United States Patent Application Publication US 2014/0004565 A1 - sequence listing, part 28

SEQ ID NO: 593925 - RNA, 19 nt, Artificial Sequence
  Description of Artificial Sequence: Synthetic oligonucleotide
uccuuaaauauacuucuaa

SEQ ID NO: 593926 - RNA, 19 nt, Artificial Sequence
  Description of Artificial Sequence: Synthetic oligonucleotide
uuccaaauggagaucuuca

SEQ ID NO: 593927 - RNA, 19 nt, Artificial Sequence
  Description of Artificial Sequence: Synthetic oligonucleotide
cagacaaucaaauguauga

SEQ ID NO: 593928 - RNA, 19 nt, Artificial Sequence
  Description of Artificial Sequence: Synthetic oligonucleotide
ugagacguggauaucuaca

SEQ ID NO: 593929 - RNA, 19 nt, Artificial Sequence
  Description of Artificial Sequence: Synthetic oligonucleotide
aucguugggugucaggccg

SEQ ID NO: 593930 - RNA, 19 nt, Artificial Sequence
  Description of Artificial Sequence: Synthetic oligonucleotide
uuuuagggaugccaauuca

SEQ ID NO: 593931 - RNA, 19 nt, Artificial Sequence
  Description of Artificial Sequence: Synthetic oligonucleotide
ugccauaguagccuuguca

SEQ ID NO: 593932 - RNA, 19 nt, Artificial Sequence
  Description of Artificial Sequence: Synthetic oligonucleotide
cuaagcuguauucaucuug

SEQ ID NO: 593933 - RNA, 19 nt, Artificial Sequence
  Description of Artificial Sequence: Synthetic oligonucleotide
ucggacuaaguccugacaa

SEQ ID NO: 593934 - RNA, 19 nt, Artificial Sequence
  Description of Artificial Sequence: Synthetic oligonucleotide
uuuagggaugccaauucaa

SEQ ID NO: 593935 - RNA, 19 nt, Artificial Sequence
  Description of Artificial Sequence: Synthetic oligonucleotide
guaaguguuaucuccucug

SEQ ID NO: 593936 - RNA, 19 nt, Artificial Sequence
  Description of Artificial Sequence: Synthetic oligonucleotide
uauuaacugaguguuugug

SEQ ID NO: 593937 - RNA, 19 nt, Artificial Sequence
  Description of Artificial Sequence: Synthetic oligonucleotide
uuguguacgaauucuucac

SEQ ID NO: 593938 - RNA, 19 nt, Artificial Sequence
  Description of Artificial Sequence: Synthetic oligonucleotide
ugauagugcagucagccuu

SEQ ID NO: 593939 - RNA, 19 nt, Artificial Sequence
  Description of Artificial Sequence: Synthetic oligonucleotide
auagcuuagcuuugccagg

SEQ ID NO: 593940 - RNA, 19 nt, Artificial Sequence
  Description of Artificial Sequence: Synthetic oligonucleotide
aggaaaacccauccuguag

SEQ ID NO: 593941 - RNA, 19 nt, Artificial Sequence
  Description of Artificial Sequence: Synthetic oligonucleotide
aaucgggaaaugucggacu

SEQ ID NO: 593942 - RNA, 19 nt, Artificial Sequence
  Description of Artificial Sequence: Synthetic oligonucleotide
cuccguaaguguuaucucc

SEQ ID NO: 593943 - RNA, 19 nt, Artificial Sequence
  Description of Artificial Sequence: Synthetic oligonucleotide
cauaggaagaacuauuuua

SEQ ID NO: 593944 - RNA, 19 nt, Artificial Sequence
  Description of Artificial Sequence: Synthetic oligonucleotide
ccaaccauuuuaauaaugc

SEQ ID NO: 593945 - RNA, 19 nt, Artificial Sequence
  Description of Artificial Sequence: Synthetic oligonucleotide
ccuaaguuauaacaaagag

SEQ ID NO: 593946 - RNA, 19 nt, Artificial Sequence
  Description of Artificial Sequence: Synthetic oligonucleotide
uucaguuguaaauucccuc

SEQ ID NO: 593947 - RNA, 19 nt, Artificial Sequence
  Description of Artificial Sequence: Synthetic oligonucleotide
uuagggaugccaauucaaa

SEQ ID NO: 593948 - RNA, 19 nt, Artificial Sequence
  Description of Artificial Sequence: Synthetic oligonucleotide
acggguuauuaacugagug

SEQ ID NO: 593949 - RNA, 19 nt, Artificial Sequence
  Description of Artificial Sequence: Synthetic oligonucleotide
uguguacgaauucuucacu

SEQ ID NO: 593950 - RNA, 19 nt, Artificial Sequence
  Description of Artificial Sequence: Synthetic oligonucleotide
aacaucguugggugucagg

SEQ ID NO: 593951 - RNA, 19 nt, Artificial Sequence
  Description of Artificial Sequence: Synthetic oligonucleotide
uggcaugaaaugcacauuu

SEQ ID NO: 593952 - RNA, 19 nt, Artificial Sequence
  Description of Artificial Sequence: Synthetic oligonucleotide
acaauugccgcugcagcgc

SEQ ID NO: 593953 - RNA, 19 nt, Artificial Sequence
  Description of Artificial Sequence: Synthetic oligonucleotide
augaaguuauaauuugaaa

SEQ ID NO: 593954 - RNA, 19 nt, Artificial Sequence
  Description of Artificial Sequence: Synthetic oligonucleotide
cacuagacacaauugccgc

SEQ ID NO: 593955 - RNA, 19 nt, Artificial Sequence
  Description of Artificial Sequence: Synthetic oligonucleotide
gagcguaacaaccacagcu

SEQ ID NO: 593956 - RNA, 19 nt, Artificial Sequence
  Description of Artificial Sequence: Synthetic oligonucleotide
caaucauggagcucuauca

SEQ ID NO: 593957 - RNA, 19 nt, Artificial Sequence
  Description of Artificial Sequence: Synthetic oligonucleotide
ugcuucguaagugaggagu

SEQ ID NO: 593958 - RNA, 19 nt, Artificial Sequence
  Description of Artificial Sequence: Synthetic oligonucleotide
cuaccucaugcuaaucggg

SEQ ID NO: 593959 - RNA, 19 nt, Artificial Sequence
  Description of Artificial Sequence: Synthetic oligonucleotide
guagccuugucaugcacag

SEQ ID NO: 593960 - RNA, 19 nt, Artificial Sequence
  Description of Artificial Sequence: Synthetic oligonucleotide
agugcuucguaagugagga

SEQ ID NO: 593961 - RNA, 19 nt, Artificial Sequence
  Description of Artificial Sequence: Synthetic oligonucleotide
augagacguggauaucuac

SEQ ID NO: 593962 - RNA, 19 nt, Artificial Sequence
  Description of Artificial Sequence: Synthetic oligonucleotide
ucuaucacgucaacaucgu

SEQ ID NO: 593963 - RNA, 19 nt, Artificial Sequence
  Description of Artificial Sequence: Synthetic oligonucleotide
cauagcaccuucuggcagc

SEQ ID NO: 593964 - RNA, 19 nt, Artificial Sequence
  Description of Artificial Sequence: Synthetic oligonucleotide
ugcaagacggucagaaaau

SEQ ID NO: 593965 - RNA, 19 nt, Artificial Sequence
  Description of Artificial Sequence: Synthetic oligonucleotide
uccguaaguguuaucuccu

SEQ ID NO: 593966 - RNA, 19 nt, Artificial Sequence
  Description of Artificial Sequence: Synthetic oligonucleotide
gggaauacggguuauuaac

SEQ ID NO: 593967 - RNA, 19 nt, Artificial Sequence
  Description of Artificial Sequence: Synthetic oligonucleotide
accaaugcuccaccuugcc

SEQ ID NO: 593968 - RNA, 19 nt, Artificial Sequence
  Description of Artificial Sequence: Synthetic oligonucleotide
cuuagcaacaaaucuaccu

SEQ ID NO: 593969 - RNA, 19 nt, Artificial Sequence
  Description of Artificial Sequence: Synthetic oligonucleotide
aagacggucagaaaaucaa

SEQ ID NO: 593970 - RNA, 19 nt, Artificial Sequence
  Description of Artificial Sequence: Synthetic oligonucleotide
uaccucaugcuaaucggga

SEQ ID NO: 593971 - RNA, 19 nt, Artificial Sequence
  Description of Artificial Sequence: Synthetic oligonucleotide
cuuguguacgaauucuuca

SEQ ID NO: 593972 - RNA, 19 nt, Artificial Sequence
  Description of Artificial Sequence: Synthetic oligonucleotide
acgaauucuucacuagaca

SEQ ID NO: 593973 - RNA, 19 nt, Artificial Sequence
  Description of Artificial Sequence: Synthetic oligonucleotide
ugucaaccaaugcuccacc

SEQ ID NO: 593974 - RNA, 19 nt, Artificial Sequence
  Description of Artificial Sequence: Synthetic oligonucleotide
uggagaucuucauagcuua

SEQ ID NO: 593975 - RNA, 19 nt, Artificial Sequence
  Description of Artificial Sequence: Synthetic oligonucleotide
gaaagaaggccgacugagg

SEQ ID NO: 593976 - RNA, 19 nt, Artificial Sequence
  Description of Artificial Sequence: Synthetic oligonucleotide
aguuguaugcaagucuuca

SEQ ID NO: 593977 - RNA, 19 nt, Artificial Sequence
  Description of Artificial Sequence: Synthetic oligonucleotide
acaaaucuaccucaugcua

SEQ ID NO: 593978 - RNA, 19 nt, Artificial Sequence
  Description of Artificial Sequence: Synthetic oligonucleotide
uaagaacuauuaguaagaa

SEQ ID NO: 593979 - RNA, 19 nt, Artificial Sequence
  Description of Artificial Sequence: Synthetic oligonucleotide
agcguaacaaccacagcuc

SEQ ID NO: 593980 - RNA, 19 nt, Artificial Sequence
  Description of Artificial Sequence: Synthetic oligonucleotide
uaaucgggaaaugucggac

SEQ ID NO: 593981 - RNA, 19 nt, Artificial Sequence
  Description of Artificial Sequence: Synthetic oligonucleotide
uaccuugaaagaaggccga

SEQ ID NO: 593982 - RNA, 19 nt, Artificial Sequence
  Description of Artificial Sequence: Synthetic oligonucleotide
ucaugcacaguuguaugca

SEQ ID NO: 593983 - RNA, 19 nt, Artificial Sequence
  Description of Artificial Sequence: Synthetic oligonucleotide
uagggaugccaauucaaaa

SEQ ID NO: 593984 - RNA, 19 nt, Artificial Sequence
  Description of Artificial Sequence: Synthetic oligonucleotide
cuucuaagcuguauucauc

SEQ ID NO: 593985 - RNA, 19 nt, Artificial Sequence
  Description of Artificial Sequence: Synthetic oligonucleotide
aaauucccuccuaagcuca

SEQ ID NO: 593986 - RNA, 19 nt, Artificial Sequence
  Description of Artificial Sequence: Synthetic oligonucleotide
uugcaaaguguucaacuuu

SEQ ID NO: 593987 - RNA, 19 nt, Artificial Sequence
  Description of Artificial Sequence: Synthetic oligonucleotide
gacguggauaucuacauau

SEQ ID NO: 593988 - RNA, 19 nt, Artificial Sequence
  Description of Artificial Sequence: Synthetic oligonucleotide
aacuugaugcagguaauua

SEQ ID NO: 593989 - RNA, 19 nt, Artificial Sequence
  Description of Artificial Sequence: Synthetic oligonucleotide
uccaaaccuaaguuauaac

SEQ ID NO: 593990 - RNA, 19 nt, Artificial Sequence
  Description of Artificial Sequence: Synthetic oligonucleotide
augcuaaucgggaaauguc

SEQ ID NO: 593991 - RNA, 19 nt, Artificial Sequence
  Description of Artificial Sequence: Synthetic oligonucleotide
acuaggguuuacgacccac

SEQ ID NO: 593992 - RNA, 19 nt, Artificial Sequence
  Description of Artificial Sequence: Synthetic oligonucleotide
agcuguauucaucuuggaa

SEQ ID NO: 593993 - RNA, 19 nt, Artificial Sequence
  Description of Artificial Sequence: Synthetic oligonucleotide
ggcuucgccucucagaugc

SEQ ID NO: 593994 - RNA, 19 nt, Artificial Sequence
  Description of Artificial Sequence: Synthetic oligonucleotide
gagguuuccaaauggagau

SEQ ID NO: 593995 - RNA, 19 nt, Artificial Sequence
  Description of Artificial Sequence: Synthetic oligonucleotide
ugggaauacggguuauuaa

SEQ ID NO: 593996 - RNA, 19 nt, Artificial Sequence
  Description of Artificial Sequence: Synthetic oligonucleotide
ggguuuacgacccacuuuc

SEQ ID NO: 593997 - RNA, 19 nt, Artificial Sequence
  Description of Artificial Sequence: Synthetic oligonucleotide
gagacacuaacuccugguc

SEQ ID NO: 593998 - RNA, 19 nt, Artificial Sequence
  Description of Artificial Sequence: Synthetic oligonucleotide
ggugggacagcacugcaag

SEQ ID NO: 593999 - RNA, 19 nt, Artificial Sequence
  Description of Artificial Sequence: Synthetic oligonucleotide
aagacaagaucugccuuga

SEQ ID NO: 594000 - RNA, 19 nt, Artificial Sequence
  Description of Artificial Sequence: Synthetic oligonucleotide
agaccauaauucuuguauu

SEQ ID NO: 594001 - RNA, 19 nt, Artificial Sequence
  Description of Artificial Sequence: Synthetic oligonucleotide
aaguggggugggcagacaa

SEQ ID NO: 594002 - RNA, 19 nt, Artificial Sequence
  Description of Artificial Sequence: Synthetic oligonucleotide
gaccuguugcucccagugg

SEQ ID NO: 594003 - RNA, 19 nt, Artificial Sequence
  Description of Artificial Sequence: Synthetic oligonucleotide
guacgaauucuucacuaga

SEQ ID NO: 594004 - RNA, 19 nt, Artificial Sequence
  Description of Artificial Sequence: Synthetic oligonucleotide
accuaaguuauaacaaaga

SEQ ID NO: 594005 - RNA, 19 nt, Artificial Sequence
  Description of Artificial Sequence: Synthetic oligonucleotide
auggagcucuaucacguca

SEQ ID NO: 594006 - RNA, 19 nt, Artificial Sequence
  Description of Artificial Sequence: Synthetic oligonucleotide
cuaaguccugacaaugaga

SEQ ID NO: 594007 - RNA, 19 nt, Artificial Sequence
  Description of Artificial Sequence: Synthetic oligonucleotide
agccagaccuguugcuccc

SEQ ID NO: 594008 - RNA, 19 nt, Artificial Sequence
  Description of Artificial Sequence: Synthetic oligonucleotide
uggagcucuaucacgucaa

SEQ ID NO: 594009 - RNA, 19 nt, Artificial Sequence
  Description of Artificial Sequence: Synthetic oligonucleotide
agacaaucaaauguaugaa

SEQ ID NO: 594010 - RNA, 19 nt, Artificial Sequence
  Description of Artificial Sequence: Synthetic oligonucleotide
cugaggguucauuuuacca

SEQ ID NO: 594011 - RNA, 19 nt, Artificial Sequence
  Description of Artificial Sequence: Synthetic oligonucleotide
ucaaccaaugcuccaccuu

SEQ ID NO: 594012 - RNA, 19 nt, Artificial Sequence
  Description of Artificial Sequence: Synthetic oligonucleotide
uacggguuauuaacugagu

SEQ ID NO: 594013 - RNA, 19 nt, Artificial Sequence
  Description of Artificial Sequence: Synthetic oligonucleotide
caggccggauuucucauag

SEQ ID NO: 594014 - RNA, 19 nt, Artificial Sequence
  Description of Artificial Sequence: Synthetic oligonucleotide
auugugagacucaauuuau

SEQ ID NO: 594015 - RNA, 19 nt, Artificial Sequence
  Description of Artificial Sequence: Synthetic oligonucleotide
caaggggaacucucauucc

SEQ ID NO: 594016 - RNA, 19 nt, Artificial Sequence
  Description of Artificial Sequence: Synthetic oligonucleotide
ugacaaugagacguggaua

SEQ ID NO: 594017 - RNA, 19 nt, Artificial Sequence
  Description of Artificial Sequence: Synthetic oligonucleotide
gagacucaauuuaugaacu

SEQ ID NO: 594018 - RNA, 19 nt, Artificial Sequence
  Description of Artificial Sequence: Synthetic oligonucleotide
uccugacaaugagacgugg

SEQ ID NO: 594019 - RNA, 19 nt, Artificial Sequence
  Description of Artificial Sequence: Synthetic oligonucleotide
caauggcucuaauacccug

SEQ ID NO: 594020 - RNA, 19 nt, Artificial Sequence
  Description of Artificial Sequence: Synthetic oligonucleotide
uuuggcuugcaggccauac

SEQ ID NO: 594021 - RNA, 19 nt, Artificial Sequence
  Description of Artificial Sequence: Synthetic oligonucleotide
gcuaaucgggaaaugucgg

SEQ ID NO: 594022 - RNA, 19 nt, Artificial Sequence
  Description of Artificial Sequence: Synthetic oligonucleotide
ugaguugggcagcacugau

SEQ ID NO: 594023 - RNA, 19 nt, Artificial Sequence
  Description of Artificial Sequence: Synthetic oligonucleotide
uaggguuuacgacccacuu

SEQ ID NO: 594024 - RNA, 19 nt, Artificial Sequence
  Description of Artificial Sequence: Synthetic oligonucleotide
gagaaauugugagacucaa

SEQ ID NO: 594025 - RNA, 19 nt, Artificial Sequence
  Description of Artificial Sequence: Synthetic oligonucleotide
caccacuaggguuuacgac

SEQ ID NO: 594026 - RNA, 19 nt, Artificial Sequence
  Description of Artificial Sequence: Synthetic oligonucleotide
ugucggacuaaguccugac

SEQ ID NO: 594027 - RNA, 19 nt, Artificial Sequence
  Description of Artificial Sequence: Synthetic oligonucleotide
cuguggagcaaguggggug

SEQ ID NO: 594028 - RNA, 19 nt, Artificial Sequence
  Description of Artificial Sequence: Synthetic oligonucleotide
ucguugggugucaggccgg

SEQ ID NO: 594029 - RNA, 19 nt, Artificial Sequence
  Description of Artificial Sequence: Synthetic oligonucleotide
uccuaagcucagaccauaa

SEQ ID NO: 594030 - RNA, 19 nt, Artificial Sequence
  Description of Artificial Sequence: Synthetic oligonucleotide
cacgaacuguucuccuucc

SEQ ID NO: 594031 - RNA, 19 nt, Artificial Sequence
  Description of Artificial Sequence: Synthetic oligonucleotide
ccaaggggaacucucauuc

SEQ ID NO: 594032 - RNA, 19 nt, Artificial Sequence
  Description of Artificial Sequence: Synthetic oligonucleotide
aaugagacguggauaucua

SEQ ID NO: 594033 - RNA, 19 nt, Artificial Sequence
  Description of Artificial Sequence: Synthetic oligonucleotide
uggugauagugcagucagc

SEQ ID NO: 594034 - RNA, 19 nt, Artificial Sequence
  Description of Artificial Sequence: Synthetic oligonucleotide
uacgacccacuuuccuccg

SEQ ID NO: 594035 - RNA, 19 nt, Artificial Sequence
  Description of Artificial Sequence: Synthetic oligonucleotide
cuaaucgggaaaugucgga

SEQ ID NO: 594036 - RNA, 19 nt, Artificial Sequence
  Description of Artificial Sequence: Synthetic oligonucleotide
agcuucaggaaaacccauc

SEQ ID NO: 594037 - RNA, 19 nt, Artificial Sequence
  Description of Artificial Sequence: Synthetic oligonucleotide
ucguaagugaggaguucau

SEQ ID NO: 594038 - RNA, 19 nt, Artificial Sequence
  Description of Artificial Sequence: Synthetic oligonucleotide
uaguagccuugucaugcac

SEQ ID NO: 594039 - RNA, 19 nt, Artificial Sequence
  Description of Artificial Sequence: Synthetic oligonucleotide
ggacuaaguccugacaaug

SEQ ID NO: 594040 - RNA, 19 nt, Artificial Sequence
  Description of Artificial Sequence: Synthetic oligonucleotide
aucgggaaaugucggacua

SEQ ID NO: 594041 - RNA, 19 nt, Artificial Sequence
  Description of Artificial Sequence: Synthetic oligonucleotide
agacucaauuuaugaacuu

SEQ ID NO: 594042 - RNA, 19 nt, Artificial Sequence
  Description of Artificial Sequence: Synthetic oligonucleotide
ucuaccacccagguggcuu

SEQ ID NO: 594043 - RNA, 19 nt, Artificial Sequence
  Description of Artificial Sequence: Synthetic oligonucleotide
guuucagauggcaugaaau

SEQ ID NO: 594044 - RNA, 19 nt, Artificial Sequence
  Description of Artificial Sequence: Synthetic oligonucleotide
accuugaaagaaggccgac

SEQ ID NO: 594045 - RNA, 19 nt, Artificial Sequence
  Description of Artificial Sequence: Synthetic oligonucleotide
caauugccgcugcagcgcc

SEQ ID NO: 594046 - RNA, 19 nt, Artificial Sequence
  Description of Artificial Sequence: Synthetic oligonucleotide
aggccggauuucucauagc

SEQ ID NO: 594047 - RNA, 19 nt, Artificial Sequence
  Description of Artificial Sequence: Synthetic oligonucleotide
auugauccuuaaauauacu

SEQ ID NO: 594048 - RNA, 19 nt, Artificial Sequence
  Description of Artificial Sequence: Synthetic oligonucleotide
acguggauaucuacauauc

SEQ ID NO: 594049 - RNA, 19 nt, Artificial Sequence
  Description of Artificial Sequence: Synthetic oligonucleotide
cauccuguagagcguaaca

SEQ ID NO: 594050 - RNA, 19 nt, Artificial Sequence
  Description of Artificial Sequence: Synthetic oligonucleotide
cacgcacugagccagaccu

SEQ ID NO: 594051 - RNA, 19 nt, Artificial Sequence
  Description of Artificial Sequence: Synthetic oligonucleotide
gaccauaauucuuguauuu

SEQ ID NO: 594052 - RNA, 19 nt, Artificial Sequence
  Description of Artificial Sequence: Synthetic oligonucleotide
gaacugggaauacggguua

SEQ ID NO: 594053 - RNA, 19 nt, Artificial Sequence
  Description of Artificial Sequence: Synthetic oligonucleotide
agacccauguuaccagcaa

SEQ ID NO: 594054 - RNA, 19 nt, Artificial Sequence
  Description of Artificial Sequence: Synthetic oligonucleotide
aggguuuacgacccacuuu

SEQ ID NO: 594055 - RNA, 19 nt, Artificial Sequence
  Description of Artificial Sequence: Synthetic oligonucleotide
gcagacaaucaaauguaug

SEQ ID NO: 594056 - RNA, 19 nt, Artificial Sequence
  Description of Artificial Sequence: Synthetic oligonucleotide
auggagaucuucauagcuu

SEQ ID NO: 594057 - RNA, 19 nt, Artificial Sequence
  Description of Artificial Sequence: Synthetic oligonucleotide
cacaguuguaugcaagucu

SEQ ID NO: 594058 - RNA, 19 nt, Artificial Sequence
  Description of Artificial Sequence: Synthetic oligonucleotide
cuccgaggccuaaauugug

SEQ ID NO: 594059 - RNA, 19 nt, Artificial Sequence
  Description of Artificial Sequence: Synthetic oligonucleotide
uaagaacuugaugcaggua

SEQ ID NO: 594060 - RNA, 19 nt, Artificial Sequence
  Description of Artificial Sequence: Synthetic oligonucleotide
guagagcguaacaaccaca

SEQ ID NO: 594061 - RNA, 19 nt, Artificial Sequence
  Description of Artificial Sequence: Synthetic oligonucleotide
caguuguaugcaagucuuc

SEQ ID NO: 594062 - RNA, 19 nt, Artificial Sequence
  Description of Artificial Sequence: Synthetic oligonucleotide
gaucuucauagcuuagcuu

SEQ ID NO: 594063 - RNA, 19 nt, Artificial Sequence
  Description of Artificial Sequence: Synthetic oligonucleotide
gucggacuaaguccugaca

SEQ ID NO: 594064 - RNA, 19 nt, Artificial Sequence
  Description of Artificial Sequence: Synthetic oligonucleotide
caaugagacguggauaucu

SEQ ID NO: 594065 - RNA, 19 nt, Artificial Sequence
  Description of Artificial Sequence: Synthetic oligonucleotide
gaguucugaaggagcuggc

SEQ ID NO: 594066 - RNA, 19 nt, Artificial Sequence
  Description of Artificial Sequence: Synthetic oligonucleotide
cuuuccuccguaaguguua

SEQ ID NO: 594067 - RNA, 19 nt, Artificial Sequence
  Description of Artificial Sequence: Synthetic oligonucleotide
cuugucaugcacaguugua

SEQ ID NO: 594068 - RNA, 19 nt, Artificial Sequence
  Description of Artificial Sequence: Synthetic oligonucleotide
acaccccaaaacaucugug

SEQ ID NO: 594069 - RNA, 19 nt, Artificial Sequence
  Description of Artificial Sequence: Synthetic oligonucleotide
agaaauugugagacucaau

SEQ ID NO: 594070 - RNA, 19 nt, Artificial Sequence
  Description of Artificial Sequence: Synthetic oligonucleotide
cagccguaggcugggaggc

SEQ ID NO: 594071 - RNA, 19 nt, Artificial Sequence
  Description of Artificial Sequence: Synthetic oligonucleotide
cuaccacccagguggcuuc

SEQ ID NO: 594072 - RNA, 19 nt, Artificial Sequence
  Description of Artificial Sequence: Synthetic oligonucleotide
uugccguucuucacaucua

SEQ ID NO: 594073 - RNA, 19 nt, Artificial Sequence
  Description of Artificial Sequence: Synthetic oligonucleotide
agacggucagaaaaucaaa

SEQ ID NO: 594074 - RNA, 19 nt, Artificial Sequence
  Description of Artificial Sequence: Synthetic oligonucleotide
ggauaucuacauaucuauc

SEQ ID NO: 594075 - RNA, 19 nt, Artificial Sequence
  Description of Artificial Sequence: Synthetic oligonucleotide
cugacaaugagacguggau

SEQ ID NO: 594076 - RNA, 19 nt, Artificial Sequence
  Description of Artificial Sequence: Synthetic oligonucleotide
uccacacauugauccuuaa

SEQ ID NO: 594077 - RNA, 19 nt, Artificial Sequence
  Description of Artificial Sequence: Synthetic oligonucleotide
gcgagacacuaacuccugg

SEQ ID NO: 594078 - RNA, 19 nt, Artificial Sequence
  Description of Artificial Sequence: Synthetic oligonucleotide
cagacccauguuaccagca

SEQ ID NO: 594079 - RNA, 19 nt, Artificial Sequence
  Description of Artificial Sequence: Synthetic oligonucleotide
ccaaugcuccaccuugccc

SEQ ID NO: 594080 - RNA, 19 nt, Artificial Sequence
  Description of Artificial Sequence: Synthetic oligonucleotide
ucaggccggauuucucaua

SEQ ID NO: 594081 - RNA, 19 nt, Artificial Sequence
  Description of Artificial Sequence: Synthetic oligonucleotide
ucgggaaaugucggacuaa

SEQ ID NO: 594082 - RNA, 19 nt, Artificial Sequence
  Description of Artificial Sequence: Synthetic oligonucleotide
cugggaauacggguuauua

SEQ ID NO: 594083 - RNA, 19 nt, Artificial Sequence
  Description of Artificial Sequence: Synthetic oligonucleotide
ggugggcgcagccucaauc

SEQ ID NO: 594084 - RNA, 19 nt, Artificial Sequence
  Description of Artificial Sequence: Synthetic oligonucleotide
cuaacuccuggucaacuau

SEQ ID NO: 594085 - RNA, 19 nt, Artificial Sequence
  Description of Artificial Sequence: Synthetic oligonucleotide
guccugacaaugagacgug

SEQ ID NO: 594086 - RNA, 19 nt, Artificial Sequence
  Description of Artificial Sequence: Synthetic oligonucleotide
gccauaguagccuugucau

SEQ ID NO: 594087 - RNA, 19 nt, Artificial Sequence
  Description of Artificial Sequence: Synthetic oligonucleotide
ggaauacggguuauuaacu

SEQ ID NO: 594088 - RNA, 19 nt, Artificial Sequence
  Description of Artificial Sequence: Synthetic oligonucleotide
ggguuauuaacugaguguu

SEQ ID NO: 594089 - RNA, 19 nt, Artificial Sequence
  Description of Artificial Sequence: Synthetic oligonucleotide
gcauccaauggcucuaaua

SEQ ID NO: 594090 - RNA, 19 nt, Artificial Sequence
  Description of Artificial Sequence: Synthetic oligonucleotide
auggcaugaaaugcacauu

SEQ ID NO: 594091 - RNA, 19 nt, Artificial Sequence
  Description of Artificial Sequence: Synthetic oligonucleotide
cacccacuuagcaacaaau

SEQ ID NO: 594092 - RNA, 19 nt, Artificial Sequence
  Description of Artificial Sequence: Synthetic oligonucleotide
agccucaaucugaugaguu

SEQ ID NO: 594093 - RNA, 19 nt, Artificial Sequence
  Description of Artificial Sequence: Synthetic oligonucleotide
uggcucuaauacccugauu

SEQ ID NO: 594094 - RNA, 19 nt, Artificial Sequence
  Description of Artificial Sequence: Synthetic oligonucleotide
cuaggguuuacgacccacu

SEQ ID NO: 594095 - RNA, 19 nt, Artificial Sequence
  Description of Artificial Sequence: Synthetic oligonucleotide
ccauaguagccuugucaug

SEQ ID NO: 594096 - RNA, 19 nt, Artificial Sequence
  Description of Artificial Sequence: Synthetic oligonucleotide
gucaaccaaugcuccaccu

SEQ ID NO: 594097 - RNA, 19 nt, Artificial Sequence
  Description of Artificial Sequence: Synthetic oligonucleotide
ggagcaaguggggugggca

SEQ ID NO: 594098 - RNA, 19 nt, Artificial Sequence
  Description of Artificial Sequence: Synthetic oligonucleotide
cucagaccauaauucuugu

SEQ ID NO: 594099 - RNA, 19 nt, Artificial Sequence
  Description of Artificial Sequence: Synthetic oligonucleotide
aggggaacucucauuccaa

SEQ ID NO: 594100 - RNA, 19 nt, Artificial Sequence
  Description of Artificial Sequence: Synthetic oligonucleotide
auagugcagucagccuucu

SEQ ID NO: 594101 - RNA, 19 nt, Artificial Sequence
  Description of Artificial Sequence: Synthetic oligonucleotide
aauugccgcugcagcgcca

SEQ ID NO: 594102 - RNA, 19 nt, Artificial Sequence
  Description of Artificial Sequence: Synthetic oligonucleotide
ggagcucuaucacgucaac

SEQ ID NO: 594103 - RNA, 19 nt, Artificial Sequence
  Description of Artificial Sequence: Synthetic oligonucleotide
gguuuacgacccacuuucc

SEQ ID NO: 594104 - RNA, 19 nt, Artificial Sequence
  Description of Artificial Sequence: Synthetic oligonucleotide
agagccccagugcuucgua

SEQ ID NO: 594105 - RNA, 19 nt, Artificial Sequence
  Description of Artificial Sequence: Synthetic oligonucleotide
gcaagacggucagaaaauc

SEQ ID NO: 594106 - RNA, 19 nt, Artificial Sequence
  Description of Artificial Sequence: Synthetic oligonucleotide
cuucacgaacuguucuccu

SEQ ID NO: 594107 - RNA, 19 nt, Artificial Sequence
  Description of Artificial Sequence: Synthetic oligonucleotide
ccugacaaugagacgugga

SEQ ID NO: 594108 - RNA, 19 nt, Artificial Sequence
  Description of Artificial Sequence: Synthetic oligonucleotide
ccuccguaaguguuaucuc

SEQ ID NO: 594109 - RNA, 19 nt, Artificial Sequence
  Description of Artificial Sequence: Synthetic oligonucleotide
caacuauggaagucuguuu

SEQ ID NO: 594110 - RNA, 19 nt, Artificial Sequence
  Description of Artificial Sequence: Synthetic oligonucleotide
gccggauuucucauagcac

SEQ ID NO: 594111 - RNA, 19 nt, Artificial Sequence
  Description of Artificial Sequence: Synthetic oligonucleotide
cuucgccucucagaugcca

SEQ ID NO: 594112 - RNA, 19 nt, Artificial Sequence
  Description of Artificial Sequence: Synthetic oligonucleotide
guggagcaagugggguggg

SEQ ID NO: 594113 - RNA, 19 nt, Artificial Sequence
  Description of Artificial Sequence: Synthetic oligonucleotide
ccaccacuaggguuuacga

SEQ ID NO: 594114 - RNA, 19 nt, Artificial Sequence
  Description of Artificial Sequence: Synthetic oligonucleotide
cgggaaaugucggacuaag

SEQ ID NO: 594115 - RNA, 19 nt, Artificial Sequence
  Description of Artificial Sequence: Synthetic oligonucleotide
cuccuaagcucagaccaua

SEQ ID NO: 594116 - RNA, 19 nt, Artificial Sequence
  Description of Artificial Sequence: Synthetic oligonucleotide
cguggauaucuacauaucu

SEQ ID NO: 594117 - RNA, 19 nt, Artificial Sequence
  Description of Artificial Sequence: Synthetic oligonucleotide
aucuaccacccagguggcu

SEQ ID NO: 594118 - RNA, 19 nt, Artificial Sequence
  Description of Artificial Sequence: Synthetic oligonucleotide
ccauacuuguguacgaauu

SEQ ID NO: 594119 - RNA, 19 nt, Artificial Sequence
  Description of Artificial Sequence: Synthetic oligonucleotide
acgcacugagccagaccug

SEQ ID NO: 594120 - RNA, 19 nt, Artificial Sequence
  Description of Artificial Sequence: Synthetic oligonucleotide
uggugggcgcagccucaau

SEQ ID NO: 594121 - RNA, 19 nt, Artificial Sequence
  Description of Artificial Sequence: Synthetic oligonucleotide
cggguuauuaacugagugu

SEQ ID NO: 594122 - RNA, 19 nt, Artificial Sequence
  Description of Artificial Sequence: Synthetic oligonucleotide
ggugucaggccggauuucu

SEQ ID NO: 594123 - RNA, 19 nt, Artificial Sequence
  Description of Artificial Sequence: Synthetic oligonucleotide
cuguuucagauggcaugaa

SEQ ID NO: 594124 - RNA, 19 nt, Artificial Sequence
  Description of Artificial Sequence: Synthetic oligonucleotide
ccaucugaggugggacagc

SEQ ID NO: 594125 - RNA, 19 nt, Artificial Sequence
  Description of Artificial Sequence: Synthetic oligonucleotide
cacuaggguuuacgaccca

SEQ ID NO: 594126 - RNA, 19 nt, Artificial Sequence
  Description of Artificial Sequence: Synthetic oligonucleotide
gccgacugaggguucauuu

SEQ ID NO: 594127 - RNA, 19 nt, Artificial Sequence
  Description of Artificial Sequence: Synthetic oligonucleotide
cacacccacuuagcaacaa

SEQ ID NO: 594128 - RNA, 19 nt, Artificial Sequence
  Description of Artificial Sequence: Synthetic oligonucleotide
gcgccaucugaggugggac

SEQ ID NO: 594129 - RNA, 19 nt, Artificial Sequence
  Description of Artificial Sequence: Synthetic oligonucleotide
gguuauuaacugaguguuu

SEQ ID NO: 594130 - RNA, 19 nt, Artificial Sequence
  Description of Artificial Sequence: Synthetic oligonucleotide
gggaaaugucggacuaagu

SEQ ID NO: 594131 - RNA, 19 nt, Artificial Sequence
  Description of Artificial Sequence: Synthetic oligonucleotide
ccacacccacuuagcaaca

SEQ ID NO: 594132 - RNA, 19 nt, Artificial Sequence
  Description of Artificial Sequence: Synthetic oligonucleotide
ccauguuaccagcaauuuu

SEQ ID NO: 594133 - RNA, 19 nt, Artificial Sequence
  Description of Artificial Sequence: Synthetic oligonucleotide
ccggcuucgccucucagau

SEQ ID NO: 594134 - RNA, 19 nt, Artificial Sequence
  Description of Artificial Sequence: Synthetic oligonucleotide
gcuucgccucucagaugcc

SEQ ID NO: 594135 - RNA, 19 nt, Artificial Sequence
  Description of Artificial Sequence: Synthetic oligonucleotide
cuccuccgaggccuaaauu

SEQ ID NO: 594136 - RNA, 19 nt, Artificial Sequence
  Description of Artificial Sequence: Synthetic oligonucleotide
aggccgacugaggguucau

SEQ ID NO: 594137 - RNA, 19 nt, Artificial Sequence
  Description of Artificial Sequence: Synthetic oligonucleotide
gggugucaggccggauuuc

SEQ ID NO: 594138 - RNA, 19 nt, Artificial Sequence
  Description of Artificial Sequence: Synthetic oligonucleotide
guaggcugggaggcccuau

SEQ ID NO: 594139 - RNA, 19 nt, Artificial Sequence
  Description of Artificial Sequence: Synthetic oligonucleotide
ccuccuaagcucagaccau

SEQ ID NO: 594140 - RNA, 19 nt, Artificial Sequence
  Description of Artificial Sequence: Synthetic oligonucleotide
cagagccccagugcuucgu

SEQ ID NO: 594141 - RNA, 19 nt, Artificial Sequence
  Description of Artificial Sequence: Synthetic oligonucleotide
cggacuaaguccugacaau

SEQ ID NO: 594142 - RNA, 19 nt, Artificial Sequence
  Description of Artificial Sequence: Synthetic oligonucleotide
cccauccuguagagcguaa

SEQ ID NO: 594143 - RNA, 19 nt, Artificial Sequence
  Description of Artificial Sequence: Synthetic oligonucleotide
cggcuucgccucucagaug

SEQ ID NO: 594144 - RNA, 19 nt, Artificial Sequence
  Description of Artificial Sequence: Synthetic oligonucleotide
cgacccacuuuccuccgua

SEQ ID NO: 594145 - RNA, 19 nt, Artificial Sequence
  Description of Artificial Sequence: Synthetic oligonucleotide
cguaagugaggaguucauu

SEQ ID NO: 594146 - RNA, 19 nt, Artificial Sequence
  Description of Artificial Sequence: Synthetic oligonucleotide
ggccgacugaggguucauu

SEQ ID NO: 594147 - RNA, 19 nt, Artificial Sequence
  Description of Artificial Sequence: Synthetic oligonucleotide
uugaauuuaaucuuuagcu

SEQ ID NO: 594148 - RNA, 19 nt, Artificial Sequence
  Description of Artificial Sequence: Synthetic oligonucleotide
agaaccaggaccaagaggc

SEQ ID NO: 594149 - RNA, 19 nt, Artificial Sequence
  Description of Artificial Sequence: Synthetic oligonucleotide
augauauuccuuuaggagg

SEQ ID NO: 594150 - RNA, 19 nt, Artificial Sequence
  Description of Artificial Sequence: Synthetic oligonucleotide
aaaagcuagcuucuuuacc

SEQ ID NO: 594151 - RNA, 19 nt, Artificial Sequence
  Description of Artificial Sequence: Synthetic oligonucleotide
aaagcuagcuucuuuacca

SEQ ID NO: 594152 - RNA, 19 nt, Artificial Sequence
  Description of Artificial Sequence: Synthetic oligonucleotide
uacaaguuuagguaaacag

SEQ ID NO: 594153 - RNA, 19 nt, Artificial Sequence
  Description of Artificial Sequence: Synthetic oligonucleotide
uaaccuuaacuucugaaag

SEQ ID NO: 594154 - RNA, 19 nt, Artificial Sequence
  Description of Artificial Sequence: Synthetic oligonucleotide
gaauuuaaucuuuagcuac

SEQ ID NO: 594155 - RNA, 19 nt, Artificial Sequence
  Description of Artificial Sequence: Synthetic oligonucleotide
aauacucacugccuuaaag

SEQ ID NO: 594156 - RNA, 19 nt, Artificial Sequence
  Description of Artificial Sequence: Synthetic oligonucleotide
agggauaaauuguaagugc

SEQ ID NO: 594157 - RNA, 19 nt, Artificial Sequence
  Description of Artificial Sequence: Synthetic oligonucleotide
uaaguuugaaacacccugg

SEQ ID NO: 594158 - RNA, 19 nt, Artificial Sequence
  Description of Artificial Sequence: Synthetic oligonucleotide
uacaguuaguguuaaaggc

SEQ ID NO: 594159 - RNA, 19 nt, Artificial Sequence
  Description of Artificial Sequence: Synthetic oligonucleotide
uaucagagcaaccaaguug

SEQ ID NO: 594160 - RNA, 19 nt, Artificial Sequence
  Description of Artificial Sequence: Synthetic oligonucleotide
ugaacguggaucucaaagg

SEQ ID NO: 594161 - RNA, 19 nt, Artificial Sequence
  Description of Artificial Sequence: Synthetic oligonucleotide
accaaguugacauagugug

SEQ ID NO: 594162 - RNA, 19 nt, Artificial Sequence
  Description of Artificial Sequence: Synthetic oligonucleotide
caugauauuccuuuaggag

SEQ ID NO: 594163 - RNA, 19 nt, Artificial Sequence
  Description of Artificial Sequence: Synthetic oligonucleotide
uacuaugaacuauugcugg

SEQ ID NO: 594164 - RNA, 19 nt, Artificial Sequence
  Description of Artificial Sequence: Synthetic oligonucleotide
aaauuauacguacaaguuu

SEQ ID NO: 594165 - RNA, 19 nt, Artificial Sequence
  Description of Artificial Sequence: Synthetic oligonucleotide
aaguuugaaacacccuggg

SEQ ID NO: 594166 - RNA, 19 nt, Artificial Sequence
  Description of Artificial Sequence: Synthetic oligonucleotide
cuaaguuugaaacacccug

SEQ ID NO: 594167 - RNA, 19 nt, Artificial Sequence
  Description of Artificial Sequence: Synthetic oligonucleotide
aaaucagcgaagaauuuuc

SEQ ID NO: 594168 - RNA, 19 nt, Artificial Sequence
  Description of Artificial Sequence: Synthetic oligonucleotide
uuuuacuaugaacuauugc

SEQ ID NO: 594169 - RNA, 19 nt, Artificial Sequence
  Description of Artificial Sequence: Synthetic oligonucleotide
aauuguaagugccgacaac

SEQ ID NO: 594170 - RNA, 19 nt, Artificial Sequence
  Description of Artificial Sequence: Synthetic oligonucleotide
aacaauuugaggcuguaua

SEQ ID NO: 594171 - RNA, 19 nt, Artificial Sequence
  Description of Artificial Sequence: Synthetic oligonucleotide
uucaucagcaaucccugcg

SEQ ID NO: 594172 - RNA, 19 nt, Artificial Sequence
  Description of Artificial Sequence: Synthetic oligonucleotide
uuaaccuuaacuucugaaa

SEQ ID NO: 594173 - RNA, 19 nt, Artificial Sequence
  Description of Artificial Sequence: Synthetic oligonucleotide
acuaugaacuauugcuggc

SEQ ID NO: 594174 - RNA, 19 nt, Artificial Sequence
  Description of Artificial Sequence: Synthetic oligonucleotide
ugagguuuccaggagacgg

SEQ ID NO: 594175 - RNA, 19 nt, Artificial Sequence
  Description of Artificial Sequence: Synthetic oligonucleotide
aguuucgguccccaaaagc

SEQ ID NO: 594176 - RNA, 19 nt, Artificial Sequence
  Description of Artificial Sequence: Synthetic oligonucleotide
agcaauuccccauacccac

SEQ ID NO: 594177 - RNA, 19 nt, Artificial Sequence
  Description of Artificial Sequence: Synthetic oligonucleotide
auaaauuguaagugccgac

SEQ ID NO: 594178 - RNA, 19 nt, Artificial Sequence
  Description of Artificial Sequence: Synthetic oligonucleotide
aauuauacguacaaguuua

SEQ ID NO: 594179 - RNA, 19 nt, Artificial Sequence
  Description of Artificial Sequence: Synthetic oligonucleotide
gauaguacugcaguuucgg

SEQ ID NO: 594180 - RNA, 19 nt, Artificial Sequence
  Description of Artificial Sequence: Synthetic oligonucleotide
guuugggaggaccagagag

SEQ ID NO: 594181 - RNA, 19 nt, Artificial Sequence
  Description of Artificial Sequence: Synthetic oligonucleotide
aaacuuaaccuuaacuucu

SEQ ID NO: 594182 - RNA, 19 nt, Artificial Sequence
  Description of Artificial Sequence: Synthetic oligonucleotide
aaaauuauacguacaaguu

SEQ ID NO: 594183 - RNA, 19 nt, Artificial Sequence
  Description of Artificial Sequence: Synthetic oligonucleotide
ugaauuuaaucuuuagcua

SEQ ID NO: 594184 - RNA, 19 nt, Artificial Sequence
  Description of Artificial Sequence: Synthetic oligonucleotide
accaugauauuccuuuagg

SEQ ID NO: 594185 - RNA, 19 nt, Artificial Sequence
  Description of Artificial Sequence: Synthetic oligonucleotide
cauuggagaaggcaggccg

SEQ ID NO: 594186 - RNA, 19 nt, Artificial Sequence
  Description of Artificial Sequence: Synthetic oligonucleotide
aaucccugcggcucagccc

SEQ ID NO: 594187 - RNA, 19 nt, Artificial Sequence
  Description of Artificial Sequence: Synthetic oligonucleotide
ucagcgaagaauuuucuau

SEQ ID NO: 594188 - RNA, 19 nt, Artificial Sequence
  Description of Artificial Sequence: Synthetic oligonucleotide
uguaagugccgacaacugc

SEQ ID NO: 594189 - RNA, 19 nt, Artificial Sequence
  Description of Artificial Sequence: Synthetic oligonucleotide
acaacaccgaguugucucc

SEQ ID NO: 594190 - RNA, 19 nt, Artificial Sequence
  Description of Artificial Sequence: Synthetic oligonucleotide
uaaauuguaagugccgaca

SEQ ID NO: 594191 - RNA, 19 nt, Artificial Sequence
  Description of Artificial Sequence: Synthetic oligonucleotide
aaauuguaagugccgacaa

SEQ ID NO: 594192 - RNA, 19 nt, Artificial Sequence
  Description of Artificial Sequence: Synthetic oligonucleotide
gaacguggaucucaaaggc

SEQ ID NO: 594193 - RNA, 19 nt, Artificial Sequence
  Description of Artificial Sequence: Synthetic oligonucleotide
aguuuagguaaacagcaga

SEQ ID NO: 594194 - RNA, 19 nt, Artificial Sequence
  Description of Artificial Sequence: Synthetic oligonucleotide
aaccuuaacuucugaaagu

SEQ ID NO: 594195 - RNA, 19 nt, Artificial Sequence
  Description of Artificial Sequence: Synthetic oligonucleotide
acugccugcgaguucauuc

SEQ ID NO: 594196 - RNA, 19 nt, Artificial Sequence
  Description of Artificial Sequence: Synthetic oligonucleotide
auacucacugccuuaaagu

SEQ ID NO: 594197 - RNA, 19 nt, Artificial Sequence
  Description of Artificial Sequence: Synthetic oligonucleotide
aaaauaggauuccuuugau

SEQ ID NO: 594198 - RNA, 19 nt, Artificial Sequence
  Description of Artificial Sequence: Synthetic oligonucleotide
aagaugaguggcaugcuag

SEQ ID NO: 594199 - RNA, 19 nt, Artificial Sequence
  Description of Artificial Sequence: Synthetic oligonucleotide
auacguacaaguuuaggua

SEQ ID NO: 594200 - RNA, 19 nt, Artificial Sequence
  Description of Artificial Sequence: Synthetic oligonucleotide
gauaaauuguaagugccga

SEQ ID NO: 594201 - RNA, 19 nt, Artificial Sequence
  Description of Artificial Sequence: Synthetic oligonucleotide
uuuaaucuuuagcuacugu

SEQ ID NO: 594202 - RNA, 19 nt, Artificial Sequence
  Description of Artificial Sequence: Synthetic oligonucleotide
ucaggugccccuacgagca

SEQ ID NO: 594203 - RNA, 19 nt, Artificial Sequence
  Description of Artificial Sequence: Synthetic oligonucleotide
ugaagggugauaguacugc

SEQ ID NO: 594204 - RNA, 19 nt, Artificial Sequence
  Description of Artificial Sequence: Synthetic oligonucleotide
uccuucaaccuucucaggu

SEQ ID NO: 594205 - RNA, 19 nt, Artificial Sequence
  Description of Artificial Sequence: Synthetic oligonucleotide
cacaauagagccacgggug

SEQ ID NO: 594206 - RNA, 19 nt, Artificial Sequence
  Description of Artificial Sequence: Synthetic oligonucleotide
ucuaaguuugaaacacccu

SEQ ID NO: 594207 - RNA, 19 nt, Artificial Sequence
  Description of Artificial Sequence: Synthetic oligonucleotide
aguucauucacgguuccuc

SEQ ID NO: 594208 - RNA, 19 nt, Artificial Sequence
  Description of Artificial Sequence: Synthetic oligonucleotide
uacguacaaguuuagguaa

SEQ ID NO: 594209 - RNA, 19 nt, Artificial Sequence
  Description of Artificial Sequence: Synthetic oligonucleotide
cacagggauaaauuguaag

SEQ ID NO: 594210 - RNA, 19 nt, Artificial Sequence
  Description of Artificial Sequence: Synthetic oligonucleotide
aaaguggccaaggucaagu

SEQ ID NO: 594211 - RNA, 19 nt, Artificial Sequence
  Description of Artificial Sequence: Synthetic oligonucleotide
ugcgaguucauucacgguu

SEQ ID NO: 594212 - RNA, 19 nt, Artificial Sequence
  Description of Artificial Sequence: Synthetic oligonucleotide
acaauuugaggcuguauaa

SEQ ID NO: 594213 - RNA, 19 nt, Artificial Sequence
  Description of Artificial Sequence: Synthetic oligonucleotide
uaugaacuauugcuggcac

SEQ ID NO: 594214 - RNA, 19 nt, Artificial Sequence
  Description of Artificial Sequence: Synthetic oligonucleotide
uuuccauguuacauccugc

SEQ ID NO: 594215 - RNA, 19 nt, Artificial Sequence
  Description of Artificial Sequence: Synthetic oligonucleotide
aucagagcaaccaaguuga

SEQ ID NO: 594216 - RNA, 19 nt, Artificial Sequence
  Description of Artificial Sequence: Synthetic oligonucleotide
augaguggcaugcuagaag

SEQ ID NO: 594217 - RNA, 19 nt, Artificial Sequence
  Description of Artificial Sequence: Synthetic oligonucleotide
ucucuaaguuugaaacacc

SEQ ID NO: 594218 - RNA, 19 nt, Artificial Sequence
  Description of Artificial Sequence: Synthetic oligonucleotide
auucacgguuccucgcucc

SEQ ID NO: 594219 - RNA, 19 nt, Artificial Sequence
  Description of Artificial Sequence: Synthetic oligonucleotide
gacaacaccgaguugucuc

SEQ ID NO: 594220 - RNA, 19 nt, Artificial Sequence
  Description of Artificial Sequence: Synthetic oligonucleotide
ucauuaaccacuggugcug

SEQ ID NO: 594221 - RNA, 19 nt, Artificial Sequence
  Description of Artificial Sequence: Synthetic oligonucleotide
accacaauagagccacggg

SEQ ID NO: 594222 - RNA, 19 nt, Artificial Sequence
  Description of Artificial Sequence: Synthetic oligonucleotide
cuacuguuuuccauguuac

SEQ ID NO: 594223 - RNA, 19 nt, Artificial Sequence
  Description of Artificial Sequence: Synthetic oligonucleotide
cauuaggauccucaucccg

SEQ ID NO: 594224 - RNA, 19 nt, Artificial Sequence
  Description of Artificial Sequence: Synthetic oligonucleotide
guaagugccgacaacugcc

SEQ ID NO: 594225 - RNA, 19 nt, Artificial Sequence
  Description of Artificial Sequence: Synthetic oligonucleotide
accgaguugucuccaggcc

SEQ ID NO: 594226 - RNA, 19 nt, Artificial Sequence
  Description of Artificial Sequence: Synthetic oligonucleotide
aguggcaugcuagaagagg

SEQ ID NO: 594227 - RNA, 19 nt, Artificial Sequence
  Description of Artificial Sequence: Synthetic oligonucleotide
uccauguuacauccugcag

SEQ ID NO: 594228 - RNA, 19 nt, Artificial Sequence
  Description of Artificial Sequence: Synthetic oligonucleotide
uggcaugcaugaaauauuc

SEQ ID NO: 594229 - RNA, 19 nt, Artificial Sequence
  Description of Artificial Sequence: Synthetic oligonucleotide
uagacacacgugaauagaa

SEQ ID NO: 594230 - RNA, 19 nt, Artificial Sequence
  Description of Artificial Sequence: Synthetic oligonucleotide
uuguaagugccgacaacug

SEQ ID NO: 594231 - RNA, 19 nt, Artificial Sequence
  Description of Artificial Sequence: Synthetic oligonucleotide
auauucaugcuuucccaca

SEQ ID NO: 594232 - RNA, 19 nt, Artificial Sequence
  Description of Artificial Sequence: Synthetic oligonucleotide
gguugggguacucaggagg

SEQ ID NO: 594233 - RNA, 19 nt, Artificial Sequence
  Description of Artificial Sequence: Synthetic oligonucleotide
uguugggacaaaguggcca

SEQ ID NO: 594234 - RNA, 19 nt, Artificial Sequence
  Description of Artificial Sequence: Synthetic oligonucleotide
aacguggaucucaaaggcg

SEQ ID NO: 594235 - RNA, 19 nt, Artificial Sequence
  Description of Artificial Sequence: Synthetic oligonucleotide
uucguucuaccucuacuca

SEQ ID NO: 594236 - RNA, 19 nt, Artificial Sequence
  Description of Artificial Sequence: Synthetic oligonucleotide
agcgaagaauuuucuauga

SEQ ID NO: 594237 - RNA, 19 nt, Artificial Sequence
  Description of Artificial Sequence: Synthetic oligonucleotide
agggugauaguacugcagu

SEQ ID NO: 594238 - RNA, 19 nt, Artificial Sequence
  Description of Artificial Sequence: Synthetic oligonucleotide
uaccagugggcaauggucu

SEQ ID NO: 594239 - RNA, 19 nt, Artificial Sequence
  Description of Artificial Sequence: Synthetic oligonucleotide
cugcaaagaugauaggcac

SEQ ID NO: 594240 - RNA, 19 nt, Artificial Sequence
  Description of Artificial Sequence: Synthetic oligonucleotide
ugggguaucagagcaacca

SEQ ID NO: 594241 - RNA, 19 nt, Artificial Sequence
  Description of Artificial Sequence: Synthetic oligonucleotide
aaggcguccacagcagaac

SEQ ID NO: 594242 - RNA, 19 nt, Artificial Sequence
  Description of Artificial Sequence: Synthetic oligonucleotide
aauagagccacgggugaug

SEQ ID NO: 594243 - RNA, 19 nt, Artificial Sequence
  Description of Artificial Sequence: Synthetic oligonucleotide
acaguuaguguuaaaggca

SEQ ID NO: 594244 - RNA, 19 nt, Artificial Sequence
  Description of Artificial Sequence: Synthetic oligonucleotide
aauguuccccacugagugu

SEQ ID NO: 594245 - RNA, 19 nt, Artificial Sequence
  Description of Artificial Sequence: Synthetic oligonucleotide
gguguuggcuaccaguggg

SEQ ID NO: 594246 - RNA, 19 nt, Artificial Sequence
  Description of Artificial Sequence: Synthetic oligonucleotide
gcgcuuauggguuaagggg

SEQ ID NO: 594247 - RNA, 19 nt, Artificial Sequence
  Description of Artificial Sequence: Synthetic oligonucleotide
caaccaaguugacauagug

SEQ ID NO: 594248 - RNA, 19 nt, Artificial Sequence
  Description of Artificial Sequence: Synthetic oligonucleotide
ucagugugugcuaggucag

SEQ ID NO: 594249 - RNA, 19 nt, Artificial Sequence
  Description of Artificial Sequence: Synthetic oligonucleotide
ugguaggccacuagcgugc

SEQ ID NO: 594250 - RNA, 19 nt, Artificial Sequence
  Description of Artificial Sequence: Synthetic oligonucleotide
cuugaaccgugcaggagcc

SEQ ID NO: 594251 - RNA, 19 nt, Artificial Sequence
  Description of Artificial Sequence: Synthetic oligonucleotide
ugggguacucaggaggugg

SEQ ID NO: 594252 - RNA, 19 nt, Artificial Sequence
  Description of Artificial Sequence: Synthetic oligonucleotide
cagcuuugggguuugggag

SEQ ID NO: 594253 - RNA, 19 nt, Artificial Sequence
  Description of Artificial Sequence: Synthetic oligonucleotide
ugagauguggguccuucaa

SEQ ID NO: 594254 - RNA, 19 nt, Artificial Sequence
  Description of Artificial Sequence: Synthetic oligonucleotide
cagcgaagaauuuucuaug

SEQ ID NO: 594255 - RNA, 19 nt, Artificial Sequence
  Description of Artificial Sequence: Synthetic oligonucleotide
uuguugguccacuccacca

SEQ ID NO: 594256 - RNA, 19 nt, Artificial Sequence
  Description of Artificial Sequence: Synthetic oligonucleotide
ggauaaauuguaagugccg

SEQ ID NO: 594257 - RNA, 19 nt, Artificial Sequence
  Description of Artificial Sequence: Synthetic oligonucleotide
uggucugugggccaccggu

SEQ ID NO: 594258 - RNA, 19 nt, Artificial Sequence
  Description of Artificial Sequence: Synthetic oligonucleotide
aagggugauaguacugcag

SEQ ID NO: 594259 - RNA, 19 nt, Artificial Sequence
  Description of Artificial Sequence: Synthetic oligonucleotide
acaauagagccacggguga

SEQ ID NO: 594260 - RNA, 19 nt, Artificial Sequence
  Description of Artificial Sequence: Synthetic oligonucleotide
guuucgguccccaaaagca

SEQ ID NO: 594261 - RNA, 19 nt, Artificial Sequence
  Description of Artificial Sequence: Synthetic oligonucleotide
ggcgcuuauggguuaaggg

SEQ ID NO: 594262 - RNA, 19 nt, Artificial Sequence
  Description of Artificial Sequence: Synthetic oligonucleotide
uuggagucccuuuuccaca

SEQ ID NO: 594263 - RNA, 19 nt, Artificial Sequence
  Description of Artificial Sequence: Synthetic oligonucleotide
gugauaguacugcaguuuc

SEQ ID NO: 594264 - RNA, 19 nt, Artificial Sequence
  Description of Artificial Sequence: Synthetic oligonucleotide
cuugucaccuugugggcgc

SEQ ID NO: 594265 - RNA, 19 nt, Artificial Sequence
  Description of Artificial Sequence: Synthetic oligonucleotide
aauuagcuuugagagccca

SEQ ID NO: 594266 - RNA, 19 nt, Artificial Sequence
  Description of Artificial Sequence: Synthetic oligonucleotide
uuucgguccccaaaagcaa

SEQ ID NO: 594267 - RNA, 19 nt, Artificial Sequence
  Description of Artificial Sequence: Synthetic oligonucleotide
aauuuggccuugaaccgug

SEQ ID NO: 594268 - RNA, 19 nt, Artificial Sequence
  Description of Artificial Sequence: Synthetic oligonucleotide
guccucaagggucagugug

SEQ ID NO: 594269 - RNA, 19 nt, Artificial Sequence
  Description of Artificial Sequence: Synthetic oligonucleotide
ggacuguugggacaaagug

SEQ ID NO: 594270 - RNA, 19 nt, Artificial Sequence
  Description of Artificial Sequence: Synthetic oligonucleotide
ugggcgcuugugaacgugg

SEQ ID NO: 594271 - RNA, 19 nt, Artificial Sequence
  Description of Artificial Sequence: Synthetic oligonucleotide
caauuccccauacccaccc

SEQ ID NO: 594272 - RNA, 19 nt, Artificial Sequence
  Description of Artificial Sequence: Synthetic oligonucleotide
uggagucccuuuuccacag

SEQ ID NO: 594273 - RNA, 19 nt, Artificial Sequence
  Description of Artificial Sequence: Synthetic oligonucleotide
aacuuaaccuuaacuucug

SEQ ID NO: 594274 - RNA, 19 nt, Artificial Sequence
  Description of Artificial Sequence: Synthetic oligonucleotide
caaagcaauuccccauacc

SEQ ID NO: 594275 - RNA, 19 nt, Artificial Sequence
  Description of Artificial Sequence: Synthetic oligonucleotide
agcccuaugaucugcuccu

SEQ ID NO: 594276 - RNA, 19 nt, Artificial Sequence
  Description of Artificial Sequence: Synthetic oligonucleotide
gggauaaauuguaagugcc

SEQ ID NO: 594277 - RNA, 19 nt, Artificial Sequence
  Description of Artificial Sequence: Synthetic oligonucleotide
cuuaaccuuaacuucugaa

SEQ ID NO: 594278 - RNA, 19 nt, Artificial Sequence
  Description of Artificial Sequence: Synthetic oligonucleotide
cucuacagacaacaccgag

SEQ ID NO: 594279 - RNA, 19 nt, Artificial Sequence
  Description of Artificial Sequence: Synthetic oligonucleotide
uucucaggugccccuacga

SEQ ID NO: 594280 - RNA, 19 nt, Artificial Sequence
  Description of Artificial Sequence: Synthetic oligonucleotide
gcaaagaugauaggcaccc

SEQ ID NO: 594281 - RNA, 19 nt, Artificial Sequence
  Description of Artificial Sequence: Synthetic oligonucleotide
accucuacucaaacagugc

SEQ ID NO: 594282 - RNA, 19 nt, Artificial Sequence
  Description of Artificial Sequence: Synthetic oligonucleotide
gaggcguguacucuccuac

SEQ ID NO: 594283 - RNA, 19 nt, Artificial Sequence
  Description of Artificial Sequence: Synthetic oligonucleotide
ugggccaccggucucuaca

SEQ ID NO: 594284 - RNA, 19 nt, Artificial Sequence
  Description of Artificial Sequence: Synthetic oligonucleotide
ugcaguuucgguccccaaa

SEQ ID NO: 594285 - RNA, 19 nt, Artificial Sequence
  Description of Artificial Sequence: Synthetic oligonucleotide
aagcaauuccccauaccca

SEQ ID NO: 594286 - RNA, 19 nt, Artificial Sequence
  Description of Artificial Sequence: Synthetic oligonucleotide
gugccacagggauaaauug

SEQ ID NO: 594287 - RNA, 19 nt, Artificial Sequence
  Description of Artificial Sequence: Synthetic oligonucleotide
aggcguccacagcagaacg

SEQ ID NO: 594288 - RNA, 19 nt, Artificial Sequence
  Description of Artificial Sequence: Synthetic oligonucleotide
agaggcguggucucgggca

SEQ ID NO: 594289 - RNA, 19 nt, Artificial Sequence
  Description of Artificial Sequence: Synthetic oligonucleotide
acuggagcgccagagaaga

SEQ ID NO: 594290 - RNA, 19 nt, Artificial Sequence
  Description of Artificial Sequence: Synthetic oligonucleotide
aaucagcgaagaauuuucu

SEQ ID NO: 594291 - RNA, 19 nt, Artificial Sequence
  Description of Artificial Sequence: Synthetic oligonucleotide
aagugaggaaagagcauca

SEQ ID NO: 594292 - RNA, 19 nt, Artificial Sequence
  Description of Artificial Sequence: Synthetic oligonucleotide
aguugacauagugugaaaa

SEQ ID NO: 594293 - RNA, 19 nt, Artificial Sequence
  Description of Artificial Sequence: Synthetic oligonucleotide
gugccgacaacugccagcg

SEQ ID NO: 594294 - RNA, 19 nt, Artificial Sequence
  Description of Artificial Sequence: Synthetic oligonucleotide
gccacuagcgugcaugggg

SEQ ID NO: 594295 - RNA, 19 nt, Artificial Sequence
  Description of Artificial Sequence: Synthetic oligonucleotide
agaugaguggcaugcuaga

SEQ ID NO: 594296 - RNA, 19 nt, Artificial Sequence
  Description of Artificial Sequence: Synthetic oligonucleotide
gacuguggacuguugggac

SEQ ID NO: 594297 - RNA, 19 nt, Artificial Sequence
  Description of Artificial Sequence: Synthetic oligonucleotide
uuuggccuugaaccgugca

SEQ ID NO: 594298 - RNA, 19 nt, Artificial Sequence
  Description of Artificial Sequence: Synthetic oligonucleotide
ucucuacagacaacaccga

SEQ ID NO: 594299 - RNA, 19 nt, Artificial Sequence
  Description of Artificial Sequence: Synthetic oligonucleotide
ugucccuuggucuucucua

SEQ ID NO: 594300 - RNA, 19 nt, Artificial Sequence
  Description of Artificial Sequence: Synthetic oligonucleotide
ucaaccuucucaggugccc

SEQ ID NO: 594301 - RNA, 19 nt, Artificial Sequence
  Description of Artificial Sequence: Synthetic oligonucleotide
gcuagacacacgugaauag

SEQ ID NO: 594302 - RNA, 19 nt, Artificial Sequence
  Description of Artificial Sequence: Synthetic oligonucleotide
ugguucagaggcguggucu

SEQ ID NO: 594303 - RNA, 19 nt, Artificial Sequence
  Description of Artificial Sequence: Synthetic oligonucleotide
cagcccuaugaucugcucc

SEQ ID NO: 594304 - RNA, 19 nt, Artificial Sequence
  Description of Artificial Sequence: Synthetic oligonucleotide
ccuugaaccgugcaggagc

SEQ ID NO: 594305 - RNA, 19 nt, Artificial Sequence
  Description of Artificial Sequence: Synthetic oligonucleotide
gaagggugauaguacugca

SEQ ID NO: 594306 - RNA, 19 nt, Artificial Sequence
  Description of Artificial Sequence: Synthetic oligonucleotide
aaacaauuugaggcuguau

SEQ ID NO: 594307 - RNA, 19 nt, Artificial Sequence
  Description of Artificial Sequence: Synthetic oligonucleotide
aaguugacauagugugaaa

SEQ ID NO: 594308 - RNA, 19 nt, Artificial Sequence
  Description of Artificial Sequence: Synthetic oligonucleotide
ucguucuaccucuacucaa

SEQ ID NO: 594309 - RNA, 19 nt, Artificial Sequence
  Description of Artificial Sequence: Synthetic oligonucleotide
ccugcgaguucauucacgg

SEQ ID NO: 594310 - RNA, 19 nt, Artificial Sequence
  Description of Artificial Sequence: Synthetic oligonucleotide
aagugccgacaacugccag

SEQ ID NO: 594311 - RNA, 19 nt, Artificial Sequence
  Description of Artificial Sequence: Synthetic oligonucleotide
cuucaccaaaauguucccc

SEQ ID NO: 594312 - RNA, 19 nt, Artificial Sequence
  Description of Artificial Sequence: Synthetic oligonucleotide
caccacaauagagccacgg

SEQ ID NO: 594313 - RNA, 19 nt, Artificial Sequence
  Description of Artificial Sequence: Synthetic oligonucleotide
cauguuacauccugcagcu

SEQ ID NO: 594314 - RNA, 19 nt, Artificial Sequence
  Description of Artificial Sequence: Synthetic oligonucleotide
cuugugggcgcuugugaac

SEQ ID NO: 594315 - RNA, 19 nt, Artificial Sequence
  Description of Artificial Sequence: Synthetic oligonucleotide
agcacugccugcgaguuca

SEQ ID NO: 594316 - RNA, 19 nt, Artificial Sequence
  Description of Artificial Sequence: Synthetic oligonucleotide
cauuaaccacuggugcugg

SEQ ID NO: 594317 - RNA, 19 nt, Artificial Sequence
  Description of Artificial Sequence: Synthetic oligonucleotide
caaguugacauagugugaa

SEQ ID NO: 594318 - RNA, 19 nt, Artificial Sequence
  Description of Artificial Sequence: Synthetic oligonucleotide
acuagcgugcaugggguag

SEQ ID NO: 594319 - RNA, 19 nt, Artificial Sequence
  Description of Artificial Sequence: Synthetic oligonucleotide
agcaaagcaauuccccaua

SEQ ID NO: 594320 - RNA, 19 nt, Artificial Sequence
  Description of Artificial Sequence: Synthetic oligonucleotide
uggggucauguucuuggga

SEQ ID NO: 594321 - RNA, 19 nt, Artificial Sequence
  Description of Artificial Sequence: Synthetic oligonucleotide
uacucuccuacaguguccu

SEQ ID NO: 594322 - RNA, 19 nt, Artificial Sequence
  Description of Artificial Sequence: Synthetic oligonucleotide
aucagcgaagaauuuucua

SEQ ID NO: 594323 - RNA, 19 nt, Artificial Sequence
  Description of Artificial Sequence: Synthetic oligonucleotide
acagcaauacucacugccu

SEQ ID NO: 594324 - RNA, 19 nt, Artificial Sequence
  Description of Artificial Sequence: Synthetic oligonucleotide
cacugccuuaaagucaggc

SEQ ID NO: 594325 - RNA, 19 nt, Artificial Sequence
  Description of Artificial Sequence: Synthetic oligonucleotide
cuaugaacuauugcuggca

SEQ ID NO: 594326 - RNA, 19 nt, Artificial Sequence
  Description of Artificial Sequence: Synthetic oligonucleotide
cuugugaacguggaucuca

SEQ ID NO: 594327 - RNA, 19 nt, Artificial Sequence
  Description of Artificial Sequence: Synthetic oligonucleotide
uugauaaagguggccuggu

SEQ ID NO: 594328 - RNA, 19 nt, Artificial Sequence
  Description of Artificial Sequence: Synthetic oligonucleotide
uggcaugcuagaagagggu

SEQ ID NO: 594329 - RNA, 19 nt, Artificial Sequence
  Description of Artificial Sequence: Synthetic oligonucleotide
aaaggcguccacagcagaa

SEQ ID NO: 594330 - RNA, 19 nt, Artificial Sequence
  Description of Artificial Sequence: Synthetic oligonucleotide
agcuagacacacgugaaua

SEQ ID NO: 594331 - RNA, 19 nt, Artificial Sequence
  Description of Artificial Sequence: Synthetic oligonucleotide
acucacugccuuaaaguca

SEQ ID NO: 594332 - RNA, 19 nt, Artificial Sequence
  Description of Artificial Sequence: Synthetic oligonucleotide
uguccugguucagaggcgu

SEQ ID NO: 594333 - RNA, 19 nt, Artificial Sequence
  Description of Artificial Sequence: Synthetic oligonucleotide
agcgccagagaagagggga

SEQ ID NO: 594334 - RNA, 19 nt, Artificial Sequence
  Description of Artificial Sequence: Synthetic oligonucleotide
guucuaccucuacucaaac

SEQ ID NO: 594335 - RNA, 19 nt, Artificial Sequence
  Description of Artificial Sequence: Synthetic oligonucleotide
acgguggugccacagggau

SEQ ID NO: 594336 - RNA, 19 nt, Artificial Sequence
  Description of Artificial Sequence: Synthetic oligonucleotide
uccccauacccacccaaaa

SEQ ID NO: 594337 - RNA, 19 nt, Artificial Sequence
  Description of Artificial Sequence: Synthetic oligonucleotide
gaacuauugcuggcacucc

SEQ ID NO: 594338 - RNA, 19 nt, Artificial Sequence
  Description of Artificial Sequence: Synthetic oligonucleotide
auuccccauacccacccaa

SEQ ID NO: 594339 - RNA, 19 nt, Artificial Sequence
  Description of Artificial Sequence: Synthetic oligonucleotide
aacagugcuuucagagcca

SEQ ID NO: 594340 - RNA, 19 nt, Artificial Sequence
  Description of Artificial Sequence: Synthetic oligonucleotide
cuagacacacgugaauaga

SEQ ID NO: 594341 - RNA, 19 nt, Artificial Sequence
  Description of Artificial Sequence: Synthetic oligonucleotide
aucgguauggggucauguu

SEQ ID NO: 594342 - RNA, 19 nt, Artificial Sequence
  Description of Artificial Sequence: Synthetic oligonucleotide
acacccugggagcuuauuu

SEQ ID NO: 594343 - RNA, 19 nt, Artificial Sequence
  Description of Artificial Sequence: Synthetic oligonucleotide
cguguacucuccuacagug

SEQ ID NO: 594344 - RNA, 19 nt, Artificial Sequence
  Description of Artificial Sequence: Synthetic oligonucleotide
auagagccacgggugaugu

SEQ ID NO: 594345 - RNA, 19 nt, Artificial Sequence
  Description of Artificial Sequence: Synthetic oligonucleotide
uuccccacugaguguuuca

SEQ ID NO: 594346 - RNA, 19 nt, Artificial Sequence
  Description of Artificial Sequence: Synthetic oligonucleotide
ggguaucagagcaaccaag

SEQ ID NO: 594347 - RNA, 19 nt, Artificial Sequence
  Description of Artificial Sequence: Synthetic oligonucleotide
uugguccacuccaccacaa

SEQ ID NO: 594348 - RNA, 19 nt, Artificial Sequence
  Description of Artificial Sequence: Synthetic oligonucleotide
guuccucgcuccuucguuc

SEQ ID NO: 594349 - RNA, 19 nt, Artificial Sequence
  Description of Artificial Sequence: Synthetic oligonucleotide
cugggguaucagagcaacc

SEQ ID NO: 594350 - RNA, 19 nt, Artificial Sequence
  Description of Artificial Sequence: Synthetic oligonucleotide
ucagagcaaccaaguugac

SEQ ID NO: 594351 - RNA, 19 nt, Artificial Sequence
  Description of Artificial Sequence: Synthetic oligonucleotide
ccaugauauuccuuuagga

SEQ ID NO: 594352 - RNA, 19 nt, Artificial Sequence
  Description of Artificial Sequence: Synthetic oligonucleotide
caauuugaggcuguauaaa

SEQ ID NO: 594353 - RNA, 19 nt, Artificial Sequence
  Description of Artificial Sequence: Synthetic oligonucleotide
aggugccccuacgagcagc

SEQ ID NO: 594354 - RNA, 19 nt, Artificial Sequence
  Description of Artificial Sequence: Synthetic oligonucleotide
ugaaccgugcaggagccuu

SEQ ID NO: 594355 - RNA, 19 nt, Artificial Sequence
  Description of Artificial Sequence: Synthetic oligonucleotide
caguuucgguccccaaaag

SEQ ID NO: 594356 - RNA, 19 nt, Artificial Sequence
  Description of Artificial Sequence: Synthetic oligonucleotide
cagacaacaccgaguuguc

SEQ ID NO: 594357 - RNA, 19 nt, Artificial Sequence
  Description of Artificial Sequence: Synthetic oligonucleotide
guacucuccuacagugucc

SEQ ID NO: 594358 - RNA, 19 nt, Artificial Sequence
  Description of Artificial Sequence: Synthetic oligonucleotide
ccuucaaccuucucaggug

SEQ ID NO: 594359 - RNA, 19 nt, Artificial Sequence
  Description of Artificial Sequence: Synthetic oligonucleotide
agaccaugauauuccuuua

SEQ ID NO: 594360 - RNA, 19 nt, Artificial Sequence
  Description of Artificial Sequence: Synthetic oligonucleotide
uuccuuuaggagggaagaa

SEQ ID NO: 594361 - RNA, 19 nt, Artificial Sequence
  Description of Artificial Sequence: Synthetic oligonucleotide
uggcccaccuuggagcacc

SEQ ID NO: 594362 - RNA, 19 nt, Artificial Sequence
  Description of Artificial Sequence: Synthetic oligonucleotide
cugccugcgaguucauuca

SEQ ID NO: 594363 - RNA, 19 nt, Artificial Sequence
  Description of Artificial Sequence: Synthetic oligonucleotide
acgguuccucgcuccuucg

SEQ ID NO: 594364 - RNA, 19 nt, Artificial Sequence
  Description of Artificial Sequence: Synthetic oligonucleotide
ugugaacguggaucucaaa

SEQ ID NO: 594365 - RNA, 19 nt, Artificial Sequence
  Description of Artificial Sequence: Synthetic oligonucleotide
caaagaugauaggcacccc

SEQ ID NO: 594366 - RNA, 19 nt, Artificial Sequence
  Description of Artificial Sequence: Synthetic oligonucleotide
gugugucagugugugcuag

SEQ ID NO: 594367 - RNA, 19 nt, Artificial Sequence
  Description of Artificial Sequence: Synthetic oligonucleotide
guuuccaggagacgguggu

SEQ ID NO: 594368 - RNA, 19 nt, Artificial Sequence
  Description of Artificial Sequence: Synthetic oligonucleotide
uugggacaaaguggccaag

SEQ ID NO: 594369 - RNA, 19 nt, Artificial Sequence
  Description of Artificial Sequence: Synthetic oligonucleotide
agacacacgugaauagaaa

SEQ ID NO: 594370 - RNA, 19 nt, Artificial Sequence
  Description of Artificial Sequence: Synthetic oligonucleotide
cauucacgguuccucgcuc

SEQ ID NO: 594371 - RNA, 19 nt, Artificial Sequence
  Description of Artificial Sequence: Synthetic oligonucleotide
ucugugggccaccggucuc

SEQ ID NO: 594372 - RNA, 19 nt, Artificial Sequence
  Description of Artificial Sequence: Synthetic oligonucleotide
aucccgcagaggcguguac

SEQ ID NO: 594373 - RNA, 19 nt, Artificial Sequence
  Description of Artificial Sequence: Synthetic oligonucleotide
cccuuuaucuguggcaugc

SEQ ID NO: 594374 - RNA, 19 nt, Artificial Sequence
  Description of Artificial Sequence: Synthetic oligonucleotide
ggaugucauuaaccacugg

SEQ ID NO: 594375 - RNA, 19 nt, Artificial Sequence
  Description of Artificial Sequence: Synthetic oligonucleotide
ucagcccuaugaucugcuc

SEQ ID NO: 594376 - RNA, 19 nt, Artificial Sequence
  Description of Artificial Sequence: Synthetic oligonucleotide
caaagucucuccagcagcu

SEQ ID NO: 594377 - RNA, 19 nt, Artificial Sequence
  Description of Artificial Sequence: Synthetic oligonucleotide
aggcguguacucuccuaca

SEQ ID NO: 594378 - RNA, 19 nt, Artificial Sequence
  Description of Artificial Sequence: Synthetic oligonucleotide
caagaugaguggcaugcua

SEQ ID NO: 594379 - RNA, 19 nt, Artificial Sequence
  Description of Artificial Sequence: Synthetic oligonucleotide
cuaggucagguguuggcua

SEQ ID NO: 594380 - RNA, 19 nt, Artificial Sequence
  Description of Artificial Sequence: Synthetic oligonucleotide
gaaccgugcaggagccuug

SEQ ID NO: 594381 - RNA, 19 nt, Artificial Sequence
  Description of Artificial Sequence: Synthetic oligonucleotide
cuugggacgggagcccuug

SEQ ID NO: 594382 - RNA, 19 nt, Artificial Sequence
  Description of Artificial Sequence: Synthetic oligonucleotide
ccuacaguguccugguuca

SEQ ID NO: 594383 - RNA, 19 nt, Artificial Sequence
  Description of Artificial Sequence: Synthetic oligonucleotide
gcaguuucgguccccaaaa

SEQ ID NO: 594384 - RNA, 19 nt, Artificial Sequence
  Description of Artificial Sequence: Synthetic oligonucleotide
aaccgugcaggagccuugu

SEQ ID NO: 594385 - RNA, 19 nt, Artificial Sequence
  Description of Artificial Sequence: Synthetic oligonucleotide
ucccgcagaggcguguacu

SEQ ID NO: 594386 - RNA, 19 nt, Artificial Sequence
  Description of Artificial Sequence: Synthetic oligonucleotide
gccaccggucucuacagac

SEQ ID NO: 594387 - RNA, 19 nt, Artificial Sequence
  Description of Artificial Sequence: Synthetic oligonucleotide
agacaacaccgaguugucu

SEQ ID NO: 594388 - RNA, 19 nt, Artificial Sequence
  Description of Artificial Sequence: Synthetic oligonucleotide
ggacuggagcgccagagaa

SEQ ID NO: 594389 - RNA, 19 nt, Artificial Sequence
  Description of Artificial Sequence: Synthetic oligonucleotide
gaaacacccugggagcuua

SEQ ID NO: 594390 - RNA, 19 nt, Artificial Sequence
  Description of Artificial Sequence: Synthetic oligonucleotide
agaggcguguacucuccua

SEQ ID NO: 594391 - RNA, 19 nt, Artificial Sequence
  Description of Artificial Sequence: Synthetic oligonucleotide
uucuugggacgggagcccu

SEQ ID NO: 594392 - RNA, 19 nt, Artificial Sequence
  Description of Artificial Sequence: Synthetic oligonucleotide
accuuggagcaccuagguu

SEQ ID NO: 594393 - RNA, 19 nt, Artificial Sequence
  Description of Artificial Sequence: Synthetic oligonucleotide
cgugcaggagccuugucac

SEQ ID NO: 594394 - RNA, 19 nt, Artificial Sequence
  Description of Artificial Sequence: Synthetic oligonucleotide
gcgugcaugggguagaggu

SEQ ID NO: 594395 - RNA, 19 nt, Artificial Sequence
  Description of Artificial Sequence: Synthetic oligonucleotide
guguguuguugguccacuc

SEQ ID NO: 594396 - RNA, 19 nt, Artificial Sequence
  Description of Artificial Sequence: Synthetic oligonucleotide
uugggacgggagcccuugc

SEQ ID NO: 594397 - RNA, 19 nt, Artificial Sequence
  Description of Artificial Sequence: Synthetic oligonucleotide
ccuugucaccuugugggcg

SEQ ID NO: 594398 - RNA, 19 nt, Artificial Sequence
  Description of Artificial Sequence: Synthetic oligonucleotide
uagcgugcaugggguagag

SEQ ID NO: 594399 - RNA, 19 nt, Artificial Sequence
  Description of Artificial Sequence: Synthetic oligonucleotide
guuggcuaccagugggcaa

SEQ ID NO: 594400 - RNA, 19 nt, Artificial Sequence
  Description of Artificial Sequence: Synthetic oligonucleotide
cugguagggaggugcauua

SEQ ID NO: 594401 - RNA, 19 nt, Artificial Sequence
  Description of Artificial Sequence: Synthetic oligonucleotide
cuaccucuacucaaacagu

SEQ ID NO: 594402 - RNA, 19 nt, Artificial Sequence
  Description of Artificial Sequence: Synthetic oligonucleotide
cagugcuuucagagccagc

SEQ ID NO: 594403 - RNA, 19 nt, Artificial Sequence
  Description of Artificial Sequence: Synthetic oligonucleotide
acguacaaguuuagguaaa

SEQ ID NO: 594404 - RNA, 19 nt, Artificial Sequence
  Description of Artificial Sequence: Synthetic oligonucleotide
ugaucgguauggggucaug

SEQ ID NO: 594405 - RNA, 19 nt, Artificial Sequence
  Description of Artificial Sequence: Synthetic oligonucleotide
ccuacgagcagcuggccca

SEQ ID NO: 594406 - RNA, 19 nt, Artificial Sequence
  Description of Artificial Sequence: Synthetic oligonucleotide
gugcuuucagagccagcca

SEQ ID NO: 594407 - RNA, 19 nt, Artificial Sequence
  Description of Artificial Sequence: Synthetic oligonucleotide
gaucgguauggggucaugu

SEQ ID NO: 594408 - RNA, 19 nt, Artificial Sequence
  Description of Artificial Sequence: Synthetic oligonucleotide
caccggucucuacagacaa

SEQ ID NO: 594409 - RNA, 19 nt, Artificial Sequence
  Description of Artificial Sequence: Synthetic oligonucleotide
guugggguacucaggaggu

SEQ ID NO: 594410 - RNA, 19 nt, Artificial Sequence
  Description of Artificial Sequence: Synthetic oligonucleotide
accggucucuacagacaac

SEQ ID NO: 594411 - RNA, 19 nt, Artificial Sequence
  Description of Artificial Sequence: Synthetic oligonucleotide
cagugggcaauggucugug

SEQ ID NO: 594412 - RNA, 19 nt, Artificial Sequence
  Description of Artificial Sequence: Synthetic oligonucleotide
gggugaucgguaugggguc

SEQ ID NO: 594413 - RNA, 19 nt, Artificial Sequence
  Description of Artificial Sequence: Synthetic oligonucleotide
guaucagagcaaccaaguu

SEQ ID NO: 594414 - RNA, 19 nt, Artificial Sequence
  Description of Artificial Sequence: Synthetic oligonucleotide
uaucuguggcaugcaugaa

SEQ ID NO: 594415 - RNA, 19 nt, Artificial Sequence
  Description of Artificial Sequence: Synthetic oligonucleotide
accgugcaggagccuuguc

SEQ ID NO: 594416 - RNA, 19 nt, Artificial Sequence
  Description of Artificial Sequence: Synthetic oligonucleotide
caaaaucagcgaagaauuu

SEQ ID NO: 594417 - RNA, 19 nt, Artificial Sequence
  Description of Artificial Sequence: Synthetic oligonucleotide
gagcaaccaaguugacaua

SEQ ID NO: 594418 - RNA, 19 nt, Artificial Sequence
  Description of Artificial Sequence: Synthetic oligonucleotide
cacccaggcgcuuaugggu

SEQ ID NO: 594419 - RNA, 19 nt, Artificial Sequence
  Description of Artificial Sequence: Synthetic oligonucleotide
agcgugcaugggguagagg

SEQ ID NO: 594420 - RNA, 19 nt, Artificial Sequence
  Description of Artificial Sequence: Synthetic oligonucleotide
agucaggcuccagagcauu

SEQ ID NO: 594421 - RNA, 19 nt, Artificial Sequence
  Description of Artificial Sequence: Synthetic oligonucleotide
ccaaguugacauaguguga

SEQ ID NO: 594422 - RNA, 19 nt, Artificial Sequence
  Description of Artificial Sequence: Synthetic oligonucleotide
ucuugggacgggagcccuu

SEQ ID NO: 594423 - RNA, 19 nt, Artificial Sequence
  Description of Artificial Sequence: Synthetic oligonucleotide
caccuugugggcgcuugug

SEQ ID NO: 594424 - RNA, 19 nt, Artificial Sequence
  Description of Artificial Sequence: Synthetic oligonucleotide
gggccaccggucucuacag

SEQ ID NO: 594425 - RNA, 19 nt, Artificial Sequence
  Description of Artificial Sequence: Synthetic oligonucleotide
gcgaguucauucacgguuc

SEQ ID NO: 594426 - RNA, 19 nt, Artificial Sequence
  Description of Artificial Sequence: Synthetic oligonucleotide
gccugcgaguucauucacg

SEQ ID NO: 594427 - RNA, 19 nt, Artificial Sequence
  Description of Artificial Sequence: Synthetic oligonucleotide
cuagcgugcaugggguaga

SEQ ID NO: 594428 - RNA, 19 nt, Artificial Sequence
  Description of Artificial Sequence: Synthetic oligonucleotide
cuacgagcagcuggcccac

SEQ ID NO: 594429 - RNA, 19 nt, Artificial Sequence
  Description of Artificial Sequence: Synthetic oligonucleotide
agucaggcucugggguauc

SEQ ID NO: 594430 - RNA, 19 nt, Artificial Sequence
  Description of Artificial Sequence: Synthetic oligonucleotide
caauacucacugccuuaaa

SEQ ID NO: 594431 - RNA, 19 nt, Artificial Sequence
  Description of Artificial Sequence: Synthetic oligonucleotide
ugccgacaacugccagcgc

SEQ ID NO: 594432 - RNA, 19 nt, Artificial Sequence
  Description of Artificial Sequence: Synthetic oligonucleotide
uugaaccgugcaggagccu

SEQ ID NO: 594433 - RNA, 19 nt, Artificial Sequence
  Description of Artificial Sequence: Synthetic oligonucleotide
cccuacgagcagcuggccc

SEQ ID NO: 594434 - RNA, 19 nt, Artificial Sequence
  Description of Artificial Sequence: Synthetic oligonucleotide
uggguccuucaaccuucuc

SEQ ID NO: 594435 - RNA, 19 nt, Artificial Sequence
  Description of Artificial Sequence: Synthetic oligonucleotide
gugggcgcuugugaacgug

SEQ ID NO: 594436 - RNA, 19 nt, Artificial Sequence
  Description of Artificial Sequence: Synthetic oligonucleotide
gccacagggauaaauugua

SEQ ID NO: 594437 - RNA, 19 nt, Artificial Sequence
  Description of Artificial Sequence: Synthetic oligonucleotide
ccggucucuacagacaaca

SEQ ID NO: 594438 - RNA, 19 nt, Artificial Sequence
  Description of Artificial Sequence: Synthetic oligonucleotide
uggcuaccagugggcaaug

SEQ ID NO: 594439 - RNA, 19 nt, Artificial Sequence
  Description of Artificial Sequence: Synthetic oligonucleotide
cguacaaguuuagguaaac

SEQ ID NO: 594440 - RNA, 19 nt, Artificial Sequence
  Description of Artificial Sequence: Synthetic oligonucleotide
caccaaaauguuccccacu

SEQ ID NO: 594441 - RNA, 19 nt, Artificial Sequence
  Description of Artificial Sequence: Synthetic oligonucleotide
uugucaccuugugggcgcu

SEQ ID NO: 594442 - RNA, 19 nt, Artificial Sequence
  Description of Artificial Sequence: Synthetic oligonucleotide
uccucgcuccuucguucua

SEQ ID NO: 594443 - RNA, 19 nt, Artificial Sequence
  Description of Artificial Sequence: Synthetic oligonucleotide
cagcaaucccugcggcuca

SEQ ID NO: 594444 - RNA, 19 nt, Artificial Sequence
  Description of Artificial Sequence: Synthetic oligonucleotide
cacccugggagcuuauuuu

SEQ ID NO: 594445 - RNA, 19 nt, Artificial Sequence
  Description of Artificial Sequence: Synthetic oligonucleotide
gcagcuagacacacgugaa

SEQ ID NO: 594446 - RNA, 19 nt, Artificial Sequence
  Description of Artificial Sequence: Synthetic oligonucleotide
ggccuugaaccgugcagga

SEQ ID NO: 594447 - RNA, 19 nt, Artificial Sequence
  Description of Artificial Sequence: Synthetic oligonucleotide
gccuugaaccgugcaggag

SEQ ID NO: 594448 - RNA, 19 nt, Artificial Sequence
  Description of Artificial Sequence: Synthetic oligonucleotide
cucagcccuaugaucugcu

SEQ ID NO: 594449 - RNA, 19 nt, Artificial Sequence
  Description of Artificial Sequence: Synthetic oligonucleotide
cgaguucauucacgguucc

SEQ ID NO: 594450 - RNA, 19 nt, Artificial Sequence
  Description of Artificial Sequence: Synthetic oligonucleotide
ccuugugggcgcuugugaa

SEQ ID NO: 594451 - RNA, 19 nt, Artificial Sequence
  Description of Artificial Sequence: Synthetic oligonucleotide
aaacacccugggagcuuau

SEQ ID NO: 594452 - RNA, 19 nt, Artificial Sequence
  Description of Artificial Sequence: Synthetic oligonucleotide
ucacgguuccucgcuccuu

SEQ ID NO: 594453 - RNA, 19 nt, Artificial Sequence
  Description of Artificial Sequence: Synthetic oligonucleotide
cccgcagaggcguguacuc

SEQ ID NO: 594454 - RNA, 19 nt, Artificial Sequence
  Description of Artificial Sequence: Synthetic oligonucleotide
cguucuaccucuacucaaa

SEQ ID NO: 594455 - RNA, 19 nt, Artificial Sequence
  Description of Artificial Sequence: Synthetic oligonucleotide
gaggugcauuaggauccuc

SEQ ID NO: 594456 - RNA, 19 nt, Artificial Sequence
  Description of Artificial Sequence: Synthetic oligonucleotide
gcaugggguagaggucagg

SEQ ID NO: 594457 - RNA, 19 nt, Artificial Sequence
  Description of Artificial Sequence: Synthetic oligonucleotide
uacgagcagcuggcccacc

SEQ ID NO: 594458 - RNA, 19 nt, Artificial Sequence
  Description of Artificial Sequence: Synthetic oligonucleotide
ggucagguguuggcuacca

SEQ ID NO: 594459 - RNA, 19 nt, Artificial Sequence
  Description of Artificial Sequence: Synthetic oligonucleotide
ggccacuagcgugcauggg

SEQ ID NO: 594460 - RNA, 19 nt, Artificial Sequence
  Description of Artificial Sequence: Synthetic oligonucleotide
cagcacugccugcgaguuc

SEQ ID NO: 594461 - RNA, 19 nt, Artificial Sequence
  Description of Artificial Sequence: Synthetic oligonucleotide
ccacagggauaaauuguaa

SEQ ID NO: 594462 - RNA, 19 nt, Artificial Sequence
  Description of Artificial Sequence: Synthetic oligonucleotide
cgcagaggcguguacucuc

SEQ ID NO: 594463 - RNA, 19 nt, Artificial Sequence
  Description of Artificial Sequence: Synthetic oligonucleotide
cagcuagacacacgugaau

SEQ ID NO: 594464 - RNA, 19 nt, Artificial Sequence
  Description of Artificial Sequence: Synthetic oligonucleotide
ccaccggucucuacagaca

SEQ ID NO: 594465 - RNA, 19 nt, Artificial Sequence
  Description of Artificial Sequence: Synthetic oligonucleotide
auguuacauccugcagcua

SEQ ID NO: 594466 - RNA, 19 nt, Artificial Sequence
  Description of Artificial Sequence: Synthetic oligonucleotide
cacuagcgugcauggggua

SEQ ID NO: 594467 - RNA, 19 nt, Artificial Sequence
  Description of Artificial Sequence: Synthetic oligonucleotide
ccucgcuccuucguucuac

SEQ ID NO: 594468 - RNA, 19 nt, Artificial Sequence
  Description of Artificial Sequence: Synthetic oligonucleotide
ccccuuuaucuguggcaug

SEQ ID NO: 594469 - RNA, 19 nt, Artificial Sequence
  Description of Artificial Sequence: Synthetic oligonucleotide
ccaagaggccccuccagcu

SEQ ID NO: 594470 - RNA, 19 nt, Artificial Sequence
  Description of Artificial Sequence: Synthetic oligonucleotide
cugcgaguucauucacggu

SEQ ID NO: 594471 - RNA, 19 nt, Artificial Sequence
  Description of Artificial Sequence: Synthetic oligonucleotide
cagagagggcaggcuuguc

SEQ ID NO: 594472 - RNA, 19 nt, Artificial Sequence
  Description of Artificial Sequence: Synthetic oligonucleotide
caauagagccacgggugau

SEQ ID NO: 594473 - RNA, 19 nt, Artificial Sequence
  Description of Artificial Sequence: Synthetic oligonucleotide
cucaagggucaguguggcu

SEQ ID NO: 594474 - RNA, 19 nt, Artificial Sequence
  Description of Artificial Sequence: Synthetic oligonucleotide
cgguauggggucauguucu

SEQ ID NO: 594475 - RNA, 19 nt, Artificial Sequence
  Description of Artificial Sequence: Synthetic oligonucleotide
ccacuagcgugcauggggu

SEQ ID NO: 594476 - RNA, 19 nt, Artificial Sequence
  Description of Artificial Sequence: Synthetic oligonucleotide
cgcuugugaacguggaucu

SEQ ID NO: 594477 - RNA, 19 nt, Artificial Sequence
  Description of Artificial Sequence: Synthetic oligonucleotide
gcuugugaacguggaucuc

SEQ ID NO: 594478 - RNA, 19 nt, Artificial Sequence
  Description of Artificial Sequence: Synthetic oligonucleotide
gguccucaagggucagugu

SEQ ID NO: 594479 - RNA, 19 nt, Artificial Sequence
  Description of Artificial Sequence: Synthetic oligonucleotide
ugucaccuugugggcgcuu

SEQ ID NO: 594480 - RNA, 19 nt, Artificial Sequence
  Description of Artificial Sequence: Synthetic oligonucleotide
ggguagaggucaggauguc

SEQ ID NO: 594481 - RNA, 19 nt, Artificial Sequence
  Description of Artificial Sequence: Synthetic oligonucleotide
gugugcuaggucagguguu

SEQ ID NO: 594482 - RNA, 19 nt, Artificial Sequence
  Description of Artificial Sequence: Synthetic oligonucleotide
gcguggggugggacugugg

SEQ ID NO: 594483 - RNA, 19 nt, Artificial Sequence
  Description of Artificial Sequence: Synthetic oligonucleotide
ccgacaacugccagcgccu

SEQ ID NO: 594484 - RNA, 19 nt, Artificial Sequence
  Description of Artificial Sequence: Synthetic oligonucleotide
gguauggggucauguucuu

SEQ ID NO: 594485 - RNA, 19 nt, Artificial Sequence
  Description of Artificial Sequence: Synthetic oligonucleotide
ccugcaaauuuggccuuga

SEQ ID NO: 594486 - RNA, 19 nt, Artificial Sequence
  Description of Artificial Sequence: Synthetic oligonucleotide
cacuggugcugggucaccu

SEQ ID NO: 594487 - RNA, 19 nt, Artificial Sequence
  Description of Artificial Sequence: Synthetic oligonucleotide
gaguugucuccaggccccu

SEQ ID NO: 594488 - RNA, 19 nt, Artificial Sequence
  Description of Artificial Sequence: Synthetic oligonucleotide
gugccccuacgagcagcug

SEQ ID NO: 594489 - RNA, 19 nt, Artificial Sequence
  Description of Artificial Sequence: Synthetic oligonucleotide
cagaggcguguacucuccu

SEQ ID NO: 594490 - RNA, 19 nt, Artificial Sequence
  Description of Artificial Sequence: Synthetic oligonucleotide
caucccgcagaggcgugua

SEQ ID NO: 594491 - RNA, 19 nt, Artificial Sequence
  Description of Artificial Sequence: Synthetic oligonucleotide
caggaccaagaggcccuca

SEQ ID NO: 594492 - RNA, 19 nt, Artificial Sequence
  Description of Artificial Sequence: Synthetic oligonucleotide
ggugccccuacgagcagcu

SEQ ID NO: 594493 - RNA, 19 nt, Artificial Sequence
  Description of Artificial Sequence: Synthetic oligonucleotide
ucccugcggcucagcccua

SEQ ID NO: 594494 - RNA, 19 nt, Artificial Sequence
  Description of Artificial Sequence: Synthetic oligonucleotide
ggaccagagagggcaggcu

SEQ ID NO: 594495 - RNA, 19 nt, Artificial Sequence
  Description of Artificial Sequence: Synthetic oligonucleotide
ggaggugcauuaggauccu

SEQ ID NO: 594496 - RNA, 19 nt, Artificial Sequence
  Description of Artificial Sequence: Synthetic oligonucleotide
guaggccacuagcgugcau

SEQ ID NO: 594497 - RNA, 19 nt, Artificial Sequence
  Description of Artificial Sequence: Synthetic oligonucleotide
ccaggaccaagaggcccuc

SEQ ID NO: 594498 - RNA, 19 nt, Artificial Sequence
  Description of Artificial Sequence: Synthetic oligonucleotide
ccugguucagaggcguggu

SEQ ID NO: 594499 - RNA, 19 nt, Artificial Sequence
  Description of Artificial Sequence: Synthetic oligonucleotide
cccaggcgcuuauggguua

SEQ ID NO: 594500 - RNA, 19 nt, Artificial Sequence
  Description of Artificial Sequence: Synthetic oligonucleotide
ccucagugguaggccacua

SEQ ID NO: 594501 - RNA, 19 nt, Artificial Sequence
  Description of Artificial Sequence: Synthetic oligonucleotide
ccgcagaggcguguacucu

SEQ ID NO: 594502 - RNA, 19 nt, Artificial Sequence
  Description of Artificial Sequence: Synthetic oligonucleotide
cgccugucacagcaauacu

SEQ ID NO: 594503 - RNA, 19 nt, Artificial Sequence
  Description of Artificial Sequence: Synthetic oligonucleotide
ccuccacccaggcgcuuau

SEQ ID NO: 594504 - RNA, 19 nt, Artificial Sequence
  Description of Artificial Sequence: Synthetic oligonucleotide
gcccuaugaucugcuccuu

SEQ ID NO: 594505 - RNA, 19 nt, Artificial Sequence
  Description of Artificial Sequence: Synthetic oligonucleotide
gcguggucucgggcacacu

SEQ ID NO: 594506 - RNA, 19 nt, Artificial Sequence
  Description of Artificial Sequence: Synthetic oligonucleotide
acuuguguuacauauaucc

SEQ ID NO: 594507 - RNA, 19 nt, Artificial Sequence
  Description of Artificial Sequence: Synthetic oligonucleotide
uuaaaagccaugaauacug

SEQ ID NO: 594508 - RNA, 19 nt, Artificial Sequence
  Description of Artificial Sequence: Synthetic oligonucleotide
aguauaaucaaacccauug

SEQ ID NO: 594509 - RNA, 19 nt, Artificial Sequence
  Description of Artificial Sequence: Synthetic oligonucleotide
ugagguacaguccauaaag

SEQ ID NO: 594510 - RNA, 19 nt, Artificial Sequence
  Description of Artificial Sequence: Synthetic oligonucleotide
gauaggaguaaacaucucg

SEQ ID NO: 594511 - RNA, 19 nt, Artificial Sequence
  Description of Artificial Sequence: Synthetic oligonucleotide
uguaucauugaucucagga

SEQ ID NO: 594512 - RNA, 19 nt, Artificial Sequence
  Description of Artificial Sequence: Synthetic oligonucleotide
uguaugaguauuauuuuag

SEQ ID NO: 594513 - RNA, 19 nt, Artificial Sequence
  Description of Artificial Sequence: Synthetic oligonucleotide
agauaugggauagacaucc

SEQ ID NO: 594514 - RNA, 19 nt, Artificial Sequence
  Description of Artificial Sequence: Synthetic oligonucleotide
aguacacacacacacacac

SEQ ID NO: 594515 - RNA, 19 nt, Artificial Sequence
  Description of Artificial Sequence: Synthetic oligonucleotide
uguaccaugagagagacug

SEQ ID NO: 594516 - RNA, 19 nt, Artificial Sequence
  Description of Artificial Sequence: Synthetic oligonucleotide
uuauuauugugccaacacg

SEQ ID NO: 594517 - RNA, 19 nt, Artificial Sequence
  Description of Artificial Sequence: Synthetic oligonucleotide
uauuuauacucauuagggg

SEQ ID NO: 594518 - RNA, 19 nt, Artificial Sequence
  Description of Artificial Sequence: Synthetic oligonucleotide
auaguacacacacacacac

SEQ ID NO: 594519 - RNA, 19 nt, Artificial Sequence
  Description of Artificial Sequence: Synthetic oligonucleotide
uuccauaacaggcaaacag

SEQ ID NO: 594520 - RNA, 19 nt, Artificial Sequence
  Description of Artificial Sequence: Synthetic oligonucleotide
uacucaaaugaucagauaa

SEQ ID NO: 594521 - RNA, 19 nt, Artificial Sequence
  Description of Artificial Sequence: Synthetic oligonucleotide
auuacuugacuauuucugg

SEQ ID NO: 594522 - RNA, 19 nt, Artificial Sequence
  Description of Artificial Sequence: Synthetic oligonucleotide
gauacucagacgaagaggc

SEQ ID NO: 594523 - RNA, 19 nt, Artificial Sequence
  Description of Artificial Sequence: Synthetic oligonucleotide
cucacuaaaacucauugac

SEQ ID NO: 594524 - RNA, 19 nt, Artificial Sequence
  Description of Artificial Sequence: Synthetic oligonucleotide
aacauacgcucacuaaaac

SEQ ID NO: 594525 - RNA, 19 nt, Artificial Sequence
  Description of Artificial Sequence: Synthetic oligonucleotide
ugaguauuauuuuagccac

SEQ ID NO: 594526 - RNA, 19 nt, Artificial Sequence
  Description of Artificial Sequence: Synthetic oligonucleotide
uggguucgaacauagaaag

SEQ ID NO: 594527 - RNA, 19 nt, Artificial Sequence
  Description of Artificial Sequence: Synthetic oligonucleotide
aguuuaacccauaugguac

SEQ ID NO: 594528 - RNA, 19 nt, Artificial Sequence
  Description of Artificial Sequence: Synthetic oligonucleotide
auaagaacuguaacaaggc

SEQ ID NO: 594529 - RNA, 19 nt, Artificial Sequence
  Description of Artificial Sequence: Synthetic oligonucleotide
guaaacaucucgaauacag

SEQ ID NO: 594530 - RNA, 19 nt, Artificial Sequence
  Description of Artificial Sequence: Synthetic oligonucleotide
uguugacuaacucaaauuu

SEQ ID NO: 594531 - RNA, 19 nt, Artificial Sequence
  Description of Artificial Sequence: Synthetic oligonucleotide
aggauaugcgaugacaagc

SEQ ID NO: 594532 - RNA, 19 nt, Artificial Sequence
  Description of Artificial Sequence: Synthetic oligonucleotide
cauacgcucacuaaaacuc

SEQ ID NO: 594533 - RNA, 19 nt, Artificial Sequence
  Description of Artificial Sequence: Synthetic oligonucleotide
uguuacgugagacauccca

SEQ ID NO: 594534 - RNA, 19 nt, Artificial Sequence
  Description of Artificial Sequence: Synthetic oligonucleotide
uacacacacacacacacac

SEQ ID NO: 594535 - RNA, 19 nt, Artificial Sequence
  Description of Artificial Sequence: Synthetic oligonucleotide
uguggguucgaacauagaa

SEQ ID NO: 594536 - RNA, 19 nt, Artificial Sequence
  Description of Artificial Sequence: Synthetic oligonucleotide
uuaauuacuugacuauuuc

SEQ ID NO: 594537 - RNA, 19 nt, Artificial Sequence
  Description of Artificial Sequence: Synthetic oligonucleotide
aaggcaaucaaucuuccuu

SEQ ID NO: 594538 - RNA, 19 nt, Artificial Sequence
  Description of Artificial Sequence: Synthetic oligonucleotide
aaguuuaacccauauggua

SEQ ID NO: 594539 - RNA, 19 nt, Artificial Sequence
  Description of Artificial Sequence: Synthetic oligonucleotide
aaagacuccaccgcagacg

SEQ ID NO: 594540 - RNA, 19 nt, Artificial Sequence
  Description of Artificial Sequence: Synthetic oligonucleotide
uccccugauagauaguggg

SEQ ID NO: 594541 - RNA, 19 nt, Artificial Sequence
  Description of Artificial Sequence: Synthetic oligonucleotide
acuauuucuggccuuuaag

SEQ ID NO: 594542 - RNA, 19 nt, Artificial Sequence
  Description of Artificial Sequence: Synthetic oligonucleotide
uguaacaaggcuagugaac

SEQ ID NO: 594543 - RNA, 19 nt, Artificial Sequence
  Description of Artificial Sequence: Synthetic oligonucleotide
guaagugagaacaacaaga

SEQ ID NO: 594544 - RNA, 19 nt, Artificial Sequence
  Description of Artificial Sequence: Synthetic oligonucleotide
aauacagcccagaugaggu

SEQ ID NO: 594545 - RNA, 19 nt, Artificial Sequence
  Description of Artificial Sequence: Synthetic oligonucleotide
aacacgagaaggauaugcg

SEQ ID NO: 594546 - RNA, 19 nt, Artificial Sequence
  Description of Artificial Sequence: Synthetic oligonucleotide
uaauuacuugacuauuucu

SEQ ID NO: 594547 - RNA, 19 nt, Artificial Sequence
  Description of Artificial Sequence: Synthetic oligonucleotide
gaagauaccaagggaagcc

SEQ ID NO: 594548 - RNA, 19 nt, Artificial Sequence
  Description of Artificial Sequence: Synthetic oligonucleotide
acuguaacaaggcuaguga

SEQ ID NO: 594549 - RNA, 19 nt, Artificial Sequence
  Description of Artificial Sequence: Synthetic oligonucleotide
ugugccaacacgagaagga

SEQ ID NO: 594550 - RNA, 19 nt, Artificial Sequence
  Description of Artificial Sequence: Synthetic oligonucleotide
agguaaaaggcaaucaauc

SEQ ID NO: 594551 - RNA, 19 nt, Artificial Sequence
  Description of Artificial Sequence: Synthetic oligonucleotide
auagacauccccaaaaggu

SEQ ID NO: 594552 - RNA, 19 nt, Artificial Sequence
  Description of Artificial Sequence: Synthetic oligonucleotide
guaacaaggcuagugaacc

SEQ ID NO: 594553 - RNA, 19 nt, Artificial Sequence
  Description of Artificial Sequence: Synthetic oligonucleotide
aacacugcuauaauaagaa

SEQ ID NO: 594554 - RNA, 19 nt, Artificial Sequence
  Description of Artificial Sequence: Synthetic oligonucleotide
aacuguaacaaggcuagug

SEQ ID NO: 594555 - RNA, 19 nt, Artificial Sequence
  Description of Artificial Sequence: Synthetic oligonucleotide
auccacgcaauuaaaacac

SEQ ID NO: 594556 - RNA, 19 nt, Artificial Sequence
  Description of Artificial Sequence: Synthetic oligonucleotide
agcuaaugaaagugauggc

SEQ ID NO: 594557 - RNA, 19 nt, Artificial Sequence
  Description of Artificial Sequence: Synthetic oligonucleotide
ugugcuuauuaaaagccau

SEQ ID NO: 594558 - RNA, 19 nt, Artificial Sequence
  Description of Artificial Sequence: Synthetic oligonucleotide
uccuuccaaauuaugaaaa

SEQ ID NO: 594559 - RNA, 19 nt, Artificial Sequence
  Description of Artificial Sequence: Synthetic oligonucleotide
caugucgauacucagacga

SEQ ID NO: 594560 - RNA, 19 nt, Artificial Sequence
  Description of Artificial Sequence: Synthetic oligonucleotide
agugagcucggauuguauc

SEQ ID NO: 594561 - RNA, 19 nt, Artificial Sequence
  Description of Artificial Sequence: Synthetic oligonucleotide
aaaguuuaacccauauggu

SEQ ID NO: 594562 - RNA, 19 nt, Artificial Sequence
  Description of Artificial Sequence: Synthetic oligonucleotide
ugguuguaccaugagagag

SEQ ID NO: 594563 - RNA, 19 nt, Artificial Sequence
  Description of Artificial Sequence: Synthetic oligonucleotide
ucacagugagcucggauug

SEQ ID NO: 594564 - RNA, 19 nt, Artificial Sequence
  Description of Artificial Sequence: Synthetic oligonucleotide
auuaaaagccaugaauacu

SEQ ID NO: 594565 - RNA, 19 nt, Artificial Sequence
  Description of Artificial Sequence: Synthetic oligonucleotide
uuauugugccaacacgaga

SEQ ID NO: 594566 - RNA, 19 nt, Artificial Sequence
  Description of Artificial Sequence: Synthetic oligonucleotide
aguauuauuuuagccacug

SEQ ID NO: 594567 - RNA, 19 nt, Artificial Sequence
  Description of Artificial Sequence: Synthetic oligonucleotide
acauacgcucacuaaaacu

SEQ ID NO: 594568 - RNA, 19 nt, Artificial Sequence
  Description of Artificial Sequence: Synthetic oligonucleotide
aggcaaucaaucuuccuug

SEQ ID NO: 594569 - RNA, 19 nt, Artificial Sequence
  Description of Artificial Sequence: Synthetic oligonucleotide
agagcaucgagcugagaag

SEQ ID NO: 594570 - RNA, 19 nt, Artificial Sequence
  Description of Artificial Sequence: Synthetic oligonucleotide
uuugaacauacgcucacua

SEQ ID NO: 594571 - RNA, 19 nt, Artificial Sequence
  Description of Artificial Sequence: Synthetic oligonucleotide
ucuuugaacauacgcucac

SEQ ID NO: 594572 - RNA, 19 nt, Artificial Sequence
  Description of Artificial Sequence: Synthetic oligonucleotide
cacacacacacacacacac

SEQ ID NO: 594573 - RNA, 19 nt, Artificial Sequence
  Description of Artificial Sequence: Synthetic oligonucleotide
ucggauuguaucauugauc

SEQ ID NO: 594574 - RNA, 19 nt, Artificial Sequence
  Description of Artificial Sequence: Synthetic oligonucleotide
uauagaaccccaugguguc

SEQ ID NO: 594575 - RNA, 19 nt, Artificial Sequence
  Description of Artificial Sequence: Synthetic oligonucleotide
ggggaaaugcauuacuuag

SEQ ID NO: 594576 - RNA, 19 nt, Artificial Sequence
  Description of Artificial Sequence: Synthetic oligonucleotide
cacgcagagggaaaugucc

SEQ ID NO: 594577 - RNA, 19 nt, Artificial Sequence
  Description of Artificial Sequence: Synthetic oligonucleotide
acacacacacaccaguucu

SEQ ID NO: 594578 - RNA, 19 nt, Artificial Sequence
  Description of Artificial Sequence: Synthetic oligonucleotide
caacacgagaaggauaugc

SEQ ID NO: 594579 - RNA, 19 nt, Artificial Sequence
  Description of Artificial Sequence: Synthetic oligonucleotide
auaugcgaugacaagcagg

SEQ ID NO: 594580 - RNA, 19 nt, Artificial Sequence
  Description of Artificial Sequence: Synthetic oligonucleotide
acaucucgaauacagccca

SEQ ID NO: 594581 - RNA, 19 nt, Artificial Sequence
  Description of Artificial Sequence: Synthetic oligonucleotide
ucucguguagucagcauuc

SEQ ID NO: 594582 - RNA, 19 nt, Artificial Sequence
  Description of Artificial Sequence: Synthetic oligonucleotide
gacuccaccgcagacgagg

SEQ ID NO: 594583 - RNA, 19 nt, Artificial Sequence
  Description of Artificial Sequence: Synthetic oligonucleotide
gguucgaacauagaaagac

SEQ ID NO: 594584 - RNA, 19 nt, Artificial Sequence
  Description of Artificial Sequence: Synthetic oligonucleotide
aaggguauguaugaguauu

SEQ ID NO: 594585 - RNA, 19 nt, Artificial Sequence
  Description of Artificial Sequence: Synthetic oligonucleotide
uuguugacuaacucaaauu

SEQ ID NO: 594586 - RNA, 19 nt, Artificial Sequence
  Description of Artificial Sequence: Synthetic oligonucleotide
guaucauugaucucaggaa

SEQ ID NO: 594587 - RNA, 19 nt, Artificial Sequence
  Description of Artificial Sequence: Synthetic oligonucleotide
gguguuacgugagacaucc

SEQ ID NO: 594588 - RNA, 19 nt, Artificial Sequence
  Description of Artificial Sequence: Synthetic oligonucleotide
auaauauuguugacuaacu

SEQ ID NO: 594589 - RNA, 19 nt, Artificial Sequence
  Description of Artificial Sequence: Synthetic oligonucleotide
auuacucaaaugaucagau

SEQ ID NO: 594590 - RNA, 19 nt, Artificial Sequence
  Description of Artificial Sequence: Synthetic oligonucleotide
auaggaguaaacaucucga

SEQ ID NO: 594591 - RNA, 19 nt, Artificial Sequence
  Description of Artificial Sequence: Synthetic oligonucleotide
uggacucgcaggauuggag

SEQ ID NO: 594592 - RNA, 19 nt, Artificial Sequence
  Description of Artificial Sequence: Synthetic oligonucleotide
uugaacauacgcucacuaa

SEQ ID NO: 594593 - RNA, 19 nt, Artificial Sequence
  Description of Artificial Sequence: Synthetic oligonucleotide
ggaguaaacaucucgaaua

SEQ ID NO: 594594 - RNA, 19 nt, Artificial Sequence
  Description of Artificial Sequence: Synthetic oligonucleotide
uuccccugauagauagugg

SEQ ID NO: 594595 - RNA, 19 nt, Artificial Sequence
  Description of Artificial Sequence: Synthetic oligonucleotide
auuauugugccaacacgag

SEQ ID NO: 594596 - RNA, 19 nt, Artificial Sequence
  Description of Artificial Sequence: Synthetic oligonucleotide
acacgcaaagcuuugugaa

SEQ ID NO: 594597 - RNA, 19 nt, Artificial Sequence
  Description of Artificial Sequence: Synthetic oligonucleotide
aggaguaaacaucucgaau

SEQ ID NO: 594598 - RNA, 19 nt, Artificial Sequence
  Description of Artificial Sequence: Synthetic oligonucleotide
gagagaaucaucacacaga

SEQ ID NO: 594599 - RNA, 19 nt, Artificial Sequence
  Description of Artificial Sequence: Synthetic oligonucleotide
caaugagagagacgaacac

SEQ ID NO: 594600 - RNA, 19 nt, Artificial Sequence
  Description of Artificial Sequence: Synthetic oligonucleotide
uuacgugagacaucccagu

SEQ ID NO: 594601 - RNA, 19 nt, Artificial Sequence
  Description of Artificial Sequence: Synthetic oligonucleotide
aggccgaacacaucaaaga

SEQ ID NO: 594602 - RNA, 19 nt, Artificial Sequence
  Description of Artificial Sequence: Synthetic oligonucleotide
cuuguguuacauauaucca

SEQ ID NO: 594603 - RNA, 19 nt, Artificial Sequence
  Description of Artificial Sequence: Synthetic oligonucleotide
ucuuuauacuccucccuau

SEQ ID NO: 594604 - RNA, 19 nt, Artificial Sequence
  Description of Artificial Sequence: Synthetic oligonucleotide
cacguucccaugucgauac

SEQ ID NO: 594605 - RNA, 19 nt, Artificial Sequence
  Description of Artificial Sequence: Synthetic oligonucleotide
guuacgugagacaucccag

SEQ ID NO: 594606 - RNA, 19 nt, Artificial Sequence
  Description of Artificial Sequence: Synthetic oligonucleotide
cacacacacacacacacca

SEQ ID NO: 594607 - RNA, 19 nt, Artificial Sequence
  Description of Artificial Sequence: Synthetic oligonucleotide
uacaaaacagcagccguaa

SEQ ID NO: 594608 - RNA, 19 nt, Artificial Sequence
  Description of Artificial Sequence: Synthetic oligonucleotide
acacgagaaggauaugcga

SEQ ID NO: 594609 - RNA, 19 nt, Artificial Sequence
  Description of Artificial Sequence: Synthetic oligonucleotide
cuagugaaccagcuaauga

SEQ ID NO: 594610 - RNA, 19 nt, Artificial Sequence
  Description of Artificial Sequence: Synthetic oligonucleotide
acgaacacugcuauaauaa

SEQ ID NO: 594611 - RNA, 19 nt, Artificial Sequence
  Description of Artificial Sequence: Synthetic oligonucleotide
cucgaauacagcccagaug

SEQ ID NO: 594612 - RNA, 19 nt, Artificial Sequence
  Description of Artificial Sequence: Synthetic oligonucleotide
gauaguacacacacacaca

SEQ ID NO: 594613 - RNA, 19 nt, Artificial Sequence
  Description of Artificial Sequence: Synthetic oligonucleotide
uaguacacacacacacaca

SEQ ID NO: 594614 - RNA, 19 nt, Artificial Sequence
  Description of Artificial Sequence: Synthetic oligonucleotide
augcuacccagauagcacu

SEQ ID NO: 594615 - RNA, 19 nt, Artificial Sequence
  Description of Artificial Sequence: Synthetic oligonucleotide
uuuaagcauguuccugaaa

SEQ ID NO: 594616 - RNA, 19 nt, Artificial Sequence
  Description of Artificial Sequence: Synthetic oligonucleotide
aauguccaaucugggaacu

SEQ ID NO: 594617 - RNA, 19 nt, Artificial Sequence
  Description of Artificial Sequence: Synthetic oligonucleotide
aguauacuuucagaaguga

SEQ ID NO: 594618 - RNA, 19 nt, Artificial Sequence
  Description of Artificial Sequence: Synthetic oligonucleotide
cugcgcacaccauuguuag

SEQ ID NO: 594619 - RNA, 19 nt, Artificial Sequence
  Description of Artificial Sequence: Synthetic oligonucleotide
uguagucagcauuccugug

SEQ ID NO: 594620 - RNA, 19 nt, Artificial Sequence
  Description of Artificial Sequence: Synthetic oligonucleotide
uuguaucauugaucucagg

SEQ ID NO: 594621 - RNA, 19 nt, Artificial Sequence
  Description of Artificial Sequence: Synthetic oligonucleotide
accgugaccauuccuucug

SEQ ID NO: 594622 - RNA, 19 nt, Artificial Sequence
  Description of Artificial Sequence: Synthetic oligonucleotide
guacacgcaaagcuuugug

SEQ ID NO: 594623 - RNA, 19 nt, Artificial Sequence
  Description of Artificial Sequence: Synthetic oligonucleotide
ucuaaggggcauguacuca

SEQ ID NO: 594624 - RNA, 19 nt, Artificial Sequence
  Description of Artificial Sequence: Synthetic oligonucleotide
uaccuagugugcuuauuaa

SEQ ID NO: 594625 - RNA, 19 nt, Artificial Sequence
  Description of Artificial Sequence: Synthetic oligonucleotide
uugauccauauuccagagu

SEQ ID NO: 594626 - RNA, 19 nt, Artificial Sequence
  Description of Artificial Sequence: Synthetic oligonucleotide
acgcaaagcuuugugaaca

SEQ ID NO: 594627 - RNA, 19 nt, Artificial Sequence
  Description of Artificial Sequence: Synthetic oligonucleotide
cuuguuacugggugcauaa

SEQ ID NO: 594628 - RNA, 19 nt, Artificial Sequence
  Description of Artificial Sequence: Synthetic oligonucleotide
cuguccaaugagagagacg

SEQ ID NO: 594629 - RNA, 19 nt, Artificial Sequence
  Description of Artificial Sequence: Synthetic oligonucleotide
gaacauacgcucacuaaaa

SEQ ID NO: 594630 - RNA, 19 nt, Artificial Sequence
  Description of Artificial Sequence: Synthetic oligonucleotide
aacccauaugguacuuguc

SEQ ID NO: 594631 - RNA, 19 nt, Artificial Sequence
  Description of Artificial Sequence: Synthetic oligonucleotide
gacgaacacugcuauaaua

SEQ ID NO: 594632 - RNA, 19 nt, Artificial Sequence
  Description of Artificial Sequence: Synthetic oligonucleotide
acacacacacacacacacc

SEQ ID NO: 594633 - RNA, 19 nt, Artificial Sequence
  Description of Artificial Sequence: Synthetic oligonucleotide
ucguguagucagcauuccu

SEQ ID NO: 594634 - RNA, 19 nt, Artificial Sequence
  Description of Artificial Sequence: Synthetic oligonucleotide
uuacucaaaugaucagaua

SEQ ID NO: 594635 - RNA, 19 nt, Artificial Sequence
  Description of Artificial Sequence: Synthetic oligonucleotide
cauaugguacuugucccug

SEQ ID NO: 594636 - RNA, 19 nt, Artificial Sequence
  Description of Artificial Sequence: Synthetic oligonucleotide
uacgugagacaucccagua

SEQ ID NO: 594637 - RNA, 19 nt, Artificial Sequence
  Description of Artificial Sequence: Synthetic oligonucleotide
cacgcaaagcuuugugaac

SEQ ID NO: 594638 - RNA, 19 nt, Artificial Sequence
  Description of Artificial Sequence: Synthetic oligonucleotide
gguaaaaggcaaucaaucu

SEQ ID NO: 594639 - RNA, 19 nt, Artificial Sequence
  Description of Artificial Sequence: Synthetic oligonucleotide
auacucagacgaagaggcc

SEQ ID NO: 594640 - RNA, 19 nt, Artificial Sequence
  Description of Artificial Sequence: Synthetic oligonucleotide
ccuuccaaauuaugaaaag

SEQ ID NO: 594641 - RNA, 19 nt, Artificial Sequence
  Description of Artificial Sequence: Synthetic oligonucleotide
ugagacagcguugauccuu

SEQ ID NO: 594642 - RNA, 19 nt, Artificial Sequence
  Description of Artificial Sequence: Synthetic oligonucleotide
aucaaacccauugauccau

SEQ ID NO: 594643 - RNA, 19 nt, Artificial Sequence
  Description of Artificial Sequence: Synthetic oligonucleotide
ucgagcugagaagaucucu

SEQ ID NO: 594644 - RNA, 19 nt, Artificial Sequence
  Description of Artificial Sequence: Synthetic oligonucleotide
cccaugucgauacucagac

SEQ ID NO: 594645 - RNA, 19 nt, Artificial Sequence
  Description of Artificial Sequence: Synthetic oligonucleotide
uuacugggugcauaauauu

SEQ ID NO: 594646 - RNA, 19 nt, Artificial Sequence
  Description of Artificial Sequence: Synthetic oligonucleotide
uguacacgcaaagcuuugu

SEQ ID NO: 594647 - RNA, 19 nt, Artificial Sequence
  Description of Artificial Sequence: Synthetic oligonucleotide
agccggaagauaccaauuu

SEQ ID NO: 594648 - RNA, 19 nt, Artificial Sequence
  Description of Artificial Sequence: Synthetic oligonucleotide
guagucagcauuccugugu

SEQ ID NO: 594649 - RNA, 19 nt, Artificial Sequence
  Description of Artificial Sequence: Synthetic oligonucleotide
ggaagauaccaagggaagc

SEQ ID NO: 594650 - RNA, 19 nt, Artificial Sequence
  Description of Artificial Sequence: Synthetic oligonucleotide
ggacucgcaggauuggagc

SEQ ID NO: 594651 - RNA, 19 nt, Artificial Sequence
  Description of Artificial Sequence: Synthetic oligonucleotide
gaaaugcuacccagauagc

SEQ ID NO: 594652 - RNA, 19 nt, Artificial Sequence
  Description of Artificial Sequence: Synthetic oligonucleotide
caucgagcugagaagaucu

SEQ ID NO: 594653 - RNA, 19 nt, Artificial Sequence
  Description of Artificial Sequence: Synthetic oligonucleotide
cacacacacacaccaguuc

SEQ ID NO: 594654 - RNA, 19 nt, Artificial Sequence
  Description of Artificial Sequence: Synthetic oligonucleotide
acgugagacaucccaguau

SEQ ID NO: 594655 - RNA, 19 nt, Artificial Sequence
  Description of Artificial Sequence: Synthetic oligonucleotide
guauacuuucagaagugaa

SEQ ID NO: 594656 - RNA, 19 nt, Artificial Sequence
  Description of Artificial Sequence: Synthetic oligonucleotide
aacuaccuagugugcuuau

SEQ ID NO: 594657 - RNA, 19 nt, Artificial Sequence
  Description of Artificial Sequence: Synthetic oligonucleotide
gagguacaguccauaaaga

SEQ ID NO: 594658 - RNA, 19 nt, Artificial Sequence
  Description of Artificial Sequence: Synthetic oligonucleotide
cuaccuagugugcuuauua

SEQ ID NO: 594659 - RNA, 19 nt, Artificial Sequence
  Description of Artificial Sequence: Synthetic oligonucleotide
ugacaccuguacuucuauc

SEQ ID NO: 594660 - RNA, 19 nt, Artificial Sequence
  Description of Artificial Sequence: Synthetic oligonucleotide
agaauggaggcuagcacaa

SEQ ID NO: 594661 - RNA, 19 nt, Artificial Sequence
  Description of Artificial Sequence: Synthetic oligonucleotide
guacuucuauccagaacug

SEQ ID NO: 594662 - RNA, 19 nt, Artificial Sequence
  Description of Artificial Sequence: Synthetic oligonucleotide
guggguucgaacauagaaa

SEQ ID NO: 594663 - RNA, 19 nt, Artificial Sequence
  Description of Artificial Sequence: Synthetic oligonucleotide
gucgauacucagacgaaga

SEQ ID NO: 594664 - RNA, 19 nt, Artificial Sequence
  Description of Artificial Sequence: Synthetic oligonucleotide
ucaaacccauugauccaua

SEQ ID NO: 594665 - RNA, 19 nt, Artificial Sequence
  Description of Artificial Sequence: Synthetic oligonucleotide
agacgaacacugcuauaau

SEQ ID NO: 594666 - RNA, 19 nt, Artificial Sequence
  Description of Artificial Sequence: Synthetic oligonucleotide
agagagacgaacacugcua

SEQ ID NO: 594667 - RNA, 19 nt, Artificial Sequence
  Description of Artificial Sequence: Synthetic oligonucleotide
guuacugggugcauaauau

SEQ ID NO: 594668 - RNA, 19 nt, Artificial Sequence
  Description of Artificial Sequence: Synthetic oligonucleotide
guccuuguacacgcaaagc

SEQ ID NO: 594669 - RNA, 19 nt, Artificial Sequence
  Description of Artificial Sequence: Synthetic oligonucleotide
gugguuguaccaugagaga

SEQ ID NO: 594670 - RNA, 19 nt, Artificial Sequence
  Description of Artificial Sequence: Synthetic oligonucleotide
uuguggguucgaacauaga

SEQ ID NO: 594671 - RNA, 19 nt, Artificial Sequence
  Description of Artificial Sequence: Synthetic oligonucleotide
gagguguuacgugagacau

SEQ ID NO: 594672 - RNA, 19 nt, Artificial Sequence
  Description of Artificial Sequence: Synthetic oligonucleotide
caucucgaauacagcccag

SEQ ID NO: 594673 - RNA, 19 nt, Artificial Sequence
  Description of Artificial Sequence: Synthetic oligonucleotide
gcucacuaaaacucauuga

SEQ ID NO: 594674 - RNA, 19 nt, Artificial Sequence
  Description of Artificial Sequence: Synthetic oligonucleotide
cagaacugccaugcagagg

SEQ ID NO: 594675 - RNA, 19 nt, Artificial Sequence
  Description of Artificial Sequence: Synthetic oligonucleotide
aucucgaauacagcccaga

SEQ ID NO: 594676 - RNA, 19 nt, Artificial Sequence
  Description of Artificial Sequence: Synthetic oligonucleotide
cuuuggauauaagucugaa

SEQ ID NO: 594677 - RNA, 19 nt, Artificial Sequence
  Description of Artificial Sequence: Synthetic oligonucleotide
cuuguacacgcaaagcuuu

SEQ ID NO: 594678 - RNA, 19 nt, Artificial Sequence
  Description of Artificial Sequence: Synthetic oligonucleotide
acauauggcuugguccugu

SEQ ID NO: 594679 - RNA, 19 nt, Artificial Sequence
  Description of Artificial Sequence: Synthetic oligonucleotide
cacgagaaggauaugcgau

SEQ ID NO: 594680 - RNA, 19 nt, Artificial Sequence
  Description of Artificial Sequence: Synthetic oligonucleotide
cuugugacuggaaugccau

SEQ ID NO: 594681 - RNA, 19 nt, Artificial Sequence
  Description of Artificial Sequence: Synthetic oligonucleotide
ugcuacccagauagcacuu

SEQ ID NO: 594682 - RNA, 19 nt, Artificial Sequence
  Description of Artificial Sequence: Synthetic oligonucleotide
acacacacacacacaccag

SEQ ID NO: 594683 - RNA, 19 nt, Artificial Sequence
  Description of Artificial Sequence: Synthetic oligonucleotide
cucguguagucagcauucc

SEQ ID NO: 594684 - RNA, 19 nt, Artificial Sequence
  Description of Artificial Sequence: Synthetic oligonucleotide
acugcgcacaccauuguua

SEQ ID NO: 594685 - RNA, 19 nt, Artificial Sequence
  Description of Artificial Sequence: Synthetic oligonucleotide
ucucucguguagucagcau

SEQ ID NO: 594686 - RNA, 19 nt, Artificial Sequence
  Description of Artificial Sequence: Synthetic oligonucleotide
acgcagagggaaaugucca

SEQ ID NO: 594687 - RNA, 19 nt, Artificial Sequence
  Description of Artificial Sequence: Synthetic oligonucleotide
ggauuggagcuguauggga

SEQ ID NO: 594688 - RNA, 19 nt, Artificial Sequence
  Description of Artificial Sequence: Synthetic oligonucleotide
aacccacgcagagggaaau

SEQ ID NO: 594689 - RNA, 19 nt, Artificial Sequence
  Description of Artificial Sequence: Synthetic oligonucleotide
gguuguaccaugagagaga

SEQ ID NO: 594690 - RNA, 19 nt, Artificial Sequence
  Description of Artificial Sequence: Synthetic oligonucleotide
agguguuacgugagacauc

SEQ ID NO: 594691 - RNA, 19 nt, Artificial Sequence
  Description of Artificial Sequence: Synthetic oligonucleotide
gggaaaugcauuacuuaga

SEQ ID NO: 594692 - RNA, 19 nt, Artificial Sequence
  Description of Artificial Sequence: Synthetic oligonucleotide
guauuauuuuagccacugu

SEQ ID NO: 594693 - RNA, 19 nt, Artificial Sequence
  Description of Artificial Sequence: Synthetic oligonucleotide
gcaaggguauguaugagua

SEQ ID NO: 594694 - RNA, 19 nt, Artificial Sequence
  Description of Artificial Sequence: Synthetic oligonucleotide
ggcuagcacaacaucagga

SEQ ID NO: 594695 - RNA, 19 nt, Artificial Sequence
  Description of Artificial Sequence: Synthetic oligonucleotide
caccauuguuagagucagc

SEQ ID NO: 594696 - RNA, 19 nt, Artificial Sequence
  Description of Artificial Sequence: Synthetic oligonucleotide
cacacacacacacaccagu

SEQ ID NO: 594697 - RNA, 19 nt, Artificial Sequence
  Description of Artificial Sequence: Synthetic oligonucleotide
guacacacacacacacaca

SEQ ID NO: 594698 - RNA, 19 nt, Artificial Sequence
  Description of Artificial Sequence: Synthetic oligonucleotide
ccccugauagauagugggc

SEQ ID NO: 594699 - RNA, 19 nt, Artificial Sequence
  Description of Artificial Sequence: Synthetic oligonucleotide
acacacacacacacacaca

SEQ ID NO: 594700 - RNA, 19 nt, Artificial Sequence
  Description of Artificial Sequence: Synthetic oligonucleotide
acacacacacacaccaguu

SEQ ID NO: 594701 - RNA, 19 nt, Artificial Sequence
  Description of Artificial Sequence: Synthetic oligonucleotide
aggguauguaugaguauua

SEQ ID NO: 594702 - RNA, 19 nt, Artificial Sequence
  Description of Artificial Sequence: Synthetic oligonucleotide
cagacaucacuaucccaaa

SEQ ID NO: 594703 - RNA, 19 nt, Artificial Sequence
  Description of Artificial Sequence: Synthetic oligonucleotide
cucggauuguaucauugau

SEQ ID NO: 594704 - RNA, 19 nt, Artificial Sequence
  Description of Artificial Sequence: Synthetic oligonucleotide
cuuuugcaaggguauguau

SEQ ID NO: 594705 - RNA, 19 nt, Artificial Sequence
  Description of Artificial Sequence: Synthetic oligonucleotide
caucacuaucccaaaguuu

SEQ ID NO: 594706 - RNA, 19 nt, Artificial Sequence
  Description of Artificial Sequence: Synthetic oligonucleotide
cuggagccggaagauacca

SEQ ID NO: 594707 - RNA, 19 nt, Artificial Sequence
  Description of Artificial Sequence: Synthetic oligonucleotide
gcucggauuguaucauuga

SEQ ID NO: 594708 - RNA, 19 nt, Artificial Sequence
  Description of Artificial Sequence: Synthetic oligonucleotide
ccaugucgauacucagacg

SEQ ID NO: 594709 - RNA, 19 nt, Artificial Sequence
  Description of Artificial Sequence: Synthetic oligonucleotide
ggauuguaucauugaucuc

SEQ ID NO: 594710 - RNA, 19 nt, Artificial Sequence
  Description of Artificial Sequence: Synthetic oligonucleotide
gaguauuauuuuagccacu

SEQ ID NO: 594711 - RNA, 19 nt, Artificial Sequence
  Description of Artificial Sequence: Synthetic oligonucleotide
gguauguaugaguauuauu

SEQ ID NO: 594712 - RNA, 19 nt, Artificial Sequence
  Description of Artificial Sequence: Synthetic oligonucleotide
ccgcagacgaggaggagug

SEQ ID NO: 594713 - RNA, 19 nt, Artificial Sequence
  Description of Artificial Sequence: Synthetic oligonucleotide
agacagcguugauccuuug

SEQ ID NO: 594714 - RNA, 19 nt, Artificial Sequence
  Description of Artificial Sequence: Synthetic oligonucleotide
acuaccuagugugcuuauu

SEQ ID NO: 594715 - RNA, 19 nt, Artificial Sequence
  Description of Artificial Sequence: Synthetic oligonucleotide
cucagacgaagaggccagc

SEQ ID NO: 594716 - RNA, 19 nt, Artificial Sequence
  Description of Artificial Sequence: Synthetic oligonucleotide
ccacgcaauuaaaacacaa

SEQ ID NO: 594717 - RNA, 19 nt, Artificial Sequence
  Description of Artificial Sequence: Synthetic oligonucleotide
cccugauagauagugggca

SEQ ID NO: 594718 - RNA, 19 nt, Artificial Sequence
  Description of Artificial Sequence: Synthetic oligonucleotide
cucucguguagucagcauu

SEQ ID NO: 594719 - RNA, 19 nt, Artificial Sequence
  Description of Artificial Sequence: Synthetic oligonucleotide
ggagccggaagauaccaau

SEQ ID NO: 594720 - RNA, 19 nt, Artificial Sequence
  Description of Artificial Sequence: Synthetic oligonucleotide
cuuugaacauacgcucacu

SEQ ID NO: 594721 - RNA, 19 nt, Artificial Sequence
  Description of Artificial Sequence: Synthetic oligonucleotide
agcaucgagcugagaagau

SEQ ID NO: 594722 - RNA, 19 nt, Artificial Sequence
  Description of Artificial Sequence: Synthetic oligonucleotide
gcaucgagcugagaagauc

SEQ ID NO: 594723 - RNA, 19 nt, Artificial Sequence
  Description of Artificial Sequence: Synthetic oligonucleotide
gagaccacugagacagcgu

SEQ ID NO: 594724 - RNA, 19 nt, Artificial Sequence
  Description of Artificial Sequence: Synthetic oligonucleotide
acccacgcagagggaaaug

SEQ ID NO: 594725 - RNA, 19 nt, Artificial Sequence
  Description of Artificial Sequence: Synthetic oligonucleotide
caaacccauugauccauau

SEQ ID NO: 594726 - RNA, 19 nt, Artificial Sequence
  Description of Artificial Sequence: Synthetic oligonucleotide
ggguuacugauaacuaccu

SEQ ID NO: 594727 - RNA, 19 nt, Artificial Sequence
  Description of Artificial Sequence: Synthetic oligonucleotide
ggauaggaguaaacaucuc

SEQ ID NO: 594728 - RNA, 19 nt, Artificial Sequence
  Description of Artificial Sequence: Synthetic oligonucleotide
acguucccaugucgauacu

SEQ ID NO: 594729 - RNA, 19 nt, Artificial Sequence
  Description of Artificial Sequence: Synthetic oligonucleotide
caguauccacaugugcuua

SEQ ID NO: 594730 - RNA, 19 nt, Artificial Sequence
  Description of Artificial Sequence: Synthetic oligonucleotide
cgugagacaucccaguaua

SEQ ID NO: 594731 - RNA, 19 nt, Artificial Sequence
  Description of Artificial Sequence: Synthetic oligonucleotide
cagaagcucuuugaacaua

SEQ ID NO: 594732 - RNA, 19 nt, Artificial Sequence
  Description of Artificial Sequence: Synthetic oligonucleotide
ggguucgaacauagaaaga

SEQ ID NO: 594733 - RNA, 19 nt, Artificial Sequence
  Description of Artificial Sequence: Synthetic oligonucleotide
acgcucacuaaaacucauu

SEQ ID NO: 594734 - RNA, 19 nt, Artificial Sequence
  Description of Artificial Sequence: Synthetic oligonucleotide
guguuacgugagacauccc

SEQ ID NO: 594735 - RNA, 19 nt, Artificial Sequence
  Description of Artificial Sequence: Synthetic oligonucleotide
agcagccguaacagccaug

SEQ ID NO: 594736 - RNA, 19 nt, Artificial Sequence
  Description of Artificial Sequence: Synthetic oligonucleotide
ccuuguacacgcaaagcuu

SEQ ID NO: 594737 - RNA, 19 nt, Artificial Sequence
  Description of Artificial Sequence: Synthetic oligonucleotide
caccgugaccauuccuucu

SEQ ID NO: 594738 - RNA, 19 nt, Artificial Sequence
  Description of Artificial Sequence: Synthetic oligonucleotide
gaacuguaacaaggcuagu

SEQ ID NO: 594739 - RNA, 19 nt, Artificial Sequence
  Description of Artificial Sequence: Synthetic oligonucleotide
gagccggaagauaccaauu

SEQ ID NO: 594740 - RNA, 19 nt, Artificial Sequence
  Description of Artificial Sequence: Synthetic oligonucleotide
ggguauguaugaguauuau

SEQ ID NO: 594741 - RNA, 19 nt, Artificial Sequence
  Description of Artificial Sequence: Synthetic oligonucleotide
ucgcaggauuggagcugua

SEQ ID NO: 594742 - RNA, 19 nt, Artificial Sequence
  Description of Artificial Sequence: Synthetic oligonucleotide
cagugagcucggauuguau

SEQ ID NO: 594743 - RNA, 19 nt, Artificial Sequence
  Description of Artificial Sequence: Synthetic oligonucleotide
cccacgcagagggaaaugu

SEQ ID NO: 594744 - RNA, 19 nt, Artificial Sequence
  Description of Artificial Sequence: Synthetic oligonucleotide
ccguaacagccauguaguu

SEQ ID NO: 594745 - RNA, 19 nt, Artificial Sequence
  Description of Artificial Sequence: Synthetic oligonucleotide
aaugcuacaaucuugggga

SEQ ID NO: 594746 - RNA, 19 nt, Artificial Sequence
  Description of Artificial Sequence: Synthetic oligonucleotide
gaaacgaucauauugaaaa

SEQ ID NO: 594747 - RNA, 19 nt, Artificial Sequence
  Description of Artificial Sequence: Synthetic oligonucleotide
aauuccgacuacuauuugg

SEQ ID NO: 594748 - RNA, 19 nt, Artificial Sequence
  Description of Artificial Sequence: Synthetic oligonucleotide
ucauuggcuacaaagcagg

SEQ ID NO: 594749 - RNA, 19 nt, Artificial Sequence
  Description of Artificial Sequence: Synthetic oligonucleotide
guaauugauggcuuggacg

SEQ ID NO: 594750 - RNA, 19 nt, Artificial Sequence
  Description of Artificial Sequence: Synthetic oligonucleotide
ucaaccagcaaacuugugc

SEQ ID NO: 594751 - RNA, 19 nt, Artificial Sequence
  Description of Artificial Sequence: Synthetic oligonucleotide
uuggauaugguaauggccu

SEQ ID NO: 594752 - RNA, 19 nt, Artificial Sequence
  Description of Artificial Sequence: Synthetic oligonucleotide
uacuauuuggauaugguaa

SEQ ID NO: 594753 - RNA, 19 nt, Artificial Sequence
  Description of Artificial Sequence: Synthetic oligonucleotide
auaagcuugacauugcgcu

SEQ ID NO: 594754 - RNA, 19 nt, Artificial Sequence
  Description of Artificial Sequence: Synthetic oligonucleotide
ucgagaaagaagcucauca

SEQ ID NO: 594755 - RNA, 19 nt, Artificial Sequence
  Description of Artificial Sequence: Synthetic oligonucleotide
aauauuccuaguuccacca

SEQ ID NO: 594756 - RNA, 19 nt, Artificial Sequence
  Description of Artificial Sequence: Synthetic oligonucleotide
aaagaaacgaucauauuga

SEQ ID NO: 594757 - RNA, 19 nt, Artificial Sequence
  Description of Artificial Sequence: Synthetic oligonucleotide
acugacgucacagucaggc

SEQ ID NO: 594758 - RNA, 19 nt, Artificial Sequence
  Description of Artificial Sequence: Synthetic oligonucleotide
uaauugauggcuuggacgu

SEQ ID NO: 594759 - RNA, 19 nt, Artificial Sequence
  Description of Artificial Sequence: Synthetic oligonucleotide
uucgucaggagccugcugg

SEQ ID NO: 594760 - RNA, 19 nt, Artificial Sequence
  Description of Artificial Sequence: Synthetic oligonucleotide
acauauaaagacaauuccg

SEQ ID NO: 594761 - RNA, 19 nt, Artificial Sequence
  Description of Artificial Sequence: Synthetic oligonucleotide
aucauagaggcaugguucc

SEQ ID NO: 594762 - RNA, 19 nt, Artificial Sequence
  Description of Artificial Sequence: Synthetic oligonucleotide
uagauuaauauuuaauaua

SEQ ID NO: 594763 - RNA, 19 nt, Artificial Sequence
  Description of Artificial Sequence: Synthetic oligonucleotide
uauuuggauaugguaaugg

SEQ ID NO: 594764 - RNA, 19 nt, Artificial Sequence
  Description of Artificial Sequence: Synthetic oligonucleotide
aaacucgguaaguaugguc

SEQ ID NO: 594765 - RNA, 19 nt, Artificial Sequence
  Description of Artificial Sequence: Synthetic oligonucleotide
ugcgucuuugccauggagg

SEQ ID NO: 594766 - RNA, 19 nt, Artificial Sequence
  Description of Artificial Sequence: Synthetic oligonucleotide
uucucgagaaagaagcuca

SEQ ID NO: 594767 - RNA, 19 nt, Artificial Sequence
  Description of Artificial Sequence: Synthetic oligonucleotide
aaacgugauugcuccaaac

SEQ ID NO: 594768 - RNA, 19 nt, Artificial Sequence
  Description of Artificial Sequence: Synthetic oligonucleotide
auggcgucgaaccacaguc

SEQ ID NO: 594769 - RNA, 19 nt, Artificial Sequence
  Description of Artificial Sequence: Synthetic oligonucleotide
ucauaagcuugacauugcg

SEQ ID NO: 594770 - RNA, 19 nt, Artificial Sequence
  Description of Artificial Sequence: Synthetic oligonucleotide
aacgugauugcuccaaacu

SEQ ID NO: 594771 - RNA, 19 nt, Artificial Sequence
  Description of Artificial Sequence: Synthetic oligonucleotide
uaacugacgucacagucag

SEQ ID NO: 594772 - RNA, 19 nt, Artificial Sequence
  Description of Artificial Sequence: Synthetic oligonucleotide
gaugauauggcuggggcag

SEQ ID NO: 594773 - RNA, 19 nt, Artificial Sequence
  Description of Artificial Sequence: Synthetic oligonucleotide
aaugccuuaccaagcgucc

SEQ ID NO: 594774 - RNA, 19 nt, Artificial Sequence
  Description of Artificial Sequence: Synthetic oligonucleotide
aagaauggcgucgaaccac

SEQ ID NO: 594775 - RNA, 19 nt, Artificial Sequence
  Description of Artificial Sequence: Synthetic oligonucleotide
acgaauguggcuucaguuc

SEQ ID NO: 594776 - RNA, 19 nt, Artificial Sequence
  Description of Artificial Sequence: Synthetic oligonucleotide
ugccucauaagcuugacau

SEQ ID NO: 594777 - RNA, 19 nt, Artificial Sequence
  Description of Artificial Sequence: Synthetic oligonucleotide
acuguugcgaaucccuugg

SEQ ID NO: 594778 - RNA, 19 nt, Artificial Sequence
  Description of Artificial Sequence: Synthetic oligonucleotide
aacucgguaaguaugguca

SEQ ID NO: 594779 - RNA, 19 nt, Artificial Sequence
  Description of Artificial Sequence: Synthetic oligonucleotide
ucuuucacucaucacuuca

SEQ ID NO: 594780 - RNA, 19 nt, Artificial Sequence
  Description of Artificial Sequence: Synthetic oligonucleotide
aauguacccuccaacacag

SEQ ID NO: 594781 - RNA, 19 nt, Artificial Sequence
  Description of Artificial Sequence: Synthetic oligonucleotide
ggagucauuggcuacaaag

SEQ ID NO: 594782 - RNA, 19 nt, Artificial Sequence
  Description of Artificial Sequence: Synthetic oligonucleotide
agcagcauaggaucguacg

SEQ ID NO: 594783 - RNA, 19 nt, Artificial Sequence
  Description of Artificial Sequence: Synthetic oligonucleotide
gaugagggagucuguauag

SEQ ID NO: 594784 - RNA, 19 nt, Artificial Sequence
  Description of Artificial Sequence: Synthetic oligonucleotide
acgugauugcuccaaacuc

SEQ ID NO: 594785 - RNA, 19 nt, Artificial Sequence
  Description of Artificial Sequence: Synthetic oligonucleotide
uggacguagauguugugcc

SEQ ID NO: 594786 - RNA, 19 nt, Artificial Sequence
  Description of Artificial Sequence: Synthetic oligonucleotide
agaaguugcauuccgcuga

SEQ ID NO: 594787 - RNA, 19 nt, Artificial Sequence
  Description of Artificial Sequence: Synthetic oligonucleotide
uugggugaauaacugacgu

SEQ ID NO: 594788 - RNA, 19 nt, Artificial Sequence
  Description of Artificial Sequence: Synthetic oligonucleotide
uggacuaggguucgagggg

SEQ ID NO: 594789 - RNA, 19 nt, Artificial Sequence
  Description of Artificial Sequence: Synthetic oligonucleotide
guggacuaggguucgaggg

SEQ ID NO: 594790 - RNA, 19 nt, Artificial Sequence
  Description of Artificial Sequence: Synthetic oligonucleotide
ugaacaguuucaaaugcua

SEQ ID NO: 594791 - RNA, 19 nt, Artificial Sequence
  Description of Artificial Sequence: Synthetic oligonucleotide
uggcggaagauauauuuug

SEQ ID NO: 594792 - RNA, 19 nt, Artificial Sequence
  Description of Artificial Sequence: Synthetic oligonucleotide
uccagaaauauuccuaguu

SEQ ID NO: 594793 - RNA, 19 nt, Artificial Sequence
  Description of Artificial Sequence: Synthetic oligonucleotide
uuucgcaugauauccugga

SEQ ID NO: 594794 - RNA, 19 nt, Artificial Sequence
  Description of Artificial Sequence: Synthetic oligonucleotide
agggguuucucugaucugc

SEQ ID NO: 594795 - RNA, 19 nt, Artificial Sequence
  Description of Artificial Sequence: Synthetic oligonucleotide
uguggcggaagauauauuu

SEQ ID NO: 594796 - RNA, 19 nt, Artificial Sequence
  Description of Artificial Sequence: Synthetic oligonucleotide
aaagacaauuccgacuacu

SEQ ID NO: 594797 - RNA, 19 nt, Artificial Sequence
  Description of Artificial Sequence: Synthetic oligonucleotide
cauaagcuugacauugcgc

SEQ ID NO: 594798 - RNA, 19 nt, Artificial Sequence
  Description of Artificial Sequence: Synthetic oligonucleotide
acuauuuggauaugguaau

SEQ ID NO: 594799 - RNA, 19 nt, Artificial Sequence
  Description of Artificial Sequence: Synthetic oligonucleotide
acuauagauuaauauuuaa

SEQ ID NO: 594800 - RNA, 19 nt, Artificial Sequence
  Description of Artificial Sequence: Synthetic oligonucleotide
auauauuuuggcacucgac

SEQ ID NO: 594801 - RNA, 19 nt, Artificial Sequence
  Description of Artificial Sequence: Synthetic oligonucleotide
aguugcauuccgcugacga

SEQ ID NO: 594802 - RNA, 19 nt, Artificial Sequence
  Description of Artificial Sequence: Synthetic oligonucleotide
aagggcacgccccucagca

SEQ ID NO: 594803 - RNA, 19 nt, Artificial Sequence
  Description of Artificial Sequence: Synthetic oligonucleotide
gauaugguaauggccuggg

SEQ ID NO: 594804 - RNA, 19 nt, Artificial Sequence
  Description of Artificial Sequence: Synthetic oligonucleotide
uacuauagauuaauauuua

SEQ ID NO: 594805 - RNA, 19 nt, Artificial Sequence
  Description of Artificial Sequence: Synthetic oligonucleotide
auggggaagauuugugcuc

SEQ ID NO: 594806 - RNA, 19 nt, Artificial Sequence
  Description of Artificial Sequence: Synthetic oligonucleotide
uaagaauggcgucgaacca

SEQ ID NO: 594807 - RNA, 19 nt, Artificial Sequence
  Description of Artificial Sequence: Synthetic oligonucleotide
uccacaaacgugauugcuc

SEQ ID NO: 594808 - RNA, 19 nt, Artificial Sequence
  Description of Artificial Sequence: Synthetic oligonucleotide
gauaagaauggcgucgaac

SEQ ID NO: 594809 - RNA, 19 nt, Artificial Sequence
  Description of Artificial Sequence: Synthetic oligonucleotide
uaccaagcgucccagaaau

SEQ ID NO: 594810 - RNA, 19 nt, Artificial Sequence
  Description of Artificial Sequence: Synthetic oligonucleotide
ugauuuuacuauagauuaa

SEQ ID NO: 594811 - RNA, 19 nt, Artificial Sequence
  Description of Artificial Sequence: Synthetic oligonucleotide
caccgcauggaccucaucc

SEQ ID NO: 594812 - RNA, 19 nt, Artificial Sequence
  Description of Artificial Sequence: Synthetic oligonucleotide
gucuguauagucaucugcc

SEQ ID NO: 594813 - RNA, 19 nt, Artificial Sequence
  Description of Artificial Sequence: Synthetic oligonucleotide
ugagacacucuuucuggcc

SEQ ID NO: 594814 - RNA, 19 nt, Artificial Sequence
  Description of Artificial Sequence: Synthetic oligonucleotide
aguggacuaggguucgagg

SEQ ID NO: 594815 - RNA, 19 nt, Artificial Sequence
  Description of Artificial Sequence: Synthetic oligonucleotide
ucgacuguugcgaaucccu

SEQ ID NO: 594816 - RNA, 19 nt, Artificial Sequence
  Description of Artificial Sequence: Synthetic oligonucleotide
acgaucauauugaaaagug

SEQ ID NO: 594817 - RNA, 19 nt, Artificial Sequence
  Description of Artificial Sequence: Synthetic oligonucleotide
uuuagcagcaucggcgacc

SEQ ID NO: 594818 - RNA, 19 nt, Artificial Sequence
  Description of Artificial Sequence: Synthetic oligonucleotide
uuggacguagauguugugc

SEQ ID NO: 594819 - RNA, 19 nt, Artificial Sequence
  Description of Artificial Sequence: Synthetic oligonucleotide
ugucaaccagcaaacuugu

SEQ ID NO: 594820 - RNA, 19 nt, Artificial Sequence
  Description of Artificial Sequence: Synthetic oligonucleotide
cuuucgcaugauauccugg

SEQ ID NO: 594821 - RNA, 19 nt, Artificial Sequence
  Description of Artificial Sequence: Synthetic oligonucleotide
caugauauccuggaaguuc

SEQ ID NO: 594822 - RNA, 19 nt, Artificial Sequence
  Description of Artificial Sequence: Synthetic oligonucleotide
uagucauuacugcaccaga

SEQ ID NO: 594823 - RNA, 19 nt, Artificial Sequence
  Description of Artificial Sequence: Synthetic oligonucleotide
cuugcggaagacauugcug

SEQ ID NO: 594824 - RNA, 19 nt, Artificial Sequence
  Description of Artificial Sequence: Synthetic oligonucleotide
cugaaguggacuaggguuc

SEQ ID NO: 594825 - RNA, 19 nt, Artificial Sequence
  Description of Artificial Sequence: Synthetic oligonucleotide
aauggcgucgaaccacagu

SEQ ID NO: 594826 - RNA, 19 nt, Artificial Sequence
  Description of Artificial Sequence: Synthetic oligonucleotide
gaucguacggugucaacca

SEQ ID NO: 594827 - RNA, 19 nt, Artificial Sequence
  Description of Artificial Sequence: Synthetic oligonucleotide
aagcgucccagaaauaaug

SEQ ID NO: 594828 - RNA, 19 nt, Artificial Sequence
  Description of Artificial Sequence: Synthetic oligonucleotide
caagagagauuuuccugcc

SEQ ID NO: 594829 - RNA, 19 nt, Artificial Sequence
  Description of Artificial Sequence: Synthetic oligonucleotide
uuggaucauagaggcaugg

SEQ ID NO: 594830 - RNA, 19 nt, Artificial Sequence
  Description of Artificial Sequence: Synthetic oligonucleotide
acucgagauaagaauggcg

SEQ ID NO: 594831 - RNA, 19 nt, Artificial Sequence
  Description of Artificial Sequence: Synthetic oligonucleotide
agacauugcugccugucug

SEQ ID NO: 594832 - RNA, 19 nt, Artificial Sequence
  Description of Artificial Sequence: Synthetic oligonucleotide
ucaaaaugcaagggccucc

SEQ ID NO: 594833 - RNA, 19 nt, Artificial Sequence
  Description of Artificial Sequence: Synthetic oligonucleotide
gagcggagggcgcuaagcg

SEQ ID NO: 594834 - RNA, 19 nt, Artificial Sequence
  Description of Artificial Sequence: Synthetic oligonucleotide
agggacucgagauaagaau

SEQ ID NO: 594835 - RNA, 19 nt, Artificial Sequence
  Description of Artificial Sequence: Synthetic oligonucleotide
guugggugaauaacugacg

SEQ ID NO: 594836 - RNA, 19 nt, Artificial Sequence
  Description of Artificial Sequence: Synthetic oligonucleotide
agcauaggaucguacggug

SEQ ID NO: 594837 - RNA, 19 nt, Artificial Sequence
  Description of Artificial Sequence: Synthetic oligonucleotide
ugaaguggacuaggguucg

SEQ ID NO: 594838 - RNA, 19 nt, Artificial Sequence
  Description of Artificial Sequence: Synthetic oligonucleotide
aucggcgacccgcacaggg

SEQ ID NO: 594839 - RNA, 19 nt, Artificial Sequence
  Description of Artificial Sequence: Synthetic oligonucleotide
guagucauuacugcaccag

SEQ ID NO: 594840 - RNA, 19 nt, Artificial Sequence
  Description of Artificial Sequence: Synthetic oligonucleotide
cucauaagcuugacauugc

SEQ ID NO: 594841 - RNA, 19 nt, Artificial Sequence
  Description of Artificial Sequence: Synthetic oligonucleotide
ugggcacucgagcggaggg

SEQ ID NO: 594842 - RNA, 19 nt, Artificial Sequence
  Description of Artificial Sequence: Synthetic oligonucleotide
uccgacuacuauuuggaua

SEQ ID NO: 594843 - RNA, 19 nt, Artificial Sequence
  Description of Artificial Sequence: Synthetic oligonucleotide
ugugccaucuggagucugc

SEQ ID NO: 594844 - RNA, 19 nt, Artificial Sequence
  Description of Artificial Sequence: Synthetic oligonucleotide
auuguggcggaagauauau

SEQ ID NO: 594845 - RNA, 19 nt, Artificial Sequence
  Description of Artificial Sequence: Synthetic oligonucleotide
cuagguagucauuacugca

SEQ ID NO: 594846 - RNA, 19 nt, Artificial Sequence
  Description of Artificial Sequence: Synthetic oligonucleotide
uuggcacucgacuguugcg

SEQ ID NO: 594847 - RNA, 19 nt, Artificial Sequence
  Description of Artificial Sequence: Synthetic oligonucleotide
aauguggcuucaguuccag

SEQ ID NO: 594848 - RNA, 19 nt, Artificial Sequence
  Description of Artificial Sequence: Synthetic oligonucleotide
acucgacuguugcgaaucc

SEQ ID NO: 594849 - RNA, 19 nt, Artificial Sequence
  Description of Artificial Sequence: Synthetic oligonucleotide
agcccuacucgcuuccacg

SEQ ID NO: 594850 - RNA, 19 nt, Artificial Sequence
  Description of Artificial Sequence: Synthetic oligonucleotide
cuauagauuaauauuuaau

SEQ ID NO: 594851 - RNA, 19 nt, Artificial Sequence
  Description of Artificial Sequence: Synthetic oligonucleotide
ugccuagguagucauuacu

SEQ ID NO: 594852 - RNA, 19 nt, Artificial Sequence
  Description of Artificial Sequence: Synthetic oligonucleotide
gaaugccuuaccaagcguc

SEQ ID NO: 594853 - RNA, 19 nt, Artificial Sequence
  Description of Artificial Sequence: Synthetic oligonucleotide
gguuacugagcuuugggca

SEQ ID NO: 594854 - RNA, 19 nt, Artificial Sequence
  Description of Artificial Sequence: Synthetic oligonucleotide
uuaccaagcgucccagaaa

SEQ ID NO: 594855 - RNA, 19 nt, Artificial Sequence
  Description of Artificial Sequence: Synthetic oligonucleotide
gacuguugcgaaucccuug

SEQ ID NO: 594856 - RNA, 19 nt, Artificial Sequence
  Description of Artificial Sequence: Synthetic oligonucleotide
auagaggcaugguucccag

SEQ ID NO: 594857 - RNA, 19 nt, Artificial Sequence
  Description of Artificial Sequence: Synthetic oligonucleotide
ucgacgggacggcaguggg

SEQ ID NO: 594858 - RNA, 19 nt, Artificial Sequence
  Description of Artificial Sequence: Synthetic oligonucleotide
ugcauuccgcugacgaaug

SEQ ID NO: 594859 - RNA, 19 nt, Artificial Sequence
  Description of Artificial Sequence: Synthetic oligonucleotide
ucguacggugucaaccagc

SEQ ID NO: 594860 - RNA, 19 nt, Artificial Sequence
  Description of Artificial Sequence: Synthetic oligonucleotide
auuccgacuacuauuugga

SEQ ID NO: 594861 - RNA, 19 nt, Artificial Sequence
  Description of Artificial Sequence: Synthetic oligonucleotide
acuacuauuuggauauggu

SEQ ID NO: 594862 - RNA, 19 nt, Artificial Sequence
  Description of Artificial Sequence: Synthetic oligonucleotide
uggauaugguaauggccug

SEQ ID NO: 594863 - RNA, 19 nt, Artificial Sequence
  Description of Artificial Sequence: Synthetic oligonucleotide
ugggguaauugauggcuug

SEQ ID NO: 594864 - RNA, 19 nt, Artificial Sequence
  Description of Artificial Sequence: Synthetic oligonucleotide
uguugcgaaucccuuggau

SEQ ID NO: 594865 - RNA, 19 nt, Artificial Sequence
  Description of Artificial Sequence: Synthetic oligonucleotide
augccuagguagucauuac

SEQ ID NO: 594866 - RNA, 19 nt, Artificial Sequence
  Description of Artificial Sequence: Synthetic oligonucleotide
ucgagauaagaauggcguc

SEQ ID NO: 594867 - RNA, 19 nt, Artificial Sequence
  Description of Artificial Sequence: Synthetic oligonucleotide
caauguacccuccaacaca

SEQ ID NO: 594868 - RNA, 19 nt, Artificial Sequence
  Description of Artificial Sequence: Synthetic oligonucleotide
aaauaggcuuucucucuuu

SEQ ID NO: 594869 - RNA, 19 nt, Artificial Sequence
  Description of Artificial Sequence: Synthetic oligonucleotide
ucuuagccagggugaacag

SEQ ID NO: 594870 - RNA, 19 nt, Artificial Sequence
  Description of Artificial Sequence: Synthetic oligonucleotide
augcuacaaucuuggggac

SEQ ID NO: 594871 - RNA, 19 nt, Artificial Sequence
  Description of Artificial Sequence: Synthetic oligonucleotide
caguggaugaccgggagac

SEQ ID NO: 594872 - RNA, 19 nt, Artificial Sequence
  Description of Artificial Sequence: Synthetic oligonucleotide
guacccuccaacacagccg

SEQ ID NO: 594873 - RNA, 19 nt, Artificial Sequence
  Description of Artificial Sequence: Synthetic oligonucleotide
uucaaaaugcaagggccuc

SEQ ID NO: 594874 - RNA, 19 nt, Artificial Sequence
  Description of Artificial Sequence: Synthetic oligonucleotide
uaagcgaccaaaugcccuu

SEQ ID NO: 594875 - RNA, 19 nt, Artificial Sequence
  Description of Artificial Sequence: Synthetic oligonucleotide
cucaugccugagaaauagg

SEQ ID NO: 594876 - RNA, 19 nt, Artificial Sequence
  Description of Artificial Sequence: Synthetic oligonucleotide
gggugaauaacugacguca

SEQ ID NO: 594877 - RNA, 19 nt, Artificial Sequence
  Description of Artificial Sequence: Synthetic oligonucleotide
ugcuuucgcaugauauccu

SEQ ID NO: 594878 - RNA, 19 nt, Artificial Sequence
  Description of Artificial Sequence: Synthetic oligonucleotide
ccacaaacgugauugcucc

SEQ ID NO: 594879 - RNA, 19 nt, Artificial Sequence
  Description of Artificial Sequence: Synthetic oligonucleotide
uguugugccuggucaucag

SEQ ID NO: 594880 - RNA, 19 nt, Artificial Sequence
  Description of Artificial Sequence: Synthetic oligonucleotide
gcgcuaagcgaccaaaugc

SEQ ID NO: 594881 - RNA, 19 nt, Artificial Sequence
  Description of Artificial Sequence: Synthetic oligonucleotide
caucccgaucaccaauucc

SEQ ID NO: 594882 - RNA, 19 nt, Artificial Sequence
  Description of Artificial Sequence: Synthetic oligonucleotide
guuacugagcuuugggcaa

SEQ ID NO: 594883 - RNA, 19 nt, Artificial Sequence
  Description of Artificial Sequence: Synthetic oligonucleotide
aagacaauuccgacuacua

SEQ ID NO: 594884 - RNA, 19 nt, Artificial Sequence
  Description of Artificial Sequence: Synthetic oligonucleotide
ccagaaauauuccuaguuc

SEQ ID NO: 594885 - RNA, 19 nt, Artificial Sequence
  Description of Artificial Sequence: Synthetic oligonucleotide
acaauuccgacuacuauuu

SEQ ID NO: 594886 - RNA, 19 nt, Artificial Sequence
  Description of Artificial Sequence: Synthetic oligonucleotide
uggaugaccgggagaccag

SEQ ID NO: 594887 - RNA, 19 nt, Artificial Sequence
  Description of Artificial Sequence: Synthetic oligonucleotide
uugcauuccgcugacgaau

SEQ ID NO: 594888 - RNA, 19 nt, Artificial Sequence
  Description of Artificial Sequence: Synthetic oligonucleotide
ugaccgggagaccagcguc

SEQ ID NO: 594889 - RNA, 19 nt, Artificial Sequence
  Description of Artificial Sequence: Synthetic oligonucleotide
uuccgcugacgaauguggc

SEQ ID NO: 594890 - RNA, 19 nt, Artificial Sequence
  Description of Artificial Sequence: Synthetic oligonucleotide
guagcaguucucugaggug

SEQ ID NO: 594891 - RNA, 19 nt, Artificial Sequence
  Description of Artificial Sequence: Synthetic oligonucleotide
ucgguaaguauggucauuu

SEQ ID NO: 594892 - RNA, 19 nt, Artificial Sequence
  Description of Artificial Sequence: Synthetic oligonucleotide
gaugaccgggagaccagcg

SEQ ID NO: 594893 - RNA, 19 nt, Artificial Sequence
  Description of Artificial Sequence: Synthetic oligonucleotide
cuauuuggauaugguaaug

SEQ ID NO: 594894 - RNA, 19 nt, Artificial Sequence
  Description of Artificial Sequence: Synthetic oligonucleotide
ugggugaauaacugacguc

SEQ ID NO: 594895 - RNA, 19 nt, Artificial Sequence
  Description of Artificial Sequence: Synthetic oligonucleotide
ucagaucuuuguagcaguu

SEQ ID NO: 594896 - RNA, 19 nt, Artificial Sequence
  Description of Artificial Sequence: Synthetic oligonucleotide
gagauaagaauggcgucga

SEQ ID NO: 594897 - RNA, 19 nt, Artificial Sequence
  Description of Artificial Sequence: Synthetic oligonucleotide
uccgcugacgaauguggcu

SEQ ID NO: 594898 - RNA, 19 nt, Artificial Sequence
  Description of Artificial Sequence: Synthetic oligonucleotide
caccucgagccccauacag

SEQ ID NO: 594899 - RNA, 19 nt, Artificial Sequence
  Description of Artificial Sequence: Synthetic oligonucleotide
ggaucguacggugucaacc

SEQ ID NO: 594900 - RNA, 19 nt, Artificial Sequence
  Description of Artificial Sequence: Synthetic oligonucleotide
accucgagccccauacagc

SEQ ID NO: 594901 - RNA, 19 nt, Artificial Sequence
  Description of Artificial Sequence: Synthetic oligonucleotide
gcggaagauauauuuuggc

SEQ ID NO: 594902 - RNA, 19 nt, Artificial Sequence
  Description of Artificial Sequence: Synthetic oligonucleotide
accgcauggaccucaucca

SEQ ID NO: 594903 - RNA, 19 nt, Artificial Sequence
  Description of Artificial Sequence: Synthetic oligonucleotide
uuuuggcacucgacuguug

SEQ ID NO: 594904 - RNA, 19 nt, Artificial Sequence
  Description of Artificial Sequence: Synthetic oligonucleotide
ccucauaagcuugacauug

SEQ ID NO: 594905 - RNA, 19 nt, Artificial Sequence
  Description of Artificial Sequence: Synthetic oligonucleotide
ugacggguguccagccggg

SEQ ID NO: 594906 - RNA, 19 nt, Artificial Sequence
  Description of Artificial Sequence: Synthetic oligonucleotide
ccauugaaugaacaguuuc

SEQ ID NO: 594907 - RNA, 19 nt, Artificial Sequence
  Description of Artificial Sequence: Synthetic oligonucleotide
cuuaccaagcgucccagaa

SEQ ID NO: 594908 - RNA, 19 nt, Artificial Sequence
  Description of Artificial Sequence: Synthetic oligonucleotide
uggcacucgacuguugcga

SEQ ID NO: 594909 - RNA, 19 nt, Artificial Sequence
  Description of Artificial Sequence: Synthetic oligonucleotide
ggcggaagauauauuuugg

SEQ ID NO: 594910 - RNA, 19 nt, Artificial Sequence
  Description of Artificial Sequence: Synthetic oligonucleotide
caaccagcaaacuugugcu

SEQ ID NO: 594911 - RNA, 19 nt, Artificial Sequence
  Description of Artificial Sequence: Synthetic oligonucleotide
aucguacggugucaaccag

SEQ ID NO: 594912 - RNA, 19 nt, Artificial Sequence
  Description of Artificial Sequence: Synthetic oligonucleotide
uccaucccgaucaccaauu

SEQ ID NO: 594913 - RNA, 19 nt, Artificial Sequence
  Description of Artificial Sequence: Synthetic oligonucleotide
ucucgagaaagaagcucau

SEQ ID NO: 594914 - RNA, 19 nt, Artificial Sequence
  Description of Artificial Sequence: Synthetic oligonucleotide
caggacuaugauuuuacua

SEQ ID NO: 594915 - RNA, 19 nt, Artificial Sequence
  Description of Artificial Sequence: Synthetic oligonucleotide
gacgucacagucaggccug

SEQ ID NO: 594916 - RNA, 19 nt, Artificial Sequence
  Description of Artificial Sequence: Synthetic oligonucleotide
cugacgucacagucaggcc

SEQ ID NO: 594917 - RNA, 19 nt, Artificial Sequence
  Description of Artificial Sequence: Synthetic oligonucleotide
ccgacucaugccuagguag

SEQ ID NO: 594918 - RNA, 19 nt, Artificial Sequence
  Description of Artificial Sequence: Synthetic oligonucleotide
gagacacucuuucuggccu

SEQ ID NO: 594919 - RNA, 19 nt, Artificial Sequence
  Description of Artificial Sequence: Synthetic oligonucleotide
uccgguucacaguuuuaaa

SEQ ID NO: 594920 - RNA, 19 nt, Artificial Sequence
  Description of Artificial Sequence: Synthetic oligonucleotide
ccucgagccccauacagcc

SEQ ID NO: 594921 - RNA, 19 nt, Artificial Sequence
  Description of Artificial Sequence: Synthetic oligonucleotide
agaaacgaucauauugaaa

SEQ ID NO: 594922 - RNA, 19 nt, Artificial Sequence
  Description of Artificial Sequence: Synthetic oligonucleotide
gcuacaaucuuggggacug

SEQ ID NO: 594923 - RNA, 19 nt, Artificial Sequence
  Description of Artificial Sequence: Synthetic oligonucleotide
ggauaugguaauggccugg

SEQ ID NO: 594924 - RNA, 19 nt, Artificial Sequence
  Description of Artificial Sequence: Synthetic oligonucleotide
ugccgacucaugccuaggu

SEQ ID NO: 594925 - RNA, 19 nt, Artificial Sequence
  Description of Artificial Sequence: Synthetic oligonucleotide
cgcuaagcgaccaaaugcc

SEQ ID NO: 594926 - RNA, 19 nt, Artificial Sequence
  Description of Artificial Sequence: Synthetic oligonucleotide
aguggaugaccgggagacc

SEQ ID NO: 594927 - RNA, 19 nt, Artificial Sequence
  Description of Artificial Sequence: Synthetic oligonucleotide
cgagauaagaauggcgucg

SEQ ID NO: 594928 - RNA, 19 nt, Artificial Sequence
  Description of Artificial Sequence: Synthetic oligonucleotide
ugcaccagacugacaccug

SEQ ID NO: 594929 - RNA, 19 nt, Artificial Sequence
  Description of Artificial Sequence: Synthetic oligonucleotide
gccccauacagccccaccg

SEQ ID NO: 594930 - RNA, 19 nt, Artificial Sequence
  Description of Artificial Sequence: Synthetic oligonucleotide
cauuccgcugacgaaugug

SEQ ID NO: 594931 - RNA, 19 nt, Artificial Sequence
  Description of Artificial Sequence: Synthetic oligonucleotide
gacgggacggcagugggca

SEQ ID NO: 594932 - RNA, 19 nt, Artificial Sequence
  Description of Artificial Sequence: Synthetic oligonucleotide
gaucuuuguagcaguucuc

SEQ ID NO: 594933 - RNA, 19 nt, Artificial Sequence
  Description of Artificial Sequence: Synthetic oligonucleotide
uggaucauagaggcauggu

SEQ ID NO: 594934 - RNA, 19 nt, Artificial Sequence
  Description of Artificial Sequence: Synthetic oligonucleotide
caccgugggguaauugaug

SEQ ID NO: 594935 - RNA, 19 nt, Artificial Sequence
  Description of Artificial Sequence: Synthetic oligonucleotide
gacgaauguggcuucaguu

SEQ ID NO: 594936 - RNA, 19 nt, Artificial Sequence
  Description of Artificial Sequence: Synthetic oligonucleotide
ccgaaugccuuaccaagcg

SEQ ID NO: 594937 - RNA, 19 nt, Artificial Sequence
  Description of Artificial Sequence: Synthetic oligonucleotide
caguuccagcccuacucgc

SEQ ID NO: 594938 - RNA, 19 nt, Artificial Sequence
  Description of Artificial Sequence: Synthetic oligonucleotide
guggaugaccgggagacca

SEQ ID NO: 594939 - RNA, 19 nt, Artificial Sequence
  Description of Artificial Sequence: Synthetic oligonucleotide
cacucgacuguugcgaauc

SEQ ID NO: 594940 - RNA, 19 nt, Artificial Sequence
  Description of Artificial Sequence: Synthetic oligonucleotide
ucccgaucaccaauuccuc

SEQ ID NO: 594941 - RNA, 19 nt, Artificial Sequence
  Description of Artificial Sequence: Synthetic oligonucleotide
gucauuacugcaccagacu

SEQ ID NO: 594942 - RNA, 19 nt, Artificial Sequence
  Description of Artificial Sequence: Synthetic oligonucleotide
ugcuacaaucuuggggacu

SEQ ID NO: 594943 - RNA, 19 nt, Artificial Sequence
  Description of Artificial Sequence: Synthetic oligonucleotide
uggcgucgaaccacagucu

SEQ ID NO: 594944 - RNA, 19 nt, Artificial Sequence
  Description of Artificial Sequence: Synthetic oligonucleotide
agcaucggcgacccgcaca

SEQ ID NO: 594945 - RNA, 19 nt, Artificial Sequence
  Description of Artificial Sequence: Synthetic oligonucleotide
ggcgcuaagcgaccaaaug

SEQ ID NO: 594946 - RNA, 19 nt, Artificial Sequence
  Description of Artificial Sequence: Synthetic oligonucleotide
agaauggcgucgaaccaca

SEQ ID NO: 594947 - RNA, 19 nt, Artificial Sequence
  Description of Artificial Sequence: Synthetic oligonucleotide
uuccgacuacuauuuggau

SEQ ID NO: 594948 - RNA, 19 nt, Artificial Sequence
  Description of Artificial Sequence: Synthetic oligonucleotide
gcuuucgcaugauauccug

SEQ ID NO: 594949 - RNA, 19 nt, Artificial Sequence
  Description of Artificial Sequence: Synthetic oligonucleotide
gaaucccuuggaucauaga

SEQ ID NO: 594950 - RNA, 19 nt, Artificial Sequence
  Description of Artificial Sequence: Synthetic oligonucleotide
gagggguuucucugaucug

SEQ ID NO: 594951 - RNA, 19 nt, Artificial Sequence
  Description of Artificial Sequence: Synthetic oligonucleotide
acucgguaaguauggucau

SEQ ID NO: 594952 - RNA, 19 nt, Artificial Sequence
  Description of Artificial Sequence: Synthetic oligonucleotide
gggguaauugauggcuugg

SEQ ID NO: 594953 - RNA, 19 nt, Artificial Sequence
  Description of Artificial Sequence: Synthetic oligonucleotide
auaggaucguacgguguca

SEQ ID NO: 594954 - RNA, 19 nt, Artificial Sequence
  Description of Artificial Sequence: Synthetic oligonucleotide
gcaucggcgacccgcacag

SEQ ID NO: 594955 - RNA, 19 nt, Artificial Sequence
  Description of Artificial Sequence: Synthetic oligonucleotide
uguccagccgggagcugug

SEQ ID NO: 594956 - RNA, 19 nt, Artificial Sequence
  Description of Artificial Sequence: Synthetic oligonucleotide
caauuccgacuacuauuug

SEQ ID NO: 594957 - RNA, 19 nt, Artificial Sequence
  Description of Artificial Sequence: Synthetic oligonucleotide
guugcauuccgcugacgaa

SEQ ID NO: 594958 - RNA, 19 nt, Artificial Sequence
  Description of Artificial Sequence: Synthetic oligonucleotide
cugcgcgggcucucgacgg

SEQ ID NO: 594959 - RNA, 19 nt, Artificial Sequence
  Description of Artificial Sequence: Synthetic oligonucleotide
ggagggguuucucugaucu

SEQ ID NO: 594960 - RNA, 19 nt, Artificial Sequence
  Description of Artificial Sequence: Synthetic oligonucleotide
aagcgaccaaaugcccuug

SEQ ID NO: 594961 - RNA, 19 nt, Artificial Sequence
  Description of Artificial Sequence: Synthetic oligonucleotide
ccgcacagggaugauaugg

SEQ ID NO: 594962 - RNA, 19 nt, Artificial Sequence
  Description of Artificial Sequence: Synthetic oligonucleotide
cugcgucuuugccauggag

SEQ ID NO: 594963 - RNA, 19 nt, Artificial Sequence
  Description of Artificial Sequence: Synthetic oligonucleotide
cucgacuguugcgaauccc

SEQ ID NO: 594964 - RNA, 19 nt, Artificial Sequence
  Description of Artificial Sequence: Synthetic oligonucleotide
cagacuggccuugcggaag

SEQ ID NO: 594965 - RNA, 19 nt, Artificial Sequence
  Description of Artificial Sequence: Synthetic oligonucleotide
auucgucaggagccugcug

SEQ ID NO: 594966 - RNA, 19 nt, Artificial Sequence
  Description of Artificial Sequence: Synthetic oligonucleotide
uaggaucguacggugucaa

SEQ ID NO: 594967 - RNA, 19 nt, Artificial Sequence
  Description of Artificial Sequence: Synthetic oligonucleotide
ugccccacacacgcgcggg

SEQ ID NO: 594968 - RNA, 19 nt, Artificial Sequence
  Description of Artificial Sequence: Synthetic oligonucleotide
cucgacgggacggcagugg

SEQ ID NO: 594969 - RNA, 19 nt, Artificial Sequence
  Description of Artificial Sequence: Synthetic oligonucleotide
ggcaccgugggguaauuga

SEQ ID NO: 594970 - RNA, 19 nt, Artificial Sequence
  Description of Artificial Sequence: Synthetic oligonucleotide
aauugauggcuuggacgua

SEQ ID NO: 594971 - RNA, 19 nt, Artificial Sequence
  Description of Artificial Sequence: Synthetic oligonucleotide
uaggguucgaggggcuggc

SEQ ID NO: 594972 - RNA, 19 nt, Artificial Sequence
  Description of Artificial Sequence: Synthetic oligonucleotide
aguuccagcccuacucgcu

SEQ ID NO: 594973 - RNA, 19 nt, Artificial Sequence
  Description of Artificial Sequence: Synthetic oligonucleotide
ggugccgacucaugccuag

SEQ ID NO: 594974 - RNA, 19 nt, Artificial Sequence
  Description of Artificial Sequence: Synthetic oligonucleotide
ggcacucgagcggagggcg

SEQ ID NO: 594975 - RNA, 19 nt, Artificial Sequence
  Description of Artificial Sequence: Synthetic oligonucleotide
cucgagccccauacagccc

SEQ ID NO: 594976 - RNA, 19 nt, Artificial Sequence
  Description of Artificial Sequence: Synthetic oligonucleotide
acccgcacagggaugauau

SEQ ID NO: 594977 - RNA, 19 nt, Artificial Sequence
  Description of Artificial Sequence: Synthetic oligonucleotide
ugggauucgucaggagccu

SEQ ID NO: 594978 - RNA, 19 nt, Artificial Sequence
  Description of Artificial Sequence: Synthetic oligonucleotide
gacucaugccuagguaguc

SEQ ID NO: 594979 - RNA, 19 nt, Artificial Sequence
  Description of Artificial Sequence: Synthetic oligonucleotide
cucgagaaagaagcucauc

SEQ ID NO: 594980 - RNA, 19 nt, Artificial Sequence
  Description of Artificial Sequence: Synthetic oligonucleotide
ggcuuggacguagauguug

SEQ ID NO: 594981 - RNA, 19 nt, Artificial Sequence
  Description of Artificial Sequence: Synthetic oligonucleotide
cugccauggggaagauuug

SEQ ID NO: 594982 - RNA, 19 nt, Artificial Sequence
  Description of Artificial Sequence: Synthetic oligonucleotide
agcgaccaaaugcccuugu

SEQ ID NO: 594983 - RNA, 19 nt, Artificial Sequence
  Description of Artificial Sequence: Synthetic oligonucleotide
ggacuaggguucgaggggc

SEQ ID NO: 594984 - RNA, 19 nt, Artificial Sequence
  Description of Artificial Sequence: Synthetic oligonucleotide
gaauggcgucgaaccacag

SEQ ID NO: 594985 - RNA, 19 nt, Artificial Sequence
  Description of Artificial Sequence: Synthetic oligonucleotide
ucaugccuagguagucauu

SEQ ID NO: 594986 - RNA, 19 nt, Artificial Sequence
  Description of Artificial Sequence: Synthetic oligonucleotide
ucgagcggagggcgcuaag

SEQ ID NO: 594987 - RNA, 19 nt, Artificial Sequence
  Description of Artificial Sequence: Synthetic oligonucleotide
ggugaauaacugacgucac

SEQ ID NO: 594988 - RNA, 19 nt, Artificial Sequence
  Description of Artificial Sequence: Synthetic oligonucleotide
uuguggcggaagauauauu

SEQ ID NO: 594989 - RNA, 19 nt, Artificial Sequence
  Description of Artificial Sequence: Synthetic oligonucleotide
cgugauugcuccaaacuca

SEQ ID NO: 594990 - RNA, 19 nt, Artificial Sequence
  Description of Artificial Sequence: Synthetic oligonucleotide
ggauucgucaggagccugc

SEQ ID NO: 594991 - RNA, 19 nt, Artificial Sequence
  Description of Artificial Sequence: Synthetic oligonucleotide
gcuaagcgaccaaaugccc

SEQ ID NO: 594992 - RNA, 19 nt, Artificial Sequence
  Description of Artificial Sequence: Synthetic oligonucleotide
ccgacuacuauuuggauau

SEQ ID NO: 594993 - RNA, 19 nt, Artificial Sequence
  Description of Artificial Sequence: Synthetic oligonucleotide
agacacucuuucuggccuu

SEQ ID NO: 594994 - RNA, 19 nt, Artificial Sequence
  Description of Artificial Sequence: Synthetic oligonucleotide
cacagccgaaugccuuacc

SEQ ID NO: 594995 - RNA, 19 nt, Artificial Sequence
  Description of Artificial Sequence: Synthetic oligonucleotide
ugugugccaucuggagucu

SEQ ID NO: 594996 - RNA, 19 nt, Artificial Sequence
  Description of Artificial Sequence: Synthetic oligonucleotide
cccgaucaccaauuccucc

SEQ ID NO: 594997 - RNA, 19 nt, Artificial Sequence
  Description of Artificial Sequence: Synthetic oligonucleotide
cuccgguucacaguuuuaa

SEQ ID NO: 594998 - RNA, 19 nt, Artificial Sequence
  Description of Artificial Sequence: Synthetic oligonucleotide
ggaucauagaggcaugguu

SEQ ID NO: 594999 - RNA, 19 nt, Artificial Sequence
  Description of Artificial Sequence: Synthetic oligonucleotide
gggucagaucuuuguagca

SEQ ID NO: 595000 - RNA, 19 nt, Artificial Sequence
  Description of Artificial Sequence: Synthetic oligonucleotide
ggcgucgaaccacagucuc

SEQ ID NO: 595001 - RNA, 19 nt, Artificial Sequence
  Description of Artificial Sequence: Synthetic oligonucleotide
gaaacagauuugggcaggu

SEQ ID NO: 595002 - RNA, 19 nt, Artificial Sequence
  Description of Artificial Sequence: Synthetic oligonucleotide
cuggcggcgaagggcacgc

SEQ ID NO: 595003 - RNA, 19 nt, Artificial Sequence
  Description of Artificial Sequence: Synthetic oligonucleotide
ccgaucaccaauuccucca

SEQ ID NO: 595004 - RNA, 19 nt, Artificial Sequence
  Description of Artificial Sequence: Synthetic oligonucleotide
ccgguucacaguuuuaaaa

SEQ ID NO: 595005 - RNA, 19 nt, Artificial Sequence
  Description of Artificial Sequence: Synthetic oligonucleotide
ucucgacgggacggcagug

SEQ ID NO: 595006 - RNA, 19 nt, Artificial Sequence
  Description of Artificial Sequence: Synthetic oligonucleotide
gccgaaugccuuaccaagc

SEQ ID NO: 595007 - RNA, 19 nt, Artificial Sequence
  Description of Artificial Sequence: Synthetic oligonucleotide
ggugucaaccagcaaacuu

SEQ ID NO: 595008 - RNA, 19 nt, Artificial Sequence
  Description of Artificial Sequence: Synthetic oligonucleotide
acgggacggcagugggcac

SEQ ID NO: 595009 - RNA, 19 nt, Artificial Sequence
  Description of Artificial Sequence: Synthetic oligonucleotide
cacaaacgugauugcucca

SEQ ID NO: 595010 - RNA, 19 nt, Artificial Sequence
  Description of Artificial Sequence: Synthetic oligonucleotide
aggagaugagacacucuuu

SEQ ID NO: 595011 - RNA, 19 nt, Artificial Sequence
  Description of Artificial Sequence: Synthetic oligonucleotide
agggcgcuaagcgaccaaa

SEQ ID NO: 595012 - RNA, 19 nt, Artificial Sequence
  Description of Artificial Sequence: Synthetic oligonucleotide
gucaaccagcaaacuugug

SEQ ID NO: 595013 - RNA, 19 nt, Artificial Sequence
  Description of Artificial Sequence: Synthetic oligonucleotide
cgaaucccuuggaucauag

SEQ ID NO: 595014 - RNA, 19 nt, Artificial Sequence
  Description of Artificial Sequence: Synthetic oligonucleotide
gauucgucaggagccugcu

SEQ ID NO: 595015 - RNA, 19 nt, Artificial Sequence
  Description of Artificial Sequence: Synthetic oligonucleotide
gugccgacucaugccuagg

SEQ ID NO: 595016 - RNA, 19 nt, Artificial Sequence
  Description of Artificial Sequence: Synthetic oligonucleotide
agcaauuggcugggauccu

SEQ ID NO: 595017 - RNA, 19 nt, Artificial Sequence
  Description of Artificial Sequence: Synthetic oligonucleotide
ggguaauugauggcuugga

SEQ ID NO: 595018 - RNA, 19 nt, Artificial Sequence
  Description of Artificial Sequence: Synthetic oligonucleotide
ccccauacagccccaccgc

SEQ ID NO: 595019 - RNA, 19 nt, Artificial Sequence
  Description of Artificial Sequence: Synthetic oligonucleotide
ccugcgcgggcucucgacg

SEQ ID NO: 595020 - RNA, 19 nt, Artificial Sequence
  Description of Artificial Sequence: Synthetic oligonucleotide
gcuccagacuggccuugcg

SEQ ID NO: 595021 - RNA, 19 nt, Artificial Sequence
  Description of Artificial Sequence: Synthetic oligonucleotide
cagcauaggaucguacggu

SEQ ID NO: 595022 - RNA, 19 nt, Artificial Sequence
  Description of Artificial Sequence: Synthetic oligonucleotide
ggaugaccgggagaccagc

SEQ ID NO: 595023 - RNA, 19 nt, Artificial Sequence
  Description of Artificial Sequence: Synthetic oligonucleotide
acgucacagucaggccugg

SEQ ID NO: 595024 - RNA, 19 nt, Artificial Sequence
  Description of Artificial Sequence: Synthetic oligonucleotide
cguacggugucaaccagca

SEQ ID NO: 595025 - RNA, 19 nt, Artificial Sequence
  Description of Artificial Sequence: Synthetic oligonucleotide
ccuacucgcuuccacguga

SEQ ID NO: 595026 - RNA, 19 nt, Artificial Sequence
  Description of Artificial Sequence: Synthetic oligonucleotide
caagcgucccagaaauaau

SEQ ID NO: 595027 - RNA, 19 nt, Artificial Sequence
  Description of Artificial Sequence: Synthetic oligonucleotide
gcggagggcgcuaagcgac

SEQ ID NO: 595028 - RNA, 19 nt, Artificial Sequence
  Description of Artificial Sequence: Synthetic oligonucleotide
gguuauccugaaggagaug

SEQ ID NO: 595029 - RNA, 19 nt, Artificial Sequence
  Description of Artificial Sequence: Synthetic oligonucleotide
gggugacggguguccagcc

SEQ ID NO: 595030 - RNA, 19 nt, Artificial Sequence
  Description of Artificial Sequence: Synthetic oligonucleotide
gcaguggaugaccgggaga

SEQ ID NO: 595031 - RNA, 19 nt, Artificial Sequence
  Description of Artificial Sequence: Synthetic oligonucleotide
cuguugcgaaucccuugga

SEQ ID NO: 595032 - RNA, 19 nt, Artificial Sequence
  Description of Artificial Sequence: Synthetic oligonucleotide
aggcaccgugggguaauug

SEQ ID NO: 595033 - RNA, 19 nt, Artificial Sequence
  Description of Artificial Sequence: Synthetic oligonucleotide
ugguuccugcgcgggcucu

SEQ ID NO: 595034 - RNA, 19 nt, Artificial Sequence
  Description of Artificial Sequence: Synthetic oligonucleotide
acacacgcgcgggugccga

SEQ ID NO: 595035 - RNA, 19 nt, Artificial Sequence
  Description of Artificial Sequence: Synthetic oligonucleotide
ccgcauggaccucauccac

SEQ ID NO: 595036 - RNA, 19 nt, Artificial Sequence
  Description of Artificial Sequence: Synthetic oligonucleotide
guuccagcccuacucgcuu

SEQ ID NO: 595037 - RNA, 19 nt, Artificial Sequence
  Description of Artificial Sequence: Synthetic oligonucleotide
gagggcgcuaagcgaccaa

SEQ ID NO: 595038 - RNA, 19 nt, Artificial Sequence
  Description of Artificial Sequence: Synthetic oligonucleotide
gcgucgaaccacagucucc

SEQ ID NO: 595039 - RNA, 19 nt, Artificial Sequence
  Description of Artificial Sequence: Synthetic oligonucleotide
cacgcgcgggugccgacuc

SEQ ID NO: 595040 - RNA, 19 nt, Artificial Sequence
  Description of Artificial Sequence: Synthetic oligonucleotide
ggacguagauguugugccu

SEQ ID NO: 595041 - RNA, 19 nt, Artificial Sequence
  Description of Artificial Sequence: Synthetic oligonucleotide
gcggcgaagggcacgcccc

SEQ ID NO: 595042 - RNA, 19 nt, Artificial Sequence
  Description of Artificial Sequence: Synthetic oligonucleotide
gcucucgacgggacggcag

SEQ ID NO: 595043 - RNA, 19 nt, Artificial Sequence
  Description of Artificial Sequence: Synthetic oligonucleotide
gcgggcucucgacgggacg

SEQ ID NO: 595044 - RNA, 19 nt, Artificial Sequence
  Description of Artificial Sequence: Synthetic oligonucleotide
gcuuggacguagauguugu

SEQ ID NO: 595045 - RNA, 19 nt, Artificial Sequence
  Description of Artificial Sequence: Synthetic oligonucleotide
guggcggaagauauauuuu

SEQ ID NO: 595046 - RNA, 19 nt, Artificial Sequence
  Description of Artificial Sequence: Synthetic oligonucleotide
acacgcgcgggugccgacu

SEQ ID NO: 595047 - RNA, 19 nt, Artificial Sequence
  Description of Artificial Sequence: Synthetic oligonucleotide
cgcgggugccgacucaugc

SEQ ID NO: 595048 - RNA, 19 nt, Artificial Sequence
  Description of Artificial Sequence: Synthetic oligonucleotide
cucucgacgggacggcagu

SEQ ID NO: 595049 - RNA, 19 nt, Artificial Sequence
  Description of Artificial Sequence: Synthetic oligonucleotide
guacggugucaaccagcaa

SEQ ID NO: 595050 - RNA, 19 nt, Artificial Sequence
  Description of Artificial Sequence: Synthetic oligonucleotide
gggauucgucaggagccug

SEQ ID NO: 595051 - RNA, 19 nt, Artificial Sequence
  Description of Artificial Sequence: Synthetic oligonucleotide
cagagcccuggcuugcagu

SEQ ID NO: 595052 - RNA, 19 nt, Artificial Sequence
  Description of Artificial Sequence: Synthetic oligonucleotide
cacacgcgcgggugccgac

SEQ ID NO: 595053 - RNA, 19 nt, Artificial Sequence
  Description of Artificial Sequence: Synthetic oligonucleotide
gggcacucgagcggagggc

SEQ ID NO: 595054 - RNA, 19 nt, Artificial Sequence
  Description of Artificial Sequence: Synthetic oligonucleotide
cgucgaaccacagucucca

SEQ ID NO: 595055 - RNA, 19 nt, Artificial Sequence
  Description of Artificial Sequence: Synthetic oligonucleotide
cuacucgcuuccacgugau

SEQ ID NO: 595056 - RNA, 19 nt, Artificial Sequence
  Description of Artificial Sequence: Synthetic oligonucleotide
gccgacucaugccuaggua

SEQ ID NO: 595057 - RNA, 19 nt, Artificial Sequence
  Description of Artificial Sequence: Synthetic oligonucleotide
gcgacccgcacagggauga

SEQ ID NO: 595058 - RNA, 19 nt, Artificial Sequence
  Description of Artificial Sequence: Synthetic oligonucleotide
cgggcucucgacgggacgg

SEQ ID NO: 595059 - RNA, 19 nt, Artificial Sequence
  Description of Artificial Sequence: Synthetic oligonucleotide
caucggcgacccgcacagg

SEQ ID NO: 595060 - RNA, 19 nt, Artificial Sequence
  Description of Artificial Sequence: Synthetic oligonucleotide
gacggguguccagccggga

SEQ ID NO: 595061 - RNA, 19 nt, Artificial Sequence
  Description of Artificial Sequence: Synthetic oligonucleotide
cccuacucgcuuccacgug

SEQ ID NO: 595062 - RNA, 19 nt, Artificial Sequence
  Description of Artificial Sequence: Synthetic oligonucleotide
cgagcggagggcgcuaagc

SEQ ID NO: 595063 - RNA, 19 nt, Artificial Sequence
  Description of Artificial Sequence: Synthetic oligonucleotide
cucauuggcuggagggguu

SEQ ID NO: 595064 - RNA, 19 nt, Artificial Sequence
  Description of Artificial Sequence: Synthetic oligonucleotide
gcccuacucgcuuccacgu

SEQ ID NO: 595065 - RNA, 19 nt, Artificial Sequence
  Description of Artificial Sequence: Synthetic oligonucleotide
gcuucucgagaaagaagcu

SEQ ID NO: 595066 - RNA, 19 nt, Artificial Sequence
  Description of Artificial Sequence: Synthetic oligonucleotide
accaagcgucccagaaaua

SEQ ID NO: 595067 - RNA, 19 nt, Artificial Sequence
  Description of Artificial Sequence: Synthetic oligonucleotide
cgugggguaauugauggcu

SEQ ID NO: 595068 - RNA, 19 nt, Artificial Sequence
  Description of Artificial Sequence: Synthetic oligonucleotide
acgcgcgggugccgacuca

SEQ ID NO: 595069 - RNA, 19 nt, Artificial Sequence
  Description of Artificial Sequence: Synthetic oligonucleotide
gccucauaagcuugacauu

SEQ ID NO: 595070 - RNA, 19 nt, Artificial Sequence
  Description of Artificial Sequence: Synthetic oligonucleotide
ccuuaccaagcgucccaga

SEQ ID NO: 595071 - RNA, 19 nt, Artificial Sequence
  Description of Artificial Sequence: Synthetic oligonucleotide
ggcgacccgcacagggaug

SEQ ID NO: 595072 - RNA, 19 nt, Artificial Sequence
  Description of Artificial Sequence: Synthetic oligonucleotide
cgaagggcacgccccucag

SEQ ID NO: 595073 - RNA, 19 nt, Artificial Sequence
  Description of Artificial Sequence: Synthetic oligonucleotide
acucgagcggagggcgcua

SEQ ID NO: 595074 - RNA, 19 nt, Artificial Sequence
  Description of Artificial Sequence: Synthetic oligonucleotide
cggagggcgcuaagcgacc

SEQ ID NO: 595075 - RNA, 19 nt, Artificial Sequence
  Description of Artificial Sequence: Synthetic oligonucleotide
gcacucgagcggagggcgc

SEQ ID NO: 595076 - RNA, 19 nt, Artificial Sequence
  Description of Artificial Sequence: Synthetic oligonucleotide
gucgaaccacagucuccau

SEQ ID NO: 595077 - RNA, 19 nt, Artificial Sequence
  Description of Artificial Sequence: Synthetic oligonucleotide
cucgguaaguauggucauu

SEQ ID NO: 595078 - RNA, 19 nt, Artificial Sequence
  Description of Artificial Sequence: Synthetic oligonucleotide
cacucgagcggagggcgcu

SEQ ID NO: 595079 - RNA, 19 nt, Artificial Sequence
  Description of Artificial Sequence: Synthetic oligonucleotide
cucgagcggagggcgcuaa

SEQ ID NO: 595080 - RNA, 19 nt, Artificial Sequence
  Description of Artificial Sequence: Synthetic oligonucleotide
gcauuccgcugacgaaugu

SEQ ID NO: 595081 - RNA, 19 nt, Artificial Sequence
  Description of Artificial Sequence: Synthetic oligonucleotide
gcgaaucccuuggaucaua

SEQ ID NO: 595082 - RNA, 19 nt, Artificial Sequence
  Description of Artificial Sequence: Synthetic oligonucleotide
gguguccagccgggagcug

SEQ ID NO: 595083 - RNA, 19 nt, Artificial Sequence
  Description of Artificial Sequence: Synthetic oligonucleotide
ccaccucgagccccauaca

SEQ ID NO: 595084 - RNA, 19 nt, Artificial Sequence
  Description of Artificial Sequence: Synthetic oligonucleotide
cgacuacuauuuggauaug

SEQ ID NO: 595085 - RNA, 19 nt, Artificial Sequence
  Description of Artificial Sequence: Synthetic oligonucleotide
cgaaugccuuaccaagcgu

SEQ ID NO: 595086 - RNA, 19 nt, Artificial Sequence
  Description of Artificial Sequence: Synthetic oligonucleotide
ccgcugacgaauguggcuu

SEQ ID NO: 595087 - RNA, 19 nt, Artificial Sequence
  Description of Artificial Sequence: Synthetic oligonucleotide
gggcgcuaagcgaccaaau

SEQ ID NO: 595088 - RNA, 19 nt, Artificial Sequence
  Description of Artificial Sequence: Synthetic oligonucleotide
gggugccgacucaugccua

SEQ ID NO: 595089 - RNA, 19 nt, Artificial Sequence
  Description of Artificial Sequence: Synthetic oligonucleotide
ccccgaggcaccguggggu

SEQ ID NO: 595090 - RNA, 19 nt, Artificial Sequence
  Description of Artificial Sequence: Synthetic oligonucleotide
gcgcgggugccgacucaug

SEQ ID NO: 595091 - RNA, 19 nt, Artificial Sequence
  Description of Artificial Sequence: Synthetic oligonucleotide
cccgaggcaccguggggua

SEQ ID NO: 595092 - RNA, 19 nt, Artificial Sequence
  Description of Artificial Sequence: Synthetic oligonucleotide
gccccacacacgcgcgggu

SEQ ID NO: 595093 - RNA, 19 nt, Artificial Sequence
  Description of Artificial Sequence: Synthetic oligonucleotide
gccuuugcuuucgcaugau

SEQ ID NO: 595094 - RNA, 19 nt, Artificial Sequence
  Description of Artificial Sequence: Synthetic oligonucleotide
cgacuguugcgaaucccuu

SEQ ID NO: 595095 - RNA, 19 nt, Artificial Sequence
  Description of Artificial Sequence: Synthetic oligonucleotide
cacgccccucagcacucuu

SEQ ID NO: 595096 - RNA, 19 nt, Artificial Sequence
  Description of Artificial Sequence: Synthetic oligonucleotide
cgguaaguauggucauuuu

SEQ ID NO: 595097 - RNA, 19 nt, Artificial Sequence
  Description of Artificial Sequence: Synthetic oligonucleotide
cggcgacccgcacagggau

SEQ ID NO: 595098 - RNA, 19 nt, Artificial Sequence
  Description of Artificial Sequence: Synthetic oligonucleotide
gccccaccgcauggaccuc

SEQ ID NO: 595099 - RNA, 19 nt, Artificial Sequence
  Description of Artificial Sequence: Synthetic oligonucleotide
gcacgccccucagcacucu

SEQ ID NO: 595100 - RNA, 19 nt, Artificial Sequence
  Description of Artificial Sequence: Synthetic oligonucleotide
cgggacggcagugggcacu

SEQ ID NO: 595101 - RNA, 19 nt, Artificial Sequence
  Description of Artificial Sequence: Synthetic oligonucleotide
cggcgaagggcacgccccu

SEQ ID NO: 595102 - RNA, 19 nt, Artificial Sequence
  Description of Artificial Sequence: Synthetic oligonucleotide
ccgggagaccagcguccau

SEQ ID NO: 595103 - RNA, 19 nt, Artificial Sequence
  Description of Artificial Sequence: Synthetic oligonucleotide
cgcgcgggugccgacucau

SEQ ID NO: 595104 - RNA, 19 nt, Artificial Sequence
  Description of Artificial Sequence: Synthetic oligonucleotide
aaauauacaauaaauagcg

SEQ ID NO: 595105 - RNA, 19 nt, Artificial Sequence
  Description of Artificial Sequence: Synthetic oligonucleotide
aaacauaagagccaggcag

SEQ ID NO: 595106 - RNA, 19 nt, Artificial Sequence
  Description of Artificial Sequence: Synthetic oligonucleotide
agugauaguauuugaaucg

SEQ ID NO: 595107 - RNA, 19 nt, Artificial Sequence
  Description of Artificial Sequence: Synthetic oligonucleotide
auaaauagcgcuccugggc

SEQ ID NO: 595108 - RNA, 19 nt, Artificial Sequence
  Description of Artificial Sequence: Synthetic oligonucleotide
aacaacacucguucaaggc

SEQ ID NO: 595109 - RNA, 19 nt, Artificial Sequence
  Description of Artificial Sequence: Synthetic oligonucleotide
aaagcuauguucuuuggca

SEQ ID NO: 595110 - RNA, 19 nt, Artificial Sequence
  Description of Artificial Sequence: Synthetic oligonucleotide
auaguauuugaaucggggc

SEQ ID NO: 595111 - RNA, 19 nt, Artificial Sequence
  Description of Artificial Sequence: Synthetic oligonucleotide
auaaaggucuuccaggcac

SEQ ID NO: 595112 - RNA, 19 nt, Artificial Sequence
  Description of Artificial Sequence: Synthetic oligonucleotide
accacuaccuggcagaagc

SEQ ID NO: 595113 - RNA, 19 nt, Artificial Sequence
  Description of Artificial Sequence: Synthetic oligonucleotide
aauaaauagcgcuccuggg

SEQ ID NO: 595114 - RNA, 19 nt, Artificial Sequence
  Description of Artificial Sequence: Synthetic oligonucleotide
cuuaaugugcaccagcucc

SEQ ID NO: 595115 - RNA, 19 nt, Artificial Sequence
  Description of Artificial Sequence: Synthetic oligonucleotide
cuuauguuggcguagcagg

SEQ ID NO: 595116 - RNA, 19 nt, Artificial Sequence
  Description of Artificial Sequence: Synthetic oligonucleotide
acaacacucguucaaggcc

SEQ ID NO: 595117 - RNA, 19 nt, Artificial Sequence
  Description of Artificial Sequence: Synthetic oligonucleotide
uucaguaggacuaggcggg

SEQ ID NO: 595118 - RNA, 19 nt, Artificial Sequence
  Description of Artificial Sequence: Synthetic oligonucleotide
ggugaaaaugccuauaucc

SEQ ID NO: 595119 - RNA, 19 nt, Artificial Sequence
  Description of Artificial Sequence: Synthetic oligonucleotide
ucaggauaagccuacacug

SEQ ID NO: 595120 - RNA, 19 nt, Artificial Sequence
  Description of Artificial Sequence: Synthetic oligonucleotide
gauaguauuugaaucgggg

SEQ ID NO: 595121 - RNA, 19 nt, Artificial Sequence
  Description of Artificial Sequence: Synthetic oligonucleotide
cucggauccauuuaaauug

SEQ ID NO: 595122 - RNA, 19 nt, Artificial Sequence
  Description of Artificial Sequence: Synthetic oligonucleotide
aacuuggccagcuccauuc

SEQ ID NO: 595123 - RNA, 19 nt, Artificial Sequence
  Description of Artificial Sequence: Synthetic oligonucleotide
aaguuuacaaacagguaac

SEQ ID NO: 595124 - RNA, 19 nt, Artificial Sequence
  Description of Artificial Sequence: Synthetic oligonucleotide
acggaguuaugucucaugc

SEQ ID NO: 595125 - RNA, 19 nt, Artificial Sequence
  Description of Artificial Sequence: Synthetic oligonucleotide
uaaauagcgcuccugggcc

SEQ ID NO: 595126 - RNA, 19 nt, Artificial Sequence
  Description of Artificial Sequence: Synthetic oligonucleotide
acuguuguccuagacaccc

SEQ ID NO: 595127 - RNA, 19 nt, Artificial Sequence
  Description of Artificial Sequence: Synthetic oligonucleotide
caggaagauggcuagaucc

SEQ ID NO: 595128 - RNA, 19 nt, Artificial Sequence
  Description of Artificial Sequence: Synthetic oligonucleotide
aacaccacggaguuauguc

SEQ ID NO: 595129 - RNA, 19 nt, Artificial Sequence
  Description of Artificial Sequence: Synthetic oligonucleotide
guucaguaggacuaggcgg

SEQ ID NO: 595130 - RNA, 19 nt, Artificial Sequence
  Description of Artificial Sequence: Synthetic oligonucleotide
aguaaaggcucucuagccg

SEQ ID NO: 595131 - RNA, 19 nt, Artificial Sequence
  Description of Artificial Sequence: Synthetic oligonucleotide
agacugggacuucaaaucc

SEQ ID NO: 595132 - RNA, 19 nt, Artificial Sequence
  Description of Artificial Sequence: Synthetic oligonucleotide
aguuaugucucaugccgcc

SEQ ID NO: 595133 - RNA, 19 nt, Artificial Sequence
  Description of Artificial Sequence: Synthetic oligonucleotide
ggaguuaugucucaugccg

SEQ ID NO: 595134 - RNA, 19 nt, Artificial Sequence
  Description of Artificial Sequence: Synthetic oligonucleotide
aauugucaggccuucccag

SEQ ID NO: 595135 - RNA, 19 nt, Artificial Sequence
  Description of Artificial Sequence: Synthetic oligonucleotide
gucaauaaaggucuuccag

SEQ ID NO: 595136 - RNA, 19 nt, Artificial Sequence
  Description of Artificial Sequence: Synthetic oligonucleotide
ugauaguauuugaaucggg

SEQ ID NO: 595137 - RNA, 19 nt, Artificial Sequence
  Description of Artificial Sequence: Synthetic oligonucleotide
ugcacgauccaccacacgu

SEQ ID NO: 595138 - RNA, 19 nt, Artificial Sequence
  Description of Artificial Sequence: Synthetic oligonucleotide
ucucaugccgcccaggcca

SEQ ID NO: 595139 - RNA, 19 nt, Artificial Sequence
  Description of Artificial Sequence: Synthetic oligonucleotide
aguauuugaaucggggccg

SEQ ID NO: 595140 - RNA, 19 nt, Artificial Sequence
  Description of Artificial Sequence: Synthetic oligonucleotide
aagccuuuuacuuucucaa

SEQ ID NO: 595141 - RNA, 19 nt, Artificial Sequence
  Description of Artificial Sequence: Synthetic oligonucleotide
caaguuuacaaacagguaa

SEQ ID NO: 595142 - RNA, 19 nt, Artificial Sequence
  Description of Artificial Sequence: Synthetic oligonucleotide
agggcauaguaccaggagg

SEQ ID NO: 595143 - RNA, 19 nt, Artificial Sequence
  Description of Artificial Sequence: Synthetic oligonucleotide
aggauaagccuacacuggg

SEQ ID NO: 595144 - RNA, 19 nt, Artificial Sequence
  Description of Artificial Sequence: Synthetic oligonucleotide
aagcagaacuggcaaguag

SEQ ID NO: 595145 - RNA, 19 nt, Artificial Sequence
  Description of Artificial Sequence: Synthetic oligonucleotide
aaucggggccgccaguugg

SEQ ID NO: 595146 - RNA, 19 nt, Artificial Sequence
  Description of Artificial Sequence: Synthetic oligonucleotide
auugucaggccuucccagc

SEQ ID NO: 595147 - RNA, 19 nt, Artificial Sequence
  Description of Artificial Sequence: Synthetic oligonucleotide
ucaacagugcauagcgugc

SEQ ID NO: 595148 - RNA, 19 nt, Artificial Sequence
  Description of Artificial Sequence: Synthetic oligonucleotide
auuccacuuggcuugauga

SEQ ID NO: 595149 - RNA, 19 nt, Artificial Sequence
  Description of Artificial Sequence: Synthetic oligonucleotide
ggagacaaacauaagagcc

SEQ ID NO: 595150 - RNA, 19 nt, Artificial Sequence
  Description of Artificial Sequence: Synthetic oligonucleotide
uaggcgggcaucaugggag

SEQ ID NO: 595151 - RNA, 19 nt, Artificial Sequence
  Description of Artificial Sequence: Synthetic oligonucleotide
uucgucuagcuucagcagc

SEQ ID NO: 595152 - RNA, 19 nt, Artificial Sequence
  Description of Artificial Sequence: Synthetic oligonucleotide
uccgcucauagguauaugc

SEQ ID NO: 595153 - RNA, 19 nt, Artificial Sequence
  Description of Artificial Sequence: Synthetic oligonucleotide
cagugauaguauuugaauc

SEQ ID NO: 595154 - RNA, 19 nt, Artificial Sequence
  Description of Artificial Sequence: Synthetic oligonucleotide
gacuaggcgggcaucaugg

SEQ ID NO: 595155 - RNA, 19 nt, Artificial Sequence
  Description of Artificial Sequence: Synthetic oligonucleotide
uuugaaucggggccgccag

SEQ ID NO: 595156 - RNA, 19 nt, Artificial Sequence
  Description of Artificial Sequence: Synthetic oligonucleotide
caacacucguucaaggccc

SEQ ID NO: 595157 - RNA, 19 nt, Artificial Sequence
  Description of Artificial Sequence: Synthetic oligonucleotide
acugauccggcuuaaugug

SEQ ID NO: 595158 - RNA, 19 nt, Artificial Sequence
  Description of Artificial Sequence: Synthetic oligonucleotide
guaaaggcucucuagccgc

SEQ ID NO: 595159 - RNA, 19 nt, Artificial Sequence
  Description of Artificial Sequence: Synthetic oligonucleotide
guacucaauguacuuguag

SEQ ID NO: 595160 - RNA, 19 nt, Artificial Sequence
  Description of Artificial Sequence: Synthetic oligonucleotide
ugguacucaauguacuugu

SEQ ID NO: 595161 - RNA, 19 nt, Artificial Sequence
  Description of Artificial Sequence: Synthetic oligonucleotide
ucguucaaggcccucaguc

SEQ ID NO: 595162 - RNA, 19 nt, Artificial Sequence
  Description of Artificial Sequence: Synthetic oligonucleotide
agucaggauaagccuacac

SEQ ID NO: 595163 - RNA, 19 nt, Artificial Sequence
  Description of Artificial Sequence: Synthetic oligonucleotide
aauguacuuguagaucaug

SEQ ID NO: 595164 - RNA, 19 nt, Artificial Sequence
  Description of Artificial Sequence: Synthetic oligonucleotide
aaugagcauggcaacuagg

SEQ ID NO: 595165 - RNA, 19 nt, Artificial Sequence
  Description of Artificial Sequence: Synthetic oligonucleotide
caggauaagccuacacugg

SEQ ID NO: 595166 - RNA, 19 nt, Artificial Sequence
  Description of Artificial Sequence: Synthetic oligonucleotide
uuauguuggcguagcagga

SEQ ID NO: 595167 - RNA, 19 nt, Artificial Sequence
  Description of Artificial Sequence: Synthetic oligonucleotide
aacaauugucaggccuucc

SEQ ID NO: 595168 - RNA, 19 nt, Artificial Sequence
  Description of Artificial Sequence: Synthetic oligonucleotide
ucggauccauuuaaauugc

SEQ ID NO: 595169 - RNA, 19 nt, Artificial Sequence
  Description of Artificial Sequence: Synthetic oligonucleotide
uuaugucucaugccgccca

SEQ ID NO: 595170 - RNA, 19 nt, Artificial Sequence
  Description of Artificial Sequence: Synthetic oligonucleotide
cagacugggacuucaaauc

SEQ ID NO: 595171 - RNA, 19 nt, Artificial Sequence
  Description of Artificial Sequence: Synthetic oligonucleotide
ugguacagcgcacaguguc

SEQ ID NO: 595172 - RNA, 19 nt, Artificial Sequence
  Description of Artificial Sequence: Synthetic oligonucleotide
augaaggucuucgucuagc

SEQ ID NO: 595173 - RNA, 19 nt, Artificial Sequence
  Description of Artificial Sequence: Synthetic oligonucleotide
cuccauuccacuuggcuug

SEQ ID NO: 595174 - RNA, 19 nt, Artificial Sequence
  Description of Artificial Sequence: Synthetic oligonucleotide
ugucaauaaaggucuucca

SEQ ID NO: 595175 - RNA, 19 nt, Artificial Sequence
  Description of Artificial Sequence: Synthetic oligonucleotide
gugucaauaaaggucuucc

SEQ ID NO: 595176 - RNA, 19 nt, Artificial Sequence
  Description of Artificial Sequence: Synthetic oligonucleotide
caacaacacucguucaagg

SEQ ID NO: 595177 - RNA, 19 nt, Artificial Sequence
  Description of Artificial Sequence: Synthetic oligonucleotide
cuggcaaguagguguaggg

SEQ ID NO: 595178 - RNA, 19 nt, Artificial Sequence
  Description of Artificial Sequence: Synthetic oligonucleotide
uguuguccuagacacccca

SEQ ID NO: 595179 - RNA, 19 nt, Artificial Sequence
  Description of Artificial Sequence: Synthetic oligonucleotide
gaacauggacagaaugggg

SEQ ID NO: 595180 - RNA, 19 nt, Artificial Sequence
  Description of Artificial Sequence: Synthetic oligonucleotide
uguccuagacaccccaacu

SEQ ID NO: 595181 - RNA, 19 nt, Artificial Sequence
  Description of Artificial Sequence: Synthetic oligonucleotide
uucucuagucaggauaagc

SEQ ID NO: 595182 - RNA, 19 nt, Artificial Sequence
  Description of Artificial Sequence: Synthetic oligonucleotide
aaaccuuauguuggcguag

SEQ ID NO: 595183 - RNA, 19 nt, Artificial Sequence
  Description of Artificial Sequence: Synthetic oligonucleotide
uacacugggguauggguga

SEQ ID NO: 595184 - RNA, 19 nt, Artificial Sequence
  Description of Artificial Sequence: Synthetic oligonucleotide
gccucaacagugcauagcg

SEQ ID NO: 595185 - RNA, 19 nt, Artificial Sequence
  Description of Artificial Sequence: Synthetic oligonucleotide
uuaacccucaccagucuuc

SEQ ID NO: 595186 - RNA, 19 nt, Artificial Sequence
  Description of Artificial Sequence: Synthetic oligonucleotide
aacuagggcauaguaccag

SEQ ID NO: 595187 - RNA, 19 nt, Artificial Sequence
  Description of Artificial Sequence: Synthetic oligonucleotide
ggacuguuguccuagacac

SEQ ID NO: 595188 - RNA, 19 nt, Artificial Sequence
  Description of Artificial Sequence: Synthetic oligonucleotide
acguuggcucaccauuugc

SEQ ID NO: 595189 - RNA, 19 nt, Artificial Sequence
  Description of Artificial Sequence: Synthetic oligonucleotide
gaugacauccaaacaauaa

SEQ ID NO: 595190 - RNA, 19 nt, Artificial Sequence
  Description of Artificial Sequence: Synthetic oligonucleotide
aacauaagagccaggcaga

SEQ ID NO: 595191 - RNA, 19 nt, Artificial Sequence
  Description of Artificial Sequence: Synthetic oligonucleotide
ggaggagacaaacauaaga

SEQ ID NO: 595192 - RNA, 19 nt, Artificial Sequence
  Description of Artificial Sequence: Synthetic oligonucleotide
ucgucuagcuucagcagca

SEQ ID NO: 595193 - RNA, 19 nt, Artificial Sequence
  Description of Artificial Sequence: Synthetic oligonucleotide
cuguugucauccaucuggg

SEQ ID NO: 595194 - RNA, 19 nt, Artificial Sequence
  Description of Artificial Sequence: Synthetic oligonucleotide
uugguacucaauguacuug

SEQ ID NO: 595195 - RNA, 19 nt, Artificial Sequence
  Description of Artificial Sequence: Synthetic oligonucleotide
aggaggagugcccacguug

SEQ ID NO: 595196 - RNA, 19 nt, Artificial Sequence
  Description of Artificial Sequence: Synthetic oligonucleotide
uggcaaguagguguagggg

SEQ ID NO: 595197 - RNA, 19 nt, Artificial Sequence
  Description of Artificial Sequence: Synthetic oligonucleotide
agaccuagcaaaacugguc

SEQ ID NO: 595198 - RNA, 19 nt, Artificial Sequence
  Description of Artificial Sequence: Synthetic oligonucleotide
uuccagacggaggugauac

SEQ ID NO: 595199 - RNA, 19 nt, Artificial Sequence
  Description of Artificial Sequence: Synthetic oligonucleotide
uccggcuuaaugugcacca

SEQ ID NO: 595200 - RNA, 19 nt, Artificial Sequence
  Description of Artificial Sequence: Synthetic oligonucleotide
ugcgccguacauuggacug

SEQ ID NO: 595201 - RNA, 19 nt, Artificial Sequence
  Description of Artificial Sequence: Synthetic oligonucleotide
acaccacggaguuaugucu

SEQ ID NO: 595202 - RNA, 19 nt, Artificial Sequence
  Description of Artificial Sequence: Synthetic oligonucleotide
gacugauccggcuuaaugu

SEQ ID NO: 595203 - RNA, 19 nt, Artificial Sequence
  Description of Artificial Sequence: Synthetic oligonucleotide
ccguacauuggacugaucc

SEQ ID NO: 595204 - RNA, 19 nt, Artificial Sequence
  Description of Artificial Sequence: Synthetic oligonucleotide
aagucaggcucaacuuggc

SEQ ID NO: 595205 - RNA, 19 nt, Artificial Sequence
  Description of Artificial Sequence: Synthetic oligonucleotide
uucacaugaaggucuucgu

SEQ ID NO: 595206 - RNA, 19 nt, Artificial Sequence
  Description of Artificial Sequence: Synthetic oligonucleotide
ugagugccugucuuugacc

SEQ ID NO: 595207 - RNA, 19 nt, Artificial Sequence
  Description of Artificial Sequence: Synthetic oligonucleotide
gugcaugcgccguacauug

SEQ ID NO: 595208 - RNA, 19 nt, Artificial Sequence
  Description of Artificial Sequence: Synthetic oligonucleotide
acagugcauagcgugcagc

SEQ ID NO: 595209 - RNA, 19 nt, Artificial Sequence
  Description of Artificial Sequence: Synthetic oligonucleotide
aaucccauauuaacccuca

SEQ ID NO: 595210 - RNA, 19 nt, Artificial Sequence
  Description of Artificial Sequence: Synthetic oligonucleotide
cuagacaccccaacuccag

SEQ ID NO: 595211 - RNA, 19 nt, Artificial Sequence
  Description of Artificial Sequence: Synthetic oligonucleotide
uccaaaccuuauguuggcg

SEQ ID NO: 595212 - RNA, 19 nt, Artificial Sequence
  Description of Artificial Sequence: Synthetic oligonucleotide
uaugucucaugccgcccag

SEQ ID NO: 595213 - RNA, 19 nt, Artificial Sequence
  Description of Artificial Sequence: Synthetic oligonucleotide
agggacuguuguccuagac

SEQ ID NO: 595214 - RNA, 19 nt, Artificial Sequence
  Description of Artificial Sequence: Synthetic oligonucleotide
acuggcaaguagguguagg

SEQ ID NO: 595215 - RNA, 19 nt, Artificial Sequence
  Description of Artificial Sequence: Synthetic oligonucleotide
cauagcgugcagcacucag

SEQ ID NO: 595216 - RNA, 19 nt, Artificial Sequence
  Description of Artificial Sequence: Synthetic oligonucleotide
uaugggugaaaaugccuau

SEQ ID NO: 595217 - RNA, 19 nt, Artificial Sequence
  Description of Artificial Sequence: Synthetic oligonucleotide
auagguauaugcagagaug

SEQ ID NO: 595218 - RNA, 19 nt, Artificial Sequence
  Description of Artificial Sequence: Synthetic oligonucleotide
cagcacuucaaggaauucc

SEQ ID NO: 595219 - RNA, 19 nt, Artificial Sequence
  Description of Artificial Sequence: Synthetic oligonucleotide
cacgcaccaacaacacucg

SEQ ID NO: 595220 - RNA, 19 nt, Artificial Sequence
  Description of Artificial Sequence: Synthetic oligonucleotide
ugccuaggaaagacagugc

SEQ ID NO: 595221 - RNA, 19 nt, Artificial Sequence
  Description of Artificial Sequence: Synthetic oligonucleotide
uggcagaagccuuuuacuu

SEQ ID NO: 595222 - RNA, 19 nt, Artificial Sequence
  Description of Artificial Sequence: Synthetic oligonucleotide
guagaucaugcccgcaaug

SEQ ID NO: 595223 - RNA, 19 nt, Artificial Sequence
  Description of Artificial Sequence: Synthetic oligonucleotide
aguuuacaaacagguaaca

SEQ ID NO: 595224 - RNA, 19 nt, Artificial Sequence
  Description of Artificial Sequence: Synthetic oligonucleotide
cauagguauaugcagagau

SEQ ID NO: 595225 - RNA, 19 nt, Artificial Sequence
  Description of Artificial Sequence: Synthetic oligonucleotide
aguucagcgaugagugccg

SEQ ID NO: 595226 - RNA, 19 nt, Artificial Sequence
  Description of Artificial Sequence: Synthetic oligonucleotide
caucaguguccgcucauag

SEQ ID NO: 595227 - RNA, 19 nt, Artificial Sequence
  Description of Artificial Sequence: Synthetic oligonucleotide
gaguuaugucucaugccgc

SEQ ID NO: 595228 - RNA, 19 nt, Artificial Sequence
  Description of Artificial Sequence: Synthetic oligonucleotide
aagcuugguuucccaggag

SEQ ID NO: 595229 - RNA, 19 nt, Artificial Sequence
  Description of Artificial Sequence: Synthetic oligonucleotide
cccauauuaacccucacca

SEQ ID NO: 595230 - RNA, 19 nt, Artificial Sequence
  Description of Artificial Sequence: Synthetic oligonucleotide
aguguccgcucauagguau

SEQ ID NO: 595231 - RNA, 19 nt, Artificial Sequence
  Description of Artificial Sequence: Synthetic oligonucleotide
ugucucugguccaugucau

SEQ ID NO: 595232 - RNA, 19 nt, Artificial Sequence
  Description of Artificial Sequence: Synthetic oligonucleotide
auagcgugcagcacucagg

SEQ ID NO: 595233 - RNA, 19 nt, Artificial Sequence
  Description of Artificial Sequence: Synthetic oligonucleotide
ggagaccuagcaaaacugg

SEQ ID NO: 595234 - RNA, 19 nt, Artificial Sequence
  Description of Artificial Sequence: Synthetic oligonucleotide
cuccaaaccuuauguuggc

SEQ ID NO: 595235 - RNA, 19 nt, Artificial Sequence
  Description of Artificial Sequence: Synthetic oligonucleotide
gccuaggaaagacagugcc

SEQ ID NO: 595236 - RNA, 19 nt, Artificial Sequence
  Description of Artificial Sequence: Synthetic oligonucleotide
acuugucucugguccaugu

SEQ ID NO: 595237 - RNA, 19 nt, Artificial Sequence
  Description of Artificial Sequence: Synthetic oligonucleotide
cucgaaucccgucacccac

SEQ ID NO: 595238 - RNA, 19 nt, Artificial Sequence
  Description of Artificial Sequence: Synthetic oligonucleotide
cucuaagaagcugcccugg

SEQ ID NO: 595239 - RNA, 19 nt, Artificial Sequence
  Description of Artificial Sequence: Synthetic oligonucleotide
uccacugggcucaggaaua

SEQ ID NO: 595240 - RNA, 19 nt, Artificial Sequence
  Description of Artificial Sequence: Synthetic oligonucleotide
acauaagagccaggcagag

SEQ ID NO: 595241 - RNA, 19 nt, Artificial Sequence
  Description of Artificial Sequence: Synthetic oligonucleotide
ugcauagcgugcagcacuc

SEQ ID NO: 595242 - RNA, 19 nt, Artificial Sequence
  Description of Artificial Sequence: Synthetic oligonucleotide
gucaggauaagccuacacu

SEQ ID NO: 595243 - RNA, 19 nt, Artificial Sequence
  Description of Artificial Sequence: Synthetic oligonucleotide
ucauagguauaugcagaga

SEQ ID NO: 595244 - RNA, 19 nt, Artificial Sequence
  Description of Artificial Sequence: Synthetic oligonucleotide
gaccaggcauguucaguag

SEQ ID NO: 595245 - RNA, 19 nt, Artificial Sequence
  Description of Artificial Sequence: Synthetic oligonucleotide
accauuugcuuuccccaug

SEQ ID NO: 595246 - RNA, 19 nt, Artificial Sequence
  Description of Artificial Sequence: Synthetic oligonucleotide
ucaugggagcgugugacaa

SEQ ID NO: 595247 - RNA, 19 nt, Artificial Sequence
  Description of Artificial Sequence: Synthetic oligonucleotide
cagccuuaagcugggaggc

SEQ ID NO: 595248 - RNA, 19 nt, Artificial Sequence
  Description of Artificial Sequence: Synthetic oligonucleotide
gcaccaacaacacucguuc

SEQ ID NO: 595249 - RNA, 19 nt, Artificial Sequence
  Description of Artificial Sequence: Synthetic oligonucleotide
acuaggcgggcaucauggg

SEQ ID NO: 595250 - RNA, 19 nt, Artificial Sequence
  Description of Artificial Sequence: Synthetic oligonucleotide
acgagacuccacugggcuc

SEQ ID NO: 595251 - RNA, 19 nt, Artificial Sequence
  Description of Artificial Sequence: Synthetic oligonucleotide
agccaacaauugucaggcc

SEQ ID NO: 595252 - RNA, 19 nt, Artificial Sequence
  Description of Artificial Sequence: Synthetic oligonucleotide
ccacgcaccaacaacacuc

SEQ ID NO: 595253 - RNA, 19 nt, Artificial Sequence
  Description of Artificial Sequence: Synthetic oligonucleotide
gaggguccucacucugucg

SEQ ID NO: 595254 - RNA, 19 nt, Artificial Sequence
  Description of Artificial Sequence: Synthetic oligonucleotide
agcgaugagugccgucagg

SEQ ID NO: 595255 - RNA, 19 nt, Artificial Sequence
  Description of Artificial Sequence: Synthetic oligonucleotide
guccuagacaccccaacuc

SEQ ID NO: 595256 - RNA, 19 nt, Artificial Sequence
  Description of Artificial Sequence: Synthetic oligonucleotide
agguccaagcuugguuucc

SEQ ID NO: 595257 - RNA, 19 nt, Artificial Sequence
  Description of Artificial Sequence: Synthetic oligonucleotide
caaacauaagagccaggca

SEQ ID NO: 595258 - RNA, 19 nt, Artificial Sequence
  Description of Artificial Sequence: Synthetic oligonucleotide
augggagcgugugacaaug

SEQ ID NO: 595259 - RNA, 19 nt, Artificial Sequence
  Description of Artificial Sequence: Synthetic oligonucleotide
augaugacauccaaacaau

SEQ ID NO: 595260 - RNA, 19 nt, Artificial Sequence
  Description of Artificial Sequence: Synthetic oligonucleotide
ggacugauccggcuuaaug

SEQ ID NO: 595261 - RNA, 19 nt, Artificial Sequence
  Description of Artificial Sequence: Synthetic oligonucleotide
cagagccaacaauugucag

SEQ ID NO: 595262 - RNA, 19 nt, Artificial Sequence
  Description of Artificial Sequence: Synthetic oligonucleotide
uuaguaucccuccccucuu

SEQ ID NO: 595263 - RNA, 19 nt, Artificial Sequence
  Description of Artificial Sequence: Synthetic oligonucleotide
guaccaggaggagacaaac

SEQ ID NO: 595264 - RNA, 19 nt, Artificial Sequence
  Description of Artificial Sequence: Synthetic oligonucleotide
ugcaugcgccguacauugg

SEQ ID NO: 595265 - RNA, 19 nt, Artificial Sequence
  Description of Artificial Sequence: Synthetic oligonucleotide
ucgaaucccgucacccacu

SEQ ID NO: 595266 - RNA, 19 nt, Artificial Sequence
  Description of Artificial Sequence: Synthetic oligonucleotide
ucuuaguaucccuccccuc

SEQ ID NO: 595267 - RNA, 19 nt, Artificial Sequence
  Description of Artificial Sequence: Synthetic oligonucleotide
cucucuagccgcagggcug

SEQ ID NO: 595268 - RNA, 19 nt, Artificial Sequence
  Description of Artificial Sequence: Synthetic oligonucleotide
auuugaaucggggccgcca

SEQ ID NO: 595269 - RNA, 19 nt, Artificial Sequence
  Description of Artificial Sequence: Synthetic oligonucleotide
cuuaguaucccuccccucu

SEQ ID NO: 595270 - RNA, 19 nt, Artificial Sequence
  Description of Artificial Sequence: Synthetic oligonucleotide
cguacauuggacugauccg

SEQ ID NO: 595271 - RNA, 19 nt, Artificial Sequence
  Description of Artificial Sequence: Synthetic oligonucleotide
gggguacuucacaugaagg

SEQ ID NO: 595272 - RNA, 19 nt, Artificial Sequence
  Description of Artificial Sequence: Synthetic oligonucleotide
gucaggaggagugcccacg

SEQ ID NO: 595273 - RNA, 19 nt, Artificial Sequence
  Description of Artificial Sequence: Synthetic oligonucleotide
gcgugcagcacucagggac

SEQ ID NO: 595274 - RNA, 19 nt, Artificial Sequence
  Description of Artificial Sequence: Synthetic oligonucleotide
agguauaugcagagauguc

SEQ ID NO: 595275 - RNA, 19 nt, Artificial Sequence
  Description of Artificial Sequence: Synthetic oligonucleotide
ucagaagcgucugcacagc

SEQ ID NO: 595276 - RNA, 19 nt, Artificial Sequence
  Description of Artificial Sequence: Synthetic oligonucleotide
uccacgcaccaacaacacu

SEQ ID NO: 595277 - RNA, 19 nt, Artificial Sequence
  Description of Artificial Sequence: Synthetic oligonucleotide
agcgugugacaaugacuuc

SEQ ID NO: 595278 - RNA, 19 nt, Artificial Sequence
  Description of Artificial Sequence: Synthetic oligonucleotide
cccucucgaaccuugcugg

SEQ ID NO: 595279 - RNA, 19 nt, Artificial Sequence
  Description of Artificial Sequence: Synthetic oligonucleotide
ccuaggaaagacagugccc

SEQ ID NO: 595280 - RNA, 19 nt, Artificial Sequence
  Description of Artificial Sequence: Synthetic oligonucleotide
accaugucaagggaggcaa

SEQ ID NO: 595281 - RNA, 19 nt, Artificial Sequence
  Description of Artificial Sequence: Synthetic oligonucleotide
guaugggugaaaaugccua

SEQ ID NO: 595282 - RNA, 19 nt, Artificial Sequence
  Description of Artificial Sequence: Synthetic oligonucleotide
uauguuggcguagcaggaa

SEQ ID NO: 595283 - RNA, 19 nt, Artificial Sequence
  Description of Artificial Sequence: Synthetic oligonucleotide
cacggaguuaugucucaug

SEQ ID NO: 595284 - RNA, 19 nt, Artificial Sequence
  Description of Artificial Sequence: Synthetic oligonucleotide
caauugucaggccuuccca

SEQ ID NO: 595285 - RNA, 19 nt, Artificial Sequence
  Description of Artificial Sequence: Synthetic oligonucleotide
gaagcugcccuggaugaca

SEQ ID NO: 595286 - RNA, 19 nt, Artificial Sequence
  Description of Artificial Sequence: Synthetic oligonucleotide
caugcgccguacauuggac

SEQ ID NO: 595287 - RNA, 19 nt, Artificial Sequence
  Description of Artificial Sequence: Synthetic oligonucleotide
ggauaagccuacacugggg

SEQ ID NO: 595288 - RNA, 19 nt, Artificial Sequence
  Description of Artificial Sequence: Synthetic oligonucleotide
uaacccucaccagucuucu

SEQ ID NO: 595289 - RNA, 19 nt, Artificial Sequence
  Description of Artificial Sequence: Synthetic oligonucleotide
gagagucucugcccacagc

SEQ ID NO: 595290 - RNA, 19 nt, Artificial Sequence
  Description of Artificial Sequence: Synthetic oligonucleotide
gccacgagacuccacuggg

SEQ ID NO: 595291 - RNA, 19 nt, Artificial Sequence
  Description of Artificial Sequence: Synthetic oligonucleotide
guuaugucucaugccgccc

SEQ ID NO: 595292 - RNA, 19 nt, Artificial Sequence
  Description of Artificial Sequence: Synthetic oligonucleotide
ggaggagugcccacguugg

SEQ ID NO: 595293 - RNA, 19 nt, Artificial Sequence
  Description of Artificial Sequence: Synthetic oligonucleotide
gggacuguuguccuagaca

SEQ ID NO: 595294 - RNA, 19 nt, Artificial Sequence
  Description of Artificial Sequence: Synthetic oligonucleotide
caccacggaguuaugucuc

SEQ ID NO: 595295 - RNA, 19 nt, Artificial Sequence
  Description of Artificial Sequence: Synthetic oligonucleotide
augcccgcaaugagcaugg

SEQ ID NO: 595296 - RNA, 19 nt, Artificial Sequence
  Description of Artificial Sequence: Synthetic oligonucleotide
guaacacaucagaaagaac

SEQ ID NO: 595297 - RNA, 19 nt, Artificial Sequence
  Description of Artificial Sequence: Synthetic oligonucleotide
uuccuccaaaccuuauguu

SEQ ID NO: 595298 - RNA, 19 nt, Artificial Sequence
  Description of Artificial Sequence: Synthetic oligonucleotide
caaaggugaggagccgggg

SEQ ID NO: 595299 - RNA, 19 nt, Artificial Sequence
  Description of Artificial Sequence: Synthetic oligonucleotide
ccauauuaacccucaccag

SEQ ID NO: 595300 - RNA, 19 nt, Artificial Sequence
  Description of Artificial Sequence: Synthetic oligonucleotide
agaagcugcccuggaugac

SEQ ID NO: 595301 - RNA, 19 nt, Artificial Sequence
  Description of Artificial Sequence: Synthetic oligonucleotide
auaagccuacacuggggua

SEQ ID NO: 595302 - RNA, 19 nt, Artificial Sequence
  Description of Artificial Sequence: Synthetic oligonucleotide
agcgucugcacagcacagg

SEQ ID NO: 595303 - RNA, 19 nt, Artificial Sequence
  Description of Artificial Sequence: Synthetic oligonucleotide
ugugcaugcgccguacauu

SEQ ID NO: 595304 - RNA, 19 nt, Artificial Sequence
  Description of Artificial Sequence: Synthetic oligonucleotide
auccugucagccccugcug

SEQ ID NO: 595305 - RNA, 19 nt, Artificial Sequence
  Description of Artificial Sequence: Synthetic oligonucleotide
augcgccguacauuggacu

SEQ ID NO: 595306 - RNA, 19 nt, Artificial Sequence
  Description of Artificial Sequence: Synthetic oligonucleotide
ggcacgaggguccucacuc

SEQ ID NO: 595307 - RNA, 19 nt, Artificial Sequence
  Description of Artificial Sequence: Synthetic oligonucleotide
ggcaacuagggcauaguac

SEQ ID NO: 595308 - RNA, 19 nt, Artificial Sequence
  Description of Artificial Sequence: Synthetic oligonucleotide
cuagggcauaguaccagga

SEQ ID NO: 595309 - RNA, 19 nt, Artificial Sequence
  Description of Artificial Sequence: Synthetic oligonucleotide
cauuugcuuuccccauggc

SEQ ID NO: 595310 - RNA, 19 nt, Artificial Sequence
  Description of Artificial Sequence: Synthetic oligonucleotide
cuccacgcaccaacaacac

SEQ ID NO: 595311 - RNA, 19 nt, Artificial Sequence
  Description of Artificial Sequence: Synthetic oligonucleotide
gccaaguuuacaaacaggu

SEQ ID NO: 595312 - RNA, 19 nt, Artificial Sequence
  Description of Artificial Sequence: Synthetic oligonucleotide
cucuagucaggauaagccu

SEQ ID NO: 595313 - RNA, 19 nt, Artificial Sequence
  Description of Artificial Sequence: Synthetic oligonucleotide
acugggguaugggugaaaa

SEQ ID NO: 595314 - RNA, 19 nt, Artificial Sequence
  Description of Artificial Sequence: Synthetic oligonucleotide
gggguagggacuguugucc

SEQ ID NO: 595315 - RNA, 19 nt, Artificial Sequence
  Description of Artificial Sequence: Synthetic oligonucleotide
aacuggcaaguagguguag

SEQ ID NO: 595316 - RNA, 19 nt, Artificial Sequence
  Description of Artificial Sequence: Synthetic oligonucleotide
cucucgaaccuugcuggcc

SEQ ID NO: 595317 - RNA, 19 nt, Artificial Sequence
  Description of Artificial Sequence: Synthetic oligonucleotide
gaaucggggccgccaguug

SEQ ID NO: 595318 - RNA, 19 nt, Artificial Sequence
  Description of Artificial Sequence: Synthetic oligonucleotide
cuguuguccuagacacccc

SEQ ID NO: 595319 - RNA, 19 nt, Artificial Sequence
  Description of Artificial Sequence: Synthetic oligonucleotide
ggccacgagacuccacugg

SEQ ID NO: 595320 - RNA, 19 nt, Artificial Sequence
  Description of Artificial Sequence: Synthetic oligonucleotide
uguccgcucauagguauau

SEQ ID NO: 595321 - RNA, 19 nt, Artificial Sequence
  Description of Artificial Sequence: Synthetic oligonucleotide
aagacagugcccagugaua

SEQ ID NO: 595322 - RNA, 19 nt, Artificial Sequence
  Description of Artificial Sequence: Synthetic oligonucleotide
guauuugaaucggggccgc

SEQ ID NO: 595323 - RNA, 19 nt, Artificial Sequence
  Description of Artificial Sequence: Synthetic oligonucleotide
aggcauguacuugucucug

SEQ ID NO: 595324 - RNA, 19 nt, Artificial Sequence
  Description of Artificial Sequence: Synthetic oligonucleotide
uauuugaaucggggccgcc

SEQ ID NO: 595325 - RNA, 19 nt, Artificial Sequence
  Description of Artificial Sequence: Synthetic oligonucleotide
uugaaucggggccgccagu

SEQ ID NO: 595326 - RNA, 19 nt, Artificial Sequence
  Description of Artificial Sequence: Synthetic oligonucleotide
gcgcacagugucaauaaag

SEQ ID NO: 595327 - RNA, 19 nt, Artificial Sequence
  Description of Artificial Sequence: Synthetic oligonucleotide
ccuuauguuggcguagcag

SEQ ID NO: 595328 - RNA, 19 nt, Artificial Sequence
  Description of Artificial Sequence: Synthetic oligonucleotide
acgucaauguggcccucca

SEQ ID NO: 595329 - RNA, 19 nt, Artificial Sequence
  Description of Artificial Sequence: Synthetic oligonucleotide
uggcuugaugagagucucu

SEQ ID NO: 595330 - RNA, 19 nt, Artificial Sequence
  Description of Artificial Sequence: Synthetic oligonucleotide
ugaaucggggccgccaguu

SEQ ID NO: 595331 - RNA, 19 nt, Artificial Sequence
  Description of Artificial Sequence: Synthetic oligonucleotide
ugggagcgugugacaauga

SEQ ID NO: 595332 - RNA, 19 nt, Artificial Sequence
  Description of Artificial Sequence: Synthetic oligonucleotide
cccgcaaugagcauggcaa

SEQ ID NO: 595333 - RNA, 19 nt, Artificial Sequence
  Description of Artificial Sequence: Synthetic oligonucleotide
gucucaugccgcccaggcc

SEQ ID NO: 595334 - RNA, 19 nt, Artificial Sequence
  Description of Artificial Sequence: Synthetic oligonucleotide
gcgucugcacagcacaggc

SEQ ID NO: 595335 - RNA, 19 nt, Artificial Sequence
  Description of Artificial Sequence: Synthetic oligonucleotide
guagggguagggacuguug

SEQ ID NO: 595336 - RNA, 19 nt, Artificial Sequence
  Description of Artificial Sequence: Synthetic oligonucleotide
ccucuuaguaucccucccc

SEQ ID NO: 595337 - RNA, 19 nt, Artificial Sequence
  Description of Artificial Sequence: Synthetic oligonucleotide
cacguuggcucaccauuug

SEQ ID NO: 595338 - RNA, 19 nt, Artificial Sequence
  Description of Artificial Sequence: Synthetic oligonucleotide
ggcaaguagguguaggggu

SEQ ID NO: 595339 - RNA, 19 nt, Artificial Sequence
  Description of Artificial Sequence: Synthetic oligonucleotide
ggaggcaaugaggaugccc

SEQ ID NO: 595340 - RNA, 19 nt, Artificial Sequence
  Description of Artificial Sequence: Synthetic oligonucleotide
gaaucccgucacccacucc

SEQ ID NO: 595341 - RNA, 19 nt, Artificial Sequence
  Description of Artificial Sequence: Synthetic oligonucleotide
caaaucccauauuaacccu

SEQ ID NO: 595342 - RNA, 19 nt, Artificial Sequence
  Description of Artificial Sequence: Synthetic oligonucleotide
auugucugcucagcagccu

SEQ ID NO: 595343 - RNA, 19 nt, Artificial Sequence
  Description of Artificial Sequence: Synthetic oligonucleotide
gggcauaguaccaggagga

SEQ ID NO: 595344 - RNA, 19 nt, Artificial Sequence
  Description of Artificial Sequence: Synthetic oligonucleotide
aggccacgagacuccacug

SEQ ID NO: 595345 - RNA, 19 nt, Artificial Sequence
  Description of Artificial Sequence: Synthetic oligonucleotide
ccagacggaggugauacag

SEQ ID NO: 595346 - RNA, 19 nt, Artificial Sequence
  Description of Artificial Sequence: Synthetic oligonucleotide
agcgcacagugucaauaaa

SEQ ID NO: 595347 - RNA, 19 nt, Artificial Sequence
  Description of Artificial Sequence: Synthetic oligonucleotide
cacgaggguccucacucug

SEQ ID NO: 595348 - RNA, 19 nt, Artificial Sequence
  Description of Artificial Sequence: Synthetic oligonucleotide
gagaccuagcaaaacuggu

SEQ ID NO: 595349 - RNA, 19 nt, Artificial Sequence
  Description of Artificial Sequence: Synthetic oligonucleotide
ugccgucaggaggagugcc

SEQ ID NO: 595350 - RNA, 19 nt, Artificial Sequence
  Description of Artificial Sequence: Synthetic oligonucleotide
caacaauugucaggccuuc

SEQ ID NO: 595351 - RNA, 19 nt, Artificial Sequence
  Description of Artificial Sequence: Synthetic oligonucleotide
agucagcacuucaaggaau

SEQ ID NO: 595352 - RNA, 19 nt, Artificial Sequence
  Description of Artificial Sequence: Synthetic oligonucleotide
gacucaugccuaggaaaga

SEQ ID NO: 595353 - RNA, 19 nt, Artificial Sequence
  Description of Artificial Sequence: Synthetic oligonucleotide
uugcugggguagaaagcua

SEQ ID NO: 595354 - RNA, 19 nt, Artificial Sequence
  Description of Artificial Sequence: Synthetic oligonucleotide
cuucucuagucaggauaag

SEQ ID NO: 595355 - RNA, 19 nt, Artificial Sequence
  Description of Artificial Sequence: Synthetic oligonucleotide
gggagcgugugacaaugac

SEQ ID NO: 595356 - RNA, 19 nt, Artificial Sequence
  Description of Artificial Sequence: Synthetic oligonucleotide
uucagcgaugagugccguc

SEQ ID NO: 595357 - RNA, 19 nt, Artificial Sequence
  Description of Artificial Sequence: Synthetic oligonucleotide
cagcacaggccaaguuuac

SEQ ID NO: 595358 - RNA, 19 nt, Artificial Sequence
  Description of Artificial Sequence: Synthetic oligonucleotide
acucugucgccagccguag

SEQ ID NO: 595359 - RNA, 19 nt, Artificial Sequence
  Description of Artificial Sequence: Synthetic oligonucleotide
caggcauguucaguaggac

SEQ ID NO: 595360 - RNA, 19 nt, Artificial Sequence
  Description of Artificial Sequence: Synthetic oligonucleotide
aggucuucgucuagcuuca

SEQ ID NO: 595361 - RNA, 19 nt, Artificial Sequence
  Description of Artificial Sequence: Synthetic oligonucleotide
ccuccacgcaccaacaaca

SEQ ID NO: 595362 - RNA, 19 nt, Artificial Sequence
  Description of Artificial Sequence: Synthetic oligonucleotide
gcgugugacaaugacuuca

SEQ ID NO: 595363 - RNA, 19 nt, Artificial Sequence
  Description of Artificial Sequence: Synthetic oligonucleotide
uagucaggauaagccuaca

SEQ ID NO: 595364 - RNA, 19 nt, Artificial Sequence
  Description of Artificial Sequence: Synthetic oligonucleotide
ucgaaccuugcuggccacc

SEQ ID NO: 595365 - RNA, 19 nt, Artificial Sequence
  Description of Artificial Sequence: Synthetic oligonucleotide
gccaacaauugucaggccu

SEQ ID NO: 595366 - RNA, 19 nt, Artificial Sequence
  Description of Artificial Sequence: Synthetic oligonucleotide
gaugcccaguucagcgaug

SEQ ID NO: 595367 - RNA, 19 nt, Artificial Sequence
  Description of Artificial Sequence: Synthetic oligonucleotide
caacagugcauagcgugca

SEQ ID NO: 595368 - RNA, 19 nt, Artificial Sequence
  Description of Artificial Sequence: Synthetic oligonucleotide
cacgucaauguggcccucc

SEQ ID NO: 595369 - RNA, 19 nt, Artificial Sequence
  Description of Artificial Sequence: Synthetic oligonucleotide
ggacuaggcgggcaucaug

SEQ ID NO: 595370 - RNA, 19 nt, Artificial Sequence
  Description of Artificial Sequence: Synthetic oligonucleotide
augggugaaaaugccuaua

SEQ ID NO: 595371 - RNA, 19 nt, Artificial Sequence
  Description of Artificial Sequence: Synthetic oligonucleotide
agauggcuagauccuucuu

SEQ ID NO: 595372 - RNA, 19 nt, Artificial Sequence
  Description of Artificial Sequence: Synthetic oligonucleotide
ugcccacguuggcucacca

SEQ ID NO: 595373 - RNA, 19 nt, Artificial Sequence
  Description of Artificial Sequence: Synthetic oligonucleotide
ugguaugaggaggcccuuc

SEQ ID NO: 595374 - RNA, 19 nt, Artificial Sequence
  Description of Artificial Sequence: Synthetic oligonucleotide
ggcauaguaccaggaggag

SEQ ID NO: 595375 - RNA, 19 nt, Artificial Sequence
  Description of Artificial Sequence: Synthetic oligonucleotide
cagcgaugagugccgucag

SEQ ID NO: 595376 - RNA, 19 nt, Artificial Sequence
  Description of Artificial Sequence: Synthetic oligonucleotide
cucgaaccuugcuggccac

SEQ ID NO: 595377 - RNA, 19 nt, Artificial Sequence
  Description of Artificial Sequence: Synthetic oligonucleotide
ugggccagucccucucgaa

SEQ ID NO: 595378 - RNA, 19 nt, Artificial Sequence
  Description of Artificial Sequence: Synthetic oligonucleotide
ugagugccgucaggaggag

SEQ ID NO: 595379 - RNA, 19 nt, Artificial Sequence
  Description of Artificial Sequence: Synthetic oligonucleotide
cacgagacuccacugggcu

SEQ ID NO: 595380 - RNA, 19 nt, Artificial Sequence
  Description of Artificial Sequence: Synthetic oligonucleotide
caccaacaacacucguuca

SEQ ID NO: 595381 - RNA, 19 nt, Artificial Sequence
  Description of Artificial Sequence: Synthetic oligonucleotide
gcaugcgccguacauugga

SEQ ID NO: 595382 - RNA, 19 nt, Artificial Sequence
  Description of Artificial Sequence: Synthetic oligonucleotide
ccccucuuaguaucccucc

SEQ ID NO: 595383 - RNA, 19 nt, Artificial Sequence
  Description of Artificial Sequence: Synthetic oligonucleotide
cggaguuaugucucaugcc

SEQ ID NO: 595384 - RNA, 19 nt, Artificial Sequence
  Description of Artificial Sequence: Synthetic oligonucleotide
cccagccuuaagcugggag

SEQ ID NO: 595385 - RNA, 19 nt, Artificial Sequence
  Description of Artificial Sequence: Synthetic oligonucleotide
cauaagagccaggcagaga

SEQ ID NO: 595386 - RNA, 19 nt, Artificial Sequence
  Description of Artificial Sequence: Synthetic oligonucleotide
gggccagucccucucgaac

SEQ ID NO: 595387 - RNA, 19 nt, Artificial Sequence
  Description of Artificial Sequence: Synthetic oligonucleotide
acgcaccaacaacacucgu

SEQ ID NO: 595388 - RNA, 19 nt, Artificial Sequence
  Description of Artificial Sequence: Synthetic oligonucleotide
gguccaagcuugguuuccc

SEQ ID NO: 595389 - RNA, 19 nt, Artificial Sequence
  Description of Artificial Sequence: Synthetic oligonucleotide
gguacagcgcacaguguca

SEQ ID NO: 595390 - RNA, 19 nt, Artificial Sequence
  Description of Artificial Sequence: Synthetic oligonucleotide
ucggggccgccaguugggg

SEQ ID NO: 595391 - RNA, 19 nt, Artificial Sequence
  Description of Artificial Sequence: Synthetic oligonucleotide
cagaagcgucugcacagca

SEQ ID NO: 595392 - RNA, 19 nt, Artificial Sequence
  Description of Artificial Sequence: Synthetic oligonucleotide
cccagugauaguauuugaa

SEQ ID NO: 595393 - RNA, 19 nt, Artificial Sequence
  Description of Artificial Sequence: Synthetic oligonucleotide
caggccacgagacuccacu

SEQ ID NO: 595394 - RNA, 19 nt, Artificial Sequence
  Description of Artificial Sequence: Synthetic oligonucleotide
cccucuuaguaucccuccc

SEQ ID NO: 595395 - RNA, 19 nt, Artificial Sequence
  Description of Artificial Sequence: Synthetic oligonucleotide
cacucguucaaggcccuca

SEQ ID NO: 595396 - RNA, 19 nt, Artificial Sequence
  Description of Artificial Sequence: Synthetic oligonucleotide
gccuacacugggguauggg

SEQ ID NO: 595397 - RNA, 19 nt, Artificial Sequence
  Description of Artificial Sequence: Synthetic oligonucleotide
guacagcgcacagugucaa

SEQ ID NO: 595398 - RNA, 19 nt, Artificial Sequence
  Description of Artificial Sequence: Synthetic oligonucleotide
caccaugucaagggaggca

SEQ ID NO: 595399 - RNA, 19 nt, Artificial Sequence
  Description of Artificial Sequence: Synthetic oligonucleotide
ccaaguuuacaaacaggua

SEQ ID NO: 595400 - RNA, 19 nt, Artificial Sequence
  Description of Artificial Sequence: Synthetic oligonucleotide
ccaacuccaggccacgaga

SEQ ID NO: 595401 - RNA, 19 nt, Artificial Sequence
  Description of Artificial Sequence: Synthetic oligonucleotide
gcucucuaagaagcugccc

SEQ ID NO: 595402 - RNA, 19 nt, Artificial Sequence
  Description of Artificial Sequence: Synthetic oligonucleotide
ggcuuccagacggagguga

SEQ ID NO: 595403 - RNA, 19 nt, Artificial Sequence
  Description of Artificial Sequence: Synthetic oligonucleotide
agccuuaagcugggaggca

SEQ ID NO: 595404 - RNA, 19 nt, Artificial Sequence
  Description of Artificial Sequence: Synthetic oligonucleotide
gagacuccacugggcucag

SEQ ID NO: 595405 - RNA, 19 nt, Artificial Sequence
  Description of Artificial Sequence: Synthetic oligonucleotide
guuguccuagacaccccaa

SEQ ID NO: 595406 - RNA, 19 nt, Artificial Sequence
  Description of Artificial Sequence: Synthetic oligonucleotide
aggcagagacucaugccua

SEQ ID NO: 595407 - RNA, 19 nt, Artificial Sequence
  Description of Artificial Sequence: Synthetic oligonucleotide
uggacugauccggcuuaau

SEQ ID NO: 595408 - RNA, 19 nt, Artificial Sequence
  Description of Artificial Sequence: Synthetic oligonucleotide
ccgcaaugagcauggcaac

SEQ ID NO: 595409 - RNA, 19 nt, Artificial Sequence
  Description of Artificial Sequence: Synthetic oligonucleotide
ggcccucggauccauuuaa

SEQ ID NO: 595410 - RNA, 19 nt, Artificial Sequence
  Description of Artificial Sequence: Synthetic oligonucleotide
guccgcucauagguauaug

SEQ ID NO: 595411 - RNA, 19 nt, Artificial Sequence
  Description of Artificial Sequence: Synthetic oligonucleotide
ggagcgugugacaaugacu

SEQ ID NO: 595412 - RNA, 19 nt, Artificial Sequence
  Description of Artificial Sequence: Synthetic oligonucleotide
ccagacugggacuucaaau

SEQ ID NO: 595413 - RNA, 19 nt, Artificial Sequence
  Description of Artificial Sequence: Synthetic oligonucleotide
ucgaucccgcucggucuug

SEQ ID NO: 595414 - RNA, 19 nt, Artificial Sequence
  Description of Artificial Sequence: Synthetic oligonucleotide
caacaccacggaguuaugu

SEQ ID NO: 595415 - RNA, 19 nt, Artificial Sequence
  Description of Artificial Sequence: Synthetic oligonucleotide
gcugagugccugucuuuga

SEQ ID NO: 595416 - RNA, 19 nt, Artificial Sequence
  Description of Artificial Sequence: Synthetic oligonucleotide
caguguccgcucauaggua

SEQ ID NO: 595417 - RNA, 19 nt, Artificial Sequence
  Description of Artificial Sequence: Synthetic oligonucleotide
gcccgcaaugagcauggca

SEQ ID NO: 595418 - RNA, 19 nt, Artificial Sequence
  Description of Artificial Sequence: Synthetic oligonucleotide
caggcacgaggguccucac

SEQ ID NO: 595419 - RNA, 19 nt, Artificial Sequence
  Description of Artificial Sequence: Synthetic oligonucleotide
caccauuugcuuuccccau

SEQ ID NO: 595420 - RNA, 19 nt, Artificial Sequence
  Description of Artificial Sequence: Synthetic oligonucleotide
ccaccaugucaagggaggc

SEQ ID NO: 595421 - RNA, 19 nt, Artificial Sequence
  Description of Artificial Sequence: Synthetic oligonucleotide
ccucggauccauuuaaauu

SEQ ID NO: 595422 - RNA, 19 nt, Artificial Sequence
  Description of Artificial Sequence: Synthetic oligonucleotide
ggcgggcaucaugggagcg

SEQ ID NO: 595423 - RNA, 19 nt, Artificial Sequence
  Description of Artificial Sequence: Synthetic oligonucleotide
caguaggacuaggcgggca

SEQ ID NO: 595424 - RNA, 19 nt, Artificial Sequence
  Description of Artificial Sequence: Synthetic oligonucleotide
ccaacaauugucaggccuu

SEQ ID NO: 595425 - RNA, 19 nt, Artificial Sequence
  Description of Artificial Sequence: Synthetic oligonucleotide
aggcccucagucagcacuu

SEQ ID NO: 595426 - RNA, 19 nt, Artificial Sequence
  Description of Artificial Sequence: Synthetic oligonucleotide
gguacucaauguacuugua

SEQ ID NO: 595427 - RNA, 19 nt, Artificial Sequence
  Description of Artificial Sequence: Synthetic oligonucleotide
cccaacaccacggaguuau

SEQ ID NO: 595428 - RNA, 19 nt, Artificial Sequence
  Description of Artificial Sequence: Synthetic oligonucleotide
caugggagcgugugacaau

SEQ ID NO: 595429 - RNA, 19 nt, Artificial Sequence
  Description of Artificial Sequence: Synthetic oligonucleotide
cuuccagacggaggugaua

SEQ ID NO: 595430 - RNA, 19 nt, Artificial Sequence
  Description of Artificial Sequence: Synthetic oligonucleotide
gcccucagucagcacuuca

SEQ ID NO: 595431 - RNA, 19 nt, Artificial Sequence
  Description of Artificial Sequence: Synthetic oligonucleotide
ugcccgcaaugagcauggc

SEQ ID NO: 595432 - RNA, 19 nt, Artificial Sequence
  Description of Artificial Sequence: Synthetic oligonucleotide
cugggguaugggugaaaau

SEQ ID NO: 595433 - RNA, 19 nt, Artificial Sequence
  Description of Artificial Sequence: Synthetic oligonucleotide
cgugcagcacucagggaca

SEQ ID NO: 595434 - RNA, 19 nt, Artificial Sequence
  Description of Artificial Sequence: Synthetic oligonucleotide
gcuccaugggcccucggau

SEQ ID NO: 595435 - RNA, 19 nt, Artificial Sequence
  Description of Artificial Sequence: Synthetic oligonucleotide
ccaacaccacggaguuaug

SEQ ID NO: 595436 - RNA, 19 nt, Artificial Sequence
  Description of Artificial Sequence: Synthetic oligonucleotide
ccccuugguacucaaugua

SEQ ID NO: 595437 - RNA, 19 nt, Artificial Sequence
  Description of Artificial Sequence: Synthetic oligonucleotide
ccggcuuaaugugcaccag

SEQ ID NO: 595438 - RNA, 19 nt, Artificial Sequence
  Description of Artificial Sequence: Synthetic oligonucleotide
cgaaucccgucacccacuc

SEQ ID NO: 595439 - RNA, 19 nt, Artificial Sequence
  Description of Artificial Sequence: Synthetic oligonucleotide
guguccgcucauagguaua

SEQ ID NO: 595440 - RNA, 19 nt, Artificial Sequence
  Description of Artificial Sequence: Synthetic oligonucleotide
gccgcccaggccacaagac

SEQ ID NO: 595441 - RNA, 19 nt, Artificial Sequence
  Description of Artificial Sequence: Synthetic oligonucleotide
ggccucaccauagcucucu

SEQ ID NO: 595442 - RNA, 19 nt, Artificial Sequence
  Description of Artificial Sequence: Synthetic oligonucleotide
gacaggccucgaaucccgu

SEQ ID NO: 595443 - RNA, 19 nt, Artificial Sequence
  Description of Artificial Sequence: Synthetic oligonucleotide
cccacguuggcucaccauu

SEQ ID NO: 595444 - RNA, 19 nt, Artificial Sequence
  Description of Artificial Sequence: Synthetic oligonucleotide
gagugccgucaggaggagu

SEQ ID NO: 595445 - RNA, 19 nt, Artificial Sequence
  Description of Artificial Sequence: Synthetic oligonucleotide
cccucggauccauuuaaau

SEQ ID NO: 595446 - RNA, 19 nt, Artificial Sequence
  Description of Artificial Sequence: Synthetic oligonucleotide
gcacgaggguccucacucu

SEQ ID NO: 595447 - RNA, 19 nt, Artificial Sequence
  Description of Artificial Sequence: Synthetic oligonucleotide
ccgucaggaggagugccca

SEQ ID NO: 595448 - RNA, 19 nt, Artificial Sequence
  Description of Artificial Sequence: Synthetic oligonucleotide
cgaucccgcucggucuugg

SEQ ID NO: 595449 - RNA, 19 nt, Artificial Sequence
  Description of Artificial Sequence: Synthetic oligonucleotide
cuucucgaucccgcucggu

SEQ ID NO: 595450 - RNA, 19 nt, Artificial Sequence
  Description of Artificial Sequence: Synthetic oligonucleotide
cgcaccaacaacacucguu

SEQ ID NO: 595451 - RNA, 19 nt, Artificial Sequence
  Description of Artificial Sequence: Synthetic oligonucleotide
gcccucggauccauuuaaa

SEQ ID NO: 595452 - RNA, 19 nt, Artificial Sequence
  Description of Artificial Sequence: Synthetic oligonucleotide
ccacguuggcucaccauuu

SEQ ID NO: 595453 - RNA, 19 nt, Artificial Sequence
  Description of Artificial Sequence: Synthetic oligonucleotide
gccucaccauagcucucua

SEQ ID NO: 595454 - RNA, 19 nt, Artificial Sequence
  Description of Artificial Sequence: Synthetic oligonucleotide
ggccagacugggacuucaa

SEQ ID NO: 595455 - RNA, 19 nt, Artificial Sequence
  Description of Artificial Sequence: Synthetic oligonucleotide
gcgggcaucaugggagcgu

SEQ ID NO: 595456 - RNA, 19 nt, Artificial Sequence
  Description of Artificial Sequence: Synthetic oligonucleotide
ccgcagggcugagugccug

SEQ ID NO: 595457 - RNA, 19 nt, Artificial Sequence
  Description of Artificial Sequence: Synthetic oligonucleotide
cagccccuugguacucaau

SEQ ID NO: 595458 - RNA, 19 nt, Artificial Sequence
  Description of Artificial Sequence: Synthetic oligonucleotide
ccgcccaggccacaagacu

SEQ ID NO: 595459 - RNA, 19 nt, Artificial Sequence
  Description of Artificial Sequence: Synthetic oligonucleotide
gccguacauuggacugauc

SEQ ID NO: 595460 - RNA, 19 nt, Artificial Sequence
  Description of Artificial Sequence: Synthetic oligonucleotide
gcccacguuggcucaccau

SEQ ID NO: 595461 - RNA, 19 nt, Artificial Sequence
  Description of Artificial Sequence: Synthetic oligonucleotide
gggcauggcuaggguccca

SEQ ID NO: 595462 - RNA, 19 nt, Artificial Sequence
  Description of Artificial Sequence: Synthetic oligonucleotide
ccaugucaagggaggcaau

SEQ ID NO: 595463 - RNA, 19 nt, Artificial Sequence
  Description of Artificial Sequence: Synthetic oligonucleotide
ccgcucggucuuggucagc

SEQ ID NO: 595464 - RNA, 19 nt, Artificial Sequence
  Description of Artificial Sequence: Synthetic oligonucleotide
ccauuccacuuggcuugau

SEQ ID NO: 595465 - RNA, 19 nt, Artificial Sequence
  Description of Artificial Sequence: Synthetic oligonucleotide
aaagguacuacauaauagc

SEQ ID NO: 595466 - RNA, 19 nt, Artificial Sequence
  Description of Artificial Sequence: Synthetic oligonucleotide
aauaauuucacauuuggga

SEQ ID NO: 595467 - RNA, 19 nt, Artificial Sequence
  Description of Artificial Sequence: Synthetic oligonucleotide
uuugggauaauauuguugg

SEQ ID NO: 595468 - RNA, 19 nt, Artificial Sequence
  Description of Artificial Sequence: Synthetic oligonucleotide
auaaccuggaaacugagcc

SEQ ID NO: 595469 - RNA, 19 nt, Artificial Sequence
  Description of Artificial Sequence: Synthetic oligonucleotide
uuugacaugaggcagacug

SEQ ID NO: 595470 - RNA, 19 nt, Artificial Sequence
  Description of Artificial Sequence: Synthetic oligonucleotide
aaaugcauggguuaauguc

SEQ ID NO: 595471 - RNA, 19 nt, Artificial Sequence
  Description of Artificial Sequence: Synthetic oligonucleotide
uucacuauaguauaaaagu

SEQ ID NO: 595472 - RNA, 19 nt, Artificial Sequence
  Description of Artificial Sequence: Synthetic oligonucleotide
uugugcuagaauaaaauag

SEQ ID NO: 595473 - RNA, 19 nt, Artificial Sequence
  Description of Artificial Sequence: Synthetic oligonucleotide
uguuauacaagaauaagau

SEQ ID NO: 595474 - RNA, 19 nt, Artificial Sequence
  Description of Artificial Sequence: Synthetic oligonucleotide
caugcaauuaaagauaacg

SEQ ID NO: 595475 - RNA, 19 nt, Artificial Sequence
  Description of Artificial Sequence: Synthetic oligonucleotide
aauagauauaacccugaag

SEQ ID NO: 595476 - RNA, 19 nt, Artificial Sequence
  Description of Artificial Sequence: Synthetic oligonucleotide
uucuaauuagaaaacauuc

SEQ ID NO: 595477 - RNA, 19 nt, Artificial Sequence
  Description of Artificial Sequence: Synthetic oligonucleotide
acauuaguaauugaguagc

SEQ ID NO: 595478 - RNA, 19 nt, Artificial Sequence
  Description of Artificial Sequence: Synthetic oligonucleotide
ucugcuaaguguaaauggg

SEQ ID NO: 595479 - RNA, 19 nt, Artificial Sequence
  Description of Artificial Sequence: Synthetic oligonucleotide
aaagauaacgggcuuauaa

SEQ ID NO: 595480 - RNA, 19 nt, Artificial Sequence
  Description of Artificial Sequence: Synthetic oligonucleotide
ucuacaugacuuuagaacu

SEQ ID NO: 595481 - RNA, 19 nt, Artificial Sequence
  Description of Artificial Sequence: Synthetic oligonucleotide
uuaacgauagcuugaaaug

SEQ ID NO: 595482 - RNA, 19 nt, Artificial Sequence
  Description of Artificial Sequence: Synthetic oligonucleotide
aagauaacgggcuuauaag

SEQ ID NO: 595483 - RNA, 19 nt, Artificial Sequence
  Description of Artificial Sequence: Synthetic oligonucleotide
aaugcauggguuaaugucg

SEQ ID NO: 595484 - RNA, 19 nt, Artificial Sequence
  Description of Artificial Sequence: Synthetic oligonucleotide
aaauggguaugguauuccc

SEQ ID NO: 595485 - RNA, 19 nt, Artificial Sequence
  Description of Artificial Sequence: Synthetic oligonucleotide
uuuaacgauagcuugaaau

SEQ ID NO: 595486 - RNA, 19 nt, Artificial Sequence
  Description of Artificial Sequence: Synthetic oligonucleotide
auaacccugaaguuuacac

SEQ ID NO: 595487 - RNA, 19 nt, Artificial Sequence
  Description of Artificial Sequence: Synthetic oligonucleotide
cacauuuugcuuaagacug

SEQ ID NO: 595488 - RNA, 19 nt, Artificial Sequence
  Description of Artificial Sequence: Synthetic oligonucleotide
ucuaauuagaaaacauucu

SEQ ID NO: 595489 - RNA, 19 nt, Artificial Sequence
  Description of Artificial Sequence: Synthetic oligonucleotide
uucuacaugacuuuagaac

SEQ ID NO: 595490 - RNA, 19 nt, Artificial Sequence
  Description of Artificial Sequence: Synthetic oligonucleotide
uuacauuuuaacgauagcu

SEQ ID NO: 595491 - RNA, 19 nt, Artificial Sequence
  Description of Artificial Sequence: Synthetic oligonucleotide
uuugcuugggauuuuagac

SEQ ID NO: 595492 - RNA, 19 nt, Artificial Sequence
  Description of Artificial Sequence: Synthetic oligonucleotide
uuaaugucgaugcaccuug

SEQ ID NO: 595493 - RNA, 19 nt, Artificial Sequence
  Description of Artificial Sequence: Synthetic oligonucleotide
aaugcuaucugguuuguaa

SEQ ID NO: 595494 - RNA, 19 nt, Artificial Sequence
  Description of Artificial Sequence: Synthetic oligonucleotide
cacauuugggauaauauug

SEQ ID NO: 595495 - RNA, 19 nt, Artificial Sequence
  Description of Artificial Sequence: Synthetic oligonucleotide
cauggguuaaugucgaugc

SEQ ID NO: 595496 - RNA, 19 nt, Artificial Sequence
  Description of Artificial Sequence: Synthetic oligonucleotide
cauaauagauauaacccug

SEQ ID NO: 595497 - RNA, 19 nt, Artificial Sequence
  Description of Artificial Sequence: Synthetic oligonucleotide
auaacgggcuuauaagugg

SEQ ID NO: 595498 - RNA, 19 nt, Artificial Sequence
  Description of Artificial Sequence: Synthetic oligonucleotide
ucggagacuauucucauga

SEQ ID NO: 595499 - RNA, 19 nt, Artificial Sequence
  Description of Artificial Sequence: Synthetic oligonucleotide
uuuugugcuagaauaaaau

SEQ ID NO: 595500 - RNA, 19 nt, Artificial Sequence
  Description of Artificial Sequence: Synthetic oligonucleotide
acuccugacaucuucgcac

SEQ ID NO: 595501 - RNA, 19 nt, Artificial Sequence
  Description of Artificial Sequence: Synthetic oligonucleotide
agaguuuugugcuagaaua

SEQ ID NO: 595502 - RNA, 19 nt, Artificial Sequence
  Description of Artificial Sequence: Synthetic oligonucleotide
agaauggcauaauagauau

SEQ ID NO: 595503 - RNA, 19 nt, Artificial Sequence
  Description of Artificial Sequence: Synthetic oligonucleotide
uaacgauagcuugaaaugg

SEQ ID NO: 595504 - RNA, 19 nt, Artificial Sequence
  Description of Artificial Sequence: Synthetic oligonucleotide
ugcuaagggguuuugaucu

SEQ ID NO: 595505 - RNA, 19 nt, Artificial Sequence
  Description of Artificial Sequence: Synthetic oligonucleotide
cuauaguauaaaaguaaag

SEQ ID NO: 595506 - RNA, 19 nt, Artificial Sequence
  Description of Artificial Sequence: Synthetic oligonucleotide
gauuacaggugcuuggcug

SEQ ID NO: 595507 - RNA, 19 nt, Artificial Sequence
  Description of Artificial Sequence: Synthetic oligonucleotide
auuuaguuguuucaggaaa

SEQ ID NO: 595508 - RNA, 19 nt, Artificial Sequence
  Description of Artificial Sequence: Synthetic oligonucleotide
acaaaaucgucauggcuuc

SEQ ID NO: 595509 - RNA, 19 nt, Artificial Sequence
  Description of Artificial Sequence: Synthetic oligonucleotide
aauugaguagcauucuauu

SEQ ID NO: 595510 - RNA, 19 nt, Artificial Sequence
  Description of Artificial Sequence: Synthetic oligonucleotide
uuugaacucaaguuugccu

SEQ ID NO: 595511 - RNA, 19 nt, Artificial Sequence
  Description of Artificial Sequence: Synthetic oligonucleotide
ucaagguacauuacuaaau

SEQ ID NO: 595512 - RNA, 19 nt, Artificial Sequence
  Description of Artificial Sequence: Synthetic oligonucleotide
aauaagauguccacuaaau

SEQ ID NO: 595513 - RNA, 19 nt, Artificial Sequence
  Description of Artificial Sequence: Synthetic oligonucleotide
aagaauagcuuaaaagacu

SEQ ID NO: 595514 - RNA, 19 nt, Artificial Sequence
  Description of Artificial Sequence: Synthetic oligonucleotide
ugcaauugaacuacuccug

SEQ ID NO: 595515 - RNA, 19 nt, Artificial Sequence
  Description of Artificial Sequence: Synthetic oligonucleotide
cacauuaguaauugaguag

SEQ ID NO: 595516 - RNA, 19 nt, Artificial Sequence
  Description of Artificial Sequence: Synthetic oligonucleotide
ucaucuaugguagaugaac

SEQ ID NO: 595517 - RNA, 19 nt, Artificial Sequence
  Description of Artificial Sequence: Synthetic oligonucleotide
ucacauuaguaauugagua

SEQ ID NO: 595518 - RNA, 19 nt, Artificial Sequence
  Description of Artificial Sequence: Synthetic oligonucleotide
ucuugcaacguccaagagu

SEQ ID NO: 595519 - RNA, 19 nt, Artificial Sequence
  Description of Artificial Sequence: Synthetic oligonucleotide
ugucuuacaaauguucuga

SEQ ID NO: 595520 - RNA, 19 nt, Artificial Sequence
  Description of Artificial Sequence: Synthetic oligonucleotide
ugugcaaaagguacuacau

SEQ ID NO: 595521 - RNA, 19 nt, Artificial Sequence
  Description of Artificial Sequence: Synthetic oligonucleotide
aacgauagcuugaaauggg

SEQ ID NO: 595522 - RNA, 19 nt, Artificial Sequence
  Description of Artificial Sequence: Synthetic oligonucleotide
aaaagcggccaauauugcu

SEQ ID NO: 595523 - RNA, 19 nt, Artificial Sequence
  Description of Artificial Sequence: Synthetic oligonucleotide
ugaccauuuauagaguuga

SEQ ID NO: 595524 - RNA, 19 nt, Artificial Sequence
  Description of Artificial Sequence: Synthetic oligonucleotide
uuauagaguugacuccucc

SEQ ID NO: 595525 - RNA, 19 nt, Artificial Sequence
  Description of Artificial Sequence: Synthetic oligonucleotide
ggcauaauagauauaaccc

SEQ ID NO: 595526 - RNA, 19 nt, Artificial Sequence
  Description of Artificial Sequence: Synthetic oligonucleotide
aauagcaguaucugcccgu

SEQ ID NO: 595527 - RNA, 19 nt, Artificial Sequence
  Description of Artificial Sequence: Synthetic oligonucleotide
agauaacgggcuuauaagu

SEQ ID NO: 595528 - RNA, 19 nt, Artificial Sequence
  Description of Artificial Sequence: Synthetic oligonucleotide
agauugacauucaaauuac

SEQ ID NO: 595529 - RNA, 19 nt, Artificial Sequence
  Description of Artificial Sequence: Synthetic oligonucleotide
caauauauugcuaaggggu

SEQ ID NO: 595530 - RNA, 19 nt, Artificial Sequence
  Description of Artificial Sequence: Synthetic oligonucleotide
caggcuguuaaacccaucg

SEQ ID NO: 595531 - RNA, 19 nt, Artificial Sequence
  Description of Artificial Sequence: Synthetic oligonucleotide
uaauugaguagcauucuau

SEQ ID NO: 595532 - RNA, 19 nt, Artificial Sequence
  Description of Artificial Sequence: Synthetic oligonucleotide
agcacacagauugacauuc

SEQ ID NO: 595533 - RNA, 19 nt, Artificial Sequence
  Description of Artificial Sequence: Synthetic oligonucleotide
aauggguaugguauucccg

SEQ ID NO: 595534 - RNA, 19 nt, Artificial Sequence
  Description of Artificial Sequence: Synthetic oligonucleotide
cauugggaaaugaaaacuc

SEQ ID NO: 595535 - RNA, 19 nt, Artificial Sequence
  Description of Artificial Sequence: Synthetic oligonucleotide
ugcugucacaauauauugc

SEQ ID NO: 595536 - RNA, 19 nt, Artificial Sequence
  Description of Artificial Sequence: Synthetic oligonucleotide
uacaccuauggguaagucc

SEQ ID NO: 595537 - RNA, 19 nt, Artificial Sequence
  Description of Artificial Sequence: Synthetic oligonucleotide
uccuuugcgggguacauca

SEQ ID NO: 595538 - RNA, 19 nt, Artificial Sequence
  Description of Artificial Sequence: Synthetic oligonucleotide
aaaugggaacagcugguca

SEQ ID NO: 595539 - RNA, 19 nt, Artificial Sequence
  Description of Artificial Sequence: Synthetic oligonucleotide
aacacaaccaugucauuua

SEQ ID NO: 595540 - RNA, 19 nt, Artificial Sequence
  Description of Artificial Sequence: Synthetic oligonucleotide
gaauagcaguaucugcccg

SEQ ID NO: 595541 - RNA, 19 nt, Artificial Sequence
  Description of Artificial Sequence: Synthetic oligonucleotide
auuuauagaguugacuccu

SEQ ID NO: 595542 - RNA, 19 nt, Artificial Sequence
  Description of Artificial Sequence: Synthetic oligonucleotide
gauuuugaccauuuauaga

SEQ ID NO: 595543 - RNA, 19 nt, Artificial Sequence
  Description of Artificial Sequence: Synthetic oligonucleotide
acucacauuaguaauugag

SEQ ID NO: 595544 - RNA, 19 nt, Artificial Sequence
  Description of Artificial Sequence: Synthetic oligonucleotide
uugggaaaugaaaacucac

SEQ ID NO: 595545 - RNA, 19 nt, Artificial Sequence
  Description of Artificial Sequence: Synthetic oligonucleotide
uugaccauuuauagaguug

SEQ ID NO: 595546 - RNA, 19 nt, Artificial Sequence
  Description of Artificial Sequence: Synthetic oligonucleotide
gaaauuacauuuuaacgau

SEQ ID NO: 595547 - RNA, 19 nt, Artificial Sequence
  Description of Artificial Sequence: Synthetic oligonucleotide
ucuaugguagaugaacugu

SEQ ID NO: 595548 - RNA, 19 nt, Artificial Sequence
  Description of Artificial Sequence: Synthetic oligonucleotide
ugggauaauauuguuggga

SEQ ID NO: 595549 - RNA, 19 nt, Artificial Sequence
  Description of Artificial Sequence: Synthetic oligonucleotide
ucaaguuugccugucucag

SEQ ID NO: 595550 - RNA, 19 nt, Artificial Sequence
  Description of Artificial Sequence: Synthetic oligonucleotide
cuguuaaacccaucgguag

SEQ ID NO: 595551 - RNA, 19 nt, Artificial Sequence
  Description of Artificial Sequence: Synthetic oligonucleotide
ugucgaugcaccuuggaau

SEQ ID NO: 595552 - RNA, 19 nt, Artificial Sequence
  Description of Artificial Sequence: Synthetic oligonucleotide
uaucucaguaaaagagagc

SEQ ID NO: 595553 - RNA, 19 nt, Artificial Sequence
  Description of Artificial Sequence: Synthetic oligonucleotide
uaugguagaugaacuguac

SEQ ID NO: 595554 - RNA, 19 nt, Artificial Sequence
  Description of Artificial Sequence: Synthetic oligonucleotide
ugcuuguaaagauuuugac

SEQ ID NO: 595555 - RNA, 19 nt, Artificial Sequence
  Description of Artificial Sequence: Synthetic oligonucleotide
ccauuuauagaguugacuc

SEQ ID NO: 595556 - RNA, 19 nt, Artificial Sequence
  Description of Artificial Sequence: Synthetic oligonucleotide
agcgcuaagucaccaaaag

SEQ ID NO: 595557 - RNA, 19 nt, Artificial Sequence
  Description of Artificial Sequence: Synthetic oligonucleotide
cagauugacauucaaauua

SEQ ID NO: 595558 - RNA, 19 nt, Artificial Sequence
  Description of Artificial Sequence: Synthetic oligonucleotide
uccugucuuacaaauguuc

SEQ ID NO: 595559 - RNA, 19 nt, Artificial Sequence
  Description of Artificial Sequence: Synthetic oligonucleotide
aagguacuacauaauagca

SEQ ID NO: 595560 - RNA, 19 nt, Artificial Sequence
  Description of Artificial Sequence: Synthetic oligonucleotide
uaaaugcauggguuaaugu

SEQ ID NO: 595561 - RNA, 19 nt, Artificial Sequence
  Description of Artificial Sequence: Synthetic oligonucleotide
acuuaaaugcacauaauua

SEQ ID NO: 595562 - RNA, 19 nt, Artificial Sequence
  Description of Artificial Sequence: Synthetic oligonucleotide
uugcaaaauucucuguuau

SEQ ID NO: 595563 - RNA, 19 nt, Artificial Sequence
  Description of Artificial Sequence: Synthetic oligonucleotide
aguagcauucuauuuggaa

SEQ ID NO: 595564 - RNA, 19 nt, Artificial Sequence
  Description of Artificial Sequence: Synthetic oligonucleotide
cuguguuugagaccugagg

SEQ ID NO: 595565 - RNA, 19 nt, Artificial Sequence
  Description of Artificial Sequence: Synthetic oligonucleotide
aucuaugguagaugaacug

SEQ ID NO: 595566 - RNA, 19 nt, Artificial Sequence
  Description of Artificial Sequence: Synthetic oligonucleotide
uuuguugcuuugcugucac

SEQ ID NO: 595567 - RNA, 19 nt, Artificial Sequence
  Description of Artificial Sequence: Synthetic oligonucleotide
uacaucauuaccucagguu

SEQ ID NO: 595568 - RNA, 19 nt, Artificial Sequence
  Description of Artificial Sequence: Synthetic oligonucleotide
guaucucuggcucuugccc

SEQ ID NO: 595569 - RNA, 19 nt, Artificial Sequence
  Description of Artificial Sequence: Synthetic oligonucleotide
gacacaaaaucgucauggc

SEQ ID NO: 595570 - RNA, 19 nt, Artificial Sequence
  Description of Artificial Sequence: Synthetic oligonucleotide
uaacgggcuuauaaguggc

SEQ ID NO: 595571 - RNA, 19 nt, Artificial Sequence
  Description of Artificial Sequence: Synthetic oligonucleotide
acacaaaaucgucauggcu

SEQ ID NO: 595572 - RNA, 19 nt, Artificial Sequence
  Description of Artificial Sequence: Synthetic oligonucleotide
auuugggauaauauuguug

SEQ ID NO: 595573 - RNA, 19 nt, Artificial Sequence
  Description of Artificial Sequence: Synthetic oligonucleotide
aaacccaucgguagcucac

SEQ ID NO: 595574 - RNA, 19 nt, Artificial Sequence
  Description of Artificial Sequence: Synthetic oligonucleotide
cuauggguaaguccuuugc

SEQ ID NO: 595575 - RNA, 19 nt, Artificial Sequence
  Description of Artificial Sequence: Synthetic oligonucleotide
agacuauucucaugaaggu

SEQ ID NO: 595576 - RNA, 19 nt, Artificial Sequence
  Description of Artificial Sequence: Synthetic oligonucleotide
uuuugaccauuuauagagu

SEQ ID NO: 595577 - RNA, 19 nt, Artificial Sequence
  Description of Artificial Sequence: Synthetic oligonucleotide
agacucaagguacauuacu

SEQ ID NO: 595578 - RNA, 19 nt, Artificial Sequence
  Description of Artificial Sequence: Synthetic oligonucleotide
cuaucuugcaacguccaag

SEQ ID NO: 595579 - RNA, 19 nt, Artificial Sequence
  Description of Artificial Sequence: Synthetic oligonucleotide
aagcggccaauauugcuug

SEQ ID NO: 595580 - RNA, 19 nt, Artificial Sequence
  Description of Artificial Sequence: Synthetic oligonucleotide
cuugccacagcgcuaaguc

SEQ ID NO: 595581 - RNA, 19 nt, Artificial Sequence
  Description of Artificial Sequence: Synthetic oligonucleotide
guucauaaccuggaaacug

SEQ ID NO: 595582 - RNA, 19 nt, Artificial Sequence
  Description of Artificial Sequence: Synthetic oligonucleotide
uuugcgggguacaucauua

SEQ ID NO: 595583 - RNA, 19 nt, Artificial Sequence
  Description of Artificial Sequence: Synthetic oligonucleotide
aauauauugcuaagggguu

SEQ ID NO: 595584 - RNA, 19 nt, Artificial Sequence
  Description of Artificial Sequence: Synthetic oligonucleotide
acaccuauggguaaguccu

SEQ ID NO: 595585 - RNA, 19 nt, Artificial Sequence
  Description of Artificial Sequence: Synthetic oligonucleotide
ugacuuuagaacugcucac

SEQ ID NO: 595586 - RNA, 19 nt, Artificial Sequence
  Description of Artificial Sequence: Synthetic oligonucleotide
gaccuuccaguccuuaaag

SEQ ID NO: 595587 - RNA, 19 nt, Artificial Sequence
  Description of Artificial Sequence: Synthetic oligonucleotide
gguacuacauaauagcaaa

SEQ ID NO: 595588 - RNA, 19 nt, Artificial Sequence
  Description of Artificial Sequence: Synthetic oligonucleotide
uccaagaguuuugugcuag

SEQ ID NO: 595589 - RNA, 19 nt, Artificial Sequence
  Description of Artificial Sequence: Synthetic oligonucleotide
uuaaagauaacgggcuuau

SEQ ID NO: 595590 - RNA, 19 nt, Artificial Sequence
  Description of Artificial Sequence: Synthetic oligonucleotide
cauuuuaacgauagcuuga

SEQ ID NO: 595591 - RNA, 19 nt, Artificial Sequence
  Description of Artificial Sequence: Synthetic oligonucleotide
ugaacuguacuguguuuga

SEQ ID NO: 595592 - RNA, 19 nt, Artificial Sequence
  Description of Artificial Sequence: Synthetic oligonucleotide
uaaccuggaaacugagcca

SEQ ID NO: 595593 - RNA, 19 nt, Artificial Sequence
  Description of Artificial Sequence: Synthetic oligonucleotide
caugacuuuagaacugcuc

SEQ ID NO: 595594 - RNA, 19 nt, Artificial Sequence
  Description of Artificial Sequence: Synthetic oligonucleotide
agggguuuugaucugcaga

SEQ ID NO: 595595 - RNA, 19 nt, Artificial Sequence
  Description of Artificial Sequence: Synthetic oligonucleotide
cuaaaugcauggguuaaug

SEQ ID NO: 595596 - RNA, 19 nt, Artificial Sequence
  Description of Artificial Sequence: Synthetic oligonucleotide
uguugcuuugcugucacaa

SEQ ID NO: 595597 - RNA, 19 nt, Artificial Sequence
  Description of Artificial Sequence: Synthetic oligonucleotide
ugcgggguacaucauuacc

SEQ ID NO: 595598 - RNA, 19 nt, Artificial Sequence
  Description of Artificial Sequence: Synthetic oligonucleotide
uuuacacgccaagaaaccu

SEQ ID NO: 595599 - RNA, 19 nt, Artificial Sequence
  Description of Artificial Sequence: Synthetic oligonucleotide
uguccacuaaaugggaaca

SEQ ID NO: 595600 - RNA, 19 nt, Artificial Sequence
  Description of Artificial Sequence: Synthetic oligonucleotide
augguagaugaacuguacu

SEQ ID NO: 595601 - RNA, 19 nt, Artificial Sequence
  Description of Artificial Sequence: Synthetic oligonucleotide
aguccuuaaagagucagau

SEQ ID NO: 595602 - RNA, 19 nt, Artificial Sequence
  Description of Artificial Sequence: Synthetic oligonucleotide
caauuaaagauaacgggcu

SEQ ID NO: 595603 - RNA, 19 nt, Artificial Sequence
  Description of Artificial Sequence: Synthetic oligonucleotide
guuuacacgccaagaaacc

SEQ ID NO: 595604 - RNA, 19 nt, Artificial Sequence
  Description of Artificial Sequence: Synthetic oligonucleotide
uaaugucgaugcaccuugg

SEQ ID NO: 595605 - RNA, 19 nt, Artificial Sequence
  Description of Artificial Sequence: Synthetic oligonucleotide
ccaucgguagcucacaugc

SEQ ID NO: 595606 - RNA, 19 nt, Artificial Sequence
  Description of Artificial Sequence: Synthetic oligonucleotide
gaugccuaagaaggggucc

SEQ ID NO: 595607 - RNA, 19 nt, Artificial Sequence
  Description of Artificial Sequence: Synthetic oligonucleotide
aggcuguuaaacccaucgg

SEQ ID NO: 595608 - RNA, 19 nt, Artificial Sequence
  Description of Artificial Sequence: Synthetic oligonucleotide
uggguuaaugucgaugcac

SEQ ID NO: 595609 - RNA, 19 nt, Artificial Sequence
  Description of Artificial Sequence: Synthetic oligonucleotide
uuacacgccaagaaaccua

SEQ ID NO: 595610 - RNA, 19 nt, Artificial Sequence
  Description of Artificial Sequence: Synthetic oligonucleotide
uccacuaaaugggaacagc

SEQ ID NO: 595611 - RNA, 19 nt, Artificial Sequence
  Description of Artificial Sequence: Synthetic oligonucleotide
ccauuauuugcagugaacc

SEQ ID NO: 595612 - RNA, 19 nt, Artificial Sequence
  Description of Artificial Sequence: Synthetic oligonucleotide
caagggaagagugagucuc

SEQ ID NO: 595613 - RNA, 19 nt, Artificial Sequence
  Description of Artificial Sequence: Synthetic oligonucleotide
gucuuacaaauguucugag

SEQ ID NO: 595614 - RNA, 19 nt, Artificial Sequence
  Description of Artificial Sequence: Synthetic oligonucleotide
auaauagauauaacccuga

SEQ ID NO: 595615 - RNA, 19 nt, Artificial Sequence
  Description of Artificial Sequence: Synthetic oligonucleotide
ugaaccuuguugagugcca

SEQ ID NO: 595616 - RNA, 19 nt, Artificial Sequence
  Description of Artificial Sequence: Synthetic oligonucleotide
aaagcggccaauauugcuu

SEQ ID NO: 595617 - RNA, 19 nt, Artificial Sequence
  Description of Artificial Sequence: Synthetic oligonucleotide
ggauuuuagacucaaggua

SEQ ID NO: 595618 - RNA, 19 nt, Artificial Sequence
  Description of Artificial Sequence: Synthetic oligonucleotide
ggagacuauucucaugaag

SEQ ID NO: 595619 - RNA, 19 nt, Artificial Sequence
  Description of Artificial Sequence: Synthetic oligonucleotide
uuuauagaguugacuccuc

SEQ ID NO: 595620 - RNA, 19 nt, Artificial Sequence
  Description of Artificial Sequence: Synthetic oligonucleotide
uuccccggcaggcuguggg

SEQ ID NO: 595621 - RNA, 19 nt, Artificial Sequence
  Description of Artificial Sequence: Synthetic oligonucleotide
acugcucacuuaaaugcac

SEQ ID NO: 595622 - RNA, 19 nt, Artificial Sequence
  Description of Artificial Sequence: Synthetic oligonucleotide
ugauuacaggugcuuggcu

SEQ ID NO: 595623 - RNA, 19 nt, Artificial Sequence
  Description of Artificial Sequence: Synthetic oligonucleotide
uacacgccaagaaaccuau

SEQ ID NO: 595624 - RNA, 19 nt, Artificial Sequence
  Description of Artificial Sequence: Synthetic oligonucleotide
auugggaaaugaaaacuca

SEQ ID NO: 595625 - RNA, 19 nt, Artificial Sequence
  Description of Artificial Sequence: Synthetic oligonucleotide
aucuucgcacaccccauag

SEQ ID NO: 595626 - RNA, 19 nt, Artificial Sequence
  Description of Artificial Sequence: Synthetic oligonucleotide
gagagcaaaggaaauuaca

SEQ ID NO: 595627 - RNA, 19 nt, Artificial Sequence
  Description of Artificial Sequence: Synthetic oligonucleotide
ugcccguuuucuaauuaga

SEQ ID NO: 595628 - RNA, 19 nt, Artificial Sequence
  Description of Artificial Sequence: Synthetic oligonucleotide
caaaauucucuguuauaca

SEQ ID NO: 595629 - RNA, 19 nt, Artificial Sequence
  Description of Artificial Sequence: Synthetic oligonucleotide
gggguuuugaucugcagac

SEQ ID NO: 595630 - RNA, 19 nt, Artificial Sequence
  Description of Artificial Sequence: Synthetic oligonucleotide
cuugcaacguccaagaguu

SEQ ID NO: 595631 - RNA, 19 nt, Artificial Sequence
  Description of Artificial Sequence: Synthetic oligonucleotide
ggauaauauuguugggaag

SEQ ID NO: 595632 - RNA, 19 nt, Artificial Sequence
  Description of Artificial Sequence: Synthetic oligonucleotide
aaaaucgucauggcuucaa

SEQ ID NO: 595633 - RNA, 19 nt, Artificial Sequence
  Description of Artificial Sequence: Synthetic oligonucleotide
ucccgauuuaguuguuuca

SEQ ID NO: 595634 - RNA, 19 nt, Artificial Sequence
  Description of Artificial Sequence: Synthetic oligonucleotide
uaagacugccgugaugugu

SEQ ID NO: 595635 - RNA, 19 nt, Artificial Sequence
  Description of Artificial Sequence: Synthetic oligonucleotide
accucgaccuuccaguccu

SEQ ID NO: 595636 - RNA, 19 nt, Artificial Sequence
  Description of Artificial Sequence: Synthetic oligonucleotide
caugacaacaaugugcaaa

SEQ ID NO: 595637 - RNA, 19 nt, Artificial Sequence
  Description of Artificial Sequence: Synthetic oligonucleotide
uuugagugggcaggauggg

SEQ ID NO: 595638 - RNA, 19 nt, Artificial Sequence
  Description of Artificial Sequence: Synthetic oligonucleotide
uucccgauuuaguuguuuc

SEQ ID NO: 595639 - RNA, 19 nt, Artificial Sequence
  Description of Artificial Sequence: Synthetic oligonucleotide
uugggauuuuagacucaag

SEQ ID NO: 595640 - RNA, 19 nt, Artificial Sequence
  Description of Artificial Sequence: Synthetic oligonucleotide
uacuaaaugcauggguuaa

SEQ ID NO: 595641 - RNA, 19 nt, Artificial Sequence
  Description of Artificial Sequence: Synthetic oligonucleotide
auuaaagauaacgggcuua

SEQ ID NO: 595642 - RNA, 19 nt, Artificial Sequence
  Description of Artificial Sequence: Synthetic oligonucleotide
guauucccgauuuaguugu

SEQ ID NO: 595643 - RNA, 19 nt, Artificial Sequence
  Description of Artificial Sequence: Synthetic oligonucleotide
uagaguugacuccucccuc

SEQ ID NO: 595644 - RNA, 19 nt, Artificial Sequence
  Description of Artificial Sequence: Synthetic oligonucleotide
uauugcuaagggguuuuga

SEQ ID NO: 595645 - RNA, 19 nt, Artificial Sequence
  Description of Artificial Sequence: Synthetic oligonucleotide
uucaucuaugguagaugaa

SEQ ID NO: 595646 - RNA, 19 nt, Artificial Sequence
  Description of Artificial Sequence: Synthetic oligonucleotide
guccuuaaagagucagaug

SEQ ID NO: 595647 - RNA, 19 nt, Artificial Sequence
  Description of Artificial Sequence: Synthetic oligonucleotide
auuuugcuuaagacugccg

SEQ ID NO: 595648 - RNA, 19 nt, Artificial Sequence
  Description of Artificial Sequence: Synthetic oligonucleotide
cugcccguuuucuaauuag

SEQ ID NO: 595649 - RNA, 19 nt, Artificial Sequence
  Description of Artificial Sequence: Synthetic oligonucleotide
cucacauuaguaauugagu

SEQ ID NO: 595650 - RNA, 19 nt, Artificial Sequence
  Description of Artificial Sequence: Synthetic oligonucleotide
caaccaugucauuuaagga

SEQ ID NO: 595651 - RNA, 19 nt, Artificial Sequence
  Description of Artificial Sequence: Synthetic oligonucleotide
caccccauagcaucagcag

SEQ ID NO: 595652 - RNA, 19 nt, Artificial Sequence
  Description of Artificial Sequence: Synthetic oligonucleotide
gugcuagaauaaaauagac

SEQ ID NO: 595653 - RNA, 19 nt, Artificial Sequence
  Description of Artificial Sequence: Synthetic oligonucleotide
cucaagguacauuacuaaa

SEQ ID NO: 595654 - RNA, 19 nt, Artificial Sequence
  Description of Artificial Sequence: Synthetic oligonucleotide
uggccauuugagugggcag

SEQ ID NO: 595655 - RNA, 19 nt, Artificial Sequence
  Description of Artificial Sequence: Synthetic oligonucleotide
uuugagaccugaggaugcc

SEQ ID NO: 595656 - RNA, 19 nt, Artificial Sequence
  Description of Artificial Sequence: Synthetic oligonucleotide
augcuuguaaagauuuuga

SEQ ID NO: 595657 - RNA, 19 nt, Artificial Sequence
  Description of Artificial Sequence: Synthetic oligonucleotide
aguuuugugcuagaauaaa

SEQ ID NO: 595658 - RNA, 19 nt, Artificial Sequence
  Description of Artificial Sequence: Synthetic oligonucleotide
gugaaccuuguugagugcc

SEQ ID NO: 595659 - RNA, 19 nt, Artificial Sequence
  Description of Artificial Sequence: Synthetic oligonucleotide
gggauaauauuguugggaa

SEQ ID NO: 595660 - RNA, 19 nt, Artificial Sequence
  Description of Artificial Sequence: Synthetic oligonucleotide
uuaagacugccgugaugug

SEQ ID NO: 595661 - RNA, 19 nt, Artificial Sequence
  Description of Artificial Sequence: Synthetic oligonucleotide
aucgguagcucacaugcuu

SEQ ID NO: 595662 - RNA, 19 nt, Artificial Sequence
  Description of Artificial Sequence: Synthetic oligonucleotide
gugauuacaggugcuuggc

SEQ ID NO: 595663 - RNA, 19 nt, Artificial Sequence
  Description of Artificial Sequence: Synthetic oligonucleotide
aagacugccgugauguguu

SEQ ID NO: 595664 - RNA, 19 nt, Artificial Sequence
  Description of Artificial Sequence: Synthetic oligonucleotide
cuaagggguuuugaucugc

SEQ ID NO: 595665 - RNA, 19 nt, Artificial Sequence
  Description of Artificial Sequence: Synthetic oligonucleotide
cauuacuaaaugcaugggu

SEQ ID NO: 595666 - RNA, 19 nt, Artificial Sequence
  Description of Artificial Sequence: Synthetic oligonucleotide
aggaugggcaaacccguca

SEQ ID NO: 595667 - RNA, 19 nt, Artificial Sequence
  Description of Artificial Sequence: Synthetic oligonucleotide
uuuagacucaagguacauu

SEQ ID NO: 595668 - RNA, 19 nt, Artificial Sequence
  Description of Artificial Sequence: Synthetic oligonucleotide
agaagggguccccaauaca

SEQ ID NO: 595669 - RNA, 19 nt, Artificial Sequence
  Description of Artificial Sequence: Synthetic oligonucleotide
gcauaauagauauaacccu

SEQ ID NO: 595670 - RNA, 19 nt, Artificial Sequence
  Description of Artificial Sequence: Synthetic oligonucleotide
caaaguugcuugccacagc

SEQ ID NO: 595671 - RNA, 19 nt, Artificial Sequence
  Description of Artificial Sequence: Synthetic oligonucleotide
gacucaagguacauuacua

SEQ ID NO: 595672 - RNA, 19 nt, Artificial Sequence
  Description of Artificial Sequence: Synthetic oligonucleotide
ucgucauggcuucaaugua

SEQ ID NO: 595673 - RNA, 19 nt, Artificial Sequence
  Description of Artificial Sequence: Synthetic oligonucleotide
guaauugaguagcauucua

SEQ ID NO: 595674 - RNA, 19 nt, Artificial Sequence
  Description of Artificial Sequence: Synthetic oligonucleotide
ucugcccguuuucuaauua

SEQ ID NO: 595675 - RNA, 19 nt, Artificial Sequence
  Description of Artificial Sequence: Synthetic oligonucleotide
gagaugaccucgaccuucc

SEQ ID NO: 595676 - RNA, 19 nt, Artificial Sequence
  Description of Artificial Sequence: Synthetic oligonucleotide
ugccgugauguguuuuggc

SEQ ID NO: 595677 - RNA, 19 nt, Artificial Sequence
  Description of Artificial Sequence: Synthetic oligonucleotide
agccaaugcuaucugguuu

SEQ ID NO: 595678 - RNA, 19 nt, Artificial Sequence
  Description of Artificial Sequence: Synthetic oligonucleotide
guauaauucaggcuagcuu

SEQ ID NO: 595679 - RNA, 19 nt, Artificial Sequence
  Description of Artificial Sequence: Synthetic oligonucleotide
auacaccuauggguaaguc

SEQ ID NO: 595680 - RNA, 19 nt, Artificial Sequence
  Description of Artificial Sequence: Synthetic oligonucleotide
cuaugguagaugaacugua

SEQ ID NO: 595681 - RNA, 19 nt, Artificial Sequence
  Description of Artificial Sequence: Synthetic oligonucleotide
agguacuacauaauagcaa

SEQ ID NO: 595682 - RNA, 19 nt, Artificial Sequence
  Description of Artificial Sequence: Synthetic oligonucleotide
cuuugggguggagcaaugg

SEQ ID NO: 595683 - RNA, 19 nt, Artificial Sequence
  Description of Artificial Sequence: Synthetic oligonucleotide
uguuuuggcguugucucua

SEQ ID NO: 595684 - RNA, 19 nt, Artificial Sequence
  Description of Artificial Sequence: Synthetic oligonucleotide
ugcuuggcugaauucuaaa

SEQ ID NO: 595685 - RNA, 19 nt, Artificial Sequence
  Description of Artificial Sequence: Synthetic oligonucleotide
ggguuaaugucgaugcacc

SEQ ID NO: 595686 - RNA, 19 nt, Artificial Sequence
  Description of Artificial Sequence: Synthetic oligonucleotide
cauuauuugcagugaaccu

SEQ ID NO: 595687 - RNA, 19 nt, Artificial Sequence
  Description of Artificial Sequence: Synthetic oligonucleotide
ccgauuuaguuguuucagg

SEQ ID NO: 595688 - RNA, 19 nt, Artificial Sequence
  Description of Artificial Sequence: Synthetic oligonucleotide
gcuaaguguaaaugggaga

SEQ ID NO: 595689 - RNA, 19 nt, Artificial Sequence
  Description of Artificial Sequence: Synthetic oligonucleotide
acgccaagaaaccuaucuu

SEQ ID NO: 595690 - RNA, 19 nt, Artificial Sequence
  Description of Artificial Sequence: Synthetic oligonucleotide
acccugaaguuuacacgcc

SEQ ID NO: 595691 - RNA, 19 nt, Artificial Sequence
  Description of Artificial Sequence: Synthetic oligonucleotide
caucuaugguagaugaacu

SEQ ID NO: 595692 - RNA, 19 nt, Artificial Sequence
  Description of Artificial Sequence: Synthetic oligonucleotide
uccaguccuuaaagaguca

SEQ ID NO: 595693 - RNA, 19 nt, Artificial Sequence
  Description of Artificial Sequence: Synthetic oligonucleotide
acacaaccaugucauuuaa

SEQ ID NO: 595694 - RNA, 19 nt, Artificial Sequence
  Description of Artificial Sequence: Synthetic oligonucleotide
cuguauaauucaggcuagc

SEQ ID NO: 595695 - RNA, 19 nt, Artificial Sequence
  Description of Artificial Sequence: Synthetic oligonucleotide
ugauguguuuuggcguugu

SEQ ID NO: 595696 - RNA, 19 nt, Artificial Sequence
  Description of Artificial Sequence: Synthetic oligonucleotide
auauauugcuaagggguuu

SEQ ID NO: 595697 - RNA, 19 nt, Artificial Sequence
  Description of Artificial Sequence: Synthetic oligonucleotide
cucggagacuauucucaug

SEQ ID NO: 595698 - RNA, 19 nt, Artificial Sequence
  Description of Artificial Sequence: Synthetic oligonucleotide
cacuuaaaugcacauaauu

SEQ ID NO: 595699 - RNA, 19 nt, Artificial Sequence
  Description of Artificial Sequence: Synthetic oligonucleotide
augguauucccgauuuagu

SEQ ID NO: 595700 - RNA, 19 nt, Artificial Sequence
  Description of Artificial Sequence: Synthetic oligonucleotide
ucccucggagacuauucuc

SEQ ID NO: 595701 - RNA, 19 nt, Artificial Sequence
  Description of Artificial Sequence: Synthetic oligonucleotide
gacuuuagaacugcucacu

SEQ ID NO: 595702 - RNA, 19 nt, Artificial Sequence
  Description of Artificial Sequence: Synthetic oligonucleotide
gcgcuaagucaccaaaagc

SEQ ID NO: 595703 - RNA, 19 nt, Artificial Sequence
  Description of Artificial Sequence: Synthetic oligonucleotide
acuaaaugcauggguuaau

SEQ ID NO: 595704 - RNA, 19 nt, Artificial Sequence
  Description of Artificial Sequence: Synthetic oligonucleotide
cacgccaagaaaccuaucu

SEQ ID NO: 595705 - RNA, 19 nt, Artificial Sequence
  Description of Artificial Sequence: Synthetic oligonucleotide
acgauagcuugaaaugggu

SEQ ID NO: 595706 - RNA, 19 nt, Artificial Sequence
  Description of Artificial Sequence: Synthetic oligonucleotide
agugggguucaaccugaga

SEQ ID NO: 595707 - RNA, 19 nt, Artificial Sequence
  Description of Artificial Sequence: Synthetic oligonucleotide
ggcucuugcccaguggagg

SEQ ID NO: 595708 - RNA, 19 nt, Artificial Sequence
  Description of Artificial Sequence: Synthetic oligonucleotide
uugcgggguacaucauuac

SEQ ID NO: 595709 - RNA, 19 nt, Artificial Sequence
  Description of Artificial Sequence: Synthetic oligonucleotide
gauguguuuuggcguuguc

SEQ ID NO: 595710 - RNA, 19 nt, Artificial Sequence
  Description of Artificial Sequence: Synthetic oligonucleotide
gagugagucuccugcccca

SEQ ID NO: 595711 - RNA, 19 nt, Artificial Sequence
  Description of Artificial Sequence: Synthetic oligonucleotide
uccccggcaggcugugggg

SEQ ID NO: 595712 - RNA, 19 nt, Artificial Sequence
  Description of Artificial Sequence: Synthetic oligonucleotide
gugcaaaagguacuacaua

SEQ ID NO: 595713 - RNA, 19 nt, Artificial Sequence
  Description of Artificial Sequence: Synthetic oligonucleotide
acgggcuuauaaguggccu

SEQ ID NO: 595714 - RNA, 19 nt, Artificial Sequence
  Description of Artificial Sequence: Synthetic oligonucleotide
gcuagcuuugaacucaagu

SEQ ID NO: 595715 - RNA, 19 nt, Artificial Sequence
  Description of Artificial Sequence: Synthetic oligonucleotide
auauugcuaagggguuuug

SEQ ID NO: 595716 - RNA, 19 nt, Artificial Sequence
  Description of Artificial Sequence: Synthetic oligonucleotide
gggcaaacccgucacugug

SEQ ID NO: 595717 - RNA, 19 nt, Artificial Sequence
  Description of Artificial Sequence: Synthetic oligonucleotide
uggguaugguauucccgau

SEQ ID NO: 595718 - RNA, 19 nt, Artificial Sequence
  Description of Artificial Sequence: Synthetic oligonucleotide
guaucagugcugucuggaa

SEQ ID NO: 595719 - RNA, 19 nt, Artificial Sequence
  Description of Artificial Sequence: Synthetic oligonucleotide
cuccugacaucuucgcaca

SEQ ID NO: 595720 - RNA, 19 nt, Artificial Sequence
  Description of Artificial Sequence: Synthetic oligonucleotide
uagagaccagacugggcuu

SEQ ID NO: 595721 - RNA, 19 nt, Artificial Sequence
  Description of Artificial Sequence: Synthetic oligonucleotide
gcauggguuaaugucgaug

SEQ ID NO: 595722 - RNA, 19 nt, Artificial Sequence
  Description of Artificial Sequence: Synthetic oligonucleotide
cccgauuuaguuguuucag

SEQ ID NO: 595723 - RNA, 19 nt, Artificial Sequence
  Description of Artificial Sequence: Synthetic oligonucleotide
uccugacaucuucgcacac

SEQ ID NO: 595724 - RNA, 19 nt, Artificial Sequence
  Description of Artificial Sequence: Synthetic oligonucleotide
gguucaaccugagacagua

SEQ ID NO: 595725 - RNA, 19 nt, Artificial Sequence
  Description of Artificial Sequence: Synthetic oligonucleotide
caagaauaagauguccacu

SEQ ID NO: 595726 - RNA, 19 nt, Artificial Sequence
  Description of Artificial Sequence: Synthetic oligonucleotide
guacaucauuaccucaggu

SEQ ID NO: 595727 - RNA, 19 nt, Artificial Sequence
  Description of Artificial Sequence: Synthetic oligonucleotide
caguccuuaaagagucaga

SEQ ID NO: 595728 - RNA, 19 nt, Artificial Sequence
  Description of Artificial Sequence: Synthetic oligonucleotide
caggugcuuggcugaauuc

SEQ ID NO: 595729 - RNA, 19 nt, Artificial Sequence
  Description of Artificial Sequence: Synthetic oligonucleotide
gguagaugaacuguacugu

SEQ ID NO: 595730 - RNA, 19 nt, Artificial Sequence
  Description of Artificial Sequence: Synthetic oligonucleotide
gagaccugaggaugccuaa

SEQ ID NO: 595731 - RNA, 19 nt, Artificial Sequence
  Description of Artificial Sequence: Synthetic oligonucleotide
cgauuuaguuguuucagga

SEQ ID NO: 595732 - RNA, 19 nt, Artificial Sequence
  Description of Artificial Sequence: Synthetic oligonucleotide
augcauggguuaaugucga

SEQ ID NO: 595733 - RNA, 19 nt, Artificial Sequence
  Description of Artificial Sequence: Synthetic oligonucleotide
gguacauuacuaaaugcau

SEQ ID NO: 595734 - RNA, 19 nt, Artificial Sequence
  Description of Artificial Sequence: Synthetic oligonucleotide
uaaagauaacgggcuuaua

SEQ ID NO: 595735 - RNA, 19 nt, Artificial Sequence
  Description of Artificial Sequence: Synthetic oligonucleotide
guacuacauaauagcaaaa

SEQ ID NO: 595736 - RNA, 19 nt, Artificial Sequence
  Description of Artificial Sequence: Synthetic oligonucleotide
gcuuauaaguggccuuuga

SEQ ID NO: 595737 - RNA, 19 nt, Artificial Sequence
  Description of Artificial Sequence: Synthetic oligonucleotide
acaugacuuuagaacugcu

SEQ ID NO: 595738 - RNA, 19 nt, Artificial Sequence
  Description of Artificial Sequence: Synthetic oligonucleotide
gguaugguauucccgauuu

SEQ ID NO: 595739 - RNA, 19 nt, Artificial Sequence
  Description of Artificial Sequence: Synthetic oligonucleotide
accuaucuugcaacgucca

SEQ ID NO: 595740 - RNA, 19 nt, Artificial Sequence
  Description of Artificial Sequence: Synthetic oligonucleotide
ccaguccuuaaagagucag

SEQ ID NO: 595741 - RNA, 19 nt, Artificial Sequence
  Description of Artificial Sequence: Synthetic oligonucleotide
aagggguccccaauacauu

SEQ ID NO: 595742 - RNA, 19 nt, Artificial Sequence
  Description of Artificial Sequence: Synthetic oligonucleotide
gcaacguccaagaguuuug

SEQ ID NO: 595743 - RNA, 19 nt, Artificial Sequence
  Description of Artificial Sequence: Synthetic oligonucleotide
gcuaagggguuuugaucug

SEQ ID NO: 595744 - RNA, 19 nt, Artificial Sequence
  Description of Artificial Sequence: Synthetic oligonucleotide
gcuguuaaacccaucggua

SEQ ID NO: 595745 - RNA, 19 nt, Artificial Sequence
  Description of Artificial Sequence: Synthetic oligonucleotide
uauucccgauuuaguuguu

SEQ ID NO: 595746 - RNA, 19 nt, Artificial Sequence
  Description of Artificial Sequence: Synthetic oligonucleotide
aucugcccguuuucuaauu

SEQ ID NO: 595747 - RNA, 19 nt, Artificial Sequence
  Description of Artificial Sequence: Synthetic oligonucleotide
ugcauggguuaaugucgau

SEQ ID NO: 595748 - RNA, 19 nt, Artificial Sequence
  Description of Artificial Sequence: Synthetic oligonucleotide
cugucacaauauauugcua

SEQ ID NO: 595749 - RNA, 19 nt, Artificial Sequence
  Description of Artificial Sequence: Synthetic oligonucleotide
ccugacaucuucgcacacc

SEQ ID NO: 595750 - RNA, 19 nt, Artificial Sequence
  Description of Artificial Sequence: Synthetic oligonucleotide
auucccgauuuaguuguuu

SEQ ID NO: 595751 - RNA, 19 nt, Artificial Sequence
  Description of Artificial Sequence: Synthetic oligonucleotide
gcaaugggccucugcuaag

SEQ ID NO: 595752 - RNA, 19 nt, Artificial Sequence
  Description of Artificial Sequence: Synthetic oligonucleotide
aguccuuugcgggguacau

SEQ ID NO: 595753 - RNA, 19 nt, Artificial Sequence
  Description of Artificial Sequence: Synthetic oligonucleotide
cccucggagacuauucuca

SEQ ID NO: 595754 - RNA, 19 nt, Artificial Sequence
  Description of Artificial Sequence: Synthetic oligonucleotide
cagcgcuaagucaccaaaa

SEQ ID NO: 595755 - RNA, 19 nt, Artificial Sequence
  Description of Artificial Sequence: Synthetic oligonucleotide
gguuaaugucgaugcaccu

SEQ ID NO: 595756 - RNA, 19 nt, Artificial Sequence
  Description of Artificial Sequence: Synthetic oligonucleotide
guaugguauucccgauuua

SEQ ID NO: 595757 - RNA, 19 nt, Artificial Sequence
  Description of Artificial Sequence: Synthetic oligonucleotide
augcaccuuggaauuucug

SEQ ID NO: 595758 - RNA, 19 nt, Artificial Sequence
  Description of Artificial Sequence: Synthetic oligonucleotide
ccacuaaaugggaacagcu

SEQ ID NO: 595759 - RNA, 19 nt, Artificial Sequence
  Description of Artificial Sequence: Synthetic oligonucleotide
accuauggguaaguccuuu

SEQ ID NO: 595760 - RNA, 19 nt, Artificial Sequence
  Description of Artificial Sequence: Synthetic oligonucleotide
gaauggcauaauagauaua

SEQ ID NO: 595761 - RNA, 19 nt, Artificial Sequence
  Description of Artificial Sequence: Synthetic oligonucleotide
guguuuuggcguugucucu

SEQ ID NO: 595762 - RNA, 19 nt, Artificial Sequence
  Description of Artificial Sequence: Synthetic oligonucleotide
ggcuuauaaguggccuuug

SEQ ID NO: 595763 - RNA, 19 nt, Artificial Sequence
  Description of Artificial Sequence: Synthetic oligonucleotide
gcggccaauauugcuugcc

SEQ ID NO: 595764 - RNA, 19 nt, Artificial Sequence
  Description of Artificial Sequence: Synthetic oligonucleotide
acacgccaagaaaccuauc

SEQ ID NO: 595765 - RNA, 19 nt, Artificial Sequence
  Description of Artificial Sequence: Synthetic oligonucleotide
ccuuugacaugaggcagac

SEQ ID NO: 595766 - RNA, 19 nt, Artificial Sequence
  Description of Artificial Sequence: Synthetic oligonucleotide
cacagcgcuaagucaccaa

SEQ ID NO: 595767 - RNA, 19 nt, Artificial Sequence
  Description of Artificial Sequence: Synthetic oligonucleotide
caaguuugccugucucagu

SEQ ID NO: 595768 - RNA, 19 nt, Artificial Sequence
  Description of Artificial Sequence: Synthetic oligonucleotide
guugcuugccacagcgcua

SEQ ID NO: 595769 - RNA, 19 nt, Artificial Sequence
  Description of Artificial Sequence: Synthetic oligonucleotide
acuguuugcuugggauuuu

SEQ ID NO: 595770 - RNA, 19 nt, Artificial Sequence
  Description of Artificial Sequence: Synthetic oligonucleotide
cgggguacaucauuaccuc

SEQ ID NO: 595771 - RNA, 19 nt, Artificial Sequence
  Description of Artificial Sequence: Synthetic oligonucleotide
ccugaaguuuacacgccaa

SEQ ID NO: 595772 - RNA, 19 nt, Artificial Sequence
  Description of Artificial Sequence: Synthetic oligonucleotide
guaaguccuuugcggggua

SEQ ID NO: 595773 - RNA, 19 nt, Artificial Sequence
  Description of Artificial Sequence: Synthetic oligonucleotide
guccuuugcgggguacauc

SEQ ID NO: 595774 - RNA, 19 nt, Artificial Sequence
  Description of Artificial Sequence: Synthetic oligonucleotide
cuuugcgggguacaucauu

SEQ ID NO: 595775 - RNA, 19 nt, Artificial Sequence
  Description of Artificial Sequence: Synthetic oligonucleotide
ggguuuugaucugcagaca

SEQ ID NO: 595776 - RNA, 19 nt, Artificial Sequence
  Description of Artificial Sequence: Synthetic oligonucleotide
ccuaagaagggguccccaa

SEQ ID NO: 595777 - RNA, 19 nt, Artificial Sequence
  Description of Artificial Sequence: Synthetic oligonucleotide
cccugaaguuuacacgcca

SEQ ID NO: 595778 - RNA, 19 nt, Artificial Sequence
  Description of Artificial Sequence: Synthetic oligonucleotide
guacuguguuugagaccug

SEQ ID NO: 595779 - RNA, 19 nt, Artificial Sequence
  Description of Artificial Sequence: Synthetic oligonucleotide
gccauuugagugggcagga

SEQ ID NO: 595780 - RNA, 19 nt, Artificial Sequence
  Description of Artificial Sequence: Synthetic oligonucleotide
gcaaaagguacuacauaau

SEQ ID NO: 595781 - RNA, 19 nt, Artificial Sequence
  Description of Artificial Sequence: Synthetic oligonucleotide
caguaucugcccguuuucu

SEQ ID NO: 595782 - RNA, 19 nt, Artificial Sequence
  Description of Artificial Sequence: Synthetic oligonucleotide
agcuuccccggcaggcugu

SEQ ID NO: 595783 - RNA, 19 nt, Artificial Sequence
  Description of Artificial Sequence: Synthetic oligonucleotide
caaugggccucugcuaagu

SEQ ID NO: 595784 - RNA, 19 nt, Artificial Sequence
  Description of Artificial Sequence: Synthetic oligonucleotide
ggcguugucucuaauucuu

SEQ ID NO: 595785 - RNA, 19 nt, Artificial Sequence
  Description of Artificial Sequence: Synthetic oligonucleotide
cuccugucuuacaaauguu

SEQ ID NO: 595786 - RNA, 19 nt, Artificial Sequence
  Description of Artificial Sequence: Synthetic oligonucleotide
ccaagaguuuugugcuaga

SEQ ID NO: 595787 - RNA, 19 nt, Artificial Sequence
  Description of Artificial Sequence: Synthetic oligonucleotide
ggcagguaucucuggcucu

SEQ ID NO: 595788 - RNA, 19 nt, Artificial Sequence
  Description of Artificial Sequence: Synthetic oligonucleotide
gcccugaauagcaguaucu

SEQ ID NO: 595789 - RNA, 19 nt, Artificial Sequence
  Description of Artificial Sequence: Synthetic oligonucleotide
ccgugauguguuuuggcgu

SEQ ID NO: 595790 - RNA, 19 nt, Artificial Sequence
  Description of Artificial Sequence: Synthetic oligonucleotide
ggccaauauugcuugccuu

SEQ ID NO: 595791 - RNA, 19 nt, Artificial Sequence
  Description of Artificial Sequence: Synthetic oligonucleotide
cgaugcaccuuggaauuuc

SEQ ID NO: 595792 - RNA, 19 nt, Artificial Sequence
  Description of Artificial Sequence: Synthetic oligonucleotide
gcacacagauugacauuca

SEQ ID NO: 595793 - RNA, 19 nt, Artificial Sequence
  Description of Artificial Sequence: Synthetic oligonucleotide
ggguaugguauucccgauu

SEQ ID NO: 595794 - RNA, 19 nt, Artificial Sequence
  Description of Artificial Sequence: Synthetic oligonucleotide
ggcaaacccgucacugugu

SEQ ID NO: 595795 - RNA, 19 nt, Artificial Sequence
  Description of Artificial Sequence: Synthetic oligonucleotide
cccaguggagggaugugcu

SEQ ID NO: 595796 - RNA, 19 nt, Artificial Sequence
  Description of Artificial Sequence: Synthetic oligonucleotide
cucgaccuuccaguccuua

SEQ ID NO: 595797 - RNA, 19 nt, Artificial Sequence
  Description of Artificial Sequence: Synthetic oligonucleotide
guucaaccugagacaguau

SEQ ID NO: 595798 - RNA, 19 nt, Artificial Sequence
  Description of Artificial Sequence: Synthetic oligonucleotide
gggcuuauaaguggccuuu

SEQ ID NO: 595799 - RNA, 19 nt, Artificial Sequence
  Description of Artificial Sequence: Synthetic oligonucleotide
cccggcaggcuguggggug

SEQ ID NO: 595800 - RNA, 19 nt, Artificial Sequence
  Description of Artificial Sequence: Synthetic oligonucleotide
gaacuacuccugacaucuu

SEQ ID NO: 595801 - RNA, 19 nt, Artificial Sequence
  Description of Artificial Sequence: Synthetic oligonucleotide
caccuauggguaaguccuu

SEQ ID NO: 595802 - RNA, 19 nt, Artificial Sequence
  Description of Artificial Sequence: Synthetic oligonucleotide
gcagguaucucuggcucuu

SEQ ID NO: 595803 - RNA, 19 nt, Artificial Sequence
  Description of Artificial Sequence: Synthetic oligonucleotide
ccacagcgcuaagucacca

SEQ ID NO: 595804 - RNA, 19 nt, Artificial Sequence
  Description of Artificial Sequence: Synthetic oligonucleotide
cggagacuauucucaugaa

SEQ ID NO: 595805 - RNA, 19 nt, Artificial Sequence
  Description of Artificial Sequence: Synthetic oligonucleotide
cggccaauauugcuugccu

SEQ ID NO: 595806 - RNA, 19 nt, Artificial Sequence
  Description of Artificial Sequence: Synthetic oligonucleotide
cgggcuuauaaguggccuu

SEQ ID NO: 595807 - RNA, 19 nt, Artificial Sequence
  Description of Artificial Sequence: Synthetic oligonucleotide
ccuuugcgggguacaucau

SEQ ID NO: 595808 - RNA, 19 nt, Artificial Sequence
  Description of Artificial Sequence: Synthetic oligonucleotide
ccccagagaauggcauaau

SEQ ID NO: 595809 - RNA, 19 nt, Artificial Sequence
  Description of Artificial Sequence: Synthetic oligonucleotide
ccucgaccuuccaguccuu

SEQ ID NO: 595810 - RNA, 19 nt, Artificial Sequence
  Description of Artificial Sequence: Synthetic oligonucleotide
aagaauaucaagccggucc

SEQ ID NO: 595811 - RNA, 19 nt, Artificial Sequence
  Description of Artificial Sequence: Synthetic oligonucleotide
uauucauuaauucaggucc

SEQ ID NO: 595812 - RNA, 19 nt, Artificial Sequence
  Description of Artificial Sequence: Synthetic oligonucleotide
uuaagauugauucuuguug

SEQ ID NO: 595813 - RNA, 19 nt, Artificial Sequence
  Description of Artificial Sequence: Synthetic oligonucleotide
aaugauuucucuuauugcu

SEQ ID NO: 595814 - RNA, 19 nt, Artificial Sequence
  Description of Artificial Sequence: Synthetic oligonucleotide
uuuaacggauuuuacaggg

SEQ ID NO: 595815 - RNA, 19 nt, Artificial Sequence
  Description of Artificial Sequence: Synthetic oligonucleotide
ucuuuaacggauuuuacag

SEQ ID NO: 595816 - RNA, 19 nt, Artificial Sequence
  Description of Artificial Sequence: Synthetic oligonucleotide
aaauaauugauggaugccg

SEQ ID NO: 595817 - RNA, 19 nt, Artificial Sequence
  Description of Artificial Sequence: Synthetic oligonucleotide
uuuauagcuagaaaguuca

SEQ ID NO: 595818 - RNA, 19 nt, Artificial Sequence
  Description of Artificial Sequence: Synthetic oligonucleotide
aaaacuacacuuaagaccu

SEQ ID NO: 595819 - RNA, 19 nt, Artificial Sequence
  Description of Artificial Sequence: Synthetic oligonucleotide
aaaguaucaguauugcucu

SEQ ID NO: 595820 - RNA, 19 nt, Artificial Sequence
  Description of Artificial Sequence: Synthetic oligonucleotide
aaaauaauugauggaugcc

SEQ ID NO: 595821 - RNA, 19 nt, Artificial Sequence
  Description of Artificial Sequence: Synthetic oligonucleotide
auugcuaccucucucauag

SEQ ID NO: 595822 - RNA, 19 nt, Artificial Sequence
  Description of Artificial Sequence: Synthetic oligonucleotide
accaagauacauuugggac

SEQ ID NO: 595823 - RNA, 19 nt, Artificial Sequence
  Description of Artificial Sequence: Synthetic oligonucleotide
ucccuuuauagcuagaaag

SEQ ID NO: 595824 - RNA, 19 nt, Artificial Sequence
  Description of Artificial Sequence: Synthetic oligonucleotide
agaguaacaacccucuagg

SEQ ID NO: 595825 - RNA, 19 nt, Artificial Sequence
  Description of Artificial Sequence: Synthetic oligonucleotide
cugaagaauaucaagccgg

SEQ ID NO: 595826 - RNA, 19 nt, Artificial Sequence
  Description of Artificial Sequence: Synthetic oligonucleotide
guaauuuucaccaugccag

SEQ ID NO: 595827 - RNA, 19 nt, Artificial Sequence
  Description of Artificial Sequence: Synthetic oligonucleotide
guaacaacccucuaggugc

SEQ ID NO: 595828 - RNA, 19 nt, Artificial Sequence
  Description of Artificial Sequence: Synthetic oligonucleotide
ucugaugucauucaucccu

SEQ ID NO: 595829 - RNA, 19 nt, Artificial Sequence
  Description of Artificial Sequence: Synthetic oligonucleotide
guucaagccacuuucauug

SEQ ID NO: 595830 - RNA, 19 nt, Artificial Sequence
  Description of Artificial Sequence: Synthetic oligonucleotide
uucaggaccauuaauuaca

SEQ ID NO: 595831 - RNA, 19 nt, Artificial Sequence
  Description of Artificial Sequence: Synthetic oligonucleotide
aauguuaagagugaggcua

SEQ ID NO: 595832 - RNA, 19 nt, Artificial Sequence
  Description of Artificial Sequence: Synthetic oligonucleotide
uagaguaacaacccucuag

SEQ ID NO: 595833 - RNA, 19 nt, Artificial Sequence
  Description of Artificial Sequence: Synthetic oligonucleotide
agcaucuagugcuugaggg

SEQ ID NO: 595834 - RNA, 19 nt, Artificial Sequence
  Description of Artificial Sequence: Synthetic oligonucleotide
aggaccauuaauuacagaa

SEQ ID NO: 595835 - RNA, 19 nt, Artificial Sequence
  Description of Artificial Sequence: Synthetic oligonucleotide
acuaauaggcauugagugg

SEQ ID NO: 595836 - RNA, 19 nt, Artificial Sequence
  Description of Artificial Sequence: Synthetic oligonucleotide
uugcagacggcuaugaucu

SEQ ID NO: 595837 - RNA, 19 nt, Artificial Sequence
  Description of Artificial Sequence: Synthetic oligonucleotide
uuagacuguguguagcccg

SEQ ID NO: 595838 - RNA, 19 nt, Artificial Sequence
  Description of Artificial Sequence: Synthetic oligonucleotide
uguaacauccaaugaaacu

SEQ ID NO: 595839 - RNA, 19 nt, Artificial Sequence
  Description of Artificial Sequence: Synthetic oligonucleotide
uaagauugauucuuguugu

SEQ ID NO: 595840 - RNA, 19 nt, Artificial Sequence
  Description of Artificial Sequence: Synthetic oligonucleotide
uaagagugaggcuacaacu

SEQ ID NO: 595841 - RNA, 19 nt, Artificial Sequence
  Description of Artificial Sequence: Synthetic oligonucleotide
uuuagguggcugaauaccc

SEQ ID NO: 595842 - RNA, 19 nt, Artificial Sequence
  Description of Artificial Sequence: Synthetic oligonucleotide
gaaggauagauccacguca

SEQ ID NO: 595843 - RNA, 19 nt, Artificial Sequence
  Description of Artificial Sequence: Synthetic oligonucleotide
gacuuaggauguuucaagg

SEQ ID NO: 595844 - RNA, 19 nt, Artificial Sequence
  Description of Artificial Sequence: Synthetic oligonucleotide
ugccaaaacuguuacaucu

SEQ ID NO: 595845 - RNA, 19 nt, Artificial Sequence
  Description of Artificial Sequence: Synthetic oligonucleotide
cucuuuuagggcaaagugc

SEQ ID NO: 595846 - RNA, 19 nt, Artificial Sequence
  Description of Artificial Sequence: Synthetic oligonucleotide
aguaacaacccucuaggug

SEQ ID NO: 595847 - RNA, 19 nt, Artificial Sequence
  Description of Artificial Sequence: Synthetic oligonucleotide
gauucuaggugucacgaug

SEQ ID NO: 595848 - RNA, 19 nt, Artificial Sequence
  Description of Artificial Sequence: Synthetic oligonucleotide
acuuaggauguuucaaggg

SEQ ID NO: 595849 - RNA, 19 nt, Artificial Sequence
  Description of Artificial Sequence: Synthetic oligonucleotide
aaagacuuaggauguuuca

SEQ ID NO: 595850 - RNA, 19 nt, Artificial Sequence
  Description of Artificial Sequence: Synthetic oligonucleotide
cuuuaacggauuuuacagg

SEQ ID NO: 595851 - RNA, 19 nt, Artificial Sequence
  Description of Artificial Sequence: Synthetic oligonucleotide
uuaagagugaggcuacaac

SEQ ID NO: 595852 - RNA, 19 nt, Artificial Sequence
  Description of Artificial Sequence: Synthetic oligonucleotide
uguuucaagggccauucca

SEQ ID NO: 595853 - RNA, 19 nt, Artificial Sequence
  Description of Artificial Sequence: Synthetic oligonucleotide
uuuaccuauuaagaaacug

SEQ ID NO: 595854 - RNA, 19 nt, Artificial Sequence
  Description of Artificial Sequence: Synthetic oligonucleotide
aucaguauugcucuuugca

SEQ ID NO: 595855 - RNA, 19 nt, Artificial Sequence
  Description of Artificial Sequence: Synthetic oligonucleotide
cuucgcaaggcauacagac

SEQ ID NO: 595856 - RNA, 19 nt, Artificial Sequence
  Description of Artificial Sequence: Synthetic oligonucleotide
cuuuauagcuagaaaguuc

SEQ ID NO: 595857 - RNA, 19 nt, Artificial Sequence
  Description of Artificial Sequence: Synthetic oligonucleotide
agcccuagcaaucauuguc

SEQ ID NO: 595858 - RNA, 19 nt, Artificial Sequence
  Description of Artificial Sequence: Synthetic oligonucleotide
ucgcaaggcauacagaccu

SEQ ID NO: 595859 - RNA, 19 nt, Artificial Sequence
  Description of Artificial Sequence: Synthetic oligonucleotide
gguaauggcacguaaauga

SEQ ID NO: 595860 - RNA, 19 nt, Artificial Sequence
  Description of Artificial Sequence: Synthetic oligonucleotide
uaaguuacuuugaauuggu

SEQ ID NO: 595861 - RNA, 19 nt, Artificial Sequence
  Description of Artificial Sequence: Synthetic oligonucleotide
aagagugaggcuacaacuc

SEQ ID NO: 595862 - RNA, 19 nt, Artificial Sequence
  Description of Artificial Sequence: Synthetic oligonucleotide
agaucuaacuggcuuagcu

SEQ ID NO: 595863 - RNA, 19 nt, Artificial Sequence
  Description of Artificial Sequence: Synthetic oligonucleotide
aacugccccuuucaacugc

SEQ ID NO: 595864 - RNA, 19 nt, Artificial Sequence
  Description of Artificial Sequence: Synthetic oligonucleotide
uccaugggcauuauuugcc

SEQ ID NO: 595865 - RNA, 19 nt, Artificial Sequence
  Description of Artificial Sequence: Synthetic oligonucleotide
uuuaagccuccaaucaugu

SEQ ID NO: 595866 - RNA, 19 nt, Artificial Sequence
  Description of Artificial Sequence: Synthetic oligonucleotide
acaagagaacuccuuuagg

SEQ ID NO: 595867 - RNA, 19 nt, Artificial Sequence
  Description of Artificial Sequence: Synthetic oligonucleotide
aguaguuucucuucacuga

SEQ ID NO: 595868 - RNA, 19 nt, Artificial Sequence
  Description of Artificial Sequence: Synthetic oligonucleotide
ucgaguauuuccuucucug

SEQ ID NO: 595869 - RNA, 19 nt, Artificial Sequence
  Description of Artificial Sequence: Synthetic oligonucleotide
auggaugccguagaguggc

SEQ ID NO: 595870 - RNA, 19 nt, Artificial Sequence
  Description of Artificial Sequence: Synthetic oligonucleotide
aaacgcaucagcgacucug

SEQ ID NO: 595871 - RNA, 19 nt, Artificial Sequence
  Description of Artificial Sequence: Synthetic oligonucleotide
ggugucacgaugcucaagg

SEQ ID NO: 595872 - RNA, 19 nt, Artificial Sequence
  Description of Artificial Sequence: Synthetic oligonucleotide
uauccaugggcauuauuug

SEQ ID NO: 595873 - RNA, 19 nt, Artificial Sequence
  Description of Artificial Sequence: Synthetic oligonucleotide
cuagcaaucauugucuuuc

SEQ ID NO: 595874 - RNA, 19 nt, Artificial Sequence
  Description of Artificial Sequence: Synthetic oligonucleotide
aaggauagauccacgucac

SEQ ID NO: 595875 - RNA, 19 nt, Artificial Sequence
  Description of Artificial Sequence: Synthetic oligonucleotide
caaucaugucauaaguuac

SEQ ID NO: 595876 - RNA, 19 nt, Artificial Sequence
  Description of Artificial Sequence: Synthetic oligonucleotide
uacggaauaucucucuaac

SEQ ID NO: 595877 - RNA, 19 nt, Artificial Sequence
  Description of Artificial Sequence: Synthetic oligonucleotide
ugacaggucgaguauuucc

SEQ ID NO: 595878 - RNA, 19 nt, Artificial Sequence
  Description of Artificial Sequence: Synthetic oligonucleotide
aauaauugauggaugccgu

SEQ ID NO: 595879 - RNA, 19 nt, Artificial Sequence
  Description of Artificial Sequence: Synthetic oligonucleotide
auucuaggugucacgaugc

SEQ ID NO: 595880 - RNA, 19 nt, Artificial Sequence
  Description of Artificial Sequence: Synthetic oligonucleotide
agaauaucaagccgguccu

SEQ ID NO: 595881 - RNA, 19 nt, Artificial Sequence
  Description of Artificial Sequence: Synthetic oligonucleotide
acuaggucugaugucauuc

SEQ ID NO: 595882 - RNA, 19 nt, Artificial Sequence
  Description of Artificial Sequence: Synthetic oligonucleotide
uaccuauuaagaaacugua

SEQ ID NO: 595883 - RNA, 19 nt, Artificial Sequence
  Description of Artificial Sequence: Synthetic oligonucleotide
ugucugggcgauuaguagc

SEQ ID NO: 595884 - RNA, 19 nt, Artificial Sequence
  Description of Artificial Sequence: Synthetic oligonucleotide
auucauuaauucagguccc

SEQ ID NO: 595885 - RNA, 19 nt, Artificial Sequence
  Description of Artificial Sequence: Synthetic oligonucleotide
cauaacucuugaaaaguuc

SEQ ID NO: 595886 - RNA, 19 nt, Artificial Sequence
  Description of Artificial Sequence: Synthetic oligonucleotide
uaagcauguauuucuuaga

SEQ ID NO: 595887 - RNA, 19 nt, Artificial Sequence
  Description of Artificial Sequence: Synthetic oligonucleotide
ugcuaccucucucauagca

SEQ ID NO: 595888 - RNA, 19 nt, Artificial Sequence
  Description of Artificial Sequence: Synthetic oligonucleotide
acccauucugaugaaagac

SEQ ID NO: 595889 - RNA, 19 nt, Artificial Sequence
  Description of Artificial Sequence: Synthetic oligonucleotide
auugauggaugccguagag

SEQ ID NO: 595890 - RNA, 19 nt, Artificial Sequence
  Description of Artificial Sequence: Synthetic oligonucleotide
uccguuaacagcugagcca

SEQ ID NO: 595891 - RNA, 19 nt, Artificial Sequence
  Description of Artificial Sequence: Synthetic oligonucleotide
aaucaugucauaaguuacu

SEQ ID NO: 595892 - RNA, 19 nt, Artificial Sequence
  Description of Artificial Sequence: Synthetic oligonucleotide
cuugagaggcaguucaaug

SEQ ID NO: 595893 - RNA, 19 nt, Artificial Sequence
  Description of Artificial Sequence: Synthetic oligonucleotide
guaaacacccucaagacaa

SEQ ID NO: 595894 - RNA, 19 nt, Artificial Sequence
  Description of Artificial Sequence: Synthetic oligonucleotide
uggcugaauacccauucug

SEQ ID NO: 595895 - RNA, 19 nt, Artificial Sequence
  Description of Artificial Sequence: Synthetic oligonucleotide
cuugcagacggcuaugauc

SEQ ID NO: 595896 - RNA, 19 nt, Artificial Sequence
  Description of Artificial Sequence: Synthetic oligonucleotide
ucauuguuuuggagcaucc

SEQ ID NO: 595897 - RNA, 19 nt, Artificial Sequence
  Description of Artificial Sequence: Synthetic oligonucleotide
aauaggcauugaguggaac

SEQ ID NO: 595898 - RNA, 19 nt, Artificial Sequence
  Description of Artificial Sequence: Synthetic oligonucleotide
cuggaugaaucaaaacuac

SEQ ID NO: 595899 - RNA, 19 nt, Artificial Sequence
  Description of Artificial Sequence: Synthetic oligonucleotide
uuagugagcaaguguggca

SEQ ID NO: 595900 - RNA, 19 nt, Artificial Sequence
  Description of Artificial Sequence: Synthetic oligonucleotide
uaauuuucaccaugccagc

SEQ ID NO: 595901 - RNA, 19 nt, Artificial Sequence
  Description of Artificial Sequence: Synthetic oligonucleotide
caucuagugcuugagggcg

SEQ ID NO: 595902 - RNA, 19 nt, Artificial Sequence
  Description of Artificial Sequence: Synthetic oligonucleotide
cugaauacccauucugaug

SEQ ID NO: 595903 - RNA, 19 nt, Artificial Sequence
  Description of Artificial Sequence: Synthetic oligonucleotide
uuaggaacgccaaucucaa

SEQ ID NO: 595904 - RNA, 19 nt, Artificial Sequence
  Description of Artificial Sequence: Synthetic oligonucleotide
agggagguuaggcuguuuc

SEQ ID NO: 595905 - RNA, 19 nt, Artificial Sequence
  Description of Artificial Sequence: Synthetic oligonucleotide
ugucacgaugcucaaggcu

SEQ ID NO: 595906 - RNA, 19 nt, Artificial Sequence
  Description of Artificial Sequence: Synthetic oligonucleotide
aagauaauggaaggugcca

SEQ ID NO: 595907 - RNA, 19 nt, Artificial Sequence
  Description of Artificial Sequence: Synthetic oligonucleotide
aaugaaacuucaccagcuu

SEQ ID NO: 595908 - RNA, 19 nt, Artificial Sequence
  Description of Artificial Sequence: Synthetic oligonucleotide
cucuucgcaaggcauacag

SEQ ID NO: 595909 - RNA, 19 nt, Artificial Sequence
  Description of Artificial Sequence: Synthetic oligonucleotide
ggaauaucucucuaacugc

SEQ ID NO: 595910 - RNA, 19 nt, Artificial Sequence
  Description of Artificial Sequence: Synthetic oligonucleotide
uuucauuggccaaagccuu

SEQ ID NO: 595911 - RNA, 19 nt, Artificial Sequence
  Description of Artificial Sequence: Synthetic oligonucleotide
aucaauguuaagagugagg

SEQ ID NO: 595912 - RNA, 19 nt, Artificial Sequence
  Description of Artificial Sequence: Synthetic oligonucleotide
uuaacggauuuuacaggga

SEQ ID NO: 595913 - RNA, 19 nt, Artificial Sequence
  Description of Artificial Sequence: Synthetic oligonucleotide
caaaacacggucugcaaca

SEQ ID NO: 595914 - RNA, 19 nt, Artificial Sequence
  Description of Artificial Sequence: Synthetic oligonucleotide
ucaagccacuuucauuggc

SEQ ID NO: 595915 - RNA, 19 nt, Artificial Sequence
  Description of Artificial Sequence: Synthetic oligonucleotide
auacccauucugaugaaag

SEQ ID NO: 595916 - RNA, 19 nt, Artificial Sequence
  Description of Artificial Sequence: Synthetic oligonucleotide
ucauuagcaacagcccuag

SEQ ID NO: 595917 - RNA, 19 nt, Artificial Sequence
  Description of Artificial Sequence: Synthetic oligonucleotide
uucaucccuuguaagaaau

SEQ ID NO: 595918 - RNA, 19 nt, Artificial Sequence
  Description of Artificial Sequence: Synthetic oligonucleotide
ugggauucuaggugucacg

SEQ ID NO: 595919 - RNA, 19 nt, Artificial Sequence
  Description of Artificial Sequence: Synthetic oligonucleotide
uuuacggaauaucucucua

SEQ ID NO: 595920 - RNA, 19 nt, Artificial Sequence
  Description of Artificial Sequence: Synthetic oligonucleotide
aguguggcacccuucggag

SEQ ID NO: 595921 - RNA, 19 nt, Artificial Sequence
  Description of Artificial Sequence: Synthetic oligonucleotide
cauuauuugccagucucag

SEQ ID NO: 595922 - RNA, 19 nt, Artificial Sequence
  Description of Artificial Sequence: Synthetic oligonucleotide
accaacauauccaugggca

SEQ ID NO: 595923 - RNA, 19 nt, Artificial Sequence
  Description of Artificial Sequence: Synthetic oligonucleotide
ugcuggaauuccauaacuc

SEQ ID NO: 595924 - RNA, 19 nt, Artificial Sequence
  Description of Artificial Sequence: Synthetic oligonucleotide
agcuuuagugagcaagugu

SEQ ID NO: 595925 - RNA, 19 nt, Artificial Sequence
  Description of Artificial Sequence: Synthetic oligonucleotide
uaggauguuucaagggcca

SEQ ID NO: 595926 - RNA, 19 nt, Artificial Sequence
  Description of Artificial Sequence: Synthetic oligonucleotide
cuugcuuuacggaauaucu

SEQ ID NO: 595927 - RNA, 19 nt, Artificial Sequence
  Description of Artificial Sequence: Synthetic oligonucleotide
cuuuaucaaaucgcccugg

SEQ ID NO: 595928 - RNA, 19 nt, Artificial Sequence
  Description of Artificial Sequence: Synthetic oligonucleotide
agagugaggcuacaacucu

SEQ ID NO: 595929 - RNA, 19 nt, Artificial Sequence
  Description of Artificial Sequence: Synthetic oligonucleotide
ucuaggugcuggaauucca

SEQ ID NO: 595930 - RNA, 19 nt, Artificial Sequence
  Description of Artificial Sequence: Synthetic oligonucleotide
acagcugagccaaaacacg

SEQ ID NO: 595931 - RNA, 19 nt, Artificial Sequence
  Description of Artificial Sequence: Synthetic oligonucleotide
uuacggaauaucucucuaa

SEQ ID NO: 595932 - RNA, 19 nt, Artificial Sequence
  Description of Artificial Sequence: Synthetic oligonucleotide
cauagcacuaggucugaug

SEQ ID NO: 595933 - RNA, 19 nt, Artificial Sequence
  Description of Artificial Sequence: Synthetic oligonucleotide
aacuacacuuaagaccugu

SEQ ID NO: 595934 - RNA, 19 nt, Artificial Sequence
  Description of Artificial Sequence: Synthetic oligonucleotide
uggaggacgaguucaucca

SEQ ID NO: 595935 - RNA, 19 nt, Artificial Sequence
  Description of Artificial Sequence: Synthetic oligonucleotide
auacagaccugccucauua

SEQ ID NO: 595936 - RNA, 19 nt, Artificial Sequence
  Description of Artificial Sequence: Synthetic oligonucleotide
aaggacuaguacccguccu

SEQ ID NO: 595937 - RNA, 19 nt, Artificial Sequence
  Description of Artificial Sequence: Synthetic oligonucleotide
gcauuaauagacuucagua

SEQ ID NO: 595938 - RNA, 19 nt, Artificial Sequence
  Description of Artificial Sequence: Synthetic oligonucleotide
uccgggagggccauacaag

SEQ ID NO: 595939 - RNA, 19 nt, Artificial Sequence
  Description of Artificial Sequence: Synthetic oligonucleotide
uucuuagacuguguguagc

SEQ ID NO: 595940 - RNA, 19 nt, Artificial Sequence
  Description of Artificial Sequence: Synthetic oligonucleotide
caaccucauuacuaauagg

SEQ ID NO: 595941 - RNA, 19 nt, Artificial Sequence
  Description of Artificial Sequence: Synthetic oligonucleotide
agaaaguucaagccacuuu

SEQ ID NO: 595942 - RNA, 19 nt, Artificial Sequence
  Description of Artificial Sequence: Synthetic oligonucleotide
acguaaccuugcuucaguc

SEQ ID NO: 595943 - RNA, 19 nt, Artificial Sequence
  Description of Artificial Sequence: Synthetic oligonucleotide
ugcuugagggcgauuugug

SEQ ID NO: 595944 - RNA, 19 nt, Artificial Sequence
  Description of Artificial Sequence: Synthetic oligonucleotide
auguuucaagggccauucc

SEQ ID NO: 595945 - RNA, 19 nt, Artificial Sequence
  Description of Artificial Sequence: Synthetic oligonucleotide
agcaccugaagaacugccc

SEQ ID NO: 595946 - RNA, 19 nt, Artificial Sequence
  Description of Artificial Sequence: Synthetic oligonucleotide
guacccguccuucacuucc

SEQ ID NO: 595947 - RNA, 19 nt, Artificial Sequence
  Description of Artificial Sequence: Synthetic oligonucleotide
cagaccugccucauuacac

SEQ ID NO: 595948 - RNA, 19 nt, Artificial Sequence
  Description of Artificial Sequence: Synthetic oligonucleotide
ucuaacuggcuuagcugga

SEQ ID NO: 595949 - RNA, 19 nt, Artificial Sequence
  Description of Artificial Sequence: Synthetic oligonucleotide
cuguuuaagccuccaauca

SEQ ID NO: 595950 - RNA, 19 nt, Artificial Sequence
  Description of Artificial Sequence: Synthetic oligonucleotide
aggucaaccucauuacuaa

SEQ ID NO: 595951 - RNA, 19 nt, Artificial Sequence
  Description of Artificial Sequence: Synthetic oligonucleotide
cuuauugcuuucagcugac

SEQ ID NO: 595952 - RNA, 19 nt, Artificial Sequence
  Description of Artificial Sequence: Synthetic oligonucleotide
caagagaacuccuuuaggu

SEQ ID NO: 595953 - RNA, 19 nt, Artificial Sequence
  Description of Artificial Sequence: Synthetic oligonucleotide
aguucaagccacuuucauu

SEQ ID NO: 595954 - RNA, 19 nt, Artificial Sequence
  Description of Artificial Sequence: Synthetic oligonucleotide
acggaauaucucucuaacu

SEQ ID NO: 595955 - RNA, 19 nt, Artificial Sequence
  Description of Artificial Sequence: Synthetic oligonucleotide
cauugaguggaacugcaga

SEQ ID NO: 595956 - RNA, 19 nt, Artificial Sequence
  Description of Artificial Sequence: Synthetic oligonucleotide
uaaccuugcuucagucuca

SEQ ID NO: 595957 - RNA, 19 nt, Artificial Sequence
  Description of Artificial Sequence: Synthetic oligonucleotide
ucucaccauagaauuugcu

SEQ ID NO: 595958 - RNA, 19 nt, Artificial Sequence
  Description of Artificial Sequence: Synthetic oligonucleotide
auguuaagagugaggcuac

SEQ ID NO: 595959 - RNA, 19 nt, Artificial Sequence
  Description of Artificial Sequence: Synthetic oligonucleotide
cugucugggcgauuaguag

SEQ ID NO: 595960 - RNA, 19 nt, Artificial Sequence
  Description of Artificial Sequence: Synthetic oligonucleotide
ucuucgcaaggcauacaga

SEQ ID NO: 595961 - RNA, 19 nt, Artificial Sequence
  Description of Artificial Sequence: Synthetic oligonucleotide
guaacauccaaugaaacuu

SEQ ID NO: 595962 - RNA, 19 nt, Artificial Sequence
  Description of Artificial Sequence: Synthetic oligonucleotide
guucaggcugcuugagagg

SEQ ID NO: 595963 - RNA, 19 nt, Artificial Sequence
  Description of Artificial Sequence: Synthetic oligonucleotide
aucaagccgguccugggca

SEQ ID NO: 595964 - RNA, 19 nt, Artificial Sequence
  Description of Artificial Sequence: Synthetic oligonucleotide
ccuauuaagaaacuguaaa

SEQ ID NO: 595965 - RNA, 19 nt, Artificial Sequence
  Description of Artificial Sequence: Synthetic oligonucleotide
ugaggcuacaacucucuuu

SEQ ID NO: 595966 - RNA, 19 nt, Artificial Sequence
  Description of Artificial Sequence: Synthetic oligonucleotide
acagcccuagcaaucauug

SEQ ID NO: 595967 - RNA, 19 nt, Artificial Sequence
  Description of Artificial Sequence: Synthetic oligonucleotide
ucacgaugcucaaggcuug

SEQ ID NO: 595968 - RNA, 19 nt, Artificial Sequence
  Description of Artificial Sequence: Synthetic oligonucleotide
augaaacuucaccagcuuu

SEQ ID NO: 595969 - RNA, 19 nt, Artificial Sequence
  Description of Artificial Sequence: Synthetic oligonucleotide
ggauagauccacgucacug

SEQ ID NO: 595970 - RNA, 19 nt, Artificial Sequence
  Description of Artificial Sequence: Synthetic oligonucleotide
uccaaggacuaguacccgu

SEQ ID NO: 595971 - RNA, 19 nt, Artificial Sequence
  Description of Artificial Sequence: Synthetic oligonucleotide
ccugccucauuacacaagg

SEQ ID NO: 595972 - RNA, 19 nt, Artificial Sequence
  Description of Artificial Sequence: Synthetic oligonucleotide
accugcauuaauagacuuc

SEQ ID NO: 595973 - RNA, 19 nt, Artificial Sequence
  Description of Artificial Sequence: Synthetic oligonucleotide
cggaauaucucucuaacug

SEQ ID NO: 595974 - RNA, 19 nt, Artificial Sequence
  Description of Artificial Sequence: Synthetic oligonucleotide
cuuugcaccugcauuaaua

SEQ ID NO: 595975 - RNA, 19 nt, Artificial Sequence
  Description of Artificial Sequence: Synthetic oligonucleotide
cauagaguaacaacccucu

SEQ ID NO: 595976 - RNA, 19 nt, Artificial Sequence
  Description of Artificial Sequence: Synthetic oligonucleotide
caaggacuaguacccgucc

SEQ ID NO: 595977 - RNA, 19 nt, Artificial Sequence
  Description of Artificial Sequence: Synthetic oligonucleotide
cuucuucuagggccaagag

SEQ ID NO: 595978 - RNA, 19 nt, Artificial Sequence
  Description of Artificial Sequence: Synthetic oligonucleotide
gggaccauagaguaacaac

SEQ ID NO: 595979 - RNA, 19 nt, Artificial Sequence
  Description of Artificial Sequence: Synthetic oligonucleotide
uguggcuccaaggacuagu

SEQ ID NO: 595980 - RNA, 19 nt, Artificial Sequence
  Description of Artificial Sequence: Synthetic oligonucleotide
gcuagaaaguucaagccac

SEQ ID NO: 595981 - RNA, 19 nt, Artificial Sequence
  Description of Artificial Sequence: Synthetic oligonucleotide
cugggcgauuaguagcugc

SEQ ID NO: 595982 - RNA, 19 nt, Artificial Sequence
  Description of Artificial Sequence: Synthetic oligonucleotide
cuuugcuaucauuguuuug

SEQ ID NO: 595983 - RNA, 19 nt, Artificial Sequence
  Description of Artificial Sequence: Synthetic oligonucleotide
cauuaggaacgccaaucuc

SEQ ID NO: 595984 - RNA, 19 nt, Artificial Sequence
  Description of Artificial Sequence: Synthetic oligonucleotide
caugggcauuauuugccag

SEQ ID NO: 595985 - RNA, 19 nt, Artificial Sequence
  Description of Artificial Sequence: Synthetic oligonucleotide
aacggauuuuacagggagu

SEQ ID NO: 595986 - RNA, 19 nt, Artificial Sequence
  Description of Artificial Sequence: Synthetic oligonucleotide
uggcuuagcuggaaggaua

SEQ ID NO: 595987 - RNA, 19 nt, Artificial Sequence
  Description of Artificial Sequence: Synthetic oligonucleotide
gggacucuguguaacaucc

SEQ ID NO: 595988 - RNA, 19 nt, Artificial Sequence
  Description of Artificial Sequence: Synthetic oligonucleotide
ucaucccuuguaagaaauc

SEQ ID NO: 595989 - RNA, 19 nt, Artificial Sequence
  Description of Artificial Sequence: Synthetic oligonucleotide
agacggcuaugaucucugc

SEQ ID NO: 595990 - RNA, 19 nt, Artificial Sequence
  Description of Artificial Sequence: Synthetic oligonucleotide
caucccuuguaagaaauca

SEQ ID NO: 595991 - RNA, 19 nt, Artificial Sequence
  Description of Artificial Sequence: Synthetic oligonucleotide
auaauugauggaugccgua

SEQ ID NO: 595992 - RNA, 19 nt, Artificial Sequence
  Description of Artificial Sequence: Synthetic oligonucleotide
cugggcauuaggaacgcca

SEQ ID NO: 595993 - RNA, 19 nt, Artificial Sequence
  Description of Artificial Sequence: Synthetic oligonucleotide
ugcucaaggcuugagugaa

SEQ ID NO: 595994 - RNA, 19 nt, Artificial Sequence
  Description of Artificial Sequence: Synthetic oligonucleotide
aacacccucaagacaaaau

SEQ ID NO: 595995 - RNA, 19 nt, Artificial Sequence
  Description of Artificial Sequence: Synthetic oligonucleotide
uucauaauucggucagcuu

SEQ ID NO: 595996 - RNA, 19 nt, Artificial Sequence
  Description of Artificial Sequence: Synthetic oligonucleotide
ugacguaaccuugcuucag

SEQ ID NO: 595997 - RNA, 19 nt, Artificial Sequence
  Description of Artificial Sequence: Synthetic oligonucleotide
uucauuaauucaggucccu

SEQ ID NO: 595998 - RNA, 19 nt, Artificial Sequence
  Description of Artificial Sequence: Synthetic oligonucleotide
uucuaggugucacgaugcu

SEQ ID NO: 595999 - RNA, 19 nt, Artificial Sequence
  Description of Artificial Sequence: Synthetic oligonucleotide
ucucucuaacugcucuuuc

SEQ ID NO: 596000 - RNA, 19 nt, Artificial Sequence
  Description of Artificial Sequence: Synthetic oligonucleotide
acggauuuuacagggagua

SEQ ID NO: 596001 - RNA, 19 nt, Artificial Sequence
  Description of Artificial Sequence: Synthetic oligonucleotide
uuacagggaguacucugua

SEQ ID NO: 596002 - RNA, 19 nt, Artificial Sequence
  Description of Artificial Sequence: Synthetic oligonucleotide
cauaauucggucagcuuua

SEQ ID NO: 596003 - RNA, 19 nt, Artificial Sequence
  Description of Artificial Sequence: Synthetic oligonucleotide
uguguagcccgcucuuuuc

SEQ ID NO: 596004 - RNA, 19 nt, Artificial Sequence
  Description of Artificial Sequence: Synthetic oligonucleotide
guagaguggcuucagcaaa

SEQ ID NO: 596005 - RNA, 19 nt, Artificial Sequence
  Description of Artificial Sequence: Synthetic oligonucleotide
ugacuguuuaagccuccaa

SEQ ID NO: 596006 - RNA, 19 nt, Artificial Sequence
  Description of Artificial Sequence: Synthetic oligonucleotide
acuggcuuagcuggaagga

SEQ ID NO: 596007 - RNA, 19 nt, Artificial Sequence
  Description of Artificial Sequence: Synthetic oligonucleotide
gaacugccccuuucaacug

SEQ ID NO: 596008 - RNA, 19 nt, Artificial Sequence
  Description of Artificial Sequence: Synthetic oligonucleotide
accucauuacuaauaggca

SEQ ID NO: 596009 - RNA, 19 nt, Artificial Sequence
  Description of Artificial Sequence: Synthetic oligonucleotide
ccgaguaagugucaguuug

SEQ ID NO: 596010 - RNA, 19 nt, Artificial Sequence
  Description of Artificial Sequence: Synthetic oligonucleotide
caaucauugucuuuccagu

SEQ ID NO: 596011 - RNA, 19 nt, Artificial Sequence
  Description of Artificial Sequence: Synthetic oligonucleotide
auuuuacagggaguacucu

SEQ ID NO: 596012 - RNA, 19 nt, Artificial Sequence
  Description of Artificial Sequence: Synthetic oligonucleotide
cagacggcuaugaucucug

SEQ ID NO: 596013 - RNA, 19 nt, Artificial Sequence
  Description of Artificial Sequence: Synthetic oligonucleotide
aucccauccaucuccguua

SEQ ID NO: 596014 - RNA, 19 nt, Artificial Sequence
  Description of Artificial Sequence: Synthetic oligonucleotide
uaauaggcauugaguggaa

SEQ ID NO: 596015 - RNA, 19 nt, Artificial Sequence
  Description of Artificial Sequence: Synthetic oligonucleotide
caaugaaacuucaccagcu

SEQ ID NO: 596016 - RNA, 19 nt, Artificial Sequence
  Description of Artificial Sequence: Synthetic oligonucleotide
agccaaaacacggucugca

SEQ ID NO: 596017 - RNA, 19 nt, Artificial Sequence
  Description of Artificial Sequence: Synthetic oligonucleotide
caacugccaaagcaucaag

SEQ ID NO: 596018 - RNA, 19 nt, Artificial Sequence
  Description of Artificial Sequence: Synthetic oligonucleotide
ccauagaguaacaacccuc

SEQ ID NO: 596019 - RNA, 19 nt, Artificial Sequence
  Description of Artificial Sequence: Synthetic oligonucleotide
ccaagauacauuugggaca

SEQ ID NO: 596020 - RNA, 19 nt, Artificial Sequence
  Description of Artificial Sequence: Synthetic oligonucleotide
uuaagccuccaaucauguc

SEQ ID NO: 596021 - RNA, 19 nt, Artificial Sequence
  Description of Artificial Sequence: Synthetic oligonucleotide
auuuaccuauuaagaaacu

SEQ ID NO: 596022 - RNA, 19 nt, Artificial Sequence
  Description of Artificial Sequence: Synthetic oligonucleotide
cuaggucugaugucauuca

SEQ ID NO: 596023 - RNA, 19 nt, Artificial Sequence
  Description of Artificial Sequence: Synthetic oligonucleotide
cuucuagggccaagagagc

SEQ ID NO: 596024 - RNA, 19 nt, Artificial Sequence
  Description of Artificial Sequence: Synthetic oligonucleotide
cucuaggugcuggaauucc

SEQ ID NO: 596025 - RNA, 19 nt, Artificial Sequence
  Description of Artificial Sequence: Synthetic oligonucleotide
gcuaugaucucugcucccg

SEQ ID NO: 596026 - RNA, 19 nt, Artificial Sequence
  Description of Artificial Sequence: Synthetic oligonucleotide
ccuuguaagaaaucauuca

SEQ ID NO: 596027 - RNA, 19 nt, Artificial Sequence
  Description of Artificial Sequence: Synthetic oligonucleotide
cauucaucccuuguaagaa

SEQ ID NO: 596028 - RNA, 19 nt, Artificial Sequence
  Description of Artificial Sequence: Synthetic oligonucleotide
cacccuucggagcagcuuc

SEQ ID NO: 596029 - RNA, 19 nt, Artificial Sequence
  Description of Artificial Sequence: Synthetic oligonucleotide
caggucgaguauuuccuuc

SEQ ID NO: 596030 - RNA, 19 nt, Artificial Sequence
  Description of Artificial Sequence: Synthetic oligonucleotide
ggaaggauagauccacguc

SEQ ID NO: 596031 - RNA, 19 nt, Artificial Sequence
  Description of Artificial Sequence: Synthetic oligonucleotide
cuccagugaggauauuuca

SEQ ID NO: 596032 - RNA, 19 nt, Artificial Sequence
  Description of Artificial Sequence: Synthetic oligonucleotide
aaaucgcccuggucuucug

SEQ ID NO: 596033 - RNA, 19 nt, Artificial Sequence
  Description of Artificial Sequence: Synthetic oligonucleotide
aaaacgcaucagcgacucu

SEQ ID NO: 596034 - RNA, 19 nt, Artificial Sequence
  Description of Artificial Sequence: Synthetic oligonucleotide
caaguguggcacccuucgg

SEQ ID NO: 596035 - RNA, 19 nt, Artificial Sequence
  Description of Artificial Sequence: Synthetic oligonucleotide
aggacuaguacccguccuu

SEQ ID NO: 596036 - RNA, 19 nt, Artificial Sequence
  Description of Artificial Sequence: Synthetic oligonucleotide
gaagaauaucaagccgguc

SEQ ID NO: 596037 - RNA, 19 nt, Artificial Sequence
  Description of Artificial Sequence: Synthetic oligonucleotide
uaguacccguccuucacuu

SEQ ID NO: 596038 - RNA, 19 nt, Artificial Sequence
  Description of Artificial Sequence: Synthetic oligonucleotide
ucuauucugucugggcgau

SEQ ID NO: 596039 - RNA, 19 nt, Artificial Sequence
  Description of Artificial Sequence: Synthetic oligonucleotide
gacuaguacccguccuuca

SEQ ID NO: 596040 - RNA, 19 nt, Artificial Sequence
  Description of Artificial Sequence: Synthetic oligonucleotide
caggucaaccucauuacua

SEQ ID NO: 596041 - RNA, 19 nt, Artificial Sequence
  Description of Artificial Sequence: Synthetic oligonucleotide
ucauuaauucaggucccuu

SEQ ID NO: 596042 - RNA, 19 nt, Artificial Sequence
  Description of Artificial Sequence: Synthetic oligonucleotide
uagaaaguucaagccacuu

SEQ ID NO: 596043 - RNA, 19 nt, Artificial Sequence
  Description of Artificial Sequence: Synthetic oligonucleotide
cugccucauuacacaaggc

SEQ ID NO: 596044 - RNA, 19 nt, Artificial Sequence
  Description of Artificial Sequence: Synthetic oligonucleotide
ggcgauuuguggcuccaag

SEQ ID NO: 596045 - RNA, 19 nt, Artificial Sequence
  Description of Artificial Sequence: Synthetic oligonucleotide
cuuuacggaauaucucucu

SEQ ID NO: 596046 - RNA, 19 nt, Artificial Sequence
  Description of Artificial Sequence: Synthetic oligonucleotide
gacaggucgaguauuuccu

SEQ ID NO: 596047 - RNA, 19 nt, Artificial Sequence
  Description of Artificial Sequence: Synthetic oligonucleotide
gggagguuaggcuguuucc

SEQ ID NO: 596048 - RNA, 19 nt, Artificial Sequence
  Description of Artificial Sequence: Synthetic oligonucleotide
cuaucagggagguuaggcu

SEQ ID NO: 596049 - RNA, 19 nt, Artificial Sequence
  Description of Artificial Sequence: Synthetic oligonucleotide
guacucuguaaugcugggc

SEQ ID NO: 596050 - RNA, 19 nt, Artificial Sequence
  Description of Artificial Sequence: Synthetic oligonucleotide
gaacgccaaucucaaucuc

SEQ ID NO: 596051 - RNA, 19 nt, Artificial Sequence
  Description of Artificial Sequence: Synthetic oligonucleotide
acgcaucagcgacucuggg

SEQ ID NO: 596052 - RNA, 19 nt, Artificial Sequence
  Description of Artificial Sequence: Synthetic oligonucleotide
ccaaaacacggucugcaac

SEQ ID NO: 596053 - RNA, 19 nt, Artificial Sequence
  Description of Artificial Sequence: Synthetic oligonucleotide
gugucacgaugcucaaggc

SEQ ID NO: 596054 - RNA, 19 nt, Artificial Sequence
  Description of Artificial Sequence: Synthetic oligonucleotide
cauuacacaaggccuucaa

SEQ ID NO: 596055 - RNA, 19 nt, Artificial Sequence
  Description of Artificial Sequence: Synthetic oligonucleotide
cugacguaaccuugcuuca

SEQ ID NO: 596056 - RNA, 19 nt, Artificial Sequence
  Description of Artificial Sequence: Synthetic oligonucleotide
uuuggaggacgaguucauc

SEQ ID NO: 596057 - RNA, 19 nt, Artificial Sequence
  Description of Artificial Sequence: Synthetic oligonucleotide
aggauagauccacgucacu

SEQ ID NO: 596058 - RNA, 19 nt, Artificial Sequence
  Description of Artificial Sequence: Synthetic oligonucleotide
guuaagagugaggcuacaa

SEQ ID NO: 596059 - RNA, 19 nt, Artificial Sequence
  Description of Artificial Sequence: Synthetic oligonucleotide
agcaaguguggcacccuuc

SEQ ID NO: 596060 - RNA, 19 nt, Artificial Sequence
  Description of Artificial Sequence: Synthetic oligonucleotide
gacguaaccuugcuucagu

SEQ ID NO: 596061 - RNA, 19 nt, Artificial Sequence
  Description of Artificial Sequence: Synthetic oligonucleotide
gaguaacaacccucuaggu

SEQ ID NO: 596062 - RNA, 19 nt, Artificial Sequence
  Description of Artificial Sequence: Synthetic oligonucleotide
aaacuacacuuaagaccug

SEQ ID NO: 596063 - RNA, 19 nt, Artificial Sequence
  Description of Artificial Sequence: Synthetic oligonucleotide
aaguuacuuugaauugguu

SEQ ID NO: 596064 - RNA, 19 nt, Artificial Sequence
  Description of Artificial Sequence: Synthetic oligonucleotide
uacccguccuucacuuccu

SEQ ID NO: 596065 - RNA, 19 nt, Artificial Sequence
  Description of Artificial Sequence: Synthetic oligonucleotide
uguagcccgcucuuuucuu

SEQ ID NO: 596066 - RNA, 19 nt, Artificial Sequence
  Description of Artificial Sequence: Synthetic oligonucleotide
acaggucgaguauuuccuu

SEQ ID NO: 596067 - RNA, 19 nt, Artificial Sequence
  Description of Artificial Sequence: Synthetic oligonucleotide
acggucugcaacaucccca

SEQ ID NO: 596068 - RNA, 19 nt, Artificial Sequence
  Description of Artificial Sequence: Synthetic oligonucleotide
cuccaaggacuaguacccg

SEQ ID NO: 596069 - RNA, 19 nt, Artificial Sequence
  Description of Artificial Sequence: Synthetic oligonucleotide
cuucauaauucggucagcu

SEQ ID NO: 596070 - RNA, 19 nt, Artificial Sequence
  Description of Artificial Sequence: Synthetic oligonucleotide
gacuguguguagcccgcuc

SEQ ID NO: 596071 - RNA, 19 nt, Artificial Sequence
  Description of Artificial Sequence: Synthetic oligonucleotide
ggaacgccaaucucaaucu

SEQ ID NO: 596072 - RNA, 19 nt, Artificial Sequence
  Description of Artificial Sequence: Synthetic oligonucleotide
gacggcuaugaucucugcu

SEQ ID NO: 596073 - RNA, 19 nt, Artificial Sequence
  Description of Artificial Sequence: Synthetic oligonucleotide
aucccuuguaagaaaucau

SEQ ID NO: 596074 - RNA, 19 nt, Artificial Sequence
  Description of Artificial Sequence: Synthetic oligonucleotide
cagcuuuagugagcaagug

SEQ ID NO: 596075 - RNA, 19 nt, Artificial Sequence
  Description of Artificial Sequence: Synthetic oligonucleotide
caacucucuuuuccacuuc

SEQ ID NO: 596076 - RNA, 19 nt, Artificial Sequence
  Description of Artificial Sequence: Synthetic oligonucleotide
guguggcacccuucggagc

SEQ ID NO: 596077 - RNA, 19 nt, Artificial Sequence
  Description of Artificial Sequence: Synthetic oligonucleotide
ucuagugcuugagggcgau

SEQ ID NO: 596078 - RNA, 19 nt, Artificial Sequence
  Description of Artificial Sequence: Synthetic oligonucleotide
gggauucuaggugucacga

SEQ ID NO: 596079 - RNA, 19 nt, Artificial Sequence
  Description of Artificial Sequence: Synthetic oligonucleotide
cugcaccaacauauccaug

SEQ ID NO: 596080 - RNA, 19 nt, Artificial Sequence
  Description of Artificial Sequence: Synthetic oligonucleotide
uugcuaccucucucauagc

SEQ ID NO: 596081 - RNA, 19 nt, Artificial Sequence
  Description of Artificial Sequence: Synthetic oligonucleotide
cuaugaucucugcucccga

SEQ ID NO: 596082 - RNA, 19 nt, Artificial Sequence
  Description of Artificial Sequence: Synthetic oligonucleotide
ucaaaucgcccuggucuuc

SEQ ID NO: 596083 - RNA, 19 nt, Artificial Sequence
  Description of Artificial Sequence: Synthetic oligonucleotide
gcaucagcgacucugggau

SEQ ID NO: 596084 - RNA, 19 nt, Artificial Sequence
  Description of Artificial Sequence: Synthetic oligonucleotide
uaggugucacgaugcucaa

SEQ ID NO: 596085 - RNA, 19 nt, Artificial Sequence
  Description of Artificial Sequence: Synthetic oligonucleotide
ggcauacagaccugccuca

SEQ ID NO: 596086 - RNA, 19 nt, Artificial Sequence
  Description of Artificial Sequence: Synthetic oligonucleotide
ucaagccgguccugggcau

SEQ ID NO: 596087 - RNA, 19 nt, Artificial Sequence
  Description of Artificial Sequence: Synthetic oligonucleotide
acugacaggucgaguauuu

SEQ ID NO: 596088 - RNA, 19 nt, Artificial Sequence
  Description of Artificial Sequence: Synthetic oligonucleotide
gucgaguauuuccuucucu

SEQ ID NO: 596089 - RNA, 19 nt, Artificial Sequence
  Description of Artificial Sequence: Synthetic oligonucleotide
cugagccaaaacacggucu

SEQ ID NO: 596090 - RNA, 19 nt, Artificial Sequence
  Description of Artificial Sequence: Synthetic oligonucleotide
aacccucuaggugcuggaa

SEQ ID NO: 596091 - RNA, 19 nt, Artificial Sequence
  Description of Artificial Sequence: Synthetic oligonucleotide
ggcuaugaucucugcuccc

SEQ ID NO: 596092 - RNA, 19 nt, Artificial Sequence
  Description of Artificial Sequence: Synthetic oligonucleotide
auaauucggucagcuuuaa

SEQ ID NO: 596093 - RNA, 19 nt, Artificial Sequence
  Description of Artificial Sequence: Synthetic oligonucleotide
ucgcccuggucuucugagu

SEQ ID NO: 596094 - RNA, 19 nt, Artificial Sequence
  Description of Artificial Sequence: Synthetic oligonucleotide
ucgauucuuccaggccuca

SEQ ID NO: 596095 - RNA, 19 nt, Artificial Sequence
  Description of Artificial Sequence: Synthetic oligonucleotide
gucgauucuuccaggccuc

SEQ ID NO: 596096 - RNA, 19 nt, Artificial Sequence
  Description of Artificial Sequence: Synthetic oligonucleotide
gcauuauuugccagucuca

SEQ ID NO: 596097 - RNA, 19 nt, Artificial Sequence
  Description of Artificial Sequence: Synthetic oligonucleotide
gcuaccucucucauagcac

SEQ ID NO: 596098 - RNA, 19 nt, Artificial Sequence
  Description of Artificial Sequence: Synthetic oligonucleotide
uguguguagcccgcucuuu

SEQ ID NO: 596099 - RNA, 19 nt, Artificial Sequence
  Description of Artificial Sequence: Synthetic oligonucleotide
cccuuuauagcuagaaagu

SEQ ID NO: 596100 - RNA, 19 nt, Artificial Sequence
  Description of Artificial Sequence: Synthetic oligonucleotide
gcuugagugaaaugccucu

SEQ ID NO: 596101 - RNA, 19 nt, Artificial Sequence
  Description of Artificial Sequence: Synthetic oligonucleotide
acgaguucauccaggucaa

SEQ ID NO: 596102 - RNA, 19 nt, Artificial Sequence
  Description of Artificial Sequence: Synthetic oligonucleotide
ggcgauuaguagcugccaa

SEQ ID NO: 596103 - RNA, 19 nt, Artificial Sequence
  Description of Artificial Sequence: Synthetic oligonucleotide
aggugucacgaugcucaag

SEQ ID NO: 596104 - RNA, 19 nt, Artificial Sequence
  Description of Artificial Sequence: Synthetic oligonucleotide
gcuuuacggaauaucucuc

SEQ ID NO: 596105 - RNA, 19 nt, Artificial Sequence
  Description of Artificial Sequence: Synthetic oligonucleotide
cuaguacccguccuucacu

SEQ ID NO: 596106 - RNA, 19 nt, Artificial Sequence
  Description of Artificial Sequence: Synthetic oligonucleotide
ggcauugaguggaacugca

SEQ ID NO: 596107 - RNA, 19 nt, Artificial Sequence
  Description of Artificial Sequence: Synthetic oligonucleotide
gugacuuccucuaguccaa

SEQ ID NO: 596108 - RNA, 19 nt, Artificial Sequence
  Description of Artificial Sequence: Synthetic oligonucleotide
ucauagcacuaggucugau

SEQ ID NO: 596109 - RNA, 19 nt, Artificial Sequence
  Description of Artificial Sequence: Synthetic oligonucleotide
gcacguaaaugauccuguc

SEQ ID NO: 596110 - RNA, 19 nt, Artificial Sequence
  Description of Artificial Sequence: Synthetic oligonucleotide
gcgauuaguagcugccaaa

SEQ ID NO: 596111 - RNA, 19 nt, Artificial Sequence
  Description of Artificial Sequence: Synthetic oligonucleotide
cuaacuggcuuagcuggaa

SEQ ID NO: 596112 - RNA, 19 nt, Artificial Sequence
  Description of Artificial Sequence: Synthetic oligonucleotide
ggucgaguauuuccuucuc

SEQ ID NO: 596113 - RNA, 19 nt, Artificial Sequence
  Description of Artificial Sequence: Synthetic oligonucleotide
ccucauuacuaauaggcau

SEQ ID NO: 596114 - RNA, 19 nt, Artificial Sequence
  Description of Artificial Sequence: Synthetic oligonucleotide
gucugggcgauuaguagcu

SEQ ID NO: 596115 - RNA, 19 nt, Artificial Sequence
  Description of Artificial Sequence: Synthetic oligonucleotide
aucuagugcuugagggcga

SEQ ID NO: 596116 - RNA, 19 nt, Artificial Sequence
  Description of Artificial Sequence: Synthetic oligonucleotide
ggacuaguacccguccuuc

SEQ ID NO: 596117 - RNA, 19 nt, Artificial Sequence
  Description of Artificial Sequence: Synthetic oligonucleotide
gccucauuacacaaggccu

SEQ ID NO: 596118 - RNA, 19 nt, Artificial Sequence
  Description of Artificial Sequence: Synthetic oligonucleotide
cugacuguuuaagccucca

SEQ ID NO: 596119 - RNA, 19 nt, Artificial Sequence
  Description of Artificial Sequence: Synthetic oligonucleotide
ugcagacggcuaugaucuc

SEQ ID NO: 596120 - RNA, 19 nt, Artificial Sequence
  Description of Artificial Sequence: Synthetic oligonucleotide
cggucugcaacauccccag

SEQ ID NO: 596121 - RNA, 19 nt, Artificial Sequence
  Description of Artificial Sequence: Synthetic oligonucleotide
acucuucgcaaggcauaca

SEQ ID NO: 596122 - RNA, 19 nt, Artificial Sequence
  Description of Artificial Sequence: Synthetic oligonucleotide
ggcacguaaaugauccugu

SEQ ID NO: 596123 - RNA, 19 nt, Artificial Sequence
  Description of Artificial Sequence: Synthetic oligonucleotide
gccaaaacacggucugcaa

SEQ ID NO: 596124 - RNA, 19 nt, Artificial Sequence
  Description of Artificial Sequence: Synthetic oligonucleotide
agacuguguguagcccgcu

SEQ ID NO: 596125 - RNA, 19 nt, Artificial Sequence
  Description of Artificial Sequence: Synthetic oligonucleotide
cucuuugcaccugcauuaa

SEQ ID NO: 596126 - RNA, 19 nt, Artificial Sequence
  Description of Artificial Sequence: Synthetic oligonucleotide
ccguuaacagcugagccaa

SEQ ID NO: 596127 - RNA, 19 nt, Artificial Sequence
  Description of Artificial Sequence: Synthetic oligonucleotide
cguagaguggcuucagcaa

SEQ ID NO: 596128 - RNA, 19 nt, Artificial Sequence
  Description of Artificial Sequence: Synthetic oligonucleotide
ccgggagggccauacaaga

SEQ ID NO: 596129 - RNA, 19 nt, Artificial Sequence
  Description of Artificial Sequence: Synthetic oligonucleotide
caauugcuaccucucucau

SEQ ID NO: 596130 - RNA, 19 nt, Artificial Sequence
  Description of Artificial Sequence: Synthetic oligonucleotide
guguguagcccgcucuuuu

SEQ ID NO: 596131 - RNA, 19 nt, Artificial Sequence
  Description of Artificial Sequence: Synthetic oligonucleotide
caaguccacugccaucccu

SEQ ID NO: 596132 - RNA, 19 nt, Artificial Sequence
  Description of Artificial Sequence: Synthetic oligonucleotide
gcugcuugagaggcaguuc

SEQ ID NO: 596133 - RNA, 19 nt, Artificial Sequence
  Description of Artificial Sequence: Synthetic oligonucleotide
caaaucgcccuggucuucu

SEQ ID NO: 596134 - RNA, 19 nt, Artificial Sequence
  Description of Artificial Sequence: Synthetic oligonucleotide
ccauaacucuugaaaaguu

SEQ ID NO: 596135 - RNA, 19 nt, Artificial Sequence
  Description of Artificial Sequence: Synthetic oligonucleotide
gcaucugguaauggcacgu

SEQ ID NO: 596136 - RNA, 19 nt, Artificial Sequence
  Description of Artificial Sequence: Synthetic oligonucleotide
cgauuaguagcugccaaaa

SEQ ID NO: 596137 - RNA, 19 nt, Artificial Sequence
  Description of Artificial Sequence: Synthetic oligonucleotide
cacgaugcucaaggcuuga

SEQ ID NO: 596138 - RNA, 19 nt, Artificial Sequence
  Description of Artificial Sequence: Synthetic oligonucleotide
cauccgggagggccauaca

SEQ ID NO: 596139 - RNA, 19 nt, Artificial Sequence
  Description of Artificial Sequence: Synthetic oligonucleotide
ccucauuacacaaggccuu

SEQ ID NO: 596140 - RNA, 19 nt, Artificial Sequence
  Description of Artificial Sequence: Synthetic oligonucleotide
ccuuuauagcuagaaaguu

SEQ ID NO: 596141 - RNA, 19 nt, Artificial Sequence
  Description of Artificial Sequence: Synthetic oligonucleotide
aggucccuuuauagcuaga

SEQ ID NO: 596142 - RNA, 19 nt, Artificial Sequence
  Description of Artificial Sequence: Synthetic oligonucleotide
ggacucuguguaacaucca

SEQ ID NO: 596143 - RNA, 19 nt, Artificial Sequence
  Description of Artificial Sequence: Synthetic oligonucleotide
ccuucggagcagcuucuga

SEQ ID NO: 596144 - RNA, 19 nt, Artificial Sequence
  Description of Artificial Sequence: Synthetic oligonucleotide
gugaggcuacaacucucuu

SEQ ID NO: 596145 - RNA, 19 nt, Artificial Sequence
  Description of Artificial Sequence: Synthetic oligonucleotide
cuguguguagcccgcucuu

SEQ ID NO: 596146 - RNA, 19 nt, Artificial Sequence
  Description of Artificial Sequence: Synthetic oligonucleotide
cacuaggucugaugucauu

SEQ ID NO: 596147 - RNA, 19 nt, Artificial Sequence
  Description of Artificial Sequence: Synthetic oligonucleotide
cgaugcucaaggcuugagu

SEQ ID NO: 596148 - RNA, 19 nt, Artificial Sequence
  Description of Artificial Sequence: Synthetic oligonucleotide
gcccgcucuuuucuuggua

SEQ ID NO: 596149 - RNA, 19 nt, Artificial Sequence
  Description of Artificial Sequence: Synthetic oligonucleotide
caucagcgacucugggauu

SEQ ID NO: 596150 - RNA, 19 nt, Artificial Sequence
  Description of Artificial Sequence: Synthetic oligonucleotide
gcucaaggcuugagugaaa

SEQ ID NO: 596151 - RNA, 19 nt, Artificial Sequence
  Description of Artificial Sequence: Synthetic oligonucleotide
cccuucggagcagcuucug

SEQ ID NO: 596152 - RNA, 19 nt, Artificial Sequence
  Description of Artificial Sequence: Synthetic oligonucleotide
gcauacagaccugccucau

SEQ ID NO: 596153 - RNA, 19 nt, Artificial Sequence
  Description of Artificial Sequence: Synthetic oligonucleotide
ggaugccguagaguggcuu

SEQ ID NO: 596154 - RNA, 19 nt, Artificial Sequence
  Description of Artificial Sequence: Synthetic oligonucleotide
gggcgauuuguggcuccaa

SEQ ID NO: 596155 - RNA, 19 nt, Artificial Sequence
  Description of Artificial Sequence: Synthetic oligonucleotide
ccuugcagacggcuaugau

SEQ ID NO: 596156 - RNA, 19 nt, Artificial Sequence
  Description of Artificial Sequence: Synthetic oligonucleotide
ccgcucuuuucuugguaau

SEQ ID NO: 596157 - RNA, 19 nt, Artificial Sequence
  Description of Artificial Sequence: Synthetic oligonucleotide
cuauucugucugggcgauu

SEQ ID NO: 596158 - RNA, 19 nt, Artificial Sequence
  Description of Artificial Sequence: Synthetic oligonucleotide
cguuaacagcugagccaaa

SEQ ID NO: 596159 - RNA, 19 nt, Artificial Sequence
  Description of Artificial Sequence: Synthetic oligonucleotide
cuagugcuugagggcgauu

SEQ ID NO: 596160 - RNA, 19 nt, Artificial Sequence
  Description of Artificial Sequence: Synthetic oligonucleotide
caagccgguccugggcauu

SEQ ID NO: 596161 - RNA, 19 nt, Artificial Sequence
  Description of Artificial Sequence: Synthetic oligonucleotide
ccaagagagcagccuccuu

SEQ ID NO: 596162 - RNA, 19 nt, Artificial Sequence
  Description of Artificial Sequence: Synthetic oligonucleotide
caacuccagugaggauauu

SEQ ID NO: 596163 - RNA, 19 nt, Artificial Sequence
  Description of Artificial Sequence: Synthetic oligonucleotide
cgccaaucucaaucucuuu

SEQ ID NO: 596164 - RNA, 19 nt, Artificial Sequence
  Description of Artificial Sequence: Synthetic oligonucleotide
aauguuaaugacuauagca

SEQ ID NO: 596165 - RNA, 19 nt, Artificial Sequence
  Description of Artificial Sequence: Synthetic oligonucleotide
aaaaguaaaacauuccucu

SEQ ID NO: 596166 - RNA, 19 nt, Artificial Sequence
  Description of Artificial Sequence: Synthetic oligonucleotide
guugauaucacccaaaaug

SEQ ID NO: 596167 - RNA, 19 nt, Artificial Sequence
  Description of Artificial Sequence: Synthetic oligonucleotide
auauuuagugaauauggcc

SEQ ID NO: 596168 - RNA, 19 nt, Artificial Sequence
  Description of Artificial Sequence: Synthetic oligonucleotide
aaauguuaaugacuauagc

SEQ ID NO: 596169 - RNA, 19 nt, Artificial Sequence
  Description of Artificial Sequence: Synthetic oligonucleotide
acauagucgauacacaugg

SEQ ID NO: 596170 - RNA, 19 nt, Artificial Sequence
  Description of Artificial Sequence: Synthetic oligonucleotide
uauuuagugaauauggccu

SEQ ID NO: 596171 - RNA, 19 nt, Artificial Sequence
  Description of Artificial Sequence: Synthetic oligonucleotide
aaaguuagggaacguauuc

SEQ ID NO: 596172 - RNA, 19 nt, Artificial Sequence
  Description of Artificial Sequence: Synthetic oligonucleotide
acugagugaagauacauuc

SEQ ID NO: 596173 - RNA, 19 nt, Artificial Sequence
  Description of Artificial Sequence: Synthetic oligonucleotide
auaacaguuggucacaaag

SEQ ID NO: 596174 - RNA, 19 nt, Artificial Sequence
  Description of Artificial Sequence: Synthetic oligonucleotide
uggauuauuacacauggac

SEQ ID NO: 596175 - RNA, 19 nt, Artificial Sequence
  Description of Artificial Sequence: Synthetic oligonucleotide
gaauaaguaucauugauga

SEQ ID NO: 596176 - RNA, 19 nt, Artificial Sequence
  Description of Artificial Sequence: Synthetic oligonucleotide
acagauauauggcacauag

SEQ ID NO: 596177 - RNA, 19 nt, Artificial Sequence
  Description of Artificial Sequence: Synthetic oligonucleotide
aguaucauugaugauggcc

SEQ ID NO: 596178 - RNA, 19 nt, Artificial Sequence
  Description of Artificial Sequence: Synthetic oligonucleotide
auuaguguaccauaggucu

SEQ ID NO: 596179 - RNA, 19 nt, Artificial Sequence
  Description of Artificial Sequence: Synthetic oligonucleotide
agucgauacacauggauac

SEQ ID NO: 596180 - RNA, 19 nt, Artificial Sequence
  Description of Artificial Sequence: Synthetic oligonucleotide
uuuacaucuagauuucuca

SEQ ID NO: 596181 - RNA, 19 nt, Artificial Sequence
  Description of Artificial Sequence: Synthetic oligonucleotide
uguuguagugaccauaaca

SEQ ID NO: 596182 - RNA, 19 nt, Artificial Sequence
  Description of Artificial Sequence: Synthetic oligonucleotide
aauacuguaacugucacua

SEQ ID NO: 596183 - RNA, 19 nt, Artificial Sequence
  Description of Artificial Sequence: Synthetic oligonucleotide
uguaacaacaugauacaca

SEQ ID NO: 596184 - RNA, 19 nt, Artificial Sequence
  Description of Artificial Sequence: Synthetic oligonucleotide
auauauggcacauagucga

SEQ ID NO: 596185 - RNA, 19 nt, Artificial Sequence
  Description of Artificial Sequence: Synthetic oligonucleotide
aaagauguuguagugacca

SEQ ID NO: 596186 - RNA, 19 nt, Artificial Sequence
  Description of Artificial Sequence: Synthetic oligonucleotide
agggaacguauucugaucc

SEQ ID NO: 596187 - RNA, 19 nt, Artificial Sequence
  Description of Artificial Sequence: Synthetic oligonucleotide
aaacaaaagaugaucucac

SEQ ID NO: 596188 - RNA, 19 nt, Artificial Sequence
  Description of Artificial Sequence: Synthetic oligonucleotide
uuugacauucgguaaaugu

SEQ ID NO: 596189 - RNA, 19 nt, Artificial Sequence
  Description of Artificial Sequence: Synthetic oligonucleotide
agaaagaaauuaguguacc

SEQ ID NO: 596190 - RNA, 19 nt, Artificial Sequence
  Description of Artificial Sequence: Synthetic oligonucleotide
acuaccauacuggacaacc

SEQ ID NO: 596191 - RNA, 19 nt, Artificial Sequence
  Description of Artificial Sequence: Synthetic oligonucleotide
ucauaggaaaccccgcugg

SEQ ID NO: 596192 - RNA, 19 nt, Artificial Sequence
  Description of Artificial Sequence: Synthetic oligonucleotide
ucuagggugaggcugacca

SEQ ID NO: 596193 - RNA, 19 nt, Artificial Sequence
  Description of Artificial Sequence: Synthetic oligonucleotide
aauuaguguaccauagguc

SEQ ID NO: 596194 - RNA, 19 nt, Artificial Sequence
  Description of Artificial Sequence: Synthetic oligonucleotide
aacuauggauaacacaaca

SEQ ID NO: 596195 - RNA, 19 nt, Artificial Sequence
  Description of Artificial Sequence: Synthetic oligonucleotide
gauauauggcacauagucg

SEQ ID NO: 596196 - RNA, 19 nt, Artificial Sequence
  Description of Artificial Sequence: Synthetic oligonucleotide
uaggacgugguaaagagcu

SEQ ID NO: 596197 - RNA, 19 nt, Artificial Sequence
  Description of Artificial Sequence: Synthetic oligonucleotide
ugcgaaguugauaucaccc

SEQ ID NO: 596198 - RNA, 19 nt, Artificial Sequence
  Description of Artificial Sequence: Synthetic oligonucleotide
aaaauaccaugaccgcagc

SEQ ID NO: 596199 - RNA, 19 nt, Artificial Sequence
  Description of Artificial Sequence: Synthetic oligonucleotide
uagcggaucaguuucacag

SEQ ID NO: 596200 - RNA, 19 nt, Artificial Sequence
  Description of Artificial Sequence: Synthetic oligonucleotide
acagcaucaaucuuggaca

SEQ ID NO: 596201 - RNA, 19 nt, Artificial Sequence
  Description of Artificial Sequence: Synthetic oligonucleotide
uguagugaccauaacagau

SEQ ID NO: 596202 - RNA, 19 nt, Artificial Sequence
  Description of Artificial Sequence: Synthetic oligonucleotide
uacgguauuucuuuuaagu

SEQ ID NO: 596203 - RNA, 19 nt, Artificial Sequence
  Description of Artificial Sequence: Synthetic oligonucleotide
ucuacauuugacauucggu

SEQ ID NO: 596204 - RNA, 19 nt, Artificial Sequence
  Description of Artificial Sequence: Synthetic oligonucleotide
aauccgaaucuccaauauc

SEQ ID NO: 596205 - RNA, 19 nt, Artificial Sequence
  Description of Artificial Sequence: Synthetic oligonucleotide
auaaagugguacccaaaac

SEQ ID NO: 596206 - RNA, 19 nt, Artificial Sequence
  Description of Artificial Sequence: Synthetic oligonucleotide
cauauuuagugaauauggc

SEQ ID NO: 596207 - RNA, 19 nt, Artificial Sequence
  Description of Artificial Sequence: Synthetic oligonucleotide
aagagggcaccacaccacc

SEQ ID NO: 596208 - RNA, 19 nt, Artificial Sequence
  Description of Artificial Sequence: Synthetic oligonucleotide
auaaagaacacaaauguaa

SEQ ID NO: 596209 - RNA, 19 nt, Artificial Sequence
  Description of Artificial Sequence: Synthetic oligonucleotide
ucugagaguuccauuuccg

SEQ ID NO: 596210 - RNA, 19 nt, Artificial Sequence
  Description of Artificial Sequence: Synthetic oligonucleotide
auuuagugaauauggccuc

SEQ ID NO: 596211 - RNA, 19 nt, Artificial Sequence
  Description of Artificial Sequence: Synthetic oligonucleotide
uguuaaugacuauagcaac

SEQ ID NO: 596212 - RNA, 19 nt, Artificial Sequence
  Description of Artificial Sequence: Synthetic oligonucleotide
cauaggacgugguaaagag

SEQ ID NO: 596213 - RNA, 19 nt, Artificial Sequence
  Description of Artificial Sequence: Synthetic oligonucleotide
agcaucauaaaagauguug

SEQ ID NO: 596214 - RNA, 19 nt, Artificial Sequence
  Description of Artificial Sequence: Synthetic oligonucleotide
auucgguaaauguuaauga

SEQ ID NO: 596215 - RNA, 19 nt, Artificial Sequence
  Description of Artificial Sequence: Synthetic oligonucleotide
ucgguaaauguuaaugacu

SEQ ID NO: 596216 - RNA, 19 nt, Artificial Sequence
  Description of Artificial Sequence: Synthetic oligonucleotide
gauaucacccaaaaugaug

SEQ ID NO: 596217 - RNA, 19 nt, Artificial Sequence
  Description of Artificial Sequence: Synthetic oligonucleotide
aaccaaaccauugcccggc

SEQ ID NO: 596218 - RNA, 19 nt, Artificial Sequence
  Description of Artificial Sequence: Synthetic oligonucleotide
uaacaguuggucacaaaga

SEQ ID NO: 596219 - RNA, 19 nt, Artificial Sequence
  Description of Artificial Sequence: Synthetic oligonucleotide
gauuauuacacauggacau

SEQ ID NO: 596220 - RNA, 19 nt, Artificial Sequence
  Description of Artificial Sequence: Synthetic oligonucleotide
gaagauacauucuuaggaa

SEQ ID NO: 596221 - RNA, 19 nt, Artificial Sequence
  Description of Artificial Sequence: Synthetic oligonucleotide
aaaagauguuguagugacc

SEQ ID NO: 596222 - RNA, 19 nt, Artificial Sequence
  Description of Artificial Sequence: Synthetic oligonucleotide
ucugugaauccgaaucucc

SEQ ID NO: 596223 - RNA, 19 nt, Artificial Sequence
  Description of Artificial Sequence: Synthetic oligonucleotide
uucgguaaauguuaaugac

SEQ ID NO: 596224 - RNA, 19 nt, Artificial Sequence
  Description of Artificial Sequence: Synthetic oligonucleotide
auagcaacuauggauaaca

SEQ ID NO: 596225 - RNA, 19 nt, Artificial Sequence
  Description of Artificial Sequence: Synthetic oligonucleotide
gacauagcggaucaguuuc

SEQ ID NO: 596226 - RNA, 19 nt, Artificial Sequence
  Description of Artificial Sequence: Synthetic oligonucleotide
caugaccgcagcuauauug

SEQ ID NO: 596227 - RNA, 19 nt, Artificial Sequence
  Description of Artificial Sequence: Synthetic oligonucleotide
uugacauucgguaaauguu

SEQ ID NO: 596228 - RNA, 19 nt, Artificial Sequence
  Description of Artificial Sequence: Synthetic oligonucleotide
auugagucccacuugcaug

SEQ ID NO: 596229 - RNA, 19 nt, Artificial Sequence
  Description of Artificial Sequence: Synthetic oligonucleotide
cauucgguaaauguuaaug

SEQ ID NO: 596230 - RNA, 19 nt, Artificial Sequence
  Description of Artificial Sequence: Synthetic oligonucleotide
ugacauucgguaaauguua

SEQ ID NO: 596231 - RNA, 19 nt, Artificial Sequence
  Description of Artificial Sequence: Synthetic oligonucleotide
uauggcacauagucgauac

SEQ ID NO: 596232 - RNA, 19 nt, Artificial Sequence
  Description of Artificial Sequence: Synthetic oligonucleotide
uagacucucugaaauguca

SEQ ID NO: 596233 - RNA, 19 nt, Artificial Sequence
  Description of Artificial Sequence: Synthetic oligonucleotide
guugaacuguauuugccag

SEQ ID NO: 596234 - RNA, 19 nt, Artificial Sequence
  Description of Artificial Sequence: Synthetic oligonucleotide
ugguaaagagcuguguucc

SEQ ID NO: 596235 - RNA, 19 nt, Artificial Sequence
  Description of Artificial Sequence: Synthetic oligonucleotide
cacuuguggauuauuacac

SEQ ID NO: 596236 - RNA, 19 nt, Artificial Sequence
  Description of Artificial Sequence: Synthetic oligonucleotide
acgacccagucucucaucc

SEQ ID NO: 596237 - RNA, 19 nt, Artificial Sequence
  Description of Artificial Sequence: Synthetic oligonucleotide
ucuacgguauuucuuuuaa

SEQ ID NO: 596238 - RNA, 19 nt, Artificial Sequence
  Description of Artificial Sequence: Synthetic oligonucleotide
ucacuuccgaauaaguauc

SEQ ID NO: 596239 - RNA, 19 nt, Artificial Sequence
  Description of Artificial Sequence: Synthetic oligonucleotide
uguaguagacccucuacau

SEQ ID NO: 596240 - RNA, 19 nt, Artificial Sequence
  Description of Artificial Sequence: Synthetic oligonucleotide
acugcguguacuuucaaaa

SEQ ID NO: 596241 - RNA, 19 nt, Artificial Sequence
  Description of Artificial Sequence: Synthetic oligonucleotide
aacuucuagggugaggcug

SEQ ID NO: 596242 - RNA, 19 nt, Artificial Sequence
  Description of Artificial Sequence: Synthetic oligonucleotide
uggacauuggcacuuccac

SEQ ID NO: 596243 - RNA, 19 nt, Artificial Sequence
  Description of Artificial Sequence: Synthetic oligonucleotide
guuuuaguuugaccaaugc

SEQ ID NO: 596244 - RNA, 19 nt, Artificial Sequence
  Description of Artificial Sequence: Synthetic oligonucleotide
ucaucuacgguauuucuuu

SEQ ID NO: 596245 - RNA, 19 nt, Artificial Sequence
  Description of Artificial Sequence: Synthetic oligonucleotide
uaguagacccucuacauuu

SEQ ID NO: 596246 - RNA, 19 nt, Artificial Sequence
  Description of Artificial Sequence: Synthetic oligonucleotide
aauaaguaucauugaugau

SEQ ID NO: 596247 - RNA, 19 nt, Artificial Sequence
  Description of Artificial Sequence: Synthetic oligonucleotide
uaugccacaugcucaaagu

SEQ ID NO: 596248 - RNA, 19 nt, Artificial Sequence
  Description of Artificial Sequence: Synthetic oligonucleotide
auuuacaucuagauuucuc

SEQ ID NO: 596249 - RNA, 19 nt, Artificial Sequence
  Description of Artificial Sequence: Synthetic oligonucleotide
ucauaauguagcugggcgu

SEQ ID NO: 596250 - RNA, 19 nt, Artificial Sequence
  Description of Artificial Sequence: Synthetic oligonucleotide
caucauccgauucccagcg

SEQ ID NO: 596251 - RNA, 19 nt, Artificial Sequence
  Description of Artificial Sequence: Synthetic oligonucleotide
ucgagaaacuguaguagac

SEQ ID NO: 596252 - RNA, 19 nt, Artificial Sequence
  Description of Artificial Sequence: Synthetic oligonucleotide
gacuauagcaacuauggau

SEQ ID NO: 596253 - RNA, 19 nt, Artificial Sequence
  Description of Artificial Sequence: Synthetic oligonucleotide
auagucgauacacauggau

SEQ ID NO: 596254 - RNA, 19 nt, Artificial Sequence
  Description of Artificial Sequence: Synthetic oligonucleotide
aacccgguuagcuuccuca

SEQ ID NO: 596255 - RNA, 19 nt, Artificial Sequence
  Description of Artificial Sequence: Synthetic oligonucleotide
guacccaaaacccgguuag

SEQ ID NO: 596256 - RNA, 19 nt, Artificial Sequence
  Description of Artificial Sequence: Synthetic oligonucleotide
ugcacuucaaguugaaguu

SEQ ID NO: 596257 - RNA, 19 nt, Artificial Sequence
  Description of Artificial Sequence: Synthetic oligonucleotide
ucuuuggcacaucuagaca

SEQ ID NO: 596258 - RNA, 19 nt, Artificial Sequence
  Description of Artificial Sequence: Synthetic oligonucleotide
aaaagugcagaaaauuaua

SEQ ID NO: 596259 - RNA, 19 nt, Artificial Sequence
  Description of Artificial Sequence: Synthetic oligonucleotide
auguuaaugacuauagcaa

SEQ ID NO: 596260 - RNA, 19 nt, Artificial Sequence
  Description of Artificial Sequence: Synthetic oligonucleotide
acaguuggucacaaagacc

SEQ ID NO: 596261 - RNA, 19 nt, Artificial Sequence
  Description of Artificial Sequence: Synthetic oligonucleotide
agugcagucugugaauccg

SEQ ID NO: 596262 - RNA, 19 nt, Artificial Sequence
  Description of Artificial Sequence: Synthetic oligonucleotide
acuauagcaacuauggaua

SEQ ID NO: 596263 - RNA, 19 nt, Artificial Sequence
  Description of Artificial Sequence: Synthetic oligonucleotide
uuaaugacuauagcaacua

SEQ ID NO: 596264 - RNA, 19 nt, Artificial Sequence
  Description of Artificial Sequence: Synthetic oligonucleotide
guccuguuaaagcugauga

SEQ ID NO: 596265 - RNA, 19 nt, Artificial Sequence
  Description of Artificial Sequence: Synthetic oligonucleotide
cacuugcaugccuacaccg

SEQ ID NO: 596266 - RNA, 19 nt, Artificial Sequence
  Description of Artificial Sequence: Synthetic oligonucleotide
uucuuaggaaaguacugaa

SEQ ID NO: 596267 - RNA, 19 nt, Artificial Sequence
  Description of Artificial Sequence: Synthetic oligonucleotide
uaccauacuggacaaccac

SEQ ID NO: 596268 - RNA, 19 nt, Artificial Sequence
  Description of Artificial Sequence: Synthetic oligonucleotide
accauacuggacaaccacc

SEQ ID NO: 596269 - RNA, 19 nt, Artificial Sequence
  Description of Artificial Sequence: Synthetic oligonucleotide
agcaacuauggauaacaca

SEQ ID NO: 596270 - RNA, 19 nt, Artificial Sequence
  Description of Artificial Sequence: Synthetic oligonucleotide
aacguauucugauccucga

SEQ ID NO: 596271 - RNA, 19 nt, Artificial Sequence
  Description of Artificial Sequence: Synthetic oligonucleotide
cuacauuugacauucggua

SEQ ID NO: 596272 - RNA, 19 nt, Artificial Sequence
  Description of Artificial Sequence: Synthetic oligonucleotide
ugaaguuuguuuacuugua

SEQ ID NO: 596273 - RNA, 19 nt, Artificial Sequence
  Description of Artificial Sequence: Synthetic oligonucleotide
accgcagcuauauuguuga

SEQ ID NO: 596274 - RNA, 19 nt, Artificial Sequence
  Description of Artificial Sequence: Synthetic oligonucleotide
aaguuagggaacguauucu

SEQ ID NO: 596275 - RNA, 19 nt, Artificial Sequence
  Description of Artificial Sequence: Synthetic oligonucleotide
ccaacauccagacaauucc

SEQ ID NO: 596276 - RNA, 19 nt, Artificial Sequence
  Description of Artificial Sequence: Synthetic oligonucleotide
acauaguaaaggauaaaga

SEQ ID NO: 596277 - RNA, 19 nt, Artificial Sequence
  Description of Artificial Sequence: Synthetic oligonucleotide
aaaguacugaagucaucaa

SEQ ID NO: 596278 - RNA, 19 nt, Artificial Sequence
  Description of Artificial Sequence: Synthetic oligonucleotide
cuuaggaaaguacugaagu

SEQ ID NO: 596279 - RNA, 19 nt, Artificial Sequence
  Description of Artificial Sequence: Synthetic oligonucleotide
ugugacauagcggaucagu

SEQ ID NO: 596280 - RNA, 19 nt, Artificial Sequence
  Description of Artificial Sequence: Synthetic oligonucleotide
aauguagcugggcguauaa

SEQ ID NO: 596281 - RNA, 19 nt, Artificial Sequence
  Description of Artificial Sequence: Synthetic oligonucleotide
ugacuauagcaacuaugga

SEQ ID NO: 596282 - RNA, 19 nt, Artificial Sequence
  Description of Artificial Sequence: Synthetic oligonucleotide
uccgaauaaguaucauuga

SEQ ID NO: 596283 - RNA, 19 nt, Artificial Sequence
  Description of Artificial Sequence: Synthetic oligonucleotide
caucuagacaugguugugg

SEQ ID NO: 596284 - RNA, 19 nt, Artificial Sequence
  Description of Artificial Sequence: Synthetic oligonucleotide
agucugugaauccgaaucu

SEQ ID NO: 596285 - RNA, 19 nt, Artificial Sequence
  Description of Artificial Sequence: Synthetic oligonucleotide
ugcguguacuuucaaaauu

SEQ ID NO: 596286 - RNA, 19 nt, Artificial Sequence
  Description of Artificial Sequence: Synthetic oligonucleotide
ugauaucacccaaaaugau

SEQ ID NO: 596287 - RNA, 19 nt, Artificial Sequence
  Description of Artificial Sequence: Synthetic oligonucleotide
ugaccauaacagauauaug

SEQ ID NO: 596288 - RNA, 19 nt, Artificial Sequence
  Description of Artificial Sequence: Synthetic oligonucleotide
ucugcgaaguugauaucac

SEQ ID NO: 596289 - RNA, 19 nt, Artificial Sequence
  Description of Artificial Sequence: Synthetic oligonucleotide
uguuuacuuguaacaacau

SEQ ID NO: 596290 - RNA, 19 nt, Artificial Sequence
  Description of Artificial Sequence: Synthetic oligonucleotide
agcggaucaguuucacagg

SEQ ID NO: 596291 - RNA, 19 nt, Artificial Sequence
  Description of Artificial Sequence: Synthetic oligonucleotide
ucgcugggaacucaaccag

SEQ ID NO: 596292 - RNA, 19 nt, Artificial Sequence
  Description of Artificial Sequence: Synthetic oligonucleotide
uuggcacaucuagacaugg

SEQ ID NO: 596293 - RNA, 19 nt, Artificial Sequence
  Description of Artificial Sequence: Synthetic oligonucleotide
ugugaauccgaaucuccaa

SEQ ID NO: 596294 - RNA, 19 nt, Artificial Sequence
  Description of Artificial Sequence: Synthetic oligonucleotide
aucaacugagugccgaaga

SEQ ID NO: 596295 - RNA, 19 nt, Artificial Sequence
  Description of Artificial Sequence: Synthetic oligonucleotide
uccugcgggagcuaugccc

SEQ ID NO: 596296 - RNA, 19 nt, Artificial Sequence
  Description of Artificial Sequence: Synthetic oligonucleotide
cacauagucgauacacaug

SEQ ID NO: 596297 - RNA, 19 nt, Artificial Sequence
  Description of Artificial Sequence: Synthetic oligonucleotide
aucuagacaugguugugga

SEQ ID NO: 596298 - RNA, 19 nt, Artificial Sequence
  Description of Artificial Sequence: Synthetic oligonucleotide
acacaauaccccugguuug

SEQ ID NO: 596299 - RNA, 19 nt, Artificial Sequence
  Description of Artificial Sequence: Synthetic oligonucleotide
uguaacugucacuaccaua

SEQ ID NO: 596300 - RNA, 19 nt, Artificial Sequence
  Description of Artificial Sequence: Synthetic oligonucleotide
auaggacgugguaaagagc

SEQ ID NO: 596301 - RNA, 19 nt, Artificial Sequence
  Description of Artificial Sequence: Synthetic oligonucleotide
acgguauuucuuuuaaguu

SEQ ID NO: 596302 - RNA, 19 nt, Artificial Sequence
  Description of Artificial Sequence: Synthetic oligonucleotide
ugucaucuacgguauuucu

SEQ ID NO: 596303 - RNA, 19 nt, Artificial Sequence
  Description of Artificial Sequence: Synthetic oligonucleotide
acuuguggauuauuacaca

SEQ ID NO: 596304 - RNA, 19 nt, Artificial Sequence
  Description of Artificial Sequence: Synthetic oligonucleotide
ugauuucacuuccgaauaa

SEQ ID NO: 596305 - RNA, 19 nt, Artificial Sequence
  Description of Artificial Sequence: Synthetic oligonucleotide
uuaguguaccauaggucuc

SEQ ID NO: 596306 - RNA, 19 nt, Artificial Sequence
  Description of Artificial Sequence: Synthetic oligonucleotide
ugguagcccuuucugauaa

SEQ ID NO: 596307 - RNA, 19 nt, Artificial Sequence
  Description of Artificial Sequence: Synthetic oligonucleotide
uacuuguaacaacaugaua

SEQ ID NO: 596308 - RNA, 19 nt, Artificial Sequence
  Description of Artificial Sequence: Synthetic oligonucleotide
augucaucuacgguauuuc

SEQ ID NO: 596309 - RNA, 19 nt, Artificial Sequence
  Description of Artificial Sequence: Synthetic oligonucleotide
cuguauuugccaguaugcc

SEQ ID NO: 596310 - RNA, 19 nt, Artificial Sequence
  Description of Artificial Sequence: Synthetic oligonucleotide
ggcguauaaauacuguaac

SEQ ID NO: 596311 - RNA, 19 nt, Artificial Sequence
  Description of Artificial Sequence: Synthetic oligonucleotide
ucucaagcuugacaaucac

SEQ ID NO: 596312 - RNA, 19 nt, Artificial Sequence
  Description of Artificial Sequence: Synthetic oligonucleotide
gugguaaagagcuguguuc

SEQ ID NO: 596313 - RNA, 19 nt, Artificial Sequence
  Description of Artificial Sequence: Synthetic oligonucleotide
uuuagugaauauggccuca

SEQ ID NO: 596314 - RNA, 19 nt, Artificial Sequence
  Description of Artificial Sequence: Synthetic oligonucleotide
caaccaaaccauugcccgg

SEQ ID NO: 596315 - RNA, 19 nt, Artificial Sequence
  Description of Artificial Sequence: Synthetic oligonucleotide
uccucgagaaacuguagua

SEQ ID NO: 596316 - RNA, 19 nt, Artificial Sequence
  Description of Artificial Sequence: Synthetic oligonucleotide
uccgcuuucugcugggcca

SEQ ID NO: 596317 - RNA, 19 nt, Artificial Sequence
  Description of Artificial Sequence: Synthetic oligonucleotide
ugggcguauaaauacugua

SEQ ID NO: 596318 - RNA, 19 nt, Artificial Sequence
  Description of Artificial Sequence: Synthetic oligonucleotide
uauucugauccucgagaaa

SEQ ID NO: 596319 - RNA, 19 nt, Artificial Sequence
  Description of Artificial Sequence: Synthetic oligonucleotide
cauaggucucacuguguag

SEQ ID NO: 596320 - RNA, 19 nt, Artificial Sequence
  Description of Artificial Sequence: Synthetic oligonucleotide
ucugauccucgagaaacug

SEQ ID NO: 596321 - RNA, 19 nt, Artificial Sequence
  Description of Artificial Sequence: Synthetic oligonucleotide
augaauuugaagagcuuga

SEQ ID NO: 596322 - RNA, 19 nt, Artificial Sequence
  Description of Artificial Sequence: Synthetic oligonucleotide
auccgauucccagcguucc

SEQ ID NO: 596323 - RNA, 19 nt, Artificial Sequence
  Description of Artificial Sequence: Synthetic oligonucleotide
uccuguuaaagcugaugaa

SEQ ID NO: 596324 - RNA, 19 nt, Artificial Sequence
  Description of Artificial Sequence: Synthetic oligonucleotide
augcucaaaguuagggaac

SEQ ID NO: 596325 - RNA, 19 nt, Artificial Sequence
  Description of Artificial Sequence: Synthetic oligonucleotide
caaaacccgguuagcuucc

SEQ ID NO: 596326 - RNA, 19 nt, Artificial Sequence
  Description of Artificial Sequence: Synthetic oligonucleotide
ugacauagcggaucaguuu

SEQ ID NO: 596327 - RNA, 19 nt, Artificial Sequence
  Description of Artificial Sequence: Synthetic oligonucleotide
uagcccuuucugauaaggu

SEQ ID NO: 596328 - RNA, 19 nt, Artificial Sequence
  Description of Artificial Sequence: Synthetic oligonucleotide
cagcguuccaacucuuccc

SEQ ID NO: 596329 - RNA, 19 nt, Artificial Sequence
  Description of Artificial Sequence: Synthetic oligonucleotide
gucgcugggaacucaacca

SEQ ID NO: 596330 - RNA, 19 nt, Artificial Sequence
  Description of Artificial Sequence: Synthetic oligonucleotide
cugcgaaguugauaucacc

SEQ ID NO: 596331 - RNA, 19 nt, Artificial Sequence
  Description of Artificial Sequence: Synthetic oligonucleotide
cucgagaaacuguaguaga

SEQ ID NO: 596332 - RNA, 19 nt, Artificial Sequence
  Description of Artificial Sequence: Synthetic oligonucleotide
auaggaaaccccgcuggag

SEQ ID NO: 596333 - RNA, 19 nt, Artificial Sequence
  Description of Artificial Sequence: Synthetic oligonucleotide
cauuggcacuuccacuucc

SEQ ID NO: 596334 - RNA, 19 nt, Artificial Sequence
  Description of Artificial Sequence: Synthetic oligonucleotide
ucauccgauucccagcguu

SEQ ID NO: 596335 - RNA, 19 nt, Artificial Sequence
  Description of Artificial Sequence: Synthetic oligonucleotide
ggauuauuacacauggaca

SEQ ID NO: 596336 - RNA, 19 nt, Artificial Sequence
  Description of Artificial Sequence: Synthetic oligonucleotide
cacaauaccccugguuugc

SEQ ID NO: 596337 - RNA, 19 nt, Artificial Sequence
  Description of Artificial Sequence: Synthetic oligonucleotide
uagggaacguauucugauc

SEQ ID NO: 596338 - RNA, 19 nt, Artificial Sequence
  Description of Artificial Sequence: Synthetic oligonucleotide
uagugcagucugugaaucc

SEQ ID NO: 596339 - RNA, 19 nt, Artificial Sequence
  Description of Artificial Sequence: Synthetic oligonucleotide
ggugcucacguucugucag

SEQ ID NO: 596340 - RNA, 19 nt, Artificial Sequence
  Description of Artificial Sequence: Synthetic oligonucleotide
uauaacaguuggucacaaa

SEQ ID NO: 596341 - RNA, 19 nt, Artificial Sequence
  Description of Artificial Sequence: Synthetic oligonucleotide
cuguaguagacccucuaca

SEQ ID NO: 596342 - RNA, 19 nt, Artificial Sequence
  Description of Artificial Sequence: Synthetic oligonucleotide
auaccacauaauaaaugca

SEQ ID NO: 596343 - RNA, 19 nt, Artificial Sequence
  Description of Artificial Sequence: Synthetic oligonucleotide
cuuuggcacaucuagacau

SEQ ID NO: 596344 - RNA, 19 nt, Artificial Sequence
  Description of Artificial Sequence: Synthetic oligonucleotide
cuuccaccacauaguaaag

SEQ ID NO: 596345 - RNA, 19 nt, Artificial Sequence
  Description of Artificial Sequence: Synthetic oligonucleotide
aacucaauauuuacaucua

SEQ ID NO: 596346 - RNA, 19 nt, Artificial Sequence
  Description of Artificial Sequence: Synthetic oligonucleotide
ggugaggcugaccauugag

SEQ ID NO: 596347 - RNA, 19 nt, Artificial Sequence
  Description of Artificial Sequence: Synthetic oligonucleotide
caucauaaaagauguugua

SEQ ID NO: 596348 - RNA, 19 nt, Artificial Sequence
  Description of Artificial Sequence: Synthetic oligonucleotide
ucaucaacugagugccgaa

SEQ ID NO: 596349 - RNA, 19 nt, Artificial Sequence
  Description of Artificial Sequence: Synthetic oligonucleotide
guuaaugacuauagcaacu

SEQ ID NO: 596350 - RNA, 19 nt, Artificial Sequence
  Description of Artificial Sequence: Synthetic oligonucleotide
auagcggaucaguuucaca

SEQ ID NO: 596351 - RNA, 19 nt, Artificial Sequence
  Description of Artificial Sequence: Synthetic oligonucleotide
ucacuaccauacuggacaa

SEQ ID NO: 596352 - RNA, 19 nt, Artificial Sequence
  Description of Artificial Sequence: Synthetic oligonucleotide
uaaggucugagaguuccau

SEQ ID NO: 596353 - RNA, 19 nt, Artificial Sequence
  Description of Artificial Sequence: Synthetic oligonucleotide
ccaaaacccgguuagcuuc

SEQ ID NO: 596354 - RNA, 19 nt, Artificial Sequence
  Description of Artificial Sequence: Synthetic oligonucleotide
gaccgcagcuauauuguug

SEQ ID NO: 596355 - RNA, 19 nt, Artificial Sequence
  Description of Artificial Sequence: Synthetic oligonucleotide
augaccgcagcuauauugu

SEQ ID NO: 596356 - RNA, 19 nt, Artificial Sequence
  Description of Artificial Sequence: Synthetic oligonucleotide
gauccucgagaaacuguag

SEQ ID NO: 596357 - RNA, 19 nt, Artificial Sequence
  Description of Artificial Sequence: Synthetic oligonucleotide
aaucucugcgaaguugaua

SEQ ID NO: 596358 - RNA, 19 nt, Artificial Sequence
  Description of Artificial Sequence: Synthetic oligonucleotide
ccuauggagugcuccaugc

SEQ ID NO: 596359 - RNA, 19 nt, Artificial Sequence
  Description of Artificial Sequence: Synthetic oligonucleotide
uuagugaauauggccucaa

SEQ ID NO: 596360 - RNA, 19 nt, Artificial Sequence
  Description of Artificial Sequence: Synthetic oligonucleotide
cagcuauauuguugaacug

SEQ ID NO: 596361 - RNA, 19 nt, Artificial Sequence
  Description of Artificial Sequence: Synthetic oligonucleotide
accaugggcaaaguuuaug

SEQ ID NO: 596362 - RNA, 19 nt, Artificial Sequence
  Description of Artificial Sequence: Synthetic oligonucleotide
auuauuacacauggacauu

SEQ ID NO: 596363 - RNA, 19 nt, Artificial Sequence
  Description of Artificial Sequence: Synthetic oligonucleotide
aucucaagcuugacaauca

SEQ ID NO: 596364 - RNA, 19 nt, Artificial Sequence
  Description of Artificial Sequence: Synthetic oligonucleotide
aucuacgguauuucuuuua

SEQ ID NO: 596365 - RNA, 19 nt, Artificial Sequence
  Description of Artificial Sequence: Synthetic oligonucleotide
cuuguggauuauuacacau

SEQ ID NO: 596366 - RNA, 19 nt, Artificial Sequence
  Description of Artificial Sequence: Synthetic oligonucleotide
gaauccgaaucuccaauau

SEQ ID NO: 596367 - RNA, 19 nt, Artificial Sequence
  Description of Artificial Sequence: Synthetic oligonucleotide
cauccgauucccagcguuc

SEQ ID NO: 596368 - RNA, 19 nt, Artificial Sequence
  Description of Artificial Sequence: Synthetic oligonucleotide
cacacgccucaccaguacc

SEQ ID NO: 596369 - RNA, 19 nt, Artificial Sequence
  Description of Artificial Sequence: Synthetic oligonucleotide
aggugugcaaccaaaccau

SEQ ID NO: 596370 - RNA, 19 nt, Artificial Sequence
  Description of Artificial Sequence: Synthetic oligonucleotide
uguggaccucgcugucacg

SEQ ID NO: 596371 - RNA, 19 nt, Artificial Sequence
  Description of Artificial Sequence: Synthetic oligonucleotide
ggauaacacaacaauccca

SEQ ID NO: 596372 - RNA, 19 nt, Artificial Sequence
  Description of Artificial Sequence: Synthetic oligonucleotide
gcaucauccgauucccagc

SEQ ID NO: 596373 - RNA, 19 nt, Artificial Sequence
  Description of Artificial Sequence: Synthetic oligonucleotide
ccauaacagauauauggca

SEQ ID NO: 596374 - RNA, 19 nt, Artificial Sequence
  Description of Artificial Sequence: Synthetic oligonucleotide
gucgauacacauggauacc

SEQ ID NO: 596375 - RNA, 19 nt, Artificial Sequence
  Description of Artificial Sequence: Synthetic oligonucleotide
gacgugguaaagagcugug

SEQ ID NO: 596376 - RNA, 19 nt, Artificial Sequence
  Description of Artificial Sequence: Synthetic oligonucleotide
gacccucuacauuugacau

SEQ ID NO: 596377 - RNA, 19 nt, Artificial Sequence
  Description of Artificial Sequence: Synthetic oligonucleotide
acauucgguaaauguuaau

SEQ ID NO: 596378 - RNA, 19 nt, Artificial Sequence
  Description of Artificial Sequence: Synthetic oligonucleotide
aggaaaccccgcuggagau

SEQ ID NO: 596379 - RNA, 19 nt, Artificial Sequence
  Description of Artificial Sequence: Synthetic oligonucleotide
uugguagcccuuucugaua

SEQ ID NO: 596380 - RNA, 19 nt, Artificial Sequence
  Description of Artificial Sequence: Synthetic oligonucleotide
caucgguguggccuuuccc

SEQ ID NO: 596381 - RNA, 19 nt, Artificial Sequence
  Description of Artificial Sequence: Synthetic oligonucleotide
acaucuagacaugguugug

SEQ ID NO: 596382 - RNA, 19 nt, Artificial Sequence
  Description of Artificial Sequence: Synthetic oligonucleotide
cuaccauacuggacaacca

SEQ ID NO: 596383 - RNA, 19 nt, Artificial Sequence
  Description of Artificial Sequence: Synthetic oligonucleotide
acacgaugcugccuaugga

SEQ ID NO: 596384 - RNA, 19 nt, Artificial Sequence
  Description of Artificial Sequence: Synthetic oligonucleotide
ucugcaucgguguggccuu

SEQ ID NO: 596385 - RNA, 19 nt, Artificial Sequence
  Description of Artificial Sequence: Synthetic oligonucleotide
aaaugcacuucaaguugaa

SEQ ID NO: 596386 - RNA, 19 nt, Artificial Sequence
  Description of Artificial Sequence: Synthetic oligonucleotide
ccgaagacaggucuuuggc

SEQ ID NO: 596387 - RNA, 19 nt, Artificial Sequence
  Description of Artificial Sequence: Synthetic oligonucleotide
gacauucgguaaauguuaa

SEQ ID NO: 596388 - RNA, 19 nt, Artificial Sequence
  Description of Artificial Sequence: Synthetic oligonucleotide
cauaauguagcugggcgua

SEQ ID NO: 596389 - RNA, 19 nt, Artificial Sequence
  Description of Artificial Sequence: Synthetic oligonucleotide
guagugaccauaacagaua

SEQ ID NO: 596390 - RNA, 19 nt, Artificial Sequence
  Description of Artificial Sequence: Synthetic oligonucleotide
gaugcggaacugagugaag

SEQ ID NO: 596391 - RNA, 19 nt, Artificial Sequence
  Description of Artificial Sequence: Synthetic oligonucleotide
cuguuaaagcugaugaauu

SEQ ID NO: 596392 - RNA, 19 nt, Artificial Sequence
  Description of Artificial Sequence: Synthetic oligonucleotide
aguagacccucuacauuug

SEQ ID NO: 596393 - RNA, 19 nt, Artificial Sequence
  Description of Artificial Sequence: Synthetic oligonucleotide
ugccguagacucucugaaa

SEQ ID NO: 596394 - RNA, 19 nt, Artificial Sequence
  Description of Artificial Sequence: Synthetic oligonucleotide
cacuuccgaauaaguauca

SEQ ID NO: 596395 - RNA, 19 nt, Artificial Sequence
  Description of Artificial Sequence: Synthetic oligonucleotide
auggagugcuccaugcggu

SEQ ID NO: 596396 - RNA, 19 nt, Artificial Sequence
  Description of Artificial Sequence: Synthetic oligonucleotide
uacccaaaacccgguuagc

SEQ ID NO: 596397 - RNA, 19 nt, Artificial Sequence
  Description of Artificial Sequence: Synthetic oligonucleotide
cccaacauccagacaauuc

SEQ ID NO: 596398 - RNA, 19 nt, Artificial Sequence
  Description of Artificial Sequence: Synthetic oligonucleotide
guagacccucuacauuuga

SEQ ID NO: 596399 - RNA, 19 nt, Artificial Sequence
  Description of Artificial Sequence: Synthetic oligonucleotide
augccuacaccgugaccug

SEQ ID NO: 596400 - RNA, 19 nt, Artificial Sequence
  Description of Artificial Sequence: Synthetic oligonucleotide
acuugcaugccuacaccgu

SEQ ID NO: 596401 - RNA, 19 nt, Artificial Sequence
  Description of Artificial Sequence: Synthetic oligonucleotide
auggacauuggcacuucca

SEQ ID NO: 596402 - RNA, 19 nt, Artificial Sequence
  Description of Artificial Sequence: Synthetic oligonucleotide
cuuggcccguuccaugauc

SEQ ID NO: 596403 - RNA, 19 nt, Artificial Sequence
  Description of Artificial Sequence: Synthetic oligonucleotide
cccggcuucaccugaagac

SEQ ID NO: 596404 - RNA, 19 nt, Artificial Sequence
  Description of Artificial Sequence: Synthetic oligonucleotide
cauaggaaaccccgcugga

SEQ ID NO: 596405 - RNA, 19 nt, Artificial Sequence
  Description of Artificial Sequence: Synthetic oligonucleotide
gacaaccaccucaucaugu

SEQ ID NO: 596406 - RNA, 19 nt, Artificial Sequence
  Description of Artificial Sequence: Synthetic oligonucleotide
gucacgacccagucucuca

SEQ ID NO: 596407 - RNA, 19 nt, Artificial Sequence
  Description of Artificial Sequence: Synthetic oligonucleotide
agggcaccacaccaccugu

SEQ ID NO: 596408 - RNA, 19 nt, Artificial Sequence
  Description of Artificial Sequence: Synthetic oligonucleotide
uggagugcuccaugcgguc

SEQ ID NO: 596409 - RNA, 19 nt, Artificial Sequence
  Description of Artificial Sequence: Synthetic oligonucleotide
caacugagugccgaagaca

SEQ ID NO: 596410 - RNA, 19 nt, Artificial Sequence
  Description of Artificial Sequence: Synthetic oligonucleotide
uggaccucgcugucacgac

SEQ ID NO: 596411 - RNA, 19 nt, Artificial Sequence
  Description of Artificial Sequence: Synthetic oligonucleotide
aaaacccgguuagcuuccu

SEQ ID NO: 596412 - RNA, 19 nt, Artificial Sequence
  Description of Artificial Sequence: Synthetic oligonucleotide
auauggcacauagucgaua

SEQ ID NO: 596413 - RNA, 19 nt, Artificial Sequence
  Description of Artificial Sequence: Synthetic oligonucleotide
cauagucgauacacaugga

SEQ ID NO: 596414 - RNA, 19 nt, Artificial Sequence
  Description of Artificial Sequence: Synthetic oligonucleotide
cuuccgaauaaguaucauu

SEQ ID NO: 596415 - RNA, 19 nt, Artificial Sequence
  Description of Artificial Sequence: Synthetic oligonucleotide
ccaguaugccacaugcuca

SEQ ID NO: 596416 - RNA, 19 nt, Artificial Sequence
  Description of Artificial Sequence: Synthetic oligonucleotide
caaucuuggacacgaugcu

SEQ ID NO: 596417 - RNA, 19 nt, Artificial Sequence
  Description of Artificial Sequence: Synthetic oligonucleotide
acuuccgaauaaguaucau

SEQ ID NO: 596418 - RNA, 19 nt, Artificial Sequence
  Description of Artificial Sequence: Synthetic oligonucleotide
ugucacgacccagucucuc

SEQ ID NO: 596419 - RNA, 19 nt, Artificial Sequence
  Description of Artificial Sequence: Synthetic oligonucleotide
gcguauaaauacuguaacu

SEQ ID NO: 596420 - RNA, 19 nt, Artificial Sequence
  Description of Artificial Sequence: Synthetic oligonucleotide
gcucauaggacgugguaaa

SEQ ID NO: 596421 - RNA, 19 nt, Artificial Sequence
  Description of Artificial Sequence: Synthetic oligonucleotide
uaccaugaccgcagcuaua

SEQ ID NO: 596422 - RNA, 19 nt, Artificial Sequence
  Description of Artificial Sequence: Synthetic oligonucleotide
gggcguauaaauacuguaa

SEQ ID NO: 596423 - RNA, 19 nt, Artificial Sequence
  Description of Artificial Sequence: Synthetic oligonucleotide
acacgccucaccaguaccu

SEQ ID NO: 596424 - RNA, 19 nt, Artificial Sequence
  Description of Artificial Sequence: Synthetic oligonucleotide
gguacccaaaacccgguua

SEQ ID NO: 596425 - RNA, 19 nt, Artificial Sequence
  Description of Artificial Sequence: Synthetic oligonucleotide
ugaccgcagcuauauuguu

SEQ ID NO: 596426 - RNA, 19 nt, Artificial Sequence
  Description of Artificial Sequence: Synthetic oligonucleotide
acccgguuagcuuccucaa

SEQ ID NO: 596427 - RNA, 19 nt, Artificial Sequence
  Description of Artificial Sequence: Synthetic oligonucleotide
guggauuauuacacaugga

SEQ ID NO: 596428 - RNA, 19 nt, Artificial Sequence
  Description of Artificial Sequence: Synthetic oligonucleotide
auaauguagcugggcguau

SEQ ID NO: 596429 - RNA, 19 nt, Artificial Sequence
  Description of Artificial Sequence: Synthetic oligonucleotide
cgguaaauguuaaugacua

SEQ ID NO: 596430 - RNA, 19 nt, Artificial Sequence
  Description of Artificial Sequence: Synthetic oligonucleotide
accaaaccauugcccggcu

SEQ ID NO: 596431 - RNA, 19 nt, Artificial Sequence
  Description of Artificial Sequence: Synthetic oligonucleotide
cguauucugauccucgaga

SEQ ID NO: 596432 - RNA, 19 nt, Artificial Sequence
  Description of Artificial Sequence: Synthetic oligonucleotide
cacugcguguacuuucaaa

SEQ ID NO: 596433 - RNA, 19 nt, Artificial Sequence
  Description of Artificial Sequence: Synthetic oligonucleotide
ggaccucgcugucacgacc

SEQ ID NO: 596434 - RNA, 19 nt, Artificial Sequence
  Description of Artificial Sequence: Synthetic oligonucleotide
aucauccgauucccagcgu

SEQ ID NO: 596435 - RNA, 19 nt, Artificial Sequence
  Description of Artificial Sequence: Synthetic oligonucleotide
cuauauuguugaacuguau

SEQ ID NO: 596436 - RNA, 19 nt, Artificial Sequence
  Description of Artificial Sequence: Synthetic oligonucleotide
gcuauauuguugaacugua

SEQ ID NO: 596437 - RNA, 19 nt, Artificial Sequence
  Description of Artificial Sequence: Synthetic oligonucleotide
gaacuucuagggugaggcu

SEQ ID NO: 596438 - RNA, 19 nt, Artificial Sequence
  Description of Artificial Sequence: Synthetic oligonucleotide
cugauccucgagaaacugu

SEQ ID NO: 596439 - RNA, 19 nt, Artificial Sequence
  Description of Artificial Sequence: Synthetic oligonucleotide
ggccaaaucugauuucacu

SEQ ID NO: 596440 - RNA, 19 nt, Artificial Sequence
  Description of Artificial Sequence: Synthetic oligonucleotide
gccuauggagugcuccaug

SEQ ID NO: 596441 - RNA, 19 nt, Artificial Sequence
  Description of Artificial Sequence: Synthetic oligonucleotide
gcacauagucgauacacau

SEQ ID NO: 596442 - RNA, 19 nt, Artificial Sequence
  Description of Artificial Sequence: Synthetic oligonucleotide
ugccuacaccgugaccugu

SEQ ID NO: 596443 - RNA, 19 nt, Artificial Sequence
  Description of Artificial Sequence: Synthetic oligonucleotide
acaugguuguggagagcug

SEQ ID NO: 596444 - RNA, 19 nt, Artificial Sequence
  Description of Artificial Sequence: Synthetic oligonucleotide
agagcuugauccagaccaa

SEQ ID NO: 596445 - RNA, 19 nt, Artificial Sequence
  Description of Artificial Sequence: Synthetic oligonucleotide
cucgcugucacgacccagu

SEQ ID NO: 596446 - RNA, 19 nt, Artificial Sequence
  Description of Artificial Sequence: Synthetic oligonucleotide
cugggcguauaaauacugu

SEQ ID NO: 596447 - RNA, 19 nt, Artificial Sequence
  Description of Artificial Sequence: Synthetic oligonucleotide
ugcucacguucugucaguu

SEQ ID NO: 596448 - RNA, 19 nt, Artificial Sequence
  Description of Artificial Sequence: Synthetic oligonucleotide
ccaugggcaaaguuuaugu

SEQ ID NO: 596449 - RNA, 19 nt, Artificial Sequence
  Description of Artificial Sequence: Synthetic oligonucleotide
gguagcccuuucugauaag

SEQ ID NO: 596450 - RNA, 19 nt, Artificial Sequence
  Description of Artificial Sequence: Synthetic oligonucleotide
auguagcugggcguauaaa

SEQ ID NO: 596451 - RNA, 19 nt, Artificial Sequence
  Description of Artificial Sequence: Synthetic oligonucleotide
agugccgaagacaggucuu

SEQ ID NO: 596452 - RNA, 19 nt, Artificial Sequence
  Description of Artificial Sequence: Synthetic oligonucleotide
aggacgugguaaagagcug

SEQ ID NO: 596453 - RNA, 19 nt, Artificial Sequence
  Description of Artificial Sequence: Synthetic oligonucleotide
cauccuggucauauuuagu

SEQ ID NO: 596454 - RNA, 19 nt, Artificial Sequence
  Description of Artificial Sequence: Synthetic oligonucleotide
caauaccccugguuugcaa

SEQ ID NO: 596455 - RNA, 19 nt, Artificial Sequence
  Description of Artificial Sequence: Synthetic oligonucleotide
cuggucauauuuagugaau

SEQ ID NO: 596456 - RNA, 19 nt, Artificial Sequence
  Description of Artificial Sequence: Synthetic oligonucleotide
ggaacugagugaagauaca

SEQ ID NO: 596457 - RNA, 19 nt, Artificial Sequence
  Description of Artificial Sequence: Synthetic oligonucleotide
aagcugugacauagcggau

SEQ ID NO: 596458 - RNA, 19 nt, Artificial Sequence
  Description of Artificial Sequence: Synthetic oligonucleotide
cacuaccauacuggacaac

SEQ ID NO: 596459 - RNA, 19 nt, Artificial Sequence
  Description of Artificial Sequence: Synthetic oligonucleotide
ccugcgggagcuaugccca

SEQ ID NO: 596460 - RNA, 19 nt, Artificial Sequence
  Description of Artificial Sequence: Synthetic oligonucleotide
cuccugcgggagcuaugcc

SEQ ID NO: 596461 - RNA, 19 nt, Artificial Sequence
  Description of Artificial Sequence: Synthetic oligonucleotide
gcaucgguguggccuuucc

SEQ ID NO: 596462 - RNA, 19 nt, Artificial Sequence
  Description of Artificial Sequence: Synthetic oligonucleotide
gguaaauguuaaugacuau

SEQ ID NO: 596463 - RNA, 19 nt, Artificial Sequence
  Description of Artificial Sequence: Synthetic oligonucleotide
gugacauagcggaucaguu

SEQ ID NO: 596464 - RNA, 19 nt, Artificial Sequence
  Description of Artificial Sequence: Synthetic oligonucleotide
uggcccguuccaugaucuc

SEQ ID NO: 596465 - RNA, 19 nt, Artificial Sequence
  Description of Artificial Sequence: Synthetic oligonucleotide
ggacgugguaaagagcugu

SEQ ID NO: 596466 - RNA, 19 nt, Artificial Sequence
  Description of Artificial Sequence: Synthetic oligonucleotide
ccgaauaaguaucauugau

SEQ ID NO: 596467 - RNA, 19 nt, Artificial Sequence
  Description of Artificial Sequence: Synthetic oligonucleotide
ccucuacauuugacauucg

SEQ ID NO: 596468 - RNA, 19 nt, Artificial Sequence
  Description of Artificial Sequence: Synthetic oligonucleotide
cugcucauaggacguggua

SEQ ID NO: 596469 - RNA, 19 nt, Artificial Sequence
  Description of Artificial Sequence: Synthetic oligonucleotide
gguccugucgaagcucauc

SEQ ID NO: 596470 - RNA, 19 nt, Artificial Sequence
  Description of Artificial Sequence: Synthetic oligonucleotide
ggcccguuccaugaucuca

SEQ ID NO: 596471 - RNA, 19 nt, Artificial Sequence
  Description of Artificial Sequence: Synthetic oligonucleotide
ccgaaucuccaauaucucu

SEQ ID NO: 596472 - RNA, 19 nt, Artificial Sequence
  Description of Artificial Sequence: Synthetic oligonucleotide
gcguguacuuucaaaauuu

SEQ ID NO: 596473 - RNA, 19 nt, Artificial Sequence
  Description of Artificial Sequence: Synthetic oligonucleotide
gcucacguucugucaguuc

SEQ ID NO: 596474 - RNA, 19 nt, Artificial Sequence
  Description of Artificial Sequence: Synthetic oligonucleotide
ccgggaacuucuaggguga

SEQ ID NO: 596475 - RNA, 19 nt, Artificial Sequence
  Description of Artificial Sequence: Synthetic oligonucleotide
gggaacguauucugauccu

SEQ ID NO: 596476 - RNA, 19 nt, Artificial Sequence
  Description of Artificial Sequence: Synthetic oligonucleotide
ggaugcugcaucauccgau

SEQ ID NO: 596477 - RNA, 19 nt, Artificial Sequence
  Description of Artificial Sequence: Synthetic oligonucleotide
ccuugccguagacucucug

SEQ ID NO: 596478 - RNA, 19 nt, Artificial Sequence
  Description of Artificial Sequence: Synthetic oligonucleotide
ugcgguccacacgccucac

SEQ ID NO: 596479 - RNA, 19 nt, Artificial Sequence
  Description of Artificial Sequence: Synthetic oligonucleotide
cgaaucuccaauaucucuu

SEQ ID NO: 596480 - RNA, 19 nt, Artificial Sequence
  Description of Artificial Sequence: Synthetic oligonucleotide
ccuaacaccucucgccucu

SEQ ID NO: 596481 - RNA, 19 nt, Artificial Sequence
  Description of Artificial Sequence: Synthetic oligonucleotide
gcccggcuucaccugaaga

SEQ ID NO: 596482 - RNA, 19 nt, Artificial Sequence
  Description of Artificial Sequence: Synthetic oligonucleotide
gcgguccacacgccucacc

SEQ ID NO: 596483 - RNA, 19 nt, Artificial Sequence
  Description of Artificial Sequence: Synthetic oligonucleotide
cuagggugaggcugaccau

SEQ ID NO: 596484 - RNA, 19 nt, Artificial Sequence
  Description of Artificial Sequence: Synthetic oligonucleotide
gggugaggcugaccauuga

SEQ ID NO: 596485 - RNA, 19 nt, Artificial Sequence
  Description of Artificial Sequence: Synthetic oligonucleotide
caccugucgcugggaacuc

SEQ ID NO: 596486 - RNA, 19 nt, Artificial Sequence
  Description of Artificial Sequence: Synthetic oligonucleotide
ccgugaccugucugggaug

SEQ ID NO: 596487 - RNA, 19 nt, Artificial Sequence
  Description of Artificial Sequence: Synthetic oligonucleotide
ccugucgcugggaacucaa

SEQ ID NO: 596488 - RNA, 19 nt, Artificial Sequence
  Description of Artificial Sequence: Synthetic oligonucleotide
gccuacaccgugaccuguc

SEQ ID NO: 596489 - RNA, 19 nt, Artificial Sequence
  Description of Artificial Sequence: Synthetic oligonucleotide
ccucgcugucacgacccag

SEQ ID NO: 596490 - RNA, 19 nt, Artificial Sequence
  Description of Artificial Sequence: Synthetic oligonucleotide
cugucacgacccagucucu

SEQ ID NO: 596491 - RNA, 19 nt, Artificial Sequence
  Description of Artificial Sequence: Synthetic oligonucleotide
cgugguaaagagcuguguu

SEQ ID NO: 596492 - RNA, 19 nt, Artificial Sequence
  Description of Artificial Sequence: Synthetic oligonucleotide
gugccgaagacaggucuuu

SEQ ID NO: 596493 - RNA, 19 nt, Artificial Sequence
  Description of Artificial Sequence: Synthetic oligonucleotide
cuaugcccacugucaucgu

SEQ ID NO: 596494 - RNA, 19 nt, Artificial Sequence
  Description of Artificial Sequence: Synthetic oligonucleotide
ggccgggaacuucuagggu

SEQ ID NO: 596495 - RNA, 19 nt, Artificial Sequence
  Description of Artificial Sequence: Synthetic oligonucleotide
gggcaccacaccaccuguc

SEQ ID NO: 596496 - RNA, 19 nt, Artificial Sequence
  Description of Artificial Sequence: Synthetic oligonucleotide
ccguaccaggcgcuccauc

SEQ ID NO: 596497 - RNA, 19 nt, Artificial Sequence
  Description of Artificial Sequence: Synthetic oligonucleotide
ccggcuucaccugaagacu

SEQ ID NO: 596498 - RNA, 19 nt, Artificial Sequence
  Description of Artificial Sequence: Synthetic oligonucleotide
ggugugcaaccaaaccauu

SEQ ID NO: 596499 - RNA, 19 nt, Artificial Sequence
  Description of Artificial Sequence: Synthetic oligonucleotide
ccuacaccgugaccugucu

SEQ ID NO: 596500 - RNA, 19 nt, Artificial Sequence
  Description of Artificial Sequence: Synthetic oligonucleotide
cuaacaccucucgccucuu

SEQ ID NO: 596501 - RNA, 19 nt, Artificial Sequence
  Description of Artificial Sequence: Synthetic oligonucleotide
ccacugcguguacuuucaa

SEQ ID NO: 596502 - RNA, 19 nt, Artificial Sequence
  Description of Artificial Sequence: Synthetic oligonucleotide
ccgcagcuauauuguugaa

SEQ ID NO: 596503 - RNA, 19 nt, Artificial Sequence
  Description of Artificial Sequence: Synthetic oligonucleotide
ccucucgccucuucagcuu

SEQ ID NO: 596504 - RNA, 19 nt, Artificial Sequence
  Description of Artificial Sequence: Synthetic oligonucleotide
cccgguuagcuuccucaau

SEQ ID NO: 596505 - RNA, 19 nt, Artificial Sequence
  Description of Artificial Sequence: Synthetic oligonucleotide
ccaaaccauugcccggcuu

SEQ ID NO: 596506 - RNA, 19 nt, Artificial Sequence
  Description of Artificial Sequence: Synthetic oligonucleotide
ccaugaccgcagcuauauu

SEQ ID NO: 596507 - RNA, 19 nt, Artificial Sequence
  Description of Artificial Sequence: Synthetic oligonucleotide
cgggagcuaugcccacugu

SEQ ID NO: 596508 - RNA, 19 nt, Artificial Sequence
  Description of Artificial Sequence: Synthetic oligonucleotide
aggucaauaauuuaaaacc

SEQ ID NO: 596509 - RNA, 19 nt, Artificial Sequence
  Description of Artificial Sequence: Synthetic oligonucleotide
uaaauuaagggcuugagac

SEQ ID NO: 596510 - RNA, 19 nt, Artificial Sequence
  Description of Artificial Sequence: Synthetic oligonucleotide
aaauaagagacccuggcgu

SEQ ID NO: 596511 - RNA, 19 nt, Artificial Sequence
  Description of Artificial Sequence: Synthetic oligonucleotide
aauugaaauaccuguauaa

SEQ ID NO: 596512 - RNA, 19 nt, Artificial Sequence
  Description of Artificial Sequence: Synthetic oligonucleotide
uuaaauuagccacuguaca

SEQ ID NO: 596513 - RNA, 19 nt, Artificial Sequence
  Description of Artificial Sequence: Synthetic oligonucleotide
aauuaagggcuugagacuc

SEQ ID NO: 596514 - RNA, 19 nt, Artificial Sequence
  Description of Artificial Sequence: Synthetic oligonucleotide
cagacgaacaccaugagac

SEQ ID NO: 596515 - RNA, 19 nt, Artificial Sequence
  Description of Artificial Sequence: Synthetic oligonucleotide
ucaaguauccacccaaggc

SEQ ID NO: 596516 - RNA, 19 nt, Artificial Sequence
  Description of Artificial Sequence: Synthetic oligonucleotide
agcucaagaaaacccaggc

SEQ ID NO: 596517 - RNA, 19 nt, Artificial Sequence
  Description of Artificial Sequence: Synthetic oligonucleotide
caugauagcggugauagcg

SEQ ID NO: 596518 - RNA, 19 nt, Artificial Sequence
  Description of Artificial Sequence: Synthetic oligonucleotide
uucaccacgugcuucacgg

SEQ ID NO: 596519 - RNA, 19 nt, Artificial Sequence
  Description of Artificial Sequence: Synthetic oligonucleotide
aaauuagccacuguacaag

SEQ ID NO: 596520 - RNA, 19 nt, Artificial Sequence
  Description of Artificial Sequence: Synthetic oligonucleotide
aaauuaagggcuugagacu

SEQ ID NO: 596521 - RNA, 19 nt, Artificial Sequence
  Description of Artificial Sequence: Synthetic oligonucleotide
aauaagagacccuggcgug

SEQ ID NO: 596522 - RNA, 19 nt, Artificial Sequence
  Description of Artificial Sequence: Synthetic oligonucleotide
uguacaaggucaauaauuu

SEQ ID NO: 596523 - RNA, 19 nt, Artificial Sequence
  Description of Artificial Sequence: Synthetic oligonucleotide
augauuuccagacaucuca

SEQ ID NO: 596524 - RNA, 19 nt, Artificial Sequence
  Description of Artificial Sequence: Synthetic oligonucleotide
aaaauaugauuuccagaca

SEQ ID NO: 596525 - RNA, 19 nt, Artificial Sequence
  Description of Artificial Sequence: Synthetic oligonucleotide
uguccuguauaccccaggg

SEQ ID NO: 596526 - RNA, 19 nt, Artificial Sequence
  Description of Artificial Sequence: Synthetic oligonucleotide
auaaauuaagggcuugaga

SEQ ID NO: 596527 - RNA, 19 nt, Artificial Sequence
  Description of Artificial Sequence: Synthetic oligonucleotide
uucaaguauccacccaagg

SEQ ID NO: 596528 - RNA, 19 nt, Artificial Sequence
  Description of Artificial Sequence: Synthetic oligonucleotide
gucguagagaaguacaccc

SEQ ID NO: 596529 - RNA, 19 nt, Artificial Sequence
  Description of Artificial Sequence: Synthetic oligonucleotide
gaugccuacuuacaccagg

SEQ ID NO: 596530 - RNA, 19 nt, Artificial Sequence
  Description of Artificial Sequence: Synthetic oligonucleotide
auaaauagccccagcaggg

SEQ ID NO: 596531 - RNA, 19 nt, Artificial Sequence
  Description of Artificial Sequence: Synthetic oligonucleotide
uaaauuagccacuguacaa

SEQ ID NO: 596532 - RNA, 19 nt, Artificial Sequence
  Description of Artificial Sequence: Synthetic oligonucleotide
aauuagccacuguacaagu

SEQ ID NO: 596533 - RNA, 19 nt, Artificial Sequence
  Description of Artificial Sequence: Synthetic oligonucleotide
agggcggucuuucugaccg

SEQ ID NO: 596534 - RNA, 19 nt, Artificial Sequence
  Description of Artificial Sequence: Synthetic oligonucleotide
aaaacagccugccacgcaa

SEQ ID NO: 596535 - RNA, 19 nt, Artificial Sequence
  Description of Artificial Sequence: Synthetic oligonucleotide
acaccaugagacuggaggg

SEQ ID NO: 596536 - RNA, 19 nt, Artificial Sequence
  Description of Artificial Sequence: Synthetic oligonucleotide
accuuguuuagcccgcagc

SEQ ID NO: 596537 - RNA, 19 nt, Artificial Sequence
  Description of Artificial Sequence: Synthetic oligonucleotide
uccgucaucaguguccagg

SEQ ID NO: 596538 - RNA, 19 nt, Artificial Sequence
  Description of Artificial Sequence: Synthetic oligonucleotide
acuuacaccagggucacag

SEQ ID NO: 596539 - RNA, 19 nt, Artificial Sequence
  Description of Artificial Sequence: Synthetic oligonucleotide
agaaguacacccagagacc

SEQ ID NO: 596540 - RNA, 19 nt, Artificial Sequence
  Description of Artificial Sequence: Synthetic oligonucleotide
aaugcgcguagacggcagc

SEQ ID NO: 596541 - RNA, 19 nt, Artificial Sequence
  Description of Artificial Sequence: Synthetic oligonucleotide
accccugaugccuacuuac

SEQ ID NO: 596542 - RNA, 19 nt, Artificial Sequence
  Description of Artificial Sequence: Synthetic oligonucleotide
agacaucucacacuuuuga

SEQ ID NO: 596543 - RNA, 19 nt, Artificial Sequence
  Description of Artificial Sequence: Synthetic oligonucleotide
aagagcucaagaaaaccca

SEQ ID NO: 596544 - RNA, 19 nt, Artificial Sequence
  Description of Artificial Sequence: Synthetic oligonucleotide
uagaccgugccgaagcccc

SEQ ID NO: 596545 - RNA, 19 nt, Artificial Sequence
  Description of Artificial Sequence: Synthetic oligonucleotide
aaauagccccagcagggca

SEQ ID NO: 596546 - RNA, 19 nt, Artificial Sequence
  Description of Artificial Sequence: Synthetic oligonucleotide
accugugcgaagaagcggc

SEQ ID NO: 596547 - RNA, 19 nt, Artificial Sequence
  Description of Artificial Sequence: Synthetic oligonucleotide
cucugguucaaguauccac

SEQ ID NO: 596548 - RNA, 19 nt, Artificial Sequence
  Description of Artificial Sequence: Synthetic oligonucleotide
agcucucacugcuagaagu

SEQ ID NO: 596549 - RNA, 19 nt, Artificial Sequence
  Description of Artificial Sequence: Synthetic oligonucleotide
auaagagacccuggcgugc

SEQ ID NO: 596550 - RNA, 19 nt, Artificial Sequence
  Description of Artificial Sequence: Synthetic oligonucleotide
caggagacaucccaggcag

SEQ ID NO: 596551 - RNA, 19 nt, Artificial Sequence
  Description of Artificial Sequence: Synthetic oligonucleotide
acgcaagaucuccucgucc

SEQ ID NO: 596552 - RNA, 19 nt, Artificial Sequence
  Description of Artificial Sequence: Synthetic oligonucleotide
gcaagcagacuguacaagg

SEQ ID NO: 596553 - RNA, 19 nt, Artificial Sequence
  Description of Artificial Sequence: Synthetic oligonucleotide
aggcacucaaagcaaagga

SEQ ID NO: 596554 - RNA, 19 nt, Artificial Sequence
  Description of Artificial Sequence: Synthetic oligonucleotide
gaagggaauguccccacac

SEQ ID NO: 596555 - RNA, 19 nt, Artificial Sequence
  Description of Artificial Sequence: Synthetic oligonucleotide
gaagccgucgggccgcucg

SEQ ID NO: 596556 - RNA, 19 nt, Artificial Sequence
  Description of Artificial Sequence: Synthetic oligonucleotide
agcgcaagagugcccaggg

SEQ ID NO: 596557 - RNA, 19 nt, Artificial Sequence
  Description of Artificial Sequence: Synthetic oligonucleotide
ucguagagaaguacaccca

SEQ ID NO: 596558 - RNA, 19 nt, Artificial Sequence
  Description of Artificial Sequence: Synthetic oligonucleotide
aaguaaccucagcaaauaa

SEQ ID NO: 596559 - RNA, 19 nt, Artificial Sequence
  Description of Artificial Sequence: Synthetic oligonucleotide
gggagccgaacuuagacag

SEQ ID NO: 596560 - RNA, 19 nt, Artificial Sequence
  Description of Artificial Sequence: Synthetic oligonucleotide
acgagugccaucaaaguca

SEQ ID NO: 596561 - RNA, 19 nt, Artificial Sequence
  Description of Artificial Sequence: Synthetic oligonucleotide
agaggugcgccagggagcc

SEQ ID NO: 596562 - RNA, 19 nt, Artificial Sequence
  Description of Artificial Sequence: Synthetic oligonucleotide
gacgaacaccaugagacug

SEQ ID NO: 596563 - RNA, 19 nt, Artificial Sequence
  Description of Artificial Sequence: Synthetic oligonucleotide
gaggaaguaaccucagcaa

SEQ ID NO: 596564 - RNA, 19 nt, Artificial Sequence
  Description of Artificial Sequence: Synthetic oligonucleotide
ugucguagagaaguacacc

SEQ ID NO: 596565 - RNA, 19 nt, Artificial Sequence
  Description of Artificial Sequence: Synthetic oligonucleotide
ggagagacaccacucaaug

SEQ ID NO: 596566 - RNA, 19 nt, Artificial Sequence
  Description of Artificial Sequence: Synthetic oligonucleotide
ggaggaaguaaccucagca

SEQ ID NO: 596567 - RNA, 19 nt, Artificial Sequence
  Description of Artificial Sequence: Synthetic oligonucleotide
cuuagacagcagcaucgcg

SEQ ID NO: 596568 - RNA, 19 nt, Artificial Sequence
  Description of Artificial Sequence: Synthetic oligonucleotide
agagccgaaggucacaguu

SEQ ID NO: 596569 - RNA, 19 nt, Artificial Sequence
  Description of Artificial Sequence: Synthetic oligonucleotide
cuagccugagcccaggcuc

SEQ ID NO: 596570 - RNA, 19 nt, Artificial Sequence
  Description of Artificial Sequence: Synthetic oligonucleotide
ugagcuucagcucgcccga

SEQ ID NO: 596571 - RNA, 19 nt, Artificial Sequence
  Description of Artificial Sequence: Synthetic oligonucleotide
uagcggauccacucugggg

SEQ ID NO: 596572 - RNA, 19 nt, Artificial Sequence
  Description of Artificial Sequence: Synthetic oligonucleotide
gaucccgcggccccgaggc

SEQ ID NO: 596573 - RNA, 19 nt, Artificial Sequence
  Description of Artificial Sequence: Synthetic oligonucleotide
uucuggaacgcuccccucu

SEQ ID NO: 596574 - RNA, 19 nt, Artificial Sequence
  Description of Artificial Sequence: Synthetic oligonucleotide
gaugcggcugccugcguag

SEQ ID NO: 596575 - RNA, 19 nt, Artificial Sequence
  Description of Artificial Sequence: Synthetic oligonucleotide
augauagcggugauagcgg

SEQ ID NO: 596576 - RNA, 19 nt, Artificial Sequence
  Description of Artificial Sequence: Synthetic oligonucleotide
ugcccagacgaacaccaug

SEQ ID NO: 596577 - RNA, 19 nt, Artificial Sequence
  Description of Artificial Sequence: Synthetic oligonucleotide
ucagcgaggcagccgcgcg

SEQ ID NO: 596578 - RNA, 19 nt, Artificial Sequence
  Description of Artificial Sequence: Synthetic oligonucleotide
cagagcgcccaugauagcg

SEQ ID NO: 596579 - RNA, 19 nt, Artificial Sequence
  Description of Artificial Sequence: Synthetic oligonucleotide
ugcugugccgccucugacc

SEQ ID NO: 596580 - RNA, 19 nt, Artificial Sequence
  Description of Artificial Sequence: Synthetic oligonucleotide
ugauagcggugauagcgga

SEQ ID NO: 596581 - RNA, 19 nt, Artificial Sequence
  Description of Artificial Sequence: Synthetic oligonucleotide
cagggagccgaacuuagac

SEQ ID NO: 596582 - RNA, 19 nt, Artificial Sequence
  Description of Artificial Sequence: Synthetic oligonucleotide
cuuucugaccgcagacagc

SEQ ID NO: 596583 - RNA, 19 nt, Artificial Sequence
  Description of Artificial Sequence: Synthetic oligonucleotide
cacgagugccaucaaaguc

SEQ ID NO: 596584 - RNA, 19 nt, Artificial Sequence
  Description of Artificial Sequence: Synthetic oligonucleotide
ggaauguccccacacacca

SEQ ID NO: 596585 - RNA, 19 nt, Artificial Sequence
  Description of Artificial Sequence: Synthetic oligonucleotide
acacgagugccaucaaagu

SEQ ID NO: 596586 - RNA, 19 nt, Artificial Sequence
  Description of Artificial Sequence: Synthetic oligonucleotide
ggugauagcggauccacuc

SEQ ID NO: 596587 - RNA, 19 nt, Artificial Sequence
  Description of Artificial Sequence: Synthetic oligonucleotide
guccuguauaccccagggg

SEQ ID NO: 596588 - RNA, 19 nt, Artificial Sequence
  Description of Artificial Sequence: Synthetic oligonucleotide
ccauaaauaagagacccug

SEQ ID NO: 596589 - RNA, 19 nt, Artificial Sequence
  Description of Artificial Sequence: Synthetic oligonucleotide
agagcucaagaaaacccag

SEQ ID NO: 596590 - RNA, 19 nt, Artificial Sequence
  Description of Artificial Sequence: Synthetic oligonucleotide
ugguucaaguauccaccca

SEQ ID NO: 596591 - RNA, 19 nt, Artificial Sequence
  Description of Artificial Sequence: Synthetic oligonucleotide
ugcacgaccccgcaaccgu

SEQ ID NO: 596592 - RNA, 19 nt, Artificial Sequence
  Description of Artificial Sequence: Synthetic oligonucleotide
augccuacuuacaccaggg

SEQ ID NO: 596593 - RNA, 19 nt, Artificial Sequence
  Description of Artificial Sequence: Synthetic oligonucleotide
ccuacuuacaccaggguca

SEQ ID NO: 596594 - RNA, 19 nt, Artificial Sequence
  Description of Artificial Sequence: Synthetic oligonucleotide
ugcuuggaggaaguaaccu

SEQ ID NO: 596595 - RNA, 19 nt, Artificial Sequence
  Description of Artificial Sequence: Synthetic oligonucleotide
acaaggucaauaauuuaaa

SEQ ID NO: 596596 - RNA, 19 nt, Artificial Sequence
  Description of Artificial Sequence: Synthetic oligonucleotide
ggcagagcgcccaugauag

SEQ ID NO: 596597 - RNA, 19 nt, Artificial Sequence
  Description of Artificial Sequence: Synthetic oligonucleotide
guacacacgagugccauca

SEQ ID NO: 596598 - RNA, 19 nt, Artificial Sequence
  Description of Artificial Sequence: Synthetic oligonucleotide
agggagccgaacuuagaca

SEQ ID NO: 596599 - RNA, 19 nt, Artificial Sequence
  Description of Artificial Sequence: Synthetic oligonucleotide
ugaugccuacuuacaccag

SEQ ID NO: 596600 - RNA, 19 nt, Artificial Sequence
  Description of Artificial Sequence: Synthetic oligonucleotide
acgugcuucacggccaccg

SEQ ID NO: 596601 - RNA, 19 nt, Artificial Sequence
  Description of Artificial Sequence: Synthetic oligonucleotide
uuagcccgcagccaucuuu

SEQ ID NO: 596602 - RNA, 19 nt, Artificial Sequence
  Description of Artificial Sequence: Synthetic oligonucleotide
gagagacaccacucaauga

SEQ ID NO: 596603 - RNA, 19 nt, Artificial Sequence
  Description of Artificial Sequence: Synthetic oligonucleotide
uagccugagcccaggcucc

SEQ ID NO: 596604 - RNA, 19 nt, Artificial Sequence
  Description of Artificial Sequence: Synthetic oligonucleotide
guaaccucagcaaauaaau

SEQ ID NO: 596605 - RNA, 19 nt, Artificial Sequence
  Description of Artificial Sequence: Synthetic oligonucleotide
aggcggaugacgccucgcg

SEQ ID NO: 596606 - RNA, 19 nt, Artificial Sequence
  Description of Artificial Sequence: Synthetic oligonucleotide
agcaagcagacuguacaag

SEQ ID NO: 596607 - RNA, 19 nt, Artificial Sequence
  Description of Artificial Sequence: Synthetic oligonucleotide
ccaaccguugcauugcuug

SEQ ID NO: 596608 - RNA, 19 nt, Artificial Sequence
  Description of Artificial Sequence: Synthetic oligonucleotide
ucguccugcucgaagggaa

SEQ ID NO: 596609 - RNA, 19 nt, Artificial Sequence
  Description of Artificial Sequence: Synthetic oligonucleotide
agacgaacaccaugagacu

SEQ ID NO: 596610 - RNA, 19 nt, Artificial Sequence
  Description of Artificial Sequence: Synthetic oligonucleotide
uuccgugaugaagucgaag

SEQ ID NO: 596611 - RNA, 19 nt, Artificial Sequence
  Description of Artificial Sequence: Synthetic oligonucleotide
guucaaguauccacccaag

SEQ ID NO: 596612 - RNA, 19 nt, Artificial Sequence
  Description of Artificial Sequence: Synthetic oligonucleotide
aguguagaccguguccuug

SEQ ID NO: 596613 - RNA, 19 nt, Artificial Sequence
  Description of Artificial Sequence: Synthetic oligonucleotide
cugaccgcagacagcgcgg

SEQ ID NO: 596614 - RNA, 19 nt, Artificial Sequence
  Description of Artificial Sequence: Synthetic oligonucleotide
acccguccggcacggacgc

SEQ ID NO: 596615 - RNA, 19 nt, Artificial Sequence
  Description of Artificial Sequence: Synthetic oligonucleotide
cgcgaaugcgcguagacgg

SEQ ID NO: 596616 - RNA, 19 nt, Artificial Sequence
  Description of Artificial Sequence: Synthetic oligonucleotide
gaaguaaccucagcaaaua

SEQ ID NO: 596617 - RNA, 19 nt, Artificial Sequence
  Description of Artificial Sequence: Synthetic oligonucleotide
uagcggugauagcggaucc

SEQ ID NO: 596618 - RNA, 19 nt, Artificial Sequence
  Description of Artificial Sequence: Synthetic oligonucleotide
gguucaaguauccacccaa

SEQ ID NO: 596619 - RNA, 19 nt, Artificial Sequence
  Description of Artificial Sequence: Synthetic oligonucleotide
cagacaucucacacuuuug

SEQ ID NO: 596620 - RNA, 19 nt, Artificial Sequence
  Description of Artificial Sequence: Synthetic oligonucleotide
aaacaggcccggugccaag

SEQ ID NO: 596621 - RNA, 19 nt, Artificial Sequence
  Description of Artificial Sequence: Synthetic oligonucleotide
cagacagcgcggcggaucc

SEQ ID NO: 596622 - RNA, 19 nt, Artificial Sequence
  Description of Artificial Sequence: Synthetic oligonucleotide
gacagcgcggcggaucccg

SEQ ID NO: 596623 - RNA, 19 nt, Artificial Sequence
  Description of Artificial Sequence: Synthetic oligonucleotide
caggggugcuccaugucag

SEQ ID NO: 596624 - RNA, 19 nt, Artificial Sequence
  Description of Artificial Sequence: Synthetic oligonucleotide
accgcagacagcgcggcgg

SEQ ID NO: 596625 - RNA, 19 nt, Artificial Sequence
  Description of Artificial Sequence: Synthetic oligonucleotide
cagcugcuaaaauaaauua

SEQ ID NO: 596626 - RNA, 19 nt, Artificial Sequence
  Description of Artificial Sequence: Synthetic oligonucleotide
guagaccguguccuugagc

SEQ ID NO: 596627 - RNA, 19 nt, Artificial Sequence
  Description of Artificial Sequence: Synthetic oligonucleotide
ugacccguccggcacggac

SEQ ID NO: 596628 - RNA, 19 nt, Artificial Sequence
  Description of Artificial Sequence: Synthetic oligonucleotide
ucgaagggaauguccccac

SEQ ID NO: 596629 - RNA, 19 nt, Artificial Sequence
  Description of Artificial Sequence: Synthetic oligonucleotide
cuuuugcaggagacauccc

SEQ ID NO: 596630 - RNA, 19 nt, Artificial Sequence
  Description of Artificial Sequence: Synthetic oligonucleotide
gacccguccggcacggacg

SEQ ID NO: 596631 - RNA, 19 nt, Artificial Sequence
  Description of Artificial Sequence: Synthetic oligonucleotide
uggggaccuacuccaggug

SEQ ID NO: 596632 - RNA, 19 nt, Artificial Sequence
  Description of Artificial Sequence: Synthetic oligonucleotide
gcggaugacgccucgcgcg

SEQ ID NO: 596633 - RNA, 19 nt, Artificial Sequence
  Description of Artificial Sequence: Synthetic oligonucleotide
uccagggcgccacguuccg

SEQ ID NO: 596634 - RNA, 19 nt, Artificial Sequence
  Description of Artificial Sequence: Synthetic oligonucleotide
uggaacgcuccccucuguc

SEQ ID NO: 596635 - RNA, 19 nt, Artificial Sequence
  Description of Artificial Sequence: Synthetic oligonucleotide
cacacaccaugucguagag

SEQ ID NO: 596636 - RNA, 19 nt, Artificial Sequence
  Description of Artificial Sequence: Synthetic oligonucleotide
guagacggcagcuggccga

SEQ ID NO: 596637 - RNA, 19 nt, Artificial Sequence
  Description of Artificial Sequence: Synthetic oligonucleotide
gaaugcgcguagacggcag

SEQ ID NO: 596638 - RNA, 19 nt, Artificial Sequence
  Description of Artificial Sequence: Synthetic oligonucleotide
acgaccccgcaaccguggc

SEQ ID NO: 596639 - RNA, 19 nt, Artificial Sequence
  Description of Artificial Sequence: Synthetic oligonucleotide
ucugacccguccggcacgg

SEQ ID NO: 596640 - RNA, 19 nt, Artificial Sequence
  Description of Artificial Sequence: Synthetic oligonucleotide
cuacuuacaccagggucac

SEQ ID NO: 596641 - RNA, 19 nt, Artificial Sequence
  Description of Artificial Sequence: Synthetic oligonucleotide
cucgcccgagcgcaggucc

SEQ ID NO: 596642 - RNA, 19 nt, Artificial Sequence
  Description of Artificial Sequence: Synthetic oligonucleotide
agacaugcccagacgaaca

SEQ ID NO: 596643 - RNA, 19 nt, Artificial Sequence
  Description of Artificial Sequence: Synthetic oligonucleotide
cacgaccccgcaaccgugg

SEQ ID NO: 596644 - RNA, 19 nt, Artificial Sequence
  Description of Artificial Sequence: Synthetic oligonucleotide
uguacacacgagugccauc

SEQ ID NO: 596645 - RNA, 19 nt, Artificial Sequence
  Description of Artificial Sequence: Synthetic oligonucleotide
acguuccgugaugaagucg

SEQ ID NO: 596646 - RNA, 19 nt, Artificial Sequence
  Description of Artificial Sequence: Synthetic oligonucleotide
caccugugcgaagaagcgg

SEQ ID NO: 596647 - RNA, 19 nt, Artificial Sequence
  Description of Artificial Sequence: Synthetic oligonucleotide
acaagcucucacugcuaga

SEQ ID NO: 596648 - RNA, 19 nt, Artificial Sequence
  Description of Artificial Sequence: Synthetic oligonucleotide
ugcgaagaagcggcgcgcc

SEQ ID NO: 596649 - RNA, 19 nt, Artificial Sequence
  Description of Artificial Sequence: Synthetic oligonucleotide
aaacaaccccaccccugau

SEQ ID NO: 596650 - RNA, 19 nt, Artificial Sequence
  Description of Artificial Sequence: Synthetic oligonucleotide
gccuacuuacaccaggguc

SEQ ID NO: 596651 - RNA, 19 nt, Artificial Sequence
  Description of Artificial Sequence: Synthetic oligonucleotide
cucacaagcucucacugcu

SEQ ID NO: 596652 - RNA, 19 nt, Artificial Sequence
  Description of Artificial Sequence: Synthetic oligonucleotide
gcaaccguggcaguggcgc

SEQ ID NO: 596653 - RNA, 19 nt, Artificial Sequence
  Description of Artificial Sequence: Synthetic oligonucleotide
gcuggcuccgucaucagug

SEQ ID NO: 596654 - RNA, 19 nt, Artificial Sequence
  Description of Artificial Sequence: Synthetic oligonucleotide
cagggcgccacguuccgug

SEQ ID NO: 596655 - RNA, 19 nt, Artificial Sequence
  Description of Artificial Sequence: Synthetic oligonucleotide
cacggcgcccaccugguac

SEQ ID NO: 596656 - RNA, 19 nt, Artificial Sequence
  Description of Artificial Sequence: Synthetic oligonucleotide
gcugugccgccucugaccc

SEQ ID NO: 596657 - RNA, 19 nt, Artificial Sequence
  Description of Artificial Sequence: Synthetic oligonucleotide
gccacgcaagaucuccucg

SEQ ID NO: 596658 - RNA, 19 nt, Artificial Sequence
  Description of Artificial Sequence: Synthetic oligonucleotide
uagacggcagcuggccgag

SEQ ID NO: 596659 - RNA, 19 nt, Artificial Sequence
  Description of Artificial Sequence: Synthetic oligonucleotide
cucugacccguccggcacg

SEQ ID NO: 596660 - RNA, 19 nt, Artificial Sequence
  Description of Artificial Sequence: Synthetic oligonucleotide
cgagccgaagucaaugagc

SEQ ID NO: 596661 - RNA, 19 nt, Artificial Sequence
  Description of Artificial Sequence: Synthetic oligonucleotide
acccugacuguccuguaua

SEQ ID NO: 596662 - RNA, 19 nt, Artificial Sequence
  Description of Artificial Sequence: Synthetic oligonucleotide
ugcguagaccgugccgaag

SEQ ID NO: 596663 - RNA, 19 nt, Artificial Sequence
  Description of Artificial Sequence: Synthetic oligonucleotide
gagggcggucuuucugacc

SEQ ID NO: 596664 - RNA, 19 nt, Artificial Sequence
  Description of Artificial Sequence: Synthetic oligonucleotide
aguggcgcacagcggcaag

SEQ ID NO: 596665 - RNA, 19 nt, Artificial Sequence
  Description of Artificial Sequence: Synthetic oligonucleotide
guggccgcgcgaaugcgcg

SEQ ID NO: 596666 - RNA, 19 nt, Artificial Sequence
  Description of Artificial Sequence: Synthetic oligonucleotide
cuucaccgggagguggucc

SEQ ID NO: 596667 - RNA, 19 nt, Artificial Sequence
  Description of Artificial Sequence: Synthetic oligonucleotide
agacugccccacucgguca

SEQ ID NO: 596668 - RNA, 19 nt, Artificial Sequence
  Description of Artificial Sequence: Synthetic oligonucleotide
cacgcaagaucuccucguc

SEQ ID NO: 596669 - RNA, 19 nt, Artificial Sequence
  Description of Artificial Sequence: Synthetic oligonucleotide
agcaucgcggguggccucg

SEQ ID NO: 596670 - RNA, 19 nt, Artificial Sequence
  Description of Artificial Sequence: Synthetic oligonucleotide
ugcgcguagacggcagcug

SEQ ID NO: 596671 - RNA, 19 nt, Artificial Sequence
  Description of Artificial Sequence: Synthetic oligonucleotide
cucacacuuuugaacuuaa

SEQ ID NO: 596672 - RNA, 19 nt, Artificial Sequence
  Description of Artificial Sequence: Synthetic oligonucleotide
cucgaagggaaugucccca

SEQ ID NO: 596673 - RNA, 19 nt, Artificial Sequence
  Description of Artificial Sequence: Synthetic oligonucleotide
cugccugcguagaccgugc

SEQ ID NO: 596674 - RNA, 19 nt, Artificial Sequence
  Description of Artificial Sequence: Synthetic oligonucleotide
uucugaccgcagacagcgc

SEQ ID NO: 596675 - RNA, 19 nt, Artificial Sequence
  Description of Artificial Sequence: Synthetic oligonucleotide
cacagcugcuaaaauaaau

SEQ ID NO: 596676 - RNA, 19 nt, Artificial Sequence
  Description of Artificial Sequence: Synthetic oligonucleotide
cacguuccgugaugaaguc

SEQ ID NO: 596677 - RNA, 19 nt, Artificial Sequence
  Description of Artificial Sequence: Synthetic oligonucleotide
gccacguuccgugaugaag

SEQ ID NO: 596678 - RNA, 19 nt, Artificial Sequence
  Description of Artificial Sequence: Synthetic oligonucleotide
ugccccacucggucacccg

SEQ ID NO: 596679 - RNA, 19 nt, Artificial Sequence
  Description of Artificial Sequence: Synthetic oligonucleotide
ugaccgcagacagcgcggc

SEQ ID NO: 596680 - RNA, 19 nt, Artificial Sequence
  Description of Artificial Sequence: Synthetic oligonucleotide
auuaagggcuugagacucu

SEQ ID NO: 596681 - RNA, 19 nt, Artificial Sequence
  Description of Artificial Sequence: Synthetic oligonucleotide
cugugcgaagaagcggcgc

SEQ ID NO: 596682 - RNA, 19 nt, Artificial Sequence
  Description of Artificial Sequence: Synthetic oligonucleotide
gaugacgccucgcgcgcca

SEQ ID NO: 596683 - RNA, 19 nt, Artificial Sequence
  Description of Artificial Sequence: Synthetic oligonucleotide
gaccgcagacagcgcggcg

SEQ ID NO: 596684 - RNA, 19 nt, Artificial Sequence
  Description of Artificial Sequence: Synthetic oligonucleotide
ugccugcguagaccgugcc

SEQ ID NO: 596685 - RNA, 19 nt, Artificial Sequence
  Description of Artificial Sequence: Synthetic oligonucleotide
gugcacgaccccgcaaccg

SEQ ID NO: 596686 - RNA, 19 nt, Artificial Sequence
  Description of Artificial Sequence: Synthetic oligonucleotide
ggcucacacgccccggccg

SEQ ID NO: 596687 - RNA, 19 nt, Artificial Sequence
  Description of Artificial Sequence: Synthetic oligonucleotide
gcgcguagacggcagcugg

SEQ ID NO: 596688 - RNA, 19 nt, Artificial Sequence
  Description of Artificial Sequence: Synthetic oligonucleotide
caggcgggaccuuguuuag

SEQ ID NO: 596689 - RNA, 19 nt, Artificial Sequence
  Description of Artificial Sequence: Synthetic oligonucleotide
aucgcggguggccucgcgu

SEQ ID NO: 596690 - RNA, 19 nt, Artificial Sequence
  Description of Artificial Sequence: Synthetic oligonucleotide
ccaugagacuggagggugg

SEQ ID NO: 596691 - RNA, 19 nt, Artificial Sequence
  Description of Artificial Sequence: Synthetic oligonucleotide
uguauaccccaggggccug

SEQ ID NO: 596692 - RNA, 19 nt, Artificial Sequence
  Description of Artificial Sequence: Synthetic oligonucleotide
guauaccccaggggccugg

SEQ ID NO: 596693 - RNA, 19 nt, Artificial Sequence
  Description of Artificial Sequence: Synthetic oligonucleotide
uccgucggcgaugcggcug

SEQ ID NO: 596694 - RNA, 19 nt, Artificial Sequence
  Description of Artificial Sequence: Synthetic oligonucleotide
ccgaacuuagacagcagca

SEQ ID NO: 596695 - RNA, 19 nt, Artificial Sequence
  Description of Artificial Sequence: Synthetic oligonucleotide
ugcggcugccugcguagac

SEQ ID NO: 596696 - RNA, 19 nt, Artificial Sequence
  Description of Artificial Sequence: Synthetic oligonucleotide
ggccgcucgaaccagucca

SEQ ID NO: 596697 - RNA, 19 nt, Artificial Sequence
  Description of Artificial Sequence: Synthetic oligonucleotide
ggcgcagucgcccgguggc

SEQ ID NO: 596698 - RNA, 19 nt, Artificial Sequence
  Description of Artificial Sequence: Synthetic oligonucleotide
ccugccacgcaagaucucc

SEQ ID NO: 596699 - RNA, 19 nt, Artificial Sequence
  Description of Artificial Sequence: Synthetic oligonucleotide
caaaggucaccagggguca

SEQ ID NO: 596700 - RNA, 19 nt, Artificial Sequence
  Description of Artificial Sequence: Synthetic oligonucleotide
uggcgcacagcggcaagca

SEQ ID NO: 596701 - RNA, 19 nt, Artificial Sequence
  Description of Artificial Sequence: Synthetic oligonucleotide
ugagggccucucugagggc

SEQ ID NO: 596702 - RNA, 19 nt, Artificial Sequence
  Description of Artificial Sequence: Synthetic oligonucleotide
cgggaccuuguuuagcccg

SEQ ID NO: 596703 - RNA, 19 nt, Artificial Sequence
  Description of Artificial Sequence: Synthetic oligonucleotide
guccagggcgccacguucc

SEQ ID NO: 596704 - RNA, 19 nt, Artificial Sequence
  Description of Artificial Sequence: Synthetic oligonucleotide
cguuccgugaugaagucga

SEQ ID NO: 596705 - RNA, 19 nt, Artificial Sequence
  Description of Artificial Sequence: Synthetic oligonucleotide
aggugcgccagggagccga

SEQ ID NO: 596706 - RNA, 19 nt, Artificial Sequence
  Description of Artificial Sequence: Synthetic oligonucleotide
gggagggcggucuuucuga

SEQ ID NO: 596707 - RNA, 19 nt, Artificial Sequence
  Description of Artificial Sequence: Synthetic oligonucleotide
agcgcgcccgagccgaagu

SEQ ID NO: 596708 - RNA, 19 nt, Artificial Sequence
  Description of Artificial Sequence: Synthetic oligonucleotide
uggcuccgucaucaguguc

SEQ ID NO: 596709 - RNA, 19 nt, Artificial Sequence
  Description of Artificial Sequence: Synthetic oligonucleotide
cccugaugccuacuuacac

SEQ ID NO: 596710 - RNA, 19 nt, Artificial Sequence
  Description of Artificial Sequence: Synthetic oligonucleotide
ggcgaugcggcugccugcg

SEQ ID NO: 596711 - RNA, 19 nt, Artificial Sequence
  Description of Artificial Sequence: Synthetic oligonucleotide
gagacaucccaggcagaga

SEQ ID NO: 596712 - RNA, 19 nt, Artificial Sequence
  Description of Artificial Sequence: Synthetic oligonucleotide
gccugcguagaccgugccg

SEQ ID NO: 596713 - RNA, 19 nt, Artificial Sequence
  Description of Artificial Sequence: Synthetic oligonucleotide
ggugcacgaccccgcaacc

SEQ ID NO: 596714 - RNA, 19 nt, Artificial Sequence
  Description of Artificial Sequence: Synthetic oligonucleotide
uauaccccaggggccugga

SEQ ID NO: 596715 - RNA, 19 nt, Artificial Sequence
  Description of Artificial Sequence: Synthetic oligonucleotide
augcgcguagacggcagcu

SEQ ID NO: 596716 - RNA, 19 nt, Artificial Sequence
  Description of Artificial Sequence: Synthetic oligonucleotide
gcgcgaaugcgcguagacg

SEQ ID NO: 596717 - RNA, 19 nt, Artificial Sequence
  Description of Artificial Sequence: Synthetic oligonucleotide
caccgggaguccgucggcg

SEQ ID NO: 596718 - RNA, 19 nt, Artificial Sequence
  Description of Artificial Sequence: Synthetic oligonucleotide
gccgccucugacccguccg

SEQ ID NO: 596719 - RNA, 19 nt, Artificial Sequence
  Description of Artificial Sequence: Synthetic oligonucleotide
gcggcaagcaccugugcga

SEQ ID NO: 596720 - RNA, 19 nt, Artificial Sequence
  Description of Artificial Sequence: Synthetic oligonucleotide
accgggaguccgucggcga

SEQ ID NO: 596721 - RNA, 19 nt, Artificial Sequence
  Description of Artificial Sequence: Synthetic oligonucleotide
acacgccccggccgccucg

SEQ ID NO: 596722 - RNA, 19 nt, Artificial Sequence
  Description of Artificial Sequence: Synthetic oligonucleotide
ggcggaugacgccucgcgc

SEQ ID NO: 596723 - RNA, 19 nt, Artificial Sequence
  Description of Artificial Sequence: Synthetic oligonucleotide
ccugugcgaagaagcggcg

SEQ ID NO: 596724 - RNA, 19 nt, Artificial Sequence
  Description of Artificial Sequence: Synthetic oligonucleotide
ucgcccgagcgcaggucca

SEQ ID NO: 596725 - RNA, 19 nt, Artificial Sequence
  Description of Artificial Sequence: Synthetic oligonucleotide
agcggugauagcggaucca

SEQ ID NO: 596726 - RNA, 19 nt, Artificial Sequence
  Description of Artificial Sequence: Synthetic oligonucleotide
cacggacgcgggagggcgg

SEQ ID NO: 596727 - RNA, 19 nt, Artificial Sequence
  Description of Artificial Sequence: Synthetic oligonucleotide
caggguggucacaccauaa

SEQ ID NO: 596728 - RNA, 19 nt, Artificial Sequence
  Description of Artificial Sequence: Synthetic oligonucleotide
guggcgcacagcggcaagc

SEQ ID NO: 596729 - RNA, 19 nt, Artificial Sequence
  Description of Artificial Sequence: Synthetic oligonucleotide
ggaaguaaccucagcaaau

SEQ ID NO: 596730 - RNA, 19 nt, Artificial Sequence
  Description of Artificial Sequence: Synthetic oligonucleotide
uuuagcccgcagccaucuu

SEQ ID NO: 596731 - RNA, 19 nt, Artificial Sequence
  Description of Artificial Sequence: Synthetic oligonucleotide
agcaggcggaugacgccuc

SEQ ID NO: 596732 - RNA, 19 nt, Artificial Sequence
  Description of Artificial Sequence: Synthetic oligonucleotide
gcacggacgcgggagggcg

SEQ ID NO: 596733 - RNA, 19 nt, Artificial Sequence
  Description of Artificial Sequence: Synthetic oligonucleotide
ucguccagggcgccacguu

SEQ ID NO: 596734 - RNA, 19 nt, Artificial Sequence
  Description of Artificial Sequence: Synthetic oligonucleotide
caugucagacacaguuggu

SEQ ID NO: 596735 - RNA, 19 nt, Artificial Sequence
  Description of Artificial Sequence: Synthetic oligonucleotide
ccgagccgaagucaaugag

SEQ ID NO: 596736 - RNA, 19 nt, Artificial Sequence
  Description of Artificial Sequence: Synthetic oligonucleotide
acaguggcagagcgcccau

SEQ ID NO: 596737 - RNA, 19 nt, Artificial Sequence
  Description of Artificial Sequence: Synthetic oligonucleotide
ccaguggcccaaccguugc

SEQ ID NO: 596738 - RNA, 19 nt, Artificial Sequence
  Description of Artificial Sequence: Synthetic oligonucleotide
ggcccaaccguugcauugc

SEQ ID NO: 596739 - RNA, 19 nt, Artificial Sequence
  Description of Artificial Sequence: Synthetic oligonucleotide
ccagacgaacaccaugaga

SEQ ID NO: 596740 - RNA, 19 nt, Artificial Sequence
  Description of Artificial Sequence: Synthetic oligonucleotide
guuuagcccgcagccaucu

SEQ ID NO: 596741 - RNA, 19 nt, Artificial Sequence
  Description of Artificial Sequence: Synthetic oligonucleotide
gcucacacgccccggccgc

SEQ ID NO: 596742 - RNA, 19 nt, Artificial Sequence
  Description of Artificial Sequence: Synthetic oligonucleotide
gggaccuuguuuagcccgc

SEQ ID NO: 596743 - RNA, 19 nt, Artificial Sequence
  Description of Artificial Sequence: Synthetic oligonucleotide
ccaugauagcggugauagc

SEQ ID NO: 596744 - RNA, 19 nt, Artificial Sequence
  Description of Artificial Sequence: Synthetic oligonucleotide
ucgcgugcugugccgccuc

SEQ ID NO: 596745 - RNA, 19 nt, Artificial Sequence
  Description of Artificial Sequence: Synthetic oligonucleotide
gcggugauagcggauccac

SEQ ID NO: 596746 - RNA, 19 nt, Artificial Sequence
  Description of Artificial Sequence: Synthetic oligonucleotide
gcuggcuagccugagccca

SEQ ID NO: 596747 - RNA, 19 nt, Artificial Sequence
  Description of Artificial Sequence: Synthetic oligonucleotide
ggcgccacguuccgugaug

SEQ ID NO: 596748 - RNA, 19 nt, Artificial Sequence
  Description of Artificial Sequence: Synthetic oligonucleotide
ccacguuccgugaugaagu

SEQ ID NO: 596749 - RNA, 19 nt, Artificial Sequence
  Description of Artificial Sequence: Synthetic oligonucleotide
ggaucccgcggccccgagg

SEQ ID NO: 596750 - RNA, 19 nt, Artificial Sequence
  Description of Artificial Sequence: Synthetic oligonucleotide
ggagggcggucuuucugac

SEQ ID NO: 596751 - RNA, 19 nt, Artificial Sequence
  Description of Artificial Sequence: Synthetic oligonucleotide
cgcuucccuuaaauuagcc

SEQ ID NO: 596752 - RNA, 19 nt, Artificial Sequence
  Description of Artificial Sequence: Synthetic oligonucleotide
caucgcggguggccucgcg

SEQ ID NO: 596753 - RNA, 19 nt, Artificial Sequence
  Description of Artificial Sequence: Synthetic oligonucleotide
ccugcguagaccgugccga

SEQ ID NO: 596754 - RNA, 19 nt, Artificial Sequence
  Description of Artificial Sequence: Synthetic oligonucleotide
ggagccgaacuuagacagc

SEQ ID NO: 596755 - RNA, 19 nt, Artificial Sequence
  Description of Artificial Sequence: Synthetic oligonucleotide
cacaguuuucuggaacgcu

SEQ ID NO: 596756 - RNA, 19 nt, Artificial Sequence
  Description of Artificial Sequence: Synthetic oligonucleotide
ccccgcuucccuuaaauua

SEQ ID NO: 596757 - RNA, 19 nt, Artificial Sequence
  Description of Artificial Sequence: Synthetic oligonucleotide
gauagcggugauagcggau

SEQ ID NO: 596758 - RNA, 19 nt, Artificial Sequence
  Description of Artificial Sequence: Synthetic oligonucleotide
gcccgagccgaagucaaug

SEQ ID NO: 596759 - RNA, 19 nt, Artificial Sequence
  Description of Artificial Sequence: Synthetic oligonucleotide
cguagacggcagcuggccg

SEQ ID NO: 596760 - RNA, 19 nt, Artificial Sequence
  Description of Artificial Sequence: Synthetic oligonucleotide
gggaguccgucggcgaugc

SEQ ID NO: 596761 - RNA, 19 nt, Artificial Sequence
  Description of Artificial Sequence: Synthetic oligonucleotide
guggcagaugggcaccagu

SEQ ID NO: 596762 - RNA, 19 nt, Artificial Sequence
  Description of Artificial Sequence: Synthetic oligonucleotide
ccucugacccguccggcac

SEQ ID NO: 596763 - RNA, 19 nt, Artificial Sequence
  Description of Artificial Sequence: Synthetic oligonucleotide
cuguauaccccaggggccu

SEQ ID NO: 596764 - RNA, 19 nt, Artificial Sequence
  Description of Artificial Sequence: Synthetic oligonucleotide
gcgggaccuuguuuagccc

SEQ ID NO: 596765 - RNA, 19 nt, Artificial Sequence
  Description of Artificial Sequence: Synthetic oligonucleotide
ggguggucacaccauaaau

SEQ ID NO: 596766 - RNA, 19 nt, Artificial Sequence
  Description of Artificial Sequence: Synthetic oligonucleotide
caggcggaugacgccucgc

SEQ ID NO: 596767 - RNA, 19 nt, Artificial Sequence
  Description of Artificial Sequence: Synthetic oligonucleotide
ugugccgguuccggccgcu

SEQ ID NO: 596768 - RNA, 19 nt, Artificial Sequence
  Description of Artificial Sequence: Synthetic oligonucleotide
cccgcaaccguggcagugg

SEQ ID NO: 596769 - RNA, 19 nt, Artificial Sequence
  Description of Artificial Sequence: Synthetic oligonucleotide
gagcgcccaugauagcggu

SEQ ID NO: 596770 - RNA, 19 nt, Artificial Sequence
  Description of Artificial Sequence: Synthetic oligonucleotide
cccacacaccaugucguag

SEQ ID NO: 596771 - RNA, 19 nt, Artificial Sequence
  Description of Artificial Sequence: Synthetic oligonucleotide
agacggcagcuggccgagc

SEQ ID NO: 596772 - RNA, 19 nt, Artificial Sequence
  Description of Artificial Sequence: Synthetic oligonucleotide
gguggccgcgcgaaugcgc

SEQ ID NO: 596773 - RNA, 19 nt, Artificial Sequence
  Description of Artificial Sequence: Synthetic oligonucleotide
caaccguggcaguggcgca

SEQ ID NO: 596774 - RNA, 19 nt, Artificial Sequence
  Description of Artificial Sequence: Synthetic oligonucleotide
gggaccuacuccaggugca

SEQ ID NO: 596775 - RNA, 19 nt, Artificial Sequence
  Description of Artificial Sequence: Synthetic oligonucleotide
aagcggcgcgccaggggcu

SEQ ID NO: 596776 - RNA, 19 nt, Artificial Sequence
  Description of Artificial Sequence: Synthetic oligonucleotide
gcggcugccugcguagacc

SEQ ID NO: 596777 - RNA, 19 nt, Artificial Sequence
  Description of Artificial Sequence: Synthetic oligonucleotide
gcgaaugcgcguagacggc

SEQ ID NO: 596778 - RNA, 19 nt, Artificial Sequence
  Description of Artificial Sequence: Synthetic oligonucleotide
gggccgcucgaaccagucc

SEQ ID NO: 596779 - RNA, 19 nt, Artificial Sequence
  Description of Artificial Sequence: Synthetic oligonucleotide
ccagacaucucacacuuuu

SEQ ID NO: 596780 - RNA, 19 nt, Artificial Sequence
  Description of Artificial Sequence: Synthetic oligonucleotide
cggugcacgaccccgcaac

SEQ ID NO: 596781 - RNA, 19 nt, Artificial Sequence
  Description of Artificial Sequence: Synthetic oligonucleotide
ggccaccgggaguccgucg

SEQ ID NO: 596782 - RNA, 19 nt, Artificial Sequence
  Description of Artificial Sequence: Synthetic oligonucleotide
ccgguggccgcgcgaaugc

SEQ ID NO: 596783 - RNA, 19 nt, Artificial Sequence
  Description of Artificial Sequence: Synthetic oligonucleotide
ccguccggcacggacgcgg

SEQ ID NO: 596784 - RNA, 19 nt, Artificial Sequence
  Description of Artificial Sequence: Synthetic oligonucleotide
cucacacgccccggccgcc

SEQ ID NO: 596785 - RNA, 19 nt, Artificial Sequence
  Description of Artificial Sequence: Synthetic oligonucleotide
cgagcgcagguccaccagc

SEQ ID NO: 596786 - RNA, 19 nt, Artificial Sequence
  Description of Artificial Sequence: Synthetic oligonucleotide
gcagacagcgcggcggauc

SEQ ID NO: 596787 - RNA, 19 nt, Artificial Sequence
  Description of Artificial Sequence: Synthetic oligonucleotide
cagcaucgcggguggccuc

SEQ ID NO: 596788 - RNA, 19 nt, Artificial Sequence
  Description of Artificial Sequence: Synthetic oligonucleotide
caccaugagacuggagggu

SEQ ID NO: 596789 - RNA, 19 nt, Artificial Sequence
  Description of Artificial Sequence: Synthetic oligonucleotide
gcagagcgcccaugauagc

SEQ ID NO: 596790 - RNA, 19 nt, Artificial Sequence
  Description of Artificial Sequence: Synthetic oligonucleotide
gcuagccugagcccaggcu

SEQ ID NO: 596791 - RNA, 19 nt, Artificial Sequence
  Description of Artificial Sequence: Synthetic oligonucleotide
gugcaggaagauggggucu

SEQ ID NO: 596792 - RNA, 19 nt, Artificial Sequence
  Description of Artificial Sequence: Synthetic oligonucleotide
uggccgcgcgaaugcgcgu

SEQ ID NO: 596793 - RNA, 19 nt, Artificial Sequence
  Description of Artificial Sequence: Synthetic oligonucleotide
ggggcacggccacuccgcc

SEQ ID NO: 596794 - RNA, 19 nt, Artificial Sequence
  Description of Artificial Sequence: Synthetic oligonucleotide
ccgccucugacccguccgg

SEQ ID NO: 596795 - RNA, 19 nt, Artificial Sequence
  Description of Artificial Sequence: Synthetic oligonucleotide
caguggcagagcgcccaug

SEQ ID NO: 596796 - RNA, 19 nt, Artificial Sequence
  Description of Artificial Sequence: Synthetic oligonucleotide
ggcggucuuucugaccgca

SEQ ID NO: 596797 - RNA, 19 nt, Artificial Sequence
  Description of Artificial Sequence: Synthetic oligonucleotide
ccacucggucacccgcucc

SEQ ID NO: 596798 - RNA, 19 nt, Artificial Sequence
  Description of Artificial Sequence: Synthetic oligonucleotide
gccgcucgaaccaguccag

SEQ ID NO: 596799 - RNA, 19 nt, Artificial Sequence
  Description of Artificial Sequence: Synthetic oligonucleotide
cugcguagaccgugccgaa

SEQ ID NO: 596800 - RNA, 19 nt, Artificial Sequence
  Description of Artificial Sequence: Synthetic oligonucleotide
cggaugacgccucgcgcgc

SEQ ID NO: 596801 - RNA, 19 nt, Artificial Sequence
  Description of Artificial Sequence: Synthetic oligonucleotide
guuccgugaugaagucgaa

SEQ ID NO: 596802 - RNA, 19 nt, Artificial Sequence
  Description of Artificial Sequence: Synthetic oligonucleotide
cgagcggcucacacgcccc

SEQ ID NO: 596803 - RNA, 19 nt, Artificial Sequence
  Description of Artificial Sequence: Synthetic oligonucleotide
accccgcaaccguggcagu

SEQ ID NO: 596804 - RNA, 19 nt, Artificial Sequence
  Description of Artificial Sequence: Synthetic oligonucleotide
ggaugacgccucgcgcgcc

SEQ ID NO: 596805 - RNA, 19 nt, Artificial Sequence
  Description of Artificial Sequence: Synthetic oligonucleotide
gcggucuuucugaccgcag

SEQ ID NO: 596806 - RNA, 19 nt, Artificial Sequence
  Description of Artificial Sequence: Synthetic oligonucleotide
augcggcugccugcguaga

SEQ ID NO: 596807 - RNA, 19 nt, Artificial Sequence
  Description of Artificial Sequence: Synthetic oligonucleotide
cccgcagaggugcgccagg

SEQ ID NO: 596808 - RNA, 19 nt, Artificial Sequence
  Description of Artificial Sequence: Synthetic oligonucleotide
ggcacggacgcgggagggc

SEQ ID NO: 596809 - RNA, 19 nt, Artificial Sequence
  Description of Artificial Sequence: Synthetic oligonucleotide
ccgcaaccguggcaguggc

SEQ ID NO: 596810 - RNA, 19 nt, Artificial Sequence
  Description of Artificial Sequence: Synthetic oligonucleotide
gggagagacaccacucaau

SEQ ID NO: 596811 - RNA, 19 nt, Artificial Sequence
  Description of Artificial Sequence: Synthetic oligonucleotide
cgcgcgaaugcgcguagac

SEQ ID NO: 596812 - RNA, 19 nt, Artificial Sequence
  Description of Artificial Sequence: Synthetic oligonucleotide
gggcggucuuucugaccgc

SEQ ID NO: 596813 - RNA, 19 nt, Artificial Sequence
  Description of Artificial Sequence: Synthetic oligonucleotide
augcccagacgaacaccau

SEQ ID NO: 596814 - RNA, 19 nt, Artificial Sequence
  Description of Artificial Sequence: Synthetic oligonucleotide
ccgcagaggugcgccaggg

SEQ ID NO: 596815 - RNA, 19 nt, Artificial Sequence
  Description of Artificial Sequence: Synthetic oligonucleotide
gccgcgcgaaugcgcguag

SEQ ID NO: 596816 - RNA, 19 nt, Artificial Sequence
  Description of Artificial Sequence: Synthetic oligonucleotide
gccacuccgcccagacugc

SEQ ID NO: 596817 - RNA, 19 nt, Artificial Sequence
  Description of Artificial Sequence: Synthetic oligonucleotide
gcacgaccccgcaaccgug

SEQ ID NO: 596818 - RNA, 19 nt, Artificial Sequence
  Description of Artificial Sequence: Synthetic oligonucleotide
ccagcgcaagagugcccag

SEQ ID NO: 596819 - RNA, 19 nt, Artificial Sequence
  Description of Artificial Sequence: Synthetic oligonucleotide
ccucgcgugcugugccgcc

SEQ ID NO: 596820 - RNA, 19 nt, Artificial Sequence
  Description of Artificial Sequence: Synthetic oligonucleotide
ccaggcccgcagaggugcg

SEQ ID NO: 596821 - RNA, 19 nt, Artificial Sequence
  Description of Artificial Sequence: Synthetic oligonucleotide
ggcgugccugggguggcag

SEQ ID NO: 596822 - RNA, 19 nt, Artificial Sequence
  Description of Artificial Sequence: Synthetic oligonucleotide
cacccugacuguccuguau

SEQ ID NO: 596823 - RNA, 19 nt, Artificial Sequence
  Description of Artificial Sequence: Synthetic oligonucleotide
ccacgcaagaucuccucgu

SEQ ID NO: 596824 - RNA, 19 nt, Artificial Sequence
  Description of Artificial Sequence: Synthetic oligonucleotide
gccgucgggccgcucgaac

SEQ ID NO: 596825 - RNA, 19 nt, Artificial Sequence
  Description of Artificial Sequence: Synthetic oligonucleotide
ccguugcauugcuugugca

SEQ ID NO: 596826 - RNA, 19 nt, Artificial Sequence
  Description of Artificial Sequence: Synthetic oligonucleotide
cgcaaccguggcaguggcg

SEQ ID NO: 596827 - RNA, 19 nt, Artificial Sequence
  Description of Artificial Sequence: Synthetic oligonucleotide
ccaccgggaguccgucggc

SEQ ID NO: 596828 - RNA, 19 nt, Artificial Sequence
  Description of Artificial Sequence: Synthetic oligonucleotide
cggucuuucugaccgcaga

SEQ ID NO: 596829 - RNA, 19 nt, Artificial Sequence
  Description of Artificial Sequence: Synthetic oligonucleotide
cgggagggcggucuuucug

SEQ ID NO: 596830 - RNA, 19 nt, Artificial Sequence
  Description of Artificial Sequence: Synthetic oligonucleotide
gcccgcagaggugcgccag

SEQ ID NO: 596831 - RNA, 19 nt, Artificial Sequence
  Description of Artificial Sequence: Synthetic oligonucleotide
cuccgcccagacugcccca

SEQ ID NO: 596832 - RNA, 19 nt, Artificial Sequence
  Description of Artificial Sequence: Synthetic oligonucleotide
cccgguggccgcgcgaaug

SEQ ID NO: 596833 - RNA, 19 nt, Artificial Sequence
  Description of Artificial Sequence: Synthetic oligonucleotide
cagcgcgcccgagccgaag

SEQ ID NO: 596834 - RNA, 19 nt, Artificial Sequence
  Description of Artificial Sequence: Synthetic oligonucleotide
gccucgcgugcugugccgc

SEQ ID NO: 596835 - RNA, 19 nt, Artificial Sequence
  Description of Artificial Sequence: Synthetic oligonucleotide
gcgccacguuccgugauga

SEQ ID NO: 596836 - RNA, 19 nt, Artificial Sequence
  Description of Artificial Sequence: Synthetic oligonucleotide
guggcccaaccguugcauu

SEQ ID NO: 596837 - RNA, 19 nt, Artificial Sequence
  Description of Artificial Sequence: Synthetic oligonucleotide
cguccggcacggacgcggg

SEQ ID NO: 596838 - RNA, 19 nt, Artificial Sequence
  Description of Artificial Sequence: Synthetic oligonucleotide
gcagccgcgcggcgcaguc

SEQ ID NO: 596839 - RNA, 19 nt, Artificial Sequence
  Description of Artificial Sequence: Synthetic oligonucleotide
gcaguggcgcacagcggca

SEQ ID NO: 596840 - RNA, 19 nt, Artificial Sequence
  Description of Artificial Sequence: Synthetic oligonucleotide
caguggcgcacagcggcaa

SEQ ID NO: 596841 - RNA, 19 nt, Artificial Sequence
  Description of Artificial Sequence: Synthetic oligonucleotide
caguguagaccguguccuu

SEQ ID NO: 596842 - RNA, 19 nt, Artificial Sequence
  Description of Artificial Sequence: Synthetic oligonucleotide
gcgcgccaggggcucgucc

SEQ ID NO: 596843 - RNA, 19 nt, Artificial Sequence
  Description of Artificial Sequence: Synthetic oligonucleotide
cgaacuuagacagcagcau

SEQ ID NO: 596844 - RNA, 19 nt, Artificial Sequence
  Description of Artificial Sequence: Synthetic oligonucleotide
cgcagucgcccgguggccg

SEQ ID NO: 596845 - RNA, 19 nt, Artificial Sequence
  Description of Artificial Sequence: Synthetic oligonucleotide
cgaagggaauguccccaca

SEQ ID NO: 596846 - RNA, 19 nt, Artificial Sequence
  Description of Artificial Sequence: Synthetic oligonucleotide
cgaaugcgcguagacggca

SEQ ID NO: 596847 - RNA, 19 nt, Artificial Sequence
  Description of Artificial Sequence: Synthetic oligonucleotide
cggcgcagucgcccggugg

SEQ ID NO: 596848 - RNA, 19 nt, Artificial Sequence
  Description of Artificial Sequence: Synthetic oligonucleotide
gacgcgggagggcggucuu

SEQ ID NO: 596849 - RNA, 19 nt, Artificial Sequence
  Description of Artificial Sequence: Synthetic oligonucleotide
ccccgcaaccguggcagug

SEQ ID NO: 596850 - RNA, 19 nt, Artificial Sequence
  Description of Artificial Sequence: Synthetic oligonucleotide
gcgcgcccgagccgaaguc

SEQ ID NO: 596851 - RNA, 19 nt, Artificial Sequence
  Description of Artificial Sequence: Synthetic oligonucleotide
gcgcagucgcccgguggcc

SEQ ID NO: 596852 - RNA, 19 nt, Artificial Sequence
  Description of Artificial Sequence: Synthetic oligonucleotide
cucguccagggcgccacgu

SEQ ID NO: 596853 - RNA, 19 nt, Artificial Sequence
  Description of Artificial Sequence: Synthetic oligonucleotide
ggcccgcagaggugcgcca

SEQ ID NO: 596854 - RNA, 19 nt, Artificial Sequence
  Description of Artificial Sequence: Synthetic oligonucleotide
gcacggccacuccgcccag

SEQ ID NO: 596855 - RNA, 19 nt, Artificial Sequence
  Description of Artificial Sequence: Synthetic oligonucleotide
gugccgguuccggccgcuc

SEQ ID NO: 596856 - RNA, 19 nt, Artificial Sequence
  Description of Artificial Sequence: Synthetic oligonucleotide
cgggccgcucgaaccaguc

SEQ ID NO: 596857 - RNA, 19 nt, Artificial Sequence
  Description of Artificial Sequence: Synthetic oligonucleotide
ccgcagacagcgcggcgga

SEQ ID NO: 596858 - RNA, 19 nt, Artificial Sequence
  Description of Artificial Sequence: Synthetic oligonucleotide
gcccggugccaagagcaaa

SEQ ID NO: 596859 - RNA, 19 nt, Artificial Sequence
  Description of Artificial Sequence: Synthetic oligonucleotide
gcccaaccguugcauugcu

SEQ ID NO: 596860 - RNA, 19 nt, Artificial Sequence
  Description of Artificial Sequence: Synthetic oligonucleotide
cucgcgugcugugccgccu

SEQ ID NO: 596861 - RNA, 19 nt, Artificial Sequence
  Description of Artificial Sequence: Synthetic oligonucleotide
gcgcaagagugcccagggu

SEQ ID NO: 596862 - RNA, 19 nt, Artificial Sequence
  Description of Artificial Sequence: Synthetic oligonucleotide
gucggcgaugcggcugccu

SEQ ID NO: 596863 - RNA, 19 nt, Artificial Sequence
  Description of Artificial Sequence: Synthetic oligonucleotide
guccgucggcgaugcggcu

SEQ ID NO: 596864 - RNA, 19 nt, Artificial Sequence
  Description of Artificial Sequence: Synthetic oligonucleotide
ggccgcgcgaaugcgcgua

SEQ ID NO: 596865 - RNA, 19 nt, Artificial Sequence
  Description of Artificial Sequence: Synthetic oligonucleotide
ggacgcgggagggcggucu

SEQ ID NO: 596866 - RNA, 19 nt, Artificial Sequence
  Description of Artificial Sequence: Synthetic oligonucleotide
cgggaguccgucggcgaug

SEQ ID NO: 596867 - RNA, 19 nt, Artificial Sequence
  Description of Artificial Sequence: Synthetic oligonucleotide
cacggccacuccgcccaga

SEQ ID NO: 596868 - RNA, 19 nt, Artificial Sequence
  Description of Artificial Sequence: Synthetic oligonucleotide
ccccacacaccaugucgua

SEQ ID NO: 596869 - RNA, 19 nt, Artificial Sequence
  Description of Artificial Sequence: Synthetic oligonucleotide
cgccucugacccguccggc

SEQ ID NO: 596870 - RNA, 19 nt, Artificial Sequence
  Description of Artificial Sequence: Synthetic oligonucleotide
caccacaggggugcuccau

SEQ ID NO: 596871 - RNA, 19 nt, Artificial Sequence
  Description of Artificial Sequence: Synthetic oligonucleotide
ccguguccuugagcagcgc

SEQ ID NO: 596872 - RNA, 19 nt, Artificial Sequence
  Description of Artificial Sequence: Synthetic oligonucleotide
ccgcgcccaccuugcgcag

SEQ ID NO: 596873 - RNA, 19 nt, Artificial Sequence
  Description of Artificial Sequence: Synthetic oligonucleotide
gccugccacgcaagaucuc

SEQ ID NO: 596874 - RNA, 19 nt, Artificial Sequence
  Description of Artificial Sequence: Synthetic oligonucleotide
cgaugcggcugccugcgua

SEQ ID NO: 596875 - RNA, 19 nt, Artificial Sequence
  Description of Artificial Sequence: Synthetic oligonucleotide
cugacccguccggcacgga

SEQ ID NO: 596876 - RNA, 19 nt, Artificial Sequence
  Description of Artificial Sequence: Synthetic oligonucleotide
ggugcgccagggagccgaa

SEQ ID NO: 596877 - RNA, 19 nt, Artificial Sequence
  Description of Artificial Sequence: Synthetic oligonucleotide
cggugauagcggauccacu

SEQ ID NO: 596878 - RNA, 19 nt, Artificial Sequence
  Description of Artificial Sequence: Synthetic oligonucleotide
gggcucguccagggcgcca

SEQ ID NO: 596879 - RNA, 19 nt, Artificial Sequence
  Description of Artificial Sequence: Synthetic oligonucleotide
cgcgcccgagccgaaguca

SEQ ID NO: 596880 - RNA, 19 nt, Artificial Sequence
  Description of Artificial Sequence: Synthetic oligonucleotide
cgaccccgcaaccguggca

SEQ ID NO: 596881 - RNA, 19 nt, Artificial Sequence
  Description of Artificial Sequence: Synthetic oligonucleotide
gggcgccacguuccgugau

SEQ ID NO: 596882 - RNA, 19 nt, Artificial Sequence
  Description of Artificial Sequence: Synthetic oligonucleotide
cccaaccguugcauugcuu

SEQ ID NO: 596883 - RNA, 19 nt, Artificial Sequence
  Description of Artificial Sequence: Synthetic oligonucleotide
ccgggaguccgucggcgau

SEQ ID NO: 596884 - RNA, 19 nt, Artificial Sequence
  Description of Artificial Sequence: Synthetic oligonucleotide
ccccgaggccgagcgcuca

SEQ ID NO: 596885 - RNA, 19 nt, Artificial Sequence
  Description of Artificial Sequence: Synthetic oligonucleotide
ccgcgcgaaugcgcguaga

SEQ ID NO: 596886 - RNA, 19 nt, Artificial Sequence
  Description of Artificial Sequence: Synthetic oligonucleotide
gcgaugcggcugccugcgu

SEQ ID NO: 596887 - RNA, 19 nt, Artificial Sequence
  Description of Artificial Sequence: Synthetic oligonucleotide
cgccacguuccgugaugaa

SEQ ID NO: 596888 - RNA, 19 nt, Artificial Sequence
  Description of Artificial Sequence: Synthetic oligonucleotide
ccgcccagacugccccacu

SEQ ID NO: 596889 - RNA, 19 nt, Artificial Sequence
  Description of Artificial Sequence: Synthetic oligonucleotide
ccagggcgccacguuccgu

SEQ ID NO: 596890 - RNA, 19 nt, Artificial Sequence
  Description of Artificial Sequence: Synthetic oligonucleotide
cgcgugcugugccgccucu

SEQ ID NO: 596891 - RNA, 19 nt, Artificial Sequence
  Description of Artificial Sequence: Synthetic oligonucleotide
cgcccgagccgaagucaau

SEQ ID NO: 596892 - RNA, 19 nt, Artificial Sequence
  Description of Artificial Sequence: Synthetic oligonucleotide
cgcagacagcgcggcggau

SEQ ID NO: 596893 - RNA, 19 nt, Artificial Sequence
  Description of Artificial Sequence: Synthetic oligonucleotide
ugaaguuccacucugacca

SEQ ID NO: 596894 - RNA, 19 nt, Artificial Sequence
  Description of Artificial Sequence: Synthetic oligonucleotide
aaacgacccacuuuguugc

SEQ ID NO: 596895 - RNA, 19 nt, Artificial Sequence
  Description of Artificial Sequence: Synthetic oligonucleotide
uuaaaacuuaaauaguugu

SEQ ID NO: 596896 - RNA, 19 nt, Artificial Sequence
  Description of Artificial Sequence: Synthetic oligonucleotide
ggugaagugaccuagagag

SEQ ID NO: 596897 - RNA, 19 nt, Artificial Sequence
  Description of Artificial Sequence: Synthetic oligonucleotide
uaguauauaggcuacuucc

SEQ ID NO: 596898 - RNA, 19 nt, Artificial Sequence
  Description of Artificial Sequence: Synthetic oligonucleotide
  modified_base (8)..(8): a, c, u, g, unknown or other
agugccanccuuuugaaag

SEQ ID NO: 596899 - RNA, 19 nt, Artificial Sequence
  Description of Artificial Sequence: Synthetic oligonucleotide
acuaguaguuaguauauag

SEQ ID NO: 596900 - RNA, 19 nt, Artificial Sequence
  Description of Artificial Sequence: Synthetic oligonucleotide
uugaaugaauuacuaaggc

SEQ ID NO: 596901 - RNA, 19 nt, Artificial Sequence
  Description of Artificial Sequence: Synthetic oligonucleotide
agagaaacgacccacuuug

SEQ ID NO: 596902 - RNA, 19 nt, Artificial Sequence
  Description of Artificial Sequence: Synthetic oligonucleotide
ugaccuauauaagaaaggg

SEQ ID NO: 596903 - RNA, 19 nt, Artificial Sequence
  Description of Artificial Sequence: Synthetic oligonucleotide
uccacuagguuguaaaagg

SEQ ID NO: 596904 - RNA, 19 nt, Artificial Sequence
  Description of Artificial Sequence: Synthetic oligonucleotide
uugucuaccaacuugugca

SEQ ID NO: 596905 - RNA, 19 nt, Artificial Sequence
  Description of Artificial Sequence: Synthetic oligonucleotide
aaugaccuauauaagaaag

SEQ ID NO: 596906 - RNA, 19 nt, Artificial Sequence
  Description of Artificial Sequence: Synthetic oligonucleotide
uguccaacaacauuuauau

SEQ ID NO: 596907 - RNA, 19 nt, Artificial Sequence
  Description of Artificial Sequence: Synthetic oligonucleotide
uaaguucuaaccuuaaguc

SEQ ID NO: 596908 - RNA, 19 nt, Artificial Sequence
  Description of Artificial Sequence: Synthetic oligonucleotide
ucuuaaaacuuaaauaguu

SEQ ID NO: 596909 - RNA, 19 nt, Artificial Sequence
  Description of Artificial Sequence: Synthetic oligonucleotide
aaccuuuuguuuuaaggug

SEQ ID NO: 596910 - RNA, 19 nt, Artificial Sequence
  Description of Artificial Sequence: Synthetic oligonucleotide
uucuaagggcucaaaauag

SEQ ID NO: 596911 - RNA, 19 nt, Artificial Sequence
  Description of Artificial Sequence: Synthetic oligonucleotide
aaacuuaaauaguugucca

SEQ ID NO: 596912 - RNA, 19 nt, Artificial Sequence
  Description of Artificial Sequence: Synthetic oligonucleotide
agucgucuaaguucuaacc

SEQ ID NO: 596913 - RNA, 19 nt, Artificial Sequence
  Description of Artificial Sequence: Synthetic oligonucleotide
aaauugcugauguugaaau

SEQ ID NO: 596914 - RNA, 19 nt, Artificial Sequence
  Description of Artificial Sequence: Synthetic oligonucleotide
aggaauuagggauuugggg

SEQ ID NO: 596915 - RNA, 19 nt, Artificial Sequence
  Description of Artificial Sequence: Synthetic oligonucleotide
aguguggacuagcugagcc

SEQ ID NO: 596916 - RNA, 19 nt, Artificial Sequence
  Description of Artificial Sequence: Synthetic oligonucleotide
ugggaguaaggaauuaggg

SEQ ID NO: 596917 - RNA, 19 nt, Artificial Sequence
  Description of Artificial Sequence: Synthetic oligonucleotide
gguauuuuccacuagguug

SEQ ID NO: 596918 - RNA, 19 nt, Artificial Sequence
  Description of Artificial Sequence: Synthetic oligonucleotide
ucuuagucgucuaaguucu

SEQ ID NO: 596919 - RNA, 19 nt, Artificial Sequence
  Description of Artificial Sequence: Synthetic oligonucleotide
uugaaccuggagcagaaag

SEQ ID NO: 596920 - RNA, 19 nt, Artificial Sequence
  Description of Artificial Sequence: Synthetic oligonucleotide
aaguucuaaccuuaagucu

SEQ ID NO: 596921 - RNA, 19 nt, Artificial Sequence
  Description of Artificial Sequence: Synthetic oligonucleotide
gaaacgacccacuuuguug

SEQ ID NO: 596922 - RNA, 19 nt, Artificial Sequence
  Description of Artificial Sequence: Synthetic oligonucleotide
uuacacugagcucuugggg

SEQ ID NO: 596923 - RNA, 19 nt, Artificial Sequence
  Description of Artificial Sequence: Synthetic oligonucleotide
ugaaugaauuacuaaggcu

SEQ ID NO: 596924 - RNA, 19 nt, Artificial Sequence
  Description of Artificial Sequence: Synthetic oligonucleotide
aacucugguaacaaggcuc

SEQ ID NO: 596925 - RNA, 19 nt, Artificial Sequence
  Description of Artificial Sequence: Synthetic oligonucleotide
auugucacuacucauguaa

SEQ ID NO: 596926 - RNA, 19 nt, Artificial Sequence
  Description of Artificial Sequence: Synthetic oligonucleotide
ucacuacucauguaagagg

SEQ ID NO: 596927 - RNA, 19 nt, Artificial Sequence
  Description of Artificial Sequence: Synthetic oligonucleotide
uguaccccuacugagaaag

SEQ ID NO: 596928 - RNA, 19 nt, Artificial Sequence
  Description of Artificial Sequence: Synthetic oligonucleotide
ucuuaacaacaccagcucc

SEQ ID NO: 596929 - RNA, 19 nt, Artificial Sequence
  Description of Artificial Sequence: Synthetic oligonucleotide
ucuugugggaguaaggaau

SEQ ID NO: 596930 - RNA, 19 nt, Artificial Sequence
  Description of Artificial Sequence: Synthetic oligonucleotide
auaggcuacuuccccaacc

SEQ ID NO: 596931 - RNA, 19 nt, Artificial Sequence
  Description of Artificial Sequence: Synthetic oligonucleotide
uuugguauacaaagauuca

SEQ ID NO: 596932 - RNA, 19 nt, Artificial Sequence
  Description of Artificial Sequence: Synthetic oligonucleotide
uaguuguccaacaacauuu

SEQ ID NO: 596933 - RNA, 19 nt, Artificial Sequence
  Description of Artificial Sequence: Synthetic oligonucleotide
accguaauagucucuggac

SEQ ID NO: 596934 - RNA, 19 nt, Artificial Sequence
  Description of Artificial Sequence: Synthetic oligonucleotide
uccgccuucuuccugacag

SEQ ID NO: 596935 - RNA, 19 nt, Artificial Sequence
  Description of Artificial Sequence: Synthetic oligonucleotide
gaugggaaggcucuuugag

SEQ ID NO: 596936 - RNA, 19 nt, Artificial Sequence
  Description of Artificial Sequence: Synthetic oligonucleotide
uggggaauauguaaaauua

SEQ ID NO: 596937 - RNA, 19 nt, Artificial Sequence
  Description of Artificial Sequence: Synthetic oligonucleotide
ucuaaguucuaaccuuaag

SEQ ID NO: 596938 - RNA, 19 nt, Artificial Sequence
  Description of Artificial Sequence: Synthetic oligonucleotide
gagaguguggacuagcuga

SEQ ID NO: 596939 - RNA, 19 nt, Artificial Sequence
  Description of Artificial Sequence: Synthetic oligonucleotide
agaacuuccuugccauucc

SEQ ID NO: 596940 - RNA, 19 nt, Artificial Sequence
  Description of Artificial Sequence: Synthetic oligonucleotide
acuacuugcuaggacaugg

SEQ ID NO: 596941 - RNA, 19 nt, Artificial Sequence
  Description of Artificial Sequence: Synthetic oligonucleotide
accucuuaacaacaccagc

SEQ ID NO: 596942 - RNA, 19 nt, Artificial Sequence
  Description of Artificial Sequence: Synthetic oligonucleotide
agauucauggcaucccggg

SEQ ID NO: 596943 - RNA, 19 nt, Artificial Sequence
  Description of Artificial Sequence: Synthetic oligonucleotide
auaaccaguuaaaugcagc

SEQ ID NO: 596944 - RNA, 19 nt, Artificial Sequence
  Description of Artificial Sequence: Synthetic oligonucleotide
uaauucauguguccuuugc

SEQ ID NO: 596945 - RNA, 19 nt, Artificial Sequence
  Description of Artificial Sequence: Synthetic oligonucleotide
uggaggaauaaugacagca

SEQ ID NO: 596946 - RNA, 19 nt, Artificial Sequence
  Description of Artificial Sequence: Synthetic oligonucleotide
uaaagcauuaaugaccuau

SEQ ID NO: 596947 - RNA, 19 nt, Artificial Sequence
  Description of Artificial Sequence: Synthetic oligonucleotide
uuuaagaugcuuuucucuu

SEQ ID NO: 596948 - RNA, 19 nt, Artificial Sequence
  Description of Artificial Sequence: Synthetic oligonucleotide
uuuuccacuagguuguaaa

SEQ ID NO: 596949 - RNA, 19 nt, Artificial Sequence
  Description of Artificial Sequence: Synthetic oligonucleotide
aaugugcccuuccuacugg

SEQ ID NO: 596950 - RNA, 19 nt, Artificial Sequence
  Description of Artificial Sequence: Synthetic oligonucleotide
cuaaccuuaagucuucauc

SEQ ID NO: 596951 - RNA, 19 nt, Artificial Sequence
  Description of Artificial Sequence: Synthetic oligonucleotide
aagggcucaaaauaguauu

SEQ ID NO: 596952 - RNA, 19 nt, Artificial Sequence
  Description of Artificial Sequence: Synthetic oligonucleotide
accaguuaaaugcagcacu

SEQ ID NO: 596953 - RNA, 19 nt, Artificial Sequence
  Description of Artificial Sequence: Synthetic oligonucleotide
uuaguauauaggcuacuuc

SEQ ID NO: 596954 - RNA, 19 nt, Artificial Sequence
  Description of Artificial Sequence: Synthetic oligonucleotide
auucuaagggcucaaaaua

SEQ ID NO: 596955 - RNA, 19 nt, Artificial Sequence
  Description of Artificial Sequence: Synthetic oligonucleotide
guaguuaguauauaggcua

SEQ ID NO: 596956 - RNA, 19 nt, Artificial Sequence
  Description of Artificial Sequence: Synthetic oligonucleotide
acuggugaaggcugaauag

SEQ ID NO: 596957 - RNA, 19 nt, Artificial Sequence
  Description of Artificial Sequence: Synthetic oligonucleotide
uccugaacuacuugcuagg

SEQ ID NO: 596958 - RNA, 19 nt, Artificial Sequence
  Description of Artificial Sequence: Synthetic oligonucleotide
uauauaucacaguguuucc

SEQ ID NO: 596959 - RNA, 19 nt, Artificial Sequence
  Description of Artificial Sequence: Synthetic oligonucleotide
cucuuagucgucuaaguuc

SEQ ID NO: 596960 - RNA, 19 nt, Artificial Sequence
  Description of Artificial Sequence: Synthetic oligonucleotide
aaugaauuacuaaggcucu

SEQ ID NO: 596961 - RNA, 19 nt, Artificial Sequence
  Description of Artificial Sequence: Synthetic oligonucleotide
ugacuaagugguccguagg

SEQ ID NO: 596962 - RNA, 19 nt, Artificial Sequence
  Description of Artificial Sequence: Synthetic oligonucleotide
caaaguuacauguccucag

SEQ ID NO: 596963 - RNA, 19 nt, Artificial Sequence
  Description of Artificial Sequence: Synthetic oligonucleotide
guaguugucaccucuuaac

SEQ ID NO: 596964 - RNA, 19 nt, Artificial Sequence
  Description of Artificial Sequence: Synthetic oligonucleotide
auggacuucugcaaauugc

SEQ ID NO: 596965 - RNA, 19 nt, Artificial Sequence
  Description of Artificial Sequence: Synthetic oligonucleotide
uuuguuuuaaggugugcau

SEQ ID NO: 596966 - RNA, 19 nt, Artificial Sequence
  Description of Artificial Sequence: Synthetic oligonucleotide
guugucaccucuuaacaac

SEQ ID NO: 596967 - RNA, 19 nt, Artificial Sequence
  Description of Artificial Sequence: Synthetic oligonucleotide
ggaauuagggauuugggga

SEQ ID NO: 596968 - RNA, 19 nt, Artificial Sequence
  Description of Artificial Sequence: Synthetic oligonucleotide
guauauaggcuacuucccc

SEQ ID NO: 596969 - RNA, 19 nt, Artificial Sequence
  Description of Artificial Sequence: Synthetic oligonucleotide
cccacugacagauacauag

SEQ ID NO: 596970 - RNA, 19 nt, Artificial Sequence
  Description of Artificial Sequence: Synthetic oligonucleotide
accuauauaagaaaggguu

SEQ ID NO: 596971 - RNA, 19 nt, Artificial Sequence
  Description of Artificial Sequence: Synthetic oligonucleotide
aacgucauuguuuucccua

SEQ ID NO: 596972 - RNA, 19 nt, Artificial Sequence
  Description of Artificial Sequence: Synthetic oligonucleotide
gauggacuucugcaaauug

SEQ ID NO: 596973 - RNA, 19 nt, Artificial Sequence
  Description of Artificial Sequence: Synthetic oligonucleotide
gucacuacucauguaagag

SEQ ID NO: 596974 - RNA, 19 nt, Artificial Sequence
  Description of Artificial Sequence: Synthetic oligonucleotide
ugguccguagguuggaacc

SEQ ID NO: 596975 - RNA, 19 nt, Artificial Sequence
  Description of Artificial Sequence: Synthetic oligonucleotide
aagugaccuagagagguag

SEQ ID NO: 596976 - RNA, 19 nt, Artificial Sequence
  Description of Artificial Sequence: Synthetic oligonucleotide
uuuucccuaauugcuaaug

SEQ ID NO: 596977 - RNA, 19 nt, Artificial Sequence
  Description of Artificial Sequence: Synthetic oligonucleotide
uuccacuagguuguaaaag

SEQ ID NO: 596978 - RNA, 19 nt, Artificial Sequence
  Description of Artificial Sequence: Synthetic oligonucleotide
  modified_base (2)..(2): a, c, u, g, unknown or other
anccuuuugaaagcugugu

SEQ ID NO: 596979 - RNA, 19 nt, Artificial Sequence
  Description of Artificial Sequence: Synthetic oligonucleotide
aagcauuaaugaccuauau

SEQ ID NO: 596980 - RNA, 19 nt, Artificial Sequence
  Description of Artificial Sequence: Synthetic oligonucleotide
augaccuauauaagaaagg

SEQ ID NO: 596981 - RNA, 19 nt, Artificial Sequence
  Description of Artificial Sequence: Synthetic oligonucleotide
uaguuaguauauaggcuac

SEQ ID NO: 596982 - RNA, 19 nt, Artificial Sequence
  Description of Artificial Sequence: Synthetic oligonucleotide
gaaugugcccuuccuacug

SEQ ID NO: 596983 - RNA, 19 nt, Artificial Sequence
  Description of Artificial Sequence: Synthetic oligonucleotide
uacuugcuaggacauggcc

SEQ ID NO: 596984 - RNA, 19 nt, Artificial Sequence
  Description of Artificial Sequence: Synthetic oligonucleotide
cauucuugugggaguaagg

SEQ ID NO: 596985 - RNA, 19 nt, Artificial Sequence
  Description of Artificial Sequence: Synthetic oligonucleotide
ucuguaccccuacugagaa

SEQ ID NO: 596986 - RNA, 19 nt, Artificial Sequence
  Description of Artificial Sequence: Synthetic oligonucleotide
uuccuugccauuccagggc

SEQ ID NO: 596987 - RNA, 19 nt, Artificial Sequence
  Description of Artificial Sequence: Synthetic oligonucleotide
uugguacugaaauggcacc

SEQ ID NO: 596988 - RNA, 19 nt, Artificial Sequence
  Description of Artificial Sequence: Synthetic oligonucleotide
gugaaugugcccuuccuac

SEQ ID NO: 596989 - RNA, 19 nt, Artificial Sequence
  Description of Artificial Sequence: Synthetic oligonucleotide
aguaguuaguauauaggcu

SEQ ID NO: 596990 - RNA, 19 nt, Artificial Sequence
  Description of Artificial Sequence: Synthetic oligonucleotide
uucuggcaagaaauaacca

SEQ ID NO: 596991 - RNA, 19 nt, Artificial Sequence
  Description of Artificial Sequence: Synthetic oligonucleotide
aggucaucugugaaugugc

SEQ ID NO: 596992 - RNA, 19 nt, Artificial Sequence
  Description of Artificial Sequence: Synthetic oligonucleotide
cacuacucauguaagagga

SEQ ID NO: 596993 - RNA, 19 nt, Artificial Sequence
  Description of Artificial Sequence: Synthetic oligonucleotide
aucacaguguuuccacauc

SEQ ID NO: 596994 - RNA, 19 nt, Artificial Sequence
  Description of Artificial Sequence: Synthetic oligonucleotide
cuaauugcuaaugcugcag

SEQ ID NO: 596995 - RNA, 19 nt, Artificial Sequence
  Description of Artificial Sequence: Synthetic oligonucleotide
uagggguuuagcuuacacu

SEQ ID NO: 596996 - RNA, 19 nt, Artificial Sequence
  Description of Artificial Sequence: Synthetic oligonucleotide
augucaccguaauagucuc

SEQ ID NO: 596997 - RNA, 19 nt, Artificial Sequence
  Description of Artificial Sequence: Synthetic oligonucleotide
uugguauacaaagauucaa

SEQ ID NO: 596998 - RNA, 19 nt, Artificial Sequence
  Description of Artificial Sequence: Synthetic oligonucleotide
aggacugacugguggguac

SEQ ID NO: 596999 - RNA, 19 nt, Artificial Sequence
  Description of Artificial Sequence: Synthetic oligonucleotide
uacuaaggcucugacuuag

SEQ ID NO: 597000 - RNA, 19 nt, Artificial Sequence
  Description of Artificial Sequence: Synthetic oligonucleotide
uguccucgguucuugaaac

SEQ ID NO: 597001 - RNA, 19 nt, Artificial Sequence
  Description of Artificial Sequence: Synthetic oligonucleotide
agugggaaagaaccuuuug

SEQ ID NO: 597002 - RNA, 19 nt, Artificial Sequence
  Description of Artificial Sequence: Synthetic oligonucleotide
uuaagcgcucuacccacug

SEQ ID NO: 597003 - RNA, 19 nt, Artificial Sequence
  Description of Artificial Sequence: Synthetic oligonucleotide
cuagcccuaggacugacug

SEQ ID NO: 597004 - RNA, 19 nt, Artificial Sequence
  Description of Artificial Sequence: Synthetic oligonucleotide
ggucccuugaaccuggagc

SEQ ID NO: 597005 - RNA, 19 nt, Artificial Sequence
  Description of Artificial Sequence: Synthetic oligonucleotide
aacuugugcaggucaucug

SEQ ID NO: 597006 - RNA, 19 nt, Artificial Sequence
  Description of Artificial Sequence: Synthetic oligonucleotide
acuuggugaagugaccuag

SEQ ID NO: 597007 - RNA, 19 nt, Artificial Sequence
  Description of Artificial Sequence: Synthetic oligonucleotide
uaagaggaguugaaugaau

SEQ ID NO: 597008 - RNA, 19 nt, Artificial Sequence
  Description of Artificial Sequence: Synthetic oligonucleotide
agcauuaaugaccuauaua

SEQ ID NO: 597009 - RNA, 19 nt, Artificial Sequence
  Description of Artificial Sequence: Synthetic oligonucleotide
cugacuaagugguccguag

SEQ ID NO: 597010 - RNA, 19 nt, Artificial Sequence
  Description of Artificial Sequence: Synthetic oligonucleotide
cuuagauucuggaugggaa

SEQ ID NO: 597011 - RNA, 19 nt, Artificial Sequence
  Description of Artificial Sequence: Synthetic oligonucleotide
uggaaaugcacagcugccc

SEQ ID NO: 597012 - RNA, 19 nt, Artificial Sequence
  Description of Artificial Sequence: Synthetic oligonucleotide
gauuuggggaauauguaaa

SEQ ID NO: 597013 - RNA, 19 nt, Artificial Sequence
  Description of Artificial Sequence: Synthetic oligonucleotide
uuguccucgguucuugaaa

SEQ ID NO: 597014 - RNA, 19 nt, Artificial Sequence
  Description of Artificial Sequence: Synthetic oligonucleotide
uggacuagcugagccaucc

SEQ ID NO: 597015 - RNA, 19 nt, Artificial Sequence
  Description of Artificial Sequence: Synthetic oligonucleotide
aaaggguugcaaccccagu

SEQ ID NO: 597016 - RNA, 19 nt, Artificial Sequence
  Description of Artificial Sequence: Synthetic oligonucleotide
ccagcauuccauuuugugc

SEQ ID NO: 597017 - RNA, 19 nt, Artificial Sequence
  Description of Artificial Sequence: Synthetic oligonucleotide
gaguugaaugaauuacuaa

SEQ ID NO: 597018 - RNA, 19 nt, Artificial Sequence
  Description of Artificial Sequence: Synthetic oligonucleotide
ugguauuuuccacuagguu

SEQ ID NO: 597019 - RNA, 19 nt, Artificial Sequence
  Description of Artificial Sequence: Synthetic oligonucleotide
ucgucuaaguucuaaccuu

SEQ ID NO: 597020 - RNA, 19 nt, Artificial Sequence
  Description of Artificial Sequence: Synthetic oligonucleotide
  modified_base (7)..(7): a, c, u, g, unknown or other
gugccanccuuuugaaagc

SEQ ID NO: 597021 - RNA, 19 nt, Artificial Sequence
  Description of Artificial Sequence: Synthetic oligonucleotide
gucccuugaaccuggagca

SEQ ID NO: 597022 - RNA, 19 nt, Artificial Sequence
  Description of Artificial Sequence: Synthetic oligonucleotide
gugugaaccuuuuaaaccu

SEQ ID NO: 597023 - RNA, 19 nt, Artificial Sequence
  Description of Artificial Sequence: Synthetic oligonucleotide
aaccuuaagucuucaucuu

SEQ ID NO: 597024 - RNA, 19 nt, Artificial Sequence
  Description of Artificial Sequence: Synthetic oligonucleotide
ugcagcacuaguaguuagu

SEQ ID NO: 597025 - RNA, 19 nt, Artificial Sequence
  Description of Artificial Sequence: Synthetic oligonucleotide
caacaacauuuauauauca

SEQ ID NO: 597026 - RNA, 19 nt, Artificial Sequence
  Description of Artificial Sequence: Synthetic oligonucleotide
agaggaguugaaugaauua

SEQ ID NO: 597027 - RNA, 19 nt, Artificial Sequence
  Description of Artificial Sequence: Synthetic oligonucleotide
ccuauauaagaaaggguug

SEQ ID NO: 597028 - RNA, 19 nt, Artificial Sequence
  Description of Artificial Sequence: Synthetic oligonucleotide
aagagggcccguucagaug

SEQ ID NO: 597029 - RNA, 19 nt, Artificial Sequence
  Description of Artificial Sequence: Synthetic oligonucleotide
uccuacagguuggaacugg

SEQ ID NO: 597030 - RNA, 19 nt, Artificial Sequence
  Description of Artificial Sequence: Synthetic oligonucleotide
ggaguaaggaauuagggau

SEQ ID NO: 597031 - RNA, 19 nt, Artificial Sequence
  Description of Artificial Sequence: Synthetic oligonucleotide
gaugucaccguaauagucu

SEQ ID NO: 597032 - RNA, 19 nt, Artificial Sequence
  Description of Artificial Sequence: Synthetic oligonucleotide
cuggcgacucugcaggucc

SEQ ID NO: 597033 - RNA, 19 nt, Artificial Sequence
  Description of Artificial Sequence: Synthetic oligonucleotide
cuacagguuggaacuggcc

SEQ ID NO: 597034 - RNA, 19 nt, Artificial Sequence
  Description of Artificial Sequence: Synthetic oligonucleotide
acucauguaagaggaguug

SEQ ID NO: 597035 - RNA, 19 nt, Artificial Sequence
  Description of Artificial Sequence: Synthetic oligonucleotide
aaugcagcacuaguaguua

SEQ ID NO: 597036 - RNA, 19 nt, Artificial Sequence
  Description of Artificial Sequence: Synthetic oligonucleotide
gucauggaaaugcacagcu

SEQ ID NO: 597037 - RNA, 19 nt, Artificial Sequence
  Description of Artificial Sequence: Synthetic oligonucleotide
cagaugggaaggcucuucc

SEQ ID NO: 597038 - RNA, 19 nt, Artificial Sequence
  Description of Artificial Sequence: Synthetic oligonucleotide
  modified_base (3)..(3): a, c, u, g, unknown or other
canccuuuugaaagcugug

SEQ ID NO: 597039 - RNA, 19 nt, Artificial Sequence
  Description of Artificial Sequence: Synthetic oligonucleotide
guagggaucagagugggaa

SEQ ID NO: 597040 - RNA, 19 nt, Artificial Sequence
  Description of Artificial Sequence: Synthetic oligonucleotide
uccccugguauuuuccacu

SEQ ID NO: 597041 - RNA, 19 nt, Artificial Sequence
  Description of Artificial Sequence: Synthetic oligonucleotide
cuacuugcuaggacauggc

SEQ ID NO: 597042 - RNA, 19 nt, Artificial Sequence
  Description of Artificial Sequence: Synthetic oligonucleotide
agucucaggcagccccucc

SEQ ID NO: 597043 - RNA, 19 nt, Artificial Sequence
  Description of Artificial Sequence: Synthetic oligonucleotide
acuugcuaggacauggccu

SEQ ID NO: 597044 - RNA, 19 nt, Artificial Sequence
  Description of Artificial Sequence: Synthetic oligonucleotide
cuuaacaacaccagcuccu

SEQ ID NO: 597045 - RNA, 19 nt, Artificial Sequence
  Description of Artificial Sequence: Synthetic oligonucleotide
cugaacuacuugcuaggac

SEQ ID NO: 597046 - RNA, 19 nt, Artificial Sequence
  Description of Artificial Sequence: Synthetic oligonucleotide
ugguacugaaauggcacca

SEQ ID NO: 597047 - RNA, 19 nt, Artificial Sequence
  Description of Artificial Sequence: Synthetic oligonucleotide
gggaacgucauuguuuucc

SEQ ID NO: 597048 - RNA, 19 nt, Artificial Sequence
  Description of Artificial Sequence: Synthetic oligonucleotide
cccuaauugcuaaugcugc

SEQ ID NO: 597049 - RNA, 19 nt, Artificial Sequence
  Description of Artificial Sequence: Synthetic oligonucleotide
ggaggaauaaugacagcag

SEQ ID NO: 597050 - RNA, 19 nt, Artificial Sequence
  Description of Artificial Sequence: Synthetic oligonucleotide
gucaccguaauagucucug

SEQ ID NO: 597051 - RNA, 19 nt, Artificial Sequence
  Description of Artificial Sequence: Synthetic oligonucleotide
cauuuauauaucacagugu

SEQ ID NO: 597052 - RNA, 19 nt, Artificial Sequence
  Description of Artificial Sequence: Synthetic oligonucleotide
augcagcacuaguaguuag

SEQ ID NO: 597053 - RNA, 19 nt, Artificial Sequence
  Description of Artificial Sequence: Synthetic oligonucleotide
gaaguuccacucugaccag

SEQ ID NO: 597054 - RNA, 19 nt, Artificial Sequence
  Description of Artificial Sequence: Synthetic oligonucleotide
ugugugugugugaaccuuu

SEQ ID NO: 597055 - RNA, 19 nt, Artificial Sequence
  Description of Artificial Sequence: Synthetic oligonucleotide
uguggacuagcugagccau

SEQ ID NO: 597056 - RNA, 19 nt, Artificial Sequence
  Description of Artificial Sequence: Synthetic oligonucleotide
agccacccagguuugaggu

SEQ ID NO: 597057 - RNA, 19 nt, Artificial Sequence
  Description of Artificial Sequence: Synthetic oligonucleotide
cuuccuacuggaagucaug

SEQ ID NO: 597058 - RNA, 19 nt, Artificial Sequence
  Description of Artificial Sequence: Synthetic oligonucleotide
agaaacgacccacuuuguu

SEQ ID NO: 597059 - RNA, 19 nt, Artificial Sequence
  Description of Artificial Sequence: Synthetic oligonucleotide
ugugaaccuuuuaaaccuu

SEQ ID NO: 597060 - RNA, 19 nt, Artificial Sequence
  Description of Artificial Sequence: Synthetic oligonucleotide
agugaccuagagagguagc

SEQ ID NO: 597061 - RNA, 19 nt, Artificial Sequence
  Description of Artificial Sequence: Synthetic oligonucleotide
ggaacgucauuguuuuccc

SEQ ID NO: 597062 - RNA, 19 nt, Artificial Sequence
  Description of Artificial Sequence: Synthetic oligonucleotide
cauucuaagggcucaaaau

SEQ ID NO: 597063 - RNA, 19 nt, Artificial Sequence
  Description of Artificial Sequence: Synthetic oligonucleotide
gucgucuaaguucuaaccu

SEQ ID NO: 597064 - RNA, 19 nt, Artificial Sequence
  Description of Artificial Sequence: Synthetic oligonucleotide
agaguguggacuagcugag

SEQ ID NO: 597065 - RNA, 19 nt, Artificial Sequence
  Description of Artificial Sequence: Synthetic oligonucleotide
uuacuaaggcucugacuua

SEQ ID NO: 597066 - RNA, 19 nt, Artificial Sequence
  Description of Artificial Sequence: Synthetic oligonucleotide
cacuagguuguaaaaggaa

SEQ ID NO: 597067 - RNA, 19 nt, Artificial Sequence
  Description of Artificial Sequence: Synthetic oligonucleotide
ccuaggacugacugguggg

SEQ ID NO: 597068 - RNA, 19 nt, Artificial Sequence
  Description of Artificial Sequence: Synthetic oligonucleotide
aguuaguauauaggcuacu

SEQ ID NO: 597069 - RNA, 19 nt, Artificial Sequence
  Description of Artificial Sequence: Synthetic oligonucleotide
cucauguaagaggaguuga

SEQ ID NO: 597070 - RNA, 19 nt, Artificial Sequence
  Description of Artificial Sequence: Synthetic oligonucleotide
ucuagcccuaggacugacu

SEQ ID NO: 597071 - RNA, 19 nt, Artificial Sequence
  Description of Artificial Sequence: Synthetic oligonucleotide
ugucaccguaauagucucu

SEQ ID NO: 597072 - RNA, 19 nt, Artificial Sequence
  Description of Artificial Sequence: Synthetic oligonucleotide
augaauuacuaaggcucug

SEQ ID NO: 597073 - RNA, 19 nt, Artificial Sequence
  Description of Artificial Sequence: Synthetic oligonucleotide
guuccacuccacugagugc

SEQ ID NO: 597074 - RNA, 19 nt, Artificial Sequence
  Description of Artificial Sequence: Synthetic oligonucleotide
caccguaauagucucugga

SEQ ID NO: 597075 - RNA, 19 nt, Artificial Sequence
  Description of Artificial Sequence: Synthetic oligonucleotide
ugagcucuuggggaacucu

SEQ ID NO: 597076 - RNA, 19 nt, Artificial Sequence
  Description of Artificial Sequence: Synthetic oligonucleotide
ggaaaugcacagcugccca

SEQ ID NO: 597077 - RNA, 19 nt, Artificial Sequence
  Description of Artificial Sequence: Synthetic oligonucleotide
aacgacccacuuuguugcu

SEQ ID NO: 597078 - RNA, 19 nt, Artificial Sequence
  Description of Artificial Sequence: Synthetic oligonucleotide
cuggaggaauaaugacagc

SEQ ID NO: 597079 - RNA, 19 nt, Artificial Sequence
  Description of Artificial Sequence: Synthetic oligonucleotide
ugcagaugucaccguaaua

SEQ ID NO: 597080 - RNA, 19 nt, Artificial Sequence
  Description of Artificial Sequence: Synthetic oligonucleotide
gguacagaacaggaaagca

SEQ ID NO: 597081 - RNA, 19 nt, Artificial Sequence
  Description of Artificial Sequence: Synthetic oligonucleotide
guacugaaauggcaccauc

SEQ ID NO: 597082 - RNA, 19 nt, Artificial Sequence
  Description of Artificial Sequence: Synthetic oligonucleotide
  modified_base (6)..(6): a, c, u, g, unknown or other
ugccanccuuuugaaagcu

SEQ ID NO: 597083 - RNA, 19 nt, Artificial Sequence
  Description of Artificial Sequence: Synthetic oligonucleotide
ugggaaggcucuuccugcu

SEQ ID NO: 597084 - RNA, 19 nt, Artificial Sequence
  Description of Artificial Sequence: Synthetic oligonucleotide
ccuggcuacucacuguucc

SEQ ID NO: 597085 - RNA, 19 nt, Artificial Sequence
  Description of Artificial Sequence: Synthetic oligonucleotide
gguugugcccagucucugg

SEQ ID NO: 597086 - RNA, 19 nt, Artificial Sequence
  Description of Artificial Sequence: Synthetic oligonucleotide
cagguuugaggucauggaa

SEQ ID NO: 597087 - RNA, 19 nt, Artificial Sequence
  Description of Artificial Sequence: Synthetic oligonucleotide
ggcccguucagaugggaag

SEQ ID NO: 597088 - RNA, 19 nt, Artificial Sequence
  Description of Artificial Sequence: Synthetic oligonucleotide
caguugucuaccaacuugu

SEQ ID NO: 597089 - RNA, 19 nt, Artificial Sequence
  Description of Artificial Sequence: Synthetic oligonucleotide
gaccuauauaagaaagggu

SEQ ID NO: 597090 - RNA, 19 nt, Artificial Sequence
  Description of Artificial Sequence: Synthetic oligonucleotide
ucugacuaagugguccgua

SEQ ID NO: 597091 - RNA, 19 nt, Artificial Sequence
  Description of Artificial Sequence: Synthetic oligonucleotide
gugaccuagagagguagca

SEQ ID NO: 597092 - RNA, 19 nt, Artificial Sequence
  Description of Artificial Sequence: Synthetic oligonucleotide
ccaacgguauuugugcugc

SEQ ID NO: 597093 - RNA, 19 nt, Artificial Sequence
  Description of Artificial Sequence: Synthetic oligonucleotide
agaaaggguugcaacccca

SEQ ID NO: 597094 - RNA, 19 nt, Artificial Sequence
  Description of Artificial Sequence: Synthetic oligonucleotide
cuuggugaagugaccuaga

SEQ ID NO: 597095 - RNA, 19 nt, Artificial Sequence
  Description of Artificial Sequence: Synthetic oligonucleotide
accccuacugagaaaggca

SEQ ID NO: 597096 - RNA, 19 nt, Artificial Sequence
  Description of Artificial Sequence: Synthetic oligonucleotide
acuaagugguccguagguu

SEQ ID NO: 597097 - RNA, 19 nt, Artificial Sequence
  Description of Artificial Sequence: Synthetic oligonucleotide
guaauagucucuggacuaa

SEQ ID NO: 597098 - RNA, 19 nt, Artificial Sequence
  Description of Artificial Sequence: Synthetic oligonucleotide
guucuaaccuuaagucuuc

SEQ ID NO: 597099 - RNA, 19 nt, Artificial Sequence
  Description of Artificial Sequence: Synthetic oligonucleotide
cugguauuuuccacuaggu

SEQ ID NO: 597100 - RNA, 19 nt, Artificial Sequence
  Description of Artificial Sequence: Synthetic oligonucleotide
agaagagggcccguucaga

SEQ ID NO: 597101 - RNA, 19 nt, Artificial Sequence
  Description of Artificial Sequence: Synthetic oligonucleotide
gcauucuugugggaguaag

SEQ ID NO: 597102 - RNA, 19 nt, Artificial Sequence
  Description of Artificial Sequence: Synthetic oligonucleotide
uuccuacagguuggaacug

SEQ ID NO: 597103 - RNA, 19 nt, Artificial Sequence
  Description of Artificial Sequence: Synthetic oligonucleotide
gucuccgccuucuuccuga

SEQ ID NO: 597104 - RNA, 19 nt, Artificial Sequence
  Description of Artificial Sequence: Synthetic oligonucleotide
cuugcuaggacauggccuu

SEQ ID NO: 597105 - RNA, 19 nt, Artificial Sequence
  Description of Artificial Sequence: Synthetic oligonucleotide
gugguccguagguuggaac

SEQ ID NO: 597106 - RNA, 19 nt, Artificial Sequence
  Description of Artificial Sequence: Synthetic oligonucleotide
uccugccugaaagauucau

SEQ ID NO: 597107 - RNA, 19 nt, Artificial Sequence
  Description of Artificial Sequence: Synthetic oligonucleotide
uucugacuaagugguccgu

SEQ ID NO: 597108 - RNA, 19 nt, Artificial Sequence
  Description of Artificial Sequence: Synthetic oligonucleotide
ccuacagguuggaacuggc

SEQ ID NO: 597109 - RNA, 19 nt, Artificial Sequence
  Description of Artificial Sequence: Synthetic oligonucleotide
ccucuuaacaacaccagcu

SEQ ID NO: 597110 - RNA, 19 nt, Artificial Sequence
  Description of Artificial Sequence: Synthetic oligonucleotide
agggcucaaaauaguauua

SEQ ID NO: 597111 - RNA, 19 nt, Artificial Sequence
  Description of Artificial Sequence: Synthetic oligonucleotide
ugguugugcccagucucug

SEQ ID NO: 597112 - RNA, 19 nt, Artificial Sequence
  Description of Artificial Sequence: Synthetic oligonucleotide
gacagauacauagggguuu

SEQ ID NO: 597113 - RNA, 19 nt, Artificial Sequence
  Description of Artificial Sequence: Synthetic oligonucleotide
guaccccuacugagaaagg

SEQ ID NO: 597114 - RNA, 19 nt, Artificial Sequence
  Description of Artificial Sequence: Synthetic oligonucleotide
guuaguauauaggcuacuu

SEQ ID NO: 597115 - RNA, 19 nt, Artificial Sequence
  Description of Artificial Sequence: Synthetic oligonucleotide
gauggcuuaagaggcugua

SEQ ID NO: 597116 - RNA, 19 nt, Artificial Sequence
  Description of Artificial Sequence: Synthetic oligonucleotide
ccaaaucuauucaguuaac

SEQ ID NO: 597117 - RNA, 19 nt, Artificial Sequence
  Description of Artificial Sequence: Synthetic oligonucleotide
guaucacagcaggacuuac

SEQ ID NO: 597118 - RNA, 19 nt, Artificial Sequence
  Description of Artificial Sequence: Synthetic oligonucleotide
gcccguucagaugggaagg

SEQ ID NO: 597119 - RNA, 19 nt, Artificial Sequence
  Description of Artificial Sequence: Synthetic oligonucleotide
gucauuguuuucccuaauu

SEQ ID NO: 597120 - RNA, 19 nt, Artificial Sequence
  Description of Artificial Sequence: Synthetic oligonucleotide
gaguaggguagggaucaga

SEQ ID NO: 597121 - RNA, 19 nt, Artificial Sequence
  Description of Artificial Sequence: Synthetic oligonucleotide
auuaagcgcucuacccacu

SEQ ID NO: 597122 - RNA, 19 nt, Artificial Sequence
  Description of Artificial Sequence: Synthetic oligonucleotide
uaggacugacuggugggua

SEQ ID NO: 597123 - RNA, 19 nt, Artificial Sequence
  Description of Artificial Sequence: Synthetic oligonucleotide
uagcuuacacugagcucuu

SEQ ID NO: 597124 - RNA, 19 nt, Artificial Sequence
  Description of Artificial Sequence: Synthetic oligonucleotide
gaacgucauuguuuucccu

SEQ ID NO: 597125 - RNA, 19 nt, Artificial Sequence
  Description of Artificial Sequence: Synthetic oligonucleotide
guaggguagggaucagagu

SEQ ID NO: 597126 - RNA, 19 nt, Artificial Sequence
  Description of Artificial Sequence: Synthetic oligonucleotide
gcuaggacauggccuucag

SEQ ID NO: 597127 - RNA, 19 nt, Artificial Sequence
  Description of Artificial Sequence: Synthetic oligonucleotide
cagggaacgucauuguuuu

SEQ ID NO: 597128 - RNA, 19 nt, Artificial Sequence
  Description of Artificial Sequence: Synthetic oligonucleotide
guugcaaccccaguccccu

SEQ ID NO: 597129 - RNA, 19 nt, Artificial Sequence
  Description of Artificial Sequence: Synthetic oligonucleotide
cuaaggcucugacuuagau

SEQ ID NO: 597130 - RNA, 19 nt, Artificial Sequence
  Description of Artificial Sequence: Synthetic oligonucleotide
acgacccacuuuguugcug

SEQ ID NO: 597131 - RNA, 19 nt, Artificial Sequence
  Description of Artificial Sequence: Synthetic oligonucleotide
ccuaauugcuaaugcugca

SEQ ID NO: 597132 - RNA, 19 nt, Artificial Sequence
  Description of Artificial Sequence: Synthetic oligonucleotide
gaagugaccuagagaggua

SEQ ID NO: 597133 - RNA, 19 nt, Artificial Sequence
  Description of Artificial Sequence: Synthetic oligonucleotide
agguuaccugaaagggucu

SEQ ID NO: 597134 - RNA, 19 nt, Artificial Sequence
  Description of Artificial Sequence: Synthetic oligonucleotide
ccagguuugaggucaugga

SEQ ID NO: 597135 - RNA, 19 nt, Artificial Sequence
  Description of Artificial Sequence: Synthetic oligonucleotide
uugcaaccccaguccccug

SEQ ID NO: 597136 - RNA, 19 nt, Artificial Sequence
  Description of Artificial Sequence: Synthetic oligonucleotide
cguaauagucucuggacua

SEQ ID NO: 597137 - RNA, 19 nt, Artificial Sequence
  Description of Artificial Sequence: Synthetic oligonucleotide
cauugucacuacucaugua

SEQ ID NO: 597138 - RNA, 19 nt, Artificial Sequence
  Description of Artificial Sequence: Synthetic oligonucleotide
ccguagguuggaaccuggg

SEQ ID NO: 597139 - RNA, 19 nt, Artificial Sequence
  Description of Artificial Sequence: Synthetic oligonucleotide
  modified_base (9)..(9): a, c, u, g, unknown or other
cagugccanccuuuugaaa

SEQ ID NO: 597140 - RNA, 19 nt, Artificial Sequence
  Description of Artificial Sequence: Synthetic oligonucleotide
gguuaccugaaagggucuc

SEQ ID NO: 597141 - RNA, 19 nt, Artificial Sequence
  Description of Artificial Sequence: Synthetic oligonucleotide
agguuggaacuggccaagu

SEQ ID NO: 597142 - RNA, 19 nt, Artificial Sequence
  Description of Artificial Sequence: Synthetic oligonucleotide
gagggcccguucagauggg

SEQ ID NO: 597143 - RNA, 19 nt, Artificial Sequence
  Description of Artificial Sequence: Synthetic oligonucleotide
agugguccguagguuggaa

SEQ ID NO: 597144 - RNA, 19 nt, Artificial Sequence
  Description of Artificial Sequence: Synthetic oligonucleotide
agcuuacacugagcucuug

SEQ ID NO: 597145 - RNA, 19 nt, Artificial Sequence
  Description of Artificial Sequence: Synthetic oligonucleotide
gggauuuggggaauaugua

SEQ ID NO: 597146 - RNA, 19 nt, Artificial Sequence
  Description of Artificial Sequence: Synthetic oligonucleotide
  modified_base (5)..(5): a, c, u, g, unknown or other
gccanccuuuugaaagcug

SEQ ID NO: 597147 - RNA, 19 nt, Artificial Sequence
  Description of Artificial Sequence: Synthetic oligonucleotide
caucccgggcccaguuguc

SEQ ID NO: 597148 - RNA, 19 nt, Artificial Sequence
  Description of Artificial Sequence: Synthetic oligonucleotide
cagagaaacgacccacuuu

SEQ ID NO: 597149 - RNA, 19 nt, Artificial Sequence
  Description of Artificial Sequence: Synthetic oligonucleotide
uugcuaggacauggccuuc

SEQ ID NO: 597150 - RNA, 19 nt, Artificial Sequence
  Description of Artificial Sequence: Synthetic oligonucleotide
ucauggcaucccgggccca

SEQ ID NO: 597151 - RNA, 19 nt, Artificial Sequence
  Description of Artificial Sequence: Synthetic oligonucleotide
cacuaguaguuaguauaua

SEQ ID NO: 597152 - RNA, 19 nt, Artificial Sequence
  Description of Artificial Sequence: Synthetic oligonucleotide
gagaaacgacccacuuugu

SEQ ID NO: 597153 - RNA, 19 nt, Artificial Sequence
  Description of Artificial Sequence: Synthetic oligonucleotide
gccugggcagccuggcuac

SEQ ID NO: 597154 - RNA, 19 nt, Artificial Sequence
  Description of Artificial Sequence: Synthetic oligonucleotide
ccguaauagucucuggacu

SEQ ID NO: 597155 - RNA, 19 nt, Artificial Sequence
  Description of Artificial Sequence: Synthetic oligonucleotide
cuaggacauggccuucagu

SEQ ID NO: 597156 - RNA, 19 nt, Artificial Sequence
  Description of Artificial Sequence: Synthetic oligonucleotide
ccuugccauuccagggccc

SEQ ID NO: 597157 - RNA, 19 nt, Artificial Sequence
  Description of Artificial Sequence: Synthetic oligonucleotide
cacuccacugagugccaaa

SEQ ID NO: 597158 - RNA, 19 nt, Artificial Sequence
  Description of Artificial Sequence: Synthetic oligonucleotide
ccucgguucuugaaacaga

SEQ ID NO: 597159 - RNA, 19 nt, Artificial Sequence
  Description of Artificial Sequence: Synthetic oligonucleotide
cuuagucgucuaaguucua

SEQ ID NO: 597160 - RNA, 19 nt, Artificial Sequence
  Description of Artificial Sequence: Synthetic oligonucleotide
gcacuaguaguuaguauau

SEQ ID NO: 597161 - RNA, 19 nt, Artificial Sequence
  Description of Artificial Sequence: Synthetic oligonucleotide
ccaguccccugguauuuuc

SEQ ID NO: 597162 - RNA, 19 nt, Artificial Sequence
  Description of Artificial Sequence: Synthetic oligonucleotide
cuguaccccuacugagaaa

SEQ ID NO: 597163 - RNA, 19 nt, Artificial Sequence
  Description of Artificial Sequence: Synthetic oligonucleotide
cgucuaaguucuaaccuua

SEQ ID NO: 597164 - RNA, 19 nt, Artificial Sequence
  Description of Artificial Sequence: Synthetic oligonucleotide
cccguucagaugggaaggc

SEQ ID NO: 597165 - RNA, 19 nt, Artificial Sequence
  Description of Artificial Sequence: Synthetic oligonucleotide
gacccacuuuguugcugua

SEQ ID NO: 597166 - RNA, 19 nt, Artificial Sequence
  Description of Artificial Sequence: Synthetic oligonucleotide
gugaaccuuuuaaaccuuu

SEQ ID NO: 597167 - RNA, 19 nt, Artificial Sequence
  Description of Artificial Sequence: Synthetic oligonucleotide
agggcccguucagauggga

SEQ ID NO: 597168 - RNA, 19 nt, Artificial Sequence
  Description of Artificial Sequence: Synthetic oligonucleotide
ccugaacuacuugcuagga

SEQ ID NO: 597169 - RNA, 19 nt, Artificial Sequence
  Description of Artificial Sequence: Synthetic oligonucleotide
gguacugaaauggcaccau

SEQ ID NO: 597170 - RNA, 19 nt, Artificial Sequence
  Description of Artificial Sequence: Synthetic oligonucleotide
cagucucaggcagccccuc

SEQ ID NO: 597171 - RNA, 19 nt, Artificial Sequence
  Description of Artificial Sequence: Synthetic oligonucleotide
gccacccagguuugagguc

SEQ ID NO: 597172 - RNA, 19 nt, Artificial Sequence
  Description of Artificial Sequence: Synthetic oligonucleotide
caacugcagaugucaccgu

SEQ ID NO: 597173 - RNA, 19 nt, Artificial Sequence
  Description of Artificial Sequence: Synthetic oligonucleotide
gguccguagguuggaaccu

SEQ ID NO: 597174 - RNA, 19 nt, Artificial Sequence
  Description of Artificial Sequence: Synthetic oligonucleotide
caacgguauuugugcugcu

SEQ ID NO: 597175 - RNA, 19 nt, Artificial Sequence
  Description of Artificial Sequence: Synthetic oligonucleotide
gggcccaguugucuaccaa

SEQ ID NO: 597176 - RNA, 19 nt, Artificial Sequence
  Description of Artificial Sequence: Synthetic oligonucleotide
cgcucuacccacugacaga

SEQ ID NO: 597177 - RNA, 19 nt, Artificial Sequence
  Description of Artificial Sequence: Synthetic oligonucleotide
gcgacucugcagguccuga

SEQ ID NO: 597178 - RNA, 19 nt, Artificial Sequence
  Description of Artificial Sequence: Synthetic oligonucleotide
ggacuagcugagccauccu

SEQ ID NO: 597179 - RNA, 19 nt, Artificial Sequence
  Description of Artificial Sequence: Synthetic oligonucleotide
caaccccaguccccuggua

SEQ ID NO: 597180 - RNA, 19 nt, Artificial Sequence
  Description of Artificial Sequence: Synthetic oligonucleotide
gggcccguucagaugggaa

SEQ ID NO: 597181 - RNA, 19 nt, Artificial Sequence
  Description of Artificial Sequence: Synthetic oligonucleotide
cagggcccucauaauucau

SEQ ID NO: 597182 - RNA, 19 nt, Artificial Sequence
  Description of Artificial Sequence: Synthetic oligonucleotide
ccgacucauugucacuacu

SEQ ID NO: 597183 - RNA, 19 nt, Artificial Sequence
  Description of Artificial Sequence: Synthetic oligonucleotide
cccuuccuacuggaaguca

SEQ ID NO: 597184 - RNA, 19 nt, Artificial Sequence
  Description of Artificial Sequence: Synthetic oligonucleotide
ccgccuucuuccugacaga

SEQ ID NO: 597185 - RNA, 19 nt, Artificial Sequence
  Description of Artificial Sequence: Synthetic oligonucleotide
ccccaacgguauuugugcu

SEQ ID NO: 597186 - RNA, 19 nt, Artificial Sequence
  Description of Artificial Sequence: Synthetic oligonucleotide
ccguucagaugggaaggcu

SEQ ID NO: 597187 - RNA, 19 nt, Artificial Sequence
  Description of Artificial Sequence: Synthetic oligonucleotide
ccccaguccccugguauuu

SEQ ID NO: 597188 - RNA, 19 nt, Artificial Sequence
  Description of Artificial Sequence: Synthetic oligonucleotide
aaaacaauauugcggaugg

SEQ ID NO: 597189 - RNA, 19 nt, Artificial Sequence
  Description of Artificial Sequence: Synthetic oligonucleotide
aaucggaaaagcgugggcc

SEQ ID NO: 597190 - RNA, 19 nt, Artificial Sequence
  Description of Artificial Sequence: Synthetic oligonucleotide
auuaucguuagccugcagg

SEQ ID NO: 597191 - RNA, 19 nt, Artificial Sequence
  Description of Artificial Sequence: Synthetic oligonucleotide
cuggaaaacaauauugcgg

SEQ ID NO: 597192 - RNA, 19 nt, Artificial Sequence
  Description of Artificial Sequence: Synthetic oligonucleotide
ugacuggaaaacaauauug

SEQ ID NO: 597193 - RNA, 19 nt, Artificial Sequence
  Description of Artificial Sequence: Synthetic oligonucleotide
uggaaaacaauauugcgga

SEQ ID NO: 597194 - RNA, 19 nt, Artificial Sequence
  Description of Artificial Sequence: Synthetic oligonucleotide
uuccauaaggcauaaaaga

SEQ ID NO: 597195 - RNA, 19 nt, Artificial Sequence
  Description of Artificial Sequence: Synthetic oligonucleotide
cauaaggcauaaaagacag

SEQ ID NO: 597196 - RNA, 19 nt, Artificial Sequence
  Description of Artificial Sequence: Synthetic oligonucleotide
aaacaacuagggcaugggc

SEQ ID NO: 597197 - RNA, 19 nt, Artificial Sequence
  Description of Artificial Sequence: Synthetic oligonucleotide
gucauuuaggcccagagac

SEQ ID NO: 597198 - RNA, 19 nt, Artificial Sequence
  Description of Artificial Sequence: Synthetic oligonucleotide
gagaguuuuccccaagagg

SEQ ID NO: 597199 - RNA, 19 nt, Artificial Sequence
  Description of Artificial Sequence: Synthetic oligonucleotide
ugugucacuggccaaucgg

SEQ ID NO: 597200 - RNA, 19 nt, Artificial Sequence
  Description of Artificial Sequence: Synthetic oligonucleotide
ugagauuaucguuagccug

SEQ ID NO: 597201 - RNA, 19 nt, Artificial Sequence
  Description of Artificial Sequence: Synthetic oligonucleotide
ugggguuaaaugcuggcag

SEQ ID NO: 597202 - RNA, 19 nt, Artificial Sequence
  Description of Artificial Sequence: Synthetic oligonucleotide
agaguuuuccccaagaggu

SEQ ID NO: 597203 - RNA, 19 nt, Artificial Sequence
  Description of Artificial Sequence: Synthetic oligonucleotide
uuaucguuagccugcagga

SEQ ID NO: 597204 - RNA, 19 nt, Artificial Sequence
  Description of Artificial Sequence: Synthetic oligonucleotide
uggacgaugggguuaaaug

SEQ ID NO: 597205 - RNA, 19 nt, Artificial Sequence
  Description of Artificial Sequence: Synthetic oligonucleotide
ucauaaacggucacuggca

SEQ ID NO: 597206 - RNA, 19 nt, Artificial Sequence
  Description of Artificial Sequence: Synthetic oligonucleotide
guacuugggagacacaacc

SEQ ID NO: 597207 - RNA, 19 nt, Artificial Sequence
  Description of Artificial Sequence: Synthetic oligonucleotide
gucauaaacggucacuggc

SEQ ID NO: 597208 - RNA, 19 nt, Artificial Sequence
  Description of Artificial Sequence: Synthetic oligonucleotide
ugaccuuagggacagcuga

SEQ ID NO: 597209 - RNA, 19 nt, Artificial Sequence
  Description of Artificial Sequence: Synthetic oligonucleotide
acacuaucugagcuggggc

SEQ ID NO: 597210 - RNA, 19 nt, Artificial Sequence
  Description of Artificial Sequence: Synthetic oligonucleotide
ugagguacucccaggaaug

SEQ ID NO: 597211 - RNA, 19 nt, Artificial Sequence
  Description of Artificial Sequence: Synthetic oligonucleotide
gcuaaagagagcucggugg

SEQ ID NO: 597212 - RNA, 19 nt, Artificial Sequence
  Description of Artificial Sequence: Synthetic oligonucleotide
aguuuuccccaagaggucc

SEQ ID NO: 597213 - RNA, 19 nt, Artificial Sequence
  Description of Artificial Sequence: Synthetic oligonucleotide
agagccaaaccacacacca

SEQ ID NO: 597214 - RNA, 19 nt, Artificial Sequence
  Description of Artificial Sequence: Synthetic oligonucleotide
aucguuagccugcaggauc

SEQ ID NO: 597215 - RNA, 19 nt, Artificial Sequence
  Description of Artificial Sequence: Synthetic oligonucleotide
aagagagcucggugggugc

SEQ ID NO: 597216 - RNA, 19 nt, Artificial Sequence
  Description of Artificial Sequence: Synthetic oligonucleotide
cucaucgucaagcagggac

SEQ ID NO: 597217 - RNA, 19 nt, Artificial Sequence
  Description of Artificial Sequence: Synthetic oligonucleotide
caagugcaaacaacuaggg

SEQ ID NO: 597218 - RNA, 19 nt, Artificial Sequence
  Description of Artificial Sequence: Synthetic oligonucleotide
cauucuucggccguggagg

SEQ ID NO: 597219 - RNA, 19 nt, Artificial Sequence
  Description of Artificial Sequence: Synthetic oligonucleotide
gagauuaucguuagccugc

SEQ ID NO: 597220 - RNA, 19 nt, Artificial Sequence
  Description of Artificial Sequence: Synthetic oligonucleotide
aagaugagcuuguagcgaa

SEQ ID NO: 597221 - RNA, 19 nt, Artificial Sequence
  Description of Artificial Sequence: Synthetic oligonucleotide
uaaacggucacuggcaaga

SEQ ID NO: 597222 - RNA, 19 nt, Artificial Sequence
  Description of Artificial Sequence: Synthetic oligonucleotide
cuauggcaaacccaggccc

SEQ ID NO: 597223 - RNA, 19 nt, Artificial Sequence
  Description of Artificial Sequence: Synthetic oligonucleotide
ggugagauuaucguuagcc

SEQ ID NO: 597224 - RNA, 19 nt, Artificial Sequence
  Description of Artificial Sequence: Synthetic oligonucleotide
ucaucgucaagcagggaca

SEQ ID NO: 597225 - RNA, 19 nt, Artificial Sequence
  Description of Artificial Sequence: Synthetic oligonucleotide
gacgacuggaagcuguucc

SEQ ID NO: 597226 - RNA, 19 nt, Artificial Sequence
  Description of Artificial Sequence: Synthetic oligonucleotide
agagacaugagcucaucgu

SEQ ID NO: 597227 - RNA, 19 nt, Artificial Sequence
  Description of Artificial Sequence: Synthetic oligonucleotide
aucggaaaagcgugggccg

SEQ ID NO: 597228 - RNA, 19 nt, Artificial Sequence
  Description of Artificial Sequence: Synthetic oligonucleotide
aaaccacacaccaagugca

SEQ ID NO: 597229 - RNA, 19 nt, Artificial Sequence
  Description of Artificial Sequence: Synthetic oligonucleotide
uggccaaucggaaaagcgu

SEQ ID NO: 597230 - RNA, 19 nt, Artificial Sequence
  Description of Artificial Sequence: Synthetic oligonucleotide
gaaggagagagcaccaggc

SEQ ID NO: 597231 - RNA, 19 nt, Artificial Sequence
  Description of Artificial Sequence: Synthetic oligonucleotide
cuggccaaucggaaaagcg

SEQ ID NO: 597232 - RNA, 19 nt, Artificial Sequence
  Description of Artificial Sequence: Synthetic oligonucleotide
uguugcaggagaguuuucc

SEQ ID NO: 597233 - RNA, 19 nt, Artificial Sequence
  Description of Artificial Sequence: Synthetic oligonucleotide
aaguacuugggagacacaa

SEQ ID NO: 597234 - RNA, 19 nt, Artificial Sequence
  Description of Artificial Sequence: Synthetic oligonucleotide
aaagagagcucggugggug

SEQ ID NO: 597235 - RNA, 19 nt, Artificial Sequence
  Description of Artificial Sequence: Synthetic oligonucleotide
uggucauaaacggucacug

SEQ ID NO: 597236 - RNA, 19 nt, Artificial Sequence
  Description of Artificial Sequence: Synthetic oligonucleotide
ucugacgacuggaagcugu

SEQ ID NO: 597237 - RNA, 19 nt, Artificial Sequence
  Description of Artificial Sequence: Synthetic oligonucleotide
ucauuuaggcccagagaca

SEQ ID NO: 597238 - RNA, 19 nt, Artificial Sequence
  Description of Artificial Sequence: Synthetic oligonucleotide
gaugagcuuguagcgaagg

SEQ ID NO: 597239 - RNA, 19 nt, Artificial Sequence
  Description of Artificial Sequence: Synthetic oligonucleotide
aagcgugggccgcaugcgc

SEQ ID NO: 597240 - RNA, 19 nt, Artificial Sequence
  Description of Artificial Sequence: Synthetic oligonucleotide
aggccaauuguccagcugu

SEQ ID NO: 597241 - RNA, 19 nt, Artificial Sequence
  Description of Artificial Sequence: Synthetic oligonucleotide
gagacaugagcucaucguc

SEQ ID NO: 597242 - RNA, 19 nt, Artificial Sequence
  Description of Artificial Sequence: Synthetic oligonucleotide
aagagccaaaccacacacc

SEQ ID NO: 597243 - RNA, 19 nt, Artificial Sequence
  Description of Artificial Sequence: Synthetic oligonucleotide
ucgucaagcagggacacug

SEQ ID NO: 597244 - RNA, 19 nt, Artificial Sequence
  Description of Artificial Sequence: Synthetic oligonucleotide
auguuggcuaaagagagcu

SEQ ID NO: 597245 - RNA, 19 nt, Artificial Sequence
  Description of Artificial Sequence: Synthetic oligonucleotide
augguguggggucauuuag

SEQ ID NO: 597246 - RNA, 19 nt, Artificial Sequence
  Description of Artificial Sequence: Synthetic oligonucleotide
caauauugcggaugggcug

SEQ ID NO: 597247 - RNA, 19 nt, Artificial Sequence
  Description of Artificial Sequence: Synthetic oligonucleotide
gucauuccagggcauacag

SEQ ID NO: 597248 - RNA, 19 nt, Artificial Sequence
  Description of Artificial Sequence: Synthetic oligonucleotide
ggacgaugggguuaaaugc

SEQ ID NO: 597249 - RNA, 19 nt, Artificial Sequence
  Description of Artificial Sequence: Synthetic oligonucleotide
gaacugauccacaucuccc

SEQ ID NO: 597250 - RNA, 19 nt, Artificial Sequence
  Description of Artificial Sequence: Synthetic oligonucleotide
guaggguugccugugcugg

SEQ ID NO: 597251 - RNA, 19 nt, Artificial Sequence
  Description of Artificial Sequence: Synthetic oligonucleotide
ucguuagccugcaggaucu

SEQ ID NO: 597252 - RNA, 19 nt, Artificial Sequence
  Description of Artificial Sequence: Synthetic oligonucleotide
acauucuucggccguggag

SEQ ID NO: 597253 - RNA, 19 nt, Artificial Sequence
  Description of Artificial Sequence: Synthetic oligonucleotide
guugcaggagaguuuuccc

SEQ ID NO: 597254 - RNA, 19 nt, Artificial Sequence
  Description of Artificial Sequence: Synthetic oligonucleotide
agacguguuguggaggagg

SEQ ID NO: 597255 - RNA, 19 nt, Artificial Sequence
  Description of Artificial Sequence: Synthetic oligonucleotide
auaaacggucacuggcaag

SEQ ID NO: 597256 - RNA, 19 nt, Artificial Sequence
  Description of Artificial Sequence: Synthetic oligonucleotide
aggaucucagcuaaggccu

SEQ ID NO: 597257 - RNA, 19 nt, Artificial Sequence
  Description of Artificial Sequence: Synthetic oligonucleotide
aaagcgugggccgcaugcg

SEQ ID NO: 597258 - RNA, 19 nt, Artificial Sequence
  Description of Artificial Sequence: Synthetic oligonucleotide
caaacaacuagggcauggg

SEQ ID NO: 597259 - RNA, 19 nt, Artificial Sequence
  Description of Artificial Sequence: Synthetic oligonucleotide
uacagccccucccuguucc

SEQ ID NO: 597260 - RNA, 19 nt, Artificial Sequence
  Description of Artificial Sequence: Synthetic oligonucleotide
uacuugggagacacaaccu

SEQ ID NO: 597261 - RNA, 19 nt, Artificial Sequence
  Description of Artificial Sequence: Synthetic oligonucleotide
ucguugguaggguugccug

SEQ ID NO: 597262 - RNA, 19 nt, Artificial Sequence
  Description of Artificial Sequence: Synthetic oligonucleotide
auucuucggccguggaggg

SEQ ID NO: 597263 - RNA, 19 nt, Artificial Sequence
  Description of Artificial Sequence: Synthetic oligonucleotide
cacacuaucugagcugggg

SEQ ID NO: 597264 - RNA, 19 nt, Artificial Sequence
  Description of Artificial Sequence: Synthetic oligonucleotide
ugcuggucauaaacgguca

SEQ ID NO: 597265 - RNA, 19 nt, Artificial Sequence
  Description of Artificial Sequence: Synthetic oligonucleotide
aguacuugggagacacaac

SEQ ID NO: 597266 - RNA, 19 nt, Artificial Sequence
  Description of Artificial Sequence: Synthetic oligonucleotide
ggcauaaaagacagguggg

SEQ ID NO: 597267 - RNA, 19 nt, Artificial Sequence
  Description of Artificial Sequence: Synthetic oligonucleotide
uccggagacguguugugga

SEQ ID NO: 597268 - RNA, 19 nt, Artificial Sequence
  Description of Artificial Sequence: Synthetic oligonucleotide
auggagaccaccaccacca

SEQ ID NO: 597269 - RNA, 19 nt, Artificial Sequence
  Description of Artificial Sequence: Synthetic oligonucleotide
caccugggugagauuaucg

SEQ ID NO: 597270 - RNA, 19 nt, Artificial Sequence
  Description of Artificial Sequence: Synthetic oligonucleotide
guggaucccgagcaaagug

SEQ ID NO: 597271 - RNA, 19 nt, Artificial Sequence
  Description of Artificial Sequence: Synthetic oligonucleotide
cuguacagcagcuccaaga

SEQ ID NO: 597272 - RNA, 19 nt, Artificial Sequence
  Description of Artificial Sequence: Synthetic oligonucleotide
gaggggaaaagauggcauc

SEQ ID NO: 597273 - RNA, 19 nt, Artificial Sequence
  Description of Artificial Sequence: Synthetic oligonucleotide
ggagaguuuuccccaagag

SEQ ID NO: 597274 - RNA, 19 nt, Artificial Sequence
  Description of Artificial Sequence: Synthetic oligonucleotide
ccaucugacgacuggaagc

SEQ ID NO: 597275 - RNA, 19 nt, Artificial Sequence
  Description of Artificial Sequence: Synthetic oligonucleotide
gcauaaaagacaggugggg

SEQ ID NO: 597276 - RNA, 19 nt, Artificial Sequence
  Description of Artificial Sequence: Synthetic oligonucleotide
gggguuagcaaggagcagg

SEQ ID NO: 597277 - RNA, 19 nt, Artificial Sequence
  Description of Artificial Sequence: Synthetic oligonucleotide
gucacggagggugagccgg

SEQ ID NO: 597278 - RNA, 19 nt, Artificial Sequence
  Description of Artificial Sequence: Synthetic oligonucleotide
ugaggguucggcgccaucu

SEQ ID NO: 597279 - RNA, 19 nt, Artificial Sequence
  Description of Artificial Sequence: Synthetic oligonucleotide
ggucauaaacggucacugg

SEQ ID NO: 597280 - RNA, 19 nt, Artificial Sequence
  Description of Artificial Sequence: Synthetic oligonucleotide
ugaagauggugugggguca

SEQ ID NO: 597281 - RNA, 19 nt, Artificial Sequence
  Description of Artificial Sequence: Synthetic oligonucleotide
caaucggaaaagcgugggc

SEQ ID NO: 597282 - RNA, 19 nt, Artificial Sequence
  Description of Artificial Sequence: Synthetic oligonucleotide
caugcgcucacagcgcugg

SEQ ID NO: 597283 - RNA, 19 nt, Artificial Sequence
  Description of Artificial Sequence: Synthetic oligonucleotide
gaucaccugggugagauua

SEQ ID NO: 597284 - RNA, 19 nt, Artificial Sequence
  Description of Artificial Sequence: Synthetic oligonucleotide
uguuguugacuuccucaau

SEQ ID NO: 597285 - RNA, 19 nt, Artificial Sequence
  Description of Artificial Sequence: Synthetic oligonucleotide
cuggcaagaugcugcuggg

SEQ ID NO: 597286 - RNA, 19 nt, Artificial Sequence
  Description of Artificial Sequence: Synthetic oligonucleotide
cuucaugaccuuagggaca

SEQ ID NO: 597287 - RNA, 19 nt, Artificial Sequence
  Description of Artificial Sequence: Synthetic oligonucleotide
agcgaaggcgaaccuucuc

SEQ ID NO: 597288 - RNA, 19 nt, Artificial Sequence
  Description of Artificial Sequence: Synthetic oligonucleotide
ucugacguccgggagccca

SEQ ID NO: 597289 - RNA, 19 nt, Artificial Sequence
  Description of Artificial Sequence: Synthetic oligonucleotide
gggucauuuaggcccagag

SEQ ID NO: 597290 - RNA, 19 nt, Artificial Sequence
  Description of Artificial Sequence: Synthetic oligonucleotide
agccucaccuucaugaccu

SEQ ID NO: 597291 - RNA, 19 nt, Artificial Sequence
  Description of Artificial Sequence: Synthetic oligonucleotide
ggucuggucgcccauggug

SEQ ID NO: 597292 - RNA, 19 nt, Artificial Sequence
  Description of Artificial Sequence: Synthetic oligonucleotide
guuauggcugggccuuucc

SEQ ID NO: 597293 - RNA, 19 nt, Artificial Sequence
  Description of Artificial Sequence: Synthetic oligonucleotide
uggacugggcaagcuacag

SEQ ID NO: 597294 - RNA, 19 nt, Artificial Sequence
  Description of Artificial Sequence: Synthetic oligonucleotide
uuggggucccagcagcuau

SEQ ID NO: 597295 - RNA, 19 nt, Artificial Sequence
  Description of Artificial Sequence: Synthetic oligonucleotide
aucugguaagcuucugcaa

SEQ ID NO: 597296 - RNA, 19 nt, Artificial Sequence
  Description of Artificial Sequence: Synthetic oligonucleotide
uuaggcccagagacaugag

SEQ ID NO: 597297 - RNA, 19 nt, Artificial Sequence
  Description of Artificial Sequence: Synthetic oligonucleotide
ucccucacucccgagaguc

SEQ ID NO: 597298 - RNA, 19 nt, Artificial Sequence
  Description of Artificial Sequence: Synthetic oligonucleotide
cugguugccagggugggug

SEQ ID NO: 597299 - RNA, 19 nt, Artificial Sequence
  Description of Artificial Sequence: Synthetic oligonucleotide
cauucacccgcuuugagau

SEQ ID NO: 597300 - RNA, 19 nt, Artificial Sequence
  Description of Artificial Sequence: Synthetic oligonucleotide
ucacggagggugagccggg

SEQ ID NO: 597301 - RNA, 19 nt, Artificial Sequence
  Description of Artificial Sequence: Synthetic oligonucleotide
augggguuaaaugcuggca

SEQ ID NO: 597302 - RNA, 19 nt, Artificial Sequence
  Description of Artificial Sequence: Synthetic oligonucleotide
gggacugaggguucggcgc

SEQ ID NO: 597303 - RNA, 19 nt, Artificial Sequence
  Description of Artificial Sequence: Synthetic oligonucleotide
ggcuaaagagagcucggug

SEQ ID NO: 597304 - RNA, 19 nt, Artificial Sequence
  Description of Artificial Sequence: Synthetic oligonucleotide
gaugguguggggucauuua

SEQ ID NO: 597305 - RNA, 19 nt, Artificial Sequence
  Description of Artificial Sequence: Synthetic oligonucleotide
uucggcgccaucugacgac

SEQ ID NO: 597306 - RNA, 19 nt, Artificial Sequence
  Description of Artificial Sequence: Synthetic oligonucleotide
ggacacggaagccaugcug

SEQ ID NO: 597307 - RNA, 19 nt, Artificial Sequence
  Description of Artificial Sequence: Synthetic oligonucleotide
uggucgcccauggugaaga

SEQ ID NO: 597308 - RNA, 19 nt, Artificial Sequence
  Description of Artificial Sequence: Synthetic oligonucleotide
guugguaggguugccugug

SEQ ID NO: 597309 - RNA, 19 nt, Artificial Sequence
  Description of Artificial Sequence: Synthetic oligonucleotide
gacuucacaauccccugcu

SEQ ID NO: 597310 - RNA, 19 nt, Artificial Sequence
  Description of Artificial Sequence: Synthetic oligonucleotide
ucacucccgagagucauuc

SEQ ID NO: 597311 - RNA, 19 nt, Artificial Sequence
  Description of Artificial Sequence: Synthetic oligonucleotide
cagccuagggagagggaag

SEQ ID NO: 597312 - RNA, 19 nt, Artificial Sequence
  Description of Artificial Sequence: Synthetic oligonucleotide
auacagccccucccuguuc

SEQ ID NO: 597313 - RNA, 19 nt, Artificial Sequence
  Description of Artificial Sequence: Synthetic oligonucleotide
uaaagagagcucggugggu

SEQ ID NO: 597314 - RNA, 19 nt, Artificial Sequence
  Description of Artificial Sequence: Synthetic oligonucleotide
ccaaguacuugggagacac

SEQ ID NO: 597315 - RNA, 19 nt, Artificial Sequence
  Description of Artificial Sequence: Synthetic oligonucleotide
uguagcgaaggcgaaccuu

SEQ ID NO: 597316 - RNA, 19 nt, Artificial Sequence
  Description of Artificial Sequence: Synthetic oligonucleotide
ggggaacugauccacaucu

SEQ ID NO: 597317 - RNA, 19 nt, Artificial Sequence
  Description of Artificial Sequence: Synthetic oligonucleotide
cugcucguugguaggguug

SEQ ID NO: 597318 - RNA, 19 nt, Artificial Sequence
  Description of Artificial Sequence: Synthetic oligonucleotide
gguucggcgccaucugacg

SEQ ID NO: 597319 - RNA, 19 nt, Artificial Sequence
  Description of Artificial Sequence: Synthetic oligonucleotide
ucggaaaagcgugggccgc

SEQ ID NO: 597320 - RNA, 19 nt, Artificial Sequence
  Description of Artificial Sequence: Synthetic oligonucleotide
cauaaacggucacuggcaa

SEQ ID NO: 597321 - RNA, 19 nt, Artificial Sequence
  Description of Artificial Sequence: Synthetic oligonucleotide
caccccacacuaucugagc

SEQ ID NO: 597322 - RNA, 19 nt, Artificial Sequence
  Description of Artificial Sequence: Synthetic oligonucleotide
agccccucccuguuccagg

SEQ ID NO: 597323 - RNA, 19 nt, Artificial Sequence
  Description of Artificial Sequence: Synthetic oligonucleotide
gacgaugggguuaaaugcu

SEQ ID NO: 597324 - RNA, 19 nt, Artificial Sequence
  Description of Artificial Sequence: Synthetic oligonucleotide
gguaggguugccugugcug

SEQ ID NO: 597325 - RNA, 19 nt, Artificial Sequence
  Description of Artificial Sequence: Synthetic oligonucleotide
cuaaggccucaucauuguc

SEQ ID NO: 597326 - RNA, 19 nt, Artificial Sequence
  Description of Artificial Sequence: Synthetic oligonucleotide
gggaagaccccaccucagg

SEQ ID NO: 597327 - RNA, 19 nt, Artificial Sequence
  Description of Artificial Sequence: Synthetic oligonucleotide
aguggaucccgagcaaagu

SEQ ID NO: 597328 - RNA, 19 nt, Artificial Sequence
  Description of Artificial Sequence: Synthetic oligonucleotide
agcgcccuggcaguggauc

SEQ ID NO: 597329 - RNA, 19 nt, Artificial Sequence
  Description of Artificial Sequence: Synthetic oligonucleotide
uggcuaaagagagcucggu

SEQ ID NO: 597330 - RNA, 19 nt, Artificial Sequence
  Description of Artificial Sequence: Synthetic oligonucleotide
gggugugagcucuucagca

SEQ ID NO: 597331 - RNA, 19 nt, Artificial Sequence
  Description of Artificial Sequence: Synthetic oligonucleotide
uagcgaaggcgaaccuucu

SEQ ID NO: 597332 - RNA, 19 nt, Artificial Sequence
  Description of Artificial Sequence: Synthetic oligonucleotide
uggaagcuuggggucagac

SEQ ID NO: 597333 - RNA, 19 nt, Artificial Sequence
  Description of Artificial Sequence: Synthetic oligonucleotide
uggagaccaccaccaccag

SEQ ID NO: 597334 - RNA, 19 nt, Artificial Sequence
  Description of Artificial Sequence: Synthetic oligonucleotide
auugaccuccucaccccgg

SEQ ID NO: 597335 - RNA, 19 nt, Artificial Sequence
  Description of Artificial Sequence: Synthetic oligonucleotide
agauuaucguuagccugca

SEQ ID NO: 597336 - RNA, 19 nt, Artificial Sequence
  Description of Artificial Sequence: Synthetic oligonucleotide
ugcggaugggcuggggagc

SEQ ID NO: 597337 - RNA, 19 nt, Artificial Sequence
  Description of Artificial Sequence: Synthetic oligonucleotide
gaucacauucuucggccgu

SEQ ID NO: 597338 - RNA, 19 nt, Artificial Sequence
  Description of Artificial Sequence: Synthetic oligonucleotide
cagcuauggcaaacccagg

SEQ ID NO: 597339 - RNA, 19 nt, Artificial Sequence
  Description of Artificial Sequence: Synthetic oligonucleotide
uggugcccgagggagggag

SEQ ID NO: 597340 - RNA, 19 nt, Artificial Sequence
  Description of Artificial Sequence: Synthetic oligonucleotide
acgaugggguuaaaugcug

SEQ ID NO: 597341 - RNA, 19 nt, Artificial Sequence
  Description of Artificial Sequence: Synthetic oligonucleotide
gaguuuuccccaagagguc

SEQ ID NO: 597342 - RNA, 19 nt, Artificial Sequence
  Description of Artificial Sequence: Synthetic oligonucleotide
uaucguuagccugcaggau

SEQ ID NO: 597343 - RNA, 19 nt, Artificial Sequence
  Description of Artificial Sequence: Synthetic oligonucleotide
cuccggagacguguugugg

SEQ ID NO: 597344 - RNA, 19 nt, Artificial Sequence
  Description of Artificial Sequence: Synthetic oligonucleotide
ggugguuggggucccagca

SEQ ID NO: 597345 - RNA, 19 nt, Artificial Sequence
  Description of Artificial Sequence: Synthetic oligonucleotide
gaccuuagggacagcugac

SEQ ID NO: 597346 - RNA, 19 nt, Artificial Sequence
  Description of Artificial Sequence: Synthetic oligonucleotide
gcauucacccgcuuugaga

SEQ ID NO: 597347 - RNA, 19 nt, Artificial Sequence
  Description of Artificial Sequence: Synthetic oligonucleotide
caucgucaagcagggacac

SEQ ID NO: 597348 - RNA, 19 nt, Artificial Sequence
  Description of Artificial Sequence: Synthetic oligonucleotide
acugcucguugguaggguu

SEQ ID NO: 597349 - RNA, 19 nt, Artificial Sequence
  Description of Artificial Sequence: Synthetic oligonucleotide
acaaccuugaugagcucau

SEQ ID NO: 597350 - RNA, 19 nt, Artificial Sequence
  Description of Artificial Sequence: Synthetic oligonucleotide
ggccuaacagccaugcuuc

SEQ ID NO: 597351 - RNA, 19 nt, Artificial Sequence
  Description of Artificial Sequence: Synthetic oligonucleotide
ggcgccaucugacgacugg

SEQ ID NO: 597352 - RNA, 19 nt, Artificial Sequence
  Description of Artificial Sequence: Synthetic oligonucleotide
gucuggucgcccaugguga

SEQ ID NO: 597353 - RNA, 19 nt, Artificial Sequence
  Description of Artificial Sequence: Synthetic oligonucleotide
gcaaagagccaaaccacac

SEQ ID NO: 597354 - RNA, 19 nt, Artificial Sequence
  Description of Artificial Sequence: Synthetic oligonucleotide
agcuccggagacguguugu

SEQ ID NO: 597355 - RNA, 19 nt, Artificial Sequence
  Description of Artificial Sequence: Synthetic oligonucleotide
aagccaugcuggucauaaa

SEQ ID NO: 597356 - RNA, 19 nt, Artificial Sequence
  Description of Artificial Sequence: Synthetic oligonucleotide
gucggcaguccaugccggg

SEQ ID NO: 597357 - RNA, 19 nt, Artificial Sequence
  Description of Artificial Sequence: Synthetic oligonucleotide
ucuggucgcccauggugaa

SEQ ID NO: 597358 - RNA, 19 nt, Artificial Sequence
  Description of Artificial Sequence: Synthetic oligonucleotide
ccaaucggaaaagcguggg

SEQ ID NO: 597359 - RNA, 19 nt, Artificial Sequence
  Description of Artificial Sequence: Synthetic oligonucleotide
uucuucggccguggagggg

SEQ ID NO: 597360 - RNA, 19 nt, Artificial Sequence
  Description of Artificial Sequence: Synthetic oligonucleotide
cacgucagagcgcccuggc

SEQ ID NO: 597361 - RNA, 19 nt, Artificial Sequence
  Description of Artificial Sequence: Synthetic oligonucleotide
accuuagggacagcugacu

SEQ ID NO: 597362 - RNA, 19 nt, Artificial Sequence
  Description of Artificial Sequence: Synthetic oligonucleotide
uggguauguggugcccgag

SEQ ID NO: 597363 - RNA, 19 nt, Artificial Sequence
  Description of Artificial Sequence: Synthetic oligonucleotide
ucaccugggugagauuauc

SEQ ID NO: 597364 - RNA, 19 nt, Artificial Sequence
  Description of Artificial Sequence: Synthetic oligonucleotide
guucggcgccaucugacga

SEQ ID NO: 597365 - RNA, 19 nt, Artificial Sequence
  Description of Artificial Sequence: Synthetic oligonucleotide
agccuagggagagggaaga

SEQ ID NO: 597366 - RNA, 19 nt, Artificial Sequence
  Description of Artificial Sequence: Synthetic oligonucleotide
aggguucggcgccaucuga

SEQ ID NO: 597367 - RNA, 19 nt, Artificial Sequence
  Description of Artificial Sequence: Synthetic oligonucleotide
ggacugaggguucggcgcc

SEQ ID NO: 597368 - RNA, 19 nt, Artificial Sequence
  Description of Artificial Sequence: Synthetic oligonucleotide
gccaaucggaaaagcgugg

SEQ ID NO: 597369 - RNA, 19 nt, Artificial Sequence
  Description of Artificial Sequence: Synthetic oligonucleotide
gguugaucaccugggugag

SEQ ID NO: 597370 - RNA, 19 nt, Artificial Sequence
  Description of Artificial Sequence: Synthetic oligonucleotide
cugacuggaaaacaauauu

SEQ ID NO: 597371 - RNA, 19 nt, Artificial Sequence
  Description of Artificial Sequence: Synthetic oligonucleotide
caggccaauuguccagcug

SEQ ID NO: 597372 - RNA, 19 nt, Artificial Sequence
  Description of Artificial Sequence: Synthetic oligonucleotide
ugggccuaacagccaugcu

SEQ ID NO: 597373 - RNA, 19 nt, Artificial Sequence
  Description of Artificial Sequence: Synthetic oligonucleotide
ucuguccuagaggcucccc

SEQ ID NO: 597374 - RNA, 19 nt, Artificial Sequence
  Description of Artificial Sequence: Synthetic oligonucleotide
cauuuaggcccagagacau

SEQ ID NO: 597375 - RNA, 19 nt, Artificial Sequence
  Description of Artificial Sequence: Synthetic oligonucleotide
agcgccuguugcaggagag

SEQ ID NO: 597376 - RNA, 19 nt, Artificial Sequence
  Description of Artificial Sequence: Synthetic oligonucleotide
uucccucacucccgagagu

SEQ ID NO: 597377 - RNA, 19 nt, Artificial Sequence
  Description of Artificial Sequence: Synthetic oligonucleotide
acguccgggagcccaagua

SEQ ID NO: 597378 - RNA, 19 nt, Artificial Sequence
  Description of Artificial Sequence: Synthetic oligonucleotide
acgucagagcgcccuggca

SEQ ID NO: 597379 - RNA, 19 nt, Artificial Sequence
  Description of Artificial Sequence: Synthetic oligonucleotide
cugagguacucccaggaau

SEQ ID NO: 597380 - RNA, 19 nt, Artificial Sequence
  Description of Artificial Sequence: Synthetic oligonucleotide
caucugacgacuggaagcu

SEQ ID NO: 597381 - RNA, 19 nt, Artificial Sequence
  Description of Artificial Sequence: Synthetic oligonucleotide
cgucagagcgcccuggcag

SEQ ID NO: 597382 - RNA, 19 nt, Artificial Sequence
  Description of Artificial Sequence: Synthetic oligonucleotide
uggcaagaugcugcugggu

SEQ ID NO: 597383 - RNA, 19 nt, Artificial Sequence
  Description of Artificial Sequence: Synthetic oligonucleotide
agaugguguggggucauuu

SEQ ID NO: 597384 - RNA, 19 nt, Artificial Sequence
  Description of Artificial Sequence: Synthetic oligonucleotide
agguacucccaggaaugga

SEQ ID NO: 597385 - RNA, 19 nt, Artificial Sequence
  Description of Artificial Sequence: Synthetic oligonucleotide
cacucccgagagucauucc

SEQ ID NO: 597386 - RNA, 19 nt, Artificial Sequence
  Description of Artificial Sequence: Synthetic oligonucleotide
agagagcucggugggugcu

SEQ ID NO: 597387 - RNA, 19 nt, Artificial Sequence
  Description of Artificial Sequence: Synthetic oligonucleotide
caccaagugcaaacaacua

SEQ ID NO: 597388 - RNA, 19 nt, Artificial Sequence
  Description of Artificial Sequence: Synthetic oligonucleotide
agcuguacagcagcuccaa

SEQ ID NO: 597389 - RNA, 19 nt, Artificial Sequence
  Description of Artificial Sequence: Synthetic oligonucleotide
cgaugggguuaaaugcugg

SEQ ID NO: 597390 - RNA, 19 nt, Artificial Sequence
  Description of Artificial Sequence: Synthetic oligonucleotide
ugacgacuggaagcuguuc

SEQ ID NO: 597391 - RNA, 19 nt, Artificial Sequence
  Description of Artificial Sequence: Synthetic oligonucleotide
gagcuccggagacguguug

SEQ ID NO: 597392 - RNA, 19 nt, Artificial Sequence
  Description of Artificial Sequence: Synthetic oligonucleotide
gcgcucacagcgcugguac

SEQ ID NO: 597393 - RNA, 19 nt, Artificial Sequence
  Description of Artificial Sequence: Synthetic oligonucleotide
guuuuccccaagaggucca

SEQ ID NO: 597394 - RNA, 19 nt, Artificial Sequence
  Description of Artificial Sequence: Synthetic oligonucleotide
ggucacggagggugagccg

SEQ ID NO: 597395 - RNA, 19 nt, Artificial Sequence
  Description of Artificial Sequence: Synthetic oligonucleotide
guuccaggcucccacuggu

SEQ ID NO: 597396 - RNA, 19 nt, Artificial Sequence
  Description of Artificial Sequence: Synthetic oligonucleotide
ucugguugccagggugggu

SEQ ID NO: 597397 - RNA, 19 nt, Artificial Sequence
  Description of Artificial Sequence: Synthetic oligonucleotide
uggccguggcaucaccauu

SEQ ID NO: 597398 - RNA, 19 nt, Artificial Sequence
  Description of Artificial Sequence: Synthetic oligonucleotide
gccugaagauggugugggg

SEQ ID NO: 597399 - RNA, 19 nt, Artificial Sequence
  Description of Artificial Sequence: Synthetic oligonucleotide
accgcacuugcugggccuc

SEQ ID NO: 597400 - RNA, 19 nt, Artificial Sequence
  Description of Artificial Sequence: Synthetic oligonucleotide
gcuggucauaaacggucac

SEQ ID NO: 597401 - RNA, 19 nt, Artificial Sequence
  Description of Artificial Sequence: Synthetic oligonucleotide
ucggcgccaucugacgacu

SEQ ID NO: 597402 - RNA, 19 nt, Artificial Sequence
  Description of Artificial Sequence: Synthetic oligonucleotide
cuggguauguggugcccga

SEQ ID NO: 597403 - RNA, 19 nt, Artificial Sequence
  Description of Artificial Sequence: Synthetic oligonucleotide
gacguguuguggaggaggu

SEQ ID NO: 597404 - RNA, 19 nt, Artificial Sequence
  Description of Artificial Sequence: Synthetic oligonucleotide
gagagcucggugggugcug

SEQ ID NO: 597405 - RNA, 19 nt, Artificial Sequence
  Description of Artificial Sequence: Synthetic oligonucleotide
ggucacuggcaagaugcug

SEQ ID NO: 597406 - RNA, 19 nt, Artificial Sequence
  Description of Artificial Sequence: Synthetic oligonucleotide
agaccccaccucaggcugg

SEQ ID NO: 597407 - RNA, 19 nt, Artificial Sequence
  Description of Artificial Sequence: Synthetic oligonucleotide
aggucuggucgcccauggu

SEQ ID NO: 597408 - RNA, 19 nt, Artificial Sequence
  Description of Artificial Sequence: Synthetic oligonucleotide
ggcuccuggacugggcaag

SEQ ID NO: 597409 - RNA, 19 nt, Artificial Sequence
  Description of Artificial Sequence: Synthetic oligonucleotide
ugacguccgggagcccaag

SEQ ID NO: 597410 - RNA, 19 nt, Artificial Sequence
  Description of Artificial Sequence: Synthetic oligonucleotide
aucugacgacuggaagcug

SEQ ID NO: 597411 - RNA, 19 nt, Artificial Sequence
  Description of Artificial Sequence: Synthetic oligonucleotide
cagagcgcccuggcagugg

SEQ ID NO: 597412 - RNA, 19 nt, Artificial Sequence
  Description of Artificial Sequence: Synthetic oligonucleotide
agucagggcugggccuaac

SEQ ID NO: 597413 - RNA, 19 nt, Artificial Sequence
  Description of Artificial Sequence: Synthetic oligonucleotide
caaguuauggcugggccuu

SEQ ID NO: 597414 - RNA, 19 nt, Artificial Sequence
  Description of Artificial Sequence: Synthetic oligonucleotide
gcuuguagcgaaggcgaac

SEQ ID NO: 597415 - RNA, 19 nt, Artificial Sequence
  Description of Artificial Sequence: Synthetic oligonucleotide
ccccacacuaucugagcug

SEQ ID NO: 597416 - RNA, 19 nt, Artificial Sequence
  Description of Artificial Sequence: Synthetic oligonucleotide
gggugagauuaucguuagc

SEQ ID NO: 597417 - RNA, 19 nt, Artificial Sequence
  Description of Artificial Sequence: Synthetic oligonucleotide
agcgugggccgcaugcgcu

SEQ ID NO: 597418 - RNA, 19 nt, Artificial Sequence
  Description of Artificial Sequence: Synthetic oligonucleotide
cucagggugugagcucuuc

SEQ ID NO: 597419 - RNA, 19 nt, Artificial Sequence
  Description of Artificial Sequence: Synthetic oligonucleotide
gggccuaacagccaugcuu

SEQ ID NO: 597420 - RNA, 19 nt, Artificial Sequence
  Description of Artificial Sequence: Synthetic oligonucleotide
ccggagacguguuguggag

SEQ ID NO: 597421 - RNA, 19 nt, Artificial Sequence
  Description of Artificial Sequence: Synthetic oligonucleotide
gcuccggagacguguugug

SEQ ID NO: 597422 - RNA, 19 nt, Artificial Sequence
  Description of Artificial Sequence: Synthetic oligonucleotide
aagaugguguggggucauu

SEQ ID NO: 597423 - RNA, 19 nt, Artificial Sequence
  Description of Artificial Sequence: Synthetic oligonucleotide
acguuguuguugacuuccu

SEQ ID NO: 597424 - RNA, 19 nt, Artificial Sequence
  Description of Artificial Sequence: Synthetic oligonucleotide
gguugguggcuccuggacu

SEQ ID NO: 597425 - RNA, 19 nt, Artificial Sequence
  Description of Artificial Sequence: Synthetic oligonucleotide
cccucuguccuagaggcuc

SEQ ID NO: 597426 - RNA, 19 nt, Artificial Sequence
  Description of Artificial Sequence: Synthetic oligonucleotide
gucagagcgcccuggcagu

SEQ ID NO: 597427 - RNA, 19 nt, Artificial Sequence
  Description of Artificial Sequence: Synthetic oligonucleotide
aucgucaagcagggacacu

SEQ ID NO: 597428 - RNA, 19 nt, Artificial Sequence
  Description of Artificial Sequence: Synthetic oligonucleotide
gaucccgagcaaaguggaa

SEQ ID NO: 597429 - RNA, 19 nt, Artificial Sequence
  Description of Artificial Sequence: Synthetic oligonucleotide
aucaccugggugagauuau

SEQ ID NO: 597430 - RNA, 19 nt, Artificial Sequence
  Description of Artificial Sequence: Synthetic oligonucleotide
gcuaaggccucaucauugu

SEQ ID NO: 597431 - RNA, 19 nt, Artificial Sequence
  Description of Artificial Sequence: Synthetic oligonucleotide
cacauucuucggccgugga

SEQ ID NO: 597432 - RNA, 19 nt, Artificial Sequence
  Description of Artificial Sequence: Synthetic oligonucleotide
ccucccuguuccaggcucc

SEQ ID NO: 597433 - RNA, 19 nt, Artificial Sequence
  Description of Artificial Sequence: Synthetic oligonucleotide
cacggagggugagccgggg

SEQ ID NO: 597434 - RNA, 19 nt, Artificial Sequence
  Description of Artificial Sequence: Synthetic oligonucleotide
ucaugaccuuagggacagc

SEQ ID NO: 597435 - RNA, 19 nt, Artificial Sequence
  Description of Artificial Sequence: Synthetic oligonucleotide
ucggugggugcuggcugug

SEQ ID NO: 597436 - RNA, 19 nt, Artificial Sequence
  Description of Artificial Sequence: Synthetic oligonucleotide
ucccuguuccaggcuccca

SEQ ID NO: 597437 - RNA, 19 nt, Artificial Sequence
  Description of Artificial Sequence: Synthetic oligonucleotide
ggaaaacaauauugcggau

SEQ ID NO: 597438 - RNA, 19 nt, Artificial Sequence
  Description of Artificial Sequence: Synthetic oligonucleotide
gccaauuguccagcuguac

SEQ ID NO: 597439 - RNA, 19 nt, Artificial Sequence
  Description of Artificial Sequence: Synthetic oligonucleotide
cguccgggagcccaaguac

SEQ ID NO: 597440 - RNA, 19 nt, Artificial Sequence
  Description of Artificial Sequence: Synthetic oligonucleotide
ggguuaaaugcuggcagcu

SEQ ID NO: 597441 - RNA, 19 nt, Artificial Sequence
  Description of Artificial Sequence: Synthetic oligonucleotide
agcuuguagcgaaggcgaa

SEQ ID NO: 597442 - RNA, 19 nt, Artificial Sequence
  Description of Artificial Sequence: Synthetic oligonucleotide
guugaucaccugggugaga

SEQ ID NO: 597443 - RNA, 19 nt, Artificial Sequence
  Description of Artificial Sequence: Synthetic oligonucleotide
uggggucauuuaggcccag

SEQ ID NO: 597444 - RNA, 19 nt, Artificial Sequence
  Description of Artificial Sequence: Synthetic oligonucleotide
ccacugcucguugguaggg

SEQ ID NO: 597445 - RNA, 19 nt, Artificial Sequence
  Description of Artificial Sequence: Synthetic oligonucleotide
ugggccgcaugcgcucaca

SEQ ID NO: 597446 - RNA, 19 nt, Artificial Sequence
  Description of Artificial Sequence: Synthetic oligonucleotide
gggccgcaugcgcucacag

SEQ ID NO: 597447 - RNA, 19 nt, Artificial Sequence
  Description of Artificial Sequence: Synthetic oligonucleotide
gccccucccuguuccaggc

SEQ ID NO: 597448 - RNA, 19 nt, Artificial Sequence
  Description of Artificial Sequence: Synthetic oligonucleotide
agagcuccggagacguguu

SEQ ID NO: 597449 - RNA, 19 nt, Artificial Sequence
  Description of Artificial Sequence: Synthetic oligonucleotide
cacuggugguugggguccc

SEQ ID NO: 597450 - RNA, 19 nt, Artificial Sequence
  Description of Artificial Sequence: Synthetic oligonucleotide
ucacccgcuuugagaucuu

SEQ ID NO: 597451 - RNA, 19 nt, Artificial Sequence
  Description of Artificial Sequence: Synthetic oligonucleotide
gcacagugauguuggcuaa

SEQ ID NO: 597452 - RNA, 19 nt, Artificial Sequence
  Description of Artificial Sequence: Synthetic oligonucleotide
cagcgccuguugcaggaga

SEQ ID NO: 597453 - RNA, 19 nt, Artificial Sequence
  Description of Artificial Sequence: Synthetic oligonucleotide
ccuggcuguggcucaucac

SEQ ID NO: 597454 - RNA, 19 nt, Artificial Sequence
  Description of Artificial Sequence: Synthetic oligonucleotide
gaagaugguguggggucau

SEQ ID NO: 597455 - RNA, 19 nt, Artificial Sequence
  Description of Artificial Sequence: Synthetic oligonucleotide
cugacguccgggagcccaa

SEQ ID NO: 597456 - RNA, 19 nt, Artificial Sequence
  Description of Artificial Sequence: Synthetic oligonucleotide
ccgcaugcgcucacagcgc

SEQ ID NO: 597457 - RNA, 19 nt, Artificial Sequence
  Description of Artificial Sequence: Synthetic oligonucleotide
cucguugguaggguugccu

SEQ ID NO: 597458 - RNA, 19 nt, Artificial Sequence
  Description of Artificial Sequence: Synthetic oligonucleotide
ccaccgcacuugcugggcc

SEQ ID NO: 597459 - RNA, 19 nt, Artificial Sequence
  Description of Artificial Sequence: Synthetic oligonucleotide
guccgggagcccaaguacu

SEQ ID NO: 597460 - RNA, 19 nt, Artificial Sequence
  Description of Artificial Sequence: Synthetic oligonucleotide
cugaggguucggcgccauc

SEQ ID NO: 597461 - RNA, 19 nt, Artificial Sequence
  Description of Artificial Sequence: Synthetic oligonucleotide
cacccgcuuugagaucuuc

SEQ ID NO: 597462 - RNA, 19 nt, Artificial Sequence
  Description of Artificial Sequence: Synthetic oligonucleotide
gcaguggaucccgagcaaa

SEQ ID NO: 597463 - RNA, 19 nt, Artificial Sequence
  Description of Artificial Sequence: Synthetic oligonucleotide
gacguccgggagcccaagu

SEQ ID NO: 597464 - RNA, 19 nt, Artificial Sequence
  Description of Artificial Sequence: Synthetic oligonucleotide
guggacgaugggguuaaau

SEQ ID NO: 597465 - RNA, 19 nt, Artificial Sequence
  Description of Artificial Sequence: Synthetic oligonucleotide
cggagacguguuguggagg

SEQ ID NO: 597466 - RNA, 19 nt, Artificial Sequence
  Description of Artificial Sequence: Synthetic oligonucleotide
cuggccguggcaucaccau

SEQ ID NO: 597467 - RNA, 19 nt, Artificial Sequence
  Description of Artificial Sequence: Synthetic oligonucleotide
acguguuguggaggagguu

SEQ ID NO: 597468 - RNA, 19 nt, Artificial Sequence
  Description of Artificial Sequence: Synthetic oligonucleotide
cugacgacuggaagcuguu

SEQ ID NO: 597469 - RNA, 19 nt, Artificial Sequence
  Description of Artificial Sequence: Synthetic oligonucleotide
gccguggcaucaccauuga

SEQ ID NO: 597470 - RNA, 19 nt, Artificial Sequence
  Description of Artificial Sequence: Synthetic oligonucleotide
gcgccaucugacgacugga

SEQ ID NO: 597471 - RNA, 19 nt, Artificial Sequence
  Description of Artificial Sequence: Synthetic oligonucleotide
caccgcacuugcugggccu

SEQ ID NO: 597472 - RNA, 19 nt, Artificial Sequence
  Description of Artificial Sequence: Synthetic oligonucleotide
cccaccgcacuugcugggc

SEQ ID NO: 597473 - RNA, 19 nt, Artificial Sequence
  Description of Artificial Sequence: Synthetic oligonucleotide
gcagcuccaagaucuuauu

SEQ ID NO: 597474 - RNA, 19 nt, Artificial Sequence
  Description of Artificial Sequence: Synthetic oligonucleotide
gcucguugguaggguugcc

SEQ ID NO: 597475 - RNA, 19 nt, Artificial Sequence
  Description of Artificial Sequence: Synthetic oligonucleotide
ccguggcaucaccauugac

SEQ ID NO: 597476 - RNA, 19 nt, Artificial Sequence
  Description of Artificial Sequence: Synthetic oligonucleotide
gcgugggccgcaugcgcuc

SEQ ID NO: 597477 - RNA, 19 nt, Artificial Sequence
  Description of Artificial Sequence: Synthetic oligonucleotide
gcggaugggcuggggagca

SEQ ID NO: 597478 - RNA, 19 nt, Artificial Sequence
  Description of Artificial Sequence: Synthetic oligonucleotide
ggggucauuuaggcccaga

SEQ ID NO: 597479 - RNA, 19 nt, Artificial Sequence
  Description of Artificial Sequence: Synthetic oligonucleotide
gcacggagguccucagggu

SEQ ID NO: 597480 - RNA, 19 nt, Artificial Sequence
  Description of Artificial Sequence: Synthetic oligonucleotide
gccuuuccauaaggcauaa

SEQ ID NO: 597481 - RNA, 19 nt, Artificial Sequence
  Description of Artificial Sequence: Synthetic oligonucleotide
ccucaccccggaccagcug

SEQ ID NO: 597482 - RNA, 19 nt, Artificial Sequence
  Description of Artificial Sequence: Synthetic oligonucleotide
cacugcucguugguagggu

SEQ ID NO: 597483 - RNA, 19 nt, Artificial Sequence
  Description of Artificial Sequence: Synthetic oligonucleotide
cucacucccgagagucauu

SEQ ID NO: 597484 - RNA, 19 nt, Artificial Sequence
  Description of Artificial Sequence: Synthetic oligonucleotide
gguccaggccugagagguc

SEQ ID NO: 597485 - RNA, 19 nt, Artificial Sequence
  Description of Artificial Sequence: Synthetic oligonucleotide
gccuaacagccaugcuucu

SEQ ID NO: 597486 - RNA, 19 nt, Artificial Sequence
  Description of Artificial Sequence: Synthetic oligonucleotide
ggcuguggcucaucaccau

SEQ ID NO: 597487 - RNA, 19 nt, Artificial Sequence
  Description of Artificial Sequence: Synthetic oligonucleotide
aggcagcgcccuggcugug

SEQ ID NO: 597488 - RNA, 19 nt, Artificial Sequence
  Description of Artificial Sequence: Synthetic oligonucleotide
ggaaaagcgugggccgcau

SEQ ID NO: 597489 - RNA, 19 nt, Artificial Sequence
  Description of Artificial Sequence: Synthetic oligonucleotide
cccaaguacuugggagaca

SEQ ID NO: 597490 - RNA, 19 nt, Artificial Sequence
  Description of Artificial Sequence: Synthetic oligonucleotide
cguugguaggguugccugu

SEQ ID NO: 597491 - RNA, 19 nt, Artificial Sequence
  Description of Artificial Sequence: Synthetic oligonucleotide
ccgcacuugcugggccucc

SEQ ID NO: 597492 - RNA, 19 nt, Artificial Sequence
  Description of Artificial Sequence: Synthetic oligonucleotide
ggagguccucaggguguga

SEQ ID NO: 597493 - RNA, 19 nt, Artificial Sequence
  Description of Artificial Sequence: Synthetic oligonucleotide
ccccaccucaggcuggagu

SEQ ID NO: 597494 - RNA, 19 nt, Artificial Sequence
  Description of Artificial Sequence: Synthetic oligonucleotide
ccucacucccgagagucau

SEQ ID NO: 597495 - RNA, 19 nt, Artificial Sequence
  Description of Artificial Sequence: Synthetic oligonucleotide
gggcaagcuacagcugcuu

SEQ ID NO: 597496 - RNA, 19 nt, Artificial Sequence
  Description of Artificial Sequence: Synthetic oligonucleotide
cggcgccaucugacgacug

SEQ ID NO: 597497 - RNA, 19 nt, Artificial Sequence
  Description of Artificial Sequence: Synthetic oligonucleotide
cgcaugcgcucacagcgcu

SEQ ID NO: 597498 - RNA, 19 nt, Artificial Sequence
  Description of Artificial Sequence: Synthetic oligonucleotide
gguggacgaugggguuaaa

SEQ ID NO: 597499 - RNA, 19 nt, Artificial Sequence
  Description of Artificial Sequence: Synthetic oligonucleotide
cggucacuggcaagaugcu

SEQ ID NO: 597500 - RNA, 19 nt, Artificial Sequence
  Description of Artificial Sequence: Synthetic oligonucleotide
gccucaccuucaugaccuu

SEQ ID NO: 597501 - RNA, 19 nt, Artificial Sequence
  Description of Artificial Sequence: Synthetic oligonucleotide
caccccggaccagcugcuu

SEQ ID NO: 597502 - RNA, 19 nt, Artificial Sequence
  Description of Artificial Sequence: Synthetic oligonucleotide
ucaugcauaaacuugaagg

SEQ ID NO: 597503 - RNA, 19 nt, Artificial Sequence
  Description of Artificial Sequence: Synthetic oligonucleotide
uuauaagugggauagaggc

SEQ ID NO: 597504 - RNA, 19 nt, Artificial Sequence
  Description of Artificial Sequence: Synthetic oligonucleotide
aaggguauuaaauauuguc

SEQ ID NO: 597505 - RNA, 19 nt, Artificial Sequence
  Description of Artificial Sequence: Synthetic oligonucleotide
cauguuuuggccaagacag

SEQ ID NO: 597506 - RNA, 19 nt, Artificial Sequence
  Description of Artificial Sequence: Synthetic oligonucleotide
gaggauaccgccuugagcc

SEQ ID NO: 597507 - RNA, 19 nt, Artificial Sequence
  Description of Artificial Sequence: Synthetic oligonucleotide
aauauugucuguugcaugu

SEQ ID NO: 597508 - RNA, 19 nt, Artificial Sequence
  Description of Artificial Sequence: Synthetic oligonucleotide
uuuauaagugggauagagg

SEQ ID NO: 597509 - RNA, 19 nt, Artificial Sequence
  Description of Artificial Sequence: Synthetic oligonucleotide
uggacaaggacaccgaggg

SEQ ID NO: 597510 - RNA, 19 nt, Artificial Sequence
  Description of Artificial Sequence: Synthetic oligonucleotide
acaaaauuaaaagcuaggg

SEQ ID NO: 597511 - RNA, 19 nt, Artificial Sequence
  Description of Artificial Sequence: Synthetic oligonucleotide
uuaaaagcuagggugacag

SEQ ID NO: 597512 - RNA, 19 nt, Artificial Sequence
  Description of Artificial Sequence: Synthetic oligonucleotide
cacauuucggcaauagucg

SEQ ID NO: 597513 - RNA, 19 nt, Artificial Sequence
  Description of Artificial Sequence: Synthetic oligonucleotide
aucacuagcguccuggaag

SEQ ID NO: 597514 - RNA, 19 nt, Artificial Sequence
  Description of Artificial Sequence: Synthetic oligonucleotide
aggucccugaaauacaugg

SEQ ID NO: 597515 - RNA, 19 nt, Artificial Sequence
  Description of Artificial Sequence: Synthetic oligonucleotide
uguuauguggggaucccgg

SEQ ID NO: 597516 - RNA, 19 nt, Artificial Sequence
  Description of Artificial Sequence: Synthetic oligonucleotide
aauuaaaagcuagggugac

SEQ ID NO: 597517 - RNA, 19 nt, Artificial Sequence
  Description of Artificial Sequence: Synthetic oligonucleotide
aaauuaaaagcuaggguga

SEQ ID NO: 597518 - RNA, 19 nt, Artificial Sequence
  Description of Artificial Sequence: Synthetic oligonucleotide
aguaccaggucccauugac

SEQ ID NO: 597519 - RNA, 19 nt, Artificial Sequence
  Description of Artificial Sequence: Synthetic oligonucleotide
uccagugcugucaaggaag

SEQ ID NO: 597520 - RNA, 19 nt, Artificial Sequence
  Description of Artificial Sequence: Synthetic oligonucleotide
guaggcgccacguaaacgg

SEQ ID NO: 597521 - RNA, 19 nt, Artificial Sequence
  Description of Artificial Sequence: Synthetic oligonucleotide
accuuuauaagugggauag

SEQ ID NO: 597522 - RNA, 19 nt, Artificial Sequence
  Description of Artificial Sequence: Synthetic oligonucleotide
aaacgguuggucaugaucu

SEQ ID NO: 597523 - RNA, 19 nt, Artificial Sequence
  Description of Artificial Sequence: Synthetic oligonucleotide
ugaagugagguuccucacg

SEQ ID NO: 597524 - RNA, 19 nt, Artificial Sequence
  Description of Artificial Sequence: Synthetic oligonucleotide
gauauuccauuccagcagc

SEQ ID NO: 597525 - RNA, 19 nt, Artificial Sequence
  Description of Artificial Sequence: Synthetic oligonucleotide
ucaguggacaaggacaccg

SEQ ID NO: 597526 - RNA, 19 nt, Artificial Sequence
  Description of Artificial Sequence: Synthetic oligonucleotide
augagcacaguacaccaac

SEQ ID NO: 597527 - RNA, 19 nt, Artificial Sequence
  Description of Artificial Sequence: Synthetic oligonucleotide
auaaacuugaaggcccugc

SEQ ID NO: 597528 - RNA, 19 nt, Artificial Sequence
  Description of Artificial Sequence: Synthetic oligonucleotide
cuuuauaagugggauagag

SEQ ID NO: 597529 - RNA, 19 nt, Artificial Sequence
  Description of Artificial Sequence: Synthetic oligonucleotide
uggggauugaccuuggggu

SEQ ID NO: 597530 - RNA, 19 nt, Artificial Sequence
  Description of Artificial Sequence: Synthetic oligonucleotide
augcauaaacuugaaggcc

SEQ ID NO: 597531 - RNA, 19 nt, Artificial Sequence
  Description of Artificial Sequence: Synthetic oligonucleotide
aagcccuugacugucauug

SEQ ID NO: 597532 - RNA, 19 nt, Artificial Sequence
  Description of Artificial Sequence: Synthetic oligonucleotide
gacaggcgcaaucagaccc

SEQ ID NO: 597533 - RNA, 19 nt, Artificial Sequence
  Description of Artificial Sequence: Synthetic oligonucleotide
acaggugucaucugggcag

SEQ ID NO: 597534 - RNA, 19 nt, Artificial Sequence
  Description of Artificial Sequence: Synthetic oligonucleotide
uaaacgguuggucaugauc

SEQ ID NO: 597535 - RNA, 19 nt, Artificial Sequence
  Description of Artificial Sequence: Synthetic oligonucleotide
ugccggaucgccaugucgg

SEQ ID NO: 597536 - RNA, 19 nt, Artificial Sequence
  Description of Artificial Sequence: Synthetic oligonucleotide
uaccaggucccauugaccc

SEQ ID NO: 597537 - RNA, 19 nt, Artificial Sequence
  Description of Artificial Sequence: Synthetic oligonucleotide
agagucauggggauugacc

SEQ ID NO: 597538 - RNA, 19 nt, Artificial Sequence
  Description of Artificial Sequence: Synthetic oligonucleotide
acuuccgucaucacuagcg

SEQ ID NO: 597539 - RNA, 19 nt, Artificial Sequence
  Description of Artificial Sequence: Synthetic oligonucleotide
auuacucugagcuacuguu

SEQ ID NO: 597540 - RNA, 19 nt, Artificial Sequence
  Description of Artificial Sequence: Synthetic oligonucleotide
gauggguuguggcuaacag

SEQ ID NO: 597541 - RNA, 19 nt, Artificial Sequence
  Description of Artificial Sequence: Synthetic oligonucleotide
ggcaguuaagccuacagug

SEQ ID NO: 597542 - RNA, 19 nt, Artificial Sequence
  Description of Artificial Sequence: Synthetic oligonucleotide
acauuucggcaauagucgg

SEQ ID NO: 597543 - RNA, 19 nt, Artificial Sequence
  Description of Artificial Sequence: Synthetic oligonucleotide
uuuuggccaagacaguccu

SEQ ID NO: 597544 - RNA, 19 nt, Artificial Sequence
  Description of Artificial Sequence: Synthetic oligonucleotide
gauguggcuggcuauuccc

SEQ ID NO: 597545 - RNA, 19 nt, Artificial Sequence
  Description of Artificial Sequence: Synthetic oligonucleotide
agaggcuagauguggcugg

SEQ ID NO: 597546 - RNA, 19 nt, Artificial Sequence
  Description of Artificial Sequence: Synthetic oligonucleotide
auuucggcaauagucgggg

SEQ ID NO: 597547 - RNA, 19 nt, Artificial Sequence
  Description of Artificial Sequence: Synthetic oligonucleotide
uguacaccgccaaugacau

SEQ ID NO: 597548 - RNA, 19 nt, Artificial Sequence
  Description of Artificial Sequence: Synthetic oligonucleotide
ucaugauggcccgagaaca

SEQ ID NO: 597549 - RNA, 19 nt, Artificial Sequence
  Description of Artificial Sequence: Synthetic oligonucleotide
uggcccgagaacauucugg

SEQ ID NO: 597550 - RNA, 19 nt, Artificial Sequence
  Description of Artificial Sequence: Synthetic oligonucleotide
uucaugauggcccgagaac

SEQ ID NO: 597551 - RNA, 19 nt, Artificial Sequence
  Description of Artificial Sequence: Synthetic oligonucleotide
acuagcguccuggaagucc

SEQ ID NO: 597552 - RNA, 19 nt, Artificial Sequence
  Description of Artificial Sequence: Synthetic oligonucleotide
uccacuucgaccucagggu

SEQ ID NO: 597553 - RNA, 19 nt, Artificial Sequence
  Description of Artificial Sequence: Synthetic oligonucleotide
caauagucggggcagggcc

SEQ ID NO: 597554 - RNA, 19 nt, Artificial Sequence
  Description of Artificial Sequence: Synthetic oligonucleotide
guuaagccuacaguggccg

SEQ ID NO: 597555 - RNA, 19 nt, Artificial Sequence
  Description of Artificial Sequence: Synthetic oligonucleotide
guaagcagccuuuccaggc

SEQ ID NO: 597556 - RNA, 19 nt, Artificial Sequence
  Description of Artificial Sequence: Synthetic oligonucleotide
uuacucugagcuacuguug

SEQ ID NO: 597557 - RNA, 19 nt, Artificial Sequence
  Description of Artificial Sequence: Synthetic oligonucleotide
gcuauagcagcucagcacc

SEQ ID NO: 597558 - RNA, 19 nt, Artificial Sequence
  Description of Artificial Sequence: Synthetic oligonucleotide
uuuuggggacacuggcucg

SEQ ID NO: 597559 - RNA, 19 nt, Artificial Sequence
  Description of Artificial Sequence: Synthetic oligonucleotide
ggauauuccauuccagcag

SEQ ID NO: 597560 - RNA, 19 nt, Artificial Sequence
  Description of Artificial Sequence: Synthetic oligonucleotide
cucgcagcugaccugauac

SEQ ID NO: 597561 - RNA, 19 nt, Artificial Sequence
  Description of Artificial Sequence: Synthetic oligonucleotide
caguuaagccuacaguggc

SEQ ID NO: 597562 - RNA, 19 nt, Artificial Sequence
  Description of Artificial Sequence: Synthetic oligonucleotide
uaagcagccuuuccaggcc

SEQ ID NO: 597563 - RNA, 19 nt, Artificial Sequence
  Description of Artificial Sequence: Synthetic oligonucleotide
acuuugugaguccacuuga

SEQ ID NO: 597564 - RNA, 19 nt, Artificial Sequence
  Description of Artificial Sequence: Synthetic oligonucleotide
cauuucggcaauagucggg

SEQ ID NO: 597565 - RNA, 19 nt, Artificial Sequence
  Description of Artificial Sequence: Synthetic oligonucleotide
uugacccugagcugaagug

SEQ ID NO: 597566 - RNA, 19 nt, Artificial Sequence
  Description of Artificial Sequence: Synthetic oligonucleotide
ugagccacuuccgucauca

SEQ ID NO: 597567 - RNA, 19 nt, Artificial Sequence
  Description of Artificial Sequence: Synthetic oligonucleotide
ugauaggccagggagggca

SEQ ID NO: 597568 - RNA, 19 nt, Artificial Sequence
  Description of Artificial Sequence: Synthetic oligonucleotide
aauagucggggcagggccg

SEQ ID NO: 597569 - RNA, 19 nt, Artificial Sequence
  Description of Artificial Sequence: Synthetic oligonucleotide
accgccaaugacauucucc

SEQ ID NO: 597570 - RNA, 19 nt, Artificial Sequence
  Description of Artificial Sequence: Synthetic oligonucleotide
uaguuugccacggcgacgc

SEQ ID NO: 597571 - RNA, 19 nt, Artificial Sequence
  Description of Artificial Sequence: Synthetic oligonucleotide
caggggaccuuuauaagug

SEQ ID NO: 597572 - RNA, 19 nt, Artificial Sequence
  Description of Artificial Sequence: Synthetic oligonucleotide
accccaugcacugugcccc

SEQ ID NO: 597573 - RNA, 19 nt, Artificial Sequence
  Description of Artificial Sequence: Synthetic oligonucleotide
ggccucaugaguuucuggg

SEQ ID NO: 597574 - RNA, 19 nt, Artificial Sequence
  Description of Artificial Sequence: Synthetic oligonucleotide
cucagagaccaacuuuucc

SEQ ID NO: 597575 - RNA, 19 nt, Artificial Sequence
  Description of Artificial Sequence: Synthetic oligonucleotide
uggcaguuaagccuacagu

SEQ ID NO: 597576 - RNA, 19 nt, Artificial Sequence
  Description of Artificial Sequence: Synthetic oligonucleotide
uuugccacggcgacgcuuc

SEQ ID NO: 597577 - RNA, 19 nt, Artificial Sequence
  Description of Artificial Sequence: Synthetic oligonucleotide
uguuuuggccaagacaguc

SEQ ID NO: 597578 - RNA, 19 nt, Artificial Sequence
  Description of Artificial Sequence: Synthetic oligonucleotide
auaagugggauagaggcua

SEQ ID NO: 597579 - RNA, 19 nt, Artificial Sequence
  Description of Artificial Sequence: Synthetic oligonucleotide
acaaggacaccgagggucc

SEQ ID NO: 597580 - RNA, 19 nt, Artificial Sequence
  Description of Artificial Sequence: Synthetic oligonucleotide
agcagcggucaucacuggc

SEQ ID NO: 597581 - RNA, 19 nt, Artificial Sequence
  Description of Artificial Sequence: Synthetic oligonucleotide
uguugcauguuuuggccaa

SEQ ID NO: 597582 - RNA, 19 nt, Artificial Sequence
  Description of Artificial Sequence: Synthetic oligonucleotide
ccauucggcauccaggucg

SEQ ID NO: 597583 - RNA, 19 nt, Artificial Sequence
  Description of Artificial Sequence: Synthetic oligonucleotide
caucaccucaggcagguac

SEQ ID NO: 597584 - RNA, 19 nt, Artificial Sequence
  Description of Artificial Sequence: Synthetic oligonucleotide
ugaggucccugaaauacau

SEQ ID NO: 597585 - RNA, 19 nt, Artificial Sequence
  Description of Artificial Sequence: Synthetic oligonucleotide
caaaauuaaaagcuagggu

SEQ ID NO: 597586 - RNA, 19 nt, Artificial Sequence
  Description of Artificial Sequence: Synthetic oligonucleotide
ucacuagcguccuggaagu

SEQ ID NO: 597587 - RNA, 19 nt, Artificial Sequence
  Description of Artificial Sequence: Synthetic oligonucleotide
guggcaguuaagccuacag

SEQ ID NO: 597588 - RNA, 19 nt, Artificial Sequence
  Description of Artificial Sequence: Synthetic oligonucleotide
ugauggcccgagaacauuc

SEQ ID NO: 597589 - RNA, 19 nt, Artificial Sequence
  Description of Artificial Sequence: Synthetic oligonucleotide
uguagugcucaguggacaa

SEQ ID NO: 597590 - RNA, 19 nt, Artificial Sequence
  Description of Artificial Sequence: Synthetic oligonucleotide
gccaagacaguccuugggg

SEQ ID NO: 597591 - RNA, 19 nt, Artificial Sequence
  Description of Artificial Sequence: Synthetic oligonucleotide
uguguacaccgccaaugac

SEQ ID NO: 597592 - RNA, 19 nt, Artificial Sequence
  Description of Artificial Sequence: Synthetic oligonucleotide
aggggaccuuuauaagugg

SEQ ID NO: 597593 - RNA, 19 nt, Artificial Sequence
  Description of Artificial Sequence: Synthetic oligonucleotide
caugggucaaggguguccg

SEQ ID NO: 597594 - RNA, 19 nt, Artificial Sequence
  Description of Artificial Sequence: Synthetic oligonucleotide
ucggcaauagucggggcag

SEQ ID NO: 597595 - RNA, 19 nt, Artificial Sequence
  Description of Artificial Sequence: Synthetic oligonucleotide
ucuccgauggguuguggcu

SEQ ID NO: 597596 - RNA, 19 nt, Artificial Sequence
  Description of Artificial Sequence: Synthetic oligonucleotide
ugagcacaguacaccaacu

SEQ ID NO: 597597 - RNA, 19 nt, Artificial Sequence
  Description of Artificial Sequence: Synthetic oligonucleotide
cacccaucaccucaggcag

SEQ ID NO: 597598 - RNA, 19 nt, Artificial Sequence
  Description of Artificial Sequence: Synthetic oligonucleotide
caaggaucaaggugacgag

SEQ ID NO: 597599 - RNA, 19 nt, Artificial Sequence
  Description of Artificial Sequence: Synthetic oligonucleotide
aaggggcccaggcauccuc

SEQ ID NO: 597600 - RNA, 19 nt, Artificial Sequence
  Description of Artificial Sequence: Synthetic oligonucleotide
caaugagcacaguacacca

SEQ ID NO: 597601 - RNA, 19 nt, Artificial Sequence
  Description of Artificial Sequence: Synthetic oligonucleotide
ugcauguuuuggccaagac

SEQ ID NO: 597602 - RNA, 19 nt, Artificial Sequence
  Description of Artificial Sequence: Synthetic oligonucleotide
cauucggcauccaggucgg

SEQ ID NO: 597603 - RNA, 19 nt, Artificial Sequence
  Description of Artificial Sequence: Synthetic oligonucleotide
ggcaguuaccgccaccugg

SEQ ID NO: 597604 - RNA, 19 nt, Artificial Sequence
  Description of Artificial Sequence: Synthetic oligonucleotide
ugcagaguuucuucugagu

SEQ ID NO: 597605 - RNA, 19 nt, Artificial Sequence
  Description of Artificial Sequence: Synthetic oligonucleotide
guuauguggggaucccggc

SEQ ID NO: 597606 - RNA, 19 nt, Artificial Sequence
  Description of Artificial Sequence: Synthetic oligonucleotide
cacacccucaagcagugug

SEQ ID NO: 597607 - RNA, 19 nt, Artificial Sequence
  Description of Artificial Sequence: Synthetic oligonucleotide
ugaggucuccgauggguug

SEQ ID NO: 597608 - RNA, 19 nt, Artificial Sequence
  Description of Artificial Sequence: Synthetic oligonucleotide
cccgagaacauucuggggc

SEQ ID NO: 597609 - RNA, 19 nt, Artificial Sequence
  Description of Artificial Sequence: Synthetic oligonucleotide
cauucuccgcacccgauug

SEQ ID NO: 597610 - RNA, 19 nt, Artificial Sequence
  Description of Artificial Sequence: Synthetic oligonucleotide
cagaacacacccucaagca

SEQ ID NO: 597611 - RNA, 19 nt, Artificial Sequence
  Description of Artificial Sequence: Synthetic oligonucleotide
uucuccgcacccgauuggg

SEQ ID NO: 597612 - RNA, 19 nt, Artificial Sequence
  Description of Artificial Sequence: Synthetic oligonucleotide
uuccccugaagugagguuc

SEQ ID NO: 597613 - RNA, 19 nt, Artificial Sequence
  Description of Artificial Sequence: Synthetic oligonucleotide
ccgccaaugacauucuccg

SEQ ID NO: 597614 - RNA, 19 nt, Artificial Sequence
  Description of Artificial Sequence: Synthetic oligonucleotide
ucauggggauugaccuugg

SEQ ID NO: 597615 - RNA, 19 nt, Artificial Sequence
  Description of Artificial Sequence: Synthetic oligonucleotide
ugucaugcauaaacuugaa

SEQ ID NO: 597616 - RNA, 19 nt, Artificial Sequence
  Description of Artificial Sequence: Synthetic oligonucleotide
cuauagcagcucagcaccc

SEQ ID NO: 597617 - RNA, 19 nt, Artificial Sequence
  Description of Artificial Sequence: Synthetic oligonucleotide
caacauacugacagcccug

SEQ ID NO: 597618 - RNA, 19 nt, Artificial Sequence
  Description of Artificial Sequence: Synthetic oligonucleotide
ugugacagccucgguacgc

SEQ ID NO: 597619 - RNA, 19 nt, Artificial Sequence
  Description of Artificial Sequence: Synthetic oligonucleotide
auucuccgcacccgauugg

SEQ ID NO: 597620 - RNA, 19 nt, Artificial Sequence
  Description of Artificial Sequence: Synthetic oligonucleotide
gcaaggaucaaggugacga

SEQ ID NO: 597621 - RNA, 19 nt, Artificial Sequence
  Description of Artificial Sequence: Synthetic oligonucleotide
ucccugaaauacauggcuu

SEQ ID NO: 597622 - RNA, 19 nt, Artificial Sequence
  Description of Artificial Sequence: Synthetic oligonucleotide
guguacaccgccaaugaca

SEQ ID NO: 597623 - RNA, 19 nt, Artificial Sequence
  Description of Artificial Sequence: Synthetic oligonucleotide
guggacaaggacaccgagg

SEQ ID NO: 597624 - RNA, 19 nt, Artificial Sequence
  Description of Artificial Sequence: Synthetic oligonucleotide
gcaguuaagccuacagugg

SEQ ID NO: 597625 - RNA, 19 nt, Artificial Sequence
  Description of Artificial Sequence: Synthetic oligonucleotide
ugggccucaguuucugaca

SEQ ID NO: 597626 - RNA, 19 nt, Artificial Sequence
  Description of Artificial Sequence: Synthetic oligonucleotide
agggcuaguuugccacggc

SEQ ID NO: 597627 - RNA, 19 nt, Artificial Sequence
  Description of Artificial Sequence: Synthetic oligonucleotide
gauugggccccagaacuug

SEQ ID NO: 597628 - RNA, 19 nt, Artificial Sequence
  Description of Artificial Sequence: Synthetic oligonucleotide
uggccucaugaguuucugg

SEQ ID NO: 597629 - RNA, 19 nt, Artificial Sequence
  Description of Artificial Sequence: Synthetic oligonucleotide
agccuacaguggccgagcc

SEQ ID NO: 597630 - RNA, 19 nt, Artificial Sequence
  Description of Artificial Sequence: Synthetic oligonucleotide
acagccucgguacgccagg

SEQ ID NO: 597631 - RNA, 19 nt, Artificial Sequence
  Description of Artificial Sequence: Synthetic oligonucleotide
auuaaaagcuagggugaca

SEQ ID NO: 597632 - RNA, 19 nt, Artificial Sequence
  Description of Artificial Sequence: Synthetic oligonucleotide
aggaggguaagggaggagu

SEQ ID NO: 597633 - RNA, 19 nt, Artificial Sequence
  Description of Artificial Sequence: Synthetic oligonucleotide
ucaucacuagcguccugga

SEQ ID NO: 597634 - RNA, 19 nt, Artificial Sequence
  Description of Artificial Sequence: Synthetic oligonucleotide
cgcaaucagacccaggagg

SEQ ID NO: 597635 - RNA, 19 nt, Artificial Sequence
  Description of Artificial Sequence: Synthetic oligonucleotide
cugaagugagguuccucac

SEQ ID NO: 597636 - RNA, 19 nt, Artificial Sequence
  Description of Artificial Sequence: Synthetic oligonucleotide
ugacaggcgcaaucagacc

SEQ ID NO: 597637 - RNA, 19 nt, Artificial Sequence
  Description of Artificial Sequence: Synthetic oligonucleotide
ggcuauagcagcucagcac

SEQ ID NO: 597638 - RNA, 19 nt, Artificial Sequence
  Description of Artificial Sequence: Synthetic oligonucleotide
agagaccaacuuuuccaga

SEQ ID NO: 597639 - RNA, 19 nt, Artificial Sequence
  Description of Artificial Sequence: Synthetic oligonucleotide
aggaggauaccgccuugag

SEQ ID NO: 597640 - RNA, 19 nt, Artificial Sequence
  Description of Artificial Sequence: Synthetic oligonucleotide
ucugagcuacuguugccuc

SEQ ID NO: 597641 - RNA, 19 nt, Artificial Sequence
  Description of Artificial Sequence: Synthetic oligonucleotide
cugcagaguuucuucugag

SEQ ID NO: 597642 - RNA, 19 nt, Artificial Sequence
  Description of Artificial Sequence: Synthetic oligonucleotide
ggcgcaaucagacccagga

SEQ ID NO: 597643 - RNA, 19 nt, Artificial Sequence
  Description of Artificial Sequence: Synthetic oligonucleotide
aaaagacaguaagcagccu

SEQ ID NO: 597644 - RNA, 19 nt, Artificial Sequence
  Description of Artificial Sequence: Synthetic oligonucleotide
uaacagccgcccuucuggc

SEQ ID NO: 597645 - RNA, 19 nt, Artificial Sequence
  Description of Artificial Sequence: Synthetic oligonucleotide
agacuuagauguagugcuc

SEQ ID NO: 597646 - RNA, 19 nt, Artificial Sequence
  Description of Artificial Sequence: Synthetic oligonucleotide
ccuugacugucauugcucc

SEQ ID NO: 597647 - RNA, 19 nt, Artificial Sequence
  Description of Artificial Sequence: Synthetic oligonucleotide
cuaguuugccacggcgacg

SEQ ID NO: 597648 - RNA, 19 nt, Artificial Sequence
  Description of Artificial Sequence: Synthetic oligonucleotide
agccacauguguacaccgc

SEQ ID NO: 597649 - RNA, 19 nt, Artificial Sequence
  Description of Artificial Sequence: Synthetic oligonucleotide
guuaccgccaccugggccu

SEQ ID NO: 597650 - RNA, 19 nt, Artificial Sequence
  Description of Artificial Sequence: Synthetic oligonucleotide
cuagcguccuggaagucca

SEQ ID NO: 597651 - RNA, 19 nt, Artificial Sequence
  Description of Artificial Sequence: Synthetic oligonucleotide
uuaagccuacaguggccga

SEQ ID NO: 597652 - RNA, 19 nt, Artificial Sequence
  Description of Artificial Sequence: Synthetic oligonucleotide
uugaggucuccgauggguu

SEQ ID NO: 597653 - RNA, 19 nt, Artificial Sequence
  Description of Artificial Sequence: Synthetic oligonucleotide
aaugagcacaguacaccaa

SEQ ID NO: 597654 - RNA, 19 nt, Artificial Sequence
  Description of Artificial Sequence: Synthetic oligonucleotide
ggaggauaccgccuugagc

SEQ ID NO: 597655 - RNA, 19 nt, Artificial Sequence
  Description of Artificial Sequence: Synthetic oligonucleotide
uccgcacccgauugggccc

SEQ ID NO: 597656 - RNA, 19 nt, Artificial Sequence
  Description of Artificial Sequence: Synthetic oligonucleotide
uguggcuaacagccgcccu

SEQ ID NO: 597657 - RNA, 19 nt, Artificial Sequence
  Description of Artificial Sequence: Synthetic oligonucleotide
uauagcagcucagcacccu

SEQ ID NO: 597658 - RNA, 19 nt, Artificial Sequence
  Description of Artificial Sequence: Synthetic oligonucleotide
gcaguuaccgccaccuggg

SEQ ID NO: 597659 - RNA, 19 nt, Artificial Sequence
  Description of Artificial Sequence: Synthetic oligonucleotide
aacagccgcccuucuggcu

SEQ ID NO: 597660 - RNA, 19 nt, Artificial Sequence
  Description of Artificial Sequence: Synthetic oligonucleotide
caaggcagccuuugagcac

SEQ ID NO: 597661 - RNA, 19 nt, Artificial Sequence
  Description of Artificial Sequence: Synthetic oligonucleotide
guguuauguggggaucccg

SEQ ID NO: 597662 - RNA, 19 nt, Artificial Sequence
  Description of Artificial Sequence: Synthetic oligonucleotide
gcaaucagacccaggaggc

SEQ ID NO: 597663 - RNA, 19 nt, Artificial Sequence
  Description of Artificial Sequence: Synthetic oligonucleotide
aaagcccuugacugucauu

SEQ ID NO: 597664 - RNA, 19 nt, Artificial Sequence
  Description of Artificial Sequence: Synthetic oligonucleotide
gucaaggguguccgggagc

SEQ ID NO: 597665 - RNA, 19 nt, Artificial Sequence
  Description of Artificial Sequence: Synthetic oligonucleotide
ggcucuaggcagcuagcgg

SEQ ID NO: 597666 - RNA, 19 nt, Artificial Sequence
  Description of Artificial Sequence: Synthetic oligonucleotide
agcggcugaggucuucugu

SEQ ID NO: 597667 - RNA, 19 nt, Artificial Sequence
  Description of Artificial Sequence: Synthetic oligonucleotide
uuucggcaauagucggggc

SEQ ID NO: 597668 - RNA, 19 nt, Artificial Sequence
  Description of Artificial Sequence: Synthetic oligonucleotide
guuguggcuaacagccgcc

SEQ ID NO: 597669 - RNA, 19 nt, Artificial Sequence
  Description of Artificial Sequence: Synthetic oligonucleotide
caccccaugcacugugccc

SEQ ID NO: 597670 - RNA, 19 nt, Artificial Sequence
  Description of Artificial Sequence: Synthetic oligonucleotide
ggccaagacaguccuuggg

SEQ ID NO: 597671 - RNA, 19 nt, Artificial Sequence
  Description of Artificial Sequence: Synthetic oligonucleotide
gggcuaguuugccacggcg

SEQ ID NO: 597672 - RNA, 19 nt, Artificial Sequence
  Description of Artificial Sequence: Synthetic oligonucleotide
ugagcuacuguugccucau

SEQ ID NO: 597673 - RNA, 19 nt, Artificial Sequence
  Description of Artificial Sequence: Synthetic oligonucleotide
gagguuccuccauucggca

SEQ ID NO: 597674 - RNA, 19 nt, Artificial Sequence
  Description of Artificial Sequence: Synthetic oligonucleotide
cugcagagaugccuggguc

SEQ ID NO: 597675 - RNA, 19 nt, Artificial Sequence
  Description of Artificial Sequence: Synthetic oligonucleotide
gacagccucgguacgccag

SEQ ID NO: 597676 - RNA, 19 nt, Artificial Sequence
  Description of Artificial Sequence: Synthetic oligonucleotide
agagccuggacagcaacau

SEQ ID NO: 597677 - RNA, 19 nt, Artificial Sequence
  Description of Artificial Sequence: Synthetic oligonucleotide
auagucggggcagggccgg

SEQ ID NO: 597678 - RNA, 19 nt, Artificial Sequence
  Description of Artificial Sequence: Synthetic oligonucleotide
cuguugcauguuuuggcca

SEQ ID NO: 597679 - RNA, 19 nt, Artificial Sequence
  Description of Artificial Sequence: Synthetic oligonucleotide
ggagguuccuccauucggc

SEQ ID NO: 597680 - RNA, 19 nt, Artificial Sequence
  Description of Artificial Sequence: Synthetic oligonucleotide
auggcccgagaacauucug

SEQ ID NO: 597681 - RNA, 19 nt, Artificial Sequence
  Description of Artificial Sequence: Synthetic oligonucleotide
ccugaagugagguuccuca

SEQ ID NO: 597682 - RNA, 19 nt, Artificial Sequence
  Description of Artificial Sequence: Synthetic oligonucleotide
cauggggauugaccuuggg

SEQ ID NO: 597683 - RNA, 19 nt, Artificial Sequence
  Description of Artificial Sequence: Synthetic oligonucleotide
ccgagaacauucuggggcc

SEQ ID NO: 597684 - RNA, 19 nt, Artificial Sequence
  Description of Artificial Sequence: Synthetic oligonucleotide
gcuaguuugccacggcgac

SEQ ID NO: 597685 - RNA, 19 nt, Artificial Sequence
  Description of Artificial Sequence: Synthetic oligonucleotide
acauucuccgcacccgauu

SEQ ID NO: 597686 - RNA, 19 nt, Artificial Sequence
  Description of Artificial Sequence: Synthetic oligonucleotide
ucgcagcugaccugauaca

SEQ ID NO: 597687 - RNA, 19 nt, Artificial Sequence
  Description of Artificial Sequence: Synthetic oligonucleotide
uaggcgccacguaaacggu

SEQ ID NO: 597688 - RNA, 19 nt, Artificial Sequence
  Description of Artificial Sequence: Synthetic oligonucleotide
acguaaacgguuggucaug

SEQ ID NO: 597689 - RNA, 19 nt, Artificial Sequence
  Description of Artificial Sequence: Synthetic oligonucleotide
auugccaccguaggcgcca

SEQ ID NO: 597690 - RNA, 19 nt, Artificial Sequence
  Description of Artificial Sequence: Synthetic oligonucleotide
gcuauuccccugaagugag

SEQ ID NO: 597691 - RNA, 19 nt, Artificial Sequence
  Description of Artificial Sequence: Synthetic oligonucleotide
cauugccaccguaggcgcc

SEQ ID NO: 597692 - RNA, 19 nt, Artificial Sequence
  Description of Artificial Sequence: Synthetic oligonucleotide
agcguccuggaaguccacg

SEQ ID NO: 597693 - RNA, 19 nt, Artificial Sequence
  Description of Artificial Sequence: Synthetic oligonucleotide
gccucgguacgccaggugc

SEQ ID NO: 597694 - RNA, 19 nt, Artificial Sequence
  Description of Artificial Sequence: Synthetic oligonucleotide
guagugcucaguggacaag

SEQ ID NO: 597695 - RNA, 19 nt, Artificial Sequence
  Description of Artificial Sequence: Synthetic oligonucleotide
uccgauggguuguggcuaa

SEQ ID NO: 597696 - RNA, 19 nt, Artificial Sequence
  Description of Artificial Sequence: Synthetic oligonucleotide
gacccugagcugaaguguc

SEQ ID NO: 597697 - RNA, 19 nt, Artificial Sequence
  Description of Artificial Sequence: Synthetic oligonucleotide
gaggcuagauguggcuggc

SEQ ID NO: 597698 - RNA, 19 nt, Artificial Sequence
  Description of Artificial Sequence: Synthetic oligonucleotide
uuccuggggagccgcggga

SEQ ID NO: 597699 - RNA, 19 nt, Artificial Sequence
  Description of Artificial Sequence: Synthetic oligonucleotide
aggauaccgccuugagccu

SEQ ID NO: 597700 - RNA, 19 nt, Artificial Sequence
  Description of Artificial Sequence: Synthetic oligonucleotide
cuugggguuuccgcagccc

SEQ ID NO: 597701 - RNA, 19 nt, Artificial Sequence
  Description of Artificial Sequence: Synthetic oligonucleotide
ggucaaggguguccgggag

SEQ ID NO: 597702 - RNA, 19 nt, Artificial Sequence
  Description of Artificial Sequence: Synthetic oligonucleotide
aagggaagacagagcugug

SEQ ID NO: 597703 - RNA, 19 nt, Artificial Sequence
  Description of Artificial Sequence: Synthetic oligonucleotide
gcaacauacugacagcccu

SEQ ID NO: 597704 - RNA, 19 nt, Artificial Sequence
  Description of Artificial Sequence: Synthetic oligonucleotide
cacccucaagcaguguggc

SEQ ID NO: 597705 - RNA, 19 nt, Artificial Sequence
  Description of Artificial Sequence: Synthetic oligonucleotide
uagauguggcuggcuauuc

SEQ ID NO: 597706 - RNA, 19 nt, Artificial Sequence
  Description of Artificial Sequence: Synthetic oligonucleotide
guugcauguuuuggccaag

SEQ ID NO: 597707 - RNA, 19 nt, Artificial Sequence
  Description of Artificial Sequence: Synthetic oligonucleotide
accagggacgccccggcaa

SEQ ID NO: 597708 - RNA, 19 nt, Artificial Sequence
  Description of Artificial Sequence: Synthetic oligonucleotide
ugacagccucgguacgcca

SEQ ID NO: 597709 - RNA, 19 nt, Artificial Sequence
  Description of Artificial Sequence: Synthetic oligonucleotide
gccacggcgacgcuucucc

SEQ ID NO: 597710 - RNA, 19 nt, Artificial Sequence
  Description of Artificial Sequence: Synthetic oligonucleotide
ugucucggagcuuggccuu

SEQ ID NO: 597711 - RNA, 19 nt, Artificial Sequence
  Description of Artificial Sequence: Synthetic oligonucleotide
ggugucaucugggcagccg

SEQ ID NO: 597712 - RNA, 19 nt, Artificial Sequence
  Description of Artificial Sequence: Synthetic oligonucleotide
uguggcaguuaagccuaca

SEQ ID NO: 597713 - RNA, 19 nt, Artificial Sequence
  Description of Artificial Sequence: Synthetic oligonucleotide
gugacagccucgguacgcc

SEQ ID NO: 597714 - RNA, 19 nt, Artificial Sequence
  Description of Artificial Sequence: Synthetic oligonucleotide
gucgggcuuggugaugucc

SEQ ID NO: 597715 - RNA, 19 nt, Artificial Sequence
  Description of Artificial Sequence: Synthetic oligonucleotide
cuccauucggcauccaggu

SEQ ID NO: 597716 - RNA, 19 nt, Artificial Sequence
  Description of Artificial Sequence: Synthetic oligonucleotide
gugaguccacuugagggga

SEQ ID NO: 597717 - RNA, 19 nt, Artificial Sequence
  Description of Artificial Sequence: Synthetic oligonucleotide
gggccccagaacuugucag

SEQ ID NO: 597718 - RNA, 19 nt, Artificial Sequence
  Description of Artificial Sequence: Synthetic oligonucleotide
ggcaaugagcacaguacac

SEQ ID NO: 597719 - RNA, 19 nt, Artificial Sequence
  Description of Artificial Sequence: Synthetic oligonucleotide
gcggucaucacuggcuggg

SEQ ID NO: 597720 - RNA, 19 nt, Artificial Sequence
  Description of Artificial Sequence: Synthetic oligonucleotide
cucgguacgccaggugccc

SEQ ID NO: 597721 - RNA, 19 nt, Artificial Sequence
  Description of Artificial Sequence: Synthetic oligonucleotide
cugagcuacuguugccuca

SEQ ID NO: 597722 - RNA, 19 nt, Artificial Sequence
  Description of Artificial Sequence: Synthetic oligonucleotide
uuuggccaagacaguccuu

SEQ ID NO: 597723 - RNA, 19 nt, Artificial Sequence
  Description of Artificial Sequence: Synthetic oligonucleotide
caaggguauuaaauauugu

SEQ ID NO: 597724 - RNA, 19 nt, Artificial Sequence
  Description of Artificial Sequence: Synthetic oligonucleotide
aguggccgagccagcugcc

SEQ ID NO: 597725 - RNA, 19 nt, Artificial Sequence
  Description of Artificial Sequence: Synthetic oligonucleotide
cacauguguacaccgccaa

SEQ ID NO: 597726 - RNA, 19 nt, Artificial Sequence
  Description of Artificial Sequence: Synthetic oligonucleotide
ggcaauagucggggcaggg

SEQ ID NO: 597727 - RNA, 19 nt, Artificial Sequence
  Description of Artificial Sequence: Synthetic oligonucleotide
ugcugucaaggaagacuua

SEQ ID NO: 597728 - RNA, 19 nt, Artificial Sequence
  Description of Artificial Sequence: Synthetic oligonucleotide
gcuaacagccgcccuucug

SEQ ID NO: 597729 - RNA, 19 nt, Artificial Sequence
  Description of Artificial Sequence: Synthetic oligonucleotide
ggagggcaugggucaaggg

SEQ ID NO: 597730 - RNA, 19 nt, Artificial Sequence
  Description of Artificial Sequence: Synthetic oligonucleotide
cauuacucugagcuacugu

SEQ ID NO: 597731 - RNA, 19 nt, Artificial Sequence
  Description of Artificial Sequence: Synthetic oligonucleotide
ccacguaaacgguugguca

SEQ ID NO: 597732 - RNA, 19 nt, Artificial Sequence
  Description of Artificial Sequence: Synthetic oligonucleotide
cugguguuauguggggauc

SEQ ID NO: 597733 - RNA, 19 nt, Artificial Sequence
  Description of Artificial Sequence: Synthetic oligonucleotide
agcaucccuguggccaggg

SEQ ID NO: 597734 - RNA, 19 nt, Artificial Sequence
  Description of Artificial Sequence: Synthetic oligonucleotide
caggugucaucugggcagc

SEQ ID NO: 597735 - RNA, 19 nt, Artificial Sequence
  Description of Artificial Sequence: Synthetic oligonucleotide
cccuuggauauuccauucc

SEQ ID NO: 597736 - RNA, 19 nt, Artificial Sequence
  Description of Artificial Sequence: Synthetic oligonucleotide
auauugucuguugcauguu

SEQ ID NO: 597737 - RNA, 19 nt, Artificial Sequence
  Description of Artificial Sequence: Synthetic oligonucleotide
gggcucuaggcagcuagcg

SEQ ID NO: 597738 - RNA, 19 nt, Artificial Sequence
  Description of Artificial Sequence: Synthetic oligonucleotide
acaggcgcaaucagaccca

SEQ ID NO: 597739 - RNA, 19 nt, Artificial Sequence
  Description of Artificial Sequence: Synthetic oligonucleotide
uagcggcugaggucuucug

SEQ ID NO: 597740 - RNA, 19 nt, Artificial Sequence
  Description of Artificial Sequence: Synthetic oligonucleotide
ccccauuacucugagcuac

SEQ ID NO: 597741 - RNA, 19 nt, Artificial Sequence
  Description of Artificial Sequence: Synthetic oligonucleotide
acccucaagcaguguggca

SEQ ID NO: 597742 - RNA, 19 nt, Artificial Sequence
  Description of Artificial Sequence: Synthetic oligonucleotide
caguuaccgccaccugggc

SEQ ID NO: 597743 - RNA, 19 nt, Artificial Sequence
  Description of Artificial Sequence: Synthetic oligonucleotide
gcugaccugauacaaaauu

SEQ ID NO: 597744 - RNA, 19 nt, Artificial Sequence
  Description of Artificial Sequence: Synthetic oligonucleotide
cccuugacugucauugcuc

SEQ ID NO: 597745 - RNA, 19 nt, Artificial Sequence
  Description of Artificial Sequence: Synthetic oligonucleotide
agguaccggcccuuggaua

SEQ ID NO: 597746 - RNA, 19 nt, Artificial Sequence
  Description of Artificial Sequence: Synthetic oligonucleotide
uaccgccuugagccucucc

SEQ ID NO: 597747 - RNA, 19 nt, Artificial Sequence
  Description of Artificial Sequence: Synthetic oligonucleotide
gcgcaaucagacccaggag

SEQ ID NO: 597748 - RNA, 19 nt, Artificial Sequence
  Description of Artificial Sequence: Synthetic oligonucleotide
gccacuuccgucaucacua

SEQ ID NO: 597749 - RNA, 19 nt, Artificial Sequence
  Description of Artificial Sequence: Synthetic oligonucleotide
gcgacgcuucuccucaggc

SEQ ID NO: 597750 - RNA, 19 nt, Artificial Sequence
  Description of Artificial Sequence: Synthetic oligonucleotide
cacguaaacgguuggucau

SEQ ID NO: 597751 - RNA, 19 nt, Artificial Sequence
  Description of Artificial Sequence: Synthetic oligonucleotide
gcaauagucggggcagggc

SEQ ID NO: 597752 - RNA, 19 nt, Artificial Sequence
  Description of Artificial Sequence: Synthetic oligonucleotide
ccaagacaguccuugggga

SEQ ID NO: 597753 - RNA, 19 nt, Artificial Sequence
  Description of Artificial Sequence: Synthetic oligonucleotide
cagagucauggggauugac

SEQ ID NO: 597754 - RNA, 19 nt, Artificial Sequence
  Description of Artificial Sequence: Synthetic oligonucleotide
ggcgccacguaaacgguug

SEQ ID NO: 597755 - RNA, 19 nt, Artificial Sequence
  Description of Artificial Sequence: Synthetic oligonucleotide
gggaccuuuauaaguggga

SEQ ID NO: 597756 - RNA, 19 nt, Artificial Sequence
  Description of Artificial Sequence: Synthetic oligonucleotide
ggccaaggguauuaaauau

SEQ ID NO: 597757 - RNA, 19 nt, Artificial Sequence
  Description of Artificial Sequence: Synthetic oligonucleotide
caccguaggcgccacguaa

SEQ ID NO: 597758 - RNA, 19 nt, Artificial Sequence
  Description of Artificial Sequence: Synthetic oligonucleotide
auugggccccagaacuugu

SEQ ID NO: 597759 - RNA, 19 nt, Artificial Sequence
  Description of Artificial Sequence: Synthetic oligonucleotide
cagcagcggucaucacugg

SEQ ID NO: 597760 - RNA, 19 nt, Artificial Sequence
  Description of Artificial Sequence: Synthetic oligonucleotide
ggcgacgcuucuccucagg

SEQ ID NO: 597761 - RNA, 19 nt, Artificial Sequence
  Description of Artificial Sequence: Synthetic oligonucleotide
gguaccggcccuuggauau

SEQ ID NO: 597762 - RNA, 19 nt, Artificial Sequence
  Description of Artificial Sequence: Synthetic oligonucleotide
ggcuagauguggcuggcua

SEQ ID NO: 597763 - RNA, 19 nt, Artificial Sequence
  Description of Artificial Sequence: Synthetic oligonucleotide
accggcccuuggauauucc

SEQ ID NO: 597764 - RNA, 19 nt, Artificial Sequence
  Description of Artificial Sequence: Synthetic oligonucleotide
cuuccgucaucacuagcgu

SEQ ID NO: 597765 - RNA, 19 nt, Artificial Sequence
  Description of Artificial Sequence: Synthetic oligonucleotide
augauggcccgagaacauu

SEQ ID NO: 597766 - RNA, 19 nt, Artificial Sequence
  Description of Artificial Sequence: Synthetic oligonucleotide
ggcuaguuugccacggcga

SEQ ID NO: 597767 - RNA, 19 nt, Artificial Sequence
  Description of Artificial Sequence: Synthetic oligonucleotide
gccacguaaacgguugguc

SEQ ID NO: 597768 - RNA, 19 nt, Artificial Sequence
  Description of Artificial Sequence: Synthetic oligonucleotide
guacgccaggugccccagg

SEQ ID NO: 597769 - RNA, 19 nt, Artificial Sequence
  Description of Artificial Sequence: Synthetic oligonucleotide
gcucagcacccuccaaggc

SEQ ID NO: 597770 - RNA, 19 nt, Artificial Sequence
  Description of Artificial Sequence: Synthetic oligonucleotide
uaccggcccuuggauauuc

SEQ ID NO: 597771 - RNA, 19 nt, Artificial Sequence
  Description of Artificial Sequence: Synthetic oligonucleotide
caugucgggcuuggugaug

SEQ ID NO: 597772 - RNA, 19 nt, Artificial Sequence
  Description of Artificial Sequence: Synthetic oligonucleotide
accguaggcgccacguaaa

SEQ ID NO: 597773 - RNA, 19 nt, Artificial Sequence
  Description of Artificial Sequence: Synthetic oligonucleotide
ucugcaugucagggccacu

SEQ ID NO: 597774 - RNA, 19 nt, Artificial Sequence
  Description of Artificial Sequence: Synthetic oligonucleotide
cagcuagcggcugaggucu

SEQ ID NO: 597775 - RNA, 19 nt, Artificial Sequence
  Description of Artificial Sequence: Synthetic oligonucleotide
agaaggugucaugcauaaa

SEQ ID NO: 597776 - RNA, 19 nt, Artificial Sequence
  Description of Artificial Sequence: Synthetic oligonucleotide
caggcgcaaucagacccag

SEQ ID NO: 597777 - RNA, 19 nt, Artificial Sequence
  Description of Artificial Sequence: Synthetic oligonucleotide
cccauugacccugagcuga

SEQ ID NO: 597778 - RNA, 19 nt, Artificial Sequence
  Description of Artificial Sequence: Synthetic oligonucleotide
aggucccauugacccugag

SEQ ID NO: 597779 - RNA, 19 nt, Artificial Sequence
  Description of Artificial Sequence: Synthetic oligonucleotide
ggcucacuugaggucuccg

SEQ ID NO: 597780 - RNA, 19 nt, Artificial Sequence
  Description of Artificial Sequence: Synthetic oligonucleotide
gauggcccgagaacauucu

SEQ ID NO: 597781 - RNA, 19 nt, Artificial Sequence
  Description of Artificial Sequence: Synthetic oligonucleotide
uagcguccuggaaguccac

SEQ ID NO: 597782 - RNA, 19 nt, Artificial Sequence
  Description of Artificial Sequence: Synthetic oligonucleotide
agggacgccccggcaauga

SEQ ID NO: 597783 - RNA, 19 nt, Artificial Sequence
  Description of Artificial Sequence: Synthetic oligonucleotide
agcuagggugacaggcgca

SEQ ID NO: 597784 - RNA, 19 nt, Artificial Sequence
  Description of Artificial Sequence: Synthetic oligonucleotide
cucuaggcagcuagcggcu

SEQ ID NO: 597785 - RNA, 19 nt, Artificial Sequence
  Description of Artificial Sequence: Synthetic oligonucleotide
gggucaaggguguccggga

SEQ ID NO: 597786 - RNA, 19 nt, Artificial Sequence
  Description of Artificial Sequence: Synthetic oligonucleotide
uggaguccaggagguuccu

SEQ ID NO: 597787 - RNA, 19 nt, Artificial Sequence
  Description of Artificial Sequence: Synthetic oligonucleotide
ccgccagccacauguguac

SEQ ID NO: 597788 - RNA, 19 nt, Artificial Sequence
  Description of Artificial Sequence: Synthetic oligonucleotide
caccgaggguccagaugug

SEQ ID NO: 597789 - RNA, 19 nt, Artificial Sequence
  Description of Artificial Sequence: Synthetic oligonucleotide
gcacugugccccauuacuc

SEQ ID NO: 597790 - RNA, 19 nt, Artificial Sequence
  Description of Artificial Sequence: Synthetic oligonucleotide
ggaugucucggagcuuggc

SEQ ID NO: 597791 - RNA, 19 nt, Artificial Sequence
  Description of Artificial Sequence: Synthetic oligonucleotide
gauaccgccuugagccucu

SEQ ID NO: 597792 - RNA, 19 nt, Artificial Sequence
  Description of Artificial Sequence: Synthetic oligonucleotide
caggaggauaccgccuuga

SEQ ID NO: 597793 - RNA, 19 nt, Artificial Sequence
  Description of Artificial Sequence: Synthetic oligonucleotide
ggaccuuuauaagugggau

SEQ ID NO: 597794 - RNA, 19 nt, Artificial Sequence
  Description of Artificial Sequence: Synthetic oligonucleotide
cccgauugggccccagaac

SEQ ID NO: 597795 - RNA, 19 nt, Artificial Sequence
  Description of Artificial Sequence: Synthetic oligonucleotide
cgacgcuucuccucaggcc

SEQ ID NO: 597796 - RNA, 19 nt, Artificial Sequence
  Description of Artificial Sequence: Synthetic oligonucleotide
aguuugccacggcgacgcu

SEQ ID NO: 597797 - RNA, 19 nt, Artificial Sequence
  Description of Artificial Sequence: Synthetic oligonucleotide
ccgauugggccccagaacu

SEQ ID NO: 597798 - RNA, 19 nt, Artificial Sequence
  Description of Artificial Sequence: Synthetic oligonucleotide
uuccgcagcccuggaugac

SEQ ID NO: 597799 - RNA, 19 nt, Artificial Sequence
  Description of Artificial Sequence: Synthetic oligonucleotide
gcgccacguaaacgguugg

SEQ ID NO: 597800 - RNA, 19 nt, Artificial Sequence
  Description of Artificial Sequence: Synthetic oligonucleotide
ccacauguguacaccgcca

SEQ ID NO: 597801 - RNA, 19 nt, Artificial Sequence
  Description of Artificial Sequence: Synthetic oligonucleotide
acgccccggcaaugagcac

SEQ ID NO: 597802 - RNA, 19 nt, Artificial Sequence
  Description of Artificial Sequence: Synthetic oligonucleotide
ccagugcugucaaggaaga

SEQ ID NO: 597803 - RNA, 19 nt, Artificial Sequence
  Description of Artificial Sequence: Synthetic oligonucleotide
aggcgcaaucagacccagg

SEQ ID NO: 597804 - RNA, 19 nt, Artificial Sequence
  Description of Artificial Sequence: Synthetic oligonucleotide
ggacgccccggcaaugagc

SEQ ID NO: 597805 - RNA, 19 nt, Artificial Sequence
  Description of Artificial Sequence: Synthetic oligonucleotide
cuccgauggguuguggcua

SEQ ID NO: 597806 - RNA, 19 nt, Artificial Sequence
  Description of Artificial Sequence: Synthetic oligonucleotide
gggacgccccggcaaugag

SEQ ID NO: 597807 - RNA, 19 nt, Artificial Sequence
  Description of Artificial Sequence: Synthetic oligonucleotide
gguuccucacguggacccc

SEQ ID NO: 597808 - RNA, 19 nt, Artificial Sequence
  Description of Artificial Sequence: Synthetic oligonucleotide
cguaggcgccacguaaacg

SEQ ID NO: 597809 - RNA, 19 nt, Artificial Sequence
  Description of Artificial Sequence: Synthetic oligonucleotide
cugagccacuuccgucauc

SEQ ID NO: 597810 - RNA, 19 nt, Artificial Sequence
  Description of Artificial Sequence: Synthetic oligonucleotide
ggauaccgccuugagccuc

SEQ ID NO: 597811 - RNA, 19 nt, Artificial Sequence
  Description of Artificial Sequence: Synthetic oligonucleotide
gcuagauguggcuggcuau

SEQ ID NO: 597812 - RNA, 19 nt, Artificial Sequence
  Description of Artificial Sequence: Synthetic oligonucleotide
guaaacgguuggucaugau

SEQ ID NO: 597813 - RNA, 19 nt, Artificial Sequence
  Description of Artificial Sequence: Synthetic oligonucleotide
gcuagggugacaggcgcaa

SEQ ID NO: 597814 - RNA, 19 nt, Artificial Sequence
  Description of Artificial Sequence: Synthetic oligonucleotide
cggcaaugagcacaguaca

SEQ ID NO: 597815 - RNA, 19 nt, Artificial Sequence
  Description of Artificial Sequence: Synthetic oligonucleotide
auaccgccuugagccucuc

SEQ ID NO: 597816 - RNA, 19 nt, Artificial Sequence
  Description of Artificial Sequence: Synthetic oligonucleotide
ggggcaguuaccgccaccu

SEQ ID NO: 597817 - RNA, 19 nt, Artificial Sequence
  Description of Artificial Sequence: Synthetic oligonucleotide
gggcaguuaccgccaccug

SEQ ID NO: 597818 - RNA, 19 nt, Artificial Sequence
  Description of Artificial Sequence: Synthetic oligonucleotide
ggggcucuaggcagcuagc

SEQ ID NO: 597819 - RNA, 19 nt, Artificial Sequence
  Description of Artificial Sequence: Synthetic oligonucleotide
ccguaggcgccacguaaac

SEQ ID NO: 597820 - RNA, 19 nt, Artificial Sequence
  Description of Artificial Sequence: Synthetic oligonucleotide
ggucugguggggagucccc

SEQ ID NO: 597821 - RNA, 19 nt, Artificial Sequence
  Description of Artificial Sequence: Synthetic oligonucleotide
ugccacggcgacgcuucuc

SEQ ID NO: 597822 - RNA, 19 nt, Artificial Sequence
  Description of Artificial Sequence: Synthetic oligonucleotide
gcauaaacuugaaggcccu

SEQ ID NO: 597823 - RNA, 19 nt, Artificial Sequence
  Description of Artificial Sequence: Synthetic oligonucleotide
gccaccgcugccugagcca

SEQ ID NO: 597824 - RNA, 19 nt, Artificial Sequence
  Description of Artificial Sequence: Synthetic oligonucleotide
cacccgauugggccccaga

SEQ ID NO: 597825 - RNA, 19 nt, Artificial Sequence
  Description of Artificial Sequence: Synthetic oligonucleotide
ggaggagugugcagccaga

SEQ ID NO: 597826 - RNA, 19 nt, Artificial Sequence
  Description of Artificial Sequence: Synthetic oligonucleotide
acacacccucaagcagugu

SEQ ID NO: 597827 - RNA, 19 nt, Artificial Sequence
  Description of Artificial Sequence: Synthetic oligonucleotide
ggagccgcgggaugggccu

SEQ ID NO: 597828 - RNA, 19 nt, Artificial Sequence
  Description of Artificial Sequence: Synthetic oligonucleotide
gauaggccagggagggcau

SEQ ID NO: 597829 - RNA, 19 nt, Artificial Sequence
  Description of Artificial Sequence: Synthetic oligonucleotide
gccgagccagcugccaccc

SEQ ID NO: 597830 - RNA, 19 nt, Artificial Sequence
  Description of Artificial Sequence: Synthetic oligonucleotide
ggccucagagaccaacuuu

SEQ ID NO: 597831 - RNA, 19 nt, Artificial Sequence
  Description of Artificial Sequence: Synthetic oligonucleotide
cagggacgccccggcaaug

SEQ ID NO: 597832 - RNA, 19 nt, Artificial Sequence
  Description of Artificial Sequence: Synthetic oligonucleotide
gccaaggguauuaaauauu

SEQ ID NO: 597833 - RNA, 19 nt, Artificial Sequence
  Description of Artificial Sequence: Synthetic oligonucleotide
aggcgccacguaaacgguu

SEQ ID NO: 597834 - RNA, 19 nt, Artificial Sequence
  Description of Artificial Sequence: Synthetic oligonucleotide
ccuuuauaagugggauaga

SEQ ID NO: 597835 - RNA, 19 nt, Artificial Sequence
  Description of Artificial Sequence: Synthetic oligonucleotide
caggucggccugguuggca

SEQ ID NO: 597836 - RNA, 19 nt, Artificial Sequence
  Description of Artificial Sequence: Synthetic oligonucleotide
ccggaucgccaugucgggc

SEQ ID NO: 597837 - RNA, 19 nt, Artificial Sequence
  Description of Artificial Sequence: Synthetic oligonucleotide
ccggcccuuggauauucca

SEQ ID NO: 597838 - RNA, 19 nt, Artificial Sequence
  Description of Artificial Sequence: Synthetic oligonucleotide
gccccauuacucugagcua

SEQ ID NO: 597839 - RNA, 19 nt, Artificial Sequence
  Description of Artificial Sequence: Synthetic oligonucleotide
guuugccacggcgacgcuu

SEQ ID NO: 597840 - RNA, 19 nt, Artificial Sequence
  Description of Artificial Sequence: Synthetic oligonucleotide
agcagccuuuccaggccuu

SEQ ID NO: 597841 - RNA, 19 nt, Artificial Sequence
  Description of Artificial Sequence: Synthetic oligonucleotide
cuccgccagccacaugugu

SEQ ID NO: 597842 - RNA, 19 nt, Artificial Sequence
  Description of Artificial Sequence: Synthetic oligonucleotide
agccgcgggaugggccuca

SEQ ID NO: 597843 - RNA, 19 nt, Artificial Sequence
  Description of Artificial Sequence: Synthetic oligonucleotide
cccugaagugagguuccuc

SEQ ID NO: 597844 - RNA, 19 nt, Artificial Sequence
  Description of Artificial Sequence: Synthetic oligonucleotide
gccuggacagcaacauacu

SEQ ID NO: 597845 - RNA, 19 nt, Artificial Sequence
  Description of Artificial Sequence: Synthetic oligonucleotide
gagccgcgggaugggccuc

SEQ ID NO: 597846 - RNA, 19 nt, Artificial Sequence
  Description of Artificial Sequence: Synthetic oligonucleotide
gcuagcggcugaggucuuc

SEQ ID NO: 597847 - RNA, 19 nt, Artificial Sequence
  Description of Artificial Sequence: Synthetic oligonucleotide
ccacaggaggauaccgccu

SEQ ID NO: 597848 - RNA, 19 nt, Artificial Sequence
  Description of Artificial Sequence: Synthetic oligonucleotide
ggcuggcuauuccccugaa

SEQ ID NO: 597849 - RNA, 19 nt, Artificial Sequence
  Description of Artificial Sequence: Synthetic oligonucleotide
ggguuuccgcagcccugga

SEQ ID NO: 597850 - RNA, 19 nt, Artificial Sequence
  Description of Artificial Sequence: Synthetic oligonucleotide
cccauuacucugagcuacu

SEQ ID NO: 597851 - RNA, 19 nt, Artificial Sequence
  Description of Artificial Sequence: Synthetic oligonucleotide
cggaucgccaugucgggcu

SEQ ID NO: 597852 - RNA, 19 nt, Artificial Sequence
  Description of Artificial Sequence: Synthetic oligonucleotide
gcgggaugggccucaguuu

SEQ ID NO: 597853 - RNA, 19 nt, Artificial Sequence
  Description of Artificial Sequence: Synthetic oligonucleotide
cauggcuuuuggggacacu

SEQ ID NO: 597854 - RNA, 19 nt, Artificial Sequence
  Description of Artificial Sequence: Synthetic oligonucleotide
cgggcaccagggacgcccc

SEQ ID NO: 597855 - RNA, 19 nt, Artificial Sequence
  Description of Artificial Sequence: Synthetic oligonucleotide
ccgcacccgauugggcccc

SEQ ID NO: 597856 - RNA, 19 nt, Artificial Sequence
  Description of Artificial Sequence: Synthetic oligonucleotide
cgauggguuguggcuaaca

SEQ ID NO: 597857 - RNA, 19 nt, Artificial Sequence
  Description of Artificial Sequence: Synthetic oligonucleotide
ggcuaacagccgcccuucu

SEQ ID NO: 597858 - RNA, 19 nt, Artificial Sequence
  Description of Artificial Sequence: Synthetic oligonucleotide
gcccuucuggcuggccuca

SEQ ID NO: 597859 - RNA, 19 nt, Artificial Sequence
  Description of Artificial Sequence: Synthetic oligonucleotide
cacccuggccugguguuau

SEQ ID NO: 597860 - RNA, 19 nt, Artificial Sequence
  Description of Artificial Sequence: Synthetic oligonucleotide
guacaccgccaaugacauu

SEQ ID NO: 597861 - RNA, 19 nt, Artificial Sequence
  Description of Artificial Sequence: Synthetic oligonucleotide
cuagggugacaggcgcaau

SEQ ID NO: 597862 - RNA, 19 nt, Artificial Sequence
  Description of Artificial Sequence: Synthetic oligonucleotide
cgcgggaugggccucaguu

SEQ ID NO: 597863 - RNA, 19 nt, Artificial Sequence
  Description of Artificial Sequence: Synthetic oligonucleotide
ccaugucgggcuuggugau

SEQ ID NO: 597864 - RNA, 19 nt, Artificial Sequence
  Description of Artificial Sequence: Synthetic oligonucleotide
agcuagcggcugaggucuu

SEQ ID NO: 597865 - RNA, 19 nt, Artificial Sequence
  Description of Artificial Sequence: Synthetic oligonucleotide
cgagaacauucuggggcca

SEQ ID NO: 597866 - RNA, 19 nt, Artificial Sequence
  Description of Artificial Sequence: Synthetic oligonucleotide
ggaucgccaugucgggcuu

SEQ ID NO: 597867 - RNA, 19 nt, Artificial Sequence
  Description of Artificial Sequence: Synthetic oligonucleotide
ccacgucauugccaccgua

SEQ ID NO: 597868 - RNA, 19 nt, Artificial Sequence
  Description of Artificial Sequence: Synthetic oligonucleotide
cagccucgguacgccaggu

SEQ ID NO: 597869 - RNA, 19 nt, Artificial Sequence
  Description of Artificial Sequence: Synthetic oligonucleotide
cggcccuuggauauuccau

SEQ ID NO: 597870 - RNA, 19 nt, Artificial Sequence
  Description of Artificial Sequence: Synthetic oligonucleotide
ccaccguaggcgccacgua

SEQ ID NO: 597871 - RNA, 19 nt, Artificial Sequence
  Description of Artificial Sequence: Synthetic oligonucleotide
ccagggacgccccggcaau

SEQ ID NO: 597872 - RNA, 19 nt, Artificial Sequence
  Description of Artificial Sequence: Synthetic oligonucleotide
cggcgacgcuucuccucag

SEQ ID NO: 597873 - RNA, 19 nt, Artificial Sequence
  Description of Artificial Sequence: Synthetic oligonucleotide
ccgcugccugagccacuuc

SEQ ID NO: 597874 - RNA, 19 nt, Artificial Sequence
  Description of Artificial Sequence: Synthetic oligonucleotide
cccggcugcagaguuucuu

SEQ ID NO: 597875 - RNA, 19 nt, Artificial Sequence
  Description of Artificial Sequence: Synthetic oligonucleotide
cgccacguaaacgguuggu

SEQ ID NO: 597876 - RNA, 19 nt, Artificial Sequence
  Description of Artificial Sequence: Synthetic oligonucleotide
ccaucaccucaggcaggua

SEQ ID NO: 597877 - RNA, 19 nt, Artificial Sequence
  Description of Artificial Sequence: Synthetic oligonucleotide
ccgagccagcugccacccu

SEQ ID NO: 597878 - RNA, 19 nt, Artificial Sequence
  Description of Artificial Sequence: Synthetic oligonucleotide
ccgcgggaugggccucagu

SEQ ID NO: 597879 - RNA, 19 nt, Artificial Sequence
  Description of Artificial Sequence: Synthetic oligonucleotide
ccccggcaaugagcacagu

SEQ ID NO: 597880 - RNA, 19 nt, Artificial Sequence
  Description of Artificial Sequence: Synthetic oligonucleotide
aaacuuaacaaucuugacc

SEQ ID NO: 597881 - RNA, 19 nt, Artificial Sequence
  Description of Artificial Sequence: Synthetic oligonucleotide
  modified_base (9)..(9): a, c, u, g, unknown or other
uuuuauacngaauucagca

SEQ ID NO: 597882 - RNA, 19 nt, Artificial Sequence
  Description of Artificial Sequence: Synthetic oligonucleotide
  modified_base (7)..(7): a, c, u, g, unknown or other
uuauacngaauucagcaug

SEQ ID NO: 597883 - RNA, 19 nt, Artificial Sequence
  Description of Artificial Sequence: Synthetic oligonucleotide
acucguauugcauaguagc

SEQ ID NO: 597884 - RNA, 19 nt, Artificial Sequence
  Description of Artificial Sequence: Synthetic oligonucleotide
agaaggggcacucaggugc

SEQ ID NO: 597885 - RNA, 19 nt, Artificial Sequence
  Description of Artificial Sequence: Synthetic oligonucleotide
uccuaugggacuaaggagg

SEQ ID NO: 597886 - RNA, 19 nt, Artificial Sequence
  Description of Artificial Sequence: Synthetic oligonucleotide
uucaauagugguaaaagga

SEQ ID NO: 597887 - RNA, 19 nt, Artificial Sequence
  Description of Artificial Sequence: Synthetic oligonucleotide
  modified_base (6)..(6): a, c, u, g, unknown or other
uauacngaauucagcaugg

SEQ ID NO: 597888 - RNA, 19 nt, Artificial Sequence
  Description of Artificial Sequence: Synthetic oligonucleotide
uuucaauagugguaaaagg

SEQ ID NO: 597889 - RNA, 19 nt, Artificial Sequence
  Description of Artificial Sequence: Synthetic oligonucleotide
uuaaauccuuacaaaacag

SEQ ID NO: 597890 - RNA, 19 nt, Artificial Sequence
  Description of Artificial Sequence: Synthetic oligonucleotide
aaacccuccgccuuccucc

SEQ ID NO: 597891 - RNA, 19 nt, Artificial Sequence
  Description of Artificial Sequence: Synthetic oligonucleotide
aucaaugcugcucacugcc

SEQ ID NO: 597892 - RNA, 19 nt, Artificial Sequence
  Description of Artificial Sequence: Synthetic oligonucleotide
acaguuaggggucuugacc

SEQ ID NO: 597893 - RNA, 19 nt, Artificial Sequence
  Description of Artificial Sequence: Synthetic oligonucleotide
ugaccaaggaguuuugagg

SEQ ID NO: 597894 - RNA, 19 nt, Artificial Sequence
  Description of Artificial Sequence: Synthetic oligonucleotide
agaggugugacccugcggg

SEQ ID NO: 597895 - RNA, 19 nt, Artificial Sequence
  Description of Artificial Sequence: Synthetic oligonucleotide
agaucccuagccuucaggc

SEQ ID NO: 597896 - RNA, 19 nt, Artificial Sequence
  Description of Artificial Sequence: Synthetic oligonucleotide
uggggaaagacaaaagggc

SEQ ID NO: 597897 - RNA, 19 nt, Artificial Sequence
  Description of Artificial Sequence: Synthetic oligonucleotide
uuuucaccugguaggaugg

SEQ ID NO: 597898 - RNA, 19 nt, Artificial Sequence
  Description of Artificial Sequence: Synthetic oligonucleotide
uaugggacuaaggaggagg

SEQ ID NO: 597899 - RNA, 19 nt, Artificial Sequence
  Description of Artificial Sequence: Synthetic oligonucleotide
cagaauacaaaauccuggc

SEQ ID NO: 597900 - RNA, 19 nt, Artificial Sequence
  Description of Artificial Sequence: Synthetic oligonucleotide
aagcaagucaaauuauuau

SEQ ID NO: 597901 - RNA, 19 nt, Artificial Sequence
  Description of Artificial Sequence: Synthetic oligonucleotide
gaccaaggaguuuugaggc

SEQ ID NO: 597902 - RNA, 19 nt, Artificial Sequence
  Description of Artificial Sequence: Synthetic oligonucleotide
aguacucuucaauaacagg

SEQ ID NO: 597903 - RNA, 19 nt, Artificial Sequence
  Description of Artificial Sequence: Synthetic oligonucleotide
cuagaaacaguccccaggc

SEQ ID NO: 597904 - RNA, 19 nt, Artificial Sequence
  Description of Artificial Sequence: Synthetic oligonucleotide
ugaaagugcuugcaugucc

SEQ ID NO: 597905 - RNA, 19 nt, Artificial Sequence
  Description of Artificial Sequence: Synthetic oligonucleotide
aacagaauacaaaauccug

SEQ ID NO: 597906 - RNA, 19 nt, Artificial Sequence
  Description of Artificial Sequence: Synthetic oligonucleotide
auguacaaggggcuggugg

SEQ ID NO: 597907 - RNA, 19 nt, Artificial Sequence
  Description of Artificial Sequence: Synthetic oligonucleotide
ucucauucacaguuagggg

SEQ ID NO: 597908 - RNA, 19 nt, Artificial Sequence
  Description of Artificial Sequence: Synthetic oligonucleotide
agcgcaaggagcuaagcag

SEQ ID NO: 597909 - RNA, 19 nt, Artificial Sequence
  Description of Artificial Sequence: Synthetic oligonucleotide
agauucugauugucaaccc

SEQ ID NO: 597910 - RNA, 19 nt, Artificial Sequence
  Description of Artificial Sequence: Synthetic oligonucleotide
ugguuuguggccaagccac

SEQ ID NO: 597911 - RNA, 19 nt, Artificial Sequence
  Description of Artificial Sequence: Synthetic oligonucleotide
uugaccaaggaguuuugag

SEQ ID NO: 597912 - RNA, 19 nt, Artificial Sequence
  Description of Artificial Sequence: Synthetic oligonucleotide
gaccccaacauucaaguac

SEQ ID NO: 597913 - RNA, 19 nt, Artificial Sequence
  Description of Artificial Sequence: Synthetic oligonucleotide
caguuaggggucuugaccc

SEQ ID NO: 597914 - RNA, 19 nt, Artificial Sequence
  Description of Artificial Sequence: Synthetic oligonucleotide
aaacuaaacuuaacaaucu

SEQ ID NO: 597915 - RNA, 19 nt, Artificial Sequence
  Description of Artificial Sequence: Synthetic oligonucleotide
uacucuucaauaacaggga

SEQ ID NO: 597916 - RNA, 19 nt, Artificial Sequence
  Description of Artificial Sequence: Synthetic oligonucleotide
uucaauaacagggaagcaa

SEQ ID NO: 597917 - RNA, 19 nt, Artificial Sequence
  Description of Artificial Sequence: Synthetic oligonucleotide
uucaaguacucuucaauaa

SEQ ID NO: 597918 - RNA, 19 nt, Artificial Sequence
  Description of Artificial Sequence: Synthetic oligonucleotide
cuuuucaccugguaggaug

SEQ ID NO: 597919 - RNA, 19 nt, Artificial Sequence
  Description of Artificial Sequence: Synthetic oligonucleotide
guggggaaagacaaaaggg

SEQ ID NO: 597920 - RNA, 19 nt, Artificial Sequence
  Description of Artificial Sequence: Synthetic oligonucleotide
uaaacuuaacaaucuugac

SEQ ID NO: 597921 - RNA, 19 nt, Artificial Sequence
  Description of Artificial Sequence: Synthetic oligonucleotide
uccccaaaucuaaaacagg

SEQ ID NO: 597922 - RNA, 19 nt, Artificial Sequence
  Description of Artificial Sequence: Synthetic oligonucleotide
  modified_base (8)..(8): a, c, u, g, unknown or other
uuuauacngaauucagcau

SEQ ID NO: 597923 - RNA, 19 nt, Artificial Sequence
  Description of Artificial Sequence: Synthetic oligonucleotide
uaucaggccugucccagcg

SEQ ID NO: 597924 - RNA, 19 nt, Artificial Sequence
  Description of Artificial Sequence: Synthetic oligonucleotide
agggaagcaagucaaauua

SEQ ID NO: 597925 - RNA, 19 nt, Artificial Sequence
  Description of Artificial Sequence: Synthetic oligonucleotide
ugccccagacccaagagug

SEQ ID NO: 597926 - RNA, 19 nt, Artificial Sequence
  Description of Artificial Sequence: Synthetic oligonucleotide
  modified_base (2)..(2): a, c, u, g, unknown or other
cngaauucagcaugguuug

SEQ ID NO: 597927 - RNA, 19 nt, Artificial Sequence
  Description of Artificial Sequence: Synthetic oligonucleotide
auccuaugggacuaaggag

SEQ ID NO: 597928 - RNA, 19 nt, Artificial Sequence
  Description of Artificial Sequence: Synthetic oligonucleotide
agcaagucaaauuauuauu

SEQ ID NO: 597929 - RNA, 19 nt, Artificial Sequence
  Description of Artificial Sequence: Synthetic oligonucleotide
aacuaaacuuaacaaucuu

SEQ ID NO: 597930 - RNA, 19 nt, Artificial Sequence
  Description of Artificial Sequence: Synthetic oligonucleotide
  modified_base (3)..(3): a, c, u, g, unknown or other
acngaauucagcaugguuu

SEQ ID NO: 597931 - RNA, 19 nt, Artificial Sequence
  Description of Artificial Sequence: Synthetic oligonucleotide
agggaacucguacuucccc

SEQ ID NO: 597932 - RNA, 19 nt, Artificial Sequence
  Description of Artificial Sequence: Synthetic oligonucleotide
accaaggaguuuugaggcc

SEQ ID NO: 597933 - RNA, 19 nt, Artificial Sequence
  Description of Artificial Sequence: Synthetic oligonucleotide
ucuguagcggucuuuucac

SEQ ID NO: 597934 - RNA, 19 nt, Artificial Sequence
  Description of Artificial Sequence: Synthetic oligonucleotide
aaucaaccaggugcguccc

SEQ ID NO: 597935 - RNA, 19 nt, Artificial Sequence
  Description of Artificial Sequence: Synthetic oligonucleotide
ugaacuggugccugggaug

SEQ ID NO: 597936 - RNA, 19 nt, Artificial Sequence
  Description of Artificial Sequence: Synthetic oligonucleotide
cauaguagcucguggcuag

SEQ ID NO: 597937 - RNA, 19 nt, Artificial Sequence
  Description of Artificial Sequence: Synthetic oligonucleotide
auggaguugaaagugcuug

SEQ ID NO: 597938 - RNA, 19 nt, Artificial Sequence
  Description of Artificial Sequence: Synthetic oligonucleotide
ucaugugggaaccccauua

SEQ ID NO: 597939 - RNA, 19 nt, Artificial Sequence
  Description of Artificial Sequence: Synthetic oligonucleotide
ggcagcgugagguagcucg

SEQ ID NO: 597940 - RNA, 19 nt, Artificial Sequence
  Description of Artificial Sequence: Synthetic oligonucleotide
cauggcgauggccucagcg

SEQ ID NO: 597941 - RNA, 19 nt, Artificial Sequence
  Description of Artificial Sequence: Synthetic oligonucleotide
ugcauaguagcucguggcu

SEQ ID NO: 597942 - RNA, 19 nt, Artificial Sequence
  Description of Artificial Sequence: Synthetic oligonucleotide
  modified_base (4)..(4): a, c, u, g, unknown or other
uacngaauucagcaugguu

SEQ ID NO: 597943 - RNA, 19 nt, Artificial Sequence
  Description of Artificial Sequence: Synthetic oligonucleotide
gcuagaaacaguccccagg

SEQ ID NO: 597944 - RNA, 19 nt, Artificial Sequence
  Description of Artificial Sequence: Synthetic oligonucleotide
ucgggcauggaagacagca

SEQ ID NO: 597945 - RNA, 19 nt, Artificial Sequence
  Description of Artificial Sequence: Synthetic oligonucleotide
acgaagggcggguagccac

SEQ ID NO: 597946 - RNA, 19 nt, Artificial Sequence
  Description of Artificial Sequence: Synthetic oligonucleotide
cugguaucaggccuguccc

SEQ ID NO: 597947 - RNA, 19 nt, Artificial Sequence
  Description of Artificial Sequence: Synthetic oligonucleotide
ugcauguccccaaaucuaa

SEQ ID NO: 597948 - RNA, 19 nt, Artificial Sequence
  Description of Artificial Sequence: Synthetic oligonucleotide
gaacuggugccugggaugg

SEQ ID NO: 597949 - RNA, 19 nt, Artificial Sequence
  Description of Artificial Sequence: Synthetic oligonucleotide
uuuguggccaagccacccc

SEQ ID NO: 597950 - RNA, 19 nt, Artificial Sequence
  Description of Artificial Sequence: Synthetic oligonucleotide
aacucguauugcauaguag

SEQ ID NO: 597951 - RNA, 19 nt, Artificial Sequence
  Description of Artificial Sequence: Synthetic oligonucleotide
agggaaucaaccaggugcg

SEQ ID NO: 597952 - RNA, 19 nt, Artificial Sequence
  Description of Artificial Sequence: Synthetic oligonucleotide
agggccacggaggaaaugg

SEQ ID NO: 597953 - RNA, 19 nt, Artificial Sequence
  Description of Artificial Sequence: Synthetic oligonucleotide
uagcggucuuuucaccugg

SEQ ID NO: 597954 - RNA, 19 nt, Artificial Sequence
  Description of Artificial Sequence: Synthetic oligonucleotide
cugaaggcaugucaccucc

SEQ ID NO: 597955 - RNA, 19 nt, Artificial Sequence
  Description of Artificial Sequence: Synthetic oligonucleotide
ugggaaccccauuauuugc

SEQ ID NO: 597956 - RNA, 19 nt, Artificial Sequence
  Description of Artificial Sequence: Synthetic oligonucleotide
uauccaagacaguggaauc

SEQ ID NO: 597957 - RNA, 19 nt, Artificial Sequence
  Description of Artificial Sequence: Synthetic oligonucleotide
ccccaaaucuaaaacaggc

SEQ ID NO: 597958 - RNA, 19 nt, Artificial Sequence
  Description of Artificial Sequence: Synthetic oligonucleotide
uauugcauaguagcucgug

SEQ ID NO: 597959 - RNA, 19 nt, Artificial Sequence
  Description of Artificial Sequence: Synthetic oligonucleotide
aggcugaguggcccaaacc

SEQ ID NO: 597960 - RNA, 19 nt, Artificial Sequence
  Description of Artificial Sequence: Synthetic oligonucleotide
aggaauugcaggcggggug

SEQ ID NO: 597961 - RNA, 19 nt, Artificial Sequence
  Description of Artificial Sequence: Synthetic oligonucleotide
ucggaggguguucucuggg

SEQ ID NO: 597962 - RNA, 19 nt, Artificial Sequence
  Description of Artificial Sequence: Synthetic oligonucleotide
cugagaaggggcacucagg

SEQ ID NO: 597963 - RNA, 19 nt, Artificial Sequence
  Description of Artificial Sequence: Synthetic oligonucleotide
ggcugaguggcccaaaccc

SEQ ID NO: 597964 - RNA, 19 nt, Artificial Sequence
  Description of Artificial Sequence: Synthetic oligonucleotide
agucuaaacuaaacuuaac

SEQ ID NO: 597965 - RNA, 19 nt, Artificial Sequence
  Description of Artificial Sequence: Synthetic oligonucleotide
ugggaggugggacugguau

SEQ ID NO: 597966 - RNA, 19 nt, Artificial Sequence
  Description of Artificial Sequence: Synthetic oligonucleotide
ugagcccugagaaggggca

SEQ ID NO: 597967 - RNA, 19 nt, Artificial Sequence
  Description of Artificial Sequence: Synthetic oligonucleotide
gugcccaacagcuggauca

SEQ ID NO: 597968 - RNA, 19 nt, Artificial Sequence
  Description of Artificial Sequence: Synthetic oligonucleotide
uuggcggcgaaggagauau

SEQ ID NO: 597969 - RNA, 19 nt, Artificial Sequence
  Description of Artificial Sequence: Synthetic oligonucleotide
gaagcaagucaaauuauua

SEQ ID NO: 597970 - RNA, 19 nt, Artificial Sequence
  Description of Artificial Sequence: Synthetic oligonucleotide
ggcguugacaguugguggg

SEQ ID NO: 597971 - RNA, 19 nt, Artificial Sequence
  Description of Artificial Sequence: Synthetic oligonucleotide
ugucaccuccccuacugug

SEQ ID NO: 597972 - RNA, 19 nt, Artificial Sequence
  Description of Artificial Sequence: Synthetic oligonucleotide
accugagcagaggaauugc

SEQ ID NO: 597973 - RNA, 19 nt, Artificial Sequence
  Description of Artificial Sequence: Synthetic oligonucleotide
ucguauugcauaguagcuc

SEQ ID NO: 597974 - RNA, 19 nt, Artificial Sequence
  Description of Artificial Sequence: Synthetic oligonucleotide
gggacagggaaucaaccag

SEQ ID NO: 597975 - RNA, 19 nt, Artificial Sequence
  Description of Artificial Sequence: Synthetic oligonucleotide
ugccagagaggcuugcccu

SEQ ID NO: 597976 - RNA, 19 nt, Artificial Sequence
  Description of Artificial Sequence: Synthetic oligonucleotide
ugggcacuugcuuucaaua

SEQ ID NO: 597977 - RNA, 19 nt, Artificial Sequence
  Description of Artificial Sequence: Synthetic oligonucleotide
ugguggagcuagcugggug

SEQ ID NO: 597978 - RNA, 19 nt, Artificial Sequence
  Description of Artificial Sequence: Synthetic oligonucleotide
aucucggaccagcagcuug

SEQ ID NO: 597979 - RNA, 19 nt, Artificial Sequence
  Description of Artificial Sequence: Synthetic oligonucleotide
caggggcguauguacaagg

SEQ ID NO: 597980 - RNA, 19 nt, Artificial Sequence
  Description of Artificial Sequence: Synthetic oligonucleotide
cucuauccaagacagugga

SEQ ID NO: 597981 - RNA, 19 nt, Artificial Sequence
  Description of Artificial Sequence: Synthetic oligonucleotide
ugucagggaacucguacuu

SEQ ID NO: 597982 - RNA, 19 nt, Artificial Sequence
  Description of Artificial Sequence: Synthetic oligonucleotide
gacaggcgagcaucguggg

SEQ ID NO: 597983 - RNA, 19 nt, Artificial Sequence
  Description of Artificial Sequence: Synthetic oligonucleotide
ucaacccuccaagggacag

SEQ ID NO: 597984 - RNA, 19 nt, Artificial Sequence
  Description of Artificial Sequence: Synthetic oligonucleotide
gaacucguauugcauagua

SEQ ID NO: 597985 - RNA, 19 nt, Artificial Sequence
  Description of Artificial Sequence: Synthetic oligonucleotide
ugggaacucguauugcaua

SEQ ID NO: 597986 - RNA, 19 nt, Artificial Sequence
  Description of Artificial Sequence: Synthetic oligonucleotide
ugacaauacugagggcuag

SEQ ID NO: 597987 - RNA, 19 nt, Artificial Sequence
  Description of Artificial Sequence: Synthetic oligonucleotide
gguacccagaucccuagcc

SEQ ID NO: 597988 - RNA, 19 nt, Artificial Sequence
  Description of Artificial Sequence: Synthetic oligonucleotide
ucuauccaagacaguggaa

SEQ ID NO: 597989 - RNA, 19 nt, Artificial Sequence
  Description of Artificial Sequence: Synthetic oligonucleotide
augggacuaaggaggaggg

SEQ ID NO: 597990 - RNA, 19 nt, Artificial Sequence
  Description of Artificial Sequence: Synthetic oligonucleotide
guagcucggaugaccacgg

SEQ ID NO: 597991 - RNA, 19 nt, Artificial Sequence
  Description of Artificial Sequence: Synthetic oligonucleotide
uccucgggugcccaacagc

SEQ ID NO: 597992 - RNA, 19 nt, Artificial Sequence
  Description of Artificial Sequence: Synthetic oligonucleotide
acauucaaguacucuucaa

SEQ ID NO: 597993 - RNA, 19 nt, Artificial Sequence
  Description of Artificial Sequence: Synthetic oligonucleotide
ccauuauuugcugaugggc

SEQ ID NO: 597994 - RNA, 19 nt, Artificial Sequence
  Description of Artificial Sequence: Synthetic oligonucleotide
ucguggcuagaaacagucc

SEQ ID NO: 597995 - RNA, 19 nt, Artificial Sequence
  Description of Artificial Sequence: Synthetic oligonucleotide
aggggcaaguccucgggug

SEQ ID NO: 597996 - RNA, 19 nt, Artificial Sequence
  Description of Artificial Sequence: Synthetic oligonucleotide
ggaauugcaggcggggugg

SEQ ID NO: 597997 - RNA, 19 nt, Artificial Sequence
  Description of Artificial Sequence: Synthetic oligonucleotide
aggcuugcccucugucgcc

SEQ ID NO: 597998 - RNA, 19 nt, Artificial Sequence
  Description of Artificial Sequence: Synthetic oligonucleotide
guagcggucuuuucaccug

SEQ ID NO: 597999 - RNA, 19 nt, Artificial Sequence
  Description of Artificial Sequence: Synthetic oligonucleotide
uucacaguuaggggucuug

SEQ ID NO: 598000 - RNA, 19 nt, Artificial Sequence
  Description of Artificial Sequence: Synthetic oligonucleotide
aguugacaggcgagcaucg

SEQ ID NO: 598001 - RNA, 19 nt, Artificial Sequence
  Description of Artificial Sequence: Synthetic oligonucleotide
ucaccuccccuacugugac

SEQ ID NO: 598002 - RNA, 19 nt, Artificial Sequence
  Description of Artificial Sequence: Synthetic oligonucleotide
ucacaguuaggggucuuga

SEQ ID NO: 598003 - RNA, 19 nt, Artificial Sequence
  Description of Artificial Sequence: Synthetic oligonucleotide
auacaaaauccuggcguug

SEQ ID NO: 598004 - RNA, 19 nt, Artificial Sequence
  Description of Artificial Sequence: Synthetic oligonucleotide
ggggcguauguacaagggg

SEQ ID NO: 598005 - RNA, 19 nt, Artificial Sequence
  Description of Artificial Sequence: Synthetic oligonucleotide
aucaggccugucccagcgc

SEQ ID NO: 598006 - RNA, 19 nt, Artificial Sequence
  Description of Artificial Sequence: Synthetic oligonucleotide
gucaaauuauuauuauuuu

SEQ ID NO: 598007 - RNA, 19 nt, Artificial Sequence
  Description of Artificial Sequence: Synthetic oligonucleotide
cacaguuaggggucuugac

SEQ ID NO: 598008 - RNA, 19 nt, Artificial Sequence
  Description of Artificial Sequence: Synthetic oligonucleotide
uggcuagaaacagucccca

SEQ ID NO: 598009 - RNA, 19 nt, Artificial Sequence
  Description of Artificial Sequence: Synthetic oligonucleotide
gaaccccauuauuugcuga

SEQ ID NO: 598010 - RNA, 19 nt, Artificial Sequence
  Description of Artificial Sequence: Synthetic oligonucleotide
agcggcgaaggaugugagg

SEQ ID NO: 598011 - RNA, 19 nt, Artificial Sequence
  Description of Artificial Sequence: Synthetic oligonucleotide
cugaguggcccaaacccuc

SEQ ID NO: 598012 - RNA, 19 nt, Artificial Sequence
  Description of Artificial Sequence: Synthetic oligonucleotide
ugcccuggagacaccugag

SEQ ID NO: 598013 - RNA, 19 nt, Artificial Sequence
  Description of Artificial Sequence: Synthetic oligonucleotide
gggcguauguacaaggggc

SEQ ID NO: 598014 - RNA, 19 nt, Artificial Sequence
  Description of Artificial Sequence: Synthetic oligonucleotide
ccccauuauuugcugaugg

SEQ ID NO: 598015 - RNA, 19 nt, Artificial Sequence
  Description of Artificial Sequence: Synthetic oligonucleotide
ugacaauccuaugggacua

SEQ ID NO: 598016 - RNA, 19 nt, Artificial Sequence
  Description of Artificial Sequence: Synthetic oligonucleotide
auugcaggcgggguggugu

SEQ ID NO: 598017 - RNA, 19 nt, Artificial Sequence
  Description of Artificial Sequence: Synthetic oligonucleotide
accccaacauucaaguacu

SEQ ID NO: 598018 - RNA, 19 nt, Artificial Sequence
  Description of Artificial Sequence: Synthetic oligonucleotide
aguagcucguggcuagaaa

SEQ ID NO: 598019 - RNA, 19 nt, Artificial Sequence
  Description of Artificial Sequence: Synthetic oligonucleotide
cguggcuagaaacaguccc

SEQ ID NO: 598020 - RNA, 19 nt, Artificial Sequence
  Description of Artificial Sequence: Synthetic oligonucleotide
cuguagcggucuuuucacc

SEQ ID NO: 598021 - RNA, 19 nt, Artificial Sequence
  Description of Artificial Sequence: Synthetic oligonucleotide
ggcgaaggagauaugggcc

SEQ ID NO: 598022 - RNA, 19 nt, Artificial Sequence
  Description of Artificial Sequence: Synthetic oligonucleotide
uucauggcgauggccucag

SEQ ID NO: 598023 - RNA, 19 nt, Artificial Sequence
  Description of Artificial Sequence: Synthetic oligonucleotide
acaguugacaggcgagcau

SEQ ID NO: 598024 - RNA, 19 nt, Artificial Sequence
  Description of Artificial Sequence: Synthetic oligonucleotide
aggggcguauguacaaggg

SEQ ID NO: 598025 - RNA, 19 nt, Artificial Sequence
  Description of Artificial Sequence: Synthetic oligonucleotide
gucggaggguguucucugg

SEQ ID NO: 598026 - RNA, 19 nt, Artificial Sequence
  Description of Artificial Sequence: Synthetic oligonucleotide
caguugacaggcgagcauc

SEQ ID NO: 598027 - RNA, 19 nt, Artificial Sequence
  Description of Artificial Sequence: Synthetic oligonucleotide
ggugcguccccauccaccc

SEQ ID NO: 598028 - RNA, 19 nt, Artificial Sequence
  Description of Artificial Sequence: Synthetic oligonucleotide
aguuaggggucuugaccca

SEQ ID NO: 598029 - RNA, 19 nt, Artificial Sequence
  Description of Artificial Sequence: Synthetic oligonucleotide
ccaagagugcucugguggg

SEQ ID NO: 598030 - RNA, 19 nt, Artificial Sequence
  Description of Artificial Sequence: Synthetic oligonucleotide
gauccccaacccuggaaga

SEQ ID NO: 598031 - RNA, 19 nt, Artificial Sequence
  Description of Artificial Sequence: Synthetic oligonucleotide
guuuguggccaagccaccc

SEQ ID NO: 598032 - RNA, 19 nt, Artificial Sequence
  Description of Artificial Sequence: Synthetic oligonucleotide
ccaacagagcccagcagcc

SEQ ID NO: 598033 - RNA, 19 nt, Artificial Sequence
  Description of Artificial Sequence: Synthetic oligonucleotide
ugguaucaggccuguccca

SEQ ID NO: 598034 - RNA, 19 nt, Artificial Sequence
  Description of Artificial Sequence: Synthetic oligonucleotide
gagguagcucggaugacca

SEQ ID NO: 598035 - RNA, 19 nt, Artificial Sequence
  Description of Artificial Sequence: Synthetic oligonucleotide
gcgcagguggccuucacag

SEQ ID NO: 598036 - RNA, 19 nt, Artificial Sequence
  Description of Artificial Sequence: Synthetic oligonucleotide
gcaagucaaauuauuauua

SEQ ID NO: 598037 - RNA, 19 nt, Artificial Sequence
  Description of Artificial Sequence: Synthetic oligonucleotide
aaaggucuguagcggucuu

SEQ ID NO: 598038 - RNA, 19 nt, Artificial Sequence
  Description of Artificial Sequence: Synthetic oligonucleotide
acuaaggaggaggguggag

SEQ ID NO: 598039 - RNA, 19 nt, Artificial Sequence
  Description of Artificial Sequence: Synthetic oligonucleotide
cuauccaagacaguggaau

SEQ ID NO: 598040 - RNA, 19 nt, Artificial Sequence
  Description of Artificial Sequence: Synthetic oligonucleotide
ccaccagaccccaacauuc

SEQ ID NO: 598041 - RNA, 19 nt, Artificial Sequence
  Description of Artificial Sequence: Synthetic oligonucleotide
ggaaccccauuauuugcug

SEQ ID NO: 598042 - RNA, 19 nt, Artificial Sequence
  Description of Artificial Sequence: Synthetic oligonucleotide
cugugacaauccuauggga

SEQ ID NO: 598043 - RNA, 19 nt, Artificial Sequence
  Description of Artificial Sequence: Synthetic oligonucleotide
ccuuacaaaacagaauaca

SEQ ID NO: 598044 - RNA, 19 nt, Artificial Sequence
  Description of Artificial Sequence: Synthetic oligonucleotide
caugcugguggcccuccag

SEQ ID NO: 598045 - RNA, 19 nt, Artificial Sequence
  Description of Artificial Sequence: Synthetic oligonucleotide
cucguauugcauaguagcu

SEQ ID NO: 598046 - RNA, 19 nt, Artificial Sequence
  Description of Artificial Sequence: Synthetic oligonucleotide
acccaagagugcucuggug

SEQ ID NO: 598047 - RNA, 19 nt, Artificial Sequence
  Description of Artificial Sequence: Synthetic oligonucleotide
guaucaggccugucccagc

SEQ ID NO: 598048 - RNA, 19 nt, Artificial Sequence
  Description of Artificial Sequence: Synthetic oligonucleotide
ugaggccaggggcugcccu

SEQ ID NO: 598049 - RNA, 19 nt, Artificial Sequence
  Description of Artificial Sequence: Synthetic oligonucleotide
aacccuccgccuuccuccu

SEQ ID NO: 598050 - RNA, 19 nt, Artificial Sequence
  Description of Artificial Sequence: Synthetic oligonucleotide
caccugagcagaggaauug

SEQ ID NO: 598051 - RNA, 19 nt, Artificial Sequence
  Description of Artificial Sequence: Synthetic oligonucleotide
ucuggggcgcaccccugca

SEQ ID NO: 598052 - RNA, 19 nt, Artificial Sequence
  Description of Artificial Sequence: Synthetic oligonucleotide
ccagaccccaacauucaag

SEQ ID NO: 598053 - RNA, 19 nt, Artificial Sequence
  Description of Artificial Sequence: Synthetic oligonucleotide
ucccuagccuucaggcccu

SEQ ID NO: 598054 - RNA, 19 nt, Artificial Sequence
  Description of Artificial Sequence: Synthetic oligonucleotide
acccagaucccuagccuuc

SEQ ID NO: 598055 - RNA, 19 nt, Artificial Sequence
  Description of Artificial Sequence: Synthetic oligonucleotide
  modified_base (5)..(5): a, c, u, g, unknown or other
auacngaauucagcauggu

SEQ ID NO: 598056 - RNA, 19 nt, Artificial Sequence
  Description of Artificial Sequence: Synthetic oligonucleotide
ugcuugcauguccccaaau

SEQ ID NO: 598057 - RNA, 19 nt, Artificial Sequence
  Description of Artificial Sequence: Synthetic oligonucleotide
ggucgggcauggaagacag

SEQ ID NO: 598058 - RNA, 19 nt, Artificial Sequence
  Description of Artificial Sequence: Synthetic oligonucleotide
cagcgcaaggagcuaagca

SEQ ID NO: 598059 - RNA, 19 nt, Artificial Sequence
  Description of Artificial Sequence: Synthetic oligonucleotide
gauggcaaggggcggggua

SEQ ID NO: 598060 - RNA, 19 nt, Artificial Sequence
  Description of Artificial Sequence: Synthetic oligonucleotide
ugcuuucaauagugguaaa

SEQ ID NO: 598061 - RNA, 19 nt, Artificial Sequence
  Description of Artificial Sequence: Synthetic oligonucleotide
cauccacccaaccuccaga

SEQ ID NO: 598062 - RNA, 19 nt, Artificial Sequence
  Description of Artificial Sequence: Synthetic oligonucleotide
cacccaaccuccagagguc

SEQ ID NO: 598063 - RNA, 19 nt, Artificial Sequence
  Description of Artificial Sequence: Synthetic oligonucleotide
cagaggucucuauccaaga

SEQ ID NO: 598064 - RNA, 19 nt, Artificial Sequence
  Description of Artificial Sequence: Synthetic oligonucleotide
aguccucgggugcccaaca

SEQ ID NO: 598065 - RNA, 19 nt, Artificial Sequence
  Description of Artificial Sequence: Synthetic oligonucleotide
agcgugagguagcucggau

SEQ ID NO: 598066 - RNA, 19 nt, Artificial Sequence
  Description of Artificial Sequence: Synthetic oligonucleotide
cagcguccuccucacacug

SEQ ID NO: 598067 - RNA, 19 nt, Artificial Sequence
  Description of Artificial Sequence: Synthetic oligonucleotide
uugcaggcgggguggugug

SEQ ID NO: 598068 - RNA, 19 nt, Artificial Sequence
  Description of Artificial Sequence: Synthetic oligonucleotide
accagaccccaacauucaa

SEQ ID NO: 598069 - RNA, 19 nt, Artificial Sequence
  Description of Artificial Sequence: Synthetic oligonucleotide
aggucgggcauggaagaca

SEQ ID NO: 598070 - RNA, 19 nt, Artificial Sequence
  Description of Artificial Sequence: Synthetic oligonucleotide
ccuacugugacaauccuau

SEQ ID NO: 598071 - RNA, 19 nt, Artificial Sequence
  Description of Artificial Sequence: Synthetic oligonucleotide
accccauuauuugcugaug

SEQ ID NO: 598072 - RNA, 19 nt, Artificial Sequence
  Description of Artificial Sequence: Synthetic oligonucleotide
cuaugggacuaaggaggag

SEQ ID NO: 598073 - RNA, 19 nt, Artificial Sequence
  Description of Artificial Sequence: Synthetic oligonucleotide
ggaaucaaccaggugcguc

SEQ ID NO: 598074 - RNA, 19 nt, Artificial Sequence
  Description of Artificial Sequence: Synthetic oligonucleotide
cuaagcagccugggaggag

SEQ ID NO: 598075 - RNA, 19 nt, Artificial Sequence
  Description of Artificial Sequence: Synthetic oligonucleotide
uuucaccugguaggaugga

SEQ ID NO: 598076 - RNA, 19 nt, Artificial Sequence
  Description of Artificial Sequence: Synthetic oligonucleotide
ggacuugggcagcacucag

SEQ ID NO: 598077 - RNA, 19 nt, Artificial Sequence
  Description of Artificial Sequence: Synthetic oligonucleotide
ggcuagaaacaguccccag

SEQ ID NO: 598078 - RNA, 19 nt, Artificial Sequence
  Description of Artificial Sequence: Synthetic oligonucleotide
gaggugugacccugcggga

SEQ ID NO: 598079 - RNA, 19 nt, Artificial Sequence
  Description of Artificial Sequence: Synthetic oligonucleotide
agaccccaacauucaagua

SEQ ID NO: 598080 - RNA, 19 nt, Artificial Sequence
  Description of Artificial Sequence: Synthetic oligonucleotide
guacccagaucccuagccu

SEQ ID NO: 598081 - RNA, 19 nt, Artificial Sequence
  Description of Artificial Sequence: Synthetic oligonucleotide
accugguaggauggaguug

SEQ ID NO: 598082 - RNA, 19 nt, Artificial Sequence
  Description of Artificial Sequence: Synthetic oligonucleotide
cagcggcgaaggaugugag

SEQ ID NO: 598083 - RNA, 19 nt, Artificial Sequence
  Description of Artificial Sequence: Synthetic oligonucleotide
gacuaaggaggagggugga

SEQ ID NO: 598084 - RNA, 19 nt, Artificial Sequence
  Description of Artificial Sequence: Synthetic oligonucleotide
caccagaccccaacauuca

SEQ ID NO: 598085 - RNA, 19 nt, Artificial Sequence
  Description of Artificial Sequence: Synthetic oligonucleotide
ccaagacaguggaaucccc

SEQ ID NO: 598086 - RNA, 19 nt, Artificial Sequence
  Description of Artificial Sequence: Synthetic oligonucleotide
cucgggugcccaacagcug

SEQ ID NO: 598087 - RNA, 19 nt, Artificial Sequence
  Description of Artificial Sequence: Synthetic oligonucleotide
cugggauggcaaggggcgg

SEQ ID NO: 598088 - RNA, 19 nt, Artificial Sequence
  Description of Artificial Sequence: Synthetic oligonucleotide
gacccaagagugcucuggu

SEQ ID NO: 598089 - RNA, 19 nt, Artificial Sequence
  Description of Artificial Sequence: Synthetic oligonucleotide
ggcacuugcuuucaauagu

SEQ ID NO: 598090 - RNA, 19 nt, Artificial Sequence
  Description of Artificial Sequence: Synthetic oligonucleotide
ccaaaucuaaaacaggcuu

SEQ ID NO: 598091 - RNA, 19 nt, Artificial Sequence
  Description of Artificial Sequence: Synthetic oligonucleotide
gcgugagguagcucggaug

SEQ ID NO: 598092 - RNA, 19 nt, Artificial Sequence
  Description of Artificial Sequence: Synthetic oligonucleotide
gaggugggacugguaucag

SEQ ID NO: 598093 - RNA, 19 nt, Artificial Sequence
  Description of Artificial Sequence: Synthetic oligonucleotide
ccaagccaccccaggauug

SEQ ID NO: 598094 - RNA, 19 nt, Artificial Sequence
  Description of Artificial Sequence: Synthetic oligonucleotide
gugugacccugcgggaucc

SEQ ID NO: 598095 - RNA, 19 nt, Artificial Sequence
  Description of Artificial Sequence: Synthetic oligonucleotide
cccagcguccuccucacac

SEQ ID NO: 598096 - RNA, 19 nt, Artificial Sequence
  Description of Artificial Sequence: Synthetic oligonucleotide
guucauggcgauggccuca

SEQ ID NO: 598097 - RNA, 19 nt, Artificial Sequence
  Description of Artificial Sequence: Synthetic oligonucleotide
ggggagucaugugggaacc

SEQ ID NO: 598098 - RNA, 19 nt, Artificial Sequence
  Description of Artificial Sequence: Synthetic oligonucleotide
gugaacuggugccugggau

SEQ ID NO: 598099 - RNA, 19 nt, Artificial Sequence
  Description of Artificial Sequence: Synthetic oligonucleotide
ugcaggcgggguggugugg

SEQ ID NO: 598100 - RNA, 19 nt, Artificial Sequence
  Description of Artificial Sequence: Synthetic oligonucleotide
acccaaccuccagaggucu

SEQ ID NO: 598101 - RNA, 19 nt, Artificial Sequence
  Description of Artificial Sequence: Synthetic oligonucleotide
gaucaugcugguggcccuc

SEQ ID NO: 598102 - RNA, 19 nt, Artificial Sequence
  Description of Artificial Sequence: Synthetic oligonucleotide
ucccagcgcaaggagcuaa

SEQ ID NO: 598103 - RNA, 19 nt, Artificial Sequence
  Description of Artificial Sequence: Synthetic oligonucleotide
gcucacugcccagucaggc

SEQ ID NO: 598104 - RNA, 19 nt, Artificial Sequence
  Description of Artificial Sequence: Synthetic oligonucleotide
auaguagcucguggcuaga

SEQ ID NO: 598105 - RNA, 19 nt, Artificial Sequence
  Description of Artificial Sequence: Synthetic oligonucleotide
gguucauggcgauggccuc

SEQ ID NO: 598106 - RNA, 19 nt, Artificial Sequence
  Description of Artificial Sequence: Synthetic oligonucleotide
gcuuggggagggaucaaug

SEQ ID NO: 598107 - RNA, 19 nt, Artificial Sequence
  Description of Artificial Sequence: Synthetic oligonucleotide
guccccauccacccaaccu

SEQ ID NO: 598108 - RNA, 19 nt, Artificial Sequence
  Description of Artificial Sequence: Synthetic oligonucleotide
aggggcgggguacccagau

SEQ ID NO: 598109 - RNA, 19 nt, Artificial Sequence
  Description of Artificial Sequence: Synthetic oligonucleotide
ccuaugggacuaaggagga

SEQ ID NO: 598110 - RNA, 19 nt, Artificial Sequence
  Description of Artificial Sequence: Synthetic oligonucleotide
acccugcgggauccccaac

SEQ ID NO: 598111 - RNA, 19 nt, Artificial Sequence
  Description of Artificial Sequence: Synthetic oligonucleotide
ccucugucgccgcugggcc

SEQ ID NO: 598112 - RNA, 19 nt, Artificial Sequence
  Description of Artificial Sequence: Synthetic oligonucleotide
ggugugacccugcgggauc

SEQ ID NO: 598113 - RNA, 19 nt, Artificial Sequence
  Description of Artificial Sequence: Synthetic oligonucleotide
aggugugacccugcgggau

SEQ ID NO: 598114 - RNA, 19 nt, Artificial Sequence
  Description of Artificial Sequence: Synthetic oligonucleotide
agcccugagaaggggcacu

SEQ ID NO: 598115 - RNA, 19 nt, Artificial Sequence
  Description of Artificial Sequence: Synthetic oligonucleotide
guauguacaaggggcuggu

SEQ ID NO: 598116 - RNA, 19 nt, Artificial Sequence
  Description of Artificial Sequence: Synthetic oligonucleotide
guucucuggggcgcacccc

SEQ ID NO: 598117 - RNA, 19 nt, Artificial Sequence
  Description of Artificial Sequence: Synthetic oligonucleotide
cccugcgggauccccaacc

SEQ ID NO: 598118 - RNA, 19 nt, Artificial Sequence
  Description of Artificial Sequence: Synthetic oligonucleotide
acaccugagcagaggaauu

SEQ ID NO: 598119 - RNA, 19 nt, Artificial Sequence
  Description of Artificial Sequence: Synthetic oligonucleotide
gagcccugagaaggggcac

SEQ ID NO: 598120 - RNA, 19 nt, Artificial Sequence
  Description of Artificial Sequence: Synthetic oligonucleotide
caugugggaaccccauuau

SEQ ID NO: 598121 - RNA, 19 nt, Artificial Sequence
  Description of Artificial Sequence: Synthetic oligonucleotide
cuggggcgcaccccugcac

SEQ ID NO: 598122 - RNA, 19 nt, Artificial Sequence
  Description of Artificial Sequence: Synthetic oligonucleotide
gguuuguggccaagccacc

SEQ ID NO: 598123 - RNA, 19 nt, Artificial Sequence
  Description of Artificial Sequence: Synthetic oligonucleotide
gcguauguacaaggggcug

SEQ ID NO: 598124 - RNA, 19 nt, Artificial Sequence
  Description of Artificial Sequence: Synthetic oligonucleotide
caccccugcacccacgggu

SEQ ID NO: 598125 - RNA, 19 nt, Artificial Sequence
  Description of Artificial Sequence: Synthetic oligonucleotide
guggggagucaugugggaa

SEQ ID NO: 598126 - RNA, 19 nt, Artificial Sequence
  Description of Artificial Sequence: Synthetic oligonucleotide
cacccaccagaccccaaca

SEQ ID NO: 598127 - RNA, 19 nt, Artificial Sequence
  Description of Artificial Sequence: Synthetic oligonucleotide
cucacugcccagucaggcu

SEQ ID NO: 598128 - RNA, 19 nt, Artificial Sequence
  Description of Artificial Sequence: Synthetic oligonucleotide
gggaaaggucuguagcggu

SEQ ID NO: 598129 - RNA, 19 nt, Artificial Sequence
  Description of Artificial Sequence: Synthetic oligonucleotide
cccaaaucuaaaacaggcu

SEQ ID NO: 598130 - RNA, 19 nt, Artificial Sequence
  Description of Artificial Sequence: Synthetic oligonucleotide
caggugcguccccauccac

SEQ ID NO: 598131 - RNA, 19 nt, Artificial Sequence
  Description of Artificial Sequence: Synthetic oligonucleotide
ccacccaaccuccagaggu

SEQ ID NO: 598132 - RNA, 19 nt, Artificial Sequence
  Description of Artificial Sequence: Synthetic oligonucleotide
gccccuagcaggacccagg

SEQ ID NO: 598133 - RNA, 19 nt, Artificial Sequence
  Description of Artificial Sequence: Synthetic oligonucleotide
gcaggggcguauguacaag

SEQ ID NO: 598134 - RNA, 19 nt, Artificial Sequence
  Description of Artificial Sequence: Synthetic oligonucleotide
gcucggaugaccacgggcu

SEQ ID NO: 598135 - RNA, 19 nt, Artificial Sequence
  Description of Artificial Sequence: Synthetic oligonucleotide
ggcggggugguguggcccc

SEQ ID NO: 598136 - RNA, 19 nt, Artificial Sequence
  Description of Artificial Sequence: Synthetic oligonucleotide
guggagcuagcugggugca

SEQ ID NO: 598137 - RNA, 19 nt, Artificial Sequence
  Description of Artificial Sequence: Synthetic oligonucleotide
gcgggauccccaacccugg

SEQ ID NO: 598138 - RNA, 19 nt, Artificial Sequence
  Description of Artificial Sequence: Synthetic oligonucleotide
cagguaggugauggggaca

SEQ ID NO: 598139 - RNA, 19 nt, Artificial Sequence
  Description of Artificial Sequence: Synthetic oligonucleotide
gucaacccuccaagggaca

SEQ ID NO: 598140 - RNA, 19 nt, Artificial Sequence
  Description of Artificial Sequence: Synthetic oligonucleotide
gcauaguagcucguggcua

SEQ ID NO: 598141 - RNA, 19 nt, Artificial Sequence
  Description of Artificial Sequence: Synthetic oligonucleotide
cucugucgccgcugggcca

SEQ ID NO: 598142 - RNA, 19 nt, Artificial Sequence
  Description of Artificial Sequence: Synthetic oligonucleotide
caccugguaggauggaguu

SEQ ID NO: 598143 - RNA, 19 nt, Artificial Sequence
  Description of Artificial Sequence: Synthetic oligonucleotide
gggaaccccauuauuugcu

SEQ ID NO: 598144 - RNA, 19 nt, Artificial Sequence
  Description of Artificial Sequence: Synthetic oligonucleotide
cccagcgcaaggagcuaag

SEQ ID NO: 598145 - RNA, 19 nt, Artificial Sequence
  Description of Artificial Sequence: Synthetic oligonucleotide
ccacgaagggcggguagcc

SEQ ID NO: 598146 - RNA, 19 nt, Artificial Sequence
  Description of Artificial Sequence: Synthetic oligonucleotide
agcggucuuuucaccuggu

SEQ ID NO: 598147 - RNA, 19 nt, Artificial Sequence
  Description of Artificial Sequence: Synthetic oligonucleotide
ccgguucauggcgauggcc

SEQ ID NO: 598148 - RNA, 19 nt, Artificial Sequence
  Description of Artificial Sequence: Synthetic oligonucleotide
ggcguauguacaaggggcu

SEQ ID NO: 598149 - RNA, 19 nt, Artificial Sequence
  Description of Artificial Sequence: Synthetic oligonucleotide
caagaaccugcaggggcaa

SEQ ID NO: 598150 - RNA, 19 nt, Artificial Sequence
  Description of Artificial Sequence: Synthetic oligonucleotide
gggagucaugugggaaccc

SEQ ID NO: 598151 - RNA, 19 nt, Artificial Sequence
  Description of Artificial Sequence: Synthetic oligonucleotide
aggcagcgugagguagcuc

SEQ ID NO: 598152 - RNA, 19 nt, Artificial Sequence
  Description of Artificial Sequence: Synthetic oligonucleotide
ccucgggugcccaacagcu

SEQ ID NO: 598153 - RNA, 19 nt, Artificial Sequence
  Description of Artificial Sequence: Synthetic oligonucleotide
gacugguaucaggccuguc

SEQ ID NO: 598154 - RNA, 19 nt, Artificial Sequence
  Description of Artificial Sequence: Synthetic oligonucleotide
gcaggcggggugguguggc

SEQ ID NO: 598155 - RNA, 19 nt, Artificial Sequence
  Description of Artificial Sequence: Synthetic oligonucleotide
guuaggggucuugacccau

SEQ ID NO: 598156 - RNA, 19 nt, Artificial Sequence
  Description of Artificial Sequence: Synthetic oligonucleotide
cugccgguucauggcgaug

SEQ ID NO: 598157 - RNA, 19 nt, Artificial Sequence
  Description of Artificial Sequence: Synthetic oligonucleotide
gccgguucauggcgauggc

SEQ ID NO: 598158 - RNA, 19 nt, Artificial Sequence
  Description of Artificial Sequence: Synthetic oligonucleotide
gggaagcaagucaaauuau

SEQ ID NO: 598159 - RNA, 19 nt, Artificial Sequence
  Description of Artificial Sequence: Synthetic oligonucleotide
gaauugcaggcgggguggu

SEQ ID NO: 598160 - RNA, 19 nt, Artificial Sequence
  Description of Artificial Sequence: Synthetic oligonucleotide
ggcgggguacccagauccc

SEQ ID NO: 598161 - RNA, 19 nt, Artificial Sequence
  Description of Artificial Sequence: Synthetic oligonucleotide
acccuccgccuuccuccug

SEQ ID NO: 598162 - RNA, 19 nt, Artificial Sequence
  Description of Artificial Sequence: Synthetic oligonucleotide
gucgggcauggaagacagc

SEQ ID NO: 598163 - RNA, 19 nt, Artificial Sequence
  Description of Artificial Sequence: Synthetic oligonucleotide
gcguugacaguugguggga

SEQ ID NO: 598164 - RNA, 19 nt, Artificial Sequence
  Description of Artificial Sequence: Synthetic oligonucleotide
cccuacugugacaauccua

SEQ ID NO: 598165 - RNA, 19 nt, Artificial Sequence
  Description of Artificial Sequence: Synthetic oligonucleotide
caagccaccccaggauugu

SEQ ID NO: 598166 - RNA, 19 nt, Artificial Sequence
  Description of Artificial Sequence: Synthetic oligonucleotide
ggcgcaccccugcacccac

SEQ ID NO: 598167 - RNA, 19 nt, Artificial Sequence
  Description of Artificial Sequence: Synthetic oligonucleotide
ggcaaggggcgggguaccc

SEQ ID NO: 598168 - RNA, 19 nt, Artificial Sequence
  Description of Artificial Sequence: Synthetic oligonucleotide
gugcguccccauccaccca

SEQ ID NO: 598169 - RNA, 19 nt, Artificial Sequence
  Description of Artificial Sequence: Synthetic oligonucleotide
ggagggccugucccugaca

SEQ ID NO: 598170 - RNA, 19 nt, Artificial Sequence
  Description of Artificial Sequence: Synthetic oligonucleotide
cgcaccccugcacccacgg

SEQ ID NO: 598171 - RNA, 19 nt, Artificial Sequence
  Description of Artificial Sequence: Synthetic oligonucleotide
ggccaagccaccccaggau

SEQ ID NO: 598172 - RNA, 19 nt, Artificial Sequence
  Description of Artificial Sequence: Synthetic oligonucleotide
ccccaacauucaaguacuc

SEQ ID NO: 598173 - RNA, 19 nt, Artificial Sequence
  Description of Artificial Sequence: Synthetic oligonucleotide
gcauguccccaaaucuaaa

SEQ ID NO: 598174 - RNA, 19 nt, Artificial Sequence
  Description of Artificial Sequence: Synthetic oligonucleotide
gggcuaggaagagguguga

SEQ ID NO: 598175 - RNA, 19 nt, Artificial Sequence
  Description of Artificial Sequence: Synthetic oligonucleotide
cagcgugagguagcucgga

SEQ ID NO: 598176 - RNA, 19 nt, Artificial Sequence
  Description of Artificial Sequence: Synthetic oligonucleotide
agcagccugggaggagauu

SEQ ID NO: 598177 - RNA, 19 nt, Artificial Sequence
  Description of Artificial Sequence: Synthetic oligonucleotide
cuugcccucugucgccgcu

SEQ ID NO: 598178 - RNA, 19 nt, Artificial Sequence
  Description of Artificial Sequence: Synthetic oligonucleotide
cccaacauucaaguacucu

SEQ ID NO: 598179 - RNA, 19 nt, Artificial Sequence
  Description of Artificial Sequence: Synthetic oligonucleotide
ccaggugcguccccaucca

SEQ ID NO: 598180 - RNA, 19 nt, Artificial Sequence
  Description of Artificial Sequence: Synthetic oligonucleotide
gcggucuuuucaccuggua

SEQ ID NO: 598181 - RNA, 19 nt, Artificial Sequence
  Description of Artificial Sequence: Synthetic oligonucleotide
ggcgagcaucguggggugc

SEQ ID NO: 598182 - RNA, 19 nt, Artificial Sequence
  Description of Artificial Sequence: Synthetic oligonucleotide
ggggcgggguacccagauc

SEQ ID NO: 598183 - RNA, 19 nt, Artificial Sequence
  Description of Artificial Sequence: Synthetic oligonucleotide
cguccccauccacccaacc

SEQ ID NO: 598184 - RNA, 19 nt, Artificial Sequence
  Description of Artificial Sequence: Synthetic oligonucleotide
gcgauggccucagcggcga

SEQ ID NO: 598185 - RNA, 19 nt, Artificial Sequence
  Description of Artificial Sequence: Synthetic oligonucleotide
caggcagcgugagguagcu

SEQ ID NO: 598186 - RNA, 19 nt, Artificial Sequence
  Description of Artificial Sequence: Synthetic oligonucleotide
gccugucccugacaauacu

SEQ ID NO: 598187 - RNA, 19 nt, Artificial Sequence
  Description of Artificial Sequence: Synthetic oligonucleotide
ggcccaaacccuccgccuu

SEQ ID NO: 598188 - RNA, 19 nt, Artificial Sequence
  Description of Artificial Sequence: Synthetic oligonucleotide
gcucguggcuagaaacagu

SEQ ID NO: 598189 - RNA, 19 nt, Artificial Sequence
  Description of Artificial Sequence: Synthetic oligonucleotide
ggguguucucuggggcgca

SEQ ID NO: 598190 - RNA, 19 nt, Artificial Sequence
  Description of Artificial Sequence: Synthetic oligonucleotide
ggccucagcggcgaaggau

SEQ ID NO: 598191 - RNA, 19 nt, Artificial Sequence
  Description of Artificial Sequence: Synthetic oligonucleotide
cgagcaucguggggugcag

SEQ ID NO: 598192 - RNA, 19 nt, Artificial Sequence
  Description of Artificial Sequence: Synthetic oligonucleotide
gccccgucagcagggccac

SEQ ID NO: 598193 - RNA, 19 nt, Artificial Sequence
  Description of Artificial Sequence: Synthetic oligonucleotide
ccgccccgucagcagggcc

SEQ ID NO: 598194 - RNA, 19 nt, Artificial Sequence
  Description of Artificial Sequence: Synthetic oligonucleotide
cugcuuggggagggaucaa

SEQ ID NO: 598195 - RNA, 19 nt, Artificial Sequence
  Description of Artificial Sequence: Synthetic oligonucleotide
cccaccagaccccaacauu

SEQ ID NO: 598196 - RNA, 19 nt, Artificial Sequence
  Description of Artificial Sequence: Synthetic oligonucleotide
gggaaucaaccaggugcgu

SEQ ID NO: 598197 - RNA, 19 nt, Artificial Sequence
  Description of Artificial Sequence: Synthetic oligonucleotide
gcgggguacccagaucccu

SEQ ID NO: 598198 - RNA, 19 nt, Artificial Sequence
  Description of Artificial Sequence: Synthetic oligonucleotide
gggcgcaccccugcaccca

SEQ ID NO: 598199 - RNA, 19 nt, Artificial Sequence
  Description of Artificial Sequence: Synthetic oligonucleotide
gccgcugggccagcuugga

SEQ ID NO: 598200 - RNA, 19 nt, Artificial Sequence
  Description of Artificial Sequence: Synthetic oligonucleotide
gcguccccauccacccaac

SEQ ID NO: 598201 - RNA, 19 nt, Artificial Sequence
  Description of Artificial Sequence: Synthetic oligonucleotide
ccccuacugugacaauccu

SEQ ID NO: 598202 - RNA, 19 nt, Artificial Sequence
  Description of Artificial Sequence: Synthetic oligonucleotide
gggcaggccuccccucggu

SEQ ID NO: 598203 - RNA, 19 nt, Artificial Sequence
  Description of Artificial Sequence: Synthetic oligonucleotide
gcccagcguccuccucaca

SEQ ID NO: 598204 - RNA, 19 nt, Artificial Sequence
  Description of Artificial Sequence: Synthetic oligonucleotide
gggugcccaacagcuggau

SEQ ID NO: 598205 - RNA, 19 nt, Artificial Sequence
  Description of Artificial Sequence: Synthetic oligonucleotide
ccccgucagcagggccacg

SEQ ID NO: 598206 - RNA, 19 nt, Artificial Sequence
  Description of Artificial Sequence: Synthetic oligonucleotide
cccuagccuucaggcccug

SEQ ID NO: 598207 - RNA, 19 nt, Artificial Sequence
  Description of Artificial Sequence: Synthetic oligonucleotide
cguggggugcaggcugagu

SEQ ID NO: 598208 - RNA, 19 nt, Artificial Sequence
  Description of Artificial Sequence: Synthetic oligonucleotide
aaauauuuaacccaguuag

SEQ ID NO: 598209 - RNA, 19 nt, Artificial Sequence
  Description of Artificial Sequence: Synthetic oligonucleotide
uguacuuaaucacaguggg

SEQ ID NO: 598210 - RNA, 19 nt, Artificial Sequence
  Description of Artificial Sequence: Synthetic oligonucleotide
uucuauuuagaaaaguacc

SEQ ID NO: 598211 - RNA, 19 nt, Artificial Sequence
  Description of Artificial Sequence: Synthetic oligonucleotide
aacaccgucauuucaauag

SEQ ID NO: 598212 - RNA, 19 nt, Artificial Sequence
  Description of Artificial Sequence: Synthetic oligonucleotide
aauauccgcuuccaaaagc

SEQ ID NO: 598213 - RNA, 19 nt, Artificial Sequence
  Description of Artificial Sequence: Synthetic oligonucleotide
ugucugacaaguuauaagc

SEQ ID NO: 598214 - RNA, 19 nt, Artificial Sequence
  Description of Artificial Sequence: Synthetic oligonucleotide
ucuauuuagaaaaguacca

SEQ ID NO: 598215 - RNA, 19 nt, Artificial Sequence
  Description of Artificial Sequence: Synthetic oligonucleotide
aaugcauuacgugagcugg

SEQ ID NO: 598216 - RNA, 19 nt, Artificial Sequence
  Description of Artificial Sequence: Synthetic oligonucleotide
uguacaacccaccuaugcg

SEQ ID NO: 598217 - RNA, 19 nt, Artificial Sequence
  Description of Artificial Sequence: Synthetic oligonucleotide
uuguacuuaaucacagugg

SEQ ID NO: 598218 - RNA, 19 nt, Artificial Sequence
  Description of Artificial Sequence: Synthetic oligonucleotide
agcgucaauaaauauccgc

SEQ ID NO: 598219 - RNA, 19 nt, Artificial Sequence
  Description of Artificial Sequence: Synthetic oligonucleotide
cuguccaccggcuagaugg

SEQ ID NO: 598220 - RNA, 19 nt, Artificial Sequence
  Description of Artificial Sequence: Synthetic oligonucleotide
ucaauaaauauccgcuucc

SEQ ID NO: 598221 - RNA, 19 nt, Artificial Sequence
  Description of Artificial Sequence: Synthetic oligonucleotide
auaguuauuccuuugugca

SEQ ID NO: 598222 - RNA, 19 nt, Artificial Sequence
  Description of Artificial Sequence: Synthetic oligonucleotide
cauguuguuaccauccugc

SEQ ID NO: 598223 - RNA, 19 nt, Artificial Sequence
  Description of Artificial Sequence: Synthetic oligonucleotide
aaagguugaguucuuagaa

SEQ ID NO: 598224 - RNA, 19 nt, Artificial Sequence
  Description of Artificial Sequence: Synthetic oligonucleotide
uaacauuuaaccaguuagc

SEQ ID NO: 598225 - RNA, 19 nt, Artificial Sequence
  Description of Artificial Sequence: Synthetic oligonucleotide
uugcuauucaacagguagg

SEQ ID NO: 598226 - RNA, 19 nt, Artificial Sequence
  Description of Artificial Sequence: Synthetic oligonucleotide
acuuugguaacauuaacau

SEQ ID NO: 598227 - RNA, 19 nt, Artificial Sequence
  Description of Artificial Sequence: Synthetic oligonucleotide
uacuuaaucacaguggggu

SEQ ID NO: 598228 - RNA, 19 nt, Artificial Sequence
  Description of Artificial Sequence: Synthetic oligonucleotide
uuauuagcaucguuacagg

SEQ ID NO: 598229 - RNA, 19 nt, Artificial Sequence
  Description of Artificial Sequence: Synthetic oligonucleotide
ugugaaucuuuuauuguac

SEQ ID NO: 598230 - RNA, 19 nt, Artificial Sequence
  Description of Artificial Sequence: Synthetic oligonucleotide
ucaccagucacauuguacu

SEQ ID NO: 598231 - RNA, 19 nt, Artificial Sequence
  Description of Artificial Sequence: Synthetic oligonucleotide
aauuaacaccgucauuuca

SEQ ID NO: 598232 - RNA, 19 nt, Artificial Sequence
  Description of Artificial Sequence: Synthetic oligonucleotide
aaaguaccagcucaugggu

SEQ ID NO: 598233 - RNA, 19 nt, Artificial Sequence
  Description of Artificial Sequence: Synthetic oligonucleotide
uauucaacagguaggccug

SEQ ID NO: 598234 - RNA, 19 nt, Artificial Sequence
  Description of Artificial Sequence: Synthetic oligonucleotide
cauuuaaccaguuagcaaa

SEQ ID NO: 598235 - RNA, 19 nt, Artificial Sequence
  Description of Artificial Sequence: Synthetic oligonucleotide
uaugcggcaggacagguca

SEQ ID NO: 598236 - RNA, 19 nt, Artificial Sequence
  Description of Artificial Sequence: Synthetic oligonucleotide
ucagcgugcagccuaaaga

SEQ ID NO: 598237 - RNA, 19 nt, Artificial Sequence
  Description of Artificial Sequence: Synthetic oligonucleotide
guuaccauccugcauacac

SEQ ID NO: 598238 - RNA, 19 nt, Artificial Sequence
  Description of Artificial Sequence: Synthetic oligonucleotide
aagaucagccgcccuuacc

SEQ ID NO: 598239 - RNA, 19 nt, Artificial Sequence
  Description of Artificial Sequence: Synthetic oligonucleotide
aacgcugaagacauugagg

SEQ ID NO: 598240 - RNA, 19 nt, Artificial Sequence
  Description of Artificial Sequence: Synthetic oligonucleotide
uuagcaucguuacaggcaa

SEQ ID NO: 598241 - RNA, 19 nt, Artificial Sequence
  Description of Artificial Sequence: Synthetic oligonucleotide
guacaacccaccuaugcgg

SEQ ID NO: 598242 - RNA, 19 nt, Artificial Sequence
  Description of Artificial Sequence: Synthetic oligonucleotide
ucuagcaucuucagcgugc

SEQ ID NO: 598243 - RNA, 19 nt, Artificial Sequence
  Description of Artificial Sequence: Synthetic oligonucleotide
aacaccaacagaagacugg

SEQ ID NO: 598244 - RNA, 19 nt, Artificial Sequence
  Description of Artificial Sequence: Synthetic oligonucleotide
uagauggucugguagccgg

SEQ ID NO: 598245 - RNA, 19 nt, Artificial Sequence
  Description of Artificial Sequence: Synthetic oligonucleotide
aacguguugcauuucuugu

SEQ ID NO: 598246 - RNA, 19 nt, Artificial Sequence
  Description of Artificial Sequence: Synthetic oligonucleotide
uguaacguguugcauuucu

SEQ ID NO: 598247 - RNA, 19 nt, Artificial Sequence
  Description of Artificial Sequence: Synthetic oligonucleotide
agcucggggacauaagaac

SEQ ID NO: 598248 - RNA, 19 nt, Artificial Sequence
  Description of Artificial Sequence: Synthetic oligonucleotide
cuuaccacgcccaaguguc

SEQ ID NO: 598249 - RNA, 19 nt, Artificial Sequence
  Description of Artificial Sequence: Synthetic oligonucleotide
acagacccaaaccugucac

SEQ ID NO: 598250 - RNA, 19 nt, Artificial Sequence
  Description of Artificial Sequence: Synthetic oligonucleotide
uaacguguugcauuucuug

SEQ ID NO: 598251 - RNA, 19 nt, Artificial Sequence
  Description of Artificial Sequence: Synthetic oligonucleotide
ucaaccggacuucuuguag

SEQ ID NO: 598252 - RNA, 19 nt, Artificial Sequence
  Description of Artificial Sequence: Synthetic oligonucleotide
cuauucaguacuucugcag

SEQ ID NO: 598253 - RNA, 19 nt, Artificial Sequence
  Description of Artificial Sequence: Synthetic oligonucleotide
ucgggaagagucauguuca

SEQ ID NO: 598254 - RNA, 19 nt, Artificial Sequence
  Description of Artificial Sequence: Synthetic oligonucleotide
ugagugucugacaaguuau

SEQ ID NO: 598255 - RNA, 19 nt, Artificial Sequence
  Description of Artificial Sequence: Synthetic oligonucleotide
aagaugugcuccucggugu

SEQ ID NO: 598256 - RNA, 19 nt, Artificial Sequence
  Description of Artificial Sequence: Synthetic oligonucleotide
auagcacucaaacaccggu

SEQ ID NO: 598257 - RNA, 19 nt, Artificial Sequence
  Description of Artificial Sequence: Synthetic oligonucleotide
uggccauuauacaagcugu

SEQ ID NO: 598258 - RNA, 19 nt, Artificial Sequence
  Description of Artificial Sequence: Synthetic oligonucleotide
ugagugacgacacguuggc

SEQ ID NO: 598259 - RNA, 19 nt, Artificial Sequence
  Description of Artificial Sequence: Synthetic oligonucleotide
gaacgcugaagacauugag

SEQ ID NO: 598260 - RNA, 19 nt, Artificial Sequence
  Description of Artificial Sequence: Synthetic oligonucleotide
gagcgugacggucacauug

SEQ ID NO: 598261 - RNA, 19 nt, Artificial Sequence
  Description of Artificial Sequence: Synthetic oligonucleotide
auucaguacuucugcagag

SEQ ID NO: 598262 - RNA, 19 nt, Artificial Sequence
  Description of Artificial Sequence: Synthetic oligonucleotide
ugcuauucaacagguaggc

SEQ ID NO: 598263 - RNA, 19 nt, Artificial Sequence
  Description of Artificial Sequence: Synthetic oligonucleotide
cuggaaaucacuuuacaaa

SEQ ID NO: 598264 - RNA, 19 nt, Artificial Sequence
  Description of Artificial Sequence: Synthetic oligonucleotide
aaguugagcgucaauaaau

SEQ ID NO: 598265 - RNA, 19 nt, Artificial Sequence
  Description of Artificial Sequence: Synthetic oligonucleotide
uugauaaagcagauuugaa

SEQ ID NO: 598266 - RNA, 19 nt, Artificial Sequence
  Description of Artificial Sequence: Synthetic oligonucleotide
agugacgacacguuggcau

SEQ ID NO: 598267 - RNA, 19 nt, Artificial Sequence
  Description of Artificial Sequence: Synthetic oligonucleotide
agaaguuggccauuauaca

SEQ ID NO: 598268 - RNA, 19 nt, Artificial Sequence
  Description of Artificial Sequence: Synthetic oligonucleotide
uccuuagagcucuacuuug

SEQ ID NO: 598269 - RNA, 19 nt, Artificial Sequence
  Description of Artificial Sequence: Synthetic oligonucleotide
uacagaguggauccccuug

SEQ ID NO: 598270 - RNA, 19 nt, Artificial Sequence
  Description of Artificial Sequence: Synthetic oligonucleotide
gggacauaagaacaggccc

SEQ ID NO: 598271 - RNA, 19 nt, Artificial Sequence
  Description of Artificial Sequence: Synthetic oligonucleotide
uuccguuuucaccagucac

SEQ ID NO: 598272 - RNA, 19 nt, Artificial Sequence
  Description of Artificial Sequence: Synthetic oligonucleotide
acaggcaaugcauuacgug

SEQ ID NO: 598273 - RNA, 19 nt, Artificial Sequence
  Description of Artificial Sequence: Synthetic oligonucleotide
uucaaccuugaaagccugg

SEQ ID NO: 598274 - RNA, 19 nt, Artificial Sequence
  Description of Artificial Sequence: Synthetic oligonucleotide
guuacuauucaguacuucu

SEQ ID NO: 598275 - RNA, 19 nt, Artificial Sequence
  Description of Artificial Sequence: Synthetic oligonucleotide
ucuugugaaguugagcguc

SEQ ID NO: 598276 - RNA, 19 nt, Artificial Sequence
  Description of Artificial Sequence: Synthetic oligonucleotide
aaccugucacuuucaaccu

SEQ ID NO: 598277 - RNA, 19 nt, Artificial Sequence
  Description of Artificial Sequence: Synthetic oligonucleotide
uuaaucacagugggguuug

SEQ ID NO: 598278 - RNA, 19 nt, Artificial Sequence
  Description of Artificial Sequence: Synthetic oligonucleotide
caaccggacuucuuguagg

SEQ ID NO: 598279 - RNA, 19 nt, Artificial Sequence
  Description of Artificial Sequence: Synthetic oligonucleotide
ugggcugauguucaaugcu

SEQ ID NO: 598280 - RNA, 19 nt, Artificial Sequence
  Description of Artificial Sequence: Synthetic oligonucleotide
auuagcaucguuacaggca

SEQ ID NO: 598281 - RNA, 19 nt, Artificial Sequence
  Description of Artificial Sequence: Synthetic oligonucleotide
guguacaacccaccuaugc

SEQ ID NO: 598282 - RNA, 19 nt, Artificial Sequence
  Description of Artificial Sequence: Synthetic oligonucleotide
cacauuguacuuaaucaca

SEQ ID NO: 598283 - RNA, 19 nt, Artificial Sequence
  Description of Artificial Sequence: Synthetic oligonucleotide
uucagcgugcagccuaaag

SEQ ID NO: 598284 - RNA, 19 nt, Artificial Sequence
  Description of Artificial Sequence: Synthetic oligonucleotide
caggcaaugcauuacguga

SEQ ID NO: 598285 - RNA, 19 nt, Artificial Sequence
  Description of Artificial Sequence: Synthetic oligonucleotide
augagugacgacacguugg

SEQ ID NO: 598286 - RNA, 19 nt, Artificial Sequence
  Description of Artificial Sequence: Synthetic oligonucleotide
auuaacaccgucauuucaa

SEQ ID NO: 598287 - RNA, 19 nt, Artificial Sequence
  Description of Artificial Sequence: Synthetic oligonucleotide
auggggaucagcauguugu

SEQ ID NO: 598288 - RNA, 19 nt, Artificial Sequence
  Description of Artificial Sequence: Synthetic oligonucleotide
accuaucuaagcucgggga

SEQ ID NO: 598289 - RNA, 19 nt, Artificial Sequence
  Description of Artificial Sequence: Synthetic oligonucleotide
aacaggcuagaacugccau

SEQ ID NO: 598290 - RNA, 19 nt, Artificial Sequence
  Description of Artificial Sequence: Synthetic oligonucleotide
caaugcauuacgugagcug

SEQ ID NO: 598291 - RNA, 19 nt, Artificial Sequence
  Description of Artificial Sequence: Synthetic oligonucleotide
gauagcacucaaacaccgg

SEQ ID NO: 598292 - RNA, 19 nt, Artificial Sequence
  Description of Artificial Sequence: Synthetic oligonucleotide
gagauucccuuuguaaggc

SEQ ID NO: 598293 - RNA, 19 nt, Artificial Sequence
  Description of Artificial Sequence: Synthetic oligonucleotide
acuguaacguguugcauuu

SEQ ID NO: 598294 - RNA, 19 nt, Artificial Sequence
  Description of Artificial Sequence: Synthetic oligonucleotide
ugugccauugcugucuuuc

SEQ ID NO: 598295 - RNA, 19 nt, Artificial Sequence
  Description of Artificial Sequence: Synthetic oligonucleotide
gaggccaugagugacgaca

SEQ ID NO: 598296 - RNA, 19 nt, Artificial Sequence
  Description of Artificial Sequence: Synthetic oligonucleotide
ugucaguugaggagucuac

SEQ ID NO: 598297 - RNA, 19 nt, Artificial Sequence
  Description of Artificial Sequence: Synthetic oligonucleotide
aucacugagcgugacgguc

SEQ ID NO: 598298 - RNA, 19 nt, Artificial Sequence
  Description of Artificial Sequence: Synthetic oligonucleotide
ucuaagcucggggacauaa

SEQ ID NO: 598299 - RNA, 19 nt, Artificial Sequence
  Description of Artificial Sequence: Synthetic oligonucleotide
aaccggacuucuuguagga

SEQ ID NO: 598300 - RNA, 19 nt, Artificial Sequence
  Description of Artificial Sequence: Synthetic oligonucleotide
gaaguugagcgucaauaaa

SEQ ID NO: 598301 - RNA, 19 nt, Artificial Sequence
  Description of Artificial Sequence: Synthetic oligonucleotide
acguguugcauuucuugug

SEQ ID NO: 598302 - RNA, 19 nt, Artificial Sequence
  Description of Artificial Sequence: Synthetic oligonucleotide
gacggcaguucaaagguug

SEQ ID NO: 598303 - RNA, 19 nt, Artificial Sequence
  Description of Artificial Sequence: Synthetic oligonucleotide
cucggggacauaagaacag

SEQ ID NO: 598304 - RNA, 19 nt, Artificial Sequence
  Description of Artificial Sequence: Synthetic oligonucleotide
uaccauccugcauacacuc

SEQ ID NO: 598305 - RNA, 19 nt, Artificial Sequence
  Description of Artificial Sequence: Synthetic oligonucleotide
caccuaucuaagcucgggg

SEQ ID NO: 598306 - RNA, 19 nt, Artificial Sequence
  Description of Artificial Sequence: Synthetic oligonucleotide
uuaacaccgucauuucaau

SEQ ID NO: 598307 - RNA, 19 nt, Artificial Sequence
  Description of Artificial Sequence: Synthetic oligonucleotide
uacaggcaaugcauuacgu

SEQ ID NO: 598308 - RNA, 19 nt, Artificial Sequence
  Description of Artificial Sequence: Synthetic oligonucleotide
aacaccgguauguuuuguu

SEQ ID NO: 598309 - RNA, 19 nt, Artificial Sequence
  Description of Artificial Sequence: Synthetic oligonucleotide
auauccgcuuccaaaagca

SEQ ID NO: 598310 - RNA, 19 nt, Artificial Sequence
  Description of Artificial Sequence: Synthetic oligonucleotide
agucauguucaaccggacu

SEQ ID NO: 598311 - RNA, 19 nt, Artificial Sequence
  Description of Artificial Sequence: Synthetic oligonucleotide
aaagugugccucccuucca

SEQ ID NO: 598312 - RNA, 19 nt, Artificial Sequence
  Description of Artificial Sequence: Synthetic oligonucleotide
agcagauuugaaaacaguu

SEQ ID NO: 598313 - RNA, 19 nt, Artificial Sequence
  Description of Artificial Sequence: Synthetic oligonucleotide
cacuuucaaccuugaaagc

SEQ ID NO: 598314 - RNA, 19 nt, Artificial Sequence
  Description of Artificial Sequence: Synthetic oligonucleotide
aucagccgcccuuaccacg

SEQ ID NO: 598315 - RNA, 19 nt, Artificial Sequence
  Description of Artificial Sequence: Synthetic oligonucleotide
cuaccacaagaacuguuac

SEQ ID NO: 598316 - RNA, 19 nt, Artificial Sequence
  Description of Artificial Sequence: Synthetic oligonucleotide
ucaguguacaacccaccua

SEQ ID NO: 598317 - RNA, 19 nt, Artificial Sequence
  Description of Artificial Sequence: Synthetic oligonucleotide
ucggggacauaagaacagg

SEQ ID NO: 598318 - RNA, 19 nt, Artificial Sequence
  Description of Artificial Sequence: Synthetic oligonucleotide
guacuuaaucacagugggg

SEQ ID NO: 598319 - RNA, 19 nt, Artificial Sequence
  Description of Artificial Sequence: Synthetic oligonucleotide
agcgugacggucacauugc

SEQ ID NO: 598320 - RNA, 19 nt, Artificial Sequence
  Description of Artificial Sequence: Synthetic oligonucleotide
gauuccgguccccaggcca

SEQ ID NO: 598321 - RNA, 19 nt, Artificial Sequence
  Description of Artificial Sequence: Synthetic oligonucleotide
ggauagcacucaaacaccg

SEQ ID NO: 598322 - RNA, 19 nt, Artificial Sequence
  Description of Artificial Sequence: Synthetic oligonucleotide
aucguuacaggcaaugcau

SEQ ID NO: 598323 - RNA, 19 nt, Artificial Sequence
  Description of Artificial Sequence: Synthetic oligonucleotide
aaacggggccacccucaac

SEQ ID NO: 598324 - RNA, 19 nt, Artificial Sequence
  Description of Artificial Sequence: Synthetic oligonucleotide
ugcagaaacggggccaccc

SEQ ID NO: 598325 - RNA, 19 nt, Artificial Sequence
  Description of Artificial Sequence: Synthetic oligonucleotide
acaccuaucuaagcucggg

SEQ ID NO: 598326 - RNA, 19 nt, Artificial Sequence
  Description of Artificial Sequence: Synthetic oligonucleotide
uaguuauuccuuugugcau

SEQ ID NO: 598327 - RNA, 19 nt, Artificial Sequence
  Description of Artificial Sequence: Synthetic oligonucleotide
aaucacagugggguuugug

SEQ ID NO: 598328 - RNA, 19 nt, Artificial Sequence
  Description of Artificial Sequence: Synthetic oligonucleotide
ugacgacacguuggcaucg

SEQ ID NO: 598329 - RNA, 19 nt, Artificial Sequence
  Description of Artificial Sequence: Synthetic oligonucleotide
aguuauuccuuugugcaua

SEQ ID NO: 598330 - RNA, 19 nt, Artificial Sequence
  Description of Artificial Sequence: Synthetic oligonucleotide
caucguuacaggcaaugca

SEQ ID NO: 598331 - RNA, 19 nt, Artificial Sequence
  Description of Artificial Sequence: Synthetic oligonucleotide
auguugagugucugacaag

SEQ ID NO: 598332 - RNA, 19 nt, Artificial Sequence
  Description of Artificial Sequence: Synthetic oligonucleotide
acaccgucauuucaauagu

SEQ ID NO: 598333 - RNA, 19 nt, Artificial Sequence
  Description of Artificial Sequence: Synthetic oligonucleotide
uguuacuauucaguacuuc

SEQ ID NO: 598334 - RNA, 19 nt, Artificial Sequence
  Description of Artificial Sequence: Synthetic oligonucleotide
ucauguucaaccggacuuc

SEQ ID NO: 598335 - RNA, 19 nt, Artificial Sequence
  Description of Artificial Sequence: Synthetic oligonucleotide
agcaucguuacaggcaaug

SEQ ID NO: 598336 - RNA, 19 nt, Artificial Sequence
  Description of Artificial Sequence: Synthetic oligonucleotide
ugguaacauuaacauuuaa

SEQ ID NO: 598337 - RNA, 19 nt, Artificial Sequence
  Description of Artificial Sequence: Synthetic oligonucleotide
cuaagcucggggacauaag

SEQ ID NO: 598338 - RNA, 19 nt, Artificial Sequence
  Description of Artificial Sequence: Synthetic oligonucleotide
auuacgugagcugguccuc

SEQ ID NO: 598339 - RNA, 19 nt, Artificial Sequence
  Description of Artificial Sequence: Synthetic oligonucleotide
ugccuugaugucaguugag

SEQ ID NO: 598340 - RNA, 19 nt, Artificial Sequence
  Description of Artificial Sequence: Synthetic oligonucleotide
cagauuccgguccccaggc

SEQ ID NO: 598341 - RNA, 19 nt, Artificial Sequence
  Description of Artificial Sequence: Synthetic oligonucleotide
guugcauuucuugugaagu

SEQ ID NO: 598342 - RNA, 19 nt, Artificial Sequence
  Description of Artificial Sequence: Synthetic oligonucleotide
gaccugaacgcugaagaca

SEQ ID NO: 598343 - RNA, 19 nt, Artificial Sequence
  Description of Artificial Sequence: Synthetic oligonucleotide
acgcccaagugucaggcca

SEQ ID NO: 598344 - RNA, 19 nt, Artificial Sequence
  Description of Artificial Sequence: Synthetic oligonucleotide
gauugguuggaggccauga

SEQ ID NO: 598345 - RNA, 19 nt, Artificial Sequence
  Description of Artificial Sequence: Synthetic oligonucleotide
uauccgcuuccaaaagcaa

SEQ ID NO: 598346 - RNA, 19 nt, Artificial Sequence
  Description of Artificial Sequence: Synthetic oligonucleotide
agucuacagaguggauccc

SEQ ID NO: 598347 - RNA, 19 nt, Artificial Sequence
  Description of Artificial Sequence: Synthetic oligonucleotide
aggcaaugcauuacgugag

SEQ ID NO: 598348 - RNA, 19 nt, Artificial Sequence
  Description of Artificial Sequence: Synthetic oligonucleotide
caaccuugaaagccuggac

SEQ ID NO: 598349 - RNA, 19 nt, Artificial Sequence
  Description of Artificial Sequence: Synthetic oligonucleotide
uagcacucaaacaccggua

SEQ ID NO: 598350 - RNA, 19 nt, Artificial Sequence
  Description of Artificial Sequence: Synthetic oligonucleotide
ccacaccuaucuaagcucg

SEQ ID NO: 598351 - RNA, 19 nt, Artificial Sequence
  Description of Artificial Sequence: Synthetic oligonucleotide
aggacgagcccugccaggg

SEQ ID NO: 598352 - RNA, 19 nt, Artificial Sequence
  Description of Artificial Sequence: Synthetic oligonucleotide
acuuaaucacagugggguu

SEQ ID NO: 598353 - RNA, 19 nt, Artificial Sequence
  Description of Artificial Sequence: Synthetic oligonucleotide
gaggacgagcccugccagg

SEQ ID NO: 598354 - RNA, 19 nt, Artificial Sequence
  Description of Artificial Sequence: Synthetic oligonucleotide
ccuuagagcucuacuuugg

SEQ ID NO: 598355 - RNA, 19 nt, Artificial Sequence
  Description of Artificial Sequence: Synthetic oligonucleotide
caagaacuguuacuauuca

SEQ ID NO: 598356 - RNA, 19 nt, Artificial Sequence
  Description of Artificial Sequence: Synthetic oligonucleotide
gcucucagugauugguugg

SEQ ID NO: 598357 - RNA, 19 nt, Artificial Sequence
  Description of Artificial Sequence: Synthetic oligonucleotide
ucucagugauugguuggag

SEQ ID NO: 598358 - RNA, 19 nt, Artificial Sequence
  Description of Artificial Sequence: Synthetic oligonucleotide
ucguuacaggcaaugcauu

SEQ ID NO: 598359 - RNA, 19 nt, Artificial Sequence
  Description of Artificial Sequence: Synthetic oligonucleotide
ucauguaggugauguucau

SEQ ID NO: 598360 - RNA, 19 nt, Artificial Sequence
  Description of Artificial Sequence: Synthetic oligonucleotide
cacaccuaucuaagcucgg

SEQ ID NO: 598361 - RNA, 19 nt, Artificial Sequence
  Description of Artificial Sequence: Synthetic oligonucleotide
accugaacgcugaagacau

SEQ ID NO: 598362 - RNA, 19 nt, Artificial Sequence
  Description of Artificial Sequence: Synthetic oligonucleotide
gguaggccuggauaguggc

SEQ ID NO: 598363 - RNA, 19 nt, Artificial Sequence
  Description of Artificial Sequence: Synthetic oligonucleotide
aguugagcgucaauaaaua

SEQ ID NO: 598364 - RNA, 19 nt, Artificial Sequence
  Description of Artificial Sequence: Synthetic oligonucleotide
aggccaugagugacgacac

SEQ ID NO: 598365 - RNA, 19 nt, Artificial Sequence
  Description of Artificial Sequence: Synthetic oligonucleotide
ggggacauaagaacaggcc

SEQ ID NO: 598366 - RNA, 19 nt, Artificial Sequence
  Description of Artificial Sequence: Synthetic oligonucleotide
gucauguucaaccggacuu

SEQ ID NO: 598367 - RNA, 19 nt, Artificial Sequence
  Description of Artificial Sequence: Synthetic oligonucleotide
agauggucugguagccggc

SEQ ID NO: 598368 - RNA, 19 nt, Artificial Sequence
  Description of Artificial Sequence: Synthetic oligonucleotide
aagcucggggacauaagaa

SEQ ID NO: 598369 - RNA, 19 nt, Artificial Sequence
  Description of Artificial Sequence: Synthetic oligonucleotide
uaacaccgucauuucaaua

SEQ ID NO: 598370 - RNA, 19 nt, Artificial Sequence
  Description of Artificial Sequence: Synthetic oligonucleotide
guaggaguucccgaccgug

SEQ ID NO: 598371 - RNA, 19 nt, Artificial Sequence
  Description of Artificial Sequence: Synthetic oligonucleotide
gacgcguccaccgacucga

SEQ ID NO: 598372 - RNA, 19 nt, Artificial Sequence
  Description of Artificial Sequence: Synthetic oligonucleotide
cuugugaaguugagcguca

SEQ ID NO: 598373 - RNA, 19 nt, Artificial Sequence
  Description of Artificial Sequence: Synthetic oligonucleotide
uaggcggcacaguggucgg

SEQ ID NO: 598374 - RNA, 19 nt, Artificial Sequence
  Description of Artificial Sequence: Synthetic oligonucleotide
cagugauugguuggaggcc

SEQ ID NO: 598375 - RNA, 19 nt, Artificial Sequence
  Description of Artificial Sequence: Synthetic oligonucleotide
ugcauuacgugagcugguc

SEQ ID NO: 598376 - RNA, 19 nt, Artificial Sequence
  Description of Artificial Sequence: Synthetic oligonucleotide
accacgcccaagugucagg

SEQ ID NO: 598377 - RNA, 19 nt, Artificial Sequence
  Description of Artificial Sequence: Synthetic oligonucleotide
cauuacgugagcugguccu

SEQ ID NO: 598378 - RNA, 19 nt, Artificial Sequence
  Description of Artificial Sequence: Synthetic oligonucleotide
cauggcgcgacgcagccga

SEQ ID NO: 598379 - RNA, 19 nt, Artificial Sequence
  Description of Artificial Sequence: Synthetic oligonucleotide
gaucagccgcccuuaccac

SEQ ID NO: 598380 - RNA, 19 nt, Artificial Sequence
  Description of Artificial Sequence: Synthetic oligonucleotide
uuaccacgcccaaguguca

SEQ ID NO: 598381 - RNA, 19 nt, Artificial Sequence
  Description of Artificial Sequence: Synthetic oligonucleotide
ugaagagcucucagugauu

SEQ ID NO: 598382 - RNA, 19 nt, Artificial Sequence
  Description of Artificial Sequence: Synthetic oligonucleotide
uaccacgcccaagugucag

SEQ ID NO: 598383 - RNA, 19 nt, Artificial Sequence
  Description of Artificial Sequence: Synthetic oligonucleotide
caguguacaacccaccuau

SEQ ID NO: 598384 - RNA, 19 nt, Artificial Sequence
  Description of Artificial Sequence: Synthetic oligonucleotide
cuaucuaagcucggggaca

SEQ ID NO: 598385 - RNA, 19 nt, Artificial Sequence
  Description of Artificial Sequence: Synthetic oligonucleotide
ccuaucuaagcucggggac

SEQ ID NO: 598386 - RNA, 19 nt, Artificial Sequence
  Description of Artificial Sequence: Synthetic oligonucleotide
caccgguauguuuuguuga

SEQ ID NO: 598387 - RNA, 19 nt, Artificial Sequence
  Description of Artificial Sequence: Synthetic oligonucleotide
guuccguuuucaccaguca

SEQ ID NO: 598388 - RNA, 19 nt, Artificial Sequence
  Description of Artificial Sequence: Synthetic oligonucleotide
gugacgacacguuggcauc

SEQ ID NO: 598389 - RNA, 19 nt, Artificial Sequence
  Description of Artificial Sequence: Synthetic oligonucleotide
gccuugaugucaguugagg

SEQ ID NO: 598390 - RNA, 19 nt, Artificial Sequence
  Description of Artificial Sequence: Synthetic oligonucleotide
acgacacguuggcaucggg

SEQ ID NO: 598391 - RNA, 19 nt, Artificial Sequence
  Description of Artificial Sequence: Synthetic oligonucleotide
acauuugauaaagcagauu

SEQ ID NO: 598392 - RNA, 19 nt, Artificial Sequence
  Description of Artificial Sequence: Synthetic oligonucleotide
cugucaaggucaccacaug

SEQ ID NO: 598393 - RNA, 19 nt, Artificial Sequence
  Description of Artificial Sequence: Synthetic oligonucleotide
auccccuuguugcuggcau

SEQ ID NO: 598394 - RNA, 19 nt, Artificial Sequence
  Description of Artificial Sequence: Synthetic oligonucleotide
gacgacacguuggcaucgg

SEQ ID NO: 598395 - RNA, 19 nt, Artificial Sequence
  Description of Artificial Sequence: Synthetic oligonucleotide
uuaacccaguuagcaaaau

SEQ ID NO: 598396 - RNA, 19 nt, Artificial Sequence
  Description of Artificial Sequence: Synthetic oligonucleotide
cauaagaacaggccccugu

SEQ ID NO: 598397 - RNA, 19 nt, Artificial Sequence
  Description of Artificial Sequence: Synthetic oligonucleotide
cugugcgucuggcgcagcg

SEQ ID NO: 598398 - RNA, 19 nt, Artificial Sequence
  Description of Artificial Sequence: Synthetic oligonucleotide
gcauguuguuaccauccug

SEQ ID NO: 598399 - RNA, 19 nt, Artificial Sequence
  Description of Artificial Sequence: Synthetic oligonucleotide
uagccggcaugacuccucu

SEQ ID NO: 598400 - RNA, 19 nt, Artificial Sequence
  Description of Artificial Sequence: Synthetic oligonucleotide
uguccaccggcuagauggu

SEQ ID NO: 598401 - RNA, 19 nt, Artificial Sequence
  Description of Artificial Sequence: Synthetic oligonucleotide
ggcaaugcauuacgugagc

SEQ ID NO: 598402 - RNA, 19 nt, Artificial Sequence
  Description of Artificial Sequence: Synthetic oligonucleotide
agcgugcagccuaaagauc

SEQ ID NO: 598403 - RNA, 19 nt, Artificial Sequence
  Description of Artificial Sequence: Synthetic oligonucleotide
ugugcgucuggcgcagcgc

SEQ ID NO: 598404 - RNA, 19 nt, Artificial Sequence
  Description of Artificial Sequence: Synthetic oligonucleotide
aacaggccccugugcgucu

SEQ ID NO: 598405 - RNA, 19 nt, Artificial Sequence
  Description of Artificial Sequence: Synthetic oligonucleotide
gucaguugaggagucuaca

SEQ ID NO: 598406 - RNA, 19 nt, Artificial Sequence
  Description of Artificial Sequence: Synthetic oligonucleotide
accgucauuucaauaguua

SEQ ID NO: 598407 - RNA, 19 nt, Artificial Sequence
  Description of Artificial Sequence: Synthetic oligonucleotide
gcauuacgugagcuggucc

SEQ ID NO: 598408 - RNA, 19 nt, Artificial Sequence
  Description of Artificial Sequence: Synthetic oligonucleotide
cacuuguaggaguucccga

SEQ ID NO: 598409 - RNA, 19 nt, Artificial Sequence
  Description of Artificial Sequence: Synthetic oligonucleotide
gacauaagaacaggccccu

SEQ ID NO: 598410 - RNA, 19 nt, Artificial Sequence
  Description of Artificial Sequence: Synthetic oligonucleotide
cacucaaacaccgguaugu

SEQ ID NO: 598411 - RNA, 19 nt, Artificial Sequence
  Description of Artificial Sequence: Synthetic oligonucleotide
aggauggguucagaaacau

SEQ ID NO: 598412 - RNA, 19 nt, Artificial Sequence
  Description of Artificial Sequence: Synthetic oligonucleotide
cagguuccguuuucaccag

SEQ ID NO: 598413 - RNA, 19 nt, Artificial Sequence
  Description of Artificial Sequence: Synthetic oligonucleotide
guugagcgucaauaaauau

SEQ ID NO: 598414 - RNA, 19 nt, Artificial Sequence
  Description of Artificial Sequence: Synthetic oligonucleotide
ccgaccguggccugaagag

SEQ ID NO: 598415 - RNA, 19 nt, Artificial Sequence
  Description of Artificial Sequence: Synthetic oligonucleotide
auccgcuuccaaaagcaau

SEQ ID NO: 598416 - RNA, 19 nt, Artificial Sequence
  Description of Artificial Sequence: Synthetic oligonucleotide
cuaaagaucagccgcccuu

SEQ ID NO: 598417 - RNA, 19 nt, Artificial Sequence
  Description of Artificial Sequence: Synthetic oligonucleotide
ugggguuugugggcacaag

SEQ ID NO: 598418 - RNA, 19 nt, Artificial Sequence
  Description of Artificial Sequence: Synthetic oligonucleotide
gucaccacaugaggacugc

SEQ ID NO: 598419 - RNA, 19 nt, Artificial Sequence
  Description of Artificial Sequence: Synthetic oligonucleotide
guugcgaggccggcgggag

SEQ ID NO: 598420 - RNA, 19 nt, Artificial Sequence
  Description of Artificial Sequence: Synthetic oligonucleotide
uccugcgugcagcgugucu

SEQ ID NO: 598421 - RNA, 19 nt, Artificial Sequence
  Description of Artificial Sequence: Synthetic oligonucleotide
caccgacucgagaggcccg

SEQ ID NO: 598422 - RNA, 19 nt, Artificial Sequence
  Description of Artificial Sequence: Synthetic oligonucleotide
cagcgugcagccuaaagau

SEQ ID NO: 598423 - RNA, 19 nt, Artificial Sequence
  Description of Artificial Sequence: Synthetic oligonucleotide
aguguacaacccaccuaug

SEQ ID NO: 598424 - RNA, 19 nt, Artificial Sequence
  Description of Artificial Sequence: Synthetic oligonucleotide
cacgcccaagugucaggcc

SEQ ID NO: 598425 - RNA, 19 nt, Artificial Sequence
  Description of Artificial Sequence: Synthetic oligonucleotide
acauaagaacaggccccug

SEQ ID NO: 598426 - RNA, 19 nt, Artificial Sequence
  Description of Artificial Sequence: Synthetic oligonucleotide
gcaucguuacaggcaaugc

SEQ ID NO: 598427 - RNA, 19 nt, Artificial Sequence
  Description of Artificial Sequence: Synthetic oligonucleotide
gccggcaugacuccucuuc

SEQ ID NO: 598428 - RNA, 19 nt, Artificial Sequence
  Description of Artificial Sequence: Synthetic oligonucleotide
accggcuagauggucuggu

SEQ ID NO: 598429 - RNA, 19 nt, Artificial Sequence
  Description of Artificial Sequence: Synthetic oligonucleotide
gcuauucaacagguaggcc

SEQ ID NO: 598430 - RNA, 19 nt, Artificial Sequence
  Description of Artificial Sequence: Synthetic oligonucleotide
gaccguggccugaagagcu

SEQ ID NO: 598431 - RNA, 19 nt, Artificial Sequence
  Description of Artificial Sequence: Synthetic oligonucleotide
agguuccguuuucaccagu

SEQ ID NO: 598432 - RNA, 19 nt, Artificial Sequence
  Description of Artificial Sequence: Synthetic oligonucleotide
ggccauuauacaagcugug

SEQ ID NO: 598433 - RNA, 19 nt, Artificial Sequence
  Description of Artificial Sequence: Synthetic oligonucleotide
guguugcauuucuugugaa

SEQ ID NO: 598434 - RNA, 19 nt, Artificial Sequence
  Description of Artificial Sequence: Synthetic oligonucleotide
ggacgcguccaccgacucg

SEQ ID NO: 598435 - RNA, 19 nt, Artificial Sequence
  Description of Artificial Sequence: Synthetic oligonucleotide
uggcaucgggaagagucau

SEQ ID NO: 598436 - RNA, 19 nt, Artificial Sequence
  Description of Artificial Sequence: Synthetic oligonucleotide
gguugugcccagccagaug

SEQ ID NO: 598437 - RNA, 19 nt, Artificial Sequence
  Description of Artificial Sequence: Synthetic oligonucleotide
uggcgcgacgcagccgagg

SEQ ID NO: 598438 - RNA, 19 nt, Artificial Sequence
  Description of Artificial Sequence: Synthetic oligonucleotide
gcucggggacauaagaaca

SEQ ID NO: 598439 - RNA, 19 nt, Artificial Sequence
  Description of Artificial Sequence: Synthetic oligonucleotide
cucuuccugccgaugaggu

SEQ ID NO: 598440 - RNA, 19 nt, Artificial Sequence
  Description of Artificial Sequence: Synthetic oligonucleotide
gaccgcggggcgccagggg

SEQ ID NO: 598441 - RNA, 19 nt, Artificial Sequence
  Description of Artificial Sequence: Synthetic oligonucleotide
cuuaaucacagugggguuu

SEQ ID NO: 598442 - RNA, 19 nt, Artificial Sequence
  Description of Artificial Sequence: Synthetic oligonucleotide
aguucccgaccguggccug

SEQ ID NO: 598443 - RNA, 19 nt, Artificial Sequence
  Description of Artificial Sequence: Synthetic oligonucleotide
gguccucaguguacaaccc

SEQ ID NO: 598444 - RNA, 19 nt, Artificial Sequence
  Description of Artificial Sequence: Synthetic oligonucleotide
acggcaguucaaagguuga

SEQ ID NO: 598445 - RNA, 19 nt, Artificial Sequence
  Description of Artificial Sequence: Synthetic oligonucleotide
gagugucugacaaguuaua

SEQ ID NO: 598446 - RNA, 19 nt, Artificial Sequence
  Description of Artificial Sequence: Synthetic oligonucleotide
ggaggacgcguccaccgac

SEQ ID NO: 598447 - RNA, 19 nt, Artificial Sequence
  Description of Artificial Sequence: Synthetic oligonucleotide
augcauuacgugagcuggu

SEQ ID NO: 598448 - RNA, 19 nt, Artificial Sequence
  Description of Artificial Sequence: Synthetic oligonucleotide
ucccuuuguaaggcuuaaa

SEQ ID NO: 598449 - RNA, 19 nt, Artificial Sequence
  Description of Artificial Sequence: Synthetic oligonucleotide
gaguucccgaccguggccu

SEQ ID NO: 598450 - RNA, 19 nt, Artificial Sequence
  Description of Artificial Sequence: Synthetic oligonucleotide
ccggcaugacuccucuucc

SEQ ID NO: 598451 - RNA, 19 nt, Artificial Sequence
  Description of Artificial Sequence: Synthetic oligonucleotide
ggauacuguucuugcucuc

SEQ ID NO: 598452 - RNA, 19 nt, Artificial Sequence
  Description of Artificial Sequence: Synthetic oligonucleotide
uaaucacagugggguuugu

SEQ ID NO: 598453 - RNA, 19 nt, Artificial Sequence
  Description of Artificial Sequence: Synthetic oligonucleotide
cuccuuagagcucuacuuu

SEQ ID NO: 598454 - RNA, 19 nt, Artificial Sequence
  Description of Artificial Sequence: Synthetic oligonucleotide
guaggccuggauaguggca

SEQ ID NO: 598455 - RNA, 19 nt, Artificial Sequence
  Description of Artificial Sequence: Synthetic oligonucleotide
caggggccgccauggcgcg

SEQ ID NO: 598456 - RNA, 19 nt, Artificial Sequence
  Description of Artificial Sequence: Synthetic oligonucleotide
cguguugcauuucuuguga

SEQ ID NO: 598457 - RNA, 19 nt, Artificial Sequence
  Description of Artificial Sequence: Synthetic oligonucleotide
guagccggcaugacuccuc

SEQ ID NO: 598458 - RNA, 19 nt, Artificial Sequence
  Description of Artificial Sequence: Synthetic oligonucleotide
gggugcggcgguugcgagg

SEQ ID NO: 598459 - RNA, 19 nt, Artificial Sequence
  Description of Artificial Sequence: Synthetic oligonucleotide
cacccucaacaccaacaga

SEQ ID NO: 598460 - RNA, 19 nt, Artificial Sequence
  Description of Artificial Sequence: Synthetic oligonucleotide
ggcuaggcggcacaguggu

SEQ ID NO: 598461 - RNA, 19 nt, Artificial Sequence
  Description of Artificial Sequence: Synthetic oligonucleotide
gccuaaagaucagccgccc

SEQ ID NO: 598462 - RNA, 19 nt, Artificial Sequence
  Description of Artificial Sequence: Synthetic oligonucleotide
cauuugggcugauguucaa

SEQ ID NO: 598463 - RNA, 19 nt, Artificial Sequence
  Description of Artificial Sequence: Synthetic oligonucleotide
accguggccugaagagcuc

SEQ ID NO: 598464 - RNA, 19 nt, Artificial Sequence
  Description of Artificial Sequence: Synthetic oligonucleotide
cagucucguagauggugaa

SEQ ID NO: 598465 - RNA, 19 nt, Artificial Sequence
  Description of Artificial Sequence: Synthetic oligonucleotide
caccgugugcaaggccugc

SEQ ID NO: 598466 - RNA, 19 nt, Artificial Sequence
  Description of Artificial Sequence: Synthetic oligonucleotide
ucccgaccguggccugaag

SEQ ID NO: 598467 - RNA, 19 nt, Artificial Sequence
  Description of Artificial Sequence: Synthetic oligonucleotide
gccauggcgcgacgcagcc

SEQ ID NO: 598468 - RNA, 19 nt, Artificial Sequence
  Description of Artificial Sequence: Synthetic oligonucleotide
gcaucgggaagagucaugu

SEQ ID NO: 598469 - RNA, 19 nt, Artificial Sequence
  Description of Artificial Sequence: Synthetic oligonucleotide
cuguaacguguugcauuuc

SEQ ID NO: 598470 - RNA, 19 nt, Artificial Sequence
  Description of Artificial Sequence: Synthetic oligonucleotide
cgcgacgcagccgaggccg

SEQ ID NO: 598471 - RNA, 19 nt, Artificial Sequence
  Description of Artificial Sequence: Synthetic oligonucleotide
ccacgcccaagugucaggc

SEQ ID NO: 598472 - RNA, 19 nt, Artificial Sequence
  Description of Artificial Sequence: Synthetic oligonucleotide
gaaccauguccagucucgu

SEQ ID NO: 598473 - RNA, 19 nt, Artificial Sequence
  Description of Artificial Sequence: Synthetic oligonucleotide
caccggcuagauggucugg

SEQ ID NO: 598474 - RNA, 19 nt, Artificial Sequence
  Description of Artificial Sequence: Synthetic oligonucleotide
gcgugacggucacauugcc

SEQ ID NO: 598475 - RNA, 19 nt, Artificial Sequence
  Description of Artificial Sequence: Synthetic oligonucleotide
gucuggcgcagcgcacccg

SEQ ID NO: 598476 - RNA, 19 nt, Artificial Sequence
  Description of Artificial Sequence: Synthetic oligonucleotide
acgcagccgaggccggggu

SEQ ID NO: 598477 - RNA, 19 nt, Artificial Sequence
  Description of Artificial Sequence: Synthetic oligonucleotide
cccuuuguaaggcuuaaau

SEQ ID NO: 598478 - RNA, 19 nt, Artificial Sequence
  Description of Artificial Sequence: Synthetic oligonucleotide
accggacuucuuguaggaa

SEQ ID NO: 598479 - RNA, 19 nt, Artificial Sequence
  Description of Artificial Sequence: Synthetic oligonucleotide
cagacccaaaccugucacu

SEQ ID NO: 598480 - RNA, 19 nt, Artificial Sequence
  Description of Artificial Sequence: Synthetic oligonucleotide
gccaugagugacgacacgu

SEQ ID NO: 598481 - RNA, 19 nt, Artificial Sequence
  Description of Artificial Sequence: Synthetic oligonucleotide
cauguucaaccggacuucu

SEQ ID NO: 598482 - RNA, 19 nt, Artificial Sequence
  Description of Artificial Sequence: Synthetic oligonucleotide
cgugugcaaggccugccag

SEQ ID NO: 598483 - RNA, 19 nt, Artificial Sequence
  Description of Artificial Sequence: Synthetic oligonucleotide
ccaccggcuagauggucug

SEQ ID NO: 598484 - RNA, 19 nt, Artificial Sequence
  Description of Artificial Sequence: Synthetic oligonucleotide
auccugcgugcagcguguc

SEQ ID NO: 598485 - RNA, 19 nt, Artificial Sequence
  Description of Artificial Sequence: Synthetic oligonucleotide
ggcaucgggaagagucaug

SEQ ID NO: 598486 - RNA, 19 nt, Artificial Sequence
  Description of Artificial Sequence: Synthetic oligonucleotide
ucccacuagcugugucauu

SEQ ID NO: 598487 - RNA, 19 nt, Artificial Sequence
  Description of Artificial Sequence: Synthetic oligonucleotide
ggacugcagcucccacuag

SEQ ID NO: 598488 - RNA, 19 nt, Artificial Sequence
  Description of Artificial Sequence: Synthetic oligonucleotide
ccgucauuucaauaguuau

SEQ ID NO: 598489 - RNA, 19 nt, Artificial Sequence
  Description of Artificial Sequence: Synthetic oligonucleotide
cguccaccgacucgagagg

SEQ ID NO: 598490 - RNA, 19 nt, Artificial Sequence
  Description of Artificial Sequence: Synthetic oligonucleotide
ggauccccuuguugcuggc

SEQ ID NO: 598491 - RNA, 19 nt, Artificial Sequence
  Description of Artificial Sequence: Synthetic oligonucleotide
gcaaugcauuacgugagcu

SEQ ID NO: 598492 - RNA, 19 nt, Artificial Sequence
  Description of Artificial Sequence: Synthetic oligonucleotide
cuguuacuauucaguacuu

SEQ ID NO: 598493 - RNA, 19 nt, Artificial Sequence
  Description of Artificial Sequence: Synthetic oligonucleotide
ggacgagcccugccagggc

SEQ ID NO: 598494 - RNA, 19 nt, Artificial Sequence
  Description of Artificial Sequence: Synthetic oligonucleotide
guaacguguugcauuucuu

SEQ ID NO: 598495 - RNA, 19 nt, Artificial Sequence
  Description of Artificial Sequence: Synthetic oligonucleotide
gacuccucuuccugccgau

SEQ ID NO: 598496 - RNA, 19 nt, Artificial Sequence
  Description of Artificial Sequence: Synthetic oligonucleotide
ccacaugaggacugcagcu

SEQ ID NO: 598497 - RNA, 19 nt, Artificial Sequence
  Description of Artificial Sequence: Synthetic oligonucleotide
caccgucauuucaauaguu

SEQ ID NO: 598498 - RNA, 19 nt, Artificial Sequence
  Description of Artificial Sequence: Synthetic oligonucleotide
aggccggcgggaggacgcg

SEQ ID NO: 598499 - RNA, 19 nt, Artificial Sequence
  Description of Artificial Sequence: Synthetic oligonucleotide
gggaggacgcguccaccga

SEQ ID NO: 598500 - RNA, 19 nt, Artificial Sequence
  Description of Artificial Sequence: Synthetic oligonucleotide
gcagaaacggggccacccu

SEQ ID NO: 598501 - RNA, 19 nt, Artificial Sequence
  Description of Artificial Sequence: Synthetic oligonucleotide
cgcccaagugucaggccag

SEQ ID NO: 598502 - RNA, 19 nt, Artificial Sequence
  Description of Artificial Sequence: Synthetic oligonucleotide
cgaccguggccugaagagc

SEQ ID NO: 598503 - RNA, 19 nt, Artificial Sequence
  Description of Artificial Sequence: Synthetic oligonucleotide
cucgagaggcccggcagcu

SEQ ID NO: 598504 - RNA, 19 nt, Artificial Sequence
  Description of Artificial Sequence: Synthetic oligonucleotide
gcaccgugugcaaggccug

SEQ ID NO: 598505 - RNA, 19 nt, Artificial Sequence
  Description of Artificial Sequence: Synthetic oligonucleotide
gguugcgaggccggcggga

SEQ ID NO: 598506 - RNA, 19 nt, Artificial Sequence
  Description of Artificial Sequence: Synthetic oligonucleotide
cccgaccguggccugaaga

SEQ ID NO: 598507 - RNA, 19 nt, Artificial Sequence
  Description of Artificial Sequence: Synthetic oligonucleotide
ggggccgccauggcgcgac

SEQ ID NO: 598508 - RNA, 19 nt, Artificial Sequence
  Description of Artificial Sequence: Synthetic oligonucleotide
gccgcccuuaccacgccca

SEQ ID NO: 598509 - RNA, 19 nt, Artificial Sequence
  Description of Artificial Sequence: Synthetic oligonucleotide
ccgugugcaaggccugcca

SEQ ID NO: 598510 - RNA, 19 nt, Artificial Sequence
  Description of Artificial Sequence: Synthetic oligonucleotide
acgcguccaccgacucgag

SEQ ID NO: 598511 - RNA, 19 nt, Artificial Sequence
  Description of Artificial Sequence: Synthetic oligonucleotide
cagaguggauccccuuguu

SEQ ID NO: 598512 - RNA, 19 nt, Artificial Sequence
  Description of Artificial Sequence: Synthetic oligonucleotide
ccuaaagaucagccgcccu

SEQ ID NO: 598513 - RNA, 19 nt, Artificial Sequence
  Description of Artificial Sequence: Synthetic oligonucleotide
caucgggaagagucauguu

SEQ ID NO: 598514 - RNA, 19 nt, Artificial Sequence
  Description of Artificial Sequence: Synthetic oligonucleotide
gcgcgacgcagccgaggcc

SEQ ID NO: 598515 - RNA, 19 nt, Artificial Sequence
  Description of Artificial Sequence: Synthetic oligonucleotide
ccacaagaacuguuacuau

SEQ ID NO: 598516 - RNA, 19 nt, Artificial Sequence
  Description of Artificial Sequence: Synthetic oligonucleotide
cgucuggcgcagcgcaccc

SEQ ID NO: 598517 - RNA, 19 nt, Artificial Sequence
  Description of Artificial Sequence: Synthetic oligonucleotide
ccaugagugacgacacguu

SEQ ID NO: 598518 - RNA, 19 nt, Artificial Sequence
  Description of Artificial Sequence: Synthetic oligonucleotide
gguagccggcaugacuccu

SEQ ID NO: 598519 - RNA, 19 nt, Artificial Sequence
  Description of Artificial Sequence: Synthetic oligonucleotide
gugcagcgugucucuuccu

SEQ ID NO: 598520 - RNA, 19 nt, Artificial Sequence
  Description of Artificial Sequence: Synthetic oligonucleotide
cuucagcgugcagccuaaa

SEQ ID NO: 598521 - RNA, 19 nt, Artificial Sequence
  Description of Artificial Sequence: Synthetic oligonucleotide
cagucauguuguccuucuu

SEQ ID NO: 598522 - RNA, 19 nt, Artificial Sequence
  Description of Artificial Sequence: Synthetic oligonucleotide
ccggcuagauggucuggua

SEQ ID NO: 598523 - RNA, 19 nt, Artificial Sequence
  Description of Artificial Sequence: Synthetic oligonucleotide
gcuaggcggcacagugguc

SEQ ID NO: 598524 - RNA, 19 nt, Artificial Sequence
  Description of Artificial Sequence: Synthetic oligonucleotide
gcgcacccgccuguccacc

SEQ ID NO: 598525 - RNA, 19 nt, Artificial Sequence
  Description of Artificial Sequence: Synthetic oligonucleotide
ccgacucgagaggcccggc

SEQ ID NO: 598526 - RNA, 19 nt, Artificial Sequence
  Description of Artificial Sequence: Synthetic oligonucleotide
cgguugcgaggccggcggg

SEQ ID NO: 598527 - RNA, 19 nt, Artificial Sequence
  Description of Artificial Sequence: Synthetic oligonucleotide
cgaccgcggggcgccaggg

SEQ ID NO: 598528 - RNA, 19 nt, Artificial Sequence
  Description of Artificial Sequence: Synthetic oligonucleotide
guggucggggaagguccau

SEQ ID NO: 598529 - RNA, 19 nt, Artificial Sequence
  Description of Artificial Sequence: Synthetic oligonucleotide
cgccggcacggaggggacc

SEQ ID NO: 598530 - RNA, 19 nt, Artificial Sequence
  Description of Artificial Sequence: Synthetic oligonucleotide
cagcgaccgcggggcgcca

SEQ ID NO: 598531 - RNA, 19 nt, Artificial Sequence
  Description of Artificial Sequence: Synthetic oligonucleotide
aauaugaugcaaaugaucc

SEQ ID NO: 598532 - RNA, 19 nt, Artificial Sequence
  Description of Artificial Sequence: Synthetic oligonucleotide
aaagacgcgacccagcagc

SEQ ID NO: 598533 - RNA, 19 nt, Artificial Sequence
  Description of Artificial Sequence: Synthetic oligonucleotide
aauauuauacugcuuaaca

SEQ ID NO: 598534 - RNA, 19 nt, Artificial Sequence
  Description of Artificial Sequence: Synthetic oligonucleotide
aacgaaaugaguguccucc

SEQ ID NO: 598535 - RNA, 19 nt, Artificial Sequence
  Description of Artificial Sequence: Synthetic oligonucleotide
aauucuacaucuugguggg

SEQ ID NO: 598536 - RNA, 19 nt, Artificial Sequence
  Description of Artificial Sequence: Synthetic oligonucleotide
uuucaugcaauccugauac

SEQ ID NO: 598537 - RNA, 19 nt, Artificial Sequence
  Description of Artificial Sequence: Synthetic oligonucleotide
aaugucuauacauaagacu

SEQ ID NO: 598538 - RNA, 19 nt, Artificial Sequence
  Description of Artificial Sequence: Synthetic oligonucleotide
auauuauacugcuuaacac

SEQ ID NO: 598539 - RNA, 19 nt, Artificial Sequence
  Description of Artificial Sequence: Synthetic oligonucleotide
caauucuacaucuuggugg

SEQ ID NO: 598540 - RNA, 19 nt, Artificial Sequence
  Description of Artificial Sequence: Synthetic oligonucleotide
augcuaacgaauaugaugc

SEQ ID NO: 598541 - RNA, 19 nt, Artificial Sequence
  Description of Artificial Sequence: Synthetic oligonucleotide
uaaaugcuaacgaauauga

SEQ ID NO: 598542 - RNA, 19 nt, Artificial Sequence
  Description of Artificial Sequence: Synthetic oligonucleotide
uauacugcuuaacacaacc

SEQ ID NO: 598543 - RNA, 19 nt, Artificial Sequence
  Description of Artificial Sequence: Synthetic oligonucleotide
uguaccuaggcaaacauuc

SEQ ID NO: 598544 - RNA, 19 nt, Artificial Sequence
  Description of Artificial Sequence: Synthetic oligonucleotide
uggucuagggcaaaagagg

SEQ ID NO: 598545 - RNA, 19 nt, Artificial Sequence
  Description of Artificial Sequence: Synthetic oligonucleotide
ugauacucucucuagaaca

SEQ ID NO: 598546 - RNA, 19 nt, Artificial Sequence
  Description of Artificial Sequence: Synthetic oligonucleotide
ucuagauugaggaggaggu

SEQ ID NO: 598547 - RNA, 19 nt, Artificial Sequence
  Description of Artificial Sequence: Synthetic oligonucleotide
ugauacaucugcuuggcca

SEQ ID NO: 598548 - RNA, 19 nt, Artificial Sequence
  Description of Artificial Sequence: Synthetic oligonucleotide
ucgacgaggucgaagacgg

SEQ ID NO: 598549 - RNA, 19 nt, Artificial Sequence
  Description of Artificial Sequence: Synthetic oligonucleotide
gacggaugggcacugaacg

SEQ ID NO: 598550 - RNA, 19 nt, Artificial Sequence
  Description of Artificial Sequence: Synthetic oligonucleotide
aauccggaauguuuugggg

SEQ ID NO: 598551 - RNA, 19 nt, Artificial Sequence
  Description of Artificial Sequence: Synthetic oligonucleotide
uauagaaacauacgacgga

SEQ ID NO: 598552 - RNA, 19 nt, Artificial Sequence
  Description of Artificial Sequence: Synthetic oligonucleotide
uccuauuggaaugaggucc

SEQ ID NO: 598553 - RNA, 19 nt, Artificial Sequence
  Description of Artificial Sequence: Synthetic oligonucleotide
uacucucucuagaacaagg

SEQ ID NO: 598554 - RNA, 19 nt, Artificial Sequence
  Description of Artificial Sequence: Synthetic oligonucleotide
ucuagggcaaaagaggucc

SEQ ID NO: 598555 - RNA, 19 nt, Artificial Sequence
  Description of Artificial Sequence: Synthetic oligonucleotide
aaugauccaaucaauauua

SEQ ID NO: 598556 - RNA, 19 nt, Artificial Sequence
  Description of Artificial Sequence: Synthetic oligonucleotide
ugcgguaauagguuugggg

SEQ ID NO: 598557 - RNA, 19 nt, Artificial Sequence
  Description of Artificial Sequence: Synthetic oligonucleotide
ucucucuagaacaagggaa

SEQ ID NO: 598558 - RNA, 19 nt, Artificial Sequence
  Description of Artificial Sequence: Synthetic oligonucleotide
aaacguucguggcaaagug

SEQ ID NO: 598559 - RNA, 19 nt, Artificial Sequence
  Description of Artificial Sequence: Synthetic oligonucleotide
uuggagacggcgucgaagg

SEQ ID NO: 598560 - RNA, 19 nt, Artificial Sequence
  Description of Artificial Sequence: Synthetic oligonucleotide
uacgacggaaauaaugucu

SEQ ID NO: 598561 - RNA, 19 nt, Artificial Sequence
  Description of Artificial Sequence: Synthetic oligonucleotide
aagcgcaccucguagggcg

SEQ ID NO: 598562 - RNA, 19 nt, Artificial Sequence
  Description of Artificial Sequence: Synthetic oligonucleotide
gaauccggaauguuuuggg

SEQ ID NO: 598563 - RNA, 19 nt, Artificial Sequence
  Description of Artificial Sequence: Synthetic oligonucleotide
uuugauacucucucuagaa

SEQ ID NO: 598564 - RNA, 19 nt, Artificial Sequence
  Description of Artificial Sequence: Synthetic oligonucleotide
caccaaauaaaugcuaacg

SEQ ID NO: 598565 - RNA, 19 nt, Artificial Sequence
  Description of Artificial Sequence: Synthetic oligonucleotide
cuaagggcuauuaaugcug

SEQ ID NO: 598566 - RNA, 19 nt, Artificial Sequence
  Description of Artificial Sequence: Synthetic oligonucleotide
ugguagagugcacugaacu

SEQ ID NO: 598567 - RNA, 19 nt, Artificial Sequence
  Description of Artificial Sequence: Synthetic oligonucleotide
uuuucagagugcauaacau

SEQ ID NO: 598568 - RNA, 19 nt, Artificial Sequence
  Description of Artificial Sequence: Synthetic oligonucleotide
uuggaaugaggucccagag

SEQ ID NO: 598569 - RNA, 19 nt, Artificial Sequence
  Description of Artificial Sequence: Synthetic oligonucleotide
acugcuuaacacaaccagc

SEQ ID NO: 598570 - RNA, 19 nt, Artificial Sequence
  Description of Artificial Sequence: Synthetic oligonucleotide
augaguguccuccaaacgu

SEQ ID NO: 598571 - RNA, 19 nt, Artificial Sequence
  Description of Artificial Sequence: Synthetic oligonucleotide
ugcuaagggcuauuaaugc

SEQ ID NO: 598572 - RNA, 19 nt, Artificial Sequence
  Description of Artificial Sequence: Synthetic oligonucleotide
uaugaugcaaaugauccaa

SEQ ID NO: 598573 - RNA, 19 nt, Artificial Sequence
  Description of Artificial Sequence: Synthetic oligonucleotide
aauuuguggcuagggacgg

SEQ ID NO: 598574 - RNA, 19 nt, Artificial Sequence
  Description of Artificial Sequence: Synthetic oligonucleotide
uuaaugcuguaccuaggca

SEQ ID NO: 598575 - RNA, 19 nt, Artificial Sequence
  Description of Artificial Sequence: Synthetic oligonucleotide
agggcuauuaaugcuguac

SEQ ID NO: 598576 - RNA, 19 nt, Artificial Sequence
  Description of Artificial Sequence: Synthetic oligonucleotide
acaauucuacaucuuggug

SEQ ID NO: 598577 - RNA, 19 nt, Artificial Sequence
  Description of Artificial Sequence: Synthetic oligonucleotide
cauuagacccgacuagggg

SEQ ID NO: 598578 - RNA, 19 nt, Artificial Sequence
  Description of Artificial Sequence: Synthetic oligonucleotide
auacauaagacuaacuuuu

SEQ ID NO: 598579 - RNA, 19 nt, Artificial Sequence
  Description of Artificial Sequence: Synthetic oligonucleotide
auacgacggaaauaauguc

SEQ ID NO: 598580 - RNA, 19 nt, Artificial Sequence
  Description of Artificial Sequence: Synthetic oligonucleotide
auuucacccugcaugaagg

SEQ ID NO: 598581 - RNA, 19 nt, Artificial Sequence
  Description of Artificial Sequence: Synthetic oligonucleotide
acugaacgaaaugaguguc

SEQ ID NO: 598582 - RNA, 19 nt, Artificial Sequence
  Description of Artificial Sequence: Synthetic oligonucleotide
uugauacucucucuagaac

SEQ ID NO: 598583 - RNA, 19 nt, Artificial Sequence
  Description of Artificial Sequence: Synthetic oligonucleotide
uaccuaggcaaacauucug

SEQ ID NO: 598584 - RNA, 19 nt, Artificial Sequence
  Description of Artificial Sequence: Synthetic oligonucleotide
cucgcugagcuucagugcg

SEQ ID NO: 598585 - RNA, 19 nt, Artificial Sequence
  Description of Artificial Sequence: Synthetic oligonucleotide
accuaggcaaacauucugc

SEQ ID NO: 598586 - RNA, 19 nt, Artificial Sequence
  Description of Artificial Sequence: Synthetic oligonucleotide
ucgacaccgacccaggccu

SEQ ID NO: 598587 - RNA, 19 nt, Artificial Sequence
  Description of Artificial Sequence: Synthetic oligonucleotide
acagaccccggccaaaguc

SEQ ID NO: 598588 - RNA, 19 nt, Artificial Sequence
  Description of Artificial Sequence: Synthetic oligonucleotide
cauuucgugaugccaggcg

SEQ ID NO: 598589 - RNA, 19 nt, Artificial Sequence
  Description of Artificial Sequence: Synthetic oligonucleotide
auuucgugaugccaggcga

SEQ ID NO: 598590 - RNA, 19 nt, Artificial Sequence
  Description of Artificial Sequence: Synthetic oligonucleotide
ugcuacugacaugagugcg

SEQ ID NO: 598591 - RNA, 19 nt, Artificial Sequence
  Description of Artificial Sequence: Synthetic oligonucleotide
acauacgacggaaauaaug

SEQ ID NO: 598592 - RNA, 19 nt, Artificial Sequence
  Description of Artificial Sequence: Synthetic oligonucleotide
ucugcgguaauagguuugg

SEQ ID NO: 598593 - RNA, 19 nt, Artificial Sequence
  Description of Artificial Sequence: Synthetic oligonucleotide
gggaaacaaaauuuguggc

SEQ ID NO: 598594 - RNA, 19 nt, Artificial Sequence
  Description of Artificial Sequence: Synthetic oligonucleotide
agcgugagcagcgugucgc

SEQ ID NO: 598595 - RNA, 19 nt, Artificial Sequence
  Description of Artificial Sequence: Synthetic oligonucleotide
agcagucguugcuaagggc

SEQ ID NO: 598596 - RNA, 19 nt, Artificial Sequence
  Description of Artificial Sequence: Synthetic oligonucleotide
ugguccguacucgacaccg

SEQ ID NO: 598597 - RNA, 19 nt, Artificial Sequence
  Description of Artificial Sequence: Synthetic oligonucleotide
auaugaugcaaaugaucca

SEQ ID NO: 598598 - RNA, 19 nt, Artificial Sequence
  Description of Artificial Sequence: Synthetic oligonucleotide
aaguuacauaccuguuuca

SEQ ID NO: 598599 - RNA, 19 nt, Artificial Sequence
  Description of Artificial Sequence: Synthetic oligonucleotide
uccccagcuaagaugguug

SEQ ID NO: 598600 - RNA, 19 nt, Artificial Sequence
  Description of Artificial Sequence: Synthetic oligonucleotide
aaguaggcgccagucgccc

SEQ ID NO: 598601 - RNA, 19 nt, Artificial Sequence
  Description of Artificial Sequence: Synthetic oligonucleotide
ugguccuauuggaaugagg

SEQ ID NO: 598602 - RNA, 19 nt, Artificial Sequence
  Description of Artificial Sequence: Synthetic oligonucleotide
cugaacgaaaugagugucc

SEQ ID NO: 598603 - RNA, 19 nt, Artificial Sequence
  Description of Artificial Sequence: Synthetic oligonucleotide
aacguucguggcaaagugg

SEQ ID NO: 598604 - RNA, 19 nt, Artificial Sequence
  Description of Artificial Sequence: Synthetic oligonucleotide
cauacgacggaaauaaugu

SEQ ID NO: 598605 - RNA, 19 nt, Artificial Sequence
  Description of Artificial Sequence: Synthetic oligonucleotide
cuaacgaauaugaugcaaa

SEQ ID NO: 598606 - RNA, 19 nt, Artificial Sequence
  Description of Artificial Sequence: Synthetic oligonucleotide
ucgcggaccaucuugggcu

SEQ ID NO: 598607 - RNA, 19 nt, Artificial Sequence
  Description of Artificial Sequence: Synthetic oligonucleotide
agcguugcgcugcuucucc

SEQ ID NO: 598608 - RNA, 19 nt, Artificial Sequence
  Description of Artificial Sequence: Synthetic oligonucleotide
ugaacgaaaugaguguccu

SEQ ID NO: 598609 - RNA, 19 nt, Artificial Sequence
  Description of Artificial Sequence: Synthetic oligonucleotide
caugcaauccugauacauc

SEQ ID NO: 598610 - RNA, 19 nt, Artificial Sequence
  Description of Artificial Sequence: Synthetic oligonucleotide
guggucuagggcaaaagag

SEQ ID NO: 598611 - RNA, 19 nt, Artificial Sequence
  Description of Artificial Sequence: Synthetic oligonucleotide
ucacuuuaacauccccagc

SEQ ID NO: 598612 - RNA, 19 nt, Artificial Sequence
  Description of Artificial Sequence: Synthetic oligonucleotide
caauauuauacugcuuaac

SEQ ID NO: 598613 - RNA, 19 nt, Artificial Sequence
  Description of Artificial Sequence: Synthetic oligonucleotide
ugggcgaaugcgcugugcc

SEQ ID NO: 598614 - RNA, 19 nt, Artificial Sequence
  Description of Artificial Sequence: Synthetic oligonucleotide
cuuucagcugaguccggcg

SEQ ID NO: 598615 - RNA, 19 nt, Artificial Sequence
  Description of Artificial Sequence: Synthetic oligonucleotide
auccggaauguuuugggga

SEQ ID NO: 598616 - RNA, 19 nt, Artificial Sequence
  Description of Artificial Sequence: Synthetic oligonucleotide
aaugcgcugugcccaaagu

SEQ ID NO: 598617 - RNA, 19 nt, Artificial Sequence
  Description of Artificial Sequence: Synthetic oligonucleotide
cugagacucaccagcgccg

SEQ ID NO: 598618 - RNA, 19 nt, Artificial Sequence
  Description of Artificial Sequence: Synthetic oligonucleotide
caaaccguggggcggaggc

SEQ ID NO: 598619 - RNA, 19 nt, Artificial Sequence
  Description of Artificial Sequence: Synthetic oligonucleotide
caaaauuuguggcuaggga

SEQ ID NO: 598620 - RNA, 19 nt, Artificial Sequence
  Description of Artificial Sequence: Synthetic oligonucleotide
gacgcgacccagcagcgag

SEQ ID NO: 598621 - RNA, 19 nt, Artificial Sequence
  Description of Artificial Sequence: Synthetic oligonucleotide
acucucucuagaacaaggg

SEQ ID NO: 598622 - RNA, 19 nt, Artificial Sequence
  Description of Artificial Sequence: Synthetic oligonucleotide
uuuugcgcaggcuggcggc

SEQ ID NO: 598623 - RNA, 19 nt, Artificial Sequence
  Description of Artificial Sequence: Synthetic oligonucleotide
aagacggcgcggaggauac

SEQ ID NO: 598624 - RNA, 19 nt, Artificial Sequence
  Description of Artificial Sequence: Synthetic oligonucleotide
accuguuucaaaauauaga

SEQ ID NO: 598625 - RNA, 19 nt, Artificial Sequence
  Description of Artificial Sequence: Synthetic oligonucleotide
uuucgugaugccaggcgac

SEQ ID NO: 598626 - RNA, 19 nt, Artificial Sequence
  Description of Artificial Sequence: Synthetic oligonucleotide
uucgccuugcagaugcagu

SEQ ID NO: 598627 - RNA, 19 nt, Artificial Sequence
  Description of Artificial Sequence: Synthetic oligonucleotide
ucguagggcgugcagccag

SEQ ID NO: 598628 - RNA, 19 nt, Artificial Sequence
  Description of Artificial Sequence: Synthetic oligonucleotide
uacucgacaccgacccagg

SEQ ID NO: 598629 - RNA, 19 nt, Artificial Sequence
  Description of Artificial Sequence: Synthetic oligonucleotide
gaaugcgcugugcccaaag

SEQ ID NO: 598630 - RNA, 19 nt, Artificial Sequence
  Description of Artificial Sequence: Synthetic oligonucleotide
uccggaauguuuuggggau

SEQ ID NO: 598631 - RNA, 19 nt, Artificial Sequence
  Description of Artificial Sequence: Synthetic oligonucleotide
gggcuauuaaugcuguacc

SEQ ID NO: 598632 - RNA, 19 nt, Artificial Sequence
  Description of Artificial Sequence: Synthetic oligonucleotide
accucguagggcgugcagc

SEQ ID NO: 598633 - RNA, 19 nt, Artificial Sequence
  Description of Artificial Sequence: Synthetic oligonucleotide
gucgacgaggucgaagacg

SEQ ID NO: 598634 - RNA, 19 nt, Artificial Sequence
  Description of Artificial Sequence: Synthetic oligonucleotide
accgacccaggccucuugc

SEQ ID NO: 598635 - RNA, 19 nt, Artificial Sequence
  Description of Artificial Sequence: Synthetic oligonucleotide
uucgugaugccaggcgacg

SEQ ID NO: 598636 - RNA, 19 nt, Artificial Sequence
  Description of Artificial Sequence: Synthetic oligonucleotide
uccguacucgacaccgacc

SEQ ID NO: 598637 - RNA, 19 nt, Artificial Sequence
  Description of Artificial Sequence: Synthetic oligonucleotide
acacacccggggcagcccc

SEQ ID NO: 598638 - RNA, 19 nt, Artificial Sequence
  Description of Artificial Sequence: Synthetic oligonucleotide
uguuuuggggaugcacuug

SEQ ID NO: 598639 - RNA, 19 nt, Artificial Sequence
  Description of Artificial Sequence: Synthetic oligonucleotide
gcaagguuccaguuccugg

SEQ ID NO: 598640 - RNA, 19 nt, Artificial Sequence
  Description of Artificial Sequence: Synthetic oligonucleotide
cucgacaccgacccaggcc

SEQ ID NO: 598641 - RNA, 19 nt, Artificial Sequence
  Description of Artificial Sequence: Synthetic oligonucleotide
acgaggucgaagacggcgc

SEQ ID NO: 598642 - RNA, 19 nt, Artificial Sequence
  Description of Artificial Sequence: Synthetic oligonucleotide
caaguaggcgccagucgcc

SEQ ID NO: 598643 - RNA, 19 nt, Artificial Sequence
  Description of Artificial Sequence: Synthetic oligonucleotide
acucgacaccgacccaggc

SEQ ID NO: 598644 - RNA, 19 nt, Artificial Sequence
  Description of Artificial Sequence: Synthetic oligonucleotide
guacucgacaccgacccag

SEQ ID NO: 598645 - RNA, 19 nt, Artificial Sequence
  Description of Artificial Sequence: Synthetic oligonucleotide
aaaugcuaacgaauaugau

SEQ ID NO: 598646 - RNA, 19 nt, Artificial Sequence
  Description of Artificial Sequence: Synthetic oligonucleotide
gauuccggcgggguggucc

SEQ ID NO: 598647 - RNA, 19 nt, Artificial Sequence
  Description of Artificial Sequence: Synthetic oligonucleotide
gcgucgaaggcaaagacgc

SEQ ID NO: 598648 - RNA, 19 nt, Artificial Sequence
  Description of Artificial Sequence: Synthetic oligonucleotide
uguccuccaaacguucgug

SEQ ID NO: 598649 - RNA, 19 nt, Artificial Sequence
  Description of Artificial Sequence: Synthetic oligonucleotide
cuacugacaugagugcggc

SEQ ID NO: 598650 - RNA, 19 nt, Artificial Sequence
  Description of Artificial Sequence: Synthetic oligonucleotide
gaguccggcgguuccgggg

SEQ ID NO: 598651 - RNA, 19 nt, Artificial Sequence
  Description of Artificial Sequence: Synthetic oligonucleotide
uggggcggaggcagcaccg

SEQ ID NO: 598652 - RNA, 19 nt, Artificial Sequence
  Description of Artificial Sequence: Synthetic oligonucleotide
uucagcugaguccggcggu

SEQ ID NO: 598653 - RNA, 19 nt, Artificial Sequence
  Description of Artificial Sequence: Synthetic oligonucleotide
ccaagguacauuagacccg

SEQ ID NO: 598654 - RNA, 19 nt, Artificial Sequence
  Description of Artificial Sequence: Synthetic oligonucleotide
agcgagugguccuucuuga

SEQ ID NO: 598655 - RNA, 19 nt, Artificial Sequence
  Description of Artificial Sequence: Synthetic oligonucleotide
agcgucugcgguaauaggu

SEQ ID NO: 598656 - RNA, 19 nt, Artificial Sequence
  Description of Artificial Sequence: Synthetic oligonucleotide
ugccaccaaauaaaugcua

SEQ ID NO: 598657 - RNA, 19 nt, Artificial Sequence
  Description of Artificial Sequence: Synthetic oligonucleotide
cuagggcaaaagagguccc

SEQ ID NO: 598658 - RNA, 19 nt, Artificial Sequence
  Description of Artificial Sequence: Synthetic oligonucleotide
ucagcguugcgcugcuucu

SEQ ID NO: 598659 - RNA, 19 nt, Artificial Sequence
  Description of Artificial Sequence: Synthetic oligonucleotide
ggaauccggaauguuuugg

SEQ ID NO: 598660 - RNA, 19 nt, Artificial Sequence
  Description of Artificial Sequence: Synthetic oligonucleotide
ccaaguaggcgccagucgc

SEQ ID NO: 598661 - RNA, 19 nt, Artificial Sequence
  Description of Artificial Sequence: Synthetic oligonucleotide
gacggcgcggaggauacag

SEQ ID NO: 598662 - RNA, 19 nt, Artificial Sequence
  Description of Artificial Sequence: Synthetic oligonucleotide
aaucaauauuauacugcuu

SEQ ID NO: 598663 - RNA, 19 nt, Artificial Sequence
  Description of Artificial Sequence: Synthetic oligonucleotide
gacucaccagcgccguggg

SEQ ID NO: 598664 - RNA, 19 nt, Artificial Sequence
  Description of Artificial Sequence: Synthetic oligonucleotide
agcgccguggguagcaugg

SEQ ID NO: 598665 - RNA, 19 nt, Artificial Sequence
  Description of Artificial Sequence: Synthetic oligonucleotide
aagacgcgacccagcagcg

SEQ ID NO: 598666 - RNA, 19 nt, Artificial Sequence
  Description of Artificial Sequence: Synthetic oligonucleotide
acguucguggcaaaguggu

SEQ ID NO: 598667 - RNA, 19 nt, Artificial Sequence
  Description of Artificial Sequence: Synthetic oligonucleotide
gucgaagacggcgcggagg

SEQ ID NO: 598668 - RNA, 19 nt, Artificial Sequence
  Description of Artificial Sequence: Synthetic oligonucleotide
cucagcguugcgcugcuuc

SEQ ID NO: 598669 - RNA, 19 nt, Artificial Sequence
  Description of Artificial Sequence: Synthetic oligonucleotide
aagaaguuacauaccuguu

SEQ ID NO: 598670 - RNA, 19 nt, Artificial Sequence
  Description of Artificial Sequence: Synthetic oligonucleotide
cauguccgcgccaggcacg

SEQ ID NO: 598671 - RNA, 19 nt, Artificial Sequence
  Description of Artificial Sequence: Synthetic oligonucleotide
gcggcaagguuccaguucc

SEQ ID NO: 598672 - RNA, 19 nt, Artificial Sequence
  Description of Artificial Sequence: Synthetic oligonucleotide
gacggaaauaaugucuaua

SEQ ID NO: 598673 - RNA, 19 nt, Artificial Sequence
  Description of Artificial Sequence: Synthetic oligonucleotide
acacaaccagcuuauccuu

SEQ ID NO: 598674 - RNA, 19 nt, Artificial Sequence
  Description of Artificial Sequence: Synthetic oligonucleotide
gacggcgucgaaggcaaag

SEQ ID NO: 598675 - RNA, 19 nt, Artificial Sequence
  Description of Artificial Sequence: Synthetic oligonucleotide
gucgcggaccaucuugggc

SEQ ID NO: 598676 - RNA, 19 nt, Artificial Sequence
  Description of Artificial Sequence: Synthetic oligonucleotide
gaacgaaaugaguguccuc

SEQ ID NO: 598677 - RNA, 19 nt, Artificial Sequence
  Description of Artificial Sequence: Synthetic oligonucleotide
uccccauuucgugaugcca

SEQ ID NO: 598678 - RNA, 19 nt, Artificial Sequence
  Description of Artificial Sequence: Synthetic oligonucleotide
caguggccgacacacccgg

SEQ ID NO: 598679 - RNA, 19 nt, Artificial Sequence
  Description of Artificial Sequence: Synthetic oligonucleotide
ccguacucgacaccgaccc

SEQ ID NO: 598680 - RNA, 19 nt, Artificial Sequence
  Description of Artificial Sequence: Synthetic oligonucleotide
ggcgucgaaggcaaagacg

SEQ ID NO: 598681 - RNA, 19 nt, Artificial Sequence
  Description of Artificial Sequence: Synthetic oligonucleotide
gguggucuagggcaaaaga

SEQ ID NO: 598682 - RNA, 19 nt, Artificial Sequence
  Description of Artificial Sequence: Synthetic oligonucleotide
acggaugggcacugaacga

SEQ ID NO: 598683 - RNA, 19 nt, Artificial Sequence
  Description of Artificial Sequence: Synthetic oligonucleotide
gcuuaacacaaccagcuua

SEQ ID NO: 598684 - RNA, 19 nt, Artificial Sequence
  Description of Artificial Sequence: Synthetic oligonucleotide
gcugauuccggcggggugg

SEQ ID NO: 598685 - RNA, 19 nt, Artificial Sequence
  Description of Artificial Sequence: Synthetic oligonucleotide
auucagguccccauuucgu

SEQ ID NO: 598686 - RNA, 19 nt, Artificial Sequence
  Description of Artificial Sequence: Synthetic oligonucleotide
caaagacgcgacccagcag

SEQ ID NO: 598687 - RNA, 19 nt, Artificial Sequence
  Description of Artificial Sequence: Synthetic oligonucleotide
caucuauguagggcugggg

SEQ ID NO: 598688 - RNA, 19 nt, Artificial Sequence
  Description of Artificial Sequence: Synthetic oligonucleotide
caagguacauuagacccga

SEQ ID NO: 598689 - RNA, 19 nt, Artificial Sequence
  Description of Artificial Sequence: Synthetic oligonucleotide
ugucugcuacugacaugag

SEQ ID NO: 598690 - RNA, 19 nt, Artificial Sequence
  Description of Artificial Sequence: Synthetic oligonucleotide
agcgccucgcucugguuug

SEQ ID NO: 598691 - RNA, 19 nt, Artificial Sequence
  Description of Artificial Sequence: Synthetic oligonucleotide
gggcccucuagauugagga

SEQ ID NO: 598692 - RNA, 19 nt, Artificial Sequence
  Description of Artificial Sequence: Synthetic oligonucleotide
ugaguccggcgguuccggg

SEQ ID NO: 598693 - RNA, 19 nt, Artificial Sequence
  Description of Artificial Sequence: Synthetic oligonucleotide
acaguggccgacacacccg

SEQ ID NO: 598694 - RNA, 19 nt, Artificial Sequence
  Description of Artificial Sequence: Synthetic oligonucleotide
gcuggaguacacguugccg

SEQ ID NO: 598695 - RNA, 19 nt, Artificial Sequence
  Description of Artificial Sequence: Synthetic oligonucleotide
uggagacggcgucgaaggc

SEQ ID NO: 598696 - RNA, 19 nt, Artificial Sequence
  Description of Artificial Sequence: Synthetic oligonucleotide
auacaguggccgacacacc

SEQ ID NO: 598697 - RNA, 19 nt, Artificial Sequence
  Description of Artificial Sequence: Synthetic oligonucleotide
acgacggaaauaaugucua

SEQ ID NO: 598698 - RNA, 19 nt, Artificial Sequence
  Description of Artificial Sequence: Synthetic oligonucleotide
auguccgcgccaggcacgc

SEQ ID NO: 598699 - RNA, 19 nt, Artificial Sequence
  Description of Artificial Sequence: Synthetic oligonucleotide
ggcgacaccgggcugcugc

SEQ ID NO: 598700 - RNA, 19 nt, Artificial Sequence
  Description of Artificial Sequence: Synthetic oligonucleotide
accccggccaaagucuuuc

SEQ ID NO: 598701 - RNA, 19 nt, Artificial Sequence
  Description of Artificial Sequence: Synthetic oligonucleotide
uccuugggcgaaugcgcug

SEQ ID NO: 598702 - RNA, 19 nt, Artificial Sequence
  Description of Artificial Sequence: Synthetic oligonucleotide
cagcgucugcgguaauagg

SEQ ID NO: 598703 - RNA, 19 nt, Artificial Sequence
  Description of Artificial Sequence: Synthetic oligonucleotide
gggacggaccauucugggg

SEQ ID NO: 598704 - RNA, 19 nt, Artificial Sequence
  Description of Artificial Sequence: Synthetic oligonucleotide
gaggauacaguggccgaca

SEQ ID NO: 598705 - RNA, 19 nt, Artificial Sequence
  Description of Artificial Sequence: Synthetic oligonucleotide
ugagacucaccagcgccgu

SEQ ID NO: 598706 - RNA, 19 nt, Artificial Sequence
  Description of Artificial Sequence: Synthetic oligonucleotide
gcggaggauacaguggccg

SEQ ID NO: 598707 - RNA, 19 nt, Artificial Sequence
  Description of Artificial Sequence: Synthetic oligonucleotide
cacugaacgaaaugagugu

SEQ ID NO: 598708 - RNA, 19 nt, Artificial Sequence
  Description of Artificial Sequence: Synthetic oligonucleotide
guccguacucgacaccgac

SEQ ID NO: 598709 - RNA, 19 nt, Artificial Sequence
  Description of Artificial Sequence: Synthetic oligonucleotide
gaagcgcaccucguagggc

SEQ ID NO: 598710 - RNA, 19 nt, Artificial Sequence
  Description of Artificial Sequence: Synthetic oligonucleotide
cucguaguccaugccgggc

SEQ ID NO: 598711 - RNA, 19 nt, Artificial Sequence
  Description of Artificial Sequence: Synthetic oligonucleotide
gagugcacugaacugccgu

SEQ ID NO: 598712 - RNA, 19 nt, Artificial Sequence
  Description of Artificial Sequence: Synthetic oligonucleotide
aagguacauuagacccgac

SEQ ID NO: 598713 - RNA, 19 nt, Artificial Sequence
  Description of Artificial Sequence: Synthetic oligonucleotide
gagcccgugggauacucaa

SEQ ID NO: 598714 - RNA, 19 nt, Artificial Sequence
  Description of Artificial Sequence: Synthetic oligonucleotide
gcgauuucacccugcauga

SEQ ID NO: 598715 - RNA, 19 nt, Artificial Sequence
  Description of Artificial Sequence: Synthetic oligonucleotide
ucgugaugccaggcgacgc

SEQ ID NO: 598716 - RNA, 19 nt, Artificial Sequence
  Description of Artificial Sequence: Synthetic oligonucleotide
uuaacacaaccagcuuauc

SEQ ID NO: 598717 - RNA, 19 nt, Artificial Sequence
  Description of Artificial Sequence: Synthetic oligonucleotide
gcccgugggauacucaaug

SEQ ID NO: 598718 - RNA, 19 nt, Artificial Sequence
  Description of Artificial Sequence: Synthetic oligonucleotide
aagggcuauuaaugcugua

SEQ ID NO: 598719 - RNA, 19 nt, Artificial Sequence
  Description of Artificial Sequence: Synthetic oligonucleotide
agguggucuagggcaaaag

SEQ ID NO: 598720 - RNA, 19 nt, Artificial Sequence
  Description of Artificial Sequence: Synthetic oligonucleotide
ccgcuguuggccauagggg

SEQ ID NO: 598721 - RNA, 19 nt, Artificial Sequence
  Description of Artificial Sequence: Synthetic oligonucleotide
gcaaagacgcgacccagca

SEQ ID NO: 598722 - RNA, 19 nt, Artificial Sequence
  Description of Artificial Sequence: Synthetic oligonucleotide
ggggacggaccauucuggg

SEQ ID NO: 598723 - RNA, 19 nt, Artificial Sequence
  Description of Artificial Sequence: Synthetic oligonucleotide
gucugcgguaauagguuug

SEQ ID NO: 598724 - RNA, 19 nt, Artificial Sequence
  Description of Artificial Sequence: Synthetic oligonucleotide
ccaccaaauaaaugcuaac

SEQ ID NO: 598725 - RNA, 19 nt, Artificial Sequence
  Description of Artificial Sequence: Synthetic oligonucleotide
aacauacgacggaaauaau

SEQ ID NO: 598726 - RNA, 19 nt, Artificial Sequence
  Description of Artificial Sequence: Synthetic oligonucleotide
ccguuaagcagcgucugcg

SEQ ID NO: 598727 - RNA, 19 nt, Artificial Sequence
  Description of Artificial Sequence: Synthetic oligonucleotide
aagggcccucuagauugag

SEQ ID NO: 598728 - RNA, 19 nt, Artificial Sequence
  Description of Artificial Sequence: Synthetic oligonucleotide
aacugccguccuugggcga

SEQ ID NO: 598729 - RNA, 19 nt, Artificial Sequence
  Description of Artificial Sequence: Synthetic oligonucleotide
gcagcgucugcgguaauag

SEQ ID NO: 598730 - RNA, 19 nt, Artificial Sequence
  Description of Artificial Sequence: Synthetic oligonucleotide
uccggggaugccuuccuuu

SEQ ID NO: 598731 - RNA, 19 nt, Artificial Sequence
  Description of Artificial Sequence: Synthetic oligonucleotide
ucccgcucgguugcgcagg

SEQ ID NO: 598732 - RNA, 19 nt, Artificial Sequence
  Description of Artificial Sequence: Synthetic oligonucleotide
gagacggcgucgaaggcaa

SEQ ID NO: 598733 - RNA, 19 nt, Artificial Sequence
  Description of Artificial Sequence: Synthetic oligonucleotide
ggcaucuauguagggcugg

SEQ ID NO: 598734 - RNA, 19 nt, Artificial Sequence
  Description of Artificial Sequence: Synthetic oligonucleotide
ugggcuuguuggcccacuc

SEQ ID NO: 598735 - RNA, 19 nt, Artificial Sequence
  Description of Artificial Sequence: Synthetic oligonucleotide
guccccauuucgugaugcc

SEQ ID NO: 598736 - RNA, 19 nt, Artificial Sequence
  Description of Artificial Sequence: Synthetic oligonucleotide
uccaugcccgggugggcgc

SEQ ID NO: 598737 - RNA, 19 nt, Artificial Sequence
  Description of Artificial Sequence: Synthetic oligonucleotide
ugcgcaggcuggcggcugc

SEQ ID NO: 598738 - RNA, 19 nt, Artificial Sequence
  Description of Artificial Sequence: Synthetic oligonucleotide
aaaccguggggcggaggca

SEQ ID NO: 598739 - RNA, 19 nt, Artificial Sequence
  Description of Artificial Sequence: Synthetic oligonucleotide
auuccggcggggugguccu

SEQ ID NO: 598740 - RNA, 19 nt, Artificial Sequence
  Description of Artificial Sequence: Synthetic oligonucleotide
accccggacgcgcuggagu

SEQ ID NO: 598741 - RNA, 19 nt, Artificial Sequence
  Description of Artificial Sequence: Synthetic oligonucleotide
accgucgacgaggucgaag

SEQ ID NO: 598742 - RNA, 19 nt, Artificial Sequence
  Description of Artificial Sequence: Synthetic oligonucleotide
gcuauuaaugcuguaccua

SEQ ID NO: 598743 - RNA, 19 nt, Artificial Sequence
  Description of Artificial Sequence: Synthetic oligonucleotide
agucgcccgagccaugcuu

SEQ ID NO: 598744 - RNA, 19 nt, Artificial Sequence
  Description of Artificial Sequence: Synthetic oligonucleotide
gcaucuauguagggcuggg

SEQ ID NO: 598745 - RNA, 19 nt, Artificial Sequence
  Description of Artificial Sequence: Synthetic oligonucleotide
uugggcgaaugcgcugugc

SEQ ID NO: 598746 - RNA, 19 nt, Artificial Sequence
  Description of Artificial Sequence: Synthetic oligonucleotide
cccaaguaggcgccagucg

SEQ ID NO: 598747 - RNA, 19 nt, Artificial Sequence
  Description of Artificial Sequence: Synthetic oligonucleotide
cugaguccggcgguuccgg

SEQ ID NO: 598748 - RNA, 19 nt, Artificial Sequence
  Description of Artificial Sequence: Synthetic oligonucleotide
cuguaaauucaggucccca

SEQ ID NO: 598749 - RNA, 19 nt, Artificial Sequence
  Description of Artificial Sequence: Synthetic oligonucleotide
gcuaagggcuauuaaugcu

SEQ ID NO: 598750 - RNA, 19 nt, Artificial Sequence
  Description of Artificial Sequence: Synthetic oligonucleotide
gcuagggacggaugggcac

SEQ ID NO: 598751 - RNA, 19 nt, Artificial Sequence
  Description of Artificial Sequence: Synthetic oligonucleotide
acggcgucgaaggcaaaga

SEQ ID NO: 598752 - RNA, 19 nt, Artificial Sequence
  Description of Artificial Sequence: Synthetic oligonucleotide
cuggccgggccguuaagca

SEQ ID NO: 598753 - RNA, 19 nt, Artificial Sequence
  Description of Artificial Sequence: Synthetic oligonucleotide
ggggcauuucucuccgcug

SEQ ID NO: 598754 - RNA, 19 nt, Artificial Sequence
  Description of Artificial Sequence: Synthetic oligonucleotide
cuccaaacguucguggcaa

SEQ ID NO: 598755 - RNA, 19 nt, Artificial Sequence
  Description of Artificial Sequence: Synthetic oligonucleotide
cugcgguaauagguuuggg

SEQ ID NO: 598756 - RNA, 19 nt, Artificial Sequence
  Description of Artificial Sequence: Synthetic oligonucleotide
cugguccguacucgacacc

SEQ ID NO: 598757 - RNA, 19 nt, Artificial Sequence
  Description of Artificial Sequence: Synthetic oligonucleotide
cagcgugagcagcgugucg

SEQ ID NO: 598758 - RNA, 19 nt, Artificial Sequence
  Description of Artificial Sequence: Synthetic oligonucleotide
ccugguccguacucgacac

SEQ ID NO: 598759 - RNA, 19 nt, Artificial Sequence
  Description of Artificial Sequence: Synthetic oligonucleotide
guaggcgccagucgcccga

SEQ ID NO: 598760 - RNA, 19 nt, Artificial Sequence
  Description of Artificial Sequence: Synthetic oligonucleotide
ccucgcugagcuucagugc

SEQ ID NO: 598761 - RNA, 19 nt, Artificial Sequence
  Description of Artificial Sequence: Synthetic oligonucleotide
gugguccuauuggaaugag

SEQ ID NO: 598762 - RNA, 19 nt, Artificial Sequence
  Description of Artificial Sequence: Synthetic oligonucleotide
ugcggcucaagggucucuc

SEQ ID NO: 598763 - RNA, 19 nt, Artificial Sequence
  Description of Artificial Sequence: Synthetic oligonucleotide
gccaccaaauaaaugcuaa

SEQ ID NO: 598764 - RNA, 19 nt, Artificial Sequence
  Description of Artificial Sequence: Synthetic oligonucleotide
ggcgccaccuguaaauuca

SEQ ID NO: 598765 - RNA, 19 nt, Artificial Sequence
  Description of Artificial Sequence: Synthetic oligonucleotide
uucuagcaacucuggccuu

SEQ ID NO: 598766 - RNA, 19 nt, Artificial Sequence
  Description of Artificial Sequence: Synthetic oligonucleotide
caaacguucguggcaaagu

SEQ ID NO: 598767 - RNA, 19 nt, Artificial Sequence
  Description of Artificial Sequence: Synthetic oligonucleotide
gcagucguugcuaagggcu

SEQ ID NO: 598768 - RNA, 19 nt, Artificial Sequence
  Description of Artificial Sequence: Synthetic oligonucleotide
ggucuagggcaaaagaggu

SEQ ID NO: 598769 - RNA, 19 nt, Artificial Sequence
  Description of Artificial Sequence: Synthetic oligonucleotide
ccguccuugggcgaaugcg

SEQ ID NO: 598770 - RNA, 19 nt, Artificial Sequence
  Description of Artificial Sequence: Synthetic oligonucleotide
ggcggcaagguuccaguuc

SEQ ID NO: 598771 - RNA, 19 nt, Artificial Sequence
  Description of Artificial Sequence: Synthetic oligonucleotide
ggaggauacaguggccgac

SEQ ID NO: 598772 - RNA, 19 nt, Artificial Sequence
  Description of Artificial Sequence: Synthetic oligonucleotide
ggcgaaugcgcugugccca

SEQ ID NO: 598773 - RNA, 19 nt, Artificial Sequence
  Description of Artificial Sequence: Synthetic oligonucleotide
guaguccaugccgggcuug

SEQ ID NO: 598774 - RNA, 19 nt, Artificial Sequence
  Description of Artificial Sequence: Synthetic oligonucleotide
cagaccccggccaaagucu

SEQ ID NO: 598775 - RNA, 19 nt, Artificial Sequence
  Description of Artificial Sequence: Synthetic oligonucleotide
ccagcuaagaugguugcga

SEQ ID NO: 598776 - RNA, 19 nt, Artificial Sequence
  Description of Artificial Sequence: Synthetic oligonucleotide
cagugcgcuuucagcugag

SEQ ID NO: 598777 - RNA, 19 nt, Artificial Sequence
  Description of Artificial Sequence: Synthetic oligonucleotide
gggcgaaugcgcugugccc

SEQ ID NO: 598778 - RNA, 19 nt, Artificial Sequence
  Description of Artificial Sequence: Synthetic oligonucleotide
cucccgcucgguugcgcag

SEQ ID NO: 598779 - RNA, 19 nt, Artificial Sequence
  Description of Artificial Sequence: Synthetic oligonucleotide
ggcugagacucaccagcgc

SEQ ID NO: 598780 - RNA, 19 nt, Artificial Sequence
  Description of Artificial Sequence: Synthetic oligonucleotide
agucguugcuaagggcuau

SEQ ID NO: 598781 - RNA, 19 nt, Artificial Sequence
  Description of Artificial Sequence: Synthetic oligonucleotide
cacacccggggcagccccg

SEQ ID NO: 598782 - RNA, 19 nt, Artificial Sequence
  Description of Artificial Sequence: Synthetic oligonucleotide
ccaaacguucguggcaaag

SEQ ID NO: 598783 - RNA, 19 nt, Artificial Sequence
  Description of Artificial Sequence: Synthetic oligonucleotide
ucgcccgagccaugcuucu

SEQ ID NO: 598784 - RNA, 19 nt, Artificial Sequence
  Description of Artificial Sequence: Synthetic oligonucleotide
cuugggcgaaugcgcugug

SEQ ID NO: 598785 - RNA, 19 nt, Artificial Sequence
  Description of Artificial Sequence: Synthetic oligonucleotide
cgugucgcggaccaucuug

SEQ ID NO: 598786 - RNA, 19 nt, Artificial Sequence
  Description of Artificial Sequence: Synthetic oligonucleotide
ugggcgcuaggcggcgggg

SEQ ID NO: 598787 - RNA, 19 nt, Artificial Sequence
  Description of Artificial Sequence: Synthetic oligonucleotide
cugcuuggccaccccggac

SEQ ID NO: 598788 - RNA, 19 nt, Artificial Sequence
  Description of Artificial Sequence: Synthetic oligonucleotide
ggauacaguggccgacaca

SEQ ID NO: 598789 - RNA, 19 nt, Artificial Sequence
  Description of Artificial Sequence: Synthetic oligonucleotide
ccgucgacgaggucgaaga

SEQ ID NO: 598790 - RNA, 19 nt, Artificial Sequence
  Description of Artificial Sequence: Synthetic oligonucleotide
gccguuaagcagcgucugc

SEQ ID NO: 598791 - RNA, 19 nt, Artificial Sequence
  Description of Artificial Sequence: Synthetic oligonucleotide
cagcgugucgcggaccauc

SEQ ID NO: 598792 - RNA, 19 nt, Artificial Sequence
  Description of Artificial Sequence: Synthetic oligonucleotide
ggacggaugggcacugaac

SEQ ID NO: 598793 - RNA, 19 nt, Artificial Sequence
  Description of Artificial Sequence: Synthetic oligonucleotide
gcgugagcagcgugucgcg

SEQ ID NO: 598794 - RNA, 19 nt, Artificial Sequence
  Description of Artificial Sequence: Synthetic oligonucleotide
gucgcccgagccaugcuuc

SEQ ID NO: 598795 - RNA, 19 nt, Artificial Sequence
  Description of Artificial Sequence: Synthetic oligonucleotide
gaagggcccucuagauuga

SEQ ID NO: 598796 - RNA, 19 nt, Artificial Sequence
  Description of Artificial Sequence: Synthetic oligonucleotide
caggcgacgcugccccggc

SEQ ID NO: 598797 - RNA, 19 nt, Artificial Sequence
  Description of Artificial Sequence: Synthetic oligonucleotide
cagugguagagugcacuga

SEQ ID NO: 598798 - RNA, 19 nt, Artificial Sequence
  Description of Artificial Sequence: Synthetic oligonucleotide
cagucguugcuaagggcua

SEQ ID NO: 598799 - RNA, 19 nt, Artificial Sequence
  Description of Artificial Sequence: Synthetic oligonucleotide
gcuguuucgccuugcagau

SEQ ID NO: 598800 - RNA, 19 nt, Artificial Sequence
  Description of Artificial Sequence: Synthetic oligonucleotide
gguugcgauuucacccugc

SEQ ID NO: 598801 - RNA, 19 nt, Artificial Sequence
  Description of Artificial Sequence: Synthetic oligonucleotide
aggcgccagucgcccgagc

SEQ ID NO: 598802 - RNA, 19 nt, Artificial Sequence
  Description of Artificial Sequence: Synthetic oligonucleotide
cuggggcaauacaccucac

SEQ ID NO: 598803 - RNA, 19 nt, Artificial Sequence
  Description of Artificial Sequence: Synthetic oligonucleotide
agcagcgucugcgguaaua

SEQ ID NO: 598804 - RNA, 19 nt, Artificial Sequence
  Description of Artificial Sequence: Synthetic oligonucleotide
agugcgcuuucagcugagu

SEQ ID NO: 598805 - RNA, 19 nt, Artificial Sequence
  Description of Artificial Sequence: Synthetic oligonucleotide
gcuuggccaccccggacgc

SEQ ID NO: 598806 - RNA, 19 nt, Artificial Sequence
  Description of Artificial Sequence: Synthetic oligonucleotide
ggccauaggggaauccgga

SEQ ID NO: 598807 - RNA, 19 nt, Artificial Sequence
  Description of Artificial Sequence: Synthetic oligonucleotide
ccauuucgugaugccaggc

SEQ ID NO: 598808 - RNA, 19 nt, Artificial Sequence
  Description of Artificial Sequence: Synthetic oligonucleotide
aguggccgacacacccggg

SEQ ID NO: 598809 - RNA, 19 nt, Artificial Sequence
  Description of Artificial Sequence: Synthetic oligonucleotide
gcuggcggcaagguuccag

SEQ ID NO: 598810 - RNA, 19 nt, Artificial Sequence
  Description of Artificial Sequence: Synthetic oligonucleotide
ccuccaaacguucguggca

SEQ ID NO: 598811 - RNA, 19 nt, Artificial Sequence
  Description of Artificial Sequence: Synthetic oligonucleotide
acucaccagcgccgugggu

SEQ ID NO: 598812 - RNA, 19 nt, Artificial Sequence
  Description of Artificial Sequence: Synthetic oligonucleotide
gcuguaccuaggcaaacau

SEQ ID NO: 598813 - RNA, 19 nt, Artificial Sequence
  Description of Artificial Sequence: Synthetic oligonucleotide
cuggcggcaagguuccagu

SEQ ID NO: 598814 - RNA, 19 nt, Artificial Sequence
  Description of Artificial Sequence: Synthetic oligonucleotide
cuguuucgccuugcagaug

SEQ ID NO: 598815 - RNA, 19 nt, Artificial Sequence
  Description of Artificial Sequence: Synthetic oligonucleotide
cccagcuaagaugguugcg

SEQ ID NO: 598816 - RNA, 19 nt, Artificial Sequence
  Description of Artificial Sequence: Synthetic oligonucleotide
ugccggagcccgugggaua

SEQ ID NO: 598817 - RNA, 19 nt, Artificial Sequence
  Description of Artificial Sequence: Synthetic oligonucleotide
gcagcauguccgcgccagg

SEQ ID NO: 598818 - RNA, 19 nt, Artificial Sequence
  Description of Artificial Sequence: Synthetic oligonucleotide
cucgguugcgcaggcucuc

SEQ ID NO: 598819 - RNA, 19 nt, Artificial Sequence
  Description of Artificial Sequence: Synthetic oligonucleotide
gcuggccgggccguuaagc

SEQ ID NO: 598820 - RNA, 19 nt, Artificial Sequence
  Description of Artificial Sequence: Synthetic oligonucleotide
ccuuuugcgcaggcuggcg

SEQ ID NO: 598821 - RNA, 19 nt, Artificial Sequence
  Description of Artificial Sequence: Synthetic oligonucleotide
ugccguccuugggcgaaug

SEQ ID NO: 598822 - RNA, 19 nt, Artificial Sequence
  Description of Artificial Sequence: Synthetic oligonucleotide
gacagaccccggccaaagu

SEQ ID NO: 598823 - RNA, 19 nt, Artificial Sequence
  Description of Artificial Sequence: Synthetic oligonucleotide
cuauuggaaugagguccca

SEQ ID NO: 598824 - RNA, 19 nt, Artificial Sequence
  Description of Artificial Sequence: Synthetic oligonucleotide
cagcgccguggguagcaug

SEQ ID NO: 598825 - RNA, 19 nt, Artificial Sequence
  Description of Artificial Sequence: Synthetic oligonucleotide
cuguaccuaggcaaacauu

SEQ ID NO: 598826 - RNA, 19 nt, Artificial Sequence
  Description of Artificial Sequence: Synthetic oligonucleotide
gccauaggggaauccggaa

SEQ ID NO: 598827 - RNA, 19 nt, Artificial Sequence
  Description of Artificial Sequence: Synthetic oligonucleotide
uccggcgguuccggggaug

SEQ ID NO: 598828 - RNA, 19 nt, Artificial Sequence
  Description of Artificial Sequence: Synthetic oligonucleotide
uccucccgcucgguugcgc

SEQ ID NO: 598829 - RNA, 19 nt, Artificial Sequence
  Description of Artificial Sequence: Synthetic oligonucleotide
gcgacgcugccccggcacg

SEQ ID NO: 598830 - RNA, 19 nt, Artificial Sequence
  Description of Artificial Sequence: Synthetic oligonucleotide
caccgacccaggccucuug

SEQ ID NO: 598831 - RNA, 19 nt, Artificial Sequence
  Description of Artificial Sequence: Synthetic oligonucleotide
cagcuaagaugguugcgau

SEQ ID NO: 598832 - RNA, 19 nt, Artificial Sequence
  Description of Artificial Sequence: Synthetic oligonucleotide
gggcgccaccuguaaauuc

SEQ ID NO: 598833 - RNA, 19 nt, Artificial Sequence
  Description of Artificial Sequence: Synthetic oligonucleotide
gccgacacacccggggcag

SEQ ID NO: 598834 - RNA, 19 nt, Artificial Sequence
  Description of Artificial Sequence: Synthetic oligonucleotide
cagcguugcgcugcuucuc

SEQ ID NO: 598835 - RNA, 19 nt, Artificial Sequence
  Description of Artificial Sequence: Synthetic oligonucleotide
agacgcgacccagcagcga

SEQ ID NO: 598836 - RNA, 19 nt, Artificial Sequence
  Description of Artificial Sequence: Synthetic oligonucleotide
cgggccguuaagcagcguc

SEQ ID NO: 598837 - RNA, 19 nt, Artificial Sequence
  Description of Artificial Sequence: Synthetic oligonucleotide
uccggcggggugguccuau

SEQ ID NO: 598838 - RNA, 19 nt, Artificial Sequence
  Description of Artificial Sequence: Synthetic oligonucleotide
gccguccuugggcgaaugc

SEQ ID NO: 598839 - RNA, 19 nt, Artificial Sequence
  Description of Artificial Sequence: Synthetic oligonucleotide
cggcgcggaggauacagug

SEQ ID NO: 598840 - RNA, 19 nt, Artificial Sequence
  Description of Artificial Sequence: Synthetic oligonucleotide
gcgccaccuguaaauucag

SEQ ID NO: 598841 - RNA, 19 nt, Artificial Sequence
  Description of Artificial Sequence: Synthetic oligonucleotide
ccaggcacgcccuccuuga

SEQ ID NO: 598842 - RNA, 19 nt, Artificial Sequence
  Description of Artificial Sequence: Synthetic oligonucleotide
ggcuagggacggaugggca

SEQ ID NO: 598843 - RNA, 19 nt, Artificial Sequence
  Description of Artificial Sequence: Synthetic oligonucleotide
uucucuccgcuggggcaau

SEQ ID NO: 598844 - RNA, 19 nt, Artificial Sequence
  Description of Artificial Sequence: Synthetic oligonucleotide
gccaccccggacgcgcugg

SEQ ID NO: 598845 - RNA, 19 nt, Artificial Sequence
  Description of Artificial Sequence: Synthetic oligonucleotide
gacaccgacccaggccucu

SEQ ID NO: 598846 - RNA, 19 nt, Artificial Sequence
  Description of Artificial Sequence: Synthetic oligonucleotide
guuucgccuugcagaugca

SEQ ID NO: 598847 - RNA, 19 nt, Artificial Sequence
  Description of Artificial Sequence: Synthetic oligonucleotide
acggcgcggaggauacagu

SEQ ID NO: 598848 - RNA, 19 nt, Artificial Sequence
  Description of Artificial Sequence: Synthetic oligonucleotide
agcccgugggauacucaau

SEQ ID NO: 598849 - RNA, 19 nt, Artificial Sequence
  Description of Artificial Sequence: Synthetic oligonucleotide
cucguagggcgugcagcca

SEQ ID NO: 598850 - RNA, 19 nt, Artificial Sequence
  Description of Artificial Sequence: Synthetic oligonucleotide
cggcgucgaaggcaaagac

SEQ ID NO: 598851 - RNA, 19 nt, Artificial Sequence
  Description of Artificial Sequence: Synthetic oligonucleotide
cccgcggacauagugagcu

SEQ ID NO: 598852 - RNA, 19 nt, Artificial Sequence
  Description of Artificial Sequence: Synthetic oligonucleotide
cgcuccugguccguacucg

SEQ ID NO: 598853 - RNA, 19 nt, Artificial Sequence
  Description of Artificial Sequence: Synthetic oligonucleotide
gcgagugguccuucuugaa

SEQ ID NO: 598854 - RNA, 19 nt, Artificial Sequence
  Description of Artificial Sequence: Synthetic oligonucleotide
aggcgacgcugccccggca

SEQ ID NO: 598855 - RNA, 19 nt, Artificial Sequence
  Description of Artificial Sequence: Synthetic oligonucleotide
gccgggccguuaagcagcg

SEQ ID NO: 598856 - RNA, 19 nt, Artificial Sequence
  Description of Artificial Sequence: Synthetic oligonucleotide
ccagcgugagcagcguguc

SEQ ID NO: 598857 - RNA, 19 nt, Artificial Sequence
  Description of Artificial Sequence: Synthetic oligonucleotide
cuccucccgcucgguugcg

SEQ ID NO: 598858 - RNA, 19 nt, Artificial Sequence
  Description of Artificial Sequence: Synthetic oligonucleotide
cgcggaggauacaguggcc

SEQ ID NO: 598859 - RNA, 19 nt, Artificial Sequence
  Description of Artificial Sequence: Synthetic oligonucleotide
ccaaaccguggggcggagg

SEQ ID NO: 598860 - RNA, 19 nt, Artificial Sequence
  Description of Artificial Sequence: Synthetic oligonucleotide
cgcggacauagugagcuuc

SEQ ID NO: 598861 - RNA, 19 nt, Artificial Sequence
  Description of Artificial Sequence: Synthetic oligonucleotide
ccauaggggaauccggaau

SEQ ID NO: 598862 - RNA, 19 nt, Artificial Sequence
  Description of Artificial Sequence: Synthetic oligonucleotide
cguugcuaagggcuauuaa

SEQ ID NO: 598863 - RNA, 19 nt, Artificial Sequence
  Description of Artificial Sequence: Synthetic oligonucleotide
acgcgcuggaguacacguu

SEQ ID NO: 598864 - RNA, 19 nt, Artificial Sequence
  Description of Artificial Sequence: Synthetic oligonucleotide
ccggcgguuccggggaugc

SEQ ID NO: 598865 - RNA, 19 nt, Artificial Sequence
  Description of Artificial Sequence: Synthetic oligonucleotide
cagcgccucgcucugguuu

SEQ ID NO: 598866 - RNA, 19 nt, Artificial Sequence
  Description of Artificial Sequence: Synthetic oligonucleotide
gcgaaugcgcugugcccaa

SEQ ID NO: 598867 - RNA, 19 nt, Artificial Sequence
  Description of Artificial Sequence: Synthetic oligonucleotide
gguccguacucgacaccga

SEQ ID NO: 598868 - RNA, 19 nt, Artificial Sequence
  Description of Artificial Sequence: Synthetic oligonucleotide
ugauuccggcggggugguc

SEQ ID NO: 598869 - RNA, 19 nt, Artificial Sequence
  Description of Artificial Sequence: Synthetic oligonucleotide
ggggcggaggcagcaccgc

SEQ ID NO: 598870 - RNA, 19 nt, Artificial Sequence
  Description of Artificial Sequence: Synthetic oligonucleotide
caccagcgccguggguagc

SEQ ID NO: 598871 - RNA, 19 nt, Artificial Sequence
  Description of Artificial Sequence: Synthetic oligonucleotide
acaccgacccaggccucuu

SEQ ID NO: 598872 - RNA, 19 nt, Artificial Sequence
  Description of Artificial Sequence: Synthetic oligonucleotide
ggagcccgugggauacuca

SEQ ID NO: 598873 - RNA, 19 nt, Artificial Sequence
  Description of Artificial Sequence: Synthetic oligonucleotide
cgucgacgaggucgaagac

SEQ ID NO: 598874 - RNA, 19 nt, Artificial Sequence
  Description of Artificial Sequence: Synthetic oligonucleotide
gcgccguggguagcauggg

SEQ ID NO: 598875 - RNA, 19 nt, Artificial Sequence
  Description of Artificial Sequence: Synthetic oligonucleotide
caggcacgcccuccuugaa

SEQ ID NO: 598876 - RNA, 19 nt, Artificial Sequence
  Description of Artificial Sequence: Synthetic oligonucleotide
ccccgcggacauagugagc

SEQ ID NO: 598877 - RNA, 19 nt, Artificial Sequence
  Description of Artificial Sequence: Synthetic oligonucleotide
agacggcgcggaggauaca

SEQ ID NO: 598878 - RNA, 19 nt, Artificial Sequence
  Description of Artificial Sequence: Synthetic oligonucleotide
ccucccgcucgguugcgca

SEQ ID NO: 598879 - RNA, 19 nt, Artificial Sequence
  Description of Artificial Sequence: Synthetic oligonucleotide
cccgcucgguugcgcaggc

SEQ ID NO: 598880 - RNA, 19 nt, Artificial Sequence
  Description of Artificial Sequence: Synthetic oligonucleotide
ggcgggcgacaccgggcug

SEQ ID NO: 598881 - RNA, 19 nt, Artificial Sequence
  Description of Artificial Sequence: Synthetic oligonucleotide
cugauuccggcgggguggu

SEQ ID NO: 598882 - RNA, 19 nt, Artificial Sequence
  Description of Artificial Sequence: Synthetic oligonucleotide
gcgucugcgguaauagguu

SEQ ID NO: 598883 - RNA, 19 nt, Artificial Sequence
  Description of Artificial Sequence: Synthetic oligonucleotide
cgcgacccagcagcgagug

SEQ ID NO: 598884 - RNA, 19 nt, Artificial Sequence
  Description of Artificial Sequence: Synthetic oligonucleotide
cgacgaggucgaagacggc

SEQ ID NO: 598885 - RNA, 19 nt, Artificial Sequence
  Description of Artificial Sequence: Synthetic oligonucleotide
ccgggcaccccacgcccac

SEQ ID NO: 598886 - RNA, 19 nt, Artificial Sequence
  Description of Artificial Sequence: Synthetic oligonucleotide
gggcagcauguccgcgcca

SEQ ID NO: 598887 - RNA, 19 nt, Artificial Sequence
  Description of Artificial Sequence: Synthetic oligonucleotide
ccggacgcgcuggaguaca

SEQ ID NO: 598888 - RNA, 19 nt, Artificial Sequence
  Description of Artificial Sequence: Synthetic oligonucleotide
ccccggacgcgcuggagua

SEQ ID NO: 598889 - RNA, 19 nt, Artificial Sequence
  Description of Artificial Sequence: Synthetic oligonucleotide
cggcggggugguccuauug

SEQ ID NO: 598890 - RNA, 19 nt, Artificial Sequence
  Description of Artificial Sequence: Synthetic oligonucleotide
ccgacacacccggggcagc

SEQ ID NO: 598891 - RNA, 19 nt, Artificial Sequence
  Description of Artificial Sequence: Synthetic oligonucleotide
agacggcgucgaaggcaaa

SEQ ID NO: 598892 - RNA, 19 nt, Artificial Sequence
  Description of Artificial Sequence: Synthetic oligonucleotide
cguacucgacaccgaccca

SEQ ID NO: 598893 - RNA, 19 nt, Artificial Sequence
  Description of Artificial Sequence: Synthetic oligonucleotide
cccaaaccguggggcggag

SEQ ID NO: 598894 - RNA, 19 nt, Artificial Sequence
  Description of Artificial Sequence: Synthetic oligonucleotide
uuccggcggggugguccua

SEQ ID NO: 598895 - RNA, 19 nt, Artificial Sequence
  Description of Artificial Sequence: Synthetic oligonucleotide
ccccaaaccguggggcgga

SEQ ID NO: 598896 - RNA, 19 nt, Artificial Sequence
  Description of Artificial Sequence: Synthetic oligonucleotide
cccggacgcgcuggaguac

SEQ ID NO: 598897 - RNA, 19 nt, Artificial Sequence
  Description of Artificial Sequence: Synthetic oligonucleotide
cagucgcccgagccaugcu

SEQ ID NO: 598898 - RNA, 19 nt, Artificial Sequence
  Description of Artificial Sequence: Synthetic oligonucleotide
gcgccucgcucugguuugc

SEQ ID NO: 598899 - RNA, 19 nt, Artificial Sequence
  Description of Artificial Sequence: Synthetic oligonucleotide
cguucguggcaaaguggua

SEQ ID NO: 598900 - RNA, 19 nt, Artificial Sequence
  Description of Artificial Sequence: Synthetic oligonucleotide
cggacgcgcuggaguacac

SEQ ID NO: 598901 - RNA, 19 nt, Artificial Sequence
  Description of Artificial Sequence: Synthetic oligonucleotide
gaccccggccaaagucuuu

SEQ ID NO: 598902 - RNA, 19 nt, Artificial Sequence
  Description of Artificial Sequence: Synthetic oligonucleotide
ggggcgccaccuguaaauu

SEQ ID NO: 598903 - RNA, 19 nt, Artificial Sequence
  Description of Artificial Sequence: Synthetic oligonucleotide
cgacggaaauaaugucuau

SEQ ID NO: 598904 - RNA, 19 nt, Artificial Sequence
  Description of Artificial Sequence: Synthetic oligonucleotide
cgucugcgguaauagguuu

SEQ ID NO: 598905 - RNA, 19 nt, Artificial Sequence
  Description of Artificial Sequence: Synthetic oligonucleotide
cgauuucacccugcaugaa

SEQ ID NO: 598906 - RNA, 19 nt, Artificial Sequence
  Description of Artificial Sequence: Synthetic oligonucleotide
ggggcacggcugagacuca

SEQ ID NO: 598907 - RNA, 19 nt, Artificial Sequence
  Description of Artificial Sequence: Synthetic oligonucleotide
ggguccgcuguuggccaua

SEQ ID NO: 598908 - RNA, 19 nt, Artificial Sequence
  Description of Artificial Sequence: Synthetic oligonucleotide
cgcuggccgggccguuaag

SEQ ID NO: 598909 - RNA, 19 nt, Artificial Sequence
  Description of Artificial Sequence: Synthetic oligonucleotide
guccggcgguuccggggau

SEQ ID NO: 598910 - RNA, 19 nt, Artificial Sequence
  Description of Artificial Sequence: Synthetic oligonucleotide
caccgggcugcugcuguuu

SEQ ID NO: 598911 - RNA, 19 nt, Artificial Sequence
  Description of Artificial Sequence: Synthetic oligonucleotide
caccgucgacgaggucgaa

SEQ ID NO: 598912 - RNA, 19 nt, Artificial Sequence
  Description of Artificial Sequence: Synthetic oligonucleotide
cugccguccuugggcgaau

SEQ ID NO: 598913 - RNA, 19 nt, Artificial Sequence
  Description of Artificial Sequence: Synthetic oligonucleotide
cgaaugcgcugugcccaaa

SEQ ID NO: 598914 - RNA, 19 nt, Artificial Sequence
  Description of Artificial Sequence: Synthetic oligonucleotide
gcagcgugucgcggaccau

SEQ ID NO: 598915 - RNA, 19 nt, Artificial Sequence
  Description of Artificial Sequence: Synthetic oligonucleotide
ccaugcccgggugggcgcu

SEQ ID NO: 598916 - RNA, 19 nt, Artificial Sequence
  Description of Artificial Sequence: Synthetic oligonucleotide
ccgcggacauagugagcuu

SEQ ID NO: 598917 - RNA, 19 nt, Artificial Sequence
  Description of Artificial Sequence: Synthetic oligonucleotide
cgcggaccaucuugggcuu

SEQ ID NO: 598918 - RNA, 19 nt, Artificial Sequence
  Description of Artificial Sequence: Synthetic oligonucleotide
ccggcggggugguccuauu

SEQ ID NO: 598919 - RNA, 19 nt, Artificial Sequence
  Description of Artificial Sequence: Synthetic oligonucleotide
ccggagcccgugggauacu

SEQ ID NO: 598920 - RNA, 19 nt, Artificial Sequence
  Description of Artificial Sequence: Synthetic oligonucleotide
ccgcucgguugcgcaggcu

SEQ ID NO: 598921 - RNA, 19 nt, Artificial Sequence
  Description of Artificial Sequence: Synthetic oligonucleotide
ccgggccguuaagcagcgu

SEQ ID NO: 598922 - RNA, 19 nt, Artificial Sequence
  Description of Artificial Sequence: Synthetic oligonucleotide
ugaaaguucuucaugaucg

SEQ ID NO: 598923 - RNA, 19 nt, Artificial Sequence
  Description of Artificial Sequence: Synthetic oligonucleotide
aaugaauauuuauuaccgc

SEQ ID NO: 598924 - RNA, 19 nt, Artificial Sequence
  Description of Artificial Sequence: Synthetic oligonucleotide
aaaugaauauuuauuaccg

SEQ ID NO: 598925 - RNA, 19 nt, Artificial Sequence
  Description of Artificial Sequence: Synthetic oligonucleotide
aaugaguugagguugcauc

SEQ ID NO: 598926 - RNA, 19 nt, Artificial Sequence
  Description of Artificial Sequence: Synthetic oligonucleotide
aaucauaauaagaauuggc

SEQ ID NO: 598927 - RNA, 19 nt, Artificial Sequence
  Description of Artificial Sequence: Synthetic oligonucleotide
uguacuauucuucuucugg

SEQ ID NO: 598928 - RNA, 19 nt, Artificial Sequence
  Description of Artificial Sequence: Synthetic oligonucleotide
aagaauuggcuuaugaagc

SEQ ID NO: 598929 - RNA, 19 nt, Artificial Sequence
  Description of Artificial Sequence: Synthetic oligonucleotide
uauuaagugucacaucugg

SEQ ID NO: 598930 - RNA, 19 nt, Artificial Sequence
  Description of Artificial Sequence: Synthetic oligonucleotide
uuuauuaccgcauuuugug

SEQ ID NO: 598931 - RNA, 19 nt, Artificial Sequence
  Description of Artificial Sequence: Synthetic oligonucleotide
guaguuauaacucucggag

SEQ ID NO: 598932 - RNA, 19 nt, Artificial Sequence
  Description of Artificial Sequence: Synthetic oligonucleotide
cauuuugugacuuaacacc

SEQ ID NO: 598933 - RNA, 19 nt, Artificial Sequence
  Description of Artificial Sequence: Synthetic oligonucleotide
uuuacuuggagaauuguca

SEQ ID NO: 598934 - RNA, 19 nt, Artificial Sequence
  Description of Artificial Sequence: Synthetic oligonucleotide
aaggcucggaacuugaagg

SEQ ID NO: 598935 - RNA, 19 nt, Artificial Sequence
  Description of Artificial Sequence: Synthetic oligonucleotide
gaauuuaacauuguggggc

SEQ ID NO: 598936 - RNA, 19 nt, Artificial Sequence
  Description of Artificial Sequence: Synthetic oligonucleotide
aguuauaacucucggaguc

SEQ ID NO: 598937 - RNA, 19 nt, Artificial Sequence
  Description of Artificial Sequence: Synthetic oligonucleotide
aaaagaccgaacucuguac

SEQ ID NO: 598938 - RNA, 19 nt, Artificial Sequence
  Description of Artificial Sequence: Synthetic oligonucleotide
aaagaccgaacucuguacg

SEQ ID NO: 598939 - RNA, 19 nt, Artificial Sequence
  Description of Artificial Sequence: Synthetic oligonucleotide
acuuaagauuguuuugucc

SEQ ID NO: 598940 - RNA, 19 nt, Artificial Sequence
  Description of Artificial Sequence: Synthetic oligonucleotide
aaaacuauuugaggcaacg

SEQ ID NO: 598941 - RNA, 19 nt, Artificial Sequence
  Description of Artificial Sequence: Synthetic oligonucleotide
aauguaaauuugacaaagc

SEQ ID NO: 598942 - RNA, 19 nt, Artificial Sequence
  Description of Artificial Sequence: Synthetic oligonucleotide
aaauauaccgcagucucuc

SEQ ID NO: 598943 - RNA, 19 nt, Artificial Sequence
  Description of Artificial Sequence: Synthetic oligonucleotide
ucuagugaggaacacgugc

SEQ ID NO: 598944 - RNA, 19 nt, Artificial Sequence
  Description of Artificial Sequence: Synthetic oligonucleotide
gagguaaacacauagaaua

SEQ ID NO: 598945 - RNA, 19 nt, Artificial Sequence
  Description of Artificial Sequence: Synthetic oligonucleotide
uucaugaucggacuuggag

SEQ ID NO: 598946 - RNA, 19 nt, Artificial Sequence
  Description of Artificial Sequence: Synthetic oligonucleotide
aacccugcaggccggaucc

SEQ ID NO: 598947 - RNA, 19 nt, Artificial Sequence
  Description of Artificial Sequence: Synthetic oligonucleotide
uuugucgcgacuuugggga

SEQ ID NO: 598948 - RNA, 19 nt, Artificial Sequence
  Description of Artificial Sequence: Synthetic oligonucleotide
uaacauaacgucacagucc

SEQ ID NO: 598949 - RNA, 19 nt, Artificial Sequence
  Description of Artificial Sequence: Synthetic oligonucleotide
caugucuuaacugaguagg

SEQ ID NO: 598950 - RNA, 19 nt, Artificial Sequence
  Description of Artificial Sequence: Synthetic oligonucleotide
uucaauugagguaaacaca

SEQ ID NO: 598951 - RNA, 19 nt, Artificial Sequence
  Description of Artificial Sequence: Synthetic oligonucleotide
aaucacgaggucaaugggc

SEQ ID NO: 598952 - RNA, 19 nt, Artificial Sequence
  Description of Artificial Sequence: Synthetic oligonucleotide
uggcuuaugaagcacaaac

SEQ ID NO: 598953 - RNA, 19 nt, Artificial Sequence
  Description of Artificial Sequence: Synthetic oligonucleotide
uauacuauugggcaugaau

SEQ ID NO: 598954 - RNA, 19 nt, Artificial Sequence
  Description of Artificial Sequence: Synthetic oligonucleotide
uugucuaaccugcugaaug

SEQ ID NO: 598955 - RNA, 19 nt, Artificial Sequence
  Description of Artificial Sequence: Synthetic oligonucleotide
aauuugucgcgacuuuggg

SEQ ID NO: 598956 - RNA, 19 nt, Artificial Sequence
  Description of Artificial Sequence: Synthetic oligonucleotide
uguuacaguauucucucgc

SEQ ID NO: 598957 - RNA, 19 nt, Artificial Sequence
  Description of Artificial Sequence: Synthetic oligonucleotide
aaagcugcccaacuuaaga

SEQ ID NO: 598958 - RNA, 19 nt, Artificial Sequence
  Description of Artificial Sequence: Synthetic oligonucleotide
aauaacuuguugaggaaag

SEQ ID NO: 598959 - RNA, 19 nt, Artificial Sequence
  Description of Artificial Sequence: Synthetic oligonucleotide
aauuuaacauuguggggcu

SEQ ID NO: 598960 - RNA, 19 nt, Artificial Sequence
  Description of Artificial Sequence: Synthetic oligonucleotide
guuaucacacaguucgugg

SEQ ID NO: 598961 - RNA, 19 nt, Artificial Sequence
  Description of Artificial Sequence: Synthetic oligonucleotide
ucaugaucggacuuggagc

SEQ ID NO: 598962 - RNA, 19 nt, Artificial Sequence
  Description of Artificial Sequence: Synthetic oligonucleotide
uagaauccuacuuauggug

SEQ ID NO: 598963 - RNA, 19 nt, Artificial Sequence
  Description of Artificial Sequence: Synthetic oligonucleotide
uauuugaggcaacguaacg

SEQ ID NO: 598964 - RNA, 19 nt, Artificial Sequence
  Description of Artificial Sequence: Synthetic oligonucleotide
uucccuuauacuauugggc

SEQ ID NO: 598965 - RNA, 19 nt, Artificial Sequence
  Description of Artificial Sequence: Synthetic oligonucleotide
ugaaccaagacagucauuc

SEQ ID NO: 598966 - RNA, 19 nt, Artificial Sequence
  Description of Artificial Sequence: Synthetic oligonucleotide
uggagauagagugaugagg

SEQ ID NO: 598967 - RNA, 19 nt, Artificial Sequence
  Description of Artificial Sequence: Synthetic oligonucleotide
uaugcuacaguaguuauaa

SEQ ID NO: 598968 - RNA, 19 nt, Artificial Sequence
  Description of Artificial Sequence: Synthetic oligonucleotide
uuucucauuggcccaacag

SEQ ID NO: 598969 - RNA, 19 nt, Artificial Sequence
  Description of Artificial Sequence: Synthetic oligonucleotide
uucauauuaagugucacau

SEQ ID NO: 598970 - RNA, 19 nt, Artificial Sequence
  Description of Artificial Sequence: Synthetic oligonucleotide
ugagguucagccaaguguc

SEQ ID NO: 598971 - RNA, 19 nt, Artificial Sequence
  Description of Artificial Sequence: Synthetic oligonucleotide
aacuauuugaggcaacgua

SEQ ID NO: 598972 - RNA, 19 nt, Artificial Sequence
  Description of Artificial Sequence: Synthetic oligonucleotide
aucauaauaagaauuggcu

SEQ ID NO: 598973 - RNA, 19 nt, Artificial Sequence
  Description of Artificial Sequence: Synthetic oligonucleotide
ugaugaaccaagacaguca

SEQ ID NO: 598974 - RNA, 19 nt, Artificial Sequence
  Description of Artificial Sequence: Synthetic oligonucleotide
aaauacgaaugcauugggg

SEQ ID NO: 598975 - RNA, 19 nt, Artificial Sequence
  Description of Artificial Sequence: Synthetic oligonucleotide
aauuauccagcucuggguu

SEQ ID NO: 598976 - RNA, 19 nt, Artificial Sequence
  Description of Artificial Sequence: Synthetic oligonucleotide
uguuggaagagccaagcuc

SEQ ID NO: 598977 - RNA, 19 nt, Artificial Sequence
  Description of Artificial Sequence: Synthetic oligonucleotide
uuagucccuauguuuaugc

SEQ ID NO: 598978 - RNA, 19 nt, Artificial Sequence
  Description of Artificial Sequence: Synthetic oligonucleotide
guucccuuauacuauuggg

SEQ ID NO: 598979 - RNA, 19 nt, Artificial Sequence
  Description of Artificial Sequence: Synthetic oligonucleotide
gacccucuggacuauaugc

SEQ ID NO: 598980 - RNA, 19 nt, Artificial Sequence
  Description of Artificial Sequence: Synthetic oligonucleotide
agaauccuacuuauggugc

SEQ ID NO: 598981 - RNA, 19 nt, Artificial Sequence
  Description of Artificial Sequence: Synthetic oligonucleotide
auacuauugggcaugaaug

SEQ ID NO: 598982 - RNA, 19 nt, Artificial Sequence
  Description of Artificial Sequence: Synthetic oligonucleotide
aacggagugaucaacagaa

SEQ ID NO: 598983 - RNA, 19 nt, Artificial Sequence
  Description of Artificial Sequence: Synthetic oligonucleotide
aaguuuguuacaguauucu

SEQ ID NO: 598984 - RNA, 19 nt, Artificial Sequence
  Description of Artificial Sequence: Synthetic oligonucleotide
uauuaccgcauuuugugac

SEQ ID NO: 598985 - RNA, 19 nt, Artificial Sequence
  Description of Artificial Sequence: Synthetic oligonucleotide
cuuuucagcgcgaaccugc

SEQ ID NO: 598986 - RNA, 19 nt, Artificial Sequence
  Description of Artificial Sequence: Synthetic oligonucleotide
auuugucgcgacuuugggg

SEQ ID NO: 598987 - RNA, 19 nt, Artificial Sequence
  Description of Artificial Sequence: Synthetic oligonucleotide
uggucggcgagauuugugg

SEQ ID NO: 598988 - RNA, 19 nt, Artificial Sequence
  Description of Artificial Sequence: Synthetic oligonucleotide
gaggaguguaacuuggcug

SEQ ID NO: 598989 - RNA, 19 nt, Artificial Sequence
  Description of Artificial Sequence: Synthetic oligonucleotide
auagaauccuacuuauggu

SEQ ID NO: 598990 - RNA, 19 nt, Artificial Sequence
  Description of Artificial Sequence: Synthetic oligonucleotide
uacuuauggugcaacgacc

SEQ ID NO: 598991 - RNA, 19 nt, Artificial Sequence
  Description of Artificial Sequence: Synthetic oligonucleotide
ucuucuagugaggaacacg

SEQ ID NO: 598992 - RNA, 19 nt, Artificial Sequence
  Description of Artificial Sequence: Synthetic oligonucleotide
uacuauugggcaugaaugu

SEQ ID NO: 598993 - RNA, 19 nt, Artificial Sequence
  Description of Artificial Sequence: Synthetic oligonucleotide
caaauacgaaugcauuggg

SEQ ID NO: 598994 - RNA, 19 nt, Artificial Sequence
  Description of Artificial Sequence: Synthetic oligonucleotide
gugaucaacagaaauguac

SEQ ID NO: 598995 - RNA, 19 nt, Artificial Sequence
  Description of Artificial Sequence: Synthetic oligonucleotide
gacauacaauaccaauucc

SEQ ID NO: 598996 - RNA, 19 nt, Artificial Sequence
  Description of Artificial Sequence: Synthetic oligonucleotide
uugauaaaccaguuguuua

SEQ ID NO: 598997 - RNA, 19 nt, Artificial Sequence
  Description of Artificial Sequence: Synthetic oligonucleotide
uucuagucgcuggagauag

SEQ ID NO: 598998 - RNA, 19 nt, Artificial Sequence
  Description of Artificial Sequence: Synthetic oligonucleotide
uucggaaggguauggaugu

SEQ ID NO: 598999 - RNA, 19 nt, Artificial Sequence
  Description of Artificial Sequence: Synthetic oligonucleotide
uuaucacacaguucgugga

SEQ ID NO: 599000 - RNA, 19 nt, Artificial Sequence
  Description of Artificial Sequence: Synthetic oligonucleotide
ugucuaaccugcugaauga

SEQ ID NO: 599001 - RNA, 19 nt, Artificial Sequence
  Description of Artificial Sequence: Synthetic oligonucleotide
aacgaccaugaauaacuug

SEQ ID NO: 599002 - RNA, 19 nt, Artificial Sequence
  Description of Artificial Sequence: Synthetic oligonucleotide
uuauuaccgcauuuuguga

SEQ ID NO: 599003 - RNA, 19 nt, Artificial Sequence
  Description of Artificial Sequence: Synthetic oligonucleotide
cuacuuauggugcaacgac

SEQ ID NO: 599004 - RNA, 19 nt, Artificial Sequence
  Description of Artificial Sequence: Synthetic oligonucleotide
ugcgcuaacuguuucuucu

SEQ ID NO: 599005 - RNA, 19 nt, Artificial Sequence
  Description of Artificial Sequence: Synthetic oligonucleotide
ucucucucgucaaucacga

SEQ ID NO: 599006 - RNA, 19 nt, Artificial Sequence
  Description of Artificial Sequence: Synthetic oligonucleotide
cauuggaccacccugagaa

SEQ ID NO: 599007 - RNA, 19 nt, Artificial Sequence
  Description of Artificial Sequence: Synthetic oligonucleotide
cuauuugaggcaacguaac

SEQ ID NO: 599008 - RNA, 19 nt, Artificial Sequence
  Description of Artificial Sequence: Synthetic oligonucleotide
uuuaugcuacaguaguuau

SEQ ID NO: 599009 - RNA, 19 nt, Artificial Sequence
  Description of Artificial Sequence: Synthetic oligonucleotide
ucguugaaggagucggagg

SEQ ID NO: 599010 - RNA, 19 nt, Artificial Sequence
  Description of Artificial Sequence: Synthetic oligonucleotide
aacguaguccccuggcaug

SEQ ID NO: 599011 - RNA, 19 nt, Artificial Sequence
  Description of Artificial Sequence: Synthetic oligonucleotide
cuucggaaggguauggaug

SEQ ID NO: 599012 - RNA, 19 nt, Artificial Sequence
  Description of Artificial Sequence: Synthetic oligonucleotide
uggaccacccugagaaacg

SEQ ID NO: 599013 - RNA, 19 nt, Artificial Sequence
  Description of Artificial Sequence: Synthetic oligonucleotide
ugauagaauccuacuuaug

SEQ ID NO: 599014 - RNA, 19 nt, Artificial Sequence
  Description of Artificial Sequence: Synthetic oligonucleotide
augaguugagguugcauca

SEQ ID NO: 599015 - RNA, 19 nt, Artificial Sequence
  Description of Artificial Sequence: Synthetic oligonucleotide
aaacguaguccccuggcau

SEQ ID NO: 599016 - RNA, 19 nt, Artificial Sequence
  Description of Artificial Sequence: Synthetic oligonucleotide
ucuucaugaucggacuugg

SEQ ID NO: 599017 - RNA, 19 nt, Artificial Sequence
  Description of Artificial Sequence: Synthetic oligonucleotide
ugaggcaacguaacggagu

SEQ ID NO: 599018 - RNA, 19 nt, Artificial Sequence
  Description of Artificial Sequence: Synthetic oligonucleotide
uuugaaacuaaaggacaca

SEQ ID NO: 599019 - RNA, 19 nt, Artificial Sequence
  Description of Artificial Sequence: Synthetic oligonucleotide
ugucuggaguuucauauua

SEQ ID NO: 599020 - RNA, 19 nt, Artificial Sequence
  Description of Artificial Sequence: Synthetic oligonucleotide
auacaauaccaauuccaca

SEQ ID NO: 599021 - RNA, 19 nt, Artificial Sequence
  Description of Artificial Sequence: Synthetic oligonucleotide
ugagauguuggaagagcca

SEQ ID NO: 599022 - RNA, 19 nt, Artificial Sequence
  Description of Artificial Sequence: Synthetic oligonucleotide
cacgugcugagaaaagagg

SEQ ID NO: 599023 - RNA, 19 nt, Artificial Sequence
  Description of Artificial Sequence: Synthetic oligonucleotide
uuggcgaagaccgcgaugu

SEQ ID NO: 599024 - RNA, 19 nt, Artificial Sequence
  Description of Artificial Sequence: Synthetic oligonucleotide
gcaaauacgaaugcauugg

SEQ ID NO: 599025 - RNA, 19 nt, Artificial Sequence
  Description of Artificial Sequence: Synthetic oligonucleotide
ugucucaaugagcccauca

SEQ ID NO: 599026 - RNA, 19 nt, Artificial Sequence
  Description of Artificial Sequence: Synthetic oligonucleotide
uuauggugcaacgaccaug

SEQ ID NO: 599027 - RNA, 19 nt, Artificial Sequence
  Description of Artificial Sequence: Synthetic oligonucleotide
gaggcaacguaacggagug

SEQ ID NO: 599028 - RNA, 19 nt, Artificial Sequence
  Description of Artificial Sequence: Synthetic oligonucleotide
acgugcugagaaaagaggg

SEQ ID NO: 599029 - RNA, 19 nt, Artificial Sequence
  Description of Artificial Sequence: Synthetic oligonucleotide
aaacacauucuagucgcug

SEQ ID NO: 599030 - RNA, 19 nt, Artificial Sequence
  Description of Artificial Sequence: Synthetic oligonucleotide
aagaccgaacucuguacga

SEQ ID NO: 599031 - RNA, 19 nt, Artificial Sequence
  Description of Artificial Sequence: Synthetic oligonucleotide
guaacggagugaucaacag

SEQ ID NO: 599032 - RNA, 19 nt, Artificial Sequence
  Description of Artificial Sequence: Synthetic oligonucleotide
gauagagugaugagguuca

SEQ ID NO: 599033 - RNA, 19 nt, Artificial Sequence
  Description of Artificial Sequence: Synthetic oligonucleotide
uaacggagugaucaacaga

SEQ ID NO: 599034 - RNA, 19 nt, Artificial Sequence
  Description of Artificial Sequence: Synthetic oligonucleotide
acuauugggcaugaauguc

SEQ ID NO: 599035 - RNA, 19 nt, Artificial Sequence
  Description of Artificial Sequence: Synthetic oligonucleotide
uauaccgcagucucuccug

SEQ ID NO: 599036 - RNA, 19 nt, Artificial Sequence
  Description of Artificial Sequence: Synthetic oligonucleotide
uuaacugaguagggugugg

SEQ ID NO: 599037 - RNA, 19 nt, Artificial Sequence
  Description of Artificial Sequence: Synthetic oligonucleotide
uaguuauaacucucggagu

SEQ ID NO: 599038 - RNA, 19 nt, Artificial Sequence
  Description of Artificial Sequence: Synthetic oligonucleotide
cugaaaguucuucaugauc

SEQ ID NO: 599039 - RNA, 19 nt, Artificial Sequence
  Description of Artificial Sequence: Synthetic oligonucleotide
guacaaguuuaacuuaguc

SEQ ID NO: 599040 - RNA, 19 nt, Artificial Sequence
  Description of Artificial Sequence: Synthetic oligonucleotide
agauuuguggaggagccug

SEQ ID NO: 599041 - RNA, 19 nt, Artificial Sequence
  Description of Artificial Sequence: Synthetic oligonucleotide
gagaaacguaguccccugg

SEQ ID NO: 599042 - RNA, 19 nt, Artificial Sequence
  Description of Artificial Sequence: Synthetic oligonucleotide
acuguugucuaaccugcug

SEQ ID NO: 599043 - RNA, 19 nt, Artificial Sequence
  Description of Artificial Sequence: Synthetic oligonucleotide
aaacuauuugaggcaacgu

SEQ ID NO: 599044 - RNA, 19 nt, Artificial Sequence
  Description of Artificial Sequence: Synthetic oligonucleotide
cuuggagaauugucagucc

SEQ ID NO: 599045 - RNA, 19 nt, Artificial Sequence
  Description of Artificial Sequence: Synthetic oligonucleotide
uggugcaacgaccaugaau

SEQ ID NO: 599046 - RNA, 19 nt, Artificial Sequence
  Description of Artificial Sequence: Synthetic oligonucleotide
gaguuucauauuaaguguc

SEQ ID NO: 599047 - RNA, 19 nt, Artificial Sequence
  Description of Artificial Sequence: Synthetic oligonucleotide
auaauaagaauuggcuuau

SEQ ID NO: 599048 - RNA, 19 nt, Artificial Sequence
  Description of Artificial Sequence: Synthetic oligonucleotide
uuaaagguaacagcauuuu

SEQ ID NO: 599049 - RNA, 19 nt, Artificial Sequence
  Description of Artificial Sequence: Synthetic oligonucleotide
gaaaagagggucccaugga

SEQ ID NO: 599050 - RNA, 19 nt, Artificial Sequence
  Description of Artificial Sequence: Synthetic oligonucleotide
uuaugcuacaguaguuaua

SEQ ID NO: 599051 - RNA, 19 nt, Artificial Sequence
  Description of Artificial Sequence: Synthetic oligonucleotide
ggagugaucaacagaaaug

SEQ ID NO: 599052 - RNA, 19 nt, Artificial Sequence
  Description of Artificial Sequence: Synthetic oligonucleotide
ucggcgagauuuguggagg

SEQ ID NO: 599053 - RNA, 19 nt, Artificial Sequence
  Description of Artificial Sequence: Synthetic oligonucleotide
auuaccgcauuuugugacu

SEQ ID NO: 599054 - RNA, 19 nt, Artificial Sequence
  Description of Artificial Sequence: Synthetic oligonucleotide
caacguaacggagugauca

SEQ ID NO: 599055 - RNA, 19 nt, Artificial Sequence
  Description of Artificial Sequence: Synthetic oligonucleotide
gagugaucaacagaaaugu

SEQ ID NO: 599056 - RNA, 19 nt, Artificial Sequence
  Description of Artificial Sequence: Synthetic oligonucleotide
gaaggagucggaggaacag

SEQ ID NO: 599057 - RNA, 19 nt, Artificial Sequence
  Description of Artificial Sequence: Synthetic oligonucleotide
cuagucgcuggagauagag

SEQ ID NO: 599058 - RNA, 19 nt, Artificial Sequence
  Description of Artificial Sequence: Synthetic oligonucleotide
caaggcucggaacuugaag

SEQ ID NO: 599059 - RNA, 19 nt, Artificial Sequence
  Description of Artificial Sequence: Synthetic oligonucleotide
gaucuacagaauuuaacau

SEQ ID NO: 599060 - RNA, 19 nt, Artificial Sequence
  Description of Artificial Sequence: Synthetic oligonucleotide
aguucguggaccuuuucua

SEQ ID NO: 599061 - RNA, 19 nt, Artificial Sequence
  Description of Artificial Sequence: Synthetic oligonucleotide
uuccugauagaauccuacu

SEQ ID NO: 599062 - RNA, 19 nt, Artificial Sequence
  Description of Artificial Sequence: Synthetic oligonucleotide
acuaaaggacacauugaug

SEQ ID NO: 599063 - RNA, 19 nt, Artificial Sequence
  Description of Artificial Sequence: Synthetic oligonucleotide
cugaccauccaacacaaaa

SEQ ID NO: 599064 - RNA, 19 nt, Artificial Sequence
  Description of Artificial Sequence: Synthetic oligonucleotide
auaguguggaaaacaagga

SEQ ID NO: 599065 - RNA, 19 nt, Artificial Sequence
  Description of Artificial Sequence: Synthetic oligonucleotide
gucccuauguuuaugcuac

SEQ ID NO: 599066 - RNA, 19 nt, Artificial Sequence
  Description of Artificial Sequence: Synthetic oligonucleotide
caaguguccaucgcgcucc

SEQ ID NO: 599067 - RNA, 19 nt, Artificial Sequence
  Description of Artificial Sequence: Synthetic oligonucleotide
ucuucggaaggguauggau

SEQ ID NO: 599068 - RNA, 19 nt, Artificial Sequence
  Description of Artificial Sequence: Synthetic oligonucleotide
ggugcaacgaccaugaaua

SEQ ID NO: 599069 - RNA, 19 nt, Artificial Sequence
  Description of Artificial Sequence: Synthetic oligonucleotide
aagaccgcgauguccucgu

SEQ ID NO: 599070 - RNA, 19 nt, Artificial Sequence
  Description of Artificial Sequence: Synthetic oligonucleotide
ucuugcgcuaacuguuucu

SEQ ID NO: 599071 - RNA, 19 nt, Artificial Sequence
  Description of Artificial Sequence: Synthetic oligonucleotide
auauaccgcagucucuccu

SEQ ID NO: 599072 - RNA, 19 nt, Artificial Sequence
  Description of Artificial Sequence: Synthetic oligonucleotide
aacguaacggagugaucaa

SEQ ID NO: 599073 - RNA, 19 nt, Artificial Sequence
  Description of Artificial Sequence: Synthetic oligonucleotide
ugaucggacuuggagcucc

SEQ ID NO: 599074 - RNA, 19 nt, Artificial Sequence
  Description of Artificial Sequence: Synthetic oligonucleotide
gaaacguaguccccuggca

SEQ ID NO: 599075 - RNA, 19 nt, Artificial Sequence
  Description of Artificial Sequence: Synthetic oligonucleotide
uuauccagcucuggguuug

SEQ ID NO: 599076 - RNA, 19 nt, Artificial Sequence
  Description of Artificial Sequence: Synthetic oligonucleotide
auccccauguguugcugac

SEQ ID NO: 599077 - RNA, 19 nt, Artificial Sequence
  Description of Artificial Sequence: Synthetic oligonucleotide
uucuagugaggaacacgug

SEQ ID NO: 599078 - RNA, 19 nt, Artificial Sequence
  Description of Artificial Sequence: Synthetic oligonucleotide
uguuuacuuggagaauugu

SEQ ID NO: 599079 - RNA, 19 nt, Artificial Sequence
  Description of Artificial Sequence: Synthetic oligonucleotide
cauggucucgccaggauga

SEQ ID NO: 599080 - RNA, 19 nt, Artificial Sequence
  Description of Artificial Sequence: Synthetic oligonucleotide
cuucuagugaggaacacgu

SEQ ID NO: 599081 - RNA, 19 nt, Artificial Sequence
  Description of Artificial Sequence: Synthetic oligonucleotide
cuggagauagagugaugag

SEQ ID NO: 599082 - RNA, 19 nt, Artificial Sequence
  Description of Artificial Sequence: Synthetic oligonucleotide
ggacaauauugucucaaug

SEQ ID NO: 599083 - RNA, 19 nt, Artificial Sequence
  Description of Artificial Sequence: Synthetic oligonucleotide
uguccauaaccuguccgcc

SEQ ID NO: 599084 - RNA, 19 nt, Artificial Sequence
  Description of Artificial Sequence: Synthetic oligonucleotide
uucguggaccuuuucuaac

SEQ ID NO: 599085 - RNA, 19 nt, Artificial Sequence
  Description of Artificial Sequence: Synthetic oligonucleotide
acaguauucucucgcuccu

SEQ ID NO: 599086 - RNA, 19 nt, Artificial Sequence
  Description of Artificial Sequence: Synthetic oligonucleotide
ugacccucuggacuauaug

SEQ ID NO: 599087 - RNA, 19 nt, Artificial Sequence
  Description of Artificial Sequence: Synthetic oligonucleotide
uguccgccaacauugggau

SEQ ID NO: 599088 - RNA, 19 nt, Artificial Sequence
  Description of Artificial Sequence: Synthetic oligonucleotide
ggucucgccaggaugaagg

SEQ ID NO: 599089 - RNA, 19 nt, Artificial Sequence
  Description of Artificial Sequence: Synthetic oligonucleotide
gaagaccgcgauguccucg

SEQ ID NO: 599090 - RNA, 19 nt, Artificial Sequence
  Description of Artificial Sequence: Synthetic oligonucleotide
uuuucagcgcgaaccugcu

SEQ ID NO: 599091 - RNA, 19 nt, Artificial Sequence
  Description of Artificial Sequence: Synthetic oligonucleotide
accacccugagaaacguag

SEQ ID NO: 599092 - RNA, 19 nt, Artificial Sequence
  Description of Artificial Sequence: Synthetic oligonucleotide
gucccauggacauacaaua

SEQ ID NO: 599093 - RNA, 19 nt, Artificial Sequence
  Description of Artificial Sequence: Synthetic oligonucleotide
auaccgcagucucuccugg

SEQ ID NO: 599094 - RNA, 19 nt, Artificial Sequence
  Description of Artificial Sequence: Synthetic oligonucleotide
ugggaucuacagaauuuaa

SEQ ID NO: 599095 - RNA, 19 nt, Artificial Sequence
  Description of Artificial Sequence: Synthetic oligonucleotide
cucuguacgaaguuuguua

SEQ ID NO: 599096 - RNA, 19 nt, Artificial Sequence
  Description of Artificial Sequence: Synthetic oligonucleotide
uuggaccacccugagaaac

SEQ ID NO: 599097 - RNA, 19 nt, Artificial Sequence
  Description of Artificial Sequence: Synthetic oligonucleotide
agucccuauguuuaugcua

SEQ ID NO: 599098 - RNA, 19 nt, Artificial Sequence
  Description of Artificial Sequence: Synthetic oligonucleotide
accgcgauguccucguuga

SEQ ID NO: 599099 - RNA, 19 nt, Artificial Sequence
  Description of Artificial Sequence: Synthetic oligonucleotide
acguaguccccuggcaugc

SEQ ID NO: 599100 - RNA, 19 nt, Artificial Sequence
  Description of Artificial Sequence: Synthetic oligonucleotide
uggacaauauugucucaau

SEQ ID NO: 599101 - RNA, 19 nt, Artificial Sequence
  Description of Artificial Sequence: Synthetic oligonucleotide
cuguugucuaaccugcuga

SEQ ID NO: 599102 - RNA, 19 nt, Artificial Sequence
  Description of Artificial Sequence: Synthetic oligonucleotide
auauuaagugucacaucug

SEQ ID NO: 599103 - RNA, 19 nt, Artificial Sequence
  Description of Artificial Sequence: Synthetic oligonucleotide
cugugccauacucauuccc

SEQ ID NO: 599104 - RNA, 19 nt, Artificial Sequence
  Description of Artificial Sequence: Synthetic oligonucleotide
gcuuaugaagcacaaacua

SEQ ID NO: 599105 - RNA, 19 nt, Artificial Sequence
  Description of Artificial Sequence: Synthetic oligonucleotide
acguaacggagugaucaac

SEQ ID NO: 599106 - RNA, 19 nt, Artificial Sequence
  Description of Artificial Sequence: Synthetic oligonucleotide
gucggcgagauuuguggag

SEQ ID NO: 599107 - RNA, 19 nt, Artificial Sequence
  Description of Artificial Sequence: Synthetic oligonucleotide
uuuguggaggagccugaaa

SEQ ID NO: 599108 - RNA, 19 nt, Artificial Sequence
  Description of Artificial Sequence: Synthetic oligonucleotide
ugcaacgaccaugaauaac

SEQ ID NO: 599109 - RNA, 19 nt, Artificial Sequence
  Description of Artificial Sequence: Synthetic oligonucleotide
gauuugacuggucaaucau

SEQ ID NO: 599110 - RNA, 19 nt, Artificial Sequence
  Description of Artificial Sequence: Synthetic oligonucleotide
gucauuccaggguggguag

SEQ ID NO: 599111 - RNA, 19 nt, Artificial Sequence
  Description of Artificial Sequence: Synthetic oligonucleotide
auccuacuuauggugcaac

SEQ ID NO: 599112 - RNA, 19 nt, Artificial Sequence
  Description of Artificial Sequence: Synthetic oligonucleotide
aguugagguugcaucauca

SEQ ID NO: 599113 - RNA, 19 nt, Artificial Sequence
  Description of Artificial Sequence: Synthetic oligonucleotide
augcuacaguaguuauaac

SEQ ID NO: 599114 - RNA, 19 nt, Artificial Sequence
  Description of Artificial Sequence: Synthetic oligonucleotide
uagugaauucacugaugaa

SEQ ID NO: 599115 - RNA, 19 nt, Artificial Sequence
  Description of Artificial Sequence: Synthetic oligonucleotide
cuuaacugaguagggugug

SEQ ID NO: 599116 - RNA, 19 nt, Artificial Sequence
  Description of Artificial Sequence: Synthetic oligonucleotide
uagagugaugagguucagc

SEQ ID NO: 599117 - RNA, 19 nt, Artificial Sequence
  Description of Artificial Sequence: Synthetic oligonucleotide
uccucuguugcuugaugaa

SEQ ID NO: 599118 - RNA, 19 nt, Artificial Sequence
  Description of Artificial Sequence: Synthetic oligonucleotide
caaugagcccaucacuuca

SEQ ID NO: 599119 - RNA, 19 nt, Artificial Sequence
  Description of Artificial Sequence: Synthetic oligonucleotide
cucguugaaggagucggag

SEQ ID NO: 599120 - RNA, 19 nt, Artificial Sequence
  Description of Artificial Sequence: Synthetic oligonucleotide
ucgauuugacuggucaauc

SEQ ID NO: 599121 - RNA, 19 nt, Artificial Sequence
  Description of Artificial Sequence: Synthetic oligonucleotide
uguccaucgcgcuccccag

SEQ ID NO: 599122 - RNA, 19 nt, Artificial Sequence
  Description of Artificial Sequence: Synthetic oligonucleotide
caugaucggacuuggagcu

SEQ ID NO: 599123 - RNA, 19 nt, Artificial Sequence
  Description of Artificial Sequence: Synthetic oligonucleotide
ucauucuuuugggaacaac

SEQ ID NO: 599124 - RNA, 19 nt, Artificial Sequence
  Description of Artificial Sequence: Synthetic oligonucleotide
cuguccgccaacauuggga

SEQ ID NO: 599125 - RNA, 19 nt, Artificial Sequence
  Description of Artificial Sequence: Synthetic oligonucleotide
uuauaacucucggagucuu

SEQ ID NO: 599126 - RNA, 19 nt, Artificial Sequence
  Description of Artificial Sequence: Synthetic oligonucleotide
aauccuacuuauggugcaa

SEQ ID NO: 599127 - RNA, 19 nt, Artificial Sequence
  Description of Artificial Sequence: Synthetic oligonucleotide
ggcaucaaaacacauucua

SEQ ID NO: 599128 - RNA, 19 nt, Artificial Sequence
  Description of Artificial Sequence: Synthetic oligonucleotide
agguaaacacauagaauau

SEQ ID NO: 599129 - RNA, 19 nt, Artificial Sequence
  Description of Artificial Sequence: Synthetic oligonucleotide
cuuagucccuauguuuaug

SEQ ID NO: 599130 - RNA, 19 nt, Artificial Sequence
  Description of Artificial Sequence: Synthetic oligonucleotide
uuguggucggcgagauuug

SEQ ID NO: 599131 - RNA, 19 nt, Artificial Sequence
  Description of Artificial Sequence: Synthetic oligonucleotide
gguaaacacauagaauauc

SEQ ID NO: 599132 - RNA, 19 nt, Artificial Sequence
  Description of Artificial Sequence: Synthetic oligonucleotide
acuuagucccuauguuuau

SEQ ID NO: 599133 - RNA, 19 nt, Artificial Sequence
  Description of Artificial Sequence: Synthetic oligonucleotide
uuuguguucuugucccauu

SEQ ID NO: 599134 - RNA, 19 nt, Artificial Sequence
  Description of Artificial Sequence: Synthetic oligonucleotide
uggcagaaguuaucacaca

SEQ ID NO: 599135 - RNA, 19 nt, Artificial Sequence
  Description of Artificial Sequence: Synthetic oligonucleotide
uugugacuuaacaccuuuu

SEQ ID NO: 599136 - RNA, 19 nt, Artificial Sequence
  Description of Artificial Sequence: Synthetic oligonucleotide
gaccgcgauguccucguug

SEQ ID NO: 599137 - RNA, 19 nt, Artificial Sequence
  Description of Artificial Sequence: Synthetic oligonucleotide
ugucuugcgcuaacuguuu

SEQ ID NO: 599138 - RNA, 19 nt, Artificial Sequence
  Description of Artificial Sequence: Synthetic oligonucleotide
cgagauuuguggaggagcc

SEQ ID NO: 599139 - RNA, 19 nt, Artificial Sequence
  Description of Artificial Sequence: Synthetic oligonucleotide
auaacgucacaguccucau

SEQ ID NO: 599140 - RNA, 19 nt, Artificial Sequence
  Description of Artificial Sequence: Synthetic oligonucleotide
uauaacucucggagucuuu

SEQ ID NO: 599141 - RNA, 19 nt, Artificial Sequence
  Description of Artificial Sequence: Synthetic oligonucleotide
gcaacgaccaugaauaacu

SEQ ID NO: 599142 - RNA, 19 nt, Artificial Sequence
  Description of Artificial Sequence: Synthetic oligonucleotide
uucuucuagugaggaacac

SEQ ID NO: 599143 - RNA, 19 nt, Artificial Sequence
  Description of Artificial Sequence: Synthetic oligonucleotide
guuguggucggcgagauuu

SEQ ID NO: 599144 - RNA, 19 nt, Artificial Sequence
  Description of Artificial Sequence: Synthetic oligonucleotide
ugaguugagguugcaucau

SEQ ID NO: 599145 - RNA, 19 nt, Artificial Sequence
  Description of Artificial Sequence: Synthetic oligonucleotide
ugaaugaguugagguugca

SEQ ID NO: 599146 - RNA, 19 nt, Artificial Sequence
  Description of Artificial Sequence: Synthetic oligonucleotide
agcgugguucuuuucucau

SEQ ID NO: 599147 - RNA, 19 nt, Artificial Sequence
  Description of Artificial Sequence: Synthetic oligonucleotide
auuggcuuaugaagcacaa

SEQ ID NO: 599148 - RNA, 19 nt, Artificial Sequence
  Description of Artificial Sequence: Synthetic oligonucleotide
gauuuguggaggagccuga

SEQ ID NO: 599149 - RNA, 19 nt, Artificial Sequence
  Description of Artificial Sequence: Synthetic oligonucleotide
cacauagaauaucuaacau

SEQ ID NO: 599150 - RNA, 19 nt, Artificial Sequence
  Description of Artificial Sequence: Synthetic oligonucleotide
cagagagucuuaaaauagu

SEQ ID NO: 599151 - RNA, 19 nt, Artificial Sequence
  Description of Artificial Sequence: Synthetic oligonucleotide
accgaacucuguacgaagu

SEQ ID NO: 599152 - RNA, 19 nt, Artificial Sequence
  Description of Artificial Sequence: Synthetic oligonucleotide
gcgagauuuguggaggagc

SEQ ID NO: 599153 - RNA, 19 nt, Artificial Sequence
  Description of Artificial Sequence: Synthetic oligonucleotide
ucuagucgcuggagauaga

SEQ ID NO: 599154 - RNA, 19 nt, Artificial Sequence
  Description of Artificial Sequence: Synthetic oligonucleotide
gguauggaugugugagaug

SEQ ID NO: 599155 - RNA, 19 nt, Artificial Sequence
  Description of Artificial Sequence: Synthetic oligonucleotide
ggaacaaaggcugggcauc

SEQ ID NO: 599156 - RNA, 19 nt, Artificial Sequence
  Description of Artificial Sequence: Synthetic oligonucleotide
cuguacgaaguuuguuaca

SEQ ID NO: 599157 - RNA, 19 nt, Artificial Sequence
  Description of Artificial Sequence: Synthetic oligonucleotide
acccucuggacuauaugcu

SEQ ID NO: 599158 - RNA, 19 nt, Artificial Sequence
  Description of Artificial Sequence: Synthetic oligonucleotide
cauuucccuucaaacagcu

SEQ ID NO: 599159 - RNA, 19 nt, Artificial Sequence
  Description of Artificial Sequence: Synthetic oligonucleotide
ugccauacucauucccauu

SEQ ID NO: 599160 - RNA, 19 nt, Artificial Sequence
  Description of Artificial Sequence: Synthetic oligonucleotide
gagccaagcucucaugaau

SEQ ID NO: 599161 - RNA, 19 nt, Artificial Sequence
  Description of Artificial Sequence: Synthetic oligonucleotide
uguggucggcgagauuugu

SEQ ID NO: 599162 - RNA, 19 nt, Artificial Sequence
  Description of Artificial Sequence: Synthetic oligonucleotide
ucucgccaggaugaagggu

SEQ ID NO: 599163 - RNA, 19 nt, Artificial Sequence
  Description of Artificial Sequence: Synthetic oligonucleotide
auuggaccacccugagaaa

SEQ ID NO: 599164 - RNA, 19 nt, Artificial Sequence
  Description of Artificial Sequence: Synthetic oligonucleotide
uuaccgcauuuugugacuu

SEQ ID NO: 599165 - RNA, 19 nt, Artificial Sequence
  Description of Artificial Sequence: Synthetic oligonucleotide
ucccuauguuuaugcuaca

SEQ ID NO: 599166 - RNA, 19 nt, Artificial Sequence
  Description of Artificial Sequence: Synthetic oligonucleotide
agaccgaacucuguacgaa

SEQ ID NO: 599167 - RNA, 19 nt, Artificial Sequence
  Description of Artificial Sequence: Synthetic oligonucleotide
uaacauuguggggcucugu

SEQ ID NO: 599168 - RNA, 19 nt, Artificial Sequence
  Description of Artificial Sequence: Synthetic oligonucleotide
cauaaccuguccgccaaca

SEQ ID NO: 599169 - RNA, 19 nt, Artificial Sequence
  Description of Artificial Sequence: Synthetic oligonucleotide
cauuuguguucuuguccca

SEQ ID NO: 599170 - RNA, 19 nt, Artificial Sequence
  Description of Artificial Sequence: Synthetic oligonucleotide
gcuccccauaggcugaccc

SEQ ID NO: 599171 - RNA, 19 nt, Artificial Sequence
  Description of Artificial Sequence: Synthetic oligonucleotide
ggcgaagaccgcgaugucc

SEQ ID NO: 599172 - RNA, 19 nt, Artificial Sequence
  Description of Artificial Sequence: Synthetic oligonucleotide
aguccucauacaaguauuu

SEQ ID NO: 599173 - RNA, 19 nt, Artificial Sequence
  Description of Artificial Sequence: Synthetic oligonucleotide
uggucucgccaggaugaag

SEQ ID NO: 599174 - RNA, 19 nt, Artificial Sequence
  Description of Artificial Sequence: Synthetic oligonucleotide
augaucggacuuggagcuc

SEQ ID NO: 599175 - RNA, 19 nt, Artificial Sequence
  Description of Artificial Sequence: Synthetic oligonucleotide
uuauacuauugggcaugaa

SEQ ID NO: 599176 - RNA, 19 nt, Artificial Sequence
  Description of Artificial Sequence: Synthetic oligonucleotide
guuauaacucucggagucu

SEQ ID NO: 599177 - RNA, 19 nt, Artificial Sequence
  Description of Artificial Sequence: Synthetic oligonucleotide
aucuaacaugaaacaauua

SEQ ID NO: 599178 - RNA, 19 nt, Artificial Sequence
  Description of Artificial Sequence: Synthetic oligonucleotide
gucuugcgcuaacuguuuc

SEQ ID NO: 599179 - RNA, 19 nt, Artificial Sequence
  Description of Artificial Sequence: Synthetic oligonucleotide
agugaucaacagaaaugua

SEQ ID NO: 599180 - RNA, 19 nt, Artificial Sequence
  Description of Artificial Sequence: Synthetic oligonucleotide
cucgccaggaugaaggguu

SEQ ID NO: 599181 - RNA, 19 nt, Artificial Sequence
  Description of Artificial Sequence: Synthetic oligonucleotide
cucucucgucaaucacgag

SEQ ID NO: 599182 - RNA, 19 nt, Artificial Sequence
  Description of Artificial Sequence: Synthetic oligonucleotide
agcucccaucucucucguc

SEQ ID NO: 599183 - RNA, 19 nt, Artificial Sequence
  Description of Artificial Sequence: Synthetic oligonucleotide
cagcgugguucuuuucuca

SEQ ID NO: 599184 - RNA, 19 nt, Artificial Sequence
  Description of Artificial Sequence: Synthetic oligonucleotide
guugagguugcaucaucau

SEQ ID NO: 599185 - RNA, 19 nt, Artificial Sequence
  Description of Artificial Sequence: Synthetic oligonucleotide
auuuguggaggagccugaa

SEQ ID NO: 599186 - RNA, 19 nt, Artificial Sequence
  Description of Artificial Sequence: Synthetic oligonucleotide
uuucagcgcgaaccugcuu

SEQ ID NO: 599187 - RNA, 19 nt, Artificial Sequence
  Description of Artificial Sequence: Synthetic oligonucleotide
uugucgcgacuuuggggaa

SEQ ID NO: 599188 - RNA, 19 nt, Artificial Sequence
  Description of Artificial Sequence: Synthetic oligonucleotide
cuacagaauuuaacauugu

SEQ ID NO: 599189 - RNA, 19 nt, Artificial Sequence
  Description of Artificial Sequence: Synthetic oligonucleotide
caguucguggaccuuuucu

SEQ ID NO: 599190 - RNA, 19 nt, Artificial Sequence
  Description of Artificial Sequence: Synthetic oligonucleotide
ucggaaggguauggaugug

SEQ ID NO: 599191 - RNA, 19 nt, Artificial Sequence
  Description of Artificial Sequence: Synthetic oligonucleotide
gaaugaguugagguugcau

SEQ ID NO: 599192 - RNA, 19 nt, Artificial Sequence
  Description of Artificial Sequence: Synthetic oligonucleotide
cuucaugaucggacuugga

SEQ ID NO: 599193 - RNA, 19 nt, Artificial Sequence
  Description of Artificial Sequence: Synthetic oligonucleotide
uaccgcauuuugugacuua

SEQ ID NO: 599194 - RNA, 19 nt, Artificial Sequence
  Description of Artificial Sequence: Synthetic oligonucleotide
guggucggcgagauuugug

SEQ ID NO: 599195 - RNA, 19 nt, Artificial Sequence
  Description of Artificial Sequence: Synthetic oligonucleotide
acgaggucaaugggcauuu

SEQ ID NO: 599196 - RNA, 19 nt, Artificial Sequence
  Description of Artificial Sequence: Synthetic oligonucleotide
cguaacggagugaucaaca

SEQ ID NO: 599197 - RNA, 19 nt, Artificial Sequence
  Description of Artificial Sequence: Synthetic oligonucleotide
cccuauguuuaugcuacag

SEQ ID NO: 599198 - RNA, 19 nt, Artificial Sequence
  Description of Artificial Sequence: Synthetic oligonucleotide
ggaaagcugcccaacuuaa

SEQ ID NO: 599199 - RNA, 19 nt, Artificial Sequence
  Description of Artificial Sequence: Synthetic oligonucleotide
cugagaaacguaguccccu

SEQ ID NO: 599200 - RNA, 19 nt, Artificial Sequence
  Description of Artificial Sequence: Synthetic oligonucleotide
ggacuuggagcucccaucu

SEQ ID NO: 599201 - RNA, 19 nt, Artificial Sequence
  Description of Artificial Sequence: Synthetic oligonucleotide
aucgcgcuccccagcgugg

SEQ ID NO: 599202 - RNA, 19 nt, Artificial Sequence
  Description of Artificial Sequence: Synthetic oligonucleotide
accuguccgccaacauugg

SEQ ID NO: 599203 - RNA, 19 nt, Artificial Sequence
  Description of Artificial Sequence: Synthetic oligonucleotide
cccaacuuaagauuguuuu

SEQ ID NO: 599204 - RNA, 19 nt, Artificial Sequence
  Description of Artificial Sequence: Synthetic oligonucleotide
ggcuuaugaagcacaaacu

SEQ ID NO: 599205 - RNA, 19 nt, Artificial Sequence
  Description of Artificial Sequence: Synthetic oligonucleotide
ccuacuuauggugcaacga

SEQ ID NO: 599206 - RNA, 19 nt, Artificial Sequence
  Description of Artificial Sequence: Synthetic oligonucleotide
ugucgcgacuuuggggaau

SEQ ID NO: 599207 - RNA, 19 nt, Artificial Sequence
  Description of Artificial Sequence: Synthetic oligonucleotide
agcuccccauaggcugacc

SEQ ID NO: 599208 - RNA, 19 nt, Artificial Sequence
  Description of Artificial Sequence: Synthetic oligonucleotide
ggcgagauuuguggaggag

SEQ ID NO: 599209 - RNA, 19 nt, Artificial Sequence
  Description of Artificial Sequence: Synthetic oligonucleotide
ccuguccgccaacauuggg

SEQ ID NO: 599210 - RNA, 19 nt, Artificial Sequence
  Description of Artificial Sequence: Synthetic oligonucleotide
ccaaguguccaucgcgcuc

SEQ ID NO: 599211 - RNA, 19 nt, Artificial Sequence
  Description of Artificial Sequence: Synthetic oligonucleotide
gccggauccccauguguug

SEQ ID NO: 599212 - RNA, 19 nt, Artificial Sequence
  Description of Artificial Sequence: Synthetic oligonucleotide
ggucggcgagauuugugga

SEQ ID NO: 599213 - RNA, 19 nt, Artificial Sequence
  Description of Artificial Sequence: Synthetic oligonucleotide
gugucuugcgcuaacuguu

SEQ ID NO: 599214 - RNA, 19 nt, Artificial Sequence
  Description of Artificial Sequence: Synthetic oligonucleotide
ccagcgugguucuuuucuc

SEQ ID NO: 599215 - RNA, 19 nt, Artificial Sequence
  Description of Artificial Sequence: Synthetic oligonucleotide
caucuggggaggaguguaa

SEQ ID NO: 599216 - RNA, 19 nt, Artificial Sequence
  Description of Artificial Sequence: Synthetic oligonucleotide
gugcaacgaccaugaauaa

SEQ ID NO: 599217 - RNA, 19 nt, Artificial Sequence
  Description of Artificial Sequence: Synthetic oligonucleotide
ggcaacguaacggagugau

SEQ ID NO: 599218 - RNA, 19 nt, Artificial Sequence
  Description of Artificial Sequence: Synthetic oligonucleotide
gggaacaaaggcugggcau

SEQ ID NO: 599219 - RNA, 19 nt, Artificial Sequence
  Description of Artificial Sequence: Synthetic oligonucleotide
gugccauacucauucccau

SEQ ID NO: 599220 - RNA, 19 nt, Artificial Sequence
  Description of Artificial Sequence: Synthetic oligonucleotide
gcuuuucagcgcgaaccug

SEQ ID NO: 599221 - RNA, 19 nt, Artificial Sequence
  Description of Artificial Sequence: Synthetic oligonucleotide
ggcuuuucagcgcgaaccu

SEQ ID NO: 599222 - RNA, 19 nt, Artificial Sequence
  Description of Artificial Sequence: Synthetic oligonucleotide
ggaguguaacuuggcugug

SEQ ID NO: 599223 - RNA, 19 nt, Artificial Sequence
  Description of Artificial Sequence: Synthetic oligonucleotide
ccgcauuuugugacuuaac

SEQ ID NO: 599224 - RNA, 19 nt, Artificial Sequence
  Description of Artificial Sequence: Synthetic oligonucleotide
acggagugaucaacagaaa

SEQ ID NO: 599225 - RNA, 19 nt, Artificial Sequence
  Description of Artificial Sequence: Synthetic oligonucleotide
cuuauggugcaacgaccau

SEQ ID NO: 599226 - RNA, 19 nt, Artificial Sequence
  Description of Artificial Sequence: Synthetic oligonucleotide
ccggauccccauguguugc

SEQ ID NO: 599227 - RNA, 19 nt, Artificial Sequence
  Description of Artificial Sequence: Synthetic oligonucleotide
aggcaacguaacggaguga

SEQ ID NO: 599228 - RNA, 19 nt, Artificial Sequence
  Description of Artificial Sequence: Synthetic oligonucleotide
ggguauggaugugugagau

SEQ ID NO: 599229 - RNA, 19 nt, Artificial Sequence
  Description of Artificial Sequence: Synthetic oligonucleotide
cuugcgcuaacuguuucuu

SEQ ID NO: 599230 - RNA, 19 nt, Artificial Sequence
  Description of Artificial Sequence: Synthetic oligonucleotide
guccgccaacauugggauc

SEQ ID NO: 599231 - RNA, 19 nt, Artificial Sequence
  Description of Artificial Sequence: Synthetic oligonucleotide
ccuugaguucccuuauacu

SEQ ID NO: 599232 - RNA, 19 nt, Artificial Sequence
  Description of Artificial Sequence: Synthetic oligonucleotide
gcucacugcucgauuugac

SEQ ID NO: 599233 - RNA, 19 nt, Artificial Sequence
  Description of Artificial Sequence: Synthetic oligonucleotide
cucauuggcccaacagguu

SEQ ID NO: 599234 - RNA, 19 nt, Artificial Sequence
  Description of Artificial Sequence: Synthetic oligonucleotide
caacgaccaugaauaacuu

SEQ ID NO: 599235 - RNA, 19 nt, Artificial Sequence
  Description of Artificial Sequence: Synthetic oligonucleotide
cugcccaacuuaagauugu

SEQ ID NO: 599236 - RNA, 19 nt, Artificial Sequence
  Description of Artificial Sequence: Synthetic oligonucleotide
ucgcgcuccccagcguggu

SEQ ID NO: 599237 - RNA, 19 nt, Artificial Sequence
  Description of Artificial Sequence: Synthetic oligonucleotide
cagcgcgaaccugcuuggc

SEQ ID NO: 599238 - RNA, 19 nt, Artificial Sequence
  Description of Artificial Sequence: Synthetic oligonucleotide
auggucucgccaggaugaa

SEQ ID NO: 599239 - RNA, 19 nt, Artificial Sequence
  Description of Artificial Sequence: Synthetic oligonucleotide
gucgcgacuuuggggaaua

SEQ ID NO: 599240 - RNA, 19 nt, Artificial Sequence
  Description of Artificial Sequence: Synthetic oligonucleotide
cugacccucuggacuauau

SEQ ID NO: 599241 - RNA, 19 nt, Artificial Sequence
  Description of Artificial Sequence: Synthetic oligonucleotide
agagggucccauggacaua

SEQ ID NO: 599242 - RNA, 19 nt, Artificial Sequence
  Description of Artificial Sequence: Synthetic oligonucleotide
ccaggugaagcuacacugu

SEQ ID NO: 599243 - RNA, 19 nt, Artificial Sequence
  Description of Artificial Sequence: Synthetic oligonucleotide
ccauaaccuguccgccaac

SEQ ID NO: 599244 - RNA, 19 nt, Artificial Sequence
  Description of Artificial Sequence: Synthetic oligonucleotide
gcaacguaacggagugauc

SEQ ID NO: 599245 - RNA, 19 nt, Artificial Sequence
  Description of Artificial Sequence: Synthetic oligonucleotide
cccagcgugguucuuuucu

SEQ ID NO: 599246 - RNA, 19 nt, Artificial Sequence
  Description of Artificial Sequence: Synthetic oligonucleotide
cacaguucguggaccuuuu

SEQ ID NO: 599247 - RNA, 19 nt, Artificial Sequence
  Description of Artificial Sequence: Synthetic oligonucleotide
cacgaggucaaugggcauu

SEQ ID NO: 599248 - RNA, 19 nt, Artificial Sequence
  Description of Artificial Sequence: Synthetic oligonucleotide
ucgcgacuuuggggaauau

SEQ ID NO: 599249 - RNA, 19 nt, Artificial Sequence
  Description of Artificial Sequence: Synthetic oligonucleotide
gcgaaccugcuuggcgaag

SEQ ID NO: 599250 - RNA, 19 nt, Artificial Sequence
  Description of Artificial Sequence: Synthetic oligonucleotide
agaccgcgauguccucguu

SEQ ID NO: 599251 - RNA, 19 nt, Artificial Sequence
  Description of Artificial Sequence: Synthetic oligonucleotide
cgcgacuuuggggaauaug

SEQ ID NO: 599252 - RNA, 19 nt, Artificial Sequence
  Description of Artificial Sequence: Synthetic oligonucleotide
guccugugucuugcgcuaa

SEQ ID NO: 599253 - RNA, 19 nt, Artificial Sequence
  Description of Artificial Sequence: Synthetic oligonucleotide
ggggauggcuuggcaaaua

SEQ ID NO: 599254 - RNA, 19 nt, Artificial Sequence
  Description of Artificial Sequence: Synthetic oligonucleotide
gaguaggguguggggucau

SEQ ID NO: 599255 - RNA, 19 nt, Artificial Sequence
  Description of Artificial Sequence: Synthetic oligonucleotide
gcaaacccugcaggccgga

SEQ ID NO: 599256 - RNA, 19 nt, Artificial Sequence
  Description of Artificial Sequence: Synthetic oligonucleotide
cgaagaccgcgauguccuc

SEQ ID NO: 599257 - RNA, 19 nt, Artificial Sequence
  Description of Artificial Sequence: Synthetic oligonucleotide
ggacuauaugcugcuccuu

SEQ ID NO: 599258 - RNA, 19 nt, Artificial Sequence
  Description of Artificial Sequence: Synthetic oligonucleotide
cggcgagauuuguggagga

SEQ ID NO: 599259 - RNA, 19 nt, Artificial Sequence
  Description of Artificial Sequence: Synthetic oligonucleotide
ccccauaggcugacccucu

SEQ ID NO: 599260 - RNA, 19 nt, Artificial Sequence
  Description of Artificial Sequence: Synthetic oligonucleotide
gcugacccucuggacuaua

SEQ ID NO: 599261 - RNA, 19 nt, Artificial Sequence
  Description of Artificial Sequence: Synthetic oligonucleotide
gguuguggucggcgagauu

SEQ ID NO: 599262 - RNA, 19 nt, Artificial Sequence
  Description of Artificial Sequence: Synthetic oligonucleotide
cgccaacauugggaucuac

SEQ ID NO: 599263 - RNA, 19 nt, Artificial Sequence
  Description of Artificial Sequence: Synthetic oligonucleotide
ccgcgauguccucguugaa

SEQ ID NO: 599264 - RNA, 19 nt, Artificial Sequence
  Description of Artificial Sequence: Synthetic oligonucleotide
ggcugacccucuggacuau

SEQ ID NO: 599265 - RNA, 19 nt, Artificial Sequence
  Description of Artificial Sequence: Synthetic oligonucleotide
aaaagcgagacuuagaucu

SEQ ID NO: 599266 - RNA, 19 nt, Artificial Sequence
  Description of Artificial Sequence: Synthetic oligonucleotide
aauauucuaagaugaacac

SEQ ID NO: 599267 - RNA, 19 nt, Artificial Sequence
  Description of Artificial Sequence: Synthetic oligonucleotide
aauacuuauauugguaagc

SEQ ID NO: 599268 - RNA, 19 nt, Artificial Sequence
  Description of Artificial Sequence: Synthetic oligonucleotide
aaauaagucaaauauucca

SEQ ID NO: 599269 - RNA, 19 nt, Artificial Sequence
  Description of Artificial Sequence: Synthetic oligonucleotide
gaagcuauggcuuuagggg

SEQ ID NO: 599270 - RNA, 19 nt, Artificial Sequence
  Description of Artificial Sequence: Synthetic oligonucleotide
uauaccuaggagaauaagg

SEQ ID NO: 599271 - RNA, 19 nt, Artificial Sequence
  Description of Artificial Sequence: Synthetic oligonucleotide
auuacaugagcauaaacag

SEQ ID NO: 599272 - RNA, 19 nt, Artificial Sequence
  Description of Artificial Sequence: Synthetic oligonucleotide
aagaauaggggauaucguc

SEQ ID NO: 599273 - RNA, 19 nt, Artificial Sequence
  Description of Artificial Sequence: Synthetic oligonucleotide
uugauaagggaacagaucu

SEQ ID NO: 599274 - RNA, 19 nt, Artificial Sequence
  Description of Artificial Sequence: Synthetic oligonucleotide
uacgaaaucaauccggugc

SEQ ID NO: 599275 - RNA, 19 nt, Artificial Sequence
  Description of Artificial Sequence: Synthetic oligonucleotide
agagauugaccacagcucc

SEQ ID NO: 599276 - RNA, 19 nt, Artificial Sequence
  Description of Artificial Sequence: Synthetic oligonucleotide
ugagauauguauuagggaa

SEQ ID NO: 599277 - RNA, 19 nt, Artificial Sequence
  Description of Artificial Sequence: Synthetic oligonucleotide
aacaaucauuguuaaugac

SEQ ID NO: 599278 - RNA, 19 nt, Artificial Sequence
  Description of Artificial Sequence: Synthetic oligonucleotide
aguuucggcacauguaugc

SEQ ID NO: 599279 - RNA, 19 nt, Artificial Sequence
  Description of Artificial Sequence: Synthetic oligonucleotide
auaccuaggagaauaaggc

SEQ ID NO: 599280 - RNA, 19 nt, Artificial Sequence
  Description of Artificial Sequence: Synthetic oligonucleotide
gauuacaugagcauaaaca

SEQ ID NO: 599281 - RNA, 19 nt, Artificial Sequence
  Description of Artificial Sequence: Synthetic oligonucleotide
uauuccauccgcauaaacu

SEQ ID NO: 599282 - RNA, 19 nt, Artificial Sequence
  Description of Artificial Sequence: Synthetic oligonucleotide
agcagaaaauucugcaacc

SEQ ID NO: 599283 - RNA, 19 nt, Artificial Sequence
  Description of Artificial Sequence: Synthetic oligonucleotide
augauaaucugucugugag

SEQ ID NO: 599284 - RNA, 19 nt, Artificial Sequence
  Description of Artificial Sequence: Synthetic oligonucleotide
aaaauggaugcagagcagg

SEQ ID NO: 599285 - RNA, 19 nt, Artificial Sequence
  Description of Artificial Sequence: Synthetic oligonucleotide
ugugccuacuuccucaggg

SEQ ID NO: 599286 - RNA, 19 nt, Artificial Sequence
  Description of Artificial Sequence: Synthetic oligonucleotide
ugggcuacgaaaucaaucc

SEQ ID NO: 599287 - RNA, 19 nt, Artificial Sequence
  Description of Artificial Sequence: Synthetic oligonucleotide
augagaaagcacuaauuuc

SEQ ID NO: 599288 - RNA, 19 nt, Artificial Sequence
  Description of Artificial Sequence: Synthetic oligonucleotide
uagugugucuggaagaaag

SEQ ID NO: 599289 - RNA, 19 nt, Artificial Sequence
  Description of Artificial Sequence: Synthetic oligonucleotide
ugauaaagcugacauugag

SEQ ID NO: 599290 - RNA, 19 nt, Artificial Sequence
  Description of Artificial Sequence: Synthetic oligonucleotide
cauaaacucucacaggccg

SEQ ID NO: 599291 - RNA, 19 nt, Artificial Sequence
  Description of Artificial Sequence: Synthetic oligonucleotide
auugaaaaguugauaaggg

SEQ ID NO: 599292 - RNA, 19 nt, Artificial Sequence
  Description of Artificial Sequence: Synthetic oligonucleotide
aguuaaaauugcaacaguc

SEQ ID NO: 599293 - RNA, 19 nt, Artificial Sequence
  Description of Artificial Sequence: Synthetic oligonucleotide
ugucaagauuacaugagca

SEQ ID NO: 599294 - RNA, 19 nt, Artificial Sequence
  Description of Artificial Sequence: Synthetic oligonucleotide
uuuuagggaaguuaaaauu

SEQ ID NO: 599295 - RNA, 19 nt, Artificial Sequence
  Description of Artificial Sequence: Synthetic oligonucleotide
uguauuagggaaagguucu

SEQ ID NO: 599296 - RNA, 19 nt, Artificial Sequence
  Description of Artificial Sequence: Synthetic oligonucleotide
uuacccaucagcauggcuc

SEQ ID NO: 599297 - RNA, 19 nt, Artificial Sequence
  Description of Artificial Sequence: Synthetic oligonucleotide
aggucaaggccauauggcc

SEQ ID NO: 599298 - RNA, 19 nt, Artificial Sequence
  Description of Artificial Sequence: Synthetic oligonucleotide
auaacgcucguuuucguuc

SEQ ID NO: 599299 - RNA, 19 nt, Artificial Sequence
  Description of Artificial Sequence: Synthetic oligonucleotide
agaacaagcaggugagugg

SEQ ID NO: 599300 - RNA, 19 nt, Artificial Sequence
  Description of Artificial Sequence: Synthetic oligonucleotide
aaauuacccaucagcaugg

SEQ ID NO: 599301 - RNA, 19 nt, Artificial Sequence
  Description of Artificial Sequence: Synthetic oligonucleotide
auuuacuauauuugaaaga

SEQ ID NO: 599302 - RNA, 19 nt, Artificial Sequence
  Description of Artificial Sequence: Synthetic oligonucleotide
agaaaagcgagacuuagau

SEQ ID NO: 599303 - RNA, 19 nt, Artificial Sequence
  Description of Artificial Sequence: Synthetic oligonucleotide
ugagcuaugcagcacuacc

SEQ ID NO: 599304 - RNA, 19 nt, Artificial Sequence
  Description of Artificial Sequence: Synthetic oligonucleotide
uggaauuaggagcuaauuc

SEQ ID NO: 599305 - RNA, 19 nt, Artificial Sequence
  Description of Artificial Sequence: Synthetic oligonucleotide
auauguauuagggaaaggu

SEQ ID NO: 599306 - RNA, 19 nt, Artificial Sequence
  Description of Artificial Sequence: Synthetic oligonucleotide
caaugagauauguauuagg

SEQ ID NO: 599307 - RNA, 19 nt, Artificial Sequence
  Description of Artificial Sequence: Synthetic oligonucleotide
aagagauugaccacagcuc

SEQ ID NO: 599308 - RNA, 19 nt, Artificial Sequence
  Description of Artificial Sequence: Synthetic oligonucleotide
aauacuugggcgaacagaa

SEQ ID NO: 599309 - RNA, 19 nt, Artificial Sequence
  Description of Artificial Sequence: Synthetic oligonucleotide
auguauuagggaaagguuc

SEQ ID NO: 599310 - RNA, 19 nt, Artificial Sequence
  Description of Artificial Sequence: Synthetic oligonucleotide
cuaccuaacaugagaaagc

SEQ ID NO: 599311 - RNA, 19 nt, Artificial Sequence
  Description of Artificial Sequence: Synthetic oligonucleotide
aaauggaugcagagcaggc

SEQ ID NO: 599312 - RNA, 19 nt, Artificial Sequence
  Description of Artificial Sequence: Synthetic oligonucleotide
uaaucugucugugagagaa

SEQ ID NO: 599313 - RNA, 19 nt, Artificial Sequence
  Description of Artificial Sequence: Synthetic oligonucleotide
aaucaauccggugcucugc

SEQ ID NO: 599314 - RNA, 19 nt, Artificial Sequence
  Description of Artificial Sequence: Synthetic oligonucleotide
ugugagagaaaacaaucau

SEQ ID NO: 599315 - RNA, 19 nt, Artificial Sequence
  Description of Artificial Sequence: Synthetic oligonucleotide
uggaccaaacauuuccagg

SEQ ID NO: 599316 - RNA, 19 nt, Artificial Sequence
  Description of Artificial Sequence: Synthetic oligonucleotide
gauauuuuagggaaguuaa

SEQ ID NO: 599317 - RNA, 19 nt, Artificial Sequence
  Description of Artificial Sequence: Synthetic oligonucleotide
ugcagcacuaccuaacaug

SEQ ID NO: 599318 - RNA, 19 nt, Artificial Sequence
  Description of Artificial Sequence: Synthetic oligonucleotide
aacccguucuugcaagugg

SEQ ID NO: 599319 - RNA, 19 nt, Artificial Sequence
  Description of Artificial Sequence: Synthetic oligonucleotide
uaagaaaagcgagacuuag

SEQ ID NO: 599320 - RNA, 19 nt, Artificial Sequence
  Description of Artificial Sequence: Synthetic oligonucleotide
ucaguuucggcacauguau

SEQ ID NO: 599321 - RNA, 19 nt, Artificial Sequence
  Description of Artificial Sequence: Synthetic oligonucleotide
acauuguuaaggaagcuuc

SEQ ID NO: 599322 - RNA, 19 nt, Artificial Sequence
  Description of Artificial Sequence: Synthetic oligonucleotide
ucuuugaugugcuuauaca

SEQ ID NO: 599323 - RNA, 19 nt, Artificial Sequence
  Description of Artificial Sequence: Synthetic oligonucleotide
uauuuuagggaaguuaaaa

SEQ ID NO: 599324 - RNA, 19 nt, Artificial Sequence
  Description of Artificial Sequence: Synthetic oligonucleotide
guaccuaugggcgacaugc

SEQ ID NO: 599325 - RNA, 19 nt, Artificial Sequence
  Description of Artificial Sequence: Synthetic oligonucleotide
uuagauauuuuagggaagu

SEQ ID NO: 599326 - RNA, 19 nt, Artificial Sequence
  Description of Artificial Sequence: Synthetic oligonucleotide
auaggggauaucgucaugg

SEQ ID NO: 599327 - RNA, 19 nt, Artificial Sequence
  Description of Artificial Sequence: Synthetic oligonucleotide
ugucuagagagacuugcug

SEQ ID NO: 599328 - RNA, 19 nt, Artificial Sequence
  Description of Artificial Sequence: Synthetic oligonucleotide
uauguauuagggaaagguu

SEQ ID NO: 599329 - RNA, 19 nt, Artificial Sequence
  Description of Artificial Sequence: Synthetic oligonucleotide
auagucacggacaaugcgg

SEQ ID NO: 599330 - RNA, 19 nt, Artificial Sequence
  Description of Artificial Sequence: Synthetic oligonucleotide
ggaaaauggaugcagagca

SEQ ID NO: 599331 - RNA, 19 nt, Artificial Sequence
  Description of Artificial Sequence: Synthetic oligonucleotide
uagucacggacaaugcggg

SEQ ID NO: 599332 - RNA, 19 nt, Artificial Sequence
  Description of Artificial Sequence: Synthetic oligonucleotide
ucaccuuuguauaccuagg

SEQ ID NO: 599333 - RNA, 19 nt, Artificial Sequence
  Description of Artificial Sequence: Synthetic oligonucleotide
aauuaggagcuaauucagg

SEQ ID NO: 599334 - RNA, 19 nt, Artificial Sequence
  Description of Artificial Sequence: Synthetic oligonucleotide
ucccaugauaaucugucug

SEQ ID NO: 599335 - RNA, 19 nt, Artificial Sequence
  Description of Artificial Sequence: Synthetic oligonucleotide
aagcuauggcuuuaggggu

SEQ ID NO: 599336 - RNA, 19 nt, Artificial Sequence
  Description of Artificial Sequence: Synthetic oligonucleotide
uuacaugagcauaaacagu

SEQ ID NO: 599337 - RNA, 19 nt, Artificial Sequence
  Description of Artificial Sequence: Synthetic oligonucleotide
ucagcauauguuucagugc

SEQ ID NO: 599338 - RNA, 19 nt, Artificial Sequence
  Description of Artificial Sequence: Synthetic oligonucleotide
agagaagggccaucgaaag

SEQ ID NO: 599339 - RNA, 19 nt, Artificial Sequence
  Description of Artificial Sequence: Synthetic oligonucleotide
ugugucuagagagacuugc

SEQ ID NO: 599340 - RNA, 19 nt, Artificial Sequence
  Description of Artificial Sequence: Synthetic oligonucleotide
aaaucaauccggugcucug

SEQ ID NO: 599341 - RNA, 19 nt, Artificial Sequence
  Description of Artificial Sequence: Synthetic oligonucleotide
aacauguugcacuuauuuu

SEQ ID NO: 599342 - RNA, 19 nt, Artificial Sequence
  Description of Artificial Sequence: Synthetic oligonucleotide
uucccugucaagauuacau

SEQ ID NO: 599343 - RNA, 19 nt, Artificial Sequence
  Description of Artificial Sequence: Synthetic oligonucleotide
ugggcgaacagaauauucu

SEQ ID NO: 599344 - RNA, 19 nt, Artificial Sequence
  Description of Artificial Sequence: Synthetic oligonucleotide
uuaguucuauuuacuauau

SEQ ID NO: 599345 - RNA, 19 nt, Artificial Sequence
  Description of Artificial Sequence: Synthetic oligonucleotide
gagacggauccccaaagag

SEQ ID NO: 599346 - RNA, 19 nt, Artificial Sequence
  Description of Artificial Sequence: Synthetic oligonucleotide
gaagggauugaaaaguuga

SEQ ID NO: 599347 - RNA, 19 nt, Artificial Sequence
  Description of Artificial Sequence: Synthetic oligonucleotide
agcacacugacccucaagu

SEQ ID NO: 599348 - RNA, 19 nt, Artificial Sequence
  Description of Artificial Sequence: Synthetic oligonucleotide
uuaaggaagcuuccuuuga

SEQ ID NO: 599349 - RNA, 19 nt, Artificial Sequence
  Description of Artificial Sequence: Synthetic oligonucleotide
agucuugccaaauuaccca

SEQ ID NO: 599350 - RNA, 19 nt, Artificial Sequence
  Description of Artificial Sequence: Synthetic oligonucleotide
aucaauccggugcucugcc

SEQ ID NO: 599351 - RNA, 19 nt, Artificial Sequence
  Description of Artificial Sequence: Synthetic oligonucleotide
aggggauaucgucaugggc

SEQ ID NO: 599352 - RNA, 19 nt, Artificial Sequence
  Description of Artificial Sequence: Synthetic oligonucleotide
acuuauauugguaagcuua

SEQ ID NO: 599353 - RNA, 19 nt, Artificial Sequence
  Description of Artificial Sequence: Synthetic oligonucleotide
uuuacuuuaucaacccguu

SEQ ID NO: 599354 - RNA, 19 nt, Artificial Sequence
  Description of Artificial Sequence: Synthetic oligonucleotide
uguagguuccgucuggcau

SEQ ID NO: 599355 - RNA, 19 nt, Artificial Sequence
  Description of Artificial Sequence: Synthetic oligonucleotide
aaguugauaagggaacaga

SEQ ID NO: 599356 - RNA, 19 nt, Artificial Sequence
  Description of Artificial Sequence: Synthetic oligonucleotide
ugugcgugagcucaucacu

SEQ ID NO: 599357 - RNA, 19 nt, Artificial Sequence
  Description of Artificial Sequence: Synthetic oligonucleotide
uguuaaggaagcuuccuuu

SEQ ID NO: 599358 - RNA, 19 nt, Artificial Sequence
  Description of Artificial Sequence: Synthetic oligonucleotide
cacugcgucauaacgcucg

SEQ ID NO: 599359 - RNA, 19 nt, Artificial Sequence
  Description of Artificial Sequence: Synthetic oligonucleotide
cauuguuaaggaagcuucc

SEQ ID NO: 599360 - RNA, 19 nt, Artificial Sequence
  Description of Artificial Sequence: Synthetic oligonucleotide
ucccugccgaagaauaggg

SEQ ID NO: 599361 - RNA, 19 nt, Artificial Sequence
  Description of Artificial Sequence: Synthetic oligonucleotide
gagaacaagcaggugagug

SEQ ID NO: 599362 - RNA, 19 nt, Artificial Sequence
  Description of Artificial Sequence: Synthetic oligonucleotide
uuguauaccuaggagaaua

SEQ ID NO: 599363 - RNA, 19 nt, Artificial Sequence
  Description of Artificial Sequence: Synthetic oligonucleotide
cugucaagauuacaugagc

SEQ ID NO: 599364 - RNA, 19 nt, Artificial Sequence
  Description of Artificial Sequence: Synthetic oligonucleotide
aacauuguuaaggaagcuu

SEQ ID NO: 599365 - RNA, 19 nt, Artificial Sequence
  Description of Artificial Sequence: Synthetic oligonucleotide
gaacaagcaggugaguggc

SEQ ID NO: 599366 - RNA, 19 nt, Artificial Sequence
  Description of Artificial Sequence: Synthetic oligonucleotide
aucgucaugggcuacgaaa

SEQ ID NO: 599367 - RNA, 19 nt, Artificial Sequence
  Description of Artificial Sequence: Synthetic oligonucleotide
uccuuugaaccccgugugg

SEQ ID NO: 599368 - RNA, 19 nt, Artificial Sequence
  Description of Artificial Sequence: Synthetic oligonucleotide
cacgcuucuuucuugugcc

SEQ ID NO: 599369 - RNA, 19 nt, Artificial Sequence
  Description of Artificial Sequence: Synthetic oligonucleotide
acgaaaucaauccggugcu

SEQ ID NO: 599370 - RNA, 19 nt, Artificial Sequence
  Description of Artificial Sequence: Synthetic oligonucleotide
cacacugacccucaaguac

SEQ ID NO: 599371 - RNA, 19 nt, Artificial Sequence
  Description of Artificial Sequence: Synthetic oligonucleotide
uauggcccuuccuuuacag

SEQ ID NO: 599372 - RNA, 19 nt, Artificial Sequence
  Description of Artificial Sequence: Synthetic oligonucleotide
guuggagcaaacaugccug

SEQ ID NO: 599373 - RNA, 19 nt, Artificial Sequence
  Description of Artificial Sequence: Synthetic oligonucleotide
cugauguggagauaccuuc

SEQ ID NO: 599374 - RNA, 19 nt, Artificial Sequence
  Description of Artificial Sequence: Synthetic oligonucleotide
agcuccuuugcaguguagc

SEQ ID NO: 599375 - RNA, 19 nt, Artificial Sequence
  Description of Artificial Sequence: Synthetic oligonucleotide
ugcuuauacacgucgucac

SEQ ID NO: 599376 - RNA, 19 nt, Artificial Sequence
  Description of Artificial Sequence: Synthetic oligonucleotide
ugcgucauaacgcucguuu

SEQ ID NO: 599377 - RNA, 19 nt, Artificial Sequence
  Description of Artificial Sequence: Synthetic oligonucleotide
ugcacugcgucauaacgcu

SEQ ID NO: 599378 - RNA, 19 nt, Artificial Sequence
  Description of Artificial Sequence: Synthetic oligonucleotide
uaccuaacaugagaaagca

SEQ ID NO: 599379 - RNA, 19 nt, Artificial Sequence
  Description of Artificial Sequence: Synthetic oligonucleotide
acaaugagauauguauuag

SEQ ID NO: 599380 - RNA, 19 nt, Artificial Sequence
  Description of Artificial Sequence: Synthetic oligonucleotide
ugacagagaucuagaagcu

SEQ ID NO: 599381 - RNA, 19 nt, Artificial Sequence
  Description of Artificial Sequence: Synthetic oligonucleotide
uaccuaggagaauaaggca

SEQ ID NO: 599382 - RNA, 19 nt, Artificial Sequence
  Description of Artificial Sequence: Synthetic oligonucleotide
uauacacgucgucacuccc

SEQ ID NO: 599383 - RNA, 19 nt, Artificial Sequence
  Description of Artificial Sequence: Synthetic oligonucleotide
uguauaccuaggagaauaa

SEQ ID NO: 599384 - RNA, 19 nt, Artificial Sequence
  Description of Artificial Sequence: Synthetic oligonucleotide
ugugcuuauacacgucguc

SEQ ID NO: 599385 - RNA, 19 nt, Artificial Sequence
  Description of Artificial Sequence: Synthetic oligonucleotide
accuaugggcgacaugcac

SEQ ID NO: 599386 - RNA, 19 nt, Artificial Sequence
  Description of Artificial Sequence: Synthetic oligonucleotide
caagauuacaugagcauaa

SEQ ID NO: 599387 - RNA, 19 nt, Artificial Sequence
  Description of Artificial Sequence: Synthetic oligonucleotide
ugauguggagauaccuucu

SEQ ID NO: 599388 - RNA, 19 nt, Artificial Sequence
  Description of Artificial Sequence: Synthetic oligonucleotide
aauaggggauaucgucaug

SEQ ID NO: 599389 - RNA, 19 nt, Artificial Sequence
  Description of Artificial Sequence: Synthetic oligonucleotide
aaaguggaaccaguuaaaa

SEQ ID NO: 599390 - RNA, 19 nt, Artificial Sequence
  Description of Artificial Sequence: Synthetic oligonucleotide
aauuacccaucagcauggc

SEQ ID NO: 599391 - RNA, 19 nt, Artificial Sequence
  Description of Artificial Sequence: Synthetic oligonucleotide
ucugauguggagauaccuu

SEQ ID NO: 599392 - RNA, 19 nt, Artificial Sequence
  Description of Artificial Sequence: Synthetic oligonucleotide
gaaaagcgagacuuagauc

SEQ ID NO: 599393 - RNA, 19 nt, Artificial Sequence
  Description of Artificial Sequence: Synthetic oligonucleotide
cugcacugcgucauaacgc

SEQ ID NO: 599394 - RNA, 19 nt, Artificial Sequence
  Description of Artificial Sequence: Synthetic oligonucleotide
ugaguggcagcagugacgu

SEQ ID NO: 599395 - RNA, 19 nt, Artificial Sequence
  Description of Artificial Sequence: Synthetic oligonucleotide
ucgucaugggcuacgaaau

SEQ ID NO: 599396 - RNA, 19 nt, Artificial Sequence
  Description of Artificial Sequence: Synthetic oligonucleotide
aguacacgcuucuuucuug

SEQ ID NO: 599397 - RNA, 19 nt, Artificial Sequence
  Description of Artificial Sequence: Synthetic oligonucleotide
agauauuuuagggaaguua

SEQ ID NO: 599398 - RNA, 19 nt, Artificial Sequence
  Description of Artificial Sequence: Synthetic oligonucleotide
cuaugggcgacaugcacug

SEQ ID NO: 599399 - RNA, 19 nt, Artificial Sequence
  Description of Artificial Sequence: Synthetic oligonucleotide
uuucggcacauguaugcug

SEQ ID NO: 599400 - RNA, 19 nt, Artificial Sequence
  Description of Artificial Sequence: Synthetic oligonucleotide
ucuagcaccuaggagcaca

SEQ ID NO: 599401 - RNA, 19 nt, Artificial Sequence
  Description of Artificial Sequence: Synthetic oligonucleotide
uuggguccaacaagaaacu

SEQ ID NO: 599402 - RNA, 19 nt, Artificial Sequence
  Description of Artificial Sequence: Synthetic oligonucleotide
agaauaggggauaucguca

SEQ ID NO: 599403 - RNA, 19 nt, Artificial Sequence
  Description of Artificial Sequence: Synthetic oligonucleotide
uaggggauaucgucauggg

SEQ ID NO: 599404 - RNA, 19 nt, Artificial Sequence
  Description of Artificial Sequence: Synthetic oligonucleotide
gagagacggauccccaaag

SEQ ID NO: 599405 - RNA, 19 nt, Artificial Sequence
  Description of Artificial Sequence: Synthetic oligonucleotide
ugauaagggaacagaucuc

SEQ ID NO: 599406 - RNA, 19 nt, Artificial Sequence
  Description of Artificial Sequence: Synthetic oligonucleotide
augggcuacgaaaucaauc

SEQ ID NO: 599407 - RNA, 19 nt, Artificial Sequence
  Description of Artificial Sequence: Synthetic oligonucleotide
uucaguuucggcacaugua

SEQ ID NO: 599408 - RNA, 19 nt, Artificial Sequence
  Description of Artificial Sequence: Synthetic oligonucleotide
gaaaauggaugcagagcag

SEQ ID NO: 599409 - RNA, 19 nt, Artificial Sequence
  Description of Artificial Sequence: Synthetic oligonucleotide
ucccugucaagauuacaug

SEQ ID NO: 599410 - RNA, 19 nt, Artificial Sequence
  Description of Artificial Sequence: Synthetic oligonucleotide
ucacggacaaugcggguga

SEQ ID NO: 599411 - RNA, 19 nt, Artificial Sequence
  Description of Artificial Sequence: Synthetic oligonucleotide
uacacgucgucacucccug

SEQ ID NO: 599412 - RNA, 19 nt, Artificial Sequence
  Description of Artificial Sequence: Synthetic oligonucleotide
gcgaacagaauauucuaag

SEQ ID NO: 599413 - RNA, 19 nt, Artificial Sequence
  Description of Artificial Sequence: Synthetic oligonucleotide
cuuagaucucuuccuuccc

SEQ ID NO: 599414 - RNA, 19 nt, Artificial Sequence
  Description of Artificial Sequence: Synthetic oligonucleotide
uuguuaaggaagcuuccuu

SEQ ID NO: 599415 - RNA, 19 nt, Artificial Sequence
  Description of Artificial Sequence: Synthetic oligonucleotide
cuuuaucccaugauaaucu

SEQ ID NO: 599416 - RNA, 19 nt, Artificial Sequence
  Description of Artificial Sequence: Synthetic oligonucleotide
cugugagagaaaacaauca

SEQ ID NO: 599417 - RNA, 19 nt, Artificial Sequence
  Description of Artificial Sequence: Synthetic oligonucleotide
aggcuucuaagguagggga

SEQ ID NO: 599418 - RNA, 19 nt, Artificial Sequence
  Description of Artificial Sequence: Synthetic oligonucleotide
cuuauauugguaagcuuaa

SEQ ID NO: 599419 - RNA, 19 nt, Artificial Sequence
  Description of Artificial Sequence: Synthetic oligonucleotide
ugcauggaccccauugggu

SEQ ID NO: 599420 - RNA, 19 nt, Artificial Sequence
  Description of Artificial Sequence: Synthetic oligonucleotide
accauuaguuuuaaaacau

SEQ ID NO: 599421 - RNA, 19 nt, Artificial Sequence
  Description of Artificial Sequence: Synthetic oligonucleotide
acaugggucggcaggacac

SEQ ID NO: 599422 - RNA, 19 nt, Artificial Sequence
  Description of Artificial Sequence: Synthetic oligonucleotide
aaagcgagacuuagaucuc

SEQ ID NO: 599423 - RNA, 19 nt, Artificial Sequence
  Description of Artificial Sequence: Synthetic oligonucleotide
uaacgcucguuuucguuca

SEQ ID NO: 599424 - RNA, 19 nt, Artificial Sequence
  Description of Artificial Sequence: Synthetic oligonucleotide
guuaaaauugcaacagucu

SEQ ID NO: 599425 - RNA, 19 nt, Artificial Sequence
  Description of Artificial Sequence: Synthetic oligonucleotide
gaaagagauugaccacagc

SEQ ID NO: 599426 - RNA, 19 nt, Artificial Sequence
  Description of Artificial Sequence: Synthetic oligonucleotide
aguugauaagggaacagau

SEQ ID NO: 599427 - RNA, 19 nt, Artificial Sequence
  Description of Artificial Sequence: Synthetic oligonucleotide
ucaaguaccuaugggcgac

SEQ ID NO: 599428 - RNA, 19 nt, Artificial Sequence
  Description of Artificial Sequence: Synthetic oligonucleotide
cuugaaguugugcgugagc

SEQ ID NO: 599429 - RNA, 19 nt, Artificial Sequence
  Description of Artificial Sequence: Synthetic oligonucleotide
aacaugccugcuucuuuga

SEQ ID NO: 599430 - RNA, 19 nt, Artificial Sequence
  Description of Artificial Sequence: Synthetic oligonucleotide
ggaguaagaaaagcgagac

SEQ ID NO: 599431 - RNA, 19 nt, Artificial Sequence
  Description of Artificial Sequence: Synthetic oligonucleotide
uuccauccgcauaaacucu

SEQ ID NO: 599432 - RNA, 19 nt, Artificial Sequence
  Description of Artificial Sequence: Synthetic oligonucleotide
gacggauccccaaagagaa

SEQ ID NO: 599433 - RNA, 19 nt, Artificial Sequence
  Description of Artificial Sequence: Synthetic oligonucleotide
cagcauccgaccuuuuccc

SEQ ID NO: 599434 - RNA, 19 nt, Artificial Sequence
  Description of Artificial Sequence: Synthetic oligonucleotide
aagugguauuucuucucau

SEQ ID NO: 599435 - RNA, 19 nt, Artificial Sequence
  Description of Artificial Sequence: Synthetic oligonucleotide
augaccagagugaaauaag

SEQ ID NO: 599436 - RNA, 19 nt, Artificial Sequence
  Description of Artificial Sequence: Synthetic oligonucleotide
uuguuugguugcaucccca

SEQ ID NO: 599437 - RNA, 19 nt, Artificial Sequence
  Description of Artificial Sequence: Synthetic oligonucleotide
agaagcuagggaccauucu

SEQ ID NO: 599438 - RNA, 19 nt, Artificial Sequence
  Description of Artificial Sequence: Synthetic oligonucleotide
agcguucaugaguagggcu

SEQ ID NO: 599439 - RNA, 19 nt, Artificial Sequence
  Description of Artificial Sequence: Synthetic oligonucleotide
ggcuacgaaaucaauccgg

SEQ ID NO: 599440 - RNA, 19 nt, Artificial Sequence
  Description of Artificial Sequence: Synthetic oligonucleotide
ggagcguucaugaguaggg

SEQ ID NO: 599441 - RNA, 19 nt, Artificial Sequence
  Description of Artificial Sequence: Synthetic oligonucleotide
uuggagcaaacaugccugc

SEQ ID NO: 599442 - RNA, 19 nt, Artificial Sequence
  Description of Artificial Sequence: Synthetic oligonucleotide
acucucacaggccgcucac

SEQ ID NO: 599443 - RNA, 19 nt, Artificial Sequence
  Description of Artificial Sequence: Synthetic oligonucleotide
uagaagcuagggaccauuc

SEQ ID NO: 599444 - RNA, 19 nt, Artificial Sequence
  Description of Artificial Sequence: Synthetic oligonucleotide
uccauccgcauaaacucuc

SEQ ID NO: 599445 - RNA, 19 nt, Artificial Sequence
  Description of Artificial Sequence: Synthetic oligonucleotide
cacgucgucacucccugcc

SEQ ID NO: 599446 - RNA, 19 nt, Artificial Sequence
  Description of Artificial Sequence: Synthetic oligonucleotide
guauaccuaggagaauaag

SEQ ID NO: 599447 - RNA, 19 nt, Artificial Sequence
  Description of Artificial Sequence: Synthetic oligonucleotide
ccuuuguauaccuaggaga

SEQ ID NO: 599448 - RNA, 19 nt, Artificial Sequence
  Description of Artificial Sequence: Synthetic oligonucleotide
ugcgugagcucaucacugc

SEQ ID NO: 599449 - RNA, 19 nt, Artificial Sequence
  Description of Artificial Sequence: Synthetic oligonucleotide
aagggauugaaaaguugau

SEQ ID NO: 599450 - RNA, 19 nt, Artificial Sequence
  Description of Artificial Sequence: Synthetic oligonucleotide
aagauuacaugagcauaaa

SEQ ID NO: 599451 - RNA, 19 nt, Artificial Sequence
  Description of Artificial Sequence: Synthetic oligonucleotide
ugaauucucgggacuucuc

SEQ ID NO: 599452 - RNA, 19 nt, Artificial Sequence
  Description of Artificial Sequence: Synthetic oligonucleotide
agagacggauccccaaaga

SEQ ID NO: 599453 - RNA, 19 nt, Artificial Sequence
  Description of Artificial Sequence: Synthetic oligonucleotide
cuacgaaaucaauccggug

SEQ ID NO: 599454 - RNA, 19 nt, Artificial Sequence
  Description of Artificial Sequence: Synthetic oligonucleotide
uaguacacgcuucuuucuu

SEQ ID NO: 599455 - RNA, 19 nt, Artificial Sequence
  Description of Artificial Sequence: Synthetic oligonucleotide
ucgggcgucagcguccagg

SEQ ID NO: 599456 - RNA, 19 nt, Artificial Sequence
  Description of Artificial Sequence: Synthetic oligonucleotide
uacuuauauugguaagcuu

SEQ ID NO: 599457 - RNA, 19 nt, Artificial Sequence
  Description of Artificial Sequence: Synthetic oligonucleotide
cuagagagacuugcugggg

SEQ ID NO: 599458 - RNA, 19 nt, Artificial Sequence
  Description of Artificial Sequence: Synthetic oligonucleotide
accucccacaaugagauau

SEQ ID NO: 599459 - RNA, 19 nt, Artificial Sequence
  Description of Artificial Sequence: Synthetic oligonucleotide
agacuuagaucucuuccuu

SEQ ID NO: 599460 - RNA, 19 nt, Artificial Sequence
  Description of Artificial Sequence: Synthetic oligonucleotide
cucccaaauacuugggcga

SEQ ID NO: 599461 - RNA, 19 nt, Artificial Sequence
  Description of Artificial Sequence: Synthetic oligonucleotide
auuacccaucagcauggcu

SEQ ID NO: 599462 - RNA, 19 nt, Artificial Sequence
  Description of Artificial Sequence: Synthetic oligonucleotide
acgucaucaccuuuguaua

SEQ ID NO: 599463 - RNA, 19 nt, Artificial Sequence
  Description of Artificial Sequence: Synthetic oligonucleotide
caugagaaagcacuaauuu

SEQ ID NO: 599464 - RNA, 19 nt, Artificial Sequence
  Description of Artificial Sequence: Synthetic oligonucleotide
ugaugugcuuauacacguc

SEQ ID NO: 599465 - RNA, 19 nt, Artificial Sequence
  Description of Artificial Sequence: Synthetic oligonucleotide
cagagaucuagaagcuaug

SEQ ID NO: 599466 - RNA, 19 nt, Artificial Sequence
  Description of Artificial Sequence: Synthetic oligonucleotide
ggguaaaaccaaagcaggg

SEQ ID NO: 599467 - RNA, 19 nt, Artificial Sequence
  Description of Artificial Sequence: Synthetic oligonucleotide
ggcuuuagggguaaaacca

SEQ ID NO: 599468 - RNA, 19 nt, Artificial Sequence
  Description of Artificial Sequence: Synthetic oligonucleotide
cuuuaucaacccguucuug

SEQ ID NO: 599469 - RNA, 19 nt, Artificial Sequence
  Description of Artificial Sequence: Synthetic oligonucleotide
cuagaagcuauggcuuuag

SEQ ID NO: 599470 - RNA, 19 nt, Artificial Sequence
  Description of Artificial Sequence: Synthetic oligonucleotide
agauugaccacagcuccca

SEQ ID NO: 599471 - RNA, 19 nt, Artificial Sequence
  Description of Artificial Sequence: Synthetic oligonucleotide
agagagacggauccccaaa

SEQ ID NO: 599472 - RNA, 19 nt, Artificial Sequence
  Description of Artificial Sequence: Synthetic oligonucleotide
cacguagcggcagugcugc

SEQ ID NO: 599473 - RNA, 19 nt, Artificial Sequence
  Description of Artificial Sequence: Synthetic oligonucleotide
acuagugugucuggaagaa

SEQ ID NO: 599474 - RNA, 19 nt, Artificial Sequence
  Description of Artificial Sequence: Synthetic oligonucleotide
aagcgagacuuagaucucu

SEQ ID NO: 599475 - RNA, 19 nt, Artificial Sequence
  Description of Artificial Sequence: Synthetic oligonucleotide
gcauauguuucagugcucc

SEQ ID NO: 599476 - RNA, 19 nt, Artificial Sequence
  Description of Artificial Sequence: Synthetic oligonucleotide
agacggauccccaaagaga

SEQ ID NO: 599477 - RNA, 19 nt, Artificial Sequence
  Description of Artificial Sequence: Synthetic oligonucleotide
uauuagggaaagguucuuu

SEQ ID NO: 599478 - RNA, 19 nt, Artificial Sequence
  Description of Artificial Sequence: Synthetic oligonucleotide
uuauauugguaagcuuaaa

SEQ ID NO: 599479 - RNA, 19 nt, Artificial Sequence
  Description of Artificial Sequence: Synthetic oligonucleotide
gucacggacaaugcgggug

SEQ ID NO: 599480 - RNA, 19 nt, Artificial Sequence
  Description of Artificial Sequence: Synthetic oligonucleotide
ucauaacgcucguuuucgu

SEQ ID NO: 599481 - RNA, 19 nt, Artificial Sequence
  Description of Artificial Sequence: Synthetic oligonucleotide
cucccugccgaagaauagg

SEQ ID NO: 599482 - RNA, 19 nt, Artificial Sequence
  Description of Artificial Sequence: Synthetic oligonucleotide
ucggcaggacacuuggaau

SEQ ID NO: 599483 - RNA, 19 nt, Artificial Sequence
  Description of Artificial Sequence: Synthetic oligonucleotide
auauguuucagugcuccuu

SEQ ID NO: 599484 - RNA, 19 nt, Artificial Sequence
  Description of Artificial Sequence: Synthetic oligonucleotide
gaaagguucuuugcuugca

SEQ ID NO: 599485 - RNA, 19 nt, Artificial Sequence
  Description of Artificial Sequence: Synthetic oligonucleotide
gguuccgucuggcauacac

SEQ ID NO: 599486 - RNA, 19 nt, Artificial Sequence
  Description of Artificial Sequence: Synthetic oligonucleotide
gccaaauuacccaucagca

SEQ ID NO: 599487 - RNA, 19 nt, Artificial Sequence
  Description of Artificial Sequence: Synthetic oligonucleotide
auccacguagcggcagugc

SEQ ID NO: 599488 - RNA, 19 nt, Artificial Sequence
  Description of Artificial Sequence: Synthetic oligonucleotide
agcccuugaaguugugcgu

SEQ ID NO: 599489 - RNA, 19 nt, Artificial Sequence
  Description of Artificial Sequence: Synthetic oligonucleotide
cagagaagggccaucgaaa

SEQ ID NO: 599490 - RNA, 19 nt, Artificial Sequence
  Description of Artificial Sequence: Synthetic oligonucleotide
caaaguggaaccaguuaaa

SEQ ID NO: 599491 - RNA, 19 nt, Artificial Sequence
  Description of Artificial Sequence: Synthetic oligonucleotide
cuagcaccuaggagcacac

SEQ ID NO: 599492 - RNA, 19 nt, Artificial Sequence
  Description of Artificial Sequence: Synthetic oligonucleotide
agcacuagugugucuggaa

SEQ ID NO: 599493 - RNA, 19 nt, Artificial Sequence
  Description of Artificial Sequence: Synthetic oligonucleotide
caccucauccacguagcgg

SEQ ID NO: 599494 - RNA, 19 nt, Artificial Sequence
  Description of Artificial Sequence: Synthetic oligonucleotide
auaaucugucugugagaga

SEQ ID NO: 599495 - RNA, 19 nt, Artificial Sequence
  Description of Artificial Sequence: Synthetic oligonucleotide
ggaaagagauugaccacag

SEQ ID NO: 599496 - RNA, 19 nt, Artificial Sequence
  Description of Artificial Sequence: Synthetic oligonucleotide
auuucccugucaagauuac

SEQ ID NO: 599497 - RNA, 19 nt, Artificial Sequence
  Description of Artificial Sequence: Synthetic oligonucleotide
cagcauauguuucagugcu

SEQ ID NO: 599498 - RNA, 19 nt, Artificial Sequence
  Description of Artificial Sequence: Synthetic oligonucleotide
acaugagaaagcacuaauu

SEQ ID NO: 599499 - RNA, 19 nt, Artificial Sequence
  Description of Artificial Sequence: Synthetic oligonucleotide
aguaccuaugggcgacaug

SEQ ID NO: 599500 - RNA, 19 nt, Artificial Sequence
  Description of Artificial Sequence: Synthetic oligonucleotide
acaggccgcucacaaggag

SEQ ID NO: 599501 - RNA, 19 nt, Artificial Sequence
  Description of Artificial Sequence: Synthetic oligonucleotide
aaacucucacaggccgcuc

SEQ ID NO: 599502 - RNA, 19 nt, Artificial Sequence
  Description of Artificial Sequence: Synthetic oligonucleotide
gaaaucaauccggugcucu

SEQ ID NO: 599503 - RNA, 19 nt, Artificial Sequence
  Description of Artificial Sequence: Synthetic oligonucleotide
uacacgcuucuuucuugug

SEQ ID NO: 599504 - RNA, 19 nt, Artificial Sequence
  Description of Artificial Sequence: Synthetic oligonucleotide
gaagggccaucgaaaggag

SEQ ID NO: 599505 - RNA, 19 nt, Artificial Sequence
  Description of Artificial Sequence: Synthetic oligonucleotide
gggcuacgaaaucaauccg

SEQ ID NO: 599506 - RNA, 19 nt, Artificial Sequence
  Description of Artificial Sequence: Synthetic oligonucleotide
uaccuaugggcgacaugca

SEQ ID NO: 599507 - RNA, 19 nt, Artificial Sequence
  Description of Artificial Sequence: Synthetic oligonucleotide
gaauaggggauaucgucau

SEQ ID NO: 599508 - RNA, 19 nt, Artificial Sequence
  Description of Artificial Sequence: Synthetic oligonucleotide
aauagaagcuagggaccau

SEQ ID NO: 599509 - RNA, 19 nt, Artificial Sequence
  Description of Artificial Sequence: Synthetic oligonucleotide
gcgacaugcacugagagaa

SEQ ID NO: 599510 - RNA, 19 nt, Artificial Sequence
  Description of Artificial Sequence: Synthetic oligonucleotide
cucaaguaccuaugggcga

SEQ ID NO: 599511 - RNA, 19 nt, Artificial Sequence
  Description of Artificial Sequence: Synthetic oligonucleotide
ugcaaccgacacucuguug

SEQ ID NO: 599512 - RNA, 19 nt, Artificial Sequence
  Description of Artificial Sequence: Synthetic oligonucleotide
caccuaggagcacacugac

SEQ ID NO: 599513 - RNA, 19 nt, Artificial Sequence
  Description of Artificial Sequence: Synthetic oligonucleotide
aggaaacuuccaaugaauu

SEQ ID NO: 599514 - RNA, 19 nt, Artificial Sequence
  Description of Artificial Sequence: Synthetic oligonucleotide
acuugggcgaacagaauau

SEQ ID NO: 599515 - RNA, 19 nt, Artificial Sequence
  Description of Artificial Sequence: Synthetic oligonucleotide
acuuggaauuaggagcuaa

SEQ ID NO: 599516 - RNA, 19 nt, Artificial Sequence
  Description of Artificial Sequence: Synthetic oligonucleotide
acacgucgucacucccugc

SEQ ID NO: 599517 - RNA, 19 nt, Artificial Sequence
  Description of Artificial Sequence: Synthetic oligonucleotide
ugggucggcaggacacuug

SEQ ID NO: 599518 - RNA, 19 nt, Artificial Sequence
  Description of Artificial Sequence: Synthetic oligonucleotide
gaagaauaggggauaucgu

SEQ ID NO: 599519 - RNA, 19 nt, Artificial Sequence
  Description of Artificial Sequence: Synthetic oligonucleotide
cauuggguccaacaagaaa

SEQ ID NO: 599520 - RNA, 19 nt, Artificial Sequence
  Description of Artificial Sequence: Synthetic oligonucleotide
caccuuuguauaccuagga

SEQ ID NO: 599521 - RNA, 19 nt, Artificial Sequence
  Description of Artificial Sequence: Synthetic oligonucleotide
uuugaaccccguguggguu

SEQ ID NO: 599522 - RNA, 19 nt, Artificial Sequence
  Description of Artificial Sequence: Synthetic oligonucleotide
gagcguucaugaguagggc

SEQ ID NO: 599523 - RNA, 19 nt, Artificial Sequence
  Description of Artificial Sequence: Synthetic oligonucleotide
uugaaccccguguggguuc

SEQ ID NO: 599524 - RNA, 19 nt, Artificial Sequence
  Description of Artificial Sequence: Synthetic oligonucleotide
auagaagcuagggaccauu

SEQ ID NO: 599525 - RNA, 19 nt, Artificial Sequence
  Description of Artificial Sequence: Synthetic oligonucleotide
gcaaccgacacucuguugu

SEQ ID NO: 599526 - RNA, 19 nt, Artificial Sequence
  Description of Artificial Sequence: Synthetic oligonucleotide
ggucaaggccauauggccc

SEQ ID NO: 599527 - RNA, 19 nt, Artificial Sequence
  Description of Artificial Sequence: Synthetic oligonucleotide
guugugcgugagcucauca

SEQ ID NO: 599528 - RNA, 19 nt, Artificial Sequence
  Description of Artificial Sequence: Synthetic oligonucleotide
cugggacucugccugggac

SEQ ID NO: 599529 - RNA, 19 nt, Artificial Sequence
  Description of Artificial Sequence: Synthetic oligonucleotide
guagguuccgucuggcaua

SEQ ID NO: 599530 - RNA, 19 nt, Artificial Sequence
  Description of Artificial Sequence: Synthetic oligonucleotide
uaggagcacacugacccuc

SEQ ID NO: 599531 - RNA, 19 nt, Artificial Sequence
  Description of Artificial Sequence: Synthetic oligonucleotide
cauccgcauaaacucucac

SEQ ID NO: 599532 - RNA, 19 nt, Artificial Sequence
  Description of Artificial Sequence: Synthetic oligonucleotide
agcauauguuucagugcuc

SEQ ID NO: 599533 - RNA, 19 nt, Artificial Sequence
  Description of Artificial Sequence: Synthetic oligonucleotide
uagccccucuguagguucc

SEQ ID NO: 599534 - RNA, 19 nt, Artificial Sequence
  Description of Artificial Sequence: Synthetic oligonucleotide
gaguaagaaaagcgagacu

SEQ ID NO: 599535 - RNA, 19 nt, Artificial Sequence
  Description of Artificial Sequence: Synthetic oligonucleotide
aucuggcaagccaccuugc

SEQ ID NO: 599536 - RNA, 19 nt, Artificial Sequence
  Description of Artificial Sequence: Synthetic oligonucleotide
agcauccgaccuuuucccu

SEQ ID NO: 599537 - RNA, 19 nt, Artificial Sequence
  Description of Artificial Sequence: Synthetic oligonucleotide
gugcgugagcucaucacug

SEQ ID NO: 599538 - RNA, 19 nt, Artificial Sequence
  Description of Artificial Sequence: Synthetic oligonucleotide
ugcugcacugcgucauaac

SEQ ID NO: 599539 - RNA, 19 nt, Artificial Sequence
  Description of Artificial Sequence: Synthetic oligonucleotide
agaauaaggcagagagaga

SEQ ID NO: 599540 - RNA, 19 nt, Artificial Sequence
  Description of Artificial Sequence: Synthetic oligonucleotide
ucccaaauacuugggcgaa

SEQ ID NO: 599541 - RNA, 19 nt, Artificial Sequence
  Description of Artificial Sequence: Synthetic oligonucleotide
aguugugcgugagcucauc

SEQ ID NO: 599542 - RNA, 19 nt, Artificial Sequence
  Description of Artificial Sequence: Synthetic oligonucleotide
uaucgucaugggcuacgaa

SEQ ID NO: 599543 - RNA, 19 nt, Artificial Sequence
  Description of Artificial Sequence: Synthetic oligonucleotide
augcgggugaugaugucug

SEQ ID NO: 599544 - RNA, 19 nt, Artificial Sequence
  Description of Artificial Sequence: Synthetic oligonucleotide
cagcacuaccuaacaugag

SEQ ID NO: 599545 - RNA, 19 nt, Artificial Sequence
  Description of Artificial Sequence: Synthetic oligonucleotide
gcagcacuaccuaacauga

SEQ ID NO: 599546 - RNA, 19 nt, Artificial Sequence
  Description of Artificial Sequence: Synthetic oligonucleotide
agcuagggaccauucuuua

SEQ ID NO: 599547 - RNA, 19 nt, Artificial Sequence
  Description of Artificial Sequence: Synthetic oligonucleotide
acugcgucauaacgcucgu

SEQ ID NO: 599548 - RNA, 19 nt, Artificial Sequence
  Description of Artificial Sequence: Synthetic oligonucleotide
augcagcacuaccuaacau

SEQ ID NO: 599549 - RNA, 19 nt, Artificial Sequence
  Description of Artificial Sequence: Synthetic oligonucleotide
ccugccgaagaauagggga

SEQ ID NO: 599550 - RNA, 19 nt, Artificial Sequence
  Description of Artificial Sequence: Synthetic oligonucleotide
guaagaaaagcgagacuua

SEQ ID NO: 599551 - RNA, 19 nt, Artificial Sequence
  Description of Artificial Sequence: Synthetic oligonucleotide
acugcagaccucccacaau

SEQ ID NO: 599552 - RNA, 19 nt, Artificial Sequence
  Description of Artificial Sequence: Synthetic oligonucleotide
gggacgucuugccagagaa

SEQ ID NO: 599553 - RNA, 19 nt, Artificial Sequence
  Description of Artificial Sequence: Synthetic oligonucleotide
uagguuccgucuggcauac

SEQ ID NO: 599554 - RNA, 19 nt, Artificial Sequence
  Description of Artificial Sequence: Synthetic oligonucleotide
auaucgucaugggcuacga

SEQ ID NO: 599555 - RNA, 19 nt, Artificial Sequence
  Description of Artificial Sequence: Synthetic oligonucleotide
auacacgucgucacucccu

SEQ ID NO: 599556 - RNA, 19 nt, Artificial Sequence
  Description of Artificial Sequence: Synthetic oligonucleotide
gggcgacaugcacugagag

SEQ ID NO: 599557 - RNA, 19 nt, Artificial Sequence
  Description of Artificial Sequence: Synthetic oligonucleotide
gcguucaugaguagggcug

SEQ ID NO: 599558 - RNA, 19 nt, Artificial Sequence
  Description of Artificial Sequence: Synthetic oligonucleotide
aaguaccuaugggcgacau

SEQ ID NO: 599559 - RNA, 19 nt, Artificial Sequence
  Description of Artificial Sequence: Synthetic oligonucleotide
agucacggacaaugcgggu

SEQ ID NO: 599560 - RNA, 19 nt, Artificial Sequence
  Description of Artificial Sequence: Synthetic oligonucleotide
gagcuaugcagcacuaccu

SEQ ID NO: 599561 - RNA, 19 nt, Artificial Sequence
  Description of Artificial Sequence: Synthetic oligonucleotide
ugaaccccguguggguuca

SEQ ID NO: 599562 - RNA, 19 nt, Artificial Sequence
  Description of Artificial Sequence: Synthetic oligonucleotide
caacccguucuugcaagug

SEQ ID NO: 599563 - RNA, 19 nt, Artificial Sequence
  Description of Artificial Sequence: Synthetic oligonucleotide
gacagagaucuagaagcua

SEQ ID NO: 599564 - RNA, 19 nt, Artificial Sequence
  Description of Artificial Sequence: Synthetic oligonucleotide
aucagagcccgggcaugac

SEQ ID NO: 599565 - RNA, 19 nt, Artificial Sequence
  Description of Artificial Sequence: Synthetic oligonucleotide
acccguucuugcaaguggu

SEQ ID NO: 599566 - RNA, 19 nt, Artificial Sequence
  Description of Artificial Sequence: Synthetic oligonucleotide
uucuugcaagugguauuuc

SEQ ID NO: 599567 - RNA, 19 nt, Artificial Sequence
  Description of Artificial Sequence: Synthetic oligonucleotide
gccgcucacaaggaguucc

SEQ ID NO: 599568 - RNA, 19 nt, Artificial Sequence
  Description of Artificial Sequence: Synthetic oligonucleotide
aacgcucguuuucguucau

SEQ ID NO: 599569 - RNA, 19 nt, Artificial Sequence
  Description of Artificial Sequence: Synthetic oligonucleotide
aaccgacacucuguuguuu

SEQ ID NO: 599570 - RNA, 19 nt, Artificial Sequence
  Description of Artificial Sequence: Synthetic oligonucleotide
ugcuugcaucagagcccgg

SEQ ID NO: 599571 - RNA, 19 nt, Artificial Sequence
  Description of Artificial Sequence: Synthetic oligonucleotide
gucugauguggagauaccu

SEQ ID NO: 599572 - RNA, 19 nt, Artificial Sequence
  Description of Artificial Sequence: Synthetic oligonucleotide
aaccccguguggguucagu

SEQ ID NO: 599573 - RNA, 19 nt, Artificial Sequence
  Description of Artificial Sequence: Synthetic oligonucleotide
gcacuaccuaacaugagaa

SEQ ID NO: 599574 - RNA, 19 nt, Artificial Sequence
  Description of Artificial Sequence: Synthetic oligonucleotide
ggcgacaugcacugagaga

SEQ ID NO: 599575 - RNA, 19 nt, Artificial Sequence
  Description of Artificial Sequence: Synthetic oligonucleotide
cuuugaaccccgugugggu

SEQ ID NO: 599576 - RNA, 19 nt, Artificial Sequence
  Description of Artificial Sequence: Synthetic oligonucleotide
ccaugauaaucugucugug

SEQ ID NO: 599577 - RNA, 19 nt, Artificial Sequence
  Description of Artificial Sequence: Synthetic oligonucleotide
auggaccccauugggucca

SEQ ID NO: 599578 - RNA, 19 nt, Artificial Sequence
  Description of Artificial Sequence: Synthetic oligonucleotide
ggcgaacagaauauucuaa

SEQ ID NO: 599579 - RNA, 19 nt, Artificial Sequence
  Description of Artificial Sequence: Synthetic oligonucleotide
cauccacguagcggcagug

SEQ ID NO: 599580 - RNA, 19 nt, Artificial Sequence
  Description of Artificial Sequence: Synthetic oligonucleotide
cccugccgaagaauagggg

SEQ ID NO: 599581 - RNA, 19 nt, Artificial Sequence
  Description of Artificial Sequence: Synthetic oligonucleotide
cgucauaacgcucguuuuc

SEQ ID NO: 599582 - RNA, 19 nt, Artificial Sequence
  Description of Artificial Sequence: Synthetic oligonucleotide
acggacaaugcgggugaug

SEQ ID NO: 599583 - RNA, 19 nt, Artificial Sequence
  Description of Artificial Sequence: Synthetic oligonucleotide
cauauguuucagugcuccu

SEQ ID NO: 599584 - RNA, 19 nt, Artificial Sequence
  Description of Artificial Sequence: Synthetic oligonucleotide
ccucccacaaugagauaug

SEQ ID NO: 599585 - RNA, 19 nt, Artificial Sequence
  Description of Artificial Sequence: Synthetic oligonucleotide
uggggacgucuugccagag

SEQ ID NO: 599586 - RNA, 19 nt, Artificial Sequence
  Description of Artificial Sequence: Synthetic oligonucleotide
agcuauggcuuuaggggua

SEQ ID NO: 599587 - RNA, 19 nt, Artificial Sequence
  Description of Artificial Sequence: Synthetic oligonucleotide
cauaacgcucguuuucguu

SEQ ID NO: 599588 - RNA, 19 nt, Artificial Sequence
  Description of Artificial Sequence: Synthetic oligonucleotide
gggauaucgucaugggcua

SEQ ID NO: 599589 - RNA, 19 nt, Artificial Sequence
  Description of Artificial Sequence: Synthetic oligonucleotide
accuugcuucagaacagaa

SEQ ID NO: 599590 - RNA, 19 nt, Artificial Sequence
  Description of Artificial Sequence: Synthetic oligonucleotide
aggagcuaauucagguuuu

SEQ ID NO: 599591 - RNA, 19 nt, Artificial Sequence
  Description of Artificial Sequence: Synthetic oligonucleotide
aggagcacacugacccuca

SEQ ID NO: 599592 - RNA, 19 nt, Artificial Sequence
  Description of Artificial Sequence: Synthetic oligonucleotide
cgucaucaccuuuguauac

SEQ ID NO: 599593 - RNA, 19 nt, Artificial Sequence
  Description of Artificial Sequence: Synthetic oligonucleotide
agccccucuguagguuccg

SEQ ID NO: 599594 - RNA, 19 nt, Artificial Sequence
  Description of Artificial Sequence: Synthetic oligonucleotide
gcuacgaaaucaauccggu

SEQ ID NO: 599595 - RNA, 19 nt, Artificial Sequence
  Description of Artificial Sequence: Synthetic oligonucleotide
guuucggcacauguaugcu

SEQ ID NO: 599596 - RNA, 19 nt, Artificial Sequence
  Description of Artificial Sequence: Synthetic oligonucleotide
cacaggccgcucacaagga

SEQ ID NO: 599597 - RNA, 19 nt, Artificial Sequence
  Description of Artificial Sequence: Synthetic oligonucleotide
cccaugauaaucugucugu

SEQ ID NO: 599598 - RNA, 19 nt, Artificial Sequence
  Description of Artificial Sequence: Synthetic oligonucleotide
auacuugggcgaacagaau

SEQ ID NO: 599599 - RNA, 19 nt, Artificial Sequence
  Description of Artificial Sequence: Synthetic oligonucleotide
auccggugcucugccagga

SEQ ID NO: 599600 - RNA, 19 nt, Artificial Sequence
  Description of Artificial Sequence: Synthetic oligonucleotide
ccgggcaugaccagaguga

SEQ ID NO: 599601 - RNA, 19 nt, Artificial Sequence
  Description of Artificial Sequence: Synthetic oligonucleotide
ccguguggguucaguuucg

SEQ ID NO: 599602 - RNA, 19 nt, Artificial Sequence
  Description of Artificial Sequence: Synthetic oligonucleotide
caucaccuuuguauaccua

SEQ ID NO: 599603 - RNA, 19 nt, Artificial Sequence
  Description of Artificial Sequence: Synthetic oligonucleotide
uucuagcaccuaggagcac

SEQ ID NO: 599604 - RNA, 19 nt, Artificial Sequence
  Description of Artificial Sequence: Synthetic oligonucleotide
ccuugaaguugugcgugag

SEQ ID NO: 599605 - RNA, 19 nt, Artificial Sequence
  Description of Artificial Sequence: Synthetic oligonucleotide
cuagugugucuggaagaaa

SEQ ID NO: 599606 - RNA, 19 nt, Artificial Sequence
  Description of Artificial Sequence: Synthetic oligonucleotide
aggccgcucacaaggaguu

SEQ ID NO: 599607 - RNA, 19 nt, Artificial Sequence
  Description of Artificial Sequence: Synthetic oligonucleotide
gguucaguuucggcacaug

SEQ ID NO: 599608 - RNA, 19 nt, Artificial Sequence
  Description of Artificial Sequence: Synthetic oligonucleotide
ggcguuccucaccaccuca

SEQ ID NO: 599609 - RNA, 19 nt, Artificial Sequence
  Description of Artificial Sequence: Synthetic oligonucleotide
agcgagacuuagaucucuu

SEQ ID NO: 599610 - RNA, 19 nt, Artificial Sequence
  Description of Artificial Sequence: Synthetic oligonucleotide
gugucuagagagacuugcu

SEQ ID NO: 599611 - RNA, 19 nt, Artificial Sequence
  Description of Artificial Sequence: Synthetic oligonucleotide
cucuggguaguacacgcuu

SEQ ID NO: 599612 - RNA, 19 nt, Artificial Sequence
  Description of Artificial Sequence: Synthetic oligonucleotide
gcgugagcucaucacugca

SEQ ID NO: 599613 - RNA, 19 nt, Artificial Sequence
  Description of Artificial Sequence: Synthetic oligonucleotide
caugggcuacgaaaucaau

SEQ ID NO: 599614 - RNA, 19 nt, Artificial Sequence
  Description of Artificial Sequence: Synthetic oligonucleotide
ccaaauuacccaucagcau

SEQ ID NO: 599615 - RNA, 19 nt, Artificial Sequence
  Description of Artificial Sequence: Synthetic oligonucleotide
gcaucagagcccgggcaug

SEQ ID NO: 599616 - RNA, 19 nt, Artificial Sequence
  Description of Artificial Sequence: Synthetic oligonucleotide
ggauaucgucaugggcuac

SEQ ID NO: 599617 - RNA, 19 nt, Artificial Sequence
  Description of Artificial Sequence: Synthetic oligonucleotide
augggucggcaggacacuu

SEQ ID NO: 599618 - RNA, 19 nt, Artificial Sequence
  Description of Artificial Sequence: Synthetic oligonucleotide
gguugcauccccacucagu

SEQ ID NO: 599619 - RNA, 19 nt, Artificial Sequence
  Description of Artificial Sequence: Synthetic oligonucleotide
gugcugcacugcgucauaa

SEQ ID NO: 599620 - RNA, 19 nt, Artificial Sequence
  Description of Artificial Sequence: Synthetic oligonucleotide
ggggacgucuugccagaga

SEQ ID NO: 599621 - RNA, 19 nt, Artificial Sequence
  Description of Artificial Sequence: Synthetic oligonucleotide
gcuagggaccauucuuuau

SEQ ID NO: 599622 - RNA, 19 nt, Artificial Sequence
  Description of Artificial Sequence: Synthetic oligonucleotide
gcuauggcuuuagggguaa

SEQ ID NO: 599623 - RNA, 19 nt, Artificial Sequence
  Description of Artificial Sequence: Synthetic oligonucleotide
cccaaauacuugggcgaac

SEQ ID NO: 599624 - RNA, 19 nt, Artificial Sequence
  Description of Artificial Sequence: Synthetic oligonucleotide
gaaccccguguggguucag

SEQ ID NO: 599625 - RNA, 19 nt, Artificial Sequence
  Description of Artificial Sequence: Synthetic oligonucleotide
ccuacuuccucagggcaaa

SEQ ID NO: 599626 - RNA, 19 nt, Artificial Sequence
  Description of Artificial Sequence: Synthetic oligonucleotide
cugcaaccgacacucuguu

SEQ ID NO: 599627 - RNA, 19 nt, Artificial Sequence
  Description of Artificial Sequence: Synthetic oligonucleotide
cuugggcgaacagaauauu

SEQ ID NO: 599628 - RNA, 19 nt, Artificial Sequence
  Description of Artificial Sequence: Synthetic oligonucleotide
ccgaagaauaggggauauc

SEQ ID NO: 599629 - RNA, 19 nt, Artificial Sequence
  Description of Artificial Sequence: Synthetic oligonucleotide
auccgaccuuuucccucuu

SEQ ID NO: 599630 - RNA, 19 nt, Artificial Sequence
  Description of Artificial Sequence: Synthetic oligonucleotide
ccauucuuuaucccaugau

SEQ ID NO: 599631 - RNA, 19 nt, Artificial Sequence
  Description of Artificial Sequence: Synthetic oligonucleotide
ggagcacacugacccucaa

SEQ ID NO: 599632 - RNA, 19 nt, Artificial Sequence
  Description of Artificial Sequence: Synthetic oligonucleotide
ggcaagcacuagugugucu

SEQ ID NO: 599633 - RNA, 19 nt, Artificial Sequence
  Description of Artificial Sequence: Synthetic oligonucleotide
ggacaaugcgggugaugau

SEQ ID NO: 599634 - RNA, 19 nt, Artificial Sequence
  Description of Artificial Sequence: Synthetic oligonucleotide
ccacagcucccaaauacuu

SEQ ID NO: 599635 - RNA, 19 nt, Artificial Sequence
  Description of Artificial Sequence: Synthetic oligonucleotide
gcacuaauuucaacagcuu

SEQ ID NO: 599636 - RNA, 19 nt, Artificial Sequence
  Description of Artificial Sequence: Synthetic oligonucleotide
gcacugcgucauaacgcuc

SEQ ID NO: 599637 - RNA, 19 nt, Artificial Sequence
  Description of Artificial Sequence: Synthetic oligonucleotide
gccgaagaauaggggauau

SEQ ID NO: 599638 - RNA, 19 nt, Artificial Sequence
  Description of Artificial Sequence: Synthetic oligonucleotide
cguucuugcaagugguauu

SEQ ID NO: 599639 - RNA, 19 nt, Artificial Sequence
  Description of Artificial Sequence: Synthetic oligonucleotide
ccguucuugcaagugguau

SEQ ID NO: 599640 - RNA, 19 nt, Artificial Sequence
  Description of Artificial Sequence: Synthetic oligonucleotide
agguuccgucuggcauaca

SEQ ID NO: 599641 - RNA, 19 nt, Artificial Sequence
  Description of Artificial Sequence: Synthetic oligonucleotide
ggccgcucacaaggaguuc

SEQ ID NO: 599642 - RNA, 19 nt, Artificial Sequence
  Description of Artificial Sequence: Synthetic oligonucleotide
cggcaggacacuuggaauu

SEQ ID NO: 599643 - RNA, 19 nt, Artificial Sequence
  Description of Artificial Sequence: Synthetic oligonucleotide
ggacucugccugggacuga

SEQ ID NO: 599644 - RNA, 19 nt, Artificial Sequence
  Description of Artificial Sequence: Synthetic oligonucleotide
cgggcaugaccagagugaa

SEQ ID NO: 599645 - RNA, 19 nt, Artificial Sequence
  Description of Artificial Sequence: Synthetic oligonucleotide
ggguucaguuucggcacau

SEQ ID NO: 599646 - RNA, 19 nt, Artificial Sequence
  Description of Artificial Sequence: Synthetic oligonucleotide
gcguuccucaccaccucau

SEQ ID NO: 599647 - RNA, 19 nt, Artificial Sequence
  Description of Artificial Sequence: Synthetic oligonucleotide
cguuuucguucaucacagu

SEQ ID NO: 599648 - RNA, 19 nt, Artificial Sequence
  Description of Artificial Sequence: Synthetic oligonucleotide
cugcgucauaacgcucguu

SEQ ID NO: 599649 - RNA, 19 nt, Artificial Sequence
  Description of Artificial Sequence: Synthetic oligonucleotide
cacggacaaugcgggugau

SEQ ID NO: 599650 - RNA, 19 nt, Artificial Sequence
  Description of Artificial Sequence: Synthetic oligonucleotide
cgucuggcauacacaucau

SEQ ID NO: 599651 - RNA, 19 nt, Artificial Sequence
  Description of Artificial Sequence: Synthetic oligonucleotide
ugugauaaaauacauacac

SEQ ID NO: 599652 - RNA, 19 nt, Artificial Sequence
  Description of Artificial Sequence: Synthetic oligonucleotide
auuauuaucaauugcgggg

SEQ ID NO: 599653 - RNA, 19 nt, Artificial Sequence
  Description of Artificial Sequence: Synthetic oligonucleotide
uguuauaacaaguaauggg

SEQ ID NO: 599654 - RNA, 19 nt, Artificial Sequence
  Description of Artificial Sequence: Synthetic oligonucleotide
auguaaagcagucauacac

SEQ ID NO: 599655 - RNA, 19 nt, Artificial Sequence
  Description of Artificial Sequence: Synthetic oligonucleotide
uuagguaacacuaauggac

SEQ ID NO: 599656 - RNA, 19 nt, Artificial Sequence
  Description of Artificial Sequence: Synthetic oligonucleotide
gaauacauaacuuggagac

SEQ ID NO: 599657 - RNA, 19 nt, Artificial Sequence
  Description of Artificial Sequence: Synthetic oligonucleotide
uguaaguuaaccaauguuc

SEQ ID NO: 599658 - RNA, 19 nt, Artificial Sequence
  Description of Artificial Sequence: Synthetic oligonucleotide
ugcauaaggacucauaugu

SEQ ID NO: 599659 - RNA, 19 nt, Artificial Sequence
  Description of Artificial Sequence: Synthetic oligonucleotide
cauuagguaacacuaaugg

SEQ ID NO: 599660 - RNA, 19 nt, Artificial Sequence
  Description of Artificial Sequence: Synthetic oligonucleotide
uacaccauuaucauuaaca

SEQ ID NO: 599661 - RNA, 19 nt, Artificial Sequence
  Description of Artificial Sequence: Synthetic oligonucleotide
uuuaguuagagcacuaugu

SEQ ID NO: 599662 - RNA, 19 nt, Artificial Sequence
  Description of Artificial Sequence: Synthetic oligonucleotide
aacacuaauggacacaggu

SEQ ID NO: 599663 - RNA, 19 nt, Artificial Sequence
  Description of Artificial Sequence: Synthetic oligonucleotide
uaauuuacaaauaacccaa

SEQ ID NO: 599664 - RNA, 19 nt, Artificial Sequence
  Description of Artificial Sequence: Synthetic oligonucleotide
ucauuauuaucaauugcgg

SEQ ID NO: 599665 - RNA, 19 nt, Artificial Sequence
  Description of Artificial Sequence: Synthetic oligonucleotide
uuugaaacgagcuccauga

SEQ ID NO: 599666 - RNA, 19 nt, Artificial Sequence
  Description of Artificial Sequence: Synthetic oligonucleotide
uuugucaaaaccucuaaug

SEQ ID NO: 599667 - RNA, 19 nt, Artificial Sequence
  Description of Artificial Sequence: Synthetic oligonucleotide
aucauuaacacccauguga

SEQ ID NO: 599668 - RNA, 19 nt, Artificial Sequence
  Description of Artificial Sequence: Synthetic oligonucleotide
uuaucuauuugugaaaucc

SEQ ID NO: 599669 - RNA, 19 nt, Artificial Sequence
  Description of Artificial Sequence: Synthetic oligonucleotide
uguaauuaucgcaugaagu

SEQ ID NO: 599670 - RNA, 19 nt, Artificial Sequence
  Description of Artificial Sequence: Synthetic oligonucleotide
ucuucuauguuauaacaag

SEQ ID NO: 599671 - RNA, 19 nt, Artificial Sequence
  Description of Artificial Sequence: Synthetic oligonucleotide
acuacuauguaauauuaug

SEQ ID NO: 599672 - RNA, 19 nt, Artificial Sequence
  Description of Artificial Sequence: Synthetic oligonucleotide
aauagaaguauguaauaaa

SEQ ID NO: 599673 - RNA, 19 nt, Artificial Sequence
  Description of Artificial Sequence: Synthetic oligonucleotide
acaccauuaucauuaacac

SEQ ID NO: 599674 - RNA, 19 nt, Artificial Sequence
  Description of Artificial Sequence: Synthetic oligonucleotide
ucuauugugaugucuuuag

SEQ ID NO: 599675 - RNA, 19 nt, Artificial Sequence
  Description of Artificial Sequence: Synthetic oligonucleotide
ucaucuugaaguaaugagu

SEQ ID NO: 599676 - RNA, 19 nt, Artificial Sequence
  Description of Artificial Sequence: Synthetic oligonucleotide
aaagccuaagcauacuacu

SEQ ID NO: 599677 - RNA, 19 nt, Artificial Sequence
  Description of Artificial Sequence: Synthetic oligonucleotide
aaguacauuagguaacacu

SEQ ID NO: 599678 - RNA, 19 nt, Artificial Sequence
  Description of Artificial Sequence: Synthetic oligonucleotide
aaggacucauauguaaagc

SEQ ID NO: 599679 - RNA, 19 nt, Artificial Sequence
  Description of Artificial Sequence: Synthetic oligonucleotide
cauauugcgcaaaaugagg

SEQ ID NO: 599680 - RNA, 19 nt, Artificial Sequence
  Description of Artificial Sequence: Synthetic oligonucleotide
ucauauguaaagcagucau

SEQ ID NO: 599681 - RNA, 19 nt, Artificial Sequence
  Description of Artificial Sequence: Synthetic oligonucleotide
aaggccaguagauguagac

SEQ ID NO: 599682 - RNA, 19 nt, Artificial Sequence
  Description of Artificial Sequence: Synthetic oligonucleotide
aaauccaacaaauggcuaa

SEQ ID NO: 599683 - RNA, 19 nt, Artificial Sequence
  Description of Artificial Sequence: Synthetic oligonucleotide
augaauacauaacuuggag

SEQ ID NO: 599684 - RNA, 19 nt, Artificial Sequence
  Description of Artificial Sequence: Synthetic oligonucleotide
uccuauuaaaauuugguuu

SEQ ID NO: 599685 - RNA, 19 nt, Artificial Sequence
  Description of Artificial Sequence: Synthetic oligonucleotide
acauaguaaagccuaagca

SEQ ID NO: 599686 - RNA, 19 nt, Artificial Sequence
  Description of Artificial Sequence: Synthetic oligonucleotide
ugaauacauaacuuggaga

SEQ ID NO: 599687 - RNA, 19 nt, Artificial Sequence
  Description of Artificial Sequence: Synthetic oligonucleotide
ucuugaauguaauuaucgc

SEQ ID NO: 599688 - RNA, 19 nt, Artificial Sequence
  Description of Artificial Sequence: Synthetic oligonucleotide
ugcagaucaaucaucaguc

SEQ ID NO: 599689 - RNA, 19 nt, Artificial Sequence
  Description of Artificial Sequence: Synthetic oligonucleotide
auuaccuuuggugaagugg

SEQ ID NO: 599690 - RNA, 19 nt, Artificial Sequence
  Description of Artificial Sequence: Synthetic oligonucleotide
cacuaauggacacagguag

SEQ ID NO: 599691 - RNA, 19 nt, Artificial Sequence
  Description of Artificial Sequence: Synthetic oligonucleotide
aagaucagaagguaguuuu

SEQ ID NO: 599692 - RNA, 19 nt, Artificial Sequence
  Description of Artificial Sequence: Synthetic oligonucleotide
agauguagacaacaccugg

SEQ ID NO: 599693 - RNA, 19 nt, Artificial Sequence
  Description of Artificial Sequence: Synthetic oligonucleotide
gcuaauacauaguaaagcc

SEQ ID NO: 599694 - RNA, 19 nt, Artificial Sequence
  Description of Artificial Sequence: Synthetic oligonucleotide
agagucgucaaucugacaa

SEQ ID NO: 599695 - RNA, 19 nt, Artificial Sequence
  Description of Artificial Sequence: Synthetic oligonucleotide
uaaugagucauccaccaaa

SEQ ID NO: 599696 - RNA, 19 nt, Artificial Sequence
  Description of Artificial Sequence: Synthetic oligonucleotide
uugcaaauuggauaagggc

SEQ ID NO: 599697 - RNA, 19 nt, Artificial Sequence
  Description of Artificial Sequence: Synthetic oligonucleotide
aaauggcuaauacauagua

SEQ ID NO: 599698 - RNA, 19 nt, Artificial Sequence
  Description of Artificial Sequence: Synthetic oligonucleotide
aauguccccauauugcgca

SEQ ID NO: 599699 - RNA, 19 nt, Artificial Sequence
  Description of Artificial Sequence: Synthetic oligonucleotide
guagaguucuagcauaugc

SEQ ID NO: 599700 - RNA, 19 nt, Artificial Sequence
  Description of Artificial Sequence: Synthetic oligonucleotide
uacuauguaauauuaugaa

SEQ ID NO: 599701 - RNA, 19 nt, Artificial Sequence
  Description of Artificial Sequence: Synthetic oligonucleotide
uuguuuacugaaauaaaau

SEQ ID NO: 599702 - RNA, 19 nt, Artificial Sequence
  Description of Artificial Sequence: Synthetic oligonucleotide
uaucgcaugaagugaagag

SEQ ID NO: 599703 - RNA, 19 nt, Artificial Sequence
  Description of Artificial Sequence: Synthetic oligonucleotide
uuauuaucaauugcggggc

SEQ ID NO: 599704 - RNA, 19 nt, Artificial Sequence
  Description of Artificial Sequence: Synthetic oligonucleotide
aagugaagagucgucaauc

SEQ ID NO: 599705 - RNA, 19 nt, Artificial Sequence
  Description of Artificial Sequence: Synthetic oligonucleotide
uuguccuauuaaaauuugg

SEQ ID NO: 599706 - RNA, 19 nt, Artificial Sequence
  Description of Artificial Sequence: Synthetic oligonucleotide
caucaaucuuucaaaauac

SEQ ID NO: 599707 - RNA, 19 nt, Artificial Sequence
  Description of Artificial Sequence: Synthetic oligonucleotide
ggagacuuuaguuagagca

SEQ ID NO: 599708 - RNA, 19 nt, Artificial Sequence
  Description of Artificial Sequence: Synthetic oligonucleotide
uucguauguugcaaauugg

SEQ ID NO: 599709 - RNA, 19 nt, Artificial Sequence
  Description of Artificial Sequence: Synthetic oligonucleotide
uuaguuagagcacuauguc

SEQ ID NO: 599710 - RNA, 19 nt, Artificial Sequence
  Description of Artificial Sequence: Synthetic oligonucleotide
uagguaacacuaauggaca

SEQ ID NO: 599711 - RNA, 19 nt, Artificial Sequence
  Description of Artificial Sequence: Synthetic oligonucleotide
ugaacuaacggcuguauua

SEQ ID NO: 599712 - RNA, 19 nt, Artificial Sequence
  Description of Artificial Sequence: Synthetic oligonucleotide
uuuaagagaccauuccacu

SEQ ID NO: 599713 - RNA, 19 nt, Artificial Sequence
  Description of Artificial Sequence: Synthetic oligonucleotide
aacuaacggcuguauuacc

SEQ ID NO: 599714 - RNA, 19 nt, Artificial Sequence
  Description of Artificial Sequence: Synthetic oligonucleotide
uuagcauccagaugcauaa

SEQ ID NO: 599715 - RNA, 19 nt, Artificial Sequence
  Description of Artificial Sequence: Synthetic oligonucleotide
cuucguauguugcaaauug

SEQ ID NO: 599716 - RNA, 19 nt, Artificial Sequence
  Description of Artificial Sequence: Synthetic oligonucleotide
gucuugaauguaauuaucg

SEQ ID NO: 599717 - RNA, 19 nt, Artificial Sequence
  Description of Artificial Sequence: Synthetic oligonucleotide
guuauaggcgaccuguaag

SEQ ID NO: 599718 - RNA, 19 nt, Artificial Sequence
  Description of Artificial Sequence: Synthetic oligonucleotide
uuauaacaaguaauggguc

SEQ ID NO: 599719 - RNA, 19 nt, Artificial Sequence
  Description of Artificial Sequence: Synthetic oligonucleotide
aguaaugagucauccacca

SEQ ID NO: 599720 - RNA, 19 nt, Artificial Sequence
  Description of Artificial Sequence: Synthetic oligonucleotide
ucggugauccaccacagca

SEQ ID NO: 599721 - RNA, 19 nt, Artificial Sequence
  Description of Artificial Sequence: Synthetic oligonucleotide
uaaugggucauaaguauuc

SEQ ID NO: 599722 - RNA, 19 nt, Artificial Sequence
  Description of Artificial Sequence: Synthetic oligonucleotide
cuuaaugaagcgguuauug

SEQ ID NO: 599723 - RNA, 19 nt, Artificial Sequence
  Description of Artificial Sequence: Synthetic oligonucleotide
uguauacuuucuccuaagc

SEQ ID NO: 599724 - RNA, 19 nt, Artificial Sequence
  Description of Artificial Sequence: Synthetic oligonucleotide
uucuauguuauaacaagua

SEQ ID NO: 599725 - RNA, 19 nt, Artificial Sequence
  Description of Artificial Sequence: Synthetic oligonucleotide
uucuccuaagcucagugac

SEQ ID NO: 599726 - RNA, 19 nt, Artificial Sequence
  Description of Artificial Sequence: Synthetic oligonucleotide
uuauaggcgaccuguaagu

SEQ ID NO: 599727 - RNA, 19 nt, Artificial Sequence
  Description of Artificial Sequence: Synthetic oligonucleotide
uaaagccuaagcauacuac

SEQ ID NO: 599728 - RNA, 19 nt, Artificial Sequence
  Description of Artificial Sequence: Synthetic oligonucleotide
ucauuaacacccaugugau

SEQ ID NO: 599729 - RNA, 19 nt, Artificial Sequence
  Description of Artificial Sequence: Synthetic oligonucleotide
agcauccagaugcauaagg

SEQ ID NO: 599730 - RNA, 19 nt, Artificial Sequence
  Description of Artificial Sequence: Synthetic oligonucleotide
uuaaugaagcgguuauuga

SEQ ID NO: 599731 - RNA, 19 nt, Artificial Sequence
  Description of Artificial Sequence: Synthetic oligonucleotide
auauugcgcaaaaugaggg

SEQ ID NO: 599732 - RNA, 19 nt, Artificial Sequence
  Description of Artificial Sequence: Synthetic oligonucleotide
aguaaugggucauaaguau

SEQ ID NO: 599733 - RNA, 19 nt, Artificial Sequence
  Description of Artificial Sequence: Synthetic oligonucleotide
ucguauguugcaaauugga

SEQ ID NO: 599734 - RNA, 19 nt, Artificial Sequence
  Description of Artificial Sequence: Synthetic oligonucleotide
gaagacagcguccaggaga

SEQ ID NO: 599735 - RNA, 19 nt, Artificial Sequence
  Description of Artificial Sequence: Synthetic oligonucleotide
uggcuaauacauaguaaag

SEQ ID NO: 599736 - RNA, 19 nt, Artificial Sequence
  Description of Artificial Sequence: Synthetic oligonucleotide
auuagguaacacuaaugga

SEQ ID NO: 599737 - RNA, 19 nt, Artificial Sequence
  Description of Artificial Sequence: Synthetic oligonucleotide
acuauguaauauuaugaau

SEQ ID NO: 599738 - RNA, 19 nt, Artificial Sequence
  Description of Artificial Sequence: Synthetic oligonucleotide
acacagguagaguucuagc

SEQ ID NO: 599739 - RNA, 19 nt, Artificial Sequence
  Description of Artificial Sequence: Synthetic oligonucleotide
cuacuauguaauauuauga

SEQ ID NO: 599740 - RNA, 19 nt, Artificial Sequence
  Description of Artificial Sequence: Synthetic oligonucleotide
uugaaguaaugagucaucc

SEQ ID NO: 599741 - RNA, 19 nt, Artificial Sequence
  Description of Artificial Sequence: Synthetic oligonucleotide
ugaauacugcuucuguacu

SEQ ID NO: 599742 - RNA, 19 nt, Artificial Sequence
  Description of Artificial Sequence: Synthetic oligonucleotide
aacuauuugucuaugguuu

SEQ ID NO: 599743 - RNA, 19 nt, Artificial Sequence
  Description of Artificial Sequence: Synthetic oligonucleotide
uaguuagagcacuauguca

SEQ ID NO: 599744 - RNA, 19 nt, Artificial Sequence
  Description of Artificial Sequence: Synthetic oligonucleotide
cacaacagguaaaaugggc

SEQ ID NO: 599745 - RNA, 19 nt, Artificial Sequence
  Description of Artificial Sequence: Synthetic oligonucleotide
aacgagcuccaugaauugc

SEQ ID NO: 599746 - RNA, 19 nt, Artificial Sequence
  Description of Artificial Sequence: Synthetic oligonucleotide
ucuauucauuaauuuacaa

SEQ ID NO: 599747 - RNA, 19 nt, Artificial Sequence
  Description of Artificial Sequence: Synthetic oligonucleotide
ugaauguaauuaucgcaug

SEQ ID NO: 599748 - RNA, 19 nt, Artificial Sequence
  Description of Artificial Sequence: Synthetic oligonucleotide
uaauuaucgcaugaaguga

SEQ ID NO: 599749 - RNA, 19 nt, Artificial Sequence
  Description of Artificial Sequence: Synthetic oligonucleotide
aguacauuagguaacacua

SEQ ID NO: 599750 - RNA, 19 nt, Artificial Sequence
  Description of Artificial Sequence: Synthetic oligonucleotide
ggggcuagaaacuagcaag

SEQ ID NO: 599751 - RNA, 19 nt, Artificial Sequence
  Description of Artificial Sequence: Synthetic oligonucleotide
aggaacuauuugucuaugg

SEQ ID NO: 599752 - RNA, 19 nt, Artificial Sequence
  Description of Artificial Sequence: Synthetic oligonucleotide
ucgcaugaagugaagaguc

SEQ ID NO: 599753 - RNA, 19 nt, Artificial Sequence
  Description of Artificial Sequence: Synthetic oligonucleotide
cuuuaguuagagcacuaug

SEQ ID NO: 599754 - RNA, 19 nt, Artificial Sequence
  Description of Artificial Sequence: Synthetic oligonucleotide
guuauaacaaguaaugggu

SEQ ID NO: 599755 - RNA, 19 nt, Artificial Sequence
  Description of Artificial Sequence: Synthetic oligonucleotide
ucgucaaucugacaauccu

SEQ ID NO: 599756 - RNA, 19 nt, Artificial Sequence
  Description of Artificial Sequence: Synthetic oligonucleotide
uguagacaacaccugggga

SEQ ID NO: 599757 - RNA, 19 nt, Artificial Sequence
  Description of Artificial Sequence: Synthetic oligonucleotide
aaacgagcuccaugaauug

SEQ ID NO: 599758 - RNA, 19 nt, Artificial Sequence
  Description of Artificial Sequence: Synthetic oligonucleotide
ccaagaacgagauucagug

SEQ ID NO: 599759 - RNA, 19 nt, Artificial Sequence
  Description of Artificial Sequence: Synthetic oligonucleotide
accucgaccucuugcaugg

SEQ ID NO: 599760 - RNA, 19 nt, Artificial Sequence
  Description of Artificial Sequence: Synthetic oligonucleotide
ugaaguaaugagucaucca

SEQ ID NO: 599761 - RNA, 19 nt, Artificial Sequence
  Description of Artificial Sequence: Synthetic oligonucleotide
caugaauugcagcagcuuc

SEQ ID NO: 599762 - RNA, 19 nt, Artificial Sequence
  Description of Artificial Sequence: Synthetic oligonucleotide
aaugaagcgguuauugaau

SEQ ID NO: 599763 - RNA, 19 nt, Artificial Sequence
  Description of Artificial Sequence: Synthetic oligonucleotide
gauuccucuaccucggcca

SEQ ID NO: 599764 - RNA, 19 nt, Artificial Sequence
  Description of Artificial Sequence: Synthetic oligonucleotide
aauguucaauagaaguaug

SEQ ID NO: 599765 - RNA, 19 nt, Artificial Sequence
  Description of Artificial Sequence: Synthetic oligonucleotide
uuaucaauugcggggcuag

SEQ ID NO: 599766 - RNA, 19 nt, Artificial Sequence
  Description of Artificial Sequence: Synthetic oligonucleotide
ggcuguauuaccuuuggug

SEQ ID NO: 599767 - RNA, 19 nt, Artificial Sequence
  Description of Artificial Sequence: Synthetic oligonucleotide
auuguuuacugaaauaaaa

SEQ ID NO: 599768 - RNA, 19 nt, Artificial Sequence
  Description of Artificial Sequence: Synthetic oligonucleotide
uuaucaaaccacgucuucu

SEQ ID NO: 599769 - RNA, 19 nt, Artificial Sequence
  Description of Artificial Sequence: Synthetic oligonucleotide
aauuaucgcaugaagugaa

SEQ ID NO: 599770 - RNA, 19 nt, Artificial Sequence
  Description of Artificial Sequence: Synthetic oligonucleotide
uaggcgaccuguaaguuaa

SEQ ID NO: 599771 - RNA, 19 nt, Artificial Sequence
  Description of Artificial Sequence: Synthetic oligonucleotide
agaccauuccacuuuauuu

SEQ ID NO: 599772 - RNA, 19 nt, Artificial Sequence
  Description of Artificial Sequence: Synthetic oligonucleotide
acaaguaaugggucauaag

SEQ ID NO: 599773 - RNA, 19 nt, Artificial Sequence
  Description of Artificial Sequence: Synthetic oligonucleotide
uggauaagggcaccuucag

SEQ ID NO: 599774 - RNA, 19 nt, Artificial Sequence
  Description of Artificial Sequence: Synthetic oligonucleotide
ugaaacgagcuccaugaau

SEQ ID NO: 599775 - RNA, 19 nt, Artificial Sequence
  Description of Artificial Sequence: Synthetic oligonucleotide
uucauuccuuauuuggagu

SEQ ID NO: 599776 - RNA, 19 nt, Artificial Sequence
  Description of Artificial Sequence: Synthetic oligonucleotide
ugucgcucucuguaaaugc

SEQ ID NO: 599777 - RNA, 19 nt, Artificial Sequence
  Description of Artificial Sequence: Synthetic oligonucleotide
uauguaaagcagucauaca

SEQ ID NO: 599778 - RNA, 19 nt, Artificial Sequence
  Description of Artificial Sequence: Synthetic oligonucleotide
accaauguucccaaucgac

SEQ ID NO: 599779 - RNA, 19 nt, Artificial Sequence
  Description of Artificial Sequence: Synthetic oligonucleotide
agaacgagauucagugucc

SEQ ID NO: 599780 - RNA, 19 nt, Artificial Sequence
  Description of Artificial Sequence: Synthetic oligonucleotide
aacgagauucaguguccuc

SEQ ID NO: 599781 - RNA, 19 nt, Artificial Sequence
  Description of Artificial Sequence: Synthetic oligonucleotide
caaguaaugggucauaagu

SEQ ID NO: 599782 - RNA, 19 nt, Artificial Sequence
  Description of Artificial Sequence: Synthetic oligonucleotide
caauugcggggcuagaaac

SEQ ID NO: 599783 - RNA, 19 nt, Artificial Sequence
  Description of Artificial Sequence: Synthetic oligonucleotide
ugaaguuucagugccuccu

SEQ ID NO: 599784 - RNA, 19 nt, Artificial Sequence
  Description of Artificial Sequence: Synthetic oligonucleotide
uauugcgcaaaaugaggga

SEQ ID NO: 599785 - RNA, 19 nt, Artificial Sequence
  Description of Artificial Sequence: Synthetic oligonucleotide
ucaauugcggggcuagaaa

SEQ ID NO: 599786 - RNA, 19 nt, Artificial Sequence
  Description of Artificial Sequence: Synthetic oligonucleotide
uuuaucuauuugugaaauc

SEQ ID NO: 599787 - RNA, 19 nt, Artificial Sequence
  Description of Artificial Sequence: Synthetic oligonucleotide
uugaccgacuguuucacaa

SEQ ID NO: 599788 - RNA, 19 nt, Artificial Sequence
  Description of Artificial Sequence: Synthetic oligonucleotide
ggagauguagcuuugaccu

SEQ ID NO: 599789 - RNA, 19 nt, Artificial Sequence
  Description of Artificial Sequence: Synthetic oligonucleotide
aguuagagcacuaugucau

SEQ ID NO: 599790 - RNA, 19 nt, Artificial Sequence
  Description of Artificial Sequence: Synthetic oligonucleotide
gaacuaacggcuguauuac

SEQ ID NO: 599791 - RNA, 19 nt, Artificial Sequence
  Description of Artificial Sequence: Synthetic oligonucleotide
caacagguaaaaugggcug

SEQ ID NO: 599792 - RNA, 19 nt, Artificial Sequence
  Description of Artificial Sequence: Synthetic oligonucleotide
uuaagagaccauuccacuu

SEQ ID NO: 599793 - RNA, 19 nt, Artificial Sequence
  Description of Artificial Sequence: Synthetic oligonucleotide
guagacaacaccuggggaa

SEQ ID NO: 599794 - RNA, 19 nt, Artificial Sequence
  Description of Artificial Sequence: Synthetic oligonucleotide
gaugcauaaggacucauau

SEQ ID NO: 599795 - RNA, 19 nt, Artificial Sequence
  Description of Artificial Sequence: Synthetic oligonucleotide
cauuaagauuuuaaaugca

SEQ ID NO: 599796 - RNA, 19 nt, Artificial Sequence
  Description of Artificial Sequence: Synthetic oligonucleotide
uacuacuauguaauauuau

SEQ ID NO: 599797 - RNA, 19 nt, Artificial Sequence
  Description of Artificial Sequence: Synthetic oligonucleotide
aaccuggacuguuuguccu

SEQ ID NO: 599798 - RNA, 19 nt, Artificial Sequence
  Description of Artificial Sequence: Synthetic oligonucleotide
aaccaauguucccaaucga

SEQ ID NO: 599799 - RNA, 19 nt, Artificial Sequence
  Description of Artificial Sequence: Synthetic oligonucleotide
acuauuaaguuugcugaug

SEQ ID NO: 599800 - RNA, 19 nt, Artificial Sequence
  Description of Artificial Sequence: Synthetic oligonucleotide
aaguaaugggucauaagua

SEQ ID NO: 599801 - RNA, 19 nt, Artificial Sequence
  Description of Artificial Sequence: Synthetic oligonucleotide
cauaaggacucauauguaa

SEQ ID NO: 599802 - RNA, 19 nt, Artificial Sequence
  Description of Artificial Sequence: Synthetic oligonucleotide
uuucuccuaagcucaguga

SEQ ID NO: 599803 - RNA, 19 nt, Artificial Sequence
  Description of Artificial Sequence: Synthetic oligonucleotide
augcauaaggacucauaug

SEQ ID NO: 599804 - RNA, 19 nt, Artificial Sequence
  Description of Artificial Sequence: Synthetic oligonucleotide
uucugcguuucaaugugcu

SEQ ID NO: 599805 - RNA, 19 nt, Artificial Sequence
  Description of Artificial Sequence: Synthetic oligonucleotide
ggcuaauacauaguaaagc

SEQ ID NO: 599806 - RNA, 19 nt, Artificial Sequence
  Description of Artificial Sequence: Synthetic oligonucleotide
uagacaacaccuggggaag

SEQ ID NO: 599807 - RNA, 19 nt, Artificial Sequence
  Description of Artificial Sequence: Synthetic oligonucleotide
uaacacuaauggacacagg

SEQ ID NO: 599808 - RNA, 19 nt, Artificial Sequence
  Description of Artificial Sequence: Synthetic oligonucleotide
cuauugugaugucuuuagc

SEQ ID NO: 599809 - RNA, 19 nt, Artificial Sequence
  Description of Artificial Sequence: Synthetic oligonucleotide
uaccucggccagaugaaag

SEQ ID NO: 599810 - RNA, 19 nt, Artificial Sequence
  Description of Artificial Sequence: Synthetic oligonucleotide
gagacuuuaguuagagcac

SEQ ID NO: 599811 - RNA, 19 nt, Artificial Sequence
  Description of Artificial Sequence: Synthetic oligonucleotide
uuaucgcaugaagugaaga

SEQ ID NO: 599812 - RNA, 19 nt, Artificial Sequence
  Description of Artificial Sequence: Synthetic oligonucleotide
gacccaaccgcucuuugac

SEQ ID NO: 599813 - RNA, 19 nt, Artificial Sequence
  Description of Artificial Sequence: Synthetic oligonucleotide
auaguaaagccuaagcaua

SEQ ID NO: 599814 - RNA, 19 nt, Artificial Sequence
  Description of Artificial Sequence: Synthetic oligonucleotide
ucuagcauaugcagaucaa

SEQ ID NO: 599815 - RNA, 19 nt, Artificial Sequence
  Description of Artificial Sequence: Synthetic oligonucleotide
uauuugugaaauccaucuu

SEQ ID NO: 599816 - RNA, 19 nt, Artificial Sequence
  Description of Artificial Sequence: Synthetic oligonucleotide
accuuaaugaagcgguuau

SEQ ID NO: 599817 - RNA, 19 nt, Artificial Sequence
  Description of Artificial Sequence: Synthetic oligonucleotide
ugcggggcuagaaacuagc

SEQ ID NO: 599818 - RNA, 19 nt, Artificial Sequence
  Description of Artificial Sequence: Synthetic oligonucleotide
aaauuggauaagggcaccu

SEQ ID NO: 599819 - RNA, 19 nt, Artificial Sequence
  Description of Artificial Sequence: Synthetic oligonucleotide
ucuccuaagcucagugacu

SEQ ID NO: 599820 - RNA, 19 nt, Artificial Sequence
  Description of Artificial Sequence: Synthetic oligonucleotide
aagcgguuauugaauacug

SEQ ID NO: 599821 - RNA, 19 nt, Artificial Sequence
  Description of Artificial Sequence: Synthetic oligonucleotide
cuauguuauaacaaguaau

SEQ ID NO: 599822 - RNA, 19 nt, Artificial Sequence
  Description of Artificial Sequence: Synthetic oligonucleotide
acggcuguauuaccuuugg

SEQ ID NO: 599823 - RNA, 19 nt, Artificial Sequence
  Description of Artificial Sequence: Synthetic oligonucleotide
acuuuccuaaguucaaguu

SEQ ID NO: 599824 - RNA, 19 nt, Artificial Sequence
  Description of Artificial Sequence: Synthetic oligonucleotide
augaagugaagagucguca

SEQ ID NO: 599825 - RNA, 19 nt, Artificial Sequence
  Description of Artificial Sequence: Synthetic oligonucleotide
accguuauaggcgaccugu

SEQ ID NO: 599826 - RNA, 19 nt, Artificial Sequence
  Description of Artificial Sequence: Synthetic oligonucleotide
ggucauaaguauucaaauc

SEQ ID NO: 599827 - RNA, 19 nt, Artificial Sequence
  Description of Artificial Sequence: Synthetic oligonucleotide
aauugcggggcuagaaacu

SEQ ID NO: 599828 - RNA, 19 nt, Artificial Sequence
  Description of Artificial Sequence: Synthetic oligonucleotide
agccuaagcauacuacuau

SEQ ID NO: 599829 - RNA, 19 nt, Artificial Sequence
  Description of Artificial Sequence: Synthetic oligonucleotide
aucgcaugaagugaagagu

SEQ ID NO: 599830 - RNA, 19 nt, Artificial Sequence
  Description of Artificial Sequence: Synthetic oligonucleotide
acuaacggcuguauuaccu

SEQ ID NO: 599831 - RNA, 19 nt, Artificial Sequence
  Description of Artificial Sequence: Synthetic oligonucleotide
ucuaccucggccagaugaa

SEQ ID NO: 599832 - RNA, 19 nt, Artificial Sequence
  Description of Artificial Sequence: Synthetic oligonucleotide
gaagagucgucaaucugac

SEQ ID NO: 599833 - RNA, 19 nt, Artificial Sequence
  Description of Artificial Sequence: Synthetic oligonucleotide
aaggaacuauuugucuaug

SEQ ID NO: 599834 - RNA, 19 nt, Artificial Sequence
  Description of Artificial Sequence: Synthetic oligonucleotide
agacuuuaguuagagcacu

SEQ ID NO: 599835 - RNA, 19 nt, Artificial Sequence
  Description of Artificial Sequence: Synthetic oligonucleotide
uucuucguauguugcaaau

SEQ ID NO: 599836 - RNA, 19 nt, Artificial Sequence
  Description of Artificial Sequence: Synthetic oligonucleotide
aucuauucauuaauuuaca

SEQ ID NO: 599837 - RNA, 19 nt, Artificial Sequence
  Description of Artificial Sequence: Synthetic oligonucleotide
augucuuuagcaauuguuu

SEQ ID NO: 599838 - RNA, 19 nt, Artificial Sequence
  Description of Artificial Sequence: Synthetic oligonucleotide
acuguuuguccuauuaaaa

SEQ ID NO: 599839 - RNA, 19 nt, Artificial Sequence
  Description of Artificial Sequence: Synthetic oligonucleotide
cauacuacuauguaauauu

SEQ ID NO: 599840 - RNA, 19 nt, Artificial Sequence
  Description of Artificial Sequence: Synthetic oligonucleotide
auaaggacucauauguaaa

SEQ ID NO: 599841 - RNA, 19 nt, Artificial Sequence
  Description of Artificial Sequence: Synthetic oligonucleotide
gaccgacuguuucacaaca

SEQ ID NO: 599842 - RNA, 19 nt, Artificial Sequence
  Description of Artificial Sequence: Synthetic oligonucleotide
guaaagccuaagcauacua

SEQ ID NO: 599843 - RNA, 19 nt, Artificial Sequence
  Description of Artificial Sequence: Synthetic oligonucleotide
ggccagaugaaagaauucc

SEQ ID NO: 599844 - RNA, 19 nt, Artificial Sequence
  Description of Artificial Sequence: Synthetic oligonucleotide
aaccuuaaugaagcgguua

SEQ ID NO: 599845 - RNA, 19 nt, Artificial Sequence
  Description of Artificial Sequence: Synthetic oligonucleotide
augaagcgguuauugaaua

SEQ ID NO: 599846 - RNA, 19 nt, Artificial Sequence
  Description of Artificial Sequence: Synthetic oligonucleotide
ugaccgacuguuucacaac

SEQ ID NO: 599847 - RNA, 19 nt, Artificial Sequence
  Description of Artificial Sequence: Synthetic oligonucleotide
ccuaaguucaaguuuagua

SEQ ID NO: 599848 - RNA, 19 nt, Artificial Sequence
  Description of Artificial Sequence: Synthetic oligonucleotide
agagaucuccaaugcucug

SEQ ID NO: 599849 - RNA, 19 nt, Artificial Sequence
  Description of Artificial Sequence: Synthetic oligonucleotide
auacuacuauguaauauua

SEQ ID NO: 599850 - RNA, 19 nt, Artificial Sequence
  Description of Artificial Sequence: Synthetic oligonucleotide
accuguaaguuaaccaaug

SEQ ID NO: 599851 - RNA, 19 nt, Artificial Sequence
  Description of Artificial Sequence: Synthetic oligonucleotide
cuuugaccgacuguuucac

SEQ ID NO: 599852 - RNA, 19 nt, Artificial Sequence
  Description of Artificial Sequence: Synthetic oligonucleotide
aagagucgucaaucugaca

SEQ ID NO: 599853 - RNA, 19 nt, Artificial Sequence
  Description of Artificial Sequence: Synthetic oligonucleotide
cucuguaaaugcagagauc

SEQ ID NO: 599854 - RNA, 19 nt, Artificial Sequence
  Description of Artificial Sequence: Synthetic oligonucleotide
caauguucccaaucgacua

SEQ ID NO: 599855 - RNA, 19 nt, Artificial Sequence
  Description of Artificial Sequence: Synthetic oligonucleotide
cagcuguaauucuguauac

SEQ ID NO: 599856 - RNA, 19 nt, Artificial Sequence
  Description of Artificial Sequence: Synthetic oligonucleotide
ucgaccucuugcauggauu

SEQ ID NO: 599857 - RNA, 19 nt, Artificial Sequence
  Description of Artificial Sequence: Synthetic oligonucleotide
uaauggacacagguagagu

SEQ ID NO: 599858 - RNA, 19 nt, Artificial Sequence
  Description of Artificial Sequence: Synthetic oligonucleotide
uuugaccgacuguuucaca

SEQ ID NO: 599859 - RNA, 19 nt, Artificial Sequence
  Description of Artificial Sequence: Synthetic oligonucleotide
auaggcgaccuguaaguua

SEQ ID NO: 599860 - RNA, 19 nt, Artificial Sequence
  Description of Artificial Sequence: Synthetic oligonucleotide
auuaucgcaugaagugaag

SEQ ID NO: 599861 - RNA, 19 nt, Artificial Sequence
  Description of Artificial Sequence: Synthetic oligonucleotide
uugaaacgagcuccaugaa

SEQ ID NO: 599862 - RNA, 19 nt, Artificial Sequence
  Description of Artificial Sequence: Synthetic oligonucleotide
uugcggggcuagaaacuag

SEQ ID NO: 599863 - RNA, 19 nt, Artificial Sequence
  Description of Artificial Sequence: Synthetic oligonucleotide
aagccuaagcauacuacua

SEQ ID NO: 599864 - RNA, 19 nt, Artificial Sequence
  Description of Artificial Sequence: Synthetic oligonucleotide
agauauugguuuauuccau

SEQ ID NO: 599865 - RNA, 19 nt, Artificial Sequence
  Description of Artificial Sequence: Synthetic oligonucleotide
agcuguaauucuguauacu

SEQ ID NO: 599866 - RNA, 19 nt, Artificial Sequence
  Description of Artificial Sequence: Synthetic oligonucleotide
gggcuagaaacuagcaagg

SEQ ID NO: 599867 - RNA, 19 nt, Artificial Sequence
  Description of Artificial Sequence: Synthetic oligonucleotide
cacagcugaaauauuagau

SEQ ID NO: 599868 - RNA, 19 nt, Artificial Sequence
  Description of Artificial Sequence: Synthetic oligonucleotide
cauaaguauucaaaucuau

SEQ ID NO: 599869 - RNA, 19 nt, Artificial Sequence
  Description of Artificial Sequence: Synthetic oligonucleotide
ucugucgcucucuguaaau

SEQ ID NO: 599870 - RNA, 19 nt, Artificial Sequence
  Description of Artificial Sequence: Synthetic oligonucleotide
cccaaccgcucuuugaccg

SEQ ID NO: 599871 - RNA, 19 nt, Artificial Sequence
  Description of Artificial Sequence: Synthetic oligonucleotide
aguaaagccuaagcauacu

SEQ ID NO: 599872 - RNA, 19 nt, Artificial Sequence
  Description of Artificial Sequence: Synthetic oligonucleotide
ucucugucgcucucuguaa

SEQ ID NO: 599873 - RNA, 19 nt, Artificial Sequence
  Description of Artificial Sequence: Synthetic oligonucleotide
gucgucaaucugacaaucc

SEQ ID NO: 599874 - RNA, 19 nt, Artificial Sequence
  Description of Artificial Sequence: Synthetic oligonucleotide
ucaccguuauaggcgaccu

SEQ ID NO: 599875 - RNA, 19 nt, Artificial Sequence
  Description of Artificial Sequence: Synthetic oligonucleotide
aacacccaugugauaaaau

SEQ ID NO: 599876 - RNA, 19 nt, Artificial Sequence
  Description of Artificial Sequence: Synthetic oligonucleotide
accgcucuuugaccgacug

SEQ ID NO: 599877 - RNA, 19 nt, Artificial Sequence
  Description of Artificial Sequence: Synthetic oligonucleotide
ucuucguauguugcaaauu

SEQ ID NO: 599878 - RNA, 19 nt, Artificial Sequence
  Description of Artificial Sequence: Synthetic oligonucleotide
acuuuaguuagagcacuau

SEQ ID NO: 599879 - RNA, 19 nt, Artificial Sequence
  Description of Artificial Sequence: Synthetic oligonucleotide
guccuauuaaaauuugguu

SEQ ID NO: 599880 - RNA, 19 nt, Artificial Sequence
  Description of Artificial Sequence: Synthetic oligonucleotide
agcauacuacuauguaaua

SEQ ID NO: 599881 - RNA, 19 nt, Artificial Sequence
  Description of Artificial Sequence: Synthetic oligonucleotide
ggaacuauuugucuauggu

SEQ ID NO: 599882 - RNA, 19 nt, Artificial Sequence
  Description of Artificial Sequence: Synthetic oligonucleotide
gucaaaaccucuaauguuu

SEQ ID NO: 599883 - RNA, 19 nt, Artificial Sequence
  Description of Artificial Sequence: Synthetic oligonucleotide
agcguccaggagauguagc

SEQ ID NO: 599884 - RNA, 19 nt, Artificial Sequence
  Description of Artificial Sequence: Synthetic oligonucleotide
ccgacuguuucacaacagg

SEQ ID NO: 599885 - RNA, 19 nt, Artificial Sequence
  Description of Artificial Sequence: Synthetic oligonucleotide
gccuaagcauacuacuaug

SEQ ID NO: 599886 - RNA, 19 nt, Artificial Sequence
  Description of Artificial Sequence: Synthetic oligonucleotide
acaagaucagaagguaguu

SEQ ID NO: 599887 - RNA, 19 nt, Artificial Sequence
  Description of Artificial Sequence: Synthetic oligonucleotide
caccucgaccucuugcaug

SEQ ID NO: 599888 - RNA, 19 nt, Artificial Sequence
  Description of Artificial Sequence: Synthetic oligonucleotide
augggcugcugaacuaacg

SEQ ID NO: 599889 - RNA, 19 nt, Artificial Sequence
  Description of Artificial Sequence: Synthetic oligonucleotide
gucaccguuauaggcgacc

SEQ ID NO: 599890 - RNA, 19 nt, Artificial Sequence
  Description of Artificial Sequence: Synthetic oligonucleotide
caaagacucuuccugaaau

SEQ ID NO: 599891 - RNA, 19 nt, Artificial Sequence
  Description of Artificial Sequence: Synthetic oligonucleotide
aucaauugcggggcuagaa

SEQ ID NO: 599892 - RNA, 19 nt, Artificial Sequence
  Description of Artificial Sequence: Synthetic oligonucleotide
uauaggcgaccuguaaguu

SEQ ID NO: 599893 - RNA, 19 nt, Artificial Sequence
  Description of Artificial Sequence: Synthetic oligonucleotide
uaacaaguaaugggucaua

SEQ ID NO: 599894 - RNA, 19 nt, Artificial Sequence
  Description of Artificial Sequence: Synthetic oligonucleotide
cugucgcucucuguaaaug

SEQ ID NO: 599895 - RNA, 19 nt, Artificial Sequence
  Description of Artificial Sequence: Synthetic oligonucleotide
gcgaccuguaaguuaacca

SEQ ID NO: 599896 - RNA, 19 nt, Artificial Sequence
  Description of Artificial Sequence: Synthetic oligonucleotide
auuaucaauugcggggcua

SEQ ID NO: 599897 - RNA, 19 nt, Artificial Sequence
  Description of Artificial Sequence: Synthetic oligonucleotide
uccugcccuuugaaacgag

SEQ ID NO: 599898 - RNA, 19 nt, Artificial Sequence
  Description of Artificial Sequence: Synthetic oligonucleotide
guacauuagguaacacuaa

SEQ ID NO: 599899 - RNA, 19 nt, Artificial Sequence
  Description of Artificial Sequence: Synthetic oligonucleotide
caaauggcuaauacauagu

SEQ ID NO: 599900 - RNA, 19 nt, Artificial Sequence
  Description of Artificial Sequence: Synthetic oligonucleotide
gaauacugcuucuguacuu

SEQ ID NO: 599901 - RNA, 19 nt, Artificial Sequence
  Description of Artificial Sequence: Synthetic oligonucleotide
auugcggggcuagaaacua

SEQ ID NO: 599902 - RNA, 19 nt, Artificial Sequence
  Description of Artificial Sequence: Synthetic oligonucleotide
caauucugugucaagcaau

SEQ ID NO: 599903 - RNA, 19 nt, Artificial Sequence
  Description of Artificial Sequence: Synthetic oligonucleotide
cuguaaguuaaccaauguu

SEQ ID NO: 599904 - RNA, 19 nt, Artificial Sequence
  Description of Artificial Sequence: Synthetic oligonucleotide
guaaugagucauccaccaa

SEQ ID NO: 599905 - RNA, 19 nt, Artificial Sequence
  Description of Artificial Sequence: Synthetic oligonucleotide
accgacuguuucacaacag

SEQ ID NO: 599906 - RNA, 19 nt, Artificial Sequence
  Description of Artificial Sequence: Synthetic oligonucleotide
agccugcauuuucuuauau

SEQ ID NO: 599907 - RNA, 19 nt, Artificial Sequence
  Description of Artificial Sequence: Synthetic oligonucleotide
gagaccauuccacuuuauu

SEQ ID NO: 599908 - RNA, 19 nt, Artificial Sequence
  Description of Artificial Sequence: Synthetic oligonucleotide
agaugcauaaggacucaua

SEQ ID NO: 599909 - RNA, 19 nt, Artificial Sequence
  Description of Artificial Sequence: Synthetic oligonucleotide
uacuugagauugccuucuu

SEQ ID NO: 599910 - RNA, 19 nt, Artificial Sequence
  Description of Artificial Sequence: Synthetic oligonucleotide
ggccgugagccgcaccucg

SEQ ID NO: 599911 - RNA, 19 nt, Artificial Sequence
  Description of Artificial Sequence: Synthetic oligonucleotide
gagucgucaaucugacaau

SEQ ID NO: 599912 - RNA, 19 nt, Artificial Sequence
  Description of Artificial Sequence: Synthetic oligonucleotide
cgcaugaagugaagagucg

SEQ ID NO: 599913 - RNA, 19 nt, Artificial Sequence
  Description of Artificial Sequence: Synthetic oligonucleotide
gcagaucaaucaucaguca

SEQ ID NO: 599914 - RNA, 19 nt, Artificial Sequence
  Description of Artificial Sequence: Synthetic oligonucleotide
ccugcccuuugaaacgagc

SEQ ID NO: 599915 - RNA, 19 nt, Artificial Sequence
  Description of Artificial Sequence: Synthetic oligonucleotide
ggcgaccuguaaguuaacc

SEQ ID NO: 599916 - RNA, 19 nt, Artificial Sequence
  Description of Artificial Sequence: Synthetic oligonucleotide
caagaacgagauucagugu

SEQ ID NO: 599917 - RNA, 19 nt, Artificial Sequence
  Description of Artificial Sequence: Synthetic oligonucleotide
gugccugaagguacaggac

SEQ ID NO: 599918 - RNA, 19 nt, Artificial Sequence
  Description of Artificial Sequence: Synthetic oligonucleotide
caaccgcucuuugaccgac

SEQ ID NO: 599919 - RNA, 19 nt, Artificial Sequence
  Description of Artificial Sequence: Synthetic oligonucleotide
uguccccauauugcgcaaa

SEQ ID NO: 599920 - RNA, 19 nt, Artificial Sequence
  Description of Artificial Sequence: Synthetic oligonucleotide
cagguaaaaugggcugcug

SEQ ID NO: 599921 - RNA, 19 nt, Artificial Sequence
  Description of Artificial Sequence: Synthetic oligonucleotide
gguagaguucuagcauaug

SEQ ID NO: 599922 - RNA, 19 nt, Artificial Sequence
  Description of Artificial Sequence: Synthetic oligonucleotide
gaacgagauucaguguccu

SEQ ID NO: 599923 - RNA, 19 nt, Artificial Sequence
  Description of Artificial Sequence: Synthetic oligonucleotide
caccguuauaggcgaccug

SEQ ID NO: 599924 - RNA, 19 nt, Artificial Sequence
  Description of Artificial Sequence: Synthetic oligonucleotide
cauuaacacccaugugaua

SEQ ID NO: 599925 - RNA, 19 nt, Artificial Sequence
  Description of Artificial Sequence: Synthetic oligonucleotide
ggucggugauccaccacag

SEQ ID NO: 599926 - RNA, 19 nt, Artificial Sequence
  Description of Artificial Sequence: Synthetic oligonucleotide
cgaccuguaaguuaaccaa

SEQ ID NO: 599927 - RNA, 19 nt, Artificial Sequence
  Description of Artificial Sequence: Synthetic oligonucleotide
guaaugggucauaaguauu

SEQ ID NO: 599928 - RNA, 19 nt, Artificial Sequence
  Description of Artificial Sequence: Synthetic oligonucleotide
cuaacggcuguauuaccuu

SEQ ID NO: 599929 - RNA, 19 nt, Artificial Sequence
  Description of Artificial Sequence: Synthetic oligonucleotide
ugccccggccgugagccgc

SEQ ID NO: 599930 - RNA, 19 nt, Artificial Sequence
  Description of Artificial Sequence: Synthetic oligonucleotide
cucugucgcucucuguaaa

SEQ ID NO: 599931 - RNA, 19 nt, Artificial Sequence
  Description of Artificial Sequence: Synthetic oligonucleotide
ccaauguucccaaucgacu

SEQ ID NO: 599932 - RNA, 19 nt, Artificial Sequence
  Description of Artificial Sequence: Synthetic oligonucleotide
ggacccaaccgcucuuuga

SEQ ID NO: 599933 - RNA, 19 nt, Artificial Sequence
  Description of Artificial Sequence: Synthetic oligonucleotide
ccugccccggccgugagcc

SEQ ID NO: 599934 - RNA, 19 nt, Artificial Sequence
  Description of Artificial Sequence: Synthetic oligonucleotide
gcauacuacuauguaauau

SEQ ID NO: 599935 - RNA, 19 nt, Artificial Sequence
  Description of Artificial Sequence: Synthetic oligonucleotide
cugaagguacaggacccaa

SEQ ID NO: 599936 - RNA, 19 nt, Artificial Sequence
  Description of Artificial Sequence: Synthetic oligonucleotide
aaccgcucuuugaccgacu

SEQ ID NO: 599937 - RNA, 19 nt, Artificial Sequence
  Description of Artificial Sequence: Synthetic oligonucleotide
cugggucggugauccacca

SEQ ID NO: 599938 - RNA, 19 nt, Artificial Sequence
  Description of Artificial Sequence: Synthetic oligonucleotide
agagaccauuccacuuuau

SEQ ID NO: 599939 - RNA, 19 nt, Artificial Sequence
  Description of Artificial Sequence: Synthetic oligonucleotide
cuccuaagcucagugacuu

SEQ ID NO: 599940 - RNA, 19 nt, Artificial Sequence
  Description of Artificial Sequence: Synthetic oligonucleotide
aggcgaccuguaaguuaac

SEQ ID NO: 599941 - RNA, 19 nt, Artificial Sequence
  Description of Artificial Sequence: Synthetic oligonucleotide
ccgcaccucgaccucuugc

SEQ ID NO: 599942 - RNA, 19 nt, Artificial Sequence
  Description of Artificial Sequence: Synthetic oligonucleotide
gcauaaggacucauaugua

SEQ ID NO: 599943 - RNA, 19 nt, Artificial Sequence
  Description of Artificial Sequence: Synthetic oligonucleotide
cuaccucggccagaugaaa

SEQ ID NO: 599944 - RNA, 19 nt, Artificial Sequence
  Description of Artificial Sequence: Synthetic oligonucleotide
ggcuagaaacuagcaaggu

SEQ ID NO: 599945 - RNA, 19 nt, Artificial Sequence
  Description of Artificial Sequence: Synthetic oligonucleotide
cgugagccgcaccucgacc

SEQ ID NO: 599946 - RNA, 19 nt, Artificial Sequence
  Description of Artificial Sequence: Synthetic oligonucleotide
cucgaccucuugcauggau

SEQ ID NO: 599947 - RNA, 19 nt, Artificial Sequence
  Description of Artificial Sequence: Synthetic oligonucleotide
cggccagaugaaagaauuc

SEQ ID NO: 599948 - RNA, 19 nt, Artificial Sequence
  Description of Artificial Sequence: Synthetic oligonucleotide
cguuauaggcgaccuguaa

SEQ ID NO: 599949 - RNA, 19 nt, Artificial Sequence
  Description of Artificial Sequence: Synthetic oligonucleotide
cugccccggccgugagccg

SEQ ID NO: 599950 - RNA, 19 nt, Artificial Sequence
  Description of Artificial Sequence: Synthetic oligonucleotide
ccgugagccgcaccucgac

SEQ ID NO: 599951 - RNA, 19 nt, Artificial Sequence
  Description of Artificial Sequence: Synthetic oligonucleotide
gcggggcuagaaacuagca

SEQ ID NO: 599952 - RNA, 19 nt, Artificial Sequence
  Description of Artificial Sequence: Synthetic oligonucleotide
ccaaccgcucuuugaccga

SEQ ID NO: 599953 - RNA, 19 nt, Artificial Sequence
  Description of Artificial Sequence: Synthetic oligonucleotide
gcugaacuaacggcuguau

SEQ ID NO: 599954 - RNA, 19 nt, Artificial Sequence
  Description of Artificial Sequence: Synthetic oligonucleotide
cggggcuagaaacuagcaa

SEQ ID NO: 599955 - RNA, 19 nt, Artificial Sequence
  Description of Artificial Sequence: Synthetic oligonucleotide
ggucaccguuauaggcgac

SEQ ID NO: 599956 - RNA, 19 nt, Artificial Sequence
  Description of Artificial Sequence: Synthetic oligonucleotide
ccguuauaggcgaccugua

SEQ ID NO: 599957 - RNA, 19 nt, Artificial Sequence
  Description of Artificial Sequence: Synthetic oligonucleotide
gccgcaccucgaccucuug

SEQ ID NO: 599958 - RNA, 19 nt, Artificial Sequence
  Description of Artificial Sequence: Synthetic oligonucleotide
gcaccucgaccucuugcau

SEQ ID NO: 599959 - RNA, 19 nt, Artificial Sequence
  Description of Artificial Sequence: Synthetic oligonucleotide
cuggacuguuuguccuauu

SEQ ID NO: 599960 - RNA, 19 nt, Artificial Sequence
  Description of Artificial Sequence: Synthetic oligonucleotide
cccugccccggccgugagc

SEQ ID NO: 599961 - RNA, 19 nt, Artificial Sequence
  Description of Artificial Sequence: Synthetic oligonucleotide
ccgcucuuugaccgacugu

SEQ ID NO: 599962 - RNA, 19 nt, Artificial Sequence
  Description of Artificial Sequence: Synthetic oligonucleotide
cggcuguauuaccuuuggu

SEQ ID NO: 599963 - RNA, 19 nt, Artificial Sequence
  Description of Artificial Sequence: Synthetic oligonucleotide
gccccggccgugagccgca

SEQ ID NO: 599964 - RNA, 19 nt, Artificial Sequence
  Description of Artificial Sequence: Synthetic oligonucleotide
ccucgaccucuugcaugga

SEQ ID NO: 599965 - RNA, 19 nt, Artificial Sequence
  Description of Artificial Sequence: Synthetic oligonucleotide
cggccgugagccgcaccuc

SEQ ID NO: 599966 - RNA, 19 nt, Artificial Sequence
  Description of Artificial Sequence: Synthetic oligonucleotide
ccccggccgugagccgcac

SEQ ID NO: 599967 - RNA, 19 nt, Artificial Sequence
  Description of Artificial Sequence: Synthetic oligonucleotide
aauaaauuacagcaucacg

SEQ ID NO: 599968 - RNA, 19 nt, Artificial Sequence
  Description of Artificial Sequence: Synthetic oligonucleotide
aauaacugcauccccgacc

SEQ ID NO: 599969 - RNA, 19 nt, Artificial Sequence
  Description of Artificial Sequence: Synthetic oligonucleotide
uguuuuacgccuuuggagg

SEQ ID NO: 599970 - RNA, 19 nt, Artificial Sequence
  Description of Artificial Sequence: Synthetic oligonucleotide
uacaagaguaauaugaacu

SEQ ID NO: 599971 - RNA, 19 nt, Artificial Sequence
  Description of Artificial Sequence: Synthetic oligonucleotide
auucaauacccacagcucc

SEQ ID NO: 599972 - RNA, 19 nt, Artificial Sequence
  Description of Artificial Sequence: Synthetic oligonucleotide
aaaggagagagagagagag

SEQ ID NO: 599973 - RNA, 19 nt, Artificial Sequence
  Description of Artificial Sequence: Synthetic oligonucleotide
auaacugcauccccgaccc

SEQ ID NO: 599974 - RNA, 19 nt, Artificial Sequence
  Description of Artificial Sequence: Synthetic oligonucleotide
cuuugugugagaaagacuc

SEQ ID NO: 599975 - RNA, 19 nt, Artificial Sequence
  Description of Artificial Sequence: Synthetic oligonucleotide
uagaaagaaauuccuagag

SEQ ID NO: 599976 - RNA, 19 nt, Artificial Sequence
  Description of Artificial Sequence: Synthetic oligonucleotide
aauaccuuaguuccuaaga

SEQ ID NO: 599977 - RNA, 19 nt, Artificial Sequence
  Description of Artificial Sequence: Synthetic oligonucleotide
aauaugaacugggaaauag

SEQ ID NO: 599978 - RNA, 19 nt, Artificial Sequence
  Description of Artificial Sequence: Synthetic oligonucleotide
aguaauaugaacugggaaa

SEQ ID NO: 599979 - RNA, 19 nt, Artificial Sequence
  Description of Artificial Sequence: Synthetic oligonucleotide
aagaguaauaugaacuggg

SEQ ID NO: 599980 - RNA, 19 nt, Artificial Sequence
  Description of Artificial Sequence: Synthetic oligonucleotide
aaagcuauuuacacgcuac

SEQ ID NO: 599981 - RNA, 19 nt, Artificial Sequence
  Description of Artificial Sequence: Synthetic oligonucleotide
uccguguucacaacaaggg

SEQ ID NO: 599982 - RNA, 19 nt, Artificial Sequence
  Description of Artificial Sequence: Synthetic oligonucleotide
auaaauuacagcaucacga

SEQ ID NO: 599983 - RNA, 19 nt, Artificial Sequence
  Description of Artificial Sequence: Synthetic oligonucleotide
aaagcuacaaacauuaaua

SEQ ID NO: 599984 - RNA, 19 nt, Artificial Sequence
  Description of Artificial Sequence: Synthetic oligonucleotide
agaaauguucacaaggacg

SEQ ID NO: 599985 - RNA, 19 nt, Artificial Sequence
  Description of Artificial Sequence: Synthetic oligonucleotide
uaugcuuccggaaauacau

SEQ ID NO: 599986 - RNA, 19 nt, Artificial Sequence
  Description of Artificial Sequence: Synthetic oligonucleotide
acucuaagcaacuugagaa

SEQ ID NO: 599987 - RNA, 19 nt, Artificial Sequence
  Description of Artificial Sequence: Synthetic oligonucleotide
uguauauucguggucagcc

SEQ ID NO: 599988 - RNA, 19 nt, Artificial Sequence
  Description of Artificial Sequence: Synthetic oligonucleotide
guagaaacaaaccucauaa

SEQ ID NO: 599989 - RNA, 19 nt, Artificial Sequence
  Description of Artificial Sequence: Synthetic oligonucleotide
uccuaagaggaaaauaaga

SEQ ID NO: 599990 - RNA, 19 nt, Artificial Sequence
  Description of Artificial Sequence: Synthetic oligonucleotide
ucacgaaacacaaauacuu

SEQ ID NO: 599991 - RNA, 19 nt, Artificial Sequence
  Description of Artificial Sequence: Synthetic oligonucleotide
gagagagagagagagagag

SEQ ID NO: 599992 - RNA, 19 nt, Artificial Sequence
  Description of Artificial Sequence: Synthetic oligonucleotide
uaaagguuacugaaggacu

SEQ ID NO: 599993 - RNA, 19 nt, Artificial Sequence
  Description of Artificial Sequence: Synthetic oligonucleotide
aauguucacaaggacgggg

SEQ ID NO: 599994 - RNA, 19 nt, Artificial Sequence
  Description of Artificial Sequence: Synthetic oligonucleotide
ucuguacaaaaccugaaau

SEQ ID NO: 599995 - RNA, 19 nt, Artificial Sequence
  Description of Artificial Sequence: Synthetic oligonucleotide
aacuugagaaagauguccg

SEQ ID NO: 599996 - RNA, 19 nt, Artificial Sequence
  Description of Artificial Sequence: Synthetic oligonucleotide
aacacuuuaauagccacga

SEQ ID NO: 599997 - RNA, 19 nt, Artificial Sequence
  Description of Artificial Sequence: Synthetic oligonucleotide
caaauacuucacaaggugc

SEQ ID NO: 599998 - RNA, 19 nt, Artificial Sequence
  Description of Artificial Sequence: Synthetic oligonucleotide
uauauucguggucagccag

SEQ ID NO: 599999 - RNA, 19 nt, Artificial Sequence
  Description of Artificial Sequence: Synthetic oligonucleotide
auaccuuaguuccuaagag

SEQ ID NO: 600000 - RNA, 19 nt, Artificial Sequence
  Description of Artificial Sequence: Synthetic oligonucleotide
uguaaagacucacucggga

SEQ ID NO: 600001 - RNA, 19 nt, Artificial Sequence
  Description of Artificial Sequence: Synthetic oligonucleotide
aacggguguagaaacaaac

SEQ ID NO: 600002 - RNA, 19 nt, Artificial Sequence
  Description of Artificial Sequence: Synthetic oligonucleotide
uaccuuaguuccuaagagg

SEQ ID NO: 600003 - RNA, 19 nt, Artificial Sequence
  Description of Artificial Sequence: Synthetic oligonucleotide
ugugaaacuggagacgcgg

SEQ ID NO: 600004 - RNA, 19 nt, Artificial Sequence
  Description of Artificial Sequence: Synthetic oligonucleotide
uguacguuuuccuuuggca

SEQ ID NO: 600005 - RNA, 19 nt, Artificial Sequence
  Description of Artificial Sequence: Synthetic oligonucleotide
aauacccacagcuccucuc

SEQ ID NO: 600006 - RNA, 19 nt, Artificial Sequence
  Description of Artificial Sequence: Synthetic oligonucleotide
aaauaacugcauccccgac

SEQ ID NO: 600007 - RNA, 19 nt, Artificial Sequence
  Description of Artificial Sequence: Synthetic oligonucleotide
gcuguaaagacucacucgg

SEQ ID NO: 600008 - RNA, 19 nt, Artificial Sequence
  Description of Artificial Sequence: Synthetic oligonucleotide
uauccgcucugaaagacag

SEQ ID NO: 600009 - RNA, 19 nt, Artificial Sequence
  Description of Artificial Sequence: Synthetic oligonucleotide
aaauacuucacaaggugcu

SEQ ID NO: 600010 - RNA, 19 nt, Artificial Sequence
  Description of Artificial Sequence: Synthetic oligonucleotide
aagcuacaaacauuaauaa

SEQ ID NO: 600011 - RNA, 19 nt, Artificial Sequence
  Description of Artificial Sequence: Synthetic oligonucleotide
uuccuaagaggaaaauaag

SEQ ID NO: 600012 - RNA, 19 nt, Artificial Sequence
  Description of Artificial Sequence: Synthetic oligonucleotide
ugcugugcgacucgggugg

SEQ ID NO: 600013 - RNA, 19 nt, Artificial Sequence
  Description of Artificial Sequence: Synthetic oligonucleotide
ucguauaaagguuacugaa

SEQ ID NO: 600014 - RNA, 19 nt, Artificial Sequence
  Description of Artificial Sequence: Synthetic oligonucleotide
uucacaacaagggacggcc

SEQ ID NO: 600015 - RNA, 19 nt, Artificial Sequence
  Description of Artificial Sequence: Synthetic oligonucleotide
aggagagagagagagagag

SEQ ID NO: 600016 - RNA, 19 nt, Artificial Sequence
  Description of Artificial Sequence: Synthetic oligonucleotide
ugggaaauagaacacuuua

SEQ ID NO: 600017 - RNA, 19 nt, Artificial Sequence
  Description of Artificial Sequence: Synthetic oligonucleotide
agguaacggguguagaaac

SEQ ID NO: 600018 - RNA, 19 nt, Artificial Sequence
  Description of Artificial Sequence: Synthetic oligonucleotide
gaccucauggacucgauac

SEQ ID NO: 600019 - RNA, 19 nt, Artificial Sequence
  Description of Artificial Sequence: Synthetic oligonucleotide
caagggacggccaugcucc

SEQ ID NO: 600020 - RNA, 19 nt, Artificial Sequence
  Description of Artificial Sequence: Synthetic oligonucleotide
guacguuuuccuuuggcag

SEQ ID NO: 600021 - RNA, 19 nt, Artificial Sequence
  Description of Artificial Sequence: Synthetic oligonucleotide
ucugaguaagccuggggcc

SEQ ID NO: 600022 - RNA, 19 nt, Artificial Sequence
  Description of Artificial Sequence: Synthetic oligonucleotide
uuccgauggaucuucaaga

SEQ ID NO: 600023 - RNA, 19 nt, Artificial Sequence
  Description of Artificial Sequence: Synthetic oligonucleotide
acacccacuaucuagccug

SEQ ID NO: 600024 - RNA, 19 nt, Artificial Sequence
  Description of Artificial Sequence: Synthetic oligonucleotide
uguagaaacaaaccucaua

SEQ ID NO: 600025 - RNA, 19 nt, Artificial Sequence
  Description of Artificial Sequence: Synthetic oligonucleotide
cuaccugccagccagggag

SEQ ID NO: 600026 - RNA, 19 nt, Artificial Sequence
  Description of Artificial Sequence: Synthetic oligonucleotide
uucacaaggugcuaguaaa

SEQ ID NO: 600027 - RNA, 19 nt, Artificial Sequence
  Description of Artificial Sequence: Synthetic oligonucleotide
uagaacacuuuaauagcca

SEQ ID NO: 600028 - RNA, 19 nt, Artificial Sequence
  Description of Artificial Sequence: Synthetic oligonucleotide
ucauggacucgauacaaga

SEQ ID NO: 600029 - RNA, 19 nt, Artificial Sequence
  Description of Artificial Sequence: Synthetic oligonucleotide
uguacuauccgcucugaaa

SEQ ID NO: 600030 - RNA, 19 nt, Artificial Sequence
  Description of Artificial Sequence: Synthetic oligonucleotide
acucguauaaagguuacug

SEQ ID NO: 600031 - RNA, 19 nt, Artificial Sequence
  Description of Artificial Sequence: Synthetic oligonucleotide
acgaaacacaaauacuuca

SEQ ID NO: 600032 - RNA, 19 nt, Artificial Sequence
  Description of Artificial Sequence: Synthetic oligonucleotide
gagagagagagagagaaca

SEQ ID NO: 600033 - RNA, 19 nt, Artificial Sequence
  Description of Artificial Sequence: Synthetic oligonucleotide
aaaacucguauaaagguua

SEQ ID NO: 600034 - RNA, 19 nt, Artificial Sequence
  Description of Artificial Sequence: Synthetic oligonucleotide
uaucuagccugcuaccugc

SEQ ID NO: 600035 - RNA, 19 nt, Artificial Sequence
  Description of Artificial Sequence: Synthetic oligonucleotide
gcugccuuagaccucaugg

SEQ ID NO: 600036 - RNA, 19 nt, Artificial Sequence
  Description of Artificial Sequence: Synthetic oligonucleotide
ugcuguauauucgugguca

SEQ ID NO: 600037 - RNA, 19 nt, Artificial Sequence
  Description of Artificial Sequence: Synthetic oligonucleotide
accggaaugguacucaagu

SEQ ID NO: 600038 - RNA, 19 nt, Artificial Sequence
  Description of Artificial Sequence: Synthetic oligonucleotide
uacucaaguuggcagggcc

SEQ ID NO: 600039 - RNA, 19 nt, Artificial Sequence
  Description of Artificial Sequence: Synthetic oligonucleotide
aaaagcuauuuacacgcua

SEQ ID NO: 600040 - RNA, 19 nt, Artificial Sequence
  Description of Artificial Sequence: Synthetic oligonucleotide
caaggugcuaguaaaauaa

SEQ ID NO: 600041 - RNA, 19 nt, Artificial Sequence
  Description of Artificial Sequence: Synthetic oligonucleotide
uuugugugagaaagacucc

SEQ ID NO: 600042 - RNA, 19 nt, Artificial Sequence
  Description of Artificial Sequence: Synthetic oligonucleotide
uucguggucagccaggcua

SEQ ID NO: 600043 - RNA, 19 nt, Artificial Sequence
  Description of Artificial Sequence: Synthetic oligonucleotide
gaacacuuuaauagccacg

SEQ ID NO: 600044 - RNA, 19 nt, Artificial Sequence
  Description of Artificial Sequence: Synthetic oligonucleotide
aaugguacucaaguuggca

SEQ ID NO: 600045 - RNA, 19 nt, Artificial Sequence
  Description of Artificial Sequence: Synthetic oligonucleotide
aaaguccccaggcauuuga

SEQ ID NO: 600046 - RNA, 19 nt, Artificial Sequence
  Description of Artificial Sequence: Synthetic oligonucleotide
cucacgaugccacccagcg

SEQ ID NO: 600047 - RNA, 19 nt, Artificial Sequence
  Description of Artificial Sequence: Synthetic oligonucleotide
aaacucguauaaagguuac

SEQ ID NO: 600048 - RNA, 19 nt, Artificial Sequence
  Description of Artificial Sequence: Synthetic oligonucleotide
cugaaagacagaguguaag

SEQ ID NO: 600049 - RNA, 19 nt, Artificial Sequence
  Description of Artificial Sequence: Synthetic oligonucleotide
agaguagggcccuuccacg

SEQ ID NO: 600050 - RNA, 19 nt, Artificial Sequence
  Description of Artificial Sequence: Synthetic oligonucleotide
ggaaugguacucaaguugg

SEQ ID NO: 600051 - RNA, 19 nt, Artificial Sequence
  Description of Artificial Sequence: Synthetic oligonucleotide
cauggacucgauacaagag

SEQ ID NO: 600052 - RNA, 19 nt, Artificial Sequence
  Description of Artificial Sequence: Synthetic oligonucleotide
gauguagcggggcuccggg

SEQ ID NO: 600053 - RNA, 19 nt, Artificial Sequence
  Description of Artificial Sequence: Synthetic oligonucleotide
ugucgccaaaauaauaaua

SEQ ID NO: 600054 - RNA, 19 nt, Artificial Sequence
  Description of Artificial Sequence: Synthetic oligonucleotide
guguucacaacaagggacg

SEQ ID NO: 600055 - RNA, 19 nt, Artificial Sequence
  Description of Artificial Sequence: Synthetic oligonucleotide
acggguguagaaacaaacc

SEQ ID NO: 600056 - RNA, 19 nt, Artificial Sequence
  Description of Artificial Sequence: Synthetic oligonucleotide
aagcuauuuacacgcuaca

SEQ ID NO: 600057 - RNA, 19 nt, Artificial Sequence
  Description of Artificial Sequence: Synthetic oligonucleotide
ugacaaccccaaaaguccc

SEQ ID NO: 600058 - RNA, 19 nt, Artificial Sequence
  Description of Artificial Sequence: Synthetic oligonucleotide
gagagagagagagagagaa

SEQ ID NO: 600059 - RNA, 19 nt, Artificial Sequence
  Description of Artificial Sequence: Synthetic oligonucleotide
acuauccgcucugaaagac

SEQ ID NO: 600060 - RNA, 19 nt, Artificial Sequence
  Description of Artificial Sequence: Synthetic oligonucleotide
cauucaauacccacagcuc

SEQ ID NO: 600061 - RNA, 19 nt, Artificial Sequence
  Description of Artificial Sequence: Synthetic oligonucleotide
guccugacaaccccaaaag

SEQ ID NO: 600062 - RNA, 19 nt, Artificial Sequence
  Description of Artificial Sequence: Synthetic oligonucleotide
uggaacuggucacucuaag

SEQ ID NO: 600063 - RNA, 19 nt, Artificial Sequence
  Description of Artificial Sequence: Synthetic oligonucleotide
ggacauucaauacccacag

SEQ ID NO: 600064 - RNA, 19 nt, Artificial Sequence
  Description of Artificial Sequence: Synthetic oligonucleotide
uggacucgauacaagagua

SEQ ID NO: 600065 - RNA, 19 nt, Artificial Sequence
  Description of Artificial Sequence: Synthetic oligonucleotide
gaguguaaggcugcgcagg

SEQ ID NO: 600066 - RNA, 19 nt, Artificial Sequence
  Description of Artificial Sequence: Synthetic oligonucleotide
ucagacucgggcuggugag

SEQ ID NO: 600067 - RNA, 19 nt, Artificial Sequence
  Description of Artificial Sequence: Synthetic oligonucleotide
gaguaauaugaacugggaa

SEQ ID NO: 600068 - RNA, 19 nt, Artificial Sequence
  Description of Artificial Sequence: Synthetic oligonucleotide
gagagagagagagaacagc

SEQ ID NO: 600069 - RNA, 19 nt, Artificial Sequence
  Description of Artificial Sequence: Synthetic oligonucleotide
agcuacaaacauuaauaaa

SEQ ID NO: 600070 - RNA, 19 nt, Artificial Sequence
  Description of Artificial Sequence: Synthetic oligonucleotide
agagagagagagaacagcu

SEQ ID NO: 600071 - RNA, 19 nt, Artificial Sequence
  Description of Artificial Sequence: Synthetic oligonucleotide
aacccgacuguccaucaga

SEQ ID NO: 600072 - RNA, 19 nt, Artificial Sequence
  Description of Artificial Sequence: Synthetic oligonucleotide
uacacgcuacauucuauga

SEQ ID NO: 600073 - RNA, 19 nt, Artificial Sequence
  Description of Artificial Sequence: Synthetic oligonucleotide
ccugaaaccggaaugguac

SEQ ID NO: 600074 - RNA, 19 nt, Artificial Sequence
  Description of Artificial Sequence: Synthetic oligonucleotide
acuggucacucuaagcaac

SEQ ID NO: 600075 - RNA, 19 nt, Artificial Sequence
  Description of Artificial Sequence: Synthetic oligonucleotide
uacaugucgccaaaauaau

SEQ ID NO: 600076 - RNA, 19 nt, Artificial Sequence
  Description of Artificial Sequence: Synthetic oligonucleotide
accuuaguuccuaagagga

SEQ ID NO: 600077 - RNA, 19 nt, Artificial Sequence
  Description of Artificial Sequence: Synthetic oligonucleotide
uccuccacccacuaacaca

SEQ ID NO: 600078 - RNA, 19 nt, Artificial Sequence
  Description of Artificial Sequence: Synthetic oligonucleotide
cacgaaacacaaauacuuc

SEQ ID NO: 600079 - RNA, 19 nt, Artificial Sequence
  Description of Artificial Sequence: Synthetic oligonucleotide
auuuacacgcuacauucua

SEQ ID NO: 600080 - RNA, 19 nt, Artificial Sequence
  Description of Artificial Sequence: Synthetic oligonucleotide
cuguaaagacucacucggg

SEQ ID NO: 600081 - RNA, 19 nt, Artificial Sequence
  Description of Artificial Sequence: Synthetic oligonucleotide
gucgccaaaauaauaauaa

SEQ ID NO: 600082 - RNA, 19 nt, Artificial Sequence
  Description of Artificial Sequence: Synthetic oligonucleotide
uguccguguucacaacaag

SEQ ID NO: 600083 - RNA, 19 nt, Artificial Sequence
  Description of Artificial Sequence: Synthetic oligonucleotide
ggagcaguuucccauuccg

SEQ ID NO: 600084 - RNA, 19 nt, Artificial Sequence
  Description of Artificial Sequence: Synthetic oligonucleotide
guccguguucacaacaagg

SEQ ID NO: 600085 - RNA, 19 nt, Artificial Sequence
  Description of Artificial Sequence: Synthetic oligonucleotide
guuuuacgccuuuggaggc

SEQ ID NO: 600086 - RNA, 19 nt, Artificial Sequence
  Description of Artificial Sequence: Synthetic oligonucleotide
gauguccguguucacaaca

SEQ ID NO: 600087 - RNA, 19 nt, Artificial Sequence
  Description of Artificial Sequence: Synthetic oligonucleotide
agaguguaaggcugcgcag

SEQ ID NO: 600088 - RNA, 19 nt, Artificial Sequence
  Description of Artificial Sequence: Synthetic oligonucleotide
ucgccaaaauaauaauaaa

SEQ ID NO: 600089 - RNA, 19 nt, Artificial Sequence
  Description of Artificial Sequence: Synthetic oligonucleotide
uccugacaaccccaaaagu

SEQ ID NO: 600090 - RNA, 19 nt, Artificial Sequence
  Description of Artificial Sequence: Synthetic oligonucleotide
caauaccuuaguuccuaag

SEQ ID NO: 600091 - RNA, 19 nt, Artificial Sequence
  Description of Artificial Sequence: Synthetic oligonucleotide
aaagaaauuccuagagaua

SEQ ID NO: 600092 - RNA, 19 nt, Artificial Sequence
  Description of Artificial Sequence: Synthetic oligonucleotide
cucgucauacaagaaggag

SEQ ID NO: 600093 - RNA, 19 nt, Artificial Sequence
  Description of Artificial Sequence: Synthetic oligonucleotide
uacaggauugccugagaaa

SEQ ID NO: 600094 - RNA, 19 nt, Artificial Sequence
  Description of Artificial Sequence: Synthetic oligonucleotide
agccccucugugucgaugg

SEQ ID NO: 600095 - RNA, 19 nt, Artificial Sequence
  Description of Artificial Sequence: Synthetic oligonucleotide
acaaggugcuaguaaaaua

SEQ ID NO: 600096 - RNA, 19 nt, Artificial Sequence
  Description of Artificial Sequence: Synthetic oligonucleotide
cauggacaacacauccagg

SEQ ID NO: 600097 - RNA, 19 nt, Artificial Sequence
  Description of Artificial Sequence: Synthetic oligonucleotide
cucguauaaagguuacuga

SEQ ID NO: 600098 - RNA, 19 nt, Artificial Sequence
  Description of Artificial Sequence: Synthetic oligonucleotide
gacccuaagacguggcuga

SEQ ID NO: 600099 - RNA, 19 nt, Artificial Sequence
  Description of Artificial Sequence: Synthetic oligonucleotide
cgauacaagaguaauauga

SEQ ID NO: 600100 - RNA, 19 nt, Artificial Sequence
  Description of Artificial Sequence: Synthetic oligonucleotide
ugaacgugccggcugcugu

SEQ ID NO: 600101 - RNA, 19 nt, Artificial Sequence
  Description of Artificial Sequence: Synthetic oligonucleotide
gaccccucgucauacaaga

SEQ ID NO: 600102 - RNA, 19 nt, Artificial Sequence
  Description of Artificial Sequence: Synthetic oligonucleotide
uuagaccucauggacucga

SEQ ID NO: 600103 - RNA, 19 nt, Artificial Sequence
  Description of Artificial Sequence: Synthetic oligonucleotide
uccagaguagggcccuucc

SEQ ID NO: 600104 - RNA, 19 nt, Artificial Sequence
  Description of Artificial Sequence: Synthetic oligonucleotide
gauggguggacacgccacc

SEQ ID NO: 600105 - RNA, 19 nt, Artificial Sequence
  Description of Artificial Sequence: Synthetic oligonucleotide
cuagccugcuaccugccag

SEQ ID NO: 600106 - RNA, 19 nt, Artificial Sequence
  Description of Artificial Sequence: Synthetic oligonucleotide
agaaggccgccuuugugug

SEQ ID NO: 600107 - RNA, 19 nt, Artificial Sequence
  Description of Artificial Sequence: Synthetic oligonucleotide
ugugucgauggguggacac

SEQ ID NO: 600108 - RNA, 19 nt, Artificial Sequence
  Description of Artificial Sequence: Synthetic oligonucleotide
gaguggauaaggccuccgc

SEQ ID NO: 600109 - RNA, 19 nt, Artificial Sequence
  Description of Artificial Sequence: Synthetic oligonucleotide
cuaacuguggguccugaca

SEQ ID NO: 600110 - RNA, 19 nt, Artificial Sequence
  Description of Artificial Sequence: Synthetic oligonucleotide
uccgauggaucuucaagau

SEQ ID NO: 600111 - RNA, 19 nt, Artificial Sequence
  Description of Artificial Sequence: Synthetic oligonucleotide
guaaagacucacucgggaa

SEQ ID NO: 600112 - RNA, 19 nt, Artificial Sequence
  Description of Artificial Sequence: Synthetic oligonucleotide
ggacagaugcucguggugg

SEQ ID NO: 600113 - RNA, 19 nt, Artificial Sequence
  Description of Artificial Sequence: Synthetic oligonucleotide
uuaggucuaagcugccuua

SEQ ID NO: 600114 - RNA, 19 nt, Artificial Sequence
  Description of Artificial Sequence: Synthetic oligonucleotide
ggugugaaacuggagacgc

SEQ ID NO: 600115 - RNA, 19 nt, Artificial Sequence
  Description of Artificial Sequence: Synthetic oligonucleotide
acacgcuacauucuaugaa

SEQ ID NO: 600116 - RNA, 19 nt, Artificial Sequence
  Description of Artificial Sequence: Synthetic oligonucleotide
aaaccggaaugguacucaa

SEQ ID NO: 600117 - RNA, 19 nt, Artificial Sequence
  Description of Artificial Sequence: Synthetic oligonucleotide
cacccuuccccugugaccc

SEQ ID NO: 600118 - RNA, 19 nt, Artificial Sequence
  Description of Artificial Sequence: Synthetic oligonucleotide
ucgauggguggacacgcca

SEQ ID NO: 600119 - RNA, 19 nt, Artificial Sequence
  Description of Artificial Sequence: Synthetic oligonucleotide
uauucguggucagccaggc

SEQ ID NO: 600120 - RNA, 19 nt, Artificial Sequence
  Description of Artificial Sequence: Synthetic oligonucleotide
guagggcccuuccacgugg

SEQ ID NO: 600121 - RNA, 19 nt, Artificial Sequence
  Description of Artificial Sequence: Synthetic oligonucleotide
aaaaggagagagagagaga

SEQ ID NO: 600122 - RNA, 19 nt, Artificial Sequence
  Description of Artificial Sequence: Synthetic oligonucleotide
accucauaagaaauguaca

SEQ ID NO: 600123 - RNA, 19 nt, Artificial Sequence
  Description of Artificial Sequence: Synthetic oligonucleotide
ugcucaagggacagaugcu

SEQ ID NO: 600124 - RNA, 19 nt, Artificial Sequence
  Description of Artificial Sequence: Synthetic oligonucleotide
cacgcuacauucuaugaaa

SEQ ID NO: 600125 - RNA, 19 nt, Artificial Sequence
  Description of Artificial Sequence: Synthetic oligonucleotide
cauuugagugugugacacc

SEQ ID NO: 600126 - RNA, 19 nt, Artificial Sequence
  Description of Artificial Sequence: Synthetic oligonucleotide
uacuauccgcucugaaaga

SEQ ID NO: 600127 - RNA, 19 nt, Artificial Sequence
  Description of Artificial Sequence: Synthetic oligonucleotide
agaguaauaugaacuggga

SEQ ID NO: 600128 - RNA, 19 nt, Artificial Sequence
  Description of Artificial Sequence: Synthetic oligonucleotide
cuaagcaacuugagaaaga

SEQ ID NO: 600129 - RNA, 19 nt, Artificial Sequence
  Description of Artificial Sequence: Synthetic oligonucleotide
aaggacggggucaaggaaa

SEQ ID NO: 600130 - RNA, 19 nt, Artificial Sequence
  Description of Artificial Sequence: Synthetic oligonucleotide
uuccggaaauacaucuaaa

SEQ ID NO: 600131 - RNA, 19 nt, Artificial Sequence
  Description of Artificial Sequence: Synthetic oligonucleotide
auauucguggucagccagg

SEQ ID NO: 600132 - RNA, 19 nt, Artificial Sequence
  Description of Artificial Sequence: Synthetic oligonucleotide
agagagagagagagaacag

SEQ ID NO: 600133 - RNA, 19 nt, Artificial Sequence
  Description of Artificial Sequence: Synthetic oligonucleotide
uguccuuugccuuguuuua

SEQ ID NO: 600134 - RNA, 19 nt, Artificial Sequence
  Description of Artificial Sequence: Synthetic oligonucleotide
uuccccugugaccccacag

SEQ ID NO: 600135 - RNA, 19 nt, Artificial Sequence
  Description of Artificial Sequence: Synthetic oligonucleotide
gaaaccggaaugguacuca

SEQ ID NO: 600136 - RNA, 19 nt, Artificial Sequence
  Description of Artificial Sequence: Synthetic oligonucleotide
aauacuucacaaggugcua

SEQ ID NO: 600137 - RNA, 19 nt, Artificial Sequence
  Description of Artificial Sequence: Synthetic oligonucleotide
ucccaagccuuagaggagc

SEQ ID NO: 600138 - RNA, 19 nt, Artificial Sequence
  Description of Artificial Sequence: Synthetic oligonucleotide
cuuggcgguggccaugccc

SEQ ID NO: 600139 - RNA, 19 nt, Artificial Sequence
  Description of Artificial Sequence: Synthetic oligonucleotide
cguauaaagguuacugaag

SEQ ID NO: 600140 - RNA, 19 nt, Artificial Sequence
  Description of Artificial Sequence: Synthetic oligonucleotide
cuuuuaggucuaagcugcc

SEQ ID NO: 600141 - RNA, 19 nt, Artificial Sequence
  Description of Artificial Sequence: Synthetic oligonucleotide
agcccuguggcccugccca

SEQ ID NO: 600142 - RNA, 19 nt, Artificial Sequence
  Description of Artificial Sequence: Synthetic oligonucleotide
uaggucuaagcugccuuag

SEQ ID NO: 600143 - RNA, 19 nt, Artificial Sequence
  Description of Artificial Sequence: Synthetic oligonucleotide
agagagagagagagagaac

SEQ ID NO: 600144 - RNA, 19 nt, Artificial Sequence
  Description of Artificial Sequence: Synthetic oligonucleotide
uaacggguguagaaacaaa

SEQ ID NO: 600145 - RNA, 19 nt, Artificial Sequence
  Description of Artificial Sequence: Synthetic oligonucleotide
cugaguaagccuggggccc

SEQ ID NO: 600146 - RNA, 19 nt, Artificial Sequence
  Description of Artificial Sequence: Synthetic oligonucleotide
agaucuuuccaagccuuug

SEQ ID NO: 600147 - RNA, 19 nt, Artificial Sequence
  Description of Artificial Sequence: Synthetic oligonucleotide
gaugcccggguuaagauua

SEQ ID NO: 600148 - RNA, 19 nt, Artificial Sequence
  Description of Artificial Sequence: Synthetic oligonucleotide
ugaguaagccuggggcccg

SEQ ID NO: 600149 - RNA, 19 nt, Artificial Sequence
  Description of Artificial Sequence: Synthetic oligonucleotide
aguuccuaagaggaaaaua

SEQ ID NO: 600150 - RNA, 19 nt, Artificial Sequence
  Description of Artificial Sequence: Synthetic oligonucleotide
gugagcguggcucacugca

SEQ ID NO: 600151 - RNA, 19 nt, Artificial Sequence
  Description of Artificial Sequence: Synthetic oligonucleotide
gccacgauaaacuuuguua

SEQ ID NO: 600152 - RNA, 19 nt, Artificial Sequence
  Description of Artificial Sequence: Synthetic oligonucleotide
gacacgccaccugggaugg

SEQ ID NO: 600153 - RNA, 19 nt, Artificial Sequence
  Description of Artificial Sequence: Synthetic oligonucleotide
uugaugcccggguuaagau

SEQ ID NO: 600154 - RNA, 19 nt, Artificial Sequence
  Description of Artificial Sequence: Synthetic oligonucleotide
cacuaacacaccaaccuaa

SEQ ID NO: 600155 - RNA, 19 nt, Artificial Sequence
  Description of Artificial Sequence: Synthetic oligonucleotide
caggcuacugcugugcgac

SEQ ID NO: 600156 - RNA, 19 nt, Artificial Sequence
  Description of Artificial Sequence: Synthetic oligonucleotide
guaauaugaacugggaaau

SEQ ID NO: 600157 - RNA, 19 nt, Artificial Sequence
  Description of Artificial Sequence: Synthetic oligonucleotide
aacucguauaaagguuacu

SEQ ID NO: 600158 - RNA, 19 nt, Artificial Sequence
  Description of Artificial Sequence: Synthetic oligonucleotide
uuuacgccuuuggaggcug

SEQ ID NO: 600159 - RNA, 19 nt, Artificial Sequence
  Description of Artificial Sequence: Synthetic oligonucleotide
cguguucacaacaagggac

SEQ ID NO: 600160 - RNA, 19 nt, Artificial Sequence
  Description of Artificial Sequence: Synthetic oligonucleotide
cacccacuaacacaccaac

SEQ ID NO: 600161 - RNA, 19 nt, Artificial Sequence
  Description of Artificial Sequence: Synthetic oligonucleotide
uagccugcuaccugccagc

SEQ ID NO: 600162 - RNA, 19 nt, Artificial Sequence
  Description of Artificial Sequence: Synthetic oligonucleotide
uacugcugugcgacucggg

SEQ ID NO: 600163 - RNA, 19 nt, Artificial Sequence
  Description of Artificial Sequence: Synthetic oligonucleotide
ucguggucagccaggcuac

SEQ ID NO: 600164 - RNA, 19 nt, Artificial Sequence
  Description of Artificial Sequence: Synthetic oligonucleotide
cacucuaagcaacuugaga

SEQ ID NO: 600165 - RNA, 19 nt, Artificial Sequence
  Description of Artificial Sequence: Synthetic oligonucleotide
guauauucguggucagcca

SEQ ID NO: 600166 - RNA, 19 nt, Artificial Sequence
  Description of Artificial Sequence: Synthetic oligonucleotide
gaaugguacucaaguuggc

SEQ ID NO: 600167 - RNA, 19 nt, Artificial Sequence
  Description of Artificial Sequence: Synthetic oligonucleotide
gguacucaaguuggcaggg

SEQ ID NO: 600168 - RNA, 19 nt, Artificial Sequence
  Description of Artificial Sequence: Synthetic oligonucleotide
uucacaaggacggggucaa

SEQ ID NO: 600169 - RNA, 19 nt, Artificial Sequence
  Description of Artificial Sequence: Synthetic oligonucleotide
cugugaacgugccggcugc

SEQ ID NO: 600170 - RNA, 19 nt, Artificial Sequence
  Description of Artificial Sequence: Synthetic oligonucleotide
ugcucacgaugccacccag

SEQ ID NO: 600171 - RNA, 19 nt, Artificial Sequence
  Description of Artificial Sequence: Synthetic oligonucleotide
aggacggggucaaggaaac

SEQ ID NO: 600172 - RNA, 19 nt, Artificial Sequence
  Description of Artificial Sequence: Synthetic oligonucleotide
cuguggguccugacaaccc

SEQ ID NO: 600173 - RNA, 19 nt, Artificial Sequence
  Description of Artificial Sequence: Synthetic oligonucleotide
ugaaaccggaaugguacuc

SEQ ID NO: 600174 - RNA, 19 nt, Artificial Sequence
  Description of Artificial Sequence: Synthetic oligonucleotide
cuggagacgcggcuucagg

SEQ ID NO: 600175 - RNA, 19 nt, Artificial Sequence
  Description of Artificial Sequence: Synthetic oligonucleotide
aagggacggccaugcuccg

SEQ ID NO: 600176 - RNA, 19 nt, Artificial Sequence
  Description of Artificial Sequence: Synthetic oligonucleotide
uuuuacgccuuuggaggcu

SEQ ID NO: 600177 - RNA, 19 nt, Artificial Sequence
  Description of Artificial Sequence: Synthetic oligonucleotide
uaauaugaacugggaaaua

SEQ ID NO: 600178 - RNA, 19 nt, Artificial Sequence
  Description of Artificial Sequence: Synthetic oligonucleotide
ggccaagugcuguaaagac

SEQ ID NO: 600179 - RNA, 19 nt, Artificial Sequence
  Description of Artificial Sequence: Synthetic oligonucleotide
ugagcguggcucacugcac

SEQ ID NO: 600180 - RNA, 19 nt, Artificial Sequence
  Description of Artificial Sequence: Synthetic oligonucleotide
gaacccgacuguccaucag

SEQ ID NO: 600181 - RNA, 19 nt, Artificial Sequence
  Description of Artificial Sequence: Synthetic oligonucleotide
agauacuuuugcucuuaua

SEQ ID NO: 600182 - RNA, 19 nt, Artificial Sequence
  Description of Artificial Sequence: Synthetic oligonucleotide
aaccggaaugguacucaag

SEQ ID NO: 600183 - RNA, 19 nt, Artificial Sequence
  Description of Artificial Sequence: Synthetic oligonucleotide
aagccuuugcuuggcggug

SEQ ID NO: 600184 - RNA, 19 nt, Artificial Sequence
  Description of Artificial Sequence: Synthetic oligonucleotide
agaaauuccuagagauacu

SEQ ID NO: 600185 - RNA, 19 nt, Artificial Sequence
  Description of Artificial Sequence: Synthetic oligonucleotide
gacguggcugagcugucac

SEQ ID NO: 600186 - RNA, 19 nt, Artificial Sequence
  Description of Artificial Sequence: Synthetic oligonucleotide
agaacccgacuguccauca

SEQ ID NO: 600187 - RNA, 19 nt, Artificial Sequence
  Description of Artificial Sequence: Synthetic oligonucleotide
guaacggguguagaaacaa

SEQ ID NO: 600188 - RNA, 19 nt, Artificial Sequence
  Description of Artificial Sequence: Synthetic oligonucleotide
cugccuuagaccucaugga

SEQ ID NO: 600189 - RNA, 19 nt, Artificial Sequence
  Description of Artificial Sequence: Synthetic oligonucleotide
ggacacgccaccugggaug

SEQ ID NO: 600190 - RNA, 19 nt, Artificial Sequence
  Description of Artificial Sequence: Synthetic oligonucleotide
gugucgauggguggacacg

SEQ ID NO: 600191 - RNA, 19 nt, Artificial Sequence
  Description of Artificial Sequence: Synthetic oligonucleotide
guucacaacaagggacggc

SEQ ID NO: 600192 - RNA, 19 nt, Artificial Sequence
  Description of Artificial Sequence: Synthetic oligonucleotide
ucaauacccacagcuccuc

SEQ ID NO: 600193 - RNA, 19 nt, Artificial Sequence
  Description of Artificial Sequence: Synthetic oligonucleotide
ggguguagaaacaaaccuc

SEQ ID NO: 600194 - RNA, 19 nt, Artificial Sequence
  Description of Artificial Sequence: Synthetic oligonucleotide
aaggagagagagagagaga

SEQ ID NO: 600195 - RNA, 19 nt, Artificial Sequence
  Description of Artificial Sequence: Synthetic oligonucleotide
ccucauaagaaauguacaa

SEQ ID NO: 600196 - RNA, 19 nt, Artificial Sequence
  Description of Artificial Sequence: Synthetic oligonucleotide
cagcggcucagacaagcgc

SEQ ID NO: 600197 - RNA, 19 nt, Artificial Sequence
  Description of Artificial Sequence: Synthetic oligonucleotide
cuugaugcccggguuaaga

SEQ ID NO: 600198 - RNA, 19 nt, Artificial Sequence
  Description of Artificial Sequence: Synthetic oligonucleotide
cuauccgcucugaaagaca

SEQ ID NO: 600199 - RNA, 19 nt, Artificial Sequence
  Description of Artificial Sequence: Synthetic oligonucleotide
auguagcggggcuccgggg

SEQ ID NO: 600200 - RNA, 19 nt, Artificial Sequence
  Description of Artificial Sequence: Synthetic oligonucleotide
ggccuagaagugcuguucc

SEQ ID NO: 600201 - RNA, 19 nt, Artificial Sequence
  Description of Artificial Sequence: Synthetic oligonucleotide
gcuacugcugugcgacucg

SEQ ID NO: 600202 - RNA, 19 nt, Artificial Sequence
  Description of Artificial Sequence: Synthetic oligonucleotide
uaccugccagccagggagc

SEQ ID NO: 600203 - RNA, 19 nt, Artificial Sequence
  Description of Artificial Sequence: Synthetic oligonucleotide
gguccugacaaccccaaaa

SEQ ID NO: 600204 - RNA, 19 nt, Artificial Sequence
  Description of Artificial Sequence: Synthetic oligonucleotide
ccaaccuaacugugggucc

SEQ ID NO: 600205 - RNA, 19 nt, Artificial Sequence
  Description of Artificial Sequence: Synthetic oligonucleotide
gggacauucaauacccaca

SEQ ID NO: 600206 - RNA, 19 nt, Artificial Sequence
  Description of Artificial Sequence: Synthetic oligonucleotide
cuuagaccucauggacucg

SEQ ID NO: 600207 - RNA, 19 nt, Artificial Sequence
  Description of Artificial Sequence: Synthetic oligonucleotide
agccacgauaaacuuuguu

SEQ ID NO: 600208 - RNA, 19 nt, Artificial Sequence
  Description of Artificial Sequence: Synthetic oligonucleotide
ccggguuaagauuauagaa

SEQ ID NO: 600209 - RNA, 19 nt, Artificial Sequence
  Description of Artificial Sequence: Synthetic oligonucleotide
cguggcuuagccugggucc

SEQ ID NO: 600210 - RNA, 19 nt, Artificial Sequence
  Description of Artificial Sequence: Synthetic oligonucleotide
gugugaaacuggagacgcg

SEQ ID NO: 600211 - RNA, 19 nt, Artificial Sequence
  Description of Artificial Sequence: Synthetic oligonucleotide
uaguuccuaagaggaaaau

SEQ ID NO: 600212 - RNA, 19 nt, Artificial Sequence
  Description of Artificial Sequence: Synthetic oligonucleotide
ccgccuuugugugagaaag

SEQ ID NO: 600213 - RNA, 19 nt, Artificial Sequence
  Description of Artificial Sequence: Synthetic oligonucleotide
acccgacuguccaucagag

SEQ ID NO: 600214 - RNA, 19 nt, Artificial Sequence
  Description of Artificial Sequence: Synthetic oligonucleotide
cuacugcugugcgacucgg

SEQ ID NO: 600215 - RNA, 19 nt, Artificial Sequence
  Description of Artificial Sequence: Synthetic oligonucleotide
cugcuguauauucgugguc

SEQ ID NO: 600216 - RNA, 19 nt, Artificial Sequence
  Description of Artificial Sequence: Synthetic oligonucleotide
acacuuuaauagccacgau

SEQ ID NO: 600217 - RNA, 19 nt, Artificial Sequence
  Description of Artificial Sequence: Synthetic oligonucleotide
aaccuaacuguggguccug

SEQ ID NO: 600218 - RNA, 19 nt, Artificial Sequence
  Description of Artificial Sequence: Synthetic oligonucleotide
uuacgccuuuggaggcugc

SEQ ID NO: 600219 - RNA, 19 nt, Artificial Sequence
  Description of Artificial Sequence: Synthetic oligonucleotide
uagaccucauggacucgau

SEQ ID NO: 600220 - RNA, 19 nt, Artificial Sequence
  Description of Artificial Sequence: Synthetic oligonucleotide
cgauggaucuucaagaucu

SEQ ID NO: 600221 - RNA, 19 nt, Artificial Sequence
  Description of Artificial Sequence: Synthetic oligonucleotide
caggcauuugaguguguga

SEQ ID NO: 600222 - RNA, 19 nt, Artificial Sequence
  Description of Artificial Sequence: Synthetic oligonucleotide
uggcuucccaagccuuaga

SEQ ID NO: 600223 - RNA, 19 nt, Artificial Sequence
  Description of Artificial Sequence: Synthetic oligonucleotide
acucacucgggaagaggag

SEQ ID NO: 600224 - RNA, 19 nt, Artificial Sequence
  Description of Artificial Sequence: Synthetic oligonucleotide
cacccacuaucuagccugc

SEQ ID NO: 600225 - RNA, 19 nt, Artificial Sequence
  Description of Artificial Sequence: Synthetic oligonucleotide
agagagagagagagagaga

SEQ ID NO: 600226 - RNA, 19 nt, Artificial Sequence
  Description of Artificial Sequence: Synthetic oligonucleotide
ggacccuaagacguggcug

SEQ ID NO: 600227 - RNA, 19 nt, Artificial Sequence
  Description of Artificial Sequence: Synthetic oligonucleotide
uggaggccagaacccgacu

SEQ ID NO: 600228 - RNA, 19 nt, Artificial Sequence
  Description of Artificial Sequence: Synthetic oligonucleotide
gcccggguuaagauuauag

SEQ ID NO: 600229 - RNA, 19 nt, Artificial Sequence
  Description of Artificial Sequence: Synthetic oligonucleotide
gcugauguagcggggcucc

SEQ ID NO: 600230 - RNA, 19 nt, Artificial Sequence
  Description of Artificial Sequence: Synthetic oligonucleotide
cagaacccgacuguccauc

SEQ ID NO: 600231 - RNA, 19 nt, Artificial Sequence
  Description of Artificial Sequence: Synthetic oligonucleotide
caagccuuugcuuggcggu

SEQ ID NO: 600232 - RNA, 19 nt, Artificial Sequence
  Description of Artificial Sequence: Synthetic oligonucleotide
agaccucauggacucgaua

SEQ ID NO: 600233 - RNA, 19 nt, Artificial Sequence
  Description of Artificial Sequence: Synthetic oligonucleotide
gaguagggcccuuccacgu

SEQ ID NO: 600234 - RNA, 19 nt, Artificial Sequence
  Description of Artificial Sequence: Synthetic oligonucleotide
guacucaaguuggcagggc

SEQ ID NO: 600235 - RNA, 19 nt, Artificial Sequence
  Description of Artificial Sequence: Synthetic oligonucleotide
cuaacacaccaaccuaacu

SEQ ID NO: 600236 - RNA, 19 nt, Artificial Sequence
  Description of Artificial Sequence: Synthetic oligonucleotide
agcuugaugcccggguuaa

SEQ ID NO: 600237 - RNA, 19 nt, Artificial Sequence
  Description of Artificial Sequence: Synthetic oligonucleotide
auguccguguucacaacaa

SEQ ID NO: 600238 - RNA, 19 nt, Artificial Sequence
  Description of Artificial Sequence: Synthetic oligonucleotide
cacugcacgccuuccuuga

SEQ ID NO: 600239 - RNA, 19 nt, Artificial Sequence
  Description of Artificial Sequence: Synthetic oligonucleotide
cggguuaagauuauagaaa

SEQ ID NO: 600240 - RNA, 19 nt, Artificial Sequence
  Description of Artificial Sequence: Synthetic oligonucleotide
gaaggccgccuuuguguga

SEQ ID NO: 600241 - RNA, 19 nt, Artificial Sequence
  Description of Artificial Sequence: Synthetic oligonucleotide
acgcuacauucuaugaaaa

SEQ ID NO: 600242 - RNA, 19 nt, Artificial Sequence
  Description of Artificial Sequence: Synthetic oligonucleotide
agggacggccaugcuccgc

SEQ ID NO: 600243 - RNA, 19 nt, Artificial Sequence
  Description of Artificial Sequence: Synthetic oligonucleotide
gacggggucaaggaaacuu

SEQ ID NO: 600244 - RNA, 19 nt, Artificial Sequence
  Description of Artificial Sequence: Synthetic oligonucleotide
gguaacggguguagaaaca

SEQ ID NO: 600245 - RNA, 19 nt, Artificial Sequence
  Description of Artificial Sequence: Synthetic oligonucleotide
cccacuaacacaccaaccu

SEQ ID NO: 600246 - RNA, 19 nt, Artificial Sequence
  Description of Artificial Sequence: Synthetic oligonucleotide
caagccuuagaggagcagu

SEQ ID NO: 600247 - RNA, 19 nt, Artificial Sequence
  Description of Artificial Sequence: Synthetic oligonucleotide
gcugcuguauauucguggu

SEQ ID NO: 600248 - RNA, 19 nt, Artificial Sequence
  Description of Artificial Sequence: Synthetic oligonucleotide
gaacgugccggcugcugua

SEQ ID NO: 600249 - RNA, 19 nt, Artificial Sequence
  Description of Artificial Sequence: Synthetic oligonucleotide
ccugugaacgugccggcug

SEQ ID NO: 600250 - RNA, 19 nt, Artificial Sequence
  Description of Artificial Sequence: Synthetic oligonucleotide
aacgugccggcugcuguau

SEQ ID NO: 600251 - RNA, 19 nt, Artificial Sequence
  Description of Artificial Sequence: Synthetic oligonucleotide
agcgaagagcuggugugaa

SEQ ID NO: 600252 - RNA, 19 nt, Artificial Sequence
  Description of Artificial Sequence: Synthetic oligonucleotide
guggaggccagaacccgac

SEQ ID NO: 600253 - RNA, 19 nt, Artificial Sequence
  Description of Artificial Sequence: Synthetic oligonucleotide
gcccacucagggcagggug

SEQ ID NO: 600254 - RNA, 19 nt, Artificial Sequence
  Description of Artificial Sequence: Synthetic oligonucleotide
gagcugucacccuuccccu

SEQ ID NO: 600255 - RNA, 19 nt, Artificial Sequence
  Description of Artificial Sequence: Synthetic oligonucleotide
auccccgaccccucgucau

SEQ ID NO: 600256 - RNA, 19 nt, Artificial Sequence
  Description of Artificial Sequence: Synthetic oligonucleotide
agagccggugggguggccu

SEQ ID NO: 600257 - RNA, 19 nt, Artificial Sequence
  Description of Artificial Sequence: Synthetic oligonucleotide
gaccccacagugguuccuc

SEQ ID NO: 600258 - RNA, 19 nt, Artificial Sequence
  Description of Artificial Sequence: Synthetic oligonucleotide
acggggucaaggaaacuuu

SEQ ID NO: 600259 - RNA, 19 nt, Artificial Sequence
  Description of Artificial Sequence: Synthetic oligonucleotide
ugugaacgugccggcugcu

SEQ ID NO: 600260 - RNA, 19 nt, Artificial Sequence
  Description of Artificial Sequence: Synthetic oligonucleotide
cagacucgggcuggugagc

SEQ ID NO: 600261 - RNA, 19 nt, Artificial Sequence
  Description of Artificial Sequence: Synthetic oligonucleotide
uuccagaguagggcccuuc

SEQ ID NO: 600262 - RNA, 19 nt, Artificial Sequence
  Description of Artificial Sequence: Synthetic oligonucleotide
cugaaaccggaaugguacu

SEQ ID NO: 600263 - RNA, 19 nt, Artificial Sequence
  Description of Artificial Sequence: Synthetic oligonucleotide
gugaacgugccggcugcug

SEQ ID NO: 600264 - RNA, 19 nt, Artificial Sequence
  Description of Artificial Sequence: Synthetic oligonucleotide
aggcaauaccuuaguuccu

SEQ ID NO: 600265 - RNA, 19 nt, Artificial Sequence
  Description of Artificial Sequence: Synthetic oligonucleotide
ggcaauaccuuaguuccua

SEQ ID NO: 600266 - RNA, 19 nt, Artificial Sequence
  Description of Artificial Sequence: Synthetic oligonucleotide
acccuaagacguggcugag

SEQ ID NO: 600267 - RNA, 19 nt, Artificial Sequence
  Description of Artificial Sequence: Synthetic oligonucleotide
uccccgaccccucgucaua

SEQ ID NO: 600268 - RNA, 19 nt, Artificial Sequence
  Description of Artificial Sequence: Synthetic oligonucleotide
gagagagagagaacagcuu

SEQ ID NO: 600269 - RNA, 19 nt, Artificial Sequence
  Description of Artificial Sequence: Synthetic oligonucleotide
gucgauggguggacacgcc

SEQ ID NO: 600270 - RNA, 19 nt, Artificial Sequence
  Description of Artificial Sequence: Synthetic oligonucleotide
cgcgagaugccccucuccc

SEQ ID NO: 600271 - RNA, 19 nt, Artificial Sequence
  Description of Artificial Sequence: Synthetic oligonucleotide
cacaaggugcuaguaaaau

SEQ ID NO: 600272 - RNA, 19 nt, Artificial Sequence
  Description of Artificial Sequence: Synthetic oligonucleotide
guaagccuggggcccgcga

SEQ ID NO: 600273 - RNA, 19 nt, Artificial Sequence
  Description of Artificial Sequence: Synthetic oligonucleotide
ccgauggaucuucaagauc

SEQ ID NO: 600274 - RNA, 19 nt, Artificial Sequence
  Description of Artificial Sequence: Synthetic oligonucleotide
cuguacuauccgcucugaa

SEQ ID NO: 600275 - RNA, 19 nt, Artificial Sequence
  Description of Artificial Sequence: Synthetic oligonucleotide
ccggaaauacaucuaaaau

SEQ ID NO: 600276 - RNA, 19 nt, Artificial Sequence
  Description of Artificial Sequence: Synthetic oligonucleotide
ccccugugaccccacagug

SEQ ID NO: 600277 - RNA, 19 nt, Artificial Sequence
  Description of Artificial Sequence: Synthetic oligonucleotide
ggagagagagagagagaga

SEQ ID NO: 600278 - RNA, 19 nt, Artificial Sequence
  Description of Artificial Sequence: Synthetic oligonucleotide
ugcccacucagggcagggu

SEQ ID NO: 600279 - RNA, 19 nt, Artificial Sequence
  Description of Artificial Sequence: Synthetic oligonucleotide
cauccccgaccccucguca

SEQ ID NO: 600280 - RNA, 19 nt, Artificial Sequence
  Description of Artificial Sequence: Synthetic oligonucleotide
ccguguucacaacaaggga

SEQ ID NO: 600281 - RNA, 19 nt, Artificial Sequence
  Description of Artificial Sequence: Synthetic oligonucleotide
cuuccacguggcuuagccu

SEQ ID NO: 600282 - RNA, 19 nt, Artificial Sequence
  Description of Artificial Sequence: Synthetic oligonucleotide
ggccccugugaacgugccg

SEQ ID NO: 600283 - RNA, 19 nt, Artificial Sequence
  Description of Artificial Sequence: Synthetic oligonucleotide
ggcuacugcugugcgacuc

SEQ ID NO: 600284 - RNA, 19 nt, Artificial Sequence
  Description of Artificial Sequence: Synthetic oligonucleotide
ccuuaguuccuaagaggaa

SEQ ID NO: 600285 - RNA, 19 nt, Artificial Sequence
  Description of Artificial Sequence: Synthetic oligonucleotide
cccauuccgauggaucuuc

SEQ ID NO: 600286 - RNA, 19 nt, Artificial Sequence
  Description of Artificial Sequence: Synthetic oligonucleotide
caaccuaacuguggguccu

SEQ ID NO: 600287 - RNA, 19 nt, Artificial Sequence
  Description of Artificial Sequence: Synthetic oligonucleotide
ggacucgauacaagaguaa

SEQ ID NO: 600288 - RNA, 19 nt, Artificial Sequence
  Description of Artificial Sequence: Synthetic oligonucleotide
cggguguagaaacaaaccu

SEQ ID NO: 600289 - RNA, 19 nt, Artificial Sequence
  Description of Artificial Sequence: Synthetic oligonucleotide
gcucacgaugccacccagc

SEQ ID NO: 600290 - RNA, 19 nt, Artificial Sequence
  Description of Artificial Sequence: Synthetic oligonucleotide
ccacuaacacaccaaccua

SEQ ID NO: 600291 - RNA, 19 nt, Artificial Sequence
  Description of Artificial Sequence: Synthetic oligonucleotide
gcgagaugccccucuccca

SEQ ID NO: 600292 - RNA, 19 nt, Artificial Sequence
  Description of Artificial Sequence: Synthetic oligonucleotide
ccuuugugugagaaagacu

SEQ ID NO: 600293 - RNA, 19 nt, Artificial Sequence
  Description of Artificial Sequence: Synthetic oligonucleotide
caauacccacagcuccucu

SEQ ID NO: 600294 - RNA, 19 nt, Artificial Sequence
  Description of Artificial Sequence: Synthetic oligonucleotide
cccggacccuaagacgugg

SEQ ID NO: 600295 - RNA, 19 nt, Artificial Sequence
  Description of Artificial Sequence: Synthetic oligonucleotide
agggugccuuggccuagaa

SEQ ID NO: 600296 - RNA, 19 nt, Artificial Sequence
  Description of Artificial Sequence: Synthetic oligonucleotide
acccacuaucuagccugcu

SEQ ID NO: 600297 - RNA, 19 nt, Artificial Sequence
  Description of Artificial Sequence: Synthetic oligonucleotide
ggcugauguagcggggcuc

SEQ ID NO: 600298 - RNA, 19 nt, Artificial Sequence
  Description of Artificial Sequence: Synthetic oligonucleotide
gcauccccgaccccucguc

SEQ ID NO: 600299 - RNA, 19 nt, Artificial Sequence
  Description of Artificial Sequence: Synthetic oligonucleotide
caaguuggcagggccacuu

SEQ ID NO: 600300 - RNA, 19 nt, Artificial Sequence
  Description of Artificial Sequence: Synthetic oligonucleotide
gcgaagagcuggugugaaa

SEQ ID NO: 600301 - RNA, 19 nt, Artificial Sequence
  Description of Artificial Sequence: Synthetic oligonucleotide
gcguggcucacugcacgcc

SEQ ID NO: 600302 - RNA, 19 nt, Artificial Sequence
  Description of Artificial Sequence: Synthetic oligonucleotide
accccucgucauacaagaa

SEQ ID NO: 600303 - RNA, 19 nt, Artificial Sequence
  Description of Artificial Sequence: Synthetic oligonucleotide
ccaggcuacugcugugcga

SEQ ID NO: 600304 - RNA, 19 nt, Artificial Sequence
  Description of Artificial Sequence: Synthetic oligonucleotide
gccgccuuugugugagaaa

SEQ ID NO: 600305 - RNA, 19 nt, Artificial Sequence
  Description of Artificial Sequence: Synthetic oligonucleotide
gcucgugguggggagaggu

SEQ ID NO: 600306 - RNA, 19 nt, Artificial Sequence
  Description of Artificial Sequence: Synthetic oligonucleotide
ccggcugcuguauauucgu

SEQ ID NO: 600307 - RNA, 19 nt, Artificial Sequence
  Description of Artificial Sequence: Synthetic oligonucleotide
ggggcccgcgagaugcccc

SEQ ID NO: 600308 - RNA, 19 nt, Artificial Sequence
  Description of Artificial Sequence: Synthetic oligonucleotide
aggccgccuuugugugaga

SEQ ID NO: 600309 - RNA, 19 nt, Artificial Sequence
  Description of Artificial Sequence: Synthetic oligonucleotide
cuccgccaagcugcaucuc

SEQ ID NO: 600310 - RNA, 19 nt, Artificial Sequence
  Description of Artificial Sequence: Synthetic oligonucleotide
cggcugcuguauauucgug

SEQ ID NO: 600311 - RNA, 19 nt, Artificial Sequence
  Description of Artificial Sequence: Synthetic oligonucleotide
ggccgccuuugugugagaa

SEQ ID NO: 600312 - RNA, 19 nt, Artificial Sequence
  Description of Artificial Sequence: Synthetic oligonucleotide
ccgaccccucgucauacaa

SEQ ID NO: 600313 - RNA, 19 nt, Artificial Sequence
  Description of Artificial Sequence: Synthetic oligonucleotide
gcccucccugggccgggcg

SEQ ID NO: 600314 - RNA, 19 nt, Artificial Sequence
  Description of Artificial Sequence: Synthetic oligonucleotide
ccccggacccuaagacgug

SEQ ID NO: 600315 - RNA, 19 nt, Artificial Sequence
  Description of Artificial Sequence: Synthetic oligonucleotide
ccccgaccccucgucauac

SEQ ID NO: 600316 - RNA, 19 nt, Artificial Sequence
  Description of Artificial Sequence: Synthetic oligonucleotide
ccggaaugguacucaaguu

SEQ ID NO: 600317 - RNA, 19 nt, Artificial Sequence
  Description of Artificial Sequence: Synthetic oligonucleotide
cgcucgcuccaccugcuca

SEQ ID NO: 600318 - RNA, 19 nt, Artificial Sequence
  Description of Artificial Sequence: Synthetic oligonucleotide
cacguggcuuagccugggu

SEQ ID NO: 600319 - RNA, 19 nt, Artificial Sequence
  Description of Artificial Sequence: Synthetic oligonucleotide
gggcccgcgagaugccccu

SEQ ID NO: 600320 - RNA, 19 nt, Artificial Sequence
  Description of Artificial Sequence: Synthetic oligonucleotide
ccgcucugaaagacagagu

SEQ ID NO: 600321 - RNA, 19 nt, Artificial Sequence
  Description of Artificial Sequence: Synthetic oligonucleotide
acgcggcuucagggcgugu

SEQ ID NO: 600322 - RNA, 19 nt, Artificial Sequence
  Description of Artificial Sequence: Synthetic oligonucleotide
guuccagaguagggcccuu

SEQ ID NO: 600323 - RNA, 19 nt, Artificial Sequence
  Description of Artificial Sequence: Synthetic oligonucleotide
cccgaccccucgucauaca

SEQ ID NO: 600324 - RNA, 19 nt, Artificial Sequence
  Description of Artificial Sequence: Synthetic oligonucleotide
ggacggggucaaggaaacu

SEQ ID NO: 600325 - RNA, 19 nt, Artificial Sequence
  Description of Artificial Sequence: Synthetic oligonucleotide
cggccaugcuccgcucgcu

SEQ ID NO: 600326 - RNA, 19 nt, Artificial Sequence
  Description of Artificial Sequence: Synthetic oligonucleotide
cccgggcccuggggacaga

SEQ ID NO: 600327 - RNA, 19 nt, Artificial Sequence
  Description of Artificial Sequence: Synthetic oligonucleotide
aaaaucucuacucuaaacc

SEQ ID NO: 600328 - RNA, 19 nt, Artificial Sequence
  Description of Artificial Sequence: Synthetic oligonucleotide
aaaucaacggguguuaacc

SEQ ID NO: 600329 - RNA, 19 nt, Artificial Sequence
  Description of Artificial Sequence: Synthetic oligonucleotide
uugaccauaacccagcugc

SEQ ID NO: 600330 - RNA, 19 nt, Artificial Sequence
  Description of Artificial Sequence: Synthetic oligonucleotide
ucaucaaguuauaaaaugc

SEQ ID NO: 600331 - RNA, 19 nt, Artificial Sequence
  Description of Artificial Sequence: Synthetic oligonucleotide
guaaaugaagcacacagcc

SEQ ID NO: 600332 - RNA, 19 nt, Artificial Sequence
  Description of Artificial Sequence: Synthetic oligonucleotide
acauauacgaugucaggcc

SEQ ID NO: 600333 - RNA, 19 nt, Artificial Sequence
  Description of Artificial Sequence: Synthetic oligonucleotide
acucaaguaagacaagugg

SEQ ID NO: 600334 - RNA, 19 nt, Artificial Sequence
  Description of Artificial Sequence: Synthetic oligonucleotide
uuucaguugguacagggag

SEQ ID NO: 600335 - RNA, 19 nt, Artificial Sequence
  Description of Artificial Sequence: Synthetic oligonucleotide
ucaaguuauaaaaugcaga

SEQ ID NO: 600336 - RNA, 19 nt, Artificial Sequence
  Description of Artificial Sequence: Synthetic oligonucleotide
aaagauaggguguuggggu

SEQ ID NO: 600337 - RNA, 19 nt, Artificial Sequence
  Description of Artificial Sequence: Synthetic oligonucleotide
aaaucucuacucuaaacca

SEQ ID NO: 600338 - RNA, 19 nt, Artificial Sequence
  Description of Artificial Sequence: Synthetic oligonucleotide
uagaagaccaauuuccuug

SEQ ID NO: 600339 - RNA, 19 nt, Artificial Sequence
  Description of Artificial Sequence: Synthetic oligonucleotide
aaaagauaggguguugggg

SEQ ID NO: 600340 - RNA, 19 nt, Artificial Sequence
  Description of Artificial Sequence: Synthetic oligonucleotide
auuguauccccuuacaaga

SEQ ID NO: 600341 - RNA, 19 nt, Artificial Sequence
  Description of Artificial Sequence: Synthetic oligonucleotide
acggguguuaaccauuugc

SEQ ID NO: 600342 - RNA, 19 nt, Artificial Sequence
  Description of Artificial Sequence: Synthetic oligonucleotide
aauaagccgcuucugcuuc

SEQ ID NO: 600343 - RNA, 19 nt, Artificial Sequence
  Description of Artificial Sequence: Synthetic oligonucleotide
agaaaguauuagcaaaauc

SEQ ID NO: 600344 - RNA, 19 nt, Artificial Sequence
  Description of Artificial Sequence: Synthetic oligonucleotide
ucagcuagccugcugagag

SEQ ID NO: 600345 - RNA, 19 nt, Artificial Sequence
  Description of Artificial Sequence: Synthetic oligonucleotide
ugcacauauacgaugucag

SEQ ID NO: 600346 - RNA, 19 nt, Artificial Sequence
  Description of Artificial Sequence: Synthetic oligonucleotide
uguuuagcuuugaugaggc

SEQ ID NO: 600347 - RNA, 19 nt, Artificial Sequence
  Description of Artificial Sequence: Synthetic oligonucleotide
uugagauucugucagcaca

SEQ ID NO: 600348 - RNA, 19 nt, Artificial Sequence
  Description of Artificial Sequence: Synthetic oligonucleotide
cucaucaaguuauaaaaug

SEQ ID NO: 600349 - RNA, 19 nt, Artificial Sequence
  Description of Artificial Sequence: Synthetic oligonucleotide
ugguagaacaaaauaauuu

SEQ ID NO: 600350 - RNA, 19 nt, Artificial Sequence
  Description of Artificial Sequence: Synthetic oligonucleotide
agguucacauuucaguugg

SEQ ID NO: 600351 - RNA, 19 nt, Artificial Sequence
  Description of Artificial Sequence: Synthetic oligonucleotide
aagaacuaaaucaacgggu

SEQ ID NO: 600352 - RNA, 19 nt, Artificial Sequence
  Description of Artificial Sequence: Synthetic oligonucleotide
aguuaauccuauugagaac

SEQ ID NO: 600353 - RNA, 19 nt, Artificial Sequence
  Description of Artificial Sequence: Synthetic oligonucleotide
ucuaaguaacaucuuuugu

SEQ ID NO: 600354 - RNA, 19 nt, Artificial Sequence
  Description of Artificial Sequence: Synthetic oligonucleotide
gguagaacaaaauaauuuc

SEQ ID NO: 600355 - RNA, 19 nt, Artificial Sequence
  Description of Artificial Sequence: Synthetic oligonucleotide
uaaguaacaucuuuuguuu

SEQ ID NO: 600356 - RNA, 19 nt, Artificial Sequence
  Description of Artificial Sequence: Synthetic oligonucleotide
aguccucucaggaauaagc

SEQ ID NO: 600357 - RNA, 19 nt, Artificial Sequence
  Description of Artificial Sequence: Synthetic oligonucleotide
ucuacucuaaaccauuauu

SEQ ID NO: 600358 - RNA, 19 nt, Artificial Sequence
  Description of Artificial Sequence: Synthetic oligonucleotide
ucuauuguauccccuuaca

SEQ ID NO: 600359 - RNA, 19 nt, Artificial Sequence
  Description of Artificial Sequence: Synthetic oligonucleotide
cacaguuaauccuauugag

SEQ ID NO: 600360 - RNA, 19 nt, Artificial Sequence
  Description of Artificial Sequence: Synthetic oligonucleotide
gauaacaaacuuaggcugc

SEQ ID NO: 600361 - RNA, 19 nt, Artificial Sequence
  Description of Artificial Sequence: Synthetic oligonucleotide
aggacuuuggagauugacc

SEQ ID NO: 600362 - RNA, 19 nt, Artificial Sequence
  Description of Artificial Sequence: Synthetic oligonucleotide
gguagauacacauacugac

SEQ ID NO: 600363 - RNA, 19 nt, Artificial Sequence
  Description of Artificial Sequence: Synthetic oligonucleotide
cauauacgaugucaggccg

SEQ ID NO: 600364 - RNA, 19 nt, Artificial Sequence
  Description of Artificial Sequence: Synthetic oligonucleotide
uccucucaggaauaagccg

SEQ ID NO: 600365 - RNA, 19 nt, Artificial Sequence
  Description of Artificial Sequence: Synthetic oligonucleotide
aguccagucucaaacuucc

SEQ ID NO: 600366 - RNA, 19 nt, Artificial Sequence
  Description of Artificial Sequence: Synthetic oligonucleotide
cacauauacgaugucaggc

SEQ ID NO: 600367 - RNA, 19 nt, Artificial Sequence
  Description of Artificial Sequence: Synthetic oligonucleotide
ugugggaguuuccuggugc

SEQ ID NO: 600368 - RNA, 19 nt, Artificial Sequence
  Description of Artificial Sequence: Synthetic oligonucleotide
auagaaggggcucuggaga

SEQ ID NO: 600369 - RNA, 19 nt, Artificial Sequence
  Description of Artificial Sequence: Synthetic oligonucleotide
ugagauucugucagcacac

SEQ ID NO: 600370 - RNA, 19 nt, Artificial Sequence
  Description of Artificial Sequence: Synthetic oligonucleotide
uacgaugucaggccgguga

SEQ ID NO: 600371 - RNA, 19 nt, Artificial Sequence
  Description of Artificial Sequence: Synthetic oligonucleotide
aaugccuguagcugugaug

SEQ ID NO: 600372 - RNA, 19 nt, Artificial Sequence
  Description of Artificial Sequence: Synthetic oligonucleotide
gagagaguaaaugaagcac

SEQ ID NO: 600373 - RNA, 19 nt, Artificial Sequence
  Description of Artificial Sequence: Synthetic oligonucleotide
caucuugucuccauagaag

SEQ ID NO: 600374 - RNA, 19 nt, Artificial Sequence
  Description of Artificial Sequence: Synthetic oligonucleotide
uacucuaaaccauuauuuc

SEQ ID NO: 600375 - RNA, 19 nt, Artificial Sequence
  Description of Artificial Sequence: Synthetic oligonucleotide
aaucaacggguguuaacca

SEQ ID NO: 600376 - RNA, 19 nt, Artificial Sequence
  Description of Artificial Sequence: Synthetic oligonucleotide
uguagcugugaugaacacg

SEQ ID NO: 600377 - RNA, 19 nt, Artificial Sequence
  Description of Artificial Sequence: Synthetic oligonucleotide
gaucuuauguaguccaguc

SEQ ID NO: 600378 - RNA, 19 nt, Artificial Sequence
  Description of Artificial Sequence: Synthetic oligonucleotide
ugaggcaugcugcauucag

SEQ ID NO: 600379 - RNA, 19 nt, Artificial Sequence
  Description of Artificial Sequence: Synthetic oligonucleotide
uuugaugaggcaugcugca

SEQ ID NO: 600380 - RNA, 19 nt, Artificial Sequence
  Description of Artificial Sequence: Synthetic oligonucleotide
ugauucucaugguccacgg

SEQ ID NO: 600381 - RNA, 19 nt, Artificial Sequence
  Description of Artificial Sequence: Synthetic oligonucleotide
ucggacucccuccaugggg

SEQ ID NO: 600382 - RNA, 19 nt, Artificial Sequence
  Description of Artificial Sequence: Synthetic oligonucleotide
gaggacucaaguaagacaa

SEQ ID NO: 600383 - RNA, 19 nt, Artificial Sequence
  Description of Artificial Sequence: Synthetic oligonucleotide
gcagcgaaaagauagggug

SEQ ID NO: 600384 - RNA, 19 nt, Artificial Sequence
  Description of Artificial Sequence: Synthetic oligonucleotide
acggacuugaguuuucuga

SEQ ID NO: 600385 - RNA, 19 nt, Artificial Sequence
  Description of Artificial Sequence: Synthetic oligonucleotide
uucuauuguauccccuuac

SEQ ID NO: 600386 - RNA, 19 nt, Artificial Sequence
  Description of Artificial Sequence: Synthetic oligonucleotide
gguucaguugcuuuagaag

SEQ ID NO: 600387 - RNA, 19 nt, Artificial Sequence
  Description of Artificial Sequence: Synthetic oligonucleotide
caguuaauccuauugagaa

SEQ ID NO: 600388 - RNA, 19 nt, Artificial Sequence
  Description of Artificial Sequence: Synthetic oligonucleotide
agaacuaaaucaacgggug

SEQ ID NO: 600389 - RNA, 19 nt, Artificial Sequence
  Description of Artificial Sequence: Synthetic oligonucleotide
aguugguacagggagcuuc

SEQ ID NO: 600390 - RNA, 19 nt, Artificial Sequence
  Description of Artificial Sequence: Synthetic oligonucleotide
guuguauuuuaauucuuga

SEQ ID NO: 600391 - RNA, 19 nt, Artificial Sequence
  Description of Artificial Sequence: Synthetic oligonucleotide
uuguauccccuuacaagag

SEQ ID NO: 600392 - RNA, 19 nt, Artificial Sequence
  Description of Artificial Sequence: Synthetic oligonucleotide
uccucuggcacuuaaguuu

SEQ ID NO: 600393 - RNA, 19 nt, Artificial Sequence
  Description of Artificial Sequence: Synthetic oligonucleotide
gaagaaaccaggccgaggu

SEQ ID NO: 600394 - RNA, 19 nt, Artificial Sequence
  Description of Artificial Sequence: Synthetic oligonucleotide
aacuaaaucaacggguguu

SEQ ID NO: 600395 - RNA, 19 nt, Artificial Sequence
  Description of Artificial Sequence: Synthetic oligonucleotide
gagguucacauuucaguug

SEQ ID NO: 600396 - RNA, 19 nt, Artificial Sequence
  Description of Artificial Sequence: Synthetic oligonucleotide
uucucguggauccucucug

SEQ ID NO: 600397 - RNA, 19 nt, Artificial Sequence
  Description of Artificial Sequence: Synthetic oligonucleotide
agguaccaagaacuaaauc

SEQ ID NO: 600398 - RNA, 19 nt, Artificial Sequence
  Description of Artificial Sequence: Synthetic oligonucleotide
ugguccacggacuugaguu

SEQ ID NO: 600399 - RNA, 19 nt, Artificial Sequence
  Description of Artificial Sequence: Synthetic oligonucleotide
uaucauacagugagccaca

SEQ ID NO: 600400 - RNA, 19 nt, Artificial Sequence
  Description of Artificial Sequence: Synthetic oligonucleotide
agagaguaaaugaagcaca

SEQ ID NO: 600401 - RNA, 19 nt, Artificial Sequence
  Description of Artificial Sequence: Synthetic oligonucleotide
cacuaauuggucaggucag

SEQ ID NO: 600402 - RNA, 19 nt, Artificial Sequence
  Description of Artificial Sequence: Synthetic oligonucleotide
guuaaccauuugcaaaggc

SEQ ID NO: 600403 - RNA, 19 nt, Artificial Sequence
  Description of Artificial Sequence: Synthetic oligonucleotide
uguauccccuuacaagaga

SEQ ID NO: 600404 - RNA, 19 nt, Artificial Sequence
  Description of Artificial Sequence: Synthetic oligonucleotide
gaggcgaugguacauggca

SEQ ID NO: 600405 - RNA, 19 nt, Artificial Sequence
  Description of Artificial Sequence: Synthetic oligonucleotide
agaguucaaagaaaggacu

SEQ ID NO: 600406 - RNA, 19 nt, Artificial Sequence
  Description of Artificial Sequence: Synthetic oligonucleotide
agauacacauacugaccag

SEQ ID NO: 600407 - RNA, 19 nt, Artificial Sequence
  Description of Artificial Sequence: Synthetic oligonucleotide
uaaaucaacggguguuaac

SEQ ID NO: 600408 - RNA, 19 nt, Artificial Sequence
  Description of Artificial Sequence: Synthetic oligonucleotide
uucagaguagugcuccccu

SEQ ID NO: 600409 - RNA, 19 nt, Artificial Sequence
  Description of Artificial Sequence: Synthetic oligonucleotide
uggaucaccugccacugcu

SEQ ID NO: 600410 - RNA, 19 nt, Artificial Sequence
  Description of Artificial Sequence: Synthetic oligonucleotide
acguuggcgggcuugaugu

SEQ ID NO: 600411 - RNA, 19 nt, Artificial Sequence
  Description of Artificial Sequence: Synthetic oligonucleotide
ucuaaaccauuauuucuau

SEQ ID NO: 600412 - RNA, 19 nt, Artificial Sequence
  Description of Artificial Sequence: Synthetic oligonucleotide
acuaauuggucaggucagc

SEQ ID NO: 600413 - RNA, 19 nt, Artificial Sequence
  Description of Artificial Sequence: Synthetic oligonucleotide
gacucaaguaagacaagug

SEQ ID NO: 600414 - RNA, 19 nt, Artificial Sequence
  Description of Artificial Sequence: Synthetic oligonucleotide
uguucggacucccuccaug

SEQ ID NO: 600415 - RNA, 19 nt, Artificial Sequence
  Description of Artificial Sequence: Synthetic oligonucleotide
cacugaacuguccucggcc

SEQ ID NO: 600416 - RNA, 19 nt, Artificial Sequence
  Description of Artificial Sequence: Synthetic oligonucleotide
cuuucagcuagccugcuga

SEQ ID NO: 600417 - RNA, 19 nt, Artificial Sequence
  Description of Artificial Sequence: Synthetic oligonucleotide
uaauuggucaggucagcuc

SEQ ID NO: 600418 - RNA, 19 nt, Artificial Sequence
  Description of Artificial Sequence: Synthetic oligonucleotide
cucggugcaucacacgccg

SEQ ID NO: 600419 - RNA, 19 nt, Artificial Sequence
  Description of Artificial Sequence: Synthetic oligonucleotide
uggcacuuaaguuuccuua

SEQ ID NO: 600420 - RNA, 19 nt, Artificial Sequence
  Description of Artificial Sequence: Synthetic oligonucleotide
cagagaaaguauuagcaaa

SEQ ID NO: 600421 - RNA, 19 nt, Artificial Sequence
  Description of Artificial Sequence: Synthetic oligonucleotide
cucuaaaccauuauuucua

SEQ ID NO: 600422 - RNA, 19 nt, Artificial Sequence
  Description of Artificial Sequence: Synthetic oligonucleotide
gagcagcgaaaagauaggg

SEQ ID NO: 600423 - RNA, 19 nt, Artificial Sequence
  Description of Artificial Sequence: Synthetic oligonucleotide
cuaaguaacaucuuuuguu

SEQ ID NO: 600424 - RNA, 19 nt, Artificial Sequence
  Description of Artificial Sequence: Synthetic oligonucleotide
ugguucaguugcuuuagaa

SEQ ID NO: 600425 - RNA, 19 nt, Artificial Sequence
  Description of Artificial Sequence: Synthetic oligonucleotide
cagaguagugcuccccugg

SEQ ID NO: 600426 - RNA, 19 nt, Artificial Sequence
  Description of Artificial Sequence: Synthetic oligonucleotide
uuaauccuauugagaacaa

SEQ ID NO: 600427 - RNA, 19 nt, Artificial Sequence
  Description of Artificial Sequence: Synthetic oligonucleotide
agucucaaacuucccauau

SEQ ID NO: 600428 - RNA, 19 nt, Artificial Sequence
  Description of Artificial Sequence: Synthetic oligonucleotide
cuggugcacauauacgaug

SEQ ID NO: 600429 - RNA, 19 nt, Artificial Sequence
  Description of Artificial Sequence: Synthetic oligonucleotide
ucucggugcaucacacgcc

SEQ ID NO: 600430 - RNA, 19 nt, Artificial Sequence
  Description of Artificial Sequence: Synthetic oligonucleotide
aggaggcgaugguacaugg

SEQ ID NO: 600431 - RNA, 19 nt, Artificial Sequence
  Description of Artificial Sequence: Synthetic oligonucleotide
agagguuguucggacuccc

SEQ ID NO: 600432 - RNA, 19 nt, Artificial Sequence
  Description of Artificial Sequence: Synthetic oligonucleotide
agaggucgccugcaucagc

SEQ ID NO: 600433 - RNA, 19 nt, Artificial Sequence
  Description of Artificial Sequence: Synthetic oligonucleotide
gucgcacgcgacuuggcgg

SEQ ID NO: 600434 - RNA, 19 nt, Artificial Sequence
  Description of Artificial Sequence: Synthetic oligonucleotide
cacuuaucauacagugagc

SEQ ID NO: 600435 - RNA, 19 nt, Artificial Sequence
  Description of Artificial Sequence: Synthetic oligonucleotide
ucacugaacuguccucggc

SEQ ID NO: 600436 - RNA, 19 nt, Artificial Sequence
  Description of Artificial Sequence: Synthetic oligonucleotide
ugccaaugcuggcugcucc

SEQ ID NO: 600437 - RNA, 19 nt, Artificial Sequence
  Description of Artificial Sequence: Synthetic oligonucleotide
ucaacggguguuaaccauu

SEQ ID NO: 600438 - RNA, 19 nt, Artificial Sequence
  Description of Artificial Sequence: Synthetic oligonucleotide
uuucagaguagugcucccc

SEQ ID NO: 600439 - RNA, 19 nt, Artificial Sequence
  Description of Artificial Sequence: Synthetic oligonucleotide
cugagcugaagaagcggcc

SEQ ID NO: 600440 - RNA, 19 nt, Artificial Sequence
  Description of Artificial Sequence: Synthetic oligonucleotide
uucggacucccuccauggg

SEQ ID NO: 600441 - RNA, 19 nt, Artificial Sequence
  Description of Artificial Sequence: Synthetic oligonucleotide
gaagaggaggacccuccug

SEQ ID NO: 600442 - RNA, 19 nt, Artificial Sequence
  Description of Artificial Sequence: Synthetic oligonucleotide
auauacgaugucaggccgg

SEQ ID NO: 600443 - RNA, 19 nt, Artificial Sequence
  Description of Artificial Sequence: Synthetic oligonucleotide
ugauuugcaucucguguuu

SEQ ID NO: 600444 - RNA, 19 nt, Artificial Sequence
  Description of Artificial Sequence: Synthetic oligonucleotide
agugacugcccucacuaau

SEQ ID NO: 600445 - RNA, 19 nt, Artificial Sequence
  Description of Artificial Sequence: Synthetic oligonucleotide
cucaaucuggaaguccgcc

SEQ ID NO: 600446 - RNA, 19 nt, Artificial Sequence
  Description of Artificial Sequence: Synthetic oligonucleotide
uauccccuuacaagagaga

SEQ ID NO: 600447 - RNA, 19 nt, Artificial Sequence
  Description of Artificial Sequence: Synthetic oligonucleotide
gauucugucagcacacuua

SEQ ID NO: 600448 - RNA, 19 nt, Artificial Sequence
  Description of Artificial Sequence: Synthetic oligonucleotide
ugcaucacacgccgggagu

SEQ ID NO: 600449 - RNA, 19 nt, Artificial Sequence
  Description of Artificial Sequence: Synthetic oligonucleotide
aguaagacaagugguguuu

SEQ ID NO: 600450 - RNA, 19 nt, Artificial Sequence
  Description of Artificial Sequence: Synthetic oligonucleotide
ucagaguagugcuccccug

SEQ ID NO: 600451 - RNA, 19 nt, Artificial Sequence
  Description of Artificial Sequence: Synthetic oligonucleotide
acgccgggagugcaugugc

SEQ ID NO: 600452 - RNA, 19 nt, Artificial Sequence
  Description of Artificial Sequence: Synthetic oligonucleotide
accauaacccagcugcuuu

SEQ ID NO: 600453 - RNA, 19 nt, Artificial Sequence
  Description of Artificial Sequence: Synthetic oligonucleotide
uauacgaugucaggccggu

SEQ ID NO: 600454 - RNA, 19 nt, Artificial Sequence
  Description of Artificial Sequence: Synthetic oligonucleotide
gugauuggggucaggguag

SEQ ID NO: 600455 - RNA, 19 nt, Artificial Sequence
  Description of Artificial Sequence: Synthetic oligonucleotide
guccucucaggaauaagcc

SEQ ID NO: 600456 - RNA, 19 nt, Artificial Sequence
  Description of Artificial Sequence: Synthetic oligonucleotide
ugugucuaaguaacaucuu

SEQ ID NO: 600457 - RNA, 19 nt, Artificial Sequence
  Description of Artificial Sequence: Synthetic oligonucleotide
caaacuucccauauugccu

SEQ ID NO: 600458 - RNA, 19 nt, Artificial Sequence
  Description of Artificial Sequence: Synthetic oligonucleotide
uccccuuacaagagagagu

SEQ ID NO: 600459 - RNA, 19 nt, Artificial Sequence
  Description of Artificial Sequence: Synthetic oligonucleotide
ugcugugucuaaguaacau

SEQ ID NO: 600460 - RNA, 19 nt, Artificial Sequence
  Description of Artificial Sequence: Synthetic oligonucleotide
agaggaggacccuccuguc

SEQ ID NO: 600461 - RNA, 19 nt, Artificial Sequence
  Description of Artificial Sequence: Synthetic oligonucleotide
caagugguguuuagcuuug

SEQ ID NO: 600462 - RNA, 19 nt, Artificial Sequence
  Description of Artificial Sequence: Synthetic oligonucleotide
aucaacggguguuaaccau

SEQ ID NO: 600463 - RNA, 19 nt, Artificial Sequence
  Description of Artificial Sequence: Synthetic oligonucleotide
ggagauugaccauaaccca

SEQ ID NO: 600464 - RNA, 19 nt, Artificial Sequence
  Description of Artificial Sequence: Synthetic oligonucleotide
ggcgaugguacauggcagg

SEQ ID NO: 600465 - RNA, 19 nt, Artificial Sequence
  Description of Artificial Sequence: Synthetic oligonucleotide
cuuggcggcgccguggccg

SEQ ID NO: 600466 - RNA, 19 nt, Artificial Sequence
  Description of Artificial Sequence: Synthetic oligonucleotide
ugaccauaacccagcugcu

SEQ ID NO: 600467 - RNA, 19 nt, Artificial Sequence
  Description of Artificial Sequence: Synthetic oligonucleotide
caggccgaggucaccaagc

SEQ ID NO: 600468 - RNA, 19 nt, Artificial Sequence
  Description of Artificial Sequence: Synthetic oligonucleotide
aacggguguuaaccauuug

SEQ ID NO: 600469 - RNA, 19 nt, Artificial Sequence
  Description of Artificial Sequence: Synthetic oligonucleotide
cuauuguauccccuuacaa

SEQ ID NO: 600470 - RNA, 19 nt, Artificial Sequence
  Description of Artificial Sequence: Synthetic oligonucleotide
cucacuaauuggucagguc

SEQ ID NO: 600471 - RNA, 19 nt, Artificial Sequence
  Description of Artificial Sequence: Synthetic oligonucleotide
ucgcacgcgacuuggcggc

SEQ ID NO: 600472 - RNA, 19 nt, Artificial Sequence
  Description of Artificial Sequence: Synthetic oligonucleotide
agauucaucuugucuccau

SEQ ID NO: 600473 - RNA, 19 nt, Artificial Sequence
  Description of Artificial Sequence: Synthetic oligonucleotide
acccuguuugcuacaaguc

SEQ ID NO: 600474 - RNA, 19 nt, Artificial Sequence
  Description of Artificial Sequence: Synthetic oligonucleotide
aguucaaagaaaggacuuu

SEQ ID NO: 600475 - RNA, 19 nt, Artificial Sequence
  Description of Artificial Sequence: Synthetic oligonucleotide
acuaaaucaacggguguua

SEQ ID NO: 600476 - RNA, 19 nt, Artificial Sequence
  Description of Artificial Sequence: Synthetic oligonucleotide
ucacccuguuugcuacaag

SEQ ID NO: 600477 - RNA, 19 nt, Artificial Sequence
  Description of Artificial Sequence: Synthetic oligonucleotide
caguccagucucaaacuuc

SEQ ID NO: 600478 - RNA, 19 nt, Artificial Sequence
  Description of Artificial Sequence: Synthetic oligonucleotide
gaugaacacguuggcgggc

SEQ ID NO: 600479 - RNA, 19 nt, Artificial Sequence
  Description of Artificial Sequence: Synthetic oligonucleotide
gcagguagccuuguaaacc

SEQ ID NO: 600480 - RNA, 19 nt, Artificial Sequence
  Description of Artificial Sequence: Synthetic oligonucleotide
caugugcuccacagcacug

SEQ ID NO: 600481 - RNA, 19 nt, Artificial Sequence
  Description of Artificial Sequence: Synthetic oligonucleotide
gugcacauauacgauguca

SEQ ID NO: 600482 - RNA, 19 nt, Artificial Sequence
  Description of Artificial Sequence: Synthetic oligonucleotide
gaacuaaaucaacgggugu

SEQ ID NO: 600483 - RNA, 19 nt, Artificial Sequence
  Description of Artificial Sequence: Synthetic oligonucleotide
aacacguuggcgggcuuga

SEQ ID NO: 600484 - RNA, 19 nt, Artificial Sequence
  Description of Artificial Sequence: Synthetic oligonucleotide
aagaaaccaggccgagguu

SEQ ID NO: 600485 - RNA, 19 nt, Artificial Sequence
  Description of Artificial Sequence: Synthetic oligonucleotide
cagcuaguccgccugguuc

SEQ ID NO: 600486 - RNA, 19 nt, Artificial Sequence
  Description of Artificial Sequence: Synthetic oligonucleotide
agcagcgaaaagauagggu

SEQ ID NO: 600487 - RNA, 19 nt, Artificial Sequence
  Description of Artificial Sequence: Synthetic oligonucleotide
ugugagaggucgccugcau

SEQ ID NO: 600488 - RNA, 19 nt, Artificial Sequence
  Description of Artificial Sequence: Synthetic oligonucleotide
aaaccaggccgagguucac

SEQ ID NO: 600489 - RNA, 19 nt, Artificial Sequence
  Description of Artificial Sequence: Synthetic oligonucleotide
gaaaccaggccgagguuca

SEQ ID NO: 600490 - RNA, 19 nt, Artificial Sequence
  Description of Artificial Sequence: Synthetic oligonucleotide
ggucgcacgcgacuuggcg

SEQ ID NO: 600491 - RNA, 19 nt, Artificial Sequence
  Description of Artificial Sequence: Synthetic oligonucleotide
acuucccauauugccuagg

SEQ ID NO: 600492 - RNA, 19 nt, Artificial Sequence
  Description of Artificial Sequence: Synthetic oligonucleotide
cgaaaagauaggguguugg

SEQ ID NO: 600493 - RNA, 19 nt, Artificial Sequence
  Description of Artificial Sequence: Synthetic oligonucleotide
agagugcuccugguagaac

SEQ ID NO: 600494 - RNA, 19 nt, Artificial Sequence
  Description of Artificial Sequence: Synthetic oligonucleotide
uggcagagguuguucggac

SEQ ID NO: 600495 - RNA, 19 nt, Artificial Sequence
  Description of Artificial Sequence: Synthetic oligonucleotide
uguuugcuacaagucugac

SEQ ID NO: 600496 - RNA, 19 nt, Artificial Sequence
  Description of Artificial Sequence: Synthetic oligonucleotide
guuguucggacucccucca

SEQ ID NO: 600497 - RNA, 19 nt, Artificial Sequence
  Description of Artificial Sequence: Synthetic oligonucleotide
aucauacagugagccacag

SEQ ID NO: 600498 - RNA, 19 nt, Artificial Sequence
  Description of Artificial Sequence: Synthetic oligonucleotide
accaggccgagguucacau

SEQ ID NO: 600499 - RNA, 19 nt, Artificial Sequence
  Description of Artificial Sequence: Synthetic oligonucleotide
gaacacguuggcgggcuug

SEQ ID NO: 600500 - RNA, 19 nt, Artificial Sequence
  Description of Artificial Sequence: Synthetic oligonucleotide
ucggugcaucacacgccgg

SEQ ID NO: 600501 - RNA, 19 nt, Artificial Sequence
  Description of Artificial Sequence: Synthetic oligonucleotide
uuggcgggcuugaugucuc

SEQ ID NO: 600502 - RNA, 19 nt, Artificial Sequence
  Description of Artificial Sequence: Synthetic oligonucleotide
uggggugccucuguggguc

SEQ ID NO: 600503 - RNA, 19 nt, Artificial Sequence
  Description of Artificial Sequence: Synthetic oligonucleotide
guccgccugguucagccgc

SEQ ID NO: 600504 - RNA, 19 nt, Artificial Sequence
  Description of Artificial Sequence: Synthetic oligonucleotide
cugaagaaaccaggccgag

SEQ ID NO: 600505 - RNA, 19 nt, Artificial Sequence
  Description of Artificial Sequence: Synthetic oligonucleotide
ccuagagaccagaugucug

SEQ ID NO: 600506 - RNA, 19 nt, Artificial Sequence
  Description of Artificial Sequence: Synthetic oligonucleotide
cugguuguauggaaaggua

SEQ ID NO: 600507 - RNA, 19 nt, Artificial Sequence
  Description of Artificial Sequence: Synthetic oligonucleotide
cacggacuugaguuuucug

SEQ ID NO: 600508 - RNA, 19 nt, Artificial Sequence
  Description of Artificial Sequence: Synthetic oligonucleotide
uauugccuagggugacccu

SEQ ID NO: 600509 - RNA, 19 nt, Artificial Sequence
  Description of Artificial Sequence: Synthetic oligonucleotide
acgaggucacaggcggcgc

SEQ ID NO: 600510 - RNA, 19 nt, Artificial Sequence
  Description of Artificial Sequence: Synthetic oligonucleotide
guagccuuguaaaccucac

SEQ ID NO: 600511 - RNA, 19 nt, Artificial Sequence
  Description of Artificial Sequence: Synthetic oligonucleotide
gcagagguuguucggacuc

SEQ ID NO: 600512 - RNA, 19 nt, Artificial Sequence
  Description of Artificial Sequence: Synthetic oligonucleotide
acuuaggcugcugugucua

SEQ ID NO: 600513 - RNA, 19 nt, Artificial Sequence
  Description of Artificial Sequence: Synthetic oligonucleotide
caugccagccucacgaggu

SEQ ID NO: 600514 - RNA, 19 nt, Artificial Sequence
  Description of Artificial Sequence: Synthetic oligonucleotide
gcccucacuaauuggucag

SEQ ID NO: 600515 - RNA, 19 nt, Artificial Sequence
  Description of Artificial Sequence: Synthetic oligonucleotide
cugauuugcaucucguguu

SEQ ID NO: 600516 - RNA, 19 nt, Artificial Sequence
  Description of Artificial Sequence: Synthetic oligonucleotide
guuuagcuuugaugaggca

SEQ ID NO: 600517 - RNA, 19 nt, Artificial Sequence
  Description of Artificial Sequence: Synthetic oligonucleotide
uccgccugguucagccgcc

SEQ ID NO: 600518 - RNA, 19 nt, Artificial Sequence
  Description of Artificial Sequence: Synthetic oligonucleotide
gagaggucgccugcaucag

SEQ ID NO: 600519 - RNA, 19 nt, Artificial Sequence
  Description of Artificial Sequence: Synthetic oligonucleotide
gucaggccggugauugggg

SEQ ID NO: 600520 - RNA, 19 nt, Artificial Sequence
  Description of Artificial Sequence: Synthetic oligonucleotide
gccucacgaggucacaggc

SEQ ID NO: 600521 - RNA, 19 nt, Artificial Sequence
  Description of Artificial Sequence: Synthetic oligonucleotide
gaaguccgccagugagcag

SEQ ID NO: 600522 - RNA, 19 nt, Artificial Sequence
  Description of Artificial Sequence: Synthetic oligonucleotide
caaacuuaggcugcugugu

SEQ ID NO: 600523 - RNA, 19 nt, Artificial Sequence
  Description of Artificial Sequence: Synthetic oligonucleotide
cagcuagccugcugagagc

SEQ ID NO: 600524 - RNA, 19 nt, Artificial Sequence
  Description of Artificial Sequence: Synthetic oligonucleotide
ggguagauacacauacuga

SEQ ID NO: 600525 - RNA, 19 nt, Artificial Sequence
  Description of Artificial Sequence: Synthetic oligonucleotide
cuccauggggcauauggcu

SEQ ID NO: 600526 - RNA, 19 nt, Artificial Sequence
  Description of Artificial Sequence: Synthetic oligonucleotide
gagauucaucuugucucca

SEQ ID NO: 600527 - RNA, 19 nt, Artificial Sequence
  Description of Artificial Sequence: Synthetic oligonucleotide
gccgguggcucucucggcg

SEQ ID NO: 600528 - RNA, 19 nt, Artificial Sequence
  Description of Artificial Sequence: Synthetic oligonucleotide
ggaaguccgccagugagca

SEQ ID NO: 600529 - RNA, 19 nt, Artificial Sequence
  Description of Artificial Sequence: Synthetic oligonucleotide
cuaaaucaacggguguuaa

SEQ ID NO: 600530 - RNA, 19 nt, Artificial Sequence
  Description of Artificial Sequence: Synthetic oligonucleotide
ccucacgaggucacaggcg

SEQ ID NO: 600531 - RNA, 19 nt, Artificial Sequence
  Description of Artificial Sequence: Synthetic oligonucleotide
uggcgggcuugaugucucg

SEQ ID NO: 600532 - RNA, 19 nt, Artificial Sequence
  Description of Artificial Sequence: Synthetic oligonucleotide
agugcgggucgcacgcgac

SEQ ID NO: 600533 - RNA, 19 nt, Artificial Sequence
  Description of Artificial Sequence: Synthetic oligonucleotide
cagcgaaaagauagggugu

SEQ ID NO: 600534 - RNA, 19 nt, Artificial Sequence
  Description of Artificial Sequence: Synthetic oligonucleotide
accagucacccuguuugcu

SEQ ID NO: 600535 - RNA, 19 nt, Artificial Sequence
  Description of Artificial Sequence: Synthetic oligonucleotide
guaugguguucccacuagu

SEQ ID NO: 600536 - RNA, 19 nt, Artificial Sequence
  Description of Artificial Sequence: Synthetic oligonucleotide
cauaacccagcugcuuuca

SEQ ID NO: 600537 - RNA, 19 nt, Artificial Sequence
  Description of Artificial Sequence: Synthetic oligonucleotide
cagccucacgaggucacag

SEQ ID NO: 600538 - RNA, 19 nt, Artificial Sequence
  Description of Artificial Sequence: Synthetic oligonucleotide
uuguucggacucccuccau

SEQ ID NO: 600539 - RNA, 19 nt, Artificial Sequence
  Description of Artificial Sequence: Synthetic oligonucleotide
cuaauuggucaggucagcu

SEQ ID NO: 600540 - RNA, 19 nt, Artificial Sequence
  Description of Artificial Sequence: Synthetic oligonucleotide
cuccauagaaggggcucug

SEQ ID NO: 600541 - RNA, 19 nt, Artificial Sequence
  Description of Artificial Sequence: Synthetic oligonucleotide
gagugcgggucgcacgcga

SEQ ID NO: 600542 - RNA, 19 nt, Artificial Sequence
  Description of Artificial Sequence: Synthetic oligonucleotide
cucggcggcgggccgagug

SEQ ID NO: 600543 - RNA, 19 nt, Artificial Sequence
  Description of Artificial Sequence: Synthetic oligonucleotide
aggccgagguucacauuuc

SEQ ID NO: 600544 - RNA, 19 nt, Artificial Sequence
  Description of Artificial Sequence: Synthetic oligonucleotide
cacgcgacuuggcggcgcc

SEQ ID NO: 600545 - RNA, 19 nt, Artificial Sequence
  Description of Artificial Sequence: Synthetic oligonucleotide
cuagugagugggcugcagu

SEQ ID NO: 600546 - RNA, 19 nt, Artificial Sequence
  Description of Artificial Sequence: Synthetic oligonucleotide
agugcuccccugggagagg

SEQ ID NO: 600547 - RNA, 19 nt, Artificial Sequence
  Description of Artificial Sequence: Synthetic oligonucleotide
gucgccugcaucagccaac

SEQ ID NO: 600548 - RNA, 19 nt, Artificial Sequence
  Description of Artificial Sequence: Synthetic oligonucleotide
gcuuucagcuagccugcug

SEQ ID NO: 600549 - RNA, 19 nt, Artificial Sequence
  Description of Artificial Sequence: Synthetic oligonucleotide
gucacaggcggcgccggug

SEQ ID NO: 600550 - RNA, 19 nt, Artificial Sequence
  Description of Artificial Sequence: Synthetic oligonucleotide
ccauaacccagcugcuuuc

SEQ ID NO: 600551 - RNA, 19 nt, Artificial Sequence
  Description of Artificial Sequence: Synthetic oligonucleotide
cggguguuaaccauuugca

SEQ ID NO: 600552 - RNA, 19 nt, Artificial Sequence
  Description of Artificial Sequence: Synthetic oligonucleotide
ggacucaaguaagacaagu

SEQ ID NO: 600553 - RNA, 19 nt, Artificial Sequence
  Description of Artificial Sequence: Synthetic oligonucleotide
cacacgccgggagugcaug

SEQ ID NO: 600554 - RNA, 19 nt, Artificial Sequence
  Description of Artificial Sequence: Synthetic oligonucleotide
cggacucccuccauggggc

SEQ ID NO: 600555 - RNA, 19 nt, Artificial Sequence
  Description of Artificial Sequence: Synthetic oligonucleotide
cguggauccucucugguga

SEQ ID NO: 600556 - RNA, 19 nt, Artificial Sequence
  Description of Artificial Sequence: Synthetic oligonucleotide
acacgccgggagugcaugu

SEQ ID NO: 600557 - RNA, 19 nt, Artificial Sequence
  Description of Artificial Sequence: Synthetic oligonucleotide
ccgagugcgggucgcacgc

SEQ ID NO: 600558 - RNA, 19 nt, Artificial Sequence
  Description of Artificial Sequence: Synthetic oligonucleotide
cucucaggaauaagccgcu

SEQ ID NO: 600559 - RNA, 19 nt, Artificial Sequence
  Description of Artificial Sequence: Synthetic oligonucleotide
uagcugugaugaacacguu

SEQ ID NO: 600560 - RNA, 19 nt, Artificial Sequence
  Description of Artificial Sequence: Synthetic oligonucleotide
cucggccaaucuucuucuc

SEQ ID NO: 600561 - RNA, 19 nt, Artificial Sequence
  Description of Artificial Sequence: Synthetic oligonucleotide
gccgagguucacauuucag

SEQ ID NO: 600562 - RNA, 19 nt, Artificial Sequence
  Description of Artificial Sequence: Synthetic oligonucleotide
ccagacaugcaucugccua

SEQ ID NO: 600563 - RNA, 19 nt, Artificial Sequence
  Description of Artificial Sequence: Synthetic oligonucleotide
cucucucggcggcgggccg

SEQ ID NO: 600564 - RNA, 19 nt, Artificial Sequence
  Description of Artificial Sequence: Synthetic oligonucleotide
augaggcaugcugcauuca

SEQ ID NO: 600565 - RNA, 19 nt, Artificial Sequence
  Description of Artificial Sequence: Synthetic oligonucleotide
ugcuuucagcuagccugcu

SEQ ID NO: 600566 - RNA, 19 nt, Artificial Sequence
  Description of Artificial Sequence: Synthetic oligonucleotide
cucuacucuaaaccauuau

SEQ ID NO: 600567 - RNA, 19 nt, Artificial Sequence
  Description of Artificial Sequence: Synthetic oligonucleotide
ugcgggucgcacgcgacuu

SEQ ID NO: 600568 - RNA, 19 nt, Artificial Sequence
  Description of Artificial Sequence: Synthetic oligonucleotide
ccacuuggggagaggacuc

SEQ ID NO: 600569 - RNA, 19 nt, Artificial Sequence
  Description of Artificial Sequence: Synthetic oligonucleotide
cggugcaucacacgccggg

SEQ ID NO: 600570 - RNA, 19 nt, Artificial Sequence
  Description of Artificial Sequence: Synthetic oligonucleotide
ccgagguucacauuucagu

SEQ ID NO: 600571 - RNA, 19 nt, Artificial Sequence
  Description of Artificial Sequence: Synthetic oligonucleotide
auacgaugucaggccggug

SEQ ID NO: 600572 - RNA, 19 nt, Artificial Sequence
  Description of Artificial Sequence: Synthetic oligonucleotide
ggaggcgaugguacauggc

SEQ ID NO: 600573 - RNA, 19 nt, Artificial Sequence
  Description of Artificial Sequence: Synthetic oligonucleotide
cacgccgggagugcaugug

SEQ ID NO: 600574 - RNA, 19 nt, Artificial Sequence
  Description of Artificial Sequence: Synthetic oligonucleotide
gcgaaaagauaggguguug

SEQ ID NO: 600575 - RNA, 19 nt, Artificial Sequence
  Description of Artificial Sequence: Synthetic oligonucleotide
ggaucuuauguaguccagu

SEQ ID NO: 600576 - RNA, 19 nt, Artificial Sequence
  Description of Artificial Sequence: Synthetic oligonucleotide
cuagccugcugagagcccu

SEQ ID NO: 600577 - RNA, 19 nt, Artificial Sequence
  Description of Artificial Sequence: Synthetic oligonucleotide
ccuagggugacccuggauu

SEQ ID NO: 600578 - RNA, 19 nt, Artificial Sequence
  Description of Artificial Sequence: Synthetic oligonucleotide
ggcgggcuugaugucucgg

SEQ ID NO: 600579 - RNA, 19 nt, Artificial Sequence
  Description of Artificial Sequence: Synthetic oligonucleotide
caacggguguuaaccauuu

SEQ ID NO: 600580 - RNA, 19 nt, Artificial Sequence
  Description of Artificial Sequence: Synthetic oligonucleotide
gugacugcccucacuaauu

SEQ ID NO: 600581 - RNA, 19 nt, Artificial Sequence
  Description of Artificial Sequence: Synthetic oligonucleotide
gcgccguggccgcagcuag

SEQ ID NO: 600582 - RNA, 19 nt, Artificial Sequence
  Description of Artificial Sequence: Synthetic oligonucleotide
cuggcacuuaaguuuccuu

SEQ ID NO: 600583 - RNA, 19 nt, Artificial Sequence
  Description of Artificial Sequence: Synthetic oligonucleotide
auaggguguuggggugccu

SEQ ID NO: 600584 - RNA, 19 nt, Artificial Sequence
  Description of Artificial Sequence: Synthetic oligonucleotide
acgcgacuuggcggcgccg

SEQ ID NO: 600585 - RNA, 19 nt, Artificial Sequence
  Description of Artificial Sequence: Synthetic oligonucleotide
ccagucacccuguuugcua

SEQ ID NO: 600586 - RNA, 19 nt, Artificial Sequence
  Description of Artificial Sequence: Synthetic oligonucleotide
gagguuguucggacucccu

SEQ ID NO: 600587 - RNA, 19 nt, Artificial Sequence
  Description of Artificial Sequence: Synthetic oligonucleotide
gguguuggggugccucugu

SEQ ID NO: 600588 - RNA, 19 nt, Artificial Sequence
  Description of Artificial Sequence: Synthetic oligonucleotide
caaugccuguagcugugau

SEQ ID NO: 600589 - RNA, 19 nt, Artificial Sequence
  Description of Artificial Sequence: Synthetic oligonucleotide
agccguucucguggauccu

SEQ ID NO: 600590 - RNA, 19 nt, Artificial Sequence
  Description of Artificial Sequence: Synthetic oligonucleotide
ccaauuuccuugacacagu

SEQ ID NO: 600591 - RNA, 19 nt, Artificial Sequence
  Description of Artificial Sequence: Synthetic oligonucleotide
cacuagugagugggcugca

SEQ ID NO: 600592 - RNA, 19 nt, Artificial Sequence
  Description of Artificial Sequence: Synthetic oligonucleotide
ggacucccuccauggggca

SEQ ID NO: 600593 - RNA, 19 nt, Artificial Sequence
  Description of Artificial Sequence: Synthetic oligonucleotide
gccguucucguggauccuc

SEQ ID NO: 600594 - RNA, 19 nt, Artificial Sequence
  Description of Artificial Sequence: Synthetic oligonucleotide
ccuggugcacauauacgau

SEQ ID NO: 600595 - RNA, 19 nt, Artificial Sequence
  Description of Artificial Sequence: Synthetic oligonucleotide
gugcgggucgcacgcgacu

SEQ ID NO: 600596 - RNA, 19 nt, Artificial Sequence
  Description of Artificial Sequence: Synthetic oligonucleotide
cacaccagucacccuguuu

SEQ ID NO: 600597 - RNA, 19 nt, Artificial Sequence
  Description of Artificial Sequence: Synthetic oligonucleotide
ccgcagcuaguccgccugg

SEQ ID NO: 600598 - RNA, 19 nt, Artificial Sequence
  Description of Artificial Sequence: Synthetic oligonucleotide
gcgacuuggcggcgccgug

SEQ ID NO: 600599 - RNA, 19 nt, Artificial Sequence
  Description of Artificial Sequence: Synthetic oligonucleotide
gcgggucgcacgcgacuug

SEQ ID NO: 600600 - RNA, 19 nt, Artificial Sequence
  Description of Artificial Sequence: Synthetic oligonucleotide
ucccuccauggggcauaug

SEQ ID NO: 600601 - RNA, 19 nt, Artificial Sequence
  Description of Artificial Sequence: Synthetic oligonucleotide
cgggucgcacgcgacuugg

SEQ ID NO: 600602 - RNA, 19 nt, Artificial Sequence
  Description of Artificial Sequence: Synthetic oligonucleotide
ccguggccgcagcuagucc

SEQ ID NO: 600603 - RNA, 19 nt, Artificial Sequence
  Description of Artificial Sequence: Synthetic oligonucleotide
gacucccuccauggggcau

SEQ ID NO: 600604 - RNA, 19 nt, Artificial Sequence
  Description of Artificial Sequence: Synthetic oligonucleotide
gggucgcacgcgacuuggc

SEQ ID NO: 600605 - RNA, 19 nt, Artificial Sequence
  Description of Artificial Sequence: Synthetic oligonucleotide
ggcauauggcugggcuguc

SEQ ID NO: 600606 - RNA, 19 nt, Artificial Sequence
  Description of Artificial Sequence: Synthetic oligonucleotide
gcacgcgacuuggcggcgc

SEQ ID NO: 600607 - RNA, 19 nt, Artificial Sequence
  Description of Artificial Sequence: Synthetic oligonucleotide
ggccgagugcgggucgcac

SEQ ID NO: 600608 - RNA, 19 nt, Artificial Sequence
  Description of Artificial Sequence: Synthetic oligonucleotide
gccggugauuggggucagg

SEQ ID NO: 600609 - RNA, 19 nt, Artificial Sequence
  Description of Artificial Sequence: Synthetic oligonucleotide
ccucacuaauuggucaggu

SEQ ID NO: 600610 - RNA, 19 nt, Artificial Sequence
  Description of Artificial Sequence: Synthetic oligonucleotide
ccuagccaccuggugcaca

SEQ ID NO: 600611 - RNA, 19 nt, Artificial Sequence
  Description of Artificial Sequence: Synthetic oligonucleotide
ggccggugauuggggucag

SEQ ID NO: 600612 - RNA, 19 nt, Artificial Sequence
  Description of Artificial Sequence: Synthetic oligonucleotide
ucucggcggcgggccgagu

SEQ ID NO: 600613 - RNA, 19 nt, Artificial Sequence
  Description of Artificial Sequence: Synthetic oligonucleotide
ccguucucguggauccucu

SEQ ID NO: 600614 - RNA, 19 nt, Artificial Sequence
  Description of Artificial Sequence: Synthetic oligonucleotide
ggcgccguggccgcagcua

SEQ ID NO: 600615 - RNA, 19 nt, Artificial Sequence
  Description of Artificial Sequence: Synthetic oligonucleotide
cgagugcgggucgcacgcg

SEQ ID NO: 600616 - RNA, 19 nt, Artificial Sequence
  Description of Artificial Sequence: Synthetic oligonucleotide
cgccgguggcucucucggc

SEQ ID NO: 600617 - RNA, 19 nt, Artificial Sequence
  Description of Artificial Sequence: Synthetic oligonucleotide
gccuagggugacccuggau

SEQ ID NO: 600618 - RNA, 19 nt, Artificial Sequence
  Description of Artificial Sequence: Synthetic oligonucleotide
guccgccagugagcagcga

SEQ ID NO: 600619 - RNA, 19 nt, Artificial Sequence
  Description of Artificial Sequence: Synthetic oligonucleotide
ccacggacuugaguuuucu

SEQ ID NO: 600620 - RNA, 19 nt, Artificial Sequence
  Description of Artificial Sequence: Synthetic oligonucleotide
cgcacgcgacuuggcggcg

SEQ ID NO: 600621 - RNA, 19 nt, Artificial Sequence
  Description of Artificial Sequence: Synthetic oligonucleotide
gggccgagugcgggucgca

SEQ ID NO: 600622 - RNA, 19 nt, Artificial Sequence
  Description of Artificial Sequence: Synthetic oligonucleotide
cucccuccauggggcauau

SEQ ID NO: 600623 - RNA, 19 nt, Artificial Sequence
  Description of Artificial Sequence: Synthetic oligonucleotide
caguugguacagggagcuu

SEQ ID NO: 600624 - RNA, 19 nt, Artificial Sequence
  Description of Artificial Sequence: Synthetic oligonucleotide
cgccguggccgcagcuagu

SEQ ID NO: 600625 - RNA, 19 nt, Artificial Sequence
  Description of Artificial Sequence: Synthetic oligonucleotide
uauauuauguucaucagga

SEQ ID NO: 600626 - RNA, 19 nt, Artificial Sequence
  Description of Artificial Sequence: Synthetic oligonucleotide
uggacuaucaaucucaaug

SEQ ID NO: 600627 - RNA, 19 nt, Artificial Sequence
  Description of Artificial Sequence: Synthetic oligonucleotide
aagucuuugaucuccgggc

SEQ ID NO: 600628 - RNA, 19 nt, Artificial Sequence
  Description of Artificial Sequence: Synthetic oligonucleotide
gauugagauggacaaagcg

SEQ ID NO: 600629 - RNA, 19 nt, Artificial Sequence
  Description of Artificial Sequence: Synthetic oligonucleotide
uagcaauuaaaauauauua

SEQ ID NO: 600630 - RNA, 19 nt, Artificial Sequence
  Description of Artificial Sequence: Synthetic oligonucleotide
caugucaccacucauggcc

SEQ ID NO: 600631 - RNA, 19 nt, Artificial Sequence
  Description of Artificial Sequence: Synthetic oligonucleotide
auuugagaugacccgagac

SEQ ID NO: 600632 - RNA, 19 nt, Artificial Sequence
  Description of Artificial Sequence: Synthetic oligonucleotide
uguuuaguaggcauggcac

SEQ ID NO: 600633 - RNA, 19 nt, Artificial Sequence
  Description of Artificial Sequence: Synthetic oligonucleotide
aaugguguaggucucuccu

SEQ ID NO: 600634 - RNA, 19 nt, Artificial Sequence
  Description of Artificial Sequence: Synthetic oligonucleotide
auuauguucaucaggaaug

SEQ ID NO: 600635 - RNA, 19 nt, Artificial Sequence
  Description of Artificial Sequence: Synthetic oligonucleotide
acuaucaaucucaauggcc

SEQ ID NO: 600636 - RNA, 19 nt, Artificial Sequence
  Description of Artificial Sequence: Synthetic oligonucleotide
uuaagggcaaacucaaaga

SEQ ID NO: 600637 - RNA, 19 nt, Artificial Sequence
  Description of Artificial Sequence: Synthetic oligonucleotide
aacucagccguacccagcg

SEQ ID NO: 600638 - RNA, 19 nt, Artificial Sequence
  Description of Artificial Sequence: Synthetic oligonucleotide
uccgcauagaugaugacaa

SEQ ID NO: 600639 - RNA, 19 nt, Artificial Sequence
  Description of Artificial Sequence: Synthetic oligonucleotide
acagaaugccucuucguuc

SEQ ID NO: 600640 - RNA, 19 nt, Artificial Sequence
  Description of Artificial Sequence: Synthetic oligonucleotide
cuaucaaucucaauggcca

SEQ ID NO: 600641 - RNA, 19 nt, Artificial Sequence
  Description of Artificial Sequence: Synthetic oligonucleotide
ugacauucgggucacugca

SEQ ID NO: 600642 - RNA, 19 nt, Artificial Sequence
  Description of Artificial Sequence: Synthetic oligonucleotide
uuuccuaaccgucuguguc

SEQ ID NO: 600643 - RNA, 19 nt, Artificial Sequence
  Description of Artificial Sequence: Synthetic oligonucleotide
gcuuguaccacacauuucc

SEQ ID NO: 600644 - RNA, 19 nt, Artificial Sequence
  Description of Artificial Sequence: Synthetic oligonucleotide
uugaacugcagcaggucag

SEQ ID NO: 600645 - RNA, 19 nt, Artificial Sequence
  Description of Artificial Sequence: Synthetic oligonucleotide
acucgugacccacauuggc

SEQ ID NO: 600646 - RNA, 19 nt, Artificial Sequence
  Description of Artificial Sequence: Synthetic oligonucleotide
uggcuuagcacgcugguga

SEQ ID NO: 600647 - RNA, 19 nt, Artificial Sequence
  Description of Artificial Sequence: Synthetic oligonucleotide
ugaaguaccuccacuccug

SEQ ID NO: 600648 - RNA, 19 nt, Artificial Sequence
  Description of Artificial Sequence: Synthetic oligonucleotide
cagagcacggcaaugggcc

SEQ ID NO: 600649 - RNA, 19 nt, Artificial Sequence
  Description of Artificial Sequence: Synthetic oligonucleotide
cuguguaggugguaggucc

SEQ ID NO: 600650 - RNA, 19 nt, Artificial Sequence
  Description of Artificial Sequence: Synthetic oligonucleotide
cagauugagauggacaaag

SEQ ID NO: 600651 - RNA, 19 nt, Artificial Sequence
  Description of Artificial Sequence: Synthetic oligonucleotide
ugaucuccgggcuuggacc

SEQ ID NO: 600652 - RNA, 19 nt, Artificial Sequence
  Description of Artificial Sequence: Synthetic oligonucleotide
cuuagcacgcuggugaugc

SEQ ID NO: 600653 - RNA, 19 nt, Artificial Sequence
  Description of Artificial Sequence: Synthetic oligonucleotide
ugugagaccugaacggcug

SEQ ID NO: 600654 - RNA, 19 nt, Artificial Sequence
  Description of Artificial Sequence: Synthetic oligonucleotide
aaugccucuucguucuugu

SEQ ID NO: 600655 - RNA, 19 nt, Artificial Sequence
  Description of Artificial Sequence: Synthetic oligonucleotide
guacuugaaagggaugugg

SEQ ID NO: 600656 - RNA, 19 nt, Artificial Sequence
  Description of Artificial Sequence: Synthetic oligonucleotide
gguagguccucugagaagg

SEQ ID NO: 600657 - RNA, 19 nt, Artificial Sequence
  Description of Artificial Sequence: Synthetic oligonucleotide
aucagccuagcuucugcgc

SEQ ID NO: 600658 - RNA, 19 nt, Artificial Sequence
  Description of Artificial Sequence: Synthetic oligonucleotide
gacuaucaaucucaauggc

SEQ ID NO: 600659 - RNA, 19 nt, Artificial Sequence
  Description of Artificial Sequence: Synthetic oligonucleotide
uuuaguaggcauggcacug

SEQ ID NO: 600660 - RNA, 19 nt, Artificial Sequence
  Description of Artificial Sequence: Synthetic oligonucleotide
acagaaaaguucugguacu

SEQ ID NO: 600661 - RNA, 19 nt, Artificial Sequence
  Description of Artificial Sequence: Synthetic oligonucleotide
uuccuaaccgucugugucc

SEQ ID NO: 600662 - RNA, 19 nt, Artificial Sequence
  Description of Artificial Sequence: Synthetic oligonucleotide
accgugugaacgccaaugg

SEQ ID NO: 600663 - RNA, 19 nt, Artificial Sequence
  Description of Artificial Sequence: Synthetic oligonucleotide
cuuggcguguuuaguaggc

SEQ ID NO: 600664 - RNA, 19 nt, Artificial Sequence
  Description of Artificial Sequence: Synthetic oligonucleotide
gaucuccgggcuuggaccg

SEQ ID NO: 600665 - RNA, 19 nt, Artificial Sequence
  Description of Artificial Sequence: Synthetic oligonucleotide
gaaaugaguggcuggcgac

SEQ ID NO: 600666 - RNA, 19 nt, Artificial Sequence
  Description of Artificial Sequence: Synthetic oligonucleotide
gaaugcugugcacggauac

SEQ ID NO: 600667 - RNA, 19 nt, Artificial Sequence
  Description of Artificial Sequence: Synthetic oligonucleotide
aaggauagggguuggugua

SEQ ID NO: 600668 - RNA, 19 nt, Artificial Sequence
  Description of Artificial Sequence: Synthetic oligonucleotide
cucgugacccacauuggcc

SEQ ID NO: 600669 - RNA, 19 nt, Artificial Sequence
  Description of Artificial Sequence: Synthetic oligonucleotide
gacaaagcgguugccagcc

SEQ ID NO: 600670 - RNA, 19 nt, Artificial Sequence
  Description of Artificial Sequence: Synthetic oligonucleotide
ucgugacccacauuggcca

SEQ ID NO: 600671 - RNA, 19 nt, Artificial Sequence
  Description of Artificial Sequence: Synthetic oligonucleotide
ugcgacacaggagacgucc

SEQ ID NO: 600672 - RNA, 19 nt, Artificial Sequence
  Description of Artificial Sequence: Synthetic oligonucleotide
ucccgguaaggcaucaaug

SEQ ID NO: 600673 - RNA, 19 nt, Artificial Sequence
  Description of Artificial Sequence: Synthetic oligonucleotide
agauugagauggacaaagc

SEQ ID NO: 600674 - RNA, 19 nt, Artificial Sequence
  Description of Artificial Sequence: Synthetic oligonucleotide
cagcgauccgcauagauga

SEQ ID NO: 600675 - RNA, 19 nt, Artificial Sequence
  Description of Artificial Sequence: Synthetic oligonucleotide
uguucauacucgguggcca

SEQ ID NO: 600676 - RNA, 19 nt, Artificial Sequence
  Description of Artificial Sequence: Synthetic oligonucleotide
gguccuguaccccaugagg

SEQ ID NO: 600677 - RNA, 19 nt, Artificial Sequence
  Description of Artificial Sequence: Synthetic oligonucleotide
acggcaaugggccggccac

SEQ ID NO: 600678 - RNA, 19 nt, Artificial Sequence
  Description of Artificial Sequence: Synthetic oligonucleotide
gauccugcgacugucggac

SEQ ID NO: 600679 - RNA, 19 nt, Artificial Sequence
  Description of Artificial Sequence: Synthetic oligonucleotide
ccuugagaaacacaucccg

SEQ ID NO: 600680 - RNA, 19 nt, Artificial Sequence
  Description of Artificial Sequence: Synthetic oligonucleotide
cauucgggucacugcaucg

SEQ ID NO: 600681 - RNA, 19 nt, Artificial Sequence
  Description of Artificial Sequence: Synthetic oligonucleotide
ugcggcaucuggcuccccg

SEQ ID NO: 600682 - RNA, 19 nt, Artificial Sequence
  Description of Artificial Sequence: Synthetic oligonucleotide
cuucgcaucgccugcugcc

SEQ ID NO: 600683 - RNA, 19 nt, Artificial Sequence
  Description of Artificial Sequence: Synthetic oligonucleotide
aaugggccggccacucucc

SEQ ID NO: 600684 - RNA, 19 nt, Artificial Sequence
  Description of Artificial Sequence: Synthetic oligonucleotide
gaaggauagggguuggugu

SEQ ID NO: 600685 - RNA, 19 nt, Artificial Sequence
  Description of Artificial Sequence: Synthetic oligonucleotide
uaccacacauuuccgucug

SEQ ID NO: 600686 - RNA, 19 nt, Artificial Sequence
  Description of Artificial Sequence: Synthetic oligonucleotide
cacguucugggccucacag

SEQ ID NO: 600687 - RNA, 19 nt, Artificial Sequence
  Description of Artificial Sequence: Synthetic oligonucleotide
uggaccgcuggccaccuug

SEQ ID NO: 600688 - RNA, 19 nt, Artificial Sequence
  Description of Artificial Sequence: Synthetic oligonucleotide
ugcguucccgguaaggcau

SEQ ID NO: 600689 - RNA, 19 nt, Artificial Sequence
  Description of Artificial Sequence: Synthetic oligonucleotide
uguguaggugguagguccu

SEQ ID NO: 600690 - RNA, 19 nt, Artificial Sequence
  Description of Artificial Sequence: Synthetic oligonucleotide
aggaccuuggcguguuuag

SEQ ID NO: 600691 - RNA, 19 nt, Artificial Sequence
  Description of Artificial Sequence: Synthetic oligonucleotide
uugguguaggugauccgcu

SEQ ID NO: 600692 - RNA, 19 nt, Artificial Sequence
  Description of Artificial Sequence: Synthetic oligonucleotide
ugaccugcaggucccguga

SEQ ID NO: 600693 - RNA, 19 nt, Artificial Sequence
  Description of Artificial Sequence: Synthetic oligonucleotide
uccugcgacugucggacgc

SEQ ID NO: 600694 - RNA, 19 nt, Artificial Sequence
  Description of Artificial Sequence: Synthetic oligonucleotide
guccacacgcugcagggag

SEQ ID NO: 600695 - RNA, 19 nt, Artificial Sequence
  Description of Artificial Sequence: Synthetic oligonucleotide
auccgcauagaugaugaca

SEQ ID NO: 600696 - RNA, 19 nt, Artificial Sequence
  Description of Artificial Sequence: Synthetic oligonucleotide
gacugucggacgcuccucc

SEQ ID NO: 600697 - RNA, 19 nt, Artificial Sequence
  Description of Artificial Sequence: Synthetic oligonucleotide
gaccugaacggcuggccgc

SEQ ID NO: 600698 - RNA, 19 nt, Artificial Sequence
  Description of Artificial Sequence: Synthetic oligonucleotide
uucccgguaaggcaucaau

SEQ ID NO: 600699 - RNA, 19 nt, Artificial Sequence
  Description of Artificial Sequence: Synthetic oligonucleotide
cgugugaacgccaaugggc

SEQ ID NO: 600700 - RNA, 19 nt, Artificial Sequence
  Description of Artificial Sequence: Synthetic oligonucleotide
ccucacgcccacaugaagg

SEQ ID NO: 600701 - RNA, 19 nt, Artificial Sequence
  Description of Artificial Sequence: Synthetic oligonucleotide
uccguccggaaaaggaccu

SEQ ID NO: 600702 - RNA, 19 nt, Artificial Sequence
  Description of Artificial Sequence: Synthetic oligonucleotide
uaccccaugaggcggcaac

SEQ ID NO: 600703 - RNA, 19 nt, Artificial Sequence
  Description of Artificial Sequence: Synthetic oligonucleotide
gacgcugccgaagccagcc

SEQ ID NO: 600704 - RNA, 19 nt, Artificial Sequence
  Description of Artificial Sequence: Synthetic oligonucleotide
acagacgggucagcugucc

SEQ ID NO: 600705 - RNA, 19 nt, Artificial Sequence
  Description of Artificial Sequence: Synthetic oligonucleotide
cagacggcccuucaccacc

SEQ ID NO: 600706 - RNA, 19 nt, Artificial Sequence
  Description of Artificial Sequence: Synthetic oligonucleotide
guaggucucuccuccugcc

SEQ ID NO: 600707 - RNA, 19 nt, Artificial Sequence
  Description of Artificial Sequence: Synthetic oligonucleotide
aacggcuggccgcccuugg

SEQ ID NO: 600708 - RNA, 19 nt, Artificial Sequence
  Description of Artificial Sequence: Synthetic oligonucleotide
gcuggcacccuucgcaucg

SEQ ID NO: 600709 - RNA, 19 nt, Artificial Sequence
  Description of Artificial Sequence: Synthetic oligonucleotide
gagacguccacacgcugca

SEQ ID NO: 600710 - RNA, 19 nt, Artificial Sequence
  Description of Artificial Sequence: Synthetic oligonucleotide
ugauccgcuugcuggcacc

SEQ ID NO: 600711 - RNA, 19 nt, Artificial Sequence
  Description of Artificial Sequence: Synthetic oligonucleotide
acugucggacgcuccuccg

SEQ ID NO: 600712 - RNA, 19 nt, Artificial Sequence
  Description of Artificial Sequence: Synthetic oligonucleotide
agcaggucagggcggucac

SEQ ID NO: 600713 - RNA, 19 nt, Artificial Sequence
  Description of Artificial Sequence: Synthetic oligonucleotide
acgcuggugaugcucucag

SEQ ID NO: 600714 - RNA, 19 nt, Artificial Sequence
  Description of Artificial Sequence: Synthetic oligonucleotide
ggaaaaggaccuuggcgug

SEQ ID NO: 600715 - RNA, 19 nt, Artificial Sequence
  Description of Artificial Sequence: Synthetic oligonucleotide
ugcaucgaacauggacugg

SEQ ID NO: 600716 - RNA, 19 nt, Artificial Sequence
  Description of Artificial Sequence: Synthetic oligonucleotide
acauuuccgucuggagccc

SEQ ID NO: 600717 - RNA, 19 nt, Artificial Sequence
  Description of Artificial Sequence: Synthetic oligonucleotide
guaagacaagggacagacg

SEQ ID NO: 600718 - RNA, 19 nt, Artificial Sequence
  Description of Artificial Sequence: Synthetic oligonucleotide
cucaccggggcccacguuc

SEQ ID NO: 600719 - RNA, 19 nt, Artificial Sequence
  Description of Artificial Sequence: Synthetic oligonucleotide
uggcguguuuaguaggcau

SEQ ID NO: 600720 - RNA, 19 nt, Artificial Sequence
  Description of Artificial Sequence: Synthetic oligonucleotide
ggaguggagacagaccugc

SEQ ID NO: 600721 - RNA, 19 nt, Artificial Sequence
  Description of Artificial Sequence: Synthetic oligonucleotide
gagggcucucgacuccggg

SEQ ID NO: 600722 - RNA, 19 nt, Artificial Sequence
  Description of Artificial Sequence: Synthetic oligonucleotide
uccuaaccgucuguguccc

SEQ ID NO: 600723 - RNA, 19 nt, Artificial Sequence
  Description of Artificial Sequence: Synthetic oligonucleotide
caggaaugggcccuggcca

SEQ ID NO: 600724 - RNA, 19 nt, Artificial Sequence
  Description of Artificial Sequence: Synthetic oligonucleotide
guugccagcccuccucggc

SEQ ID NO: 600725 - RNA, 19 nt, Artificial Sequence
  Description of Artificial Sequence: Synthetic oligonucleotide
cucuccguccggaaaagga

SEQ ID NO: 600726 - RNA, 19 nt, Artificial Sequence
  Description of Artificial Sequence: Synthetic oligonucleotide
ugcgcuuguaccacacauu

SEQ ID NO: 600727 - RNA, 19 nt, Artificial Sequence
  Description of Artificial Sequence: Synthetic oligonucleotide
gaccuuggcguguuuagua

SEQ ID NO: 600728 - RNA, 19 nt, Artificial Sequence
  Description of Artificial Sequence: Synthetic oligonucleotide
cguaagacaagggacagac

SEQ ID NO: 600729 - RNA, 19 nt, Artificial Sequence
  Description of Artificial Sequence: Synthetic oligonucleotide
gaaugccucuucguucuug

SEQ ID NO: 600730 - RNA, 19 nt, Artificial Sequence
  Description of Artificial Sequence: Synthetic oligonucleotide
cacaucccguggcucaccg

SEQ ID NO: 600731 - RNA, 19 nt, Artificial Sequence
  Description of Artificial Sequence: Synthetic oligonucleotide
cucaggccaaugguguagg

SEQ ID NO: 600732 - RNA, 19 nt, Artificial Sequence
  Description of Artificial Sequence: Synthetic oligonucleotide
gugguagguccucugagaa

SEQ ID NO: 600733 - RNA, 19 nt, Artificial Sequence
  Description of Artificial Sequence: Synthetic oligonucleotide
aaaaggaccuuggcguguu

SEQ ID NO: 600734 - RNA, 19 nt, Artificial Sequence
  Description of Artificial Sequence: Synthetic oligonucleotide
cgguaaggcaucaaugacc

SEQ ID NO: 600735 - RNA, 19 nt, Artificial Sequence
  Description of Artificial Sequence: Synthetic oligonucleotide
gcuaccacuuggcaggaac

SEQ ID NO: 600736 - RNA, 19 nt, Artificial Sequence
  Description of Artificial Sequence: Synthetic oligonucleotide
uucgggucacugcaucgaa

SEQ ID NO: 600737 - RNA, 19 nt, Artificial Sequence
  Description of Artificial Sequence: Synthetic oligonucleotide
accacuuggcaggaaccuc

SEQ ID NO: 600738 - RNA, 19 nt, Artificial Sequence
  Description of Artificial Sequence: Synthetic oligonucleotide
accacacauuuccgucugg

SEQ ID NO: 600739 - RNA, 19 nt, Artificial Sequence
  Description of Artificial Sequence: Synthetic oligonucleotide
ucgggucacugcaucgaac

SEQ ID NO: 600740 - RNA, 19 nt, Artificial Sequence
  Description of Artificial Sequence: Synthetic oligonucleotide
uacccagcguggcguacag

SEQ ID NO: 600741 - RNA, 19 nt, Artificial Sequence
  Description of Artificial Sequence: Synthetic oligonucleotide
uguaggugguagguccucu

SEQ ID NO: 600742 - RNA, 19 nt, Artificial Sequence
  Description of Artificial Sequence: Synthetic oligonucleotide
cuguucauacucgguggcc

SEQ ID NO: 600743 - RNA, 19 nt, Artificial Sequence
  Description of Artificial Sequence: Synthetic oligonucleotide
gguguaggugauccgcuug

SEQ ID NO: 600744 - RNA, 19 nt, Artificial Sequence
  Description of Artificial Sequence: Synthetic oligonucleotide
gcguguuuaguaggcaugg

SEQ ID NO: 600745 - RNA, 19 nt, Artificial Sequence
  Description of Artificial Sequence: Synthetic oligonucleotide
uggugcguucccgguaagg

SEQ ID NO: 600746 - RNA, 19 nt, Artificial Sequence
  Description of Artificial Sequence: Synthetic oligonucleotide
ggccuuggaaaugaguggc

SEQ ID NO: 600747 - RNA, 19 nt, Artificial Sequence
  Description of Artificial Sequence: Synthetic oligonucleotide
cugucggacgcuccuccgg

SEQ ID NO: 600748 - RNA, 19 nt, Artificial Sequence
  Description of Artificial Sequence: Synthetic oligonucleotide
caaugggccggccacucuc

SEQ ID NO: 600749 - RNA, 19 nt, Artificial Sequence
  Description of Artificial Sequence: Synthetic oligonucleotide
guccggaaaaggaccuugg

SEQ ID NO: 600750 - RNA, 19 nt, Artificial Sequence
  Description of Artificial Sequence: Synthetic oligonucleotide
agccguacccagcguggcg

SEQ ID NO: 600751 - RNA, 19 nt, Artificial Sequence
  Description of Artificial Sequence: Synthetic oligonucleotide
ugcgacugucggacgcucc

SEQ ID NO: 600752 - RNA, 19 nt, Artificial Sequence
  Description of Artificial Sequence: Synthetic oligonucleotide
augaguggcuggcgacagg

SEQ ID NO: 600753 - RNA, 19 nt, Artificial Sequence
  Description of Artificial Sequence: Synthetic oligonucleotide
cagugggcccacagaaaag

SEQ ID NO: 600754 - RNA, 19 nt, Artificial Sequence
  Description of Artificial Sequence: Synthetic oligonucleotide
uccgccagccagcgauccg

SEQ ID NO: 600755 - RNA, 19 nt, Artificial Sequence
  Description of Artificial Sequence: Synthetic oligonucleotide
gauccgcauagaugaugac

SEQ ID NO: 600756 - RNA, 19 nt, Artificial Sequence
  Description of Artificial Sequence: Synthetic oligonucleotide
ccagcgauccgcauagaug

SEQ ID NO: 600757 - RNA, 19 nt, Artificial Sequence
  Description of Artificial Sequence: Synthetic oligonucleotide
ggugcguucccgguaaggc

SEQ ID NO: 600758 - RNA, 19 nt, Artificial Sequence
  Description of Artificial Sequence: Synthetic oligonucleotide
ucccguggcucaccggggc

SEQ ID NO: 600759 - RNA, 19 nt, Artificial Sequence
  Description of Artificial Sequence: Synthetic oligonucleotide
gucgucaccaggcgucccc

SEQ ID NO: 600760 - RNA, 19 nt, Artificial Sequence
  Description of Artificial Sequence: Synthetic oligonucleotide
agggcucucgacuccgggu

SEQ ID NO: 600761 - RNA, 19 nt, Artificial Sequence
  Description of Artificial Sequence: Synthetic oligonucleotide
auucgggucacugcaucga

SEQ ID NO: 600762 - RNA, 19 nt, Artificial Sequence
  Description of Artificial Sequence: Synthetic oligonucleotide
ccauuugagaugacccgag

SEQ ID NO: 600763 - RNA, 19 nt, Artificial Sequence
  Description of Artificial Sequence: Synthetic oligonucleotide
caccuccaguucaugugag

SEQ ID NO: 600764 - RNA, 19 nt, Artificial Sequence
  Description of Artificial Sequence: Synthetic oligonucleotide
uucgcaucgccugcugcca

SEQ ID NO: 600765 - RNA, 19 nt, Artificial Sequence
  Description of Artificial Sequence: Synthetic oligonucleotide
aggagacguccacacgcug

SEQ ID NO: 600766 - RNA, 19 nt, Artificial Sequence
  Description of Artificial Sequence: Synthetic oligonucleotide
gauccgcuugcuggcaccc

SEQ ID NO: 600767 - RNA, 19 nt, Artificial Sequence
  Description of Artificial Sequence: Synthetic oligonucleotide
gguacuugaaagggaugug

SEQ ID NO: 600768 - RNA, 19 nt, Artificial Sequence
  Description of Artificial Sequence: Synthetic oligonucleotide
acaucccguggcucaccgg

SEQ ID NO: 600769 - RNA, 19 nt, Artificial Sequence
  Description of Artificial Sequence: Synthetic oligonucleotide
ggcucucacuuuccuaacc

SEQ ID NO: 600770 - RNA, 19 nt, Artificial Sequence
  Description of Artificial Sequence: Synthetic oligonucleotide
augugagaccugaacggcu

SEQ ID NO: 600771 - RNA, 19 nt, Artificial Sequence
  Description of Artificial Sequence: Synthetic oligonucleotide
cauuugagaugacccgaga

SEQ ID NO: 600772 - RNA, 19 nt, Artificial Sequence
  Description of Artificial Sequence: Synthetic oligonucleotide
guaccacacauuuccgucu

SEQ ID NO: 600773 - RNA, 19 nt, Artificial Sequence
  Description of Artificial Sequence: Synthetic oligonucleotide
caguucaugugagaccuga

SEQ ID NO: 600774 - RNA, 19 nt, Artificial Sequence
  Description of Artificial Sequence: Synthetic oligonucleotide
ggagacguccacacgcugc

SEQ ID NO: 600775 - RNA, 19 nt, Artificial Sequence
  Description of Artificial Sequence: Synthetic oligonucleotide
ugugaacgccaaugggcuu

SEQ ID NO: 600776 - RNA, 19 nt, Artificial Sequence
  Description of Artificial Sequence: Synthetic oligonucleotide
ccgugaaugcugugcacgg

SEQ ID NO: 600777 - RNA, 19 nt, Artificial Sequence
  Description of Artificial Sequence: Synthetic oligonucleotide
agcggaagaccugguccac

SEQ ID NO: 600778 - RNA, 19 nt, Artificial Sequence
  Description of Artificial Sequence: Synthetic oligonucleotide
gcacggauacucugcuggg

SEQ ID NO: 600779 - RNA, 19 nt, Artificial Sequence
  Description of Artificial Sequence: Synthetic oligonucleotide
uuggugcguucccgguaag

SEQ ID NO: 600780 - RNA, 19 nt, Artificial Sequence
  Description of Artificial Sequence: Synthetic oligonucleotide
gugcguucccgguaaggca

SEQ ID NO: 600781 - RNA, 19 nt, Artificial Sequence
  Description of Artificial Sequence: Synthetic oligonucleotide
ugaguguugugcggguuuu

SEQ ID NO: 600782 - RNA, 19 nt, Artificial Sequence
  Description of Artificial Sequence: Synthetic oligonucleotide
ucggccucacgcccacaug

SEQ ID NO: 600783 - RNA, 19 nt, Artificial Sequence
  Description of Artificial Sequence: Synthetic oligonucleotide
ugguguaggugauccgcuu

SEQ ID NO: 600784 - RNA, 19 nt, Artificial Sequence
  Description of Artificial Sequence: Synthetic oligonucleotide
gcguacagcgugugguggg

SEQ ID NO: 600785 - RNA, 19 nt, Artificial Sequence
  Description of Artificial Sequence: Synthetic oligonucleotide
cacccuucgcaucgccugc

SEQ ID NO: 600786 - RNA, 19 nt, Artificial Sequence
  Description of Artificial Sequence: Synthetic oligonucleotide
cccgguaaggcaucaauga

SEQ ID NO: 600787 - RNA, 19 nt, Artificial Sequence
  Description of Artificial Sequence: Synthetic oligonucleotide
auccugcgacugucggacg

SEQ ID NO: 600788 - RNA, 19 nt, Artificial Sequence
  Description of Artificial Sequence: Synthetic oligonucleotide
augggccggccacucuccg

SEQ ID NO: 600789 - RNA, 19 nt, Artificial Sequence
  Description of Artificial Sequence: Synthetic oligonucleotide
gugugaacgccaaugggcu

SEQ ID NO: 600790 - RNA, 19 nt, Artificial Sequence
  Description of Artificial Sequence: Synthetic oligonucleotide
ggcguguuuaguaggcaug

SEQ ID NO: 600791 - RNA, 19 nt, Artificial Sequence
  Description of Artificial Sequence: Synthetic oligonucleotide
caugaggcggcaacacaaa

SEQ ID NO: 600792 - RNA, 19 nt, Artificial Sequence
  Description of Artificial Sequence: Synthetic oligonucleotide
accgugugcugaguguugu

SEQ ID NO: 600793 - RNA, 19 nt, Artificial Sequence
  Description of Artificial Sequence: Synthetic oligonucleotide
uggcacccuucgcaucgcc

SEQ ID NO: 600794 - RNA, 19 nt, Artificial Sequence
  Description of Artificial Sequence: Synthetic oligonucleotide
ggcguacagcguguggugg

SEQ ID NO: 600795 - RNA, 19 nt, Artificial Sequence
  Description of Artificial Sequence: Synthetic oligonucleotide
ccgugugaacgccaauggg

SEQ ID NO: 600796 - RNA, 19 nt, Artificial Sequence
  Description of Artificial Sequence: Synthetic oligonucleotide
gaguggagacagaccugcc

SEQ ID NO: 600797 - RNA, 19 nt, Artificial Sequence
  Description of Artificial Sequence: Synthetic oligonucleotide
ccgguaaggcaucaaugac

SEQ ID NO: 600798 - RNA, 19 nt, Artificial Sequence
  Description of Artificial Sequence: Synthetic oligonucleotide
gaaaaggaccuuggcgugu

SEQ ID NO: 600799 - RNA, 19 nt, Artificial Sequence
  Description of Artificial Sequence: Synthetic oligonucleotide
aaaggaccuuggcguguuu

SEQ ID NO: 600800 - RNA, 19 nt, Artificial Sequence
  Description of Artificial Sequence: Synthetic oligonucleotide
ugggcuugacgcugccgaa

SEQ ID NO: 600801 - RNA, 19 nt, Artificial Sequence
  Description of Artificial Sequence: Synthetic oligonucleotide
cauuuccgucuggagcccc

SEQ ID NO: 600802 - RNA, 19 nt, Artificial Sequence
  Description of Artificial Sequence: Synthetic oligonucleotide
gaccgcuggccaccuugag

SEQ ID NO: 600803 - RNA, 19 nt, Artificial Sequence
  Description of Artificial Sequence: Synthetic oligonucleotide
ugaacggcuggccgcccuu

SEQ ID NO: 600804 - RNA, 19 nt, Artificial Sequence
  Description of Artificial Sequence: Synthetic oligonucleotide
gugcacggauacucugcug

SEQ ID NO: 600805 - RNA, 19 nt, Artificial Sequence
  Description of Artificial Sequence: Synthetic oligonucleotide
cuuuccuaaccgucugugu

SEQ ID NO: 600806 - RNA, 19 nt, Artificial Sequence
  Description of Artificial Sequence: Synthetic oligonucleotide
agacggcccuucaccaccg

SEQ ID NO: 600807 - RNA, 19 nt, Artificial Sequence
  Description of Artificial Sequence: Synthetic oligonucleotide
cucacacucgugacccaca

SEQ ID NO: 600808 - RNA, 19 nt, Artificial Sequence
  Description of Artificial Sequence: Synthetic oligonucleotide
agguccucugagaaggaua

SEQ ID NO: 600809 - RNA, 19 nt, Artificial Sequence
  Description of Artificial Sequence: Synthetic oligonucleotide
cucacgcccacaugaaggu

SEQ ID NO: 600810 - RNA, 19 nt, Artificial Sequence
  Description of Artificial Sequence: Synthetic oligonucleotide
gugagcucugggugguaga

SEQ ID NO: 600811 - RNA, 19 nt, Artificial Sequence
  Description of Artificial Sequence: Synthetic oligonucleotide
ucgucaccaggcgucccca

SEQ ID NO: 600812 - RNA, 19 nt, Artificial Sequence
  Description of Artificial Sequence: Synthetic oligonucleotide
gaugacccgagaccuggau

SEQ ID NO: 600813 - RNA, 19 nt, Artificial Sequence
  Description of Artificial Sequence: Synthetic oligonucleotide
cacgaugccaccagcuggu

SEQ ID NO: 600814 - RNA, 19 nt, Artificial Sequence
  Description of Artificial Sequence: Synthetic oligonucleotide
ugcuggcacccuucgcauc

SEQ ID NO: 600815 - RNA, 19 nt, Artificial Sequence
  Description of Artificial Sequence: Synthetic oligonucleotide
cggaaaaggaccuuggcgu

SEQ ID NO: 600816 - RNA, 19 nt, Artificial Sequence
  Description of Artificial Sequence: Synthetic oligonucleotide
cuggaaccucuugcucugg

SEQ ID NO: 600817 - RNA, 19 nt, Artificial Sequence
  Description of Artificial Sequence: Synthetic oligonucleotide
cauacucgguggccaccac

SEQ ID NO: 600818 - RNA, 19 nt, Artificial Sequence
  Description of Artificial Sequence: Synthetic oligonucleotide
cugccacgcagguggaaca

SEQ ID NO: 600819 - RNA, 19 nt, Artificial Sequence
  Description of Artificial Sequence: Synthetic oligonucleotide
accaggcguccccacggga

SEQ ID NO: 600820 - RNA, 19 nt, Artificial Sequence
  Description of Artificial Sequence: Synthetic oligonucleotide
aguucaugugagaccugaa

SEQ ID NO: 600821 - RNA, 19 nt, Artificial Sequence
  Description of Artificial Sequence: Synthetic oligonucleotide
gggcucucgacuccggguc

SEQ ID NO: 600822 - RNA, 19 nt, Artificial Sequence
  Description of Artificial Sequence: Synthetic oligonucleotide
gcaucgccugcugccaugg

SEQ ID NO: 600823 - RNA, 19 nt, Artificial Sequence
  Description of Artificial Sequence: Synthetic oligonucleotide
cgauccgcauagaugauga

SEQ ID NO: 600824 - RNA, 19 nt, Artificial Sequence
  Description of Artificial Sequence: Synthetic oligonucleotide
agcgguugccagcccuccu

SEQ ID NO: 600825 - RNA, 19 nt, Artificial Sequence
  Description of Artificial Sequence: Synthetic oligonucleotide
gaacggcuggccgcccuug

SEQ ID NO: 600826 - RNA, 19 nt, Artificial Sequence
  Description of Artificial Sequence: Synthetic oligonucleotide
gccucacgcccacaugaag

SEQ ID NO: 600827 - RNA, 19 nt, Artificial Sequence
  Description of Artificial Sequence: Synthetic oligonucleotide
ucgcaucgccugcugccau

SEQ ID NO: 600828 - RNA, 19 nt, Artificial Sequence
  Description of Artificial Sequence: Synthetic oligonucleotide
accccaugaggcggcaaca

SEQ ID NO: 600829 - RNA, 19 nt, Artificial Sequence
  Description of Artificial Sequence: Synthetic oligonucleotide
acccagcguggcguacagc

SEQ ID NO: 600830 - RNA, 19 nt, Artificial Sequence
  Description of Artificial Sequence: Synthetic oligonucleotide
guacagcguguggugggug

SEQ ID NO: 600831 - RNA, 19 nt, Artificial Sequence
  Description of Artificial Sequence: Synthetic oligonucleotide
cacacggcugugcccucac

SEQ ID NO: 600832 - RNA, 19 nt, Artificial Sequence
  Description of Artificial Sequence: Synthetic oligonucleotide
ccaugucaccacucauggc

SEQ ID NO: 600833 - RNA, 19 nt, Artificial Sequence
  Description of Artificial Sequence: Synthetic oligonucleotide
gcgauccgcauagaugaug

SEQ ID NO: 600834 - RNA, 19 nt, Artificial Sequence
  Description of Artificial Sequence: Synthetic oligonucleotide
ccacgggagcaccuggaag

SEQ ID NO: 600835 - RNA, 19 nt, Artificial Sequence
  Description of Artificial Sequence: Synthetic oligonucleotide
cugcgcuuguaccacacau

SEQ ID NO: 600836 - RNA, 19 nt, Artificial Sequence
  Description of Artificial Sequence: Synthetic oligonucleotide
ccucaggccaaugguguag

SEQ ID NO: 600837 - RNA, 19 nt, Artificial Sequence
  Description of Artificial Sequence: Synthetic oligonucleotide
guacccagcguggcguaca

SEQ ID NO: 600838 - RNA, 19 nt, Artificial Sequence
  Description of Artificial Sequence: Synthetic oligonucleotide
gcuuggaccgcuggccacc

SEQ ID NO: 600839 - RNA, 19 nt, Artificial Sequence
  Description of Artificial Sequence: Synthetic oligonucleotide
gggcuugacgcugccgaag

SEQ ID NO: 600840 - RNA, 19 nt, Artificial Sequence
  Description of Artificial Sequence: Synthetic oligonucleotide
acacggcugugcccucacu

SEQ ID NO: 600841 - RNA, 19 nt, Artificial Sequence
  Description of Artificial Sequence: Synthetic oligonucleotide
guguaggugguagguccuc

SEQ ID NO: 600842 - RNA, 19 nt, Artificial Sequence
  Description of Artificial Sequence: Synthetic oligonucleotide
gggccggccacucuccguc

SEQ ID NO: 600843 - RNA, 19 nt, Artificial Sequence
  Description of Artificial Sequence: Synthetic oligonucleotide
guagguccucugagaagga

SEQ ID NO: 600844 - RNA, 19 nt, Artificial Sequence
  Description of Artificial Sequence: Synthetic oligonucleotide
gcucacacucgugacccac

SEQ ID NO: 600845 - RNA, 19 nt, Artificial Sequence
  Description of Artificial Sequence: Synthetic oligonucleotide
agcguggcguacagcgugu

SEQ ID NO: 600846 - RNA, 19 nt, Artificial Sequence
  Description of Artificial Sequence: Synthetic oligonucleotide
gcggcaucuggcuccccgc

SEQ ID NO: 600847 - RNA, 19 nt, Artificial Sequence
  Description of Artificial Sequence: Synthetic oligonucleotide
gcggcaacacaaagacacc

SEQ ID NO: 600848 - RNA, 19 nt, Artificial Sequence
  Description of Artificial Sequence: Synthetic oligonucleotide
gcgcuuguaccacacauuu

SEQ ID NO: 600849 - RNA, 19 nt, Artificial Sequence
  Description of Artificial Sequence: Synthetic oligonucleotide
cauggucauugauguagau

SEQ ID NO: 600850 - RNA, 19 nt, Artificial Sequence
  Description of Artificial Sequence: Synthetic oligonucleotide
ccggggcccacguucuggg

SEQ ID NO: 600851 - RNA, 19 nt, Artificial Sequence
  Description of Artificial Sequence: Synthetic oligonucleotide
cuggcacccuucgcaucgc

SEQ ID NO: 600852 - RNA, 19 nt, Artificial Sequence
  Description of Artificial Sequence: Synthetic oligonucleotide
gacauucgggucacugcau

SEQ ID NO: 600853 - RNA, 19 nt, Artificial Sequence
  Description of Artificial Sequence: Synthetic oligonucleotide
cugaguguugugcggguuu

SEQ ID NO: 600854 - RNA, 19 nt, Artificial Sequence
  Description of Artificial Sequence: Synthetic oligonucleotide
caccaccgugugaacgcca

SEQ ID NO: 600855 - RNA, 19 nt, Artificial Sequence
  Description of Artificial Sequence: Synthetic oligonucleotide
gcuuagcacgcuggugaug

SEQ ID NO: 600856 - RNA, 19 nt, Artificial Sequence
  Description of Artificial Sequence: Synthetic oligonucleotide
ccgccagccagcgauccgc

SEQ ID NO: 600857 - RNA, 19 nt, Artificial Sequence
  Description of Artificial Sequence: Synthetic oligonucleotide
cugcgacugucggacgcuc

SEQ ID NO: 600858 - RNA, 19 nt, Artificial Sequence
  Description of Artificial Sequence: Synthetic oligonucleotide
ggugauccgcuugcuggca

SEQ ID NO: 600859 - RNA, 19 nt, Artificial Sequence
  Description of Artificial Sequence: Synthetic oligonucleotide
cguguuuaguaggcauggc

SEQ ID NO: 600860 - RNA, 19 nt, Artificial Sequence
  Description of Artificial Sequence: Synthetic oligonucleotide
agcgauccgcauagaugau

SEQ ID NO: 600861 - RNA, 19 nt, Artificial Sequence
  Description of Artificial Sequence: Synthetic oligonucleotide
cuggacuaucaaucucaau

SEQ ID NO: 600862 - RNA, 19 nt, Artificial Sequence
  Description of Artificial Sequence: Synthetic oligonucleotide
gguguaggucucuccuccu

SEQ ID NO: 600863 - RNA, 19 nt, Artificial Sequence
  Description of Artificial Sequence: Synthetic oligonucleotide
ggcuggcgacaggagagac

SEQ ID NO: 600864 - RNA, 19 nt, Artificial Sequence
  Description of Artificial Sequence: Synthetic oligonucleotide
uugcgccugugugcggcau

SEQ ID NO: 600865 - RNA, 19 nt, Artificial Sequence
  Description of Artificial Sequence: Synthetic oligonucleotide
ccugcgacacaggagacgu

SEQ ID NO: 600866 - RNA, 19 nt, Artificial Sequence
  Description of Artificial Sequence: Synthetic oligonucleotide
ccuaaccgucugugucccc

SEQ ID NO: 600867 - RNA, 19 nt, Artificial Sequence
  Description of Artificial Sequence: Synthetic oligonucleotide
gaacgccaaugggcuugac

SEQ ID NO: 600868 - RNA, 19 nt, Artificial Sequence
  Description of Artificial Sequence: Synthetic oligonucleotide
cagacgggucagcuguccu

SEQ ID NO: 600869 - RNA, 19 nt, Artificial Sequence
  Description of Artificial Sequence: Synthetic oligonucleotide
guucccgguaaggcaucaa

SEQ ID NO: 600870 - RNA, 19 nt, Artificial Sequence
  Description of Artificial Sequence: Synthetic oligonucleotide
cuccggccuccugcaggcg

SEQ ID NO: 600871 - RNA, 19 nt, Artificial Sequence
  Description of Artificial Sequence: Synthetic oligonucleotide
caggcgcaccagccgcauc

SEQ ID NO: 600872 - RNA, 19 nt, Artificial Sequence
  Description of Artificial Sequence: Synthetic oligonucleotide
gccagcgauccgcauagau

SEQ ID NO: 600873 - RNA, 19 nt, Artificial Sequence
  Description of Artificial Sequence: Synthetic oligonucleotide
cccguggcucaccggggcc

SEQ ID NO: 600874 - RNA, 19 nt, Artificial Sequence
  Description of Artificial Sequence: Synthetic oligonucleotide
gcgacugucggacgcuccu

SEQ ID NO: 600875 - RNA, 19 nt, Artificial Sequence
  Description of Artificial Sequence: Synthetic oligonucleotide
ccguggcucaccggggccc

SEQ ID NO: 600876 - RNA, 19 nt, Artificial Sequence
  Description of Artificial Sequence: Synthetic oligonucleotide
ggaccgcuggccaccuuga

SEQ ID NO: 600877 - RNA, 19 nt, Artificial Sequence
  Description of Artificial Sequence: Synthetic oligonucleotide
ggaccuuggcguguuuagu

SEQ ID NO: 600878 - RNA, 19 nt, Artificial Sequence
  Description of Artificial Sequence: Synthetic oligonucleotide
cccuucgcaucgccugcug

SEQ ID NO: 600879 - RNA, 19 nt, Artificial Sequence
  Description of Artificial Sequence: Synthetic oligonucleotide
aggcuccgccagccagcga

SEQ ID NO: 600880 - RNA, 19 nt, Artificial Sequence
  Description of Artificial Sequence: Synthetic oligonucleotide
agccagcgauccgcauaga

SEQ ID NO: 600881 - RNA, 19 nt, Artificial Sequence
  Description of Artificial Sequence: Synthetic oligonucleotide
gcuggccgcccuuggcgga

SEQ ID NO: 600882 - RNA, 19 nt, Artificial Sequence
  Description of Artificial Sequence: Synthetic oligonucleotide
gccguacccagcguggcgu

SEQ ID NO: 600883 - RNA, 19 nt, Artificial Sequence
  Description of Artificial Sequence: Synthetic oligonucleotide
cgcaucgccugcugccaug

SEQ ID NO: 600884 - RNA, 19 nt, Artificial Sequence
  Description of Artificial Sequence: Synthetic oligonucleotide
ccgcauagaugaugacaaa

SEQ ID NO: 600885 - RNA, 19 nt, Artificial Sequence
  Description of Artificial Sequence: Synthetic oligonucleotide
cuuggaccgcuggccaccu

SEQ ID NO: 600886 - RNA, 19 nt, Artificial Sequence
  Description of Artificial Sequence: Synthetic oligonucleotide
gcguccccacgggagcacc

SEQ ID NO: 600887 - RNA, 19 nt, Artificial Sequence
  Description of Artificial Sequence: Synthetic oligonucleotide
ggccucacgcccacaugaa

SEQ ID NO: 600888 - RNA, 19 nt, Artificial Sequence
  Description of Artificial Sequence: Synthetic oligonucleotide
ccugagggugggagguaaa

SEQ ID NO: 600889 - RNA, 19 nt, Artificial Sequence
  Description of Artificial Sequence: Synthetic oligonucleotide
gcaaugggccggccacucu

SEQ ID NO: 600890 - RNA, 19 nt, Artificial Sequence
  Description of Artificial Sequence: Synthetic oligonucleotide
ccuagcuucugcgcuugua

SEQ ID NO: 600891 - RNA, 19 nt, Artificial Sequence
  Description of Artificial Sequence: Synthetic oligonucleotide
ccugaacggcuggccgccc

SEQ ID NO: 600892 - RNA, 19 nt, Artificial Sequence
  Description of Artificial Sequence: Synthetic oligonucleotide
ggcguccccacgggagcac

SEQ ID NO: 600893 - RNA, 19 nt, Artificial Sequence
  Description of Artificial Sequence: Synthetic oligonucleotide
cgugaaugcugugcacgga

SEQ ID NO: 600894 - RNA, 19 nt, Artificial Sequence
  Description of Artificial Sequence: Synthetic oligonucleotide
gcguucccgguaaggcauc

SEQ ID NO: 600895 - RNA, 19 nt, Artificial Sequence
  Description of Artificial Sequence: Synthetic oligonucleotide
caucgccugcugccauggu

SEQ ID NO: 600896 - RNA, 19 nt, Artificial Sequence
  Description of Artificial Sequence: Synthetic oligonucleotide
cgacugucggacgcuccuc

SEQ ID NO: 600897 - RNA, 19 nt, Artificial Sequence
  Description of Artificial Sequence: Synthetic oligonucleotide
gcucucgacuccggguccu

SEQ ID NO: 600898 - RNA, 19 nt, Artificial Sequence
  Description of Artificial Sequence: Synthetic oligonucleotide
gugcggcaucuggcucccc

SEQ ID NO: 600899 - RNA, 19 nt, Artificial Sequence
  Description of Artificial Sequence: Synthetic oligonucleotide
ggcugccacgcagguggaa

SEQ ID NO: 600900 - RNA, 19 nt, Artificial Sequence
  Description of Artificial Sequence: Synthetic oligonucleotide
ccaccgugugcugaguguu

SEQ ID NO: 600901 - RNA, 19 nt, Artificial Sequence
  Description of Artificial Sequence: Synthetic oligonucleotide
cgccaaugggcuugacgcu

SEQ ID NO: 600902 - RNA, 19 nt, Artificial Sequence
  Description of Artificial Sequence: Synthetic oligonucleotide
cguucccgguaaggcauca

SEQ ID NO: 600903 - RNA, 19 nt, Artificial Sequence
  Description of Artificial Sequence: Synthetic oligonucleotide
ccguacccagcguggcgua

SEQ ID NO: 600904 - RNA, 19 nt, Artificial Sequence
  Description of Artificial Sequence: Synthetic oligonucleotide
gcccacguucugggccuca

SEQ ID NO: 600905 - RNA, 19 nt, Artificial Sequence
  Description of Artificial Sequence: Synthetic oligonucleotide
cguacagcguguggugggu

SEQ ID NO: 600906 - RNA, 19 nt, Artificial Sequence
  Description of Artificial Sequence: Synthetic oligonucleotide
gccagccagcgauccgcau

SEQ ID NO: 600907 - RNA, 19 nt, Artificial Sequence
  Description of Artificial Sequence: Synthetic oligonucleotide
cucucgacuccggguccuu

SEQ ID NO: 600908 - RNA, 19 nt, Artificial Sequence
  Description of Artificial Sequence: Synthetic oligonucleotide
cggccacucuccguccgga

SEQ ID NO: 600909 - RNA, 19 nt, Artificial Sequence
  Description of Artificial Sequence: Synthetic oligonucleotide
gcucaccggggcccacguu

SEQ ID NO: 600910 - RNA, 19 nt, Artificial Sequence
  Description of Artificial Sequence: Synthetic oligonucleotide
cguccccacgggagcaccu

SEQ ID NO: 600911 - RNA, 19 nt, Artificial Sequence
  Description of Artificial Sequence: Synthetic oligonucleotide
ccguccggaaaaggaccuu

SEQ ID NO: 600912 - RNA, 19 nt, Artificial Sequence
  Description of Artificial Sequence: Synthetic oligonucleotide
aaaacucucuuccauaugc

SEQ ID NO: 600913 - RNA, 19 nt, Artificial Sequence
  Description of Artificial Sequence: Synthetic oligonucleotide
aaacaaaacaaaacaaaac

SEQ ID NO: 600914 - RNA, 19 nt, Artificial Sequence
  Description of Artificial Sequence: Synthetic oligonucleotide
aucuacuugaaguaucugc

SEQ ID NO: 600915 - RNA, 19 nt, Artificial Sequence
  Description of Artificial Sequence: Synthetic oligonucleotide
aaggauaucacuucuaauu

SEQ ID NO: 600916 - RNA, 19 nt, Artificial Sequence
  Description of Artificial Sequence: Synthetic oligonucleotide
ucuuccuacaccaaguccc

SEQ ID NO: 600917 - RNA, 19 nt, Artificial Sequence
  Description of Artificial Sequence: Synthetic oligonucleotide
aacaauguggucuacucca

SEQ ID NO: 600918 - RNA, 19 nt, Artificial Sequence
  Description of Artificial Sequence: Synthetic oligonucleotide
ucucuauuuacauuguuca

SEQ ID NO: 600919 - RNA, 19 nt, Artificial Sequence
  Description of Artificial Sequence: Synthetic oligonucleotide
uaugcuacauccauggaga

SEQ ID NO: 600920 - RNA, 19 nt, Artificial Sequence
  Description of Artificial Sequence: Synthetic oligonucleotide
uggauuacaaauacagcag

SEQ ID NO: 600921 - RNA, 19 nt, Artificial Sequence
  Description of Artificial Sequence: Synthetic oligonucleotide
aaaagaaaagaaagaaaag

SEQ ID NO: 600922 - RNA, 19 nt, Artificial Sequence
  Description of Artificial Sequence: Synthetic oligonucleotide
ccuaauaccacaaacauug

SEQ ID NO: 600923 - RNA, 19 nt, Artificial Sequence
  Description of Artificial Sequence: Synthetic oligonucleotide
uauggaauccuuucuaggc

SEQ ID NO: 600924 - RNA, 19 nt, Artificial Sequence
  Description of Artificial Sequence: Synthetic oligonucleotide
aaaacaaaacaaaacaaaa

SEQ ID NO: 600925 - RNA, 19 nt, Artificial Sequence
  Description of Artificial Sequence: Synthetic oligonucleotide
auaugcuacauccauggag

SEQ ID NO: 600926 - RNA, 19 nt, Artificial Sequence
  Description of Artificial Sequence: Synthetic oligonucleotide
aggaauaacucucuuccac

SEQ ID NO: 600927 - RNA, 19 nt, Artificial Sequence
  Description of Artificial Sequence: Synthetic oligonucleotide
uaaacuguggccuucuugu

SEQ ID NO: 600928 - RNA, 19 nt, Artificial Sequence
  Description of Artificial Sequence: Synthetic oligonucleotide
aggauaucacuucuaauuc

SEQ ID NO: 600929 - RNA, 19 nt, Artificial Sequence
  Description of Artificial Sequence: Synthetic oligonucleotide
caucaauccacgaaggggc

SEQ ID NO: 600930 - RNA, 19 nt, Artificial Sequence
  Description of Artificial Sequence: Synthetic oligonucleotide
guggauuacaaauacagca

SEQ ID NO: 600931 - RNA, 19 nt, Artificial Sequence
  Description of Artificial Sequence: Synthetic oligonucleotide
uguucauaaaccucgugca

SEQ ID NO: 600932 - RNA, 19 nt, Artificial Sequence
  Description of Artificial Sequence: Synthetic oligonucleotide
aaccacagucucuauuuac

SEQ ID NO: 600933 - RNA, 19 nt, Artificial Sequence
  Description of Artificial Sequence: Synthetic oligonucleotide
aguuugacaggccuguuag

SEQ ID NO: 600934 - RNA, 19 nt, Artificial Sequence
  Description of Artificial Sequence: Synthetic oligonucleotide
caauauauuugucauccgc

SEQ ID NO: 600935 - RNA, 19 nt, Artificial Sequence
  Description of Artificial Sequence: Synthetic oligonucleotide
aaugauugagugugcacca

SEQ ID NO: 600936 - RNA, 19 nt, Artificial Sequence
  Description of Artificial Sequence: Synthetic oligonucleotide
ugauaccugcagaugacgg

SEQ ID NO: 600937 - RNA, 19 nt, Artificial Sequence
  Description of Artificial Sequence: Synthetic oligonucleotide
auauggaauccuuucuagg

SEQ ID NO: 600938 - RNA, 19 nt, Artificial Sequence
  Description of Artificial Sequence: Synthetic oligonucleotide
acaagugguggccagugac

SEQ ID NO: 600939 - RNA, 19 nt, Artificial Sequence
  Description of Artificial Sequence: Synthetic oligonucleotide
agccuuaacaagugguggc

SEQ ID NO: 600940 - RNA, 19 nt, Artificial Sequence
  Description of Artificial Sequence: Synthetic oligonucleotide
  modified_base (4)..(4): a, c, u, g, unknown or other
aggnguaucacccacucaa

SEQ ID NO: 600941 - RNA, 19 nt, Artificial Sequence
  Description of Artificial Sequence: Synthetic oligonucleotide
uaaaucuacuugaaguauc

SEQ ID NO: 600942 - RNA, 19 nt, Artificial Sequence
  Description of Artificial Sequence: Synthetic oligonucleotide
auaacucucuuccacccuc

SEQ ID NO: 600943 - RNA, 19 nt, Artificial Sequence
  Description of Artificial Sequence: Synthetic oligonucleotide
caaaacaaaacaaaacaaa

SEQ ID NO: 600944 - RNA, 19 nt, Artificial Sequence
  Description of Artificial Sequence: Synthetic oligonucleotide
uauauuugucauccgcuga

SEQ ID NO: 600945 - RNA, 19 nt, Artificial Sequence
  Description of Artificial Sequence: Synthetic oligonucleotide
acaucaauccacgaagggg

SEQ ID NO: 600946 - RNA, 19 nt, Artificial Sequence
  Description of Artificial Sequence: Synthetic oligonucleotide
  modified_base (11)..(11): a, c, u, g, unknown or other
acguggaaggnguaucacc

SEQ ID NO: 600947 - RNA, 19 nt, Artificial Sequence
  Description of Artificial Sequence: Synthetic oligonucleotide
cacgguguuguccagaccc

SEQ ID NO: 600948 - RNA, 19 nt, Artificial Sequence
  Description of Artificial Sequence: Synthetic oligonucleotide
caaugauugagugugcacc

SEQ ID NO: 600949 - RNA, 19 nt, Artificial Sequence
  Description of Artificial Sequence: Synthetic oligonucleotide
uugagugugcaccaaauuu

SEQ ID NO: 600950 - RNA, 19 nt, Artificial Sequence
  Description of Artificial Sequence: Synthetic oligonucleotide
ucuccuuucuuccuacacc

SEQ ID NO: 600951 - RNA, 19 nt, Artificial Sequence
  Description of Artificial Sequence: Synthetic oligonucleotide
ugagcgugcgcccaucagg

SEQ ID NO: 600952 - RNA, 19 nt, Artificial Sequence
  Description of Artificial Sequence: Synthetic oligonucleotide
cauauggaauccuuucuag

SEQ ID NO: 600953 - RNA, 19 nt, Artificial Sequence
  Description of Artificial Sequence: Synthetic oligonucleotide
guaguuaucccuguucagg

SEQ ID NO: 600954 - RNA, 19 nt, Artificial Sequence
  Description of Artificial Sequence: Synthetic oligonucleotide
guagaaagggcugagagca

SEQ ID NO: 600955 - RNA, 19 nt, Artificial Sequence
  Description of Artificial Sequence: Synthetic oligonucleotide
gaucugggaggugaaaucg

SEQ ID NO: 600956 - RNA, 19 nt, Artificial Sequence
  Description of Artificial Sequence: Synthetic oligonucleotide
ucaugagagaugucuauac

SEQ ID NO: 600957 - RNA, 19 nt, Artificial Sequence
  Description of Artificial Sequence: Synthetic oligonucleotide
gaaaucguguugcuguagc

SEQ ID NO: 600958 - RNA, 19 nt, Artificial Sequence
  Description of Artificial Sequence: Synthetic oligonucleotide
acagaugaggauucuuuag

SEQ ID NO: 600959 - RNA, 19 nt, Artificial Sequence
  Description of Artificial Sequence: Synthetic oligonucleotide
aguggauuacaaauacagc

SEQ ID NO: 600960 - RNA, 19 nt, Artificial Sequence
  Description of Artificial Sequence: Synthetic oligonucleotide
aacggaagcagaagccucc

SEQ ID NO: 600961 - RNA, 19 nt, Artificial Sequence
  Description of Artificial Sequence: Synthetic oligonucleotide
agcagaagccuccagauaa

SEQ ID NO: 600962 - RNA, 19 nt, Artificial Sequence
  Description of Artificial Sequence: Synthetic oligonucleotide
ucugucagacacaucaauc

SEQ ID NO: 600963 - RNA, 19 nt, Artificial Sequence
  Description of Artificial Sequence: Synthetic oligonucleotide
ugagugugcaccaaauuua

SEQ ID NO: 600964 - RNA, 19 nt, Artificial Sequence
  Description of Artificial Sequence: Synthetic oligonucleotide
uaguuaucccuguucaggc

SEQ ID NO: 600965 - RNA, 19 nt, Artificial Sequence
  Description of Artificial Sequence: Synthetic oligonucleotide
aauccuuucuaggcugcgc

SEQ ID NO: 600966 - RNA, 19 nt, Artificial Sequence
  Description of Artificial Sequence: Synthetic oligonucleotide
aaaucuacuugaaguaucu

SEQ ID NO: 600967 - RNA, 19 nt, Artificial Sequence
  Description of Artificial Sequence: Synthetic oligonucleotide
gagcguguugaucuggcgg

SEQ ID NO: 600968 - RNA, 19 nt, Artificial Sequence
  Description of Artificial Sequence: Synthetic oligonucleotide
cucucaagaaggugcaggg

SEQ ID NO: 600969 - RNA, 19 nt, Artificial Sequence
  Description of Artificial Sequence: Synthetic oligonucleotide
ugaucuggcggcaugccug

SEQ ID NO: 600970 - RNA, 19 nt, Artificial Sequence
  Description of Artificial Sequence: Synthetic oligonucleotide
acaaucagaaugaggcacc

SEQ ID NO: 600971 - RNA, 19 nt, Artificial Sequence
  Description of Artificial Sequence: Synthetic oligonucleotide
ugauggucacagcacauac

SEQ ID NO: 600972 - RNA, 19 nt, Artificial Sequence
  Description of Artificial Sequence: Synthetic oligonucleotide
uagagccuuaacaaguggu

SEQ ID NO: 600973 - RNA, 19 nt, Artificial Sequence
  Description of Artificial Sequence: Synthetic oligonucleotide
gaagagaaagcccgucaag

SEQ ID NO: 600974 - RNA, 19 nt, Artificial Sequence
  Description of Artificial Sequence: Synthetic oligonucleotide
aucuuaugaaaggauauca

SEQ ID NO: 600975 - RNA, 19 nt, Artificial Sequence
  Description of Artificial Sequence: Synthetic oligonucleotide
cacagcucaagacagauga

SEQ ID NO: 600976 - RNA, 19 nt, Artificial Sequence
  Description of Artificial Sequence: Synthetic oligonucleotide
gaaaggauaucacuucuaa

SEQ ID NO: 600977 - RNA, 19 nt, Artificial Sequence
  Description of Artificial Sequence: Synthetic oligonucleotide
cuccagacaggcaugacac

SEQ ID NO: 600978 - RNA, 19 nt, Artificial Sequence
  Description of Artificial Sequence: Synthetic oligonucleotide
agcacauaccaccuccccg

SEQ ID NO: 600979 - RNA, 19 nt, Artificial Sequence
  Description of Artificial Sequence: Synthetic oligonucleotide
caacauacauccuguuggg

SEQ ID NO: 600980 - RNA, 19 nt, Artificial Sequence
  Description of Artificial Sequence: Synthetic oligonucleotide
aaucagaaugaggcacccc

SEQ ID NO: 600981 - RNA, 19 nt, Artificial Sequence
  Description of Artificial Sequence: Synthetic oligonucleotide
agcugagucgcugugcccc

SEQ ID NO: 600982 - RNA, 19 nt, Artificial Sequence
  Description of Artificial Sequence: Synthetic oligonucleotide
acucucuuccauaugcuac

SEQ ID NO: 600983 - RNA, 19 nt, Artificial Sequence
  Description of Artificial Sequence: Synthetic oligonucleotide
uuagaguccuuguucagua

SEQ ID NO: 600984 - RNA, 19 nt, Artificial Sequence
  Description of Artificial Sequence: Synthetic oligonucleotide
aacauacauccuguugggg

SEQ ID NO: 600985 - RNA, 19 nt, Artificial Sequence
  Description of Artificial Sequence: Synthetic oligonucleotide
ucgugcacugcacaaucag

SEQ ID NO: 600986 - RNA, 19 nt, Artificial Sequence
  Description of Artificial Sequence: Synthetic oligonucleotide
ucugggaggugaaaucgug

SEQ ID NO: 600987 - RNA, 19 nt, Artificial Sequence
  Description of Artificial Sequence: Synthetic oligonucleotide
aggcaugacacacaccucu

SEQ ID NO: 600988 - RNA, 19 nt, Artificial Sequence
  Description of Artificial Sequence: Synthetic oligonucleotide
ugagaagguugucuuuccc

SEQ ID NO: 600989 - RNA, 19 nt, Artificial Sequence
  Description of Artificial Sequence: Synthetic oligonucleotide
aauccacgaaggggcaugc

SEQ ID NO: 600990 - RNA, 19 nt, Artificial Sequence
  Description of Artificial Sequence: Synthetic oligonucleotide
ugaccucguaaacuguggc

SEQ ID NO: 600991 - RNA, 19 nt, Artificial Sequence
  Description of Artificial Sequence: Synthetic oligonucleotide
  modified_base (13)..(13): a, c, u, g, unknown or other
ucacguggaaggnguauca

SEQ ID NO: 600992 - RNA, 19 nt, Artificial Sequence
  Description of Artificial Sequence: Synthetic oligonucleotide
uguggucuacuccaguguc

SEQ ID NO: 600993 - RNA, 19 nt, Artificial Sequence
  Description of Artificial Sequence: Synthetic oligonucleotide
uguguagacgugccgugug

SEQ ID NO: 600994 - RNA, 19 nt, Artificial Sequence
  Description of Artificial Sequence: Synthetic oligonucleotide
ucaugucccaacauacauc

SEQ ID NO: 600995 - RNA, 19 nt, Artificial Sequence
  Description of Artificial Sequence: Synthetic oligonucleotide
ucucccagaguuugacagg

SEQ ID NO: 600996 - RNA, 19 nt, Artificial Sequence
  Description of Artificial Sequence: Synthetic oligonucleotide
auaaaccucgugcacugca

SEQ ID NO: 600997 - RNA, 19 nt, Artificial Sequence
  Description of Artificial Sequence: Synthetic oligonucleotide
  modified_base (6)..(6): a, c, u, g, unknown or other
gaaggnguaucacccacuc

SEQ ID NO: 600998 - RNA, 19 nt, Artificial Sequence
  Description of Artificial Sequence: Synthetic oligonucleotide
  modified_base (8)..(8): a, c, u, g, unknown or other
cugcaucngcccaucagcg

SEQ ID NO: 600999 - RNA, 19 nt, Artificial Sequence
  Description of Artificial Sequence: Synthetic oligonucleotide
gaaguaucugccagcacug

SEQ ID NO: 601000 - RNA, 19 nt, Artificial Sequence
  Description of Artificial Sequence: Synthetic oligonucleotide
accaccaugaguggauuac

SEQ ID NO: 601001 - RNA, 19 nt, Artificial Sequence
  Description of Artificial Sequence: Synthetic oligonucleotide
ggagaagcuugcaugagcg

SEQ ID NO: 601002 - RNA, 19 nt, Artificial Sequence
  Description of Artificial Sequence: Synthetic oligonucleotide
caacaauguggucuacucc

SEQ ID NO: 601003 - RNA, 19 nt, Artificial Sequence
  Description of Artificial Sequence: Synthetic oligonucleotide
cauagggcguccuccaggc

SEQ ID NO: 601004 - RNA, 19 nt, Artificial Sequence
  Description of Artificial Sequence: Synthetic oligonucleotide
uggcuagagccuuaacaag

SEQ ID NO: 601005 - RNA, 19 nt, Artificial Sequence
  Description of Artificial Sequence: Synthetic oligonucleotide
ugcuagugcgucagugggg

SEQ ID NO: 601006 - RNA, 19 nt, Artificial Sequence
  Description of Artificial Sequence: Synthetic oligonucleotide
gaccucguaaacuguggcc

SEQ ID NO: 601007 - RNA, 19 nt, Artificial Sequence
  Description of Artificial Sequence: Synthetic oligonucleotide
aagcccgucaagucuguca

SEQ ID NO: 601008 - RNA, 19 nt, Artificial Sequence
  Description of Artificial Sequence: Synthetic oligonucleotide
ugugacaaugagcgugcgc

SEQ ID NO: 601009 - RNA, 19 nt, Artificial Sequence
  Description of Artificial Sequence: Synthetic oligonucleotide
aaaccucgugcacugcaca

SEQ ID NO: 601010 - RNA, 19 nt, Artificial Sequence
  Description of Artificial Sequence: Synthetic oligonucleotide
agcccgucaagucugucag

SEQ ID NO: 601011 - RNA, 19 nt, Artificial Sequence
  Description of Artificial Sequence: Synthetic oligonucleotide
cugcuagugcgucaguggg

SEQ ID NO: 601012 - RNA, 19 nt, Artificial Sequence
  Description of Artificial Sequence: Synthetic oligonucleotide
agacacaucaauccacgaa

SEQ ID NO: 601013 - RNA, 19 nt, Artificial Sequence
  Description of Artificial Sequence: Synthetic oligonucleotide
agaguccuuguucaguaga

SEQ ID NO: 601014 - RNA, 19 nt, Artificial Sequence
  Description of Artificial Sequence: Synthetic oligonucleotide
uguagacgugccguguggg

SEQ ID NO: 601015 - RNA, 19 nt, Artificial Sequence
  Description of Artificial Sequence: Synthetic oligonucleotide
ugagggugucuguggaggg

SEQ ID NO: 601016 - RNA, 19 nt, Artificial Sequence
  Description of Artificial Sequence: Synthetic oligonucleotide
cugcacaaucagaaugagg

SEQ ID NO: 601017 - RNA, 19 nt, Artificial Sequence
  Description of Artificial Sequence: Synthetic oligonucleotide
gagaagcuugcaugagcgg

SEQ ID NO: 601018 - RNA, 19 nt, Artificial Sequence
  Description of Artificial Sequence: Synthetic oligonucleotide
agugcagccccacaaugcu

SEQ ID NO: 601019 - RNA, 19 nt, Artificial Sequence
  Description of Artificial Sequence: Synthetic oligonucleotide
agccuguuacaauauauuu

SEQ ID NO: 601020 - RNA, 19 nt, Artificial Sequence
  Description of Artificial Sequence: Synthetic oligonucleotide
caagugguggccagugacc

SEQ ID NO: 601021 - RNA, 19 nt, Artificial Sequence
  Description of Artificial Sequence: Synthetic oligonucleotide
aaggggugauaccugcaga

SEQ ID NO: 601022 - RNA, 19 nt, Artificial Sequence
  Description of Artificial Sequence: Synthetic oligonucleotide
ugauugagugugcaccaaa

SEQ ID NO: 601023 - RNA, 19 nt, Artificial Sequence
  Description of Artificial Sequence: Synthetic oligonucleotide
gaucuggcggcaugccugg

SEQ ID NO: 601024 - RNA, 19 nt, Artificial Sequence
  Description of Artificial Sequence: Synthetic oligonucleotide
uacccaaggggugauaccu

SEQ ID NO: 601025 - RNA, 19 nt, Artificial Sequence
  Description of Artificial Sequence: Synthetic oligonucleotide
ugagcguguugaucuggcg

SEQ ID NO: 601026 - RNA, 19 nt, Artificial Sequence
  Description of Artificial Sequence: Synthetic oligonucleotide
  modified_base (7)..(7): a, c, u, g, unknown or other
ugcaucngcccaucagcgc

SEQ ID NO: 601027 - RNA, 19 nt, Artificial Sequence
  Description of Artificial Sequence: Synthetic oligonucleotide
  modified_base (19)..(19): a, c, u, g, unknown or other
aaggcacgaggcugcaucn

SEQ ID NO: 601028 - RNA, 19 nt, Artificial Sequence
  Description of Artificial Sequence: Synthetic oligonucleotide
uccgcugaaaugucacagc

SEQ ID NO: 601029 - RNA, 19 nt, Artificial Sequence
  Description of Artificial Sequence: Synthetic oligonucleotide
aaucuacuugaaguaucug

SEQ ID NO: 601030 - RNA, 19 nt, Artificial Sequence
  Description of Artificial Sequence: Synthetic oligonucleotide
uguugaucuggcggcaugc

SEQ ID NO: 601031 - RNA, 19 nt, Artificial Sequence
  Description of Artificial Sequence: Synthetic oligonucleotide
  modified_base (5)..(5): a, c, u, g, unknown or other
aaggnguaucacccacuca

SEQ ID NO: 601032 - RNA, 19 nt, Artificial Sequence
  Description of Artificial Sequence: Synthetic oligonucleotide
gucucuauuuacauuguuc

SEQ ID NO: 601033 - RNA, 19 nt, Artificial Sequence
  Description of Artificial Sequence: Synthetic oligonucleotide
ucuaggcugcgcuggagga

SEQ ID NO: 601034 - RNA, 19 nt, Artificial Sequence
  Description of Artificial Sequence: Synthetic oligonucleotide
cacgcagcucucaugcagg

SEQ ID NO: 601035 - RNA, 19 nt, Artificial Sequence
  Description of Artificial Sequence: Synthetic oligonucleotide
cauuccucugccguccucg

SEQ ID NO: 601036 - RNA, 19 nt, Artificial Sequence
  Description of Artificial Sequence: Synthetic oligonucleotide
ugaaaucguguugcuguag

SEQ ID NO: 601037 - RNA, 19 nt, Artificial Sequence
  Description of Artificial Sequence: Synthetic oligonucleotide
caaggggugauaccugcag

SEQ ID NO: 601038 - RNA, 19 nt, Artificial Sequence
  Description of Artificial Sequence: Synthetic oligonucleotide
agcaucggugggaaggggc

SEQ ID NO: 601039 - RNA, 19 nt, Artificial Sequence
  Description of Artificial Sequence: Synthetic oligonucleotide
accucguaaacuguggccu

SEQ ID NO: 601040 - RNA, 19 nt, Artificial Sequence
  Description of Artificial Sequence: Synthetic oligonucleotide
ggaucgggcugcuagugcg

SEQ ID NO: 601041 - RNA, 19 nt, Artificial Sequence
  Description of Artificial Sequence: Synthetic oligonucleotide
agagccuuaacaaguggug

SEQ ID NO: 601042 - RNA, 19 nt, Artificial Sequence
  Description of Artificial Sequence: Synthetic oligonucleotide
  modified_base (9)..(9): a, c, u, g, unknown or other
gcugcaucngcccaucagc

SEQ ID NO: 601043 - RNA, 19 nt, Artificial Sequence
  Description of Artificial Sequence: Synthetic oligonucleotide
guagacgugccgugugggg

SEQ ID NO: 601044 - RNA, 19 nt, Artificial Sequence
  Description of Artificial Sequence: Synthetic oligonucleotide
uagaguccuuguucaguag

SEQ ID NO: 601045 - RNA, 19 nt, Artificial Sequence
  Description of Artificial Sequence: Synthetic oligonucleotide
uugaucuggcggcaugccu

SEQ ID NO: 601046 - RNA, 19 nt, Artificial Sequence
  Description of Artificial Sequence: Synthetic oligonucleotide
gagaaagcccgucaagucu

SEQ ID NO: 601047 - RNA, 19 nt, Artificial Sequence
  Description of Artificial Sequence: Synthetic oligonucleotide
gugauaccugcagaugacg

SEQ ID NO: 601048 - RNA, 19 nt, Artificial Sequence
  Description of Artificial Sequence: Synthetic oligonucleotide
ccauuucaccccuucaggg

SEQ ID NO: 601049 - RNA, 19 nt, Artificial Sequence
  Description of Artificial Sequence: Synthetic oligonucleotide
aguuaucccuguucaggca

SEQ ID NO: 601050 - RNA, 19 nt, Artificial Sequence
  Description of Artificial Sequence: Synthetic oligonucleotide
uaacucucuuccacccuca

SEQ ID NO: 601051 - RNA, 19 nt, Artificial Sequence
  Description of Artificial Sequence: Synthetic oligonucleotide
cauugguacccaaggggug

SEQ ID NO: 601052 - RNA, 19 nt, Artificial Sequence
  Description of Artificial Sequence: Synthetic oligonucleotide
  modified_base (2)..(2): a, c, u, g, unknown or other
gnguaucacccacucaaaa

SEQ ID NO: 601053 - RNA, 19 nt, Artificial Sequence
  Description of Artificial Sequence: Synthetic oligonucleotide
guguagacgugccgugugg

SEQ ID NO: 601054 - RNA, 19 nt, Artificial Sequence
  Description of Artificial Sequence: Synthetic oligonucleotide
agcucaagacagaugagga

SEQ ID NO: 601055 - RNA, 19 nt, Artificial Sequence
  Description of Artificial Sequence: Synthetic oligonucleotide
aggggugauaccugcagau

SEQ ID NO: 601056 - RNA, 19 nt, Artificial Sequence
  Description of Artificial Sequence: Synthetic oligonucleotide
uucccauuucaccccuuca

SEQ ID NO: 601057 - RNA, 19 nt, Artificial Sequence
  Description of Artificial Sequence: Synthetic oligonucleotide
cugagcguguugaucuggc

SEQ ID NO: 601058 - RNA, 19 nt, Artificial Sequence
  Description of Artificial Sequence: Synthetic oligonucleotide
gaauccuuucuaggcugcg

SEQ ID NO: 601059 - RNA, 19 nt, Artificial Sequence
  Description of Artificial Sequence: Synthetic oligonucleotide
gaagcagaagccuccagau

SEQ ID NO: 601060 - RNA, 19 nt, Artificial Sequence
  Description of Artificial Sequence: Synthetic oligonucleotide
acauaccaccuccccgugg

SEQ ID NO: 601061 - RNA, 19 nt, Artificial Sequence
  Description of Artificial Sequence: Synthetic oligonucleotide
gccagugaccaucugaaac

SEQ ID NO: 601062 - RNA, 19 nt, Artificial Sequence
  Description of Artificial Sequence: Synthetic oligonucleotide
uuaacaagugguggccagu

SEQ ID NO: 601063 - RNA, 19 nt, Artificial Sequence
  Description of Artificial Sequence: Synthetic oligonucleotide
ugcuacauccauggagagc

SEQ ID NO: 601064 - RNA, 19 nt, Artificial Sequence
  Description of Artificial Sequence: Synthetic oligonucleotide
guagggaggggacagguua

SEQ ID NO: 601065 - RNA, 19 nt, Artificial Sequence
  Description of Artificial Sequence: Synthetic oligonucleotide
acaaaaccuaauaccacaa

SEQ ID NO: 601066 - RNA, 19 nt, Artificial Sequence
  Description of Artificial Sequence: Synthetic oligonucleotide
agagccuguuacaauauau

SEQ ID NO: 601067 - RNA, 19 nt, Artificial Sequence
  Description of Artificial Sequence: Synthetic oligonucleotide
  modified_base (14)..(14): a, c, u, g, unknown or other
cucacguggaaggnguauc

SEQ ID NO: 601068 - RNA, 19 nt, Artificial Sequence
  Description of Artificial Sequence: Synthetic oligonucleotide
uccauagggcguccuccag

SEQ ID NO: 601069 - RNA, 19 nt, Artificial Sequence
  Description of Artificial Sequence: Synthetic oligonucleotide
acuugucgggcuuggugug

SEQ ID NO: 601070 - RNA, 19 nt, Artificial Sequence
  Description of Artificial Sequence: Synthetic oligonucleotide
agaccaccaccaugagugg

SEQ ID NO: 601071 - RNA, 19 nt, Artificial Sequence
  Description of Artificial Sequence: Synthetic oligonucleotide
uuguucaguagaugaccuc

SEQ ID NO: 601072 - RNA, 19 nt, Artificial Sequence
  Description of Artificial Sequence: Synthetic oligonucleotide
accuccccguggcugagcg

SEQ ID NO: 601073 - RNA, 19 nt, Artificial Sequence
  Description of Artificial Sequence: Synthetic oligonucleotide
ucacacggucuuuagcuuu

SEQ ID NO: 601074 - RNA, 19 nt, Artificial Sequence
  Description of Artificial Sequence: Synthetic oligonucleotide
ugucucccagaguuugaca

SEQ ID NO: 601075 - RNA, 19 nt, Artificial Sequence
  Description of Artificial Sequence: Synthetic oligonucleotide
ccuguuagaguccuuguuc

SEQ ID NO: 601076 - RNA, 19 nt, Artificial Sequence
  Description of Artificial Sequence: Synthetic oligonucleotide
  modified_base (15)..(15): a, c, u, g, unknown or other
cacgaggcugcaucngccc

SEQ ID NO: 601077 - RNA, 19 nt, Artificial Sequence
  Description of Artificial Sequence: Synthetic oligonucleotide
  modified_base (14)..(14): a, c, u, g, unknown or other
acgaggcugcaucngccca

SEQ ID NO: 601078 - RNA, 19 nt, Artificial Sequence
  Description of Artificial Sequence: Synthetic oligonucleotide
gggugauaccugcagauga

SEQ ID NO: 601079 - RNA, 19 nt, Artificial Sequence
  Description of Artificial Sequence: Synthetic oligonucleotide
auacagcaggcaaaguaca

SEQ ID NO: 601080 - RNA, 19 nt, Artificial Sequence
  Description of Artificial Sequence: Synthetic oligonucleotide
ccuuguucaguagaugacc

SEQ ID NO: 601081 - RNA, 19 nt, Artificial Sequence
  Description of Artificial Sequence: Synthetic oligonucleotide
cuuguucaguagaugaccu

SEQ ID NO: 601082 - RNA, 19 nt, Artificial Sequence
  Description of Artificial Sequence: Synthetic oligonucleotide
cgucaagucugucagacac

SEQ ID NO: 601083 - RNA, 19 nt, Artificial Sequence
  Description of Artificial Sequence: Synthetic oligonucleotide
  modified_base (10)..(10): a, c, u, g, unknown or other
ggcugcaucngcccaucag

SEQ ID NO: 601084 - RNA, 19 nt, Artificial Sequence
  Description of Artificial Sequence: Synthetic oligonucleotide
gggagaagcuugcaugagc

SEQ ID NO: 601085 - RNA, 19 nt, Artificial Sequence
  Description of Artificial Sequence: Synthetic oligonucleotide
agacagaugaggauucuuu

SEQ ID NO: 601086 - RNA, 19 nt, Artificial Sequence
  Description of Artificial Sequence: Synthetic oligonucleotide
uuggugugaugcaggacuu

SEQ ID NO: 601087 - RNA, 19 nt, Artificial Sequence
  Description of Artificial Sequence: Synthetic oligonucleotide
uuucaccccuucagggagu

SEQ ID NO: 601088 - RNA, 19 nt, Artificial Sequence
  Description of Artificial Sequence: Synthetic oligonucleotide
uagacgugccguguggggu

SEQ ID NO: 601089 - RNA, 19 nt, Artificial Sequence
  Description of Artificial Sequence: Synthetic oligonucleotide
cagccacucaacuggagca

SEQ ID NO: 601090 - RNA, 19 nt, Artificial Sequence
  Description of Artificial Sequence: Synthetic oligonucleotide
ucucaagaaggugcagggu

SEQ ID NO: 601091 - RNA, 19 nt, Artificial Sequence
  Description of Artificial Sequence: Synthetic oligonucleotide
  modified_base (2)..(2): a, c, u, g, unknown or other
cngcccaucagcgcucacg

SEQ ID NO: 601092 - RNA, 19 nt, Artificial Sequence
  Description of Artificial Sequence: Synthetic oligonucleotide
gucgggcuuggugugaugc

SEQ ID NO: 601093 - RNA, 19 nt, Artificial Sequence
  Description of Artificial Sequence: Synthetic oligonucleotide
ggacagguuagaaagggga

SEQ ID NO: 601094 - RNA, 19 nt, Artificial Sequence
  Description of Artificial Sequence: Synthetic oligonucleotide
gcgagcaucggugggaagg

SEQ ID NO: 601095 - RNA, 19 nt, Artificial Sequence
  Description of Artificial Sequence: Synthetic oligonucleotide
gcagccacucaacuggagc

SEQ ID NO: 601096 - RNA, 19 nt, Artificial Sequence
  Description of Artificial Sequence: Synthetic oligonucleotide
aaagcccgucaagucuguc

SEQ ID NO: 601097 - RNA, 19 nt, Artificial Sequence
  Description of Artificial Sequence: Synthetic oligonucleotide
ggggcaugcguccucuccg

SEQ ID NO: 601098 - RNA, 19 nt, Artificial Sequence
  Description of Artificial Sequence: Synthetic oligonucleotide
gagugugcaccaaauuuaa

SEQ ID NO: 601099 - RNA, 19 nt, Artificial Sequence
  Description of Artificial Sequence: Synthetic oligonucleotide
gaguuugacaggccuguua

SEQ ID NO: 601100 - RNA, 19 nt, Artificial Sequence
  Description of Artificial Sequence: Synthetic oligonucleotide
caauccacgaaggggcaug

SEQ ID NO: 601101 - RNA, 19 nt, Artificial Sequence
  Description of Artificial Sequence: Synthetic oligonucleotide
ggacagacuccagacaggc

SEQ ID NO: 601102 - RNA, 19 nt, Artificial Sequence
  Description of Artificial Sequence: Synthetic oligonucleotide
acgguguuguccagacccc

SEQ ID NO: 601103 - RNA, 19 nt, Artificial Sequence
  Description of Artificial Sequence: Synthetic oligonucleotide
aggugaaaucguguugcug

SEQ ID NO: 601104 - RNA, 19 nt, Artificial Sequence
  Description of Artificial Sequence: Synthetic oligonucleotide
aucaugagagaugucuaua

SEQ ID NO: 601105 - RNA, 19 nt, Artificial Sequence
  Description of Artificial Sequence: Synthetic oligonucleotide
ccggucagcaaccacaguc

SEQ ID NO: 601106 - RNA, 19 nt, Artificial Sequence
  Description of Artificial Sequence: Synthetic oligonucleotide
gcgcccaucagggagaagc

SEQ ID NO: 601107 - RNA, 19 nt, Artificial Sequence
  Description of Artificial Sequence: Synthetic oligonucleotide
gacaaugagcgugcgccca

SEQ ID NO: 601108 - RNA, 19 nt, Artificial Sequence
  Description of Artificial Sequence: Synthetic oligonucleotide
caucugaaacccagaggca

SEQ ID NO: 601109 - RNA, 19 nt, Artificial Sequence
  Description of Artificial Sequence: Synthetic oligonucleotide
gggaggugaaaucguguug

SEQ ID NO: 601110 - RNA, 19 nt, Artificial Sequence
  Description of Artificial Sequence: Synthetic oligonucleotide
  modified_base (18)..(18): a, c, u, g, unknown or other
agcgcucacguggaaggng

SEQ ID NO: 601111 - RNA, 19 nt, Artificial Sequence
  Description of Artificial Sequence: Synthetic oligonucleotide
ucguaaacuguggccuucu

SEQ ID NO: 601112 - RNA, 19 nt, Artificial Sequence
  Description of Artificial Sequence: Synthetic oligonucleotide
ucgggcuuggugugaugca

SEQ ID NO: 601113 - RNA, 19 nt, Artificial Sequence
  Description of Artificial Sequence: Synthetic oligonucleotide
gcucacacggucuuuagcu

SEQ ID NO: 601114 - RNA, 19 nt, Artificial Sequence
  Description of Artificial Sequence: Synthetic oligonucleotide
cuccccguggcugagcgug

SEQ ID NO: 601115 - RNA, 19 nt, Artificial Sequence
  Description of Artificial Sequence: Synthetic oligonucleotide
gcuagagccuuaacaagug

SEQ ID NO: 601116 - RNA, 19 nt, Artificial Sequence
  Description of Artificial Sequence: Synthetic oligonucleotide
caccuguguagacgugccg

SEQ ID NO: 601117 - RNA, 19 nt, Artificial Sequence
  Description of Artificial Sequence: Synthetic oligonucleotide
guggucuacuccagugucc

SEQ ID NO: 601118 - RNA, 19 nt, Artificial Sequence
  Description of Artificial Sequence: Synthetic oligonucleotide
gcccuugccaccuguguag

SEQ ID NO: 601119 - RNA, 19 nt, Artificial Sequence
  Description of Artificial Sequence: Synthetic oligonucleotide
ugaaacccagaggcagaug

SEQ ID NO: 601120 - RNA, 19 nt, Artificial Sequence
  Description of Artificial Sequence: Synthetic oligonucleotide
accuaauaccacaaacauu

SEQ ID NO: 601121 - RNA, 19 nt, Artificial Sequence
  Description of Artificial Sequence: Synthetic oligonucleotide
cacuggccggucagcaacc

SEQ ID NO: 601122 - RNA, 19 nt, Artificial Sequence
  Description of Artificial Sequence: Synthetic oligonucleotide
acaaugagcgugcgcccau

SEQ ID NO: 601123 - RNA, 19 nt, Artificial Sequence
  Description of Artificial Sequence: Synthetic oligonucleotide
ggccuuuucaugucccaac

SEQ ID NO: 601124 - RNA, 19 nt, Artificial Sequence
  Description of Artificial Sequence: Synthetic oligonucleotide
  modified_base (5)..(5): a, c, u, g, unknown or other
caucngcccaucagcgcuc

SEQ ID NO: 601125 - RNA, 19 nt, Artificial Sequence
  Description of Artificial Sequence: Synthetic oligonucleotide
gucuauacagcuggcccca

SEQ ID NO: 601126 - RNA, 19 nt, Artificial Sequence
  Description of Artificial Sequence: Synthetic oligonucleotide
caggcgcucuccuuucuuc

SEQ ID NO: 601127 - RNA, 19 nt, Artificial Sequence
  Description of Artificial Sequence: Synthetic oligonucleotide
gguuucacaggcgcucucc

SEQ ID NO: 601128 - RNA, 19 nt, Artificial Sequence
  Description of Artificial Sequence: Synthetic oligonucleotide
gacagagacucaugagggu

SEQ ID NO: 601129 - RNA, 19 nt, Artificial Sequence
  Description of Artificial Sequence: Synthetic oligonucleotide
  modified_base (17)..(17): a, c, u, g, unknown or other
ggcacgaggcugcaucngc

SEQ ID NO: 601130 - RNA, 19 nt, Artificial Sequence
  Description of Artificial Sequence: Synthetic oligonucleotide
gagcugagucgcugugccc

SEQ ID NO: 601131 - RNA, 19 nt, Artificial Sequence
  Description of Artificial Sequence: Synthetic oligonucleotide
cagacaggcaugacacaca

SEQ ID NO: 601132 - RNA, 19 nt, Artificial Sequence
  Description of Artificial Sequence: Synthetic oligonucleotide
ccuuucuaggcugcgcugg

SEQ ID NO: 601133 - RNA, 19 nt, Artificial Sequence
  Description of Artificial Sequence: Synthetic oligonucleotide
gacaggccuguuagagucc

SEQ ID NO: 601134 - RNA, 19 nt, Artificial Sequence
  Description of Artificial Sequence: Synthetic oligonucleotide
aucggugggaaggggccuc

SEQ ID NO: 601135 - RNA, 19 nt, Artificial Sequence
  Description of Artificial Sequence: Synthetic oligonucleotide
cuaggcugcgcuggaggag

SEQ ID NO: 601136 - RNA, 19 nt, Artificial Sequence
  Description of Artificial Sequence: Synthetic oligonucleotide
cucaagacagaugaggauu

SEQ ID NO: 601137 - RNA, 19 nt, Artificial Sequence
  Description of Artificial Sequence: Synthetic oligonucleotide
ggugauaccugcagaugac

SEQ ID NO: 601138 - RNA, 19 nt, Artificial Sequence
  Description of Artificial Sequence: Synthetic oligonucleotide
uccggagugcagccccaca

SEQ ID NO: 601139 - RNA, 19 nt, Artificial Sequence
  Description of Artificial Sequence: Synthetic oligonucleotide
cauaugcuacauccaugga

SEQ ID NO: 601140 - RNA, 19 nt, Artificial Sequence
  Description of Artificial Sequence: Synthetic oligonucleotide
gugucucccagaguuugac

SEQ ID NO: 601141 - RNA, 19 nt, Artificial Sequence
  Description of Artificial Sequence: Synthetic oligonucleotide
ucaauccacgaaggggcau

SEQ ID NO: 601142 - RNA, 19 nt, Artificial Sequence
  Description of Artificial Sequence: Synthetic oligonucleotide
aucaauccacgaaggggca

SEQ ID NO: 601143 - RNA, 19 nt, Artificial Sequence
  Description of Artificial Sequence: Synthetic oligonucleotide
caugagcggauguaguuau

SEQ ID NO: 601144 - RNA, 19 nt, Artificial Sequence
  Description of Artificial Sequence: Synthetic oligonucleotide
gugaaaucguguugcugua

SEQ ID NO: 601145 - RNA, 19 nt, Artificial Sequence
  Description of Artificial Sequence: Synthetic oligonucleotide
ggcucacacggucuuuagc

SEQ ID NO: 601146 - RNA, 19 nt, Artificial Sequence
  Description of Artificial Sequence: Synthetic oligonucleotide
cucguaaacuguggccuuc

SEQ ID NO: 601147 - RNA, 19 nt, Artificial Sequence
  Description of Artificial Sequence: Synthetic oligonucleotide
agacgugccgugugggguu

SEQ ID NO: 601148 - RNA, 19 nt, Artificial Sequence
  Description of Artificial Sequence: Synthetic oligonucleotide
aucugggaggugaaaucgu

SEQ ID NO: 601149 - RNA, 19 nt, Artificial Sequence
  Description of Artificial Sequence: Synthetic oligonucleotide
gcacaaucagaaugaggca

SEQ ID NO: 601150 - RNA, 19 nt, Artificial Sequence
  Description of Artificial Sequence: Synthetic oligonucleotide
aguacacggcgagcaucgg

SEQ ID NO: 601151 - RNA, 19 nt, Artificial Sequence
  Description of Artificial Sequence: Synthetic oligonucleotide
cauccgcugaaaugucaca

SEQ ID NO: 601152 - RNA, 19 nt, Artificial Sequence
  Description of Artificial Sequence: Synthetic oligonucleotide
caucaugagagaugucuau

SEQ ID NO: 601153 - RNA, 19 nt, Artificial Sequence
  Description of Artificial Sequence: Synthetic oligonucleotide
cucgugcacugcacaauca

SEQ ID NO: 601154 - RNA, 19 nt, Artificial Sequence
  Description of Artificial Sequence: Synthetic oligonucleotide
cuuucuaggcugcgcugga

SEQ ID NO: 601155 - RNA, 19 nt, Artificial Sequence
  Description of Artificial Sequence: Synthetic oligonucleotide
aggggagaaggcaucuuau

SEQ ID NO: 601156 - RNA, 19 nt, Artificial Sequence
  Description of Artificial Sequence: Synthetic oligonucleotide
cacauaccaccuccccgug

SEQ ID NO: 601157 - RNA, 19 nt, Artificial Sequence
  Description of Artificial Sequence: Synthetic oligonucleotide
gcaaccacagucucuauuu

SEQ ID NO: 601158 - RNA, 19 nt, Artificial Sequence
  Description of Artificial Sequence: Synthetic oligonucleotide
ucccaacauacauccuguu

SEQ ID NO: 601159 - RNA, 19 nt, Artificial Sequence
  Description of Artificial Sequence: Synthetic oligonucleotide
ucgggcugcuagugcguca

SEQ ID NO: 601160 - RNA, 19 nt, Artificial Sequence
  Description of Artificial Sequence: Synthetic oligonucleotide
cugugacaaugagcgugcg

SEQ ID NO: 601161 - RNA, 19 nt, Artificial Sequence
  Description of Artificial Sequence: Synthetic oligonucleotide
augagcggauguaguuauc

SEQ ID NO: 601162 - RNA, 19 nt, Artificial Sequence
  Description of Artificial Sequence: Synthetic oligonucleotide
  modified_base (16)..(16): a, c, u, g, unknown or other
gcacgaggcugcaucngcc

SEQ ID NO: 601163 - RNA, 19 nt, Artificial Sequence
  Description of Artificial Sequence: Synthetic oligonucleotide
caccaagucccacauuaua

SEQ ID NO: 601164 - RNA, 19 nt, Artificial Sequence
  Description of Artificial Sequence: Synthetic oligonucleotide
gcgugggugucucccagag

SEQ ID NO: 601165 - RNA, 19 nt, Artificial Sequence
  Description of Artificial Sequence: Synthetic oligonucleotide
augauugagugugcaccaa

SEQ ID NO: 601166 - RNA, 19 nt, Artificial Sequence
  Description of Artificial Sequence: Synthetic oligonucleotide
ccaagucccacauuauaaa

SEQ ID NO: 601167 - RNA, 19 nt, Artificial Sequence
  Description of Artificial Sequence: Synthetic oligonucleotide
gaagcuugcaugagcggau

SEQ ID NO: 601168 - RNA, 19 nt, Artificial Sequence
  Description of Artificial Sequence: Synthetic oligonucleotide
gggugucucccagaguuug

SEQ ID NO: 601169 - RNA, 19 nt, Artificial Sequence
  Description of Artificial Sequence: Synthetic oligonucleotide
  modified_base (6)..(6): a, c, u, g, unknown or other
gcaucngcccaucagcgcu

SEQ ID NO: 601170 - RNA, 19 nt, Artificial Sequence
  Description of Artificial Sequence: Synthetic oligonucleotide
ugucgggcuuggugugaug

SEQ ID NO: 601171 - RNA, 19 nt, Artificial Sequence
  Description of Artificial Sequence: Synthetic oligonucleotide
cccgucaagucugucagac

SEQ ID NO: 601172 - RNA, 19 nt, Artificial Sequence
  Description of Artificial Sequence: Synthetic oligonucleotide
gcacauaccaccuccccgu

SEQ ID NO: 601173 - RNA, 19 nt, Artificial Sequence
  Description of Artificial Sequence: Synthetic oligonucleotide
gggaucgggcugcuagugc

SEQ ID NO: 601174 - RNA, 19 nt, Artificial Sequence
  Description of Artificial Sequence: Synthetic oligonucleotide
acaggcgcucuccuuucuu

SEQ ID NO: 601175 - RNA, 19 nt, Artificial Sequence
  Description of Artificial Sequence: Synthetic oligonucleotide
gcaucggugggaaggggcc

SEQ ID NO: 601176 - RNA, 19 nt, Artificial Sequence
  Description of Artificial Sequence: Synthetic oligonucleotide
ggcuagagccuuaacaagu

SEQ ID NO: 601177 - RNA, 19 nt, Artificial Sequence
  Description of Artificial Sequence: Synthetic oligonucleotide
  modified_base (18)..(18): a, c, u, g, unknown or other
aggcacgaggcugcaucng

SEQ ID NO: 601178 - RNA, 19 nt, Artificial Sequence
  Description of Artificial Sequence: Synthetic oligonucleotide
auaccaccuccccguggcu

SEQ ID NO: 601179 - RNA, 19 nt, Artificial Sequence
  Description of Artificial Sequence: Synthetic oligonucleotide
agcagggcucacacggucu

SEQ ID NO: 601180 - RNA, 19 nt, Artificial Sequence
  Description of Artificial Sequence: Synthetic oligonucleotide
cugaaaugucacagcucaa

SEQ ID NO: 601181 - RNA, 19 nt, Artificial Sequence
  Description of Artificial Sequence: Synthetic oligonucleotide
ggcugcuagugcgucagug

SEQ ID NO: 601182 - RNA, 19 nt, Artificial Sequence
  Description of Artificial Sequence: Synthetic oligonucleotide
auagggcguccuccaggca

SEQ ID NO: 601183 - RNA, 19 nt, Artificial Sequence
  Description of Artificial Sequence: Synthetic oligonucleotide
acggaagcagaagccucca

SEQ ID NO: 601184 - RNA, 19 nt, Artificial Sequence
  Description of Artificial Sequence: Synthetic oligonucleotide
uucaccccuucagggagua

SEQ ID NO: 601185 - RNA, 19 nt, Artificial Sequence
  Description of Artificial Sequence: Synthetic oligonucleotide
ggggugauaccugcagaug

SEQ ID NO: 601186 - RNA, 19 nt, Artificial Sequence
  Description of Artificial Sequence: Synthetic oligonucleotide
  modified_base (4)..(4): a, c, u, g, unknown or other
aucngcccaucagcgcuca

SEQ ID NO: 601187 - RNA, 19 nt, Artificial Sequence
  Description of Artificial Sequence: Synthetic oligonucleotide
gcucauuacaaugacuuuu

SEQ ID NO: 601188 - RNA, 19 nt, Artificial Sequence
  Description of Artificial Sequence: Synthetic oligonucleotide
cccagaguagggaggggac

SEQ ID NO: 601189 - RNA, 19 nt, Artificial Sequence
  Description of Artificial Sequence: Synthetic oligonucleotide
cagaguuugacaggccugu

SEQ ID NO: 601190 - RNA, 19 nt, Artificial Sequence
  Description of Artificial Sequence: Synthetic oligonucleotide
caccccuccccagaacaac

SEQ ID NO: 601191 - RNA, 19 nt, Artificial Sequence
  Description of Artificial Sequence: Synthetic oligonucleotide
agggccgcgugggugucuc

SEQ ID NO: 601192 - RNA, 19 nt, Artificial Sequence
  Description of Artificial Sequence: Synthetic oligonucleotide
augcguccucuccgccuuc

SEQ ID NO: 601193 - RNA, 19 nt, Artificial Sequence
  Description of Artificial Sequence: Synthetic oligonucleotide
acccaaggggugauaccug

SEQ ID NO: 601194 - RNA, 19 nt, Artificial Sequence
  Description of Artificial Sequence: Synthetic oligonucleotide
cugauggucacagcacaua

SEQ ID NO: 601195 - RNA, 19 nt, Artificial Sequence
  Description of Artificial Sequence: Synthetic oligonucleotide
acgaaggggcaugcguccu

SEQ ID NO: 601196 - RNA, 19 nt, Artificial Sequence
  Description of Artificial Sequence: Synthetic oligonucleotide
agggcucacacggucuuua

SEQ ID NO: 601197 - RNA, 19 nt, Artificial Sequence
  Description of Artificial Sequence: Synthetic oligonucleotide
gacgugccgugugggguug

SEQ ID NO: 601198 - RNA, 19 nt, Artificial Sequence
  Description of Artificial Sequence: Synthetic oligonucleotide
ccuguucaggcaguccagc

SEQ ID NO: 601199 - RNA, 19 nt, Artificial Sequence
  Description of Artificial Sequence: Synthetic oligonucleotide
gggcaugcguccucuccgc

SEQ ID NO: 601200 - RNA, 19 nt, Artificial Sequence
  Description of Artificial Sequence: Synthetic oligonucleotide
  modified_base (3)..(3): a, c, u, g, unknown or other
ucngcccaucagcgcucac

SEQ ID NO: 601201 - RNA, 19 nt, Artificial Sequence
  Description of Artificial Sequence: Synthetic oligonucleotide
agcccacuagcagggcuca

SEQ ID NO: 601202 - RNA, 19 nt, Artificial Sequence
  Description of Artificial Sequence: Synthetic oligonucleotide
  modified_base (11)..(11): a, c, u, g, unknown or other
aggcugcaucngcccauca

SEQ ID NO: 601203 - RNA, 19 nt, Artificial Sequence
  Description of Artificial Sequence: Synthetic oligonucleotide
cagucucuauuuacauugu

SEQ ID NO: 601204 - RNA, 19 nt, Artificial Sequence
  Description of Artificial Sequence: Synthetic oligonucleotide
uccccguggcugagcgugu

SEQ ID NO: 601205 - RNA, 19 nt, Artificial Sequence
  Description of Artificial Sequence: Synthetic oligonucleotide
caaugagcgugcgcccauc

SEQ ID NO: 601206 - RNA, 19 nt, Artificial Sequence
  Description of Artificial Sequence: Synthetic oligonucleotide
ggagaugggcagguuucac

SEQ ID NO: 601207 - RNA, 19 nt, Artificial Sequence
  Description of Artificial Sequence: Synthetic oligonucleotide
ccaucaugagagaugucua

SEQ ID NO: 601208 - RNA, 19 nt, Artificial Sequence
  Description of Artificial Sequence: Synthetic oligonucleotide
  modified_base (7)..(7): a, c, u, g, unknown or other
ggaaggnguaucacccacu

SEQ ID NO: 601209 - RNA, 19 nt, Artificial Sequence
  Description of Artificial Sequence: Synthetic oligonucleotide
cucacuggccggucagcaa

SEQ ID NO: 601210 - RNA, 19 nt, Artificial Sequence
  Description of Artificial Sequence: Synthetic oligonucleotide
  modified_base (3)..(3): a, c, u, g, unknown or other
ggnguaucacccacucaaa

SEQ ID NO: 601211 - RNA, 19 nt, Artificial Sequence
  Description of Artificial Sequence: Synthetic oligonucleotide
uuccggagugcagccccac

SEQ ID NO: 601212 - RNA, 19 nt, Artificial Sequence
  Description of Artificial Sequence: Synthetic oligonucleotide
ggcaugcguccucuccgcc

SEQ ID NO: 601213 - RNA, 19 nt, Artificial Sequence
  Description of Artificial Sequence: Synthetic oligonucleotide
acuggccggucagcaacca

SEQ ID NO: 601214 - RNA, 19 nt, Artificial Sequence
  Description of Artificial Sequence: Synthetic oligonucleotide
cuggcuccauagggcgucc

SEQ ID NO: 601215 - RNA, 19 nt, Artificial Sequence
  Description of Artificial Sequence: Synthetic oligonucleotide
gcaugagcggauguaguua

SEQ ID NO: 601216 - RNA, 19 nt, Artificial Sequence
  Description of Artificial Sequence: Synthetic oligonucleotide
caaaguacacggcgagcau

SEQ ID NO: 601217 - RNA, 19 nt, Artificial Sequence
  Description of Artificial Sequence: Synthetic oligonucleotide
cgagcaucggugggaaggg

SEQ ID NO: 601218 - RNA, 19 nt, Artificial Sequence
  Description of Artificial Sequence: Synthetic oligonucleotide
acgugccgugugggguugc

SEQ ID NO: 601219 - RNA, 19 nt, Artificial Sequence
  Description of Artificial Sequence: Synthetic oligonucleotide
augucccaacauacauccu

SEQ ID NO: 601220 - RNA, 19 nt, Artificial Sequence
  Description of Artificial Sequence: Synthetic oligonucleotide
gcucaagacagaugaggau

SEQ ID NO: 601221 - RNA, 19 nt, Artificial Sequence
  Description of Artificial Sequence: Synthetic oligonucleotide
cgcacgguguuguccagac

SEQ ID NO: 601222 - RNA, 19 nt, Artificial Sequence
  Description of Artificial Sequence: Synthetic oligonucleotide
aucuggcggcaugccuggg

SEQ ID NO: 601223 - RNA, 19 nt, Artificial Sequence
  Description of Artificial Sequence: Synthetic oligonucleotide
caccaccaugaguggauua

SEQ ID NO: 601224 - RNA, 19 nt, Artificial Sequence
  Description of Artificial Sequence: Synthetic oligonucleotide
cuugucaccagagccuguu

SEQ ID NO: 601225 - RNA, 19 nt, Artificial Sequence
  Description of Artificial Sequence: Synthetic oligonucleotide
gaaagcccgucaagucugu

SEQ ID NO: 601226 - RNA, 19 nt, Artificial Sequence
  Description of Artificial Sequence: Synthetic oligonucleotide
cgugcacugcacaaucaga

SEQ ID NO: 601227 - RNA, 19 nt, Artificial Sequence
  Description of Artificial Sequence: Synthetic oligonucleotide
gaucgggcugcuagugcgu

SEQ ID NO: 601228 - RNA, 19 nt, Artificial Sequence
  Description of Artificial Sequence: Synthetic oligonucleotide
cugggaucgggcugcuagu

SEQ ID NO: 601229 - RNA, 19 nt, Artificial Sequence
  Description of Artificial Sequence: Synthetic oligonucleotide
cucccucacuggccgguca

SEQ ID NO: 601230 - RNA, 19 nt, Artificial Sequence
  Description of Artificial Sequence: Synthetic oligonucleotide
cacacggucuuuagcuuuu

SEQ ID NO: 601231 - RNA, 19 nt, Artificial Sequence
  Description of Artificial Sequence: Synthetic oligonucleotide
cugaaacccagaggcagau

SEQ ID NO: 601232 - RNA, 19 nt, Artificial Sequence
  Description of Artificial Sequence: Synthetic oligonucleotide
gcguccucuccgccuuccg

SEQ ID NO: 601233 - RNA, 19 nt, Artificial Sequence
  Description of Artificial Sequence: Synthetic oligonucleotide
ggugucucccagaguuuga

SEQ ID NO: 601234 - RNA, 19 nt, Artificial Sequence
  Description of Artificial Sequence: Synthetic oligonucleotide
ggccgcgugggugucuccc

SEQ ID NO: 601235 - RNA, 19 nt, Artificial Sequence
  Description of Artificial Sequence: Synthetic oligonucleotide
ggcgagcaucggugggaag

SEQ ID NO: 601236 - RNA, 19 nt, Artificial Sequence
  Description of Artificial Sequence: Synthetic oligonucleotide
ccgcugaaaugucacagcu

SEQ ID NO: 601237 - RNA, 19 nt, Artificial Sequence
  Description of Artificial Sequence: Synthetic oligonucleotide
caugcguccucuccgccuu

SEQ ID NO: 601238 - RNA, 19 nt, Artificial Sequence
  Description of Artificial Sequence: Synthetic oligonucleotide
cuguguagacgugccgugu

SEQ ID NO: 601239 - RNA, 19 nt, Artificial Sequence
  Description of Artificial Sequence: Synthetic oligonucleotide
ugcgcccaucagggagaag

SEQ ID NO: 601240 - RNA, 19 nt, Artificial Sequence
  Description of Artificial Sequence: Synthetic oligonucleotide
ggccagugaccaucugaaa

SEQ ID NO: 601241 - RNA, 19 nt, Artificial Sequence
  Description of Artificial Sequence: Synthetic oligonucleotide
ggccuguuagaguccuugu

SEQ ID NO: 601242 - RNA, 19 nt, Artificial Sequence
  Description of Artificial Sequence: Synthetic oligonucleotide
  modified_base (19)..(19): a, c, u, g, unknown or other
cagcgcucacguggaaggn

SEQ ID NO: 601243 - RNA, 19 nt, Artificial Sequence
  Description of Artificial Sequence: Synthetic oligonucleotide
gcaugcguccucuccgccu

SEQ ID NO: 601244 - RNA, 19 nt, Artificial Sequence
  Description of Artificial Sequence: Synthetic oligonucleotide
ccggagugcagccccacaa

SEQ ID NO: 601245 - RNA, 19 nt, Artificial Sequence
  Description of Artificial Sequence: Synthetic oligonucleotide
gccuguuagaguccuuguu

SEQ ID NO: 601246 - RNA, 19 nt, Artificial Sequence
  Description of Artificial Sequence: Synthetic oligonucleotide
ggcugcgcuggaggagucc

SEQ ID NO: 601247 - RNA, 19 nt, Artificial Sequence
  Description of Artificial Sequence: Synthetic oligonucleotide
caccuccccguggcugagc

SEQ ID NO: 601248 - RNA, 19 nt, Artificial Sequence
  Description of Artificial Sequence: Synthetic oligonucleotide
ccgcgugggugucucccag

SEQ ID NO: 601249 - RNA, 19 nt, Artificial Sequence
  Description of Artificial Sequence: Synthetic oligonucleotide
ggguucccauuucaccccu

SEQ ID NO: 601250 - RNA, 19 nt, Artificial Sequence
  Description of Artificial Sequence: Synthetic oligonucleotide
ccucacuggccggucagca

SEQ ID NO: 601251 - RNA, 19 nt, Artificial Sequence
  Description of Artificial Sequence: Synthetic oligonucleotide
ggcagguuucacaggcgcu

SEQ ID NO: 601252 - RNA, 19 nt, Artificial Sequence
  Description of Artificial Sequence: Synthetic oligonucleotide
cucccugucagggccgcgu

SEQ ID NO: 601253 - RNA, 19 nt, Artificial Sequence
  Description of Artificial Sequence: Synthetic oligonucleotide
gcgcucuccuuucuuccua

SEQ ID NO: 601254 - RNA, 19 nt, Artificial Sequence
  Description of Artificial Sequence: Synthetic oligonucleotide
gcguguugaucuggcggca

SEQ ID NO: 601255 - RNA, 19 nt, Artificial Sequence
  Description of Artificial Sequence: Synthetic oligonucleotide
ccuuuucaugucccaacau

SEQ ID NO: 601256 - RNA, 19 nt, Artificial Sequence
  Description of Artificial Sequence: Synthetic oligonucleotide
caucggugggaaggggccu

SEQ ID NO: 601257 - RNA, 19 nt, Artificial Sequence
  Description of Artificial Sequence: Synthetic oligonucleotide
gccgcgugggugucuccca

SEQ ID NO: 601258 - RNA, 19 nt, Artificial Sequence
  Description of Artificial Sequence: Synthetic oligonucleotide
  modified_base (17)..(17): a, c, u, g, unknown or other
gcgcucacguggaaggngu

SEQ ID NO: 601259 - RNA, 19 nt, Artificial Sequence
  Description of Artificial Sequence: Synthetic oligonucleotide
gcccgucaagucugucaga

SEQ ID NO: 601260 - RNA, 19 nt, Artificial Sequence
  Description of Artificial Sequence: Synthetic oligonucleotide
gcggcaugccugggaucgg

SEQ ID NO: 601261 - RNA, 19 nt, Artificial Sequence
  Description of Artificial Sequence: Synthetic oligonucleotide
ccauuccucugccguccuc

SEQ ID NO: 601262 - RNA, 19 nt, Artificial Sequence
  Description of Artificial Sequence: Synthetic oligonucleotide
gggcagccacucaacugga

SEQ ID NO: 601263 - RNA, 19 nt, Artificial Sequence
  Description of Artificial Sequence: Synthetic oligonucleotide
cuacaccaagucccacauu

SEQ ID NO: 601264 - RNA, 19 nt, Artificial Sequence
  Description of Artificial Sequence: Synthetic oligonucleotide
  modified_base (15)..(15): a, c, u, g, unknown or other
gcucacguggaaggnguau

SEQ ID NO: 601265 - RNA, 19 nt, Artificial Sequence
  Description of Artificial Sequence: Synthetic oligonucleotide
cccgccauauggaauccuu

SEQ ID NO: 601266 - RNA, 19 nt, Artificial Sequence
  Description of Artificial Sequence: Synthetic oligonucleotide
gggccgcgugggugucucc

SEQ ID NO: 601267 - RNA, 19 nt, Artificial Sequence
  Description of Artificial Sequence: Synthetic oligonucleotide
ccucguaaacuguggccuu

SEQ ID NO: 601268 - RNA, 19 nt, Artificial Sequence
  Description of Artificial Sequence: Synthetic oligonucleotide
ccucccucacuggccgguc

SEQ ID NO: 601269 - RNA, 19 nt, Artificial Sequence
  Description of Artificial Sequence: Synthetic oligonucleotide
  modified_base (16)..(16): a, c, u, g, unknown or other
cgcucacguggaaggngua

SEQ ID NO: 601270 - RNA, 19 nt, Artificial Sequence
  Description of Artificial Sequence: Synthetic oligonucleotide
caggccuguuagaguccuu

SEQ ID NO: 601271 - RNA, 19 nt, Artificial Sequence
  Description of Artificial Sequence: Synthetic oligonucleotide
ggaaggcacgaggcugcau

SEQ ID NO: 601272 - RNA, 19 nt, Artificial Sequence
  Description of Artificial Sequence: Synthetic oligonucleotide
cccuccccagaacaacaau

SEQ ID NO: 601273 - RNA, 19 nt, Artificial Sequence
  Description of Artificial Sequence: Synthetic oligonucleotide
cagggcucacacggucuuu

SEQ ID NO: 601274 - RNA, 19 nt, Artificial Sequence
  Description of Artificial Sequence: Synthetic oligonucleotide
ccacaccaguugcuguuuu

SEQ ID NO: 601275 - RNA, 19 nt, Artificial Sequence
  Description of Artificial Sequence: Synthetic oligonucleotide
gguucccauuucaccccuu

SEQ ID NO: 601276 - RNA, 19 nt, Artificial Sequence
  Description of Artificial Sequence: Synthetic oligonucleotide
cguaaacuguggccuucuu

SEQ ID NO: 601277 - RNA, 19 nt, Artificial Sequence
  Description of Artificial Sequence: Synthetic oligonucleotide
ccuccccguggcugagcgu

SEQ ID NO: 601278 - RNA, 19 nt, Artificial Sequence
  Description of Artificial Sequence: Synthetic oligonucleotide
ccccgccauauggaauccu

SEQ ID NO: 601279 - RNA, 19 nt, Artificial Sequence
  Description of Artificial Sequence: Synthetic oligonucleotide
cgugccgugugggguugcu

SEQ ID NO: 601280 - RNA, 19 nt, Artificial Sequence
  Description of Artificial Sequence: Synthetic oligonucleotide
aauuugauuaacaaagucc

SEQ ID NO: 601281 - RNA, 19 nt, Artificial Sequence
  Description of Artificial Sequence: Synthetic oligonucleotide
acauguaugauccaggagc

SEQ ID NO: 601282 - RNA, 19 nt, Artificial Sequence
  Description of Artificial Sequence: Synthetic oligonucleotide
aaauaagaagcugagauag

SEQ ID NO: 601283 - RNA, 19 nt, Artificial Sequence
  Description of Artificial Sequence: Synthetic oligonucleotide
uauaguaucccaauaagug

SEQ ID NO: 601284 - RNA, 19 nt, Artificial Sequence
  Description of Artificial Sequence: Synthetic oligonucleotide
aacuguuuacuguucagcc

SEQ ID NO: 601285 - RNA, 19 nt, Artificial Sequence
  Description of Artificial Sequence: Synthetic oligonucleotide
aauagcagcagcuaguugu

SEQ ID NO: 601286 - RNA, 19 nt, Artificial Sequence
  Description of Artificial Sequence: Synthetic oligonucleotide
uguaagguagagaagcacg

SEQ ID NO: 601287 - RNA, 19 nt, Artificial Sequence
  Description of Artificial Sequence: Synthetic oligonucleotide
uuuucauaaaccuggaucu

SEQ ID NO: 601288 - RNA, 19 nt, Artificial Sequence
  Description of Artificial Sequence: Synthetic oligonucleotide
ugauauagcguauacacug

SEQ ID NO: 601289 - RNA, 19 nt, Artificial Sequence
  Description of Artificial Sequence: Synthetic oligonucleotide
uguuauaucccaauggugu

SEQ ID NO: 601290 - RNA, 19 nt, Artificial Sequence
  Description of Artificial Sequence: Synthetic oligonucleotide
uguagcaacaagaagccag

SEQ ID NO: 601291 - RNA, 19 nt, Artificial Sequence
  Description of Artificial Sequence: Synthetic oligonucleotide
uguuauuucuuuuaaggca

SEQ ID NO: 601292 - RNA, 19 nt, Artificial Sequence
  Description of Artificial Sequence: Synthetic oligonucleotide
aaagcugcaauggaaggcc

SEQ ID NO: 601293 - RNA, 19 nt, Artificial Sequence
  Description of Artificial Sequence: Synthetic oligonucleotide
uguauaguaucccaauaag

SEQ ID NO: 601294 - RNA, 19 nt, Artificial Sequence
  Description of Artificial Sequence: Synthetic oligonucleotide
uaaaaugaauguuugaaau

SEQ ID NO: 601295 - RNA, 19 nt, Artificial Sequence
  Description of Artificial Sequence: Synthetic oligonucleotide
uacaaugcauucaauauac

SEQ ID NO: 601296 - RNA, 19 nt, Artificial Sequence
  Description of Artificial Sequence: Synthetic oligonucleotide
aggaauaaccaauaaacug

SEQ ID NO: 601297 - RNA, 19 nt, Artificial Sequence
  Description of Artificial Sequence: Synthetic oligonucleotide
aauuacagucagcccaacc

SEQ ID NO: 601298 - RNA, 19 nt, Artificial Sequence
  Description of Artificial Sequence: Synthetic oligonucleotide
cuuugcaugauaucaaagc

SEQ ID NO: 601299 - RNA, 19 nt, Artificial Sequence
  Description of Artificial Sequence: Synthetic oligonucleotide
aaaguugaagcauucgcca

SEQ ID NO: 601300 - RNA, 19 nt, Artificial Sequence
  Description of Artificial Sequence: Synthetic oligonucleotide
uauacuaggucccugggga

SEQ ID NO: 601301 - RNA, 19 nt, Artificial Sequence
  Description of Artificial Sequence: Synthetic oligonucleotide
augauaucaaagcucuggc

SEQ ID NO: 601302 - RNA, 19 nt, Artificial Sequence
  Description of Artificial Sequence: Synthetic oligonucleotide
uuugcaugauaucaaagcu

SEQ ID NO: 601303 - RNA, 19 nt, Artificial Sequence
  Description of Artificial Sequence: Synthetic oligonucleotide
uuccuuaugguuucuaucc

SEQ ID NO: 601304 - RNA, 19 nt, Artificial Sequence
  Description of Artificial Sequence: Synthetic oligonucleotide
ucuguuauaucccaauggu

SEQ ID NO: 601305 - RNA, 19 nt, Artificial Sequence
  Description of Artificial Sequence: Synthetic oligonucleotide
aagaugaucuacauuauug

SEQ ID NO: 601306 - RNA, 19 nt, Artificial Sequence
  Description of Artificial Sequence: Synthetic oligonucleotide
ucaggaauuacagucagcc

SEQ ID NO: 601307 - RNA, 19 nt, Artificial Sequence
  Description of Artificial Sequence: Synthetic oligonucleotide
uaaccgagaaagcaaauca

SEQ ID NO: 601308 - RNA, 19 nt, Artificial Sequence
  Description of Artificial Sequence: Synthetic oligonucleotide
ugcaugauaucaaagcucu

SEQ ID NO: 601309 - RNA, 19 nt, Artificial Sequence
  Description of Artificial Sequence: Synthetic oligonucleotide
aauauacuaggucccuggg

SEQ ID NO: 601310 - RNA, 19 nt, Artificial Sequence
  Description of Artificial Sequence: Synthetic oligonucleotide
uaauugaaugguuccaucc

SEQ ID NO: 601311 - RNA, 19 nt, Artificial Sequence
  Description of Artificial Sequence: Synthetic oligonucleotide
aacuccucuuuugaaaacc

SEQ ID NO: 601312 - RNA, 19 nt, Artificial Sequence
  Description of Artificial Sequence: Synthetic oligonucleotide
acuaacuacacauguauga

SEQ ID NO: 601313 - RNA, 19 nt, Artificial Sequence
  Description of Artificial Sequence: Synthetic oligonucleotide
uaauguaagucuguaagcc

SEQ ID NO: 601314 - RNA, 19 nt, Artificial Sequence
  Description of Artificial Sequence: Synthetic oligonucleotide
cauaaauucgcagagcagc

SEQ ID NO: 601315 - RNA, 19 nt, Artificial Sequence
  Description of Artificial Sequence: Synthetic oligonucleotide
aggaauuacagucagccca

SEQ ID NO: 601316 - RNA, 19 nt, Artificial Sequence
  Description of Artificial Sequence: Synthetic oligonucleotide
aauugaaugguuccaucca

SEQ ID NO: 601317 - RNA, 19 nt, Artificial Sequence
  Description of Artificial Sequence: Synthetic oligonucleotide
aguccuaacuggaagaagc

SEQ ID NO: 601318 - RNA, 19 nt, Artificial Sequence
  Description of Artificial Sequence: Synthetic oligonucleotide
uaaguguggaaaauaagaa

SEQ ID NO: 601319 - RNA, 19 nt, Artificial Sequence
  Description of Artificial Sequence: Synthetic oligonucleotide
uggguagaaaauacaaaag

SEQ ID NO: 601320 - RNA, 19 nt, Artificial Sequence
  Description of Artificial Sequence: Synthetic oligonucleotide
caaaguugaagcauucgcc

SEQ ID NO: 601321 - RNA, 19 nt, Artificial Sequence
  Description of Artificial Sequence: Synthetic oligonucleotide
caaaggaacgugcugaagc

SEQ ID NO: 601322 - RNA, 19 nt, Artificial Sequence
  Description of Artificial Sequence: Synthetic oligonucleotide
uuacuguucagccuagcgc

SEQ ID NO: 601323 - RNA, 19 nt, Artificial Sequence
  Description of Artificial Sequence: Synthetic oligonucleotide
agaccaugauaucagacag

SEQ ID NO: 601324 - RNA, 19 nt, Artificial Sequence
  Description of Artificial Sequence: Synthetic oligonucleotide
accgacuuaaccgagaaag

SEQ ID NO: 601325 - RNA, 19 nt, Artificial Sequence
  Description of Artificial Sequence: Synthetic oligonucleotide
uaaccaauaaacugugaca

SEQ ID NO: 601326 - RNA, 19 nt, Artificial Sequence
  Description of Artificial Sequence: Synthetic oligonucleotide
uuucuauccaacuggaguc

SEQ ID NO: 601327 - RNA, 19 nt, Artificial Sequence
  Description of Artificial Sequence: Synthetic oligonucleotide
uuauuaucucaaugaaucc

SEQ ID NO: 601328 - RNA, 19 nt, Artificial Sequence
  Description of Artificial Sequence: Synthetic oligonucleotide
agucguaauguucuuaaug

SEQ ID NO: 601329 - RNA, 19 nt, Artificial Sequence
  Description of Artificial Sequence: Synthetic oligonucleotide
auauagcguauacacugcc

SEQ ID NO: 601330 - RNA, 19 nt, Artificial Sequence
  Description of Artificial Sequence: Synthetic oligonucleotide
accaugauaucagacagcg

SEQ ID NO: 601331 - RNA, 19 nt, Artificial Sequence
  Description of Artificial Sequence: Synthetic oligonucleotide
aaccaauaaacugugacaa

SEQ ID NO: 601332 - RNA, 19 nt, Artificial Sequence
  Description of Artificial Sequence: Synthetic oligonucleotide
ucacuaacuacacauguau

SEQ ID NO: 601333 - RNA, 19 nt, Artificial Sequence
  Description of Artificial Sequence: Synthetic oligonucleotide
aaaggaacgugcugaagca

SEQ ID NO: 601334 - RNA, 19 nt, Artificial Sequence
  Description of Artificial Sequence: Synthetic oligonucleotide
ucaaccugaggacucgagg

SEQ ID NO: 601335 - RNA, 19 nt, Artificial Sequence
  Description of Artificial Sequence: Synthetic oligonucleotide
aaaugcuuacugauggcac

SEQ ID NO: 601336 - RNA, 19 nt, Artificial Sequence
  Description of Artificial Sequence: Synthetic oligonucleotide
ugaaaacccuguaagugug

SEQ ID NO: 601337 - RNA, 19 nt, Artificial Sequence
  Description of Artificial Sequence: Synthetic oligonucleotide
ucugauagauuuuacugaa

SEQ ID NO: 601338 - RNA, 19 nt, Artificial Sequence
  Description of Artificial Sequence: Synthetic oligonucleotide
ucuacauuauuggagagaa

SEQ ID NO: 601339 - RNA, 19 nt, Artificial Sequence
  Description of Artificial Sequence: Synthetic oligonucleotide
auaguaucccaauaagugu

SEQ ID NO: 601340 - RNA, 19 nt, Artificial Sequence
  Description of Artificial Sequence: Synthetic oligonucleotide
cucuguuauaucccaaugg

SEQ ID NO: 601341 - RNA, 19 nt, Artificial Sequence
  Description of Artificial Sequence: Synthetic oligonucleotide
uuacugauggcacuuugca

SEQ ID NO: 601342 - RNA, 19 nt, Artificial Sequence
  Description of Artificial Sequence: Synthetic oligonucleotide
acugauccaagucuguaag

SEQ ID NO: 601343 - RNA, 19 nt, Artificial Sequence
  Description of Artificial Sequence: Synthetic oligonucleotide
ugauccuuccaguugauaa

SEQ ID NO: 601344 - RNA, 19 nt, Artificial Sequence
  Description of Artificial Sequence: Synthetic oligonucleotide
cacaucacuccaaauauac

SEQ ID NO: 601345 - RNA, 19 nt, Artificial Sequence
  Description of Artificial Sequence: Synthetic oligonucleotide
aaggaauuacugaucucgc

SEQ ID NO: 601346 - RNA, 19 nt, Artificial Sequence
  Description of Artificial Sequence: Synthetic oligonucleotide
aacuugaaccaagucuccc

SEQ ID NO: 601347 - RNA, 19 nt, Artificial Sequence
  Description of Artificial Sequence: Synthetic oligonucleotide
uauuaucucaaugaauccu

SEQ ID NO: 601348 - RNA, 19 nt, Artificial Sequence
  Description of Artificial Sequence: Synthetic oligonucleotide
aaugcuuacugauggcacu

SEQ ID NO: 601349 - RNA, 19 nt, Artificial Sequence
  Description of Artificial Sequence: Synthetic oligonucleotide
aaguugaagcauucgccag

SEQ ID NO: 601350 - RNA, 19 nt, Artificial Sequence
  Description of Artificial Sequence: Synthetic oligonucleotide
aggacgaucucauguauag

SEQ ID NO: 601351 - RNA, 19 nt, Artificial Sequence
  Description of Artificial Sequence: Synthetic oligonucleotide
gucguaauguucuuaauga

SEQ ID NO: 601352 - RNA, 19 nt, Artificial Sequence
  Description of Artificial Sequence: Synthetic oligonucleotide
gauucaguaaaagaugauc

SEQ ID NO: 601353 - RNA, 19 nt, Artificial Sequence
  Description of Artificial Sequence: Synthetic oligonucleotide
aaaaggacgaucucaugua

SEQ ID NO: 601354 - RNA, 19 nt, Artificial Sequence
  Description of Artificial Sequence: Synthetic oligonucleotide
guauuagucuccaugagac

SEQ ID NO: 601355 - RNA, 19 nt, Artificial Sequence
  Description of Artificial Sequence: Synthetic oligonucleotide
ugugcguccucaaaggaac

SEQ ID NO: 601356 - RNA, 19 nt, Artificial Sequence
  Description of Artificial Sequence: Synthetic oligonucleotide
accgugcaaugcuugaugc

SEQ ID NO: 601357 - RNA, 19 nt, Artificial Sequence
  Description of Artificial Sequence: Synthetic oligonucleotide
auauacuaggucccugggg

SEQ ID NO: 601358 - RNA, 19 nt, Artificial Sequence
  Description of Artificial Sequence: Synthetic oligonucleotide
acacaaacgccccauagcu

SEQ ID NO: 601359 - RNA, 19 nt, Artificial Sequence
  Description of Artificial Sequence: Synthetic oligonucleotide
cugcauaaccugcagaggc

SEQ ID NO: 601360 - RNA, 19 nt, Artificial Sequence
  Description of Artificial Sequence: Synthetic oligonucleotide
agauaguccacaucaguca

SEQ ID NO: 601361 - RNA, 19 nt, Artificial Sequence
  Description of Artificial Sequence: Synthetic oligonucleotide
ugauuaacaaaguccuaac

SEQ ID NO: 601362 - RNA, 19 nt, Artificial Sequence
  Description of Artificial Sequence: Synthetic oligonucleotide
aaguaccguagccugaacu

SEQ ID NO: 601363 - RNA, 19 nt, Artificial Sequence
  Description of Artificial Sequence: Synthetic oligonucleotide
ugagauaguccacaucagu

SEQ ID NO: 601364 - RNA, 19 nt, Artificial Sequence
  Description of Artificial Sequence: Synthetic oligonucleotide
gaugaucuacauuauugga

SEQ ID NO: 601365 - RNA, 19 nt, Artificial Sequence
  Description of Artificial Sequence: Synthetic oligonucleotide
cuaccacucuucaaagucg

SEQ ID NO: 601366 - RNA, 19 nt, Artificial Sequence
  Description of Artificial Sequence: Synthetic oligonucleotide
uaguuguggaggcaaagcu

SEQ ID NO: 601367 - RNA, 19 nt, Artificial Sequence
  Description of Artificial Sequence: Synthetic oligonucleotide
uggcucauaaaaugaaugu

SEQ ID NO: 601368 - RNA, 19 nt, Artificial Sequence
  Description of Artificial Sequence: Synthetic oligonucleotide
auguuugaaaucaguaagg

SEQ ID NO: 601369 - RNA, 19 nt, Artificial Sequence
  Description of Artificial Sequence: Synthetic oligonucleotide
uguggaucauaaauucgca

SEQ ID NO: 601370 - RNA, 19 nt, Artificial Sequence
  Description of Artificial Sequence: Synthetic oligonucleotide
uuuucaggggaugacaggu

SEQ ID NO: 601371 - RNA, 19 nt, Artificial Sequence
  Description of Artificial Sequence: Synthetic oligonucleotide
gaaaaggacgaucucaugu

SEQ ID NO: 601372 - RNA, 19 nt, Artificial Sequence
  Description of Artificial Sequence: Synthetic oligonucleotide
uugauauagcguauacacu

SEQ ID NO: 601373 - RNA, 19 nt, Artificial Sequence
  Description of Artificial Sequence: Synthetic oligonucleotide
caaccugaggacucgaggc

SEQ ID NO: 601374 - RNA, 19 nt, Artificial Sequence
  Description of Artificial Sequence: Synthetic oligonucleotide
uuagucuccaugagacucc

SEQ ID NO: 601375 - RNA, 19 nt, Artificial Sequence
  Description of Artificial Sequence: Synthetic oligonucleotide
cuuacugauggcacuuugc

SEQ ID NO: 601376 - RNA, 19 nt, Artificial Sequence
  Description of Artificial Sequence: Synthetic oligonucleotide
uucuuguggaucauaaauu

SEQ ID NO: 601377 - RNA, 19 nt, Artificial Sequence
  Description of Artificial Sequence: Synthetic oligonucleotide
aagcauucgccagcgagac

SEQ ID NO: 601378 - RNA, 19 nt, Artificial Sequence
  Description of Artificial Sequence: Synthetic oligonucleotide
acucacuaacuacacaugu

SEQ ID NO: 601379 - RNA, 19 nt, Artificial Sequence
  Description of Artificial Sequence: Synthetic oligonucleotide
ucgaagguuuugaagccag

SEQ ID NO: 601380 - RNA, 19 nt, Artificial Sequence
  Description of Artificial Sequence: Synthetic oligonucleotide
aaugcuugaugcuuuuauu

SEQ ID NO: 601381 - RNA, 19 nt, Artificial Sequence
  Description of Artificial Sequence: Synthetic oligonucleotide
cuccccauaaugcagcacc

SEQ ID NO: 601382 - RNA, 19 nt, Artificial Sequence
  Description of Artificial Sequence: Synthetic oligonucleotide
acgaggauggcguugguca

SEQ ID NO: 601383 - RNA, 19 nt, Artificial Sequence
  Description of Artificial Sequence: Synthetic oligonucleotide
aaccgugcaaugcuugaug

SEQ ID NO: 601384 - RNA, 19 nt, Artificial Sequence
  Description of Artificial Sequence: Synthetic oligonucleotide
uauuggagagaaccgugca

SEQ ID NO: 601385 - RNA, 19 nt, Artificial Sequence
  Description of Artificial Sequence: Synthetic oligonucleotide
aacgccccauagcuugucc

SEQ ID NO: 601386 - RNA, 19 nt, Artificial Sequence
  Description of Artificial Sequence: Synthetic oligonucleotide
ucgauuagcaaugggauua

SEQ ID NO: 601387 - RNA, 19 nt, Artificial Sequence
  Description of Artificial Sequence: Synthetic oligonucleotide
gaaagcugcaauggaaggc

SEQ ID NO: 601388 - RNA, 19 nt, Artificial Sequence
  Description of Artificial Sequence: Synthetic oligonucleotide
uuaauugaaugguuccauc

SEQ ID NO: 601389 - RNA, 19 nt, Artificial Sequence
  Description of Artificial Sequence: Synthetic oligonucleotide
ugauaucaaagcucuggcu

SEQ ID NO: 601390 - RNA, 19 nt, Artificial Sequence
  Description of Artificial Sequence: Synthetic oligonucleotide
cuagcgccaccuuuaaggg

SEQ ID NO: 601391 - RNA, 19 nt, Artificial Sequence
  Description of Artificial Sequence: Synthetic oligonucleotide
acauuauuggagagaaccg

SEQ ID NO: 601392 - RNA, 19 nt, Artificial Sequence
  Description of Artificial Sequence: Synthetic oligonucleotide
auacaaugcauucaauaua

SEQ ID NO: 601393 - RNA, 19 nt, Artificial Sequence
  Description of Artificial Sequence: Synthetic oligonucleotide
uauagcguauacacugccu

SEQ ID NO: 601394 - RNA, 19 nt, Artificial Sequence
  Description of Artificial Sequence: Synthetic oligonucleotide
gacgaucucauguauagua

SEQ ID NO: 601395 - RNA, 19 nt, Artificial Sequence
  Description of Artificial Sequence: Synthetic oligonucleotide
ucagacagcguuagauuca

SEQ ID NO: 601396 - RNA, 19 nt, Artificial Sequence
  Description of Artificial Sequence: Synthetic oligonucleotide
aaccgagaaagcaaaucag

SEQ ID NO: 601397 - RNA, 19 nt, Artificial Sequence
  Description of Artificial Sequence: Synthetic oligonucleotide
agaggcucucgcucuauac

SEQ ID NO: 601398 - RNA, 19 nt, Artificial Sequence
  Description of Artificial Sequence: Synthetic oligonucleotide
uccgucacaaauuuccuua

SEQ ID NO: 601399 - RNA, 19 nt, Artificial Sequence
  Description of Artificial Sequence: Synthetic oligonucleotide
uguugauauagcguauaca

SEQ ID NO: 601400 - RNA, 19 nt, Artificial Sequence
  Description of Artificial Sequence: Synthetic oligonucleotide
acauuuggcugugaacccc

SEQ ID NO: 601401 - RNA, 19 nt, Artificial Sequence
  Description of Artificial Sequence: Synthetic oligonucleotide
ugucaaucagcugugugga

SEQ ID NO: 601402 - RNA, 19 nt, Artificial Sequence
  Description of Artificial Sequence: Synthetic oligonucleotide
augagaaucucuguggccu

SEQ ID NO: 601403 - RNA, 19 nt, Artificial Sequence
  Description of Artificial Sequence: Synthetic oligonucleotide
aagcugaaccaagcguugc

SEQ ID NO: 601404 - RNA, 19 nt, Artificial Sequence
  Description of Artificial Sequence: Synthetic oligonucleotide
uggggauggccacugaugu

SEQ ID NO: 601405 - RNA, 19 nt, Artificial Sequence
  Description of Artificial Sequence: Synthetic oligonucleotide
aaaggacgaucucauguau

SEQ ID NO: 601406 - RNA, 19 nt, Artificial Sequence
  Description of Artificial Sequence: Synthetic oligonucleotide
auaucagacagcguuagau

SEQ ID NO: 601407 - RNA, 19 nt, Artificial Sequence
  Description of Artificial Sequence: Synthetic oligonucleotide
auccaagucuguaagguag

SEQ ID NO: 601408 - RNA, 19 nt, Artificial Sequence
  Description of Artificial Sequence: Synthetic oligonucleotide
ugaacugugaacugacauu

SEQ ID NO: 601409 - RNA, 19 nt, Artificial Sequence
  Description of Artificial Sequence: Synthetic oligonucleotide
ucucucaaccuacuggauc

SEQ ID NO: 601410 - RNA, 19 nt, Artificial Sequence
  Description of Artificial Sequence: Synthetic oligonucleotide
gagauaguccacaucaguc

SEQ ID NO: 601411 - RNA, 19 nt, Artificial Sequence
  Description of Artificial Sequence: Synthetic oligonucleotide
gauaucaaagcucuggcuu

SEQ ID NO: 601412 - RNA, 19 nt, Artificial Sequence
  Description of Artificial Sequence: Synthetic oligonucleotide
uuaaccgagaaagcaaauc

SEQ ID NO: 601413 - RNA, 19 nt, Artificial Sequence
  Description of Artificial Sequence: Synthetic oligonucleotide
guggaucauaaauucgcag

SEQ ID NO: 601414 - RNA, 19 nt, Artificial Sequence
  Description of Artificial Sequence: Synthetic oligonucleotide
cuguuauaucccaauggug

SEQ ID NO: 601415 - RNA, 19 nt, Artificial Sequence
  Description of Artificial Sequence: Synthetic oligonucleotide
uccuuauuugcuugugcug

SEQ ID NO: 601416 - RNA, 19 nt, Artificial Sequence
  Description of Artificial Sequence: Synthetic oligonucleotide
cuuucgaagccaugacucc

SEQ ID NO: 601417 - RNA, 19 nt, Artificial Sequence
  Description of Artificial Sequence: Synthetic oligonucleotide
uucaggagaagcucggcuc

SEQ ID NO: 601418 - RNA, 19 nt, Artificial Sequence
  Description of Artificial Sequence: Synthetic oligonucleotide
auauacagccagcugugcu

SEQ ID NO: 601419 - RNA, 19 nt, Artificial Sequence
  Description of Artificial Sequence: Synthetic oligonucleotide
uucagaacuugcugcauaa

SEQ ID NO: 601420 - RNA, 19 nt, Artificial Sequence
  Description of Artificial Sequence: Synthetic oligonucleotide
uguaugauccaggagcuua

SEQ ID NO: 601421 - RNA, 19 nt, Artificial Sequence
  Description of Artificial Sequence: Synthetic oligonucleotide
gacagcguuagauucagua

SEQ ID NO: 601422 - RNA, 19 nt, Artificial Sequence
  Description of Artificial Sequence: Synthetic oligonucleotide
cuugagcucccaaguaccg

SEQ ID NO: 601423 - RNA, 19 nt, Artificial Sequence
  Description of Artificial Sequence: Synthetic oligonucleotide
aggaacgugcugaagcagc

SEQ ID NO: 601424 - RNA, 19 nt, Artificial Sequence
  Description of Artificial Sequence: Synthetic oligonucleotide
aggugagaaagcugcaaug

SEQ ID NO: 601425 - RNA, 19 nt, Artificial Sequence
  Description of Artificial Sequence: Synthetic oligonucleotide
acugaucucgcuaagacuu

SEQ ID NO: 601426 - RNA, 19 nt, Artificial Sequence
  Description of Artificial Sequence: Synthetic oligonucleotide
uuaagggucuccgucacaa

SEQ ID NO: 601427 - RNA, 19 nt, Artificial Sequence
  Description of Artificial Sequence: Synthetic oligonucleotide
uguuuacuguucagccuag

SEQ ID NO: 601428 - RNA, 19 nt, Artificial Sequence
  Description of Artificial Sequence: Synthetic oligonucleotide
uguaagcuuuucaguaagu

SEQ ID NO: 601429 - RNA, 19 nt, Artificial Sequence
  Description of Artificial Sequence: Synthetic oligonucleotide
cacucgauuagcaauggga

SEQ ID NO: 601430 - RNA, 19 nt, Artificial Sequence
  Description of Artificial Sequence: Synthetic oligonucleotide
auggcucauaaaaugaaug

SEQ ID NO: 601431 - RNA, 19 nt, Artificial Sequence
  Description of Artificial Sequence: Synthetic oligonucleotide
uuggucagcaugugcgucc

SEQ ID NO: 601432 - RNA, 19 nt, Artificial Sequence
  Description of Artificial Sequence: Synthetic oligonucleotide
auagcguauacacugccuu

SEQ ID NO: 601433 - RNA, 19 nt, Artificial Sequence
  Description of Artificial Sequence: Synthetic oligonucleotide
cuccugaacacuaccacuc

SEQ ID NO: 601434 - RNA, 19 nt, Artificial Sequence
  Description of Artificial Sequence: Synthetic oligonucleotide
guugcauuuguauuagucu

SEQ ID NO: 601435 - RNA, 19 nt, Artificial Sequence
  Description of Artificial Sequence: Synthetic oligonucleotide
uccaugagacuccaagcaa

SEQ ID NO: 601436 - RNA, 19 nt, Artificial Sequence
  Description of Artificial Sequence: Synthetic oligonucleotide
uacacgcugaagcaguaau

SEQ ID NO: 601437 - RNA, 19 nt, Artificial Sequence
  Description of Artificial Sequence: Synthetic oligonucleotide
uccuuaugguuucuaucca

SEQ ID NO: 601438 - RNA, 19 nt, Artificial Sequence
  Description of Artificial Sequence: Synthetic oligonucleotide
uccgguaucucaaucugua

SEQ ID NO: 601439 - RNA, 19 nt, Artificial Sequence
  Description of Artificial Sequence: Synthetic oligonucleotide
ucgcucuauaccauuucca

SEQ ID NO: 601440 - RNA, 19 nt, Artificial Sequence
  Description of Artificial Sequence: Synthetic oligonucleotide
uucgccagcgagaccauga

SEQ ID NO: 601441 - RNA, 19 nt, Artificial Sequence
  Description of Artificial Sequence: Synthetic oligonucleotide
cucgcucuauaccauuucc

SEQ ID NO: 601442 - RNA, 19 nt, Artificial Sequence
  Description of Artificial Sequence: Synthetic oligonucleotide
gagagacucacuaacuaca

SEQ ID NO: 601443 - RNA, 19 nt, Artificial Sequence
  Description of Artificial Sequence: Synthetic oligonucleotide
caugauaucagacagcguu

SEQ ID NO: 601444 - RNA, 19 nt, Artificial Sequence
  Description of Artificial Sequence: Synthetic oligonucleotide
uuugauuaacaaaguccua

SEQ ID NO: 601445 - RNA, 19 nt, Artificial Sequence
  Description of Artificial Sequence: Synthetic oligonucleotide
ugcauaaccugcagaggcu

SEQ ID NO: 601446 - RNA, 19 nt, Artificial Sequence
  Description of Artificial Sequence: Synthetic oligonucleotide
ucccaaguaccguagccug

SEQ ID NO: 601447 - RNA, 19 nt, Artificial Sequence
  Description of Artificial Sequence: Synthetic oligonucleotide
aaaguccuaacuggaagaa

SEQ ID NO: 601448 - RNA, 19 nt, Artificial Sequence
  Description of Artificial Sequence: Synthetic oligonucleotide
agcgccaccuuuaaggguc

SEQ ID NO: 601449 - RNA, 19 nt, Artificial Sequence
  Description of Artificial Sequence: Synthetic oligonucleotide
ugcaauggaaggccagcca

SEQ ID NO: 601450 - RNA, 19 nt, Artificial Sequence
  Description of Artificial Sequence: Synthetic oligonucleotide
acagcguuagauucaguaa

SEQ ID NO: 601451 - RNA, 19 nt, Artificial Sequence
  Description of Artificial Sequence: Synthetic oligonucleotide
cuaguuguggaggcaaagc

SEQ ID NO: 601452 - RNA, 19 nt, Artificial Sequence
  Description of Artificial Sequence: Synthetic oligonucleotide
auacaaaagcugaaccaag

SEQ ID NO: 601453 - RNA, 19 nt, Artificial Sequence
  Description of Artificial Sequence: Synthetic oligonucleotide
ucaauauacuaggucccug

SEQ ID NO: 601454 - RNA, 19 nt, Artificial Sequence
  Description of Artificial Sequence: Synthetic oligonucleotide
uaaauucgcagagcagcag

SEQ ID NO: 601455 - RNA, 19 nt, Artificial Sequence
  Description of Artificial Sequence: Synthetic oligonucleotide
agucauuaaguagucauua

SEQ ID NO: 601456 - RNA, 19 nt, Artificial Sequence
  Description of Artificial Sequence: Synthetic oligonucleotide
aaguccuaacuggaagaag

SEQ ID NO: 601457 - RNA, 19 nt, Artificial Sequence
  Description of Artificial Sequence: Synthetic oligonucleotide
uccuaacuggaagaagcag

SEQ ID NO: 601458 - RNA, 19 nt, Artificial Sequence
  Description of Artificial Sequence: Synthetic oligonucleotide
aguaucccaauaagugugg

SEQ ID NO: 601459 - RNA, 19 nt, Artificial Sequence
  Description of Artificial Sequence: Synthetic oligonucleotide
cacuaacuacacauguaug

SEQ ID NO: 601460 - RNA, 19 nt, Artificial Sequence
  Description of Artificial Sequence: Synthetic oligonucleotide
ucguaauguucuuaaugau

SEQ ID NO: 601461 - RNA, 19 nt, Artificial Sequence
  Description of Artificial Sequence: Synthetic oligonucleotide
agcgggauagcacucugcu

SEQ ID NO: 601462 - RNA, 19 nt, Artificial Sequence
  Description of Artificial Sequence: Synthetic oligonucleotide
uuucgaagccaugacucca

SEQ ID NO: 601463 - RNA, 19 nt, Artificial Sequence
  Description of Artificial Sequence: Synthetic oligonucleotide
agauuuucaggggaugaca

SEQ ID NO: 601464 - RNA, 19 nt, Artificial Sequence
  Description of Artificial Sequence: Synthetic oligonucleotide
aagcucggcucacucgaag

SEQ ID NO: 601465 - RNA, 19 nt, Artificial Sequence
  Description of Artificial Sequence: Synthetic oligonucleotide
acuuugcaugauaucaaag

SEQ ID NO: 601466 - RNA, 19 nt, Artificial Sequence
  Description of Artificial Sequence: Synthetic oligonucleotide
aauucgcagagcagcagcu

SEQ ID NO: 601467 - RNA, 19 nt, Artificial Sequence
  Description of Artificial Sequence: Synthetic oligonucleotide
ucggcucacucgaagacuc

SEQ ID NO: 601468 - RNA, 19 nt, Artificial Sequence
  Description of Artificial Sequence: Synthetic oligonucleotide
gguuucgggaaccaaggug

SEQ ID NO: 601469 - RNA, 19 nt, Artificial Sequence
  Description of Artificial Sequence: Synthetic oligonucleotide
cuguugauauagcguauac

SEQ ID NO: 601470 - RNA, 19 nt, Artificial Sequence
  Description of Artificial Sequence: Synthetic oligonucleotide
auaaauucgcagagcagca

SEQ ID NO: 601471 - RNA, 19 nt, Artificial Sequence
  Description of Artificial Sequence: Synthetic oligonucleotide
gauccuuccaguugauaaa

SEQ ID NO: 601472 - RNA, 19 nt, Artificial Sequence
  Description of Artificial Sequence: Synthetic oligonucleotide
ucaaccuacuggauccauc

SEQ ID NO: 601473 - RNA, 19 nt, Artificial Sequence
  Description of Artificial Sequence: Synthetic oligonucleotide
caggaauuacagucagccc

SEQ ID NO: 601474 - RNA, 19 nt, Artificial Sequence
  Description of Artificial Sequence: Synthetic oligonucleotide
auuaucucaaugaauccuu

SEQ ID NO: 601475 - RNA, 19 nt, Artificial Sequence
  Description of Artificial Sequence: Synthetic oligonucleotide
ucuccgucacaaauuuccu

SEQ ID NO: 601476 - RNA, 19 nt, Artificial Sequence
  Description of Artificial Sequence: Synthetic oligonucleotide
uuauaucccaaugguguaa

SEQ ID NO: 601477 - RNA, 19 nt, Artificial Sequence
  Description of Artificial Sequence: Synthetic oligonucleotide
cuuuaagggucuccgucac

SEQ ID NO: 601478 - RNA, 19 nt, Artificial Sequence
  Description of Artificial Sequence: Synthetic oligonucleotide
cugagauaguccacaucag

SEQ ID NO: 601479 - RNA, 19 nt, Artificial Sequence
  Description of Artificial Sequence: Synthetic oligonucleotide
ugaaccaagucuccccaua

SEQ ID NO: 601480 - RNA, 19 nt, Artificial Sequence
  Description of Artificial Sequence: Synthetic oligonucleotide
cagcacucgauuagcaaug

SEQ ID NO: 601481 - RNA, 19 nt, Artificial Sequence
  Description of Artificial Sequence: Synthetic oligonucleotide
uggaaacacaaacgcccca

SEQ ID NO: 601482 - RNA, 19 nt, Artificial Sequence
  Description of Artificial Sequence: Synthetic oligonucleotide
agcgagaccaugauaucag

SEQ ID NO: 601483 - RNA, 19 nt, Artificial Sequence
  Description of Artificial Sequence: Synthetic oligonucleotide
acucgaagacucugcagca

SEQ ID NO: 601484 - RNA, 19 nt, Artificial Sequence
  Description of Artificial Sequence: Synthetic oligonucleotide
ggagagacucacuaacuac

SEQ ID NO: 601485 - RNA, 19 nt, Artificial Sequence
  Description of Artificial Sequence: Synthetic oligonucleotide
uacagucagcccaaccaaa

SEQ ID NO: 601486 - RNA, 19 nt, Artificial Sequence
  Description of Artificial Sequence: Synthetic oligonucleotide
uggagagaaccgugcaaug

SEQ ID NO: 601487 - RNA, 19 nt, Artificial Sequence
  Description of Artificial Sequence: Synthetic oligonucleotide
cuuguaagcuuuucaguaa

SEQ ID NO: 601488 - RNA, 19 nt, Artificial Sequence
  Description of Artificial Sequence: Synthetic oligonucleotide
gcaugugcguccucaaagg

SEQ ID NO: 601489 - RNA, 19 nt, Artificial Sequence
  Description of Artificial Sequence: Synthetic oligonucleotide
ggauuauuaucucaaugaa

SEQ ID NO: 601490 - RNA, 19 nt, Artificial Sequence
  Description of Artificial Sequence: Synthetic oligonucleotide
ccaacuggagucauucugc

SEQ ID NO: 601491 - RNA, 19 nt, Artificial Sequence
  Description of Artificial Sequence: Synthetic oligonucleotide
acucgauuagcaaugggau

SEQ ID NO: 601492 - RNA, 19 nt, Artificial Sequence
  Description of Artificial Sequence: Synthetic oligonucleotide
ucccaauaaguguggcagc

SEQ ID NO: 601493 - RNA, 19 nt, Artificial Sequence
  Description of Artificial Sequence: Synthetic oligonucleotide
gacuuaaccgagaaagcaa

SEQ ID NO: 601494 - RNA, 19 nt, Artificial Sequence
  Description of Artificial Sequence: Synthetic oligonucleotide
agaaccgugcaaugcuuga

SEQ ID NO: 601495 - RNA, 19 nt, Artificial Sequence
  Description of Artificial Sequence: Synthetic oligonucleotide
uccugaacacuaccacucu

SEQ ID NO: 601496 - RNA, 19 nt, Artificial Sequence
  Description of Artificial Sequence: Synthetic oligonucleotide
cauuaauugaaugguucca

SEQ ID NO: 601497 - RNA, 19 nt, Artificial Sequence
  Description of Artificial Sequence: Synthetic oligonucleotide
uuauuucuuuuaaggcaua

SEQ ID NO: 601498 - RNA, 19 nt, Artificial Sequence
  Description of Artificial Sequence: Synthetic oligonucleotide
caucagucauuaaguaguc

SEQ ID NO: 601499 - RNA, 19 nt, Artificial Sequence
  Description of Artificial Sequence: Synthetic oligonucleotide
caaugggauuauuaucuca

SEQ ID NO: 601500 - RNA, 19 nt, Artificial Sequence
  Description of Artificial Sequence: Synthetic oligonucleotide
gauuauuaucucaaugaau

SEQ ID NO: 601501 - RNA, 19 nt, Artificial Sequence
  Description of Artificial Sequence: Synthetic oligonucleotide
acuuaaccgagaaagcaaa

SEQ ID NO: 601502 - RNA, 19 nt, Artificial Sequence
  Description of Artificial Sequence: Synthetic oligonucleotide
ucuguugauauagcguaua

SEQ ID NO: 601503 - RNA, 19 nt, Artificial Sequence
  Description of Artificial Sequence: Synthetic oligonucleotide
cgggauagcacucugcucc

SEQ ID NO: 601504 - RNA, 19 nt, Artificial Sequence
  Description of Artificial Sequence: Synthetic oligonucleotide
aaccaaggugagaaagcug

SEQ ID NO: 601505 - RNA, 19 nt, Artificial Sequence
  Description of Artificial Sequence: Synthetic oligonucleotide
ggaauuacugaucucgcua

SEQ ID NO: 601506 - RNA, 19 nt, Artificial Sequence
  Description of Artificial Sequence: Synthetic oligonucleotide
guuauaucccaauggugua

SEQ ID NO: 601507 - RNA, 19 nt, Artificial Sequence
  Description of Artificial Sequence: Synthetic oligonucleotide
ucagccuagcgccaccuuu

SEQ ID NO: 601508 - RNA, 19 nt, Artificial Sequence
  Description of Artificial Sequence: Synthetic oligonucleotide
cagcguuagauucaguaaa

SEQ ID NO: 601509 - RNA, 19 nt, Artificial Sequence
  Description of Artificial Sequence: Synthetic oligonucleotide
ccuacuggauccaucugcc

SEQ ID NO: 601510 - RNA, 19 nt, Artificial Sequence
  Description of Artificial Sequence: Synthetic oligonucleotide
uggguuucauccugcugcu

SEQ ID NO: 601511 - RNA, 19 nt, Artificial Sequence
  Description of Artificial Sequence: Synthetic oligonucleotide
gagaaccgugcaaugcuug

SEQ ID NO: 601512 - RNA, 19 nt, Artificial Sequence
  Description of Artificial Sequence: Synthetic oligonucleotide
cuuuuguuccugaaguccu

SEQ ID NO: 601513 - RNA, 19 nt, Artificial Sequence
  Description of Artificial Sequence: Synthetic oligonucleotide
agaguggguagaaaauaca

SEQ ID NO: 601514 - RNA, 19 nt, Artificial Sequence
  Description of Artificial Sequence: Synthetic oligonucleotide
accaauaaacugugacaaa

SEQ ID NO: 601515 - RNA, 19 nt, Artificial Sequence
  Description of Artificial Sequence: Synthetic oligonucleotide
agcacucgauuagcaaugg

SEQ ID NO: 601516 - RNA, 19 nt, Artificial Sequence
  Description of Artificial Sequence: Synthetic oligonucleotide
gauaguccacaucagucau

SEQ ID NO: 601517 - RNA, 19 nt, Artificial Sequence
  Description of Artificial Sequence: Synthetic oligonucleotide
agcauucgccagcgagacc

SEQ ID NO: 601518 - RNA, 19 nt, Artificial Sequence
  Description of Artificial Sequence: Synthetic oligonucleotide
cuacauuauuggagagaac

SEQ ID NO: 601519 - RNA, 19 nt, Artificial Sequence
  Description of Artificial Sequence: Synthetic oligonucleotide
ggaaccaaggugagaaagc

SEQ ID NO: 601520 - RNA, 19 nt, Artificial Sequence
  Description of Artificial Sequence: Synthetic oligonucleotide
cauguaugauccaggagcu

SEQ ID NO: 601521 - RNA, 19 nt, Artificial Sequence
  Description of Artificial Sequence: Synthetic oligonucleotide
gauggcacuuugcaugaua

SEQ ID NO: 601522 - RNA, 19 nt, Artificial Sequence
  Description of Artificial Sequence: Synthetic oligonucleotide
uguacacgcugaagcagua

SEQ ID NO: 601523 - RNA, 19 nt, Artificial Sequence
  Description of Artificial Sequence: Synthetic oligonucleotide
agcaacuggcccacaacag

SEQ ID NO: 601524 - RNA, 19 nt, Artificial Sequence
  Description of Artificial Sequence: Synthetic oligonucleotide
agcucggcucacucgaaga

SEQ ID NO: 601525 - RNA, 19 nt, Artificial Sequence
  Description of Artificial Sequence: Synthetic oligonucleotide
cagacagcguuagauucag

SEQ ID NO: 601526 - RNA, 19 nt, Artificial Sequence
  Description of Artificial Sequence: Synthetic oligonucleotide
gaaccaaggugagaaagcu

SEQ ID NO: 601527 - RNA, 19 nt, Artificial Sequence
  Description of Artificial Sequence: Synthetic oligonucleotide
aaacgccccauagcuuguc

SEQ ID NO: 601528 - RNA, 19 nt, Artificial Sequence
  Description of Artificial Sequence: Synthetic oligonucleotide
cagauuuucaggggaugac

SEQ ID NO: 601529 - RNA, 19 nt, Artificial Sequence
  Description of Artificial Sequence: Synthetic oligonucleotide
caggcggagcaacuggccc

SEQ ID NO: 601530 - RNA, 19 nt, Artificial Sequence
  Description of Artificial Sequence: Synthetic oligonucleotide
aggccuagaaggaauuacu

SEQ ID NO: 601531 - RNA, 19 nt, Artificial Sequence
  Description of Artificial Sequence: Synthetic oligonucleotide
uagcguauacacugccuua

SEQ ID NO: 601532 - RNA, 19 nt, Artificial Sequence
  Description of Artificial Sequence: Synthetic oligonucleotide
cugaaccaagcguugcuga

SEQ ID NO: 601533 - RNA, 19 nt, Artificial Sequence
  Description of Artificial Sequence: Synthetic oligonucleotide
agucauuaauugaaugguu

SEQ ID NO: 601534 - RNA, 19 nt, Artificial Sequence
  Description of Artificial Sequence: Synthetic oligonucleotide
uucuuucguugcuuuguua

SEQ ID NO: 601535 - RNA, 19 nt, Artificial Sequence
  Description of Artificial Sequence: Synthetic oligonucleotide
guaugauccaggagcuuac

SEQ ID NO: 601536 - RNA, 19 nt, Artificial Sequence
  Description of Artificial Sequence: Synthetic oligonucleotide
gagacuccaagcaaucugu

SEQ ID NO: 601537 - RNA, 19 nt, Artificial Sequence
  Description of Artificial Sequence: Synthetic oligonucleotide
gcauucgccagcgagacca

SEQ ID NO: 601538 - RNA, 19 nt, Artificial Sequence
  Description of Artificial Sequence: Synthetic oligonucleotide
ccaaauauacagccagcug

SEQ ID NO: 601539 - RNA, 19 nt, Artificial Sequence
  Description of Artificial Sequence: Synthetic oligonucleotide
caaccuacuggauccaucu

SEQ ID NO: 601540 - RNA, 19 nt, Artificial Sequence
  Description of Artificial Sequence: Synthetic oligonucleotide
auggcacuuugcaugauau

SEQ ID NO: 601541 - RNA, 19 nt, Artificial Sequence
  Description of Artificial Sequence: Synthetic oligonucleotide
cucacuaacuacacaugua

SEQ ID NO: 601542 - RNA, 19 nt, Artificial Sequence
  Description of Artificial Sequence: Synthetic oligonucleotide
gaacgugcugaagcagcag

SEQ ID NO: 601543 - RNA, 19 nt, Artificial Sequence
  Description of Artificial Sequence: Synthetic oligonucleotide
guaucccaauaaguguggc

SEQ ID NO: 601544 - RNA, 19 nt, Artificial Sequence
  Description of Artificial Sequence: Synthetic oligonucleotide
gccuagaaggaauuacuga

SEQ ID NO: 601545 - RNA, 19 nt, Artificial Sequence
  Description of Artificial Sequence: Synthetic oligonucleotide
ugaucucgcuaagacuuuc

SEQ ID NO: 601546 - RNA, 19 nt, Artificial Sequence
  Description of Artificial Sequence: Synthetic oligonucleotide
aggcggagcaacuggccca

SEQ ID NO: 601547 - RNA, 19 nt, Artificial Sequence
  Description of Artificial Sequence: Synthetic oligonucleotide
cauuauuggagagaaccgu

SEQ ID NO: 601548 - RNA, 19 nt, Artificial Sequence
  Description of Artificial Sequence: Synthetic oligonucleotide
acuccucgaagguuuugaa

SEQ ID NO: 601549 - RNA, 19 nt, Artificial Sequence
  Description of Artificial Sequence: Synthetic oligonucleotide
aaggacgaucucauguaua

SEQ ID NO: 601550 - RNA, 19 nt, Artificial Sequence
  Description of Artificial Sequence: Synthetic oligonucleotide
gggauagcacucugcuccg

SEQ ID NO: 601551 - RNA, 19 nt, Artificial Sequence
  Description of Artificial Sequence: Synthetic oligonucleotide
acgaucucauguauaguau

SEQ ID NO: 601552 - RNA, 19 nt, Artificial Sequence
  Description of Artificial Sequence: Synthetic oligonucleotide
gcagaaaauaaagaaggcu

SEQ ID NO: 601553 - RNA, 19 nt, Artificial Sequence
  Description of Artificial Sequence: Synthetic oligonucleotide
ucuauccaacuggagucau

SEQ ID NO: 601554 - RNA, 19 nt, Artificial Sequence
  Description of Artificial Sequence: Synthetic oligonucleotide
ugcguccucaaaggaacgu

SEQ ID NO: 601555 - RNA, 19 nt, Artificial Sequence
  Description of Artificial Sequence: Synthetic oligonucleotide
agcguuagauucaguaaaa

SEQ ID NO: 601556 - RNA, 19 nt, Artificial Sequence
  Description of Artificial Sequence: Synthetic oligonucleotide
ggccccucuguugauauag

SEQ ID NO: 601557 - RNA, 19 nt, Artificial Sequence
  Description of Artificial Sequence: Synthetic oligonucleotide
cguuagauucaguaaaaga

SEQ ID NO: 601558 - RNA, 19 nt, Artificial Sequence
  Description of Artificial Sequence: Synthetic oligonucleotide
agauucaguaaaagaugau

SEQ ID NO: 601559 - RNA, 19 nt, Artificial Sequence
  Description of Artificial Sequence: Synthetic oligonucleotide
aucaaccugaggacucgag

SEQ ID NO: 601560 - RNA, 19 nt, Artificial Sequence
  Description of Artificial Sequence: Synthetic oligonucleotide
gcagcaccgacuuaaccga

SEQ ID NO: 601561 - RNA, 19 nt, Artificial Sequence
  Description of Artificial Sequence: Synthetic oligonucleotide
uagcgccaccuuuaagggu

SEQ ID NO: 601562 - RNA, 19 nt, Artificial Sequence
  Description of Artificial Sequence: Synthetic oligonucleotide
gaucucgcuaagacuuuca

SEQ ID NO: 601563 - RNA, 19 nt, Artificial Sequence
  Description of Artificial Sequence: Synthetic oligonucleotide
gcuuacugauggcacuuug

SEQ ID NO: 601564 - RNA, 19 nt, Artificial Sequence
  Description of Artificial Sequence: Synthetic oligonucleotide
ggccuagaaggaauuacug

SEQ ID NO: 601565 - RNA, 19 nt, Artificial Sequence
  Description of Artificial Sequence: Synthetic oligonucleotide
cccauaaugcagcaccgac

SEQ ID NO: 601566 - RNA, 19 nt, Artificial Sequence
  Description of Artificial Sequence: Synthetic oligonucleotide
gcuccgguaucucaaucug

SEQ ID NO: 601567 - RNA, 19 nt, Artificial Sequence
  Description of Artificial Sequence: Synthetic oligonucleotide
ccgacuuaaccgagaaagc

SEQ ID NO: 601568 - RNA, 19 nt, Artificial Sequence
  Description of Artificial Sequence: Synthetic oligonucleotide
ccaccuuuaagggucuccg

SEQ ID NO: 601569 - RNA, 19 nt, Artificial Sequence
  Description of Artificial Sequence: Synthetic oligonucleotide
cagcgggauagcacucugc

SEQ ID NO: 601570 - RNA, 19 nt, Artificial Sequence
  Description of Artificial Sequence: Synthetic oligonucleotide
auaucccaaugguguaaaa

SEQ ID NO: 601571 - RNA, 19 nt, Artificial Sequence
  Description of Artificial Sequence: Synthetic oligonucleotide
ucgcuggcaugauccuucc

SEQ ID NO: 601572 - RNA, 19 nt, Artificial Sequence
  Description of Artificial Sequence: Synthetic oligonucleotide
auauggaaaauggcucaua

SEQ ID NO: 601573 - RNA, 19 nt, Artificial Sequence
  Description of Artificial Sequence: Synthetic oligonucleotide
ccucuguugauauagcgua

SEQ ID NO: 601574 - RNA, 19 nt, Artificial Sequence
  Description of Artificial Sequence: Synthetic oligonucleotide
cugccaaggccuagaagga

SEQ ID NO: 601575 - RNA, 19 nt, Artificial Sequence
  Description of Artificial Sequence: Synthetic oligonucleotide
guccuaacuggaagaagca

SEQ ID NO: 601576 - RNA, 19 nt, Artificial Sequence
  Description of Artificial Sequence: Synthetic oligonucleotide
ccuagaaggaauuacugau

SEQ ID NO: 601577 - RNA, 19 nt, Artificial Sequence
  Description of Artificial Sequence: Synthetic oligonucleotide
gcguuagauucaguaaaag

SEQ ID NO: 601578 - RNA, 19 nt, Artificial Sequence
  Description of Artificial Sequence: Synthetic oligonucleotide
uaagggucuccgucacaaa

SEQ ID NO: 601579 - RNA, 19 nt, Artificial Sequence
  Description of Artificial Sequence: Synthetic oligonucleotide
cagcgagaccaugauauca

SEQ ID NO: 601580 - RNA, 19 nt, Artificial Sequence
  Description of Artificial Sequence: Synthetic oligonucleotide
cucuuuugaaaacccugua

SEQ ID NO: 601581 - RNA, 19 nt, Artificial Sequence
  Description of Artificial Sequence: Synthetic oligonucleotide
augugcguccucaaaggaa

SEQ ID NO: 601582 - RNA, 19 nt, Artificial Sequence
  Description of Artificial Sequence: Synthetic oligonucleotide
gcagcaguaugaaugaugu

SEQ ID NO: 601583 - RNA, 19 nt, Artificial Sequence
  Description of Artificial Sequence: Synthetic oligonucleotide
agcugcaauggaaggccag

SEQ ID NO: 601584 - RNA, 19 nt, Artificial Sequence
  Description of Artificial Sequence: Synthetic oligonucleotide
ucgccagcgagaccaugau

SEQ ID NO: 601585 - RNA, 19 nt, Artificial Sequence
  Description of Artificial Sequence: Synthetic oligonucleotide
gcaaugggauuauuaucuc

SEQ ID NO: 601586 - RNA, 19 nt, Artificial Sequence
  Description of Artificial Sequence: Synthetic oligonucleotide
gaauuacagucagcccaac

SEQ ID NO: 601587 - RNA, 19 nt, Artificial Sequence
  Description of Artificial Sequence: Synthetic oligonucleotide
cagcaccgacuuaaccgag

SEQ ID NO: 601588 - RNA, 19 nt, Artificial Sequence
  Description of Artificial Sequence: Synthetic oligonucleotide
ucaggguuucgggaaccaa

SEQ ID NO: 601589 - RNA, 19 nt, Artificial Sequence
  Description of Artificial Sequence: Synthetic oligonucleotide
gugcguccucaaaggaacg

SEQ ID NO: 601590 - RNA, 19 nt, Artificial Sequence
  Description of Artificial Sequence: Synthetic oligonucleotide
ggccucucuguuugguugc

SEQ ID NO: 601591 - RNA, 19 nt, Artificial Sequence
  Description of Artificial Sequence: Synthetic oligonucleotide
gcugcaauggaaggccagc

SEQ ID NO: 601592 - RNA, 19 nt, Artificial Sequence
  Description of Artificial Sequence: Synthetic oligonucleotide
guaauucuuucgaagccau

SEQ ID NO: 601593 - RNA, 19 nt, Artificial Sequence
  Description of Artificial Sequence: Synthetic oligonucleotide
caaguaccguagccugaac

SEQ ID NO: 601594 - RNA, 19 nt, Artificial Sequence
  Description of Artificial Sequence: Synthetic oligonucleotide
agagaaccgugcaaugcuu

SEQ ID NO: 601595 - RNA, 19 nt, Artificial Sequence
  Description of Artificial Sequence: Synthetic oligonucleotide
gacuccaauguguggguuu

SEQ ID NO: 601596 - RNA, 19 nt, Artificial Sequence
  Description of Artificial Sequence: Synthetic oligonucleotide
cugcuccgguaucucaauc

SEQ ID NO: 601597 - RNA, 19 nt, Artificial Sequence
  Description of Artificial Sequence: Synthetic oligonucleotide
gcucggcucacucgaagac

SEQ ID NO: 601598 - RNA, 19 nt, Artificial Sequence
  Description of Artificial Sequence: Synthetic oligonucleotide
cacgaggauggcguugguc

SEQ ID NO: 601599 - RNA, 19 nt, Artificial Sequence
  Description of Artificial Sequence: Synthetic oligonucleotide
gguuuugaagccaggccaa

SEQ ID NO: 601600 - RNA, 19 nt, Artificial Sequence
  Description of Artificial Sequence: Synthetic oligonucleotide
gucagcccaaccaaaugcu

SEQ ID NO: 601601 - RNA, 19 nt, Artificial Sequence
  Description of Artificial Sequence: Synthetic oligonucleotide
uucagccuagcgccaccuu

SEQ ID NO: 601602 - RNA, 19 nt, Artificial Sequence
  Description of Artificial Sequence: Synthetic oligonucleotide
agcaccgacuuaaccgaga

SEQ ID NO: 601603 - RNA, 19 nt, Artificial Sequence
  Description of Artificial Sequence: Synthetic oligonucleotide
ccaauguguggguuucauc

SEQ ID NO: 601604 - RNA, 19 nt, Artificial Sequence
  Description of Artificial Sequence: Synthetic oligonucleotide
agccuagcgccaccuuuaa

SEQ ID NO: 601605 - RNA, 19 nt, Artificial Sequence
  Description of Artificial Sequence: Synthetic oligonucleotide
gcauaaccugcagaggcuc

SEQ ID NO: 601606 - RNA, 19 nt, Artificial Sequence
  Description of Artificial Sequence: Synthetic oligonucleotide
ccuuaugguuucuauccaa

SEQ ID NO: 601607 - RNA, 19 nt, Artificial Sequence
  Description of Artificial Sequence: Synthetic oligonucleotide
ggaacgugcugaagcagca

SEQ ID NO: 601608 - RNA, 19 nt, Artificial Sequence
  Description of Artificial Sequence: Synthetic oligonucleotide
cgaagguuuugaagccagg

SEQ ID NO: 601609 - RNA, 19 nt, Artificial Sequence
  Description of Artificial Sequence: Synthetic oligonucleotide
cucgauuagcaaugggauu

SEQ ID NO: 601610 - RNA, 19 nt, Artificial Sequence
  Description of Artificial Sequence: Synthetic oligonucleotide
guaagaccucagcucuucu

SEQ ID NO: 601611 - RNA, 19 nt, Artificial Sequence
  Description of Artificial Sequence: Synthetic oligonucleotide
auucgccagcgagaccaug

SEQ ID NO: 601612 - RNA, 19 nt, Artificial Sequence
  Description of Artificial Sequence: Synthetic oligonucleotide
cagccuagcgccaccuuua

SEQ ID NO: 601613 - RNA, 19 nt, Artificial Sequence
  Description of Artificial Sequence: Synthetic oligonucleotide
gccaccuuuaagggucucc

SEQ ID NO: 601614 - RNA, 19 nt, Artificial Sequence
  Description of Artificial Sequence: Synthetic oligonucleotide
ggauagcacucugcuccgg

SEQ ID NO: 601615 - RNA, 19 nt, Artificial Sequence
  Description of Artificial Sequence: Synthetic oligonucleotide
cagcuaguuguggaggcaa

SEQ ID NO: 601616 - RNA, 19 nt, Artificial Sequence
  Description of Artificial Sequence: Synthetic oligonucleotide
cgacuuaaccgagaaagca

SEQ ID NO: 601617 - RNA, 19 nt, Artificial Sequence
  Description of Artificial Sequence: Synthetic oligonucleotide
cauauggaaaauggcucau

SEQ ID NO: 601618 - RNA, 19 nt, Artificial Sequence
  Description of Artificial Sequence: Synthetic oligonucleotide
cucuguugauauagcguau

SEQ ID NO: 601619 - RNA, 19 nt, Artificial Sequence
  Description of Artificial Sequence: Synthetic oligonucleotide
agcuaguuguggaggcaaa

SEQ ID NO: 601620 - RNA, 19 nt, Artificial Sequence
  Description of Artificial Sequence: Synthetic oligonucleotide
cuccgguaucucaaucugu

SEQ ID NO: 601621 - RNA, 19 nt, Artificial Sequence
  Description of Artificial Sequence: Synthetic oligonucleotide
gcgagaccaugauaucaga

SEQ ID NO: 601622 - RNA, 19 nt, Artificial Sequence
  Description of Artificial Sequence: Synthetic oligonucleotide
auguaugauccaggagcuu

SEQ ID NO: 601623 - RNA, 19 nt, Artificial Sequence
  Description of Artificial Sequence: Synthetic oligonucleotide
ugauggcacuuugcaugau

SEQ ID NO: 601624 - RNA, 19 nt, Artificial Sequence
  Description of Artificial Sequence: Synthetic oligonucleotide
gcucuauaccauuuccaau

SEQ ID NO: 601625 - RNA, 19 nt, Artificial Sequence
  Description of Artificial Sequence: Synthetic oligonucleotide
gaaccgugcaaugcuugau

SEQ ID NO: 601626 - RNA, 19 nt, Artificial Sequence
  Description of Artificial Sequence: Synthetic oligonucleotide
gaagcucggcucacucgaa

SEQ ID NO: 601627 - RNA, 19 nt, Artificial Sequence
  Description of Artificial Sequence: Synthetic oligonucleotide
caucaaccugaggacucga

SEQ ID NO: 601628 - RNA, 19 nt, Artificial Sequence
  Description of Artificial Sequence: Synthetic oligonucleotide
cucaggguuucgggaacca

SEQ ID NO: 601629 - RNA, 19 nt, Artificial Sequence
  Description of Artificial Sequence: Synthetic oligonucleotide
gccuagcgccaccuuuaag

SEQ ID NO: 601630 - RNA, 19 nt, Artificial Sequence
  Description of Artificial Sequence: Synthetic oligonucleotide
ggugcuucuucaauacaau

SEQ ID NO: 601631 - RNA, 19 nt, Artificial Sequence
  Description of Artificial Sequence: Synthetic oligonucleotide
gcgggauagcacucugcuc

SEQ ID NO: 601632 - RNA, 19 nt, Artificial Sequence
  Description of Artificial Sequence: Synthetic oligonucleotide
cuccgucacaaauuuccuu

SEQ ID NO: 601633 - RNA, 19 nt, Artificial Sequence
  Description of Artificial Sequence: Synthetic oligonucleotide
ccagcgggauagcacucug

SEQ ID NO: 601634 - RNA, 19 nt, Artificial Sequence
  Description of Artificial Sequence: Synthetic oligonucleotide
caccuuuaagggucuccgu

SEQ ID NO: 601635 - RNA, 19 nt, Artificial Sequence
  Description of Artificial Sequence: Synthetic oligonucleotide
caaacgccccauagcuugu

SEQ ID NO: 601636 - RNA, 19 nt, Artificial Sequence
  Description of Artificial Sequence: Synthetic oligonucleotide
gcuggucgcuggcaugauc

SEQ ID NO: 601637 - RNA, 19 nt, Artificial Sequence
  Description of Artificial Sequence: Synthetic oligonucleotide
cacaaacgccccauagcuu

SEQ ID NO: 601638 - RNA, 19 nt, Artificial Sequence
  Description of Artificial Sequence: Synthetic oligonucleotide
cucggcucacucgaagacu

SEQ ID NO: 601639 - RNA, 19 nt, Artificial Sequence
  Description of Artificial Sequence: Synthetic oligonucleotide
ggcggagcaacuggcccac

SEQ ID NO: 601640 - RNA, 19 nt, Artificial Sequence
  Description of Artificial Sequence: Synthetic oligonucleotide
ccacggugcuucuucaaua

SEQ ID NO: 601641 - RNA, 19 nt, Artificial Sequence
  Description of Artificial Sequence: Synthetic oligonucleotide
ccaaguaccguagccugaa

SEQ ID NO: 601642 - RNA, 19 nt, Artificial Sequence
  Description of Artificial Sequence: Synthetic oligonucleotide
ccaauaaguguggcagcca

SEQ ID NO: 601643 - RNA, 19 nt, Artificial Sequence
  Description of Artificial Sequence: Synthetic oligonucleotide
cugaucucgcuaagacuuu

SEQ ID NO: 601644 - RNA, 19 nt, Artificial Sequence
  Description of Artificial Sequence: Synthetic oligonucleotide
ugcuggucgcuggcaugau

SEQ ID NO: 601645 - RNA, 19 nt, Artificial Sequence
  Description of Artificial Sequence: Synthetic oligonucleotide
gccccucuguugauauagc

SEQ ID NO: 601646 - RNA, 19 nt, Artificial Sequence
  Description of Artificial Sequence: Synthetic oligonucleotide
ccgguaucucaaucuguaa

SEQ ID NO: 601647 - RNA, 19 nt, Artificial Sequence
  Description of Artificial Sequence: Synthetic oligonucleotide
ggggauggccacugaugua

SEQ ID NO: 601648 - RNA, 19 nt, Artificial Sequence
  Description of Artificial Sequence: Synthetic oligonucleotide
cucgaagacucugcagcau

SEQ ID NO: 601649 - RNA, 19 nt, Artificial Sequence
  Description of Artificial Sequence: Synthetic oligonucleotide
ggacgaucucauguauagu

SEQ ID NO: 601650 - RNA, 19 nt, Artificial Sequence
  Description of Artificial Sequence: Synthetic oligonucleotide
cucaaccuacuggauccau

SEQ ID NO: 601651 - RNA, 19 nt, Artificial Sequence
  Description of Artificial Sequence: Synthetic oligonucleotide
cauucgccagcgagaccau

SEQ ID NO: 601652 - RNA, 19 nt, Artificial Sequence
  Description of Artificial Sequence: Synthetic oligonucleotide
ccccauaaugcagcaccga

SEQ ID NO: 601653 - RNA, 19 nt, Artificial Sequence
  Description of Artificial Sequence: Synthetic oligonucleotide
ccguagccugaacugugaa

SEQ ID NO: 601654 - RNA, 19 nt, Artificial Sequence
  Description of Artificial Sequence: Synthetic oligonucleotide
ccaugauaucagacagcgu

SEQ ID NO: 601655 - RNA, 19 nt, Artificial Sequence
  Description of Artificial Sequence: Synthetic oligonucleotide
ccgucacaaauuuccuuau

SEQ ID NO: 601656 - RNA, 19 nt, Artificial Sequence
  Description of Artificial Sequence: Synthetic oligonucleotide
gccaggccaacuccucuuu

SEQ ID NO: 601657 - RNA, 19 nt, Artificial Sequence
  Description of Artificial Sequence: Synthetic oligonucleotide
ggucgcuggcaugauccuu

SEQ ID NO: 601658 - RNA, 19 nt, Artificial Sequence
  Description of Artificial Sequence: Synthetic oligonucleotide
cgccccauagcuugucccu

SEQ ID NO: 601659 - RNA, 19 nt, Artificial Sequence
  Description of Artificial Sequence: Synthetic oligonucleotide
ccaggccaacuccucuuuu

SEQ ID NO: 601660 - RNA, 19 nt, Artificial Sequence
  Description of Artificial Sequence: Synthetic oligonucleotide
gcgccaccuuuaagggucu

SEQ ID NO: 601661 - RNA, 19 nt, Artificial Sequence
  Description of Artificial Sequence: Synthetic oligonucleotide
gcggagcaacuggcccaca

SEQ ID NO: 601662 - RNA, 19 nt, Artificial Sequence
  Description of Artificial Sequence: Synthetic oligonucleotide
agcauuuugaaguagcugc

SEQ ID NO: 601663 - RNA, 19 nt, Artificial Sequence
  Description of Artificial Sequence: Synthetic oligonucleotide
aaauaugucaggucugagc

SEQ ID NO: 601664 - RNA, 19 nt, Artificial Sequence
  Description of Artificial Sequence: Synthetic oligonucleotide
aaguguaggaaacuagggc

SEQ ID NO: 601665 - RNA, 19 nt, Artificial Sequence
  Description of Artificial Sequence: Synthetic oligonucleotide
aauaugucaggucugagcu

SEQ ID NO: 601666 - RNA, 19 nt, Artificial Sequence
  Description of Artificial Sequence: Synthetic oligonucleotide
uaaagguugaucauuuccg

SEQ ID NO: 601667 - RNA, 19 nt, Artificial Sequence
  Description of Artificial Sequence: Synthetic oligonucleotide
aguaucgagaacuaucugg

SEQ ID NO: 601668 - RNA, 19 nt, Artificial Sequence
  Description of Artificial Sequence: Synthetic oligonucleotide
uguacaguaaacaucccag

SEQ ID NO: 601669 - RNA, 19 nt, Artificial Sequence
  Description of Artificial Sequence: Synthetic oligonucleotide
ucagcaacuaaccuauugg

SEQ ID NO: 601670 - RNA, 19 nt, Artificial Sequence
  Description of Artificial Sequence: Synthetic oligonucleotide
uuuggucgaauuuaaaugc

SEQ ID NO: 601671 - RNA, 19 nt, Artificial Sequence
  Description of Artificial Sequence: Synthetic oligonucleotide
uguugaucugagaaggucg

SEQ ID NO: 601672 - RNA, 19 nt, Artificial Sequence
  Description of Artificial Sequence: Synthetic oligonucleotide
aaugggucuaauucgacug

SEQ ID NO: 601673 - RNA, 19 nt, Artificial Sequence
  Description of Artificial Sequence: Synthetic oligonucleotide
uaggauauugugauguggg

SEQ ID NO: 601674 - RNA, 19 nt, Artificial Sequence
  Description of Artificial Sequence: Synthetic oligonucleotide
ugauguuggagacugaaca

SEQ ID NO: 601675 - RNA, 19 nt, Artificial Sequence
  Description of Artificial Sequence: Synthetic oligonucleotide
ugugaaaugcgcuacugcc

SEQ ID NO: 601676 - RNA, 19 nt, Artificial Sequence
  Description of Artificial Sequence: Synthetic oligonucleotide
aaccuauuggcaccgaaag

SEQ ID NO: 601677 - RNA, 19 nt, Artificial Sequence
  Description of Artificial Sequence: Synthetic oligonucleotide
gaagaauuauugauguugg

SEQ ID NO: 601678 - RNA, 19 nt, Artificial Sequence
  Description of Artificial Sequence: Synthetic oligonucleotide
gucgcuuaggcccugaugg

SEQ ID NO: 601679 - RNA, 19 nt, Artificial Sequence
  Description of Artificial Sequence: Synthetic oligonucleotide
accaaaugggucuaauucg

SEQ ID NO: 601680 - RNA, 19 nt, Artificial Sequence
  Description of Artificial Sequence: Synthetic oligonucleotide
aguguaggaaacuagggcu

SEQ ID NO: 601681 - RNA, 19 nt, Artificial Sequence
  Description of Artificial Sequence: Synthetic oligonucleotide
acacagaugucgcuuaggc

SEQ ID NO: 601682 - RNA, 19 nt, Artificial Sequence
  Description of Artificial Sequence: Synthetic oligonucleotide
cauaucuacacuucugggc

SEQ ID NO: 601683 - RNA, 19 nt, Artificial Sequence
  Description of Artificial Sequence: Synthetic oligonucleotide
aguccuguacauuauucac

SEQ ID NO: 601684 - RNA, 19 nt, Artificial Sequence
  Description of Artificial Sequence: Synthetic oligonucleotide
uuauugauguuggagacug

SEQ ID NO: 601685 - RNA, 19 nt, Artificial Sequence
  Description of Artificial Sequence: Synthetic oligonucleotide
gaaacaggaguuauugccg

SEQ ID NO: 601686 - RNA, 19 nt, Artificial Sequence
  Description of Artificial Sequence: Synthetic oligonucleotide
uguuaggauauugugaugu

SEQ ID NO: 601687 - RNA, 19 nt, Artificial Sequence
  Description of Artificial Sequence: Synthetic oligonucleotide
ucuaauucgacugguuggg

SEQ ID NO: 601688 - RNA, 19 nt, Artificial Sequence
  Description of Artificial Sequence: Synthetic oligonucleotide
ugcacuauggaaugacccg

SEQ ID NO: 601689 - RNA, 19 nt, Artificial Sequence
  Description of Artificial Sequence: Synthetic oligonucleotide
aaaguccccguguugaucu

SEQ ID NO: 601690 - RNA, 19 nt, Artificial Sequence
  Description of Artificial Sequence: Synthetic oligonucleotide
augagcaaaggccugugac

SEQ ID NO: 601691 - RNA, 19 nt, Artificial Sequence
  Description of Artificial Sequence: Synthetic oligonucleotide
aaugcaaauaggauacuug

SEQ ID NO: 601692 - RNA, 19 nt, Artificial Sequence
  Description of Artificial Sequence: Synthetic oligonucleotide
accgaagucauccauucuc

SEQ ID NO: 601693 - RNA, 19 nt, Artificial Sequence
  Description of Artificial Sequence: Synthetic oligonucleotide
gaaagagggauccacuaug

SEQ ID NO: 601694 - RNA, 19 nt, Artificial Sequence
  Description of Artificial Sequence: Synthetic oligonucleotide
uucauuuggcuuuuccuag

SEQ ID NO: 601695 - RNA, 19 nt, Artificial Sequence
  Description of Artificial Sequence: Synthetic oligonucleotide
uucucguuugugaaaugcg

SEQ ID NO: 601696 - RNA, 19 nt, Artificial Sequence
  Description of Artificial Sequence: Synthetic oligonucleotide
ugacauaucaggcggguga

SEQ ID NO: 601697 - RNA, 19 nt, Artificial Sequence
  Description of Artificial Sequence: Synthetic oligonucleotide
ucuguuaacuuggagaagu

SEQ ID NO: 601698 - RNA, 19 nt, Artificial Sequence
  Description of Artificial Sequence: Synthetic oligonucleotide
aauucgacugguugggacu

SEQ ID NO: 601699 - RNA, 19 nt, Artificial Sequence
  Description of Artificial Sequence: Synthetic oligonucleotide
uucgcuagcagucaucggu

SEQ ID NO: 601700 - RNA, 19 nt, Artificial Sequence
  Description of Artificial Sequence: Synthetic oligonucleotide
uguacauuauucaccuucu

SEQ ID NO: 601701 - RNA, 19 nt, Artificial Sequence
  Description of Artificial Sequence: Synthetic oligonucleotide
aacaauguauguuguggga

SEQ ID NO: 601702 - RNA, 19 nt, Artificial Sequence
  Description of Artificial Sequence: Synthetic oligonucleotide
aaaacuaguuguugaagua

SEQ ID NO: 601703 - RNA, 19 nt, Artificial Sequence
  Description of Artificial Sequence: Synthetic oligonucleotide
auacuugaaauaugucagg

SEQ ID NO: 601704 - RNA, 19 nt, Artificial Sequence
  Description of Artificial Sequence: Synthetic oligonucleotide
uguugugggaguaucgaga

SEQ ID NO: 601705 - RNA, 19 nt, Artificial Sequence
  Description of Artificial Sequence: Synthetic oligonucleotide
ucucguuugugaaaugcgc

SEQ ID NO: 601706 - RNA, 19 nt, Artificial Sequence
  Description of Artificial Sequence: Synthetic oligonucleotide
uuagccuguucauacuccg

SEQ ID NO: 601707 - RNA, 19 nt, Artificial Sequence
  Description of Artificial Sequence: Synthetic oligonucleotide
ugugggaguaucgagaacu

SEQ ID NO: 601708 - RNA, 19 nt, Artificial Sequence
  Description of Artificial Sequence: Synthetic oligonucleotide
ugauacugcugcaaauaag

SEQ ID NO: 601709 - RNA, 19 nt, Artificial Sequence
  Description of Artificial Sequence: Synthetic oligonucleotide
aauaagcauuuugaaguag

SEQ ID NO: 601710 - RNA, 19 nt, Artificial Sequence
  Description of Artificial Sequence: Synthetic oligonucleotide
aaaaggguuccacccugac

SEQ ID NO: 601711 - RNA, 19 nt, Artificial Sequence
  Description of Artificial Sequence: Synthetic oligonucleotide
uguucauacuccgagucag

SEQ ID NO: 601712 - RNA, 19 nt, Artificial Sequence
  Description of Artificial Sequence: Synthetic oligonucleotide
guggucaacacagaugucg

SEQ ID NO: 601713 - RNA, 19 nt, Artificial Sequence
  Description of Artificial Sequence: Synthetic oligonucleotide
ucuguaaagggcacggcac

SEQ ID NO: 601714 - RNA, 19 nt, Artificial Sequence
  Description of Artificial Sequence: Synthetic oligonucleotide
agaguccaugagcaaaggc

SEQ ID NO: 601715 - RNA, 19 nt, Artificial Sequence
  Description of Artificial Sequence: Synthetic oligonucleotide
uccgguuauuuccucaaag

SEQ ID NO: 601716 - RNA, 19 nt, Artificial Sequence
  Description of Artificial Sequence: Synthetic oligonucleotide
aaagaccuggugauacugc

SEQ ID NO: 601717 - RNA, 19 nt, Artificial Sequence
  Description of Artificial Sequence: Synthetic oligonucleotide
uggaguaucuacuguuuag

SEQ ID NO: 601718 - RNA, 19 nt, Artificial Sequence
  Description of Artificial Sequence: Synthetic oligonucleotide
uuuagccuguucauacucc

SEQ ID NO: 601719 - RNA, 19 nt, Artificial Sequence
  Description of Artificial Sequence: Synthetic oligonucleotide
ugggucucccaccauaaag

SEQ ID NO: 601720 - RNA, 19 nt, Artificial Sequence
  Description of Artificial Sequence: Synthetic oligonucleotide
uugaaauaugucaggucug

SEQ ID NO: 601721 - RNA, 19 nt, Artificial Sequence
  Description of Artificial Sequence: Synthetic oligonucleotide
ugagcaaaggccugugacc

SEQ ID NO: 601722 - RNA, 19 nt, Artificial Sequence
  Description of Artificial Sequence: Synthetic oligonucleotide
ucgagaacuaucugggaug

SEQ ID NO: 601723 - RNA, 19 nt, Artificial Sequence
  Description of Artificial Sequence: Synthetic oligonucleotide
cugacucucaccaaaagga

SEQ ID NO: 601724 - RNA, 19 nt, Artificial Sequence
  Description of Artificial Sequence: Synthetic oligonucleotide
uaagcauuuugaaguagcu

SEQ ID NO: 601725 - RNA, 19 nt, Artificial Sequence
  Description of Artificial Sequence: Synthetic oligonucleotide
aaacaggaguuauugccga

SEQ ID NO: 601726 - RNA, 19 nt, Artificial Sequence
  Description of Artificial Sequence: Synthetic oligonucleotide
augguauuguggucaacac

SEQ ID NO: 601727 - RNA, 19 nt, Artificial Sequence
  Description of Artificial Sequence: Synthetic oligonucleotide
guacaguaaacaucccagg

SEQ ID NO: 601728 - RNA, 19 nt, Artificial Sequence
  Description of Artificial Sequence: Synthetic oligonucleotide
uuaucaaacaauguauguu

SEQ ID NO: 601729 - RNA, 19 nt, Artificial Sequence
  Description of Artificial Sequence: Synthetic oligonucleotide
ugaaaugcgcuacugccuc

SEQ ID NO: 601730 - RNA, 19 nt, Artificial Sequence
  Description of Artificial Sequence: Synthetic oligonucleotide
ucgaauuuaaaugcaaaua

SEQ ID NO: 601731 - RNA, 19 nt, Artificial Sequence
  Description of Artificial Sequence: Synthetic oligonucleotide
aagggcacggcaccgaagu

SEQ ID NO: 601732 - RNA, 19 nt, Artificial Sequence
  Description of Artificial Sequence: Synthetic oligonucleotide
acccugacauaucaggcgg

SEQ ID NO: 601733 - RNA, 19 nt, Artificial Sequence
  Description of Artificial Sequence: Synthetic oligonucleotide
cugcacuauggaaugaccc

SEQ ID NO: 601734 - RNA, 19 nt, Artificial Sequence
  Description of Artificial Sequence: Synthetic oligonucleotide
cagucaucgguucagggag

SEQ ID NO: 601735 - RNA, 19 nt, Artificial Sequence
  Description of Artificial Sequence: Synthetic oligonucleotide
aacuaaccuauuggcaccg

SEQ ID NO: 601736 - RNA, 19 nt, Artificial Sequence
  Description of Artificial Sequence: Synthetic oligonucleotide
uugauacugcugcaaauaa

SEQ ID NO: 601737 - RNA, 19 nt, Artificial Sequence
  Description of Artificial Sequence: Synthetic oligonucleotide
ggugucgucaucauuaaag

SEQ ID NO: 601738 - RNA, 19 nt, Artificial Sequence
  Description of Artificial Sequence: Synthetic oligonucleotide
gaugguauuguggucaaca

SEQ ID NO: 601739 - RNA, 19 nt, Artificial Sequence
  Description of Artificial Sequence: Synthetic oligonucleotide
aaacuaguuguugaaguau

SEQ ID NO: 601740 - RNA, 19 nt, Artificial Sequence
  Description of Artificial Sequence: Synthetic oligonucleotide
uuggagacugaacaauccu

SEQ ID NO: 601741 - RNA, 19 nt, Artificial Sequence
  Description of Artificial Sequence: Synthetic oligonucleotide
ugaaauaugucaggucuga

SEQ ID NO: 601742 - RNA, 19 nt, Artificial Sequence
  Description of Artificial Sequence: Synthetic oligonucleotide
gugacugauggccuucucg

SEQ ID NO: 601743 - RNA, 19 nt, Artificial Sequence
  Description of Artificial Sequence: Synthetic oligonucleotide
aguuauugccgaguccacc

SEQ ID NO: 601744 - RNA, 19 nt, Artificial Sequence
  Description of Artificial Sequence: Synthetic oligonucleotide
auucucaaugcgucugcac

SEQ ID NO: 601745 - RNA, 19 nt, Artificial Sequence
  Description of Artificial Sequence: Synthetic oligonucleotide
cagcaacuaaccuauuggc

SEQ ID NO: 601746 - RNA, 19 nt, Artificial Sequence
  Description of Artificial Sequence: Synthetic oligonucleotide
aaauggcugaaagggagug

SEQ ID NO: 601747 - RNA, 19 nt, Artificial Sequence
  Description of Artificial Sequence: Synthetic oligonucleotide
ugcgucugcacuauggaau

SEQ ID NO: 601748 - RNA, 19 nt, Artificial Sequence
  Description of Artificial Sequence: Synthetic oligonucleotide
aggaguuauugccgagucc

SEQ ID NO: 601749 - RNA, 19 nt, Artificial Sequence
  Description of Artificial Sequence: Synthetic oligonucleotide
auugugaugugggagguug

SEQ ID NO: 601750 - RNA, 19 nt, Artificial Sequence
  Description of Artificial Sequence: Synthetic oligonucleotide
uggucaacacagaugucgc

SEQ ID NO: 601751 - RNA, 19 nt, Artificial Sequence
  Description of Artificial Sequence: Synthetic oligonucleotide
uuggucgaauuuaaaugca

SEQ ID NO: 601752 - RNA, 19 nt, Artificial Sequence
  Description of Artificial Sequence: Synthetic oligonucleotide
gagaaggucgaacucucug

SEQ ID NO: 601753 - RNA, 19 nt, Artificial Sequence
  Description of Artificial Sequence: Synthetic oligonucleotide
uguaggaaacuagggcugg

SEQ ID NO: 601754 - RNA, 19 nt, Artificial Sequence
  Description of Artificial Sequence: Synthetic oligonucleotide
gccacgacaagucuggagg

SEQ ID NO: 601755 - RNA, 19 nt, Artificial Sequence
  Description of Artificial Sequence: Synthetic oligonucleotide
gagguaagauacucgggug

SEQ ID NO: 601756 - RNA, 19 nt, Artificial Sequence
  Description of Artificial Sequence: Synthetic oligonucleotide
agaaggucgaacucucugu

SEQ ID NO: 601757 - RNA, 19 nt, Artificial Sequence
  Description of Artificial Sequence: Synthetic oligonucleotide
uaauucgacugguugggac

SEQ ID NO: 601758 - RNA, 19 nt, Artificial Sequence
  Description of Artificial Sequence: Synthetic oligonucleotide
cuucuacucgcugaugugg

SEQ ID NO: 601759 - RNA, 19 nt, Artificial Sequence
  Description of Artificial Sequence: Synthetic oligonucleotide
aagggugcccuugugaaca

SEQ ID NO: 601760 - RNA, 19 nt, Artificial Sequence
  Description of Artificial Sequence: Synthetic oligonucleotide
uaucuacacuucugggccg

SEQ ID NO: 601761 - RNA, 19 nt, Artificial Sequence
  Description of Artificial Sequence: Synthetic oligonucleotide
uaaccuauuggcaccgaaa

SEQ ID NO: 601762 - RNA, 19 nt, Artificial Sequence
  Description of Artificial Sequence: Synthetic oligonucleotide
uuugugaaaugcgcuacug

SEQ ID NO: 601763 - RNA, 19 nt, Artificial Sequence
  Description of Artificial Sequence: Synthetic oligonucleotide
cuggcgagaagucaguuuc

SEQ ID NO: 601764 - RNA, 19 nt, Artificial Sequence
  Description of Artificial Sequence: Synthetic oligonucleotide
uauguugugggaguaucga

SEQ ID NO: 601765 - RNA, 19 nt, Artificial Sequence
  Description of Artificial Sequence: Synthetic oligonucleotide
uguuauucuggcuuucauu

SEQ ID NO: 601766 - RNA, 19 nt, Artificial Sequence
  Description of Artificial Sequence: Synthetic oligonucleotide
aucgagaacuaucugggau

SEQ ID NO: 601767 - RNA, 19 nt, Artificial Sequence
  Description of Artificial Sequence: Synthetic oligonucleotide
ugguguaacaaguucugua

SEQ ID NO: 601768 - RNA, 19 nt, Artificial Sequence
  Description of Artificial Sequence: Synthetic oligonucleotide
uucgagucggaaauuguua

SEQ ID NO: 601769 - RNA, 19 nt, Artificial Sequence
  Description of Artificial Sequence: Synthetic oligonucleotide
agguaagauacucggguga

SEQ ID NO: 601770 - RNA, 19 nt, Artificial Sequence
  Description of Artificial Sequence: Synthetic oligonucleotide
cacccugacauaucaggcg

SEQ ID NO: 601771 - RNA, 19 nt, Artificial Sequence
  Description of Artificial Sequence: Synthetic oligonucleotide
uccggaaaugucugcuggg

SEQ ID NO: 601772 - RNA, 19 nt, Artificial Sequence
  Description of Artificial Sequence: Synthetic oligonucleotide
cauacuccgagucagagcu

SEQ ID NO: 601773 - RNA, 19 nt, Artificial Sequence
  Description of Artificial Sequence: Synthetic oligonucleotide
uuuugaaacaggaguuauu

SEQ ID NO: 601774 - RNA, 19 nt, Artificial Sequence
  Description of Artificial Sequence: Synthetic oligonucleotide
ucgagucggaaauuguuaa

SEQ ID NO: 601775 - RNA, 19 nt, Artificial Sequence
  Description of Artificial Sequence: Synthetic oligonucleotide
uuuguacaguaaacauccc

SEQ ID NO: 601776 - RNA, 19 nt, Artificial Sequence
  Description of Artificial Sequence: Synthetic oligonucleotide
cucagcaacuaaccuauug

SEQ ID NO: 601777 - RNA, 19 nt, Artificial Sequence
  Description of Artificial Sequence: Synthetic oligonucleotide
uucuacucgcugaugugga

SEQ ID NO: 601778 - RNA, 19 nt, Artificial Sequence
  Description of Artificial Sequence: Synthetic oligonucleotide
gauguuggagacugaacaa

SEQ ID NO: 601779 - RNA, 19 nt, Artificial Sequence
  Description of Artificial Sequence: Synthetic oligonucleotide
ccuauuggcaccgaaagag

SEQ ID NO: 601780 - RNA, 19 nt, Artificial Sequence
  Description of Artificial Sequence: Synthetic oligonucleotide
acuagggcuggugagaacu

SEQ ID NO: 601781 - RNA, 19 nt, Artificial Sequence
  Description of Artificial Sequence: Synthetic oligonucleotide
ugacucucaccaaaaggaa

SEQ ID NO: 601782 - RNA, 19 nt, Artificial Sequence
  Description of Artificial Sequence: Synthetic oligonucleotide
gacucucaccaaaaggaag

SEQ ID NO: 601783 - RNA, 19 nt, Artificial Sequence
  Description of Artificial Sequence: Synthetic oligonucleotide
guuauucuggcuuucauuu

SEQ ID NO: 601784 - RNA, 19 nt, Artificial Sequence
  Description of Artificial Sequence: Synthetic oligonucleotide
acccgcaccgaacacauca

SEQ ID NO: 601785 - RNA, 19 nt, Artificial Sequence
  Description of Artificial Sequence: Synthetic oligonucleotide
auaugucaggucugagcuc

SEQ ID NO: 601786 - RNA, 19 nt, Artificial Sequence
  Description of Artificial Sequence: Synthetic oligonucleotide
uggucgaauuuaaaugcaa

SEQ ID NO: 601787 - RNA, 19 nt, Artificial Sequence
  Description of Artificial Sequence: Synthetic oligonucleotide
aacuaucugggauggugaa

SEQ ID NO: 601788 - RNA, 19 nt, Artificial Sequence
  Description of Artificial Sequence: Synthetic oligonucleotide
aguaaacaucccagggccc

SEQ ID NO: 601789 - RNA, 19 nt, Artificial Sequence
  Description of Artificial Sequence: Synthetic oligonucleotide
agcagucaucgguucaggg

SEQ ID NO: 601790 - RNA, 19 nt, Artificial Sequence
  Description of Artificial Sequence: Synthetic oligonucleotide
ggucuaauucgacugguug

SEQ ID NO: 601791 - RNA, 19 nt, Artificial Sequence
  Description of Artificial Sequence: Synthetic oligonucleotide
guuaggauauugugaugug

SEQ ID NO: 601792 - RNA, 19 nt, Artificial Sequence
  Description of Artificial Sequence: Synthetic oligonucleotide
aaaauggcugaaagggagu

SEQ ID NO: 601793 - RNA, 19 nt, Artificial Sequence
  Description of Artificial Sequence: Synthetic oligonucleotide
ucccauugcuuuuggacac

SEQ ID NO: 601794 - RNA, 19 nt, Artificial Sequence
  Description of Artificial Sequence: Synthetic oligonucleotide
uguugagacucacguggug

SEQ ID NO: 601795 - RNA, 19 nt, Artificial Sequence
  Description of Artificial Sequence: Synthetic oligonucleotide
uguauguugugggaguauc

SEQ ID NO: 601796 - RNA, 19 nt, Artificial Sequence
  Description of Artificial Sequence: Synthetic oligonucleotide
guauguugugggaguaucg

SEQ ID NO: 601797 - RNA, 19 nt, Artificial Sequence
  Description of Artificial Sequence: Synthetic oligonucleotide
uggagacugaacaauccuu

SEQ ID NO: 601798 - RNA, 19 nt, Artificial Sequence
  Description of Artificial Sequence: Synthetic oligonucleotide
gaaggucgaacucucuguc

SEQ ID NO: 601799 - RNA, 19 nt, Artificial Sequence
  Description of Artificial Sequence: Synthetic oligonucleotide
acucucaccaaaaggaaga

SEQ ID NO: 601800 - RNA, 19 nt, Artificial Sequence
  Description of Artificial Sequence: Synthetic oligonucleotide
ugugacccagguucucggg

SEQ ID NO: 601801 - RNA, 19 nt, Artificial Sequence
  Description of Artificial Sequence: Synthetic oligonucleotide
cacagaugucgcuuaggcc

SEQ ID NO: 601802 - RNA, 19 nt, Artificial Sequence
  Description of Artificial Sequence: Synthetic oligonucleotide
gaucugagaaggucgaacu

SEQ ID NO: 601803 - RNA, 19 nt, Artificial Sequence
  Description of Artificial Sequence: Synthetic oligonucleotide
cuguaaagggcacggcacc

SEQ ID NO: 601804 - RNA, 19 nt, Artificial Sequence
  Description of Artificial Sequence: Synthetic oligonucleotide
guuaacuuggagaaguugu

SEQ ID NO: 601805 - RNA, 19 nt, Artificial Sequence
  Description of Artificial Sequence: Synthetic oligonucleotide
uccgagcugagcuggaagu

SEQ ID NO: 601806 - RNA, 19 nt, Artificial Sequence
  Description of Artificial Sequence: Synthetic oligonucleotide
gaaauaugucaggucugag

SEQ ID NO: 601807 - RNA, 19 nt, Artificial Sequence
  Description of Artificial Sequence: Synthetic oligonucleotide
ggauauugugaugugggag

SEQ ID NO: 601808 - RNA, 19 nt, Artificial Sequence
  Description of Artificial Sequence: Synthetic oligonucleotide
ugucgcuuaggcccugaug

SEQ ID NO: 601809 - RNA, 19 nt, Artificial Sequence
  Description of Artificial Sequence: Synthetic oligonucleotide
uguugaagggugcccuugu

SEQ ID NO: 601810 - RNA, 19 nt, Artificial Sequence
  Description of Artificial Sequence: Synthetic oligonucleotide
acuucuacucgcugaugug

SEQ ID NO: 601811 - RNA, 19 nt, Artificial Sequence
  Description of Artificial Sequence: Synthetic oligonucleotide
auugauguuggagacugaa

SEQ ID NO: 601812 - RNA, 19 nt, Artificial Sequence
  Description of Artificial Sequence: Synthetic oligonucleotide
aggauauugugauguggga

SEQ ID NO: 601813 - RNA, 19 nt, Artificial Sequence
  Description of Artificial Sequence: Synthetic oligonucleotide
cauuaaaguccccguguug

SEQ ID NO: 601814 - RNA, 19 nt, Artificial Sequence
  Description of Artificial Sequence: Synthetic oligonucleotide
gauccacuaugguuccgag

SEQ ID NO: 601815 - RNA, 19 nt, Artificial Sequence
  Description of Artificial Sequence: Synthetic oligonucleotide
gauacucgggugaugccug

SEQ ID NO: 601816 - RNA, 19 nt, Artificial Sequence
  Description of Artificial Sequence: Synthetic oligonucleotide
ucguuugugaaaugcgcua

SEQ ID NO: 601817 - RNA, 19 nt, Artificial Sequence
  Description of Artificial Sequence: Synthetic oligonucleotide
ugguucaagcauaaaccuu

SEQ ID NO: 601818 - RNA, 19 nt, Artificial Sequence
  Description of Artificial Sequence: Synthetic oligonucleotide
ucucaaugcgucugcacua

SEQ ID NO: 601819 - RNA, 19 nt, Artificial Sequence
  Description of Artificial Sequence: Synthetic oligonucleotide
agugcaacgcugauguucu

SEQ ID NO: 601820 - RNA, 19 nt, Artificial Sequence
  Description of Artificial Sequence: Synthetic oligonucleotide
ccgguuauuuccucaaagg

SEQ ID NO: 601821 - RNA, 19 nt, Artificial Sequence
  Description of Artificial Sequence: Synthetic oligonucleotide
guccuguacauuauucacc

SEQ ID NO: 601822 - RNA, 19 nt, Artificial Sequence
  Description of Artificial Sequence: Synthetic oligonucleotide
aauguauguugugggagua

SEQ ID NO: 601823 - RNA, 19 nt, Artificial Sequence
  Description of Artificial Sequence: Synthetic oligonucleotide
ugaugaaguguaggaaacu

SEQ ID NO: 601824 - RNA, 19 nt, Artificial Sequence
  Description of Artificial Sequence: Synthetic oligonucleotide
auguugauacugcugcaaa

SEQ ID NO: 601825 - RNA, 19 nt, Artificial Sequence
  Description of Artificial Sequence: Synthetic oligonucleotide
ggaguuauugccgagucca

SEQ ID NO: 601826 - RNA, 19 nt, Artificial Sequence
  Description of Artificial Sequence: Synthetic oligonucleotide
aacgggcgcgugucaggcc

SEQ ID NO: 601827 - RNA, 19 nt, Artificial Sequence
  Description of Artificial Sequence: Synthetic oligonucleotide
ugguuccgagcugagcugg

SEQ ID NO: 601828 - RNA, 19 nt, Artificial Sequence
  Description of Artificial Sequence: Synthetic oligonucleotide
gagucggaaauuguuaaaa

SEQ ID NO: 601829 - RNA, 19 nt, Artificial Sequence
  Description of Artificial Sequence: Synthetic oligonucleotide
cauaaagguugaucauuuc

SEQ ID NO: 601830 - RNA, 19 nt, Artificial Sequence
  Description of Artificial Sequence: Synthetic oligonucleotide
cuagcagucaucgguucag

SEQ ID NO: 601831 - RNA, 19 nt, Artificial Sequence
  Description of Artificial Sequence: Synthetic oligonucleotide
ugccacgacaagucuggag

SEQ ID NO: 601832 - RNA, 19 nt, Artificial Sequence
  Description of Artificial Sequence: Synthetic oligonucleotide
ucgaacucucuguccagca

SEQ ID NO: 601833 - RNA, 19 nt, Artificial Sequence
  Description of Artificial Sequence: Synthetic oligonucleotide
ucgcuuaggcccugauggg

SEQ ID NO: 601834 - RNA, 19 nt, Artificial Sequence
  Description of Artificial Sequence: Synthetic oligonucleotide
guugugggaguaucgagaa

SEQ ID NO: 601835 - RNA, 19 nt, Artificial Sequence
  Description of Artificial Sequence: Synthetic oligonucleotide
agucuggaggauggaaagg

SEQ ID NO: 601836 - RNA, 19 nt, Artificial Sequence
  Description of Artificial Sequence: Synthetic oligonucleotide
cuuugugcgccucuggcga

SEQ ID NO: 601837 - RNA, 19 nt, Artificial Sequence
  Description of Artificial Sequence: Synthetic oligonucleotide
gguugaucauuuccggggc

SEQ ID NO: 601838 - RNA, 19 nt, Artificial Sequence
  Description of Artificial Sequence: Synthetic oligonucleotide
uucaagcauaaaccuuauc

SEQ ID NO: 601839 - RNA, 19 nt, Artificial Sequence
  Description of Artificial Sequence: Synthetic oligonucleotide
cacgugguguaacaaguuc

SEQ ID NO: 601840 - RNA, 19 nt, Artificial Sequence
  Description of Artificial Sequence: Synthetic oligonucleotide
gaaaugcgcuacugccucc

SEQ ID NO: 601841 - RNA, 19 nt, Artificial Sequence
  Description of Artificial Sequence: Synthetic oligonucleotide
uaaagggcacggcaccgaa

SEQ ID NO: 601842 - RNA, 19 nt, Artificial Sequence
  Description of Artificial Sequence: Synthetic oligonucleotide
accauaaagguugaucauu

SEQ ID NO: 601843 - RNA, 19 nt, Artificial Sequence
  Description of Artificial Sequence: Synthetic oligonucleotide
cucgcugauguggaaaaug

SEQ ID NO: 601844 - RNA, 19 nt, Artificial Sequence
  Description of Artificial Sequence: Synthetic oligonucleotide
ggugccacgacaagucugg

SEQ ID NO: 601845 - RNA, 19 nt, Artificial Sequence
  Description of Artificial Sequence: Synthetic oligonucleotide
accuauuggcaccgaaaga

SEQ ID NO: 601846 - RNA, 19 nt, Artificial Sequence
  Description of Artificial Sequence: Synthetic oligonucleotide
gauagacugaaugcauuaa

SEQ ID NO: 601847 - RNA, 19 nt, Artificial Sequence
  Description of Artificial Sequence: Synthetic oligonucleotide
guaugacagagucguguac

SEQ ID NO: 601848 - RNA, 19 nt, Artificial Sequence
  Description of Artificial Sequence: Synthetic oligonucleotide
acuaucugggauggugaag

SEQ ID NO: 601849 - RNA, 19 nt, Artificial Sequence
  Description of Artificial Sequence: Synthetic oligonucleotide
acgugguguaacaaguucu

SEQ ID NO: 601850 - RNA, 19 nt, Artificial Sequence
  Description of Artificial Sequence: Synthetic oligonucleotide
auauugugaugugggaggu

SEQ ID NO: 601851 - RNA, 19 nt, Artificial Sequence
  Description of Artificial Sequence: Synthetic oligonucleotide
gucgaauuuaaaugcaaau

SEQ ID NO: 601852 - RNA, 19 nt, Artificial Sequence
  Description of Artificial Sequence: Synthetic oligonucleotide
cacuauggaaugacccgug

SEQ ID NO: 601853 - RNA, 19 nt, Artificial Sequence
  Description of Artificial Sequence: Synthetic oligonucleotide
cuguggagcuugcaccgcg

SEQ ID NO: 601854 - RNA, 19 nt, Artificial Sequence
  Description of Artificial Sequence: Synthetic oligonucleotide
uugagacucacguggugua

SEQ ID NO: 601855 - RNA, 19 nt, Artificial Sequence
  Description of Artificial Sequence: Synthetic oligonucleotide
gcuucgcuagcagucaucg

SEQ ID NO: 601856 - RNA, 19 nt, Artificial Sequence
  Description of Artificial Sequence: Synthetic oligonucleotide
caggaguuauugccgaguc

SEQ ID NO: 601857 - RNA, 19 nt, Artificial Sequence
  Description of Artificial Sequence: Synthetic oligonucleotide
gaagggugcccuugugaac

SEQ ID NO: 601858 - RNA, 19 nt, Artificial Sequence
  Description of Artificial Sequence: Synthetic oligonucleotide
uuugugcgccucuggcgag

SEQ ID NO: 601859 - RNA, 19 nt, Artificial Sequence
  Description of Artificial Sequence: Synthetic oligonucleotide
ugaugggacuggugccacg

SEQ ID NO: 601860 - RNA, 19 nt, Artificial Sequence
  Description of Artificial Sequence: Synthetic oligonucleotide
ucaaugcgucugcacuaug

SEQ ID NO: 601861 - RNA, 19 nt, Artificial Sequence
  Description of Artificial Sequence: Synthetic oligonucleotide
uguggagcuugcaccgcga

SEQ ID NO: 601862 - RNA, 19 nt, Artificial Sequence
  Description of Artificial Sequence: Synthetic oligonucleotide
aagcugcgcuguuugacuu

SEQ ID NO: 601863 - RNA, 19 nt, Artificial Sequence
  Description of Artificial Sequence: Synthetic oligonucleotide
guugaucugagaaggucga

SEQ ID NO: 601864 - RNA, 19 nt, Artificial Sequence
  Description of Artificial Sequence: Synthetic oligonucleotide
auucgacugguugggacug

SEQ ID NO: 601865 - RNA, 19 nt, Artificial Sequence
  Description of Artificial Sequence: Synthetic oligonucleotide
gguucaagcauaaaccuua

SEQ ID NO: 601866 - RNA, 19 nt, Artificial Sequence
  Description of Artificial Sequence: Synthetic oligonucleotide
agcgcaucagcuuggcuuu

SEQ ID NO: 601867 - RNA, 19 nt, Artificial Sequence
  Description of Artificial Sequence: Synthetic oligonucleotide
ccguguugaucugagaagg

SEQ ID NO: 601868 - RNA, 19 nt, Artificial Sequence
  Description of Artificial Sequence: Synthetic oligonucleotide
auaucaggcgggugacuga

SEQ ID NO: 601869 - RNA, 19 nt, Artificial Sequence
  Description of Artificial Sequence: Synthetic oligonucleotide
uaaaguccccguguugauc

SEQ ID NO: 601870 - RNA, 19 nt, Artificial Sequence
  Description of Artificial Sequence: Synthetic oligonucleotide
uagcagucaucgguucagg

SEQ ID NO: 601871 - RNA, 19 nt, Artificial Sequence
  Description of Artificial Sequence: Synthetic oligonucleotide
auacugcugcaaauaagca

SEQ ID NO: 601872 - RNA, 19 nt, Artificial Sequence
  Description of Artificial Sequence: Synthetic oligonucleotide
gaugggacuggugccacga

SEQ ID NO: 601873 - RNA, 19 nt, Artificial Sequence
  Description of Artificial Sequence: Synthetic oligonucleotide
augacccgugcacugaauu

SEQ ID NO: 601874 - RNA, 19 nt, Artificial Sequence
  Description of Artificial Sequence: Synthetic oligonucleotide
ggcaccgaaagagggaucc

SEQ ID NO: 601875 - RNA, 19 nt, Artificial Sequence
  Description of Artificial Sequence: Synthetic oligonucleotide
cuucgcuagcagucaucgg

SEQ ID NO: 601876 - RNA, 19 nt, Artificial Sequence
  Description of Artificial Sequence: Synthetic oligonucleotide
ucgcuagcagucaucgguu

SEQ ID NO: 601877 - RNA, 19 nt, Artificial Sequence
  Description of Artificial Sequence: Synthetic oligonucleotide
aaagggcacggcaccgaag

SEQ ID NO: 601878 - RNA, 19 nt, Artificial Sequence
  Description of Artificial Sequence: Synthetic oligonucleotide
gugucgucaucauuaaagu

SEQ ID NO: 601879 - RNA, 19 nt, Artificial Sequence
  Description of Artificial Sequence: Synthetic oligonucleotide
ugggucuaauucgacuggu

SEQ ID NO: 601880 - RNA, 19 nt, Artificial Sequence
  Description of Artificial Sequence: Synthetic oligonucleotide
uuaggcccugaugggacug

SEQ ID NO: 601881 - RNA, 19 nt, Artificial Sequence
  Description of Artificial Sequence: Synthetic oligonucleotide
uagcugcugcugcugcugc

SEQ ID NO: 601882 - RNA, 19 nt, Artificial Sequence
  Description of Artificial Sequence: Synthetic oligonucleotide
ucuacucgcugauguggaa

SEQ ID NO: 601883 - RNA, 19 nt, Artificial Sequence
  Description of Artificial Sequence: Synthetic oligonucleotide
uggcgagaagucaguuucu

SEQ ID NO: 601884 - RNA, 19 nt, Artificial Sequence
  Description of Artificial Sequence: Synthetic oligonucleotide
auuggcaccgaaagaggga

SEQ ID NO: 601885 - RNA, 19 nt, Artificial Sequence
  Description of Artificial Sequence: Synthetic oligonucleotide
uaucaggcgggugacugau

SEQ ID NO: 601886 - RNA, 19 nt, Artificial Sequence
  Description of Artificial Sequence: Synthetic oligonucleotide
uuauugccgaguccaccuu

SEQ ID NO: 601887 - RNA, 19 nt, Artificial Sequence
  Description of Artificial Sequence: Synthetic oligonucleotide
cuaugguuccgagcugagc

SEQ ID NO: 601888 - RNA, 19 nt, Artificial Sequence
  Description of Artificial Sequence: Synthetic oligonucleotide
augcgucugcacuauggaa

SEQ ID NO: 601889 - RNA, 19 nt, Artificial Sequence
  Description of Artificial Sequence: Synthetic oligonucleotide
uuccgguuauuuccucaaa

SEQ ID NO: 601890 - RNA, 19 nt, Artificial Sequence
  Description of Artificial Sequence: Synthetic oligonucleotide
ggccucccaggcaagaugg

SEQ ID NO: 601891 - RNA, 19 nt, Artificial Sequence
  Description of Artificial Sequence: Synthetic oligonucleotide
guaagauacucgggugaug

SEQ ID NO: 601892 - RNA, 19 nt, Artificial Sequence
  Description of Artificial Sequence: Synthetic oligonucleotide
ucggugucgucaucauuaa

SEQ ID NO: 601893 - RNA, 19 nt, Artificial Sequence
  Description of Artificial Sequence: Synthetic oligonucleotide
agggugcccuugugaacac

SEQ ID NO: 601894 - RNA, 19 nt, Artificial Sequence
  Description of Artificial Sequence: Synthetic oligonucleotide
ccacccugacauaucaggc

SEQ ID NO: 601895 - RNA, 19 nt, Artificial Sequence
  Description of Artificial Sequence: Synthetic oligonucleotide
cucguuugugaaaugcgcu

SEQ ID NO: 601896 - RNA, 19 nt, Artificial Sequence
  Description of Artificial Sequence: Synthetic oligonucleotide
gaagggacccgcaccgaac

SEQ ID NO: 601897 - RNA, 19 nt, Artificial Sequence
  Description of Artificial Sequence: Synthetic oligonucleotide
gucaucgguucagggagag

SEQ ID NO: 601898 - RNA, 19 nt, Artificial Sequence
  Description of Artificial Sequence: Synthetic oligonucleotide
guugagacucacguggugu

SEQ ID NO: 601899 - RNA, 19 nt, Artificial Sequence
  Description of Artificial Sequence: Synthetic oligonucleotide
accgcgaagaagggacccg

SEQ ID NO: 601900 - RNA, 19 nt, Artificial Sequence
  Description of Artificial Sequence: Synthetic oligonucleotide
cacuucuacucgcugaugu

SEQ ID NO: 601901 - RNA, 19 nt, Artificial Sequence
  Description of Artificial Sequence: Synthetic oligonucleotide
cuagggcuggugagaacuc

SEQ ID NO: 601902 - RNA, 19 nt, Artificial Sequence
  Description of Artificial Sequence: Synthetic oligonucleotide
cccguguugaucugagaag

SEQ ID NO: 601903 - RNA, 19 nt, Artificial Sequence
  Description of Artificial Sequence: Synthetic oligonucleotide
uuccuagcagcagcuucgc

SEQ ID NO: 601904 - RNA, 19 nt, Artificial Sequence
  Description of Artificial Sequence: Synthetic oligonucleotide
gcgucugcacuauggaaug

SEQ ID NO: 601905 - RNA, 19 nt, Artificial Sequence
  Description of Artificial Sequence: Synthetic oligonucleotide
agucagcgcaucagcuugg

SEQ ID NO: 601906 - RNA, 19 nt, Artificial Sequence
  Description of Artificial Sequence: Synthetic oligonucleotide
gcaagaaagaccuggugau

SEQ ID NO: 601907 - RNA, 19 nt, Artificial Sequence
  Description of Artificial Sequence: Synthetic oligonucleotide
cuaaccuauuggcaccgaa

SEQ ID NO: 601908 - RNA, 19 nt, Artificial Sequence
  Description of Artificial Sequence: Synthetic oligonucleotide
caacgggcgcgugucaggc

SEQ ID NO: 601909 - RNA, 19 nt, Artificial Sequence
  Description of Artificial Sequence: Synthetic oligonucleotide
gaguuauugccgaguccac

SEQ ID NO: 601910 - RNA, 19 nt, Artificial Sequence
  Description of Artificial Sequence: Synthetic oligonucleotide
uagggcuggugagaacucu

SEQ ID NO: 601911 - RNA, 19 nt, Artificial Sequence
  Description of Artificial Sequence: Synthetic oligonucleotide
ugccgcauugcauguugau

SEQ ID NO: 601912 - RNA, 19 nt, Artificial Sequence
  Description of Artificial Sequence: Synthetic oligonucleotide
ugagucucugcggcccacc

SEQ ID NO: 601913 - RNA, 19 nt, Artificial Sequence
  Description of Artificial Sequence: Synthetic oligonucleotide
acuaugguuccgagcugag

SEQ ID NO: 601914 - RNA, 19 nt, Artificial Sequence
  Description of Artificial Sequence: Synthetic oligonucleotide
gcugccgcauugcauguug

SEQ ID NO: 601915 - RNA, 19 nt, Artificial Sequence
  Description of Artificial Sequence: Synthetic oligonucleotide
agcuucgcuagcagucauc

SEQ ID NO: 601916 - RNA, 19 nt, Artificial Sequence
  Description of Artificial Sequence: Synthetic oligonucleotide
cugacauaucaggcgggug

SEQ ID NO: 601917 - RNA, 19 nt, Artificial Sequence
  Description of Artificial Sequence: Synthetic oligonucleotide
gacuuccgguuauuuccuc

SEQ ID NO: 601918 - RNA, 19 nt, Artificial Sequence
  Description of Artificial Sequence: Synthetic oligonucleotide
uccuagcagcagcuucgcu

SEQ ID NO: 601919 - RNA, 19 nt, Artificial Sequence
  Description of Artificial Sequence: Synthetic oligonucleotide
aucuacacuucugggccgu

SEQ ID NO: 601920 - RNA, 19 nt, Artificial Sequence
  Description of Artificial Sequence: Synthetic oligonucleotide
uugaucugagaaggucgaa

SEQ ID NO: 601921 - RNA, 19 nt, Artificial Sequence
  Description of Artificial Sequence: Synthetic oligonucleotide
gacccgugcacugaauucu

SEQ ID NO: 601922 - RNA, 19 nt, Artificial Sequence
  Description of Artificial Sequence: Synthetic oligonucleotide
gcucuguaugacagagucg

SEQ ID NO: 601923 - RNA, 19 nt, Artificial Sequence
  Description of Artificial Sequence: Synthetic oligonucleotide
ggucgaauuuaaaugcaaa

SEQ ID NO: 601924 - RNA, 19 nt, Artificial Sequence
  Description of Artificial Sequence: Synthetic oligonucleotide
gagggaagagaagaauuau

SEQ ID NO: 601925 - RNA, 19 nt, Artificial Sequence
  Description of Artificial Sequence: Synthetic oligonucleotide
aaugcgcuacugccuccuu

SEQ ID NO: 601926 - RNA, 19 nt, Artificial Sequence
  Description of Artificial Sequence: Synthetic oligonucleotide
ggucgaacucucuguccag

SEQ ID NO: 601927 - RNA, 19 nt, Artificial Sequence
  Description of Artificial Sequence: Synthetic oligonucleotide
aaugacccgugcacugaau

SEQ ID NO: 601928 - RNA, 19 nt, Artificial Sequence
  Description of Artificial Sequence: Synthetic oligonucleotide
caccgcgaagaagggaccc

SEQ ID NO: 601929 - RNA, 19 nt, Artificial Sequence
  Description of Artificial Sequence: Synthetic oligonucleotide
gggccgugcaggcaacggg

SEQ ID NO: 601930 - RNA, 19 nt, Artificial Sequence
  Description of Artificial Sequence: Synthetic oligonucleotide
ugcuguuauucuggcuuuc

SEQ ID NO: 601931 - RNA, 19 nt, Artificial Sequence
  Description of Artificial Sequence: Synthetic oligonucleotide
cgagaacuaucugggaugg

SEQ ID NO: 601932 - RNA, 19 nt, Artificial Sequence
  Description of Artificial Sequence: Synthetic oligonucleotide
uugcaccgcgaagaaggga

SEQ ID NO: 601933 - RNA, 19 nt, Artificial Sequence
  Description of Artificial Sequence: Synthetic oligonucleotide
acggcaccgaagucaucca

SEQ ID NO: 601934 - RNA, 19 nt, Artificial Sequence
  Description of Artificial Sequence: Synthetic oligonucleotide
caagcugcgcuguuugacu

SEQ ID NO: 601935 - RNA, 19 nt, Artificial Sequence
  Description of Artificial Sequence: Synthetic oligonucleotide
gugaaaugcgcuacugccu

SEQ ID NO: 601936 - RNA, 19 nt, Artificial Sequence
  Description of Artificial Sequence: Synthetic oligonucleotide
guaaagggcacggcaccga

SEQ ID NO: 601937 - RNA, 19 nt, Artificial Sequence
  Description of Artificial Sequence: Synthetic oligonucleotide
agcaccaaaugggucuaau

SEQ ID NO: 601938 - RNA, 19 nt, Artificial Sequence
  Description of Artificial Sequence: Synthetic oligonucleotide
ccggggcucuguaugacag

SEQ ID NO: 601939 - RNA, 19 nt, Artificial Sequence
  Description of Artificial Sequence: Synthetic oligonucleotide
ggcgagaagucaguuucug

SEQ ID NO: 601940 - RNA, 19 nt, Artificial Sequence
  Description of Artificial Sequence: Synthetic oligonucleotide
gcaacgggcgcgugucagg

SEQ ID NO: 601941 - RNA, 19 nt, Artificial Sequence
  Description of Artificial Sequence: Synthetic oligonucleotide
gacuggugccacgacaagu

SEQ ID NO: 601942 - RNA, 19 nt, Artificial Sequence
  Description of Artificial Sequence: Synthetic oligonucleotide
ucuacacuucugggccgug

SEQ ID NO: 601943 - RNA, 19 nt, Artificial Sequence
  Description of Artificial Sequence: Synthetic oligonucleotide
caggcaacgggcgcguguc

SEQ ID NO: 601944 - RNA, 19 nt, Artificial Sequence
  Description of Artificial Sequence: Synthetic oligonucleotide
caucgguucagggagaguu

SEQ ID NO: 601945 - RNA, 19 nt, Artificial Sequence
  Description of Artificial Sequence: Synthetic oligonucleotide
guccccguguugaucugag

SEQ ID NO: 601946 - RNA, 19 nt, Artificial Sequence
  Description of Artificial Sequence: Synthetic oligonucleotide
gcuagcagucaucgguuca

SEQ ID NO: 601947 - RNA, 19 nt, Artificial Sequence
  Description of Artificial Sequence: Synthetic oligonucleotide
uggcaccgaaagagggauc

SEQ ID NO: 601948 - RNA, 19 nt, Artificial Sequence
  Description of Artificial Sequence: Synthetic oligonucleotide
uccccguguugaucugaga

SEQ ID NO: 601949 - RNA, 19 nt, Artificial Sequence
  Description of Artificial Sequence: Synthetic oligonucleotide
ugguggcgcuucccauugc

SEQ ID NO: 601950 - RNA, 19 nt, Artificial Sequence
  Description of Artificial Sequence: Synthetic oligonucleotide
cuaauucgacugguuggga

SEQ ID NO: 601951 - RNA, 19 nt, Artificial Sequence
  Description of Artificial Sequence: Synthetic oligonucleotide
gugcacugaauucugucuu

SEQ ID NO: 601952 - RNA, 19 nt, Artificial Sequence
  Description of Artificial Sequence: Synthetic oligonucleotide
agcugcugcugcugcugcu

SEQ ID NO: 601953 - RNA, 19 nt, Artificial Sequence
  Description of Artificial Sequence: Synthetic oligonucleotide
ucucagcaacuaaccuauu

SEQ ID NO: 601954 - RNA, 19 nt, Artificial Sequence
  Description of Artificial Sequence: Synthetic oligonucleotide
cccugacauaucaggcggg

SEQ ID NO: 601955 - RNA, 19 nt, Artificial Sequence
  Description of Artificial Sequence: Synthetic oligonucleotide
ucaucgguucagggagagu

SEQ ID NO: 601956 - RNA, 19 nt, Artificial Sequence
  Description of Artificial Sequence: Synthetic oligonucleotide
uugugcgccucuggcgaga

SEQ ID NO: 601957 - RNA, 19 nt, Artificial Sequence
  Description of Artificial Sequence: Synthetic oligonucleotide
acuaaccuauuggcaccga

SEQ ID NO: 601958 - RNA, 19 nt, Artificial Sequence
  Description of Artificial Sequence: Synthetic oligonucleotide
agucaucgguucagggaga

SEQ ID NO: 601959 - RNA, 19 nt, Artificial Sequence
  Description of Artificial Sequence: Synthetic oligonucleotide
agcugcgcuguuugacuuu

SEQ ID NO: 601960 - RNA, 19 nt, Artificial Sequence
  Description of Artificial Sequence: Synthetic oligonucleotide
acccgugcacugaauucug

SEQ ID NO: 601961 - RNA, 19 nt, Artificial Sequence
  Description of Artificial Sequence: Synthetic oligonucleotide
cguuugugaaaugcgcuac

SEQ ID NO: 601962 - RNA, 19 nt, Artificial Sequence
  Description of Artificial Sequence: Synthetic oligonucleotide
ccgugcacugaauucuguc

SEQ ID NO: 601963 - RNA, 19 nt, Artificial Sequence
  Description of Artificial Sequence: Synthetic oligonucleotide
augucgcuuaggcccugau

SEQ ID NO: 601964 - RNA, 19 nt, Artificial Sequence
  Description of Artificial Sequence: Synthetic oligonucleotide
caccauaaagguugaucau

SEQ ID NO: 601965 - RNA, 19 nt, Artificial Sequence
  Description of Artificial Sequence: Synthetic oligonucleotide
ggcaacgggcgcgugucag

SEQ ID NO: 601966 - RNA, 19 nt, Artificial Sequence
  Description of Artificial Sequence: Synthetic oligonucleotide
uucgacugguugggacugu

SEQ ID NO: 601967 - RNA, 19 nt, Artificial Sequence
  Description of Artificial Sequence: Synthetic oligonucleotide
gaugucgcuuaggcccuga

SEQ ID NO: 601968 - RNA, 19 nt, Artificial Sequence
  Description of Artificial Sequence: Synthetic oligonucleotide
ccccguguugaucugagaa

SEQ ID NO: 601969 - RNA, 19 nt, Artificial Sequence
  Description of Artificial Sequence: Synthetic oligonucleotide
ucgacugguugggacuguu

SEQ ID NO: 601970 - RNA, 19 nt, Artificial Sequence
  Description of Artificial Sequence: Synthetic oligonucleotide
gcugcugcugcugcugcug

SEQ ID NO: 601971 - RNA, 19 nt, Artificial Sequence
  Description of Artificial Sequence: Synthetic oligonucleotide
auacuccgagucagagcug

SEQ ID NO: 601972 - RNA, 19 nt, Artificial Sequence
  Description of Artificial Sequence: Synthetic oligonucleotide
cugccgcauugcauguuga

SEQ ID NO: 601973 - RNA, 19 nt, Artificial Sequence
  Description of Artificial Sequence: Synthetic oligonucleotide
cagaugucgcuuaggcccu

SEQ ID NO: 601974 - RNA, 19 nt, Artificial Sequence
  Description of Artificial Sequence: Synthetic oligonucleotide
ccauaaagguugaucauuu

SEQ ID NO: 601975 - RNA, 19 nt, Artificial Sequence
  Description of Artificial Sequence: Synthetic oligonucleotide
guggagcuugcaccgcgaa

SEQ ID NO: 601976 - RNA, 19 nt, Artificial Sequence
  Description of Artificial Sequence: Synthetic oligonucleotide
guacauuauucaccuucuu

SEQ ID NO: 601977 - RNA, 19 nt, Artificial Sequence
  Description of Artificial Sequence: Synthetic oligonucleotide
cuuaggcccugaugggacu

SEQ ID NO: 601978 - RNA, 19 nt, Artificial Sequence
  Description of Artificial Sequence: Synthetic oligonucleotide
ugcugcugcugcugcuguu

SEQ ID NO: 601979 - RNA, 19 nt, Artificial Sequence
  Description of Artificial Sequence: Synthetic oligonucleotide
gguaagauacucgggugau

SEQ ID NO: 601980 - RNA, 19 nt, Artificial Sequence
  Description of Artificial Sequence: Synthetic oligonucleotide
cgugcaggcaacgggcgcg

SEQ ID NO: 601981 - RNA, 19 nt, Artificial Sequence
  Description of Artificial Sequence: Synthetic oligonucleotide
gugggaguaucgagaacua

SEQ ID NO: 601982 - RNA, 19 nt, Artificial Sequence
  Description of Artificial Sequence: Synthetic oligonucleotide
ggugcgguagggaggcuuc

SEQ ID NO: 601983 - RNA, 19 nt, Artificial Sequence
  Description of Artificial Sequence: Synthetic oligonucleotide
agggcuggugagaacucuu

SEQ ID NO: 601984 - RNA, 19 nt, Artificial Sequence
  Description of Artificial Sequence: Synthetic oligonucleotide
agaugucgcuuaggcccug

SEQ ID NO: 601985 - RNA, 19 nt, Artificial Sequence
  Description of Artificial Sequence: Synthetic oligonucleotide
ccgaaagagggauccacua

SEQ ID NO: 601986 - RNA, 19 nt, Artificial Sequence
  Description of Artificial Sequence: Synthetic oligonucleotide
agacucuccucggguugca

SEQ ID NO: 601987 - RNA, 19 nt, Artificial Sequence
  Description of Artificial Sequence: Synthetic oligonucleotide
gcacuauggaaugacccgu

SEQ ID NO: 601988 - RNA, 19 nt, Artificial Sequence
  Description of Artificial Sequence: Synthetic oligonucleotide
gcaaccugacucucaccaa

SEQ ID NO: 601989 - RNA, 19 nt, Artificial Sequence
  Description of Artificial Sequence: Synthetic oligonucleotide
ccacgacaagucuggagga

SEQ ID NO: 601990 - RNA, 19 nt, Artificial Sequence
  Description of Artificial Sequence: Synthetic oligonucleotide
gguggcgcuucccauugcu

SEQ ID NO: 601991 - RNA, 19 nt, Artificial Sequence
  Description of Artificial Sequence: Synthetic oligonucleotide
gugauacugcugcaucauu

SEQ ID NO: 601992 - RNA, 19 nt, Artificial Sequence
  Description of Artificial Sequence: Synthetic oligonucleotide
ggucaacacagaugucgcu

SEQ ID NO: 601993 - RNA, 19 nt, Artificial Sequence
  Description of Artificial Sequence: Synthetic oligonucleotide
ggugauacugcugcaucau

SEQ ID NO: 601994 - RNA, 19 nt, Artificial Sequence
  Description of Artificial Sequence: Synthetic oligonucleotide
ggccuucucguuugugaaa

SEQ ID NO: 601995 - RNA, 19 nt, Artificial Sequence
  Description of Artificial Sequence: Synthetic oligonucleotide
gggacccgcaccgaacaca

SEQ ID NO: 601996 - RNA, 19 nt, Artificial Sequence
  Description of Artificial Sequence: Synthetic oligonucleotide
ugcaggcaacgggcgcgug

SEQ ID NO: 601997 - RNA, 19 nt, Artificial Sequence
  Description of Artificial Sequence: Synthetic oligonucleotide
ccgcgaagaagggacccgc

SEQ ID NO: 601998 - RNA, 19 nt, Artificial Sequence
  Description of Artificial Sequence: Synthetic oligonucleotide
cucaaugcgucugcacuau

SEQ ID NO: 601999 - RNA, 19 nt, Artificial Sequence
  Description of Artificial Sequence: Synthetic oligonucleotide
ucccaccauaaagguugau

SEQ ID NO: 602000 - RNA, 19 nt, Artificial Sequence
  Description of Artificial Sequence: Synthetic oligonucleotide
cgugcacugaauucugucu

SEQ ID NO: 602001 - RNA, 19 nt, Artificial Sequence
  Description of Artificial Sequence: Synthetic oligonucleotide
gcaccgcgaagaagggacc

SEQ ID NO: 602002 - RNA, 19 nt, Artificial Sequence
  Description of Artificial Sequence: Synthetic oligonucleotide
gugcaacgcugauguucuc

SEQ ID NO: 602003 - RNA, 19 nt, Artificial Sequence
  Description of Artificial Sequence: Synthetic oligonucleotide
gccgcauugcauguugaua

SEQ ID NO: 602004 - RNA, 19 nt, Artificial Sequence
  Description of Artificial Sequence: Synthetic oligonucleotide
gccuguucauacuccgagu

SEQ ID NO: 602005 - RNA, 19 nt, Artificial Sequence
  Description of Artificial Sequence: Synthetic oligonucleotide
gcaccaaaugggucuaauu

SEQ ID NO: 602006 - RNA, 19 nt, Artificial Sequence
  Description of Artificial Sequence: Synthetic oligonucleotide
gccuucucguuugugaaau

SEQ ID NO: 602007 - RNA, 19 nt, Artificial Sequence
  Description of Artificial Sequence: Synthetic oligonucleotide
gagaacuaucugggauggu

SEQ ID NO: 602008 - RNA, 19 nt, Artificial Sequence
  Description of Artificial Sequence: Synthetic oligonucleotide
caccgaagucauccauucu

SEQ ID NO: 602009 - RNA, 19 nt, Artificial Sequence
  Description of Artificial Sequence: Synthetic oligonucleotide
cgagucggaaauuguuaaa

SEQ ID NO: 602010 - RNA, 19 nt, Artificial Sequence
  Description of Artificial Sequence: Synthetic oligonucleotide
ccgaguccaccuuggagua

SEQ ID NO: 602011 - RNA, 19 nt, Artificial Sequence
  Description of Artificial Sequence: Synthetic oligonucleotide
cgcuagcagucaucgguuc

SEQ ID NO: 602012 - RNA, 19 nt, Artificial Sequence
  Description of Artificial Sequence: Synthetic oligonucleotide
cugcugccgcauugcaugu

SEQ ID NO: 602013 - RNA, 19 nt, Artificial Sequence
  Description of Artificial Sequence: Synthetic oligonucleotide
cacgacaagucuggaggau

SEQ ID NO: 602014 - RNA, 19 nt, Artificial Sequence
  Description of Artificial Sequence: Synthetic oligonucleotide
gugccacgacaagucugga

SEQ ID NO: 602015 - RNA, 19 nt, Artificial Sequence
  Description of Artificial Sequence: Synthetic oligonucleotide
gacccgcaccgaacacauc

SEQ ID NO: 602016 - RNA, 19 nt, Artificial Sequence
  Description of Artificial Sequence: Synthetic oligonucleotide
gcaggcaacgggcgcgugu

SEQ ID NO: 602017 - RNA, 19 nt, Artificial Sequence
  Description of Artificial Sequence: Synthetic oligonucleotide
cugcugcugcugcugcugu

SEQ ID NO: 602018 - RNA, 19 nt, Artificial Sequence
  Description of Artificial Sequence: Synthetic oligonucleotide
ggacccgcaccgaacacau

SEQ ID NO: 602019 - RNA, 19 nt, Artificial Sequence
  Description of Artificial Sequence: Synthetic oligonucleotide
ggcaccgaagucauccauu

SEQ ID NO: 602020 - RNA, 19 nt, Artificial Sequence
  Description of Artificial Sequence: Synthetic oligonucleotide
gggcgcgugucaggccccg

SEQ ID NO: 602021 - RNA, 19 nt, Artificial Sequence
  Description of Artificial Sequence: Synthetic oligonucleotide
cgaaagagggauccacuau

SEQ ID NO: 602022 - RNA, 19 nt, Artificial Sequence
  Description of Artificial Sequence: Synthetic oligonucleotide
cagcuucgcuagcagucau

SEQ ID NO: 602023 - RNA, 19 nt, Artificial Sequence
  Description of Artificial Sequence: Synthetic oligonucleotide
cgcgugucaggccccgcug

SEQ ID NO: 602024 - RNA, 19 nt, Artificial Sequence
  Description of Artificial Sequence: Synthetic oligonucleotide
ccugacauaucaggcgggu

SEQ ID NO: 602025 - RNA, 19 nt, Artificial Sequence
  Description of Artificial Sequence: Synthetic oligonucleotide
cccgcaccgaacacaucaa

SEQ ID NO: 602026 - RNA, 19 nt, Artificial Sequence
  Description of Artificial Sequence: Synthetic oligonucleotide
gcgugucaggccccgcugu

SEQ ID NO: 602027 - RNA, 19 nt, Artificial Sequence
  Description of Artificial Sequence: Synthetic oligonucleotide
ggcgggugacugauggccu

SEQ ID NO: 602028 - RNA, 19 nt, Artificial Sequence
  Description of Artificial Sequence: Synthetic oligonucleotide
ccgcaccgaacacaucaaa

SEQ ID NO: 602029 - RNA, 19 nt, Artificial Sequence
  Description of Artificial Sequence: Synthetic oligonucleotide
cucuggcgagaagucaguu

SEQ ID NO: 602030 - RNA, 19 nt, Artificial Sequence
  Description of Artificial Sequence: Synthetic oligonucleotide
gcggcccaccuucuugugu

SEQ ID NO: 602031 - RNA, 19 nt, Artificial Sequence
  Description of Artificial Sequence: Synthetic oligonucleotide
gggugcccuugugaacaca

SEQ ID NO: 602032 - RNA, 19 nt, Artificial Sequence
  Description of Artificial Sequence: Synthetic oligonucleotide
cgcgaagaagggacccgca

SEQ ID NO: 602033 - RNA, 19 nt, Artificial Sequence
  Description of Artificial Sequence: Synthetic oligonucleotide
gggucuaauucgacugguu

SEQ ID NO: 602034 - RNA, 19 nt, Artificial Sequence
  Description of Artificial Sequence: Synthetic oligonucleotide
ggcccaccuucuugugucu

SEQ ID NO: 602035 - RNA, 19 nt, Artificial Sequence
  Description of Artificial Sequence: Synthetic oligonucleotide
gggugacugauggccuucu

SEQ ID NO: 602036 - RNA, 19 nt, Artificial Sequence
  Description of Artificial Sequence: Synthetic oligonucleotide
ggugugccgugguggcgcu

SEQ ID NO: 602037 - RNA, 19 nt, Artificial Sequence
  Description of Artificial Sequence: Synthetic oligonucleotide
gcgcgugucaggccccgcu

SEQ ID NO: 602038 - RNA, 19 nt, Artificial Sequence
  Description of Artificial Sequence: Synthetic oligonucleotide
ggcgcgugucaggccccgc

SEQ ID NO: 602039 - RNA, 19 nt, Artificial Sequence
  Description of Artificial Sequence: Synthetic oligonucleotide
cccgugcacugaauucugu

SEQ ID NO: 602040 - RNA, 19 nt, Artificial Sequence
  Description of Artificial Sequence: Synthetic oligonucleotide
cggggcucuguaugacaga

SEQ ID NO: 602041 - RNA, 19 nt, Artificial Sequence
  Description of Artificial Sequence: Synthetic oligonucleotide
gccccgcugugggccaguc

SEQ ID NO: 602042 - RNA, 19 nt, Artificial Sequence
  Description of Artificial Sequence: Synthetic oligonucleotide
cgggcucggugucgucauc

SEQ ID NO: 602043 - RNA, 19 nt, Artificial Sequence
  Description of Artificial Sequence: Synthetic oligonucleotide
ccucggguugcaggccacu

SEQ ID NO: 602044 - RNA, 19 nt, Artificial Sequence
  Description of Artificial Sequence: Synthetic oligonucleotide
gugugccgugguggcgcuu

SEQ ID NO: 602045 - RNA, 19 nt, Artificial Sequence
  Description of Artificial Sequence: Synthetic oligonucleotide
aauuuaaaccacuuaagaa

SEQ ID NO: 602046 - RNA, 19 nt, Artificial Sequence
  Description of Artificial Sequence: Synthetic oligonucleotide
uuugcuguacaauagagcu

SEQ ID NO: 602047 - RNA, 19 nt, Artificial Sequence
  Description of Artificial Sequence: Synthetic oligonucleotide
aaagugguggucccgaagg

SEQ ID NO: 602048 - RNA, 19 nt, Artificial Sequence
  Description of Artificial Sequence: Synthetic oligonucleotide
aauuaccuuacacuuaaug

SEQ ID NO: 602049 - RNA, 19 nt, Artificial Sequence
  Description of Artificial Sequence: Synthetic oligonucleotide
uaaacuuguucacugagug

SEQ ID NO: 602050 - RNA, 19 nt, Artificial Sequence
  Description of Artificial Sequence: Synthetic oligonucleotide
uugaaaauaagguuccuug

SEQ ID NO: 602051 - RNA, 19 nt, Artificial Sequence
  Description of Artificial Sequence: Synthetic oligonucleotide
ucugaguugguucacacug

SEQ ID NO: 602052 - RNA, 19 nt, Artificial Sequence
  Description of Artificial Sequence: Synthetic oligonucleotide
aaagagagccuguagagga

SEQ ID NO: 602053 - RNA, 19 nt, Artificial Sequence
  Description of Artificial Sequence: Synthetic oligonucleotide
uaggauuguacacaacugg

SEQ ID NO: 602054 - RNA, 19 nt, Artificial Sequence
  Description of Artificial Sequence: Synthetic oligonucleotide
uuugauguccaguaauccg

SEQ ID NO: 602055 - RNA, 19 nt, Artificial Sequence
  Description of Artificial Sequence: Synthetic oligonucleotide
ugugccaugagaagguugg

SEQ ID NO: 602056 - RNA, 19 nt, Artificial Sequence
  Description of Artificial Sequence: Synthetic oligonucleotide
aguaauugucuauuugugg

SEQ ID NO: 602057 - RNA, 19 nt, Artificial Sequence
  Description of Artificial Sequence: Synthetic oligonucleotide
ugagucauagguaggauug

SEQ ID NO: 602058 - RNA, 19 nt, Artificial Sequence
  Description of Artificial Sequence: Synthetic oligonucleotide
uuaguuauuggaaggacac

SEQ ID NO: 602059 - RNA, 19 nt, Artificial Sequence
  Description of Artificial Sequence: Synthetic oligonucleotide
agagcuaucaccucuuguc

SEQ ID NO: 602060 - RNA, 19 nt, Artificial Sequence
  Description of Artificial Sequence: Synthetic oligonucleotide
uugaucagaauacugccag

SEQ ID NO: 602061 - RNA, 19 nt, Artificial Sequence
  Description of Artificial Sequence: Synthetic oligonucleotide
uguguuuagcaauucagug

SEQ ID NO: 602062 - RNA, 19 nt, Artificial Sequence
  Description of Artificial Sequence: Synthetic oligonucleotide
uuuaguuauuggaaggaca

SEQ ID NO: 602063 - RNA, 19 nt, Artificial Sequence
  Description of Artificial Sequence: Synthetic oligonucleotide
uucgaguuauuccaucugg

SEQ ID NO: 602064 - RNA, 19 nt, Artificial Sequence
  Description of Artificial Sequence: Synthetic oligonucleotide
uguugcuaaauuccauucg

SEQ ID NO: 602065 - RNA, 19 nt, Artificial Sequence
  Description of Artificial Sequence: Synthetic oligonucleotide
aggauuguacugcaggggc

SEQ ID NO: 602066 - RNA, 19 nt, Artificial Sequence
  Description of Artificial Sequence: Synthetic oligonucleotide
aaauaacuauaaaaguuag

SEQ ID NO: 602067 - RNA, 19 nt, Artificial Sequence
  Description of Artificial Sequence: Synthetic oligonucleotide
aagaguaggaggauuguac

SEQ ID NO: 602068 - RNA, 19 nt, Artificial Sequence
  Description of Artificial Sequence: Synthetic oligonucleotide
aaauguggaagucguagug

SEQ ID NO: 602069 - RNA, 19 nt, Artificial Sequence
  Description of Artificial Sequence: Synthetic oligonucleotide
aauacugccaggugguaug

SEQ ID NO: 602070 - RNA, 19 nt, Artificial Sequence
  Description of Artificial Sequence: Synthetic oligonucleotide
accgagauuccacuaaagc

SEQ ID NO: 602071 - RNA, 19 nt, Artificial Sequence
  Description of Artificial Sequence: Synthetic oligonucleotide
agaaauugaaaauaagguu

SEQ ID NO: 602072 - RNA, 19 nt, Artificial Sequence
  Description of Artificial Sequence: Synthetic oligonucleotide
cuuggcgccaauuuuaaag

SEQ ID NO: 602073 - RNA, 19 nt, Artificial Sequence
  Description of Artificial Sequence: Synthetic oligonucleotide
aucaccucuugucaggacc

SEQ ID NO: 602074 - RNA, 19 nt, Artificial Sequence
  Description of Artificial Sequence: Synthetic oligonucleotide
auuaauauccgcuccacau

SEQ ID NO: 602075 - RNA, 19 nt, Artificial Sequence
  Description of Artificial Sequence: Synthetic oligonucleotide
aguaggaggauuguacugc

SEQ ID NO: 602076 - RNA, 19 nt, Artificial Sequence
  Description of Artificial Sequence: Synthetic oligonucleotide
uaauccgcugcaaacaaug

SEQ ID NO: 602077 - RNA, 19 nt, Artificial Sequence
  Description of Artificial Sequence: Synthetic oligonucleotide
auugagaacauaauuaccu

SEQ ID NO: 602078 - RNA, 19 nt, Artificial Sequence
  Description of Artificial Sequence: Synthetic oligonucleotide
uacuaagaggcauugagaa

SEQ ID NO: 602079 - RNA, 19 nt, Artificial Sequence
  Description of Artificial Sequence: Synthetic oligonucleotide
auaauuaccuuacacuuaa

SEQ ID NO: 602080 - RNA, 19 nt, Artificial Sequence
  Description of Artificial Sequence: Synthetic oligonucleotide
uuugaaagccugccuaugc

SEQ ID NO: 602081 - RNA, 19 nt, Artificial Sequence
  Description of Artificial Sequence: Synthetic oligonucleotide
cuaccuaaaugaaggaagg

SEQ ID NO: 602082 - RNA, 19 nt, Artificial Sequence
  Description of Artificial Sequence: Synthetic oligonucleotide
aauugucuauuuguggguc

SEQ ID NO: 602083 - RNA, 19 nt, Artificial Sequence
  Description of Artificial Sequence: Synthetic oligonucleotide
uuaucuauguugcuaaauu

SEQ ID NO: 602084 - RNA, 19 nt, Artificial Sequence
  Description of Artificial Sequence: Synthetic oligonucleotide
aacucuguaucauuccugu

SEQ ID NO: 602085 - RNA, 19 nt, Artificial Sequence
  Description of Artificial Sequence: Synthetic oligonucleotide
auuauagagggguccaaag

SEQ ID NO: 602086 - RNA, 19 nt, Artificial Sequence
  Description of Artificial Sequence: Synthetic oligonucleotide
aguugguucacacugugcu

SEQ ID NO: 602087 - RNA, 19 nt, Artificial Sequence
  Description of Artificial Sequence: Synthetic oligonucleotide
aagcugcuaacucuguauc

SEQ ID NO: 602088 - RNA, 19 nt, Artificial Sequence
  Description of Artificial Sequence: Synthetic oligonucleotide
auuccacuaaagcugcugg

SEQ ID NO: 602089 - RNA, 19 nt, Artificial Sequence
  Description of Artificial Sequence: Synthetic oligonucleotide
uuuacugggucccuggccu

SEQ ID NO: 602090 - RNA, 19 nt, Artificial Sequence
  Description of Artificial Sequence: Synthetic oligonucleotide
auguccaguaauccgcugc

SEQ ID NO: 602091 - RNA, 19 nt, Artificial Sequence
  Description of Artificial Sequence: Synthetic oligonucleotide
aaagagaacugugagugcu

SEQ ID NO: 602092 - RNA, 19 nt, Artificial Sequence
  Description of Artificial Sequence: Synthetic oligonucleotide
aaaugauagggcugcuaag

SEQ ID NO: 602093 - RNA, 19 nt, Artificial Sequence
  Description of Artificial Sequence: Synthetic oligonucleotide
acuaccuaaaugaaggaag

SEQ ID NO: 602094 - RNA, 19 nt, Artificial Sequence
  Description of Artificial Sequence: Synthetic oligonucleotide
uuagcaauucaguggagga

SEQ ID NO: 602095 - RNA, 19 nt, Artificial Sequence
  Description of Artificial Sequence: Synthetic oligonucleotide
uaagacaguguacguagag

SEQ ID NO: 602096 - RNA, 19 nt, Artificial Sequence
  Description of Artificial Sequence: Synthetic oligonucleotide
acaauagagcuuuggaucu

SEQ ID NO: 602097 - RNA, 19 nt, Artificial Sequence
  Description of Artificial Sequence: Synthetic oligonucleotide
auauuaucuauguugcuaa

SEQ ID NO: 602098 - RNA, 19 nt, Artificial Sequence
  Description of Artificial Sequence: Synthetic oligonucleotide
aggaggauuguacugcagg

SEQ ID NO: 602099 - RNA, 19 nt, Artificial Sequence
  Description of Artificial Sequence: Synthetic oligonucleotide
agaccuugccaacaacugc

SEQ ID NO: 602100 - RNA, 19 nt, Artificial Sequence
  Description of Artificial Sequence: Synthetic oligonucleotide
aagacaguguacguagagg

SEQ ID NO: 602101 - RNA, 19 nt, Artificial Sequence
  Description of Artificial Sequence: Synthetic oligonucleotide
aaacggucuagcaaacugg

SEQ ID NO: 602102 - RNA, 19 nt, Artificial Sequence
  Description of Artificial Sequence: Synthetic oligonucleotide
cacuuaauggccauacuac

SEQ ID NO: 602103 - RNA, 19 nt, Artificial Sequence
  Description of Artificial Sequence: Synthetic oligonucleotide
caaaauguggaagucguag

SEQ ID NO: 602104 - RNA, 19 nt, Artificial Sequence
  Description of Artificial Sequence: Synthetic oligonucleotide
acuggggugaaauaguuau

SEQ ID NO: 602105 - RNA, 19 nt, Artificial Sequence
  Description of Artificial Sequence: Synthetic oligonucleotide
gucuuuauauuaauauccg

SEQ ID NO: 602106 - RNA, 19 nt, Artificial Sequence
  Description of Artificial Sequence: Synthetic oligonucleotide
auuuaguuauuggaaggac

SEQ ID NO: 602107 - RNA, 19 nt, Artificial Sequence
  Description of Artificial Sequence: Synthetic oligonucleotide
ggaaagagaacugugagug

SEQ ID NO: 602108 - RNA, 19 nt, Artificial Sequence
  Description of Artificial Sequence: Synthetic oligonucleotide
gaacaaacggucuagcaaa

SEQ ID NO: 602109 - RNA, 19 nt, Artificial Sequence
  Description of Artificial Sequence: Synthetic oligonucleotide
cugccuaugcuuuugcugc

SEQ ID NO: 602110 - RNA, 19 nt, Artificial Sequence
  Description of Artificial Sequence: Synthetic oligonucleotide
uuuggaucugauacaagaa

SEQ ID NO: 602111 - RNA, 19 nt, Artificial Sequence
  Description of Artificial Sequence: Synthetic oligonucleotide
aguuaggaggcaucugaac

SEQ ID NO: 602112 - RNA, 19 nt, Artificial Sequence
  Description of Artificial Sequence: Synthetic oligonucleotide
agccaucggaucuuggcgc

SEQ ID NO: 602113 - RNA, 19 nt, Artificial Sequence
  Description of Artificial Sequence: Synthetic oligonucleotide
ucaccucuugucaggaccg

SEQ ID NO: 602114 - RNA, 19 nt, Artificial Sequence
  Description of Artificial Sequence: Synthetic oligonucleotide
auaauuugcuguacaauag

SEQ ID NO: 602115 - RNA, 19 nt, Artificial Sequence
  Description of Artificial Sequence: Synthetic oligonucleotide
cuuuggaucugauacaaga

SEQ ID NO: 602116 - RNA, 19 nt, Artificial Sequence
  Description of Artificial Sequence: Synthetic oligonucleotide
auuuuaaagaguuccccaa

SEQ ID NO: 602117 - RNA, 19 nt, Artificial Sequence
  Description of Artificial Sequence: Synthetic oligonucleotide
gaaaugauagggcugcuaa

SEQ ID NO: 602118 - RNA, 19 nt, Artificial Sequence
  Description of Artificial Sequence: Synthetic oligonucleotide
uaauauccgcuccacauau

SEQ ID NO: 602119 - RNA, 19 nt, Artificial Sequence
  Description of Artificial Sequence: Synthetic oligonucleotide
uuuaugaagggcugaccug

SEQ ID NO: 602120 - RNA, 19 nt, Artificial Sequence
  Description of Artificial Sequence: Synthetic oligonucleotide
ccuaaaugaaggaaggacc

SEQ ID NO: 602121 - RNA, 19 nt, Artificial Sequence
  Description of Artificial Sequence: Synthetic oligonucleotide
uccgcugcaaacaaugaaa

SEQ ID NO: 602122 - RNA, 19 nt, Artificial Sequence
  Description of Artificial Sequence: Synthetic oligonucleotide
ggacggauggucuuuaggg

SEQ ID NO: 602123 - RNA, 19 nt, Artificial Sequence
  Description of Artificial Sequence: Synthetic oligonucleotide
agcuagugcuaggagaugc

SEQ ID NO: 602124 - RNA, 19 nt, Artificial Sequence
  Description of Artificial Sequence: Synthetic oligonucleotide
uaaaaguuaggaggcaucu

SEQ ID NO: 602125 - RNA, 19 nt, Artificial Sequence
  Description of Artificial Sequence: Synthetic oligonucleotide
agaaguuucagcacucauc

SEQ ID NO: 602126 - RNA, 19 nt, Artificial Sequence
  Description of Artificial Sequence: Synthetic oligonucleotide
uguccaugcagaagaguag

SEQ ID NO: 602127 - RNA, 19 nt, Artificial Sequence
  Description of Artificial Sequence: Synthetic oligonucleotide
aaccuaagugguuuuacua

SEQ ID NO: 602128 - RNA, 19 nt, Artificial Sequence
  Description of Artificial Sequence: Synthetic oligonucleotide
uauuugugggucuccuuag

SEQ ID NO: 602129 - RNA, 19 nt, Artificial Sequence
  Description of Artificial Sequence: Synthetic oligonucleotide
uguagaggacccuacacua

SEQ ID NO: 602130 - RNA, 19 nt, Artificial Sequence
  Description of Artificial Sequence: Synthetic oligonucleotide
ugauagggcugcuaaguug

SEQ ID NO: 602131 - RNA, 19 nt, Artificial Sequence
  Description of Artificial Sequence: Synthetic oligonucleotide
cuuagcacccucagcaccc

SEQ ID NO: 602132 - RNA, 19 nt, Artificial Sequence
  Description of Artificial Sequence: Synthetic oligonucleotide
gcuaagacaguguacguag

SEQ ID NO: 602133 - RNA, 19 nt, Artificial Sequence
  Description of Artificial Sequence: Synthetic oligonucleotide
aacggucuagcaaacuggg

SEQ ID NO: 602134 - RNA, 19 nt, Artificial Sequence
  Description of Artificial Sequence: Synthetic oligonucleotide
aguugcuuccaagggaagc

SEQ ID NO: 602135 - RNA, 19 nt, Artificial Sequence
  Description of Artificial Sequence: Synthetic oligonucleotide
aauucaguggaggaguaau

SEQ ID NO: 602136 - RNA, 19 nt, Artificial Sequence
  Description of Artificial Sequence: Synthetic oligonucleotide
gcuguugagucauagguag

SEQ ID NO: 602137 - RNA, 19 nt, Artificial Sequence
  Description of Artificial Sequence: Synthetic oligonucleotide
uaauugucuauuugugggu

SEQ ID NO: 602138 - RNA, 19 nt, Artificial Sequence
  Description of Artificial Sequence: Synthetic oligonucleotide
ggcauuuaguuauuggaag

SEQ ID NO: 602139 - RNA, 19 nt, Artificial Sequence
  Description of Artificial Sequence: Synthetic oligonucleotide
caaacggucuagcaaacug

SEQ ID NO: 602140 - RNA, 19 nt, Artificial Sequence
  Description of Artificial Sequence: Synthetic oligonucleotide
uggguugaucagaauacug

SEQ ID NO: 602141 - RNA, 19 nt, Artificial Sequence
  Description of Artificial Sequence: Synthetic oligonucleotide
acaaaauuuaaaccacuua

SEQ ID NO: 602142 - RNA, 19 nt, Artificial Sequence
  Description of Artificial Sequence: Synthetic oligonucleotide
ggccauacuaccuaaauga

SEQ ID NO: 602143 - RNA, 19 nt, Artificial Sequence
  Description of Artificial Sequence: Synthetic oligonucleotide
ugccaguugcuuccaaggg

SEQ ID NO: 602144 - RNA, 19 nt, Artificial Sequence
  Description of Artificial Sequence: Synthetic oligonucleotide
gguuccuauagucacuggg

SEQ ID NO: 602145 - RNA, 19 nt, Artificial Sequence
  Description of Artificial Sequence: Synthetic oligonucleotide
uucaguggaggaguaauug

SEQ ID NO: 602146 - RNA, 19 nt, Artificial Sequence
  Description of Artificial Sequence: Synthetic oligonucleotide
auaaaaguuaggaggcauc

SEQ ID NO: 602147 - RNA, 19 nt, Artificial Sequence
  Description of Artificial Sequence: Synthetic oligonucleotide
cuuuagugcacucugugca

SEQ ID NO: 602148 - RNA, 19 nt, Artificial Sequence
  Description of Artificial Sequence: Synthetic oligonucleotide
uggccauacuaccuaaaug

SEQ ID NO: 602149 - RNA, 19 nt, Artificial Sequence
  Description of Artificial Sequence: Synthetic oligonucleotide
gaguaauugucuauuugug

SEQ ID NO: 602150 - RNA, 19 nt, Artificial Sequence
  Description of Artificial Sequence: Synthetic oligonucleotide
uaugccaguugcuuccaag

SEQ ID NO: 602151 - RNA, 19 nt, Artificial Sequence
  Description of Artificial Sequence: Synthetic oligonucleotide
aggggaacguggcuaagac

SEQ ID NO: 602152 - RNA, 19 nt, Artificial Sequence
  Description of Artificial Sequence: Synthetic oligonucleotide
ugugagugcuggcugccgg

SEQ ID NO: 602153 - RNA, 19 nt, Artificial Sequence
  Description of Artificial Sequence: Synthetic oligonucleotide
uguugagucauagguagga

SEQ ID NO: 602154 - RNA, 19 nt, Artificial Sequence
  Description of Artificial Sequence: Synthetic oligonucleotide
ggugaaauaguuaucuccc

SEQ ID NO: 602155 - RNA, 19 nt, Artificial Sequence
  Description of Artificial Sequence: Synthetic oligonucleotide
aaugaaucuuugaugucca

SEQ ID NO: 602156 - RNA, 19 nt, Artificial Sequence
  Description of Artificial Sequence: Synthetic oligonucleotide
uuccauucgaacuggcugu

SEQ ID NO: 602157 - RNA, 19 nt, Artificial Sequence
  Description of Artificial Sequence: Synthetic oligonucleotide
auccgcuccacauaucaag

SEQ ID NO: 602158 - RNA, 19 nt, Artificial Sequence
  Description of Artificial Sequence: Synthetic oligonucleotide
agaguaggaggauuguacu

SEQ ID NO: 602159 - RNA, 19 nt, Artificial Sequence
  Description of Artificial Sequence: Synthetic oligonucleotide
cuacacuaccugaagacuc

SEQ ID NO: 602160 - RNA, 19 nt, Artificial Sequence
  Description of Artificial Sequence: Synthetic oligonucleotide
acacuuaauggccauacua

SEQ ID NO: 602161 - RNA, 19 nt, Artificial Sequence
  Description of Artificial Sequence: Synthetic oligonucleotide
auuguacacaacuggaguu

SEQ ID NO: 602162 - RNA, 19 nt, Artificial Sequence
  Description of Artificial Sequence: Synthetic oligonucleotide
uacacuaccugaagacuca

SEQ ID NO: 602163 - RNA, 19 nt, Artificial Sequence
  Description of Artificial Sequence: Synthetic oligonucleotide
gggaacguggcuaagacag

SEQ ID NO: 602164 - RNA, 19 nt, Artificial Sequence
  Description of Artificial Sequence: Synthetic oligonucleotide
ugagaacuugcccuuucca

SEQ ID NO: 602165 - RNA, 19 nt, Artificial Sequence
  Description of Artificial Sequence: Synthetic oligonucleotide
uggugaaaugauagggcug

SEQ ID NO: 602166 - RNA, 19 nt, Artificial Sequence
  Description of Artificial Sequence: Synthetic oligonucleotide
aggagaaugcagaugagug

SEQ ID NO: 602167 - RNA, 19 nt, Artificial Sequence
  Description of Artificial Sequence: Synthetic oligonucleotide
agucacuggggugaaauag

SEQ ID NO: 602168 - RNA, 19 nt, Artificial Sequence
  Description of Artificial Sequence: Synthetic oligonucleotide
guacguagaggccagguca

SEQ ID NO: 602169 - RNA, 19 nt, Artificial Sequence
  Description of Artificial Sequence: Synthetic oligonucleotide
cuugguuauuccauuccug

SEQ ID NO: 602170 - RNA, 19 nt, Artificial Sequence
  Description of Artificial Sequence: Synthetic oligonucleotide
gaaagagaacugugagugc

SEQ ID NO: 602171 - RNA, 19 nt, Artificial Sequence
  Description of Artificial Sequence: Synthetic oligonucleotide
aacaaacggucuagcaaac

SEQ ID NO: 602172 - RNA, 19 nt, Artificial Sequence
  Description of Artificial Sequence: Synthetic oligonucleotide
gauggaaaguggugguccc

SEQ ID NO: 602173 - RNA, 19 nt, Artificial Sequence
  Description of Artificial Sequence: Synthetic oligonucleotide
aaucuuugauguccaguaa

SEQ ID NO: 602174 - RNA, 19 nt, Artificial Sequence
  Description of Artificial Sequence: Synthetic oligonucleotide
ucaguggaggaguaauugu

SEQ ID NO: 602175 - RNA, 19 nt, Artificial Sequence
  Description of Artificial Sequence: Synthetic oligonucleotide
uauuggaaggacacuuaaa

SEQ ID NO: 602176 - RNA, 19 nt, Artificial Sequence
  Description of Artificial Sequence: Synthetic oligonucleotide
uccgcuccacauaucaagc

SEQ ID NO: 602177 - RNA, 19 nt, Artificial Sequence
  Description of Artificial Sequence: Synthetic oligonucleotide
acauuguacagccuugcaa

SEQ ID NO: 602178 - RNA, 19 nt, Artificial Sequence
  Description of Artificial Sequence: Synthetic oligonucleotide
ugcuucgccggcuccaagg

SEQ ID NO: 602179 - RNA, 19 nt, Artificial Sequence
  Description of Artificial Sequence: Synthetic oligonucleotide
gaaagugguggucccgaag

SEQ ID NO: 602180 - RNA, 19 nt, Artificial Sequence
  Description of Artificial Sequence: Synthetic oligonucleotide
agaacuugcccuuuccaaa

SEQ ID NO: 602181 - RNA, 19 nt, Artificial Sequence
  Description of Artificial Sequence: Synthetic oligonucleotide
uuaaccuaagugguuuuac

SEQ ID NO: 602182 - RNA, 19 nt, Artificial Sequence
  Description of Artificial Sequence: Synthetic oligonucleotide
ucgaguuauuccaucuggu

SEQ ID NO: 602183 - RNA, 19 nt, Artificial Sequence
  Description of Artificial Sequence: Synthetic oligonucleotide
ucguagugcuucuugcuca

SEQ ID NO: 602184 - RNA, 19 nt, Artificial Sequence
  Description of Artificial Sequence: Synthetic oligonucleotide
ggaggauuguacugcaggg

SEQ ID NO: 602185 - RNA, 19 nt, Artificial Sequence
  Description of Artificial Sequence: Synthetic oligonucleotide
guggauaccuggcaucucc

SEQ ID NO: 602186 - RNA, 19 nt, Artificial Sequence
  Description of Artificial Sequence: Synthetic oligonucleotide
aggacggauggucuuuagg

SEQ ID NO: 602187 - RNA, 19 nt, Artificial Sequence
  Description of Artificial Sequence: Synthetic oligonucleotide
guuuaugaagggcugaccu

SEQ ID NO: 602188 - RNA, 19 nt, Artificial Sequence
  Description of Artificial Sequence: Synthetic oligonucleotide
aguuuugacaugguuuuga

SEQ ID NO: 602189 - RNA, 19 nt, Artificial Sequence
  Description of Artificial Sequence: Synthetic oligonucleotide
ucgaacuggcuguugaguc

SEQ ID NO: 602190 - RNA, 19 nt, Artificial Sequence
  Description of Artificial Sequence: Synthetic oligonucleotide
gggugugagaaagagagcc

SEQ ID NO: 602191 - RNA, 19 nt, Artificial Sequence
  Description of Artificial Sequence: Synthetic oligonucleotide
uguacguagaggccagguc

SEQ ID NO: 602192 - RNA, 19 nt, Artificial Sequence
  Description of Artificial Sequence: Synthetic oligonucleotide
aucagaauacugccaggug

SEQ ID NO: 602193 - RNA, 19 nt, Artificial Sequence
  Description of Artificial Sequence: Synthetic oligonucleotide
agacugacccuguuggugu

SEQ ID NO: 602194 - RNA, 19 nt, Artificial Sequence
  Description of Artificial Sequence: Synthetic oligonucleotide
guuuuacuaagaggcauug

SEQ ID NO: 602195 - RNA, 19 nt, Artificial Sequence
  Description of Artificial Sequence: Synthetic oligonucleotide
uguugguguggaauguguc

SEQ ID NO: 602196 - RNA, 19 nt, Artificial Sequence
  Description of Artificial Sequence: Synthetic oligonucleotide
uccacuaaagcugcuggcu

SEQ ID NO: 602197 - RNA, 19 nt, Artificial Sequence
  Description of Artificial Sequence: Synthetic oligonucleotide
aggaacaaacggucuagca

SEQ ID NO: 602198 - RNA, 19 nt, Artificial Sequence
  Description of Artificial Sequence: Synthetic oligonucleotide
agagcugaaccugggagag

SEQ ID NO: 602199 - RNA, 19 nt, Artificial Sequence
  Description of Artificial Sequence: Synthetic oligonucleotide
aagagagccuguagaggac

SEQ ID NO: 602200 - RNA, 19 nt, Artificial Sequence
  Description of Artificial Sequence: Synthetic oligonucleotide
auacuaccuaaaugaagga

SEQ ID NO: 602201 - RNA, 19 nt, Artificial Sequence
  Description of Artificial Sequence: Synthetic oligonucleotide
uggguuuagagcgcucggg

SEQ ID NO: 602202 - RNA, 19 nt, Artificial Sequence
  Description of Artificial Sequence: Synthetic oligonucleotide
uuccacuaaagcugcuggc

SEQ ID NO: 602203 - RNA, 19 nt, Artificial Sequence
  Description of Artificial Sequence: Synthetic oligonucleotide
caguggaggaguaauuguc

SEQ ID NO: 602204 - RNA, 19 nt, Artificial Sequence
  Description of Artificial Sequence: Synthetic oligonucleotide
acaguguacguagaggcca

SEQ ID NO: 602205 - RNA, 19 nt, Artificial Sequence
  Description of Artificial Sequence: Synthetic oligonucleotide
uacuaccuaaaugaaggaa

SEQ ID NO: 602206 - RNA, 19 nt, Artificial Sequence
  Description of Artificial Sequence: Synthetic oligonucleotide
gaacguggcuaagacagug

SEQ ID NO: 602207 - RNA, 19 nt, Artificial Sequence
  Description of Artificial Sequence: Synthetic oligonucleotide
uggcgccaauuuuaaagag

SEQ ID NO: 602208 - RNA, 19 nt, Artificial Sequence
  Description of Artificial Sequence: Synthetic oligonucleotide
uuuagagcgcucgggguug

SEQ ID NO: 602209 - RNA, 19 nt, Artificial Sequence
  Description of Artificial Sequence: Synthetic oligonucleotide
uacguagaggccaggucac

SEQ ID NO: 602210 - RNA, 19 nt, Artificial Sequence
  Description of Artificial Sequence: Synthetic oligonucleotide
cagaggauaguuuugacau

SEQ ID NO: 602211 - RNA, 19 nt, Artificial Sequence
  Description of Artificial Sequence: Synthetic oligonucleotide
auuaucuauguugcuaaau

SEQ ID NO: 602212 - RNA, 19 nt, Artificial Sequence
  Description of Artificial Sequence: Synthetic oligonucleotide
aagguuccuuguucauaag

SEQ ID NO: 602213 - RNA, 19 nt, Artificial Sequence
  Description of Artificial Sequence: Synthetic oligonucleotide
cuguacaauagagcuuugg

SEQ ID NO: 602214 - RNA, 19 nt, Artificial Sequence
  Description of Artificial Sequence: Synthetic oligonucleotide
ugguuuuacuaagaggcau

SEQ ID NO: 602215 - RNA, 19 nt, Artificial Sequence
  Description of Artificial Sequence: Synthetic oligonucleotide
aaggcuugcaucagcacau

SEQ ID NO: 602216 - RNA, 19 nt, Artificial Sequence
  Description of Artificial Sequence: Synthetic oligonucleotide
uggauaccuggcaucuccc

SEQ ID NO: 602217 - RNA, 19 nt, Artificial Sequence
  Description of Artificial Sequence: Synthetic oligonucleotide
gacccuacacuaccugaag

SEQ ID NO: 602218 - RNA, 19 nt, Artificial Sequence
  Description of Artificial Sequence: Synthetic oligonucleotide
acuugcccuuuccaaaaug

SEQ ID NO: 602219 - RNA, 19 nt, Artificial Sequence
  Description of Artificial Sequence: Synthetic oligonucleotide
gcuaaauuccauucgaacu

SEQ ID NO: 602220 - RNA, 19 nt, Artificial Sequence
  Description of Artificial Sequence: Synthetic oligonucleotide
ggaguaauugucuauuugu

SEQ ID NO: 602221 - RNA, 19 nt, Artificial Sequence
  Description of Artificial Sequence: Synthetic oligonucleotide
ggguugaucagaauacugc

SEQ ID NO: 602222 - RNA, 19 nt, Artificial Sequence
  Description of Artificial Sequence: Synthetic oligonucleotide
uuaggguggacagcugagc

SEQ ID NO: 602223 - RNA, 19 nt, Artificial Sequence
  Description of Artificial Sequence: Synthetic oligonucleotide
aagcuguaacauguggcca

SEQ ID NO: 602224 - RNA, 19 nt, Artificial Sequence
  Description of Artificial Sequence: Synthetic oligonucleotide
aauauccgcuccacauauc

SEQ ID NO: 602225 - RNA, 19 nt, Artificial Sequence
  Description of Artificial Sequence: Synthetic oligonucleotide
cuaccugaagacucagauc

SEQ ID NO: 602226 - RNA, 19 nt, Artificial Sequence
  Description of Artificial Sequence: Synthetic oligonucleotide
ggguuuagagcgcucgggg

SEQ ID NO: 602227 - RNA, 19 nt, Artificial Sequence
  Description of Artificial Sequence: Synthetic oligonucleotide
auggccauacuaccuaaau

SEQ ID NO: 602228 - RNA, 19 nt, Artificial Sequence
  Description of Artificial Sequence: Synthetic oligonucleotide
aagugguggucccgaagga

SEQ ID NO: 602229 - RNA, 19 nt, Artificial Sequence
  Description of Artificial Sequence: Synthetic oligonucleotide
uuagugcacucugugcagc

SEQ ID NO: 602230 - RNA, 19 nt, Artificial Sequence
  Description of Artificial Sequence: Synthetic oligonucleotide
ggaacaaacggucuagcaa

SEQ ID NO: 602231 - RNA, 19 nt, Artificial Sequence
  Description of Artificial Sequence: Synthetic oligonucleotide
ccuaagugguuuuacuaag

SEQ ID NO: 602232 - RNA, 19 nt, Artificial Sequence
  Description of Artificial Sequence: Synthetic oligonucleotide
acugugagugcuggcugcc

SEQ ID NO: 602233 - RNA, 19 nt, Artificial Sequence
  Description of Artificial Sequence: Synthetic oligonucleotide
uaauggccauacuaccuaa

SEQ ID NO: 602234 - RNA, 19 nt, Artificial Sequence
  Description of Artificial Sequence: Synthetic oligonucleotide
cauaauuaccuuacacuua

SEQ ID NO: 602235 - RNA, 19 nt, Artificial Sequence
  Description of Artificial Sequence: Synthetic oligonucleotide
ggaagcuagugcuaggaga

SEQ ID NO: 602236 - RNA, 19 nt, Artificial Sequence
  Description of Artificial Sequence: Synthetic oligonucleotide
gacaggugugccaugagaa

SEQ ID NO: 602237 - RNA, 19 nt, Artificial Sequence
  Description of Artificial Sequence: Synthetic oligonucleotide
auacugccaggugguaugc

SEQ ID NO: 602238 - RNA, 19 nt, Artificial Sequence
  Description of Artificial Sequence: Synthetic oligonucleotide
uuuaaccuaagugguuuua

SEQ ID NO: 602239 - RNA, 19 nt, Artificial Sequence
  Description of Artificial Sequence: Synthetic oligonucleotide
cuuaauggccauacuaccu

SEQ ID NO: 602240 - RNA, 19 nt, Artificial Sequence
  Description of Artificial Sequence: Synthetic oligonucleotide
auggucuuuaggguggaca

SEQ ID NO: 602241 - RNA, 19 nt, Artificial Sequence
  Description of Artificial Sequence: Synthetic oligonucleotide
aggacccuacacuaccuga

SEQ ID NO: 602242 - RNA, 19 nt, Artificial Sequence
  Description of Artificial Sequence: Synthetic oligonucleotide
auuccauuccugcauucuu

SEQ ID NO: 602243 - RNA, 19 nt, Artificial Sequence
  Description of Artificial Sequence: Synthetic oligonucleotide
guggcugauuuacugagaa

SEQ ID NO: 602244 - RNA, 19 nt, Artificial Sequence
  Description of Artificial Sequence: Synthetic oligonucleotide
guugcuuccaagggaagca

SEQ ID NO: 602245 - RNA, 19 nt, Artificial Sequence
  Description of Artificial Sequence: Synthetic oligonucleotide
ggucccgaaggacggaugg

SEQ ID NO: 602246 - RNA, 19 nt, Artificial Sequence
  Description of Artificial Sequence: Synthetic oligonucleotide
cauucgaacuggcuguuga

SEQ ID NO: 602247 - RNA, 19 nt, Artificial Sequence
  Description of Artificial Sequence: Synthetic oligonucleotide
caugagaagguuggcuaag

SEQ ID NO: 602248 - RNA, 19 nt, Artificial Sequence
  Description of Artificial Sequence: Synthetic oligonucleotide
ugccggguagaugacaggu

SEQ ID NO: 602249 - RNA, 19 nt, Artificial Sequence
  Description of Artificial Sequence: Synthetic oligonucleotide
aacuugcccuuuccaaaau

SEQ ID NO: 602250 - RNA, 19 nt, Artificial Sequence
  Description of Artificial Sequence: Synthetic oligonucleotide
agcuuuggaucugauacaa

SEQ ID NO: 602251 - RNA, 19 nt, Artificial Sequence
  Description of Artificial Sequence: Synthetic oligonucleotide
gaagcuagugcuaggagau

SEQ ID NO: 602252 - RNA, 19 nt, Artificial Sequence
  Description of Artificial Sequence: Synthetic oligonucleotide
cuggguuuagagcgcucgg

SEQ ID NO: 602253 - RNA, 19 nt, Artificial Sequence
  Description of Artificial Sequence: Synthetic oligonucleotide
aauccgcugcaaacaauga

SEQ ID NO: 602254 - RNA, 19 nt, Artificial Sequence
  Description of Artificial Sequence: Synthetic oligonucleotide
uccccacugccacagcaga

SEQ ID NO: 602255 - RNA, 19 nt, Artificial Sequence
  Description of Artificial Sequence: Synthetic oligonucleotide
augauagggcugcuaaguu

SEQ ID NO: 602256 - RNA, 19 nt, Artificial Sequence
  Description of Artificial Sequence: Synthetic oligonucleotide
aacaacugcuucgccggcu

SEQ ID NO: 602257 - RNA, 19 nt, Artificial Sequence
  Description of Artificial Sequence: Synthetic oligonucleotide
ccaguaauccgcugcaaac

SEQ ID NO: 602258 - RNA, 19 nt, Artificial Sequence
  Description of Artificial Sequence: Synthetic oligonucleotide
aaguuaggaggcaucugaa

SEQ ID NO: 602259 - RNA, 19 nt, Artificial Sequence
  Description of Artificial Sequence: Synthetic oligonucleotide
uaguuauuggaaggacacu

SEQ ID NO: 602260 - RNA, 19 nt, Artificial Sequence
  Description of Artificial Sequence: Synthetic oligonucleotide
acucuguaucauuccugug

SEQ ID NO: 602261 - RNA, 19 nt, Artificial Sequence
  Description of Artificial Sequence: Synthetic oligonucleotide
caguguacguagaggccag

SEQ ID NO: 602262 - RNA, 19 nt, Artificial Sequence
  Description of Artificial Sequence: Synthetic oligonucleotide
gaccgagauuccacuaaag

SEQ ID NO: 602263 - RNA, 19 nt, Artificial Sequence
  Description of Artificial Sequence: Synthetic oligonucleotide
cagacugacccuguuggug

SEQ ID NO: 602264 - RNA, 19 nt, Artificial Sequence
  Description of Artificial Sequence: Synthetic oligonucleotide
ggucuagcaaacugggaca

SEQ ID NO: 602265 - RNA, 19 nt, Artificial Sequence
  Description of Artificial Sequence: Synthetic oligonucleotide
cugaaccugggagaggcug

SEQ ID NO: 602266 - RNA, 19 nt, Artificial Sequence
  Description of Artificial Sequence: Synthetic oligonucleotide
cuagugcuaggagaugcac

SEQ ID NO: 602267 - RNA, 19 nt, Artificial Sequence
  Description of Artificial Sequence: Synthetic oligonucleotide
ugacagugcuauccccacu

SEQ ID NO: 602268 - RNA, 19 nt, Artificial Sequence
  Description of Artificial Sequence: Synthetic oligonucleotide
ucgguucccaugccugcug

SEQ ID NO: 602269 - RNA, 19 nt, Artificial Sequence
  Description of Artificial Sequence: Synthetic oligonucleotide
aagggcugaccugucugug

SEQ ID NO: 602270 - RNA, 19 nt, Artificial Sequence
  Description of Artificial Sequence: Synthetic oligonucleotide
uaauuaccuuacacuuaau

SEQ ID NO: 602271 - RNA, 19 nt, Artificial Sequence
  Description of Artificial Sequence: Synthetic oligonucleotide
gguugacagugcuaucccc

SEQ ID NO: 602272 - RNA, 19 nt, Artificial Sequence
  Description of Artificial Sequence: Synthetic oligonucleotide
cauucgaguuauuccaucu

SEQ ID NO: 602273 - RNA, 19 nt, Artificial Sequence
  Description of Artificial Sequence: Synthetic oligonucleotide
gcuaaguugagggcugugc

SEQ ID NO: 602274 - RNA, 19 nt, Artificial Sequence
  Description of Artificial Sequence: Synthetic oligonucleotide
uaucaccucuugucaggac

SEQ ID NO: 602275 - RNA, 19 nt, Artificial Sequence
  Description of Artificial Sequence: Synthetic oligonucleotide
uccugccuaggaugauucc

SEQ ID NO: 602276 - RNA, 19 nt, Artificial Sequence
  Description of Artificial Sequence: Synthetic oligonucleotide
uggccaagcaguggauacc

SEQ ID NO: 602277 - RNA, 19 nt, Artificial Sequence
  Description of Artificial Sequence: Synthetic oligonucleotide
cuaaguugagggcugugcu

SEQ ID NO: 602278 - RNA, 19 nt, Artificial Sequence
  Description of Artificial Sequence: Synthetic oligonucleotide
cuaagacaguguacguaga

SEQ ID NO: 602279 - RNA, 19 nt, Artificial Sequence
  Description of Artificial Sequence: Synthetic oligonucleotide
ggucccuggccuuucuucc

SEQ ID NO: 602280 - RNA, 19 nt, Artificial Sequence
  Description of Artificial Sequence: Synthetic oligonucleotide
aagcuagugcuaggagaug

SEQ ID NO: 602281 - RNA, 19 nt, Artificial Sequence
  Description of Artificial Sequence: Synthetic oligonucleotide
gcuuaaacuuguucacuga

SEQ ID NO: 602282 - RNA, 19 nt, Artificial Sequence
  Description of Artificial Sequence: Synthetic oligonucleotide
cagaauacugccagguggu

SEQ ID NO: 602283 - RNA, 19 nt, Artificial Sequence
  Description of Artificial Sequence: Synthetic oligonucleotide
guuuagcaauucaguggag

SEQ ID NO: 602284 - RNA, 19 nt, Artificial Sequence
  Description of Artificial Sequence: Synthetic oligonucleotide
cggucuagcaaacugggac

SEQ ID NO: 602285 - RNA, 19 nt, Artificial Sequence
  Description of Artificial Sequence: Synthetic oligonucleotide
uggucccgaaggacggaug

SEQ ID NO: 602286 - RNA, 19 nt, Artificial Sequence
  Description of Artificial Sequence: Synthetic oligonucleotide
ugaguggcauuuaguuauu

SEQ ID NO: 602287 - RNA, 19 nt, Artificial Sequence
  Description of Artificial Sequence: Synthetic oligonucleotide
guagaggacccuacacuac

SEQ ID NO: 602288 - RNA, 19 nt, Artificial Sequence
  Description of Artificial Sequence: Synthetic oligonucleotide
acaaacggucuagcaaacu

SEQ ID NO: 602289 - RNA, 19 nt, Artificial Sequence
  Description of Artificial Sequence: Synthetic oligonucleotide
ugccuaugcuuuugcugcu

SEQ ID NO: 602290 - RNA, 19 nt, Artificial Sequence
  Description of Artificial Sequence: Synthetic oligonucleotide
ucuuggcgccaauuuuaaa

SEQ ID NO: 602291 - RNA, 19 nt, Artificial Sequence
  Description of Artificial Sequence: Synthetic oligonucleotide
aguggauaccuggcaucuc

SEQ ID NO: 602292 - RNA, 19 nt, Artificial Sequence
  Description of Artificial Sequence: Synthetic oligonucleotide
ucacuggguuuagagcgcu

SEQ ID NO: 602293 - RNA, 19 nt, Artificial Sequence
  Description of Artificial Sequence: Synthetic oligonucleotide
ccuguagaggacccuacac

SEQ ID NO: 602294 - RNA, 19 nt, Artificial Sequence
  Description of Artificial Sequence: Synthetic oligonucleotide
aggagucuuuauauuaaua

SEQ ID NO: 602295 - RNA, 19 nt, Artificial Sequence
  Description of Artificial Sequence: Synthetic oligonucleotide
ugucugcguccucgguucc

SEQ ID NO: 602296 - RNA, 19 nt, Artificial Sequence
  Description of Artificial Sequence: Synthetic oligonucleotide
cuguagaggacccuacacu

SEQ ID NO: 602297 - RNA, 19 nt, Artificial Sequence
  Description of Artificial Sequence: Synthetic oligonucleotide
agccuguagaggacccuac

SEQ ID NO: 602298 - RNA, 19 nt, Artificial Sequence
  Description of Artificial Sequence: Synthetic oligonucleotide
gucacuggguuuagagcgc

SEQ ID NO: 602299 - RNA, 19 nt, Artificial Sequence
  Description of Artificial Sequence: Synthetic oligonucleotide
accuuacacuuaauggcca

SEQ ID NO: 602300 - RNA, 19 nt, Artificial Sequence
  Description of Artificial Sequence: Synthetic oligonucleotide
caucccaggagucuuuaua

SEQ ID NO: 602301 - RNA, 19 nt, Artificial Sequence
  Description of Artificial Sequence: Synthetic oligonucleotide
caauagagcuuuggaucug

SEQ ID NO: 602302 - RNA, 19 nt, Artificial Sequence
  Description of Artificial Sequence: Synthetic oligonucleotide
gguaguucugugauuucca

SEQ ID NO: 602303 - RNA, 19 nt, Artificial Sequence
  Description of Artificial Sequence: Synthetic oligonucleotide
caacaacugcuucgccggc

SEQ ID NO: 602304 - RNA, 19 nt, Artificial Sequence
  Description of Artificial Sequence: Synthetic oligonucleotide
cugccggguagaugacagg

SEQ ID NO: 602305 - RNA, 19 nt, Artificial Sequence
  Description of Artificial Sequence: Synthetic oligonucleotide
guuauuccauuccugcauu

SEQ ID NO: 602306 - RNA, 19 nt, Artificial Sequence
  Description of Artificial Sequence: Synthetic oligonucleotide
guaucauuccugugugggu

SEQ ID NO: 602307 - RNA, 19 nt, Artificial Sequence
  Description of Artificial Sequence: Synthetic oligonucleotide
gaggggaacguggcuaaga

SEQ ID NO: 602308 - RNA, 19 nt, Artificial Sequence
  Description of Artificial Sequence: Synthetic oligonucleotide
cauaagugcaaugaaucuu

SEQ ID NO: 602309 - RNA, 19 nt, Artificial Sequence
  Description of Artificial Sequence: Synthetic oligonucleotide
gcugccggguagaugacag

SEQ ID NO: 602310 - RNA, 19 nt, Artificial Sequence
  Description of Artificial Sequence: Synthetic oligonucleotide
cuaucaccucuugucagga

SEQ ID NO: 602311 - RNA, 19 nt, Artificial Sequence
  Description of Artificial Sequence: Synthetic oligonucleotide
gccaugagaagguuggcua

SEQ ID NO: 602312 - RNA, 19 nt, Artificial Sequence
  Description of Artificial Sequence: Synthetic oligonucleotide
cugccuaggaugauuccua

SEQ ID NO: 602313 - RNA, 19 nt, Artificial Sequence
  Description of Artificial Sequence: Synthetic oligonucleotide
guuuagagcgcucgggguu

SEQ ID NO: 602314 - RNA, 19 nt, Artificial Sequence
  Description of Artificial Sequence: Synthetic oligonucleotide
ccgagauuccacuaaagcu

SEQ ID NO: 602315 - RNA, 19 nt, Artificial Sequence
  Description of Artificial Sequence: Synthetic oligonucleotide
gcaguggauaccuggcauc

SEQ ID NO: 602316 - RNA, 19 nt, Artificial Sequence
  Description of Artificial Sequence: Synthetic oligonucleotide
cugugagugcuggcugccg

SEQ ID NO: 602317 - RNA, 19 nt, Artificial Sequence
  Description of Artificial Sequence: Synthetic oligonucleotide
gaauacugccaggugguau

SEQ ID NO: 602318 - RNA, 19 nt, Artificial Sequence
  Description of Artificial Sequence: Synthetic oligonucleotide
aucuuggcgccaauuuuaa

SEQ ID NO: 602319 - RNA, 19 nt, Artificial Sequence
  Description of Artificial Sequence: Synthetic oligonucleotide
cugugcuggacaauauuau

SEQ ID NO: 602320 - RNA, 19 nt, Artificial Sequence
  Description of Artificial Sequence: Synthetic oligonucleotide
ccuaggaugauuccuauuu

SEQ ID NO: 602321 - RNA, 19 nt, Artificial Sequence
  Description of Artificial Sequence: Synthetic oligonucleotide
ggguuccuauagucacugg

SEQ ID NO: 602322 - RNA, 19 nt, Artificial Sequence
  Description of Artificial Sequence: Synthetic oligonucleotide
gccaucggaucuuggcgcc

SEQ ID NO: 602323 - RNA, 19 nt, Artificial Sequence
  Description of Artificial Sequence: Synthetic oligonucleotide
uuagagcgcucgggguuga

SEQ ID NO: 602324 - RNA, 19 nt, Artificial Sequence
  Description of Artificial Sequence: Synthetic oligonucleotide
gaacuggcuguugagucau

SEQ ID NO: 602325 - RNA, 19 nt, Artificial Sequence
  Description of Artificial Sequence: Synthetic oligonucleotide
ccgcuccacauaucaagcc

SEQ ID NO: 602326 - RNA, 19 nt, Artificial Sequence
  Description of Artificial Sequence: Synthetic oligonucleotide
gucacuggggugaaauagu

SEQ ID NO: 602327 - RNA, 19 nt, Artificial Sequence
  Description of Artificial Sequence: Synthetic oligonucleotide
uuacugggucccuggccuu

SEQ ID NO: 602328 - RNA, 19 nt, Artificial Sequence
  Description of Artificial Sequence: Synthetic oligonucleotide
cccaggagucuuuauauua

SEQ ID NO: 602329 - RNA, 19 nt, Artificial Sequence
  Description of Artificial Sequence: Synthetic oligonucleotide
ggaccgagauuccacuaaa

SEQ ID NO: 602330 - RNA, 19 nt, Artificial Sequence
  Description of Artificial Sequence: Synthetic oligonucleotide
ggggaacguggcuaagaca

SEQ ID NO: 602331 - RNA, 19 nt, Artificial Sequence
  Description of Artificial Sequence: Synthetic oligonucleotide
gggucccuggccuuucuuc

SEQ ID NO: 602332 - RNA, 19 nt, Artificial Sequence
  Description of Artificial Sequence: Synthetic oligonucleotide
gguuuagagcgcucggggu

SEQ ID NO: 602333 - RNA, 19 nt, Artificial Sequence
  Description of Artificial Sequence: Synthetic oligonucleotide
cagcagguucagguuccgg

SEQ ID NO: 602334 - RNA, 19 nt, Artificial Sequence
  Description of Artificial Sequence: Synthetic oligonucleotide
ggauaguuuugacaugguu

SEQ ID NO: 602335 - RNA, 19 nt, Artificial Sequence
  Description of Artificial Sequence: Synthetic oligonucleotide
gagccuguagaggacccua

SEQ ID NO: 602336 - RNA, 19 nt, Artificial Sequence
  Description of Artificial Sequence: Synthetic oligonucleotide
ggccuuucuuccaaaagcu

SEQ ID NO: 602337 - RNA, 19 nt, Artificial Sequence
  Description of Artificial Sequence: Synthetic oligonucleotide
acggucuagcaaacuggga

SEQ ID NO: 602338 - RNA, 19 nt, Artificial Sequence
  Description of Artificial Sequence: Synthetic oligonucleotide
ccucgguucccaugccugc

SEQ ID NO: 602339 - RNA, 19 nt, Artificial Sequence
  Description of Artificial Sequence: Synthetic oligonucleotide
ccaagaccuugccaacaac

SEQ ID NO: 602340 - RNA, 19 nt, Artificial Sequence
  Description of Artificial Sequence: Synthetic oligonucleotide
gguuggcuaagagcugaac

SEQ ID NO: 602341 - RNA, 19 nt, Artificial Sequence
  Description of Artificial Sequence: Synthetic oligonucleotide
uggcugccggguagaugac

SEQ ID NO: 602342 - RNA, 19 nt, Artificial Sequence
  Description of Artificial Sequence: Synthetic oligonucleotide
gccauacuaccuaaaugaa

SEQ ID NO: 602343 - RNA, 19 nt, Artificial Sequence
  Description of Artificial Sequence: Synthetic oligonucleotide
gucugcguccucgguuccc

SEQ ID NO: 602344 - RNA, 19 nt, Artificial Sequence
  Description of Artificial Sequence: Synthetic oligonucleotide
ggacccuacacuaccugaa

SEQ ID NO: 602345 - RNA, 19 nt, Artificial Sequence
  Description of Artificial Sequence: Synthetic oligonucleotide
ggaggaguaauugucuauu

SEQ ID NO: 602346 - RNA, 19 nt, Artificial Sequence
  Description of Artificial Sequence: Synthetic oligonucleotide
guaugccaguugcuuccaa

SEQ ID NO: 602347 - RNA, 19 nt, Artificial Sequence
  Description of Artificial Sequence: Synthetic oligonucleotide
acugcuucgccggcuccaa

SEQ ID NO: 602348 - RNA, 19 nt, Artificial Sequence
  Description of Artificial Sequence: Synthetic oligonucleotide
gcuagugcuaggagaugca

SEQ ID NO: 602349 - RNA, 19 nt, Artificial Sequence
  Description of Artificial Sequence: Synthetic oligonucleotide
acguagaggccaggucacu

SEQ ID NO: 602350 - RNA, 19 nt, Artificial Sequence
  Description of Artificial Sequence: Synthetic oligonucleotide
cugcuucgccggcuccaag

SEQ ID NO: 602351 - RNA, 19 nt, Artificial Sequence
  Description of Artificial Sequence: Synthetic oligonucleotide
ggcgccaauuuuaaagagu

SEQ ID NO: 602352 - RNA, 19 nt, Artificial Sequence
  Description of Artificial Sequence: Synthetic oligonucleotide
cuauagucacuggggugaa

SEQ ID NO: 602353 - RNA, 19 nt, Artificial Sequence
  Description of Artificial Sequence: Synthetic oligonucleotide
gcgccaauuuuaaagaguu

SEQ ID NO: 602354 - RNA, 19 nt, Artificial Sequence
  Description of Artificial Sequence: Synthetic oligonucleotide
ggaaagugguggucccgaa

SEQ ID NO: 602355 - RNA, 19 nt, Artificial Sequence
  Description of Artificial Sequence: Synthetic oligonucleotide
gcuguaacauguggccaca

SEQ ID NO: 602356 - RNA, 19 nt, Artificial Sequence
  Description of Artificial Sequence: Synthetic oligonucleotide
ggauuauagagggguccaa

SEQ ID NO: 602357 - RNA, 19 nt, Artificial Sequence
  Description of Artificial Sequence: Synthetic oligonucleotide
guaauccgcugcaaacaau

SEQ ID NO: 602358 - RNA, 19 nt, Artificial Sequence
  Description of Artificial Sequence: Synthetic oligonucleotide
gccggguagaugacaggug

SEQ ID NO: 602359 - RNA, 19 nt, Artificial Sequence
  Description of Artificial Sequence: Synthetic oligonucleotide
cgaguuauuccaucuggua

SEQ ID NO: 602360 - RNA, 19 nt, Artificial Sequence
  Description of Artificial Sequence: Synthetic oligonucleotide
gcuguacaauagagcuuug

SEQ ID NO: 602361 - RNA, 19 nt, Artificial Sequence
  Description of Artificial Sequence: Synthetic oligonucleotide
ggaggggaacguggcuaag

SEQ ID NO: 602362 - RNA, 19 nt, Artificial Sequence
  Description of Artificial Sequence: Synthetic oligonucleotide
uagagcgcucgggguugac

SEQ ID NO: 602363 - RNA, 19 nt, Artificial Sequence
  Description of Artificial Sequence: Synthetic oligonucleotide
ccccagaggauaguuuuga

SEQ ID NO: 602364 - RNA, 19 nt, Artificial Sequence
  Description of Artificial Sequence: Synthetic oligonucleotide
gcuucgccggcuccaaggu

SEQ ID NO: 602365 - RNA, 19 nt, Artificial Sequence
  Description of Artificial Sequence: Synthetic oligonucleotide
ccauucgaacuggcuguug

SEQ ID NO: 602366 - RNA, 19 nt, Artificial Sequence
  Description of Artificial Sequence: Synthetic oligonucleotide
caccucuugucaggaccga

SEQ ID NO: 602367 - RNA, 19 nt, Artificial Sequence
  Description of Artificial Sequence: Synthetic oligonucleotide
ccugccuaggaugauuccu

SEQ ID NO: 602368 - RNA, 19 nt, Artificial Sequence
  Description of Artificial Sequence: Synthetic oligonucleotide
cucgguucccaugccugcu

SEQ ID NO: 602369 - RNA, 19 nt, Artificial Sequence
  Description of Artificial Sequence: Synthetic oligonucleotide
cagcuuccauucgaguuau

SEQ ID NO: 602370 - RNA, 19 nt, Artificial Sequence
  Description of Artificial Sequence: Synthetic oligonucleotide
guggucccgaaggacggau

SEQ ID NO: 602371 - RNA, 19 nt, Artificial Sequence
  Description of Artificial Sequence: Synthetic oligonucleotide
gguggucccgaaggacgga

SEQ ID NO: 602372 - RNA, 19 nt, Artificial Sequence
  Description of Artificial Sequence: Synthetic oligonucleotide
ggaacguggcuaagacagu

SEQ ID NO: 602373 - RNA, 19 nt, Artificial Sequence
  Description of Artificial Sequence: Synthetic oligonucleotide
cauuccuguguggguuccu

SEQ ID NO: 602374 - RNA, 19 nt, Artificial Sequence
  Description of Artificial Sequence: Synthetic oligonucleotide
gccuaggaugauuccuauu

SEQ ID NO: 602375 - RNA, 19 nt, Artificial Sequence
  Description of Artificial Sequence: Synthetic oligonucleotide
ccggagccaucggaucuug

SEQ ID NO: 602376 - RNA, 19 nt, Artificial Sequence
  Description of Artificial Sequence: Synthetic oligonucleotide
cguagugcuucuugcucau

SEQ ID NO: 602377 - RNA, 19 nt, Artificial Sequence
  Description of Artificial Sequence: Synthetic oligonucleotide
ccaucggaucuuggcgcca

SEQ ID NO: 602378 - RNA, 19 nt, Artificial Sequence
  Description of Artificial Sequence: Synthetic oligonucleotide
cugcguccucgguucccau

SEQ ID NO: 602379 - RNA, 19 nt, Artificial Sequence
  Description of Artificial Sequence: Synthetic oligonucleotide
cggugacugcacuggugaa

SEQ ID NO: 602380 - RNA, 19 nt, Artificial Sequence
  Description of Artificial Sequence: Synthetic oligonucleotide
gccuaugcuuuugcugcuu

SEQ ID NO: 602381 - RNA, 19 nt, Artificial Sequence
  Description of Artificial Sequence: Synthetic oligonucleotide
cuauauaacaaacugagcc

SEQ ID NO: 602382 - RNA, 19 nt, Artificial Sequence
  Description of Artificial Sequence: Synthetic oligonucleotide
uauaguaacacacacacac

SEQ ID NO: 602383 - RNA, 19 nt, Artificial Sequence
  Description of Artificial Sequence: Synthetic oligonucleotide
uuagcacugacucagacag

SEQ ID NO: 602384 - RNA, 19 nt, Artificial Sequence
  Description of Artificial Sequence: Synthetic oligonucleotide
gauaucauggaauacggug

SEQ ID NO: 602385 - RNA, 19 nt, Artificial Sequence
  Description of Artificial Sequence: Synthetic oligonucleotide
uguggaaauaaauaacuag

SEQ ID NO: 602386 - RNA, 19 nt, Artificial Sequence
  Description of Artificial Sequence: Synthetic oligonucleotide
ucugugaucccacaguugg

SEQ ID NO: 602387 - RNA, 19 nt, Artificial Sequence
  Description of Artificial Sequence: Synthetic oligonucleotide
gauacauccacuucuguag

SEQ ID NO: 602388 - RNA, 19 nt, Artificial Sequence
  Description of Artificial Sequence: Synthetic oligonucleotide
aagauguauaaacauaggu

SEQ ID NO: 602389 - RNA, 19 nt, Artificial Sequence
  Description of Artificial Sequence: Synthetic oligonucleotide
auaugauagggguaggggc

SEQ ID NO: 602390 - RNA, 19 nt, Artificial Sequence
  Description of Artificial Sequence: Synthetic oligonucleotide
aucgguuuacaauuggugc

SEQ ID NO: 602391 - RNA, 19 nt, Artificial Sequence
  Description of Artificial Sequence: Synthetic oligonucleotide
ucagauaucauggaauacg

SEQ ID NO: 602392 - RNA, 19 nt, Artificial Sequence
  Description of Artificial Sequence: Synthetic oligonucleotide
aauacggugcuccauccac

SEQ ID NO: 602393 - RNA, 19 nt, Artificial Sequence
  Description of Artificial Sequence: Synthetic oligonucleotide
aguacaugggcucagucac

SEQ ID NO: 602394 - RNA, 19 nt, Artificial Sequence
  Description of Artificial Sequence: Synthetic oligonucleotide
agauaaagcaaauacacaa

SEQ ID NO: 602395 - RNA, 19 nt, Artificial Sequence
  Description of Artificial Sequence: Synthetic oligonucleotide
uauauaacaaacugagcca

SEQ ID NO: 602396 - RNA, 19 nt, Artificial Sequence
  Description of Artificial Sequence: Synthetic oligonucleotide
aaauacacaauugaaugug

SEQ ID NO: 602397 - RNA, 19 nt, Artificial Sequence
  Description of Artificial Sequence: Synthetic oligonucleotide
auagaugguacucucuucg

SEQ ID NO: 602398 - RNA, 19 nt, Artificial Sequence
  Description of Artificial Sequence: Synthetic oligonucleotide
aauaugauagggguagggg

SEQ ID NO: 602399 - RNA, 19 nt, Artificial Sequence
  Description of Artificial Sequence: Synthetic oligonucleotide
uucgcuuucgcuuaauugc

SEQ ID NO: 602400 - RNA, 19 nt, Artificial Sequence
  Description of Artificial Sequence: Synthetic oligonucleotide
aaaguuaguguaucuaccu

SEQ ID NO: 602401 - RNA, 19 nt, Artificial Sequence
  Description of Artificial Sequence: Synthetic oligonucleotide
aacacacacacacacaaga

SEQ ID NO: 602402 - RNA, 19 nt, Artificial Sequence
  Description of Artificial Sequence: Synthetic oligonucleotide
aaaaggcggaucucguacc

SEQ ID NO: 602403 - RNA, 19 nt, Artificial Sequence
  Description of Artificial Sequence: Synthetic oligonucleotide
acuaaacagcuucugcucc

SEQ ID NO: 602404 - RNA, 19 nt, Artificial Sequence
  Description of Artificial Sequence: Synthetic oligonucleotide
uagacuuaucugcaguucg

SEQ ID NO: 602405 - RNA, 19 nt, Artificial Sequence
  Description of Artificial Sequence: Synthetic oligonucleotide
cauacaaauaucugcagac

SEQ ID NO: 602406 - RNA, 19 nt, Artificial Sequence
  Description of Artificial Sequence: Synthetic oligonucleotide
uuuaguuucuugcacugug

SEQ ID NO: 602407 - RNA, 19 nt, Artificial Sequence
  Description of Artificial Sequence: Synthetic oligonucleotide
ucaaaaucguaucuggcga

SEQ ID NO: 602408 - RNA, 19 nt, Artificial Sequence
  Description of Artificial Sequence: Synthetic oligonucleotide
aaccuguacauggucaucc

SEQ ID NO: 602409 - RNA, 19 nt, Artificial Sequence
  Description of Artificial Sequence: Synthetic oligonucleotide
auaucauggaauacggugc

SEQ ID NO: 602410 - RNA, 19 nt, Artificial Sequence
  Description of Artificial Sequence: Synthetic oligonucleotide
uaguguaucuaccugcugc

SEQ ID NO: 602411 - RNA, 19 nt, Artificial Sequence
  Description of Artificial Sequence: Synthetic oligonucleotide
aggauuacugaacucgugg

SEQ ID NO: 602412 - RNA, 19 nt, Artificial Sequence
  Description of Artificial Sequence: Synthetic oligonucleotide
uauuguauccauccaguug

SEQ ID NO: 602413 - RNA, 19 nt, Artificial Sequence
  Description of Artificial Sequence: Synthetic oligonucleotide
ugaaggacguuccucauca

SEQ ID NO: 602414 - RNA, 19 nt, Artificial Sequence
  Description of Artificial Sequence: Synthetic oligonucleotide
agggacaaugguaagaagc

SEQ ID NO: 602415 - RNA, 19 nt, Artificial Sequence
  Description of Artificial Sequence: Synthetic oligonucleotide
cauguaaagaaauaugcca

SEQ ID NO: 602416 - RNA, 19 nt, Artificial Sequence
  Description of Artificial Sequence: Synthetic oligonucleotide
aauugcaugacauggcuuu

SEQ ID NO: 602417 - RNA, 19 nt, Artificial Sequence
  Description of Artificial Sequence: Synthetic oligonucleotide
uacugguagacuuaucugc

SEQ ID NO: 602418 - RNA, 19 nt, Artificial Sequence
  Description of Artificial Sequence: Synthetic oligonucleotide
aaauaugauagggguaggg

SEQ ID NO: 602419 - RNA, 19 nt, Artificial Sequence
  Description of Artificial Sequence: Synthetic oligonucleotide
ucucguaccauccggacca

SEQ ID NO: 602420 - RNA, 19 nt, Artificial Sequence
  Description of Artificial Sequence: Synthetic oligonucleotide
uaaaguguagauuucucuc

SEQ ID NO: 602421 - RNA, 19 nt, Artificial Sequence
  Description of Artificial Sequence: Synthetic oligonucleotide
uuucuguguagccucuugg

SEQ ID NO: 602422 - RNA, 19 nt, Artificial Sequence
  Description of Artificial Sequence: Synthetic oligonucleotide
uaguaacacacacacacac

SEQ ID NO: 602423 - RNA, 19 nt, Artificial Sequence
  Description of Artificial Sequence: Synthetic oligonucleotide
gauguuggcuauuguaucc

SEQ ID NO: 602424 - RNA, 19 nt, Artificial Sequence
  Description of Artificial Sequence: Synthetic oligonucleotide
ucguggauaaugcaaauau

SEQ ID NO: 602425 - RNA, 19 nt, Artificial Sequence
  Description of Artificial Sequence: Synthetic oligonucleotide
cagauaucauggaauacgg

SEQ ID NO: 602426 - RNA, 19 nt, Artificial Sequence
  Description of Artificial Sequence: Synthetic oligonucleotide
cuuaauugcaugacauggc

SEQ ID NO: 602427 - RNA, 19 nt, Artificial Sequence
  Description of Artificial Sequence: Synthetic oligonucleotide
uuguauauuucuucuauau

SEQ ID NO: 602428 - RNA, 19 nt, Artificial Sequence
  Description of Artificial Sequence: Synthetic oligonucleotide
uauaacaaacugagccagg

SEQ ID NO: 602429 - RNA, 19 nt, Artificial Sequence
  Description of Artificial Sequence: Synthetic oligonucleotide
ucuucauuagacugcacgu

SEQ ID NO: 602430 - RNA, 19 nt, Artificial Sequence
  Description of Artificial Sequence: Synthetic oligonucleotide
uugauguuggcuauuguau

SEQ ID NO: 602431 - RNA, 19 nt, Artificial Sequence
  Description of Artificial Sequence: Synthetic oligonucleotide
cuauuugcccuucaaauuc

SEQ ID NO: 602432 - RNA, 19 nt, Artificial Sequence
  Description of Artificial Sequence: Synthetic oligonucleotide
acacacacacacaagacac

SEQ ID NO: 602433 - RNA, 19 nt, Artificial Sequence
  Description of Artificial Sequence: Synthetic oligonucleotide
auauaacaaacugagccag

SEQ ID NO: 602434 - RNA, 19 nt, Artificial Sequence
  Description of Artificial Sequence: Synthetic oligonucleotide
aguccuaaaggaaaaggcg

SEQ ID NO: 602435 - RNA, 19 nt, Artificial Sequence
  Description of Artificial Sequence: Synthetic oligonucleotide
aaaucguaucuggcgaagc

SEQ ID NO: 602436 - RNA, 19 nt, Artificial Sequence
  Description of Artificial Sequence: Synthetic oligonucleotide
ucgaguggcuucaaggaag

SEQ ID NO: 602437 - RNA, 19 nt, Artificial Sequence
  Description of Artificial Sequence: Synthetic oligonucleotide
aacgaagucuagaaaagug

SEQ ID NO: 602438 - RNA, 19 nt, Artificial Sequence
  Description of Artificial Sequence: Synthetic oligonucleotide
aacauugggaggauuacug

SEQ ID NO: 602439 - RNA, 19 nt, Artificial Sequence
  Description of Artificial Sequence: Synthetic oligonucleotide
uuacaauuggugcauuuuc

SEQ ID NO: 602440 - RNA, 19 nt, Artificial Sequence
  Description of Artificial Sequence: Synthetic oligonucleotide
gaaaaggcggaucucguac

SEQ ID NO: 602441 - RNA, 19 nt, Artificial Sequence
  Description of Artificial Sequence: Synthetic oligonucleotide
cuaccugcugcauugggcg

SEQ ID NO: 602442 - RNA, 19 nt, Artificial Sequence
  Description of Artificial Sequence: Synthetic oligonucleotide
uguuccuuauauauuuccu

SEQ ID NO: 602443 - RNA, 19 nt, Artificial Sequence
  Description of Artificial Sequence: Synthetic oligonucleotide
ucaaaucgguuuacaauug

SEQ ID NO: 602444 - RNA, 19 nt, Artificial Sequence
  Description of Artificial Sequence: Synthetic oligonucleotide
aaauaacuagaaugcucug

SEQ ID NO: 602445 - RNA, 19 nt, Artificial Sequence
  Description of Artificial Sequence: Synthetic oligonucleotide
ugugcauagucaaaucggu

SEQ ID NO: 602446 - RNA, 19 nt, Artificial Sequence
  Description of Artificial Sequence: Synthetic oligonucleotide
cucauuagcacugacucag

SEQ ID NO: 602447 - RNA, 19 nt, Artificial Sequence
  Description of Artificial Sequence: Synthetic oligonucleotide
gaagagcccacuuaguaca

SEQ ID NO: 602448 - RNA, 19 nt, Artificial Sequence
  Description of Artificial Sequence: Synthetic oligonucleotide
aaucgguuuacaauuggug

SEQ ID NO: 602449 - RNA, 19 nt, Artificial Sequence
  Description of Artificial Sequence: Synthetic oligonucleotide
aaucguaucuggcgaagcu

SEQ ID NO: 602450 - RNA, 19 nt, Artificial Sequence
  Description of Artificial Sequence: Synthetic oligonucleotide
cugaccgaggguuaguugc

SEQ ID NO: 602451 - RNA, 19 nt, Artificial Sequence
  Description of Artificial Sequence: Synthetic oligonucleotide
auccggaccauucacaaca

SEQ ID NO: 602452 - RNA, 19 nt, Artificial Sequence
  Description of Artificial Sequence: Synthetic oligonucleotide
cacucauuagcacugacuc

SEQ ID NO: 602453 - RNA, 19 nt, Artificial Sequence
  Description of Artificial Sequence: Synthetic oligonucleotide
uauuuggucuaguaccuga

SEQ ID NO: 602454 - RNA, 19 nt, Artificial Sequence
  Description of Artificial Sequence: Synthetic oligonucleotide
agacauuacuuuuggaagu

SEQ ID NO: 602455 - RNA, 19 nt, Artificial Sequence
  Description of Artificial Sequence: Synthetic oligonucleotide
uuacaagucgggcucugag

SEQ ID NO: 602456 - RNA, 19 nt, Artificial Sequence
  Description of Artificial Sequence: Synthetic oligonucleotide
uaggguacuucuuuaaauc

SEQ ID NO: 602457 - RNA, 19 nt, Artificial Sequence
  Description of Artificial Sequence: Synthetic oligonucleotide
guccuaaaggaaaaggcgg

SEQ ID NO: 602458 - RNA, 19 nt, Artificial Sequence
  Description of Artificial Sequence: Synthetic oligonucleotide
agucaaaucgguuuacaau

SEQ ID NO: 602459 - RNA, 19 nt, Artificial Sequence
  Description of Artificial Sequence: Synthetic oligonucleotide
gauaucagcgguacauggg

SEQ ID NO: 602460 - RNA, 19 nt, Artificial Sequence
  Description of Artificial Sequence: Synthetic oligonucleotide
ucuaccugcugcauugggc

SEQ ID NO: 602461 - RNA, 19 nt, Artificial Sequence
  Description of Artificial Sequence: Synthetic oligonucleotide
agaguccuaaaggaaaagg

SEQ ID NO: 602462 - RNA, 19 nt, Artificial Sequence
  Description of Artificial Sequence: Synthetic oligonucleotide
uguuccgaacauugggagg

SEQ ID NO: 602463 - RNA, 19 nt, Artificial Sequence
  Description of Artificial Sequence: Synthetic oligonucleotide
uuguuccgaacauugggag

SEQ ID NO: 602464 - RNA, 19 nt, Artificial Sequence
  Description of Artificial Sequence: Synthetic oligonucleotide
uuaggguacuucuuuaaau

SEQ ID NO: 602465 - RNA, 19 nt, Artificial Sequence
  Description of Artificial Sequence: Synthetic oligonucleotide
uaguaccugauccauauuu

SEQ ID NO: 602466 - RNA, 19 nt, Artificial Sequence
  Description of Artificial Sequence: Synthetic oligonucleotide
ugccaaauauaaacacuag

SEQ ID NO: 602467 - RNA, 19 nt, Artificial Sequence
  Description of Artificial Sequence: Synthetic oligonucleotide
aucucguaccauccggacc

SEQ ID NO: 602468 - RNA, 19 nt, Artificial Sequence
  Description of Artificial Sequence: Synthetic oligonucleotide
uccuaaaggaaaaggcgga

SEQ ID NO: 602469 - RNA, 19 nt, Artificial Sequence
  Description of Artificial Sequence: Synthetic oligonucleotide
uucgcuuaauugcaugaca

SEQ ID NO: 602470 - RNA, 19 nt, Artificial Sequence
  Description of Artificial Sequence: Synthetic oligonucleotide
gauacgguuccucucuggc

SEQ ID NO: 602471 - RNA, 19 nt, Artificial Sequence
  Description of Artificial Sequence: Synthetic oligonucleotide
ucagauaucagcgguacau

SEQ ID NO: 602472 - RNA, 19 nt, Artificial Sequence
  Description of Artificial Sequence: Synthetic oligonucleotide
auaucagcgguacauggga

SEQ ID NO: 602473 - RNA, 19 nt, Artificial Sequence
  Description of Artificial Sequence: Synthetic oligonucleotide
uagaucugugaucccacag

SEQ ID NO: 602474 - RNA, 19 nt, Artificial Sequence
  Description of Artificial Sequence: Synthetic oligonucleotide
gaauuuccugcugugcugg

SEQ ID NO: 602475 - RNA, 19 nt, Artificial Sequence
  Description of Artificial Sequence: Synthetic oligonucleotide
auagguuauaaagacauua

SEQ ID NO: 602476 - RNA, 19 nt, Artificial Sequence
  Description of Artificial Sequence: Synthetic oligonucleotide
aagauaaagcaaauacaca

SEQ ID NO: 602477 - RNA, 19 nt, Artificial Sequence
  Description of Artificial Sequence: Synthetic oligonucleotide
guuaguugccauuauagua

SEQ ID NO: 602478 - RNA, 19 nt, Artificial Sequence
  Description of Artificial Sequence: Synthetic oligonucleotide
gccaaauauaaacacuagg

SEQ ID NO: 602479 - RNA, 19 nt, Artificial Sequence
  Description of Artificial Sequence: Synthetic oligonucleotide
auugggcgcagguagauga

SEQ ID NO: 602480 - RNA, 19 nt, Artificial Sequence
  Description of Artificial Sequence: Synthetic oligonucleotide
uaucauggaauacggugcu

SEQ ID NO: 602481 - RNA, 19 nt, Artificial Sequence
  Description of Artificial Sequence: Synthetic oligonucleotide
guaacacacacacacacaa

SEQ ID NO: 602482 - RNA, 19 nt, Artificial Sequence
  Description of Artificial Sequence: Synthetic oligonucleotide
gagaucuccucuccuauug

SEQ ID NO: 602483 - RNA, 19 nt, Artificial Sequence
  Description of Artificial Sequence: Synthetic oligonucleotide
aaaaucguaucuggcgaag

SEQ ID NO: 602484 - RNA, 19 nt, Artificial Sequence
  Description of Artificial Sequence: Synthetic oligonucleotide
ugcuaguucuccuuuggga

SEQ ID NO: 602485 - RNA, 19 nt, Artificial Sequence
  Description of Artificial Sequence: Synthetic oligonucleotide
ucuauuugcccuucaaauu

SEQ ID NO: 602486 - RNA, 19 nt, Artificial Sequence
  Description of Artificial Sequence: Synthetic oligonucleotide
uccuauugucuccauacaa

SEQ ID NO: 602487 - RNA, 19 nt, Artificial Sequence
  Description of Artificial Sequence: Synthetic oligonucleotide
auuagcacugacucagaca

SEQ ID NO: 602488 - RNA, 19 nt, Artificial Sequence
  Description of Artificial Sequence: Synthetic oligonucleotide
acuuaguacagaagcaguc

SEQ ID NO: 602489 - RNA, 19 nt, Artificial Sequence
  Description of Artificial Sequence: Synthetic oligonucleotide
agauguauaaacauagguu

SEQ ID NO: 602490 - RNA, 19 nt, Artificial Sequence
  Description of Artificial Sequence: Synthetic oligonucleotide
uuauaguaacacacacaca

SEQ ID NO: 602491 - RNA, 19 nt, Artificial Sequence
  Description of Artificial Sequence: Synthetic oligonucleotide
caaaucgguuuacaauugg

SEQ ID NO: 602492 - RNA, 19 nt, Artificial Sequence
  Description of Artificial Sequence: Synthetic oligonucleotide
aucacugguacugguagac

SEQ ID NO: 602493 - RNA, 19 nt, Artificial Sequence
  Description of Artificial Sequence: Synthetic oligonucleotide
auugggaggauuacugaac

SEQ ID NO: 602494 - RNA, 19 nt, Artificial Sequence
  Description of Artificial Sequence: Synthetic oligonucleotide
ucgcuuaauugcaugacau

SEQ ID NO: 602495 - RNA, 19 nt, Artificial Sequence
  Description of Artificial Sequence: Synthetic oligonucleotide
aaggacguuccucaucaga

SEQ ID NO: 602496 - RNA, 19 nt, Artificial Sequence
  Description of Artificial Sequence: Synthetic oligonucleotide
uagaugauacgguuccucu

SEQ ID NO: 602497 - RNA, 19 nt, Artificial Sequence
  Description of Artificial Sequence: Synthetic oligonucleotide
uuacugaacucguggauaa

SEQ ID NO: 602498 - RNA, 19 nt, Artificial Sequence
  Description of Artificial Sequence: Synthetic oligonucleotide
caggggagcagacacauug

SEQ ID NO: 602499 - RNA, 19 nt, Artificial Sequence
  Description of Artificial Sequence: Synthetic oligonucleotide
uaacacacacacacacaag

SEQ ID NO: 602500 - RNA, 19 nt, Artificial Sequence
  Description of Artificial Sequence: Synthetic oligonucleotide
ucguaucuggcgaagcugu

SEQ ID NO: 602501 - RNA, 19 nt, Artificial Sequence
  Description of Artificial Sequence: Synthetic oligonucleotide
acucagauaucagcgguac

SEQ ID NO: 602502 - RNA, 19 nt, Artificial Sequence
  Description of Artificial Sequence: Synthetic oligonucleotide
agaacgaagucuagaaaag

SEQ ID NO: 602503 - RNA, 19 nt, Artificial Sequence
  Description of Artificial Sequence: Synthetic oligonucleotide
cugacucagauaucagcgg

SEQ ID NO: 602504 - RNA, 19 nt, Artificial Sequence
  Description of Artificial Sequence: Synthetic oligonucleotide
uuaguacagaagcagucuu

SEQ ID NO: 602505 - RNA, 19 nt, Artificial Sequence
  Description of Artificial Sequence: Synthetic oligonucleotide
ucgucuucaaaaucguauc

SEQ ID NO: 602506 - RNA, 19 nt, Artificial Sequence
  Description of Artificial Sequence: Synthetic oligonucleotide
aguguaucuaccugcugca

SEQ ID NO: 602507 - RNA, 19 nt, Artificial Sequence
  Description of Artificial Sequence: Synthetic oligonucleotide
ugauguuggcuauuguauc

SEQ ID NO: 602508 - RNA, 19 nt, Artificial Sequence
  Description of Artificial Sequence: Synthetic oligonucleotide
uggaauacggugcuccauc

SEQ ID NO: 602509 - RNA, 19 nt, Artificial Sequence
  Description of Artificial Sequence: Synthetic oligonucleotide
aaaucgguuuacaauuggu

SEQ ID NO: 602510 - RNA, 19 nt, Artificial Sequence
  Description of Artificial Sequence: Synthetic oligonucleotide
gggaggauuacugaacucg

SEQ ID NO: 602511 - RNA, 19 nt, Artificial Sequence
  Description of Artificial Sequence: Synthetic oligonucleotide
ugguaagaagcagaguaca

SEQ ID NO: 602512 - RNA, 19 nt, Artificial Sequence
  Description of Artificial Sequence: Synthetic oligonucleotide
acaagucgggcucugagaa

SEQ ID NO: 602513 - RNA, 19 nt, Artificial Sequence
  Description of Artificial Sequence: Synthetic oligonucleotide
uaccugauccauauuuagu

SEQ ID NO: 602514 - RNA, 19 nt, Artificial Sequence
  Description of Artificial Sequence: Synthetic oligonucleotide
agaguacaugggcucaguc

SEQ ID NO: 602515 - RNA, 19 nt, Artificial Sequence
  Description of Artificial Sequence: Synthetic oligonucleotide
uugccauuauaguaacaca

SEQ ID NO: 602516 - RNA, 19 nt, Artificial Sequence
  Description of Artificial Sequence: Synthetic oligonucleotide
gacauuacuuuuggaagug

SEQ ID NO: 602517 - RNA, 19 nt, Artificial Sequence
  Description of Artificial Sequence: Synthetic oligonucleotide
gaguacaugggcucaguca

SEQ ID NO: 602518 - RNA, 19 nt, Artificial Sequence
  Description of Artificial Sequence: Synthetic oligonucleotide
agaugacuucuuuaaauua

SEQ ID NO: 602519 - RNA, 19 nt, Artificial Sequence
  Description of Artificial Sequence: Synthetic oligonucleotide
uagucaaaucgguuuacaa

SEQ ID NO: 602520 - RNA, 19 nt, Artificial Sequence
  Description of Artificial Sequence: Synthetic oligonucleotide
uucaguauuuggucuagua

SEQ ID NO: 602521 - RNA, 19 nt, Artificial Sequence
  Description of Artificial Sequence: Synthetic oligonucleotide
ugauacgguuccucucugg

SEQ ID NO: 602522 - RNA, 19 nt, Artificial Sequence
  Description of Artificial Sequence: Synthetic oligonucleotide
ucgcuuucgcuuaauugca

SEQ ID NO: 602523 - RNA, 19 nt, Artificial Sequence
  Description of Artificial Sequence: Synthetic oligonucleotide
uuagacugcacgucacaac

SEQ ID NO: 602524 - RNA, 19 nt, Artificial Sequence
  Description of Artificial Sequence: Synthetic oligonucleotide
acacacacacaagacacag

SEQ ID NO: 602525 - RNA, 19 nt, Artificial Sequence
  Description of Artificial Sequence: Synthetic oligonucleotide
aaaggcggaucucguacca

SEQ ID NO: 602526 - RNA, 19 nt, Artificial Sequence
  Description of Artificial Sequence: Synthetic oligonucleotide
acagacugaagggacaaug

SEQ ID NO: 602527 - RNA, 19 nt, Artificial Sequence
  Description of Artificial Sequence: Synthetic oligonucleotide
uggcgcauuucugagaucu

SEQ ID NO: 602528 - RNA, 19 nt, Artificial Sequence
  Description of Artificial Sequence: Synthetic oligonucleotide
ucauuagacugcacgucac

SEQ ID NO: 602529 - RNA, 19 nt, Artificial Sequence
  Description of Artificial Sequence: Synthetic oligonucleotide
aguuggucauggugacucc

SEQ ID NO: 602530 - RNA, 19 nt, Artificial Sequence
  Description of Artificial Sequence: Synthetic oligonucleotide
gacguuccucaucagaaca

SEQ ID NO: 602531 - RNA, 19 nt, Artificial Sequence
  Description of Artificial Sequence: Synthetic oligonucleotide
guacugguagacuuaucug

SEQ ID NO: 602532 - RNA, 19 nt, Artificial Sequence
  Description of Artificial Sequence: Synthetic oligonucleotide
aguacagaagcagucuucu

SEQ ID NO: 602533 - RNA, 19 nt, Artificial Sequence
  Description of Artificial Sequence: Synthetic oligonucleotide
uucaucuggcgcauuucug

SEQ ID NO: 602534 - RNA, 19 nt, Artificial Sequence
  Description of Artificial Sequence: Synthetic oligonucleotide
uuguauccauccaguugcg

SEQ ID NO: 602535 - RNA, 19 nt, Artificial Sequence
  Description of Artificial Sequence: Synthetic oligonucleotide
cugcauugggcgcagguag

SEQ ID NO: 602536 - RNA, 19 nt, Artificial Sequence
  Description of Artificial Sequence: Synthetic oligonucleotide
agacugaagggacaauggu

SEQ ID NO: 602537 - RNA, 19 nt, Artificial Sequence
  Description of Artificial Sequence: Synthetic oligonucleotide
gguaggggccacuaaacag

SEQ ID NO: 602538 - RNA, 19 nt, Artificial Sequence
  Description of Artificial Sequence: Synthetic oligonucleotide
uggucuaguaccugaucca

SEQ ID NO: 602539 - RNA, 19 nt, Artificial Sequence
  Description of Artificial Sequence: Synthetic oligonucleotide
acugaacucguggauaaug

SEQ ID NO: 602540 - RNA, 19 nt, Artificial Sequence
  Description of Artificial Sequence: Synthetic oligonucleotide
ugucccuuccuccgagggg

SEQ ID NO: 602541 - RNA, 19 nt, Artificial Sequence
  Description of Artificial Sequence: Synthetic oligonucleotide
uuaguguaucuaccugcug

SEQ ID NO: 602542 - RNA, 19 nt, Artificial Sequence
  Description of Artificial Sequence: Synthetic oligonucleotide
uacaagucgggcucugaga

SEQ ID NO: 602543 - RNA, 19 nt, Artificial Sequence
  Description of Artificial Sequence: Synthetic oligonucleotide
uuugcccuucaaauucaug

SEQ ID NO: 602544 - RNA, 19 nt, Artificial Sequence
  Description of Artificial Sequence: Synthetic oligonucleotide
ggaucacugguacugguag

SEQ ID NO: 602545 - RNA, 19 nt, Artificial Sequence
  Description of Artificial Sequence: Synthetic oligonucleotide
ggcuauuguauccauccag

SEQ ID NO: 602546 - RNA, 19 nt, Artificial Sequence
  Description of Artificial Sequence: Synthetic oligonucleotide
uaguacagaagcagucuuc

SEQ ID NO: 602547 - RNA, 19 nt, Artificial Sequence
  Description of Artificial Sequence: Synthetic oligonucleotide
agucuagaaaagugaacaa

SEQ ID NO: 602548 - RNA, 19 nt, Artificial Sequence
  Description of Artificial Sequence: Synthetic oligonucleotide
acacacacacacacaagac

SEQ ID NO: 602549 - RNA, 19 nt, Artificial Sequence
  Description of Artificial Sequence: Synthetic oligonucleotide
ucuucaguauuuggucuag

SEQ ID NO: 602550 - RNA, 19 nt, Artificial Sequence
  Description of Artificial Sequence: Synthetic oligonucleotide
guucgaguggcuucaagga

SEQ ID NO: 602551 - RNA, 19 nt, Artificial Sequence
  Description of Artificial Sequence: Synthetic oligonucleotide
uucgaguggcuucaaggaa

SEQ ID NO: 602552 - RNA, 19 nt, Artificial Sequence
  Description of Artificial Sequence: Synthetic oligonucleotide
cucggcugguugaaggacg

SEQ ID NO: 602553 - RNA, 19 nt, Artificial Sequence
  Description of Artificial Sequence: Synthetic oligonucleotide
ggguuaguugccauuauag

SEQ ID NO: 602554 - RNA, 19 nt, Artificial Sequence
  Description of Artificial Sequence: Synthetic oligonucleotide
agcgguacaugggacaguc

SEQ ID NO: 602555 - RNA, 19 nt, Artificial Sequence
  Description of Artificial Sequence: Synthetic oligonucleotide
aacucguggauaaugcaaa

SEQ ID NO: 602556 - RNA, 19 nt, Artificial Sequence
  Description of Artificial Sequence: Synthetic oligonucleotide
acgaagucuagaaaaguga

SEQ ID NO: 602557 - RNA, 19 nt, Artificial Sequence
  Description of Artificial Sequence: Synthetic oligonucleotide
uguccucaccuguagcccc

SEQ ID NO: 602558 - RNA, 19 nt, Artificial Sequence
  Description of Artificial Sequence: Synthetic oligonucleotide
cuggauacauccacuucug

SEQ ID NO: 602559 - RNA, 19 nt, Artificial Sequence
  Description of Artificial Sequence: Synthetic oligonucleotide
gccgcuuuggaccagaaga

SEQ ID NO: 602560 - RNA, 19 nt, Artificial Sequence
  Description of Artificial Sequence: Synthetic oligonucleotide
auuacugaacucguggaua

SEQ ID NO: 602561 - RNA, 19 nt, Artificial Sequence
  Description of Artificial Sequence: Synthetic oligonucleotide
uccaaaguuaguguaucua

SEQ ID NO: 602562 - RNA, 19 nt, Artificial Sequence
  Description of Artificial Sequence: Synthetic oligonucleotide
aggcggaucucguaccauc

SEQ ID NO: 602563 - RNA, 19 nt, Artificial Sequence
  Description of Artificial Sequence: Synthetic oligonucleotide
cauuagcacugacucagac

SEQ ID NO: 602564 - RNA, 19 nt, Artificial Sequence
  Description of Artificial Sequence: Synthetic oligonucleotide
cauagaugguacucucuuc

SEQ ID NO: 602565 - RNA, 19 nt, Artificial Sequence
  Description of Artificial Sequence: Synthetic oligonucleotide
ugaccgaggguuaguugcc

SEQ ID NO: 602566 - RNA, 19 nt, Artificial Sequence
  Description of Artificial Sequence: Synthetic oligonucleotide
acucauuagcacugacuca

SEQ ID NO: 602567 - RNA, 19 nt, Artificial Sequence
  Description of Artificial Sequence: Synthetic oligonucleotide
guacccugcaccugguagc

SEQ ID NO: 602568 - RNA, 19 nt, Artificial Sequence
  Description of Artificial Sequence: Synthetic oligonucleotide
cuaaaguguagauuucucu

SEQ ID NO: 602569 - RNA, 19 nt, Artificial Sequence
  Description of Artificial Sequence: Synthetic oligonucleotide
uaucagcgguacaugggac

SEQ ID NO: 602570 - RNA, 19 nt, Artificial Sequence
  Description of Artificial Sequence: Synthetic oligonucleotide
aucagcgguacaugggaca

SEQ ID NO: 602571 - RNA, 19 nt, Artificial Sequence
  Description of Artificial Sequence: Synthetic oligonucleotide
ucugaccgaggguuaguug

SEQ ID NO: 602572 - RNA, 19 nt, Artificial Sequence
  Description of Artificial Sequence: Synthetic oligonucleotide
gaggguagucuucauuaga

SEQ ID NO: 602573 - RNA, 19 nt, Artificial Sequence
  Description of Artificial Sequence: Synthetic oligonucleotide
gaucucguaccauccggac

SEQ ID NO: 602574 - RNA, 19 nt, Artificial Sequence
  Description of Artificial Sequence: Synthetic oligonucleotide
cacacacacacacaagaca

SEQ ID NO: 602575 - RNA, 19 nt, Artificial Sequence
  Description of Artificial Sequence: Synthetic oligonucleotide
caguuggucauggugacuc

SEQ ID NO: 602576 - RNA, 19 nt, Artificial Sequence
  Description of Artificial Sequence: Synthetic oligonucleotide
gguacugguagacuuaucu

SEQ ID NO: 602577 - RNA, 19 nt, Artificial Sequence
  Description of Artificial Sequence: Synthetic oligonucleotide
ugcaguucgcuuucgcuua

SEQ ID NO: 602578 - RNA, 19 nt, Artificial Sequence
  Description of Artificial Sequence: Synthetic oligonucleotide
ggaccauucacaacacagg

SEQ ID NO: 602579 - RNA, 19 nt, Artificial Sequence
  Description of Artificial Sequence: Synthetic oligonucleotide
cuucauuagacugcacguc

SEQ ID NO: 602580 - RNA, 19 nt, Artificial Sequence
  Description of Artificial Sequence: Synthetic oligonucleotide
guccuuacaagucgggcuc

SEQ ID NO: 602581 - RNA, 19 nt, Artificial Sequence
  Description of Artificial Sequence: Synthetic oligonucleotide
gaacucguggauaaugcaa

SEQ ID NO: 602582 - RNA, 19 nt, Artificial Sequence
  Description of Artificial Sequence: Synthetic oligonucleotide
uggcuauuguauccaucca

SEQ ID NO: 602583 - RNA, 19 nt, Artificial Sequence
  Description of Artificial Sequence: Synthetic oligonucleotide
caagaaccuguacaugguc

SEQ ID NO: 602584 - RNA, 19 nt, Artificial Sequence
  Description of Artificial Sequence: Synthetic oligonucleotide
cugcuaguucuccuuuggg

SEQ ID NO: 602585 - RNA, 19 nt, Artificial Sequence
  Description of Artificial Sequence: Synthetic oligonucleotide
uacuuaggguacuucuuua

SEQ ID NO: 602586 - RNA, 19 nt, Artificial Sequence
  Description of Artificial Sequence: Synthetic oligonucleotide
ccuauauaacaaacugagc

SEQ ID NO: 602587 - RNA, 19 nt, Artificial Sequence
  Description of Artificial Sequence: Synthetic oligonucleotide
ucauuagcacugacucaga

SEQ ID NO: 602588 - RNA, 19 nt, Artificial Sequence
  Description of Artificial Sequence: Synthetic oligonucleotide
uggauacauccacuucugu

SEQ ID NO: 602589 - RNA, 19 nt, Artificial Sequence
  Description of Artificial Sequence: Synthetic oligonucleotide
ucuuggccgcuuuggacca

SEQ ID NO: 602590 - RNA, 19 nt, Artificial Sequence
  Description of Artificial Sequence: Synthetic oligonucleotide
cucagccaagggaagucag

SEQ ID NO: 602591 - RNA, 19 nt, Artificial Sequence
  Description of Artificial Sequence: Synthetic oligonucleotide
auagucaaaucgguuuaca

SEQ ID NO: 602592 - RNA, 19 nt, Artificial Sequence
  Description of Artificial Sequence: Synthetic oligonucleotide
aucguaucuggcgaagcug

SEQ ID NO: 602593 - RNA, 19 nt, Artificial Sequence
  Description of Artificial Sequence: Synthetic oligonucleotide
aacacccucuaaaguguag

SEQ ID NO: 602594 - RNA, 19 nt, Artificial Sequence
  Description of Artificial Sequence: Synthetic oligonucleotide
aaauugccaccacgcgcug

SEQ ID NO: 602595 - RNA, 19 nt, Artificial Sequence
  Description of Artificial Sequence: Synthetic oligonucleotide
auuagacugcacgucacaa

SEQ ID NO: 602596 - RNA, 19 nt, Artificial Sequence
  Description of Artificial Sequence: Synthetic oligonucleotide
gucuagaaaagugaacaaa

SEQ ID NO: 602597 - RNA, 19 nt, Artificial Sequence
  Description of Artificial Sequence: Synthetic oligonucleotide
aguaacacacacacacaca

SEQ ID NO: 602598 - RNA, 19 nt, Artificial Sequence
  Description of Artificial Sequence: Synthetic oligonucleotide
auaguaacacacacacaca

SEQ ID NO: 602599 - RNA, 19 nt, Artificial Sequence
  Description of Artificial Sequence: Synthetic oligonucleotide
cauugggaggauuacugaa

SEQ ID NO: 602600 - RNA, 19 nt, Artificial Sequence
  Description of Artificial Sequence: Synthetic oligonucleotide
gucacaugacauugagaac

SEQ ID NO: 602601 - RNA, 19 nt, Artificial Sequence
  Description of Artificial Sequence: Synthetic oligonucleotide
gcauggauaaacaucaucu

SEQ ID NO: 602602 - RNA, 19 nt, Artificial Sequence
  Description of Artificial Sequence: Synthetic oligonucleotide
cuggaauuuccugcugugc

SEQ ID NO: 602603 - RNA, 19 nt, Artificial Sequence
  Description of Artificial Sequence: Synthetic oligonucleotide
uguauacaauuuccauguu

SEQ ID NO: 602604 - RNA, 19 nt, Artificial Sequence
  Description of Artificial Sequence: Synthetic oligonucleotide
cauagucaaaucgguuuac

SEQ ID NO: 602605 - RNA, 19 nt, Artificial Sequence
  Description of Artificial Sequence: Synthetic oligonucleotide
ccugguagcauggauaaac

SEQ ID NO: 602606 - RNA, 19 nt, Artificial Sequence
  Description of Artificial Sequence: Synthetic oligonucleotide
augguacucucuucgucgu

SEQ ID NO: 602607 - RNA, 19 nt, Artificial Sequence
  Description of Artificial Sequence: Synthetic oligonucleotide
gaggauuacugaacucgug

SEQ ID NO: 602608 - RNA, 19 nt, Artificial Sequence
  Description of Artificial Sequence: Synthetic oligonucleotide
aacuucugacucagauauc

SEQ ID NO: 602609 - RNA, 19 nt, Artificial Sequence
  Description of Artificial Sequence: Synthetic oligonucleotide
caccguccuuacaagucgg

SEQ ID NO: 602610 - RNA, 19 nt, Artificial Sequence
  Description of Artificial Sequence: Synthetic oligonucleotide
auuuaguuucuugcacugu

SEQ ID NO: 602611 - RNA, 19 nt, Artificial Sequence
  Description of Artificial Sequence: Synthetic oligonucleotide
uucauucagaugacuucuu

SEQ ID NO: 602612 - RNA, 19 nt, Artificial Sequence
  Description of Artificial Sequence: Synthetic oligonucleotide
guagaugauacgguuccuc

SEQ ID NO: 602613 - RNA, 19 nt, Artificial Sequence
  Description of Artificial Sequence: Synthetic oligonucleotide
ggauuacugaacucgugga

SEQ ID NO: 602614 - RNA, 19 nt, Artificial Sequence
  Description of Artificial Sequence: Synthetic oligonucleotide
ggaauacggugcuccaucc

SEQ ID NO: 602615 - RNA, 19 nt, Artificial Sequence
  Description of Artificial Sequence: Synthetic oligonucleotide
ucaucaugugcugggccug

SEQ ID NO: 602616 - RNA, 19 nt, Artificial Sequence
  Description of Artificial Sequence: Synthetic oligonucleotide
aggacguuccucaucagaa

SEQ ID NO: 602617 - RNA, 19 nt, Artificial Sequence
  Description of Artificial Sequence: Synthetic oligonucleotide
gauuacugaacucguggau

SEQ ID NO: 602618 - RNA, 19 nt, Artificial Sequence
  Description of Artificial Sequence: Synthetic oligonucleotide
ggugacuccaacaagauuu

SEQ ID NO: 602619 - RNA, 19 nt, Artificial Sequence
  Description of Artificial Sequence: Synthetic oligonucleotide
gaucacugguacugguaga

SEQ ID NO: 602620 - RNA, 19 nt, Artificial Sequence
  Description of Artificial Sequence: Synthetic oligonucleotide
ugaucccacaguuggucau

SEQ ID NO: 602621 - RNA, 19 nt, Artificial Sequence
  Description of Artificial Sequence: Synthetic oligonucleotide
cugguagcauggauaaaca

SEQ ID NO: 602622 - RNA, 19 nt, Artificial Sequence
  Description of Artificial Sequence: Synthetic oligonucleotide
accacgcgcugaaauacac

SEQ ID NO: 602623 - RNA, 19 nt, Artificial Sequence
  Description of Artificial Sequence: Synthetic oligonucleotide
gccacuaaacagcuucugc

SEQ ID NO: 602624 - RNA, 19 nt, Artificial Sequence
  Description of Artificial Sequence: Synthetic oligonucleotide
ucggcugguugaaggacgu

SEQ ID NO: 602625 - RNA, 19 nt, Artificial Sequence
  Description of Artificial Sequence: Synthetic oligonucleotide
cuucgucgucuucaaaauc

SEQ ID NO: 602626 - RNA, 19 nt, Artificial Sequence
  Description of Artificial Sequence: Synthetic oligonucleotide
acuuaucugcaguucgcuu

SEQ ID NO: 602627 - RNA, 19 nt, Artificial Sequence
  Description of Artificial Sequence: Synthetic oligonucleotide
augauacgguuccucucug

SEQ ID NO: 602628 - RNA, 19 nt, Artificial Sequence
  Description of Artificial Sequence: Synthetic oligonucleotide
gaauacggugcuccaucca

SEQ ID NO: 602629 - RNA, 19 nt, Artificial Sequence
  Description of Artificial Sequence: Synthetic oligonucleotide
acacccucuaaaguguaga

SEQ ID NO: 602630 - RNA, 19 nt, Artificial Sequence
  Description of Artificial Sequence: Synthetic oligonucleotide
cggaccauucacaacacag

SEQ ID NO: 602631 - RNA, 19 nt, Artificial Sequence
  Description of Artificial Sequence: Synthetic oligonucleotide
cagauaucagcgguacaug

SEQ ID NO: 602632 - RNA, 19 nt, Artificial Sequence
  Description of Artificial Sequence: Synthetic oligonucleotide
caaaaucguaucuggcgaa

SEQ ID NO: 602633 - RNA, 19 nt, Artificial Sequence
  Description of Artificial Sequence: Synthetic oligonucleotide
cgaaugcgcaccuuguucc

SEQ ID NO: 602634 - RNA, 19 nt, Artificial Sequence
  Description of Artificial Sequence: Synthetic oligonucleotide
aggguuaguugccauuaua

SEQ ID NO: 602635 - RNA, 19 nt, Artificial Sequence
  Description of Artificial Sequence: Synthetic oligonucleotide
gucagauaucauggaauac

SEQ ID NO: 602636 - RNA, 19 nt, Artificial Sequence
  Description of Artificial Sequence: Synthetic oligonucleotide
auguggaaauaaauaacua

SEQ ID NO: 602637 - RNA, 19 nt, Artificial Sequence
  Description of Artificial Sequence: Synthetic oligonucleotide
gcgcagguagaugauacgg

SEQ ID NO: 602638 - RNA, 19 nt, Artificial Sequence
  Description of Artificial Sequence: Synthetic oligonucleotide
uccggaccauucacaacac

SEQ ID NO: 602639 - RNA, 19 nt, Artificial Sequence
  Description of Artificial Sequence: Synthetic oligonucleotide
gcuuucgcuuaauugcaug

SEQ ID NO: 602640 - RNA, 19 nt, Artificial Sequence
  Description of Artificial Sequence: Synthetic oligonucleotide
uccgaggguagucuucauu

SEQ ID NO: 602641 - RNA, 19 nt, Artificial Sequence
  Description of Artificial Sequence: Synthetic oligonucleotide
ccacuuaguacagaagcag

SEQ ID NO: 602642 - RNA, 19 nt, Artificial Sequence
  Description of Artificial Sequence: Synthetic oligonucleotide
ugggaggauuacugaacuc

SEQ ID NO: 602643 - RNA, 19 nt, Artificial Sequence
  Description of Artificial Sequence: Synthetic oligonucleotide
agauaucauggaauacggu

SEQ ID NO: 602644 - RNA, 19 nt, Artificial Sequence
  Description of Artificial Sequence: Synthetic oligonucleotide
cugcacgucacaacucuca

SEQ ID NO: 602645 - RNA, 19 nt, Artificial Sequence
  Description of Artificial Sequence: Synthetic oligonucleotide
caagucgggcucugagaag

SEQ ID NO: 602646 - RNA, 19 nt, Artificial Sequence
  Description of Artificial Sequence: Synthetic oligonucleotide
aguaccugauccauauuua

SEQ ID NO: 602647 - RNA, 19 nt, Artificial Sequence
  Description of Artificial Sequence: Synthetic oligonucleotide
acauuacuuuuggaagugu

SEQ ID NO: 602648 - RNA, 19 nt, Artificial Sequence
  Description of Artificial Sequence: Synthetic oligonucleotide
aguucgcuuucgcuuaauu

SEQ ID NO: 602649 - RNA, 19 nt, Artificial Sequence
  Description of Artificial Sequence: Synthetic oligonucleotide
aucauggaauacggugcuc

SEQ ID NO: 602650 - RNA, 19 nt, Artificial Sequence
  Description of Artificial Sequence: Synthetic oligonucleotide
cauuagacugcacgucaca

SEQ ID NO: 602651 - RNA, 19 nt, Artificial Sequence
  Description of Artificial Sequence: Synthetic oligonucleotide
guaccauccggaccauuca

SEQ ID NO: 602652 - RNA, 19 nt, Artificial Sequence
  Description of Artificial Sequence: Synthetic oligonucleotide
cuuaguacagaagcagucu

SEQ ID NO: 602653 - RNA, 19 nt, Artificial Sequence
  Description of Artificial Sequence: Synthetic oligonucleotide
ugcgaaugcgcaccuuguu

SEQ ID NO: 602654 - RNA, 19 nt, Artificial Sequence
  Description of Artificial Sequence: Synthetic oligonucleotide
aauugccaccacgcgcuga

SEQ ID NO: 602655 - RNA, 19 nt, Artificial Sequence
  Description of Artificial Sequence: Synthetic oligonucleotide
cauccggaccauucacaac

SEQ ID NO: 602656 - RNA, 19 nt, Artificial Sequence
  Description of Artificial Sequence: Synthetic oligonucleotide
cagccacucccauuaguuc

SEQ ID NO: 602657 - RNA, 19 nt, Artificial Sequence
  Description of Artificial Sequence: Synthetic oligonucleotide
cagaugacuucuuuaaauu

SEQ ID NO: 602658 - RNA, 19 nt, Artificial Sequence
  Description of Artificial Sequence: Synthetic oligonucleotide
ggcgcagguagaugauacg

SEQ ID NO: 602659 - RNA, 19 nt, Artificial Sequence
  Description of Artificial Sequence: Synthetic oligonucleotide
guuaguguaucuaccugcu

SEQ ID NO: 602660 - RNA, 19 nt, Artificial Sequence
  Description of Artificial Sequence: Synthetic oligonucleotide
uagcauggauaaacaucau

SEQ ID NO: 602661 - RNA, 19 nt, Artificial Sequence
  Description of Artificial Sequence: Synthetic oligonucleotide
cacacacacacaagacaca

SEQ ID NO: 602662 - RNA, 19 nt, Artificial Sequence
  Description of Artificial Sequence: Synthetic oligonucleotide
cccaaaguuucuguguagc

SEQ ID NO: 602663 - RNA, 19 nt, Artificial Sequence
  Description of Artificial Sequence: Synthetic oligonucleotide
acugcacgucacaacucuc

SEQ ID NO: 602664 - RNA, 19 nt, Artificial Sequence
  Description of Artificial Sequence: Synthetic oligonucleotide
gguuaguugccauuauagu

SEQ ID NO: 602665 - RNA, 19 nt, Artificial Sequence
  Description of Artificial Sequence: Synthetic oligonucleotide
cacuuaguacagaagcagu

SEQ ID NO: 602666 - RNA, 19 nt, Artificial Sequence
  Description of Artificial Sequence: Synthetic oligonucleotide
gaacauugggaggauuacu

SEQ ID NO: 602667 - RNA, 19 nt, Artificial Sequence
  Description of Artificial Sequence: Synthetic oligonucleotide
aagggaagucagauaucau

SEQ ID NO: 602668 - RNA, 19 nt, Artificial Sequence
  Description of Artificial Sequence: Synthetic oligonucleotide
ccaguugcgaaugcgcacc

SEQ ID NO: 602669 - RNA, 19 nt, Artificial Sequence
  Description of Artificial Sequence: Synthetic oligonucleotide
uacaugggacagucugcuc

SEQ ID NO: 602670 - RNA, 19 nt, Artificial Sequence
  Description of Artificial Sequence: Synthetic oligonucleotide
aggaaaaggcggaucucgu

SEQ ID NO: 602671 - RNA, 19 nt, Artificial Sequence
  Description of Artificial Sequence: Synthetic oligonucleotide
cguggauaaugcaaauaug

SEQ ID NO: 602672 - RNA, 19 nt, Artificial Sequence
  Description of Artificial Sequence: Synthetic oligonucleotide
gaaccuguacauggucauc

SEQ ID NO: 602673 - RNA, 19 nt, Artificial Sequence
  Description of Artificial Sequence: Synthetic oligonucleotide
ggacguuccucaucagaac

SEQ ID NO: 602674 - RNA, 19 nt, Artificial Sequence
  Description of Artificial Sequence: Synthetic oligonucleotide
cuccuauugucuccauaca

SEQ ID NO: 602675 - RNA, 19 nt, Artificial Sequence
  Description of Artificial Sequence: Synthetic oligonucleotide
gcgaaugcgcaccuuguuc

SEQ ID NO: 602676 - RNA, 19 nt, Artificial Sequence
  Description of Artificial Sequence: Synthetic oligonucleotide
uccuuacaagucgggcucu

SEQ ID NO: 602677 - RNA, 19 nt, Artificial Sequence
  Description of Artificial Sequence: Synthetic oligonucleotide
ugccuucauucagaugacu

SEQ ID NO: 602678 - RNA, 19 nt, Artificial Sequence
  Description of Artificial Sequence: Synthetic oligonucleotide
acgucacaacucucaggcu

SEQ ID NO: 602679 - RNA, 19 nt, Artificial Sequence
  Description of Artificial Sequence: Synthetic oligonucleotide
ugguacugguagacuuauc

SEQ ID NO: 602680 - RNA, 19 nt, Artificial Sequence
  Description of Artificial Sequence: Synthetic oligonucleotide
uugggcgcagguagaugau

SEQ ID NO: 602681 - RNA, 19 nt, Artificial Sequence
  Description of Artificial Sequence: Synthetic oligonucleotide
accauccggaccauucaca

SEQ ID NO: 602682 - RNA, 19 nt, Artificial Sequence
  Description of Artificial Sequence: Synthetic oligonucleotide
ccuuauauauuuccuauau

SEQ ID NO: 602683 - RNA, 19 nt, Artificial Sequence
  Description of Artificial Sequence: Synthetic oligonucleotide
accguccuuacaagucggg

SEQ ID NO: 602684 - RNA, 19 nt, Artificial Sequence
  Description of Artificial Sequence: Synthetic oligonucleotide
gcgcauuucugagaucucc

SEQ ID NO: 602685 - RNA, 19 nt, Artificial Sequence
  Description of Artificial Sequence: Synthetic oligonucleotide
ccauggguacuuaggguac

SEQ ID NO: 602686 - RNA, 19 nt, Artificial Sequence
  Description of Artificial Sequence: Synthetic oligonucleotide
gacucagauaucagcggua

SEQ ID NO: 602687 - RNA, 19 nt, Artificial Sequence
  Description of Artificial Sequence: Synthetic oligonucleotide
guacaugggacagucugcu

SEQ ID NO: 602688 - RNA, 19 nt, Artificial Sequence
  Description of Artificial Sequence: Synthetic oligonucleotide
gcggaucucguaccauccg

SEQ ID NO: 602689 - RNA, 19 nt, Artificial Sequence
  Description of Artificial Sequence: Synthetic oligonucleotide
acugguacugguagacuua

SEQ ID NO: 602690 - RNA, 19 nt, Artificial Sequence
  Description of Artificial Sequence: Synthetic oligonucleotide
ggguacuuaggguacuucu

SEQ ID NO: 602691 - RNA, 19 nt, Artificial Sequence
  Description of Artificial Sequence: Synthetic oligonucleotide
ucucugaccgaggguuagu

SEQ ID NO: 602692 - RNA, 19 nt, Artificial Sequence
  Description of Artificial Sequence: Synthetic oligonucleotide
acgcgcugaaauacaccuc

SEQ ID NO: 602693 - RNA, 19 nt, Artificial Sequence
  Description of Artificial Sequence: Synthetic oligonucleotide
ccuggauacauccacuucu

SEQ ID NO: 602694 - RNA, 19 nt, Artificial Sequence
  Description of Artificial Sequence: Synthetic oligonucleotide
ccuccgaggggcauagaug

SEQ ID NO: 602695 - RNA, 19 nt, Artificial Sequence
  Description of Artificial Sequence: Synthetic oligonucleotide
ggguaggggccacuaaaca

SEQ ID NO: 602696 - RNA, 19 nt, Artificial Sequence
  Description of Artificial Sequence: Synthetic oligonucleotide
cauugggcgcagguagaug

SEQ ID NO: 602697 - RNA, 19 nt, Artificial Sequence
  Description of Artificial Sequence: Synthetic oligonucleotide
gcuauuguauccauccagu

SEQ ID NO: 602698 - RNA, 19 nt, Artificial Sequence
  Description of Artificial Sequence: Synthetic oligonucleotide
ggcggaucucguaccaucc

SEQ ID NO: 602699 - RNA, 19 nt, Artificial Sequence
  Description of Artificial Sequence: Synthetic oligonucleotide
cucagauaucagcgguaca

SEQ ID NO: 602700 - RNA, 19 nt, Artificial Sequence
  Description of Artificial Sequence: Synthetic oligonucleotide
acaguuggucauggugacu

SEQ ID NO: 602701 - RNA, 19 nt, Artificial Sequence
  Description of Artificial Sequence: Synthetic oligonucleotide
ucccaauuccaagcccaaa

SEQ ID NO: 602702 - RNA, 19 nt, Artificial Sequence
  Description of Artificial Sequence: Synthetic oligonucleotide
aggaucacugguacuggua

SEQ ID NO: 602703 - RNA, 19 nt, Artificial Sequence
  Description of Artificial Sequence: Synthetic oligonucleotide
cccauggguacuuagggua

SEQ ID NO: 602704 - RNA, 19 nt, Artificial Sequence
  Description of Artificial Sequence: Synthetic oligonucleotide
cggaucucguaccauccgg

SEQ ID NO: 602705 - RNA, 19 nt, Artificial Sequence
  Description of Artificial Sequence: Synthetic oligonucleotide
ggaaaaggcggaucucgua

SEQ ID NO: 602706 - RNA, 19 nt, Artificial Sequence
  Description of Artificial Sequence: Synthetic oligonucleotide
ccgaggguagucuucauua

SEQ ID NO: 602707 - RNA, 19 nt, Artificial Sequence
  Description of Artificial Sequence: Synthetic oligonucleotide
ggaucucguaccauccgga

SEQ ID NO: 602708 - RNA, 19 nt, Artificial Sequence
  Description of Artificial Sequence: Synthetic oligonucleotide
cucguggauaaugcaaaua

SEQ ID NO: 602709 - RNA, 19 nt, Artificial Sequence
  Description of Artificial Sequence: Synthetic oligonucleotide
gggcgcagguagaugauac

SEQ ID NO: 602710 - RNA, 19 nt, Artificial Sequence
  Description of Artificial Sequence: Synthetic oligonucleotide
ugauagggguaggggccac

SEQ ID NO: 602711 - RNA, 19 nt, Artificial Sequence
  Description of Artificial Sequence: Synthetic oligonucleotide
ccacgcgcugaaauacacc

SEQ ID NO: 602712 - RNA, 19 nt, Artificial Sequence
  Description of Artificial Sequence: Synthetic oligonucleotide
cugcaguucgcuuucgcuu

SEQ ID NO: 602713 - RNA, 19 nt, Artificial Sequence
  Description of Artificial Sequence: Synthetic oligonucleotide
cgaggguagucuucauuag

SEQ ID NO: 602714 - RNA, 19 nt, Artificial Sequence
  Description of Artificial Sequence: Synthetic oligonucleotide
uccgaacauugggaggauu

SEQ ID NO: 602715 - RNA, 19 nt, Artificial Sequence
  Description of Artificial Sequence: Synthetic oligonucleotide
gguacucucuucgucgucu

SEQ ID NO: 602716 - RNA, 19 nt, Artificial Sequence
  Description of Artificial Sequence: Synthetic oligonucleotide
ccaagggaagucagauauc

SEQ ID NO: 602717 - RNA, 19 nt, Artificial Sequence
  Description of Artificial Sequence: Synthetic oligonucleotide
ccgaacauugggaggauua

SEQ ID NO: 602718 - RNA, 19 nt, Artificial Sequence
  Description of Artificial Sequence: Synthetic oligonucleotide
auggguacuuaggguacuu

SEQ ID NO: 602719 - RNA, 19 nt, Artificial Sequence
  Description of Artificial Sequence: Synthetic oligonucleotide
guacaugggcucagucaca

SEQ ID NO: 602720 - RNA, 19 nt, Artificial Sequence
  Description of Artificial Sequence: Synthetic oligonucleotide
ggccgcuuuggaccagaag

SEQ ID NO: 602721 - RNA, 19 nt, Artificial Sequence
  Description of Artificial Sequence: Synthetic oligonucleotide
ucaguucgaguggcuucaa

SEQ ID NO: 602722 - RNA, 19 nt, Artificial Sequence
  Description of Artificial Sequence: Synthetic oligonucleotide
ugcccgcagugaucucagc

SEQ ID NO: 602723 - RNA, 19 nt, Artificial Sequence
  Description of Artificial Sequence: Synthetic oligonucleotide
caucacaguaguggauaaa

SEQ ID NO: 602724 - RNA, 19 nt, Artificial Sequence
  Description of Artificial Sequence: Synthetic oligonucleotide
ccggucaccguccuuacaa

SEQ ID NO: 602725 - RNA, 19 nt, Artificial Sequence
  Description of Artificial Sequence: Synthetic oligonucleotide
uggccgcuuuggaccagaa

SEQ ID NO: 602726 - RNA, 19 nt, Artificial Sequence
  Description of Artificial Sequence: Synthetic oligonucleotide
ggaggauuacugaacucgu

SEQ ID NO: 602727 - RNA, 19 nt, Artificial Sequence
  Description of Artificial Sequence: Synthetic oligonucleotide
ccguccuuacaagucgggc

SEQ ID NO: 602728 - RNA, 19 nt, Artificial Sequence
  Description of Artificial Sequence: Synthetic oligonucleotide
cgaacauugggaggauuac

SEQ ID NO: 602729 - RNA, 19 nt, Artificial Sequence
  Description of Artificial Sequence: Synthetic oligonucleotide
ccauccggaccauucacaa

SEQ ID NO: 602730 - RNA, 19 nt, Artificial Sequence
  Description of Artificial Sequence: Synthetic oligonucleotide
cuggcgcauuucugagauc

SEQ ID NO: 602731 - RNA, 19 nt, Artificial Sequence
  Description of Artificial Sequence: Synthetic oligonucleotide
ggucaccguccuuacaagu

SEQ ID NO: 602732 - RNA, 19 nt, Artificial Sequence
  Description of Artificial Sequence: Synthetic oligonucleotide
gccaccacgcgcugaaaua

SEQ ID NO: 602733 - RNA, 19 nt, Artificial Sequence
  Description of Artificial Sequence: Synthetic oligonucleotide
gguacuuaggguacuucuu

SEQ ID NO: 602734 - RNA, 19 nt, Artificial Sequence
  Description of Artificial Sequence: Synthetic oligonucleotide
aguugcgaaugcgcaccuu

SEQ ID NO: 602735 - RNA, 19 nt, Artificial Sequence
  Description of Artificial Sequence: Synthetic oligonucleotide
gauagggguaggggccacu

SEQ ID NO: 602736 - RNA, 19 nt, Artificial Sequence
  Description of Artificial Sequence: Synthetic oligonucleotide
cugcugcccgcagugaucu

SEQ ID NO: 602737 - RNA, 19 nt, Artificial Sequence
  Description of Artificial Sequence: Synthetic oligonucleotide
cugguacugguagacuuau

SEQ ID NO: 602738 - RNA, 19 nt, Artificial Sequence
  Description of Artificial Sequence: Synthetic oligonucleotide
ggucuaguaccugauccau

SEQ ID NO: 602739 - RNA, 19 nt, Artificial Sequence
  Description of Artificial Sequence: Synthetic oligonucleotide
ggguacuucuuuaaaucuu

SEQ ID NO: 602740 - RNA, 19 nt, Artificial Sequence
  Description of Artificial Sequence: Synthetic oligonucleotide
accugguagcauggauaaa

SEQ ID NO: 602741 - RNA, 19 nt, Artificial Sequence
  Description of Artificial Sequence: Synthetic oligonucleotide
cauggguacuuaggguacu

SEQ ID NO: 602742 - RNA, 19 nt, Artificial Sequence
  Description of Artificial Sequence: Synthetic oligonucleotide
cuucaguauuuggucuagu

SEQ ID NO: 602743 - RNA, 19 nt, Artificial Sequence
  Description of Artificial Sequence: Synthetic oligonucleotide
cgcgcugaaauacaccucu

SEQ ID NO: 602744 - RNA, 19 nt, Artificial Sequence
  Description of Artificial Sequence: Synthetic oligonucleotide
guacucucuucgucgucuu

SEQ ID NO: 602745 - RNA, 19 nt, Artificial Sequence
  Description of Artificial Sequence: Synthetic oligonucleotide
ucguaccauccggaccauu

SEQ ID NO: 602746 - RNA, 19 nt, Artificial Sequence
  Description of Artificial Sequence: Synthetic oligonucleotide
gguagaugauacgguuccu

SEQ ID NO: 602747 - RNA, 19 nt, Artificial Sequence
  Description of Artificial Sequence: Synthetic oligonucleotide
cuaguaccugauccauauu

SEQ ID NO: 602748 - RNA, 19 nt, Artificial Sequence
  Description of Artificial Sequence: Synthetic oligonucleotide
caguugcgaaugcgcaccu

SEQ ID NO: 602749 - RNA, 19 nt, Artificial Sequence
  Description of Artificial Sequence: Synthetic oligonucleotide
gcaguucgcuuucgcuuaa

SEQ ID NO: 602750 - RNA, 19 nt, Artificial Sequence
  Description of Artificial Sequence: Synthetic oligonucleotide
ggcgcauuucugagaucuc

SEQ ID NO: 602751 - RNA, 19 nt, Artificial Sequence
  Description of Artificial Sequence: Synthetic oligonucleotide
cagaguacaugggcucagu

SEQ ID NO: 602752 - RNA, 19 nt, Artificial Sequence
  Description of Artificial Sequence: Synthetic oligonucleotide
cucugaccgaggguuaguu

SEQ ID NO: 602753 - RNA, 19 nt, Artificial Sequence
  Description of Artificial Sequence: Synthetic oligonucleotide
gcgcugaaauacaccucuc

SEQ ID NO: 602754 - RNA, 19 nt, Artificial Sequence
  Description of Artificial Sequence: Synthetic oligonucleotide
gcgccggucaccguccuua

SEQ ID NO: 602755 - RNA, 19 nt, Artificial Sequence
  Description of Artificial Sequence: Synthetic oligonucleotide
ccggaccauucacaacaca

SEQ ID NO: 602756 - RNA, 19 nt, Artificial Sequence
  Description of Artificial Sequence: Synthetic oligonucleotide
gggccacuaaacagcuucu

SEQ ID NO: 602757 - RNA, 19 nt, Artificial Sequence
  Description of Artificial Sequence: Synthetic oligonucleotide
gcauugggcgcagguagau

SEQ ID NO: 602758 - RNA, 19 nt, Artificial Sequence
  Description of Artificial Sequence: Synthetic oligonucleotide
gcgaagcuguugggcucug

SEQ ID NO: 602759 - RNA, 19 nt, Artificial Sequence
  Description of Artificial Sequence: Synthetic oligonucleotide
cuccgaggguagucuucau

SEQ ID NO: 602760 - RNA, 19 nt, Artificial Sequence
  Description of Artificial Sequence: Synthetic oligonucleotide
cagcgguacaugggacagu

SEQ ID NO: 602761 - RNA, 19 nt, Artificial Sequence
  Description of Artificial Sequence: Synthetic oligonucleotide
ccgaggguuaguugccauu

SEQ ID NO: 602762 - RNA, 19 nt, Artificial Sequence
  Description of Artificial Sequence: Synthetic oligonucleotide
caguucgcuuucgcuuaau

SEQ ID NO: 602763 - RNA, 19 nt, Artificial Sequence
  Description of Artificial Sequence: Synthetic oligonucleotide
cucguaccauccggaccau

SEQ ID NO: 602764 - RNA, 19 nt, Artificial Sequence
  Description of Artificial Sequence: Synthetic oligonucleotide
gcgguacaugggacagucu

SEQ ID NO: 602765 - RNA, 19 nt, Artificial Sequence
  Description of Artificial Sequence: Synthetic oligonucleotide
cgcuuucgcuuaauugcau

SEQ ID NO: 602766 - RNA, 19 nt, Artificial Sequence
  Description of Artificial Sequence: Synthetic oligonucleotide
cagcgccggucaccguccu

SEQ ID NO: 602767 - RNA, 19 nt, Artificial Sequence
  Description of Artificial Sequence: Synthetic oligonucleotide
uauagugucaauaaacuga

SEQ ID NO: 602768 - RNA, 19 nt, Artificial Sequence
  Description of Artificial Sequence: Synthetic oligonucleotide
aaaaucugaaccuuggcca

SEQ ID NO: 602769 - RNA, 19 nt, Artificial Sequence
  Description of Artificial Sequence: Synthetic oligonucleotide
uccgcuuucacuuuuaucc

SEQ ID NO: 602770 - RNA, 19 nt, Artificial Sequence
  Description of Artificial Sequence: Synthetic oligonucleotide
gaagucgaaagacacaucg

SEQ ID NO: 602771 - RNA, 19 nt, Artificial Sequence
  Description of Artificial Sequence: Synthetic oligonucleotide
auucuuacaucuuuggugg

SEQ ID NO: 602772 - RNA, 19 nt, Artificial Sequence
  Description of Artificial Sequence: Synthetic oligonucleotide
aaggauuugaguuucccag

SEQ ID NO: 602773 - RNA, 19 nt, Artificial Sequence
  Description of Artificial Sequence: Synthetic oligonucleotide
uuuauagugucaauaaacu

SEQ ID NO: 602774 - RNA, 19 nt, Artificial Sequence
  Description of Artificial Sequence: Synthetic oligonucleotide
gauuaagaggccgagagcg

SEQ ID NO: 602775 - RNA, 19 nt, Artificial Sequence
  Description of Artificial Sequence: Synthetic oligonucleotide
ucuacuauccacuagaguu

SEQ ID NO: 602776 - RNA, 19 nt, Artificial Sequence
  Description of Artificial Sequence: Synthetic oligonucleotide
cauguaaugaguuuugaag

SEQ ID NO: 602777 - RNA, 19 nt, Artificial Sequence
  Description of Artificial Sequence: Synthetic oligonucleotide
auacaugcaagacaugccc

SEQ ID NO: 602778 - RNA, 19 nt, Artificial Sequence
  Description of Artificial Sequence: Synthetic oligonucleotide
aagucuauaacaauuccac

SEQ ID NO: 602779 - RNA, 19 nt, Artificial Sequence
  Description of Artificial Sequence: Synthetic oligonucleotide
uuaccuuucaaaauuccag

SEQ ID NO: 602780 - RNA, 19 nt, Artificial Sequence
  Description of Artificial Sequence: Synthetic oligonucleotide
uucagaaguacaaacaggu

SEQ ID NO: 602781 - RNA, 19 nt, Artificial Sequence
  Description of Artificial Sequence: Synthetic oligonucleotide
caugcccuaaguaagaagg

SEQ ID NO: 602782 - RNA, 19 nt, Artificial Sequence
  Description of Artificial Sequence: Synthetic oligonucleotide
agaguugugauuaucaaac

SEQ ID NO: 602783 - RNA, 19 nt, Artificial Sequence
  Description of Artificial Sequence: Synthetic oligonucleotide
uguaacaucaaccuauaaa

SEQ ID NO: 602784 - RNA, 19 nt, Artificial Sequence
  Description of Artificial Sequence: Synthetic oligonucleotide
ucacuuuuaucccagaccu

SEQ ID NO: 602785 - RNA, 19 nt, Artificial Sequence
  Description of Artificial Sequence: Synthetic oligonucleotide
aaaggcaauaucaugaaca

SEQ ID NO: 602786 - RNA, 19 nt, Artificial Sequence
  Description of Artificial Sequence: Synthetic oligonucleotide
uuuaguagugagcaggcug

SEQ ID NO: 602787 - RNA, 19 nt, Artificial Sequence
  Description of Artificial Sequence: Synthetic oligonucleotide
uguucuacuauccacuaga

SEQ ID NO: 602788 - RNA, 19 nt, Artificial Sequence
  Description of Artificial Sequence: Synthetic oligonucleotide
uuuuacgagcaucugaaca

SEQ ID NO: 602789 - RNA, 19 nt, Artificial Sequence
  Description of Artificial Sequence: Synthetic oligonucleotide
aaggcaauaucaugaacag

SEQ ID NO: 602790 - RNA, 19 nt, Artificial Sequence
  Description of Artificial Sequence: Synthetic oligonucleotide
cuucaguuguaauacaugc

SEQ ID NO: 602791 - RNA, 19 nt, Artificial Sequence
  Description of Artificial Sequence: Synthetic oligonucleotide
gagguaaccgacuagugag

SEQ ID NO: 602792 - RNA, 19 nt, Artificial Sequence
  Description of Artificial Sequence: Synthetic oligonucleotide
agaagaaguaaguucuuuc

SEQ ID NO: 602793 - RNA, 19 nt, Artificial Sequence
  Description of Artificial Sequence: Synthetic oligonucleotide
uauucuuacuauaccaucu

SEQ ID NO: 602794 - RNA, 19 nt, Artificial Sequence
  Description of Artificial Sequence: Synthetic oligonucleotide
ucaauaaacugacuaguac

SEQ ID NO: 602795 - RNA, 19 nt, Artificial Sequence
  Description of Artificial Sequence: Synthetic oligonucleotide
ugagaagucccauuuacug

SEQ ID NO: 602796 - RNA, 19 nt, Artificial Sequence
  Description of Artificial Sequence: Synthetic oligonucleotide
uuaguagugagcaggcugc

SEQ ID NO: 602797 - RNA, 19 nt, Artificial Sequence
  Description of Artificial Sequence: Synthetic oligonucleotide
uuguaauacaugcaagaca

SEQ ID NO: 602798 - RNA, 19 nt, Artificial Sequence
  Description of Artificial Sequence: Synthetic oligonucleotide
aacaggcuaaacugaaguc

SEQ ID NO: 602799 - RNA, 19 nt, Artificial Sequence
  Description of Artificial Sequence: Synthetic oligonucleotide
aggaguucgaguuccauuc

SEQ ID NO: 602800 - RNA, 19 nt, Artificial Sequence
  Description of Artificial Sequence: Synthetic oligonucleotide
ugcuuuauacacaggaaug

SEQ ID NO: 602801 - RNA, 19 nt, Artificial Sequence
  Description of Artificial Sequence: Synthetic oligonucleotide
uuuuaaaggccuuuuggac

SEQ ID NO: 602802 - RNA, 19 nt, Artificial Sequence
  Description of Artificial Sequence: Synthetic oligonucleotide
gucuauaacaauuccacac

SEQ ID NO: 602803 - RNA, 19 nt, Artificial Sequence
  Description of Artificial Sequence: Synthetic oligonucleotide
uuauagugucaauaaacug

SEQ ID NO: 602804 - RNA, 19 nt, Artificial Sequence
  Description of Artificial Sequence: Synthetic oligonucleotide
ugauuuauuuuacagucau

SEQ ID NO: 602805 - RNA, 19 nt, Artificial Sequence
  Description of Artificial Sequence: Synthetic oligonucleotide
cuuacaugagaucucgugc

SEQ ID NO: 602806 - RNA, 19 nt, Artificial Sequence
  Description of Artificial Sequence: Synthetic oligonucleotide
cauauauucuuacuauacc

SEQ ID NO: 602807 - RNA, 19 nt, Artificial Sequence
  Description of Artificial Sequence: Synthetic oligonucleotide
gauaugcuuucacacaaag

SEQ ID NO: 602808 - RNA, 19 nt, Artificial Sequence
  Description of Artificial Sequence: Synthetic oligonucleotide
ugaagucuauaacaauucc

SEQ ID NO: 602809 - RNA, 19 nt, Artificial Sequence
  Description of Artificial Sequence: Synthetic oligonucleotide
ucuuacuauaccaucugcu

SEQ ID NO: 602810 - RNA, 19 nt, Artificial Sequence
  Description of Artificial Sequence: Synthetic oligonucleotide
uuaaaggccuuuuggacug

SEQ ID NO: 602811 - RNA, 19 nt, Artificial Sequence
  Description of Artificial Sequence: Synthetic oligonucleotide
caauuguccauguaauuag

SEQ ID NO: 602812 - RNA, 19 nt, Artificial Sequence
  Description of Artificial Sequence: Synthetic oligonucleotide
aguugugauuaucaaacug

SEQ ID NO: 602813 - RNA, 19 nt, Artificial Sequence
  Description of Artificial Sequence: Synthetic oligonucleotide
uuuuaaaccccuucauucu

SEQ ID NO: 602814 - RNA, 19 nt, Artificial Sequence
  Description of Artificial Sequence: Synthetic oligonucleotide
auacagauccacuaugugu

SEQ ID NO: 602815 - RNA, 19 nt, Artificial Sequence
  Description of Artificial Sequence: Synthetic oligonucleotide
uaaugugaaaauucuuaca

SEQ ID NO: 602816 - RNA, 19 nt, Artificial Sequence
  Description of Artificial Sequence: Synthetic oligonucleotide
ugaaccuuggccauugcgu

SEQ ID NO: 602817 - RNA, 19 nt, Artificial Sequence
  Description of Artificial Sequence: Synthetic oligonucleotide
uguuuaguagugagcaggc

SEQ ID NO: 602818 - RNA, 19 nt, Artificial Sequence
  Description of Artificial Sequence: Synthetic oligonucleotide
cagaauuuacaagacaggc

SEQ ID NO: 602819 - RNA, 19 nt, Artificial Sequence
  Description of Artificial Sequence: Synthetic oligonucleotide
aagacaugcccuaaguaag

SEQ ID NO: 602820 - RNA, 19 nt, Artificial Sequence
  Description of Artificial Sequence: Synthetic oligonucleotide
gauuugcugcuuuauacac

SEQ ID NO: 602821 - RNA, 19 nt, Artificial Sequence
  Description of Artificial Sequence: Synthetic oligonucleotide
uuuggacuguguuuaguag

SEQ ID NO: 602822 - RNA, 19 nt, Artificial Sequence
  Description of Artificial Sequence: Synthetic oligonucleotide
aaagagaaccaaagaagag

SEQ ID NO: 602823 - RNA, 19 nt, Artificial Sequence
  Description of Artificial Sequence: Synthetic oligonucleotide
uuucaaaauuccaguacac

SEQ ID NO: 602824 - RNA, 19 nt, Artificial Sequence
  Description of Artificial Sequence: Synthetic oligonucleotide
ucauucucagguaagggau

SEQ ID NO: 602825 - RNA, 19 nt, Artificial Sequence
  Description of Artificial Sequence: Synthetic oligonucleotide
gauuaucaaacugagccac

SEQ ID NO: 602826 - RNA, 19 nt, Artificial Sequence
  Description of Artificial Sequence: Synthetic oligonucleotide
uuacaagacaggcacucug

SEQ ID NO: 602827 - RNA, 19 nt, Artificial Sequence
  Description of Artificial Sequence: Synthetic oligonucleotide
ucuccuacuauuucuuccc

SEQ ID NO: 602828 - RNA, 19 nt, Artificial Sequence
  Description of Artificial Sequence: Synthetic oligonucleotide
gaaaaggaguucgaguucc

SEQ ID NO: 602829 - RNA, 19 nt, Artificial Sequence
  Description of Artificial Sequence: Synthetic oligonucleotide
auaccugaaauaaugaaga

SEQ ID NO: 602830 - RNA, 19 nt, Artificial Sequence
  Description of Artificial Sequence: Synthetic oligonucleotide
uccaacuagcaguacaaug

SEQ ID NO: 602831 - RNA, 19 nt, Artificial Sequence
  Description of Artificial Sequence: Synthetic oligonucleotide
caguacaaugccaaucucc

SEQ ID NO: 602832 - RNA, 19 nt, Artificial Sequence
  Description of Artificial Sequence: Synthetic oligonucleotide
gaugcuagcacuguuccug

SEQ ID NO: 602833 - RNA, 19 nt, Artificial Sequence
  Description of Artificial Sequence: Synthetic oligonucleotide
uugaacuuagugaaggauu

SEQ ID NO: 602834 - RNA, 19 nt, Artificial Sequence
  Description of Artificial Sequence: Synthetic oligonucleotide
gaucucgugcuguagagac

SEQ ID NO: 602835 - RNA, 19 nt, Artificial Sequence
  Description of Artificial Sequence: Synthetic oligonucleotide
aaggaacccaaguuagucu

SEQ ID NO: 602836 - RNA, 19 nt, Artificial Sequence
  Description of Artificial Sequence: Synthetic oligonucleotide
uauguuccaacucacccuc

SEQ ID NO: 602837 - RNA, 19 nt, Artificial Sequence
  Description of Artificial Sequence: Synthetic oligonucleotide
guguuuaguagugagcagg

SEQ ID NO: 602838 - RNA, 19 nt, Artificial Sequence
  Description of Artificial Sequence: Synthetic oligonucleotide
cugcgcgccacaaacaugg

SEQ ID NO: 602839 - RNA, 19 nt, Artificial Sequence
  Description of Artificial Sequence: Synthetic oligonucleotide
uucaguuguaauacaugca

SEQ ID NO: 602840 - RNA, 19 nt, Artificial Sequence
  Description of Artificial Sequence: Synthetic oligonucleotide
agugcucuaccagaggagc

SEQ ID NO: 602841 - RNA, 19 nt, Artificial Sequence
  Description of Artificial Sequence: Synthetic oligonucleotide
ugagccacgauauggauuu

SEQ ID NO: 602842 - RNA, 19 nt, Artificial Sequence
  Description of Artificial Sequence: Synthetic oligonucleotide
uucuuacuauaccaucugc

SEQ ID NO: 602843 - RNA, 19 nt, Artificial Sequence
  Description of Artificial Sequence: Synthetic oligonucleotide
uguuauguuccaacucacc

SEQ ID NO: 602844 - RNA, 19 nt, Artificial Sequence
  Description of Artificial Sequence: Synthetic oligonucleotide
ccaacuagcaguacaaugc

SEQ ID NO: 602845 - RNA, 19 nt, Artificial Sequence
  Description of Artificial Sequence: Synthetic oligonucleotide
gaugcugcgcgccacaaac

SEQ ID NO: 602846 - RNA, 19 nt, Artificial Sequence
  Description of Artificial Sequence: Synthetic oligonucleotide
accgacuagugagugaugc

SEQ ID NO: 602847 - RNA, 19 nt, Artificial Sequence
  Description of Artificial Sequence: Synthetic oligonucleotide
uacuaacaggcuaaacuga

SEQ ID NO: 602848 - RNA, 19 nt, Artificial Sequence
  Description of Artificial Sequence: Synthetic oligonucleotide
agaccacuggcugagauuc

SEQ ID NO: 602849 - RNA, 19 nt, Artificial Sequence
  Description of Artificial Sequence: Synthetic oligonucleotide
augagcccaugucacacgc

SEQ ID NO: 602850 - RNA, 19 nt, Artificial Sequence
  Description of Artificial Sequence: Synthetic oligonucleotide
agugaaggauuugaguuuc

SEQ ID NO: 602851 - RNA, 19 nt, Artificial Sequence
  Description of Artificial Sequence: Synthetic oligonucleotide
ugucacacgccauacagau

SEQ ID NO: 602852 - RNA, 19 nt, Artificial Sequence
  Description of Artificial Sequence: Synthetic oligonucleotide
auucuuacuauaccaucug

SEQ ID NO: 602853 - RNA, 19 nt, Artificial Sequence
  Description of Artificial Sequence: Synthetic oligonucleotide
gauguggaaagaucucccc

SEQ ID NO: 602854 - RNA, 19 nt, Artificial Sequence
  Description of Artificial Sequence: Synthetic oligonucleotide
caucagacccauauguuug

SEQ ID NO: 602855 - RNA, 19 nt, Artificial Sequence
  Description of Artificial Sequence: Synthetic oligonucleotide
auuugauucuccuacuauu

SEQ ID NO: 602856 - RNA, 19 nt, Artificial Sequence
  Description of Artificial Sequence: Synthetic oligonucleotide
gaaggguuccaagaaauac

SEQ ID NO: 602857 - RNA, 19 nt, Artificial Sequence
  Description of Artificial Sequence: Synthetic oligonucleotide
uuuuggacuguguuuagua

SEQ ID NO: 602858 - RNA, 19 nt, Artificial Sequence
  Description of Artificial Sequence: Synthetic oligonucleotide
uaagggauuaagaggccga

SEQ ID NO: 602859 - RNA, 19 nt, Artificial Sequence
  Description of Artificial Sequence: Synthetic oligonucleotide
aaaucugaaccuuggccau

SEQ ID NO: 602860 - RNA, 19 nt, Artificial Sequence
  Description of Artificial Sequence: Synthetic oligonucleotide
uacuauaccaucugcugaa

SEQ ID NO: 602861 - RNA, 19 nt, Artificial Sequence
  Description of Artificial Sequence: Synthetic oligonucleotide
guaagaaggaucuucugaa

SEQ ID NO: 602862 - RNA, 19 nt, Artificial Sequence
  Description of Artificial Sequence: Synthetic oligonucleotide
cuacuauccacuagaguug

SEQ ID NO: 602863 - RNA, 19 nt, Artificial Sequence
  Description of Artificial Sequence: Synthetic oligonucleotide
acaagagugcucuaccaga

SEQ ID NO: 602864 - RNA, 19 nt, Artificial Sequence
  Description of Artificial Sequence: Synthetic oligonucleotide
uuagucuccagaacauuuc

SEQ ID NO: 602865 - RNA, 19 nt, Artificial Sequence
  Description of Artificial Sequence: Synthetic oligonucleotide
gcugucaucacuucccacg

SEQ ID NO: 602866 - RNA, 19 nt, Artificial Sequence
  Description of Artificial Sequence: Synthetic oligonucleotide
agagguaaccgacuaguga

SEQ ID NO: 602867 - RNA, 19 nt, Artificial Sequence
  Description of Artificial Sequence: Synthetic oligonucleotide
gaagucuauaacaauucca

SEQ ID NO: 602868 - RNA, 19 nt, Artificial Sequence
  Description of Artificial Sequence: Synthetic oligonucleotide
uguggaaagaucuccccaa

SEQ ID NO: 602869 - RNA, 19 nt, Artificial Sequence
  Description of Artificial Sequence: Synthetic oligonucleotide
ucagagguaaccgacuagu

SEQ ID NO: 602870 - RNA, 19 nt, Artificial Sequence
  Description of Artificial Sequence: Synthetic oligonucleotide
acugucauaagaguuucug

SEQ ID NO: 602871 - RNA, 19 nt, Artificial Sequence
  Description of Artificial Sequence: Synthetic oligonucleotide
cuuguccgaauucaggaug

SEQ ID NO: 602872 - RNA, 19 nt, Artificial Sequence
  Description of Artificial Sequence: Synthetic oligonucleotide
agacacaucguggaugagg

SEQ ID NO: 602873 - RNA, 19 nt, Artificial Sequence
  Description of Artificial Sequence: Synthetic oligonucleotide
uacgagcaucugaacaagg

SEQ ID NO: 602874 - RNA, 19 nt, Artificial Sequence
  Description of Artificial Sequence: Synthetic oligonucleotide
uguguuuaguagugagcag

SEQ ID NO: 602875 - RNA, 19 nt, Artificial Sequence
  Description of Artificial Sequence: Synthetic oligonucleotide
uggaagucgaaagacacau

SEQ ID NO: 602876 - RNA, 19 nt, Artificial Sequence
  Description of Artificial Sequence: Synthetic oligonucleotide
aguaaguucuuuccucaca

SEQ ID NO: 602877 - RNA, 19 nt, Artificial Sequence
  Description of Artificial Sequence: Synthetic oligonucleotide
gaaucagauacugggaauc

SEQ ID NO: 602878 - RNA, 19 nt, Artificial Sequence
  Description of Artificial Sequence: Synthetic oligonucleotide
caacuagcaguacaaugcc

SEQ ID NO: 602879 - RNA, 19 nt, Artificial Sequence
  Description of Artificial Sequence: Synthetic oligonucleotide
ucggaguuuaucauuugau

SEQ ID NO: 602880 - RNA, 19 nt, Artificial Sequence
  Description of Artificial Sequence: Synthetic oligonucleotide
caaaguuacuccagcuagc

SEQ ID NO: 602881 - RNA, 19 nt, Artificial Sequence
  Description of Artificial Sequence: Synthetic oligonucleotide
auuuugugggaccaccaga

SEQ ID NO: 602882 - RNA, 19 nt, Artificial Sequence
  Description of Artificial Sequence: Synthetic oligonucleotide
cggaauaaaagcuuuuacg

SEQ ID NO: 602883 - RNA, 19 nt, Artificial Sequence
  Description of Artificial Sequence: Synthetic oligonucleotide
caagagugcucuaccagag

SEQ ID NO: 602884 - RNA, 19 nt, Artificial Sequence
  Description of Artificial Sequence: Synthetic oligonucleotide
ucucgugcuguagagacca

SEQ ID NO: 602885 - RNA, 19 nt, Artificial Sequence
  Description of Artificial Sequence: Synthetic oligonucleotide
uuuguaacaucaaccuaua

SEQ ID NO: 602886 - RNA, 19 nt, Artificial Sequence
  Description of Artificial Sequence: Synthetic oligonucleotide
acgagcaucugaacaaggc

SEQ ID NO: 602887 - RNA, 19 nt, Artificial Sequence
  Description of Artificial Sequence: Synthetic oligonucleotide
gguuccaagaaauacagcu

SEQ ID NO: 602888 - RNA, 19 nt, Artificial Sequence
  Description of Artificial Sequence: Synthetic oligonucleotide
aguaacagauguucuacua

SEQ ID NO: 602889 - RNA, 19 nt, Artificial Sequence
  Description of Artificial Sequence: Synthetic oligonucleotide
agucuauaacaauuccaca

SEQ ID NO: 602890 - RNA, 19 nt, Artificial Sequence
  Description of Artificial Sequence: Synthetic oligonucleotide
acgauauggauuucaaauu

SEQ ID NO: 602891 - RNA, 19 nt, Artificial Sequence
  Description of Artificial Sequence: Synthetic oligonucleotide
auacugggaaucuuucaca

SEQ ID NO: 602892 - RNA, 19 nt, Artificial Sequence
  Description of Artificial Sequence: Synthetic oligonucleotide
ugaaggauuugaguuuccc

SEQ ID NO: 602893 - RNA, 19 nt, Artificial Sequence
  Description of Artificial Sequence: Synthetic oligonucleotide
aacaagcagcaaaacagca

SEQ ID NO: 602894 - RNA, 19 nt, Artificial Sequence
  Description of Artificial Sequence: Synthetic oligonucleotide
gaaggaacccaaguuaguc

SEQ ID NO: 602895 - RNA, 19 nt, Artificial Sequence
  Description of Artificial Sequence: Synthetic oligonucleotide
agaauuuacaagacaggca

SEQ ID NO: 602896 - RNA, 19 nt, Artificial Sequence
  Description of Artificial Sequence: Synthetic oligonucleotide
gaaguacaaacagguuugg

SEQ ID NO: 602897 - RNA, 19 nt, Artificial Sequence
  Description of Artificial Sequence: Synthetic oligonucleotide
gucugaaaugcagagugag

SEQ ID NO: 602898 - RNA, 19 nt, Artificial Sequence
  Description of Artificial Sequence: Synthetic oligonucleotide
cacaaugauaugcuuucac

SEQ ID NO: 602899 - RNA, 19 nt, Artificial Sequence
  Description of Artificial Sequence: Synthetic oligonucleotide
ugaaucagauacugggaau

SEQ ID NO: 602900 - RNA, 19 nt, Artificial Sequence
  Description of Artificial Sequence: Synthetic oligonucleotide
ucauuugauucuccuacua

SEQ ID NO: 602901 - RNA, 19 nt, Artificial Sequence
  Description of Artificial Sequence: Synthetic oligonucleotide
agaucaaacggcgcugggg

SEQ ID NO: 602902 - RNA, 19 nt, Artificial Sequence
  Description of Artificial Sequence: Synthetic oligonucleotide
agauguucuacuauccacu

SEQ ID NO: 602903 - RNA, 19 nt, Artificial Sequence
  Description of Artificial Sequence: Synthetic oligonucleotide
uacaugagaucucgugcug

SEQ ID NO: 602904 - RNA, 19 nt, Artificial Sequence
  Description of Artificial Sequence: Synthetic oligonucleotide
caugcaacaagcagcaaaa

SEQ ID NO: 602905 - RNA, 19 nt, Artificial Sequence
  Description of Artificial Sequence: Synthetic oligonucleotide
aaggaguucgaguuccauu

SEQ ID NO: 602906 - RNA, 19 nt, Artificial Sequence
  Description of Artificial Sequence: Synthetic oligonucleotide
cugucaucacuucccacgg

SEQ ID NO: 602907 - RNA, 19 nt, Artificial Sequence
  Description of Artificial Sequence: Synthetic oligonucleotide
cacaagagugcucuaccag

SEQ ID NO: 602908 - RNA, 19 nt, Artificial Sequence
  Description of Artificial Sequence: Synthetic oligonucleotide
aagggauuaagaggccgag

SEQ ID NO: 602909 - RNA, 19 nt, Artificial Sequence
  Description of Artificial Sequence: Synthetic oligonucleotide
uucgaguuccauuccugug

SEQ ID NO: 602910 - RNA, 19 nt, Artificial Sequence
  Description of Artificial Sequence: Synthetic oligonucleotide
uuccuguuauguuccaacu

SEQ ID NO: 602911 - RNA, 19 nt, Artificial Sequence
  Description of Artificial Sequence: Synthetic oligonucleotide
acaugcccuaaguaagaag

SEQ ID NO: 602912 - RNA, 19 nt, Artificial Sequence
  Description of Artificial Sequence: Synthetic oligonucleotide
cauacagauccacuaugug

SEQ ID NO: 602913 - RNA, 19 nt, Artificial Sequence
  Description of Artificial Sequence: Synthetic oligonucleotide
cuagugagugaugccaggg

SEQ ID NO: 602914 - RNA, 19 nt, Artificial Sequence
  Description of Artificial Sequence: Synthetic oligonucleotide
guacacuuccaauugucca

SEQ ID NO: 602915 - RNA, 19 nt, Artificial Sequence
  Description of Artificial Sequence: Synthetic oligonucleotide
cacgauauggauuucaaau

SEQ ID NO: 602916 - RNA, 19 nt, Artificial Sequence
  Description of Artificial Sequence: Synthetic oligonucleotide
cuagaguuguccucuucac

SEQ ID NO: 602917 - RNA, 19 nt, Artificial Sequence
  Description of Artificial Sequence: Synthetic oligonucleotide
uaaccgacuagugagugau

SEQ ID NO: 602918 - RNA, 19 nt, Artificial Sequence
  Description of Artificial Sequence: Synthetic oligonucleotide
auguggaaagaucucccca

SEQ ID NO: 602919 - RNA, 19 nt, Artificial Sequence
  Description of Artificial Sequence: Synthetic oligonucleotide
auccacuagaguuguccuc

SEQ ID NO: 602920 - RNA, 19 nt, Artificial Sequence
  Description of Artificial Sequence: Synthetic oligonucleotide
gauuugaguuucccagcug

SEQ ID NO: 602921 - RNA, 19 nt, Artificial Sequence
  Description of Artificial Sequence: Synthetic oligonucleotide
aguuccauuccugugugca

SEQ ID NO: 602922 - RNA, 19 nt, Artificial Sequence
  Description of Artificial Sequence: Synthetic oligonucleotide
cagaagauccauguaauga

SEQ ID NO: 602923 - RNA, 19 nt, Artificial Sequence
  Description of Artificial Sequence: Synthetic oligonucleotide
cuagcuuguacucagcugu

SEQ ID NO: 602924 - RNA, 19 nt, Artificial Sequence
  Description of Artificial Sequence: Synthetic oligonucleotide
uagugaaggauuugaguuu

SEQ ID NO: 602925 - RNA, 19 nt, Artificial Sequence
  Description of Artificial Sequence: Synthetic oligonucleotide
agcacgagagcuggaaggg

SEQ ID NO: 602926 - RNA, 19 nt, Artificial Sequence
  Description of Artificial Sequence: Synthetic oligonucleotide
aagaggccgagagcggugg

SEQ ID NO: 602927 - RNA, 19 nt, Artificial Sequence
  Description of Artificial Sequence: Synthetic oligonucleotide
gcuuacaugagaucucgug

SEQ ID NO: 602928 - RNA, 19 nt, Artificial Sequence
  Description of Artificial Sequence: Synthetic oligonucleotide
uugugguccgccgcgaugc

SEQ ID NO: 602929 - RNA, 19 nt, Artificial Sequence
  Description of Artificial Sequence: Synthetic oligonucleotide
cuguuauguuccaacucac

SEQ ID NO: 602930 - RNA, 19 nt, Artificial Sequence
  Description of Artificial Sequence: Synthetic oligonucleotide
ugguccgccgcgaugcugc

SEQ ID NO: 602931 - RNA, 19 nt, Artificial Sequence
  Description of Artificial Sequence: Synthetic oligonucleotide
uccucggaguuuaucauuu

SEQ ID NO: 602932 - RNA, 19 nt, Artificial Sequence
  Description of Artificial Sequence: Synthetic oligonucleotide
uuaagaggccgagagcggu

SEQ ID NO: 602933 - RNA, 19 nt, Artificial Sequence
  Description of Artificial Sequence: Synthetic oligonucleotide
gacuagugagugaugccag

SEQ ID NO: 602934 - RNA, 19 nt, Artificial Sequence
  Description of Artificial Sequence: Synthetic oligonucleotide
ugggaccaccagaagaagu

SEQ ID NO: 602935 - RNA, 19 nt, Artificial Sequence
  Description of Artificial Sequence: Synthetic oligonucleotide
ugcguuuggacugcuguca

SEQ ID NO: 602936 - RNA, 19 nt, Artificial Sequence
  Description of Artificial Sequence: Synthetic oligonucleotide
caaaggcaauaucaugaac

SEQ ID NO: 602937 - RNA, 19 nt, Artificial Sequence
  Description of Artificial Sequence: Synthetic oligonucleotide
caguacacuuccaauuguc

SEQ ID NO: 602938 - RNA, 19 nt, Artificial Sequence
  Description of Artificial Sequence: Synthetic oligonucleotide
agugagugaugccaggguu

SEQ ID NO: 602939 - RNA, 19 nt, Artificial Sequence
  Description of Artificial Sequence: Synthetic oligonucleotide
aaauuguuuuggugaugau

SEQ ID NO: 602940 - RNA, 19 nt, Artificial Sequence
  Description of Artificial Sequence: Synthetic oligonucleotide
acuagcaguacaaugccaa

SEQ ID NO: 602941 - RNA, 19 nt, Artificial Sequence
  Description of Artificial Sequence: Synthetic oligonucleotide
uaagaggccgagagcggug

SEQ ID NO: 602942 - RNA, 19 nt, Artificial Sequence
  Description of Artificial Sequence: Synthetic oligonucleotide
cuuuuacgagcaucugaac

SEQ ID NO: 602943 - RNA, 19 nt, Artificial Sequence
  Description of Artificial Sequence: Synthetic oligonucleotide
auuaagaggccgagagcgg

SEQ ID NO: 602944 - RNA, 19 nt, Artificial Sequence
  Description of Artificial Sequence: Synthetic oligonucleotide
acuauaccaucugcugaac

SEQ ID NO: 602945 - RNA, 19 nt, Artificial Sequence
  Description of Artificial Sequence: Synthetic oligonucleotide
gauguucuacuauccacua

SEQ ID NO: 602946 - RNA, 19 nt, Artificial Sequence
  Description of Artificial Sequence: Synthetic oligonucleotide
gcuuuccacaaccucacgc

SEQ ID NO: 602947 - RNA, 19 nt, Artificial Sequence
  Description of Artificial Sequence: Synthetic oligonucleotide
acgcucuggucgcuggagc

SEQ ID NO: 602948 - RNA, 19 nt, Artificial Sequence
  Description of Artificial Sequence: Synthetic oligonucleotide
uaucaaacugagccacgau

SEQ ID NO: 602949 - RNA, 19 nt, Artificial Sequence
  Description of Artificial Sequence: Synthetic oligonucleotide
uuguaacaucaaccuauaa

SEQ ID NO: 602950 - RNA, 19 nt, Artificial Sequence
  Description of Artificial Sequence: Synthetic oligonucleotide
acuuguccgaauucaggau

SEQ ID NO: 602951 - RNA, 19 nt, Artificial Sequence
  Description of Artificial Sequence: Synthetic oligonucleotide
agugaugccaggguuuccu

SEQ ID NO: 602952 - RNA, 19 nt, Artificial Sequence
  Description of Artificial Sequence: Synthetic oligonucleotide
uacagcuacagcucagcuu

SEQ ID NO: 602953 - RNA, 19 nt, Artificial Sequence
  Description of Artificial Sequence: Synthetic oligonucleotide
augcaagacaugcccuaag

SEQ ID NO: 602954 - RNA, 19 nt, Artificial Sequence
  Description of Artificial Sequence: Synthetic oligonucleotide
auuuacugggcucccguua

SEQ ID NO: 602955 - RNA, 19 nt, Artificial Sequence
  Description of Artificial Sequence: Synthetic oligonucleotide
agcgguggcaucacaagag

SEQ ID NO: 602956 - RNA, 19 nt, Artificial Sequence
  Description of Artificial Sequence: Synthetic oligonucleotide
aagucgaaagacacaucgu

SEQ ID NO: 602957 - RNA, 19 nt, Artificial Sequence
  Description of Artificial Sequence: Synthetic oligonucleotide
uuggagcaaaggcaauauc

SEQ ID NO: 602958 - RNA, 19 nt, Artificial Sequence
  Description of Artificial Sequence: Synthetic oligonucleotide
uucuuacaucuuugguggc

SEQ ID NO: 602959 - RNA, 19 nt, Artificial Sequence
  Description of Artificial Sequence: Synthetic oligonucleotide
caucacaagagugcucuac

SEQ ID NO: 602960 - RNA, 19 nt, Artificial Sequence
  Description of Artificial Sequence: Synthetic oligonucleotide
caggaagccaaaacuuguc

SEQ ID NO: 602961 - RNA, 19 nt, Artificial Sequence
  Description of Artificial Sequence: Synthetic oligonucleotide
ugcugcgcgccacaaacau

SEQ ID NO: 602962 - RNA, 19 nt, Artificial Sequence
  Description of Artificial Sequence: Synthetic oligonucleotide
uccuacuauuucuucccaa

SEQ ID NO: 602963 - RNA, 19 nt, Artificial Sequence
  Description of Artificial Sequence: Synthetic oligonucleotide
aaucuccgcuuucacuuuu

SEQ ID NO: 602964 - RNA, 19 nt, Artificial Sequence
  Description of Artificial Sequence: Synthetic oligonucleotide
guacaaugccaaucuccgc

SEQ ID NO: 602965 - RNA, 19 nt, Artificial Sequence
  Description of Artificial Sequence: Synthetic oligonucleotide
ucccguuaccuuucaaaau

SEQ ID NO: 602966 - RNA, 19 nt, Artificial Sequence
  Description of Artificial Sequence: Synthetic oligonucleotide
cgcgccacaaacauggccg

SEQ ID NO: 602967 - RNA, 19 nt, Artificial Sequence
  Description of Artificial Sequence: Synthetic oligonucleotide
acaugcaagacaugcccua

SEQ ID NO: 602968 - RNA, 19 nt, Artificial Sequence
  Description of Artificial Sequence: Synthetic oligonucleotide
cagagguaaccgacuagug

SEQ ID NO: 602969 - RNA, 19 nt, Artificial Sequence
  Description of Artificial Sequence: Synthetic oligonucleotide
agagaccacuggcugagau

SEQ ID NO: 602970 - RNA, 19 nt, Artificial Sequence
  Description of Artificial Sequence: Synthetic oligonucleotide
uccagcuagcuuguacuca

SEQ ID NO: 602971 - RNA, 19 nt, Artificial Sequence
  Description of Artificial Sequence: Synthetic oligonucleotide
aaaggaguucgaguuccau

SEQ ID NO: 602972 - RNA, 19 nt, Artificial Sequence
  Description of Artificial Sequence: Synthetic oligonucleotide
ccuguuauguuccaacuca

SEQ ID NO: 602973 - RNA, 19 nt, Artificial Sequence
  Description of Artificial Sequence: Synthetic oligonucleotide
ggauuaagaggccgagagc

SEQ ID NO: 602974 - RNA, 19 nt, Artificial Sequence
  Description of Artificial Sequence: Synthetic oligonucleotide
gcuaacaucagacccauau

SEQ ID NO: 602975 - RNA, 19 nt, Artificial Sequence
  Description of Artificial Sequence: Synthetic oligonucleotide
aucacuucccacggcgauc

SEQ ID NO: 602976 - RNA, 19 nt, Artificial Sequence
  Description of Artificial Sequence: Synthetic oligonucleotide
cucggaguuuaucauuuga

SEQ ID NO: 602977 - RNA, 19 nt, Artificial Sequence
  Description of Artificial Sequence: Synthetic oligonucleotide
cucccguuaccuuucaaaa

SEQ ID NO: 602978 - RNA, 19 nt, Artificial Sequence
  Description of Artificial Sequence: Synthetic oligonucleotide
acgccauacagauccacua

SEQ ID NO: 602979 - RNA, 19 nt, Artificial Sequence
  Description of Artificial Sequence: Synthetic oligonucleotide
aucccagaccuugacgcuc

SEQ ID NO: 602980 - RNA, 19 nt, Artificial Sequence
  Description of Artificial Sequence: Synthetic oligonucleotide
ugcccuaaguaagaaggau

SEQ ID NO: 602981 - RNA, 19 nt, Artificial Sequence
  Description of Artificial Sequence: Synthetic oligonucleotide
aguucgaguuccauuccug

SEQ ID NO: 602982 - RNA, 19 nt, Artificial Sequence
  Description of Artificial Sequence: Synthetic oligonucleotide
cggucaaaagaacaggaag

SEQ ID NO: 602983 - RNA, 19 nt, Artificial Sequence
  Description of Artificial Sequence: Synthetic oligonucleotide
ugagcccaugucacacgcc

SEQ ID NO: 602984 - RNA, 19 nt, Artificial Sequence
  Description of Artificial Sequence: Synthetic oligonucleotide
caacucacccuccagaccu

SEQ ID NO: 602985 - RNA, 19 nt, Artificial Sequence
  Description of Artificial Sequence: Synthetic oligonucleotide
gagcgguggcaucacaaga

SEQ ID NO: 602986 - RNA, 19 nt, Artificial Sequence
  Description of Artificial Sequence: Synthetic oligonucleotide
uggggccucauauauucuu

SEQ ID NO: 602987 - RNA, 19 nt, Artificial Sequence
  Description of Artificial Sequence: Synthetic oligonucleotide
ucaguguuuuaaaccccuu

SEQ ID NO: 602988 - RNA, 19 nt, Artificial Sequence
  Description of Artificial Sequence: Synthetic oligonucleotide
cguggaagucgaaagacac

SEQ ID NO: 602989 - RNA, 19 nt, Artificial Sequence
  Description of Artificial Sequence: Synthetic oligonucleotide
ggauguggaaagaucuccc

SEQ ID NO: 602990 - RNA, 19 nt, Artificial Sequence
  Description of Artificial Sequence: Synthetic oligonucleotide
gcuauugccaggaugugga

SEQ ID NO: 602991 - RNA, 19 nt, Artificial Sequence
  Description of Artificial Sequence: Synthetic oligonucleotide
uuuggacugcugucaucac

SEQ ID NO: 602992 - RNA, 19 nt, Artificial Sequence
  Description of Artificial Sequence: Synthetic oligonucleotide
gucaauaaacugacuagua

SEQ ID NO: 602993 - RNA, 19 nt, Artificial Sequence
  Description of Artificial Sequence: Synthetic oligonucleotide
gcaugcaacaagcagcaaa

SEQ ID NO: 602994 - RNA, 19 nt, Artificial Sequence
  Description of Artificial Sequence: Synthetic oligonucleotide
agccgucaucuccugagga

SEQ ID NO: 602995 - RNA, 19 nt, Artificial Sequence
  Description of Artificial Sequence: Synthetic oligonucleotide
guaaccgacuagugaguga

SEQ ID NO: 602996 - RNA, 19 nt, Artificial Sequence
  Description of Artificial Sequence: Synthetic oligonucleotide
cugccuacuaacaggcuaa

SEQ ID NO: 602997 - RNA, 19 nt, Artificial Sequence
  Description of Artificial Sequence: Synthetic oligonucleotide
gcuuuuacgagcaucugaa

SEQ ID NO: 602998 - RNA, 19 nt, Artificial Sequence
  Description of Artificial Sequence: Synthetic oligonucleotide
augcuagcacuguuccugu

SEQ ID NO: 602999 - RNA, 19 nt, Artificial Sequence
  Description of Artificial Sequence: Synthetic oligonucleotide
caacuggaccaucucgauc

SEQ ID NO: 603000 - RNA, 19 nt, Artificial Sequence
  Description of Artificial Sequence: Synthetic oligonucleotide
cuccagcuagcuuguacuc

SEQ ID NO: 603001 - RNA, 19 nt, Artificial Sequence
  Description of Artificial Sequence: Synthetic oligonucleotide
uguccgaauucaggaugag

SEQ ID NO: 603002 - RNA, 19 nt, Artificial Sequence
  Description of Artificial Sequence: Synthetic oligonucleotide
gccucauauauucuuacua

SEQ ID NO: 603003 - RNA, 19 nt, Artificial Sequence
  Description of Artificial Sequence: Synthetic oligonucleotide
ccgaauucaggaugagccc

SEQ ID NO: 603004 - RNA, 19 nt, Artificial Sequence
  Description of Artificial Sequence: Synthetic oligonucleotide
ggaccaucucgauccagcc

SEQ ID NO: 603005 - RNA, 19 nt, Artificial Sequence
  Description of Artificial Sequence: Synthetic oligonucleotide
guccgaauucaggaugagc

SEQ ID NO: 603006 - RNA, 19 nt, Artificial Sequence
  Description of Artificial Sequence: Synthetic oligonucleotide
guuccaagaaauacagcua

SEQ ID NO: 603007 - RNA, 19 nt, Artificial Sequence
  Description of Artificial Sequence: Synthetic oligonucleotide
agacaugcccuaaguaaga

SEQ ID NO: 603008 - RNA, 19 nt, Artificial Sequence
  Description of Artificial Sequence: Synthetic oligonucleotide
cuugugguccgccgcgaug

SEQ ID NO: 603009 - RNA, 19 nt, Artificial Sequence
  Description of Artificial Sequence: Synthetic oligonucleotide
agccaaaacuuguccgaau

SEQ ID NO: 603010 - RNA, 19 nt, Artificial Sequence
  Description of Artificial Sequence: Synthetic oligonucleotide
cagcccguggggaauccag

SEQ ID NO: 603011 - RNA, 19 nt, Artificial Sequence
  Description of Artificial Sequence: Synthetic oligonucleotide
cauugcguuuggacugcug

SEQ ID NO: 603012 - RNA, 19 nt, Artificial Sequence
  Description of Artificial Sequence: Synthetic oligonucleotide
agaucucgugcuguagaga

SEQ ID NO: 603013 - RNA, 19 nt, Artificial Sequence
  Description of Artificial Sequence: Synthetic oligonucleotide
ggaguucgaguuccauucc

SEQ ID NO: 603014 - RNA, 19 nt, Artificial Sequence
  Description of Artificial Sequence: Synthetic oligonucleotide
caucaguaacagauguucu

SEQ ID NO: 603015 - RNA, 19 nt, Artificial Sequence
  Description of Artificial Sequence: Synthetic oligonucleotide
accucacgcagccgucauc

SEQ ID NO: 603016 - RNA, 19 nt, Artificial Sequence
  Description of Artificial Sequence: Synthetic oligonucleotide
agccacgauauggauuuca

SEQ ID NO: 603017 - RNA, 19 nt, Artificial Sequence
  Description of Artificial Sequence: Synthetic oligonucleotide
cguuaccuuucaaaauucc

SEQ ID NO: 603018 - RNA, 19 nt, Artificial Sequence
  Description of Artificial Sequence: Synthetic oligonucleotide
gaguucgaguuccauuccu

SEQ ID NO: 603019 - RNA, 19 nt, Artificial Sequence
  Description of Artificial Sequence: Synthetic oligonucleotide
cagacccauauguuuggga

SEQ ID NO: 603020 - RNA, 19 nt, Artificial Sequence
  Description of Artificial Sequence: Synthetic oligonucleotide
ucgauccagcccgugggga

SEQ ID NO: 603021 - RNA, 19 nt, Artificial Sequence
  Description of Artificial Sequence: Synthetic oligonucleotide
aguuagucuccagaacauu

SEQ ID NO: 603022 - RNA, 19 nt, Artificial Sequence
  Description of Artificial Sequence: Synthetic oligonucleotide
guuagucuccagaacauuu

SEQ ID NO: 603023 - RNA, 19 nt, Artificial Sequence
  Description of Artificial Sequence: Synthetic oligonucleotide
gagagcgguggcaucacaa

SEQ ID NO: 603024 - RNA, 19 nt, Artificial Sequence
  Description of Artificial Sequence: Synthetic oligonucleotide
gacaugcccuaaguaagaa

SEQ ID NO: 603025 - RNA, 19 nt, Artificial Sequence
  Description of Artificial Sequence: Synthetic oligonucleotide
cacuagaguuguccucuuc

SEQ ID NO: 603026 - RNA, 19 nt, Artificial Sequence
  Description of Artificial Sequence: Synthetic oligonucleotide
gguaagggauuaagaggcc

SEQ ID NO: 603027 - RNA, 19 nt, Artificial Sequence
  Description of Artificial Sequence: Synthetic oligonucleotide
guggaagucgaaagacaca

SEQ ID NO: 603028 - RNA, 19 nt, Artificial Sequence
  Description of Artificial Sequence: Synthetic oligonucleotide
cacaaccucacgcagccgu

SEQ ID NO: 603029 - RNA, 19 nt, Artificial Sequence
  Description of Artificial Sequence: Synthetic oligonucleotide
cccuaaguaagaaggaucu

SEQ ID NO: 603030 - RNA, 19 nt, Artificial Sequence
  Description of Artificial Sequence: Synthetic oligonucleotide
agguaaccgacuagugagu

SEQ ID NO: 603031 - RNA, 19 nt, Artificial Sequence
  Description of Artificial Sequence: Synthetic oligonucleotide
cucacccuccagaccugag

SEQ ID NO: 603032 - RNA, 19 nt, Artificial Sequence
  Description of Artificial Sequence: Synthetic oligonucleotide
uggcuauugccaggaugug

SEQ ID NO: 603033 - RNA, 19 nt, Artificial Sequence
  Description of Artificial Sequence: Synthetic oligonucleotide
ccaauuguccauguaauua

SEQ ID NO: 603034 - RNA, 19 nt, Artificial Sequence
  Description of Artificial Sequence: Synthetic oligonucleotide
ugcgcgccacaaacauggc

SEQ ID NO: 603035 - RNA, 19 nt, Artificial Sequence
  Description of Artificial Sequence: Synthetic oligonucleotide
acuauccacuagaguuguc

SEQ ID NO: 603036 - RNA, 19 nt, Artificial Sequence
  Description of Artificial Sequence: Synthetic oligonucleotide
aaccgacuagugagugaug

SEQ ID NO: 603037 - RNA, 19 nt, Artificial Sequence
  Description of Artificial Sequence: Synthetic oligonucleotide
ccguuaccuuucaaaauuc

SEQ ID NO: 603038 - RNA, 19 nt, Artificial Sequence
  Description of Artificial Sequence: Synthetic oligonucleotide
gcccuaaguaagaaggauc

SEQ ID NO: 603039 - RNA, 19 nt, Artificial Sequence
  Description of Artificial Sequence: Synthetic oligonucleotide
cccaaguuagucuccagaa

SEQ ID NO: 603040 - RNA, 19 nt, Artificial Sequence
  Description of Artificial Sequence: Synthetic oligonucleotide
acaaggccuuuaaaucagu

SEQ ID NO: 603041 - RNA, 19 nt, Artificial Sequence
  Description of Artificial Sequence: Synthetic oligonucleotide
cuccuacuauuucuuccca

SEQ ID NO: 603042 - RNA, 19 nt, Artificial Sequence
  Description of Artificial Sequence: Synthetic oligonucleotide
gugacugucauaagaguuu

SEQ ID NO: 603043 - RNA, 19 nt, Artificial Sequence
  Description of Artificial Sequence: Synthetic oligonucleotide
ugugguccgccgcgaugcu

SEQ ID NO: 603044 - RNA, 19 nt, Artificial Sequence
  Description of Artificial Sequence: Synthetic oligonucleotide
ccgacuagugagugaugcc

SEQ ID NO: 603045 - RNA, 19 nt, Artificial Sequence
  Description of Artificial Sequence: Synthetic oligonucleotide
gagugaugccaggguuucc

SEQ ID NO: 603046 - RNA, 19 nt, Artificial Sequence
  Description of Artificial Sequence: Synthetic oligonucleotide
ccuuuuggacuguguuuag

SEQ ID NO: 603047 - RNA, 19 nt, Artificial Sequence
  Description of Artificial Sequence: Synthetic oligonucleotide
gggagugagcacgagagcu

SEQ ID NO: 603048 - RNA, 19 nt, Artificial Sequence
  Description of Artificial Sequence: Synthetic oligonucleotide
cccguggaagucgaaagac

SEQ ID NO: 603049 - RNA, 19 nt, Artificial Sequence
  Description of Artificial Sequence: Synthetic oligonucleotide
ugccuacuaacaggcuaaa

SEQ ID NO: 603050 - RNA, 19 nt, Artificial Sequence
  Description of Artificial Sequence: Synthetic oligonucleotide
cuuuccucacagguuuuaa

SEQ ID NO: 603051 - RNA, 19 nt, Artificial Sequence
  Description of Artificial Sequence: Synthetic oligonucleotide
gcaguacaaugccaaucuc

SEQ ID NO: 603052 - RNA, 19 nt, Artificial Sequence
  Description of Artificial Sequence: Synthetic oligonucleotide
caugcaagacaugcccuaa

SEQ ID NO: 603053 - RNA, 19 nt, Artificial Sequence
  Description of Artificial Sequence: Synthetic oligonucleotide
ggggagugagcacgagagc

SEQ ID NO: 603054 - RNA, 19 nt, Artificial Sequence
  Description of Artificial Sequence: Synthetic oligonucleotide
ggaggagcugggcacaacu

SEQ ID NO: 603055 - RNA, 19 nt, Artificial Sequence
  Description of Artificial Sequence: Synthetic oligonucleotide
cacgccauacagauccacu

SEQ ID NO: 603056 - RNA, 19 nt, Artificial Sequence
  Description of Artificial Sequence: Synthetic oligonucleotide
cuuguacucagcugugcuu

SEQ ID NO: 603057 - RNA, 19 nt, Artificial Sequence
  Description of Artificial Sequence: Synthetic oligonucleotide
cacgcagccgucaucuccu

SEQ ID NO: 603058 - RNA, 19 nt, Artificial Sequence
  Description of Artificial Sequence: Synthetic oligonucleotide
gagaccacuggcugagauu

SEQ ID NO: 603059 - RNA, 19 nt, Artificial Sequence
  Description of Artificial Sequence: Synthetic oligonucleotide
uccuugugguccgccgcga

SEQ ID NO: 603060 - RNA, 19 nt, Artificial Sequence
  Description of Artificial Sequence: Synthetic oligonucleotide
gggaccaccagaagaagua

SEQ ID NO: 603061 - RNA, 19 nt, Artificial Sequence
  Description of Artificial Sequence: Synthetic oligonucleotide
cccguggggaauccagagg

SEQ ID NO: 603062 - RNA, 19 nt, Artificial Sequence
  Description of Artificial Sequence: Synthetic oligonucleotide
ccaaucuccgcuuucacuu

SEQ ID NO: 603063 - RNA, 19 nt, Artificial Sequence
  Description of Artificial Sequence: Synthetic oligonucleotide
gcgcgccacaaacauggcc

SEQ ID NO: 603064 - RNA, 19 nt, Artificial Sequence
  Description of Artificial Sequence: Synthetic oligonucleotide
agcuuacaugagaucucgu

SEQ ID NO: 603065 - RNA, 19 nt, Artificial Sequence
  Description of Artificial Sequence: Synthetic oligonucleotide
cuuuugcguauuuccuggu

SEQ ID NO: 603066 - RNA, 19 nt, Artificial Sequence
  Description of Artificial Sequence: Synthetic oligonucleotide
uggccauccggcgcccgug

SEQ ID NO: 603067 - RNA, 19 nt, Artificial Sequence
  Description of Artificial Sequence: Synthetic oligonucleotide
ugcuagcacuguuccuguu

SEQ ID NO: 603068 - RNA, 19 nt, Artificial Sequence
  Description of Artificial Sequence: Synthetic oligonucleotide
cuagcaguacaaugccaau

SEQ ID NO: 603069 - RNA, 19 nt, Artificial Sequence
  Description of Artificial Sequence: Synthetic oligonucleotide
caucugaacaaggccuuua

SEQ ID NO: 603070 - RNA, 19 nt, Artificial Sequence
  Description of Artificial Sequence: Synthetic oligonucleotide
cacaucaguaacagauguu

SEQ ID NO: 603071 - RNA, 19 nt, Artificial Sequence
  Description of Artificial Sequence: Synthetic oligonucleotide
gcgccacaaacauggccgc

SEQ ID NO: 603072 - RNA, 19 nt, Artificial Sequence
  Description of Artificial Sequence: Synthetic oligonucleotide
cacgagagcuggaaggguu

SEQ ID NO: 603073 - RNA, 19 nt, Artificial Sequence
  Description of Artificial Sequence: Synthetic oligonucleotide
cgcccguggaagucgaaag

SEQ ID NO: 603074 - RNA, 19 nt, Artificial Sequence
  Description of Artificial Sequence: Synthetic oligonucleotide
cauucucagguaagggauu

SEQ ID NO: 603075 - RNA, 19 nt, Artificial Sequence
  Description of Artificial Sequence: Synthetic oligonucleotide
ggcuaaacugaagucuaua

SEQ ID NO: 603076 - RNA, 19 nt, Artificial Sequence
  Description of Artificial Sequence: Synthetic oligonucleotide
gucacacgccauacagauc

SEQ ID NO: 603077 - RNA, 19 nt, Artificial Sequence
  Description of Artificial Sequence: Synthetic oligonucleotide
cucacgcagccgucaucuc

SEQ ID NO: 603078 - RNA, 19 nt, Artificial Sequence
  Description of Artificial Sequence: Synthetic oligonucleotide
ggaagucgaaagacacauc

SEQ ID NO: 603079 - RNA, 19 nt, Artificial Sequence
  Description of Artificial Sequence: Synthetic oligonucleotide
gcccguggaagucgaaaga

SEQ ID NO: 603080 - RNA, 19 nt, Artificial Sequence
  Description of Artificial Sequence: Synthetic oligonucleotide
cccaugucacacgccauac

SEQ ID NO: 603081 - RNA, 19 nt, Artificial Sequence
  Description of Artificial Sequence: Synthetic oligonucleotide
augcugcgcgccacaaaca

SEQ ID NO: 603082 - RNA, 19 nt, Artificial Sequence
  Description of Artificial Sequence: Synthetic oligonucleotide
ccguggaagucgaaagaca

SEQ ID NO: 603083 - RNA, 19 nt, Artificial Sequence
  Description of Artificial Sequence: Synthetic oligonucleotide
cgacuagugagugaugcca

SEQ ID NO: 603084 - RNA, 19 nt, Artificial Sequence
  Description of Artificial Sequence: Synthetic oligonucleotide
ccucggaguuuaucauuug

SEQ ID NO: 603085 - RNA, 19 nt, Artificial Sequence
  Description of Artificial Sequence: Synthetic oligonucleotide
cccguuaccuuucaaaauu

SEQ ID NO: 603086 - RNA, 19 nt, Artificial Sequence
  Description of Artificial Sequence: Synthetic oligonucleotide
cccauuuacugggcucccg

SEQ ID NO: 603087 - RNA, 19 nt, Artificial Sequence
  Description of Artificial Sequence: Synthetic oligonucleotide
ccagaccugagaguuguga

SEQ ID NO: 603088 - RNA, 19 nt, Artificial Sequence
  Description of Artificial Sequence: Synthetic oligonucleotide
caucacuucccacggcgau

SEQ ID NO: 603089 - RNA, 19 nt, Artificial Sequence
  Description of Artificial Sequence: Synthetic oligonucleotide
gccacgauauggauuucaa

SEQ ID NO: 603090 - RNA, 19 nt, Artificial Sequence
  Description of Artificial Sequence: Synthetic oligonucleotide
ccacgauauggauuucaaa

SEQ ID NO: 603091 - RNA, 19 nt, Artificial Sequence
  Description of Artificial Sequence: Synthetic oligonucleotide
gccuacuaacaggcuaaac

SEQ ID NO: 603092 - RNA, 19 nt, Artificial Sequence
  Description of Artificial Sequence: Synthetic oligonucleotide
gccgagagcgguggcauca

SEQ ID NO: 603093 - RNA, 19 nt, Artificial Sequence
  Description of Artificial Sequence: Synthetic oligonucleotide
aucuccgcuuucacuuuua

SEQ ID NO: 603094 - RNA, 19 nt, Artificial Sequence
  Description of Artificial Sequence: Synthetic oligonucleotide
gguccgccgcgaugcugcg

SEQ ID NO: 603095 - RNA, 19 nt, Artificial Sequence
  Description of Artificial Sequence: Synthetic oligonucleotide
ggccuuuuggacuguguuu

SEQ ID NO: 603096 - RNA, 19 nt, Artificial Sequence
  Description of Artificial Sequence: Synthetic oligonucleotide
gcugcgcgccacaaacaug

SEQ ID NO: 603097 - RNA, 19 nt, Artificial Sequence
  Description of Artificial Sequence: Synthetic oligonucleotide
ggggccucauauauucuua

SEQ ID NO: 603098 - RNA, 19 nt, Artificial Sequence
  Description of Artificial Sequence: Synthetic oligonucleotide
caaucuccgcuuucacuuu

SEQ ID NO: 603099 - RNA, 19 nt, Artificial Sequence
  Description of Artificial Sequence: Synthetic oligonucleotide
ccaugucacacgccauaca

SEQ ID NO: 603100 - RNA, 19 nt, Artificial Sequence
  Description of Artificial Sequence: Synthetic oligonucleotide
gagccacgauauggauuuc

SEQ ID NO: 603101 - RNA, 19 nt, Artificial Sequence
  Description of Artificial Sequence: Synthetic oligonucleotide
cccggaauaaaagcuuuua

SEQ ID NO: 603102 - RNA, 19 nt, Artificial Sequence
  Description of Artificial Sequence: Synthetic oligonucleotide
gcgguggcaucacaagagu

SEQ ID NO: 603103 - RNA, 19 nt, Artificial Sequence
  Description of Artificial Sequence: Synthetic oligonucleotide
ccauuuacugggcucccgu

SEQ ID NO: 603104 - RNA, 19 nt, Artificial Sequence
  Description of Artificial Sequence: Synthetic oligonucleotide
gccgucaucuccugaggau

SEQ ID NO: 603105 - RNA, 19 nt, Artificial Sequence
  Description of Artificial Sequence: Synthetic oligonucleotide
ccacaaugauaugcuuuca

SEQ ID NO: 603106 - RNA, 19 nt, Artificial Sequence
  Description of Artificial Sequence: Synthetic oligonucleotide
gccgcgaugcugcgcgcca

SEQ ID NO: 603107 - RNA, 19 nt, Artificial Sequence
  Description of Artificial Sequence: Synthetic oligonucleotide
ccacaaccucacgcagccg

SEQ ID NO: 603108 - RNA, 19 nt, Artificial Sequence
  Description of Artificial Sequence: Synthetic oligonucleotide
guggccauccggcgcccgu

SEQ ID NO: 603109 - RNA, 19 nt, Artificial Sequence
  Description of Artificial Sequence: Synthetic oligonucleotide
guccgccgcgaugcugcgc

SEQ ID NO: 603110 - RNA, 19 nt, Artificial Sequence
  Description of Artificial Sequence: Synthetic oligonucleotide
gcgcccguggaagucgaaa

SEQ ID NO: 603111 - RNA, 19 nt, Artificial Sequence
  Description of Artificial Sequence: Synthetic oligonucleotide
cgauccagcccguggggaa

SEQ ID NO: 603112 - RNA, 19 nt, Artificial Sequence
  Description of Artificial Sequence: Synthetic oligonucleotide
ccgagagcgguggcaucac

SEQ ID NO: 603113 - RNA, 19 nt, Artificial Sequence
  Description of Artificial Sequence: Synthetic oligonucleotide
gcgaugcugcgcgccacaa

SEQ ID NO: 603114 - RNA, 19 nt, Artificial Sequence
  Description of Artificial Sequence: Synthetic oligonucleotide
cgccgcgaugcugcgcgcc

SEQ ID NO: 603115 - RNA, 19 nt, Artificial Sequence
  Description of Artificial Sequence: Synthetic oligonucleotide
ccgccgcgaugcugcgcgc

SEQ ID NO: 603116 - RNA, 19 nt, Artificial Sequence
  Description of Artificial Sequence: Synthetic oligonucleotide
cgcgaugcugcgcgccaca

SEQ ID NO: 603117 - RNA, 19 nt, Artificial Sequence
  Description of Artificial Sequence: Synthetic oligonucleotide
cgaugcugcgcgccacaaa

SEQ ID NO: 603118 - RNA, 19 nt, Artificial Sequence
  Description of Artificial Sequence: Synthetic oligonucleotide
ccagcccguggggaaucca

SEQ ID NO: 603119 - RNA, 19 nt, Artificial Sequence
  Description of Artificial Sequence: Synthetic oligonucleotide
cacuucccacggcgaucau

SEQ ID NO: 603120 - RNA, 19 nt, Artificial Sequence
  Description of Artificial Sequence: Synthetic oligonucleotide
ggcgcccguggaagucgaa

SEQ ID NO: 603121 - RNA, 19 nt, Artificial Sequence
  Description of Artificial Sequence: Synthetic oligonucleotide
agcauaacgagcuauaagc

SEQ ID NO: 603122 - RNA, 19 nt, Artificial Sequence
  Description of Artificial Sequence: Synthetic oligonucleotide
aaagcuucaaucauguucc

SEQ ID NO: 603123 - RNA, 19 nt, Artificial Sequence
  Description of Artificial Sequence: Synthetic oligonucleotide
aauacggucaacuugccuc

SEQ ID NO: 603124 - RNA, 19 nt, Artificial Sequence
  Description of Artificial Sequence: Synthetic oligonucleotide
uguacaaaucguaacuugc

SEQ ID NO: 603125 - RNA, 19 nt, Artificial Sequence
  Description of Artificial Sequence: Synthetic oligonucleotide
ucguaugacaucaaaauuc

SEQ ID NO: 603126 - RNA, 19 nt, Artificial Sequence
  Description of Artificial Sequence: Synthetic oligonucleotide
uacgcggcaaucauuaagg

SEQ ID NO: 603127 - RNA, 19 nt, Artificial Sequence
  Description of Artificial Sequence: Synthetic oligonucleotide
auauaucucaauuugucca

SEQ ID NO: 603128 - RNA, 19 nt, Artificial Sequence
  Description of Artificial Sequence: Synthetic oligonucleotide
aaauucugagcacgcauuc

SEQ ID NO: 603129 - RNA, 19 nt, Artificial Sequence
  Description of Artificial Sequence: Synthetic oligonucleotide
uuuacuaauugcauggcuc

SEQ ID NO: 603130 - RNA, 19 nt, Artificial Sequence
  Description of Artificial Sequence: Synthetic oligonucleotide
agacguggaacgcacaggc

SEQ ID NO: 603131 - RNA, 19 nt, Artificial Sequence
  Description of Artificial Sequence: Synthetic oligonucleotide
ugcucaucggccaagagac

SEQ ID NO: 603132 - RNA, 19 nt, Artificial Sequence
  Description of Artificial Sequence: Synthetic oligonucleotide
ucggccaagagacugggcg

SEQ ID NO: 603133 - RNA, 19 nt, Artificial Sequence
  Description of Artificial Sequence: Synthetic oligonucleotide
ugagaccaugcccugaggg

SEQ ID NO: 603134 - RNA, 19 nt, Artificial Sequence
  Description of Artificial Sequence: Synthetic oligonucleotide
cauaacgagcuauaagccg

SEQ ID NO: 603135 - RNA, 19 nt, Artificial Sequence
  Description of Artificial Sequence: Synthetic oligonucleotide
auaucaacgagaugaaggu

SEQ ID NO: 603136 - RNA, 19 nt, Artificial Sequence
  Description of Artificial Sequence: Synthetic oligonucleotide
uaucggaagcccaucaugc

SEQ ID NO: 603137 - RNA, 19 nt, Artificial Sequence
  Description of Artificial Sequence: Synthetic oligonucleotide
uguuccagauaucaacgag

SEQ ID NO: 603138 - RNA, 19 nt, Artificial Sequence
  Description of Artificial Sequence: Synthetic oligonucleotide
uuacuaauugcauggcuca

SEQ ID NO: 603139 - RNA, 19 nt, Artificial Sequence
  Description of Artificial Sequence: Synthetic oligonucleotide
auaacgagcuauaagccgg

SEQ ID NO: 603140 - RNA, 19 nt, Artificial Sequence
  Description of Artificial Sequence: Synthetic oligonucleotide
gagaugacggucucaaggc

SEQ ID NO: 603141 - RNA, 19 nt, Artificial Sequence
  Description of Artificial Sequence: Synthetic oligonucleotide
uccucggcuaaccugaaug

SEQ ID NO: 603142 - RNA, 19 nt, Artificial Sequence
  Description of Artificial Sequence: Synthetic oligonucleotide
aaguugacagucguaugac

SEQ ID NO: 603143 - RNA, 19 nt, Artificial Sequence
  Description of Artificial Sequence: Synthetic oligonucleotide
uguaaguugacagucguau

SEQ ID NO: 603144 - RNA, 19 nt, Artificial Sequence
  Description of Artificial Sequence: Synthetic oligonucleotide
acauaggaggcuaucagcg

SEQ ID NO: 603145 - RNA, 19 nt, Artificial Sequence
  Description of Artificial Sequence: Synthetic oligonucleotide
ucggcuaaccugaauggag

SEQ ID NO: 603146 - RNA, 19 nt, Artificial Sequence
  Description of Artificial Sequence: Synthetic oligonucleotide
agacggauaggaaugugcc

SEQ ID NO: 603147 - RNA, 19 nt, Artificial Sequence
  Description of Artificial Sequence: Synthetic oligonucleotide
aacugauaguagauggagg

SEQ ID NO: 603148 - RNA, 19 nt, Artificial Sequence
  Description of Artificial Sequence: Synthetic oligonucleotide
acugaaaauacggucaacu

SEQ ID NO: 603149 - RNA, 19 nt, Artificial Sequence
  Description of Artificial Sequence: Synthetic oligonucleotide
ucauacgcggcaaucauua

SEQ ID NO: 603150 - RNA, 19 nt, Artificial Sequence
  Description of Artificial Sequence: Synthetic oligonucleotide
auacggucaacuugccucg

SEQ ID NO: 603151 - RNA, 19 nt, Artificial Sequence
  Description of Artificial Sequence: Synthetic oligonucleotide
gaugagaccaugcccugag

SEQ ID NO: 603152 - RNA, 19 nt, Artificial Sequence
  Description of Artificial Sequence: Synthetic oligonucleotide
gagucuggcagccugcaag

SEQ ID NO: 603153 - RNA, 19 nt, Artificial Sequence
  Description of Artificial Sequence: Synthetic oligonucleotide
acgacauguggcuaaccac

SEQ ID NO: 603154 - RNA, 19 nt, Artificial Sequence
  Description of Artificial Sequence: Synthetic oligonucleotide
aucaacgagaugaagguug

SEQ ID NO: 603155 - RNA, 19 nt, Artificial Sequence
  Description of Artificial Sequence: Synthetic oligonucleotide
ucggcuaggacuguccagg

SEQ ID NO: 603156 - RNA, 19 nt, Artificial Sequence
  Description of Artificial Sequence: Synthetic oligonucleotide
auacgcggcaaucauuaag

SEQ ID NO: 603157 - RNA, 19 nt, Artificial Sequence
  Description of Artificial Sequence: Synthetic oligonucleotide
cacauaggaggcuaucagc

SEQ ID NO: 603158 - RNA, 19 nt, Artificial Sequence
  Description of Artificial Sequence: Synthetic oligonucleotide
aaauacggucaacuugccu

SEQ ID NO: 603159 - RNA, 19 nt, Artificial Sequence
  Description of Artificial Sequence: Synthetic oligonucleotide
aggaacuaugugugcaagg

SEQ ID NO: 603160 - RNA, 19 nt, Artificial Sequence
  Description of Artificial Sequence: Synthetic oligonucleotide
ggcuaguacaugcaggagg

SEQ ID NO: 603161 - RNA, 19 nt, Artificial Sequence
  Description of Artificial Sequence: Synthetic oligonucleotide
ucaucggccaagagacugg

SEQ ID NO: 603162 - RNA, 19 nt, Artificial Sequence
  Description of Artificial Sequence: Synthetic oligonucleotide
agcccaaagauuuacuaau

SEQ ID NO: 603163 - RNA, 19 nt, Artificial Sequence
  Description of Artificial Sequence: Synthetic oligonucleotide
aggaggaucggccaucaug

SEQ ID NO: 603164 - RNA, 19 nt, Artificial Sequence
  Description of Artificial Sequence: Synthetic oligonucleotide
uaugugugcaaggucaagu

SEQ ID NO: 603165 - RNA, 19 nt, Artificial Sequence
  Description of Artificial Sequence: Synthetic oligonucleotide
gcggcaaucauuaagguug

SEQ ID NO: 603166 - RNA, 19 nt, Artificial Sequence
  Description of Artificial Sequence: Synthetic oligonucleotide
gauaauuguggcacugcug

SEQ ID NO: 603167 - RNA, 19 nt, Artificial Sequence
  Description of Artificial Sequence: Synthetic oligonucleotide
ggaggaucggccaucaugg

SEQ ID NO: 603168 - RNA, 19 nt, Artificial Sequence
  Description of Artificial Sequence: Synthetic oligonucleotide
auacuguaaccucuuggug

SEQ ID NO: 603169 - RNA, 19 nt, Artificial Sequence
  Description of Artificial Sequence: Synthetic oligonucleotide
cauguggcuaaccacggug

SEQ ID NO: 603170 - RNA, 19 nt, Artificial Sequence
  Description of Artificial Sequence: Synthetic oligonucleotide
aacgagaugaagguugcau

SEQ ID NO: 603171 - RNA, 19 nt, Artificial Sequence
  Description of Artificial Sequence: Synthetic oligonucleotide
agagagacggauaggaaug

SEQ ID NO: 603172 - RNA, 19 nt, Artificial Sequence
  Description of Artificial Sequence: Synthetic oligonucleotide
uggugguugagugagucug

SEQ ID NO: 603173 - RNA, 19 nt, Artificial Sequence
  Description of Artificial Sequence: Synthetic oligonucleotide
cuuguucaacugauaguag

SEQ ID NO: 603174 - RNA, 19 nt, Artificial Sequence
  Description of Artificial Sequence: Synthetic oligonucleotide
aggagcacuccacaggaug

SEQ ID NO: 603175 - RNA, 19 nt, Artificial Sequence
  Description of Artificial Sequence: Synthetic oligonucleotide
ucuugucggugccagcuug

SEQ ID NO: 603176 - RNA, 19 nt, Artificial Sequence
  Description of Artificial Sequence: Synthetic oligonucleotide
gagacggauaggaaugugc

SEQ ID NO: 603177 - RNA, 19 nt, Artificial Sequence
  Description of Artificial Sequence: Synthetic oligonucleotide
gagcacgcauucuaugaag

SEQ ID NO: 603178 - RNA, 19 nt, Artificial Sequence
  Description of Artificial Sequence: Synthetic oligonucleotide
uauaagccggugcuccuca

SEQ ID NO: 603179 - RNA, 19 nt, Artificial Sequence
  Description of Artificial Sequence: Synthetic oligonucleotide
gacgacauguggcuaacca

SEQ ID NO: 603180 - RNA, 19 nt, Artificial Sequence
  Description of Artificial Sequence: Synthetic oligonucleotide
uggcuauacuguaaccucu

SEQ ID NO: 603181 - RNA, 19 nt, Artificial Sequence
  Description of Artificial Sequence: Synthetic oligonucleotide
acgcauucuaugaagagcu

SEQ ID NO: 603182 - RNA, 19 nt, Artificial Sequence
  Description of Artificial Sequence: Synthetic oligonucleotide
aguguguuaaggccauugu

SEQ ID NO: 603183 - RNA, 19 nt, Artificial Sequence
  Description of Artificial Sequence: Synthetic oligonucleotide
ugaagguugcaucgcuucu

SEQ ID NO: 603184 - RNA, 19 nt, Artificial Sequence
  Description of Artificial Sequence: Synthetic oligonucleotide
aguagaaggaaggcgcuug

SEQ ID NO: 603185 - RNA, 19 nt, Artificial Sequence
  Description of Artificial Sequence: Synthetic oligonucleotide
ggucuaguguguuaaggcc

SEQ ID NO: 603186 - RNA, 19 nt, Artificial Sequence
  Description of Artificial Sequence: Synthetic oligonucleotide
cacgcauucuaugaagagc

SEQ ID NO: 603187 - RNA, 19 nt, Artificial Sequence
  Description of Artificial Sequence: Synthetic oligonucleotide
cauaggaggcuaucagcgc

SEQ ID NO: 603188 - RNA, 19 nt, Artificial Sequence
  Description of Artificial Sequence: Synthetic oligonucleotide
gacauguggcuaaccacgg

SEQ ID NO: 603189 - RNA, 19 nt, Artificial Sequence
  Description of Artificial Sequence: Synthetic oligonucleotide
guaaguugacagucguaug

SEQ ID NO: 603190 - RNA, 19 nt, Artificial Sequence
  Description of Artificial Sequence: Synthetic oligonucleotide
agcagaucguuacggaggu

SEQ ID NO: 603191 - RNA, 19 nt, Artificial Sequence
  Description of Artificial Sequence: Synthetic oligonucleotide
cagcauaacgagcuauaag

SEQ ID NO: 603192 - RNA, 19 nt, Artificial Sequence
  Description of Artificial Sequence: Synthetic oligonucleotide
aucguuacggagguuucuc

SEQ ID NO: 603193 - RNA, 19 nt, Artificial Sequence
  Description of Artificial Sequence: Synthetic oligonucleotide
acguggaacgcacaggcau

SEQ ID NO: 603194 - RNA, 19 nt, Artificial Sequence
  Description of Artificial Sequence: Synthetic oligonucleotide
gaacuaugugugcaagguc

SEQ ID NO: 603195 - RNA, 19 nt, Artificial Sequence
  Description of Artificial Sequence: Synthetic oligonucleotide
ugugagugccacuggcaug

SEQ ID NO: 603196 - RNA, 19 nt, Artificial Sequence
  Description of Artificial Sequence: Synthetic oligonucleotide
ugcguguuccguguaacca

SEQ ID NO: 603197 - RNA, 19 nt, Artificial Sequence
  Description of Artificial Sequence: Synthetic oligonucleotide
agacugauggacuguucca

SEQ ID NO: 603198 - RNA, 19 nt, Artificial Sequence
  Description of Artificial Sequence: Synthetic oligonucleotide
gaagguugcaucgcuucug

SEQ ID NO: 603199 - RNA, 19 nt, Artificial Sequence
  Description of Artificial Sequence: Synthetic oligonucleotide
ucggcccucacugucauac

SEQ ID NO: 603200 - RNA, 19 nt, Artificial Sequence
  Description of Artificial Sequence: Synthetic oligonucleotide
ucguuacggagguuucucc

SEQ ID NO: 603201 - RNA, 19 nt, Artificial Sequence
  Description of Artificial Sequence: Synthetic oligonucleotide
aagagacugggcguguccu

SEQ ID NO: 603202 - RNA, 19 nt, Artificial Sequence
  Description of Artificial Sequence: Synthetic oligonucleotide
aaggaaggcgcuuguucaa

SEQ ID NO: 603203 - RNA, 19 nt, Artificial Sequence
  Description of Artificial Sequence: Synthetic oligonucleotide
acaugguugcuaacauagc

SEQ ID NO: 603204 - RNA, 19 nt, Artificial Sequence
  Description of Artificial Sequence: Synthetic oligonucleotide
acugcguguuccguguaac

SEQ ID NO: 603205 - RNA, 19 nt, Artificial Sequence
  Description of Artificial Sequence: Synthetic oligonucleotide
caucgcuucuguacaaauc

SEQ ID NO: 603206 - RNA, 19 nt, Artificial Sequence
  Description of Artificial Sequence: Synthetic oligonucleotide
gaggaacuaugugugcaag

SEQ ID NO: 603207 - RNA, 19 nt, Artificial Sequence
  Description of Artificial Sequence: Synthetic oligonucleotide
ccguguaaccaaaggaugg

SEQ ID NO: 603208 - RNA, 19 nt, Artificial Sequence
  Description of Artificial Sequence: Synthetic oligonucleotide
acgggucauguuuccugcc

SEQ ID NO: 603209 - RNA, 19 nt, Artificial Sequence
  Description of Artificial Sequence: Synthetic oligonucleotide
gcuaguacaugcaggaggc

SEQ ID NO: 603210 - RNA, 19 nt, Artificial Sequence
  Description of Artificial Sequence: Synthetic oligonucleotide
cucaucggccaagagacug

SEQ ID NO: 603211 - RNA, 19 nt, Artificial Sequence
  Description of Artificial Sequence: Synthetic oligonucleotide
aucagcgcaugcucaucgg

SEQ ID NO: 603212 - RNA, 19 nt, Artificial Sequence
  Description of Artificial Sequence: Synthetic oligonucleotide
uaacgagcuauaagccggu

SEQ ID NO: 603213 - RNA, 19 nt, Artificial Sequence
  Description of Artificial Sequence: Synthetic oligonucleotide
cgacauguggcuaaccacg

SEQ ID NO: 603214 - RNA, 19 nt, Artificial Sequence
  Description of Artificial Sequence: Synthetic oligonucleotide
cacgccaaaagcaguucug

SEQ ID NO: 603215 - RNA, 19 nt, Artificial Sequence
  Description of Artificial Sequence: Synthetic oligonucleotide
acaggugcggacugcgugu

SEQ ID NO: 603216 - RNA, 19 nt, Artificial Sequence
  Description of Artificial Sequence: Synthetic oligonucleotide
guuacggagguuucuccuc

SEQ ID NO: 603217 - RNA, 19 nt, Artificial Sequence
  Description of Artificial Sequence: Synthetic oligonucleotide
ugugcaaggucaagugguu

SEQ ID NO: 603218 - RNA, 19 nt, Artificial Sequence
  Description of Artificial Sequence: Synthetic oligonucleotide
ucgcuucuguacaaaucgu

SEQ ID NO: 603219 - RNA, 19 nt, Artificial Sequence
  Description of Artificial Sequence: Synthetic oligonucleotide
cguaccuugugcaaaggcc

SEQ ID NO: 603220 - RNA, 19 nt, Artificial Sequence
  Description of Artificial Sequence: Synthetic oligonucleotide
aggaaggcgcuuguucaac

SEQ ID NO: 603221 - RNA, 19 nt, Artificial Sequence
  Description of Artificial Sequence: Synthetic oligonucleotide
uggcaucgguaucggaagc

SEQ ID NO: 603222 - RNA, 19 nt, Artificial Sequence
  Description of Artificial Sequence: Synthetic oligonucleotide
uguggcuaaccacgguguc

SEQ ID NO: 603223 - RNA, 19 nt, Artificial Sequence
  Description of Artificial Sequence: Synthetic oligonucleotide
gcauaacgagcuauaagcc

SEQ ID NO: 603224 - RNA, 19 nt, Artificial Sequence
  Description of Artificial Sequence: Synthetic oligonucleotide
aucggaagcccaucaugcu

SEQ ID NO: 603225 - RNA, 19 nt, Artificial Sequence
  Description of Artificial Sequence: Synthetic oligonucleotide
cacgugugcaguguugcag

SEQ ID NO: 603226 - RNA, 19 nt, Artificial Sequence
  Description of Artificial Sequence: Synthetic oligonucleotide
guauggucuaguguguuaa

SEQ ID NO: 603227 - RNA, 19 nt, Artificial Sequence
  Description of Artificial Sequence: Synthetic oligonucleotide
uggcuaaccacggugucau

SEQ ID NO: 603228 - RNA, 19 nt, Artificial Sequence
  Description of Artificial Sequence: Synthetic oligonucleotide
uaccuugugcaaaggccuc

SEQ ID NO: 603229 - RNA, 19 nt, Artificial Sequence
  Description of Artificial Sequence: Synthetic oligonucleotide
cugcguguuccguguaacc

SEQ ID NO: 603230 - RNA, 19 nt, Artificial Sequence
  Description of Artificial Sequence: Synthetic oligonucleotide
ucaaggcgggacacacuga

SEQ ID NO: 603231 - RNA, 19 nt, Artificial Sequence
  Description of Artificial Sequence: Synthetic oligonucleotide
gugacaguaggagcacucc

SEQ ID NO: 603232 - RNA, 19 nt, Artificial Sequence
  Description of Artificial Sequence: Synthetic oligonucleotide
agucggcuaggacugucca

SEQ ID NO: 603233 - RNA, 19 nt, Artificial Sequence
  Description of Artificial Sequence: Synthetic oligonucleotide
uccaugagugggugaugug

SEQ ID NO: 603234 - RNA, 19 nt, Artificial Sequence
  Description of Artificial Sequence: Synthetic oligonucleotide
gcagacguggaacgcacag

SEQ ID NO: 603235 - RNA, 19 nt, Artificial Sequence
  Description of Artificial Sequence: Synthetic oligonucleotide
agcacgcauucuaugaaga

SEQ ID NO: 603236 - RNA, 19 nt, Artificial Sequence
  Description of Artificial Sequence: Synthetic oligonucleotide
agacgacauguggcuaacc

SEQ ID NO: 603237 - RNA, 19 nt, Artificial Sequence
  Description of Artificial Sequence: Synthetic oligonucleotide
gagcaagcgcagcucugcc

SEQ ID NO: 603238 - RNA, 19 nt, Artificial Sequence
  Description of Artificial Sequence: Synthetic oligonucleotide
cagacguggaacgcacagg

SEQ ID NO: 603239 - RNA, 19 nt, Artificial Sequence
  Description of Artificial Sequence: Synthetic oligonucleotide
cagcagacguggaacgcac

SEQ ID NO: 603240 - RNA, 19 nt, Artificial Sequence
  Description of Artificial Sequence: Synthetic oligonucleotide
uaucaacgagaugaagguu

SEQ ID NO: 603241 - RNA, 19 nt, Artificial Sequence
  Description of Artificial Sequence: Synthetic oligonucleotide
acggucucaaggcgggaca

SEQ ID NO: 603242 - RNA, 19 nt, Artificial Sequence
  Description of Artificial Sequence: Synthetic oligonucleotide
cagcccaaagauuuacuaa

SEQ ID NO: 603243 - RNA, 19 nt, Artificial Sequence
  Description of Artificial Sequence: Synthetic oligonucleotide
acgcugauuuggugaguag

SEQ ID NO: 603244 - RNA, 19 nt, Artificial Sequence
  Description of Artificial Sequence: Synthetic oligonucleotide
gucggcuaggacuguccag

SEQ ID NO: 603245 - RNA, 19 nt, Artificial Sequence
  Description of Artificial Sequence: Synthetic oligonucleotide
gcauagggcggccaccucc

SEQ ID NO: 603246 - RNA, 19 nt, Artificial Sequence
  Description of Artificial Sequence: Synthetic oligonucleotide
auguggcuaaccacggugu

SEQ ID NO: 603247 - RNA, 19 nt, Artificial Sequence
  Description of Artificial Sequence: Synthetic oligonucleotide
aacgagcuauaagccggug

SEQ ID NO: 603248 - RNA, 19 nt, Artificial Sequence
  Description of Artificial Sequence: Synthetic oligonucleotide
agagacggauaggaaugug

SEQ ID NO: 603249 - RNA, 19 nt, Artificial Sequence
  Description of Artificial Sequence: Synthetic oligonucleotide
guaccuugugcaaaggccu

SEQ ID NO: 603250 - RNA, 19 nt, Artificial Sequence
  Description of Artificial Sequence: Synthetic oligonucleotide
caucaugcucucacaguga

SEQ ID NO: 603251 - RNA, 19 nt, Artificial Sequence
  Description of Artificial Sequence: Synthetic oligonucleotide
gucguaugacaucaaaauu

SEQ ID NO: 603252 - RNA, 19 nt, Artificial Sequence
  Description of Artificial Sequence: Synthetic oligonucleotide
gacggucucaaggcgggac

SEQ ID NO: 603253 - RNA, 19 nt, Artificial Sequence
  Description of Artificial Sequence: Synthetic oligonucleotide
aacuugccucggcccucac

SEQ ID NO: 603254 - RNA, 19 nt, Artificial Sequence
  Description of Artificial Sequence: Synthetic oligonucleotide
caagccggguccaggugug

SEQ ID NO: 603255 - RNA, 19 nt, Artificial Sequence
  Description of Artificial Sequence: Synthetic oligonucleotide
cuaguacaugcaggaggcc

SEQ ID NO: 603256 - RNA, 19 nt, Artificial Sequence
  Description of Artificial Sequence: Synthetic oligonucleotide
caggauggaagacguucuc

SEQ ID NO: 603257 - RNA, 19 nt, Artificial Sequence
  Description of Artificial Sequence: Synthetic oligonucleotide
acgcggcaaucauuaaggu

SEQ ID NO: 603258 - RNA, 19 nt, Artificial Sequence
  Description of Artificial Sequence: Synthetic oligonucleotide
cuauaagccggugcuccuc

SEQ ID NO: 603259 - RNA, 19 nt, Artificial Sequence
  Description of Artificial Sequence: Synthetic oligonucleotide
gacggauaggaaugugccu

SEQ ID NO: 603260 - RNA, 19 nt, Artificial Sequence
  Description of Artificial Sequence: Synthetic oligonucleotide
caguguugcagacgggcca

SEQ ID NO: 603261 - RNA, 19 nt, Artificial Sequence
  Description of Artificial Sequence: Synthetic oligonucleotide
uacggucaacuugccucgg

SEQ ID NO: 603262 - RNA, 19 nt, Artificial Sequence
  Description of Artificial Sequence: Synthetic oligonucleotide
aaacaggugcggacugcgu

SEQ ID NO: 603263 - RNA, 19 nt, Artificial Sequence
  Description of Artificial Sequence: Synthetic oligonucleotide
cugucauacgcggcaauca

SEQ ID NO: 603264 - RNA, 19 nt, Artificial Sequence
  Description of Artificial Sequence: Synthetic oligonucleotide
ggaacuaugugugcaaggu

SEQ ID NO: 603265 - RNA, 19 nt, Artificial Sequence
  Description of Artificial Sequence: Synthetic oligonucleotide
cauuaagguugaggaggag

SEQ ID NO: 603266 - RNA, 19 nt, Artificial Sequence
  Description of Artificial Sequence: Synthetic oligonucleotide
cucguaccuugugcaaagg

SEQ ID NO: 603267 - RNA, 19 nt, Artificial Sequence
  Description of Artificial Sequence: Synthetic oligonucleotide
gacgggccacauaggaggc

SEQ ID NO: 603268 - RNA, 19 nt, Artificial Sequence
  Description of Artificial Sequence: Synthetic oligonucleotide
ccucguaccuugugcaaag

SEQ ID NO: 603269 - RNA, 19 nt, Artificial Sequence
  Description of Artificial Sequence: Synthetic oligonucleotide
ggugcggacugcguguucc

SEQ ID NO: 603270 - RNA, 19 nt, Artificial Sequence
  Description of Artificial Sequence: Synthetic oligonucleotide
agaugagaccaugcccuga

SEQ ID NO: 603271 - RNA, 19 nt, Artificial Sequence
  Description of Artificial Sequence: Synthetic oligonucleotide
caucgguaucggaagccca

SEQ ID NO: 603272 - RNA, 19 nt, Artificial Sequence
  Description of Artificial Sequence: Synthetic oligonucleotide
uacggagguuucuccucgu

SEQ ID NO: 603273 - RNA, 19 nt, Artificial Sequence
  Description of Artificial Sequence: Synthetic oligonucleotide
gcuaaccacggugucauuc

SEQ ID NO: 603274 - RNA, 19 nt, Artificial Sequence
  Description of Artificial Sequence: Synthetic oligonucleotide
ugggcauagggcggccacc

SEQ ID NO: 603275 - RNA, 19 nt, Artificial Sequence
  Description of Artificial Sequence: Synthetic oligonucleotide
ggaucggccaucauggugu

SEQ ID NO: 603276 - RNA, 19 nt, Artificial Sequence
  Description of Artificial Sequence: Synthetic oligonucleotide
aucgguaucggaagcccau

SEQ ID NO: 603277 - RNA, 19 nt, Artificial Sequence
  Description of Artificial Sequence: Synthetic oligonucleotide
aucggccaagagacugggc

SEQ ID NO: 603278 - RNA, 19 nt, Artificial Sequence
  Description of Artificial Sequence: Synthetic oligonucleotide
aggacacgugugcaguguu

SEQ ID NO: 603279 - RNA, 19 nt, Artificial Sequence
  Description of Artificial Sequence: Synthetic oligonucleotide
ggcaucgguaucggaagcc

SEQ ID NO: 603280 - RNA, 19 nt, Artificial Sequence
  Description of Artificial Sequence: Synthetic oligonucleotide
cggcuaaccugaauggagc

SEQ ID NO: 603281 - RNA, 19 nt, Artificial Sequence
  Description of Artificial Sequence: Synthetic oligonucleotide
cuaucagcgcaugcucauc

SEQ ID NO: 603282 - RNA, 19 nt, Artificial Sequence
  Description of Artificial Sequence: Synthetic oligonucleotide
ucgguaucggaagcccauc

SEQ ID NO: 603283 - RNA, 19 nt, Artificial Sequence
  Description of Artificial Sequence: Synthetic oligonucleotide
uccagacgacauguggcua

SEQ ID NO: 603284 - RNA, 19 nt, Artificial Sequence
  Description of Artificial Sequence: Synthetic oligonucleotide
agugggcacuccagacgac

SEQ ID NO: 603285 - RNA, 19 nt, Artificial Sequence
  Description of Artificial Sequence: Synthetic oligonucleotide
cagacgacauguggcuaac

SEQ ID NO: 603286 - RNA, 19 nt, Artificial Sequence
  Description of Artificial Sequence: Synthetic oligonucleotide
guaaccucuuggugggagu

SEQ ID NO: 603287 - RNA, 19 nt, Artificial Sequence
  Description of Artificial Sequence: Synthetic oligonucleotide
gcaucagugggaggacggg

SEQ ID NO: 603288 - RNA, 19 nt, Artificial Sequence
  Description of Artificial Sequence: Synthetic oligonucleotide
uccuaccuccugguaaauu

SEQ ID NO: 603289 - RNA, 19 nt, Artificial Sequence
  Description of Artificial Sequence: Synthetic oligonucleotide
gguauggucuaguguguua

SEQ ID NO: 603290 - RNA, 19 nt, Artificial Sequence
  Description of Artificial Sequence: Synthetic oligonucleotide
gaucguuacggagguuucu

SEQ ID NO: 603291 - RNA, 19 nt, Artificial Sequence
  Description of Artificial Sequence: Synthetic oligonucleotide
gcaugagagguagccagac

SEQ ID NO: 603292 - RNA, 19 nt, Artificial Sequence
  Description of Artificial Sequence: Synthetic oligonucleotide
ccgccuacucuccugcagc

SEQ ID NO: 603293 - RNA, 19 nt, Artificial Sequence
  Description of Artificial Sequence: Synthetic oligonucleotide
cagaucguuacggagguuu

SEQ ID NO: 603294 - RNA, 19 nt, Artificial Sequence
  Description of Artificial Sequence: Synthetic oligonucleotide
ugggaggacgggucauguu

SEQ ID NO: 603295 - RNA, 19 nt, Artificial Sequence
  Description of Artificial Sequence: Synthetic oligonucleotide
acggagguuucuccucgua

SEQ ID NO: 603296 - RNA, 19 nt, Artificial Sequence
  Description of Artificial Sequence: Synthetic oligonucleotide
caaggcgggacacacugau

SEQ ID NO: 603297 - RNA, 19 nt, Artificial Sequence
  Description of Artificial Sequence: Synthetic oligonucleotide
cuuuuccuaccuccuggua

SEQ ID NO: 603298 - RNA, 19 nt, Artificial Sequence
  Description of Artificial Sequence: Synthetic oligonucleotide
cacgcugauuuggugagua

SEQ ID NO: 603299 - RNA, 19 nt, Artificial Sequence
  Description of Artificial Sequence: Synthetic oligonucleotide
ccuuugccugagcaagcgc

SEQ ID NO: 603300 - RNA, 19 nt, Artificial Sequence
  Description of Artificial Sequence: Synthetic oligonucleotide
gcguguuccguguaaccaa

SEQ ID NO: 603301 - RNA, 19 nt, Artificial Sequence
  Description of Artificial Sequence: Synthetic oligonucleotide
gcuaaccugaauggagcuc

SEQ ID NO: 603302 - RNA, 19 nt, Artificial Sequence
  Description of Artificial Sequence: Synthetic oligonucleotide
ggcacuccagacgacaugu

SEQ ID NO: 603303 - RNA, 19 nt, Artificial Sequence
  Description of Artificial Sequence: Synthetic oligonucleotide
cuccaugagugggugaugu

SEQ ID NO: 603304 - RNA, 19 nt, Artificial Sequence
  Description of Artificial Sequence: Synthetic oligonucleotide
cauacgcggcaaucauuaa

SEQ ID NO: 603305 - RNA, 19 nt, Artificial Sequence
  Description of Artificial Sequence: Synthetic oligonucleotide
ggggauuuccaagaggaau

SEQ ID NO: 603306 - RNA, 19 nt, Artificial Sequence
  Description of Artificial Sequence: Synthetic oligonucleotide
cguggaacgcacaggcaug

SEQ ID NO: 603307 - RNA, 19 nt, Artificial Sequence
  Description of Artificial Sequence: Synthetic oligonucleotide
gggaggacgggucauguuu

SEQ ID NO: 603308 - RNA, 19 nt, Artificial Sequence
  Description of Artificial Sequence: Synthetic oligonucleotide
agguugcaucgcuucugua

SEQ ID NO: 603309 - RNA, 19 nt, Artificial Sequence
  Description of Artificial Sequence: Synthetic oligonucleotide
ggcuaaccugaauggagcu

SEQ ID NO: 603310 - RNA, 19 nt, Artificial Sequence
  Description of Artificial Sequence: Synthetic oligonucleotide
gcagcauaacgagcuauaa

SEQ ID NO: 603311 - RNA, 19 nt, Artificial Sequence
  Description of Artificial Sequence: Synthetic oligonucleotide
uuccuaccuccugguaaau

SEQ ID NO: 603312 - RNA, 19 nt, Artificial Sequence
  Description of Artificial Sequence: Synthetic oligonucleotide
agccggguccaggugugca

SEQ ID NO: 603313 - RNA, 19 nt, Artificial Sequence
  Description of Artificial Sequence: Synthetic oligonucleotide
agcagacguggaacgcaca

SEQ ID NO: 603314 - RNA, 19 nt, Artificial Sequence
  Description of Artificial Sequence: Synthetic oligonucleotide
cugugcccgagcuuccugu

SEQ ID NO: 603315 - RNA, 19 nt, Artificial Sequence
  Description of Artificial Sequence: Synthetic oligonucleotide
ggaaggcgcuuguucaacu

SEQ ID NO: 603316 - RNA, 19 nt, Artificial Sequence
  Description of Artificial Sequence: Synthetic oligonucleotide
gccagcagacguggaacgc

SEQ ID NO: 603317 - RNA, 19 nt, Artificial Sequence
  Description of Artificial Sequence: Synthetic oligonucleotide
cccuugucuugucggugcc

SEQ ID NO: 603318 - RNA, 19 nt, Artificial Sequence
  Description of Artificial Sequence: Synthetic oligonucleotide
cuccgccauggucuuccuc

SEQ ID NO: 603319 - RNA, 19 nt, Artificial Sequence
  Description of Artificial Sequence: Synthetic oligonucleotide
auagggcggccaccuccau

SEQ ID NO: 603320 - RNA, 19 nt, Artificial Sequence
  Description of Artificial Sequence: Synthetic oligonucleotide
caacgagaugaagguugca

SEQ ID NO: 603321 - RNA, 19 nt, Artificial Sequence
  Description of Artificial Sequence: Synthetic oligonucleotide
caucagugggaggacgggu

SEQ ID NO: 603322 - RNA, 19 nt, Artificial Sequence
  Description of Artificial Sequence: Synthetic oligonucleotide
ccaugagugggugaugugu

SEQ ID NO: 603323 - RNA, 19 nt, Artificial Sequence
  Description of Artificial Sequence: Synthetic oligonucleotide
gggcguguccuggcuauac

SEQ ID NO: 603324 - RNA, 19 nt, Artificial Sequence
  Description of Artificial Sequence: Synthetic oligonucleotide
gcaucgcuucuguacaaau

SEQ ID NO: 603325 - RNA, 19 nt, Artificial Sequence
  Description of Artificial Sequence: Synthetic oligonucleotide
gucauacgcggcaaucauu

SEQ ID NO: 603326 - RNA, 19 nt, Artificial Sequence
  Description of Artificial Sequence: Synthetic oligonucleotide
aucggccaucauggugucu

SEQ ID NO: 603327 - RNA, 19 nt, Artificial Sequence
  Description of Artificial Sequence: Synthetic oligonucleotide
cugggcguguccuggcuau

SEQ ID NO: 603328 - RNA, 19 nt, Artificial Sequence
  Description of Artificial Sequence: Synthetic oligonucleotide
ccagcagacguggaacgca

SEQ ID NO: 603329 - RNA, 19 nt, Artificial Sequence
  Description of Artificial Sequence: Synthetic oligonucleotide
agccugcaagccgggucca

SEQ ID NO: 603330 - RNA, 19 nt, Artificial Sequence
  Description of Artificial Sequence: Synthetic oligonucleotide
ggucucaaggcgggacaca

SEQ ID NO: 603331 - RNA, 19 nt, Artificial Sequence
  Description of Artificial Sequence: Synthetic oligonucleotide
gcacuccagacgacaugug

SEQ ID NO: 603332 - RNA, 19 nt, Artificial Sequence
  Description of Artificial Sequence: Synthetic oligonucleotide
cguguuccguguaaccaaa

SEQ ID NO: 603333 - RNA, 19 nt, Artificial Sequence
  Description of Artificial Sequence: Synthetic oligonucleotide
gucuugucggugccagcuu

SEQ ID NO: 603334 - RNA, 19 nt, Artificial Sequence
  Description of Artificial Sequence: Synthetic oligonucleotide
cggcaaucauuaagguuga

SEQ ID NO: 603335 - RNA, 19 nt, Artificial Sequence
  Description of Artificial Sequence: Synthetic oligonucleotide
ggcuauacuguaaccucuu

SEQ ID NO: 603336 - RNA, 19 nt, Artificial Sequence
  Description of Artificial Sequence: Synthetic oligonucleotide
ccacgccaaaagcaguucu

SEQ ID NO: 603337 - RNA, 19 nt, Artificial Sequence
  Description of Artificial Sequence: Synthetic oligonucleotide
cacugucauacgcggcaau

SEQ ID NO: 603338 - RNA, 19 nt, Artificial Sequence
  Description of Artificial Sequence: Synthetic oligonucleotide
gcccaaagauuuacuaauu

SEQ ID NO: 603339 - RNA, 19 nt, Artificial Sequence
  Description of Artificial Sequence: Synthetic oligonucleotide
gcgcaugcucaucggccaa

SEQ ID NO: 603340 - RNA, 19 nt, Artificial Sequence
  Description of Artificial Sequence: Synthetic oligonucleotide
ggccacgccaaaagcaguu

SEQ ID NO: 603341 - RNA, 19 nt, Artificial Sequence
  Description of Artificial Sequence: Synthetic oligonucleotide
cuccucggcuaaccugaau

SEQ ID NO: 603342 - RNA, 19 nt, Artificial Sequence
  Description of Artificial Sequence: Synthetic oligonucleotide
ggacuguuccacgcugauu

SEQ ID NO: 603343 - RNA, 19 nt, Artificial Sequence
  Description of Artificial Sequence: Synthetic oligonucleotide
cgcggcaaucauuaagguu

SEQ ID NO: 603344 - RNA, 19 nt, Artificial Sequence
  Description of Artificial Sequence: Synthetic oligonucleotide
caggugcggacugcguguu

SEQ ID NO: 603345 - RNA, 19 nt, Artificial Sequence
  Description of Artificial Sequence: Synthetic oligonucleotide
gcucaucggccaagagacu

SEQ ID NO: 603346 - RNA, 19 nt, Artificial Sequence
  Description of Artificial Sequence: Synthetic oligonucleotide
gcuccucggcuaaccugaa

SEQ ID NO: 603347 - RNA, 19 nt, Artificial Sequence
  Description of Artificial Sequence: Synthetic oligonucleotide
ggcuaaccacggugucauu

SEQ ID NO: 603348 - RNA, 19 nt, Artificial Sequence
  Description of Artificial Sequence: Synthetic oligonucleotide
gcagaucguuacggagguu

SEQ ID NO: 603349 - RNA, 19 nt, Artificial Sequence
  Description of Artificial Sequence: Synthetic oligonucleotide
ccacgcugauuuggugagu

SEQ ID NO: 603350 - RNA, 19 nt, Artificial Sequence
  Description of Artificial Sequence: Synthetic oligonucleotide
aacagaaagggauaaaggg

SEQ ID NO: 603351 - RNA, 19 nt, Artificial Sequence
  Description of Artificial Sequence: Synthetic oligonucleotide
aauugaaaagccaaugucc

SEQ ID NO: 603352 - RNA, 19 nt, Artificial Sequence
  Description of Artificial Sequence: Synthetic oligonucleotide
uuauuuagccacaugaagg

SEQ ID NO: 603353 - RNA, 19 nt, Artificial Sequence
  Description of Artificial Sequence: Synthetic oligonucleotide
uguaaagugucuuacacag

SEQ ID NO: 603354 - RNA, 19 nt, Artificial Sequence
  Description of Artificial Sequence: Synthetic oligonucleotide
aaggaaaugcaccaguccg

SEQ ID NO: 603355 - RNA, 19 nt, Artificial Sequence
  Description of Artificial Sequence: Synthetic oligonucleotide
uagccaacuaaaaugaggg

SEQ ID NO: 603356 - RNA, 19 nt, Artificial Sequence
  Description of Artificial Sequence: Synthetic oligonucleotide
uuagccaacuaaaaugagg

SEQ ID NO: 603357 - RNA, 19 nt, Artificial Sequence
  Description of Artificial Sequence: Synthetic oligonucleotide
uaaagugucuuacacagcu

SEQ ID NO: 603358 - RNA, 19 nt, Artificial Sequence
  Description of Artificial Sequence: Synthetic oligonucleotide
aaaugcaccaguccguguc

SEQ ID NO: 603359 - RNA, 19 nt, Artificial Sequence
  Description of Artificial Sequence: Synthetic oligonucleotide
aaaccucauaaauuaguag

SEQ ID NO: 603360 - RNA, 19 nt, Artificial Sequence
  Description of Artificial Sequence: Synthetic oligonucleotide
uauuuagccacaugaaggc

SEQ ID NO: 603361 - RNA, 19 nt, Artificial Sequence
  Description of Artificial Sequence: Synthetic oligonucleotide
aguagcaauggcaugauac

SEQ ID NO: 603362 - RNA, 19 nt, Artificial Sequence
  Description of Artificial Sequence: Synthetic oligonucleotide
caaaaguagagaaggagag

SEQ ID NO: 603363 - RNA, 19 nt, Artificial Sequence
  Description of Artificial Sequence: Synthetic oligonucleotide
uauagcauggggugcagcg

SEQ ID NO: 603364 - RNA, 19 nt, Artificial Sequence
  Description of Artificial Sequence: Synthetic oligonucleotide
aagcacaccaccaagugac

SEQ ID NO: 603365 - RNA, 19 nt, Artificial Sequence
  Description of Artificial Sequence: Synthetic oligonucleotide
ucaauugaaaagccaaugu

SEQ ID NO: 603366 - RNA, 19 nt, Artificial Sequence
  Description of Artificial Sequence: Synthetic oligonucleotide
augauacaaguccuguucc

SEQ ID NO: 603367 - RNA, 19 nt, Artificial Sequence
  Description of Artificial Sequence: Synthetic oligonucleotide
ugguacaucccacucaucc

SEQ ID NO: 603368 - RNA, 19 nt, Artificial Sequence
  Description of Artificial Sequence: Synthetic oligonucleotide
aucaauccgguacugcucc

SEQ ID NO: 603369 - RNA, 19 nt, Artificial Sequence
  Description of Artificial Sequence: Synthetic oligonucleotide
agaugcuuggccuugaaca

SEQ ID NO: 603370 - RNA, 19 nt, Artificial Sequence
  Description of Artificial Sequence: Synthetic oligonucleotide
ugaguuuuagccaacuaaa

SEQ ID NO: 603371 - RNA, 19 nt, Artificial Sequence
  Description of Artificial Sequence: Synthetic oligonucleotide
ugguagucuggccacaugg

SEQ ID NO: 603372 - RNA, 19 nt, Artificial Sequence
  Description of Artificial Sequence: Synthetic oligonucleotide
uucuccuuagcccauauuc

SEQ ID NO: 603373 - RNA, 19 nt, Artificial Sequence
  Description of Artificial Sequence: Synthetic oligonucleotide
ucuccuuagcccauauucg

SEQ ID NO: 603374 - RNA, 19 nt, Artificial Sequence
  Description of Artificial Sequence: Synthetic oligonucleotide
cauguaaagauccuccagc

SEQ ID NO: 603375 - RNA, 19 nt, Artificial Sequence
  Description of Artificial Sequence: Synthetic oligonucleotide
ucaagguaggcucuccagg

SEQ ID NO: 603376 - RNA, 19 nt, Artificial Sequence
  Description of Artificial Sequence: Synthetic oligonucleotide
aaugcaccaguccgugucc

SEQ ID NO: 603377 - RNA, 19 nt, Artificial Sequence
  Description of Artificial Sequence: Synthetic oligonucleotide
aaguugaucagugaguccu

SEQ ID NO: 603378 - RNA, 19 nt, Artificial Sequence
  Description of Artificial Sequence: Synthetic oligonucleotide
agugucgguagucaggagg

SEQ ID NO: 603379 - RNA, 19 nt, Artificial Sequence
  Description of Artificial Sequence: Synthetic oligonucleotide
uuuaaaccgcaucuguuca

SEQ ID NO: 603380 - RNA, 19 nt, Artificial Sequence
  Description of Artificial Sequence: Synthetic oligonucleotide
guagguauuuccacgaacg

SEQ ID NO: 603381 - RNA, 19 nt, Artificial Sequence
  Description of Artificial Sequence: Synthetic oligonucleotide
ugcuuucacacgaugagug

SEQ ID NO: 603382 - RNA, 19 nt, Artificial Sequence
  Description of Artificial Sequence: Synthetic oligonucleotide
cuuccauuuagcaacucag

SEQ ID NO: 603383 - RNA, 19 nt, Artificial Sequence
  Description of Artificial Sequence: Synthetic oligonucleotide
aaugcuaugggaacagcag

SEQ ID NO: 603384 - RNA, 19 nt, Artificial Sequence
  Description of Artificial Sequence: Synthetic oligonucleotide
ucuguuagggauuuauuaa

SEQ ID NO: 603385 - RNA, 19 nt, Artificial Sequence
  Description of Artificial Sequence: Synthetic oligonucleotide
agcgacaagaagcaggcag

SEQ ID NO: 603386 - RNA, 19 nt, Artificial Sequence
  Description of Artificial Sequence: Synthetic oligonucleotide
guuguaaagugucuuacac

SEQ ID NO: 603387 - RNA, 19 nt, Artificial Sequence
  Description of Artificial Sequence: Synthetic oligonucleotide
ucuucgcuaaacauguugu

SEQ ID NO: 603388 - RNA, 19 nt, Artificial Sequence
  Description of Artificial Sequence: Synthetic oligonucleotide
ucuguuagcauggaggcca

SEQ ID NO: 603389 - RNA, 19 nt, Artificial Sequence
  Description of Artificial Sequence: Synthetic oligonucleotide
uaugggaacagcaggcuca

SEQ ID NO: 603390 - RNA, 19 nt, Artificial Sequence
  Description of Artificial Sequence: Synthetic oligonucleotide
acauucucguguugggucc

SEQ ID NO: 603391 - RNA, 19 nt, Artificial Sequence
  Description of Artificial Sequence: Synthetic oligonucleotide
uaaugcuaugggaacagca

SEQ ID NO: 603392 - RNA, 19 nt, Artificial Sequence
  Description of Artificial Sequence: Synthetic oligonucleotide
agguucuauccauuggagc

SEQ ID NO: 603393 - RNA, 19 nt, Artificial Sequence
  Description of Artificial Sequence: Synthetic oligonucleotide
ucguguuggguccugauga

SEQ ID NO: 603394 - RNA, 19 nt, Artificial Sequence
  Description of Artificial Sequence: Synthetic oligonucleotide
ugcucgaaggaaaugcacc

SEQ ID NO: 603395 - RNA, 19 nt, Artificial Sequence
  Description of Artificial Sequence: Synthetic oligonucleotide
ugagggaauccuuguaagg

SEQ ID NO: 603396 - RNA, 19 nt, Artificial Sequence
  Description of Artificial Sequence: Synthetic oligonucleotide
cuguuagggauuuauuaag

SEQ ID NO: 603397 - RNA, 19 nt, Artificial Sequence
  Description of Artificial Sequence: Synthetic oligonucleotide
aagccucuaaugcuauggg

SEQ ID NO: 603398 - RNA, 19 nt, Artificial Sequence
  Description of Artificial Sequence: Synthetic oligonucleotide
acucaucccugucacaaac

SEQ ID NO: 603399 - RNA, 19 nt, Artificial Sequence
  Description of Artificial Sequence: Synthetic oligonucleotide
auuaguagugcagugcaag

SEQ ID NO: 603400 - RNA, 19 nt, Artificial Sequence
  Description of Artificial Sequence: Synthetic oligonucleotide
aacuaaaaugagggcaagg

SEQ ID NO: 603401 - RNA, 19 nt, Artificial Sequence
  Description of Artificial Sequence: Synthetic oligonucleotide
uucuguuagggauuuauua

SEQ ID NO: 603402 - RNA, 19 nt, Artificial Sequence
  Description of Artificial Sequence: Synthetic oligonucleotide
uguaguguguguauagcau

SEQ ID NO: 603403 - RNA, 19 nt, Artificial Sequence
  Description of Artificial Sequence: Synthetic oligonucleotide
cuuguagagugcuuugagc

SEQ ID NO: 603404 - RNA, 19 nt, Artificial Sequence
  Description of Artificial Sequence: Synthetic oligonucleotide
guagugcuucuucugaggg

SEQ ID NO: 603405 - RNA, 19 nt, Artificial Sequence
  Description of Artificial Sequence: Synthetic oligonucleotide
cuuagcccauauucgaagg

SEQ ID NO: 603406 - RNA, 19 nt, Artificial Sequence
  Description of Artificial Sequence: Synthetic oligonucleotide
cauuuagcaacucagccca

SEQ ID NO: 603407 - RNA, 19 nt, Artificial Sequence
  Description of Artificial Sequence: Synthetic oligonucleotide
uguagguauuuccacgaac

SEQ ID NO: 603408 - RNA, 19 nt, Artificial Sequence
  Description of Artificial Sequence: Synthetic oligonucleotide
guuuaaaccgcaucuguuc

SEQ ID NO: 603409 - RNA, 19 nt, Artificial Sequence
  Description of Artificial Sequence: Synthetic oligonucleotide
uauuuccacgaacggaagc

SEQ ID NO: 603410 - RNA, 19 nt, Artificial Sequence
  Description of Artificial Sequence: Synthetic oligonucleotide
uguuguaaagugucuuaca

SEQ ID NO: 603411 - RNA, 19 nt, Artificial Sequence
  Description of Artificial Sequence: Synthetic oligonucleotide
auguaaagauccuccagcu

SEQ ID NO: 603412 - RNA, 19 nt, Artificial Sequence
  Description of Artificial Sequence: Synthetic oligonucleotide
agccaacuaaaaugagggc

SEQ ID NO: 603413 - RNA, 19 nt, Artificial Sequence
  Description of Artificial Sequence: Synthetic oligonucleotide
guguguauagcauggggug

SEQ ID NO: 603414 - RNA, 19 nt, Artificial Sequence
  Description of Artificial Sequence: Synthetic oligonucleotide
guaguguguguauagcaug

SEQ ID NO: 603415 - RNA, 19 nt, Artificial Sequence
  Description of Artificial Sequence: Synthetic oligonucleotide
ugccuagaagguucuaucc

SEQ ID NO: 603416 - RNA, 19 nt, Artificial Sequence
  Description of Artificial Sequence: Synthetic oligonucleotide
accuuugcuucugugacac

SEQ ID NO: 603417 - RNA, 19 nt, Artificial Sequence
  Description of Artificial Sequence: Synthetic oligonucleotide
uuagcaacucagcccaaga

SEQ ID NO: 603418 - RNA, 19 nt, Artificial Sequence
  Description of Artificial Sequence: Synthetic oligonucleotide
gucaccaccggcuuuggcc

SEQ ID NO: 603419 - RNA, 19 nt, Artificial Sequence
  Description of Artificial Sequence: Synthetic oligonucleotide
ucgaaggaaaugcaccagu

SEQ ID NO: 603420 - RNA, 19 nt, Artificial Sequence
  Description of Artificial Sequence: Synthetic oligonucleotide
uugaguccgaugucuaccc

SEQ ID NO: 603421 - RNA, 19 nt, Artificial Sequence
  Description of Artificial Sequence: Synthetic oligonucleotide
uguuuaaaccgcaucuguu

SEQ ID NO: 603422 - RNA, 19 nt, Artificial Sequence
  Description of Artificial Sequence: Synthetic oligonucleotide
gacauucucguguuggguc

SEQ ID NO: 603423 - RNA, 19 nt, Artificial Sequence
  Description of Artificial Sequence: Synthetic oligonucleotide
aacggaagcaacuggugua

SEQ ID NO: 603424 - RNA, 19 nt, Artificial Sequence
  Description of Artificial Sequence: Synthetic oligonucleotide
guguguguauagcaugggg

SEQ ID NO: 603425 - RNA, 19 nt, Artificial Sequence
  Description of Artificial Sequence: Synthetic oligonucleotide
gaacaggcgugugagagcc

SEQ ID NO: 603426 - RNA, 19 nt, Artificial Sequence
  Description of Artificial Sequence: Synthetic oligonucleotide
uucaccaguacagacucug

SEQ ID NO: 603427 - RNA, 19 nt, Artificial Sequence
  Description of Artificial Sequence: Synthetic oligonucleotide
augaauugcuccugguuca

SEQ ID NO: 603428 - RNA, 19 nt, Artificial Sequence
  Description of Artificial Sequence: Synthetic oligonucleotide
agucaggagggcugguccc

SEQ ID NO: 603429 - RNA, 19 nt, Artificial Sequence
  Description of Artificial Sequence: Synthetic oligonucleotide
uccacgaacggaagcaacu

SEQ ID NO: 603430 - RNA, 19 nt, Artificial Sequence
  Description of Artificial Sequence: Synthetic oligonucleotide
ccagcuuccauuuagcaac

SEQ ID NO: 603431 - RNA, 19 nt, Artificial Sequence
  Description of Artificial Sequence: Synthetic oligonucleotide
guacuggcuugccagaugc

SEQ ID NO: 603432 - RNA, 19 nt, Artificial Sequence
  Description of Artificial Sequence: Synthetic oligonucleotide
gaaguaauggguggccucc

SEQ ID NO: 603433 - RNA, 19 nt, Artificial Sequence
  Description of Artificial Sequence: Synthetic oligonucleotide
gucuucgcuaaacauguug

SEQ ID NO: 603434 - RNA, 19 nt, Artificial Sequence
  Description of Artificial Sequence: Synthetic oligonucleotide
aagguucuauccauuggag

SEQ ID NO: 603435 - RNA, 19 nt, Artificial Sequence
  Description of Artificial Sequence: Synthetic oligonucleotide
gugaguuuuagccaacuaa

SEQ ID NO: 603436 - RNA, 19 nt, Artificial Sequence
  Description of Artificial Sequence: Synthetic oligonucleotide
ucaucccugucacaaacuc

SEQ ID NO: 603437 - RNA, 19 nt, Artificial Sequence
  Description of Artificial Sequence: Synthetic oligonucleotide
ugagcuuagcuugaagaac

SEQ ID NO: 603438 - RNA, 19 nt, Artificial Sequence
  Description of Artificial Sequence: Synthetic oligonucleotide
ugugaaguaauggguggcc

SEQ ID NO: 603439 - RNA, 19 nt, Artificial Sequence
  Description of Artificial Sequence: Synthetic oligonucleotide
gacaccacgcuucaagauc

SEQ ID NO: 603440 - RNA, 19 nt, Artificial Sequence
  Description of Artificial Sequence: Synthetic oligonucleotide
cugagggaauccuuguaag

SEQ ID NO: 603441 - RNA, 19 nt, Artificial Sequence
  Description of Artificial Sequence: Synthetic oligonucleotide
agagaaggagagccccgcc

SEQ ID NO: 603442 - RNA, 19 nt, Artificial Sequence
  Description of Artificial Sequence: Synthetic oligonucleotide
aauguccccugguauggcu

SEQ ID NO: 603443 - RNA, 19 nt, Artificial Sequence
  Description of Artificial Sequence: Synthetic oligonucleotide
uugugguccccgcuguggg

SEQ ID NO: 603444 - RNA, 19 nt, Artificial Sequence
  Description of Artificial Sequence: Synthetic oligonucleotide
guaugaguggcucauccuc

SEQ ID NO: 603445 - RNA, 19 nt, Artificial Sequence
  Description of Artificial Sequence: Synthetic oligonucleotide
uguguauagcauggggugc

SEQ ID NO: 603446 - RNA, 19 nt, Artificial Sequence
  Description of Artificial Sequence: Synthetic oligonucleotide
uucgcuaaacauguuguaa

SEQ ID NO: 603447 - RNA, 19 nt, Artificial Sequence
  Description of Artificial Sequence: Synthetic oligonucleotide
uaguagugcagugcaaggc

SEQ ID NO: 603448 - RNA, 19 nt, Artificial Sequence
  Description of Artificial Sequence: Synthetic oligonucleotide
gagaaggagagccccgccc

SEQ ID NO: 603449 - RNA, 19 nt, Artificial Sequence
  Description of Artificial Sequence: Synthetic oligonucleotide
accucauaaauuaguagug

SEQ ID NO: 603450 - RNA, 19 nt, Artificial Sequence
  Description of Artificial Sequence: Synthetic oligonucleotide
cacacgaugagugucacca

SEQ ID NO: 603451 - RNA, 19 nt, Artificial Sequence
  Description of Artificial Sequence: Synthetic oligonucleotide
cacgaugagugucaccacc

SEQ ID NO: 603452 - RNA, 19 nt, Artificial Sequence
  Description of Artificial Sequence: Synthetic oligonucleotide
aacauguuguaaagugucu

SEQ ID NO: 603453 - RNA, 19 nt, Artificial Sequence
  Description of Artificial Sequence: Synthetic oligonucleotide
uauggcucggaccacgcuu

SEQ ID NO: 603454 - RNA, 19 nt, Artificial Sequence
  Description of Artificial Sequence: Synthetic oligonucleotide
uccguguccacagugcccc

SEQ ID NO: 603455 - RNA, 19 nt, Artificial Sequence
  Description of Artificial Sequence: Synthetic oligonucleotide
augucuacccucuuuucaa

SEQ ID NO: 603456 - RNA, 19 nt, Artificial Sequence
  Description of Artificial Sequence: Synthetic oligonucleotide
accauguaaagauccucca

SEQ ID NO: 603457 - RNA, 19 nt, Artificial Sequence
  Description of Artificial Sequence: Synthetic oligonucleotide
uccugaugagguuugggua

SEQ ID NO: 603458 - RNA, 19 nt, Artificial Sequence
  Description of Artificial Sequence: Synthetic oligonucleotide
cucaagguaggcucuccag

SEQ ID NO: 603459 - RNA, 19 nt, Artificial Sequence
  Description of Artificial Sequence: Synthetic oligonucleotide
uccaugguacaucccacuc

SEQ ID NO: 603460 - RNA, 19 nt, Artificial Sequence
  Description of Artificial Sequence: Synthetic oligonucleotide
uuucuguuagggauuuauu

SEQ ID NO: 603461 - RNA, 19 nt, Artificial Sequence
  Description of Artificial Sequence: Synthetic oligonucleotide
cacgaacggaagcaacugg

SEQ ID NO: 603462 - RNA, 19 nt, Artificial Sequence
  Description of Artificial Sequence: Synthetic oligonucleotide
ugaucuugaguccgauguc

SEQ ID NO: 603463 - RNA, 19 nt, Artificial Sequence
  Description of Artificial Sequence: Synthetic oligonucleotide
gacaacugguagucuggcc

SEQ ID NO: 603464 - RNA, 19 nt, Artificial Sequence
  Description of Artificial Sequence: Synthetic oligonucleotide
agaccagcuuccauuuagc

SEQ ID NO: 603465 - RNA, 19 nt, Artificial Sequence
  Description of Artificial Sequence: Synthetic oligonucleotide
uccuuagcccauauucgaa

SEQ ID NO: 603466 - RNA, 19 nt, Artificial Sequence
  Description of Artificial Sequence: Synthetic oligonucleotide
uuaaaccgcaucuguucaa

SEQ ID NO: 603467 - RNA, 19 nt, Artificial Sequence
  Description of Artificial Sequence: Synthetic oligonucleotide
caugcggccugccagaaca

SEQ ID NO: 603468 - RNA, 19 nt, Artificial Sequence
  Description of Artificial Sequence: Synthetic oligonucleotide
gccaguguaacagaccccg

SEQ ID NO: 603469 - RNA, 19 nt, Artificial Sequence
  Description of Artificial Sequence: Synthetic oligonucleotide
gcgugugagagccacaggc

SEQ ID NO: 603470 - RNA, 19 nt, Artificial Sequence
  Description of Artificial Sequence: Synthetic oligonucleotide
caucaauccgguacugcuc

SEQ ID NO: 603471 - RNA, 19 nt, Artificial Sequence
  Description of Artificial Sequence: Synthetic oligonucleotide
agacucuguuagcauggag

SEQ ID NO: 603472 - RNA, 19 nt, Artificial Sequence
  Description of Artificial Sequence: Synthetic oligonucleotide
agguagugucgguagucag

SEQ ID NO: 603473 - RNA, 19 nt, Artificial Sequence
  Description of Artificial Sequence: Synthetic oligonucleotide
cacaccaccaagugacaac

SEQ ID NO: 603474 - RNA, 19 nt, Artificial Sequence
  Description of Artificial Sequence: Synthetic oligonucleotide
uguuuugguccaggaggcg

SEQ ID NO: 603475 - RNA, 19 nt, Artificial Sequence
  Description of Artificial Sequence: Synthetic oligonucleotide
acaccaccaagugacaacu

SEQ ID NO: 603476 - RNA, 19 nt, Artificial Sequence
  Description of Artificial Sequence: Synthetic oligonucleotide
acacgaugagugucaccac

SEQ ID NO: 603477 - RNA, 19 nt, Artificial Sequence
  Description of Artificial Sequence: Synthetic oligonucleotide
cucaguccuaaaaccugag

SEQ ID NO: 603478 - RNA, 19 nt, Artificial Sequence
  Description of Artificial Sequence: Synthetic oligonucleotide
agccucuaaugcuauggga

SEQ ID NO: 603479 - RNA, 19 nt, Artificial Sequence
  Description of Artificial Sequence: Synthetic oligonucleotide
cugagcuuagcuugaagaa

SEQ ID NO: 603480 - RNA, 19 nt, Artificial Sequence
  Description of Artificial Sequence: Synthetic oligonucleotide
caucagacaaaaguagaga

SEQ ID NO: 603481 - RNA, 19 nt, Artificial Sequence
  Description of Artificial Sequence: Synthetic oligonucleotide
cucuguuuaaaccgcaucu

SEQ ID NO: 603482 - RNA, 19 nt, Artificial Sequence
  Description of Artificial Sequence: Synthetic oligonucleotide
acggaagcaacugguguag

SEQ ID NO: 603483 - RNA, 19 nt, Artificial Sequence
  Description of Artificial Sequence: Synthetic oligonucleotide
ggguaugaguggcucaucc

SEQ ID NO: 603484 - RNA, 19 nt, Artificial Sequence
  Description of Artificial Sequence: Synthetic oligonucleotide
cugugaaguaauggguggc

SEQ ID NO: 603485 - RNA, 19 nt, Artificial Sequence
  Description of Artificial Sequence: Synthetic oligonucleotide
caacugguagucuggccac

SEQ ID NO: 603486 - RNA, 19 nt, Artificial Sequence
  Description of Artificial Sequence: Synthetic oligonucleotide
cuaugggaacagcaggcuc

SEQ ID NO: 603487 - RNA, 19 nt, Artificial Sequence
  Description of Artificial Sequence: Synthetic oligonucleotide
caguccguguccacagugc

SEQ ID NO: 603488 - RNA, 19 nt, Artificial Sequence
  Description of Artificial Sequence: Synthetic oligonucleotide
ugcgugagguggugguggg

SEQ ID NO: 603489 - RNA, 19 nt, Artificial Sequence
  Description of Artificial Sequence: Synthetic oligonucleotide
gaagaacuucagagggugc

SEQ ID NO: 603490 - RNA, 19 nt, Artificial Sequence
  Description of Artificial Sequence: Synthetic oligonucleotide
gaacggaagcaacuggugu

SEQ ID NO: 603491 - RNA, 19 nt, Artificial Sequence
  Description of Artificial Sequence: Synthetic oligonucleotide
gaccagcuuccauuuagca

SEQ ID NO: 603492 - RNA, 19 nt, Artificial Sequence
  Description of Artificial Sequence: Synthetic oligonucleotide
ugccaguguaacagacccc

SEQ ID NO: 603493 - RNA, 19 nt, Artificial Sequence
  Description of Artificial Sequence: Synthetic oligonucleotide
uguccgggcugaaaacuuc

SEQ ID NO: 603494 - RNA, 19 nt, Artificial Sequence
  Description of Artificial Sequence: Synthetic oligonucleotide
gugccuagaagguucuauc

SEQ ID NO: 603495 - RNA, 19 nt, Artificial Sequence
  Description of Artificial Sequence: Synthetic oligonucleotide
gaugugucuucaaggagaa

SEQ ID NO: 603496 - RNA, 19 nt, Artificial Sequence
  Description of Artificial Sequence: Synthetic oligonucleotide
guggcugacauucucgugu

SEQ ID NO: 603497 - RNA, 19 nt, Artificial Sequence
  Description of Artificial Sequence: Synthetic oligonucleotide
aacagaccccgaguuccuc

SEQ ID NO: 603498 - RNA, 19 nt, Artificial Sequence
  Description of Artificial Sequence: Synthetic oligonucleotide
uguauagcauggggugcag

SEQ ID NO: 603499 - RNA, 19 nt, Artificial Sequence
  Description of Artificial Sequence: Synthetic oligonucleotide
cucguguuggguccugaug

SEQ ID NO: 603500 - RNA, 19 nt, Artificial Sequence
  Description of Artificial Sequence: Synthetic oligonucleotide
uccgaugucuacccucuuu

SEQ ID NO: 603501 - RNA, 19 nt, Artificial Sequence
  Description of Artificial Sequence: Synthetic oligonucleotide
ggggcuauccucugugaag

SEQ ID NO: 603502 - RNA, 19 nt, Artificial Sequence
  Description of Artificial Sequence: Synthetic oligonucleotide
cuucagccucuguuuaaac

SEQ ID NO: 603503 - RNA, 19 nt, Artificial Sequence
  Description of Artificial Sequence: Synthetic oligonucleotide
acgaacggaagcaacuggu

SEQ ID NO: 603504 - RNA, 19 nt, Artificial Sequence
  Description of Artificial Sequence: Synthetic oligonucleotide
ccucauaaauuaguagugc

SEQ ID NO: 603505 - RNA, 19 nt, Artificial Sequence
  Description of Artificial Sequence: Synthetic oligonucleotide
caccaguccguguccacag

SEQ ID NO: 603506 - RNA, 19 nt, Artificial Sequence
  Description of Artificial Sequence: Synthetic oligonucleotide
uugagcacagugugaguuu

SEQ ID NO: 603507 - RNA, 19 nt, Artificial Sequence
  Description of Artificial Sequence: Synthetic oligonucleotide
ccuuagcccauauucgaag

SEQ ID NO: 603508 - RNA, 19 nt, Artificial Sequence
  Description of Artificial Sequence: Synthetic oligonucleotide
cuaccaccccaguacuggc

SEQ ID NO: 603509 - RNA, 19 nt, Artificial Sequence
  Description of Artificial Sequence: Synthetic oligonucleotide
ucggaccacgcuucucuug

SEQ ID NO: 603510 - RNA, 19 nt, Artificial Sequence
  Description of Artificial Sequence: Synthetic oligonucleotide
gcaacugggucucacugac

SEQ ID NO: 603511 - RNA, 19 nt, Artificial Sequence
  Description of Artificial Sequence: Synthetic oligonucleotide
gcgacaagaagcaggcagg

SEQ ID NO: 603512 - RNA, 19 nt, Artificial Sequence
  Description of Artificial Sequence: Synthetic oligonucleotide
auggcucggaccacgcuuc

SEQ ID NO: 603513 - RNA, 19 nt, Artificial Sequence
  Description of Artificial Sequence: Synthetic oligonucleotide
uuuccacgaacggaagcaa

SEQ ID NO: 603514 - RNA, 19 nt, Artificial Sequence
  Description of Artificial Sequence: Synthetic oligonucleotide
gaucugcucgaaggaaaug

SEQ ID NO: 603515 - RNA, 19 nt, Artificial Sequence
  Description of Artificial Sequence: Synthetic oligonucleotide
caacucagcccaagacccc

SEQ ID NO: 603516 - RNA, 19 nt, Artificial Sequence
  Description of Artificial Sequence: Synthetic oligonucleotide
ugaguccgaugucuacccu

SEQ ID NO: 603517 - RNA, 19 nt, Artificial Sequence
  Description of Artificial Sequence: Synthetic oligonucleotide
ccugguauggcucggacca

SEQ ID NO: 603518 - RNA, 19 nt, Artificial Sequence
  Description of Artificial Sequence: Synthetic oligonucleotide
gaugcgugaggugguggug

SEQ ID NO: 603519 - RNA, 19 nt, Artificial Sequence
  Description of Artificial Sequence: Synthetic oligonucleotide
ggguagugcuucuucugag

SEQ ID NO: 603520 - RNA, 19 nt, Artificial Sequence
  Description of Artificial Sequence: Synthetic oligonucleotide
ccucuaaugcuaugggaac

SEQ ID NO: 603521 - RNA, 19 nt, Artificial Sequence
  Description of Artificial Sequence: Synthetic oligonucleotide
gccagaacaggcgugugag

SEQ ID NO: 603522 - RNA, 19 nt, Artificial Sequence
  Description of Artificial Sequence: Synthetic oligonucleotide
acaugcggccugccagaac

SEQ ID NO: 603523 - RNA, 19 nt, Artificial Sequence
  Description of Artificial Sequence: Synthetic oligonucleotide
aguccgaugucuacccucu

SEQ ID NO: 603524 - RNA, 19 nt, Artificial Sequence
  Description of Artificial Sequence: Synthetic oligonucleotide
gcggcuaccaccccaguac

SEQ ID NO: 603525 - RNA, 19 nt, Artificial Sequence
  Description of Artificial Sequence: Synthetic oligonucleotide
uucacacgaugagugucac

SEQ ID NO: 603526 - RNA, 19 nt, Artificial Sequence
  Description of Artificial Sequence: Synthetic oligonucleotide
uggggcuaccggcuucccc

SEQ ID NO: 603527 - RNA, 19 nt, Artificial Sequence
  Description of Artificial Sequence: Synthetic oligonucleotide
gacagauccaaaagccucu

SEQ ID NO: 603528 - RNA, 19 nt, Artificial Sequence
  Description of Artificial Sequence: Synthetic oligonucleotide
agguccuuaauaguuucuu

SEQ ID NO: 603529 - RNA, 19 nt, Artificial Sequence
  Description of Artificial Sequence: Synthetic oligonucleotide
aggggcuauccucugugaa

SEQ ID NO: 603530 - RNA, 19 nt, Artificial Sequence
  Description of Artificial Sequence: Synthetic oligonucleotide
ucaauccgguacugcucca

SEQ ID NO: 603531 - RNA, 19 nt, Artificial Sequence
  Description of Artificial Sequence: Synthetic oligonucleotide
aggcggaacaugcggccug

SEQ ID NO: 603532 - RNA, 19 nt, Artificial Sequence
  Description of Artificial Sequence: Synthetic oligonucleotide
caagguaggcucuccaggu

SEQ ID NO: 603533 - RNA, 19 nt, Artificial Sequence
  Description of Artificial Sequence: Synthetic oligonucleotide
caauccgguacugcuccag

SEQ ID NO: 603534 - RNA, 19 nt, Artificial Sequence
  Description of Artificial Sequence: Synthetic oligonucleotide
aggaucugcucgaaggaaa

SEQ ID NO: 603535 - RNA, 19 nt, Artificial Sequence
  Description of Artificial Sequence: Synthetic oligonucleotide
cucaagcacaccaccaagu

SEQ ID NO: 603536 - RNA, 19 nt, Artificial Sequence
  Description of Artificial Sequence: Synthetic oligonucleotide
gccuagaagguucuaucca

SEQ ID NO: 603537 - RNA, 19 nt, Artificial Sequence
  Description of Artificial Sequence: Synthetic oligonucleotide
caccaagugacaacuggua

SEQ ID NO: 603538 - RNA, 19 nt, Artificial Sequence
  Description of Artificial Sequence: Synthetic oligonucleotide
gugggcaccgucccuggac

SEQ ID NO: 603539 - RNA, 19 nt, Artificial Sequence
  Description of Artificial Sequence: Synthetic oligonucleotide
cuucgcuaaacauguugua

SEQ ID NO: 603540 - RNA, 19 nt, Artificial Sequence
  Description of Artificial Sequence: Synthetic oligonucleotide
guauagcauggggugcagc

SEQ ID NO: 603541 - RNA, 19 nt, Artificial Sequence
  Description of Artificial Sequence: Synthetic oligonucleotide
gccucuaaugcuaugggaa

SEQ ID NO: 603542 - RNA, 19 nt, Artificial Sequence
  Description of Artificial Sequence: Synthetic oligonucleotide
gaggggcuauccucuguga

SEQ ID NO: 603543 - RNA, 19 nt, Artificial Sequence
  Description of Artificial Sequence: Synthetic oligonucleotide
accccaguacuggcuugcc

SEQ ID NO: 603544 - RNA, 19 nt, Artificial Sequence
  Description of Artificial Sequence: Synthetic oligonucleotide
aacaugcggccugccagaa

SEQ ID NO: 603545 - RNA, 19 nt, Artificial Sequence
  Description of Artificial Sequence: Synthetic oligonucleotide
cugguagucuggccacaug

SEQ ID NO: 603546 - RNA, 19 nt, Artificial Sequence
  Description of Artificial Sequence: Synthetic oligonucleotide
uccgggcugaaaacuucuu

SEQ ID NO: 603547 - RNA, 19 nt, Artificial Sequence
  Description of Artificial Sequence: Synthetic oligonucleotide
caccccaguacuggcuugc

SEQ ID NO: 603548 - RNA, 19 nt, Artificial Sequence
  Description of Artificial Sequence: Synthetic oligonucleotide
gguaggcucuccagguucc

SEQ ID NO: 603549 - RNA, 19 nt, Artificial Sequence
  Description of Artificial Sequence: Synthetic oligonucleotide
agcuuccauuuagcaacuc

SEQ ID NO: 603550 - RNA, 19 nt, Artificial Sequence
  Description of Artificial Sequence: Synthetic oligonucleotide
agcggcuaccaccccagua

SEQ ID NO: 603551 - RNA, 19 nt, Artificial Sequence
  Description of Artificial Sequence: Synthetic oligonucleotide
ccgucccuggacuucuugg

SEQ ID NO: 603552 - RNA, 19 nt, Artificial Sequence
  Description of Artificial Sequence: Synthetic oligonucleotide
agugucuuacacagcucaa

SEQ ID NO: 603553 - RNA, 19 nt, Artificial Sequence
  Description of Artificial Sequence: Synthetic oligonucleotide
gaaaugcaccaguccgugu

SEQ ID NO: 603554 - RNA, 19 nt, Artificial Sequence
  Description of Artificial Sequence: Synthetic oligonucleotide
cuaccacauggcuguccug

SEQ ID NO: 603555 - RNA, 19 nt, Artificial Sequence
  Description of Artificial Sequence: Synthetic oligonucleotide
uucucguguuggguccuga

SEQ ID NO: 603556 - RNA, 19 nt, Artificial Sequence
  Description of Artificial Sequence: Synthetic oligonucleotide
cggaccacgcuucucuugg

SEQ ID NO: 603557 - RNA, 19 nt, Artificial Sequence
  Description of Artificial Sequence: Synthetic oligonucleotide
cuacugaguaggaggacau

SEQ ID NO: 603558 - RNA, 19 nt, Artificial Sequence
  Description of Artificial Sequence: Synthetic oligonucleotide
gaccacgcuucucuuggcu

SEQ ID NO: 603559 - RNA, 19 nt, Artificial Sequence
  Description of Artificial Sequence: Synthetic oligonucleotide
caccacgcuucaagaucag

SEQ ID NO: 603560 - RNA, 19 nt, Artificial Sequence
  Description of Artificial Sequence: Synthetic oligonucleotide
accaguccguguccacagu

SEQ ID NO: 603561 - RNA, 19 nt, Artificial Sequence
  Description of Artificial Sequence: Synthetic oligonucleotide
cccugguauggcucggacc

SEQ ID NO: 603562 - RNA, 19 nt, Artificial Sequence
  Description of Artificial Sequence: Synthetic oligonucleotide
cuguagguauuuccacgaa

SEQ ID NO: 603563 - RNA, 19 nt, Artificial Sequence
  Description of Artificial Sequence: Synthetic oligonucleotide
guacagacucuguuagcau

SEQ ID NO: 603564 - RNA, 19 nt, Artificial Sequence
  Description of Artificial Sequence: Synthetic oligonucleotide
ggcgugugagagccacagg

SEQ ID NO: 603565 - RNA, 19 nt, Artificial Sequence
  Description of Artificial Sequence: Synthetic oligonucleotide
cgaacggaagcaacuggug

SEQ ID NO: 603566 - RNA, 19 nt, Artificial Sequence
  Description of Artificial Sequence: Synthetic oligonucleotide
gguauggcucggaccacgc

SEQ ID NO: 603567 - RNA, 19 nt, Artificial Sequence
  Description of Artificial Sequence: Synthetic oligonucleotide
ccaguccguguccacagug

SEQ ID NO: 603568 - RNA, 19 nt, Artificial Sequence
  Description of Artificial Sequence: Synthetic oligonucleotide
gguaugaguggcucauccu

SEQ ID NO: 603569 - RNA, 19 nt, Artificial Sequence
  Description of Artificial Sequence: Synthetic oligonucleotide
cuagaagguucuauccauu

SEQ ID NO: 603570 - RNA, 19 nt, Artificial Sequence
  Description of Artificial Sequence: Synthetic oligonucleotide
gugaaguaauggguggccu

SEQ ID NO: 603571 - RNA, 19 nt, Artificial Sequence
  Description of Artificial Sequence: Synthetic oligonucleotide
ucccgguggauggcggcug

SEQ ID NO: 603572 - RNA, 19 nt, Artificial Sequence
  Description of Artificial Sequence: Synthetic oligonucleotide
gcuuagcuugaagaacuuc

SEQ ID NO: 603573 - RNA, 19 nt, Artificial Sequence
  Description of Artificial Sequence: Synthetic oligonucleotide
uggguaugaguggcucauc

SEQ ID NO: 603574 - RNA, 19 nt, Artificial Sequence
  Description of Artificial Sequence: Synthetic oligonucleotide
cccgaaacuggcuggcauc

SEQ ID NO: 603575 - RNA, 19 nt, Artificial Sequence
  Description of Artificial Sequence: Synthetic oligonucleotide
auucucguguuggguccug

SEQ ID NO: 603576 - RNA, 19 nt, Artificial Sequence
  Description of Artificial Sequence: Synthetic oligonucleotide
gcuaccggcuuccccuccc

SEQ ID NO: 603577 - RNA, 19 nt, Artificial Sequence
  Description of Artificial Sequence: Synthetic oligonucleotide
gaaggagagccccgccccu

SEQ ID NO: 603578 - RNA, 19 nt, Artificial Sequence
  Description of Artificial Sequence: Synthetic oligonucleotide
gggaagguccuuaauaguu

SEQ ID NO: 603579 - RNA, 19 nt, Artificial Sequence
  Description of Artificial Sequence: Synthetic oligonucleotide
gcuauccucugugaaguaa

SEQ ID NO: 603580 - RNA, 19 nt, Artificial Sequence
  Description of Artificial Sequence: Synthetic oligonucleotide
ccgggcugaaaacuucuuc

SEQ ID NO: 603581 - RNA, 19 nt, Artificial Sequence
  Description of Artificial Sequence: Synthetic oligonucleotide
ccacgaacggaagcaacug

SEQ ID NO: 603582 - RNA, 19 nt, Artificial Sequence
  Description of Artificial Sequence: Synthetic oligonucleotide
cagcaggcucaagguaggc

SEQ ID NO: 603583 - RNA, 19 nt, Artificial Sequence
  Description of Artificial Sequence: Synthetic oligonucleotide
cagauccaaaagccucuaa

SEQ ID NO: 603584 - RNA, 19 nt, Artificial Sequence
  Description of Artificial Sequence: Synthetic oligonucleotide
uccccugguauggcucgga

SEQ ID NO: 603585 - RNA, 19 nt, Artificial Sequence
  Description of Artificial Sequence: Synthetic oligonucleotide
gugcagcgacaagaagcag

SEQ ID NO: 603586 - RNA, 19 nt, Artificial Sequence
  Description of Artificial Sequence: Synthetic oligonucleotide
cacucaucccugucacaaa

SEQ ID NO: 603587 - RNA, 19 nt, Artificial Sequence
  Description of Artificial Sequence: Synthetic oligonucleotide
ugcccgccuccacuaccac

SEQ ID NO: 603588 - RNA, 19 nt, Artificial Sequence
  Description of Artificial Sequence: Synthetic oligonucleotide
agcuuagcuugaagaacuu

SEQ ID NO: 603589 - RNA, 19 nt, Artificial Sequence
  Description of Artificial Sequence: Synthetic oligonucleotide
gcucggaccacgcuucucu

SEQ ID NO: 603590 - RNA, 19 nt, Artificial Sequence
  Description of Artificial Sequence: Synthetic oligonucleotide
gguccuuaauaguuucuuu

SEQ ID NO: 603591 - RNA, 19 nt, Artificial Sequence
  Description of Artificial Sequence: Synthetic oligonucleotide
cauugagcacagugugagu

SEQ ID NO: 603592 - RNA, 19 nt, Artificial Sequence
  Description of Artificial Sequence: Synthetic oligonucleotide
cugguauggcucggaccac

SEQ ID NO: 603593 - RNA, 19 nt, Artificial Sequence
  Description of Artificial Sequence: Synthetic oligonucleotide
ggaccacgcuucucuuggc

SEQ ID NO: 603594 - RNA, 19 nt, Artificial Sequence
  Description of Artificial Sequence: Synthetic oligonucleotide
gugugaguuuuagccaacu

SEQ ID NO: 603595 - RNA, 19 nt, Artificial Sequence
  Description of Artificial Sequence: Synthetic oligonucleotide
caggcucaagguaggcucu

SEQ ID NO: 603596 - RNA, 19 nt, Artificial Sequence
  Description of Artificial Sequence: Synthetic oligonucleotide
guccccugguauggcucgg

SEQ ID NO: 603597 - RNA, 19 nt, Artificial Sequence
  Description of Artificial Sequence: Synthetic oligonucleotide
augcggccugccagaacag

SEQ ID NO: 603598 - RNA, 19 nt, Artificial Sequence
  Description of Artificial Sequence: Synthetic oligonucleotide
cagacucuguuagcaugga

SEQ ID NO: 603599 - RNA, 19 nt, Artificial Sequence
  Description of Artificial Sequence: Synthetic oligonucleotide
guauggcucggaccacgcu

SEQ ID NO: 603600 - RNA, 19 nt, Artificial Sequence
  Description of Artificial Sequence: Synthetic oligonucleotide
caccaccggcuuuggccug

SEQ ID NO: 603601 - RNA, 19 nt, Artificial Sequence
  Description of Artificial Sequence: Synthetic oligonucleotide
ggaagguccuuaauaguuu

SEQ ID NO: 603602 - RNA, 19 nt, Artificial Sequence
  Description of Artificial Sequence: Synthetic oligonucleotide
cgaugucuacccucuuuuc

SEQ ID NO: 603603 - RNA, 19 nt, Artificial Sequence
  Description of Artificial Sequence: Synthetic oligonucleotide
cuaccggcuuccccuccca

SEQ ID NO: 603604 - RNA, 19 nt, Artificial Sequence
  Description of Artificial Sequence: Synthetic oligonucleotide
ggcggaacaugcggccugc

SEQ ID NO: 603605 - RNA, 19 nt, Artificial Sequence
  Description of Artificial Sequence: Synthetic oligonucleotide
cuguugugguccccgcugu

SEQ ID NO: 603606 - RNA, 19 nt, Artificial Sequence
  Description of Artificial Sequence: Synthetic oligonucleotide
gaggcggaacaugcggccu

SEQ ID NO: 603607 - RNA, 19 nt, Artificial Sequence
  Description of Artificial Sequence: Synthetic oligonucleotide
ccgccccucuccauugccc

SEQ ID NO: 603608 - RNA, 19 nt, Artificial Sequence
  Description of Artificial Sequence: Synthetic oligonucleotide
guccgggcugaaaacuucu

SEQ ID NO: 603609 - RNA, 19 nt, Artificial Sequence
  Description of Artificial Sequence: Synthetic oligonucleotide
cuguccgggcugaaaacuu

SEQ ID NO: 603610 - RNA, 19 nt, Artificial Sequence
  Description of Artificial Sequence: Synthetic oligonucleotide
ccgaaacuggcuggcauca

SEQ ID NO: 603611 - RNA, 19 nt, Artificial Sequence
  Description of Artificial Sequence: Synthetic oligonucleotide
gcaccaguccguguccaca

SEQ ID NO: 603612 - RNA, 19 nt, Artificial Sequence
  Description of Artificial Sequence: Synthetic oligonucleotide
ccgaugcgugagguggugg

SEQ ID NO: 603613 - RNA, 19 nt, Artificial Sequence
  Description of Artificial Sequence: Synthetic oligonucleotide
ggcuaccggcuuccccucc

SEQ ID NO: 603614 - RNA, 19 nt, Artificial Sequence
  Description of Artificial Sequence: Synthetic oligonucleotide
guaaggcaacugggucuca

SEQ ID NO: 603615 - RNA, 19 nt, Artificial Sequence
  Description of Artificial Sequence: Synthetic oligonucleotide
gcgugaggugguggugggg

SEQ ID NO: 603616 - RNA, 19 nt, Artificial Sequence
  Description of Artificial Sequence: Synthetic oligonucleotide
cccgccccucuccauugcc

SEQ ID NO: 603617 - RNA, 19 nt, Artificial Sequence
  Description of Artificial Sequence: Synthetic oligonucleotide
ccgcagggaggaagagggc

SEQ ID NO: 603618 - RNA, 19 nt, Artificial Sequence
  Description of Artificial Sequence: Synthetic oligonucleotide
cauucucguguuggguccu

SEQ ID NO: 603619 - RNA, 19 nt, Artificial Sequence
  Description of Artificial Sequence: Synthetic oligonucleotide
ccaguguaacagaccccga

SEQ ID NO: 603620 - RNA, 19 nt, Artificial Sequence
  Description of Artificial Sequence: Synthetic oligonucleotide
gggcuaccggcuuccccuc

SEQ ID NO: 603621 - RNA, 19 nt, Artificial Sequence
  Description of Artificial Sequence: Synthetic oligonucleotide
ccgaguuccucaguccuaa

SEQ ID NO: 603622 - RNA, 19 nt, Artificial Sequence
  Description of Artificial Sequence: Synthetic oligonucleotide
guggggcuaccggcuuccc

SEQ ID NO: 603623 - RNA, 19 nt, Artificial Sequence
  Description of Artificial Sequence: Synthetic oligonucleotide
ggcggcugagcggcuacca

SEQ ID NO: 603624 - RNA, 19 nt, Artificial Sequence
  Description of Artificial Sequence: Synthetic oligonucleotide
cagcgacaagaagcaggca

SEQ ID NO: 603625 - RNA, 19 nt, Artificial Sequence
  Description of Artificial Sequence: Synthetic oligonucleotide
ccgaugucuacccucuuuu

SEQ ID NO: 603626 - RNA, 19 nt, Artificial Sequence
  Description of Artificial Sequence: Synthetic oligonucleotide
gagcggcuaccaccccagu

SEQ ID NO: 603627 - RNA, 19 nt, Artificial Sequence
  Description of Artificial Sequence: Synthetic oligonucleotide
cucggaccacgcuucucuu

SEQ ID NO: 603628 - RNA, 19 nt, Artificial Sequence
  Description of Artificial Sequence: Synthetic oligonucleotide
cccgaugcgugagguggug

SEQ ID NO: 603629 - RNA, 19 nt, Artificial Sequence
  Description of Artificial Sequence: Synthetic oligonucleotide
ccccaguacuggcuugcca

SEQ ID NO: 603630 - RNA, 19 nt, Artificial Sequence
  Description of Artificial Sequence: Synthetic oligonucleotide
gcggaacaugcggccugcc

SEQ ID NO: 603631 - RNA, 19 nt, Artificial Sequence
  Description of Artificial Sequence: Synthetic oligonucleotide
ggcucggaccacgcuucuc

SEQ ID NO: 603632 - RNA, 19 nt, Artificial Sequence
  Description of Artificial Sequence: Synthetic oligonucleotide
cgaugcgugaggugguggu

SEQ ID NO: 603633 - RNA, 19 nt, Artificial Sequence
  Description of Artificial Sequence: Synthetic oligonucleotide
cccgaguuccucaguccua

SEQ ID NO: 603634 - RNA, 19 nt, Artificial Sequence
  Description of Artificial Sequence: Synthetic oligonucleotide
gcaccgucccuggacuucu

SEQ ID NO: 603635 - RNA, 19 nt, Artificial Sequence
  Description of Artificial Sequence: Synthetic oligonucleotide
gccucuguuuaaaccgcau

SEQ ID NO: 603636 - RNA, 19 nt, Artificial Sequence
  Description of Artificial Sequence: Synthetic oligonucleotide
guccgaugucuacccucuu

SEQ ID NO: 603637 - RNA, 19 nt, Artificial Sequence
  Description of Artificial Sequence: Synthetic oligonucleotide
cccgguggauggcggcuga

SEQ ID NO: 603638 - RNA, 19 nt, Artificial Sequence
  Description of Artificial Sequence: Synthetic oligonucleotide
gggcaccgucccuggacuu

SEQ ID NO: 603639 - RNA, 19 nt, Artificial Sequence
  Description of Artificial Sequence: Synthetic oligonucleotide
caccgucccuggacuucuu

SEQ ID NO: 603640 - RNA, 19 nt, Artificial Sequence
  Description of Artificial Sequence: Synthetic oligonucleotide
ugacaaauuaccaugaggg

SEQ ID NO: 603641 - RNA, 19 nt, Artificial Sequence
  Description of Artificial Sequence: Synthetic oligonucleotide
uuaauaaucaguaguacag

SEQ ID NO: 603642 - RNA, 19 nt, Artificial Sequence
  Description of Artificial Sequence: Synthetic oligonucleotide
aauauuaccaugaagggag

SEQ ID NO: 603643 - RNA, 19 nt, Artificial Sequence
  Description of Artificial Sequence: Synthetic oligonucleotide
ugaguuaugacaaauuacc

SEQ ID NO: 603644 - RNA, 19 nt, Artificial Sequence
  Description of Artificial Sequence: Synthetic oligonucleotide
uuauaagacucacauaacg

SEQ ID NO: 603645 - RNA, 19 nt, Artificial Sequence
  Description of Artificial Sequence: Synthetic oligonucleotide
accaaugucaauuauuuac

SEQ ID NO: 603646 - RNA, 19 nt, Artificial Sequence
  Description of Artificial Sequence: Synthetic oligonucleotide
aaaccuaaaacccuaauaa

SEQ ID NO: 603647 - RNA, 19 nt, Artificial Sequence
  Description of Artificial Sequence: Synthetic oligonucleotide
ugaacuuugagaaucggcc

SEQ ID NO: 603648 - RNA, 19 nt, Artificial Sequence
  Description of Artificial Sequence: Synthetic oligonucleotide
aaugguaauggcuggacuc

SEQ ID NO: 603649 - RNA, 19 nt, Artificial Sequence
  Description of Artificial Sequence: Synthetic oligonucleotide
ucuaaucaacuuuaaauag

SEQ ID NO: 603650 - RNA, 19 nt, Artificial Sequence
  Description of Artificial Sequence: Synthetic oligonucleotide
uuuaacuacuucuaggggc

SEQ ID NO: 603651 - RNA, 19 nt, Artificial Sequence
  Description of Artificial Sequence: Synthetic oligonucleotide
uaugguuuaucacacaaca

SEQ ID NO: 603652 - RNA, 19 nt, Artificial Sequence
  Description of Artificial Sequence: Synthetic oligonucleotide
auaagacucacauaacgac

SEQ ID NO: 603653 - RNA, 19 nt, Artificial Sequence
  Description of Artificial Sequence: Synthetic oligonucleotide
uaaucaguaguacaggucu

SEQ ID NO: 603654 - RNA, 19 nt, Artificial Sequence
  Description of Artificial Sequence: Synthetic oligonucleotide
aaacuacacaacuauagga

SEQ ID NO: 603655 - RNA, 19 nt, Artificial Sequence
  Description of Artificial Sequence: Synthetic oligonucleotide
guuaugacaaauuaccaug

SEQ ID NO: 603656 - RNA, 19 nt, Artificial Sequence
  Description of Artificial Sequence: Synthetic oligonucleotide
cuuccuaugaaauacucag

SEQ ID NO: 603657 - RNA, 19 nt, Artificial Sequence
  Description of Artificial Sequence: Synthetic oligonucleotide
uaagacucacauaacgacg

SEQ ID NO: 603658 - RNA, 19 nt, Artificial Sequence
  Description of Artificial Sequence: Synthetic oligonucleotide
aaaugccccaaccacugcc

SEQ ID NO: 603659 - RNA, 19 nt, Artificial Sequence
  Description of Artificial Sequence: Synthetic oligonucleotide
aacuacauaugguuuauca

SEQ ID NO: 603660 - RNA, 19 nt, Artificial Sequence
  Description of Artificial Sequence: Synthetic oligonucleotide
uauaagacucacauaacga

SEQ ID NO: 603661 - RNA, 19 nt, Artificial Sequence
  Description of Artificial Sequence: Synthetic oligonucleotide
aauacccuagaguaaaagu

SEQ ID NO: 603662 - RNA, 19 nt, Artificial Sequence
  Description of Artificial Sequence: Synthetic oligonucleotide
aaguaguuuacaaccacgc

SEQ ID NO: 603663 - RNA, 19 nt, Artificial Sequence
  Description of Artificial Sequence: Synthetic oligonucleotide
acuauaggaugccacaaac

SEQ ID NO: 603664 - RNA, 19 nt, Artificial Sequence
  Description of Artificial Sequence: Synthetic oligonucleotide
cacacaaucuguuaaguag

SEQ ID NO: 603665 - RNA, 19 nt, Artificial Sequence
  Description of Artificial Sequence: Synthetic oligonucleotide
ucaagcuauuugcagaaag

SEQ ID NO: 603666 - RNA, 19 nt, Artificial Sequence
  Description of Artificial Sequence: Synthetic oligonucleotide
  modified_base (8)..(8): a, c, u, g, unknown or other
aguuuacngaucugguugc

SEQ ID NO: 603667 - RNA, 19 nt, Artificial Sequence
  Description of Artificial Sequence: Synthetic oligonucleotide
ugagaaucggccaucagac

SEQ ID NO: 603668 - RNA, 19 nt, Artificial Sequence
  Description of Artificial Sequence: Synthetic oligonucleotide
aaaguaacgcaggagaaug

SEQ ID NO: 603669 - RNA, 19 nt, Artificial Sequence
  Description of Artificial Sequence: Synthetic oligonucleotide
augacaaauuaccaugagg

SEQ ID NO: 603670 - RNA, 19 nt, Artificial Sequence
  Description of Artificial Sequence: Synthetic oligonucleotide
cuaaucucauucauuagag

SEQ ID NO: 603671 - RNA, 19 nt, Artificial Sequence
  Description of Artificial Sequence: Synthetic oligonucleotide
aucuuuaacuacuucuagg

SEQ ID NO: 603672 - RNA, 19 nt, Artificial Sequence
  Description of Artificial Sequence: Synthetic oligonucleotide
aacuauucuagaaaauguc

SEQ ID NO: 603673 - RNA, 19 nt, Artificial Sequence
  Description of Artificial Sequence: Synthetic oligonucleotide
ugguuuaucacacaacaaa

SEQ ID NO: 603674 - RNA, 19 nt, Artificial Sequence
  Description of Artificial Sequence: Synthetic oligonucleotide
uguguguucagauauugcu

SEQ ID NO: 603675 - RNA, 19 nt, Artificial Sequence
  Description of Artificial Sequence: Synthetic oligonucleotide
uucuguuagagcuggaagc

SEQ ID NO: 603676 - RNA, 19 nt, Artificial Sequence
  Description of Artificial Sequence: Synthetic oligonucleotide
uuuauucaauacccuagag

SEQ ID NO: 603677 - RNA, 19 nt, Artificial Sequence
  Description of Artificial Sequence: Synthetic oligonucleotide
aauacaaagugcaugacua

SEQ ID NO: 603678 - RNA, 19 nt, Artificial Sequence
  Description of Artificial Sequence: Synthetic oligonucleotide
aguuguguaacaccaaugu

SEQ ID NO: 603679 - RNA, 19 nt, Artificial Sequence
  Description of Artificial Sequence: Synthetic oligonucleotide
uaagguuaugacaaggcaa

SEQ ID NO: 603680 - RNA, 19 nt, Artificial Sequence
  Description of Artificial Sequence: Synthetic oligonucleotide
uaaaaugccccaaccacug

SEQ ID NO: 603681 - RNA, 19 nt, Artificial Sequence
  Description of Artificial Sequence: Synthetic oligonucleotide
uugagaaucggccaucaga

SEQ ID NO: 603682 - RNA, 19 nt, Artificial Sequence
  Description of Artificial Sequence: Synthetic oligonucleotide
ucuaggagaggucugaaau

SEQ ID NO: 603683 - RNA, 19 nt, Artificial Sequence
  Description of Artificial Sequence: Synthetic oligonucleotide
aguuguggcguuuaaaccu

SEQ ID NO: 603684 - RNA, 19 nt, Artificial Sequence
  Description of Artificial Sequence: Synthetic oligonucleotide
gacuacguacaguacaucc

SEQ ID NO: 603685 - RNA, 19 nt, Artificial Sequence
  Description of Artificial Sequence: Synthetic oligonucleotide
cucuauagauaaaaccucc

SEQ ID NO: 603686 - RNA, 19 nt, Artificial Sequence
  Description of Artificial Sequence: Synthetic oligonucleotide
aaacuauucuagaaaaugu

SEQ ID NO: 603687 - RNA, 19 nt, Artificial Sequence
  Description of Artificial Sequence: Synthetic oligonucleotide
ugaugcuuugguacuaucc

SEQ ID NO: 603688 - RNA, 19 nt, Artificial Sequence
  Description of Artificial Sequence: Synthetic oligonucleotide
auaaguauccaacaguaua

SEQ ID NO: 603689 - RNA, 19 nt, Artificial Sequence
  Description of Artificial Sequence: Synthetic oligonucleotide
aacgacguuuaucaaauau

SEQ ID NO: 603690 - RNA, 19 nt, Artificial Sequence
  Description of Artificial Sequence: Synthetic oligonucleotide
uauauucuaccaccaauac

SEQ ID NO: 603691 - RNA, 19 nt, Artificial Sequence
  Description of Artificial Sequence: Synthetic oligonucleotide
cacauaacgacguuuauca

SEQ ID NO: 603692 - RNA, 19 nt, Artificial Sequence
  Description of Artificial Sequence: Synthetic oligonucleotide
acccuaauaagguuaugac

SEQ ID NO: 603693 - RNA, 19 nt, Artificial Sequence
  Description of Artificial Sequence: Synthetic oligonucleotide
uuaaguaguuuacaaccac

SEQ ID NO: 603694 - RNA, 19 nt, Artificial Sequence
  Description of Artificial Sequence: Synthetic oligonucleotide
uugaggucuaguaauaaau

SEQ ID NO: 603695 - RNA, 19 nt, Artificial Sequence
  Description of Artificial Sequence: Synthetic oligonucleotide
auuaccaugaggggaaaac

SEQ ID NO: 603696 - RNA, 19 nt, Artificial Sequence
  Description of Artificial Sequence: Synthetic oligonucleotide
aagagaugcgugucgauga

SEQ ID NO: 603697 - RNA, 19 nt, Artificial Sequence
  Description of Artificial Sequence: Synthetic oligonucleotide
acuuuaaauagugggagag

SEQ ID NO: 603698 - RNA, 19 nt, Artificial Sequence
  Description of Artificial Sequence: Synthetic oligonucleotide
aguaguuuacaaccacgcg

SEQ ID NO: 603699 - RNA, 19 nt, Artificial Sequence
  Description of Artificial Sequence: Synthetic oligonucleotide
  modified_base (9)..(9): a, c, u, g, unknown or other
caguuuacngaucugguug

SEQ ID NO: 603700 - RNA, 19 nt, Artificial Sequence
  Description of Artificial Sequence: Synthetic oligonucleotide
aauacuaaggcagccacau

SEQ ID NO: 603701 - RNA, 19 nt, Artificial Sequence
  Description of Artificial Sequence: Synthetic oligonucleotide
uauaggaccuugcccaucc

SEQ ID NO: 603702 - RNA, 19 nt, Artificial Sequence
  Description of Artificial Sequence: Synthetic oligonucleotide
cuugcaguaagcuagaacu

SEQ ID NO: 603703 - RNA, 19 nt, Artificial Sequence
  Description of Artificial Sequence: Synthetic oligonucleotide
ucuauagauaaaaccucca

SEQ ID NO: 603704 - RNA, 19 nt, Artificial Sequence
  Description of Artificial Sequence: Synthetic oligonucleotide
aacugaaucguguggauuu

SEQ ID NO: 603705 - RNA, 19 nt, Artificial Sequence
  Description of Artificial Sequence: Synthetic oligonucleotide
gaaagacuaaacuacauau

SEQ ID NO: 603706 - RNA, 19 nt, Artificial Sequence
  Description of Artificial Sequence: Synthetic oligonucleotide
aguuaugacaaauuaccau

SEQ ID NO: 603707 - RNA, 19 nt, Artificial Sequence
  Description of Artificial Sequence: Synthetic oligonucleotide
caugucaaaguaacgcagg

SEQ ID NO: 603708 - RNA, 19 nt, Artificial Sequence
  Description of Artificial Sequence: Synthetic oligonucleotide
uuuacacaaugcaagcccu

SEQ ID NO: 603709 - RNA, 19 nt, Artificial Sequence
  Description of Artificial Sequence: Synthetic oligonucleotide
ucagauauugcuuccuccu

SEQ ID NO: 603710 - RNA, 19 nt, Artificial Sequence
  Description of Artificial Sequence: Synthetic oligonucleotide
auuuauucaauacccuaga

SEQ ID NO: 603711 - RNA, 19 nt, Artificial Sequence
  Description of Artificial Sequence: Synthetic oligonucleotide
aacuuuaaauagugggaga

SEQ ID NO: 603712 - RNA, 19 nt, Artificial Sequence
  Description of Artificial Sequence: Synthetic oligonucleotide
aaaauaggagggucagucu

SEQ ID NO: 603713 - RNA, 19 nt, Artificial Sequence
  Description of Artificial Sequence: Synthetic oligonucleotide
auaagguuaugacaaggca

SEQ ID NO: 603714 - RNA, 19 nt, Artificial Sequence
  Description of Artificial Sequence: Synthetic oligonucleotide
aaacccacucacugggccg

SEQ ID NO: 603715 - RNA, 19 nt, Artificial Sequence
  Description of Artificial Sequence: Synthetic oligonucleotide
ugcaugacuacguacagua

SEQ ID NO: 603716 - RNA, 19 nt, Artificial Sequence
  Description of Artificial Sequence: Synthetic oligonucleotide
ugagguaauccagagcuag

SEQ ID NO: 603717 - RNA, 19 nt, Artificial Sequence
  Description of Artificial Sequence: Synthetic oligonucleotide
aucccuauaggaccuugcc

SEQ ID NO: 603718 - RNA, 19 nt, Artificial Sequence
  Description of Artificial Sequence: Synthetic oligonucleotide
ugaggugguacugugagca

SEQ ID NO: 603719 - RNA, 19 nt, Artificial Sequence
  Description of Artificial Sequence: Synthetic oligonucleotide
aguauauucuaccaccaau

SEQ ID NO: 603720 - RNA, 19 nt, Artificial Sequence
  Description of Artificial Sequence: Synthetic oligonucleotide
aacccuaauaagguuauga

SEQ ID NO: 603721 - RNA, 19 nt, Artificial Sequence
  Description of Artificial Sequence: Synthetic oligonucleotide
ugcaguaagcuagaacugg

SEQ ID NO: 603722 - RNA, 19 nt, Artificial Sequence
  Description of Artificial Sequence: Synthetic oligonucleotide
auacaaagugcaugacuac

SEQ ID NO: 603723 - RNA, 19 nt, Artificial Sequence
  Description of Artificial Sequence: Synthetic oligonucleotide
uguaacacaccaaggcugu

SEQ ID NO: 603724 - RNA, 19 nt, Artificial Sequence
  Description of Artificial Sequence: Synthetic oligonucleotide
cuagaacugaaucgugugg

SEQ ID NO: 603725 - RNA, 19 nt, Artificial Sequence
  Description of Artificial Sequence: Synthetic oligonucleotide
uuccgaguuuguuggaugg

SEQ ID NO: 603726 - RNA, 19 nt, Artificial Sequence
  Description of Artificial Sequence: Synthetic oligonucleotide
ucauuagaggggauuaaaa

SEQ ID NO: 603727 - RNA, 19 nt, Artificial Sequence
  Description of Artificial Sequence: Synthetic oligonucleotide
uuuacaaccacgcguucuc

SEQ ID NO: 603728 - RNA, 19 nt, Artificial Sequence
  Description of Artificial Sequence: Synthetic oligonucleotide
ucuguuagagcuggaagcc

SEQ ID NO: 603729 - RNA, 19 nt, Artificial Sequence
  Description of Artificial Sequence: Synthetic oligonucleotide
ugguacuaucccuauagga

SEQ ID NO: 603730 - RNA, 19 nt, Artificial Sequence
  Description of Artificial Sequence: Synthetic oligonucleotide
acuacucuauagauaaaac

SEQ ID NO: 603731 - RNA, 19 nt, Artificial Sequence
  Description of Artificial Sequence: Synthetic oligonucleotide
acaacuauaggaugccaca

SEQ ID NO: 603732 - RNA, 19 nt, Artificial Sequence
  Description of Artificial Sequence: Synthetic oligonucleotide
uguggauuucagugaaucc

SEQ ID NO: 603733 - RNA, 19 nt, Artificial Sequence
  Description of Artificial Sequence: Synthetic oligonucleotide
ugaaucguguggauuucag

SEQ ID NO: 603734 - RNA, 19 nt, Artificial Sequence
  Description of Artificial Sequence: Synthetic oligonucleotide
guagagaugauccaucaaa

SEQ ID NO: 603735 - RNA, 19 nt, Artificial Sequence
  Description of Artificial Sequence: Synthetic oligonucleotide
cugaacuuugagaaucggc

SEQ ID NO: 603736 - RNA, 19 nt, Artificial Sequence
  Description of Artificial Sequence: Synthetic oligonucleotide
acucuauagauaaaaccuc

SEQ ID NO: 603737 - RNA, 19 nt, Artificial Sequence
  Description of Artificial Sequence: Synthetic oligonucleotide
uucaauacccuagaguaaa

SEQ ID NO: 603738 - RNA, 19 nt, Artificial Sequence
  Description of Artificial Sequence: Synthetic oligonucleotide
aauacucagcauauuaaau

SEQ ID NO: 603739 - RNA, 19 nt, Artificial Sequence
  Description of Artificial Sequence: Synthetic oligonucleotide
uaguuuacaaccacgcguu

SEQ ID NO: 603740 - RNA, 19 nt, Artificial Sequence
  Description of Artificial Sequence: Synthetic oligonucleotide
agaaucggccaucagacaa

SEQ ID NO: 603741 - RNA, 19 nt, Artificial Sequence
  Description of Artificial Sequence: Synthetic oligonucleotide
guucuguuagagcuggaag

SEQ ID NO: 603742 - RNA, 19 nt, Artificial Sequence
  Description of Artificial Sequence: Synthetic oligonucleotide
ugaggucuaguaauaaaua

SEQ ID NO: 603743 - RNA, 19 nt, Artificial Sequence
  Description of Artificial Sequence: Synthetic oligonucleotide
aagacucacauaacgacgu

SEQ ID NO: 603744 - RNA, 19 nt, Artificial Sequence
  Description of Artificial Sequence: Synthetic oligonucleotide
aagugcaugacuacguaca

SEQ ID NO: 603745 - RNA, 19 nt, Artificial Sequence
  Description of Artificial Sequence: Synthetic oligonucleotide
acuauucuagaaaaugucu

SEQ ID NO: 603746 - RNA, 19 nt, Artificial Sequence
  Description of Artificial Sequence: Synthetic oligonucleotide
uuuaaaccuccuucugcag

SEQ ID NO: 603747 - RNA, 19 nt, Artificial Sequence
  Description of Artificial Sequence: Synthetic oligonucleotide
ucucauucauuagagggga

SEQ ID NO: 603748 - RNA, 19 nt, Artificial Sequence
  Description of Artificial Sequence: Synthetic oligonucleotide
aagguuaugacaaggcaaa

SEQ ID NO: 603749 - RNA, 19 nt, Artificial Sequence
  Description of Artificial Sequence: Synthetic oligonucleotide
cucagcuuagccucaacac

SEQ ID NO: 603750 - RNA, 19 nt, Artificial Sequence
  Description of Artificial Sequence: Synthetic oligonucleotide
ugcaagcccucuaagaaau

SEQ ID NO: 603751 - RNA, 19 nt, Artificial Sequence
  Description of Artificial Sequence: Synthetic oligonucleotide
gaggucuaguaauaaauaa

SEQ ID NO: 603752 - RNA, 19 nt, Artificial Sequence
  Description of Artificial Sequence: Synthetic oligonucleotide
aacuauaggaugccacaaa

SEQ ID NO: 603753 - RNA, 19 nt, Artificial Sequence
  Description of Artificial Sequence: Synthetic oligonucleotide
uugcaguaagcuagaacug

SEQ ID NO: 603754 - RNA, 19 nt, Artificial Sequence
  Description of Artificial Sequence: Synthetic oligonucleotide
  modified_base (11)..(11): a, c, u, g, unknown or other
ugcaguuuacngaucuggu

SEQ ID NO: 603755 - RNA, 19 nt, Artificial Sequence
  Description of Artificial Sequence: Synthetic oligonucleotide
uuccuucuaaucaacuuua

SEQ ID NO: 603756 - RNA, 19 nt, Artificial Sequence
  Description of Artificial Sequence: Synthetic oligonucleotide
uaaucaugagugaggaaua

SEQ ID NO: 603757 - RNA, 19 nt, Artificial Sequence
  Description of Artificial Sequence: Synthetic oligonucleotide
aguuuaaauugcucuuugu

SEQ ID NO: 603758 - RNA, 19 nt, Artificial Sequence
  Description of Artificial Sequence: Synthetic oligonucleotide
auagcagguauccaaguua

SEQ ID NO: 603759 - RNA, 19 nt, Artificial Sequence
  Description of Artificial Sequence: Synthetic oligonucleotide
cacaacuauaggaugccac

SEQ ID NO: 603760 - RNA, 19 nt, Artificial Sequence
  Description of Artificial Sequence: Synthetic oligonucleotide
guaguuuacaaccacgcgu

SEQ ID NO: 603761 - RNA, 19 nt, Artificial Sequence
  Description of Artificial Sequence: Synthetic oligonucleotide
  modified_base (12)..(12): a, c, u, g, unknown or other
cugcaguuuacngaucugg

SEQ ID NO: 603762 - RNA, 19 nt, Artificial Sequence
  Description of Artificial Sequence: Synthetic oligonucleotide
gaagagaugcgugucgaug

SEQ ID NO: 603763 - RNA, 19 nt, Artificial Sequence
  Description of Artificial Sequence: Synthetic oligonucleotide
  modified_base (5)..(5): a, c, u, g, unknown or other
uuacngaucugguugcuuu

SEQ ID NO: 603764 - RNA, 19 nt, Artificial Sequence
  Description of Artificial Sequence: Synthetic oligonucleotide
cagcuuagccucaacacac

SEQ ID NO: 603765 - RNA, 19 nt, Artificial Sequence
  Description of Artificial Sequence: Synthetic oligonucleotide
auaacgacguuuaucaaau

SEQ ID NO: 603766 - RNA, 19 nt, Artificial Sequence
  Description of Artificial Sequence: Synthetic oligonucleotide
caaccaacucagcuuagcc

SEQ ID NO: 603767 - RNA, 19 nt, Artificial Sequence
  Description of Artificial Sequence: Synthetic oligonucleotide
aaagacuuaaagagcacuu

SEQ ID NO: 603768 - RNA, 19 nt, Artificial Sequence
  Description of Artificial Sequence: Synthetic oligonucleotide
gguacuaucccuauaggac

SEQ ID NO: 603769 - RNA, 19 nt, Artificial Sequence
  Description of Artificial Sequence: Synthetic oligonucleotide
aacccaaccaacucagcuu

SEQ ID NO: 603770 - RNA, 19 nt, Artificial Sequence
  Description of Artificial Sequence: Synthetic oligonucleotide
uuggcaacgccuuagcauu

SEQ ID NO: 603771 - RNA, 19 nt, Artificial Sequence
  Description of Artificial Sequence: Synthetic oligonucleotide
agugcuaccuguguguuca

SEQ ID NO: 603772 - RNA, 19 nt, Artificial Sequence
  Description of Artificial Sequence: Synthetic oligonucleotide
agugcaugacuacguacag

SEQ ID NO: 603773 - RNA, 19 nt, Artificial Sequence
  Description of Artificial Sequence: Synthetic oligonucleotide
cccaaaacggcccuuauag

SEQ ID NO: 603774 - RNA, 19 nt, Artificial Sequence
  Description of Artificial Sequence: Synthetic oligonucleotide
uacuaucccuauaggaccu

SEQ ID NO: 603775 - RNA, 19 nt, Artificial Sequence
  Description of Artificial Sequence: Synthetic oligonucleotide
aaggucaacugagguaauc

SEQ ID NO: 603776 - RNA, 19 nt, Artificial Sequence
  Description of Artificial Sequence: Synthetic oligonucleotide
aaguaacgcaggagaaugg

SEQ ID NO: 603777 - RNA, 19 nt, Artificial Sequence
  Description of Artificial Sequence: Synthetic oligonucleotide
gagcaucagaguuguggcg

SEQ ID NO: 603778 - RNA, 19 nt, Artificial Sequence
  Description of Artificial Sequence: Synthetic oligonucleotide
uuacuguuagcagggagac

SEQ ID NO: 603779 - RNA, 19 nt, Artificial Sequence
  Description of Artificial Sequence: Synthetic oligonucleotide
acaaugcaagcccucuaag

SEQ ID NO: 603780 - RNA, 19 nt, Artificial Sequence
  Description of Artificial Sequence: Synthetic oligonucleotide
aaccacgcguucucugccg

SEQ ID NO: 603781 - RNA, 19 nt, Artificial Sequence
  Description of Artificial Sequence: Synthetic oligonucleotide
cauaacgacguuuaucaaa

SEQ ID NO: 603782 - RNA, 19 nt, Artificial Sequence
  Description of Artificial Sequence: Synthetic oligonucleotide
guaagaucuaagaaggaaa

SEQ ID NO: 603783 - RNA, 19 nt, Artificial Sequence
  Description of Artificial Sequence: Synthetic oligonucleotide
agucuguccugcuuaauaa

SEQ ID NO: 603784 - RNA, 19 nt, Artificial Sequence
  Description of Artificial Sequence: Synthetic oligonucleotide
aaacuacauaugguuuauc

SEQ ID NO: 603785 - RNA, 19 nt, Artificial Sequence
  Description of Artificial Sequence: Synthetic oligonucleotide
agacuuaaagagcacuuua

SEQ ID NO: 603786 - RNA, 19 nt, Artificial Sequence
  Description of Artificial Sequence: Synthetic oligonucleotide
aaaacccuaauaagguuau

SEQ ID NO: 603787 - RNA, 19 nt, Artificial Sequence
  Description of Artificial Sequence: Synthetic oligonucleotide
uuugagaaucggccaucag

SEQ ID NO: 603788 - RNA, 19 nt, Artificial Sequence
  Description of Artificial Sequence: Synthetic oligonucleotide
cuaaacuacauaugguuua

SEQ ID NO: 603789 - RNA, 19 nt, Artificial Sequence
  Description of Artificial Sequence: Synthetic oligonucleotide
caaaucccaucucuguccc

SEQ ID NO: 603790 - RNA, 19 nt, Artificial Sequence
  Description of Artificial Sequence: Synthetic oligonucleotide
uaucccuauaggaccuugc

SEQ ID NO: 603791 - RNA, 19 nt, Artificial Sequence
  Description of Artificial Sequence: Synthetic oligonucleotide
aguaagcuagaacuggcuu

SEQ ID NO: 603792 - RNA, 19 nt, Artificial Sequence
  Description of Artificial Sequence: Synthetic oligonucleotide
agccauuuaaaaugcccca

SEQ ID NO: 603793 - RNA, 19 nt, Artificial Sequence
  Description of Artificial Sequence: Synthetic oligonucleotide
caaacccacucacugggcc

SEQ ID NO: 603794 - RNA, 19 nt, Artificial Sequence
  Description of Artificial Sequence: Synthetic oligonucleotide
agagacacacaauguaaaa

SEQ ID NO: 603795 - RNA, 19 nt, Artificial Sequence
  Description of Artificial Sequence: Synthetic oligonucleotide
ucacauaacgacguuuauc

SEQ ID NO: 603796 - RNA, 19 nt, Artificial Sequence
  Description of Artificial Sequence: Synthetic oligonucleotide
aucguguggauuucaguga

SEQ ID NO: 603797 - RNA, 19 nt, Artificial Sequence
  Description of Artificial Sequence: Synthetic oligonucleotide
guuacuguuagcagggaga

SEQ ID NO: 603798 - RNA, 19 nt, Artificial Sequence
  Description of Artificial Sequence: Synthetic oligonucleotide
aaucccagacaguugugua

SEQ ID NO: 603799 - RNA, 19 nt, Artificial Sequence
  Description of Artificial Sequence: Synthetic oligonucleotide
caaacugcggcccucccug

SEQ ID NO: 603800 - RNA, 19 nt, Artificial Sequence
  Description of Artificial Sequence: Synthetic oligonucleotide
gacucacacaaucuguuaa

SEQ ID NO: 603801 - RNA, 19 nt, Artificial Sequence
  Description of Artificial Sequence: Synthetic oligonucleotide
agaugaucccacaacauau

SEQ ID NO: 603802 - RNA, 19 nt, Artificial Sequence
  Description of Artificial Sequence: Synthetic oligonucleotide
guuaaguaguuuacaacca

SEQ ID NO: 603803 - RNA, 19 nt, Artificial Sequence
  Description of Artificial Sequence: Synthetic oligonucleotide
agccagccauuuaaaaugc

SEQ ID NO: 603804 - RNA, 19 nt, Artificial Sequence
  Description of Artificial Sequence: Synthetic oligonucleotide
cuccacagaaagacuaaac

SEQ ID NO: 603805 - RNA, 19 nt, Artificial Sequence
  Description of Artificial Sequence: Synthetic oligonucleotide
gucaacugagguaauccag

SEQ ID NO: 603806 - RNA, 19 nt, Artificial Sequence
  Description of Artificial Sequence: Synthetic oligonucleotide
uguuagcagggagacuggg

SEQ ID NO: 603807 - RNA, 19 nt, Artificial Sequence
  Description of Artificial Sequence: Synthetic oligonucleotide
auacccuagaguaaaaguu

SEQ ID NO: 603808 - RNA, 19 nt, Artificial Sequence
  Description of Artificial Sequence: Synthetic oligonucleotide
cagaauagcagguauccaa

SEQ ID NO: 603809 - RNA, 19 nt, Artificial Sequence
  Description of Artificial Sequence: Synthetic oligonucleotide
ugcuuugguacuaucccua

SEQ ID NO: 603810 - RNA, 19 nt, Artificial Sequence
  Description of Artificial Sequence: Synthetic oligonucleotide
ucguguggauuucagugaa

SEQ ID NO: 603811 - RNA, 19 nt, Artificial Sequence
  Description of Artificial Sequence: Synthetic oligonucleotide
ggaauacuaaggcagccac

SEQ ID NO: 603812 - RNA, 19 nt, Artificial Sequence
  Description of Artificial Sequence: Synthetic oligonucleotide
gaguuaugacaaauuacca

SEQ ID NO: 603813 - RNA, 19 nt, Artificial Sequence
  Description of Artificial Sequence: Synthetic oligonucleotide
caguuguguaacaccaaug

SEQ ID NO: 603814 - RNA, 19 nt, Artificial Sequence
  Description of Artificial Sequence: Synthetic oligonucleotide
aagacuuaaagagcacuuu

SEQ ID NO: 603815 - RNA, 19 nt, Artificial Sequence
  Description of Artificial Sequence: Synthetic oligonucleotide
ggagaaugguaauggcugg

SEQ ID NO: 603816 - RNA, 19 nt, Artificial Sequence
  Description of Artificial Sequence: Synthetic oligonucleotide
cuguguguucagauauugc

SEQ ID NO: 603817 - RNA, 19 nt, Artificial Sequence
  Description of Artificial Sequence: Synthetic oligonucleotide
gacguuuaucaaauauuac

SEQ ID NO: 603818 - RNA, 19 nt, Artificial Sequence
  Description of Artificial Sequence: Synthetic oligonucleotide
caauacccuagaguaaaag

SEQ ID NO: 603819 - RNA, 19 nt, Artificial Sequence
  Description of Artificial Sequence: Synthetic oligonucleotide
aguuuacaaccacgcguuc

SEQ ID NO: 603820 - RNA, 19 nt, Artificial Sequence
  Description of Artificial Sequence: Synthetic oligonucleotide
aacgcaggagaaugguaau

SEQ ID NO: 603821 - RNA, 19 nt, Artificial Sequence
  Description of Artificial Sequence: Synthetic oligonucleotide
agagaugcgugucgaugag

SEQ ID NO: 603822 - RNA, 19 nt, Artificial Sequence
  Description of Artificial Sequence: Synthetic oligonucleotide
aaucaguaguacaggucug

SEQ ID NO: 603823 - RNA, 19 nt, Artificial Sequence
  Description of Artificial Sequence: Synthetic oligonucleotide
uacguacaguacauccuac

SEQ ID NO: 603824 - RNA, 19 nt, Artificial Sequence
  Description of Artificial Sequence: Synthetic oligonucleotide
cuuccgaguuuguuggaug

SEQ ID NO: 603825 - RNA, 19 nt, Artificial Sequence
  Description of Artificial Sequence: Synthetic oligonucleotide
uguucagauauugcuuccu

SEQ ID NO: 603826 - RNA, 19 nt, Artificial Sequence
  Description of Artificial Sequence: Synthetic oligonucleotide
gcuagaacugaaucgugug

SEQ ID NO: 603827 - RNA, 19 nt, Artificial Sequence
  Description of Artificial Sequence: Synthetic oligonucleotide
uacaaccacgcguucucug

SEQ ID NO: 603828 - RNA, 19 nt, Artificial Sequence
  Description of Artificial Sequence: Synthetic oligonucleotide
aggucuaguaauaaauaaa

SEQ ID NO: 603829 - RNA, 19 nt, Artificial Sequence
  Description of Artificial Sequence: Synthetic oligonucleotide
ucccuguugugaaaacuaa

SEQ ID NO: 603830 - RNA, 19 nt, Artificial Sequence
  Description of Artificial Sequence: Synthetic oligonucleotide
uccaguagguaagaucuaa

SEQ ID NO: 603831 - RNA, 19 nt, Artificial Sequence
  Description of Artificial Sequence: Synthetic oligonucleotide
uuacacaaugcaagcccuc

SEQ ID NO: 603832 - RNA, 19 nt, Artificial Sequence
  Description of Artificial Sequence: Synthetic oligonucleotide
augcgugucgaugaggacu

SEQ ID NO: 603833 - RNA, 19 nt, Artificial Sequence
  Description of Artificial Sequence: Synthetic oligonucleotide
acucuguaacacaccaagg

SEQ ID NO: 603834 - RNA, 19 nt, Artificial Sequence
  Description of Artificial Sequence: Synthetic oligonucleotide
acuacguacaguacauccu

SEQ ID NO: 603835 - RNA, 19 nt, Artificial Sequence
  Description of Artificial Sequence: Synthetic oligonucleotide
agaugcgugucgaugagga

SEQ ID NO: 603836 - RNA, 19 nt, Artificial Sequence
  Description of Artificial Sequence: Synthetic oligonucleotide
ggagccaacacagugcuac

SEQ ID NO: 603837 - RNA, 19 nt, Artificial Sequence
  Description of Artificial Sequence: Synthetic oligonucleotide
agacuaaacuacauauggu

SEQ ID NO: 603838 - RNA, 19 nt, Artificial Sequence
  Description of Artificial Sequence: Synthetic oligonucleotide
ugcaugugguggcuuguac

SEQ ID NO: 603839 - RNA, 19 nt, Artificial Sequence
  Description of Artificial Sequence: Synthetic oligonucleotide
aaucggccaucagacaacu

SEQ ID NO: 603840 - RNA, 19 nt, Artificial Sequence
  Description of Artificial Sequence: Synthetic oligonucleotide
aucaacugugccccgcgca

SEQ ID NO: 603841 - RNA, 19 nt, Artificial Sequence
  Description of Artificial Sequence: Synthetic oligonucleotide
ccaugucaaaguaacgcag

SEQ ID NO: 603842 - RNA, 19 nt, Artificial Sequence
  Description of Artificial Sequence: Synthetic oligonucleotide
ucccagacaguuguguaac

SEQ ID NO: 603843 - RNA, 19 nt, Artificial Sequence
  Description of Artificial Sequence: Synthetic oligonucleotide
ugcgugucgaugaggacuu

SEQ ID NO: 603844 - RNA, 19 nt, Artificial Sequence
  Description of Artificial Sequence: Synthetic oligonucleotide
ucgugcuacugaguuauga

SEQ ID NO: 603845 - RNA, 19 nt, Artificial Sequence
  Description of Artificial Sequence: Synthetic oligonucleotide
agaacugaaucguguggau

SEQ ID NO: 603846 - RNA, 19 nt, Artificial Sequence
  Description of Artificial Sequence: Synthetic oligonucleotide
aaugccccaaccacugccu

SEQ ID NO: 603847 - RNA, 19 nt, Artificial Sequence
  Description of Artificial Sequence: Synthetic oligonucleotide
uccgaguuuguuggauggg

SEQ ID NO: 603848 - RNA, 19 nt, Artificial Sequence
  Description of Artificial Sequence: Synthetic oligonucleotide
acugaaucguguggauuuc

SEQ ID NO: 603849 - RNA, 19 nt, Artificial Sequence
  Description of Artificial Sequence: Synthetic oligonucleotide
ugguugaggucuaguaaua

SEQ ID NO: 603850 - RNA, 19 nt, Artificial Sequence
  Description of Artificial Sequence: Synthetic oligonucleotide
acccaaccaacucagcuua

SEQ ID NO: 603851 - RNA, 19 nt, Artificial Sequence
  Description of Artificial Sequence: Synthetic oligonucleotide
ccuaaucucauucauuaga

SEQ ID NO: 603852 - RNA, 19 nt, Artificial Sequence
  Description of Artificial Sequence: Synthetic oligonucleotide
ucuaagaaaugugccccaa

SEQ ID NO: 603853 - RNA, 19 nt, Artificial Sequence
  Description of Artificial Sequence: Synthetic oligonucleotide
augguaauggcuggacucu

SEQ ID NO: 603854 - RNA, 19 nt, Artificial Sequence
  Description of Artificial Sequence: Synthetic oligonucleotide
gagaugcgugucgaugagg

SEQ ID NO: 603855 - RNA, 19 nt, Artificial Sequence
  Description of Artificial Sequence: Synthetic oligonucleotide
aggugguacugugagcauc

SEQ ID NO: 603856 - RNA, 19 nt, Artificial Sequence
  Description of Artificial Sequence: Synthetic oligonucleotide
aucaguaguacaggucuga

SEQ ID NO: 603857 - RNA, 19 nt, Artificial Sequence
  Description of Artificial Sequence: Synthetic oligonucleotide
gaaucggccaucagacaac

SEQ ID NO: 603858 - RNA, 19 nt, Artificial Sequence
  Description of Artificial Sequence: Synthetic oligonucleotide
cacaacauauuuucugucu

SEQ ID NO: 603859 - RNA, 19 nt, Artificial Sequence
  Description of Artificial Sequence: Synthetic oligonucleotide
gguaagaucuaagaaggaa

SEQ ID NO: 603860 - RNA, 19 nt, Artificial Sequence
  Description of Artificial Sequence: Synthetic oligonucleotide
cucugccgaauggugaugc

SEQ ID NO: 603861 - RNA, 19 nt, Artificial Sequence
  Description of Artificial Sequence: Synthetic oligonucleotide
gaaccucagucaccacucc

SEQ ID NO: 603862 - RNA, 19 nt, Artificial Sequence
  Description of Artificial Sequence: Synthetic oligonucleotide
augacuacguacaguacau

SEQ ID NO: 603863 - RNA, 19 nt, Artificial Sequence
  Description of Artificial Sequence: Synthetic oligonucleotide
gaauggugaugcuuuggua

SEQ ID NO: 603864 - RNA, 19 nt, Artificial Sequence
  Description of Artificial Sequence: Synthetic oligonucleotide
  modified_base (4)..(4): a, c, u, g, unknown or other
uacngaucugguugcuuuu

SEQ ID NO: 603865 - RNA, 19 nt, Artificial Sequence
  Description of Artificial Sequence: Synthetic oligonucleotide
aguucuguuagagcuggaa

SEQ ID NO: 603866 - RNA, 19 nt, Artificial Sequence
  Description of Artificial Sequence: Synthetic oligonucleotide
agucaccacuccugaguag

SEQ ID NO: 603867 - RNA, 19 nt, Artificial Sequence
  Description of Artificial Sequence: Synthetic oligonucleotide
acucacauaacgacguuua

SEQ ID NO: 603868 - RNA, 19 nt, Artificial Sequence
  Description of Artificial Sequence: Synthetic oligonucleotide
acgacguuuaucaaauauu

SEQ ID NO: 603869 - RNA, 19 nt, Artificial Sequence
  Description of Artificial Sequence: Synthetic oligonucleotide
aaacccuaauaagguuaug

SEQ ID NO: 603870 - RNA, 19 nt, Artificial Sequence
  Description of Artificial Sequence: Synthetic oligonucleotide
gaaugguaauggcuggacu

SEQ ID NO: 603871 - RNA, 19 nt, Artificial Sequence
  Description of Artificial Sequence: Synthetic oligonucleotide
cccuauaggaccuugccca

SEQ ID NO: 603872 - RNA, 19 nt, Artificial Sequence
  Description of Artificial Sequence: Synthetic oligonucleotide
cguuuaaaccuccuucugc

SEQ ID NO: 603873 - RNA, 19 nt, Artificial Sequence
  Description of Artificial Sequence: Synthetic oligonucleotide
  modified_base (6)..(6): a, c, u, g, unknown or other
uuuacngaucugguugcuu

SEQ ID NO: 603874 - RNA, 19 nt, Artificial Sequence
  Description of Artificial Sequence: Synthetic oligonucleotide
cuacguacaguacauccua

SEQ ID NO: 603875 - RNA, 19 nt, Artificial Sequence
  Description of Artificial Sequence: Synthetic oligonucleotide
caaccacgcguucucugcc

SEQ ID NO: 603876 - RNA, 19 nt, Artificial Sequence
  Description of Artificial Sequence: Synthetic oligonucleotide
acauaacgacguuuaucaa

SEQ ID NO: 603877 - RNA, 19 nt, Artificial Sequence
  Description of Artificial Sequence: Synthetic oligonucleotide
ggucuaguaauaaauaaau

SEQ ID NO: 603878 - RNA, 19 nt, Artificial Sequence
  Description of Artificial Sequence: Synthetic oligonucleotide
ggcaggucgugcuacugag

SEQ ID NO: 603879 - RNA, 19 nt, Artificial Sequence
  Description of Artificial Sequence: Synthetic oligonucleotide
gucaccacuccugaguaga

SEQ ID NO: 603880 - RNA, 19 nt, Artificial Sequence
  Description of Artificial Sequence: Synthetic oligonucleotide
gaaucguguggauuucagu

SEQ ID NO: 603881 - RNA, 19 nt, Artificial Sequence
  Description of Artificial Sequence: Synthetic oligonucleotide
ggcgaggcacuugaggugg

SEQ ID NO: 603882 - RNA, 19 nt, Artificial Sequence
  Description of Artificial Sequence: Synthetic oligonucleotide
guuguggcguuuaaaccuc

SEQ ID NO: 603883 - RNA, 19 nt, Artificial Sequence
  Description of Artificial Sequence: Synthetic oligonucleotide
gaugauccaucaaaaguau

SEQ ID NO: 603884 - RNA, 19 nt, Artificial Sequence
  Description of Artificial Sequence: Synthetic oligonucleotide
cauucauuagaggggauua

SEQ ID NO: 603885 - RNA, 19 nt, Artificial Sequence
  Description of Artificial Sequence: Synthetic oligonucleotide
aagcuagaacuggcuuccg

SEQ ID NO: 603886 - RNA, 19 nt, Artificial Sequence
  Description of Artificial Sequence: Synthetic oligonucleotide
auucaauacccuagaguaa

SEQ ID NO: 603887 - RNA, 19 nt, Artificial Sequence
  Description of Artificial Sequence: Synthetic oligonucleotide
gagcuagaacugaaucgug

SEQ ID NO: 603888 - RNA, 19 nt, Artificial Sequence
  Description of Artificial Sequence: Synthetic oligonucleotide
gagaaucggccaucagaca

SEQ ID NO: 603889 - RNA, 19 nt, Artificial Sequence
  Description of Artificial Sequence: Synthetic oligonucleotide
cccuaauaagguuaugaca

SEQ ID NO: 603890 - RNA, 19 nt, Artificial Sequence
  Description of Artificial Sequence: Synthetic oligonucleotide
cucccuguugugaaaacua

SEQ ID NO: 603891 - RNA, 19 nt, Artificial Sequence
  Description of Artificial Sequence: Synthetic oligonucleotide
ucccucuaggagaggucug

SEQ ID NO: 603892 - RNA, 19 nt, Artificial Sequence
  Description of Artificial Sequence: Synthetic oligonucleotide
aaauuaccaugaggggaaa

SEQ ID NO: 603893 - RNA, 19 nt, Artificial Sequence
  Description of Artificial Sequence: Synthetic oligonucleotide
ccaguagguaagaucuaag

SEQ ID NO: 603894 - RNA, 19 nt, Artificial Sequence
  Description of Artificial Sequence: Synthetic oligonucleotide
agaaccuuggcaacgccuu

SEQ ID NO: 603895 - RNA, 19 nt, Artificial Sequence
  Description of Artificial Sequence: Synthetic oligonucleotide
uuacaaccacgcguucucu

SEQ ID NO: 603896 - RNA, 19 nt, Artificial Sequence
  Description of Artificial Sequence: Synthetic oligonucleotide
uucuaggggcaggucgugc

SEQ ID NO: 603897 - RNA, 19 nt, Artificial Sequence
  Description of Artificial Sequence: Synthetic oligonucleotide
acgcguucucugccgaaug

SEQ ID NO: 603898 - RNA, 19 nt, Artificial Sequence
  Description of Artificial Sequence: Synthetic oligonucleotide
cccuuauagaugaucccac

SEQ ID NO: 603899 - RNA, 19 nt, Artificial Sequence
  Description of Artificial Sequence: Synthetic oligonucleotide
acgcaggagaaugguaaug

SEQ ID NO: 603900 - RNA, 19 nt, Artificial Sequence
  Description of Artificial Sequence: Synthetic oligonucleotide
ugugcaugugguggcuugu

SEQ ID NO: 603901 - RNA, 19 nt, Artificial Sequence
  Description of Artificial Sequence: Synthetic oligonucleotide
uggcuuguacuagguaggu

SEQ ID NO: 603902 - RNA, 19 nt, Artificial Sequence
  Description of Artificial Sequence: Synthetic oligonucleotide
gccaacacagugcuaccug

SEQ ID NO: 603903 - RNA, 19 nt, Artificial Sequence
  Description of Artificial Sequence: Synthetic oligonucleotide
cugugguugaggucuagua

SEQ ID NO: 603904 - RNA, 19 nt, Artificial Sequence
  Description of Artificial Sequence: Synthetic oligonucleotide
cuaucccuauaggaccuug

SEQ ID NO: 603905 - RNA, 19 nt, Artificial Sequence
  Description of Artificial Sequence: Synthetic oligonucleotide
cuaaaacccuaauaagguu

SEQ ID NO: 603906 - RNA, 19 nt, Artificial Sequence
  Description of Artificial Sequence: Synthetic oligonucleotide
ccgucugugcauguggugg

SEQ ID NO: 603907 - RNA, 19 nt, Artificial Sequence
  Description of Artificial Sequence: Synthetic oligonucleotide
uucaagcuauuugcagaaa

SEQ ID NO: 603908 - RNA, 19 nt, Artificial Sequence
  Description of Artificial Sequence: Synthetic oligonucleotide
cgcaggagaaugguaaugg

SEQ ID NO: 603909 - RNA, 19 nt, Artificial Sequence
  Description of Artificial Sequence: Synthetic oligonucleotide
ggcccuuauagaugauccc

SEQ ID NO: 603910 - RNA, 19 nt, Artificial Sequence
  Description of Artificial Sequence: Synthetic oligonucleotide
cauccuacaggcuugccuu

SEQ ID NO: 603911 - RNA, 19 nt, Artificial Sequence
  Description of Artificial Sequence: Synthetic oligonucleotide
cgugcuacugaguuaugac

SEQ ID NO: 603912 - RNA, 19 nt, Artificial Sequence
  Description of Artificial Sequence: Synthetic oligonucleotide
cggcccuuauagaugaucc

SEQ ID NO: 603913 - RNA, 19 nt, Artificial Sequence
  Description of Artificial Sequence: Synthetic oligonucleotide
ugacuacguacaguacauc

SEQ ID NO: 603914 - RNA, 19 nt, Artificial Sequence
  Description of Artificial Sequence: Synthetic oligonucleotide
guuuacaaccacgcguucu

SEQ ID NO: 603915 - RNA, 19 nt, Artificial Sequence
  Description of Artificial Sequence: Synthetic oligonucleotide
ggugguacugugagcauca

SEQ ID NO: 603916 - RNA, 19 nt, Artificial Sequence
  Description of Artificial Sequence: Synthetic oligonucleotide
uaacgacguuuaucaaaua

SEQ ID NO: 603917 - RNA, 19 nt, Artificial Sequence
  Description of Artificial Sequence: Synthetic oligonucleotide
caacuauaggaugccacaa

SEQ ID NO: 603918 - RNA, 19 nt, Artificial Sequence
  Description of Artificial Sequence: Synthetic oligonucleotide
cccuaaucucauucauuag

SEQ ID NO: 603919 - RNA, 19 nt, Artificial Sequence
  Description of Artificial Sequence: Synthetic oligonucleotide
acccuagaguaaaaguuuu

SEQ ID NO: 603920 - RNA, 19 nt, Artificial Sequence
  Description of Artificial Sequence: Synthetic oligonucleotide
gcccuuauagaugauccca

SEQ ID NO: 603921 - RNA, 19 nt, Artificial Sequence
  Description of Artificial Sequence: Synthetic oligonucleotide
caggacucacacaaucugu

SEQ ID NO: 603922 - RNA, 19 nt, Artificial Sequence
  Description of Artificial Sequence: Synthetic oligonucleotide
uacuguuagcagggagacu

SEQ ID NO: 603923 - RNA, 19 nt, Artificial Sequence
  Description of Artificial Sequence: Synthetic oligonucleotide
gcccucuaagaaaugugcc

SEQ ID NO: 603924 - RNA, 19 nt, Artificial Sequence
  Description of Artificial Sequence: Synthetic oligonucleotide
agacucacauaacgacguu

SEQ ID NO: 603925 - RNA, 19 nt, Artificial Sequence
  Description of Artificial Sequence: Synthetic oligonucleotide
ccccuaaucucauucauua

SEQ ID NO: 603926 - RNA, 19 nt, Artificial Sequence
  Description of Artificial Sequence: Synthetic oligonucleotide
ugguuacuguuagcaggga

SEQ ID NO: 603927 - RNA, 19 nt, Artificial Sequence
  Description of Artificial Sequence: Synthetic oligonucleotide
cgacguuuaucaaauauua

SEQ ID NO: 603928 - RNA, 19 nt, Artificial Sequence
  Description of Artificial Sequence: Synthetic oligonucleotide
ccuacaggcagagagugga

SEQ ID NO: 603929 - RNA, 19 nt, Artificial Sequence
  Description of Artificial Sequence: Synthetic oligonucleotide
caacgccuuagcauuuaaa

SEQ ID NO: 603930 - RNA, 19 nt, Artificial Sequence
  Description of Artificial Sequence: Synthetic oligonucleotide
cuauaggaccuugcccauc

SEQ ID NO: 603931 - RNA, 19 nt, Artificial Sequence
  Description of Artificial Sequence: Synthetic oligonucleotide
acugggccgucugugcaug

SEQ ID NO: 603932 - RNA, 19 nt, Artificial Sequence
  Description of Artificial Sequence: Synthetic oligonucleotide
uggugaugcuuugguacua

SEQ ID NO: 603933 - RNA, 19 nt, Artificial Sequence
  Description of Artificial Sequence: Synthetic oligonucleotide
gaugaucccacaacauauu

SEQ ID NO: 603934 - RNA, 19 nt, Artificial Sequence
  Description of Artificial Sequence: Synthetic oligonucleotide
guaacgcaggagaauggua

SEQ ID NO: 603935 - RNA, 19 nt, Artificial Sequence
  Description of Artificial Sequence: Synthetic oligonucleotide
guaacacaccaaggcugug

SEQ ID NO: 603936 - RNA, 19 nt, Artificial Sequence
  Description of Artificial Sequence: Synthetic oligonucleotide
uacauccuacaggcagaga

SEQ ID NO: 603937 - RNA, 19 nt, Artificial Sequence
  Description of Artificial Sequence: Synthetic oligonucleotide
agcuuagccucaacacaca

SEQ ID NO: 603938 - RNA, 19 nt, Artificial Sequence
  Description of Artificial Sequence: Synthetic oligonucleotide
aggucgugcuacugaguua

SEQ ID NO: 603939 - RNA, 19 nt, Artificial Sequence
  Description of Artificial Sequence: Synthetic oligonucleotide
gaaccuuggcaacgccuua

SEQ ID NO: 603940 - RNA, 19 nt, Artificial Sequence
  Description of Artificial Sequence: Synthetic oligonucleotide
cugaaucguguggauuuca

SEQ ID NO: 603941 - RNA, 19 nt, Artificial Sequence
  Description of Artificial Sequence: Synthetic oligonucleotide
augauccaucaaaaguaua

SEQ ID NO: 603942 - RNA, 19 nt, Artificial Sequence
  Description of Artificial Sequence: Synthetic oligonucleotide
cugccucuccacagaaaga

SEQ ID NO: 603943 - RNA, 19 nt, Artificial Sequence
  Description of Artificial Sequence: Synthetic oligonucleotide
caccaaugucaauuauuua

SEQ ID NO: 603944 - RNA, 19 nt, Artificial Sequence
  Description of Artificial Sequence: Synthetic oligonucleotide
acacaccaaggcuguggaa

SEQ ID NO: 603945 - RNA, 19 nt, Artificial Sequence
  Description of Artificial Sequence: Synthetic oligonucleotide
gaacuacucuauagauaaa

SEQ ID NO: 603946 - RNA, 19 nt, Artificial Sequence
  Description of Artificial Sequence: Synthetic oligonucleotide
cuuguacuagguagguuuu

SEQ ID NO: 603947 - RNA, 19 nt, Artificial Sequence
  Description of Artificial Sequence: Synthetic oligonucleotide
cuguuagagcuggaagcca

SEQ ID NO: 603948 - RNA, 19 nt, Artificial Sequence
  Description of Artificial Sequence: Synthetic oligonucleotide
ccaaccaacucagcuuagc

SEQ ID NO: 603949 - RNA, 19 nt, Artificial Sequence
  Description of Artificial Sequence: Synthetic oligonucleotide
cccagaaggagccccggug

SEQ ID NO: 603950 - RNA, 19 nt, Artificial Sequence
  Description of Artificial Sequence: Synthetic oligonucleotide
cuucuaggggcaggucgug

SEQ ID NO: 603951 - RNA, 19 nt, Artificial Sequence
  Description of Artificial Sequence: Synthetic oligonucleotide
  modified_base (10)..(10): a, c, u, g, unknown or other
gcaguuuacngaucugguu

SEQ ID NO: 603952 - RNA, 19 nt, Artificial Sequence
  Description of Artificial Sequence: Synthetic oligonucleotide
caaaacagaucuguagauu

SEQ ID NO: 603953 - RNA, 19 nt, Artificial Sequence
  Description of Artificial Sequence: Synthetic oligonucleotide
gacucacauaacgacguuu

SEQ ID NO: 603954 - RNA, 19 nt, Artificial Sequence
  Description of Artificial Sequence: Synthetic oligonucleotide
caaaguaacgcaggagaau

SEQ ID NO: 603955 - RNA, 19 nt, Artificial Sequence
  Description of Artificial Sequence: Synthetic oligonucleotide
gaacugaaucguguggauu

SEQ ID NO: 603956 - RNA, 19 nt, Artificial Sequence
  Description of Artificial Sequence: Synthetic oligonucleotide
  modified_base (7)..(7): a, c, u, g, unknown or other
guuuacngaucugguugcu

SEQ ID NO: 603957 - RNA, 19 nt, Artificial Sequence
  Description of Artificial Sequence: Synthetic oligonucleotide
gguugaggucuaguaauaa

SEQ ID NO: 603958 - RNA, 19 nt, Artificial Sequence
  Description of Artificial Sequence: Synthetic oligonucleotide
ggcuggacucuguaacaca

SEQ ID NO: 603959 - RNA, 19 nt, Artificial Sequence
  Description of Artificial Sequence: Synthetic oligonucleotide
cuacugaguuaugacaaau

SEQ ID NO: 603960 - RNA, 19 nt, Artificial Sequence
  Description of Artificial Sequence: Synthetic oligonucleotide
ccgaauggugaugcuuugg

SEQ ID NO: 603961 - RNA, 19 nt, Artificial Sequence
  Description of Artificial Sequence: Synthetic oligonucleotide
ggucgugcuacugaguuau

SEQ ID NO: 603962 - RNA, 19 nt, Artificial Sequence
  Description of Artificial Sequence: Synthetic oligonucleotide
gccauuuaaaaugccccaa

SEQ ID NO: 603963 - RNA, 19 nt, Artificial Sequence
  Description of Artificial Sequence: Synthetic oligonucleotide
gccgaauggugaugcuuug

SEQ ID NO: 603964 - RNA, 19 nt, Artificial Sequence
  Description of Artificial Sequence: Synthetic oligonucleotide
gugcuaccuguguguucag

SEQ ID NO: 603965 - RNA, 19 nt, Artificial Sequence
  Description of Artificial Sequence: Synthetic oligonucleotide
ccaaaacggcccuuauaga

SEQ ID NO: 603966 - RNA, 19 nt, Artificial Sequence
  Description of Artificial Sequence: Synthetic oligonucleotide
cucccucuaggagaggucu

SEQ ID NO: 603967 - RNA, 19 nt, Artificial Sequence
  Description of Artificial Sequence: Synthetic oligonucleotide
gggauggguaacccauuaa

SEQ ID NO: 603968 - RNA, 19 nt, Artificial Sequence
  Description of Artificial Sequence: Synthetic oligonucleotide
gcagaauagcagguaucca

SEQ ID NO: 603969 - RNA, 19 nt, Artificial Sequence
  Description of Artificial Sequence: Synthetic oligonucleotide
cggugguucuguuuuauaa

SEQ ID NO: 603970 - RNA, 19 nt, Artificial Sequence
  Description of Artificial Sequence: Synthetic oligonucleotide
acuaucccuauaggaccuu

SEQ ID NO: 603971 - RNA, 19 nt, Artificial Sequence
  Description of Artificial Sequence: Synthetic oligonucleotide
ccgcgcauccccaggacuc

SEQ ID NO: 603972 - RNA, 19 nt, Artificial Sequence
  Description of Artificial Sequence: Synthetic oligonucleotide
cgugucgaugaggacuucc

SEQ ID NO: 603973 - RNA, 19 nt, Artificial Sequence
  Description of Artificial Sequence: Synthetic oligonucleotide
cuaggggcaggucgugcua

SEQ ID NO: 603974 - RNA, 19 nt, Artificial Sequence
  Description of Artificial Sequence: Synthetic oligonucleotide
cccaaccaacucagcuuag

SEQ ID NO: 603975 - RNA, 19 nt, Artificial Sequence
  Description of Artificial Sequence: Synthetic oligonucleotide
gaggugguacugugagcau

SEQ ID NO: 603976 - RNA, 19 nt, Artificial Sequence
  Description of Artificial Sequence: Synthetic oligonucleotide
gugcaugacuacguacagu

SEQ ID NO: 603977 - RNA, 19 nt, Artificial Sequence
  Description of Artificial Sequence: Synthetic oligonucleotide
cggccaucagacaacuuca

SEQ ID NO: 603978 - RNA, 19 nt, Artificial Sequence
  Description of Artificial Sequence: Synthetic oligonucleotide
ggcuugccuuccccagaag

SEQ ID NO: 603979 - RNA, 19 nt, Artificial Sequence
  Description of Artificial Sequence: Synthetic oligonucleotide
gcaagcccucuaagaaaug

SEQ ID NO: 603980 - RNA, 19 nt, Artificial Sequence
  Description of Artificial Sequence: Synthetic oligonucleotide
gucgugcuacugaguuaug

SEQ ID NO: 603981 - RNA, 19 nt, Artificial Sequence
  Description of Artificial Sequence: Synthetic oligonucleotide
gcaacgccuuagcauuuaa

SEQ ID NO: 603982 - RNA, 19 nt, Artificial Sequence
  Description of Artificial Sequence: Synthetic oligonucleotide
caacucagcuuagccucaa

SEQ ID NO: 603983 - RNA, 19 nt, Artificial Sequence
  Description of Artificial Sequence: Synthetic oligonucleotide
gugcaugugguggcuugua

SEQ ID NO: 603984 - RNA, 19 nt, Artificial Sequence
  Description of Artificial Sequence: Synthetic oligonucleotide
ggugaugcuuugguacuau

SEQ ID NO: 603985 - RNA, 19 nt, Artificial Sequence
  Description of Artificial Sequence: Synthetic oligonucleotide
cccagacaguuguguaaca

SEQ ID NO: 603986 - RNA, 19 nt, Artificial Sequence
  Description of Artificial Sequence: Synthetic oligonucleotide
gccccggugguucuguuuu

SEQ ID NO: 603987 - RNA, 19 nt, Artificial Sequence
  Description of Artificial Sequence: Synthetic oligonucleotide
gcuuccgaguuuguuggau

SEQ ID NO: 603988 - RNA, 19 nt, Artificial Sequence
  Description of Artificial Sequence: Synthetic oligonucleotide
ggcaacgccuuagcauuua

SEQ ID NO: 603989 - RNA, 19 nt, Artificial Sequence
  Description of Artificial Sequence: Synthetic oligonucleotide
cacgcguucucugccgaau

SEQ ID NO: 603990 - RNA, 19 nt, Artificial Sequence
  Description of Artificial Sequence: Synthetic oligonucleotide
ccccaaaacggcccuuaua

SEQ ID NO: 603991 - RNA, 19 nt, Artificial Sequence
  Description of Artificial Sequence: Synthetic oligonucleotide
ccuauaggaccuugcccau

SEQ ID NO: 603992 - RNA, 19 nt, Artificial Sequence
  Description of Artificial Sequence: Synthetic oligonucleotide
ggccgucugugcauguggu

SEQ ID NO: 603993 - RNA, 19 nt, Artificial Sequence
  Description of Artificial Sequence: Synthetic oligonucleotide
ggcuuguacuagguagguu

SEQ ID NO: 603994 - RNA, 19 nt, Artificial Sequence
  Description of Artificial Sequence: Synthetic oligonucleotide
gcgugucgaugaggacuuc

SEQ ID NO: 603995 - RNA, 19 nt, Artificial Sequence
  Description of Artificial Sequence: Synthetic oligonucleotide
gcgaggcacuugagguggu

SEQ ID NO: 603996 - RNA, 19 nt, Artificial Sequence
  Description of Artificial Sequence: Synthetic oligonucleotide
cgaggcacuugagguggua

SEQ ID NO: 603997 - RNA, 19 nt, Artificial Sequence
  Description of Artificial Sequence: Synthetic oligonucleotide
auagcuaugcuucaguugc

SEQ ID NO: 603998 - RNA, 19 nt, Artificial Sequence
  Description of Artificial Sequence: Synthetic oligonucleotide
ucuucuaucgauuuuacag

SEQ ID NO: 603999 - RNA, 19 nt, Artificial Sequence
  Description of Artificial Sequence: Synthetic oligonucleotide
auagcuuaaauccuguacc

SEQ ID NO: 604000 - RNA, 19 nt, Artificial Sequence
  Description of Artificial Sequence: Synthetic oligonucleotide
aaucuaggaaguuagauca

SEQ ID NO: 604001 - RNA, 19 nt, Artificial Sequence
  Description of Artificial Sequence: Synthetic oligonucleotide
uuaacauguauuuuagagg

SEQ ID NO: 604002 - RNA, 19 nt, Artificial Sequence
  Description of Artificial Sequence: Synthetic oligonucleotide
aaucccauacuguuuauac

SEQ ID NO: 604003 - RNA, 19 nt, Artificial Sequence
  Description of Artificial Sequence: Synthetic oligonucleotide
aaauaaaagcagcucaguc

SEQ ID NO: 604004 - RNA, 19 nt, Artificial Sequence
  Description of Artificial Sequence: Synthetic oligonucleotide
uaugauaccuuaaaagugc

SEQ ID NO: 604005 - RNA, 19 nt, Artificial Sequence
  Description of Artificial Sequence: Synthetic oligonucleotide
uuugccuuagaaaauauga

SEQ ID NO: 604006 - RNA, 19 nt, Artificial Sequence
  Description of Artificial Sequence: Synthetic oligonucleotide
cuguuuauacugaagaugg

SEQ ID NO: 604007 - RNA, 19 nt, Artificial Sequence
  Description of Artificial Sequence: Synthetic oligonucleotide
uuaagugaaauucucauau

SEQ ID NO: 604008 - RNA, 19 nt, Artificial Sequence
  Description of Artificial Sequence: Synthetic oligonucleotide
uuuacuucaaaucccggag

SEQ ID NO: 604009 - RNA, 19 nt, Artificial Sequence
  Description of Artificial Sequence: Synthetic oligonucleotide
ucaaauugaagcauaucag

SEQ ID NO: 604010 - RNA, 19 nt, Artificial Sequence
  Description of Artificial Sequence: Synthetic oligonucleotide
aaucauauauuuauugcgg

SEQ ID NO: 604011 - RNA, 19 nt, Artificial Sequence
  Description of Artificial Sequence: Synthetic oligonucleotide
uaaauaaguuuucagggug

SEQ ID NO: 604012 - RNA, 19 nt, Artificial Sequence
  Description of Artificial Sequence: Synthetic oligonucleotide
ucuuuuacuucaaaucccg

SEQ ID NO: 604013 - RNA, 19 nt, Artificial Sequence
  Description of Artificial Sequence: Synthetic oligonucleotide
uuaugauaccuuaaaagug

SEQ ID NO: 604014 - RNA, 19 nt, Artificial Sequence
  Description of Artificial Sequence: Synthetic oligonucleotide
uuaacagaaaucuaccuac

SEQ ID NO: 604015 - RNA, 19 nt, Artificial Sequence
  Description of Artificial Sequence: Synthetic oligonucleotide
uuagaaaauaugauccugc

SEQ ID NO: 604016 - RNA, 19 nt, Artificial Sequence
  Description of Artificial Sequence: Synthetic oligonucleotide
acuaacuagaucaacaagg

SEQ ID NO: 604017 - RNA, 19 nt, Artificial Sequence
  Description of Artificial Sequence: Synthetic oligonucleotide
ucuaccuacauacugcaag

SEQ ID NO: 604018 - RNA, 19 nt, Artificial Sequence
  Description of Artificial Sequence: Synthetic oligonucleotide
cagaaaucuaccuacauac

SEQ ID NO: 604019 - RNA, 19 nt, Artificial Sequence
  Description of Artificial Sequence: Synthetic oligonucleotide
aagaaaauuaccacacugg

SEQ ID NO: 604020 - RNA, 19 nt, Artificial Sequence
  Description of Artificial Sequence: Synthetic oligonucleotide
auuacuugguuaugggugc

SEQ ID NO: 604021 - RNA, 19 nt, Artificial Sequence
  Description of Artificial Sequence: Synthetic oligonucleotide
aaagucucaaaacuuguga

SEQ ID NO: 604022 - RNA, 19 nt, Artificial Sequence
  Description of Artificial Sequence: Synthetic oligonucleotide
ugcauuugugaaauguugg

SEQ ID NO: 604023 - RNA, 19 nt, Artificial Sequence
  Description of Artificial Sequence: Synthetic oligonucleotide
uaccaugggaaacucaugg

SEQ ID NO: 604024 - RNA, 19 nt, Artificial Sequence
  Description of Artificial Sequence: Synthetic oligonucleotide
uguuugaugaauauucagu

SEQ ID NO: 604025 - RNA, 19 nt, Artificial Sequence
  Description of Artificial Sequence: Synthetic oligonucleotide
agacccauaaguuuaagug

SEQ ID NO: 604026 - RNA, 19 nt, Artificial Sequence
  Description of Artificial Sequence: Synthetic oligonucleotide
auuaccaacuaagaaaccg

SEQ ID NO: 604027 - RNA, 19 nt, Artificial Sequence
  Description of Artificial Sequence: Synthetic oligonucleotide
cuuauucugaucaaaucag

SEQ ID NO: 604028 - RNA, 19 nt, Artificial Sequence
  Description of Artificial Sequence: Synthetic oligonucleotide
aaaaccaccuauucucuag

SEQ ID NO: 604029 - RNA, 19 nt, Artificial Sequence
  Description of Artificial Sequence: Synthetic oligonucleotide
aauacuggagugcuuuauc

SEQ ID NO: 604030 - RNA, 19 nt, Artificial Sequence
  Description of Artificial Sequence: Synthetic oligonucleotide
aauccuacugccuaggcaa

SEQ ID NO: 604031 - RNA, 19 nt, Artificial Sequence
  Description of Artificial Sequence: Synthetic oligonucleotide
aacgucucugugucgaagc

SEQ ID NO: 604032 - RNA, 19 nt, Artificial Sequence
  Description of Artificial Sequence: Synthetic oligonucleotide
aacaacacagaccagguuu

SEQ ID NO: 604033 - RNA, 19 nt, Artificial Sequence
  Description of Artificial Sequence: Synthetic oligonucleotide
cauaucagccuuuaggaag

SEQ ID NO: 604034 - RNA, 19 nt, Artificial Sequence
  Description of Artificial Sequence: Synthetic oligonucleotide
aauagcuaugcuucaguug

SEQ ID NO: 604035 - RNA, 19 nt, Artificial Sequence
  Description of Artificial Sequence: Synthetic oligonucleotide
ugaauucaaaucuaagccu

SEQ ID NO: 604036 - RNA, 19 nt, Artificial Sequence
  Description of Artificial Sequence: Synthetic oligonucleotide
uuuauacugaagaugguau

SEQ ID NO: 604037 - RNA, 19 nt, Artificial Sequence
  Description of Artificial Sequence: Synthetic oligonucleotide
ucaauuaguuucaagccac

SEQ ID NO: 604038 - RNA, 19 nt, Artificial Sequence
  Description of Artificial Sequence: Synthetic oligonucleotide
aucauauauuuauugcggg

SEQ ID NO: 604039 - RNA, 19 nt, Artificial Sequence
  Description of Artificial Sequence: Synthetic oligonucleotide
uuuuagacaagaaucuguc

SEQ ID NO: 604040 - RNA, 19 nt, Artificial Sequence
  Description of Artificial Sequence: Synthetic oligonucleotide
ugcuauuuaucuuggaaug

SEQ ID NO: 604041 - RNA, 19 nt, Artificial Sequence
  Description of Artificial Sequence: Synthetic oligonucleotide
ucccauacuguuuauacug

SEQ ID NO: 604042 - RNA, 19 nt, Artificial Sequence
  Description of Artificial Sequence: Synthetic oligonucleotide
aauuaagaucauuucuccu

SEQ ID NO: 604043 - RNA, 19 nt, Artificial Sequence
  Description of Artificial Sequence: Synthetic oligonucleotide
auacuuuagugcuuggauc

SEQ ID NO: 604044 - RNA, 19 nt, Artificial Sequence
  Description of Artificial Sequence: Synthetic oligonucleotide
aaccuauacuggcuuauuc

SEQ ID NO: 604045 - RNA, 19 nt, Artificial Sequence
  Description of Artificial Sequence: Synthetic oligonucleotide
ugaguuauucuguaauagc

SEQ ID NO: 604046 - RNA, 19 nt, Artificial Sequence
  Description of Artificial Sequence: Synthetic oligonucleotide
cuucuaucgauuuuacagc

SEQ ID NO: 604047 - RNA, 19 nt, Artificial Sequence
  Description of Artificial Sequence: Synthetic oligonucleotide
auugacaaugccaacacag

SEQ ID NO: 604048 - RNA, 19 nt, Artificial Sequence
  Description of Artificial Sequence: Synthetic oligonucleotide
aacugaguuagacugagua

SEQ ID NO: 604049 - RNA, 19 nt, Artificial Sequence
  Description of Artificial Sequence: Synthetic oligonucleotide
aaucaguugccagugggac

SEQ ID NO: 604050 - RNA, 19 nt, Artificial Sequence
  Description of Artificial Sequence: Synthetic oligonucleotide
agcauaucagccuuuagga

SEQ ID NO: 604051 - RNA, 19 nt, Artificial Sequence
  Description of Artificial Sequence: Synthetic oligonucleotide
uccuaagcuaauaauuuga

SEQ ID NO: 604052 - RNA, 19 nt, Artificial Sequence
  Description of Artificial Sequence: Synthetic oligonucleotide
aaagguguauuccuuaguu

SEQ ID NO: 604053 - RNA, 19 nt, Artificial Sequence
  Description of Artificial Sequence: Synthetic oligonucleotide
gaagaugguauuucaauuc

SEQ ID NO: 604054 - RNA, 19 nt, Artificial Sequence
  Description of Artificial Sequence: Synthetic oligonucleotide
aacuacuccuuaugauacc

SEQ ID NO: 604055 - RNA, 19 nt, Artificial Sequence
  Description of Artificial Sequence: Synthetic oligonucleotide
uacuuuagugcuuggaucu

SEQ ID NO: 604056 - RNA, 19 nt, Artificial Sequence
  Description of Artificial Sequence: Synthetic oligonucleotide
aguugguuagcuuacuucu

SEQ ID NO: 604057 - RNA, 19 nt, Artificial Sequence
  Description of Artificial Sequence: Synthetic oligonucleotide
cauaaugguaguugguuag

SEQ ID NO: 604058 - RNA, 19 nt, Artificial Sequence
  Description of Artificial Sequence: Synthetic oligonucleotide
uuggauacaagcucuugcc

SEQ ID NO: 604059 - RNA, 19 nt, Artificial Sequence
  Description of Artificial Sequence: Synthetic oligonucleotide
uauugaaagguguauuccu

SEQ ID NO: 604060 - RNA, 19 nt, Artificial Sequence
  Description of Artificial Sequence: Synthetic oligonucleotide
ucaaaucuaagccuagcuc

SEQ ID NO: 604061 - RNA, 19 nt, Artificial Sequence
  Description of Artificial Sequence: Synthetic oligonucleotide
auauauuuauugcgggguc

SEQ ID NO: 604062 - RNA, 19 nt, Artificial Sequence
  Description of Artificial Sequence: Synthetic oligonucleotide
aguuuaccauuuucaauac

SEQ ID NO: 604063 - RNA, 19 nt, Artificial Sequence
  Description of Artificial Sequence: Synthetic oligonucleotide
ucugcuauuuaucuuggaa

SEQ ID NO: 604064 - RNA, 19 nt, Artificial Sequence
  Description of Artificial Sequence: Synthetic oligonucleotide
aauucucauauaccaauaa

SEQ ID NO: 604065 - RNA, 19 nt, Artificial Sequence
  Description of Artificial Sequence: Synthetic oligonucleotide
uuacaaagguuaacgauaa

SEQ ID NO: 604066 - RNA, 19 nt, Artificial Sequence
  Description of Artificial Sequence: Synthetic oligonucleotide
auuaagaucauuucuccuu

SEQ ID NO: 604067 - RNA, 19 nt, Artificial Sequence
  Description of Artificial Sequence: Synthetic oligonucleotide
uguaccaugggaaacucau

SEQ ID NO: 604068 - RNA, 19 nt, Artificial Sequence
  Description of Artificial Sequence: Synthetic oligonucleotide
uuuaucaagccugaguuaa

SEQ ID NO: 604069 - RNA, 19 nt, Artificial Sequence
  Description of Artificial Sequence: Synthetic oligonucleotide
accauuuacugcuuaaacu

SEQ ID NO: 604070 - RNA, 19 nt, Artificial Sequence
  Description of Artificial Sequence: Synthetic oligonucleotide
ugagugaguaauacaguug

SEQ ID NO: 604071 - RNA, 19 nt, Artificial Sequence
  Description of Artificial Sequence: Synthetic oligonucleotide
aagcuaauaauuugacuaa

SEQ ID NO: 604072 - RNA, 19 nt, Artificial Sequence
  Description of Artificial Sequence: Synthetic oligonucleotide
aauaccaccuaacuuccaa

SEQ ID NO: 604073 - RNA, 19 nt, Artificial Sequence
  Description of Artificial Sequence: Synthetic oligonucleotide
uuaccaacuaagaaaccgu

SEQ ID NO: 604074 - RNA, 19 nt, Artificial Sequence
  Description of Artificial Sequence: Synthetic oligonucleotide
uccuuaguuuaaaacauaa

SEQ ID NO: 604075 - RNA, 19 nt, Artificial Sequence
  Description of Artificial Sequence: Synthetic oligonucleotide
uuugccuguaccuucauuu

SEQ ID NO: 604076 - RNA, 19 nt, Artificial Sequence
  Description of Artificial Sequence: Synthetic oligonucleotide
uguuucaugggugaauuca

SEQ ID NO: 604077 - RNA, 19 nt, Artificial Sequence
  Description of Artificial Sequence: Synthetic oligonucleotide
agcaauuacuugguuaugg

SEQ ID NO: 604078 - RNA, 19 nt, Artificial Sequence
  Description of Artificial Sequence: Synthetic oligonucleotide
cuuggauacaagcucuugc

SEQ ID NO: 604079 - RNA, 19 nt, Artificial Sequence
  Description of Artificial Sequence: Synthetic oligonucleotide
uguuuucucaaaugggacu

SEQ ID NO: 604080 - RNA, 19 nt, Artificial Sequence
  Description of Artificial Sequence: Synthetic oligonucleotide
uucuauuccuuccauuaac

SEQ ID NO: 604081 - RNA, 19 nt, Artificial Sequence
  Description of Artificial Sequence: Synthetic oligonucleotide
uuuagacaagaaucugucc

SEQ ID NO: 604082 - RNA, 19 nt, Artificial Sequence
  Description of Artificial Sequence: Synthetic oligonucleotide
aaaucccggagucuugcag

SEQ ID NO: 604083 - RNA, 19 nt, Artificial Sequence
  Description of Artificial Sequence: Synthetic oligonucleotide
ugaaauucucauauaccaa

SEQ ID NO: 604084 - RNA, 19 nt, Artificial Sequence
  Description of Artificial Sequence: Synthetic oligonucleotide
ugaaugagugaguaauaca

SEQ ID NO: 604085 - RNA, 19 nt, Artificial Sequence
  Description of Artificial Sequence: Synthetic oligonucleotide
aagacccauaaguuuaagu

SEQ ID NO: 604086 - RNA, 19 nt, Artificial Sequence
  Description of Artificial Sequence: Synthetic oligonucleotide
aauuaguuucaagccacag

SEQ ID NO: 604087 - RNA, 19 nt, Artificial Sequence
  Description of Artificial Sequence: Synthetic oligonucleotide
agaaggucaaaucucugcu

SEQ ID NO: 604088 - RNA, 19 nt, Artificial Sequence
  Description of Artificial Sequence: Synthetic oligonucleotide
uauugcggggucauuaacu

SEQ ID NO: 604089 - RNA, 19 nt, Artificial Sequence
  Description of Artificial Sequence: Synthetic oligonucleotide
caaucuaggaaguuagauc

SEQ ID NO: 604090 - RNA, 19 nt, Artificial Sequence
  Description of Artificial Sequence: Synthetic oligonucleotide
cagauuaccaacuaagaaa

SEQ ID NO: 604091 - RNA, 19 nt, Artificial Sequence
  Description of Artificial Sequence: Synthetic oligonucleotide
agccaaagaacugaguuag

SEQ ID NO: 604092 - RNA, 19 nt, Artificial Sequence
  Description of Artificial Sequence: Synthetic oligonucleotide
cuagucuuucaaaauuaag

SEQ ID NO: 604093 - RNA, 19 nt, Artificial Sequence
  Description of Artificial Sequence: Synthetic oligonucleotide
uuauucugaucaaaucagu

SEQ ID NO: 604094 - RNA, 19 nt, Artificial Sequence
  Description of Artificial Sequence: Synthetic oligonucleotide
gaugaauauucaguuaaac

SEQ ID NO: 604095 - RNA, 19 nt, Artificial Sequence
  Description of Artificial Sequence: Synthetic oligonucleotide
aguaguuuaccauuuucaa

SEQ ID NO: 604096 - RNA, 19 nt, Artificial Sequence
  Description of Artificial Sequence: Synthetic oligonucleotide
ggaaguuagaucaauguug

SEQ ID NO: 604097 - RNA, 19 nt, Artificial Sequence
  Description of Artificial Sequence: Synthetic oligonucleotide
ugauguuuaaggugcacaa

SEQ ID NO: 604098 - RNA, 19 nt, Artificial Sequence
  Description of Artificial Sequence: Synthetic oligonucleotide
uuccuaagcuaauaauuug

SEQ ID NO: 604099 - RNA, 19 nt, Artificial Sequence
  Description of Artificial Sequence: Synthetic oligonucleotide
uuaacuccacauacuuuag

SEQ ID NO: 604100 - RNA, 19 nt, Artificial Sequence
  Description of Artificial Sequence: Synthetic oligonucleotide
ucugaucaaaucaguugcc

SEQ ID NO: 604101 - RNA, 19 nt, Artificial Sequence
  Description of Artificial Sequence: Synthetic oligonucleotide
gaaauugaaaggcaguagu

SEQ ID NO: 604102 - RNA, 19 nt, Artificial Sequence
  Description of Artificial Sequence: Synthetic oligonucleotide
uugguuagcuuacuucuca

SEQ ID NO: 604103 - RNA, 19 nt, Artificial Sequence
  Description of Artificial Sequence: Synthetic oligonucleotide
uaaguugggcuucuagucu

SEQ ID NO: 604104 - RNA, 19 nt, Artificial Sequence
  Description of Artificial Sequence: Synthetic oligonucleotide
uuagagguuugcuaaguuc

SEQ ID NO: 604105 - RNA, 19 nt, Artificial Sequence
  Description of Artificial Sequence: Synthetic oligonucleotide
uuagcuuacuucucaaaau

SEQ ID NO: 604106 - RNA, 19 nt, Artificial Sequence
  Description of Artificial Sequence: Synthetic oligonucleotide
guaacaaccagauuaccaa

SEQ ID NO: 604107 - RNA, 19 nt, Artificial Sequence
  Description of Artificial Sequence: Synthetic oligonucleotide
cuaccuacauacugcaagc

SEQ ID NO: 604108 - RNA, 19 nt, Artificial Sequence
  Description of Artificial Sequence: Synthetic oligonucleotide
uuaugggugccaagaaacc

SEQ ID NO: 604109 - RNA, 19 nt, Artificial Sequence
  Description of Artificial Sequence: Synthetic oligonucleotide
acaaagguuaacgauaaaa

SEQ ID NO: 604110 - RNA, 19 nt, Artificial Sequence
  Description of Artificial Sequence: Synthetic oligonucleotide
gaaguuagaucaauguuga

SEQ ID NO: 604111 - RNA, 19 nt, Artificial Sequence
  Description of Artificial Sequence: Synthetic oligonucleotide
ucucugcuauuuaucuugg

SEQ ID NO: 604112 - RNA, 19 nt, Artificial Sequence
  Description of Artificial Sequence: Synthetic oligonucleotide
aguuagaucaauguugaaa

SEQ ID NO: 604113 - RNA, 19 nt, Artificial Sequence
  Description of Artificial Sequence: Synthetic oligonucleotide
aacauaaugguaguugguu

SEQ ID NO: 604114 - RNA, 19 nt, Artificial Sequence
  Description of Artificial Sequence: Synthetic oligonucleotide
guuaugggugccaagaaac

SEQ ID NO: 604115 - RNA, 19 nt, Artificial Sequence
  Description of Artificial Sequence: Synthetic oligonucleotide
cuaacuuccaaucuaggaa

SEQ ID NO: 604116 - RNA, 19 nt, Artificial Sequence
  Description of Artificial Sequence: Synthetic oligonucleotide
aaucccggagucuugcagu

SEQ ID NO: 604117 - RNA, 19 nt, Artificial Sequence
  Description of Artificial Sequence: Synthetic oligonucleotide
ugcggggucauuaacuacu

SEQ ID NO: 604118 - RNA, 19 nt, Artificial Sequence
  Description of Artificial Sequence: Synthetic oligonucleotide
uguaauagcuaugcuucag

SEQ ID NO: 604119 - RNA, 19 nt, Artificial Sequence
  Description of Artificial Sequence: Synthetic oligonucleotide
ugcuaaguucuuucucugg

SEQ ID NO: 604120 - RNA, 19 nt, Artificial Sequence
  Description of Artificial Sequence: Synthetic oligonucleotide
accuauacuggcuuauucu

SEQ ID NO: 604121 - RNA, 19 nt, Artificial Sequence
  Description of Artificial Sequence: Synthetic oligonucleotide
uguaaaccucauaauuuaa

SEQ ID NO: 604122 - RNA, 19 nt, Artificial Sequence
  Description of Artificial Sequence: Synthetic oligonucleotide
gugaguaauacaguugcag

SEQ ID NO: 604123 - RNA, 19 nt, Artificial Sequence
  Description of Artificial Sequence: Synthetic oligonucleotide
cuuaaacuacuccuuauga

SEQ ID NO: 604124 - RNA, 19 nt, Artificial Sequence
  Description of Artificial Sequence: Synthetic oligonucleotide
auuuuagacaagaaucugu

SEQ ID NO: 604125 - RNA, 19 nt, Artificial Sequence
  Description of Artificial Sequence: Synthetic oligonucleotide
aaauaaguuuucaggguga

SEQ ID NO: 604126 - RNA, 19 nt, Artificial Sequence
  Description of Artificial Sequence: Synthetic oligonucleotide
ucaguugccgagcggugcg

SEQ ID NO: 604127 - RNA, 19 nt, Artificial Sequence
  Description of Artificial Sequence: Synthetic oligonucleotide
aauguuucaugggugaauu

SEQ ID NO: 604128 - RNA, 19 nt, Artificial Sequence
  Description of Artificial Sequence: Synthetic oligonucleotide
cauuuacugcuuaaacuac

SEQ ID NO: 604129 - RNA, 19 nt, Artificial Sequence
  Description of Artificial Sequence: Synthetic oligonucleotide
aauucaaaucuaagccuag

SEQ ID NO: 604130 - RNA, 19 nt, Artificial Sequence
  Description of Artificial Sequence: Synthetic oligonucleotide
gcuauugcaauccuacugc

SEQ ID NO: 604131 - RNA, 19 nt, Artificial Sequence
  Description of Artificial Sequence: Synthetic oligonucleotide
auacuggagugcuuuauca

SEQ ID NO: 604132 - RNA, 19 nt, Artificial Sequence
  Description of Artificial Sequence: Synthetic oligonucleotide
cuggagugcuuuaucaagc

SEQ ID NO: 604133 - RNA, 19 nt, Artificial Sequence
  Description of Artificial Sequence: Synthetic oligonucleotide
auugcaauccuacugccua

SEQ ID NO: 604134 - RNA, 19 nt, Artificial Sequence
  Description of Artificial Sequence: Synthetic oligonucleotide
ucaagccugaguuaaguuu

SEQ ID NO: 604135 - RNA, 19 nt, Artificial Sequence
  Description of Artificial Sequence: Synthetic oligonucleotide
aauuguugggaggugaguu

SEQ ID NO: 604136 - RNA, 19 nt, Artificial Sequence
  Description of Artificial Sequence: Synthetic oligonucleotide
uauauuuauugcgggguca

SEQ ID NO: 604137 - RNA, 19 nt, Artificial Sequence
  Description of Artificial Sequence: Synthetic oligonucleotide
cuaggaaguuagaucaaug

SEQ ID NO: 604138 - RNA, 19 nt, Artificial Sequence
  Description of Artificial Sequence: Synthetic oligonucleotide
uaacagaaaucuaccuaca

SEQ ID NO: 604139 - RNA, 19 nt, Artificial Sequence
  Description of Artificial Sequence: Synthetic oligonucleotide
auguuuucucaaaugggac

SEQ ID NO: 604140 - RNA, 19 nt, Artificial Sequence
  Description of Artificial Sequence: Synthetic oligonucleotide
cuaugcuucaguugccgag

SEQ ID NO: 604141 - RNA, 19 nt, Artificial Sequence
  Description of Artificial Sequence: Synthetic oligonucleotide
uauacuggcuuauucugau

SEQ ID NO: 604142 - RNA, 19 nt, Artificial Sequence
  Description of Artificial Sequence: Synthetic oligonucleotide
aguaacaaccagauuacca

SEQ ID NO: 604143 - RNA, 19 nt, Artificial Sequence
  Description of Artificial Sequence: Synthetic oligonucleotide
aaaccaccuauucucuaga

SEQ ID NO: 604144 - RNA, 19 nt, Artificial Sequence
  Description of Artificial Sequence: Synthetic oligonucleotide
ugggacuagagugaagcag

SEQ ID NO: 604145 - RNA, 19 nt, Artificial Sequence
  Description of Artificial Sequence: Synthetic oligonucleotide
cauccugaggccauuauca

SEQ ID NO: 604146 - RNA, 19 nt, Artificial Sequence
  Description of Artificial Sequence: Synthetic oligonucleotide
auugaagcauaucagccuu

SEQ ID NO: 604147 - RNA, 19 nt, Artificial Sequence
  Description of Artificial Sequence: Synthetic oligonucleotide
uauucacuaacuagaucaa

SEQ ID NO: 604148 - RNA, 19 nt, Artificial Sequence
  Description of Artificial Sequence: Synthetic oligonucleotide
agauugcugucuguugucc

SEQ ID NO: 604149 - RNA, 19 nt, Artificial Sequence
  Description of Artificial Sequence: Synthetic oligonucleotide
uguauuccuuaguuuaaaa

SEQ ID NO: 604150 - RNA, 19 nt, Artificial Sequence
  Description of Artificial Sequence: Synthetic oligonucleotide
uuaucaagccugaguuaag

SEQ ID NO: 604151 - RNA, 19 nt, Artificial Sequence
  Description of Artificial Sequence: Synthetic oligonucleotide
uuugacuuuccaacacacu

SEQ ID NO: 604152 - RNA, 19 nt, Artificial Sequence
  Description of Artificial Sequence: Synthetic oligonucleotide
ccuacauacugcaagcugc

SEQ ID NO: 604153 - RNA, 19 nt, Artificial Sequence
  Description of Artificial Sequence: Synthetic oligonucleotide
uaguugguuagcuuacuuc

SEQ ID NO: 604154 - RNA, 19 nt, Artificial Sequence
  Description of Artificial Sequence: Synthetic oligonucleotide
ugaugaauauucaguuaaa

SEQ ID NO: 604155 - RNA, 19 nt, Artificial Sequence
  Description of Artificial Sequence: Synthetic oligonucleotide
caaaucuaagccuagcucu

SEQ ID NO: 604156 - RNA, 19 nt, Artificial Sequence
  Description of Artificial Sequence: Synthetic oligonucleotide
ucuaucgauuuuacagcca

SEQ ID NO: 604157 - RNA, 19 nt, Artificial Sequence
  Description of Artificial Sequence: Synthetic oligonucleotide
aaugguaguugguuagcuu

SEQ ID NO: 604158 - RNA, 19 nt, Artificial Sequence
  Description of Artificial Sequence: Synthetic oligonucleotide
uuuauugcggggucauuaa

SEQ ID NO: 604159 - RNA, 19 nt, Artificial Sequence
  Description of Artificial Sequence: Synthetic oligonucleotide
cuuugccuuagaaaauaug

SEQ ID NO: 604160 - RNA, 19 nt, Artificial Sequence
  Description of Artificial Sequence: Synthetic oligonucleotide
auucacuaacuagaucaac

SEQ ID NO: 604161 - RNA, 19 nt, Artificial Sequence
  Description of Artificial Sequence: Synthetic oligonucleotide
caccuaacuuccaaucuag

SEQ ID NO: 604162 - RNA, 19 nt, Artificial Sequence
  Description of Artificial Sequence: Synthetic oligonucleotide
ugccuaggcaaacaacaca

SEQ ID NO: 604163 - RNA, 19 nt, Artificial Sequence
  Description of Artificial Sequence: Synthetic oligonucleotide
ugguuuggaacacuuguuu

SEQ ID NO: 604164 - RNA, 19 nt, Artificial Sequence
  Description of Artificial Sequence: Synthetic oligonucleotide
acagcuagggaaaacgucu

SEQ ID NO: 604165 - RNA, 19 nt, Artificial Sequence
  Description of Artificial Sequence: Synthetic oligonucleotide
cacuaacuagaucaacaag

SEQ ID NO: 604166 - RNA, 19 nt, Artificial Sequence
  Description of Artificial Sequence: Synthetic oligonucleotide
accaccuauucucuagaag

SEQ ID NO: 604167 - RNA, 19 nt, Artificial Sequence
  Description of Artificial Sequence: Synthetic oligonucleotide
gaaaacgucucugugucga

SEQ ID NO: 604168 - RNA, 19 nt, Artificial Sequence
  Description of Artificial Sequence: Synthetic oligonucleotide
guguuaacauguauuuuag

SEQ ID NO: 604169 - RNA, 19 nt, Artificial Sequence
  Description of Artificial Sequence: Synthetic oligonucleotide
accuacauacugcaagcug

SEQ ID NO: 604170 - RNA, 19 nt, Artificial Sequence
  Description of Artificial Sequence: Synthetic oligonucleotide
aagguguauuccuuaguuu

SEQ ID NO: 604171 - RNA, 19 nt, Artificial Sequence
  Description of Artificial Sequence: Synthetic oligonucleotide
uaccuuaaaagugcauuug

SEQ ID NO: 604172 - RNA, 19 nt, Artificial Sequence
  Description of Artificial Sequence: Synthetic oligonucleotide
acgucucugugucgaagcc

SEQ ID NO: 604173 - RNA, 19 nt, Artificial Sequence
  Description of Artificial Sequence: Synthetic oligonucleotide
aggugaguuauucuguaau

SEQ ID NO: 604174 - RNA, 19 nt, Artificial Sequence
  Description of Artificial Sequence: Synthetic oligonucleotide
caacacagaaggcuuugcc

SEQ ID NO: 604175 - RNA, 19 nt, Artificial Sequence
  Description of Artificial Sequence: Synthetic oligonucleotide
gcaauuacuugguuauggg

SEQ ID NO: 604176 - RNA, 19 nt, Artificial Sequence
  Description of Artificial Sequence: Synthetic oligonucleotide
uuuagagguuugcuaaguu

SEQ ID NO: 604177 - RNA, 19 nt, Artificial Sequence
  Description of Artificial Sequence: Synthetic oligonucleotide
ugggugaauucaaaucuaa

SEQ ID NO: 604178 - RNA, 19 nt, Artificial Sequence
  Description of Artificial Sequence: Synthetic oligonucleotide
uaauagcuaugcuucaguu

SEQ ID NO: 604179 - RNA, 19 nt, Artificial Sequence
  Description of Artificial Sequence: Synthetic oligonucleotide
agcuaauaauuugacuaag

SEQ ID NO: 604180 - RNA, 19 nt, Artificial Sequence
  Description of Artificial Sequence: Synthetic oligonucleotide
ucucaucaagucugaaacu

SEQ ID NO: 604181 - RNA, 19 nt, Artificial Sequence
  Description of Artificial Sequence: Synthetic oligonucleotide
ugaggccauuaucaugugc

SEQ ID NO: 604182 - RNA, 19 nt, Artificial Sequence
  Description of Artificial Sequence: Synthetic oligonucleotide
gaucaaaucaguugccagu

SEQ ID NO: 604183 - RNA, 19 nt, Artificial Sequence
  Description of Artificial Sequence: Synthetic oligonucleotide
cugaguuagacugaguaga

SEQ ID NO: 604184 - RNA, 19 nt, Artificial Sequence
  Description of Artificial Sequence: Synthetic oligonucleotide
uggcuuauucugaucaaau

SEQ ID NO: 604185 - RNA, 19 nt, Artificial Sequence
  Description of Artificial Sequence: Synthetic oligonucleotide
aauuagcaauuacuugguu

SEQ ID NO: 604186 - RNA, 19 nt, Artificial Sequence
  Description of Artificial Sequence: Synthetic oligonucleotide
aaacauaaugguaguuggu

SEQ ID NO: 604187 - RNA, 19 nt, Artificial Sequence
  Description of Artificial Sequence: Synthetic oligonucleotide
gccauuaucaugugcagac

SEQ ID NO: 604188 - RNA, 19 nt, Artificial Sequence
  Description of Artificial Sequence: Synthetic oligonucleotide
cauuuuagacaagaaucug

SEQ ID NO: 604189 - RNA, 19 nt, Artificial Sequence
  Description of Artificial Sequence: Synthetic oligonucleotide
ucauccugaggccauuauc

SEQ ID NO: 604190 - RNA, 19 nt, Artificial Sequence
  Description of Artificial Sequence: Synthetic oligonucleotide
ucgauuuuacagccaaaua

SEQ ID NO: 604191 - RNA, 19 nt, Artificial Sequence
  Description of Artificial Sequence: Synthetic oligonucleotide
agacucaauuaguuucaag

SEQ ID NO: 604192 - RNA, 19 nt, Artificial Sequence
  Description of Artificial Sequence: Synthetic oligonucleotide
acauaaugguaguugguua

SEQ ID NO: 604193 - RNA, 19 nt, Artificial Sequence
  Description of Artificial Sequence: Synthetic oligonucleotide
gaguuauucuguaauagcu

SEQ ID NO: 604194 - RNA, 19 nt, Artificial Sequence
  Description of Artificial Sequence: Synthetic oligonucleotide
uuaaguaguuuaccauuuu

SEQ ID NO: 604195 - RNA, 19 nt, Artificial Sequence
  Description of Artificial Sequence: Synthetic oligonucleotide
cuccaaagcaaugauugac

SEQ ID NO: 604196 - RNA, 19 nt, Artificial Sequence
  Description of Artificial Sequence: Synthetic oligonucleotide
gaaaccguuucaggaauug

SEQ ID NO: 604197 - RNA, 19 nt, Artificial Sequence
  Description of Artificial Sequence: Synthetic oligonucleotide
aagcugcuaaaggugaacu

SEQ ID NO: 604198 - RNA, 19 nt, Artificial Sequence
  Description of Artificial Sequence: Synthetic oligonucleotide
agccuagcucuaccaagcc

SEQ ID NO: 604199 - RNA, 19 nt, Artificial Sequence
  Description of Artificial Sequence: Synthetic oligonucleotide
uaucaagccugaguuaagu

SEQ ID NO: 604200 - RNA, 19 nt, Artificial Sequence
  Description of Artificial Sequence: Synthetic oligonucleotide
uugccagugggacauuccu

SEQ ID NO: 604201 - RNA, 19 nt, Artificial Sequence
  Description of Artificial Sequence: Synthetic oligonucleotide
accaccuaacuuccaaucu

SEQ ID NO: 604202 - RNA, 19 nt, Artificial Sequence
  Description of Artificial Sequence: Synthetic oligonucleotide
uacuccuuaugauaccuua

SEQ ID NO: 604203 - RNA, 19 nt, Artificial Sequence
  Description of Artificial Sequence: Synthetic oligonucleotide
gaagcauaucagccuuuag

SEQ ID NO: 604204 - RNA, 19 nt, Artificial Sequence
  Description of Artificial Sequence: Synthetic oligonucleotide
uuauugcggggucauuaac

SEQ ID NO: 604205 - RNA, 19 nt, Artificial Sequence
  Description of Artificial Sequence: Synthetic oligonucleotide
aaguugggcuucuagucuu

SEQ ID NO: 604206 - RNA, 19 nt, Artificial Sequence
  Description of Artificial Sequence: Synthetic oligonucleotide
aaauacuggagugcuuuau

SEQ ID NO: 604207 - RNA, 19 nt, Artificial Sequence
  Description of Artificial Sequence: Synthetic oligonucleotide
agugggacauuccuuuccu

SEQ ID NO: 604208 - RNA, 19 nt, Artificial Sequence
  Description of Artificial Sequence: Synthetic oligonucleotide
aucgauuuuacagccaaau

SEQ ID NO: 604209 - RNA, 19 nt, Artificial Sequence
  Description of Artificial Sequence: Synthetic oligonucleotide
ugcguccagacacaaucca

SEQ ID NO: 604210 - RNA, 19 nt, Artificial Sequence
  Description of Artificial Sequence: Synthetic oligonucleotide
augauguuuaaggugcaca

SEQ ID NO: 604211 - RNA, 19 nt, Artificial Sequence
  Description of Artificial Sequence: Synthetic oligonucleotide
gcuuccaauauucacuaac

SEQ ID NO: 604212 - RNA, 19 nt, Artificial Sequence
  Description of Artificial Sequence: Synthetic oligonucleotide
ggugcguccagacacaauc

SEQ ID NO: 604213 - RNA, 19 nt, Artificial Sequence
  Description of Artificial Sequence: Synthetic oligonucleotide
aauuuucuguacacagaga

SEQ ID NO: 604214 - RNA, 19 nt, Artificial Sequence
  Description of Artificial Sequence: Synthetic oligonucleotide
auguuucaugggugaauuc

SEQ ID NO: 604215 - RNA, 19 nt, Artificial Sequence
  Description of Artificial Sequence: Synthetic oligonucleotide
aaauucucauauaccaaua

SEQ ID NO: 604216 - RNA, 19 nt, Artificial Sequence
  Description of Artificial Sequence: Synthetic oligonucleotide
uaccaccuaacuuccaauc

SEQ ID NO: 604217 - RNA, 19 nt, Artificial Sequence
  Description of Artificial Sequence: Synthetic oligonucleotide
cacagagaguaacaaccag

SEQ ID NO: 604218 - RNA, 19 nt, Artificial Sequence
  Description of Artificial Sequence: Synthetic oligonucleotide
uaaugguaguugguuagcu

SEQ ID NO: 604219 - RNA, 19 nt, Artificial Sequence
  Description of Artificial Sequence: Synthetic oligonucleotide
uugcaauccuacugccuag

SEQ ID NO: 604220 - RNA, 19 nt, Artificial Sequence
  Description of Artificial Sequence: Synthetic oligonucleotide
ccaacuaagaaaccguuuc

SEQ ID NO: 604221 - RNA, 19 nt, Artificial Sequence
  Description of Artificial Sequence: Synthetic oligonucleotide
agcugcuaaaggugaacug

SEQ ID NO: 604222 - RNA, 19 nt, Artificial Sequence
  Description of Artificial Sequence: Synthetic oligonucleotide
uuccuuaguuuaaaacaua

SEQ ID NO: 604223 - RNA, 19 nt, Artificial Sequence
  Description of Artificial Sequence: Synthetic oligonucleotide
auuaaguaguuuaccauuu

SEQ ID NO: 604224 - RNA, 19 nt, Artificial Sequence
  Description of Artificial Sequence: Synthetic oligonucleotide
auuuauugcggggucauua

SEQ ID NO: 604225 - RNA, 19 nt, Artificial Sequence
  Description of Artificial Sequence: Synthetic oligonucleotide
aucccauacuguuuauacu

SEQ ID NO: 604226 - RNA, 19 nt, Artificial Sequence
  Description of Artificial Sequence: Synthetic oligonucleotide
uuaucaugugcagacucaa

SEQ ID NO: 604227 - RNA, 19 nt, Artificial Sequence
  Description of Artificial Sequence: Synthetic oligonucleotide
cuaacuagaucaacaaggu

SEQ ID NO: 604228 - RNA, 19 nt, Artificial Sequence
  Description of Artificial Sequence: Synthetic oligonucleotide
ucuaggaaguuagaucaau

SEQ ID NO: 604229 - RNA, 19 nt, Artificial Sequence
  Description of Artificial Sequence: Synthetic oligonucleotide
auuaucaugugcagacuca

SEQ ID NO: 604230 - RNA, 19 nt, Artificial Sequence
  Description of Artificial Sequence: Synthetic oligonucleotide
uugguuuggaacacuuguu

SEQ ID NO: 604231 - RNA, 19 nt, Artificial Sequence
  Description of Artificial Sequence: Synthetic oligonucleotide
aaguuuucagggugauaau

SEQ ID NO: 604232 - RNA, 19 nt, Artificial Sequence
  Description of Artificial Sequence: Synthetic oligonucleotide
auugcggggucauuaacua

SEQ ID NO: 604233 - RNA, 19 nt, Artificial Sequence
  Description of Artificial Sequence: Synthetic oligonucleotide
gauuaccaacuaagaaacc

SEQ ID NO: 604234 - RNA, 19 nt, Artificial Sequence
  Description of Artificial Sequence: Synthetic oligonucleotide
guuuauacugaagauggua

SEQ ID NO: 604235 - RNA, 19 nt, Artificial Sequence
  Description of Artificial Sequence: Synthetic oligonucleotide
agcuaugcuucaguugccg

SEQ ID NO: 604236 - RNA, 19 nt, Artificial Sequence
  Description of Artificial Sequence: Synthetic oligonucleotide
uacugccuaggcaaacaac

SEQ ID NO: 604237 - RNA, 19 nt, Artificial Sequence
  Description of Artificial Sequence: Synthetic oligonucleotide
uaaaccuauacuggcuuau

SEQ ID NO: 604238 - RNA, 19 nt, Artificial Sequence
  Description of Artificial Sequence: Synthetic oligonucleotide
uccuguaccaugggaaacu

SEQ ID NO: 604239 - RNA, 19 nt, Artificial Sequence
  Description of Artificial Sequence: Synthetic oligonucleotide
gauugacaaugccaacaca

SEQ ID NO: 604240 - RNA, 19 nt, Artificial Sequence
  Description of Artificial Sequence: Synthetic oligonucleotide
gauaucauuuacaaagguu

SEQ ID NO: 604241 - RNA, 19 nt, Artificial Sequence
  Description of Artificial Sequence: Synthetic oligonucleotide
aaccguuucaggaauuguu

SEQ ID NO: 604242 - RNA, 19 nt, Artificial Sequence
  Description of Artificial Sequence: Synthetic oligonucleotide
cuauacuggcuuauucuga

SEQ ID NO: 604243 - RNA, 19 nt, Artificial Sequence
  Description of Artificial Sequence: Synthetic oligonucleotide
augcuucaguugccgagcg

SEQ ID NO: 604244 - RNA, 19 nt, Artificial Sequence
  Description of Artificial Sequence: Synthetic oligonucleotide
uuagacugaguagaucuuu

SEQ ID NO: 604245 - RNA, 19 nt, Artificial Sequence
  Description of Artificial Sequence: Synthetic oligonucleotide
ccuauacuggcuuauucug

SEQ ID NO: 604246 - RNA, 19 nt, Artificial Sequence
  Description of Artificial Sequence: Synthetic oligonucleotide
aaccaccuauucucuagaa

SEQ ID NO: 604247 - RNA, 19 nt, Artificial Sequence
  Description of Artificial Sequence: Synthetic oligonucleotide
caagccugaguuaaguuua

SEQ ID NO: 604248 - RNA, 19 nt, Artificial Sequence
  Description of Artificial Sequence: Synthetic oligonucleotide
gccuaggcaaacaacacag

SEQ ID NO: 604249 - RNA, 19 nt, Artificial Sequence
  Description of Artificial Sequence: Synthetic oligonucleotide
uacaagcucuugccagaag

SEQ ID NO: 604250 - RNA, 19 nt, Artificial Sequence
  Description of Artificial Sequence: Synthetic oligonucleotide
agcucuaccaagccuggaa

SEQ ID NO: 604251 - RNA, 19 nt, Artificial Sequence
  Description of Artificial Sequence: Synthetic oligonucleotide
aaaucuaagccuagcucua

SEQ ID NO: 604252 - RNA, 19 nt, Artificial Sequence
  Description of Artificial Sequence: Synthetic oligonucleotide
ugcuucaguugccgagcgg

SEQ ID NO: 604253 - RNA, 19 nt, Artificial Sequence
  Description of Artificial Sequence: Synthetic oligonucleotide
aaaacgucucugugucgaa

SEQ ID NO: 604254 - RNA, 19 nt, Artificial Sequence
  Description of Artificial Sequence: Synthetic oligonucleotide
aguuauucuguaauagcua

SEQ ID NO: 604255 - RNA, 19 nt, Artificial Sequence
  Description of Artificial Sequence: Synthetic oligonucleotide
cauacugcaagcugcuaaa

SEQ ID NO: 604256 - RNA, 19 nt, Artificial Sequence
  Description of Artificial Sequence: Synthetic oligonucleotide
gggacuagagugaagcagc

SEQ ID NO: 604257 - RNA, 19 nt, Artificial Sequence
  Description of Artificial Sequence: Synthetic oligonucleotide
accagauuaccaacuaaga

SEQ ID NO: 604258 - RNA, 19 nt, Artificial Sequence
  Description of Artificial Sequence: Synthetic oligonucleotide
uaucaugugcagacucaau

SEQ ID NO: 604259 - RNA, 19 nt, Artificial Sequence
  Description of Artificial Sequence: Synthetic oligonucleotide
gggaaacucauggucagag

SEQ ID NO: 604260 - RNA, 19 nt, Artificial Sequence
  Description of Artificial Sequence: Synthetic oligonucleotide
acauacuuuagugcuugga

SEQ ID NO: 604261 - RNA, 19 nt, Artificial Sequence
  Description of Artificial Sequence: Synthetic oligonucleotide
cuaagcuaauaauuugacu

SEQ ID NO: 604262 - RNA, 19 nt, Artificial Sequence
  Description of Artificial Sequence: Synthetic oligonucleotide
aggaauuguugggagguga

SEQ ID NO: 604263 - RNA, 19 nt, Artificial Sequence
  Description of Artificial Sequence: Synthetic oligonucleotide
aguuuggaggauucucuuu

SEQ ID NO: 604264 - RNA, 19 nt, Artificial Sequence
  Description of Artificial Sequence: Synthetic oligonucleotide
ugccuguaccuucauuuua

SEQ ID NO: 604265 - RNA, 19 nt, Artificial Sequence
  Description of Artificial Sequence: Synthetic oligonucleotide
gacaagaaucuguccagua

SEQ ID NO: 604266 - RNA, 19 nt, Artificial Sequence
  Description of Artificial Sequence: Synthetic oligonucleotide
auuugguuuggaacacuug

SEQ ID NO: 604267 - RNA, 19 nt, Artificial Sequence
  Description of Artificial Sequence: Synthetic oligonucleotide
agugcuuuaucaagccuga

SEQ ID NO: 604268 - RNA, 19 nt, Artificial Sequence
  Description of Artificial Sequence: Synthetic oligonucleotide
guaauagcuaugcuucagu

SEQ ID NO: 604269 - RNA, 19 nt, Artificial Sequence
  Description of Artificial Sequence: Synthetic oligonucleotide
ugaagcauaucagccuuua

SEQ ID NO: 604270 - RNA, 19 nt, Artificial Sequence
  Description of Artificial Sequence: Synthetic oligonucleotide
cugcuaaugugaugaugug

SEQ ID NO: 604271 - RNA, 19 nt, Artificial Sequence
  Description of Artificial Sequence: Synthetic oligonucleotide
cauacuuuagugcuuggau

SEQ ID NO: 604272 - RNA, 19 nt, Artificial Sequence
  Description of Artificial Sequence: Synthetic oligonucleotide
auugaaagguguauuccuu

SEQ ID NO: 604273 - RNA, 19 nt, Artificial Sequence
  Description of Artificial Sequence: Synthetic oligonucleotide
gacuagagugaagcagcag

SEQ ID NO: 604274 - RNA, 19 nt, Artificial Sequence
  Description of Artificial Sequence: Synthetic oligonucleotide
cugcuauuuaucuuggaau

SEQ ID NO: 604275 - RNA, 19 nt, Artificial Sequence
  Description of Artificial Sequence: Synthetic oligonucleotide
gaaagguguauuccuuagu

SEQ ID NO: 604276 - RNA, 19 nt, Artificial Sequence
  Description of Artificial Sequence: Synthetic oligonucleotide
auacugcaagcugcuaaag

SEQ ID NO: 604277 - RNA, 19 nt, Artificial Sequence
  Description of Artificial Sequence: Synthetic oligonucleotide
caauccuacugccuaggca

SEQ ID NO: 604278 - RNA, 19 nt, Artificial Sequence
  Description of Artificial Sequence: Synthetic oligonucleotide
cuugaaugagugaguaaua

SEQ ID NO: 604279 - RNA, 19 nt, Artificial Sequence
  Description of Artificial Sequence: Synthetic oligonucleotide
cuccuuaugauaccuuaaa

SEQ ID NO: 604280 - RNA, 19 nt, Artificial Sequence
  Description of Artificial Sequence: Synthetic oligonucleotide
uaccuacauacugcaagcu

SEQ ID NO: 604281 - RNA, 19 nt, Artificial Sequence
  Description of Artificial Sequence: Synthetic oligonucleotide
cucuuuccuaagcuaauaa

SEQ ID NO: 604282 - RNA, 19 nt, Artificial Sequence
  Description of Artificial Sequence: Synthetic oligonucleotide
accuaacuuccaaucuagg

SEQ ID NO: 604283 - RNA, 19 nt, Artificial Sequence
  Description of Artificial Sequence: Synthetic oligonucleotide
aggugaacugaugauguuu

SEQ ID NO: 604284 - RNA, 19 nt, Artificial Sequence
  Description of Artificial Sequence: Synthetic oligonucleotide
cagagaguaacaaccagau

SEQ ID NO: 604285 - RNA, 19 nt, Artificial Sequence
  Description of Artificial Sequence: Synthetic oligonucleotide
agaaucuguccaguaaauu

SEQ ID NO: 604286 - RNA, 19 nt, Artificial Sequence
  Description of Artificial Sequence: Synthetic oligonucleotide
agacaagaaucuguccagu

SEQ ID NO: 604287 - RNA, 19 nt, Artificial Sequence
  Description of Artificial Sequence: Synthetic oligonucleotide
aaaccuauacuggcuuauu

SEQ ID NO: 604288 - RNA, 19 nt, Artificial Sequence
  Description of Artificial Sequence: Synthetic oligonucleotide
caauuaguuucaagccaca

SEQ ID NO: 604289 - RNA, 19 nt, Artificial Sequence
  Description of Artificial Sequence: Synthetic oligonucleotide
ccuaacuuccaaucuagga

SEQ ID NO: 604290 - RNA, 19 nt, Artificial Sequence
  Description of Artificial Sequence: Synthetic oligonucleotide
agagaguaacaaccagauu

SEQ ID NO: 604291 - RNA, 19 nt, Artificial Sequence
  Description of Artificial Sequence: Synthetic oligonucleotide
uugcggggucauuaacuac

SEQ ID NO: 604292 - RNA, 19 nt, Artificial Sequence
  Description of Artificial Sequence: Synthetic oligonucleotide
cagggugauaauucaucca

SEQ ID NO: 604293 - RNA, 19 nt, Artificial Sequence
  Description of Artificial Sequence: Synthetic oligonucleotide
cuguaauagcuaugcuuca

SEQ ID NO: 604294 - RNA, 19 nt, Artificial Sequence
  Description of Artificial Sequence: Synthetic oligonucleotide
caccuauucucuagaagaa

SEQ ID NO: 604295 - RNA, 19 nt, Artificial Sequence
  Description of Artificial Sequence: Synthetic oligonucleotide
guaaaccuauacuggcuua

SEQ ID NO: 604296 - RNA, 19 nt, Artificial Sequence
  Description of Artificial Sequence: Synthetic oligonucleotide
ugggugccaagaaaccauu

SEQ ID NO: 604297 - RNA, 19 nt, Artificial Sequence
  Description of Artificial Sequence: Synthetic oligonucleotide
ggucauuaacuacuuuuaa

SEQ ID NO: 604298 - RNA, 19 nt, Artificial Sequence
  Description of Artificial Sequence: Synthetic oligonucleotide
gcugcuaaugugaugaugu

SEQ ID NO: 604299 - RNA, 19 nt, Artificial Sequence
  Description of Artificial Sequence: Synthetic oligonucleotide
ggugaguuauucuguaaua

SEQ ID NO: 604300 - RNA, 19 nt, Artificial Sequence
  Description of Artificial Sequence: Synthetic oligonucleotide
uacuugguuaugggugcca

SEQ ID NO: 604301 - RNA, 19 nt, Artificial Sequence
  Description of Artificial Sequence: Synthetic oligonucleotide
cuaagccuagcucuaccaa

SEQ ID NO: 604302 - RNA, 19 nt, Artificial Sequence
  Description of Artificial Sequence: Synthetic oligonucleotide
guugguuagcuuacuucuc

SEQ ID NO: 604303 - RNA, 19 nt, Artificial Sequence
  Description of Artificial Sequence: Synthetic oligonucleotide
aggugcacaaucauauauu

SEQ ID NO: 604304 - RNA, 19 nt, Artificial Sequence
  Description of Artificial Sequence: Synthetic oligonucleotide
guugccagugggacauucc

SEQ ID NO: 604305 - RNA, 19 nt, Artificial Sequence
  Description of Artificial Sequence: Synthetic oligonucleotide
gguuaugggugccaagaaa

SEQ ID NO: 604306 - RNA, 19 nt, Artificial Sequence
  Description of Artificial Sequence: Synthetic oligonucleotide
ugcugagguuucauagcuu

SEQ ID NO: 604307 - RNA, 19 nt, Artificial Sequence
  Description of Artificial Sequence: Synthetic oligonucleotide
gcuagggaaaacgucucug

SEQ ID NO: 604308 - RNA, 19 nt, Artificial Sequence
  Description of Artificial Sequence: Synthetic oligonucleotide
cuguaaaccuauacuggcu

SEQ ID NO: 604309 - RNA, 19 nt, Artificial Sequence
  Description of Artificial Sequence: Synthetic oligonucleotide
guugccgagcggugcgucc

SEQ ID NO: 604310 - RNA, 19 nt, Artificial Sequence
  Description of Artificial Sequence: Synthetic oligonucleotide
guaccaugggaaacucaug

SEQ ID NO: 604311 - RNA, 19 nt, Artificial Sequence
  Description of Artificial Sequence: Synthetic oligonucleotide
ccagauuaccaacuaagaa

SEQ ID NO: 604312 - RNA, 19 nt, Artificial Sequence
  Description of Artificial Sequence: Synthetic oligonucleotide
gaauguuucaugggugaau

SEQ ID NO: 604313 - RNA, 19 nt, Artificial Sequence
  Description of Artificial Sequence: Synthetic oligonucleotide
aguugccgagcggugcguc

SEQ ID NO: 604314 - RNA, 19 nt, Artificial Sequence
  Description of Artificial Sequence: Synthetic oligonucleotide
gaguuaaguuuaaugcaau

SEQ ID NO: 604315 - RNA, 19 nt, Artificial Sequence
  Description of Artificial Sequence: Synthetic oligonucleotide
guguauuccuuaguuuaaa

SEQ ID NO: 604316 - RNA, 19 nt, Artificial Sequence
  Description of Artificial Sequence: Synthetic oligonucleotide
auaaguuuucagggugaua

SEQ ID NO: 604317 - RNA, 19 nt, Artificial Sequence
  Description of Artificial Sequence: Synthetic oligonucleotide
cacacccaagaugcuuugc

SEQ ID NO: 604318 - RNA, 19 nt, Artificial Sequence
  Description of Artificial Sequence: Synthetic oligonucleotide
ggugcacaaucauauauuu

SEQ ID NO: 604319 - RNA, 19 nt, Artificial Sequence
  Description of Artificial Sequence: Synthetic oligonucleotide
acuuccaaucuaggaaguu

SEQ ID NO: 604320 - RNA, 19 nt, Artificial Sequence
  Description of Artificial Sequence: Synthetic oligonucleotide
uauuuauugcggggucauu

SEQ ID NO: 604321 - RNA, 19 nt, Artificial Sequence
  Description of Artificial Sequence: Synthetic oligonucleotide
aagccugaguuaaguuuaa

SEQ ID NO: 604322 - RNA, 19 nt, Artificial Sequence
  Description of Artificial Sequence: Synthetic oligonucleotide
cuguaccaugggaaacuca

SEQ ID NO: 604323 - RNA, 19 nt, Artificial Sequence
  Description of Artificial Sequence: Synthetic oligonucleotide
cauuaacuccacauacuuu

SEQ ID NO: 604324 - RNA, 19 nt, Artificial Sequence
  Description of Artificial Sequence: Synthetic oligonucleotide
gggucauuaacuacuuuua

SEQ ID NO: 604325 - RNA, 19 nt, Artificial Sequence
  Description of Artificial Sequence: Synthetic oligonucleotide
guaguugguuagcuuacuu

SEQ ID NO: 604326 - RNA, 19 nt, Artificial Sequence
  Description of Artificial Sequence: Synthetic oligonucleotide
gguguauuccuuaguuuaa

SEQ ID NO: 604327 - RNA, 19 nt, Artificial Sequence
  Description of Artificial Sequence: Synthetic oligonucleotide
aucuaggaaguuagaucaa

SEQ ID NO: 604328 - RNA, 19 nt, Artificial Sequence
  Description of Artificial Sequence: Synthetic oligonucleotide
gcuaugcuucaguugccga

SEQ ID NO: 604329 - RNA, 19 nt, Artificial Sequence
  Description of Artificial Sequence: Synthetic oligonucleotide
cuucaaaucccggagucuu

SEQ ID NO: 604330 - RNA, 19 nt, Artificial Sequence
  Description of Artificial Sequence: Synthetic oligonucleotide
cacccaagaugcuuugccu

SEQ ID NO: 604331 - RNA, 19 nt, Artificial Sequence
  Description of Artificial Sequence: Synthetic oligonucleotide
guccagacacaauccauuu

SEQ ID NO: 604332 - RNA, 19 nt, Artificial Sequence
  Description of Artificial Sequence: Synthetic oligonucleotide
caccucuaaauuagcaauu

SEQ ID NO: 604333 - RNA, 19 nt, Artificial Sequence
  Description of Artificial Sequence: Synthetic oligonucleotide
ggacuagagugaagcagca

SEQ ID NO: 604334 - RNA, 19 nt, Artificial Sequence
  Description of Artificial Sequence: Synthetic oligonucleotide
ccauuaacuccacauacuu

SEQ ID NO: 604335 - RNA, 19 nt, Artificial Sequence
  Description of Artificial Sequence: Synthetic oligonucleotide
ccaccuaacuuccaaucua

SEQ ID NO: 604336 - RNA, 19 nt, Artificial Sequence
  Description of Artificial Sequence: Synthetic oligonucleotide
agcggugcguccagacaca

SEQ ID NO: 604337 - RNA, 19 nt, Artificial Sequence
  Description of Artificial Sequence: Synthetic oligonucleotide
ccuguaccuucauuuuaga

SEQ ID NO: 604338 - RNA, 19 nt, Artificial Sequence
  Description of Artificial Sequence: Synthetic oligonucleotide
auccuacugccuaggcaaa

SEQ ID NO: 604339 - RNA, 19 nt, Artificial Sequence
  Description of Artificial Sequence: Synthetic oligonucleotide
ccuguaccaugggaaacuc

SEQ ID NO: 604340 - RNA, 19 nt, Artificial Sequence
  Description of Artificial Sequence: Synthetic oligonucleotide
cccauaaguuuaagugaaa

SEQ ID NO: 604341 - RNA, 19 nt, Artificial Sequence
  Description of Artificial Sequence: Synthetic oligonucleotide
gccaaagaacugaguuaga

SEQ ID NO: 604342 - RNA, 19 nt, Artificial Sequence
  Description of Artificial Sequence: Synthetic oligonucleotide
ccauuaucaugugcagacu

SEQ ID NO: 604343 - RNA, 19 nt, Artificial Sequence
  Description of Artificial Sequence: Synthetic oligonucleotide
gccuggaaucaggaguuuu

SEQ ID NO: 604344 - RNA, 19 nt, Artificial Sequence
  Description of Artificial Sequence: Synthetic oligonucleotide
gcggugcguccagacacaa

SEQ ID NO: 604345 - RNA, 19 nt, Artificial Sequence
  Description of Artificial Sequence: Synthetic oligonucleotide
caguugccgagcggugcgu

SEQ ID NO: 604346 - RNA, 19 nt, Artificial Sequence
  Description of Artificial Sequence: Synthetic oligonucleotide
cggugcguccagacacaau

SEQ ID NO: 604347 - RNA, 19 nt, Artificial Sequence
  Description of Artificial Sequence: Synthetic oligonucleotide
aaugaagacaugccuaucg

SEQ ID NO: 604348 - RNA, 19 nt, Artificial Sequence
  Description of Artificial Sequence: Synthetic oligonucleotide
uuuacuaauaccugaacca

SEQ ID NO: 604349 - RNA, 19 nt, Artificial Sequence
  Description of Artificial Sequence: Synthetic oligonucleotide
auuaaaagcacugaauccg

SEQ ID NO: 604350 - RNA, 19 nt, Artificial Sequence
  Description of Artificial Sequence: Synthetic oligonucleotide
aaacgugccauuuuaagcu

SEQ ID NO: 604351 - RNA, 19 nt, Artificial Sequence
  Description of Artificial Sequence: Synthetic oligonucleotide
aaaacauaccacaggaugg

SEQ ID NO: 604352 - RNA, 19 nt, Artificial Sequence
  Description of Artificial Sequence: Synthetic oligonucleotide
aauccuguccgcuuguagg

SEQ ID NO: 604353 - RNA, 19 nt, Artificial Sequence
  Description of Artificial Sequence: Synthetic oligonucleotide
ugcacauccgcucaaacag

SEQ ID NO: 604354 - RNA, 19 nt, Artificial Sequence
  Description of Artificial Sequence: Synthetic oligonucleotide
aucacuuucggguaccacc

SEQ ID NO: 604355 - RNA, 19 nt, Artificial Sequence
  Description of Artificial Sequence: Synthetic oligonucleotide
ucaggugaaauacucuugg

SEQ ID NO: 604356 - RNA, 19 nt, Artificial Sequence
  Description of Artificial Sequence: Synthetic oligonucleotide
aagacaugccuaucgaguc

SEQ ID NO: 604357 - RNA, 19 nt, Artificial Sequence
  Description of Artificial Sequence: Synthetic oligonucleotide
aaacauaccacaggauggc

SEQ ID NO: 604358 - RNA, 19 nt, Artificial Sequence
  Description of Artificial Sequence: Synthetic oligonucleotide
ucagauaauccacaaacuc

SEQ ID NO: 604359 - RNA, 19 nt, Artificial Sequence
  Description of Artificial Sequence: Synthetic oligonucleotide
ggugaaauacucuuggagg

SEQ ID NO: 604360 - RNA, 19 nt, Artificial Sequence
  Description of Artificial Sequence: Synthetic oligonucleotide
gaaacgugccauuuuaagc

SEQ ID NO: 604361 - RNA, 19 nt, Artificial Sequence
  Description of Artificial Sequence: Synthetic oligonucleotide
aaggcaaccacucucugcu

SEQ ID NO: 604362 - RNA, 19 nt, Artificial Sequence
  Description of Artificial Sequence: Synthetic oligonucleotide
aaacuaugcaaggagcccg

SEQ ID NO: 604363 - RNA, 19 nt, Artificial Sequence
  Description of Artificial Sequence: Synthetic oligonucleotide
auguaaacuaugcaaggag

SEQ ID NO: 604364 - RNA, 19 nt, Artificial Sequence
  Description of Artificial Sequence: Synthetic oligonucleotide
auuaccucgacaaacuccg

SEQ ID NO: 604365 - RNA, 19 nt, Artificial Sequence
  Description of Artificial Sequence: Synthetic oligonucleotide
aagcgcauucgccagcgcc

SEQ ID NO: 604366 - RNA, 19 nt, Artificial Sequence
  Description of Artificial Sequence: Synthetic oligonucleotide
aagucgguccaagaaauac

SEQ ID NO: 604367 - RNA, 19 nt, Artificial Sequence
  Description of Artificial Sequence: Synthetic oligonucleotide
uucccauccacaaugguga

SEQ ID NO: 604368 - RNA, 19 nt, Artificial Sequence
  Description of Artificial Sequence: Synthetic oligonucleotide
aaugcuaggugccauccca

SEQ ID NO: 604369 - RNA, 19 nt, Artificial Sequence
  Description of Artificial Sequence: Synthetic oligonucleotide
aaugauuuacuaauaccug

SEQ ID NO: 604370 - RNA, 19 nt, Artificial Sequence
  Description of Artificial Sequence: Synthetic oligonucleotide
aaugcggguaaccuuccuc

SEQ ID NO: 604371 - RNA, 19 nt, Artificial Sequence
  Description of Artificial Sequence: Synthetic oligonucleotide
uccacaauggugaaacgug

SEQ ID NO: 604372 - RNA, 19 nt, Artificial Sequence
  Description of Artificial Sequence: Synthetic oligonucleotide
ugaaacgugccauuuuaag

SEQ ID NO: 604373 - RNA, 19 nt, Artificial Sequence
  Description of Artificial Sequence: Synthetic oligonucleotide
agcaaugacacgcuccacg

SEQ ID NO: 604374 - RNA, 19 nt, Artificial Sequence
  Description of Artificial Sequence: Synthetic oligonucleotide
auaauccacaaacucucgg

SEQ ID NO: 604375 - RNA, 19 nt, Artificial Sequence
  Description of Artificial Sequence: Synthetic oligonucleotide
auuuguggaugccaagacg

SEQ ID NO: 604376 - RNA, 19 nt, Artificial Sequence
  Description of Artificial Sequence: Synthetic oligonucleotide
agucugaaaacauaccaca

SEQ ID NO: 604377 - RNA, 19 nt, Artificial Sequence
  Description of Artificial Sequence: Synthetic oligonucleotide
acgagauggccucagcugc

SEQ ID NO: 604378 - RNA, 19 nt, Artificial Sequence
  Description of Artificial Sequence: Synthetic oligonucleotide
cuucauuacagcuucugug

SEQ ID NO: 604379 - RNA, 19 nt, Artificial Sequence
  Description of Artificial Sequence: Synthetic oligonucleotide
ugccauuuuaagcugauua

SEQ ID NO: 604380 - RNA, 19 nt, Artificial Sequence
  Description of Artificial Sequence: Synthetic oligonucleotide
aacgagauggccucagcug

SEQ ID NO: 604381 - RNA, 19 nt, Artificial Sequence
  Description of Artificial Sequence: Synthetic oligonucleotide
gugaaauacucuuggaggc

SEQ ID NO: 604382 - RNA, 19 nt, Artificial Sequence
  Description of Artificial Sequence: Synthetic oligonucleotide
acugccgucauccccaggg

SEQ ID NO: 604383 - RNA, 19 nt, Artificial Sequence
  Description of Artificial Sequence: Synthetic oligonucleotide
agggacgucguccaaugcc

SEQ ID NO: 604384 - RNA, 19 nt, Artificial Sequence
  Description of Artificial Sequence: Synthetic oligonucleotide
aaaagcacugaauccgccu

SEQ ID NO: 604385 - RNA, 19 nt, Artificial Sequence
  Description of Artificial Sequence: Synthetic oligonucleotide
accucgacaaacuccgggc

SEQ ID NO: 604386 - RNA, 19 nt, Artificial Sequence
  Description of Artificial Sequence: Synthetic oligonucleotide
uuaagcugauuaaaagcac

SEQ ID NO: 604387 - RNA, 19 nt, Artificial Sequence
  Description of Artificial Sequence: Synthetic oligonucleotide
uaugcaaggagcccgugcu

SEQ ID NO: 604388 - RNA, 19 nt, Artificial Sequence
  Description of Artificial Sequence: Synthetic oligonucleotide
uaucgagucgaccuggccu

SEQ ID NO: 604389 - RNA, 19 nt, Artificial Sequence
  Description of Artificial Sequence: Synthetic oligonucleotide
acuuucggguaccaccugc

SEQ ID NO: 604390 - RNA, 19 nt, Artificial Sequence
  Description of Artificial Sequence: Synthetic oligonucleotide
ugaagacaugccuaucgag

SEQ ID NO: 604391 - RNA, 19 nt, Artificial Sequence
  Description of Artificial Sequence: Synthetic oligonucleotide
aagagugggaagaucaaug

SEQ ID NO: 604392 - RNA, 19 nt, Artificial Sequence
  Description of Artificial Sequence: Synthetic oligonucleotide
ucauaguuuaucacuuccu

SEQ ID NO: 604393 - RNA, 19 nt, Artificial Sequence
  Description of Artificial Sequence: Synthetic oligonucleotide
auuugcaaccugcauccgg

SEQ ID NO: 604394 - RNA, 19 nt, Artificial Sequence
  Description of Artificial Sequence: Synthetic oligonucleotide
ugcgcgaccgccuagugcc

SEQ ID NO: 604395 - RNA, 19 nt, Artificial Sequence
  Description of Artificial Sequence: Synthetic oligonucleotide
uucuaccacaucacuuucg

SEQ ID NO: 604396 - RNA, 19 nt, Artificial Sequence
  Description of Artificial Sequence: Synthetic oligonucleotide
uccaauuaccucgacaaac

SEQ ID NO: 604397 - RNA, 19 nt, Artificial Sequence
  Description of Artificial Sequence: Synthetic oligonucleotide
uuccuuuuccagaagcgca

SEQ ID NO: 604398 - RNA, 19 nt, Artificial Sequence
  Description of Artificial Sequence: Synthetic oligonucleotide
uaggaaacgggaauccugu

SEQ ID NO: 604399 - RNA, 19 nt, Artificial Sequence
  Description of Artificial Sequence: Synthetic oligonucleotide
uaccucgacaaacuccggg

SEQ ID NO: 604400 - RNA, 19 nt, Artificial Sequence
  Description of Artificial Sequence: Synthetic oligonucleotide
uagacuucuaccacaucac

SEQ ID NO: 604401 - RNA, 19 nt, Artificial Sequence
  Description of Artificial Sequence: Synthetic oligonucleotide
agacucauggaaggcaacc

SEQ ID NO: 604402 - RNA, 19 nt, Artificial Sequence
  Description of Artificial Sequence: Synthetic oligonucleotide
ucuucgguguuggagaagc

SEQ ID NO: 604403 - RNA, 19 nt, Artificial Sequence
  Description of Artificial Sequence: Synthetic oligonucleotide
uuuguucgaggugcuaugg

SEQ ID NO: 604404 - RNA, 19 nt, Artificial Sequence
  Description of Artificial Sequence: Synthetic oligonucleotide
agagagcuaacagagguug

SEQ ID NO: 604405 - RNA, 19 nt, Artificial Sequence
  Description of Artificial Sequence: Synthetic oligonucleotide
uuccugucaucccagucag

SEQ ID NO: 604406 - RNA, 19 nt, Artificial Sequence
  Description of Artificial Sequence: Synthetic oligonucleotide
gaaccuuggcaccaaguug

SEQ ID NO: 604407 - RNA, 19 nt, Artificial Sequence
  Description of Artificial Sequence: Synthetic oligonucleotide
ucuagcagccaaccaacca

SEQ ID NO: 604408 - RNA, 19 nt, Artificial Sequence
  Description of Artificial Sequence: Synthetic oligonucleotide
augccuaucgagucgaccu

SEQ ID NO: 604409 - RNA, 19 nt, Artificial Sequence
  Description of Artificial Sequence: Synthetic oligonucleotide
caaguugaaggaaacgcuc

SEQ ID NO: 604410 - RNA, 19 nt, Artificial Sequence
  Description of Artificial Sequence: Synthetic oligonucleotide
gauaauccacaaacucucg

SEQ ID NO: 604411 - RNA, 19 nt, Artificial Sequence
  Description of Artificial Sequence: Synthetic oligonucleotide
ucauuacagcuucugugug

SEQ ID NO: 604412 - RNA, 19 nt, Artificial Sequence
  Description of Artificial Sequence: Synthetic oligonucleotide
agagugggaagaucaauga

SEQ ID NO: 604413 - RNA, 19 nt, Artificial Sequence
  Description of Artificial Sequence: Synthetic oligonucleotide
aucgagucgaccuggccuc

SEQ ID NO: 604414 - RNA, 19 nt, Artificial Sequence
  Description of Artificial Sequence: Synthetic oligonucleotide
cauccgcucaaacagcugc

SEQ ID NO: 604415 - RNA, 19 nt, Artificial Sequence
  Description of Artificial Sequence: Synthetic oligonucleotide
aacgugccauuuuaagcug

SEQ ID NO: 604416 - RNA, 19 nt, Artificial Sequence
  Description of Artificial Sequence: Synthetic oligonucleotide
aagcacugaauccgccuuc

SEQ ID NO: 604417 - RNA, 19 nt, Artificial Sequence
  Description of Artificial Sequence: Synthetic oligonucleotide
aaacaggcccaaugcuagg

SEQ ID NO: 604418 - RNA, 19 nt, Artificial Sequence
  Description of Artificial Sequence: Synthetic oligonucleotide
aagggacgucguccaaugc

SEQ ID NO: 604419 - RNA, 19 nt, Artificial Sequence
  Description of Artificial Sequence: Synthetic oligonucleotide
agacaugccuaucgagucg

SEQ ID NO: 604420 - RNA, 19 nt, Artificial Sequence
  Description of Artificial Sequence: Synthetic oligonucleotide
uuacuaauaccugaaccaa

SEQ ID NO: 604421 - RNA, 19 nt, Artificial Sequence
  Description of Artificial Sequence: Synthetic oligonucleotide
cucauuacaacagcaauga

SEQ ID NO: 604422 - RNA, 19 nt, Artificial Sequence
  Description of Artificial Sequence: Synthetic oligonucleotide
acgggaauccuguccuugc

SEQ ID NO: 604423 - RNA, 19 nt, Artificial Sequence
  Description of Artificial Sequence: Synthetic oligonucleotide
gaaauacucuuggaggcug

SEQ ID NO: 604424 - RNA, 19 nt, Artificial Sequence
  Description of Artificial Sequence: Synthetic oligonucleotide
acaauggugaaacgugcca

SEQ ID NO: 604425 - RNA, 19 nt, Artificial Sequence
  Description of Artificial Sequence: Synthetic oligonucleotide
ugucuauauuugcaaccug

SEQ ID NO: 604426 - RNA, 19 nt, Artificial Sequence
  Description of Artificial Sequence: Synthetic oligonucleotide
augugugccccucccgugc

SEQ ID NO: 604427 - RNA, 19 nt, Artificial Sequence
  Description of Artificial Sequence: Synthetic oligonucleotide
aguugaaggaaacgcucug

SEQ ID NO: 604428 - RNA, 19 nt, Artificial Sequence
  Description of Artificial Sequence: Synthetic oligonucleotide
uucgaggugcuauggagac

SEQ ID NO: 604429 - RNA, 19 nt, Artificial Sequence
  Description of Artificial Sequence: Synthetic oligonucleotide
gaagggacgucguccaaug

SEQ ID NO: 604430 - RNA, 19 nt, Artificial Sequence
  Description of Artificial Sequence: Synthetic oligonucleotide
uccgguacaucaaggccag

SEQ ID NO: 604431 - RNA, 19 nt, Artificial Sequence
  Description of Artificial Sequence: Synthetic oligonucleotide
aacgcucugggcucuucag

SEQ ID NO: 604432 - RNA, 19 nt, Artificial Sequence
  Description of Artificial Sequence: Synthetic oligonucleotide
cauccgguacaucaaggcc

SEQ ID NO: 604433 - RNA, 19 nt, Artificial Sequence
  Description of Artificial Sequence: Synthetic oligonucleotide
auaguuuaucacuuccuuu

SEQ ID NO: 604434 - RNA, 19 nt, Artificial Sequence
  Description of Artificial Sequence: Synthetic oligonucleotide
uaguagcaccuucucagug

SEQ ID NO: 604435 - RNA, 19 nt, Artificial Sequence
  Description of Artificial Sequence: Synthetic oligonucleotide
aaguugaaggaaacgcucu

SEQ ID NO: 604436 - RNA, 19 nt, Artificial Sequence
  Description of Artificial Sequence: Synthetic oligonucleotide
gguacaucaaggccagccg

SEQ ID NO: 604437 - RNA, 19 nt, Artificial Sequence
  Description of Artificial Sequence: Synthetic oligonucleotide
augaugaacaaggugcgca

SEQ ID NO: 604438 - RNA, 19 nt, Artificial Sequence
  Description of Artificial Sequence: Synthetic oligonucleotide
ugcaccucgccuuuagcca

SEQ ID NO: 604439 - RNA, 19 nt, Artificial Sequence
  Description of Artificial Sequence: Synthetic oligonucleotide
aguuuguccagguugucua

SEQ ID NO: 604440 - RNA, 19 nt, Artificial Sequence
  Description of Artificial Sequence: Synthetic oligonucleotide
gaauccuguccgcuuguag

SEQ ID NO: 604441 - RNA, 19 nt, Artificial Sequence
  Description of Artificial Sequence: Synthetic oligonucleotide
agagcuaacagagguugag

SEQ ID NO: 604442 - RNA, 19 nt, Artificial Sequence
  Description of Artificial Sequence: Synthetic oligonucleotide
uacuaauaccugaaccaau

SEQ ID NO: 604443 - RNA, 19 nt, Artificial Sequence
  Description of Artificial Sequence: Synthetic oligonucleotide
accgccuagugccaugcac

SEQ ID NO: 604444 - RNA, 19 nt, Artificial Sequence
  Description of Artificial Sequence: Synthetic oligonucleotide
ucggccaaacaccacggcu

SEQ ID NO: 604445 - RNA, 19 nt, Artificial Sequence
  Description of Artificial Sequence: Synthetic oligonucleotide
uguaacccugcugaacgag

SEQ ID NO: 604446 - RNA, 19 nt, Artificial Sequence
  Description of Artificial Sequence: Synthetic oligonucleotide
gaaacgggaauccuguccu

SEQ ID NO: 604447 - RNA, 19 nt, Artificial Sequence
  Description of Artificial Sequence: Synthetic oligonucleotide
ugaaauacucuuggaggcu

SEQ ID NO: 604448 - RNA, 19 nt, Artificial Sequence
  Description of Artificial Sequence: Synthetic oligonucleotide
aagagguacuggucccgag

SEQ ID NO: 604449 - RNA, 19 nt, Artificial Sequence
  Description of Artificial Sequence: Synthetic oligonucleotide
gaauccugguguuagcucu

SEQ ID NO: 604450 - RNA, 19 nt, Artificial Sequence
  Description of Artificial Sequence: Synthetic oligonucleotide
ggaaacgggaauccugucc

SEQ ID NO: 604451 - RNA, 19 nt, Artificial Sequence
  Description of Artificial Sequence: Synthetic oligonucleotide
uaacagagguugagguuca

SEQ ID NO: 604452 - RNA, 19 nt, Artificial Sequence
  Description of Artificial Sequence: Synthetic oligonucleotide
uugaacguguggacagaug

SEQ ID NO: 604453 - RNA, 19 nt, Artificial Sequence
  Description of Artificial Sequence: Synthetic oligonucleotide
cuaugcaaggagcccgugc

SEQ ID NO: 604454 - RNA, 19 nt, Artificial Sequence
  Description of Artificial Sequence: Synthetic oligonucleotide
uguggaugccaagacgaug

SEQ ID NO: 604455 - RNA, 19 nt, Artificial Sequence
  Description of Artificial Sequence: Synthetic oligonucleotide
ugcugaacgagauggccuc

SEQ ID NO: 604456 - RNA, 19 nt, Artificial Sequence
  Description of Artificial Sequence: Synthetic oligonucleotide
uccacggcauacucaaagu

SEQ ID NO: 604457 - RNA, 19 nt, Artificial Sequence
  Description of Artificial Sequence: Synthetic oligonucleotide
agaagcgcauucgccagcg

SEQ ID NO: 604458 - RNA, 19 nt, Artificial Sequence
  Description of Artificial Sequence: Synthetic oligonucleotide
caucaauguaaacuaugca

SEQ ID NO: 604459 - RNA, 19 nt, Artificial Sequence
  Description of Artificial Sequence: Synthetic oligonucleotide
acuaauaccugaaccaaua

SEQ ID NO: 604460 - RNA, 19 nt, Artificial Sequence
  Description of Artificial Sequence: Synthetic oligonucleotide
aucagcucgauuuguggau

SEQ ID NO: 604461 - RNA, 19 nt, Artificial Sequence
  Description of Artificial Sequence: Synthetic oligonucleotide
aacgggaauccuguccuug

SEQ ID NO: 604462 - RNA, 19 nt, Artificial Sequence
  Description of Artificial Sequence: Synthetic oligonucleotide
ugcaaccugcauccgguac

SEQ ID NO: 604463 - RNA, 19 nt, Artificial Sequence
  Description of Artificial Sequence: Synthetic oligonucleotide
uaacccugcugaacgagau

SEQ ID NO: 604464 - RNA, 19 nt, Artificial Sequence
  Description of Artificial Sequence: Synthetic oligonucleotide
gaagacaugccuaucgagu

SEQ ID NO: 604465 - RNA, 19 nt, Artificial Sequence
  Description of Artificial Sequence: Synthetic oligonucleotide
gucaacuucaggccuuuca

SEQ ID NO: 604466 - RNA, 19 nt, Artificial Sequence
  Description of Artificial Sequence: Synthetic oligonucleotide
uuaccucgacaaacuccgg

SEQ ID NO: 604467 - RNA, 19 nt, Artificial Sequence
  Description of Artificial Sequence: Synthetic oligonucleotide
ugcuauggagaccuucauu

SEQ ID NO: 604468 - RNA, 19 nt, Artificial Sequence
  Description of Artificial Sequence: Synthetic oligonucleotide
ugccuaucgagucgaccug

SEQ ID NO: 604469 - RNA, 19 nt, Artificial Sequence
  Description of Artificial Sequence: Synthetic oligonucleotide
aggaaacgggaauccuguc

SEQ ID NO: 604470 - RNA, 19 nt, Artificial Sequence
  Description of Artificial Sequence: Synthetic oligonucleotide
gcucauuacaacagcaaug

SEQ ID NO: 604471 - RNA, 19 nt, Artificial Sequence
  Description of Artificial Sequence: Synthetic oligonucleotide
gcugauuaaaagcacugaa

SEQ ID NO: 604472 - RNA, 19 nt, Artificial Sequence
  Description of Artificial Sequence: Synthetic oligonucleotide
uagugccaugcacauccgc

SEQ ID NO: 604473 - RNA, 19 nt, Artificial Sequence
  Description of Artificial Sequence: Synthetic oligonucleotide
agcugauuaaaagcacuga

SEQ ID NO: 604474 - RNA, 19 nt, Artificial Sequence
  Description of Artificial Sequence: Synthetic oligonucleotide
uuucggguaccaccugcac

SEQ ID NO: 604475 - RNA, 19 nt, Artificial Sequence
  Description of Artificial Sequence: Synthetic oligonucleotide
aguucaggugaaauacucu

SEQ ID NO: 604476 - RNA, 19 nt, Artificial Sequence
  Description of Artificial Sequence: Synthetic oligonucleotide
gguguuagcucugccagcc

SEQ ID NO: 604477 - RNA, 19 nt, Artificial Sequence
  Description of Artificial Sequence: Synthetic oligonucleotide
caagacgaugacauggucu

SEQ ID NO: 604478 - RNA, 19 nt, Artificial Sequence
  Description of Artificial Sequence: Synthetic oligonucleotide
ugguguuagcucugccagc

SEQ ID NO: 604479 - RNA, 19 nt, Artificial Sequence
  Description of Artificial Sequence: Synthetic oligonucleotide
gagugggaagaucaaugaa

SEQ ID NO: 604480 - RNA, 19 nt, Artificial Sequence
  Description of Artificial Sequence: Synthetic oligonucleotide
aggcccaaugcuaggugcc

SEQ ID NO: 604481 - RNA, 19 nt, Artificial Sequence
  Description of Artificial Sequence: Synthetic oligonucleotide
agccuccguggcuacugcc

SEQ ID NO: 604482 - RNA, 19 nt, Artificial Sequence
  Description of Artificial Sequence: Synthetic oligonucleotide
uguccgcuuguaggaaacg

SEQ ID NO: 604483 - RNA, 19 nt, Artificial Sequence
  Description of Artificial Sequence: Synthetic oligonucleotide
cuaucgagucgaccuggcc

SEQ ID NO: 604484 - RNA, 19 nt, Artificial Sequence
  Description of Artificial Sequence: Synthetic oligonucleotide
auggccucagcugcgcgac

SEQ ID NO: 604485 - RNA, 19 nt, Artificial Sequence
  Description of Artificial Sequence: Synthetic oligonucleotide
uucgccagcgccugcaguu

SEQ ID NO: 604486 - RNA, 19 nt, Artificial Sequence
  Description of Artificial Sequence: Synthetic oligonucleotide
aacuaugcaaggagcccgu

SEQ ID NO: 604487 - RNA, 19 nt, Artificial Sequence
  Description of Artificial Sequence: Synthetic oligonucleotide
cagagguugagguucaagu

SEQ ID NO: 604488 - RNA, 19 nt, Artificial Sequence
  Description of Artificial Sequence: Synthetic oligonucleotide
gcauccgguacaucaaggc

SEQ ID NO: 604489 - RNA, 19 nt, Artificial Sequence
  Description of Artificial Sequence: Synthetic oligonucleotide
cugcuaaggcuuguuuucc

SEQ ID NO: 604490 - RNA, 19 nt, Artificial Sequence
  Description of Artificial Sequence: Synthetic oligonucleotide
uggagcgcuucuuucccac

SEQ ID NO: 604491 - RNA, 19 nt, Artificial Sequence
  Description of Artificial Sequence: Synthetic oligonucleotide
acaccacggcuccaggaug

SEQ ID NO: 604492 - RNA, 19 nt, Artificial Sequence
  Description of Artificial Sequence: Synthetic oligonucleotide
gacaugccuaucgagucga

SEQ ID NO: 604493 - RNA, 19 nt, Artificial Sequence
  Description of Artificial Sequence: Synthetic oligonucleotide
cuaauaccugaaccaauaa

SEQ ID NO: 604494 - RNA, 19 nt, Artificial Sequence
  Description of Artificial Sequence: Synthetic oligonucleotide
gacucauggaaggcaacca

SEQ ID NO: 604495 - RNA, 19 nt, Artificial Sequence
  Description of Artificial Sequence: Synthetic oligonucleotide
ccuccaauuaccucgacaa

SEQ ID NO: 604496 - RNA, 19 nt, Artificial Sequence
  Description of Artificial Sequence: Synthetic oligonucleotide
cagaugugugccccucccg

SEQ ID NO: 604497 - RNA, 19 nt, Artificial Sequence
  Description of Artificial Sequence: Synthetic oligonucleotide
acgucguccaaugcccacg

SEQ ID NO: 604498 - RNA, 19 nt, Artificial Sequence
  Description of Artificial Sequence: Synthetic oligonucleotide
auugcagauguuggcgaug

SEQ ID NO: 604499 - RNA, 19 nt, Artificial Sequence
  Description of Artificial Sequence: Synthetic oligonucleotide
cuagugccaugcacauccg

SEQ ID NO: 604500 - RNA, 19 nt, Artificial Sequence
  Description of Artificial Sequence: Synthetic oligonucleotide
uugcuucaugguccaucag

SEQ ID NO: 604501 - RNA, 19 nt, Artificial Sequence
  Description of Artificial Sequence: Synthetic oligonucleotide
ggugaaacgugccauuuua

SEQ ID NO: 604502 - RNA, 19 nt, Artificial Sequence
  Description of Artificial Sequence: Synthetic oligonucleotide
ugggccccagauguaaccc

SEQ ID NO: 604503 - RNA, 19 nt, Artificial Sequence
  Description of Artificial Sequence: Synthetic oligonucleotide
cagucgaggaaguaguugu

SEQ ID NO: 604504 - RNA, 19 nt, Artificial Sequence
  Description of Artificial Sequence: Synthetic oligonucleotide
ggcaaccacucucugcucc

SEQ ID NO: 604505 - RNA, 19 nt, Artificial Sequence
  Description of Artificial Sequence: Synthetic oligonucleotide
ugaagggacgucguccaau

SEQ ID NO: 604506 - RNA, 19 nt, Artificial Sequence
  Description of Artificial Sequence: Synthetic oligonucleotide
gaagaucaaugaagacaug

SEQ ID NO: 604507 - RNA, 19 nt, Artificial Sequence
  Description of Artificial Sequence: Synthetic oligonucleotide
cugacggcagcuugccaac

SEQ ID NO: 604508 - RNA, 19 nt, Artificial Sequence
  Description of Artificial Sequence: Synthetic oligonucleotide
ucgcacacgggcagcuccc

SEQ ID NO: 604509 - RNA, 19 nt, Artificial Sequence
  Description of Artificial Sequence: Synthetic oligonucleotide
ugugugccccucccgugca

SEQ ID NO: 604510 - RNA, 19 nt, Artificial Sequence
  Description of Artificial Sequence: Synthetic oligonucleotide
aggcugacggcagcuugcc

SEQ ID NO: 604511 - RNA, 19 nt, Artificial Sequence
  Description of Artificial Sequence: Synthetic oligonucleotide
gguggagcgcuucuuuccc

SEQ ID NO: 604512 - RNA, 19 nt, Artificial Sequence
  Description of Artificial Sequence: Synthetic oligonucleotide
gccgaggucggccaaacac

SEQ ID NO: 604513 - RNA, 19 nt, Artificial Sequence
  Description of Artificial Sequence: Synthetic oligonucleotide
cuuucggguaccaccugca

SEQ ID NO: 604514 - RNA, 19 nt, Artificial Sequence
  Description of Artificial Sequence: Synthetic oligonucleotide
aggcuucgcacacgggcag

SEQ ID NO: 604515 - RNA, 19 nt, Artificial Sequence
  Description of Artificial Sequence: Synthetic oligonucleotide
acucaaaguugaacgugug

SEQ ID NO: 604516 - RNA, 19 nt, Artificial Sequence
  Description of Artificial Sequence: Synthetic oligonucleotide
cucgggcuuccuugaagag

SEQ ID NO: 604517 - RNA, 19 nt, Artificial Sequence
  Description of Artificial Sequence: Synthetic oligonucleotide
ugcuaggugccaucccaaa

SEQ ID NO: 604518 - RNA, 19 nt, Artificial Sequence
  Description of Artificial Sequence: Synthetic oligonucleotide
gaggcuucgcacacgggca

SEQ ID NO: 604519 - RNA, 19 nt, Artificial Sequence
  Description of Artificial Sequence: Synthetic oligonucleotide
aaacgggaauccuguccuu

SEQ ID NO: 604520 - RNA, 19 nt, Artificial Sequence
  Description of Artificial Sequence: Synthetic oligonucleotide
gacgucguccaaugcccac

SEQ ID NO: 604521 - RNA, 19 nt, Artificial Sequence
  Description of Artificial Sequence: Synthetic oligonucleotide
uucuucgguguuggagaag

SEQ ID NO: 604522 - RNA, 19 nt, Artificial Sequence
  Description of Artificial Sequence: Synthetic oligonucleotide
ccgaggucggccaaacacc

SEQ ID NO: 604523 - RNA, 19 nt, Artificial Sequence
  Description of Artificial Sequence: Synthetic oligonucleotide
cagaagcgcauucgccagc

SEQ ID NO: 604524 - RNA, 19 nt, Artificial Sequence
  Description of Artificial Sequence: Synthetic oligonucleotide
caucagagcauuguccaaa

SEQ ID NO: 604525 - RNA, 19 nt, Artificial Sequence
  Description of Artificial Sequence: Synthetic oligonucleotide
gggacgucguccaaugccc

SEQ ID NO: 604526 - RNA, 19 nt, Artificial Sequence
  Description of Artificial Sequence: Synthetic oligonucleotide
aaagucgguccaagaaaua

SEQ ID NO: 604527 - RNA, 19 nt, Artificial Sequence
  Description of Artificial Sequence: Synthetic oligonucleotide
aggcaaccacucucugcuc

SEQ ID NO: 604528 - RNA, 19 nt, Artificial Sequence
  Description of Artificial Sequence: Synthetic oligonucleotide
ggcugaagggacgucgucc

SEQ ID NO: 604529 - RNA, 19 nt, Artificial Sequence
  Description of Artificial Sequence: Synthetic oligonucleotide
guuaagggucuguucuucu

SEQ ID NO: 604530 - RNA, 19 nt, Artificial Sequence
  Description of Artificial Sequence: Synthetic oligonucleotide
cagucagucugaaaacaua

SEQ ID NO: 604531 - RNA, 19 nt, Artificial Sequence
  Description of Artificial Sequence: Synthetic oligonucleotide
ugcggguaaccuuccucaa

SEQ ID NO: 604532 - RNA, 19 nt, Artificial Sequence
  Description of Artificial Sequence: Synthetic oligonucleotide
cauuacagcuucugugugu

SEQ ID NO: 604533 - RNA, 19 nt, Artificial Sequence
  Description of Artificial Sequence: Synthetic oligonucleotide
gcaaccugcauccgguaca

SEQ ID NO: 604534 - RNA, 19 nt, Artificial Sequence
  Description of Artificial Sequence: Synthetic oligonucleotide
agcgcauucgccagcgccu

SEQ ID NO: 604535 - RNA, 19 nt, Artificial Sequence
  Description of Artificial Sequence: Synthetic oligonucleotide
gcuaggugccaucccaaac

SEQ ID NO: 604536 - RNA, 19 nt, Artificial Sequence
  Description of Artificial Sequence: Synthetic oligonucleotide
gacacgcuccacggcauac

SEQ ID NO: 604537 - RNA, 19 nt, Artificial Sequence
  Description of Artificial Sequence: Synthetic oligonucleotide
gcugaagggacgucgucca

SEQ ID NO: 604538 - RNA, 19 nt, Artificial Sequence
  Description of Artificial Sequence: Synthetic oligonucleotide
cacgcuccacggcauacuc

SEQ ID NO: 604539 - RNA, 19 nt, Artificial Sequence
  Description of Artificial Sequence: Synthetic oligonucleotide
cugcgcgaccgccuagugc

SEQ ID NO: 604540 - RNA, 19 nt, Artificial Sequence
  Description of Artificial Sequence: Synthetic oligonucleotide
gcaccucgccuuuagccag

SEQ ID NO: 604541 - RNA, 19 nt, Artificial Sequence
  Description of Artificial Sequence: Synthetic oligonucleotide
ugugccccucccgugcagc

SEQ ID NO: 604542 - RNA, 19 nt, Artificial Sequence
  Description of Artificial Sequence: Synthetic oligonucleotide
ucgaggugcuauggagacc

SEQ ID NO: 604543 - RNA, 19 nt, Artificial Sequence
  Description of Artificial Sequence: Synthetic oligonucleotide
uggggcggugggccaauga

SEQ ID NO: 604544 - RNA, 19 nt, Artificial Sequence
  Description of Artificial Sequence: Synthetic oligonucleotide
ucggcgccacugaauccug

SEQ ID NO: 604545 - RNA, 19 nt, Artificial Sequence
  Description of Artificial Sequence: Synthetic oligonucleotide
agguacuggucccgaggga

SEQ ID NO: 604546 - RNA, 19 nt, Artificial Sequence
  Description of Artificial Sequence: Synthetic oligonucleotide
gaagcgcauucgccagcgc

SEQ ID NO: 604547 - RNA, 19 nt, Artificial Sequence
  Description of Artificial Sequence: Synthetic oligonucleotide
gcucgggcuuccuugaaga

SEQ ID NO: 604548 - RNA, 19 nt, Artificial Sequence
  Description of Artificial Sequence: Synthetic oligonucleotide
cauucgccagcgccugcag

SEQ ID NO: 604549 - RNA, 19 nt, Artificial Sequence
  Description of Artificial Sequence: Synthetic oligonucleotide
cugcugaacgagauggccu

SEQ ID NO: 604550 - RNA, 19 nt, Artificial Sequence
  Description of Artificial Sequence: Synthetic oligonucleotide
ucccaguaacagggcaccc

SEQ ID NO: 604551 - RNA, 19 nt, Artificial Sequence
  Description of Artificial Sequence: Synthetic oligonucleotide
cacauccgcucaaacagcu

SEQ ID NO: 604552 - RNA, 19 nt, Artificial Sequence
  Description of Artificial Sequence: Synthetic oligonucleotide
ucccauccacaauggugaa

SEQ ID NO: 604553 - RNA, 19 nt, Artificial Sequence
  Description of Artificial Sequence: Synthetic oligonucleotide
gccuaucgagucgaccugg

SEQ ID NO: 604554 - RNA, 19 nt, Artificial Sequence
  Description of Artificial Sequence: Synthetic oligonucleotide
cuaguagcaccuucucagu

SEQ ID NO: 604555 - RNA, 19 nt, Artificial Sequence
  Description of Artificial Sequence: Synthetic oligonucleotide
gugaaacgugccauuuuaa

SEQ ID NO: 604556 - RNA, 19 nt, Artificial Sequence
  Description of Artificial Sequence: Synthetic oligonucleotide
ccaauuaccucgacaaacu

SEQ ID NO: 604557 - RNA, 19 nt, Artificial Sequence
  Description of Artificial Sequence: Synthetic oligonucleotide
cauuuguucgaggugcuau

SEQ ID NO: 604558 - RNA, 19 nt, Artificial Sequence
  Description of Artificial Sequence: Synthetic oligonucleotide
uugcaaccugcauccggua

SEQ ID NO: 604559 - RNA, 19 nt, Artificial Sequence
  Description of Artificial Sequence: Synthetic oligonucleotide
ggcucauuacaacagcaau

SEQ ID NO: 604560 - RNA, 19 nt, Artificial Sequence
  Description of Artificial Sequence: Synthetic oligonucleotide
ugcccacgaggcccucuug

SEQ ID NO: 604561 - RNA, 19 nt, Artificial Sequence
  Description of Artificial Sequence: Synthetic oligonucleotide
cacugaauccgccuucccu

SEQ ID NO: 604562 - RNA, 19 nt, Artificial Sequence
  Description of Artificial Sequence: Synthetic oligonucleotide
caaacuccgggccagccau

SEQ ID NO: 604563 - RNA, 19 nt, Artificial Sequence
  Description of Artificial Sequence: Synthetic oligonucleotide
gcacccuuuggaaccuugg

SEQ ID NO: 604564 - RNA, 19 nt, Artificial Sequence
  Description of Artificial Sequence: Synthetic oligonucleotide
acaugccuaucgagucgac

SEQ ID NO: 604565 - RNA, 19 nt, Artificial Sequence
  Description of Artificial Sequence: Synthetic oligonucleotide
cgguacaucaaggccagcc

SEQ ID NO: 604566 - RNA, 19 nt, Artificial Sequence
  Description of Artificial Sequence: Synthetic oligonucleotide
acgugccauuuuaagcuga

SEQ ID NO: 604567 - RNA, 19 nt, Artificial Sequence
  Description of Artificial Sequence: Synthetic oligonucleotide
ccuaucgagucgaccuggc

SEQ ID NO: 604568 - RNA, 19 nt, Artificial Sequence
  Description of Artificial Sequence: Synthetic oligonucleotide
uccuguccgcuuguaggaa

SEQ ID NO: 604569 - RNA, 19 nt, Artificial Sequence
  Description of Artificial Sequence: Synthetic oligonucleotide
acauccgcucaaacagcug

SEQ ID NO: 604570 - RNA, 19 nt, Artificial Sequence
  Description of Artificial Sequence: Synthetic oligonucleotide
cacuuucggguaccaccug

SEQ ID NO: 604571 - RNA, 19 nt, Artificial Sequence
  Description of Artificial Sequence: Synthetic oligonucleotide
gucgaggaaguaguugucu

SEQ ID NO: 604572 - RNA, 19 nt, Artificial Sequence
  Description of Artificial Sequence: Synthetic oligonucleotide
ugacggcagcuugccaaca

SEQ ID NO: 604573 - RNA, 19 nt, Artificial Sequence
  Description of Artificial Sequence: Synthetic oligonucleotide
cuccaauuaccucgacaaa

SEQ ID NO: 604574 - RNA, 19 nt, Artificial Sequence
  Description of Artificial Sequence: Synthetic oligonucleotide
gugcccauuccguccaucu

SEQ ID NO: 604575 - RNA, 19 nt, Artificial Sequence
  Description of Artificial Sequence: Synthetic oligonucleotide
gucguccaaugcccacgag

SEQ ID NO: 604576 - RNA, 19 nt, Artificial Sequence
  Description of Artificial Sequence: Synthetic oligonucleotide
ccgagggagcaucugagca

SEQ ID NO: 604577 - RNA, 19 nt, Artificial Sequence
  Description of Artificial Sequence: Synthetic oligonucleotide
caauggugaaacgugccau

SEQ ID NO: 604578 - RNA, 19 nt, Artificial Sequence
  Description of Artificial Sequence: Synthetic oligonucleotide
cacgggcagcucccagucc

SEQ ID NO: 604579 - RNA, 19 nt, Artificial Sequence
  Description of Artificial Sequence: Synthetic oligonucleotide
gcacauccgcucaaacagc

SEQ ID NO: 604580 - RNA, 19 nt, Artificial Sequence
  Description of Artificial Sequence: Synthetic oligonucleotide
gucggcgccacugaauccu

SEQ ID NO: 604581 - RNA, 19 nt, Artificial Sequence
  Description of Artificial Sequence: Synthetic oligonucleotide
cgagauggccucagcugcg

SEQ ID NO: 604582 - RNA, 19 nt, Artificial Sequence
  Description of Artificial Sequence: Synthetic oligonucleotide
ccacaucacuuucggguac

SEQ ID NO: 604583 - RNA, 19 nt, Artificial Sequence
  Description of Artificial Sequence: Synthetic oligonucleotide
ucgagucgaccuggccuca

SEQ ID NO: 604584 - RNA, 19 nt, Artificial Sequence
  Description of Artificial Sequence: Synthetic oligonucleotide
ccgugcucgggcuuccuug

SEQ ID NO: 604585 - RNA, 19 nt, Artificial Sequence
  Description of Artificial Sequence: Synthetic oligonucleotide
augcuaggugccaucccaa

SEQ ID NO: 604586 - RNA, 19 nt, Artificial Sequence
  Description of Artificial Sequence: Synthetic oligonucleotide
gcgccacugaauccuggug

SEQ ID NO: 604587 - RNA, 19 nt, Artificial Sequence
  Description of Artificial Sequence: Synthetic oligonucleotide
guugaacguguggacagau

SEQ ID NO: 604588 - RNA, 19 nt, Artificial Sequence
  Description of Artificial Sequence: Synthetic oligonucleotide
augacacgcuccacggcau

SEQ ID NO: 604589 - RNA, 19 nt, Artificial Sequence
  Description of Artificial Sequence: Synthetic oligonucleotide
agccgaggucggccaaaca

SEQ ID NO: 604590 - RNA, 19 nt, Artificial Sequence
  Description of Artificial Sequence: Synthetic oligonucleotide
ccgccuagugccaugcaca

SEQ ID NO: 604591 - RNA, 19 nt, Artificial Sequence
  Description of Artificial Sequence: Synthetic oligonucleotide
cccaaugcuaggugccauc

SEQ ID NO: 604592 - RNA, 19 nt, Artificial Sequence
  Description of Artificial Sequence: Synthetic oligonucleotide
caguuuguccagguugucu

SEQ ID NO: 604593 - RNA, 19 nt, Artificial Sequence
  Description of Artificial Sequence: Synthetic oligonucleotide
gagccggagcuuccuccuc

SEQ ID NO: 604594 - RNA, 19 nt, Artificial Sequence
  Description of Artificial Sequence: Synthetic oligonucleotide
acgcuccacggcauacuca

SEQ ID NO: 604595 - RNA, 19 nt, Artificial Sequence
  Description of Artificial Sequence: Synthetic oligonucleotide
gaccgccuagugccaugca

SEQ ID NO: 604596 - RNA, 19 nt, Artificial Sequence
  Description of Artificial Sequence: Synthetic oligonucleotide
cuucgcacacgggcagcuc

SEQ ID NO: 604597 - RNA, 19 nt, Artificial Sequence
  Description of Artificial Sequence: Synthetic oligonucleotide
ggacagaugugugccccuc

SEQ ID NO: 604598 - RNA, 19 nt, Artificial Sequence
  Description of Artificial Sequence: Synthetic oligonucleotide
aaacuccgggccagccauu

SEQ ID NO: 604599 - RNA, 19 nt, Artificial Sequence
  Description of Artificial Sequence: Synthetic oligonucleotide
gguaccaccugcacacgcu

SEQ ID NO: 604600 - RNA, 19 nt, Artificial Sequence
  Description of Artificial Sequence: Synthetic oligonucleotide
cgaggucggccaaacacca

SEQ ID NO: 604601 - RNA, 19 nt, Artificial Sequence
  Description of Artificial Sequence: Synthetic oligonucleotide
cagcugcgcgaccgccuag

SEQ ID NO: 604602 - RNA, 19 nt, Artificial Sequence
  Description of Artificial Sequence: Synthetic oligonucleotide
ccuuggaaaggaucuuacu

SEQ ID NO: 604603 - RNA, 19 nt, Artificial Sequence
  Description of Artificial Sequence: Synthetic oligonucleotide
aggugcagucgaggaagua

SEQ ID NO: 604604 - RNA, 19 nt, Artificial Sequence
  Description of Artificial Sequence: Synthetic oligonucleotide
gcggugggccaaugagggc

SEQ ID NO: 604605 - RNA, 19 nt, Artificial Sequence
  Description of Artificial Sequence: Synthetic oligonucleotide
gcugcgcgaccgccuagug

SEQ ID NO: 604606 - RNA, 19 nt, Artificial Sequence
  Description of Artificial Sequence: Synthetic oligonucleotide
ggcuucgcacacgggcagc

SEQ ID NO: 604607 - RNA, 19 nt, Artificial Sequence
  Description of Artificial Sequence: Synthetic oligonucleotide
ccuguccgcuuguaggaaa

SEQ ID NO: 604608 - RNA, 19 nt, Artificial Sequence
  Description of Artificial Sequence: Synthetic oligonucleotide
gcgaccgccuagugccaug

SEQ ID NO: 604609 - RNA, 19 nt, Artificial Sequence
  Description of Artificial Sequence: Synthetic oligonucleotide
caggugcagucgaggaagu

SEQ ID NO: 604610 - RNA, 19 nt, Artificial Sequence
  Description of Artificial Sequence: Synthetic oligonucleotide
ggcccaaugcuaggugcca

SEQ ID NO: 604611 - RNA, 19 nt, Artificial Sequence
  Description of Artificial Sequence: Synthetic oligonucleotide
caaugcggguaaccuuccu

SEQ ID NO: 604612 - RNA, 19 nt, Artificial Sequence
  Description of Artificial Sequence: Synthetic oligonucleotide
acauggagguggagcgcuu

SEQ ID NO: 604613 - RNA, 19 nt, Artificial Sequence
  Description of Artificial Sequence: Synthetic oligonucleotide
ggacgucguccaaugccca

SEQ ID NO: 604614 - RNA, 19 nt, Artificial Sequence
  Description of Artificial Sequence: Synthetic oligonucleotide
gcgcauucgccagcgccug

SEQ ID NO: 604615 - RNA, 19 nt, Artificial Sequence
  Description of Artificial Sequence: Synthetic oligonucleotide
gcugaacgagauggccuca

SEQ ID NO: 604616 - RNA, 19 nt, Artificial Sequence
  Description of Artificial Sequence: Synthetic oligonucleotide
gcccacgaggcccucuugu

SEQ ID NO: 604617 - RNA, 19 nt, Artificial Sequence
  Description of Artificial Sequence: Synthetic oligonucleotide
cgaccgccuagugccaugc

SEQ ID NO: 604618 - RNA, 19 nt, Artificial Sequence
  Description of Artificial Sequence: Synthetic oligonucleotide
ccacggcauacucaaaguu

SEQ ID NO: 604619 - RNA, 19 nt, Artificial Sequence
  Description of Artificial Sequence: Synthetic oligonucleotide
cggcgccacugaauccugg

SEQ ID NO: 604620 - RNA, 19 nt, Artificial Sequence
  Description of Artificial Sequence: Synthetic oligonucleotide
cacgcugcaccucgccuuu

SEQ ID NO: 604621 - RNA, 19 nt, Artificial Sequence
  Description of Artificial Sequence: Synthetic oligonucleotide
gugggccaaugagggccuc

SEQ ID NO: 604622 - RNA, 19 nt, Artificial Sequence
  Description of Artificial Sequence: Synthetic oligonucleotide
cgcauucgccagcgccugc

SEQ ID NO: 604623 - RNA, 19 nt, Artificial Sequence
  Description of Artificial Sequence: Synthetic oligonucleotide
ccccagauguaacccugcu

SEQ ID NO: 604624 - RNA, 19 nt, Artificial Sequence
  Description of Artificial Sequence: Synthetic oligonucleotide
cgugccauuuuaagcugau

SEQ ID NO: 604625 - RNA, 19 nt, Artificial Sequence
  Description of Artificial Sequence: Synthetic oligonucleotide
cgaugucggcgccacugaa

SEQ ID NO: 604626 - RNA, 19 nt, Artificial Sequence
  Description of Artificial Sequence: Synthetic oligonucleotide
cugagccuccguggcuacu

SEQ ID NO: 604627 - RNA, 19 nt, Artificial Sequence
  Description of Artificial Sequence: Synthetic oligonucleotide
ccgguacaucaaggccagc

SEQ ID NO: 604628 - RNA, 19 nt, Artificial Sequence
  Description of Artificial Sequence: Synthetic oligonucleotide
cgggaauccuguccuugcu

SEQ ID NO: 604629 - RNA, 19 nt, Artificial Sequence
  Description of Artificial Sequence: Synthetic oligonucleotide
cgccuagugccaugcacau

SEQ ID NO: 604630 - RNA, 19 nt, Artificial Sequence
  Description of Artificial Sequence: Synthetic oligonucleotide
gcgcgaccgccuagugcca

SEQ ID NO: 604631 - RNA, 19 nt, Artificial Sequence
  Description of Artificial Sequence: Synthetic oligonucleotide
cgcgaccgccuagugccau

SEQ ID NO: 604632 - RNA, 19 nt, Artificial Sequence
  Description of Artificial Sequence: Synthetic oligonucleotide
aaacuuguaaaccucuggg

SEQ ID NO: 604633 - RNA, 19 nt, Artificial Sequence
  Description of Artificial Sequence: Synthetic oligonucleotide
acuuguaaaccucugggcc

SEQ ID NO: 604634 - RNA, 19 nt, Artificial Sequence
  Description of Artificial Sequence: Synthetic oligonucleotide
uguaguaugguucauuuac

SEQ ID NO: 604635 - RNA, 19 nt, Artificial Sequence
  Description of Artificial Sequence: Synthetic oligonucleotide
ucuaguaagaguuaguauc

SEQ ID NO: 604636 - RNA, 19 nt, Artificial Sequence
  Description of Artificial Sequence: Synthetic oligonucleotide
aacuuguaaaccucugggc

SEQ ID NO: 604637 - RNA, 19 nt, Artificial Sequence
  Description of Artificial Sequence: Synthetic oligonucleotide
agugccaagacauucugcc

SEQ ID NO: 604638 - RNA, 19 nt, Artificial Sequence
  Description of Artificial Sequence: Synthetic oligonucleotide
cugaaugucaaacagguag

SEQ ID NO: 604639 - RNA, 19 nt, Artificial Sequence
  Description of Artificial Sequence: Synthetic oligonucleotide
agugccaucucauuguagc

SEQ ID NO: 604640 - RNA, 19 nt, Artificial Sequence
  Description of Artificial Sequence: Synthetic oligonucleotide
aacucuagaacagagaaca

SEQ ID NO: 604641 - RNA, 19 nt, Artificial Sequence
  Description of Artificial Sequence: Synthetic oligonucleotide
uuuggucuaacgcugggcg

SEQ ID NO: 604642 - RNA, 19 nt, Artificial Sequence
  Description of Artificial Sequence: Synthetic oligonucleotide
aaagcuuagaaacuuguaa

SEQ ID NO: 604643 - RNA, 19 nt, Artificial Sequence
  Description of Artificial Sequence: Synthetic oligonucleotide
guaugguucauuuaccagg

SEQ ID NO: 604644 - RNA, 19 nt, Artificial Sequence
  Description of Artificial Sequence: Synthetic oligonucleotide
ucugccuagagcaacaaga

SEQ ID NO: 604645 - RNA, 19 nt, Artificial Sequence
  Description of Artificial Sequence: Synthetic oligonucleotide
aacaccucgcccuuggcac

SEQ ID NO: 604646 - RNA, 19 nt, Artificial Sequence
  Description of Artificial Sequence: Synthetic oligonucleotide
agacauucugccuagagca

SEQ ID NO: 604647 - RNA, 19 nt, Artificial Sequence
  Description of Artificial Sequence: Synthetic oligonucleotide
agcuuagaaacuuguaaac

SEQ ID NO: 604648 - RNA, 19 nt, Artificial Sequence
  Description of Artificial Sequence: Synthetic oligonucleotide
aacaagaggaacgccagcg

SEQ ID NO: 604649 - RNA, 19 nt, Artificial Sequence
  Description of Artificial Sequence: Synthetic oligonucleotide
uugauuagugcugagaaga

SEQ ID NO: 604650 - RNA, 19 nt, Artificial Sequence
  Description of Artificial Sequence: Synthetic oligonucleotide
aagcuuagaaacuuguaaa

SEQ ID NO: 604651 - RNA, 19 nt, Artificial Sequence
  Description of Artificial Sequence: Synthetic oligonucleotide
auggcauggguuuccagcc

SEQ ID NO: 604652 - RNA, 19 nt, Artificial Sequence
  Description of Artificial Sequence: Synthetic oligonucleotide
auuuaccaggaucagaccu

SEQ ID NO: 604653 - RNA, 19 nt, Artificial Sequence
  Description of Artificial Sequence: Synthetic oligonucleotide
acguaaaggacccagugug

SEQ ID NO: 604654 - RNA, 19 nt, Artificial Sequence
  Description of Artificial Sequence: Synthetic oligonucleotide
gauugcaccacccggauca

SEQ ID NO: 604655 - RNA, 19 nt, Artificial Sequence
  Description of Artificial Sequence: Synthetic oligonucleotide
uaagaguuaguaucuuugc

SEQ ID NO: 604656 - RNA, 19 nt, Artificial Sequence
  Description of Artificial Sequence: Synthetic oligonucleotide
guagaggccaucuucguag

SEQ ID NO: 604657 - RNA, 19 nt, Artificial Sequence
  Description of Artificial Sequence: Synthetic oligonucleotide
ugaaugucaaacagguaga

SEQ ID NO: 604658 - RNA, 19 nt, Artificial Sequence
  Description of Artificial Sequence: Synthetic oligonucleotide
ucuccuuucgcacugugcu

SEQ ID NO: 604659 - RNA, 19 nt, Artificial Sequence
  Description of Artificial Sequence: Synthetic oligonucleotide
uuagaaacuuguaaaccuc

SEQ ID NO: 604660 - RNA, 19 nt, Artificial Sequence
  Description of Artificial Sequence: Synthetic oligonucleotide
agcuacuuguccucugugc

SEQ ID NO: 604661 - RNA, 19 nt, Artificial Sequence
  Description of Artificial Sequence: Synthetic oligonucleotide
uucguagggaguccgagug

SEQ ID NO: 604662 - RNA, 19 nt, Artificial Sequence
  Description of Artificial Sequence: Synthetic oligonucleotide
cuacagucaagcuggagag

SEQ ID NO: 604663 - RNA, 19 nt, Artificial Sequence
  Description of Artificial Sequence: Synthetic oligonucleotide
caucccuacauccucaggc

SEQ ID NO: 604664 - RNA, 19 nt, Artificial Sequence
  Description of Artificial Sequence: Synthetic oligonucleotide
ucggucacuaucaaagcca

SEQ ID NO: 604665 - RNA, 19 nt, Artificial Sequence
  Description of Artificial Sequence: Synthetic oligonucleotide
ugcuccuuaacgcacugcc

SEQ ID NO: 604666 - RNA, 19 nt, Artificial Sequence
  Description of Artificial Sequence: Synthetic oligonucleotide
uuucgcacugugcugaaga

SEQ ID NO: 604667 - RNA, 19 nt, Artificial Sequence
  Description of Artificial Sequence: Synthetic oligonucleotide
aaagagugguuugagggug

SEQ ID NO: 604668 - RNA, 19 nt, Artificial Sequence
  Description of Artificial Sequence: Synthetic oligonucleotide
cccauuaucauacagguug

SEQ ID NO: 604669 - RNA, 19 nt, Artificial Sequence
  Description of Artificial Sequence: Synthetic oligonucleotide
uccucuuuggucuaacgcu

SEQ ID NO: 604670 - RNA, 19 nt, Artificial Sequence
  Description of Artificial Sequence: Synthetic oligonucleotide
aaacucuagaacagagaac

SEQ ID NO: 604671 - RNA, 19 nt, Artificial Sequence
  Description of Artificial Sequence: Synthetic oligonucleotide
ucauggauugcaccacccg

SEQ ID NO: 604672 - RNA, 19 nt, Artificial Sequence
  Description of Artificial Sequence: Synthetic oligonucleotide
ugauuagugcugagaagag

SEQ ID NO: 604673 - RNA, 19 nt, Artificial Sequence
  Description of Artificial Sequence: Synthetic oligonucleotide
uagaaacuuguaaaccucu

SEQ ID NO: 604674 - RNA, 19 nt, Artificial Sequence
  Description of Artificial Sequence: Synthetic oligonucleotide
guaagaguuaguaucuuug

SEQ ID NO: 604675 - RNA, 19 nt, Artificial Sequence
  Description of Artificial Sequence: Synthetic oligonucleotide
cuucguuguaguaugguuc

SEQ ID NO: 604676 - RNA, 19 nt, Artificial Sequence
  Description of Artificial Sequence: Synthetic oligonucleotide
aaaggacccaguguggcag

SEQ ID NO: 604677 - RNA, 19 nt, Artificial Sequence
  Description of Artificial Sequence: Synthetic oligonucleotide
caaacuugccgcugcaggg

SEQ ID NO: 604678 - RNA, 19 nt, Artificial Sequence
  Description of Artificial Sequence: Synthetic oligonucleotide
agaguuaguaucuuugcuu

SEQ ID NO: 604679 - RNA, 19 nt, Artificial Sequence
  Description of Artificial Sequence: Synthetic oligonucleotide
aacaccccaccucugaccu

SEQ ID NO: 604680 - RNA, 19 nt, Artificial Sequence
  Description of Artificial Sequence: Synthetic oligonucleotide
caguguggcagcacgaagg

SEQ ID NO: 604681 - RNA, 19 nt, Artificial Sequence
  Description of Artificial Sequence: Synthetic oligonucleotide
uuucuaguaagaguuagua

SEQ ID NO: 604682 - RNA, 19 nt, Artificial Sequence
  Description of Artificial Sequence: Synthetic oligonucleotide
ugguucauuuaccaggauc

SEQ ID NO: 604683 - RNA, 19 nt, Artificial Sequence
  Description of Artificial Sequence: Synthetic oligonucleotide
cauggauugcaccacccgg

SEQ ID NO: 604684 - RNA, 19 nt, Artificial Sequence
  Description of Artificial Sequence: Synthetic oligonucleotide
gagaugagcaccuggagaa

SEQ ID NO: 604685 - RNA, 19 nt, Artificial Sequence
  Description of Artificial Sequence: Synthetic oligonucleotide
agucucagugccucagggc

SEQ ID NO: 604686 - RNA, 19 nt, Artificial Sequence
  Description of Artificial Sequence: Synthetic oligonucleotide
aggguagccgcucuucucg

SEQ ID NO: 604687 - RNA, 19 nt, Artificial Sequence
  Description of Artificial Sequence: Synthetic oligonucleotide
gacucaaugcgguucacca

SEQ ID NO: 604688 - RNA, 19 nt, Artificial Sequence
  Description of Artificial Sequence: Synthetic oligonucleotide
cuugauuagugcugagaag

SEQ ID NO: 604689 - RNA, 19 nt, Artificial Sequence
  Description of Artificial Sequence: Synthetic oligonucleotide
gaacagagaacaccucgcc

SEQ ID NO: 604690 - RNA, 19 nt, Artificial Sequence
  Description of Artificial Sequence: Synthetic oligonucleotide
cuagcagagucuguaagcc

SEQ ID NO: 604691 - RNA, 19 nt, Artificial Sequence
  Description of Artificial Sequence: Synthetic oligonucleotide
cucuagaacagagaacacc

SEQ ID NO: 604692 - RNA, 19 nt, Artificial Sequence
  Description of Artificial Sequence: Synthetic oligonucleotide
agaccuuggauggagauga

SEQ ID NO: 604693 - RNA, 19 nt, Artificial Sequence
  Description of Artificial Sequence: Synthetic oligonucleotide
ccagccaugacucaaugcg

SEQ ID NO: 604694 - RNA, 19 nt, Artificial Sequence
  Description of Artificial Sequence: Synthetic oligonucleotide
agggugcaaacucuagaac

SEQ ID NO: 604695 - RNA, 19 nt, Artificial Sequence
  Description of Artificial Sequence: Synthetic oligonucleotide
aggggccaucccuacaucc

SEQ ID NO: 604696 - RNA, 19 nt, Artificial Sequence
  Description of Artificial Sequence: Synthetic oligonucleotide
uucuugaaagagugguuug

SEQ ID NO: 604697 - RNA, 19 nt, Artificial Sequence
  Description of Artificial Sequence: Synthetic oligonucleotide
ugcaccacccggaucagug

SEQ ID NO: 604698 - RNA, 19 nt, Artificial Sequence
  Description of Artificial Sequence: Synthetic oligonucleotide
auagccuuccugcaggccu

SEQ ID NO: 604699 - RNA, 19 nt, Artificial Sequence
  Description of Artificial Sequence: Synthetic oligonucleotide
accaugacacuccuuucuc

SEQ ID NO: 604700 - RNA, 19 nt, Artificial Sequence
  Description of Artificial Sequence: Synthetic oligonucleotide
ugaaggugacaccagguuu

SEQ ID NO: 604701 - RNA, 19 nt, Artificial Sequence
  Description of Artificial Sequence: Synthetic oligonucleotide
uccaagagauggagguacg

SEQ ID NO: 604702 - RNA, 19 nt, Artificial Sequence
  Description of Artificial Sequence: Synthetic oligonucleotide
aagugccaagacauucugc

SEQ ID NO: 604703 - RNA, 19 nt, Artificial Sequence
  Description of Artificial Sequence: Synthetic oligonucleotide
uccgacugcgcuagcagag

SEQ ID NO: 604704 - RNA, 19 nt, Artificial Sequence
  Description of Artificial Sequence: Synthetic oligonucleotide
ucaacggcauccucuaccu

SEQ ID NO: 604705 - RNA, 19 nt, Artificial Sequence
  Description of Artificial Sequence: Synthetic oligonucleotide
cucgaagaccucaggaggc

SEQ ID NO: 604706 - RNA, 19 nt, Artificial Sequence
  Description of Artificial Sequence: Synthetic oligonucleotide
uucuaguaagaguuaguau

SEQ ID NO: 604707 - RNA, 19 nt, Artificial Sequence
  Description of Artificial Sequence: Synthetic oligonucleotide
cucggucacuaucaaagcc

SEQ ID NO: 604708 - RNA, 19 nt, Artificial Sequence
  Description of Artificial Sequence: Synthetic oligonucleotide
aaaugacauagcugcaaua

SEQ ID NO: 604709 - RNA, 19 nt, Artificial Sequence
  Description of Artificial Sequence: Synthetic oligonucleotide
auagcuccaagagauggag

SEQ ID NO: 604710 - RNA, 19 nt, Artificial Sequence
  Description of Artificial Sequence: Synthetic oligonucleotide
ucuugaaagagugguuuga

SEQ ID NO: 604711 - RNA, 19 nt, Artificial Sequence
  Description of Artificial Sequence: Synthetic oligonucleotide
uuucccaaccuuaaauauu

SEQ ID NO: 604712 - RNA, 19 nt, Artificial Sequence
  Description of Artificial Sequence: Synthetic oligonucleotide
aucucgggacaccucuugc

SEQ ID NO: 604713 - RNA, 19 nt, Artificial Sequence
  Description of Artificial Sequence: Synthetic oligonucleotide
aaagccgaugucaggguag

SEQ ID NO: 604714 - RNA, 19 nt, Artificial Sequence
  Description of Artificial Sequence: Synthetic oligonucleotide
cugcaauaugcucaacggc

SEQ ID NO: 604715 - RNA, 19 nt, Artificial Sequence
  Description of Artificial Sequence: Synthetic oligonucleotide
uccuuaacgcacugccagg

SEQ ID NO: 604716 - RNA, 19 nt, Artificial Sequence
  Description of Artificial Sequence: Synthetic oligonucleotide
uuggucuaacgcugggcgg

SEQ ID NO: 604717 - RNA, 19 nt, Artificial Sequence
  Description of Artificial Sequence: Synthetic oligonucleotide
aagccgaugucaggguagc

SEQ ID NO: 604718 - RNA, 19 nt, Artificial Sequence
  Description of Artificial Sequence: Synthetic oligonucleotide
augcaaggcacguccuccc

SEQ ID NO: 604719 - RNA, 19 nt, Artificial Sequence
  Description of Artificial Sequence: Synthetic oligonucleotide
aagcccuggaagcuacuug

SEQ ID NO: 604720 - RNA, 19 nt, Artificial Sequence
  Description of Artificial Sequence: Synthetic oligonucleotide
caagaucucaggaagggaa

SEQ ID NO: 604721 - RNA, 19 nt, Artificial Sequence
  Description of Artificial Sequence: Synthetic oligonucleotide
aguaagaguuaguaucuuu

SEQ ID NO: 604722 - RNA, 19 nt, Artificial Sequence
  Description of Artificial Sequence: Synthetic oligonucleotide
uaacgcacugccaggccag

SEQ ID NO: 604723 - RNA, 19 nt, Artificial Sequence
  Description of Artificial Sequence: Synthetic oligonucleotide
uuugagggugcaaacucua

SEQ ID NO: 604724 - RNA, 19 nt, Artificial Sequence
  Description of Artificial Sequence: Synthetic oligonucleotide
uucauuuaccaggaucaga

SEQ ID NO: 604725 - RNA, 19 nt, Artificial Sequence
  Description of Artificial Sequence: Synthetic oligonucleotide
gacaagugccaagacauuc

SEQ ID NO: 604726 - RNA, 19 nt, Artificial Sequence
  Description of Artificial Sequence: Synthetic oligonucleotide
agcaacaagaggaacgcca

SEQ ID NO: 604727 - RNA, 19 nt, Artificial Sequence
  Description of Artificial Sequence: Synthetic oligonucleotide
aagcuacuuguccucugug

SEQ ID NO: 604728 - RNA, 19 nt, Artificial Sequence
  Description of Artificial Sequence: Synthetic oligonucleotide
uaaaggacccaguguggca

SEQ ID NO: 604729 - RNA, 19 nt, Artificial Sequence
  Description of Artificial Sequence: Synthetic oligonucleotide
uucugccuagagcaacaag

SEQ ID NO: 604730 - RNA, 19 nt, Artificial Sequence
  Description of Artificial Sequence: Synthetic oligonucleotide
guaguaugguucauuuacc

SEQ ID NO: 604731 - RNA, 19 nt, Artificial Sequence
  Description of Artificial Sequence: Synthetic oligonucleotide
ggaggcuacagucaagcug

SEQ ID NO: 604732 - RNA, 19 nt, Artificial Sequence
  Description of Artificial Sequence: Synthetic oligonucleotide
guaaaggacccaguguggc

SEQ ID NO: 604733 - RNA, 19 nt, Artificial Sequence
  Description of Artificial Sequence: Synthetic oligonucleotide
gcuacagucaagcuggaga

SEQ ID NO: 604734 - RNA, 19 nt, Artificial Sequence
  Description of Artificial Sequence: Synthetic oligonucleotide
ugugcagggcccucaacac

SEQ ID NO: 604735 - RNA, 19 nt, Artificial Sequence
  Description of Artificial Sequence: Synthetic oligonucleotide
ucguagggaguccgagugg

SEQ ID NO: 604736 - RNA, 19 nt, Artificial Sequence
  Description of Artificial Sequence: Synthetic oligonucleotide
ugagggagagagcgcagca

SEQ ID NO: 604737 - RNA, 19 nt, Artificial Sequence
  Description of Artificial Sequence: Synthetic oligonucleotide
ucuucguagggaguccgag

SEQ ID NO: 604738 - RNA, 19 nt, Artificial Sequence
  Description of Artificial Sequence: Synthetic oligonucleotide
cagccaugacucaaugcgg

SEQ ID NO: 604739 - RNA, 19 nt, Artificial Sequence
  Description of Artificial Sequence: Synthetic oligonucleotide
gaggccgucgcaccaacug

SEQ ID NO: 604740 - RNA, 19 nt, Artificial Sequence
  Description of Artificial Sequence: Synthetic oligonucleotide
ugugcucuccggcaugccu

SEQ ID NO: 604741 - RNA, 19 nt, Artificial Sequence
  Description of Artificial Sequence: Synthetic oligonucleotide
gggugcaaacucuagaaca

SEQ ID NO: 604742 - RNA, 19 nt, Artificial Sequence
  Description of Artificial Sequence: Synthetic oligonucleotide
uuccaauccaggugcccag

SEQ ID NO: 604743 - RNA, 19 nt, Artificial Sequence
  Description of Artificial Sequence: Synthetic oligonucleotide
caguuuuaucuuccuugcg

SEQ ID NO: 604744 - RNA, 19 nt, Artificial Sequence
  Description of Artificial Sequence: Synthetic oligonucleotide
aacgccagcggagucucag

SEQ ID NO: 604745 - RNA, 19 nt, Artificial Sequence
  Description of Artificial Sequence: Synthetic oligonucleotide
cugagaguucagcugcagc

SEQ ID NO: 604746 - RNA, 19 nt, Artificial Sequence
  Description of Artificial Sequence: Synthetic oligonucleotide
aaacuugccgcugcaggga

SEQ ID NO: 604747 - RNA, 19 nt, Artificial Sequence
  Description of Artificial Sequence: Synthetic oligonucleotide
gcuagcagagucuguaagc

SEQ ID NO: 604748 - RNA, 19 nt, Artificial Sequence
  Description of Artificial Sequence: Synthetic oligonucleotide
aucccuacauccucaggcu

SEQ ID NO: 604749 - RNA, 19 nt, Artificial Sequence
  Description of Artificial Sequence: Synthetic oligonucleotide
cucaagcagggcagcacgg

SEQ ID NO: 604750 - RNA, 19 nt, Artificial Sequence
  Description of Artificial Sequence: Synthetic oligonucleotide
cucaaaagucuugaccaug

SEQ ID NO: 604751 - RNA, 19 nt, Artificial Sequence
  Description of Artificial Sequence: Synthetic oligonucleotide
cucggccggagucugagag

SEQ ID NO: 604752 - RNA, 19 nt, Artificial Sequence
  Description of Artificial Sequence: Synthetic oligonucleotide
gaaaagcuuagaaacuugu

SEQ ID NO: 604753 - RNA, 19 nt, Artificial Sequence
  Description of Artificial Sequence: Synthetic oligonucleotide
ggugacaccagguuugcca

SEQ ID NO: 604754 - RNA, 19 nt, Artificial Sequence
  Description of Artificial Sequence: Synthetic oligonucleotide
aggagucucacugggccac

SEQ ID NO: 604755 - RNA, 19 nt, Artificial Sequence
  Description of Artificial Sequence: Synthetic oligonucleotide
gacuggauaggaagaggcc

SEQ ID NO: 604756 - RNA, 19 nt, Artificial Sequence
  Description of Artificial Sequence: Synthetic oligonucleotide
ucagaccuuggauggagau

SEQ ID NO: 604757 - RNA, 19 nt, Artificial Sequence
  Description of Artificial Sequence: Synthetic oligonucleotide
gaacucaaucuucuugaaa

SEQ ID NO: 604758 - RNA, 19 nt, Artificial Sequence
  Description of Artificial Sequence: Synthetic oligonucleotide
aacgcugggcggugcugac

SEQ ID NO: 604759 - RNA, 19 nt, Artificial Sequence
  Description of Artificial Sequence: Synthetic oligonucleotide
cuuaacgcacugccaggcc

SEQ ID NO: 604760 - RNA, 19 nt, Artificial Sequence
  Description of Artificial Sequence: Synthetic oligonucleotide
uguugggaagcugaauguc

SEQ ID NO: 604761 - RNA, 19 nt, Artificial Sequence
  Description of Artificial Sequence: Synthetic oligonucleotide
gccuagagcaacaagagga

SEQ ID NO: 604762 - RNA, 19 nt, Artificial Sequence
  Description of Artificial Sequence: Synthetic oligonucleotide
gccucggucacuaucaaag

SEQ ID NO: 604763 - RNA, 19 nt, Artificial Sequence
  Description of Artificial Sequence: Synthetic oligonucleotide
caacaccccaccucugacc

SEQ ID NO: 604764 - RNA, 19 nt, Artificial Sequence
  Description of Artificial Sequence: Synthetic oligonucleotide
gguuugagggugcaaacuc

SEQ ID NO: 604765 - RNA, 19 nt, Artificial Sequence
  Description of Artificial Sequence: Synthetic oligonucleotide
agaaacuuguaaaccucug

SEQ ID NO: 604766 - RNA, 19 nt, Artificial Sequence
  Description of Artificial Sequence: Synthetic oligonucleotide
cagacagggagccgacugg

SEQ ID NO: 604767 - RNA, 19 nt, Artificial Sequence
  Description of Artificial Sequence: Synthetic oligonucleotide
aggccgucgcaccaacugg

SEQ ID NO: 604768 - RNA, 19 nt, Artificial Sequence
  Description of Artificial Sequence: Synthetic oligonucleotide
gaacaccucgcccuuggca

SEQ ID NO: 604769 - RNA, 19 nt, Artificial Sequence
  Description of Artificial Sequence: Synthetic oligonucleotide
uagggaguccgaguggggc

SEQ ID NO: 604770 - RNA, 19 nt, Artificial Sequence
  Description of Artificial Sequence: Synthetic oligonucleotide
gaagacuggauuugcuugu

SEQ ID NO: 604771 - RNA, 19 nt, Artificial Sequence
  Description of Artificial Sequence: Synthetic oligonucleotide
ucuaacgcugggcggugcu

SEQ ID NO: 604772 - RNA, 19 nt, Artificial Sequence
  Description of Artificial Sequence: Synthetic oligonucleotide
ugacucaaugcgguucacc

SEQ ID NO: 604773 - RNA, 19 nt, Artificial Sequence
  Description of Artificial Sequence: Synthetic oligonucleotide
ggacguaaaggacccagug

SEQ ID NO: 604774 - RNA, 19 nt, Artificial Sequence
  Description of Artificial Sequence: Synthetic oligonucleotide
caugacucaaugcgguuca

SEQ ID NO: 604775 - RNA, 19 nt, Artificial Sequence
  Description of Artificial Sequence: Synthetic oligonucleotide
uuguaguaugguucauuua

SEQ ID NO: 604776 - RNA, 19 nt, Artificial Sequence
  Description of Artificial Sequence: Synthetic oligonucleotide
acaagugccaagacauucu

SEQ ID NO: 604777 - RNA, 19 nt, Artificial Sequence
  Description of Artificial Sequence: Synthetic oligonucleotide
cauacaccagaaaugacau

SEQ ID NO: 604778 - RNA, 19 nt, Artificial Sequence
  Description of Artificial Sequence: Synthetic oligonucleotide
cucaagcccuggaagcuac

SEQ ID NO: 604779 - RNA, 19 nt, Artificial Sequence
  Description of Artificial Sequence: Synthetic oligonucleotide
agcggagucucagugccuc

SEQ ID NO: 604780 - RNA, 19 nt, Artificial Sequence
  Description of Artificial Sequence: Synthetic oligonucleotide
cugcgguagcucuuucucc

SEQ ID NO: 604781 - RNA, 19 nt, Artificial Sequence
  Description of Artificial Sequence: Synthetic oligonucleotide
guugggaagcugaauguca

SEQ ID NO: 604782 - RNA, 19 nt, Artificial Sequence
  Description of Artificial Sequence: Synthetic oligonucleotide
uggucuaacgcugggcggu

SEQ ID NO: 604783 - RNA, 19 nt, Artificial Sequence
  Description of Artificial Sequence: Synthetic oligonucleotide
cucgggacaccucuugcac

SEQ ID NO: 604784 - RNA, 19 nt, Artificial Sequence
  Description of Artificial Sequence: Synthetic oligonucleotide
cucccuuccuccgacugcg

SEQ ID NO: 604785 - RNA, 19 nt, Artificial Sequence
  Description of Artificial Sequence: Synthetic oligonucleotide
cacgaagguguggaugugg

SEQ ID NO: 604786 - RNA, 19 nt, Artificial Sequence
  Description of Artificial Sequence: Synthetic oligonucleotide
guagccgcucuucucgggc

SEQ ID NO: 604787 - RNA, 19 nt, Artificial Sequence
  Description of Artificial Sequence: Synthetic oligonucleotide
ugcgguucaccagacgcca

SEQ ID NO: 604788 - RNA, 19 nt, Artificial Sequence
  Description of Artificial Sequence: Synthetic oligonucleotide
cucugaccugagaagggac

SEQ ID NO: 604789 - RNA, 19 nt, Artificial Sequence
  Description of Artificial Sequence: Synthetic oligonucleotide
guucauuuaccaggaucag

SEQ ID NO: 604790 - RNA, 19 nt, Artificial Sequence
  Description of Artificial Sequence: Synthetic oligonucleotide
cuggaagcuacuuguccuc

SEQ ID NO: 604791 - RNA, 19 nt, Artificial Sequence
  Description of Artificial Sequence: Synthetic oligonucleotide
ggagaugagcaccuggaga

SEQ ID NO: 604792 - RNA, 19 nt, Artificial Sequence
  Description of Artificial Sequence: Synthetic oligonucleotide
ccauagcuccaagagaugg

SEQ ID NO: 604793 - RNA, 19 nt, Artificial Sequence
  Description of Artificial Sequence: Synthetic oligonucleotide
gacguaaaggacccagugu

SEQ ID NO: 604794 - RNA, 19 nt, Artificial Sequence
  Description of Artificial Sequence: Synthetic oligonucleotide
gacagggaggggcaagauc

SEQ ID NO: 604795 - RNA, 19 nt, Artificial Sequence
  Description of Artificial Sequence: Synthetic oligonucleotide
guuguaguaugguucauuu

SEQ ID NO: 604796 - RNA, 19 nt, Artificial Sequence
  Description of Artificial Sequence: Synthetic oligonucleotide
ucgaagaccucaggaggcc

SEQ ID NO: 604797 - RNA, 19 nt, Artificial Sequence
  Description of Artificial Sequence: Synthetic oligonucleotide
agcaccuggagaagacugg

SEQ ID NO: 604798 - RNA, 19 nt, Artificial Sequence
  Description of Artificial Sequence: Synthetic oligonucleotide
agcccuuggaaagagggaa

SEQ ID NO: 604799 - RNA, 19 nt, Artificial Sequence
  Description of Artificial Sequence: Synthetic oligonucleotide
ggucccuacuggcugaggc

SEQ ID NO: 604800 - RNA, 19 nt, Artificial Sequence
  Description of Artificial Sequence: Synthetic oligonucleotide
ugcgcuagcagagucugua

SEQ ID NO: 604801 - RNA, 19 nt, Artificial Sequence
  Description of Artificial Sequence: Synthetic oligonucleotide
guagcagcggcuguuuuca

SEQ ID NO: 604802 - RNA, 19 nt, Artificial Sequence
  Description of Artificial Sequence: Synthetic oligonucleotide
cauucugccuagagcaaca

SEQ ID NO: 604803 - RNA, 19 nt, Artificial Sequence
  Description of Artificial Sequence: Synthetic oligonucleotide
cuuguaaaccucugggccu

SEQ ID NO: 604804 - RNA, 19 nt, Artificial Sequence
  Description of Artificial Sequence: Synthetic oligonucleotide
gucccuacuggcugaggcc

SEQ ID NO: 604805 - RNA, 19 nt, Artificial Sequence
  Description of Artificial Sequence: Synthetic oligonucleotide
aggggaaagccgaugucag

SEQ ID NO: 604806 - RNA, 19 nt, Artificial Sequence
  Description of Artificial Sequence: Synthetic oligonucleotide
accgcuggguagauguugg

SEQ ID NO: 604807 - RNA, 19 nt, Artificial Sequence
  Description of Artificial Sequence: Synthetic oligonucleotide
caagaggaacgccagcgga

SEQ ID NO: 604808 - RNA, 19 nt, Artificial Sequence
  Description of Artificial Sequence: Synthetic oligonucleotide
caccacccggaucagugcc

SEQ ID NO: 604809 - RNA, 19 nt, Artificial Sequence
  Description of Artificial Sequence: Synthetic oligonucleotide
cauugcagggcagccacac

SEQ ID NO: 604810 - RNA, 19 nt, Artificial Sequence
  Description of Artificial Sequence: Synthetic oligonucleotide
ucugugucgggcacugcuu

SEQ ID NO: 604811 - RNA, 19 nt, Artificial Sequence
  Description of Artificial Sequence: Synthetic oligonucleotide
gaggccaucuucguaggga

SEQ ID NO: 604812 - RNA, 19 nt, Artificial Sequence
  Description of Artificial Sequence: Synthetic oligonucleotide
ucggccuucacuggugacu

SEQ ID NO: 604813 - RNA, 19 nt, Artificial Sequence
  Description of Artificial Sequence: Synthetic oligonucleotide
ccagcuucguuguaguaug

SEQ ID NO: 604814 - RNA, 19 nt, Artificial Sequence
  Description of Artificial Sequence: Synthetic oligonucleotide
gaagcuacuuguccucugu

SEQ ID NO: 604815 - RNA, 19 nt, Artificial Sequence
  Description of Artificial Sequence: Synthetic oligonucleotide
cgacuggauaggaagaggc

SEQ ID NO: 604816 - RNA, 19 nt, Artificial Sequence
  Description of Artificial Sequence: Synthetic oligonucleotide
gaaagccgaugucagggua

SEQ ID NO: 604817 - RNA, 19 nt, Artificial Sequence
  Description of Artificial Sequence: Synthetic oligonucleotide
ccaaccuuaaauauuacau

SEQ ID NO: 604818 - RNA, 19 nt, Artificial Sequence
  Description of Artificial Sequence: Synthetic oligonucleotide
caaugcgguucaccagacg

SEQ ID NO: 604819 - RNA, 19 nt, Artificial Sequence
  Description of Artificial Sequence: Synthetic oligonucleotide
caucucgggacaccucuug

SEQ ID NO: 604820 - RNA, 19 nt, Artificial Sequence
  Description of Artificial Sequence: Synthetic oligonucleotide
ugccaucgggcagugaggu

SEQ ID NO: 604821 - RNA, 19 nt, Artificial Sequence
  Description of Artificial Sequence: Synthetic oligonucleotide
ugagcaccuggagaagacu

SEQ ID NO: 604822 - RNA, 19 nt, Artificial Sequence
  Description of Artificial Sequence: Synthetic oligonucleotide
gaguggggcccuugauuag

SEQ ID NO: 604823 - RNA, 19 nt, Artificial Sequence
  Description of Artificial Sequence: Synthetic oligonucleotide
acgcaucaggggcugucuc

SEQ ID NO: 604824 - RNA, 19 nt, Artificial Sequence
  Description of Artificial Sequence: Synthetic oligonucleotide
caggccucggucacuauca

SEQ ID NO: 604825 - RNA, 19 nt, Artificial Sequence
  Description of Artificial Sequence: Synthetic oligonucleotide
gccgaugucaggguagccg

SEQ ID NO: 604826 - RNA, 19 nt, Artificial Sequence
  Description of Artificial Sequence: Synthetic oligonucleotide
gucauggauugcaccaccc

SEQ ID NO: 604827 - RNA, 19 nt, Artificial Sequence
  Description of Artificial Sequence: Synthetic oligonucleotide
ccauugagacuucacugag

SEQ ID NO: 604828 - RNA, 19 nt, Artificial Sequence
  Description of Artificial Sequence: Synthetic oligonucleotide
uggaagcuacuuguccucu

SEQ ID NO: 604829 - RNA, 19 nt, Artificial Sequence
  Description of Artificial Sequence: Synthetic oligonucleotide
uggggaggcuacagucaag

SEQ ID NO: 604830 - RNA, 19 nt, Artificial Sequence
  Description of Artificial Sequence: Synthetic oligonucleotide
uccuugcgcucugugucgg

SEQ ID NO: 604831 - RNA, 19 nt, Artificial Sequence
  Description of Artificial Sequence: Synthetic oligonucleotide
cagcuucguuguaguaugg

SEQ ID NO: 604832 - RNA, 19 nt, Artificial Sequence
  Description of Artificial Sequence: Synthetic oligonucleotide
aggaggccgucgcaccaac

SEQ ID NO: 604833 - RNA, 19 nt, Artificial Sequence
  Description of Artificial Sequence: Synthetic oligonucleotide
gacauagcugcaauaugcu

SEQ ID NO: 604834 - RNA, 19 nt, Artificial Sequence
  Description of Artificial Sequence: Synthetic oligonucleotide
ucccauuaucauacagguu

SEQ ID NO: 604835 - RNA, 19 nt, Artificial Sequence
  Description of Artificial Sequence: Synthetic oligonucleotide
ggucauggauugcaccacc

SEQ ID NO: 604836 - RNA, 19 nt, Artificial Sequence
  Description of Artificial Sequence: Synthetic oligonucleotide
ccuugauuagugcugagaa

SEQ ID NO: 604837 - RNA, 19 nt, Artificial Sequence
  Description of Artificial Sequence: Synthetic oligonucleotide
gccaagacauucugccuag

SEQ ID NO: 604838 - RNA, 19 nt, Artificial Sequence
  Description of Artificial Sequence: Synthetic oligonucleotide
gaugucaggguagccgcuc

SEQ ID NO: 604839 - RNA, 19 nt, Artificial Sequence
  Description of Artificial Sequence: Synthetic oligonucleotide
ugggaagcugaaugucaaa

SEQ ID NO: 604840 - RNA, 19 nt, Artificial Sequence
  Description of Artificial Sequence: Synthetic oligonucleotide
cagugccaucucauuguag

SEQ ID NO: 604841 - RNA, 19 nt, Artificial Sequence
  Description of Artificial Sequence: Synthetic oligonucleotide
ggggaggcuacagucaagc

SEQ ID NO: 604842 - RNA, 19 nt, Artificial Sequence
  Description of Artificial Sequence: Synthetic oligonucleotide
ugccggaucuccugcucga

SEQ ID NO: 604843 - RNA, 19 nt, Artificial Sequence
  Description of Artificial Sequence: Synthetic oligonucleotide
gagcaacaagaggaacgcc

SEQ ID NO: 604844 - RNA, 19 nt, Artificial Sequence
  Description of Artificial Sequence: Synthetic oligonucleotide
caggcggccacugcacugg

SEQ ID NO: 604845 - RNA, 19 nt, Artificial Sequence
  Description of Artificial Sequence: Synthetic oligonucleotide
cguaaaggacccagugugg

SEQ ID NO: 604846 - RNA, 19 nt, Artificial Sequence
  Description of Artificial Sequence: Synthetic oligonucleotide
aguggggcccuugauuagu

SEQ ID NO: 604847 - RNA, 19 nt, Artificial Sequence
  Description of Artificial Sequence: Synthetic oligonucleotide
ggggacaagugccaagaca

SEQ ID NO: 604848 - RNA, 19 nt, Artificial Sequence
  Description of Artificial Sequence: Synthetic oligonucleotide
uaguaagaguuaguaucuu

SEQ ID NO: 604849 - RNA, 19 nt, Artificial Sequence
  Description of Artificial Sequence: Synthetic oligonucleotide
agcuucguuguaguauggu

SEQ ID NO: 604850 - RNA, 19 nt, Artificial Sequence
  Description of Artificial Sequence: Synthetic oligonucleotide
augccaucgggcagugagg

SEQ ID NO: 604851 - RNA, 19 nt, Artificial Sequence
  Description of Artificial Sequence: Synthetic oligonucleotide
ucaagcccuggaagcuacu

SEQ ID NO: 604852 - RNA, 19 nt, Artificial Sequence
  Description of Artificial Sequence: Synthetic oligonucleotide
ggggacguaaaggacccag

SEQ ID NO: 604853 - RNA, 19 nt, Artificial Sequence
  Description of Artificial Sequence: Synthetic oligonucleotide
agguugggguucaggcggc

SEQ ID NO: 604854 - RNA, 19 nt, Artificial Sequence
  Description of Artificial Sequence: Synthetic oligonucleotide
uuggcuuccggaggcugga

SEQ ID NO: 604855 - RNA, 19 nt, Artificial Sequence
  Description of Artificial Sequence: Synthetic oligonucleotide
cacugagggagagagcgca

SEQ ID NO: 604856 - RNA, 19 nt, Artificial Sequence
  Description of Artificial Sequence: Synthetic oligonucleotide
ggagucugagaguucagcu

SEQ ID NO: 604857 - RNA, 19 nt, Artificial Sequence
  Description of Artificial Sequence: Synthetic oligonucleotide
agauguugggaagcugaau

SEQ ID NO: 604858 - RNA, 19 nt, Artificial Sequence
  Description of Artificial Sequence: Synthetic oligonucleotide
ucucaagcccuggaagcua

SEQ ID NO: 604859 - RNA, 19 nt, Artificial Sequence
  Description of Artificial Sequence: Synthetic oligonucleotide
ugacgcacaccuucccauu

SEQ ID NO: 604860 - RNA, 19 nt, Artificial Sequence
  Description of Artificial Sequence: Synthetic oligonucleotide
caccagacgccagccaccc

SEQ ID NO: 604861 - RNA, 19 nt, Artificial Sequence
  Description of Artificial Sequence: Synthetic oligonucleotide
agccgcucuucucgggcag

SEQ ID NO: 604862 - RNA, 19 nt, Artificial Sequence
  Description of Artificial Sequence: Synthetic oligonucleotide
ccagacgccagccacccac

SEQ ID NO: 604863 - RNA, 19 nt, Artificial Sequence
  Description of Artificial Sequence: Synthetic oligonucleotide
cccuggaagcuacuugucc

SEQ ID NO: 604864 - RNA, 19 nt, Artificial Sequence
  Description of Artificial Sequence: Synthetic oligonucleotide
auuguagcagcggcuguuu

SEQ ID NO: 604865 - RNA, 19 nt, Artificial Sequence
  Description of Artificial Sequence: Synthetic oligonucleotide
agcagcggcuguuuucaua

SEQ ID NO: 604866 - RNA, 19 nt, Artificial Sequence
  Description of Artificial Sequence: Synthetic oligonucleotide
cuccuuucucaagcccugg

SEQ ID NO: 604867 - RNA, 19 nt, Artificial Sequence
  Description of Artificial Sequence: Synthetic oligonucleotide
ucggccggagucugagagu

SEQ ID NO: 604868 - RNA, 19 nt, Artificial Sequence
  Description of Artificial Sequence: Synthetic oligonucleotide
ccuuaacgcacugccaggc

SEQ ID NO: 604869 - RNA, 19 nt, Artificial Sequence
  Description of Artificial Sequence: Synthetic oligonucleotide
agccgaugucaggguagcc

SEQ ID NO: 604870 - RNA, 19 nt, Artificial Sequence
  Description of Artificial Sequence: Synthetic oligonucleotide
gcuacuuguccucugugcu

SEQ ID NO: 604871 - RNA, 19 nt, Artificial Sequence
  Description of Artificial Sequence: Synthetic oligonucleotide
ccucggucacuaucaaagc

SEQ ID NO: 604872 - RNA, 19 nt, Artificial Sequence
  Description of Artificial Sequence: Synthetic oligonucleotide
gguucaccagacgccagcc

SEQ ID NO: 604873 - RNA, 19 nt, Artificial Sequence
  Description of Artificial Sequence: Synthetic oligonucleotide
gacauucugccuagagcaa

SEQ ID NO: 604874 - RNA, 19 nt, Artificial Sequence
  Description of Artificial Sequence: Synthetic oligonucleotide
acaccucgcccuuggcacu

SEQ ID NO: 604875 - RNA, 19 nt, Artificial Sequence
  Description of Artificial Sequence: Synthetic oligonucleotide
ugacgcaucaggggcuguc

SEQ ID NO: 604876 - RNA, 19 nt, Artificial Sequence
  Description of Artificial Sequence: Synthetic oligonucleotide
ccaagagauggagguacgg

SEQ ID NO: 604877 - RNA, 19 nt, Artificial Sequence
  Description of Artificial Sequence: Synthetic oligonucleotide
cuugccgcugcagggagga

SEQ ID NO: 604878 - RNA, 19 nt, Artificial Sequence
  Description of Artificial Sequence: Synthetic oligonucleotide
ugggcggugcugacgcauc

SEQ ID NO: 604879 - RNA, 19 nt, Artificial Sequence
  Description of Artificial Sequence: Synthetic oligonucleotide
ugucgggcacugcuuccau

SEQ ID NO: 604880 - RNA, 19 nt, Artificial Sequence
  Description of Artificial Sequence: Synthetic oligonucleotide
agagugguuugagggugca

SEQ ID NO: 604881 - RNA, 19 nt, Artificial Sequence
  Description of Artificial Sequence: Synthetic oligonucleotide
agccgacuggauaggaaga

SEQ ID NO: 604882 - RNA, 19 nt, Artificial Sequence
  Description of Artificial Sequence: Synthetic oligonucleotide
caccaugacacuccuuucu

SEQ ID NO: 604883 - RNA, 19 nt, Artificial Sequence
  Description of Artificial Sequence: Synthetic oligonucleotide
cuccgacugcgcuagcaga

SEQ ID NO: 604884 - RNA, 19 nt, Artificial Sequence
  Description of Artificial Sequence: Synthetic oligonucleotide
ugucaggguagccgcucuu

SEQ ID NO: 604885 - RNA, 19 nt, Artificial Sequence
  Description of Artificial Sequence: Synthetic oligonucleotide
auugcaccacccggaucag

SEQ ID NO: 604886 - RNA, 19 nt, Artificial Sequence
  Description of Artificial Sequence: Synthetic oligonucleotide
ggauguggggaggcuacag

SEQ ID NO: 604887 - RNA, 19 nt, Artificial Sequence
  Description of Artificial Sequence: Synthetic oligonucleotide
ggccgucgcaccaacuggg

SEQ ID NO: 604888 - RNA, 19 nt, Artificial Sequence
  Description of Artificial Sequence: Synthetic oligonucleotide
cucgcccuuggcacuggug

SEQ ID NO: 604889 - RNA, 19 nt, Artificial Sequence
  Description of Artificial Sequence: Synthetic oligonucleotide
ggguagccgcucuucucgg

SEQ ID NO: 604890 - RNA, 19 nt, Artificial Sequence
  Description of Artificial Sequence: Synthetic oligonucleotide
uggauguggggaggcuaca

SEQ ID NO: 604891 - RNA, 19 nt, Artificial Sequence
  Description of Artificial Sequence: Synthetic oligonucleotide
ccugccauugagacuucac

SEQ ID NO: 604892 - RNA, 19 nt, Artificial Sequence
  Description of Artificial Sequence: Synthetic oligonucleotide
cuguaagccaaggcagaca

SEQ ID NO: 604893 - RNA, 19 nt, Artificial Sequence
  Description of Artificial Sequence: Synthetic oligonucleotide
ggccgggagcauugcaggg

SEQ ID NO: 604894 - RNA, 19 nt, Artificial Sequence
  Description of Artificial Sequence: Synthetic oligonucleotide
cagacagcuaggggacaag

SEQ ID NO: 604895 - RNA, 19 nt, Artificial Sequence
  Description of Artificial Sequence: Synthetic oligonucleotide
gccgacuggauaggaagag

SEQ ID NO: 604896 - RNA, 19 nt, Artificial Sequence
  Description of Artificial Sequence: Synthetic oligonucleotide
cuaacgcugggcggugcug

SEQ ID NO: 604897 - RNA, 19 nt, Artificial Sequence
  Description of Artificial Sequence: Synthetic oligonucleotide
ccccuuuccaauccaggug

SEQ ID NO: 604898 - RNA, 19 nt, Artificial Sequence
  Description of Artificial Sequence: Synthetic oligonucleotide
auucugccuagagcaacaa

SEQ ID NO: 604899 - RNA, 19 nt, Artificial Sequence
  Description of Artificial Sequence: Synthetic oligonucleotide
ucucggccggagucugaga

SEQ ID NO: 604900 - RNA, 19 nt, Artificial Sequence
  Description of Artificial Sequence: Synthetic oligonucleotide
cucggccuucacuggugac

SEQ ID NO: 604901 - RNA, 19 nt, Artificial Sequence
  Description of Artificial Sequence: Synthetic oligonucleotide
acuugccgcugcagggagg

SEQ ID NO: 604902 - RNA, 19 nt, Artificial Sequence
  Description of Artificial Sequence: Synthetic oligonucleotide
ccaugacucaaugcgguuc

SEQ ID NO: 604903 - RNA, 19 nt, Artificial Sequence
  Description of Artificial Sequence: Synthetic oligonucleotide
cuucguagggaguccgagu

SEQ ID NO: 604904 - RNA, 19 nt, Artificial Sequence
  Description of Artificial Sequence: Synthetic oligonucleotide
uggccugguuugugcagau

SEQ ID NO: 604905 - RNA, 19 nt, Artificial Sequence
  Description of Artificial Sequence: Synthetic oligonucleotide
aucgggcagugagguggcc

SEQ ID NO: 604906 - RNA, 19 nt, Artificial Sequence
  Description of Artificial Sequence: Synthetic oligonucleotide
gcugacgcacaccuuccca

SEQ ID NO: 604907 - RNA, 19 nt, Artificial Sequence
  Description of Artificial Sequence: Synthetic oligonucleotide
caacggcauccucuaccug

SEQ ID NO: 604908 - RNA, 19 nt, Artificial Sequence
  Description of Artificial Sequence: Synthetic oligonucleotide
ccgacuggauaggaagagg

SEQ ID NO: 604909 - RNA, 19 nt, Artificial Sequence
  Description of Artificial Sequence: Synthetic oligonucleotide
acgccagcggagucucagu

SEQ ID NO: 604910 - RNA, 19 nt, Artificial Sequence
  Description of Artificial Sequence: Synthetic oligonucleotide
gagggccgggagcauugca

SEQ ID NO: 604911 - RNA, 19 nt, Artificial Sequence
  Description of Artificial Sequence: Synthetic oligonucleotide
cagccucccuuccuccgac

SEQ ID NO: 604912 - RNA, 19 nt, Artificial Sequence
  Description of Artificial Sequence: Synthetic oligonucleotide
ggacaccucuugcacuuca

SEQ ID NO: 604913 - RNA, 19 nt, Artificial Sequence
  Description of Artificial Sequence: Synthetic oligonucleotide
cgcuagcagagucuguaag

SEQ ID NO: 604914 - RNA, 19 nt, Artificial Sequence
  Description of Artificial Sequence: Synthetic oligonucleotide
ggcugacgcacaccuuccc

SEQ ID NO: 604915 - RNA, 19 nt, Artificial Sequence
  Description of Artificial Sequence: Synthetic oligonucleotide
cugacgcacaccuucccau

SEQ ID NO: 604916 - RNA, 19 nt, Artificial Sequence
  Description of Artificial Sequence: Synthetic oligonucleotide
ggcuuccggaggcuggaac

SEQ ID NO: 604917 - RNA, 19 nt, Artificial Sequence
  Description of Artificial Sequence: Synthetic oligonucleotide
gcaagaucucaggaaggga

SEQ ID NO: 604918 - RNA, 19 nt, Artificial Sequence
  Description of Artificial Sequence: Synthetic oligonucleotide
gcaggccucggucacuauc

SEQ ID NO: 604919 - RNA, 19 nt, Artificial Sequence
  Description of Artificial Sequence: Synthetic oligonucleotide
acgcugggcggugcugacg

SEQ ID NO: 604920 - RNA, 19 nt, Artificial Sequence
  Description of Artificial Sequence: Synthetic oligonucleotide
gcaccacccggaucagugc

SEQ ID NO: 604921 - RNA, 19 nt, Artificial Sequence
  Description of Artificial Sequence: Synthetic oligonucleotide
ccuggaagcuacuuguccu

SEQ ID NO: 604922 - RNA, 19 nt, Artificial Sequence
  Description of Artificial Sequence: Synthetic oligonucleotide
gucgggcacugcuuccauc

SEQ ID NO: 604923 - RNA, 19 nt, Artificial Sequence
  Description of Artificial Sequence: Synthetic oligonucleotide
gacugcgcuagcagagucu

SEQ ID NO: 604924 - RNA, 19 nt, Artificial Sequence
  Description of Artificial Sequence: Synthetic oligonucleotide
ccaucccuacauccucagg

SEQ ID NO: 604925 - RNA, 19 nt, Artificial Sequence
  Description of Artificial Sequence: Synthetic oligonucleotide
gucuaacgcugggcggugc

SEQ ID NO: 604926 - RNA, 19 nt, Artificial Sequence
  Description of Artificial Sequence: Synthetic oligonucleotide
acgcacugccaggccagag

SEQ ID NO: 604927 - RNA, 19 nt, Artificial Sequence
  Description of Artificial Sequence: Synthetic oligonucleotide
ggauugcaccacccggauc

SEQ ID NO: 604928 - RNA, 19 nt, Artificial Sequence
  Description of Artificial Sequence: Synthetic oligonucleotide
aguccgaguggggcccuug

SEQ ID NO: 604929 - RNA, 19 nt, Artificial Sequence
  Description of Artificial Sequence: Synthetic oligonucleotide
uugcaccacccggaucagu

SEQ ID NO: 604930 - RNA, 19 nt, Artificial Sequence
  Description of Artificial Sequence: Synthetic oligonucleotide
gcuucguuguaguaugguu

SEQ ID NO: 604931 - RNA, 19 nt, Artificial Sequence
  Description of Artificial Sequence: Synthetic oligonucleotide
ggcuacagucaagcuggag

SEQ ID NO: 604932 - RNA, 19 nt, Artificial Sequence
  Description of Artificial Sequence: Synthetic oligonucleotide
ccucccuuccuccgacugc

SEQ ID NO: 604933 - RNA, 19 nt, Artificial Sequence
  Description of Artificial Sequence: Synthetic oligonucleotide
accacccggaucagugcca

SEQ ID NO: 604934 - RNA, 19 nt, Artificial Sequence
  Description of Artificial Sequence: Synthetic oligonucleotide
gacgcaucaggggcugucu

SEQ ID NO: 604935 - RNA, 19 nt, Artificial Sequence
  Description of Artificial Sequence: Synthetic oligonucleotide
ggcccuugauuagugcuga

SEQ ID NO: 604936 - RNA, 19 nt, Artificial Sequence
  Description of Artificial Sequence: Synthetic oligonucleotide
agccucccuuccuccgacu

SEQ ID NO: 604937 - RNA, 19 nt, Artificial Sequence
  Description of Artificial Sequence: Synthetic oligonucleotide
caccucgcccuuggcacug

SEQ ID NO: 604938 - RNA, 19 nt, Artificial Sequence
  Description of Artificial Sequence: Synthetic oligonucleotide
ggucuaacgcugggcggug

SEQ ID NO: 604939 - RNA, 19 nt, Artificial Sequence
  Description of Artificial Sequence: Synthetic oligonucleotide
cccaccaugacacuccuuu

SEQ ID NO: 604940 - RNA, 19 nt, Artificial Sequence
  Description of Artificial Sequence: Synthetic oligonucleotide
ggcuccaacuggggacagg

SEQ ID NO: 604941 - RNA, 19 nt, Artificial Sequence
  Description of Artificial Sequence: Synthetic oligonucleotide
cuucucggccggagucuga

SEQ ID NO: 604942 - RNA, 19 nt, Artificial Sequence
  Description of Artificial Sequence: Synthetic oligonucleotide
cccuugauuagugcugaga

SEQ ID NO: 604943 - RNA, 19 nt, Artificial Sequence
  Description of Artificial Sequence: Synthetic oligonucleotide
gcaauaugcucaacggcau

SEQ ID NO: 604944 - RNA, 19 nt, Artificial Sequence
  Description of Artificial Sequence: Synthetic oligonucleotide
cagcucccacuggccaucc

SEQ ID NO: 604945 - RNA, 19 nt, Artificial Sequence
  Description of Artificial Sequence: Synthetic oligonucleotide
guuugugcagaugcuccuu

SEQ ID NO: 604946 - RNA, 19 nt, Artificial Sequence
  Description of Artificial Sequence: Synthetic oligonucleotide
ccuugcgcucugugucggg

SEQ ID NO: 604947 - RNA, 19 nt, Artificial Sequence
  Description of Artificial Sequence: Synthetic oligonucleotide
ugcaggccucggucacuau

SEQ ID NO: 604948 - RNA, 19 nt, Artificial Sequence
  Description of Artificial Sequence: Synthetic oligonucleotide
gcauggguuuccagccaug

SEQ ID NO: 604949 - RNA, 19 nt, Artificial Sequence
  Description of Artificial Sequence: Synthetic oligonucleotide
gcucaacggcauccucuac

SEQ ID NO: 604950 - RNA, 19 nt, Artificial Sequence
  Description of Artificial Sequence: Synthetic oligonucleotide
ccggagucugagaguucag

SEQ ID NO: 604951 - RNA, 19 nt, Artificial Sequence
  Description of Artificial Sequence: Synthetic oligonucleotide
ccucugaccugagaaggga

SEQ ID NO: 604952 - RNA, 19 nt, Artificial Sequence
  Description of Artificial Sequence: Synthetic oligonucleotide
ggcauggguuuccagccau

SEQ ID NO: 604953 - RNA, 19 nt, Artificial Sequence
  Description of Artificial Sequence: Synthetic oligonucleotide
uggcuuccggaggcuggaa

SEQ ID NO: 604954 - RNA, 19 nt, Artificial Sequence
  Description of Artificial Sequence: Synthetic oligonucleotide
cucuccggcaugccugccu

SEQ ID NO: 604955 - RNA, 19 nt, Artificial Sequence
  Description of Artificial Sequence: Synthetic oligonucleotide
gguugggguucaggcggcc

SEQ ID NO: 604956 - RNA, 19 nt, Artificial Sequence
  Description of Artificial Sequence: Synthetic oligonucleotide
gcugaaugucaaacaggua

SEQ ID NO: 604957 - RNA, 19 nt, Artificial Sequence
  Description of Artificial Sequence: Synthetic oligonucleotide
cgccagcggagucucagug

SEQ ID NO: 604958 - RNA, 19 nt, Artificial Sequence
  Description of Artificial Sequence: Synthetic oligonucleotide
caccuggagaagacuggau

SEQ ID NO: 604959 - RNA, 19 nt, Artificial Sequence
  Description of Artificial Sequence: Synthetic oligonucleotide
gccgcucuucucgggcagg

SEQ ID NO: 604960 - RNA, 19 nt, Artificial Sequence
  Description of Artificial Sequence: Synthetic oligonucleotide
gcgcuagcagagucuguaa

SEQ ID NO: 604961 - RNA, 19 nt, Artificial Sequence
  Description of Artificial Sequence: Synthetic oligonucleotide
gggaggcuacagucaagcu

SEQ ID NO: 604962 - RNA, 19 nt, Artificial Sequence
  Description of Artificial Sequence: Synthetic oligonucleotide
cgacugcgcuagcagaguc

SEQ ID NO: 604963 - RNA, 19 nt, Artificial Sequence
  Description of Artificial Sequence: Synthetic oligonucleotide
ccgucgcaccaacuggguc

SEQ ID NO: 604964 - RNA, 19 nt, Artificial Sequence
  Description of Artificial Sequence: Synthetic oligonucleotide
gggagccgacuggauagga

SEQ ID NO: 604965 - RNA, 19 nt, Artificial Sequence
  Description of Artificial Sequence: Synthetic oligonucleotide
ggacccaguguggcagcac

SEQ ID NO: 604966 - RNA, 19 nt, Artificial Sequence
  Description of Artificial Sequence: Synthetic oligonucleotide
ucgcaccaacugggucaug

SEQ ID NO: 604967 - RNA, 19 nt, Artificial Sequence
  Description of Artificial Sequence: Synthetic oligonucleotide
gcggagucucagugccuca

SEQ ID NO: 604968 - RNA, 19 nt, Artificial Sequence
  Description of Artificial Sequence: Synthetic oligonucleotide
cccugggcaccaccuucug

SEQ ID NO: 604969 - RNA, 19 nt, Artificial Sequence
  Description of Artificial Sequence: Synthetic oligonucleotide
gccaugacucaaugcgguu

SEQ ID NO: 604970 - RNA, 19 nt, Artificial Sequence
  Description of Artificial Sequence: Synthetic oligonucleotide
cugggcggugcugacgcau

SEQ ID NO: 604971 - RNA, 19 nt, Artificial Sequence
  Description of Artificial Sequence: Synthetic oligonucleotide
cugcgcuagcagagucugu

SEQ ID NO: 604972 - RNA, 19 nt, Artificial Sequence
  Description of Artificial Sequence: Synthetic oligonucleotide
gcagcacgaagguguggau

SEQ ID NO: 604973 - RNA, 19 nt, Artificial Sequence
  Description of Artificial Sequence: Synthetic oligonucleotide
ggacaagugccaagacauu

SEQ ID NO: 604974 - RNA, 19 nt, Artificial Sequence
  Description of Artificial Sequence: Synthetic oligonucleotide
gcucuccggcaugccugcc

SEQ ID NO: 604975 - RNA, 19 nt, Artificial Sequence
  Description of Artificial Sequence: Synthetic oligonucleotide
cccaggggccaucccuaca

SEQ ID NO: 604976 - RNA, 19 nt, Artificial Sequence
  Description of Artificial Sequence: Synthetic oligonucleotide
ggagucucacugggccacu

SEQ ID NO: 604977 - RNA, 19 nt, Artificial Sequence
  Description of Artificial Sequence: Synthetic oligonucleotide
ccgcucuucucgggcagga

SEQ ID NO: 604978 - RNA, 19 nt, Artificial Sequence
  Description of Artificial Sequence: Synthetic oligonucleotide
ggaggccgucgcaccaacu

SEQ ID NO: 604979 - RNA, 19 nt, Artificial Sequence
  Description of Artificial Sequence: Synthetic oligonucleotide
gccgucgcaccaacugggu

SEQ ID NO: 604980 - RNA, 19 nt, Artificial Sequence
  Description of Artificial Sequence: Synthetic oligonucleotide
cugacgcaucaggggcugu

SEQ ID NO: 604981 - RNA, 19 nt, Artificial Sequence
  Description of Artificial Sequence: Synthetic oligonucleotide
cgaugucaggguagccgcu

SEQ ID NO: 604982 - RNA, 19 nt, Artificial Sequence
  Description of Artificial Sequence: Synthetic oligonucleotide
ccgacugcgcuagcagagu

SEQ ID NO: 604983 - RNA, 19 nt, Artificial Sequence
  Description of Artificial Sequence: Synthetic oligonucleotide
ccggaggcuggaacucaau

SEQ ID NO: 604984 - RNA, 19 nt, Artificial Sequence
  Description of Artificial Sequence: Synthetic oligonucleotide
cggccggagucugagaguu

SEQ ID NO: 604985 - RNA, 19 nt, Artificial Sequence
  Description of Artificial Sequence: Synthetic oligonucleotide
ccacccggaucagugccau

SEQ ID NO: 604986 - RNA, 19 nt, Artificial Sequence
  Description of Artificial Sequence: Synthetic oligonucleotide
ggggcaccgcuggguagau

SEQ ID NO: 604987 - RNA, 19 nt, Artificial Sequence
  Description of Artificial Sequence: Synthetic oligonucleotide
ccucgcccuuggcacuggu

SEQ ID NO: 604988 - RNA, 19 nt, Artificial Sequence
  Description of Artificial Sequence: Synthetic oligonucleotide
ggccggccucucccaccau

SEQ ID NO: 604989 - RNA, 19 nt, Artificial Sequence
  Description of Artificial Sequence: Synthetic oligonucleotide
acuaccgucaaacagacag

SEQ ID NO: 604990 - RNA, 19 nt, Artificial Sequence
  Description of Artificial Sequence: Synthetic oligonucleotide
uuaagaaauacccagccac

SEQ ID NO: 604991 - RNA, 19 nt, Artificial Sequence
  Description of Artificial Sequence: Synthetic oligonucleotide
ucuuauuucucccaagaag

SEQ ID NO: 604992 - RNA, 19 nt, Artificial Sequence
  Description of Artificial Sequence: Synthetic oligonucleotide
aacgaccuaaguucuaacc

SEQ ID NO: 604993 - RNA, 19 nt, Artificial Sequence
  Description of Artificial Sequence: Synthetic oligonucleotide
ucuaauuauauggagaaug

SEQ ID NO: 604994 - RNA, 19 nt, Artificial Sequence
  Description of Artificial Sequence: Synthetic oligonucleotide
aauaguguuuaucucugag

SEQ ID NO: 604995 - RNA, 19 nt, Artificial Sequence
  Description of Artificial Sequence: Synthetic oligonucleotide
aaagagacacggcuuggcc

SEQ ID NO: 604996 - RNA, 19 nt, Artificial Sequence
  Description of Artificial Sequence: Synthetic oligonucleotide
aaccuuacuaccgucaaac

SEQ ID NO: 604997 - RNA, 19 nt, Artificial Sequence
  Description of Artificial Sequence: Synthetic oligonucleotide
ugucucucuuuucugaucg

SEQ ID NO: 604998 - RNA, 19 nt, Artificial Sequence
  Description of Artificial Sequence: Synthetic oligonucleotide
aaacuaucaaccugaagcu

SEQ ID NO: 604999 - RNA, 19 nt, Artificial Sequence
  Description of Artificial Sequence: Synthetic oligonucleotide
ucgaauguaagaaauucca

SEQ ID NO: 605000 - RNA, 19 nt, Artificial Sequence
  Description of Artificial Sequence: Synthetic oligonucleotide
aaucgugccugccuuagcg

SEQ ID NO: 605001 - RNA, 19 nt, Artificial Sequence
  Description of Artificial Sequence: Synthetic oligonucleotide
ucuuccgcccaucugaacg

SEQ ID NO: 605002 - RNA, 19 nt, Artificial Sequence
  Description of Artificial Sequence: Synthetic oligonucleotide
uugaagagcacuuuuauuu

SEQ ID NO: 605003 - RNA, 19 nt, Artificial Sequence
  Description of Artificial Sequence: Synthetic oligonucleotide
uuuacucgguuccagagca

SEQ ID NO: 605004 - RNA, 19 nt, Artificial Sequence
  Description of Artificial Sequence: Synthetic oligonucleotide
ucgguaaaauaucaguaag

SEQ ID NO: 605005 - RNA, 19 nt, Artificial Sequence
  Description of Artificial Sequence: Synthetic oligonucleotide
caugcuuaucaucugacgg

SEQ ID NO: 605006 - RNA, 19 nt, Artificial Sequence
  Description of Artificial Sequence: Synthetic oligonucleotide
aaaugucaggucuccggcc

SEQ ID NO: 605007 - RNA, 19 nt, Artificial Sequence
  Description of Artificial Sequence: Synthetic oligonucleotide
aaauaauaucccaaggucu

SEQ ID NO: 605008 - RNA, 19 nt, Artificial Sequence
  Description of Artificial Sequence: Synthetic oligonucleotide
uucaguaaccaaacuauca

SEQ ID NO: 605009 - RNA, 19 nt, Artificial Sequence
  Description of Artificial Sequence: Synthetic oligonucleotide
ucuacugccuguuuuaacu

SEQ ID NO: 605010 - RNA, 19 nt, Artificial Sequence
  Description of Artificial Sequence: Synthetic oligonucleotide
uucgaauguaagaaauucc

SEQ ID NO: 605011 - RNA, 19 nt, Artificial Sequence
  Description of Artificial Sequence: Synthetic oligonucleotide
uaguguuuaucucugagau

SEQ ID NO: 605012 - RNA, 19 nt, Artificial Sequence
  Description of Artificial Sequence: Synthetic oligonucleotide
agaccgaaguuuuaccagc

SEQ ID NO: 605013 - RNA, 19 nt, Artificial Sequence
  Description of Artificial Sequence: Synthetic oligonucleotide
aaguucaaauaauauccca

SEQ ID NO: 605014 - RNA, 19 nt, Artificial Sequence
  Description of Artificial Sequence: Synthetic oligonucleotide
cauaguucccgacaggugc

SEQ ID NO: 605015 - RNA, 19 nt, Artificial Sequence
  Description of Artificial Sequence: Synthetic oligonucleotide
ugguucuauuauuugagcc

SEQ ID NO: 605016 - RNA, 19 nt, Artificial Sequence
  Description of Artificial Sequence: Synthetic oligonucleotide
ucugacggaaaacacugcc

SEQ ID NO: 605017 - RNA, 19 nt, Artificial Sequence
  Description of Artificial Sequence: Synthetic oligonucleotide
uuugucgguaaaauaucag

SEQ ID NO: 605018 - RNA, 19 nt, Artificial Sequence
  Description of Artificial Sequence: Synthetic oligonucleotide
gaaccuguaugcuugcucc

SEQ ID NO: 605019 - RNA, 19 nt, Artificial Sequence
  Description of Artificial Sequence: Synthetic oligonucleotide
ucaugguagaccaggagga

SEQ ID NO: 605020 - RNA, 19 nt, Artificial Sequence
  Description of Artificial Sequence: Synthetic oligonucleotide
agucaagucaucuuccucu

SEQ ID NO: 605021 - RNA, 19 nt, Artificial Sequence
  Description of Artificial Sequence: Synthetic oligonucleotide
uuuccaucgagcagccucg

SEQ ID NO: 605022 - RNA, 19 nt, Artificial Sequence
  Description of Artificial Sequence: Synthetic oligonucleotide
gacuaauuaaaucagcacu

SEQ ID NO: 605023 - RNA, 19 nt, Artificial Sequence
  Description of Artificial Sequence: Synthetic oligonucleotide
aauuucgaauguaagaaau

SEQ ID NO: 605024 - RNA, 19 nt, Artificial Sequence
  Description of Artificial Sequence: Synthetic oligonucleotide
aauuggaccugaugaaaca

SEQ ID NO: 605025 - RNA, 19 nt, Artificial Sequence
  Description of Artificial Sequence: Synthetic oligonucleotide
agaauuucgaauguaagaa

SEQ ID NO: 605026 - RNA, 19 nt, Artificial Sequence
  Description of Artificial Sequence: Synthetic oligonucleotide
uucugaucguuuuagugug

SEQ ID NO: 605027 - RNA, 19 nt, Artificial Sequence
  Description of Artificial Sequence: Synthetic oligonucleotide
cuuacuaccgucaaacaga

SEQ ID NO: 605028 - RNA, 19 nt, Artificial Sequence
  Description of Artificial Sequence: Synthetic oligonucleotide
ucggacagcacuccagugg

SEQ ID NO: 605029 - RNA, 19 nt, Artificial Sequence
  Description of Artificial Sequence: Synthetic oligonucleotide
aaacgaccuaaguucuaac

SEQ ID NO: 605030 - RNA, 19 nt, Artificial Sequence
  Description of Artificial Sequence: Synthetic oligonucleotide
uuuuacucgguuccagagc

SEQ ID NO: 605031 - RNA, 19 nt, Artificial Sequence
  Description of Artificial Sequence: Synthetic oligonucleotide
ugucgguaaaauaucagua

SEQ ID NO: 605032 - RNA, 19 nt, Artificial Sequence
  Description of Artificial Sequence: Synthetic oligonucleotide
cuaaguucuaaccagucca

SEQ ID NO: 605033 - RNA, 19 nt, Artificial Sequence
  Description of Artificial Sequence: Synthetic oligonucleotide
ucaaaugguucaugaaccc

SEQ ID NO: 605034 - RNA, 19 nt, Artificial Sequence
  Description of Artificial Sequence: Synthetic oligonucleotide
ugacggaaaacacugcccu

SEQ ID NO: 605035 - RNA, 19 nt, Artificial Sequence
  Description of Artificial Sequence: Synthetic oligonucleotide
uugucgguaaaauaucagu

SEQ ID NO: 605036 - RNA, 19 nt, Artificial Sequence
  Description of Artificial Sequence: Synthetic oligonucleotide
auaucaguaagugagcgga

SEQ ID NO: 605037 - RNA, 19 nt, Artificial Sequence
  Description of Artificial Sequence: Synthetic oligonucleotide
uaacuggauacaucuuugg

SEQ ID NO: 605038 - RNA, 19 nt, Artificial Sequence
  Description of Artificial Sequence: Synthetic oligonucleotide
ugcacgauuucccaucagc

SEQ ID NO: 605039 - RNA, 19 nt, Artificial Sequence
  Description of Artificial Sequence: Synthetic oligonucleotide
guuaccuggggagaaaagg

SEQ ID NO: 605040 - RNA, 19 nt, Artificial Sequence
  Description of Artificial Sequence: Synthetic oligonucleotide
uagcuuuucggacagcacu

SEQ ID NO: 605041 - RNA, 19 nt, Artificial Sequence
  Description of Artificial Sequence: Synthetic oligonucleotide
ucuuucucggcccacgaac

SEQ ID NO: 605042 - RNA, 19 nt, Artificial Sequence
  Description of Artificial Sequence: Synthetic oligonucleotide
uuagcgucccacaacagau

SEQ ID NO: 605043 - RNA, 19 nt, Artificial Sequence
  Description of Artificial Sequence: Synthetic oligonucleotide
uuaccuggggagaaaaggu

SEQ ID NO: 605044 - RNA, 19 nt, Artificial Sequence
  Description of Artificial Sequence: Synthetic oligonucleotide
aagaaauacccagccacag

SEQ ID NO: 605045 - RNA, 19 nt, Artificial Sequence
  Description of Artificial Sequence: Synthetic oligonucleotide
uggaaugcaggagagggag

SEQ ID NO: 605046 - RNA, 19 nt, Artificial Sequence
  Description of Artificial Sequence: Synthetic oligonucleotide
agaaccuguaugcuugcuc

SEQ ID NO: 605047 - RNA, 19 nt, Artificial Sequence
  Description of Artificial Sequence: Synthetic oligonucleotide
ucuuuugguucuauuauuu

SEQ ID NO: 605048 - RNA, 19 nt, Artificial Sequence
  Description of Artificial Sequence: Synthetic oligonucleotide
cugagaaccuguaugcuug

SEQ ID NO: 605049 - RNA, 19 nt, Artificial Sequence
  Description of Artificial Sequence: Synthetic oligonucleotide
gagaccgaaguuuuaccag

SEQ ID NO: 605050 - RNA, 19 nt, Artificial Sequence
  Description of Artificial Sequence: Synthetic oligonucleotide
aggagcauagggaaggugg

SEQ ID NO: 605051 - RNA, 19 nt, Artificial Sequence
  Description of Artificial Sequence: Synthetic oligonucleotide
guaagaaauuccaaguuca

SEQ ID NO: 605052 - RNA, 19 nt, Artificial Sequence
  Description of Artificial Sequence: Synthetic oligonucleotide
uucaugaaccccaucuggu

SEQ ID NO: 605053 - RNA, 19 nt, Artificial Sequence
  Description of Artificial Sequence: Synthetic oligonucleotide
agcuuaagcuccuggccgc

SEQ ID NO: 605054 - RNA, 19 nt, Artificial Sequence
  Description of Artificial Sequence: Synthetic oligonucleotide
uuacuaccgucaaacagac

SEQ ID NO: 605055 - RNA, 19 nt, Artificial Sequence
  Description of Artificial Sequence: Synthetic oligonucleotide
acgaccuaaguucuaacca

SEQ ID NO: 605056 - RNA, 19 nt, Artificial Sequence
  Description of Artificial Sequence: Synthetic oligonucleotide
ugcucagaaccuuacuacc

SEQ ID NO: 605057 - RNA, 19 nt, Artificial Sequence
  Description of Artificial Sequence: Synthetic oligonucleotide
agcguggaaggccggaacc

SEQ ID NO: 605058 - RNA, 19 nt, Artificial Sequence
  Description of Artificial Sequence: Synthetic oligonucleotide
gaaguagcuugcucgaaac

SEQ ID NO: 605059 - RNA, 19 nt, Artificial Sequence
  Description of Artificial Sequence: Synthetic oligonucleotide
agagaccgaaguuuuacca

SEQ ID NO: 605060 - RNA, 19 nt, Artificial Sequence
  Description of Artificial Sequence: Synthetic oligonucleotide
aucaguaagugagcggagc

SEQ ID NO: 605061 - RNA, 19 nt, Artificial Sequence
  Description of Artificial Sequence: Synthetic oligonucleotide
guaugcuugcuccugggag

SEQ ID NO: 605062 - RNA, 19 nt, Artificial Sequence
  Description of Artificial Sequence: Synthetic oligonucleotide
aucguuuuagugugcuuuc

SEQ ID NO: 605063 - RNA, 19 nt, Artificial Sequence
  Description of Artificial Sequence: Synthetic oligonucleotide
uugguucuauuauuugagc

SEQ ID NO: 605064 - RNA, 19 nt, Artificial Sequence
  Description of Artificial Sequence: Synthetic oligonucleotide
ugcuggaaugggaacuccg

SEQ ID NO: 605065 - RNA, 19 nt, Artificial Sequence
  Description of Artificial Sequence: Synthetic oligonucleotide
augacuaauuaaaucagca

SEQ ID NO: 605066 - RNA, 19 nt, Artificial Sequence
  Description of Artificial Sequence: Synthetic oligonucleotide
uucuaaccaguccauuucu

SEQ ID NO: 605067 - RNA, 19 nt, Artificial Sequence
  Description of Artificial Sequence: Synthetic oligonucleotide
agaaucaaagagacacggc

SEQ ID NO: 605068 - RNA, 19 nt, Artificial Sequence
  Description of Artificial Sequence: Synthetic oligonucleotide
gaggaaucauuuuacagcu

SEQ ID NO: 605069 - RNA, 19 nt, Artificial Sequence
  Description of Artificial Sequence: Synthetic oligonucleotide
uggaaugggaacuccgcug

SEQ ID NO: 605070 - RNA, 19 nt, Artificial Sequence
  Description of Artificial Sequence: Synthetic oligonucleotide
uccuuagccagccaccaac

SEQ ID NO: 605071 - RNA, 19 nt, Artificial Sequence
  Description of Artificial Sequence: Synthetic oligonucleotide
aauacccagccacagcuua

SEQ ID NO: 605072 - RNA, 19 nt, Artificial Sequence
  Description of Artificial Sequence: Synthetic oligonucleotide
uucgccaguagaauuucga

SEQ ID NO: 605073 - RNA, 19 nt, Artificial Sequence
  Description of Artificial Sequence: Synthetic oligonucleotide
aaaacgaccuaaguucuaa

SEQ ID NO: 605074 - RNA, 19 nt, Artificial Sequence
  Description of Artificial Sequence: Synthetic oligonucleotide
ucaugaaccccaucuggug

SEQ ID NO: 605075 - RNA, 19 nt, Artificial Sequence
  Description of Artificial Sequence: Synthetic oligonucleotide
aauauaauuugcacacaaa

SEQ ID NO: 605076 - RNA, 19 nt, Artificial Sequence
  Description of Artificial Sequence: Synthetic oligonucleotide
agcguccuuagccagccac

SEQ ID NO: 605077 - RNA, 19 nt, Artificial Sequence
  Description of Artificial Sequence: Synthetic oligonucleotide
augcuuaucaucugacgga

SEQ ID NO: 605078 - RNA, 19 nt, Artificial Sequence
  Description of Artificial Sequence: Synthetic oligonucleotide
uaccgucaaacagacagag

SEQ ID NO: 605079 - RNA, 19 nt, Artificial Sequence
  Description of Artificial Sequence: Synthetic oligonucleotide
agcgaaguccccaagagca

SEQ ID NO: 605080 - RNA, 19 nt, Artificial Sequence
  Description of Artificial Sequence: Synthetic oligonucleotide
uggaccugaugaaacaguc

SEQ ID NO: 605081 - RNA, 19 nt, Artificial Sequence
  Description of Artificial Sequence: Synthetic oligonucleotide
cacgugucugcugagaacc

SEQ ID NO: 605082 - RNA, 19 nt, Artificial Sequence
  Description of Artificial Sequence: Synthetic oligonucleotide
ugggaaucgguucucugcu

SEQ ID NO: 605083 - RNA, 19 nt, Artificial Sequence
  Description of Artificial Sequence: Synthetic oligonucleotide
uuuaucucugagauagcuu

SEQ ID NO: 605084 - RNA, 19 nt, Artificial Sequence
  Description of Artificial Sequence: Synthetic oligonucleotide
augccaguuaccuggggag

SEQ ID NO: 605085 - RNA, 19 nt, Artificial Sequence
  Description of Artificial Sequence: Synthetic oligonucleotide
uucuuaaaugucaggucuc

SEQ ID NO: 605086 - RNA, 19 nt, Artificial Sequence
  Description of Artificial Sequence: Synthetic oligonucleotide
uuauauggagaaugucccu

SEQ ID NO: 605087 - RNA, 19 nt, Artificial Sequence
  Description of Artificial Sequence: Synthetic oligonucleotide
cugacggaaaacacugccc

SEQ ID NO: 605088 - RNA, 19 nt, Artificial Sequence
  Description of Artificial Sequence: Synthetic oligonucleotide
acuaauuaaaucagcacuu

SEQ ID NO: 605089 - RNA, 19 nt, Artificial Sequence
  Description of Artificial Sequence: Synthetic oligonucleotide
guagcuugcucgaaacugg

SEQ ID NO: 605090 - RNA, 19 nt, Artificial Sequence
  Description of Artificial Sequence: Synthetic oligonucleotide
ugucgugagaucuggcugu

SEQ ID NO: 605091 - RNA, 19 nt, Artificial Sequence
  Description of Artificial Sequence: Synthetic oligonucleotide
gaauuucgaauguaagaaa

SEQ ID NO: 605092 - RNA, 19 nt, Artificial Sequence
  Description of Artificial Sequence: Synthetic oligonucleotide
aaucgguucucugcuugac

SEQ ID NO: 605093 - RNA, 19 nt, Artificial Sequence
  Description of Artificial Sequence: Synthetic oligonucleotide
guaggucugcucugaaagg

SEQ ID NO: 605094 - RNA, 19 nt, Artificial Sequence
  Description of Artificial Sequence: Synthetic oligonucleotide
uaucaguaagugagcggag

SEQ ID NO: 605095 - RNA, 19 nt, Artificial Sequence
  Description of Artificial Sequence: Synthetic oligonucleotide
aguucuaaccaguccauuu

SEQ ID NO: 605096 - RNA, 19 nt, Artificial Sequence
  Description of Artificial Sequence: Synthetic oligonucleotide
aguucaaauaauaucccaa

SEQ ID NO: 605097 - RNA, 19 nt, Artificial Sequence
  Description of Artificial Sequence: Synthetic oligonucleotide
uaucccaaggucuggaguu

SEQ ID NO: 605098 - RNA, 19 nt, Artificial Sequence
  Description of Artificial Sequence: Synthetic oligonucleotide
cauccagcaagcaagguaa

SEQ ID NO: 605099 - RNA, 19 nt, Artificial Sequence
  Description of Artificial Sequence: Synthetic oligonucleotide
auaauaucccaaggucugg

SEQ ID NO: 605100 - RNA, 19 nt, Artificial Sequence
  Description of Artificial Sequence: Synthetic oligonucleotide
uaaguucuaaccaguccau

SEQ ID NO: 605101 - RNA, 19 nt, Artificial Sequence
  Description of Artificial Sequence: Synthetic oligonucleotide
ugaagagcacuuuuauuuu

SEQ ID NO: 605102 - RNA, 19 nt, Artificial Sequence
  Description of Artificial Sequence: Synthetic oligonucleotide
gaugccaguuaccugggga

SEQ ID NO: 605103 - RNA, 19 nt, Artificial Sequence
  Description of Artificial Sequence: Synthetic oligonucleotide
uuagugugcuuucuuucuc

SEQ ID NO: 605104 - RNA, 19 nt, Artificial Sequence
  Description of Artificial Sequence: Synthetic oligonucleotide
guucuaaccaguccauuuc

SEQ ID NO: 605105 - RNA, 19 nt, Artificial Sequence
  Description of Artificial Sequence: Synthetic oligonucleotide
agcagacugagcacggccc

SEQ ID NO: 605106 - RNA, 19 nt, Artificial Sequence
  Description of Artificial Sequence: Synthetic oligonucleotide
uguaugcuugcuccuggga

SEQ ID NO: 605107 - RNA, 19 nt, Artificial Sequence
  Description of Artificial Sequence: Synthetic oligonucleotide
aagucguaggucugcucug

SEQ ID NO: 605108 - RNA, 19 nt, Artificial Sequence
  Description of Artificial Sequence: Synthetic oligonucleotide
caaaugguucaugaacccc

SEQ ID NO: 605109 - RNA, 19 nt, Artificial Sequence
  Description of Artificial Sequence: Synthetic oligonucleotide
gucgguaaaauaucaguaa

SEQ ID NO: 605110 - RNA, 19 nt, Artificial Sequence
  Description of Artificial Sequence: Synthetic oligonucleotide
gaagucguaggucugcucu

SEQ ID NO: 605111 - RNA, 19 nt, Artificial Sequence
  Description of Artificial Sequence: Synthetic oligonucleotide
agaaaacgaccuaaguucu

SEQ ID NO: 605112 - RNA, 19 nt, Artificial Sequence
  Description of Artificial Sequence: Synthetic oligonucleotide
agaaguagcuugcucgaaa

SEQ ID NO: 605113 - RNA, 19 nt, Artificial Sequence
  Description of Artificial Sequence: Synthetic oligonucleotide
auuugucgguaaaauauca

SEQ ID NO: 605114 - RNA, 19 nt, Artificial Sequence
  Description of Artificial Sequence: Synthetic oligonucleotide
uauauggagaaugucccuu

SEQ ID NO: 605115 - RNA, 19 nt, Artificial Sequence
  Description of Artificial Sequence: Synthetic oligonucleotide
cuuaaaugucaggucuccg

SEQ ID NO: 605116 - RNA, 19 nt, Artificial Sequence
  Description of Artificial Sequence: Synthetic oligonucleotide
cuuccgcccaucugaacgg

SEQ ID NO: 605117 - RNA, 19 nt, Artificial Sequence
  Description of Artificial Sequence: Synthetic oligonucleotide
guaagaugccaguuaccug

SEQ ID NO: 605118 - RNA, 19 nt, Artificial Sequence
  Description of Artificial Sequence: Synthetic oligonucleotide
agagcuuaagaaauaccca

SEQ ID NO: 605119 - RNA, 19 nt, Artificial Sequence
  Description of Artificial Sequence: Synthetic oligonucleotide
uccaagaauuugucgguaa

SEQ ID NO: 605120 - RNA, 19 nt, Artificial Sequence
  Description of Artificial Sequence: Synthetic oligonucleotide
uaauaucccaaggucugga

SEQ ID NO: 605121 - RNA, 19 nt, Artificial Sequence
  Description of Artificial Sequence: Synthetic oligonucleotide
uguugcucagaaccuuacu

SEQ ID NO: 605122 - RNA, 19 nt, Artificial Sequence
  Description of Artificial Sequence: Synthetic oligonucleotide
cagagaccgaaguuuuacc

SEQ ID NO: 605123 - RNA, 19 nt, Artificial Sequence
  Description of Artificial Sequence: Synthetic oligonucleotide
cuuaagaaauacccagcca

SEQ ID NO: 605124 - RNA, 19 nt, Artificial Sequence
  Description of Artificial Sequence: Synthetic oligonucleotide
ucugaucguuuuagugugc

SEQ ID NO: 605125 - RNA, 19 nt, Artificial Sequence
  Description of Artificial Sequence: Synthetic oligonucleotide
guugcucagaaccuuacua

SEQ ID NO: 605126 - RNA, 19 nt, Artificial Sequence
  Description of Artificial Sequence: Synthetic oligonucleotide
ucgcuucucauaguucccg

SEQ ID NO: 605127 - RNA, 19 nt, Artificial Sequence
  Description of Artificial Sequence: Synthetic oligonucleotide
uauggagaaugucccuuuc

SEQ ID NO: 605128 - RNA, 19 nt, Artificial Sequence
  Description of Artificial Sequence: Synthetic oligonucleotide
cauuguggcuagcacauca

SEQ ID NO: 605129 - RNA, 19 nt, Artificial Sequence
  Description of Artificial Sequence: Synthetic oligonucleotide
agcuuuucggacagcacuc

SEQ ID NO: 605130 - RNA, 19 nt, Artificial Sequence
  Description of Artificial Sequence: Synthetic oligonucleotide
auaaucgugccugccuuag

SEQ ID NO: 605131 - RNA, 19 nt, Artificial Sequence
  Description of Artificial Sequence: Synthetic oligonucleotide
ucgguucucugcuugacuu

SEQ ID NO: 605132 - RNA, 19 nt, Artificial Sequence
  Description of Artificial Sequence: Synthetic oligonucleotide
acgaacuccugagagcauc

SEQ ID NO: 605133 - RNA, 19 nt, Artificial Sequence
  Description of Artificial Sequence: Synthetic oligonucleotide
agaaccuuacuaccgucaa

SEQ ID NO: 605134 - RNA, 19 nt, Artificial Sequence
  Description of Artificial Sequence: Synthetic oligonucleotide
ucguucgccaguagaauuu

SEQ ID NO: 605135 - RNA, 19 nt, Artificial Sequence
  Description of Artificial Sequence: Synthetic oligonucleotide
aacuccgcuggcaucgaag

SEQ ID NO: 605136 - RNA, 19 nt, Artificial Sequence
  Description of Artificial Sequence: Synthetic oligonucleotide
cucgaaacugguucccuuc

SEQ ID NO: 605137 - RNA, 19 nt, Artificial Sequence
  Description of Artificial Sequence: Synthetic oligonucleotide
aaccuguaugcuugcuccu

SEQ ID NO: 605138 - RNA, 19 nt, Artificial Sequence
  Description of Artificial Sequence: Synthetic oligonucleotide
ucagaaccuuacuaccguc

SEQ ID NO: 605139 - RNA, 19 nt, Artificial Sequence
  Description of Artificial Sequence: Synthetic oligonucleotide
agggaacccucauucucuc

SEQ ID NO: 605140 - RNA, 19 nt, Artificial Sequence
  Description of Artificial Sequence: Synthetic oligonucleotide
uggauacaucuuuggaaaa

SEQ ID NO: 605141 - RNA, 19 nt, Artificial Sequence
  Description of Artificial Sequence: Synthetic oligonucleotide
ucgccaguagaauuucgaa

SEQ ID NO: 605142 - RNA, 19 nt, Artificial Sequence
  Description of Artificial Sequence: Synthetic oligonucleotide
caagguuucuggcagcaga

SEQ ID NO: 605143 - RNA, 19 nt, Artificial Sequence
  Description of Artificial Sequence: Synthetic oligonucleotide
cuguaugcuugcuccuggg

SEQ ID NO: 605144 - RNA, 19 nt, Artificial Sequence
  Description of Artificial Sequence: Synthetic oligonucleotide
gcaugcuuaucaucugacg

SEQ ID NO: 605145 - RNA, 19 nt, Artificial Sequence
  Description of Artificial Sequence: Synthetic oligonucleotide
cuuagcgucccacaacaga

SEQ ID NO: 605146 - RNA, 19 nt, Artificial Sequence
  Description of Artificial Sequence: Synthetic oligonucleotide
cuuucgcuucucauaguuc

SEQ ID NO: 605147 - RNA, 19 nt, Artificial Sequence
  Description of Artificial Sequence: Synthetic oligonucleotide
acuccgcuggcaucgaaga

SEQ ID NO: 605148 - RNA, 19 nt, Artificial Sequence
  Description of Artificial Sequence: Synthetic oligonucleotide
caaagagacacggcuuggc

SEQ ID NO: 605149 - RNA, 19 nt, Artificial Sequence
  Description of Artificial Sequence: Synthetic oligonucleotide
acagcuuagcucuccucgu

SEQ ID NO: 605150 - RNA, 19 nt, Artificial Sequence
  Description of Artificial Sequence: Synthetic oligonucleotide
agcagcgaaguccccaaga

SEQ ID NO: 605151 - RNA, 19 nt, Artificial Sequence
  Description of Artificial Sequence: Synthetic oligonucleotide
ugacauaaucgugccugcc

SEQ ID NO: 605152 - RNA, 19 nt, Artificial Sequence
  Description of Artificial Sequence: Synthetic oligonucleotide
uucucccaagaagucguag

SEQ ID NO: 605153 - RNA, 19 nt, Artificial Sequence
  Description of Artificial Sequence: Synthetic oligonucleotide
uucggacagcacuccagug

SEQ ID NO: 605154 - RNA, 19 nt, Artificial Sequence
  Description of Artificial Sequence: Synthetic oligonucleotide
ggaaucgguucucugcuug

SEQ ID NO: 605155 - RNA, 19 nt, Artificial Sequence
  Description of Artificial Sequence: Synthetic oligonucleotide
aucugacggaaaacacugc

SEQ ID NO: 605156 - RNA, 19 nt, Artificial Sequence
  Description of Artificial Sequence: Synthetic oligonucleotide
ugagcagcgaaguccccaa

SEQ ID NO: 605157 - RNA, 19 nt, Artificial Sequence
  Description of Artificial Sequence: Synthetic oligonucleotide
uaaucgugccugccuuagc

SEQ ID NO: 605158 - RNA, 19 nt, Artificial Sequence
  Description of Artificial Sequence: Synthetic oligonucleotide
caguuggcuuucaguaacc

SEQ ID NO: 605159 - RNA, 19 nt, Artificial Sequence
  Description of Artificial Sequence: Synthetic oligonucleotide
aacuaucaaccugaagcuu

SEQ ID NO: 605160 - RNA, 19 nt, Artificial Sequence
  Description of Artificial Sequence: Synthetic oligonucleotide
cuuagcucuccucguucgc

SEQ ID NO: 605161 - RNA, 19 nt, Artificial Sequence
  Description of Artificial Sequence: Synthetic oligonucleotide
ggcuagcacaucaauagug

SEQ ID NO: 605162 - RNA, 19 nt, Artificial Sequence
  Description of Artificial Sequence: Synthetic oligonucleotide
aucgguucucugcuugacu

SEQ ID NO: 605163 - RNA, 19 nt, Artificial Sequence
  Description of Artificial Sequence: Synthetic oligonucleotide
gaaucgguucucugcuuga

SEQ ID NO: 605164 - RNA, 19 nt, Artificial Sequence
  Description of Artificial Sequence: Synthetic oligonucleotide
uccgcaugcuuaucaucug

SEQ ID NO: 605165 - RNA, 19 nt, Artificial Sequence
  Description of Artificial Sequence: Synthetic oligonucleotide
cagaaccuuacuaccguca

SEQ ID NO: 605166 - RNA, 19 nt, Artificial Sequence
  Description of Artificial Sequence: Synthetic oligonucleotide
cagcgaaguccccaagagc

SEQ ID NO: 605167 - RNA, 19 nt, Artificial Sequence
  Description of Artificial Sequence: Synthetic oligonucleotide
accuuacuaccgucaaaca

SEQ ID NO: 605168 - RNA, 19 nt, Artificial Sequence
  Description of Artificial Sequence: Synthetic oligonucleotide
auuucgaauguaagaaauu

SEQ ID NO: 605169 - RNA, 19 nt, Artificial Sequence
  Description of Artificial Sequence: Synthetic oligonucleotide
ugcucggacuguguggaug

SEQ ID NO: 605170 - RNA, 19 nt, Artificial Sequence
  Description of Artificial Sequence: Synthetic oligonucleotide
agaugccaguuaccugggg

SEQ ID NO: 605171 - RNA, 19 nt, Artificial Sequence
  Description of Artificial Sequence: Synthetic oligonucleotide
gaucguuuuagugugcuuu

SEQ ID NO: 605172 - RNA, 19 nt, Artificial Sequence
  Description of Artificial Sequence: Synthetic oligonucleotide
uuucucggcccacgaacuc

SEQ ID NO: 605173 - RNA, 19 nt, Artificial Sequence
  Description of Artificial Sequence: Synthetic oligonucleotide
ucggacuguguggauguug

SEQ ID NO: 605174 - RNA, 19 nt, Artificial Sequence
  Description of Artificial Sequence: Synthetic oligonucleotide
uccugggagaggaaucauu

SEQ ID NO: 605175 - RNA, 19 nt, Artificial Sequence
  Description of Artificial Sequence: Synthetic oligonucleotide
ucguaggucugcucugaaa

SEQ ID NO: 605176 - RNA, 19 nt, Artificial Sequence
  Description of Artificial Sequence: Synthetic oligonucleotide
ggagaggaaucauuuuaca

SEQ ID NO: 605177 - RNA, 19 nt, Artificial Sequence
  Description of Artificial Sequence: Synthetic oligonucleotide
aagaaguagcuugcucgaa

SEQ ID NO: 605178 - RNA, 19 nt, Artificial Sequence
  Description of Artificial Sequence: Synthetic oligonucleotide
gguaagaugccaguuaccu

SEQ ID NO: 605179 - RNA, 19 nt, Artificial Sequence
  Description of Artificial Sequence: Synthetic oligonucleotide
cuccguuugcuguuucauc

SEQ ID NO: 605180 - RNA, 19 nt, Artificial Sequence
  Description of Artificial Sequence: Synthetic oligonucleotide
aggcgcacgugucugcuga

SEQ ID NO: 605181 - RNA, 19 nt, Artificial Sequence
  Description of Artificial Sequence: Synthetic oligonucleotide
cuaucaaccugaagcuuaa

SEQ ID NO: 605182 - RNA, 19 nt, Artificial Sequence
  Description of Artificial Sequence: Synthetic oligonucleotide
agcacacagucaugguaga

SEQ ID NO: 605183 - RNA, 19 nt, Artificial Sequence
  Description of Artificial Sequence: Synthetic oligonucleotide
aucgugccugccuuagcgu

SEQ ID NO: 605184 - RNA, 19 nt, Artificial Sequence
  Description of Artificial Sequence: Synthetic oligonucleotide
gucaguuggcuuucaguaa

SEQ ID NO: 605185 - RNA, 19 nt, Artificial Sequence
  Description of Artificial Sequence: Synthetic oligonucleotide
agagcaccugucaguuggc

SEQ ID NO: 605186 - RNA, 19 nt, Artificial Sequence
  Description of Artificial Sequence: Synthetic oligonucleotide
uaucaaccugaagcuuaag

SEQ ID NO: 605187 - RNA, 19 nt, Artificial Sequence
  Description of Artificial Sequence: Synthetic oligonucleotide
guucgccaguagaauuucg

SEQ ID NO: 605188 - RNA, 19 nt, Artificial Sequence
  Description of Artificial Sequence: Synthetic oligonucleotide
aggaaucauuuuacagcuc

SEQ ID NO: 605189 - RNA, 19 nt, Artificial Sequence
  Description of Artificial Sequence: Synthetic oligonucleotide
guucccgacaggugcacga

SEQ ID NO: 605190 - RNA, 19 nt, Artificial Sequence
  Description of Artificial Sequence: Synthetic oligonucleotide
uagcgucccacaacagauc

SEQ ID NO: 605191 - RNA, 19 nt, Artificial Sequence
  Description of Artificial Sequence: Synthetic oligonucleotide
aaguucuaaccaguccauu

SEQ ID NO: 605192 - RNA, 19 nt, Artificial Sequence
  Description of Artificial Sequence: Synthetic oligonucleotide
cuaccgucaaacagacaga

SEQ ID NO: 605193 - RNA, 19 nt, Artificial Sequence
  Description of Artificial Sequence: Synthetic oligonucleotide
uuacucgguuccagagcac

SEQ ID NO: 605194 - RNA, 19 nt, Artificial Sequence
  Description of Artificial Sequence: Synthetic oligonucleotide
gaaccccaucuggugacag

SEQ ID NO: 605195 - RNA, 19 nt, Artificial Sequence
  Description of Artificial Sequence: Synthetic oligonucleotide
agcauccaucacguccggc

SEQ ID NO: 605196 - RNA, 19 nt, Artificial Sequence
  Description of Artificial Sequence: Synthetic oligonucleotide
gaaccuuacuaccgucaaa

SEQ ID NO: 605197 - RNA, 19 nt, Artificial Sequence
  Description of Artificial Sequence: Synthetic oligonucleotide
gggagagcguggaaggccg

SEQ ID NO: 605198 - RNA, 19 nt, Artificial Sequence
  Description of Artificial Sequence: Synthetic oligonucleotide
gaccgaaguuuuaccagca

SEQ ID NO: 605199 - RNA, 19 nt, Artificial Sequence
  Description of Artificial Sequence: Synthetic oligonucleotide
gccuuagcgucccacaaca

SEQ ID NO: 605200 - RNA, 19 nt, Artificial Sequence
  Description of Artificial Sequence: Synthetic oligonucleotide
ugaucguuuuagugugcuu

SEQ ID NO: 605201 - RNA, 19 nt, Artificial Sequence
  Description of Artificial Sequence: Synthetic oligonucleotide
ccuuagccagccaccaacc

SEQ ID NO: 605202 - RNA, 19 nt, Artificial Sequence
  Description of Artificial Sequence: Synthetic oligonucleotide
cuuaagcuccuggccgcgg

SEQ ID NO: 605203 - RNA, 19 nt, Artificial Sequence
  Description of Artificial Sequence: Synthetic oligonucleotide
uuccgcccaucugaacggg

SEQ ID NO: 605204 - RNA, 19 nt, Artificial Sequence
  Description of Artificial Sequence: Synthetic oligonucleotide
agcaccugucaguuggcuu

SEQ ID NO: 605205 - RNA, 19 nt, Artificial Sequence
  Description of Artificial Sequence: Synthetic oligonucleotide
aguucccgacaggugcacg

SEQ ID NO: 605206 - RNA, 19 nt, Artificial Sequence
  Description of Artificial Sequence: Synthetic oligonucleotide
ugcucgaaacugguucccu

SEQ ID NO: 605207 - RNA, 19 nt, Artificial Sequence
  Description of Artificial Sequence: Synthetic oligonucleotide
cuuuucggacagcacucca

SEQ ID NO: 605208 - RNA, 19 nt, Artificial Sequence
  Description of Artificial Sequence: Synthetic oligonucleotide
cgugagaucuggcuguaag

SEQ ID NO: 605209 - RNA, 19 nt, Artificial Sequence
  Description of Artificial Sequence: Synthetic oligonucleotide
uuccaucgagcagccucgg

SEQ ID NO: 605210 - RNA, 19 nt, Artificial Sequence
  Description of Artificial Sequence: Synthetic oligonucleotide
agucguaggucugcucuga

SEQ ID NO: 605211 - RNA, 19 nt, Artificial Sequence
  Description of Artificial Sequence: Synthetic oligonucleotide
uccuuucgcuucucauagu

SEQ ID NO: 605212 - RNA, 19 nt, Artificial Sequence
  Description of Artificial Sequence: Synthetic oligonucleotide
ggagugccaccauucaaga

SEQ ID NO: 605213 - RNA, 19 nt, Artificial Sequence
  Description of Artificial Sequence: Synthetic oligonucleotide
gccaccaaccaucuagguc

SEQ ID NO: 605214 - RNA, 19 nt, Artificial Sequence
  Description of Artificial Sequence: Synthetic oligonucleotide
gcuggaaugggaacuccgc

SEQ ID NO: 605215 - RNA, 19 nt, Artificial Sequence
  Description of Artificial Sequence: Synthetic oligonucleotide
uccaucgagcagccucggu

SEQ ID NO: 605216 - RNA, 19 nt, Artificial Sequence
  Description of Artificial Sequence: Synthetic oligonucleotide
ccaucgagcagccucgguc

SEQ ID NO: 605217 - RNA, 19 nt, Artificial Sequence
  Description of Artificial Sequence: Synthetic oligonucleotide
uccaucacguccggcugcu

SEQ ID NO: 605218 - RNA, 19 nt, Artificial Sequence
  Description of Artificial Sequence: Synthetic oligonucleotide
cacgauuucccaucagccu

SEQ ID NO: 605219 - RNA, 19 nt, Artificial Sequence
  Description of Artificial Sequence: Synthetic oligonucleotide
cucagaaccuuacuaccgu

SEQ ID NO: 605220 - RNA, 19 nt, Artificial Sequence
  Description of Artificial Sequence: Synthetic oligonucleotide
ggagaaugucccuuucuua

SEQ ID NO: 605221 - RNA, 19 nt, Artificial Sequence
  Description of Artificial Sequence: Synthetic oligonucleotide
cuuucucggcccacgaacu

SEQ ID NO: 605222 - RNA, 19 nt, Artificial Sequence
  Description of Artificial Sequence: Synthetic oligonucleotide
gaccuaaguucuaaccagu

SEQ ID NO: 605223 - RNA, 19 nt, Artificial Sequence
  Description of Artificial Sequence: Synthetic oligonucleotide
uagcucccauuguggcuag

SEQ ID NO: 605224 - RNA, 19 nt, Artificial Sequence
  Description of Artificial Sequence: Synthetic oligonucleotide
gaaaacgaccuaaguucua

SEQ ID NO: 605225 - RNA, 19 nt, Artificial Sequence
  Description of Artificial Sequence: Synthetic oligonucleotide
uccucgucuccuucugauu

SEQ ID NO: 605226 - RNA, 19 nt, Artificial Sequence
  Description of Artificial Sequence: Synthetic oligonucleotide
gucaggcugaguucuuucu

SEQ ID NO: 605227 - RNA, 19 nt, Artificial Sequence
  Description of Artificial Sequence: Synthetic oligonucleotide
gaggcgcacgugucugcug

SEQ ID NO: 605228 - RNA, 19 nt, Artificial Sequence
  Description of Artificial Sequence: Synthetic oligonucleotide
ugacgcccacagcaagcuc

SEQ ID NO: 605229 - RNA, 19 nt, Artificial Sequence
  Description of Artificial Sequence: Synthetic oligonucleotide
gugcacgauuucccaucag

SEQ ID NO: 605230 - RNA, 19 nt, Artificial Sequence
  Description of Artificial Sequence: Synthetic oligonucleotide
guggaaugcaggagaggga

SEQ ID NO: 605231 - RNA, 19 nt, Artificial Sequence
  Description of Artificial Sequence: Synthetic oligonucleotide
gguggccagcacuggauga

SEQ ID NO: 605232 - RNA, 19 nt, Artificial Sequence
  Description of Artificial Sequence: Synthetic oligonucleotide
ccacgaacuccugagagca

SEQ ID NO: 605233 - RNA, 19 nt, Artificial Sequence
  Description of Artificial Sequence: Synthetic oligonucleotide
gcuagcacaucaauagugu

SEQ ID NO: 605234 - RNA, 19 nt, Artificial Sequence
  Description of Artificial Sequence: Synthetic oligonucleotide
gcuuuucggacagcacucc

SEQ ID NO: 605235 - RNA, 19 nt, Artificial Sequence
  Description of Artificial Sequence: Synthetic oligonucleotide
ucccgacaggugcacgauu

SEQ ID NO: 605236 - RNA, 19 nt, Artificial Sequence
  Description of Artificial Sequence: Synthetic oligonucleotide
accaaacuaucaaccugaa

SEQ ID NO: 605237 - RNA, 19 nt, Artificial Sequence
  Description of Artificial Sequence: Synthetic oligonucleotide
ggaacccugcaggaauagc

SEQ ID NO: 605238 - RNA, 19 nt, Artificial Sequence
  Description of Artificial Sequence: Synthetic oligonucleotide
gaaggccaguugugauguc

SEQ ID NO: 605239 - RNA, 19 nt, Artificial Sequence
  Description of Artificial Sequence: Synthetic oligonucleotide
cugccuuagcgucccacaa

SEQ ID NO: 605240 - RNA, 19 nt, Artificial Sequence
  Description of Artificial Sequence: Synthetic oligonucleotide
uucccgacaggugcacgau

SEQ ID NO: 605241 - RNA, 19 nt, Artificial Sequence
  Description of Artificial Sequence: Synthetic oligonucleotide
gcuuaagcuccuggccgcg

SEQ ID NO: 605242 - RNA, 19 nt, Artificial Sequence
  Description of Artificial Sequence: Synthetic oligonucleotide
gcacgugucugcugagaac

SEQ ID NO: 605243 - RNA, 19 nt, Artificial Sequence
  Description of Artificial Sequence: Synthetic oligonucleotide
cuucggcuccguuugcugu

SEQ ID NO: 605244 - RNA, 19 nt, Artificial Sequence
  Description of Artificial Sequence: Synthetic oligonucleotide
gggaguuugugagguccag

SEQ ID NO: 605245 - RNA, 19 nt, Artificial Sequence
  Description of Artificial Sequence: Synthetic oligonucleotide
cugaucguuuuagugugcu

SEQ ID NO: 605246 - RNA, 19 nt, Artificial Sequence
  Description of Artificial Sequence: Synthetic oligonucleotide
cucguucgccaguagaauu

SEQ ID NO: 605247 - RNA, 19 nt, Artificial Sequence
  Description of Artificial Sequence: Synthetic oligonucleotide
gcuguuucauccaccaccu

SEQ ID NO: 605248 - RNA, 19 nt, Artificial Sequence
  Description of Artificial Sequence: Synthetic oligonucleotide
ccuuagcgucccacaacag

SEQ ID NO: 605249 - RNA, 19 nt, Artificial Sequence
  Description of Artificial Sequence: Synthetic oligonucleotide
caugguagaccaggaggaa

SEQ ID NO: 605250 - RNA, 19 nt, Artificial Sequence
  Description of Artificial Sequence: Synthetic oligonucleotide
agcucccauuguggcuagc

SEQ ID NO: 605251 - RNA, 19 nt, Artificial Sequence
  Description of Artificial Sequence: Synthetic oligonucleotide
cacguccggcugcuccagg

SEQ ID NO: 605252 - RNA, 19 nt, Artificial Sequence
  Description of Artificial Sequence: Synthetic oligonucleotide
gcguggaaggccggaaccc

SEQ ID NO: 605253 - RNA, 19 nt, Artificial Sequence
  Description of Artificial Sequence: Synthetic oligonucleotide
gaacuccgcuggcaucgaa

SEQ ID NO: 605254 - RNA, 19 nt, Artificial Sequence
  Description of Artificial Sequence: Synthetic oligonucleotide
caguugugaugucgugaga

SEQ ID NO: 605255 - RNA, 19 nt, Artificial Sequence
  Description of Artificial Sequence: Synthetic oligonucleotide
cuccaagaauuugucggua

SEQ ID NO: 605256 - RNA, 19 nt, Artificial Sequence
  Description of Artificial Sequence: Synthetic oligonucleotide
gucguaggucugcucugaa

SEQ ID NO: 605257 - RNA, 19 nt, Artificial Sequence
  Description of Artificial Sequence: Synthetic oligonucleotide
ucgugagaucuggcuguaa

SEQ ID NO: 605258 - RNA, 19 nt, Artificial Sequence
  Description of Artificial Sequence: Synthetic oligonucleotide
acgugucugcugagaaccu

SEQ ID NO: 605259 - RNA, 19 nt, Artificial Sequence
  Description of Artificial Sequence: Synthetic oligonucleotide
gcguccuuagccagccacc

SEQ ID NO: 605260 - RNA, 19 nt, Artificial Sequence
  Description of Artificial Sequence: Synthetic oligonucleotide
guaagugagcggagcacau

SEQ ID NO: 605261 - RNA, 19 nt, Artificial Sequence
  Description of Artificial Sequence: Synthetic oligonucleotide
gaggcuuguuccugccuuu

SEQ ID NO: 605262 - RNA, 19 nt, Artificial Sequence
  Description of Artificial Sequence: Synthetic oligonucleotide
guccuuagccagccaccaa

SEQ ID NO: 605263 - RNA, 19 nt, Artificial Sequence
  Description of Artificial Sequence: Synthetic oligonucleotide
cccauuguggcuagcacau

SEQ ID NO: 605264 - RNA, 19 nt, Artificial Sequence
  Description of Artificial Sequence: Synthetic oligonucleotide
ucggcuccguuugcuguuu

SEQ ID NO: 605265 - RNA, 19 nt, Artificial Sequence
  Description of Artificial Sequence: Synthetic oligonucleotide
ggcgcacgugucugcugag

SEQ ID NO: 605266 - RNA, 19 nt, Artificial Sequence
  Description of Artificial Sequence: Synthetic oligonucleotide
ccgcaugcuuaucaucuga

SEQ ID NO: 605267 - RNA, 19 nt, Artificial Sequence
  Description of Artificial Sequence: Synthetic oligonucleotide
ccaagguuucuggcagcag

SEQ ID NO: 605268 - RNA, 19 nt, Artificial Sequence
  Description of Artificial Sequence: Synthetic oligonucleotide
ccgacaggugcacgauuuc

SEQ ID NO: 605269 - RNA, 19 nt, Artificial Sequence
  Description of Artificial Sequence: Synthetic oligonucleotide
cguucgccaguagaauuuc

SEQ ID NO: 605270 - RNA, 19 nt, Artificial Sequence
  Description of Artificial Sequence: Synthetic oligonucleotide
gcucgaaacugguucccuu

SEQ ID NO: 605271 - RNA, 19 nt, Artificial Sequence
  Description of Artificial Sequence: Synthetic oligonucleotide
gggaacccucauucucucu

SEQ ID NO: 605272 - RNA, 19 nt, Artificial Sequence
  Description of Artificial Sequence: Synthetic oligonucleotide
accaaccaucuaggucuuu

SEQ ID NO: 605273 - RNA, 19 nt, Artificial Sequence
  Description of Artificial Sequence: Synthetic oligonucleotide
cggaacccugcaggaauag

SEQ ID NO: 605274 - RNA, 19 nt, Artificial Sequence
  Description of Artificial Sequence: Synthetic oligonucleotide
gcgaaguccccaagagcaa

SEQ ID NO: 605275 - RNA, 19 nt, Artificial Sequence
  Description of Artificial Sequence: Synthetic oligonucleotide
cgccaguagaauuucgaau

SEQ ID NO: 605276 - RNA, 19 nt, Artificial Sequence
  Description of Artificial Sequence: Synthetic oligonucleotide
gcuccguuugcuguuucau

SEQ ID NO: 605277 - RNA, 19 nt, Artificial Sequence
  Description of Artificial Sequence: Synthetic oligonucleotide
cgcuucucauaguucccga

SEQ ID NO: 605278 - RNA, 19 nt, Artificial Sequence
  Description of Artificial Sequence: Synthetic oligonucleotide
cccgacaggugcacgauuu

SEQ ID NO: 605279 - RNA, 19 nt, Artificial Sequence
  Description of Artificial Sequence: Synthetic oligonucleotide
gccuccgcaugcuuaucau

SEQ ID NO: 605280 - RNA, 19 nt, Artificial Sequence
  Description of Artificial Sequence: Synthetic oligonucleotide
ccggaacccugcaggaaua

SEQ ID NO: 605281 - RNA, 19 nt, Artificial Sequence
  Description of Artificial Sequence: Synthetic oligonucleotide
ccaaccaucuaggucuuuu

SEQ ID NO: 605282 - RNA, 19 nt, Artificial Sequence
  Description of Artificial Sequence: Synthetic oligonucleotide
ccaguccauuucuuuuggu

SEQ ID NO: 605283 - RNA, 19 nt, Artificial Sequence
  Description of Artificial Sequence: Synthetic oligonucleotide
gggaaucgguucucugcuu

SEQ ID NO: 605284 - RNA, 19 nt, Artificial Sequence
  Description of Artificial Sequence: Synthetic oligonucleotide
gcgcacgugucugcugaga

SEQ ID NO: 605285 - RNA, 19 nt, Artificial Sequence
  Description of Artificial Sequence: Synthetic oligonucleotide
ggccggaacccugcaggaa

SEQ ID NO: 605286 - RNA, 19 nt, Artificial Sequence
  Description of Artificial Sequence: Synthetic oligonucleotide
ccucguucgccaguagaau

SEQ ID NO: 605287 - RNA, 19 nt, Artificial Sequence
  Description of Artificial Sequence: Synthetic oligonucleotide
gcuugacuucggcuccguu

SEQ ID NO: 605288 - RNA, 19 nt, Artificial Sequence
  Description of Artificial Sequence: Synthetic oligonucleotide
cgcuggcaucgaagagcuu

SEQ ID NO: 605289 - RNA, 19 nt, Artificial Sequence
  Description of Artificial Sequence: Synthetic oligonucleotide
ucuuguaucaaucacuaag

SEQ ID NO: 605290 - RNA, 19 nt, Artificial Sequence
  Description of Artificial Sequence: Synthetic oligonucleotide
cuuuauuagaggcugaacg

SEQ ID NO: 605291 - RNA, 19 nt, Artificial Sequence
  Description of Artificial Sequence: Synthetic oligonucleotide
augauuuggcaguagaagc

SEQ ID NO: 605292 - RNA, 19 nt, Artificial Sequence
  Description of Artificial Sequence: Synthetic oligonucleotide
aauaaaagggaggaugcac

SEQ ID NO: 605293 - RNA, 19 nt, Artificial Sequence
  Description of Artificial Sequence: Synthetic oligonucleotide
uguacgaaugcccauuggg

SEQ ID NO: 605294 - RNA, 19 nt, Artificial Sequence
  Description of Artificial Sequence: Synthetic oligonucleotide
aaaugaugcaaugauaaug

SEQ ID NO: 605295 - RNA, 19 nt, Artificial Sequence
  Description of Artificial Sequence: Synthetic oligonucleotide
caagcuaagugacagaugc

SEQ ID NO: 605296 - RNA, 19 nt, Artificial Sequence
  Description of Artificial Sequence: Synthetic oligonucleotide
aagauuagcgucuuuauua

SEQ ID NO: 605297 - RNA, 19 nt, Artificial Sequence
  Description of Artificial Sequence: Synthetic oligonucleotide
uauaccuggauuuaguuuc

SEQ ID NO: 605298 - RNA, 19 nt, Artificial Sequence
  Description of Artificial Sequence: Synthetic oligonucleotide
uguaaucccauuauuccag

SEQ ID NO: 605299 - RNA, 19 nt, Artificial Sequence
  Description of Artificial Sequence: Synthetic oligonucleotide
caauguuacauccauagug

SEQ ID NO: 605300 - RNA, 19 nt, Artificial Sequence
  Description of Artificial Sequence: Synthetic oligonucleotide
cuuaacaugcccuagcaug

SEQ ID NO: 605301 - RNA, 19 nt, Artificial Sequence
  Description of Artificial Sequence: Synthetic oligonucleotide
ugggauugaaauaugaauc

SEQ ID NO: 605302 - RNA, 19 nt, Artificial Sequence
  Description of Artificial Sequence: Synthetic oligonucleotide
aucccauuauuccaguugc

SEQ ID NO: 605303 - RNA, 19 nt, Artificial Sequence
  Description of Artificial Sequence: Synthetic oligonucleotide
caucuaaacacuccaaagg

SEQ ID NO: 605304 - RNA, 19 nt, Artificial Sequence
  Description of Artificial Sequence: Synthetic oligonucleotide
uaucugacgauuuaguuuc

SEQ ID NO: 605305 - RNA, 19 nt, Artificial Sequence
  Description of Artificial Sequence: Synthetic oligonucleotide
aagguuuaccaccaccuuc

SEQ ID NO: 605306 - RNA, 19 nt, Artificial Sequence
  Description of Artificial Sequence: Synthetic oligonucleotide
auuuaugaucauuucacug

SEQ ID NO: 605307 - RNA, 19 nt, Artificial Sequence
  Description of Artificial Sequence: Synthetic oligonucleotide
aauucugaaggugucgacg

SEQ ID NO: 605308 - RNA, 19 nt, Artificial Sequence
  Description of Artificial Sequence: Synthetic oligonucleotide
agguuuucguuccucagcc

SEQ ID NO: 605309 - RNA, 19 nt, Artificial Sequence
  Description of Artificial Sequence: Synthetic oligonucleotide
uuuacuggauaucuguucu

SEQ ID NO: 605310 - RNA, 19 nt, Artificial Sequence
  Description of Artificial Sequence: Synthetic oligonucleotide
auacugauugcaugggacc

SEQ ID NO: 605311 - RNA, 19 nt, Artificial Sequence
  Description of Artificial Sequence: Synthetic oligonucleotide
uuuauuagaggcugaacgu

SEQ ID NO: 605312 - RNA, 19 nt, Artificial Sequence
  Description of Artificial Sequence: Synthetic oligonucleotide
aaagcucucacacuagcca

SEQ ID NO: 605313 - RNA, 19 nt, Artificial Sequence
  Description of Artificial Sequence: Synthetic oligonucleotide
ugaugcaaugauaaugggc

SEQ ID NO: 605314 - RNA, 19 nt, Artificial Sequence
  Description of Artificial Sequence: Synthetic oligonucleotide
acaagugugacucuuuucu

SEQ ID NO: 605315 - RNA, 19 nt, Artificial Sequence
  Description of Artificial Sequence: Synthetic oligonucleotide
uguaugaaaucaaaagauc

SEQ ID NO: 605316 - RNA, 19 nt, Artificial Sequence
  Description of Artificial Sequence: Synthetic oligonucleotide
auauaaggaacugauaucu

SEQ ID NO: 605317 - RNA, 19 nt, Artificial Sequence
  Description of Artificial Sequence: Synthetic oligonucleotide
aguaguuaggaccaacuug

SEQ ID NO: 605318 - RNA, 19 nt, Artificial Sequence
  Description of Artificial Sequence: Synthetic oligonucleotide
ucuacugugguaucaucgg

SEQ ID NO: 605319 - RNA, 19 nt, Artificial Sequence
  Description of Artificial Sequence: Synthetic oligonucleotide
ucaaacucgacugagauuu

SEQ ID NO: 605320 - RNA, 19 nt, Artificial Sequence
  Description of Artificial Sequence: Synthetic oligonucleotide
aauguuacauccauaguga

SEQ ID NO: 605321 - RNA, 19 nt, Artificial Sequence
  Description of Artificial Sequence: Synthetic oligonucleotide
uaugccaagguuucuuacg

SEQ ID NO: 605322 - RNA, 19 nt, Artificial Sequence
  Description of Artificial Sequence: Synthetic oligonucleotide
uccaguguaaauucugaag

SEQ ID NO: 605323 - RNA, 19 nt, Artificial Sequence
  Description of Artificial Sequence: Synthetic oligonucleotide
ucucacacuagccaaguca

SEQ ID NO: 605324 - RNA, 19 nt, Artificial Sequence
  Description of Artificial Sequence: Synthetic oligonucleotide
auucccaagguguuuugcc

SEQ ID NO: 605325 - RNA, 19 nt, Artificial Sequence
  Description of Artificial Sequence: Synthetic oligonucleotide
ucaucgguaguuuuaauaa

SEQ ID NO: 605326 - RNA, 19 nt, Artificial Sequence
  Description of Artificial Sequence: Synthetic oligonucleotide
ugcuuguugagauuugaag

SEQ ID NO: 605327 - RNA, 19 nt, Artificial Sequence
  Description of Artificial Sequence: Synthetic oligonucleotide
aucuaaacacuccaaaggu

SEQ ID NO: 605328 - RNA, 19 nt, Artificial Sequence
  Description of Artificial Sequence: Synthetic oligonucleotide
ugauuuggcaguagaagca

SEQ ID NO: 605329 - RNA, 19 nt, Artificial Sequence
  Description of Artificial Sequence: Synthetic oligonucleotide
aaucauugggccuuucuaa

SEQ ID NO: 605330 - RNA, 19 nt, Artificial Sequence
  Description of Artificial Sequence: Synthetic oligonucleotide
aaugauaaugggcacccaa

SEQ ID NO: 605331 - RNA, 19 nt, Artificial Sequence
  Description of Artificial Sequence: Synthetic oligonucleotide
uuacucgaaagccugcuug

SEQ ID NO: 605332 - RNA, 19 nt, Artificial Sequence
  Description of Artificial Sequence: Synthetic oligonucleotide
cuugacugcauucccaagg

SEQ ID NO: 605333 - RNA, 19 nt, Artificial Sequence
  Description of Artificial Sequence: Synthetic oligonucleotide
uguugagauuugaaggugc

SEQ ID NO: 605334 - RNA, 19 nt, Artificial Sequence
  Description of Artificial Sequence: Synthetic oligonucleotide
aauauuaucugacgauuua

SEQ ID NO: 605335 - RNA, 19 nt, Artificial Sequence
  Description of Artificial Sequence: Synthetic oligonucleotide
augacaauuacagggcagc

SEQ ID NO: 605336 - RNA, 19 nt, Artificial Sequence
  Description of Artificial Sequence: Synthetic oligonucleotide
ucuacuacaagcucugaau

SEQ ID NO: 605337 - RNA, 19 nt, Artificial Sequence
  Description of Artificial Sequence: Synthetic oligonucleotide
aauuguaaccuugacugca

SEQ ID NO: 605338 - RNA, 19 nt, Artificial Sequence
  Description of Artificial Sequence: Synthetic oligonucleotide
uuaugaucauuucacugcu

SEQ ID NO: 605339 - RNA, 19 nt, Artificial Sequence
  Description of Artificial Sequence: Synthetic oligonucleotide
uggucgacaagcuaaguga

SEQ ID NO: 605340 - RNA, 19 nt, Artificial Sequence
  Description of Artificial Sequence: Synthetic oligonucleotide
aauauaccuggauuuaguu

SEQ ID NO: 605341 - RNA, 19 nt, Artificial Sequence
  Description of Artificial Sequence: Synthetic oligonucleotide
uguaauacucuguucggac

SEQ ID NO: 605342 - RNA, 19 nt, Artificial Sequence
  Description of Artificial Sequence: Synthetic oligonucleotide
uuaacaugcccuagcaugu

SEQ ID NO: 605343 - RNA, 19 nt, Artificial Sequence
  Description of Artificial Sequence: Synthetic oligonucleotide
uugggauugaaauaugaau

SEQ ID NO: 605344 - RNA, 19 nt, Artificial Sequence
  Description of Artificial Sequence: Synthetic oligonucleotide
gacuuaaacugcaucagag

SEQ ID NO: 605345 - RNA, 19 nt, Artificial Sequence
  Description of Artificial Sequence: Synthetic oligonucleotide
uauuagaggcugaacguca

SEQ ID NO: 605346 - RNA, 19 nt, Artificial Sequence
  Description of Artificial Sequence: Synthetic oligonucleotide
auaaggaacugauaucugu

SEQ ID NO: 605347 - RNA, 19 nt, Artificial Sequence
  Description of Artificial Sequence: Synthetic oligonucleotide
uaacaggauagacuuaaac

SEQ ID NO: 605348 - RNA, 19 nt, Artificial Sequence
  Description of Artificial Sequence: Synthetic oligonucleotide
agauuagcgucuuuauuag

SEQ ID NO: 605349 - RNA, 19 nt, Artificial Sequence
  Description of Artificial Sequence: Synthetic oligonucleotide
uaugaaucuuguuuucuga

SEQ ID NO: 605350 - RNA, 19 nt, Artificial Sequence
  Description of Artificial Sequence: Synthetic oligonucleotide
agcuaagugacagaugcac

SEQ ID NO: 605351 - RNA, 19 nt, Artificial Sequence
  Description of Artificial Sequence: Synthetic oligonucleotide
aaggugucgacgaagcuuc

SEQ ID NO: 605352 - RNA, 19 nt, Artificial Sequence
  Description of Artificial Sequence: Synthetic oligonucleotide
auuagcgucuuuauuagag

SEQ ID NO: 605353 - RNA, 19 nt, Artificial Sequence
  Description of Artificial Sequence: Synthetic oligonucleotide
aggaccaacuuguauaucu

SEQ ID NO: 605354 - RNA, 19 nt, Artificial Sequence
  Description of Artificial Sequence: Synthetic oligonucleotide
uuaucugacgauuuaguuu

SEQ ID NO: 605355 - RNA, 19 nt, Artificial Sequence
  Description of Artificial Sequence: Synthetic oligonucleotide
uuugggauugaaauaugaa

SEQ ID NO: 605356 - RNA, 19 nt, Artificial Sequence
  Description of Artificial Sequence: Synthetic oligonucleotide
acugauacuaugccaaggu

SEQ ID NO: 605357 - RNA, 19 nt, Artificial Sequence
  Description of Artificial Sequence: Synthetic oligonucleotide
aagugugacucuuuucugu

SEQ ID NO: 605358 - RNA, 19 nt, Artificial Sequence
  Description of Artificial Sequence: Synthetic oligonucleotide
caauggucgguuuuacugg

SEQ ID NO: 605359 - RNA, 19 nt, Artificial Sequence
  Description of Artificial Sequence: Synthetic oligonucleotide
uucggacaauguuacaucc

SEQ ID NO: 605360 - RNA, 19 nt, Artificial Sequence
  Description of Artificial Sequence: Synthetic oligonucleotide
ucgacaagcuaagugacag

SEQ ID NO: 605361 - RNA, 19 nt, Artificial Sequence
  Description of Artificial Sequence: Synthetic oligonucleotide
cacauggcgcuuaacaugc

SEQ ID NO: 605362 - RNA, 19 nt, Artificial Sequence
  Description of Artificial Sequence: Synthetic oligonucleotide
uguaaauucugaagguguc

SEQ ID NO: 605363 - RNA, 19 nt, Artificial Sequence
  Description of Artificial Sequence: Synthetic oligonucleotide
ccaguguaaauucugaagg

SEQ ID NO: 605364 - RNA, 19 nt, Artificial Sequence
  Description of Artificial Sequence: Synthetic oligonucleotide
guuguaauaaaagggagga

SEQ ID NO: 605365 - RNA, 19 nt, Artificial Sequence
  Description of Artificial Sequence: Synthetic oligonucleotide
cauauucaucccuuuaaug

SEQ ID NO: 605366 - RNA, 19 nt, Artificial Sequence
  Description of Artificial Sequence: Synthetic oligonucleotide
ucgacugagauuuuccagu

SEQ ID NO: 605367 - RNA, 19 nt, Artificial Sequence
  Description of Artificial Sequence: Synthetic oligonucleotide
uacguuucugaaugcagag

SEQ ID NO: 605368 - RNA, 19 nt, Artificial Sequence
  Description of Artificial Sequence: Synthetic oligonucleotide
uuugaaggugcaugaacug

SEQ ID NO: 605369 - RNA, 19 nt, Artificial Sequence
  Description of Artificial Sequence: Synthetic oligonucleotide
cucacacuagccaagucag

SEQ ID NO: 605370 - RNA, 19 nt, Artificial Sequence
  Description of Artificial Sequence: Synthetic oligonucleotide
ucacuaaguugaaagaaua

SEQ ID NO: 605371 - RNA, 19 nt, Artificial Sequence
  Description of Artificial Sequence: Synthetic oligonucleotide
aaagauuagcgucuuuauu

SEQ ID NO: 605372 - RNA, 19 nt, Artificial Sequence
  Description of Artificial Sequence: Synthetic oligonucleotide
cuuacguuucugaaugcag

SEQ ID NO: 605373 - RNA, 19 nt, Artificial Sequence
  Description of Artificial Sequence: Synthetic oligonucleotide
uauaaggaacugauaucug

SEQ ID NO: 605374 - RNA, 19 nt, Artificial Sequence
  Description of Artificial Sequence: Synthetic oligonucleotide
ugggcacccaauuuacugg

SEQ ID NO: 605375 - RNA, 19 nt, Artificial Sequence
  Description of Artificial Sequence: Synthetic oligonucleotide
uagcgucuuuauuagaggc

SEQ ID NO: 605376 - RNA, 19 nt, Artificial Sequence
  Description of Artificial Sequence: Synthetic oligonucleotide
uaauacucuguucggacaa

SEQ ID NO: 605377 - RNA, 19 nt, Artificial Sequence
  Description of Artificial Sequence: Synthetic oligonucleotide
ugcagcuacgacaauucug

SEQ ID NO: 605378 - RNA, 19 nt, Artificial Sequence
  Description of Artificial Sequence: Synthetic oligonucleotide
uccauagugacgccgggca

SEQ ID NO: 605379 - RNA, 19 nt, Artificial Sequence
  Description of Artificial Sequence: Synthetic oligonucleotide
aacccugucagcuacugua

SEQ ID NO: 605380 - RNA, 19 nt, Artificial Sequence
  Description of Artificial Sequence: Synthetic oligonucleotide
uggcauauaaggaacugau

SEQ ID NO: 605381 - RNA, 19 nt, Artificial Sequence
  Description of Artificial Sequence: Synthetic oligonucleotide
auguuacauccauagugac

SEQ ID NO: 605382 - RNA, 19 nt, Artificial Sequence
  Description of Artificial Sequence: Synthetic oligonucleotide
gauacuaugccaagguuuc

SEQ ID NO: 605383 - RNA, 19 nt, Artificial Sequence
  Description of Artificial Sequence: Synthetic oligonucleotide
uguauccucagauacugau

SEQ ID NO: 605384 - RNA, 19 nt, Artificial Sequence
  Description of Artificial Sequence: Synthetic oligonucleotide
gauacugauugcaugggac

SEQ ID NO: 605385 - RNA, 19 nt, Artificial Sequence
  Description of Artificial Sequence: Synthetic oligonucleotide
gcuacgacaauucuggcug

SEQ ID NO: 605386 - RNA, 19 nt, Artificial Sequence
  Description of Artificial Sequence: Synthetic oligonucleotide
aucauugggccuuucuaag

SEQ ID NO: 605387 - RNA, 19 nt, Artificial Sequence
  Description of Artificial Sequence: Synthetic oligonucleotide
auuugaaggugcaugaacu

SEQ ID NO: 605388 - RNA, 19 nt, Artificial Sequence
  Description of Artificial Sequence: Synthetic oligonucleotide
gaacugauaucuguagaag

SEQ ID NO: 605389 - RNA, 19 nt, Artificial Sequence
  Description of Artificial Sequence: Synthetic oligonucleotide
aauggucgguuuuacuggu

SEQ ID NO: 605390 - RNA, 19 nt, Artificial Sequence
  Description of Artificial Sequence: Synthetic oligonucleotide
gacucuuuucuguacccag

SEQ ID NO: 605391 - RNA, 19 nt, Artificial Sequence
  Description of Artificial Sequence: Synthetic oligonucleotide
auaaugggcacccaauuua

SEQ ID NO: 605392 - RNA, 19 nt, Artificial Sequence
  Description of Artificial Sequence: Synthetic oligonucleotide
uaauuguaaccuugacugc

SEQ ID NO: 605393 - RNA, 19 nt, Artificial Sequence
  Description of Artificial Sequence: Synthetic oligonucleotide
aguucggcuuacucgaaag

SEQ ID NO: 605394 - RNA, 19 nt, Artificial Sequence
  Description of Artificial Sequence: Synthetic oligonucleotide
cagugaacuggcaggaccg

SEQ ID NO: 605395 - RNA, 19 nt, Artificial Sequence
  Description of Artificial Sequence: Synthetic oligonucleotide
ucuaccauguuaccauccu

SEQ ID NO: 605396 - RNA, 19 nt, Artificial Sequence
  Description of Artificial Sequence: Synthetic oligonucleotide
uuucaacccugucagcuac

SEQ ID NO: 605397 - RNA, 19 nt, Artificial Sequence
  Description of Artificial Sequence: Synthetic oligonucleotide
uucggcuuacucgaaagcc

SEQ ID NO: 605398 - RNA, 19 nt, Artificial Sequence
  Description of Artificial Sequence: Synthetic oligonucleotide
gauuuggcaguagaagcag

SEQ ID NO: 605399 - RNA, 19 nt, Artificial Sequence
  Description of Artificial Sequence: Synthetic oligonucleotide
guaaccuugacugcauucc

SEQ ID NO: 605400 - RNA, 19 nt, Artificial Sequence
  Description of Artificial Sequence: Synthetic oligonucleotide
ucuaaacacuccaaagguu

SEQ ID NO: 605401 - RNA, 19 nt, Artificial Sequence
  Description of Artificial Sequence: Synthetic oligonucleotide
ucuguacgaaugcccauug

SEQ ID NO: 605402 - RNA, 19 nt, Artificial Sequence
  Description of Artificial Sequence: Synthetic oligonucleotide
cucagauacugauugcaug

SEQ ID NO: 605403 - RNA, 19 nt, Artificial Sequence
  Description of Artificial Sequence: Synthetic oligonucleotide
ucuguucuccaacaauggu

SEQ ID NO: 605404 - RNA, 19 nt, Artificial Sequence
  Description of Artificial Sequence: Synthetic oligonucleotide
aaacucgacugagauuuuc

SEQ ID NO: 605405 - RNA, 19 nt, Artificial Sequence
  Description of Artificial Sequence: Synthetic oligonucleotide
ucuagguaguucacugaug

SEQ ID NO: 605406 - RNA, 19 nt, Artificial Sequence
  Description of Artificial Sequence: Synthetic oligonucleotide
uguuuugcccauuguaauc

SEQ ID NO: 605407 - RNA, 19 nt, Artificial Sequence
  Description of Artificial Sequence: Synthetic oligonucleotide
augaugcaaugauaauggg

SEQ ID NO: 605408 - RNA, 19 nt, Artificial Sequence
  Description of Artificial Sequence: Synthetic oligonucleotide
uguucggacaauguuacau

SEQ ID NO: 605409 - RNA, 19 nt, Artificial Sequence
  Description of Artificial Sequence: Synthetic oligonucleotide
gcagcuacgacaauucugg

SEQ ID NO: 605410 - RNA, 19 nt, Artificial Sequence
  Description of Artificial Sequence: Synthetic oligonucleotide
uacauccauagugacgccg

SEQ ID NO: 605411 - RNA, 19 nt, Artificial Sequence
  Description of Artificial Sequence: Synthetic oligonucleotide
ugugguaucaucgguaguu

SEQ ID NO: 605412 - RNA, 19 nt, Artificial Sequence
  Description of Artificial Sequence: Synthetic oligonucleotide
ucgacgaagcuucuacuac

SEQ ID NO: 605413 - RNA, 19 nt, Artificial Sequence
  Description of Artificial Sequence: Synthetic oligonucleotide
agaagucacugauacuaug

SEQ ID NO: 605414 - RNA, 19 nt, Artificial Sequence
  Description of Artificial Sequence: Synthetic oligonucleotide
uuauuagaggcugaacguc

SEQ ID NO: 605415 - RNA, 19 nt, Artificial Sequence
  Description of Artificial Sequence: Synthetic oligonucleotide
gacccucacaacuaccagc

SEQ ID NO: 605416 - RNA, 19 nt, Artificial Sequence
  Description of Artificial Sequence: Synthetic oligonucleotide
uuaguuucauuuugggauu

SEQ ID NO: 605417 - RNA, 19 nt, Artificial Sequence
  Description of Artificial Sequence: Synthetic oligonucleotide
ugauaaugggcacccaauu

SEQ ID NO: 605418 - RNA, 19 nt, Artificial Sequence
  Description of Artificial Sequence: Synthetic oligonucleotide
cagaguuuucauucaaguc

SEQ ID NO: 605419 - RNA, 19 nt, Artificial Sequence
  Description of Artificial Sequence: Synthetic oligonucleotide
ugccuuggcauauaaggaa

SEQ ID NO: 605420 - RNA, 19 nt, Artificial Sequence
  Description of Artificial Sequence: Synthetic oligonucleotide
uuucuucgcaccacuggca

SEQ ID NO: 605421 - RNA, 19 nt, Artificial Sequence
  Description of Artificial Sequence: Synthetic oligonucleotide
cauuaauuguaaccuugac

SEQ ID NO: 605422 - RNA, 19 nt, Artificial Sequence
  Description of Artificial Sequence: Synthetic oligonucleotide
ucuuacguuucugaaugca

SEQ ID NO: 605423 - RNA, 19 nt, Artificial Sequence
  Description of Artificial Sequence: Synthetic oligonucleotide
uggauuuaguuucuccuuu

SEQ ID NO: 605424 - RNA, 19 nt, Artificial Sequence
  Description of Artificial Sequence: Synthetic oligonucleotide
auauaccuggauuuaguuu

SEQ ID NO: 605425 - RNA, 19 nt, Artificial Sequence
  Description of Artificial Sequence: Synthetic oligonucleotide
agaacccugagaagaaagg

SEQ ID NO: 605426 - RNA, 19 nt, Artificial Sequence
  Description of Artificial Sequence: Synthetic oligonucleotide
ucggcuuacucgaaagccu

SEQ ID NO: 605427 - RNA, 19 nt, Artificial Sequence
  Description of Artificial Sequence: Synthetic oligonucleotide
uacuggucgacaagcuaag

SEQ ID NO: 605428 - RNA, 19 nt, Artificial Sequence
  Description of Artificial Sequence: Synthetic oligonucleotide
cucgacugagauuuuccag

SEQ ID NO: 605429 - RNA, 19 nt, Artificial Sequence
  Description of Artificial Sequence: Synthetic oligonucleotide
uaagacccucacaacuacc

SEQ ID NO: 605430 - RNA, 19 nt, Artificial Sequence
  Description of Artificial Sequence: Synthetic oligonucleotide
aacaugcccuagcauguca

SEQ ID NO: 605431 - RNA, 19 nt, Artificial Sequence
  Description of Artificial Sequence: Synthetic oligonucleotide
aagacccucacaacuacca

SEQ ID NO: 605432 - RNA, 19 nt, Artificial Sequence
  Description of Artificial Sequence: Synthetic oligonucleotide
aagcucucacacuagccaa

SEQ ID NO: 605433 - RNA, 19 nt, Artificial Sequence
  Description of Artificial Sequence: Synthetic oligonucleotide
ucaaagugaguucggcuua

SEQ ID NO: 605434 - RNA, 19 nt, Artificial Sequence
  Description of Artificial Sequence: Synthetic oligonucleotide
cagaugcacauccuguagc

SEQ ID NO: 605435 - RNA, 19 nt, Artificial Sequence
  Description of Artificial Sequence: Synthetic oligonucleotide
ugcaaauagcacuucuaua

SEQ ID NO: 605436 - RNA, 19 nt, Artificial Sequence
  Description of Artificial Sequence: Synthetic oligonucleotide
agcuacgacaauucuggcu

SEQ ID NO: 605437 - RNA, 19 nt, Artificial Sequence
  Description of Artificial Sequence: Synthetic oligonucleotide
cuggucgacaagcuaagug

SEQ ID NO: 605438 - RNA, 19 nt, Artificial Sequence
  Description of Artificial Sequence: Synthetic oligonucleotide
ucacugauacuaugccaag

SEQ ID NO: 605439 - RNA, 19 nt, Artificial Sequence
  Description of Artificial Sequence: Synthetic oligonucleotide
cuuguaucaaucacuaagu

SEQ ID NO: 605440 - RNA, 19 nt, Artificial Sequence
  Description of Artificial Sequence: Synthetic oligonucleotide
gauaucaccaagagugcca

SEQ ID NO: 605441 - RNA, 19 nt, Artificial Sequence
  Description of Artificial Sequence: Synthetic oligonucleotide
augccaagguuucuuacgu

SEQ ID NO: 605442 - RNA, 19 nt, Artificial Sequence
  Description of Artificial Sequence: Synthetic oligonucleotide
ucauugggccuuucuaaga

SEQ ID NO: 605443 - RNA, 19 nt, Artificial Sequence
  Description of Artificial Sequence: Synthetic oligonucleotide
acaauguuacauccauagu

SEQ ID NO: 605444 - RNA, 19 nt, Artificial Sequence
  Description of Artificial Sequence: Synthetic oligonucleotide
uccuuagggcacaauggac

SEQ ID NO: 605445 - RNA, 19 nt, Artificial Sequence
  Description of Artificial Sequence: Synthetic oligonucleotide
uuguaauacucuguucgga

SEQ ID NO: 605446 - RNA, 19 nt, Artificial Sequence
  Description of Artificial Sequence: Synthetic oligonucleotide
uucuauaccuuuguugcau

SEQ ID NO: 605447 - RNA, 19 nt, Artificial Sequence
  Description of Artificial Sequence: Synthetic oligonucleotide
aucuguucuccaacaaugg

SEQ ID NO: 605448 - RNA, 19 nt, Artificial Sequence
  Description of Artificial Sequence: Synthetic oligonucleotide
ugucuguggauguuguaau

SEQ ID NO: 605449 - RNA, 19 nt, Artificial Sequence
  Description of Artificial Sequence: Synthetic oligonucleotide
guaguuaggaccaacuugu

SEQ ID NO: 605450 - RNA, 19 nt, Artificial Sequence
  Description of Artificial Sequence: Synthetic oligonucleotide
cuuguugagauuugaaggu

SEQ ID NO: 605451 - RNA, 19 nt, Artificial Sequence
  Description of Artificial Sequence: Synthetic oligonucleotide
guaauacucuguucggaca

SEQ ID NO: 605452 - RNA, 19 nt, Artificial Sequence
  Description of Artificial Sequence: Synthetic oligonucleotide
cgaagcuucuacuacaagc

SEQ ID NO: 605453 - RNA, 19 nt, Artificial Sequence
  Description of Artificial Sequence: Synthetic oligonucleotide
aagguuucuuacguuucug

SEQ ID NO: 605454 - RNA, 19 nt, Artificial Sequence
  Description of Artificial Sequence: Synthetic oligonucleotide
aguuaggaccaacuuguau

SEQ ID NO: 605455 - RNA, 19 nt, Artificial Sequence
  Description of Artificial Sequence: Synthetic oligonucleotide
uuuguuuaaauggcaguuu

SEQ ID NO: 605456 - RNA, 19 nt, Artificial Sequence
  Description of Artificial Sequence: Synthetic oligonucleotide
ucauccaaaccauggugaa

SEQ ID NO: 605457 - RNA, 19 nt, Artificial Sequence
  Description of Artificial Sequence: Synthetic oligonucleotide
acauccauagugacgccgg

SEQ ID NO: 605458 - RNA, 19 nt, Artificial Sequence
  Description of Artificial Sequence: Synthetic oligonucleotide
uacuacaagcucugaauuu

SEQ ID NO: 605459 - RNA, 19 nt, Artificial Sequence
  Description of Artificial Sequence: Synthetic oligonucleotide
ugggccuuucuaagaaccc

SEQ ID NO: 605460 - RNA, 19 nt, Artificial Sequence
  Description of Artificial Sequence: Synthetic oligonucleotide
ucuuuauuagaggcugaac

SEQ ID NO: 605461 - RNA, 19 nt, Artificial Sequence
  Description of Artificial Sequence: Synthetic oligonucleotide
uucuucgcaccacuggcaa

SEQ ID NO: 605462 - RNA, 19 nt, Artificial Sequence
  Description of Artificial Sequence: Synthetic oligonucleotide
ccuguagccuucaaacucg

SEQ ID NO: 605463 - RNA, 19 nt, Artificial Sequence
  Description of Artificial Sequence: Synthetic oligonucleotide
agucauuaauuguaaccuu

SEQ ID NO: 605464 - RNA, 19 nt, Artificial Sequence
  Description of Artificial Sequence: Synthetic oligonucleotide
uaccuuuguugcaucucgc

SEQ ID NO: 605465 - RNA, 19 nt, Artificial Sequence
  Description of Artificial Sequence: Synthetic oligonucleotide
caagugugacucuuuucug

SEQ ID NO: 605466 - RNA, 19 nt, Artificial Sequence
  Description of Artificial Sequence: Synthetic oligonucleotide
acuacaagcucugaauuuu

SEQ ID NO: 605467 - RNA, 19 nt, Artificial Sequence
  Description of Artificial Sequence: Synthetic oligonucleotide
agugacgccgggcaacaug

SEQ ID NO: 605468 - RNA, 19 nt, Artificial Sequence
  Description of Artificial Sequence: Synthetic oligonucleotide
cuagguaguucacugaugu

SEQ ID NO: 605469 - RNA, 19 nt, Artificial Sequence
  Description of Artificial Sequence: Synthetic oligonucleotide
uuaacaggauagacuuaaa

SEQ ID NO: 605470 - RNA, 19 nt, Artificial Sequence
  Description of Artificial Sequence: Synthetic oligonucleotide
agucuagguaguucacuga

SEQ ID NO: 605471 - RNA, 19 nt, Artificial Sequence
  Description of Artificial Sequence: Synthetic oligonucleotide
guguaugaaaucaaaagau

SEQ ID NO: 605472 - RNA, 19 nt, Artificial Sequence
  Description of Artificial Sequence: Synthetic oligonucleotide
auccauagugacgccgggc

SEQ ID NO: 605473 - RNA, 19 nt, Artificial Sequence
  Description of Artificial Sequence: Synthetic oligonucleotide
ggugcaucuguacgaaugc

SEQ ID NO: 605474 - RNA, 19 nt, Artificial Sequence
  Description of Artificial Sequence: Synthetic oligonucleotide
aucacuaaguugaaagaau

SEQ ID NO: 605475 - RNA, 19 nt, Artificial Sequence
  Description of Artificial Sequence: Synthetic oligonucleotide
gucacugauacuaugccaa

SEQ ID NO: 605476 - RNA, 19 nt, Artificial Sequence
  Description of Artificial Sequence: Synthetic oligonucleotide
aaugcccauugggucaaag

SEQ ID NO: 605477 - RNA, 19 nt, Artificial Sequence
  Description of Artificial Sequence: Synthetic oligonucleotide
cacugauacuaugccaagg

SEQ ID NO: 605478 - RNA, 19 nt, Artificial Sequence
  Description of Artificial Sequence: Synthetic oligonucleotide
auccuguagccuucaaacu

SEQ ID NO: 605479 - RNA, 19 nt, Artificial Sequence
  Description of Artificial Sequence: Synthetic oligonucleotide
acugacuuuggggaguaca

SEQ ID NO: 605480 - RNA, 19 nt, Artificial Sequence
  Description of Artificial Sequence: Synthetic oligonucleotide
accuuuguugcaucucgcu

SEQ ID NO: 605481 - RNA, 19 nt, Artificial Sequence
  Description of Artificial Sequence: Synthetic oligonucleotide
ucaguccuucuggugauug

SEQ ID NO: 605482 - RNA, 19 nt, Artificial Sequence
  Description of Artificial Sequence: Synthetic oligonucleotide
ugucgacgaagcuucuacu

SEQ ID NO: 605483 - RNA, 19 nt, Artificial Sequence
  Description of Artificial Sequence: Synthetic oligonucleotide
agacccucacaacuaccag

SEQ ID NO: 605484 - RNA, 19 nt, Artificial Sequence
  Description of Artificial Sequence: Synthetic oligonucleotide
cuccaaaggcaucuaaaca

SEQ ID NO: 605485 - RNA, 19 nt, Artificial Sequence
  Description of Artificial Sequence: Synthetic oligonucleotide
aggugcaucuguacgaaug

SEQ ID NO: 605486 - RNA, 19 nt, Artificial Sequence
  Description of Artificial Sequence: Synthetic oligonucleotide
cuucgcaccacuggcaaug

SEQ ID NO: 605487 - RNA, 19 nt, Artificial Sequence
  Description of Artificial Sequence: Synthetic oligonucleotide
uuauucacauggcgcuuaa

SEQ ID NO: 605488 - RNA, 19 nt, Artificial Sequence
  Description of Artificial Sequence: Synthetic oligonucleotide
gauuagcgucuuuauuaga

SEQ ID NO: 605489 - RNA, 19 nt, Artificial Sequence
  Description of Artificial Sequence: Synthetic oligonucleotide
guucggcuuacucgaaagc

SEQ ID NO: 605490 - RNA, 19 nt, Artificial Sequence
  Description of Artificial Sequence: Synthetic oligonucleotide
gguuuuacuggucgacaag

SEQ ID NO: 605491 - RNA, 19 nt, Artificial Sequence
  Description of Artificial Sequence: Synthetic oligonucleotide
aggggcccaaguucuauug

SEQ ID NO: 605492 - RNA, 19 nt, Artificial Sequence
  Description of Artificial Sequence: Synthetic oligonucleotide
cucuguucggacaauguua

SEQ ID NO: 605493 - RNA, 19 nt, Artificial Sequence
  Description of Artificial Sequence: Synthetic oligonucleotide
uucaaacucgacugagauu

SEQ ID NO: 605494 - RNA, 19 nt, Artificial Sequence
  Description of Artificial Sequence: Synthetic oligonucleotide
ucccuuuaaugcugugucu

SEQ ID NO: 605495 - RNA, 19 nt, Artificial Sequence
  Description of Artificial Sequence: Synthetic oligonucleotide
gaccgucaucaucaucucc

SEQ ID NO: 605496 - RNA, 19 nt, Artificial Sequence
  Description of Artificial Sequence: Synthetic oligonucleotide
uggcauauucaucccuuua

SEQ ID NO: 605497 - RNA, 19 nt, Artificial Sequence
  Description of Artificial Sequence: Synthetic oligonucleotide
gugacgccgggcaacaugc

SEQ ID NO: 605498 - RNA, 19 nt, Artificial Sequence
  Description of Artificial Sequence: Synthetic oligonucleotide
ugacaauuacagggcagcu

SEQ ID NO: 605499 - RNA, 19 nt, Artificial Sequence
  Description of Artificial Sequence: Synthetic oligonucleotide
agucagaaacagccaauuu

SEQ ID NO: 605500 - RNA, 19 nt, Artificial Sequence
  Description of Artificial Sequence: Synthetic oligonucleotide
ucaacccugucagcuacug

SEQ ID NO: 605501 - RNA, 19 nt, Artificial Sequence
  Description of Artificial Sequence: Synthetic oligonucleotide
agagucuagguaguucacu

SEQ ID NO: 605502 - RNA, 19 nt, Artificial Sequence
  Description of Artificial Sequence: Synthetic oligonucleotide
cuguacgaaugcccauugg

SEQ ID NO: 605503 - RNA, 19 nt, Artificial Sequence
  Description of Artificial Sequence: Synthetic oligonucleotide
cauagugacgccgggcaac

SEQ ID NO: 605504 - RNA, 19 nt, Artificial Sequence
  Description of Artificial Sequence: Synthetic oligonucleotide
acccucacaacuaccagca

SEQ ID NO: 605505 - RNA, 19 nt, Artificial Sequence
  Description of Artificial Sequence: Synthetic oligonucleotide
ugucuauauggguuuucuu

SEQ ID NO: 605506 - RNA, 19 nt, Artificial Sequence
  Description of Artificial Sequence: Synthetic oligonucleotide
cuaagugacagaugcacau

SEQ ID NO: 605507 - RNA, 19 nt, Artificial Sequence
  Description of Artificial Sequence: Synthetic oligonucleotide
uuagaggcugaacgucauc

SEQ ID NO: 605508 - RNA, 19 nt, Artificial Sequence
  Description of Artificial Sequence: Synthetic oligonucleotide
gacaagcuaagugacagau

SEQ ID NO: 605509 - RNA, 19 nt, Artificial Sequence
  Description of Artificial Sequence: Synthetic oligonucleotide
cuuagggcacaauggacaa

SEQ ID NO: 605510 - RNA, 19 nt, Artificial Sequence
  Description of Artificial Sequence: Synthetic oligonucleotide
guuucuuacguuucugaau

SEQ ID NO: 605511 - RNA, 19 nt, Artificial Sequence
  Description of Artificial Sequence: Synthetic oligonucleotide
ucccugugcacuguaaaua

SEQ ID NO: 605512 - RNA, 19 nt, Artificial Sequence
  Description of Artificial Sequence: Synthetic oligonucleotide
aaaagggauuacaguuggu

SEQ ID NO: 605513 - RNA, 19 nt, Artificial Sequence
  Description of Artificial Sequence: Synthetic oligonucleotide
aauacucuguucggacaau

SEQ ID NO: 605514 - RNA, 19 nt, Artificial Sequence
  Description of Artificial Sequence: Synthetic oligonucleotide
gugauuguugcugaacaaa

SEQ ID NO: 605515 - RNA, 19 nt, Artificial Sequence
  Description of Artificial Sequence: Synthetic oligonucleotide
guugagauuugaaggugca

SEQ ID NO: 605516 - RNA, 19 nt, Artificial Sequence
  Description of Artificial Sequence: Synthetic oligonucleotide
gcacaaaauguuccagagc

SEQ ID NO: 605517 - RNA, 19 nt, Artificial Sequence
  Description of Artificial Sequence: Synthetic oligonucleotide
uacuaugccaagguuucuu

SEQ ID NO: 605518 - RNA, 19 nt, Artificial Sequence
  Description of Artificial Sequence: Synthetic oligonucleotide
cauugggccuuucuaagaa

SEQ ID NO: 605519 - RNA, 19 nt, Artificial Sequence
  Description of Artificial Sequence: Synthetic oligonucleotide
cuggauaucuguucuccaa

SEQ ID NO: 605520 - RNA, 19 nt, Artificial Sequence
  Description of Artificial Sequence: Synthetic oligonucleotide
cauccauagugacgccggg

SEQ ID NO: 605521 - RNA, 19 nt, Artificial Sequence
  Description of Artificial Sequence: Synthetic oligonucleotide
caaucauugggccuuucua

SEQ ID NO: 605522 - RNA, 19 nt, Artificial Sequence
  Description of Artificial Sequence: Synthetic oligonucleotide
ggcaggaccgucaucauca

SEQ ID NO: 605523 - RNA, 19 nt, Artificial Sequence
  Description of Artificial Sequence: Synthetic oligonucleotide
ugcaucagaggugcaucug

SEQ ID NO: 605524 - RNA, 19 nt, Artificial Sequence
  Description of Artificial Sequence: Synthetic oligonucleotide
ccaauuuacuggauaucug

SEQ ID NO: 605525 - RNA, 19 nt, Artificial Sequence
  Description of Artificial Sequence: Synthetic oligonucleotide
guaucaucgguaguuuuaa

SEQ ID NO: 605526 - RNA, 19 nt, Artificial Sequence
  Description of Artificial Sequence: Synthetic oligonucleotide
gauuuaguuucuccuuuau

SEQ ID NO: 605527 - RNA, 19 nt, Artificial Sequence
  Description of Artificial Sequence: Synthetic oligonucleotide
ggcugaacgucauccaaac

SEQ ID NO: 605528 - RNA, 19 nt, Artificial Sequence
  Description of Artificial Sequence: Synthetic oligonucleotide
uucgcaccacuggcaaugg

SEQ ID NO: 605529 - RNA, 19 nt, Artificial Sequence
  Description of Artificial Sequence: Synthetic oligonucleotide
gguguuuugcccauuguaa

SEQ ID NO: 605530 - RNA, 19 nt, Artificial Sequence
  Description of Artificial Sequence: Synthetic oligonucleotide
gggauuacaguugguacac

SEQ ID NO: 605531 - RNA, 19 nt, Artificial Sequence
  Description of Artificial Sequence: Synthetic oligonucleotide
agcgucuuuauuagaggcu

SEQ ID NO: 605532 - RNA, 19 nt, Artificial Sequence
  Description of Artificial Sequence: Synthetic oligonucleotide
uggacaagugugacucuuu

SEQ ID NO: 605533 - RNA, 19 nt, Artificial Sequence
  Description of Artificial Sequence: Synthetic oligonucleotide
cagagucuagguaguucac

SEQ ID NO: 605534 - RNA, 19 nt, Artificial Sequence
  Description of Artificial Sequence: Synthetic oligonucleotide
ccuuagggcacaauggaca

SEQ ID NO: 605535 - RNA, 19 nt, Artificial Sequence
  Description of Artificial Sequence: Synthetic oligonucleotide
uaucaucgguaguuuuaau

SEQ ID NO: 605536 - RNA, 19 nt, Artificial Sequence
  Description of Artificial Sequence: Synthetic oligonucleotide
uucaacccugucagcuacu

SEQ ID NO: 605537 - RNA, 19 nt, Artificial Sequence
  Description of Artificial Sequence: Synthetic oligonucleotide
caucgguaguuuuaauaaa

SEQ ID NO: 605538 - RNA, 19 nt, Artificial Sequence
  Description of Artificial Sequence: Synthetic oligonucleotide
aagcuaagugacagaugca

SEQ ID NO: 605539 - RNA, 19 nt, Artificial Sequence
  Description of Artificial Sequence: Synthetic oligonucleotide
acucgaaagccugcuugag

SEQ ID NO: 605540 - RNA, 19 nt, Artificial Sequence
  Description of Artificial Sequence: Synthetic oligonucleotide
gcgucuuuauuagaggcug

SEQ ID NO: 605541 - RNA, 19 nt, Artificial Sequence
  Description of Artificial Sequence: Synthetic oligonucleotide
cuggugauuguugcugaac

SEQ ID NO: 605542 - RNA, 19 nt, Artificial Sequence
  Description of Artificial Sequence: Synthetic oligonucleotide
gucgacgaagcuucuacua

SEQ ID NO: 605543 - RNA, 19 nt, Artificial Sequence
  Description of Artificial Sequence: Synthetic oligonucleotide
acugcaaauagcacuucua

SEQ ID NO: 605544 - RNA, 19 nt, Artificial Sequence
  Description of Artificial Sequence: Synthetic oligonucleotide
auuguaaccuugacugcau

SEQ ID NO: 605545 - RNA, 19 nt, Artificial Sequence
  Description of Artificial Sequence: Synthetic oligonucleotide
aggcaugcuuccaugacaa

SEQ ID NO: 605546 - RNA, 19 nt, Artificial Sequence
  Description of Artificial Sequence: Synthetic oligonucleotide
ugaguucggcuuacucgaa

SEQ ID NO: 605547 - RNA, 19 nt, Artificial Sequence
  Description of Artificial Sequence: Synthetic oligonucleotide
uaguuaggaccaacuugua

SEQ ID NO: 605548 - RNA, 19 nt, Artificial Sequence
  Description of Artificial Sequence: Synthetic oligonucleotide
auagugacgccgggcaaca

SEQ ID NO: 605549 - RNA, 19 nt, Artificial Sequence
  Description of Artificial Sequence: Synthetic oligonucleotide
cucgaaagccugcuugaga

SEQ ID NO: 605550 - RNA, 19 nt, Artificial Sequence
  Description of Artificial Sequence: Synthetic oligonucleotide
ugauugcaugggaccuucu

SEQ ID NO: 605551 - RNA, 19 nt, Artificial Sequence
  Description of Artificial Sequence: Synthetic oligonucleotide
caccuggauaucaccaaga

SEQ ID NO: 605552 - RNA, 19 nt, Artificial Sequence
  Description of Artificial Sequence: Synthetic oligonucleotide
aucuguacgaaugcccauu

SEQ ID NO: 605553 - RNA, 19 nt, Artificial Sequence
  Description of Artificial Sequence: Synthetic oligonucleotide
agcucucacacuagccaag

SEQ ID NO: 605554 - RNA, 19 nt, Artificial Sequence
  Description of Artificial Sequence: Synthetic oligonucleotide
gucuagguaguucacugau

SEQ ID NO: 605555 - RNA, 19 nt, Artificial Sequence
  Description of Artificial Sequence: Synthetic oligonucleotide
gaguaguuaggaccaacuu

SEQ ID NO: 605556 - RNA, 19 nt, Artificial Sequence
  Description of Artificial Sequence: Synthetic oligonucleotide
guacgaaugcccauugggu

SEQ ID NO: 605557 - RNA, 19 nt, Artificial Sequence
  Description of Artificial Sequence: Synthetic oligonucleotide
gccaauguacagaauauua

SEQ ID NO: 605558 - RNA, 19 nt, Artificial Sequence
  Description of Artificial Sequence: Synthetic oligonucleotide
uggcgcuuaacaugcccua

SEQ ID NO: 605559 - RNA, 19 nt, Artificial Sequence
  Description of Artificial Sequence: Synthetic oligonucleotide
auuagaggcugaacgucau

SEQ ID NO: 605560 - RNA, 19 nt, Artificial Sequence
  Description of Artificial Sequence: Synthetic oligonucleotide
cugaggaauagaguaguua

SEQ ID NO: 605561 - RNA, 19 nt, Artificial Sequence
  Description of Artificial Sequence: Synthetic oligonucleotide
cagcuacgacaauucuggc

SEQ ID NO: 605562 - RNA, 19 nt, Artificial Sequence
  Description of Artificial Sequence: Synthetic oligonucleotide
gaguucggcuuacucgaaa

SEQ ID NO: 605563 - RNA, 19 nt, Artificial Sequence
  Description of Artificial Sequence: Synthetic oligonucleotide
uaacaugcccuagcauguc

SEQ ID NO: 605564 - RNA, 19 nt, Artificial Sequence
  Description of Artificial Sequence: Synthetic oligonucleotide
gcuacuguauccucagaua

SEQ ID NO: 605565 - RNA, 19 nt, Artificial Sequence
  Description of Artificial Sequence: Synthetic oligonucleotide
cacccaauuuacuggauau

SEQ ID NO: 605566 - RNA, 19 nt, Artificial Sequence
  Description of Artificial Sequence: Synthetic oligonucleotide
cuacuacaagcucugaauu

SEQ ID NO: 605567 - RNA, 19 nt, Artificial Sequence
  Description of Artificial Sequence: Synthetic oligonucleotide
ucuucgcaccacuggcaau

SEQ ID NO: 605568 - RNA, 19 nt, Artificial Sequence
  Description of Artificial Sequence: Synthetic oligonucleotide
ugcccauuguaaucccauu

SEQ ID NO: 605569 - RNA, 19 nt, Artificial Sequence
  Description of Artificial Sequence: Synthetic oligonucleotide
acauggcgcuuaacaugcc

SEQ ID NO: 605570 - RNA, 19 nt, Artificial Sequence
  Description of Artificial Sequence: Synthetic oligonucleotide
auacuaugccaagguuucu

SEQ ID NO: 605571 - RNA, 19 nt, Artificial Sequence
  Description of Artificial Sequence: Synthetic oligonucleotide
gcugaacgucauccaaacc

SEQ ID NO: 605572 - RNA, 19 nt, Artificial Sequence
  Description of Artificial Sequence: Synthetic oligonucleotide
gcgcuuaacaugcccuagc

SEQ ID NO: 605573 - RNA, 19 nt, Artificial Sequence
  Description of Artificial Sequence: Synthetic oligonucleotide
caucagaggugcaucugua

SEQ ID NO: 605574 - RNA, 19 nt, Artificial Sequence
  Description of Artificial Sequence: Synthetic oligonucleotide
gccuuggcauauaaggaac

SEQ ID NO: 605575 - RNA, 19 nt, Artificial Sequence
  Description of Artificial Sequence: Synthetic oligonucleotide
auguuccaaaagggucuag

SEQ ID NO: 605576 - RNA, 19 nt, Artificial Sequence
  Description of Artificial Sequence: Synthetic oligonucleotide
acacucugauucaaagauu

SEQ ID NO: 605577 - RNA, 19 nt, Artificial Sequence
  Description of Artificial Sequence: Synthetic oligonucleotide
aggcugaacgucauccaaa

SEQ ID NO: 605578 - RNA, 19 nt, Artificial Sequence
  Description of Artificial Sequence: Synthetic oligonucleotide
gcuaagugacagaugcaca

SEQ ID NO: 605579 - RNA, 19 nt, Artificial Sequence
  Description of Artificial Sequence: Synthetic oligonucleotide
auagaguaguuaggaccaa

SEQ ID NO: 605580 - RNA, 19 nt, Artificial Sequence
  Description of Artificial Sequence: Synthetic oligonucleotide
acuggucgacaagcuaagu

SEQ ID NO: 605581 - RNA, 19 nt, Artificial Sequence
  Description of Artificial Sequence: Synthetic oligonucleotide
cucuuguaucaaucacuaa

SEQ ID NO: 605582 - RNA, 19 nt, Artificial Sequence
  Description of Artificial Sequence: Synthetic oligonucleotide
gggcacccaauuuacugga

SEQ ID NO: 605583 - RNA, 19 nt, Artificial Sequence
  Description of Artificial Sequence: Synthetic oligonucleotide
ggcccaaguucuauugcug

SEQ ID NO: 605584 - RNA, 19 nt, Artificial Sequence
  Description of Artificial Sequence: Synthetic oligonucleotide
cugucuauauggguuuucu

SEQ ID NO: 605585 - RNA, 19 nt, Artificial Sequence
  Description of Artificial Sequence: Synthetic oligonucleotide
ggcgcuuaacaugcccuag

SEQ ID NO: 605586 - RNA, 19 nt, Artificial Sequence
  Description of Artificial Sequence: Synthetic oligonucleotide
uggcguccauucuggucac

SEQ ID NO: 605587 - RNA, 19 nt, Artificial Sequence
  Description of Artificial Sequence: Synthetic oligonucleotide
cuacugugguaucaucggu

SEQ ID NO: 605588 - RNA, 19 nt, Artificial Sequence
  Description of Artificial Sequence: Synthetic oligonucleotide
ggcugcuaguuccuuguaa

SEQ ID NO: 605589 - RNA, 19 nt, Artificial Sequence
  Description of Artificial Sequence: Synthetic oligonucleotide
caggaccgucaucaucauc

SEQ ID NO: 605590 - RNA, 19 nt, Artificial Sequence
  Description of Artificial Sequence: Synthetic oligonucleotide
cccaauuuacuggauaucu

SEQ ID NO: 605591 - RNA, 19 nt, Artificial Sequence
  Description of Artificial Sequence: Synthetic oligonucleotide
acccugucagcuacuguau

SEQ ID NO: 605592 - RNA, 19 nt, Artificial Sequence
  Description of Artificial Sequence: Synthetic oligonucleotide
cuguucggacaauguuaca

SEQ ID NO: 605593 - RNA, 19 nt, Artificial Sequence
  Description of Artificial Sequence: Synthetic oligonucleotide
gcacccaauuuacuggaua

SEQ ID NO: 605594 - RNA, 19 nt, Artificial Sequence
  Description of Artificial Sequence: Synthetic oligonucleotide
ggcuuacucgaaagccugc

SEQ ID NO: 605595 - RNA, 19 nt, Artificial Sequence
  Description of Artificial Sequence: Synthetic oligonucleotide
acgacaauucuggcugcua

SEQ ID NO: 605596 - RNA, 19 nt, Artificial Sequence
  Description of Artificial Sequence: Synthetic oligonucleotide
cggcuuacucgaaagccug

SEQ ID NO: 605597 - RNA, 19 nt, Artificial Sequence
  Description of Artificial Sequence: Synthetic oligonucleotide
ggaccgucaucaucaucuc

SEQ ID NO: 605598 - RNA, 19 nt, Artificial Sequence
  Description of Artificial Sequence: Synthetic oligonucleotide
caguugguacacaaucauu

SEQ ID NO: 605599 - RNA, 19 nt, Artificial Sequence
  Description of Artificial Sequence: Synthetic oligonucleotide
aucugacgauuuaguuuca

SEQ ID NO: 605600 - RNA, 19 nt, Artificial Sequence
  Description of Artificial Sequence: Synthetic oligonucleotide
caccacuuucaauuuguuu

SEQ ID NO: 605601 - RNA, 19 nt, Artificial Sequence
  Description of Artificial Sequence: Synthetic oligonucleotide
agcugucuauauggguuuu

SEQ ID NO: 605602 - RNA, 19 nt, Artificial Sequence
  Description of Artificial Sequence: Synthetic oligonucleotide
ggcagcugucuauaugggu

SEQ ID NO: 605603 - RNA, 19 nt, Artificial Sequence
  Description of Artificial Sequence: Synthetic oligonucleotide
ggaguacacucugauucaa

SEQ ID NO: 605604 - RNA, 19 nt, Artificial Sequence
  Description of Artificial Sequence: Synthetic oligonucleotide
cuuacucgaaagccugcuu

SEQ ID NO: 605605 - RNA, 19 nt, Artificial Sequence
  Description of Artificial Sequence: Synthetic oligonucleotide
ccaaaagggucuaggugua

SEQ ID NO: 605606 - RNA, 19 nt, Artificial Sequence
  Description of Artificial Sequence: Synthetic oligonucleotide
gcugucuauauggguuuuc

SEQ ID NO: 605607 - RNA, 19 nt, Artificial Sequence
  Description of Artificial Sequence: Synthetic oligonucleotide
gaggugcaucuguacgaau

SEQ ID NO: 605608 - RNA, 19 nt, Artificial Sequence
  Description of Artificial Sequence: Synthetic oligonucleotide
gcuuaacaugcccuagcau

SEQ ID NO: 605609 - RNA, 19 nt, Artificial Sequence
  Description of Artificial Sequence: Synthetic oligonucleotide
ccaaguucuauugcugucu

SEQ ID NO: 605610 - RNA, 19 nt, Artificial Sequence
  Description of Artificial Sequence: Synthetic oligonucleotide
cccauuguaaucccauuau

SEQ ID NO: 605611 - RNA, 19 nt, Artificial Sequence
  Description of Artificial Sequence: Synthetic oligonucleotide
ccaacaauggucgguuuua

SEQ ID NO: 605612 - RNA, 19 nt, Artificial Sequence
  Description of Artificial Sequence: Synthetic oligonucleotide
cugcagcuacgacaauucu

SEQ ID NO: 605613 - RNA, 19 nt, Artificial Sequence
  Description of Artificial Sequence: Synthetic oligonucleotide
gcuuacucgaaagccugcu

SEQ ID NO: 605614 - RNA, 19 nt, Artificial Sequence
  Description of Artificial Sequence: Synthetic oligonucleotide
ccuuggcauauaaggaacu

SEQ ID NO: 605615 - RNA, 19 nt, Artificial Sequence
  Description of Artificial Sequence: Synthetic oligonucleotide
gcccuagcaugucaguccu

SEQ ID NO: 605616 - RNA, 19 nt, Artificial Sequence
  Description of Artificial Sequence: Synthetic oligonucleotide
cauuggcguccauucuggu

SEQ ID NO: 605617 - RNA, 19 nt, Artificial Sequence
  Description of Artificial Sequence: Synthetic oligonucleotide
cacugacuuuggggaguac

SEQ ID NO: 605618 - RNA, 19 nt, Artificial Sequence
  Description of Artificial Sequence: Synthetic oligonucleotide
cgguuuuacuggucgacaa

SEQ ID NO: 605619 - RNA, 19 nt, Artificial Sequence
  Description of Artificial Sequence: Synthetic oligonucleotide
cccugugcacuguaaauau

SEQ ID NO: 605620 - RNA, 19 nt, Artificial Sequence
  Description of Artificial Sequence: Synthetic oligonucleotide
cugugguaucaucgguagu

SEQ ID NO: 605621 - RNA, 19 nt, Artificial Sequence
  Description of Artificial Sequence: Synthetic oligonucleotide
uagugacgccgggcaacau

SEQ ID NO: 605622 - RNA, 19 nt, Artificial Sequence
  Description of Artificial Sequence: Synthetic oligonucleotide
ggauagacuuaaacugcau

SEQ ID NO: 605623 - RNA, 19 nt, Artificial Sequence
  Description of Artificial Sequence: Synthetic oligonucleotide
ccucagauacugauugcau

SEQ ID NO: 605624 - RNA, 19 nt, Artificial Sequence
  Description of Artificial Sequence: Synthetic oligonucleotide
aggugucgacgaagcuucu

SEQ ID NO: 605625 - RNA, 19 nt, Artificial Sequence
  Description of Artificial Sequence: Synthetic oligonucleotide
caacccugucagcuacugu

SEQ ID NO: 605626 - RNA, 19 nt, Artificial Sequence
  Description of Artificial Sequence: Synthetic oligonucleotide
ccauuguaaucccauuauu

SEQ ID NO: 605627 - RNA, 19 nt, Artificial Sequence
  Description of Artificial Sequence: Synthetic oligonucleotide
ggugucgacgaagcuucua

SEQ ID NO: 605628 - RNA, 19 nt, Artificial Sequence
  Description of Artificial Sequence: Synthetic oligonucleotide
caaacucgacugagauuuu

SEQ ID NO: 605629 - RNA, 19 nt, Artificial Sequence
  Description of Artificial Sequence: Synthetic oligonucleotide
gcacuucuauaccuuuguu

SEQ ID NO: 605630 - RNA, 19 nt, Artificial Sequence
  Description of Artificial Sequence: Synthetic oligonucleotide
cgacaagcuaagugacaga

SEQ ID NO: 605631 - RNA, 19 nt, Artificial Sequence
  Description of Artificial Sequence: Synthetic oligonucleotide
caaaagggucuagguguau

SEQ ID NO: 605632 - RNA, 19 nt, Artificial Sequence
  Description of Artificial Sequence: Synthetic oligonucleotide
ccauagugacgccgggcaa

SEQ ID NO: 605633 - RNA, 19 nt, Artificial Sequence
  Description of Artificial Sequence: Synthetic oligonucleotide
cacugucuaccaccacuuu

SEQ ID NO: 605634 - RNA, 19 nt, Artificial Sequence
  Description of Artificial Sequence: Synthetic oligonucleotide
ggcguccauucuggucacc

SEQ ID NO: 605635 - RNA, 19 nt, Artificial Sequence
  Description of Artificial Sequence: Synthetic oligonucleotide
ggcaugcuuccaugacaau

SEQ ID NO: 605636 - RNA, 19 nt, Artificial Sequence
  Description of Artificial Sequence: Synthetic oligonucleotide
cccaagguguuuugcccau

SEQ ID NO: 605637 - RNA, 19 nt, Artificial Sequence
  Description of Artificial Sequence: Synthetic oligonucleotide
gcaggaccgucaucaucau

SEQ ID NO: 605638 - RNA, 19 nt, Artificial Sequence
  Description of Artificial Sequence: Synthetic oligonucleotide
gucaguccuucuggugauu

SEQ ID NO: 605639 - RNA, 19 nt, Artificial Sequence
  Description of Artificial Sequence: Synthetic oligonucleotide
ccaagguguuuugcccauu

SEQ ID NO: 605640 - RNA, 19 nt, Artificial Sequence
  Description of Artificial Sequence: Synthetic oligonucleotide
aauguauucaguuagaucu

SEQ ID NO: 605641 - RNA, 19 nt, Artificial Sequence
  Description of Artificial Sequence: Synthetic oligonucleotide
aaaauuugaaccaacagcc

SEQ ID NO: 605642 - RNA, 19 nt, Artificial Sequence
  Description of Artificial Sequence: Synthetic oligonucleotide
aaaacagccucccagugcc

SEQ ID NO: 605643 - RNA, 19 nt, Artificial Sequence
  Description of Artificial Sequence: Synthetic oligonucleotide
aacuuagaucaccaggucc

SEQ ID NO: 605644 - RNA, 19 nt, Artificial Sequence
  Description of Artificial Sequence: Synthetic oligonucleotide
aaacauuuuaaaugagggg

SEQ ID NO: 605645 - RNA, 19 nt, Artificial Sequence
  Description of Artificial Sequence: Synthetic oligonucleotide
caaaauuugaaccaacagc

SEQ ID NO: 605646 - RNA, 19 nt, Artificial Sequence
  Description of Artificial Sequence: Synthetic oligonucleotide
cuugacaugacaaucaaac

SEQ ID NO: 605647 - RNA, 19 nt, Artificial Sequence
  Description of Artificial Sequence: Synthetic oligonucleotide
uauguuagcaccuuauccc

SEQ ID NO: 605648 - RNA, 19 nt, Artificial Sequence
  Description of Artificial Sequence: Synthetic oligonucleotide
ugcaugauuaaugagaagc

SEQ ID NO: 605649 - RNA, 19 nt, Artificial Sequence
  Description of Artificial Sequence: Synthetic oligonucleotide
uaagucacaggucucaaag

SEQ ID NO: 605650 - RNA, 19 nt, Artificial Sequence
  Description of Artificial Sequence: Synthetic oligonucleotide
uguaauucuucucaaaguc

SEQ ID NO: 605651 - RNA, 19 nt, Artificial Sequence
  Description of Artificial Sequence: Synthetic oligonucleotide
gaguguuagagucaagugg

SEQ ID NO: 605652 - RNA, 19 nt, Artificial Sequence
  Description of Artificial Sequence: Synthetic oligonucleotide
uucaugaaaugcuuggagg

SEQ ID NO: 605653 - RNA, 19 nt, Artificial Sequence
  Description of Artificial Sequence: Synthetic oligonucleotide
ugaacaaauucuuagccug

SEQ ID NO: 605654 - RNA, 19 nt, Artificial Sequence
  Description of Artificial Sequence: Synthetic oligonucleotide
ugacaaucaaaccaauugc

SEQ ID NO: 605655 - RNA, 19 nt, Artificial Sequence
  Description of Artificial Sequence: Synthetic oligonucleotide
ugauuaaugagaagcagcu

SEQ ID NO: 605656 - RNA, 19 nt, Artificial Sequence
  Description of Artificial Sequence: Synthetic oligonucleotide
ugaacuuagaucaccaggu

SEQ ID NO: 605657 - RNA, 19 nt, Artificial Sequence
  Description of Artificial Sequence: Synthetic oligonucleotide
auaaucaguagauuaggag

SEQ ID NO: 605658 - RNA, 19 nt, Artificial Sequence
  Description of Artificial Sequence: Synthetic oligonucleotide
gaaggggagacauuggagg

SEQ ID NO: 605659 - RNA, 19 nt, Artificial Sequence
  Description of Artificial Sequence: Synthetic oligonucleotide
acucagucagcucagaauc

SEQ ID NO: 605660 - RNA, 19 nt, Artificial Sequence
  Description of Artificial Sequence: Synthetic oligonucleotide
ucacuuuccuaaaacagcc

SEQ ID NO: 605661 - RNA, 19 nt, Artificial Sequence
  Description of Artificial Sequence: Synthetic oligonucleotide
uuuagcaccguuaauguau

SEQ ID NO: 605662 - RNA, 19 nt, Artificial Sequence
  Description of Artificial Sequence: Synthetic oligonucleotide
ucaaacucgccaaugggag

SEQ ID NO: 605663 - RNA, 19 nt, Artificial Sequence
  Description of Artificial Sequence: Synthetic oligonucleotide
uuugcaugauuaaugagaa

SEQ ID NO: 605664 - RNA, 19 nt, Artificial Sequence
  Description of Artificial Sequence: Synthetic oligonucleotide
aguuaugugggaaacugcc

SEQ ID NO: 605665 - RNA, 19 nt, Artificial Sequence
  Description of Artificial Sequence: Synthetic oligonucleotide
uucaguuagaucuauguua

SEQ ID NO: 605666 - RNA, 19 nt, Artificial Sequence
  Description of Artificial Sequence: Synthetic oligonucleotide
augauuaaugagaagcagc

SEQ ID NO: 605667 - RNA, 19 nt, Artificial Sequence
  Description of Artificial Sequence: Synthetic oligonucleotide
uccuaaaacagccucccag

SEQ ID NO: 605668 - RNA, 19 nt, Artificial Sequence
  Description of Artificial Sequence: Synthetic oligonucleotide
aaugaaaucagcacagagu

SEQ ID NO: 605669 - RNA, 19 nt, Artificial Sequence
  Description of Artificial Sequence: Synthetic oligonucleotide
gaaagcuaaagauaccuca

SEQ ID NO: 605670 - RNA, 19 nt, Artificial Sequence
  Description of Artificial Sequence: Synthetic oligonucleotide
cuauguuagcaccuuaucc

SEQ ID NO: 605671 - RNA, 19 nt, Artificial Sequence
  Description of Artificial Sequence: Synthetic oligonucleotide
acuaucuggguucugacug

SEQ ID NO: 605672 - RNA, 19 nt, Artificial Sequence
  Description of Artificial Sequence: Synthetic oligonucleotide
aacuguaugacagccaucu

SEQ ID NO: 605673 - RNA, 19 nt, Artificial Sequence
  Description of Artificial Sequence: Synthetic oligonucleotide
gaaaucagcacagagucug

SEQ ID NO: 605674 - RNA, 19 nt, Artificial Sequence
  Description of Artificial Sequence: Synthetic oligonucleotide
aaugaaagcuaaagauacc

SEQ ID NO: 605675 - RNA, 19 nt, Artificial Sequence
  Description of Artificial Sequence: Synthetic oligonucleotide
uugguagcaaagaaguggc

SEQ ID NO: 605676 - RNA, 19 nt, Artificial Sequence
  Description of Artificial Sequence: Synthetic oligonucleotide
ucagcuaucaccuccucca

SEQ ID NO: 605677 - RNA, 19 nt, Artificial Sequence
  Description of Artificial Sequence: Synthetic oligonucleotide
cuugugugcggcaagcucg

SEQ ID NO: 605678 - RNA, 19 nt, Artificial Sequence
  Description of Artificial Sequence: Synthetic oligonucleotide
aagauguacauguuguaau

SEQ ID NO: 605679 - RNA, 19 nt, Artificial Sequence
  Description of Artificial Sequence: Synthetic oligonucleotide
acuuuccuaaaacagccuc

SEQ ID NO: 605680 - RNA, 19 nt, Artificial Sequence
  Description of Artificial Sequence: Synthetic oligonucleotide
uuugugagaguuugcauga

SEQ ID NO: 605681 - RNA, 19 nt, Artificial Sequence
  Description of Artificial Sequence: Synthetic oligonucleotide
acaaucaaaccaauugccc

SEQ ID NO: 605682 - RNA, 19 nt, Artificial Sequence
  Description of Artificial Sequence: Synthetic oligonucleotide
agucucacuuuccuaaaac

SEQ ID NO: 605683 - RNA, 19 nt, Artificial Sequence
  Description of Artificial Sequence: Synthetic oligonucleotide
gauaccucaugcuugugug

SEQ ID NO: 605684 - RNA, 19 nt, Artificial Sequence
  Description of Artificial Sequence: Synthetic oligonucleotide
acagguacccaucacuggg

SEQ ID NO: 605685 - RNA, 19 nt, Artificial Sequence
  Description of Artificial Sequence: Synthetic oligonucleotide
accaugacuaucuggguuc

SEQ ID NO: 605686 - RNA, 19 nt, Artificial Sequence
  Description of Artificial Sequence: Synthetic oligonucleotide
aauauucucucagucguug

SEQ ID NO: 605687 - RNA, 19 nt, Artificial Sequence
  Description of Artificial Sequence: Synthetic oligonucleotide
uucuuagccugugagaucc

SEQ ID NO: 605688 - RNA, 19 nt, Artificial Sequence
  Description of Artificial Sequence: Synthetic oligonucleotide
cuuguccagauuuuguacc

SEQ ID NO: 605689 - RNA, 19 nt, Artificial Sequence
  Description of Artificial Sequence: Synthetic oligonucleotide
gacaaucaaaccaauugcc

SEQ ID NO: 605690 - RNA, 19 nt, Artificial Sequence
  Description of Artificial Sequence: Synthetic oligonucleotide
acuugcaaguuucucuugg

SEQ ID NO: 605691 - RNA, 19 nt, Artificial Sequence
  Description of Artificial Sequence: Synthetic oligonucleotide
ucaaagaagcguguggugc

SEQ ID NO: 605692 - RNA, 19 nt, Artificial Sequence
  Description of Artificial Sequence: Synthetic oligonucleotide
agugugaacuuagaucacc

SEQ ID NO: 605693 - RNA, 19 nt, Artificial Sequence
  Description of Artificial Sequence: Synthetic oligonucleotide
guuaguagaugguugccag

SEQ ID NO: 605694 - RNA, 19 nt, Artificial Sequence
  Description of Artificial Sequence: Synthetic oligonucleotide
uugucguugucuaagucac

SEQ ID NO: 605695 - RNA, 19 nt, Artificial Sequence
  Description of Artificial Sequence: Synthetic oligonucleotide
ugacuuagguuauaguuuc

SEQ ID NO: 605696 - RNA, 19 nt, Artificial Sequence
  Description of Artificial Sequence: Synthetic oligonucleotide
aguuagaucuauguuagca

SEQ ID NO: 605697 - RNA, 19 nt, Artificial Sequence
  Description of Artificial Sequence: Synthetic oligonucleotide
uuagguuauaguuucuuuu

SEQ ID NO: 605698 - RNA, 19 nt, Artificial Sequence
  Description of Artificial Sequence: Synthetic oligonucleotide
aagcuaaagauaccucaug

SEQ ID NO: 605699 - RNA, 19 nt, Artificial Sequence
  Description of Artificial Sequence: Synthetic oligonucleotide
uugacaugacaaucaaacc

SEQ ID NO: 605700 - RNA, 19 nt, Artificial Sequence
  Description of Artificial Sequence: Synthetic oligonucleotide
cuuuccuaaaacagccucc

SEQ ID NO: 605701 - RNA, 19 nt, Artificial Sequence
  Description of Artificial Sequence: Synthetic oligonucleotide
uuaugugggaaacugccau

SEQ ID NO: 605702 - RNA, 19 nt, Artificial Sequence
  Description of Artificial Sequence: Synthetic oligonucleotide
ggugaacaaauucuuagcc

SEQ ID NO: 605703 - RNA, 19 nt, Artificial Sequence
  Description of Artificial Sequence: Synthetic oligonucleotide
augaaagcuaaagauaccu

SEQ ID NO: 605704 - RNA, 19 nt, Artificial Sequence
  Description of Artificial Sequence: Synthetic oligonucleotide
cuaucuccgaaccaccagg

SEQ ID NO: 605705 - RNA, 19 nt, Artificial Sequence
  Description of Artificial Sequence: Synthetic oligonucleotide
cuugccaaaauuugaacca

SEQ ID NO: 605706 - RNA, 19 nt, Artificial Sequence
  Description of Artificial Sequence: Synthetic oligonucleotide
ugggccaugccccagaguc

SEQ ID NO: 605707 - RNA, 19 nt, Artificial Sequence
  Description of Artificial Sequence: Synthetic oligonucleotide
ugugagauccgaccauucc

SEQ ID NO: 605708 - RNA, 19 nt, Artificial Sequence
  Description of Artificial Sequence: Synthetic oligonucleotide
ucuccgaaccaccagggga

SEQ ID NO: 605709 - RNA, 19 nt, Artificial Sequence
  Description of Artificial Sequence: Synthetic oligonucleotide
agaguguuagagucaagug

SEQ ID NO: 605710 - RNA, 19 nt, Artificial Sequence
  Description of Artificial Sequence: Synthetic oligonucleotide
gaccauuccauugacuugc

SEQ ID NO: 605711 - RNA, 19 nt, Artificial Sequence
  Description of Artificial Sequence: Synthetic oligonucleotide
auguuugcaguggugauuc

SEQ ID NO: 605712 - RNA, 19 nt, Artificial Sequence
  Description of Artificial Sequence: Synthetic oligonucleotide
guuagagucaaguggaaaa

SEQ ID NO: 605713 - RNA, 19 nt, Artificial Sequence
  Description of Artificial Sequence: Synthetic oligonucleotide
uggacagggaagauguaca

SEQ ID NO: 605714 - RNA, 19 nt, Artificial Sequence
  Description of Artificial Sequence: Synthetic oligonucleotide
aguguuagagucaagugga

SEQ ID NO: 605715 - RNA, 19 nt, Artificial Sequence
  Description of Artificial Sequence: Synthetic oligonucleotide
uccacccauagucccaugg

SEQ ID NO: 605716 - RNA, 19 nt, Artificial Sequence
  Description of Artificial Sequence: Synthetic oligonucleotide
auucucucagucguuggcc

SEQ ID NO: 605717 - RNA, 19 nt, Artificial Sequence
  Description of Artificial Sequence: Synthetic oligonucleotide
agggaacucagucagcuca

SEQ ID NO: 605718 - RNA, 19 nt, Artificial Sequence
  Description of Artificial Sequence: Synthetic oligonucleotide
agagucaaguggaaaauag

SEQ ID NO: 605719 - RNA, 19 nt, Artificial Sequence
  Description of Artificial Sequence: Synthetic oligonucleotide
gauuaggagaauccuguga

SEQ ID NO: 605720 - RNA, 19 nt, Artificial Sequence
  Description of Artificial Sequence: Synthetic oligonucleotide
auaccucaugcuugugugc

SEQ ID NO: 605721 - RNA, 19 nt, Artificial Sequence
  Description of Artificial Sequence: Synthetic oligonucleotide
uuggccuaggcuaccauga

SEQ ID NO: 605722 - RNA, 19 nt, Artificial Sequence
  Description of Artificial Sequence: Synthetic oligonucleotide
aguuugcaugauuaaugag

SEQ ID NO: 605723 - RNA, 19 nt, Artificial Sequence
  Description of Artificial Sequence: Synthetic oligonucleotide
ucuauguuagcaccuuauc

SEQ ID NO: 605724 - RNA, 19 nt, Artificial Sequence
  Description of Artificial Sequence: Synthetic oligonucleotide
ugugaacuuagaucaccag

SEQ ID NO: 605725 - RNA, 19 nt, Artificial Sequence
  Description of Artificial Sequence: Synthetic oligonucleotide
ggaagugugaacuuagauc

SEQ ID NO: 605726 - RNA, 19 nt, Artificial Sequence
  Description of Artificial Sequence: Synthetic oligonucleotide
agggcaauguacuugucgu

SEQ ID NO: 605727 - RNA, 19 nt, Artificial Sequence
  Description of Artificial Sequence: Synthetic oligonucleotide
gaauucaggacugcagaag

SEQ ID NO: 605728 - RNA, 19 nt, Artificial Sequence
  Description of Artificial Sequence: Synthetic oligonucleotide
uagaucuauguuagcaccu

SEQ ID NO: 605729 - RNA, 19 nt, Artificial Sequence
  Description of Artificial Sequence: Synthetic oligonucleotide
ugaaagcuaaagauaccuc

SEQ ID NO: 605730 - RNA, 19 nt, Artificial Sequence
  Description of Artificial Sequence: Synthetic oligonucleotide
auauucucucagucguugg

SEQ ID NO: 605731 - RNA, 19 nt, Artificial Sequence
  Description of Artificial Sequence: Synthetic oligonucleotide
auggacagggaagauguac

SEQ ID NO: 605732 - RNA, 19 nt, Artificial Sequence
  Description of Artificial Sequence: Synthetic oligonucleotide
ugucaagcucuucacgucu

SEQ ID NO: 605733 - RNA, 19 nt, Artificial Sequence
  Description of Artificial Sequence: Synthetic oligonucleotide
uuauccccaggcagaacgg

SEQ ID NO: 605734 - RNA, 19 nt, Artificial Sequence
  Description of Artificial Sequence: Synthetic oligonucleotide
acaugcguaucacagcucu

SEQ ID NO: 605735 - RNA, 19 nt, Artificial Sequence
  Description of Artificial Sequence: Synthetic oligonucleotide
ugcaaguuucucuugguua

SEQ ID NO: 605736 - RNA, 19 nt, Artificial Sequence
  Description of Artificial Sequence: Synthetic oligonucleotide
uuuuguacccugugucugc

SEQ ID NO: 605737 - RNA, 19 nt, Artificial Sequence
  Description of Artificial Sequence: Synthetic oligonucleotide
cuugaugccaaagcagccg

SEQ ID NO: 605738 - RNA, 19 nt, Artificial Sequence
  Description of Artificial Sequence: Synthetic oligonucleotide
cuugucguugucuaaguca

SEQ ID NO: 605739 - RNA, 19 nt, Artificial Sequence
  Description of Artificial Sequence: Synthetic oligonucleotide
aaacucgccaaugggagca

SEQ ID NO: 605740 - RNA, 19 nt, Artificial Sequence
  Description of Artificial Sequence: Synthetic oligonucleotide
uaccucaugcuugugugcg

SEQ ID NO: 605741 - RNA, 19 nt, Artificial Sequence
  Description of Artificial Sequence: Synthetic oligonucleotide
aguagauuaggagaauccu

SEQ ID NO: 605742 - RNA, 19 nt, Artificial Sequence
  Description of Artificial Sequence: Synthetic oligonucleotide
aacggccaaccauccaaac

SEQ ID NO: 605743 - RNA, 19 nt, Artificial Sequence
  Description of Artificial Sequence: Synthetic oligonucleotide
caaucaaaccaauugccca

SEQ ID NO: 605744 - RNA, 19 nt, Artificial Sequence
  Description of Artificial Sequence: Synthetic oligonucleotide
agauccgaccauuccauug

SEQ ID NO: 605745 - RNA, 19 nt, Artificial Sequence
  Description of Artificial Sequence: Synthetic oligonucleotide
cuggcacacacacaugggg

SEQ ID NO: 605746 - RNA, 19 nt, Artificial Sequence
  Description of Artificial Sequence: Synthetic oligonucleotide
gacagguacccaucacugg

SEQ ID NO: 605747 - RNA, 19 nt, Artificial Sequence
  Description of Artificial Sequence: Synthetic oligonucleotide
aaagcuaaagauaccucau

SEQ ID NO: 605748 - RNA, 19 nt, Artificial Sequence
  Description of Artificial Sequence: Synthetic oligonucleotide
acugccaauggacagggaa

SEQ ID NO: 605749 - RNA, 19 nt, Artificial Sequence
  Description of Artificial Sequence: Synthetic oligonucleotide
ugagauccgaccauuccau

SEQ ID NO: 605750 - RNA, 19 nt, Artificial Sequence
  Description of Artificial Sequence: Synthetic oligonucleotide
agugcccauaaucaguaga

SEQ ID NO: 605751 - RNA, 19 nt, Artificial Sequence
  Description of Artificial Sequence: Synthetic oligonucleotide
agaacggccaaccauccaa

SEQ ID NO: 605752 - RNA, 19 nt, Artificial Sequence
  Description of Artificial Sequence: Synthetic oligonucleotide
ugcuaagaaacuguaugac

SEQ ID NO: 605753 - RNA, 19 nt, Artificial Sequence
  Description of Artificial Sequence: Synthetic oligonucleotide
uuugccuaucuccgaacca

SEQ ID NO: 605754 - RNA, 19 nt, Artificial Sequence
  Description of Artificial Sequence: Synthetic oligonucleotide
ucagucguuggccuaggcu

SEQ ID NO: 605755 - RNA, 19 nt, Artificial Sequence
  Description of Artificial Sequence: Synthetic oligonucleotide
acuuagaucaccagguccu

SEQ ID NO: 605756 - RNA, 19 nt, Artificial Sequence
  Description of Artificial Sequence: Synthetic oligonucleotide
ugugcggcaagcucgugca

SEQ ID NO: 605757 - RNA, 19 nt, Artificial Sequence
  Description of Artificial Sequence: Synthetic oligonucleotide
uguacauguuguaauucuu

SEQ ID NO: 605758 - RNA, 19 nt, Artificial Sequence
  Description of Artificial Sequence: Synthetic oligonucleotide
uuugaaccaacagccaaac

SEQ ID NO: 605759 - RNA, 19 nt, Artificial Sequence
  Description of Artificial Sequence: Synthetic oligonucleotide
cagggcaauguacuugucg

SEQ ID NO: 605760 - RNA, 19 nt, Artificial Sequence
  Description of Artificial Sequence: Synthetic oligonucleotide
uagccugugagauccgacc

SEQ ID NO: 605761 - RNA, 19 nt, Artificial Sequence
  Description of Artificial Sequence: Synthetic oligonucleotide
uggugauucuggcaggggu

SEQ ID NO: 605762 - RNA, 19 nt, Artificial Sequence
  Description of Artificial Sequence: Synthetic oligonucleotide
caccccaaaaugaaaucag

SEQ ID NO: 605763 - RNA, 19 nt, Artificial Sequence
  Description of Artificial Sequence: Synthetic oligonucleotide
cuggaauauucucucaguc

SEQ ID NO: 605764 - RNA, 19 nt, Artificial Sequence
  Description of Artificial Sequence: Synthetic oligonucleotide
uaugugggaaacugccaug

SEQ ID NO: 605765 - RNA, 19 nt, Artificial Sequence
  Description of Artificial Sequence: Synthetic oligonucleotide
caaacugccaauggacagg

SEQ ID NO: 605766 - RNA, 19 nt, Artificial Sequence
  Description of Artificial Sequence: Synthetic oligonucleotide
aaauuugaaccaacagcca

SEQ ID NO: 605767 - RNA, 19 nt, Artificial Sequence
  Description of Artificial Sequence: Synthetic oligonucleotide
ugaaaucagcacagagucu

SEQ ID NO: 605768 - RNA, 19 nt, Artificial Sequence
  Description of Artificial Sequence: Synthetic oligonucleotide
aggggaagaccccaaggag

SEQ ID NO: 605769 - RNA, 19 nt, Artificial Sequence
  Description of Artificial Sequence: Synthetic oligonucleotide
cauaaucaguagauuagga

SEQ ID NO: 605770 - RNA, 19 nt, Artificial Sequence
  Description of Artificial Sequence: Synthetic oligonucleotide
aggagcacgcaguggggcc

SEQ ID NO: 605771 - RNA, 19 nt, Artificial Sequence
  Description of Artificial Sequence: Synthetic oligonucleotide
uuuccaacacagccaguga

SEQ ID NO: 605772 - RNA, 19 nt, Artificial Sequence
  Description of Artificial Sequence: Synthetic oligonucleotide
gauccgaccauuccauuga

SEQ ID NO: 605773 - RNA, 19 nt, Artificial Sequence
  Description of Artificial Sequence: Synthetic oligonucleotide
guacccaucacuggggugc

SEQ ID NO: 605774 - RNA, 19 nt, Artificial Sequence
  Description of Artificial Sequence: Synthetic oligonucleotide
agacauuggagggagagaa

SEQ ID NO: 605775 - RNA, 19 nt, Artificial Sequence
  Description of Artificial Sequence: Synthetic oligonucleotide
gucguugucuaagucacag

SEQ ID NO: 605776 - RNA, 19 nt, Artificial Sequence
  Description of Artificial Sequence: Synthetic oligonucleotide
cuaucuggguucugacugg

SEQ ID NO: 605777 - RNA, 19 nt, Artificial Sequence
  Description of Artificial Sequence: Synthetic oligonucleotide
uggcuugccaaaauuugaa

SEQ ID NO: 605778 - RNA, 19 nt, Artificial Sequence
  Description of Artificial Sequence: Synthetic oligonucleotide
gaagauguacauguuguaa

SEQ ID NO: 605779 - RNA, 19 nt, Artificial Sequence
  Description of Artificial Sequence: Synthetic oligonucleotide
ucguugucuaagucacagg

SEQ ID NO: 605780 - RNA, 19 nt, Artificial Sequence
  Description of Artificial Sequence: Synthetic oligonucleotide
ugagaguuugcaugauuaa

SEQ ID NO: 605781 - RNA, 19 nt, Artificial Sequence
  Description of Artificial Sequence: Synthetic oligonucleotide
caccuugccauguuugcag

SEQ ID NO: 605782 - RNA, 19 nt, Artificial Sequence
  Description of Artificial Sequence: Synthetic oligonucleotide
gguagcaaagaaguggcag

SEQ ID NO: 605783 - RNA, 19 nt, Artificial Sequence
  Description of Artificial Sequence: Synthetic oligonucleotide
agauuaggagaauccugug

SEQ ID NO: 605784 - RNA, 19 nt, Artificial Sequence
  Description of Artificial Sequence: Synthetic oligonucleotide
uggccaaacugccaaugga

SEQ ID NO: 605785 - RNA, 19 nt, Artificial Sequence
  Description of Artificial Sequence: Synthetic oligonucleotide
ucuugacaugacaaucaaa

SEQ ID NO: 605786 - RNA, 19 nt, Artificial Sequence
  Description of Artificial Sequence: Synthetic oligonucleotide
ugggacucuguacaugcgu

SEQ ID NO: 605787 - RNA, 19 nt, Artificial Sequence
  Description of Artificial Sequence: Synthetic oligonucleotide
uguuagcaccuuaucccca

SEQ ID NO: 605788 - RNA, 19 nt, Artificial Sequence
  Description of Artificial Sequence: Synthetic oligonucleotide
aaagaagcguguggugcag

SEQ ID NO: 605789 - RNA, 19 nt, Artificial Sequence
  Description of Artificial Sequence: Synthetic oligonucleotide
gaugccaaagcagccggcc

SEQ ID NO: 605790 - RNA, 19 nt, Artificial Sequence
  Description of Artificial Sequence: Synthetic oligonucleotide
acgucuuugugagaguuug

SEQ ID NO: 605791 - RNA, 19 nt, Artificial Sequence
  Description of Artificial Sequence: Synthetic oligonucleotide
caauggacagggaagaugu

SEQ ID NO: 605792 - RNA, 19 nt, Artificial Sequence
  Description of Artificial Sequence: Synthetic oligonucleotide
ugguccaauguaguccagg

SEQ ID NO: 605793 - RNA, 19 nt, Artificial Sequence
  Description of Artificial Sequence: Synthetic oligonucleotide
acugguggacccucagguc

SEQ ID NO: 605794 - RNA, 19 nt, Artificial Sequence
  Description of Artificial Sequence: Synthetic oligonucleotide
uuagccugugagauccgac

SEQ ID NO: 605795 - RNA, 19 nt, Artificial Sequence
  Description of Artificial Sequence: Synthetic oligonucleotide
uuuuagcaccguuaaugua

SEQ ID NO: 605796 - RNA, 19 nt, Artificial Sequence
  Description of Artificial Sequence: Synthetic oligonucleotide
gaacuuagaucaccagguc

SEQ ID NO: 605797 - RNA, 19 nt, Artificial Sequence
  Description of Artificial Sequence: Synthetic oligonucleotide
gggguuuagaggcaagcag

SEQ ID NO: 605798 - RNA, 19 nt, Artificial Sequence
  Description of Artificial Sequence: Synthetic oligonucleotide
aguggugauucuggcaggg

SEQ ID NO: 605799 - RNA, 19 nt, Artificial Sequence
  Description of Artificial Sequence: Synthetic oligonucleotide
guguugggagcccucggcg

SEQ ID NO: 605800 - RNA, 19 nt, Artificial Sequence
  Description of Artificial Sequence: Synthetic oligonucleotide
ucugaaugagagaguguua

SEQ ID NO: 605801 - RNA, 19 nt, Artificial Sequence
  Description of Artificial Sequence: Synthetic oligonucleotide
gaguuaugugggaaacugc

SEQ ID NO: 605802 - RNA, 19 nt, Artificial Sequence
  Description of Artificial Sequence: Synthetic oligonucleotide
aauaggaaugaaagcuaaa

SEQ ID NO: 605803 - RNA, 19 nt, Artificial Sequence
  Description of Artificial Sequence: Synthetic oligonucleotide
ggaauauucucucagucgu

SEQ ID NO: 605804 - RNA, 19 nt, Artificial Sequence
  Description of Artificial Sequence: Synthetic oligonucleotide
ugacuaucuggguucugac

SEQ ID NO: 605805 - RNA, 19 nt, Artificial Sequence
  Description of Artificial Sequence: Synthetic oligonucleotide
ugugagaguuugcaugauu

SEQ ID NO: 605806 - RNA, 19 nt, Artificial Sequence
  Description of Artificial Sequence: Synthetic oligonucleotide
ucuugguuaguagaugguu

SEQ ID NO: 605807 - RNA, 19 nt, Artificial Sequence
  Description of Artificial Sequence: Synthetic oligonucleotide
caaacucgccaaugggagc

SEQ ID NO: 605808 - RNA, 19 nt, Artificial Sequence
  Description of Artificial Sequence: Synthetic oligonucleotide
ugccaauggacagggaaga

SEQ ID NO: 605809 - RNA, 19 nt, Artificial Sequence
  Description of Artificial Sequence: Synthetic oligonucleotide
ucuaugguacagcuuucuu

SEQ ID NO: 605810 - RNA, 19 nt, Artificial Sequence
  Description of Artificial Sequence: Synthetic oligonucleotide
gcuaagaaacuguaugaca

SEQ ID NO: 605811 - RNA, 19 nt, Artificial Sequence
  Description of Artificial Sequence: Synthetic oligonucleotide
cucgccaaugggagcaggg

SEQ ID NO: 605812 - RNA, 19 nt, Artificial Sequence
  Description of Artificial Sequence: Synthetic oligonucleotide
uguauucaguuagaucuau

SEQ ID NO: 605813 - RNA, 19 nt, Artificial Sequence
  Description of Artificial Sequence: Synthetic oligonucleotide
guacaugcguaucacagcu

SEQ ID NO: 605814 - RNA, 19 nt, Artificial Sequence
  Description of Artificial Sequence: Synthetic oligonucleotide
augacuaucuggguucuga

SEQ ID NO: 605815 - RNA, 19 nt, Artificial Sequence
  Description of Artificial Sequence: Synthetic oligonucleotide
uuagcaccguuaauguauu

SEQ ID NO: 605816 - RNA, 19 nt, Artificial Sequence
  Description of Artificial Sequence: Synthetic oligonucleotide
aggucuuguugucauugcu

SEQ ID NO: 605817 - RNA, 19 nt, Artificial Sequence
  Description of Artificial Sequence: Synthetic oligonucleotide
gagaguguuagagucaagu

SEQ ID NO: 605818 - RNA, 19 nt, Artificial Sequence
  Description of Artificial Sequence: Synthetic oligonucleotide
uugagccagucacgcaugc

SEQ ID NO: 605819 - RNA, 19 nt, Artificial Sequence
  Description of Artificial Sequence: Synthetic oligonucleotide
uugcaaguuucucuugguu

SEQ ID NO: 605820 - RNA, 19 nt, Artificial Sequence
  Description of Artificial Sequence: Synthetic oligonucleotide
agggguucucagcuaucac

SEQ ID NO: 605821 - RNA, 19 nt, Artificial Sequence
  Description of Artificial Sequence: Synthetic oligonucleotide
uuuguacccugugucugcc

SEQ ID NO: 605822 - RNA, 19 nt, Artificial Sequence
  Description of Artificial Sequence: Synthetic oligonucleotide
aucuccgaaccaccagggg

SEQ ID NO: 605823 - RNA, 19 nt, Artificial Sequence
  Description of Artificial Sequence: Synthetic oligonucleotide
ggguuuagaggcaagcagc

SEQ ID NO: 605824 - RNA, 19 nt, Artificial Sequence
  Description of Artificial Sequence: Synthetic oligonucleotide
acggccaaccauccaaaca

SEQ ID NO: 605825 - RNA, 19 nt, Artificial Sequence
  Description of Artificial Sequence: Synthetic oligonucleotide
ucuuagccugugagauccg

SEQ ID NO: 605826 - RNA, 19 nt, Artificial Sequence
  Description of Artificial Sequence: Synthetic oligonucleotide
caaagaagcguguggugca

SEQ ID NO: 605827 - RNA, 19 nt, Artificial Sequence
  Description of Artificial Sequence: Synthetic oligonucleotide
auuugaaccaacagccaaa

SEQ ID NO: 605828 - RNA, 19 nt, Artificial Sequence
  Description of Artificial Sequence: Synthetic oligonucleotide
ccauaaucaguagauuagg

SEQ ID NO: 605829 - RNA, 19 nt, Artificial Sequence
  Description of Artificial Sequence: Synthetic oligonucleotide
ugguuaguagaugguugcc

SEQ ID NO: 605830 - RNA, 19 nt, Artificial Sequence
  Description of Artificial Sequence: Synthetic oligonucleotide
gagggguuuagaggcaagc

SEQ ID NO: 605831 - RNA, 19 nt, Artificial Sequence
  Description of Artificial Sequence: Synthetic oligonucleotide
agaagauccaggcccucau

SEQ ID NO: 605832 - RNA, 19 nt, Artificial Sequence
  Description of Artificial Sequence: Synthetic oligonucleotide
ugguagcaaagaaguggca

SEQ ID NO: 605833 - RNA, 19 nt, Artificial Sequence
  Description of Artificial Sequence: Synthetic oligonucleotide
uggagcuugugacccuucu

SEQ ID NO: 605834 - RNA, 19 nt, Artificial Sequence
  Description of Artificial Sequence: Synthetic oligonucleotide
agucccauggcuugccaaa

SEQ ID NO: 605835 - RNA, 19 nt, Artificial Sequence
  Description of Artificial Sequence: Synthetic oligonucleotide
uuucucuaugguacagcuu

SEQ ID NO: 605836 - RNA, 19 nt, Artificial Sequence
  Description of Artificial Sequence: Synthetic oligonucleotide
agucguuggccuaggcuac

SEQ ID NO: 605837 - RNA, 19 nt, Artificial Sequence
  Description of Artificial Sequence: Synthetic oligonucleotide
cucgugcaacuccauuucc

SEQ ID NO: 605838 - RNA, 19 nt, Artificial Sequence
  Description of Artificial Sequence: Synthetic oligonucleotide
auccccaggcagaacggcc

SEQ ID NO: 605839 - RNA, 19 nt, Artificial Sequence
  Description of Artificial Sequence: Synthetic oligonucleotide
gugagaguuugcaugauua

SEQ ID NO: 605840 - RNA, 19 nt, Artificial Sequence
  Description of Artificial Sequence: Synthetic oligonucleotide
ucucuaugguacagcuuuc

SEQ ID NO: 605841 - RNA, 19 nt, Artificial Sequence
  Description of Artificial Sequence: Synthetic oligonucleotide
gugugcggcaagcucgugc

SEQ ID NO: 605842 - RNA, 19 nt, Artificial Sequence
  Description of Artificial Sequence: Synthetic oligonucleotide
uugugugcggcaagcucgu

SEQ ID NO: 605843 - RNA, 19 nt, Artificial Sequence
  Description of Artificial Sequence: Synthetic oligonucleotide
aucuauguuagcaccuuau

SEQ ID NO: 605844 - RNA, 19 nt, Artificial Sequence
  Description of Artificial Sequence: Synthetic oligonucleotide
caggggaagaccccaagga

SEQ ID NO: 605845 - RNA, 19 nt, Artificial Sequence
  Description of Artificial Sequence: Synthetic oligonucleotide
uccgaccauuccauugacu

SEQ ID NO: 605846 - RNA, 19 nt, Artificial Sequence
  Description of Artificial Sequence: Synthetic oligonucleotide
gucgaguuaugugggaaac

SEQ ID NO: 605847 - RNA, 19 nt, Artificial Sequence
  Description of Artificial Sequence: Synthetic oligonucleotide
cagugugggacagguaccc

SEQ ID NO: 605848 - RNA, 19 nt, Artificial Sequence
  Description of Artificial Sequence: Synthetic oligonucleotide
aaaucagcacagagucuga

SEQ ID NO: 605849 - RNA, 19 nt, Artificial Sequence
  Description of Artificial Sequence: Synthetic oligonucleotide
ucgaguuaugugggaaacu

SEQ ID NO: 605850 - RNA, 19 nt, Artificial Sequence
  Description of Artificial Sequence: Synthetic oligonucleotide
gcccucaugguguugggag

SEQ ID NO: 605851 - RNA, 19 nt, Artificial Sequence
  Description of Artificial Sequence: Synthetic oligonucleotide
ugucguugucuaagucaca

SEQ ID NO: 605852 - RNA, 19 nt, Artificial Sequence
  Description of Artificial Sequence: Synthetic oligonucleotide
caguuagaucuauguuagc

SEQ ID NO: 605853 - RNA, 19 nt, Artificial Sequence
  Description of Artificial Sequence: Synthetic oligonucleotide
uacaugcguaucacagcuc

SEQ ID NO: 605854 - RNA, 19 nt, Artificial Sequence
  Description of Artificial Sequence: Synthetic oligonucleotide
agcuaucaccuccuccaca

SEQ ID NO: 605855 - RNA, 19 nt, Artificial Sequence
  Description of Artificial Sequence: Synthetic oligonucleotide
ucccggccaggcaaaggag

SEQ ID NO: 605856 - RNA, 19 nt, Artificial Sequence
  Description of Artificial Sequence: Synthetic oligonucleotide
acuugguagcaaagaagug

SEQ ID NO: 605857 - RNA, 19 nt, Artificial Sequence
  Description of Artificial Sequence: Synthetic oligonucleotide
cauagucccauggcuugcc

SEQ ID NO: 605858 - RNA, 19 nt, Artificial Sequence
  Description of Artificial Sequence: Synthetic oligonucleotide
agugagacacugggcagug

SEQ ID NO: 605859 - RNA, 19 nt, Artificial Sequence
  Description of Artificial Sequence: Synthetic oligonucleotide
aaggagcccacaccccaaa

SEQ ID NO: 605860 - RNA, 19 nt, Artificial Sequence
  Description of Artificial Sequence: Synthetic oligonucleotide
ggaaggggagacauuggag

SEQ ID NO: 605861 - RNA, 19 nt, Artificial Sequence
  Description of Artificial Sequence: Synthetic oligonucleotide
uauccccaggcagaacggc

SEQ ID NO: 605862 - RNA, 19 nt, Artificial Sequence
  Description of Artificial Sequence: Synthetic oligonucleotide
agggguuuagaggcaagca

SEQ ID NO: 605863 - RNA, 19 nt, Artificial Sequence
  Description of Artificial Sequence: Synthetic oligonucleotide
cuaggcuaccaugacuauc

SEQ ID NO: 605864 - RNA, 19 nt, Artificial Sequence
  Description of Artificial Sequence: Synthetic oligonucleotide
uucacgucuuugugagagu

SEQ ID NO: 605865 - RNA, 19 nt, Artificial Sequence
  Description of Artificial Sequence: Synthetic oligonucleotide
aagaccccaaggagcccac

SEQ ID NO: 605866 - RNA, 19 nt, Artificial Sequence
  Description of Artificial Sequence: Synthetic oligonucleotide
gaucuauguuagcaccuua

SEQ ID NO: 605867 - RNA, 19 nt, Artificial Sequence
  Description of Artificial Sequence: Synthetic oligonucleotide
ugccccagagucgaguuau

SEQ ID NO: 605868 - RNA, 19 nt, Artificial Sequence
  Description of Artificial Sequence: Synthetic oligonucleotide
ucaugcuugugugcggcaa

SEQ ID NO: 605869 - RNA, 19 nt, Artificial Sequence
  Description of Artificial Sequence: Synthetic oligonucleotide
ucgccaaugggagcagggc

SEQ ID NO: 605870 - RNA, 19 nt, Artificial Sequence
  Description of Artificial Sequence: Synthetic oligonucleotide
uggacccucaggucucaga

SEQ ID NO: 605871 - RNA, 19 nt, Artificial Sequence
  Description of Artificial Sequence: Synthetic oligonucleotide
gaaccaccaggggaagacc

SEQ ID NO: 605872 - RNA, 19 nt, Artificial Sequence
  Description of Artificial Sequence: Synthetic oligonucleotide
gacuaucuggguucugacu

SEQ ID NO: 605873 - RNA, 19 nt, Artificial Sequence
  Description of Artificial Sequence: Synthetic oligonucleotide
cuccgaaccaccaggggaa

SEQ ID NO: 605874 - RNA, 19 nt, Artificial Sequence
  Description of Artificial Sequence: Synthetic oligonucleotide
accuugccauguuugcagu

SEQ ID NO: 605875 - RNA, 19 nt, Artificial Sequence
  Description of Artificial Sequence: Synthetic oligonucleotide
cugugagauccgaccauuc

SEQ ID NO: 605876 - RNA, 19 nt, Artificial Sequence
  Description of Artificial Sequence: Synthetic oligonucleotide
agaacaguucuggcagucu

SEQ ID NO: 605877 - RNA, 19 nt, Artificial Sequence
  Description of Artificial Sequence: Synthetic oligonucleotide
caugcguaucacagcucug

SEQ ID NO: 605878 - RNA, 19 nt, Artificial Sequence
  Description of Artificial Sequence: Synthetic oligonucleotide
cuaugguacagcuuucuuu

SEQ ID NO: 605879 - RNA, 19 nt, Artificial Sequence
  Description of Artificial Sequence: Synthetic oligonucleotide
aagauaccucaugcuugug

SEQ ID NO: 605880 - RNA, 19 nt, Artificial Sequence
  Description of Artificial Sequence: Synthetic oligonucleotide
cugccugaagaguggagga

SEQ ID NO: 605881 - RNA, 19 nt, Artificial Sequence
  Description of Artificial Sequence: Synthetic oligonucleotide
gaauccugugagauguucu

SEQ ID NO: 605882 - RNA, 19 nt, Artificial Sequence
  Description of Artificial Sequence: Synthetic oligonucleotide
ccuugaugccaaagcagcc

SEQ ID NO: 605883 - RNA, 19 nt, Artificial Sequence
  Description of Artificial Sequence: Synthetic oligonucleotide
gccaugacuuagguuauag

SEQ ID NO: 605884 - RNA, 19 nt, Artificial Sequence
  Description of Artificial Sequence: Synthetic oligonucleotide
ucucagucguuggccuagg

SEQ ID NO: 605885 - RNA, 19 nt, Artificial Sequence
  Description of Artificial Sequence: Synthetic oligonucleotide
gguuaguagaugguugcca

SEQ ID NO: 605886 - RNA, 19 nt, Artificial Sequence
  Description of Artificial Sequence: Synthetic oligonucleotide
ggccaaacugccaauggac

SEQ ID NO: 605887 - RNA, 19 nt, Artificial Sequence
  Description of Artificial Sequence: Synthetic oligonucleotide
agaucuauguuagcaccuu

SEQ ID NO: 605888 - RNA, 19 nt, Artificial Sequence
  Description of Artificial Sequence: Synthetic oligonucleotide
acaccuugccauguuugca

SEQ ID NO: 605889 - RNA, 19 nt, Artificial Sequence
  Description of Artificial Sequence: Synthetic oligonucleotide
cagucacgcaugcgcagag

SEQ ID NO: 605890 - RNA, 19 nt, Artificial Sequence
  Description of Artificial Sequence: Synthetic oligonucleotide
cucccggccaggcaaagga

SEQ ID NO: 605891 - RNA, 19 nt, Artificial Sequence
  Description of Artificial Sequence: Synthetic oligonucleotide
aacucgccaaugggagcag

SEQ ID NO: 605892 - RNA, 19 nt, Artificial Sequence
  Description of Artificial Sequence: Synthetic oligonucleotide
gagucgaguuaugugggaa

SEQ ID NO: 605893 - RNA, 19 nt, Artificial Sequence
  Description of Artificial Sequence: Synthetic oligonucleotide
ucccauggcuugccaaaau

SEQ ID NO: 605894 - RNA, 19 nt, Artificial Sequence
  Description of Artificial Sequence: Synthetic oligonucleotide
agcccacaccccaaaauga

SEQ ID NO: 605895 - RNA, 19 nt, Artificial Sequence
  Description of Artificial Sequence: Synthetic oligonucleotide
agucacgcaugcgcagagg

SEQ ID NO: 605896 - RNA, 19 nt, Artificial Sequence
  Description of Artificial Sequence: Synthetic oligonucleotide
uuccauugacuugcaaguu

SEQ ID NO: 605897 - RNA, 19 nt, Artificial Sequence
  Description of Artificial Sequence: Synthetic oligonucleotide
caguucuggcagucugaag

SEQ ID NO: 605898 - RNA, 19 nt, Artificial Sequence
  Description of Artificial Sequence: Synthetic oligonucleotide
cgaguuaugugggaaacug

SEQ ID NO: 605899 - RNA, 19 nt, Artificial Sequence
  Description of Artificial Sequence: Synthetic oligonucleotide
gacuggguuggcacccacc

SEQ ID NO: 605900 - RNA, 19 nt, Artificial Sequence
  Description of Artificial Sequence: Synthetic oligonucleotide
cccagagucgaguuaugug

SEQ ID NO: 605901 - RNA, 19 nt, Artificial Sequence
  Description of Artificial Sequence: Synthetic oligonucleotide
gguuguugcccucaucucu

SEQ ID NO: 605902 - RNA, 19 nt, Artificial Sequence
  Description of Artificial Sequence: Synthetic oligonucleotide
ucucucagucguuggccua

SEQ ID NO: 605903 - RNA, 19 nt, Artificial Sequence
  Description of Artificial Sequence: Synthetic oligonucleotide
cccauagucccauggcuug

SEQ ID NO: 605904 - RNA, 19 nt, Artificial Sequence
  Description of Artificial Sequence: Synthetic oligonucleotide
cucagucguuggccuaggc

SEQ ID NO: 605905 - RNA, 19 nt, Artificial Sequence
  Description of Artificial Sequence: Synthetic oligonucleotide
ugauucuggcagggguucu

SEQ ID NO: 605906 - RNA, 19 nt, Artificial Sequence
  Description of Artificial Sequence: Synthetic oligonucleotide
uccgaaccaccaggggaag

SEQ ID NO: 605907 - RNA, 19 nt, Artificial Sequence
  Description of Artificial Sequence: Synthetic oligonucleotide
aggaauguggagggguuua

SEQ ID NO: 605908 - RNA, 19 nt, Artificial Sequence
  Description of Artificial Sequence: Synthetic oligonucleotide
acaaggugaccagaacauu

SEQ ID NO: 605909 - RNA, 19 nt, Artificial Sequence
  Description of Artificial Sequence: Synthetic oligonucleotide
ggaauguggagggguuuag

SEQ ID NO: 605910 - RNA, 19 nt, Artificial Sequence
  Description of Artificial Sequence: Synthetic oligonucleotide
cagcuaucaccuccuccac

SEQ ID NO: 605911 - RNA, 19 nt, Artificial Sequence
  Description of Artificial Sequence: Synthetic oligonucleotide
aggucucaaagaagcgugu

SEQ ID NO: 605912 - RNA, 19 nt, Artificial Sequence
  Description of Artificial Sequence: Synthetic oligonucleotide
acucgccaaugggagcagg

SEQ ID NO: 605913 - RNA, 19 nt, Artificial Sequence
  Description of Artificial Sequence: Synthetic oligonucleotide
gguccaauguaguccaggu

SEQ ID NO: 605914 - RNA, 19 nt, Artificial Sequence
  Description of Artificial Sequence: Synthetic oligonucleotide
gaggagucgaaggucuugu

SEQ ID NO: 605915 - RNA, 19 nt, Artificial Sequence
  Description of Artificial Sequence: Synthetic oligonucleotide
gcucucguccagcucacac

SEQ ID NO: 605916 - RNA, 19 nt, Artificial Sequence
  Description of Artificial Sequence: Synthetic oligonucleotide
ccacccauagucccauggc

SEQ ID NO: 605917 - RNA, 19 nt, Artificial Sequence
  Description of Artificial Sequence: Synthetic oligonucleotide
gaacggccaaccauccaaa

SEQ ID NO: 605918 - RNA, 19 nt, Artificial Sequence
  Description of Artificial Sequence: Synthetic oligonucleotide
ucguuggccuaggcuacca

SEQ ID NO: 605919 - RNA, 19 nt, Artificial Sequence
  Description of Artificial Sequence: Synthetic oligonucleotide
acgcaugcgcagagggaac

SEQ ID NO: 605920 - RNA, 19 nt, Artificial Sequence
  Description of Artificial Sequence: Synthetic oligonucleotide
aauggacagggaagaugua

SEQ ID NO: 605921 - RNA, 19 nt, Artificial Sequence
  Description of Artificial Sequence: Synthetic oligonucleotide
agcguguggugcaguguuc

SEQ ID NO: 605922 - RNA, 19 nt, Artificial Sequence
  Description of Artificial Sequence: Synthetic oligonucleotide
acccauagucccauggcuu

SEQ ID NO: 605923 - RNA, 19 nt, Artificial Sequence
  Description of Artificial Sequence: Synthetic oligonucleotide
uugugagaguuugcaugau

SEQ ID NO: 605924 - RNA, 19 nt, Artificial Sequence
  Description of Artificial Sequence: Synthetic oligonucleotide
caggcggcagaacaguucu

SEQ ID NO: 605925 - RNA, 19 nt, Artificial Sequence
  Description of Artificial Sequence: Synthetic oligonucleotide
cagggguucucagcuauca

SEQ ID NO: 605926 - RNA, 19 nt, Artificial Sequence
  Description of Artificial Sequence: Synthetic oligonucleotide
cuuagccugugagauccga

SEQ ID NO: 605927 - RNA, 19 nt, Artificial Sequence
  Description of Artificial Sequence: Synthetic oligonucleotide
gugcccauaaucaguagau

SEQ ID NO: 605928 - RNA, 19 nt, Artificial Sequence
  Description of Artificial Sequence: Synthetic oligonucleotide
gugcaguguuccaugggga

SEQ ID NO: 605929 - RNA, 19 nt, Artificial Sequence
  Description of Artificial Sequence: Synthetic oligonucleotide
gccaaacugccaauggaca

SEQ ID NO: 605930 - RNA, 19 nt, Artificial Sequence
  Description of Artificial Sequence: Synthetic oligonucleotide
cacgcaguggggccagcuc

SEQ ID NO: 605931 - RNA, 19 nt, Artificial Sequence
  Description of Artificial Sequence: Synthetic oligonucleotide
cucuugguuaguagauggu

SEQ ID NO: 605932 - RNA, 19 nt, Artificial Sequence
  Description of Artificial Sequence: Synthetic oligonucleotide
ccuaaaacagccucccagu

SEQ ID NO: 605933 - RNA, 19 nt, Artificial Sequence
  Description of Artificial Sequence: Synthetic oligonucleotide
cacccauagucccauggcu

SEQ ID NO: 605934 - RNA, 19 nt, Artificial Sequence
  Description of Artificial Sequence: Synthetic oligonucleotide
gccagucacgcaugcgcag

SEQ ID NO: 605935 - RNA, 19 nt, Artificial Sequence
  Description of Artificial Sequence: Synthetic oligonucleotide
gcagaacggccaaccaucc

SEQ ID NO: 605936 - RNA, 19 nt, Artificial Sequence
  Description of Artificial Sequence: Synthetic oligonucleotide
ccaauguaguccaggugga

SEQ ID NO: 605937 - RNA, 19 nt, Artificial Sequence
  Description of Artificial Sequence: Synthetic oligonucleotide
cagcaggaagccacuugga

SEQ ID NO: 605938 - RNA, 19 nt, Artificial Sequence
  Description of Artificial Sequence: Synthetic oligonucleotide
cucaugcuugugugcggca

SEQ ID NO: 605939 - RNA, 19 nt, Artificial Sequence
  Description of Artificial Sequence: Synthetic oligonucleotide
uacccaucacuggggugcu

SEQ ID NO: 605940 - RNA, 19 nt, Artificial Sequence
  Description of Artificial Sequence: Synthetic oligonucleotide
cacuuuccuaaaacagccu

SEQ ID NO: 605941 - RNA, 19 nt, Artificial Sequence
  Description of Artificial Sequence: Synthetic oligonucleotide
caugacuaucuggguucug

SEQ ID NO: 605942 - RNA, 19 nt, Artificial Sequence
  Description of Artificial Sequence: Synthetic oligonucleotide
aguggcaggaggagucgaa

SEQ ID NO: 605943 - RNA, 19 nt, Artificial Sequence
  Description of Artificial Sequence: Synthetic oligonucleotide
cguugucuaagucacaggu

SEQ ID NO: 605944 - RNA, 19 nt, Artificial Sequence
  Description of Artificial Sequence: Synthetic oligonucleotide
ccuugccauguuugcagug

SEQ ID NO: 605945 - RNA, 19 nt, Artificial Sequence
  Description of Artificial Sequence: Synthetic oligonucleotide
gugugggacagguacccau

SEQ ID NO: 605946 - RNA, 19 nt, Artificial Sequence
  Description of Artificial Sequence: Synthetic oligonucleotide
caaggagcccacaccccaa

SEQ ID NO: 605947 - RNA, 19 nt, Artificial Sequence
  Description of Artificial Sequence: Synthetic oligonucleotide
gaauauucucucagucguu

SEQ ID NO: 605948 - RNA, 19 nt, Artificial Sequence
  Description of Artificial Sequence: Synthetic oligonucleotide
ggcaugcuaagaaacugua

SEQ ID NO: 605949 - RNA, 19 nt, Artificial Sequence
  Description of Artificial Sequence: Synthetic oligonucleotide
gucguuggccuaggcuacc

SEQ ID NO: 605950 - RNA, 19 nt, Artificial Sequence
  Description of Artificial Sequence: Synthetic oligonucleotide
ccguuaauguauucaguua

SEQ ID NO: 605951 - RNA, 19 nt, Artificial Sequence
  Description of Artificial Sequence: Synthetic oligonucleotide
ccagugcccauaaucagua

SEQ ID NO: 605952 - RNA, 19 nt, Artificial Sequence
  Description of Artificial Sequence: Synthetic oligonucleotide
gaagcguguggugcagugu

SEQ ID NO: 605953 - RNA, 19 nt, Artificial Sequence
  Description of Artificial Sequence: Synthetic oligonucleotide
gacuuagguuauaguuucu

SEQ ID NO: 605954 - RNA, 19 nt, Artificial Sequence
  Description of Artificial Sequence: Synthetic oligonucleotide
ggucucagagcauccuugu

SEQ ID NO: 605955 - RNA, 19 nt, Artificial Sequence
  Description of Artificial Sequence: Synthetic oligonucleotide
aacugccaauggacaggga

SEQ ID NO: 605956 - RNA, 19 nt, Artificial Sequence
  Description of Artificial Sequence: Synthetic oligonucleotide
augccccagagucgaguua

SEQ ID NO: 605957 - RNA, 19 nt, Artificial Sequence
  Description of Artificial Sequence: Synthetic oligonucleotide
ugugugcggcaagcucgug

SEQ ID NO: 605958 - RNA, 19 nt, Artificial Sequence
  Description of Artificial Sequence: Synthetic oligonucleotide
cugauccagcuggccaaac

SEQ ID NO: 605959 - RNA, 19 nt, Artificial Sequence
  Description of Artificial Sequence: Synthetic oligonucleotide
cucuaugguacagcuuucu

SEQ ID NO: 605960 - RNA, 19 nt, Artificial Sequence
  Description of Artificial Sequence: Synthetic oligonucleotide
cagaacggccaaccaucca

SEQ ID NO: 605961 - RNA, 19 nt, Artificial Sequence
  Description of Artificial Sequence: Synthetic oligonucleotide
gggccaugccccagagucg

SEQ ID NO: 605962 - RNA, 19 nt, Artificial Sequence
  Description of Artificial Sequence: Synthetic oligonucleotide
ggagggguuuagaggcaag

SEQ ID NO: 605963 - RNA, 19 nt, Artificial Sequence
  Description of Artificial Sequence: Synthetic oligonucleotide
augguccaauguaguccag

SEQ ID NO: 605964 - RNA, 19 nt, Artificial Sequence
  Description of Artificial Sequence: Synthetic oligonucleotide
gugagacacugggcagugc

SEQ ID NO: 605965 - RNA, 19 nt, Artificial Sequence
  Description of Artificial Sequence: Synthetic oligonucleotide
acccaccgguaccccuguc

SEQ ID NO: 605966 - RNA, 19 nt, Artificial Sequence
  Description of Artificial Sequence: Synthetic oligonucleotide
ggagguuguugcccucauc

SEQ ID NO: 605967 - RNA, 19 nt, Artificial Sequence
  Description of Artificial Sequence: Synthetic oligonucleotide
cgucuuugugagaguuugc

SEQ ID NO: 605968 - RNA, 19 nt, Artificial Sequence
  Description of Artificial Sequence: Synthetic oligonucleotide
ccaaugggagcagggcagc

SEQ ID NO: 605969 - RNA, 19 nt, Artificial Sequence
  Description of Artificial Sequence: Synthetic oligonucleotide
ccgaccauuccauugacuu

SEQ ID NO: 605970 - RNA, 19 nt, Artificial Sequence
  Description of Artificial Sequence: Synthetic oligonucleotide
ccauagucccauggcuugc

SEQ ID NO: 605971 - RNA, 19 nt, Artificial Sequence
  Description of Artificial Sequence: Synthetic oligonucleotide
ggccaugccccagagucga

SEQ ID NO: 605972 - RNA, 19 nt, Artificial Sequence
  Description of Artificial Sequence: Synthetic oligonucleotide
caaaccaauugcccagcuu

SEQ ID NO: 605973 - RNA, 19 nt, Artificial Sequence
  Description of Artificial Sequence: Synthetic oligonucleotide
gagauccgaccauuccauu

SEQ ID NO: 605974 - RNA, 19 nt, Artificial Sequence
  Description of Artificial Sequence: Synthetic oligonucleotide
ggagcccacaccccaaaau

SEQ ID NO: 605975 - RNA, 19 nt, Artificial Sequence
  Description of Artificial Sequence: Synthetic oligonucleotide
guacccugugucugccacu

SEQ ID NO: 605976 - RNA, 19 nt, Artificial Sequence
  Description of Artificial Sequence: Synthetic oligonucleotide
caugccccagagucgaguu

SEQ ID NO: 605977 - RNA, 19 nt, Artificial Sequence
  Description of Artificial Sequence: Synthetic oligonucleotide
gggaaacugccaugacuua

SEQ ID NO: 605978 - RNA, 19 nt, Artificial Sequence
  Description of Artificial Sequence: Synthetic oligonucleotide
agcagccggcccacucauc

SEQ ID NO: 605979 - RNA, 19 nt, Artificial Sequence
  Description of Artificial Sequence: Synthetic oligonucleotide
gccuaucuccgaaccacca

SEQ ID NO: 605980 - RNA, 19 nt, Artificial Sequence
  Description of Artificial Sequence: Synthetic oligonucleotide
ggccuaggcuaccaugacu

SEQ ID NO: 605981 - RNA, 19 nt, Artificial Sequence
  Description of Artificial Sequence: Synthetic oligonucleotide
ggagcacgcaguggggcca

SEQ ID NO: 605982 - RNA, 19 nt, Artificial Sequence
  Description of Artificial Sequence: Synthetic oligonucleotide
cacacaccuugccauguuu

SEQ ID NO: 605983 - RNA, 19 nt, Artificial Sequence
  Description of Artificial Sequence: Synthetic oligonucleotide
aggcggcagaacaguucug

SEQ ID NO: 605984 - RNA, 19 nt, Artificial Sequence
  Description of Artificial Sequence: Synthetic oligonucleotide
cacgucuuugugagaguuu

SEQ ID NO: 605985 - RNA, 19 nt, Artificial Sequence
  Description of Artificial Sequence: Synthetic oligonucleotide
cccuuugccuaucuccgaa

SEQ ID NO: 605986 - RNA, 19 nt, Artificial Sequence
  Description of Artificial Sequence: Synthetic oligonucleotide
ccaauugcccagcuucacu

SEQ ID NO: 605987 - RNA, 19 nt, Artificial Sequence
  Description of Artificial Sequence: Synthetic oligonucleotide
gcggcaagcucgugcaacu

SEQ ID NO: 605988 - RNA, 19 nt, Artificial Sequence
  Description of Artificial Sequence: Synthetic oligonucleotide
cccucaucucucucauaca

SEQ ID NO: 605989 - RNA, 19 nt, Artificial Sequence
  Description of Artificial Sequence: Synthetic oligonucleotide
ggaagccacuuggagcucu

SEQ ID NO: 605990 - RNA, 19 nt, Artificial Sequence
  Description of Artificial Sequence: Synthetic oligonucleotide
cgccaaugggagcagggca

SEQ ID NO: 605991 - RNA, 19 nt, Artificial Sequence
  Description of Artificial Sequence: Synthetic oligonucleotide
gcaugcuaagaaacuguau

SEQ ID NO: 605992 - RNA, 19 nt, Artificial Sequence
  Description of Artificial Sequence: Synthetic oligonucleotide
ccggccaggcaaaggagaa

SEQ ID NO: 605993 - RNA, 19 nt, Artificial Sequence
  Description of Artificial Sequence: Synthetic oligonucleotide
cuuagaucaccagguccuu

SEQ ID NO: 605994 - RNA, 19 nt, Artificial Sequence
  Description of Artificial Sequence: Synthetic oligonucleotide
ccagucacgcaugcgcaga

SEQ ID NO: 605995 - RNA, 19 nt, Artificial Sequence
  Description of Artificial Sequence: Synthetic oligonucleotide
gggcaauguacuugucguu

SEQ ID NO: 605996 - RNA, 19 nt, Artificial Sequence
  Description of Artificial Sequence: Synthetic oligonucleotide
ccucccggccaggcaaagg

SEQ ID NO: 605997 - RNA, 19 nt, Artificial Sequence
  Description of Artificial Sequence: Synthetic oligonucleotide
gugcggcaagcucgugcaa

SEQ ID NO: 605998 - RNA, 19 nt, Artificial Sequence
  Description of Artificial Sequence: Synthetic oligonucleotide
gagaauccugugagauguu

SEQ ID NO: 605999 - RNA, 19 nt, Artificial Sequence
  Description of Artificial Sequence: Synthetic oligonucleotide
gcagggguucucagcuauc

SEQ ID NO: 606000 - RNA, 19 nt, Artificial Sequence
  Description of Artificial Sequence: Synthetic oligonucleotide
cccaccgguaccccugucu

SEQ ID NO: 606001 - RNA, 19 nt, Artificial Sequence
  Description of Artificial Sequence: Synthetic oligonucleotide
gccaugccccagagucgag

SEQ ID NO: 606002 - RNA, 19 nt, Artificial Sequence
  Description of Artificial Sequence: Synthetic oligonucleotide
cacccaccgguaccccugu

SEQ ID NO: 606003 - RNA, 19 nt, Artificial Sequence
  Description of Artificial Sequence: Synthetic oligonucleotide
ggguuggcacccaccggua

SEQ ID NO: 606004 - RNA, 19 nt, Artificial Sequence
  Description of Artificial Sequence: Synthetic oligonucleotide
gccaauggacagggaagau

SEQ ID NO: 606005 - RNA, 19 nt, Artificial Sequence
  Description of Artificial Sequence: Synthetic oligonucleotide
ccugugagauccgaccauu

SEQ ID NO: 606006 - RNA, 19 nt, Artificial Sequence
  Description of Artificial Sequence: Synthetic oligonucleotide
ccgaaccaccaggggaaga

SEQ ID NO: 606007 - RNA, 19 nt, Artificial Sequence
  Description of Artificial Sequence: Synthetic oligonucleotide
cccucccggccaggcaaag

SEQ ID NO: 606008 - RNA, 19 nt, Artificial Sequence
  Description of Artificial Sequence: Synthetic oligonucleotide
ggcaggcggcagaacaguu

SEQ ID NO: 606009 - RNA, 19 nt, Artificial Sequence
  Description of Artificial Sequence: Synthetic oligonucleotide
gcacgcaguggggccagcu

SEQ ID NO: 606010 - RNA, 19 nt, Artificial Sequence
  Description of Artificial Sequence: Synthetic oligonucleotide
cgcaugcgcagagggaacu

SEQ ID NO: 606011 - RNA, 19 nt, Artificial Sequence
  Description of Artificial Sequence: Synthetic oligonucleotide
gcccucccggccaggcaaa

SEQ ID NO: 606012 - RNA, 19 nt, Artificial Sequence
  Description of Artificial Sequence: Synthetic oligonucleotide
uuuuccaucagauagaaug

SEQ ID NO: 606013 - RNA, 19 nt, Artificial Sequence
  Description of Artificial Sequence: Synthetic oligonucleotide
aaauucuggccccacaucc

SEQ ID NO: 606014 - RNA, 19 nt, Artificial Sequence
  Description of Artificial Sequence: Synthetic oligonucleotide
ugaauguucacgcaguggg

SEQ ID NO: 606015 - RNA, 19 nt, Artificial Sequence
  Description of Artificial Sequence: Synthetic oligonucleotide
ucaaauacagacuggaaag

SEQ ID NO: 606016 - RNA, 19 nt, Artificial Sequence
  Description of Artificial Sequence: Synthetic oligonucleotide
aaagauaaacaccugguca

SEQ ID NO: 606017 - RNA, 19 nt, Artificial Sequence
  Description of Artificial Sequence: Synthetic oligonucleotide
aaugcaguggcacacauca

SEQ ID NO: 606018 - RNA, 19 nt, Artificial Sequence
  Description of Artificial Sequence: Synthetic oligonucleotide
aaaagauaaacaccugguc

SEQ ID NO: 606019 - RNA, 19 nt, Artificial Sequence
  Description of Artificial Sequence: Synthetic oligonucleotide
guaguuuuccaucagauag

SEQ ID NO: 606020 - RNA, 19 nt, Artificial Sequence
  Description of Artificial Sequence: Synthetic oligonucleotide
uaaauuuuaacuccugaga

SEQ ID NO: 606021 - RNA, 19 nt, Artificial Sequence
  Description of Artificial Sequence: Synthetic oligonucleotide
ucagauagaaugcaguggc

SEQ ID NO: 606022 - RNA, 19 nt, Artificial Sequence
  Description of Artificial Sequence: Synthetic oligonucleotide
uucagugguagucugagag

SEQ ID NO: 606023 - RNA, 19 nt, Artificial Sequence
  Description of Artificial Sequence: Synthetic oligonucleotide
aguuccaagccccacauac

SEQ ID NO: 606024 - RNA, 19 nt, Artificial Sequence
  Description of Artificial Sequence: Synthetic oligonucleotide
gauccuaucaaagagaaca

SEQ ID NO: 606025 - RNA, 19 nt, Artificial Sequence
  Description of Artificial Sequence: Synthetic oligonucleotide
ugucaugaccuacagaacc

SEQ ID NO: 606026 - RNA, 19 nt, Artificial Sequence
  Description of Artificial Sequence: Synthetic oligonucleotide
gacagcaugacccaguccc

SEQ ID NO: 606027 - RNA, 19 nt, Artificial Sequence
  Description of Artificial Sequence: Synthetic oligonucleotide
uuacggagcugucagaagg

SEQ ID NO: 606028 - RNA, 19 nt, Artificial Sequence
  Description of Artificial Sequence: Synthetic oligonucleotide
uucgcaaacaaguaagcag

SEQ ID NO: 606029 - RNA, 19 nt, Artificial Sequence
  Description of Artificial Sequence: Synthetic oligonucleotide
aauacagacuggaaagccc

SEQ ID NO: 606030 - RNA, 19 nt, Artificial Sequence
  Description of Artificial Sequence: Synthetic oligonucleotide
aaaagguucacaucuacuu

SEQ ID NO: 606031 - RNA, 19 nt, Artificial Sequence
  Description of Artificial Sequence: Synthetic oligonucleotide
acaaguaagcagcuggugg

SEQ ID NO: 606032 - RNA, 19 nt, Artificial Sequence
  Description of Artificial Sequence: Synthetic oligonucleotide
cauagcaacgaucacagac

SEQ ID NO: 606033 - RNA, 19 nt, Artificial Sequence
  Description of Artificial Sequence: Synthetic oligonucleotide
cauuucgcaaacaaguaag

SEQ ID NO: 606034 - RNA, 19 nt, Artificial Sequence
  Description of Artificial Sequence: Synthetic oligonucleotide
aacgaucacagacucacug

SEQ ID NO: 606035 - RNA, 19 nt, Artificial Sequence
  Description of Artificial Sequence: Synthetic oligonucleotide
acuuagcuugaccaaagac

SEQ ID NO: 606036 - RNA, 19 nt, Artificial Sequence
  Description of Artificial Sequence: Synthetic oligonucleotide
aauuaaucucuuuacugau

SEQ ID NO: 606037 - RNA, 19 nt, Artificial Sequence
  Description of Artificial Sequence: Synthetic oligonucleotide
aaaauucuggccccacauc

SEQ ID NO: 606038 - RNA, 19 nt, Artificial Sequence
  Description of Artificial Sequence: Synthetic oligonucleotide
uuuccaucagauagaaugc

SEQ ID NO: 606039 - RNA, 19 nt, Artificial Sequence
  Description of Artificial Sequence: Synthetic oligonucleotide
uuuuauguccagacacugg

SEQ ID NO: 606040 - RNA, 19 nt, Artificial Sequence
  Description of Artificial Sequence: Synthetic oligonucleotide
ucugagucaucuuccaggg

SEQ ID NO: 606041 - RNA, 19 nt, Artificial Sequence
  Description of Artificial Sequence: Synthetic oligonucleotide
agaaaagguucacaucuac

SEQ ID NO: 606042 - RNA, 19 nt, Artificial Sequence
  Description of Artificial Sequence: Synthetic oligonucleotide
uacugauauaauuaaauuu

SEQ ID NO: 606043 - RNA, 19 nt, Artificial Sequence
  Description of Artificial Sequence: Synthetic oligonucleotide
ugggcuauuccuuugaggu

SEQ ID NO: 606044 - RNA, 19 nt, Artificial Sequence
  Description of Artificial Sequence: Synthetic oligonucleotide
aaaaccuuguauacuacag

SEQ ID NO: 606045 - RNA, 19 nt, Artificial Sequence
  Description of Artificial Sequence: Synthetic oligonucleotide
auuccuuugagguuggaca

SEQ ID NO: 606046 - RNA, 19 nt, Artificial Sequence
  Description of Artificial Sequence: Synthetic oligonucleotide
ugcggauccuaucaaagag

SEQ ID NO: 606047 - RNA, 19 nt, Artificial Sequence
  Description of Artificial Sequence: Synthetic oligonucleotide
uccacacuuagcuugacca

SEQ ID NO: 606048 - RNA, 19 nt, Artificial Sequence
  Description of Artificial Sequence: Synthetic oligonucleotide
acagauacccgcuccauag

SEQ ID NO: 606049 - RNA, 19 nt, Artificial Sequence
  Description of Artificial Sequence: Synthetic oligonucleotide
agugcaaagcacuccugcc

SEQ ID NO: 606050 - RNA, 19 nt, Artificial Sequence
  Description of Artificial Sequence: Synthetic oligonucleotide
aaauagaugcuggacaccu

SEQ ID NO: 606051 - RNA, 19 nt, Artificial Sequence
  Description of Artificial Sequence: Synthetic oligonucleotide
ugaccuuguggacauuucg

SEQ ID NO: 606052 - RNA, 19 nt, Artificial Sequence
  Description of Artificial Sequence: Synthetic oligonucleotide
ucuuuacugauauaauuaa

SEQ ID NO: 606053 - RNA, 19 nt, Artificial Sequence
  Description of Artificial Sequence: Synthetic oligonucleotide
auaccacucauuuuauguc

SEQ ID NO: 606054 - RNA, 19 nt, Artificial Sequence
  Description of Artificial Sequence: Synthetic oligonucleotide
acuaacaacuggaaugagc

SEQ ID NO: 606055 - RNA, 19 nt, Artificial Sequence
  Description of Artificial Sequence: Synthetic oligonucleotide
gguagaugcacugacaagg

SEQ ID NO: 606056 - RNA, 19 nt, Artificial Sequence
  Description of Artificial Sequence: Synthetic oligonucleotide
acuacaguggccaugaacu

SEQ ID NO: 606057 - RNA, 19 nt, Artificial Sequence
  Description of Artificial Sequence: Synthetic oligonucleotide
uguucagugaugaugucau

SEQ ID NO: 606058 - RNA, 19 nt, Artificial Sequence
  Description of Artificial Sequence: Synthetic oligonucleotide
cuggcuaugaauguucacg

SEQ ID NO: 606059 - RNA, 19 nt, Artificial Sequence
  Description of Artificial Sequence: Synthetic oligonucleotide
gguacuacucagcaggugg

SEQ ID NO: 606060 - RNA, 19 nt, Artificial Sequence
  Description of Artificial Sequence: Synthetic oligonucleotide
uggacauuucgcaaacaag

SEQ ID NO: 606061 - RNA, 19 nt, Artificial Sequence
  Description of Artificial Sequence: Synthetic oligonucleotide
acaaguggaagccugcaug

SEQ ID NO: 606062 - RNA, 19 nt, Artificial Sequence
  Description of Artificial Sequence: Synthetic oligonucleotide
uauacuacaguggccauga

SEQ ID NO: 606063 - RNA, 19 nt, Artificial Sequence
  Description of Artificial Sequence: Synthetic oligonucleotide
cucuguaucuaaccgagag

SEQ ID NO: 606064 - RNA, 19 nt, Artificial Sequence
  Description of Artificial Sequence: Synthetic oligonucleotide
gacaucuugaggugggaag

SEQ ID NO: 606065 - RNA, 19 nt, Artificial Sequence
  Description of Artificial Sequence: Synthetic oligonucleotide
cuuugugugaaguuggaca

SEQ ID NO: 606066 - RNA, 19 nt, Artificial Sequence
  Description of Artificial Sequence: Synthetic oligonucleotide
caauuuacggagcugucag

SEQ ID NO: 606067 - RNA, 19 nt, Artificial Sequence
  Description of Artificial Sequence: Synthetic oligonucleotide
ugguguggcagguaaaccc

SEQ ID NO: 606068 - RNA, 19 nt, Artificial Sequence
  Description of Artificial Sequence: Synthetic oligonucleotide
aacggcacugaacuggcug

SEQ ID NO: 606069 - RNA, 19 nt, Artificial Sequence
  Description of Artificial Sequence: Synthetic oligonucleotide
acucuguccacacuuagcu

SEQ ID NO: 606070 - RNA, 19 nt, Artificial Sequence
  Description of Artificial Sequence: Synthetic oligonucleotide
uaccacucauuuuaugucc

SEQ ID NO: 606071 - RNA, 19 nt, Artificial Sequence
  Description of Artificial Sequence: Synthetic oligonucleotide
cacuccaacacguagagga

SEQ ID NO: 606072 - RNA, 19 nt, Artificial Sequence
  Description of Artificial Sequence: Synthetic oligonucleotide
aucuaaccgagagagcugc

SEQ ID NO: 606073 - RNA, 19 nt, Artificial Sequence
  Description of Artificial Sequence: Synthetic oligonucleotide
uuccuuugagguuggacag

SEQ ID NO: 606074 - RNA, 19 nt, Artificial Sequence
  Description of Artificial Sequence: Synthetic oligonucleotide
uggaugacugcccagcacu

SEQ ID NO: 606075 - RNA, 19 nt, Artificial Sequence
  Description of Artificial Sequence: Synthetic oligonucleotide
uagugcauauuccugcaca

SEQ ID NO: 606076 - RNA, 19 nt, Artificial Sequence
  Description of Artificial Sequence: Synthetic oligonucleotide
ucuacuugcuccaguuugc

SEQ ID NO: 606077 - RNA, 19 nt, Artificial Sequence
  Description of Artificial Sequence: Synthetic oligonucleotide
caucagauagaaugcagug

SEQ ID NO: 606078 - RNA, 19 nt, Artificial Sequence
  Description of Artificial Sequence: Synthetic oligonucleotide
uggcuaugaauguucacgc

SEQ ID NO: 606079 - RNA, 19 nt, Artificial Sequence
  Description of Artificial Sequence: Synthetic oligonucleotide
caggagacgcuccagaccc

SEQ ID NO: 606080 - RNA, 19 nt, Artificial Sequence
  Description of Artificial Sequence: Synthetic oligonucleotide
accugacacaaguggaagc

SEQ ID NO: 606081 - RNA, 19 nt, Artificial Sequence
  Description of Artificial Sequence: Synthetic oligonucleotide
cagauagucacuaacaacu

SEQ ID NO: 606082 - RNA, 19 nt, Artificial Sequence
  Description of Artificial Sequence: Synthetic oligonucleotide
ucuguaucuaaccgagaga

SEQ ID NO: 606083 - RNA, 19 nt, Artificial Sequence
  Description of Artificial Sequence: Synthetic oligonucleotide
uuccaagccccacauacca

SEQ ID NO: 606084 - RNA, 19 nt, Artificial Sequence
  Description of Artificial Sequence: Synthetic oligonucleotide
cuugcggauccuaucaaag

SEQ ID NO: 606085 - RNA, 19 nt, Artificial Sequence
  Description of Artificial Sequence: Synthetic oligonucleotide
ugacaaauccacagagucu

SEQ ID NO: 606086 - RNA, 19 nt, Artificial Sequence
  Description of Artificial Sequence: Synthetic oligonucleotide
aauguucacgcagugggcu

SEQ ID NO: 606087 - RNA, 19 nt, Artificial Sequence
  Description of Artificial Sequence: Synthetic oligonucleotide
cuaacaacuggaaugagcu

SEQ ID NO: 606088 - RNA, 19 nt, Artificial Sequence
  Description of Artificial Sequence: Synthetic oligonucleotide
gacucuguaucuaaccgag

SEQ ID NO: 606089 - RNA, 19 nt, Artificial Sequence
  Description of Artificial Sequence: Synthetic oligonucleotide
ggaaggaucgcugaaaccc

SEQ ID NO: 606090 - RNA, 19 nt, Artificial Sequence
  Description of Artificial Sequence: Synthetic oligonucleotide
uucuccuaagagcacuuug

SEQ ID NO: 606091 - RNA, 19 nt, Artificial Sequence
  Description of Artificial Sequence: Synthetic oligonucleotide
uaguuuuccaucagauaga

SEQ ID NO: 606092 - RNA, 19 nt, Artificial Sequence
  Description of Artificial Sequence: Synthetic oligonucleotide
uggagacacccgaagaagc

SEQ ID NO: 606093 - RNA, 19 nt, Artificial Sequence
  Description of Artificial Sequence: Synthetic oligonucleotide
cuuguauacuacaguggcc

SEQ ID NO: 606094 - RNA, 19 nt, Artificial Sequence
  Description of Artificial Sequence: Synthetic oligonucleotide
ugacaucugaccuggacuc

SEQ ID NO: 606095 - RNA, 19 nt, Artificial Sequence
  Description of Artificial Sequence: Synthetic oligonucleotide
ucacacuccaacacguaga

SEQ ID NO: 606096 - RNA, 19 nt, Artificial Sequence
  Description of Artificial Sequence: Synthetic oligonucleotide
ugacacaaguggaagccug

SEQ ID NO: 606097 - RNA, 19 nt, Artificial Sequence
  Description of Artificial Sequence: Synthetic oligonucleotide
uggacagaaacucuccaau

SEQ ID NO: 606098 - RNA, 19 nt, Artificial Sequence
  Description of Artificial Sequence: Synthetic oligonucleotide
cauccaagaggucacacuc

SEQ ID NO: 606099 - RNA, 19 nt, Artificial Sequence
  Description of Artificial Sequence: Synthetic oligonucleotide
caucuaggaacugaggcag

SEQ ID NO: 606100 - RNA, 19 nt, Artificial Sequence
  Description of Artificial Sequence: Synthetic oligonucleotide
uaaccgagagagcugcuca

SEQ ID NO: 606101 - RNA, 19 nt, Artificial Sequence
  Description of Artificial Sequence: Synthetic oligonucleotide
ucaugacaucuugaggugg

SEQ ID NO: 606102 - RNA, 19 nt, Artificial Sequence
  Description of Artificial Sequence: Synthetic oligonucleotide
aagcagcgagcucuccacc

SEQ ID NO: 606103 - RNA, 19 nt, Artificial Sequence
  Description of Artificial Sequence: Synthetic oligonucleotide
ggcugcacaauuuacggag

SEQ ID NO: 606104 - RNA, 19 nt, Artificial Sequence
  Description of Artificial Sequence: Synthetic oligonucleotide
uggucaaccuagcacugcc

SEQ ID NO: 606105 - RNA, 19 nt, Artificial Sequence
  Description of Artificial Sequence: Synthetic oligonucleotide
gaagugugugcugggaccg

SEQ ID NO: 606106 - RNA, 19 nt, Artificial Sequence
  Description of Artificial Sequence: Synthetic oligonucleotide
augacauguggaaggaucg

SEQ ID NO: 606107 - RNA, 19 nt, Artificial Sequence
  Description of Artificial Sequence: Synthetic oligonucleotide
gcuaugaauguucacgcag

SEQ ID NO: 606108 - RNA, 19 nt, Artificial Sequence
  Description of Artificial Sequence: Synthetic oligonucleotide
ucuguggcaaccaggcaga

SEQ ID NO: 606109 - RNA, 19 nt, Artificial Sequence
  Description of Artificial Sequence: Synthetic oligonucleotide
uuucgcaaacaaguaagca

SEQ ID NO: 606110 - RNA, 19 nt, Artificial Sequence
  Description of Artificial Sequence: Synthetic oligonucleotide
uaucuaaccgagagagcug

SEQ ID NO: 606111 - RNA, 19 nt, Artificial Sequence
  Description of Artificial Sequence: Synthetic oligonucleotide
gaaaucaucuaggaacuga

SEQ ID NO: 606112 - RNA, 19 nt, Artificial Sequence
  Description of Artificial Sequence: Synthetic oligonucleotide
acauuucgcaaacaaguaa

SEQ ID NO: 606113 - RNA, 19 nt, Artificial Sequence
  Description of Artificial Sequence: Synthetic oligonucleotide
uguaucuaaccgagagagc

SEQ ID NO: 606114 - RNA, 19 nt, Artificial Sequence
  Description of Artificial Sequence: Synthetic oligonucleotide
aauuuacggagcugucaga

SEQ ID NO: 606115 - RNA, 19 nt, Artificial Sequence
  Description of Artificial Sequence: Synthetic oligonucleotide
gaaacccaugggcugguag

SEQ ID NO: 606116 - RNA, 19 nt, Artificial Sequence
  Description of Artificial Sequence: Synthetic oligonucleotide
agagaacagauacccgcuc

SEQ ID NO: 606117 - RNA, 19 nt, Artificial Sequence
  Description of Artificial Sequence: Synthetic oligonucleotide
gguaaggacuuccuggugc

SEQ ID NO: 606118 - RNA, 19 nt, Artificial Sequence
  Description of Artificial Sequence: Synthetic oligonucleotide
gauaacaggagacgcucca

SEQ ID NO: 606119 - RNA, 19 nt, Artificial Sequence
  Description of Artificial Sequence: Synthetic oligonucleotide
uuuacggagcugucagaag

SEQ ID NO: 606120 - RNA, 19 nt, Artificial Sequence
  Description of Artificial Sequence: Synthetic oligonucleotide
uaacaggagacgcuccaga

SEQ ID NO: 606121 - RNA, 19 nt, Artificial Sequence
  Description of Artificial Sequence: Synthetic oligonucleotide
agcagauagucacuaacaa

SEQ ID NO: 606122 - RNA, 19 nt, Artificial Sequence
  Description of Artificial Sequence: Synthetic oligonucleotide
agguaaacccguccugggg

SEQ ID NO: 606123 - RNA, 19 nt, Artificial Sequence
  Description of Artificial Sequence: Synthetic oligonucleotide
ugcugaaaauucuggcccc

SEQ ID NO: 606124 - RNA, 19 nt, Artificial Sequence
  Description of Artificial Sequence: Synthetic oligonucleotide
uugagguuggacagcagau

SEQ ID NO: 606125 - RNA, 19 nt, Artificial Sequence
  Description of Artificial Sequence: Synthetic oligonucleotide
uggguaugguugcugguug

SEQ ID NO: 606126 - RNA, 19 nt, Artificial Sequence
  Description of Artificial Sequence: Synthetic oligonucleotide
aguggagacacccgaagaa

SEQ ID NO: 606127 - RNA, 19 nt, Artificial Sequence
  Description of Artificial Sequence: Synthetic oligonucleotide
acggcacugaacuggcugg

SEQ ID NO: 606128 - RNA, 19 nt, Artificial Sequence
  Description of Artificial Sequence: Synthetic oligonucleotide
ucggugugggcuuuguaca

SEQ ID NO: 606129 - RNA, 19 nt, Artificial Sequence
  Description of Artificial Sequence: Synthetic oligonucleotide
agacucuguaucuaaccga

SEQ ID NO: 606130 - RNA, 19 nt, Artificial Sequence
  Description of Artificial Sequence: Synthetic oligonucleotide
aaacaaguaagcagcuggu

SEQ ID NO: 606131 - RNA, 19 nt, Artificial Sequence
  Description of Artificial Sequence: Synthetic oligonucleotide
gaagcagcgagcucuccac

SEQ ID NO: 606132 - RNA, 19 nt, Artificial Sequence
  Description of Artificial Sequence: Synthetic oligonucleotide
aacuggaaugagcugcuuu

SEQ ID NO: 606133 - RNA, 19 nt, Artificial Sequence
  Description of Artificial Sequence: Synthetic oligonucleotide
auggaugacugcccagcac

SEQ ID NO: 606134 - RNA, 19 nt, Artificial Sequence
  Description of Artificial Sequence: Synthetic oligonucleotide
caaagacucuguaucuaac

SEQ ID NO: 606135 - RNA, 19 nt, Artificial Sequence
  Description of Artificial Sequence: Synthetic oligonucleotide
ugguagaugcacugacaag

SEQ ID NO: 606136 - RNA, 19 nt, Artificial Sequence
  Description of Artificial Sequence: Synthetic oligonucleotide
ggaaugagcugcuuugcag

SEQ ID NO: 606137 - RNA, 19 nt, Artificial Sequence
  Description of Artificial Sequence: Synthetic oligonucleotide
cauaccacucauuuuaugu

SEQ ID NO: 606138 - RNA, 19 nt, Artificial Sequence
  Description of Artificial Sequence: Synthetic oligonucleotide
uccaaugacuuuguucaug

SEQ ID NO: 606139 - RNA, 19 nt, Artificial Sequence
  Description of Artificial Sequence: Synthetic oligonucleotide
cacacuccaacacguagag

SEQ ID NO: 606140 - RNA, 19 nt, Artificial Sequence
  Description of Artificial Sequence: Synthetic oligonucleotide
agauacccgcuccauagca

SEQ ID NO: 606141 - RNA, 19 nt, Artificial Sequence
  Description of Artificial Sequence: Synthetic oligonucleotide
accuacagaaccaggagug

SEQ ID NO: 606142 - RNA, 19 nt, Artificial Sequence
  Description of Artificial Sequence: Synthetic oligonucleotide
ugcaaagcacuccugccau

SEQ ID NO: 606143 - RNA, 19 nt, Artificial Sequence
  Description of Artificial Sequence: Synthetic oligonucleotide
ggaucgcugaaacccaugg

SEQ ID NO: 606144 - RNA, 19 nt, Artificial Sequence
  Description of Artificial Sequence: Synthetic oligonucleotide
cuguggguaugguugcugg

SEQ ID NO: 606145 - RNA, 19 nt, Artificial Sequence
  Description of Artificial Sequence: Synthetic oligonucleotide
agauaacaggagacgcucc

SEQ ID NO: 606146 - RNA, 19 nt, Artificial Sequence
  Description of Artificial Sequence: Synthetic oligonucleotide
agacacccgaagaagcagc

SEQ ID NO: 606147 - RNA, 19 nt, Artificial Sequence
  Description of Artificial Sequence: Synthetic oligonucleotide
gugggcuauuccuuugagg

SEQ ID NO: 606148 - RNA, 19 nt, Artificial Sequence
  Description of Artificial Sequence: Synthetic oligonucleotide
ucaaccuagcacugccacc

SEQ ID NO: 606149 - RNA, 19 nt, Artificial Sequence
  Description of Artificial Sequence: Synthetic oligonucleotide
uugcggauccuaucaaaga

SEQ ID NO: 606150 - RNA, 19 nt, Artificial Sequence
  Description of Artificial Sequence: Synthetic oligonucleotide
cuggucaagucacagccug

SEQ ID NO: 606151 - RNA, 19 nt, Artificial Sequence
  Description of Artificial Sequence: Synthetic oligonucleotide
acauccagaggguaguuuu

SEQ ID NO: 606152 - RNA, 19 nt, Artificial Sequence
  Description of Artificial Sequence: Synthetic oligonucleotide
agggcuccgaucuggcugg

SEQ ID NO: 606153 - RNA, 19 nt, Artificial Sequence
  Description of Artificial Sequence: Synthetic oligonucleotide
guaucuaaccgagagagcu

SEQ ID NO: 606154 - RNA, 19 nt, Artificial Sequence
  Description of Artificial Sequence: Synthetic oligonucleotide
cacagggaaaccccuugcg

SEQ ID NO: 606155 - RNA, 19 nt, Artificial Sequence
  Description of Artificial Sequence: Synthetic oligonucleotide
augacccagucccugacca

SEQ ID NO: 606156 - RNA, 19 nt, Artificial Sequence
  Description of Artificial Sequence: Synthetic oligonucleotide
uagcaacgaucacagacuc

SEQ ID NO: 606157 - RNA, 19 nt, Artificial Sequence
  Description of Artificial Sequence: Synthetic oligonucleotide
acaauuuacggagcuguca

SEQ ID NO: 606158 - RNA, 19 nt, Artificial Sequence
  Description of Artificial Sequence: Synthetic oligonucleotide
acgaucacagacucacugu

SEQ ID NO: 606159 - RNA, 19 nt, Artificial Sequence
  Description of Artificial Sequence: Synthetic oligonucleotide
ccaacauagugcauauucc

SEQ ID NO: 606160 - RNA, 19 nt, Artificial Sequence
  Description of Artificial Sequence: Synthetic oligonucleotide
auuuacggagcugucagaa

SEQ ID NO: 606161 - RNA, 19 nt, Artificial Sequence
  Description of Artificial Sequence: Synthetic oligonucleotide
guagaagucuguggcaacc

SEQ ID NO: 606162 - RNA, 19 nt, Artificial Sequence
  Description of Artificial Sequence: Synthetic oligonucleotide
acauaccacucauuuuaug

SEQ ID NO: 606163 - RNA, 19 nt, Artificial Sequence
  Description of Artificial Sequence: Synthetic oligonucleotide
uccuagaggcucuggcucc

SEQ ID NO: 606164 - RNA, 19 nt, Artificial Sequence
  Description of Artificial Sequence: Synthetic oligonucleotide
uggcagguaaacccguccu

SEQ ID NO: 606165 - RNA, 19 nt, Artificial Sequence
  Description of Artificial Sequence: Synthetic oligonucleotide
guggaaggaucgcugaaac

SEQ ID NO: 606166 - RNA, 19 nt, Artificial Sequence
  Description of Artificial Sequence: Synthetic oligonucleotide
cacauaccagggcagcugc

SEQ ID NO: 606167 - RNA, 19 nt, Artificial Sequence
  Description of Artificial Sequence: Synthetic oligonucleotide
gucacagcugaaucaggcc

SEQ ID NO: 606168 - RNA, 19 nt, Artificial Sequence
  Description of Artificial Sequence: Synthetic oligonucleotide
uccuaucaaagagaacaga

SEQ ID NO: 606169 - RNA, 19 nt, Artificial Sequence
  Description of Artificial Sequence: Synthetic oligonucleotide
cauauuccugcacagccca

SEQ ID NO: 606170 - RNA, 19 nt, Artificial Sequence
  Description of Artificial Sequence: Synthetic oligonucleotide
uuccaucagauagaaugca

SEQ ID NO: 606171 - RNA, 19 nt, Artificial Sequence
  Description of Artificial Sequence: Synthetic oligonucleotide
cccaacauagugcauauuc

SEQ ID NO: 606172 - RNA, 19 nt, Artificial Sequence
  Description of Artificial Sequence: Synthetic oligonucleotide
cagaggguaguuuuccauc

SEQ ID NO: 606173 - RNA, 19 nt, Artificial Sequence
  Description of Artificial Sequence: Synthetic oligonucleotide
cugauauaauuaaauuuua

SEQ ID NO: 606174 - RNA, 19 nt, Artificial Sequence
  Description of Artificial Sequence: Synthetic oligonucleotide
gacacccgaagaagcagcg

SEQ ID NO: 606175 - RNA, 19 nt, Artificial Sequence
  Description of Artificial Sequence: Synthetic oligonucleotide
gguggcugcacaauuuacg

SEQ ID NO: 606176 - RNA, 19 nt, Artificial Sequence
  Description of Artificial Sequence: Synthetic oligonucleotide
agugggcuauuccuuugag

SEQ ID NO: 606177 - RNA, 19 nt, Artificial Sequence
  Description of Artificial Sequence: Synthetic oligonucleotide
uacccgcuccauagcaacg

SEQ ID NO: 606178 - RNA, 19 nt, Artificial Sequence
  Description of Artificial Sequence: Synthetic oligonucleotide
cagauaacaggagacgcuc

SEQ ID NO: 606179 - RNA, 19 nt, Artificial Sequence
  Description of Artificial Sequence: Synthetic oligonucleotide
ucacgcagugggcuauucc

SEQ ID NO: 606180 - RNA, 19 nt, Artificial Sequence
  Description of Artificial Sequence: Synthetic oligonucleotide
aggcuguucagugaugaug

SEQ ID NO: 606181 - RNA, 19 nt, Artificial Sequence
  Description of Artificial Sequence: Synthetic oligonucleotide
gucaaccuagcacugccac

SEQ ID NO: 606182 - RNA, 19 nt, Artificial Sequence
  Description of Artificial Sequence: Synthetic oligonucleotide
cacucuguccacacuuagc

SEQ ID NO: 606183 - RNA, 19 nt, Artificial Sequence
  Description of Artificial Sequence: Synthetic oligonucleotide
gagacacccgaagaagcag

SEQ ID NO: 606184 - RNA, 19 nt, Artificial Sequence
  Description of Artificial Sequence: Synthetic oligonucleotide
uccgaucuggcuggggagg

SEQ ID NO: 606185 - RNA, 19 nt, Artificial Sequence
  Description of Artificial Sequence: Synthetic oligonucleotide
cagguaaacccguccuggg

SEQ ID NO: 606186 - RNA, 19 nt, Artificial Sequence
  Description of Artificial Sequence: Synthetic oligonucleotide
uguggaaggaucgcugaaa

SEQ ID NO: 606187 - RNA, 19 nt, Artificial Sequence
  Description of Artificial Sequence: Synthetic oligonucleotide
agaggaugccaugcagggc

SEQ ID NO: 606188 - RNA, 19 nt, Artificial Sequence
  Description of Artificial Sequence: Synthetic oligonucleotide
ugaugaugucaugaccuac

SEQ ID NO: 606189 - RNA, 19 nt, Artificial Sequence
  Description of Artificial Sequence: Synthetic oligonucleotide
ucuuugugugaaguuggac

SEQ ID NO: 606190 - RNA, 19 nt, Artificial Sequence
  Description of Artificial Sequence: Synthetic oligonucleotide
gaauguucacgcagugggc

SEQ ID NO: 606191 - RNA, 19 nt, Artificial Sequence
  Description of Artificial Sequence: Synthetic oligonucleotide
cucauuuuauguccagaca

SEQ ID NO: 606192 - RNA, 19 nt, Artificial Sequence
  Description of Artificial Sequence: Synthetic oligonucleotide
cagcagauagucacuaaca

SEQ ID NO: 606193 - RNA, 19 nt, Artificial Sequence
  Description of Artificial Sequence: Synthetic oligonucleotide
auccuaucaaagagaacag

SEQ ID NO: 606194 - RNA, 19 nt, Artificial Sequence
  Description of Artificial Sequence: Synthetic oligonucleotide
aucuggcaagagcuaggac

SEQ ID NO: 606195 - RNA, 19 nt, Artificial Sequence
  Description of Artificial Sequence: Synthetic oligonucleotide
cuacucagcagguggugac

SEQ ID NO: 606196 - RNA, 19 nt, Artificial Sequence
  Description of Artificial Sequence: Synthetic oligonucleotide
uccucuaucuggugucugu

SEQ ID NO: 606197 - RNA, 19 nt, Artificial Sequence
  Description of Artificial Sequence: Synthetic oligonucleotide
gucgaauuccuccucuauc

SEQ ID NO: 606198 - RNA, 19 nt, Artificial Sequence
  Description of Artificial Sequence: Synthetic oligonucleotide
ucuugugccacagguacua

SEQ ID NO: 606199 - RNA, 19 nt, Artificial Sequence
  Description of Artificial Sequence: Synthetic oligonucleotide
gaaucaggccuucaguggu

SEQ ID NO: 606200 - RNA, 19 nt, Artificial Sequence
  Description of Artificial Sequence: Synthetic oligonucleotide
ugcacaauuuacggagcug

SEQ ID NO: 606201 - RNA, 19 nt, Artificial Sequence
  Description of Artificial Sequence: Synthetic oligonucleotide
aauagaugcuggacaccug

SEQ ID NO: 606202 - RNA, 19 nt, Artificial Sequence
  Description of Artificial Sequence: Synthetic oligonucleotide
cauagugcauauuccugca

SEQ ID NO: 606203 - RNA, 19 nt, Artificial Sequence
  Description of Artificial Sequence: Synthetic oligonucleotide
gcagauagucacuaacaac

SEQ ID NO: 606204 - RNA, 19 nt, Artificial Sequence
  Description of Artificial Sequence: Synthetic oligonucleotide
guuggacagaaacucucca

SEQ ID NO: 606205 - RNA, 19 nt, Artificial Sequence
  Description of Artificial Sequence: Synthetic oligonucleotide
uacagacuggaaagcccug

SEQ ID NO: 606206 - RNA, 19 nt, Artificial Sequence
  Description of Artificial Sequence: Synthetic oligonucleotide
aaagcccugcggucgaauu

SEQ ID NO: 606207 - RNA, 19 nt, Artificial Sequence
  Description of Artificial Sequence: Synthetic oligonucleotide
cuagggcugccauggcucg

SEQ ID NO: 606208 - RNA, 19 nt, Artificial Sequence
  Description of Artificial Sequence: Synthetic oligonucleotide
gguguggcagguaaacccg

SEQ ID NO: 606209 - RNA, 19 nt, Artificial Sequence
  Description of Artificial Sequence: Synthetic oligonucleotide
agaaugcaguggcacacau

SEQ ID NO: 606210 - RNA, 19 nt, Artificial Sequence
  Description of Artificial Sequence: Synthetic oligonucleotide
agccugacaaauccacaga

SEQ ID NO: 606211 - RNA, 19 nt, Artificial Sequence
  Description of Artificial Sequence: Synthetic oligonucleotide
cagggaaaccccuugcgga

SEQ ID NO: 606212 - RNA, 19 nt, Artificial Sequence
  Description of Artificial Sequence: Synthetic oligonucleotide
gguuggacagcagauaguc

SEQ ID NO: 606213 - RNA, 19 nt, Artificial Sequence
  Description of Artificial Sequence: Synthetic oligonucleotide
cagggcuccgaucuggcug

SEQ ID NO: 606214 - RNA, 19 nt, Artificial Sequence
  Description of Artificial Sequence: Synthetic oligonucleotide
gcucagauaacaggagacg

SEQ ID NO: 606215 - RNA, 19 nt, Artificial Sequence
  Description of Artificial Sequence: Synthetic oligonucleotide
guauacuacaguggccaug

SEQ ID NO: 606216 - RNA, 19 nt, Artificial Sequence
  Description of Artificial Sequence: Synthetic oligonucleotide
guggcagguaaacccgucc

SEQ ID NO: 606217 - RNA, 19 nt, Artificial Sequence
  Description of Artificial Sequence: Synthetic oligonucleotide
caacauagugcauauuccu

SEQ ID NO: 606218 - RNA, 19 nt, Artificial Sequence
  Description of Artificial Sequence: Synthetic oligonucleotide
gguaaacccguccugggga

SEQ ID NO: 606219 - RNA, 19 nt, Artificial Sequence
  Description of Artificial Sequence: Synthetic oligonucleotide
cuccauagcaacgaucaca

SEQ ID NO: 606220 - RNA, 19 nt, Artificial Sequence
  Description of Artificial Sequence: Synthetic oligonucleotide
accgaggcuguucagugau

SEQ ID NO: 606221 - RNA, 19 nt, Artificial Sequence
  Description of Artificial Sequence: Synthetic oligonucleotide
caaccuagcacugccacca

SEQ ID NO: 606222 - RNA, 19 nt, Artificial Sequence
  Description of Artificial Sequence: Synthetic oligonucleotide
gugcugcuggcuaugaaug

SEQ ID NO: 606223 - RNA, 19 nt, Artificial Sequence
  Description of Artificial Sequence: Synthetic oligonucleotide
ggacauuucgcaaacaagu

SEQ ID NO: 606224 - RNA, 19 nt, Artificial Sequence
  Description of Artificial Sequence: Synthetic oligonucleotide
aaccuagcacugccaccag

SEQ ID NO: 606225 - RNA, 19 nt, Artificial Sequence
  Description of Artificial Sequence: Synthetic oligonucleotide
agcagcgagcucuccacca

SEQ ID NO: 606226 - RNA, 19 nt, Artificial Sequence
  Description of Artificial Sequence: Synthetic oligonucleotide
gacauuucgcaaacaagua

SEQ ID NO: 606227 - RNA, 19 nt, Artificial Sequence
  Description of Artificial Sequence: Synthetic oligonucleotide
uggccaugaacugugggua

SEQ ID NO: 606228 - RNA, 19 nt, Artificial Sequence
  Description of Artificial Sequence: Synthetic oligonucleotide
gaaggaucgcugaaaccca

SEQ ID NO: 606229 - RNA, 19 nt, Artificial Sequence
  Description of Artificial Sequence: Synthetic oligonucleotide
cacaauuuacggagcuguc

SEQ ID NO: 606230 - RNA, 19 nt, Artificial Sequence
  Description of Artificial Sequence: Synthetic oligonucleotide
aagccccacauaccacuca

SEQ ID NO: 606231 - RNA, 19 nt, Artificial Sequence
  Description of Artificial Sequence: Synthetic oligonucleotide
gaccccggagggcacagug

SEQ ID NO: 606232 - RNA, 19 nt, Artificial Sequence
  Description of Artificial Sequence: Synthetic oligonucleotide
caugacccagucccugacc

SEQ ID NO: 606233 - RNA, 19 nt, Artificial Sequence
  Description of Artificial Sequence: Synthetic oligonucleotide
gaaaagguucacaucuacu

SEQ ID NO: 606234 - RNA, 19 nt, Artificial Sequence
  Description of Artificial Sequence: Synthetic oligonucleotide
cuaugaauguucacgcagu

SEQ ID NO: 606235 - RNA, 19 nt, Artificial Sequence
  Description of Artificial Sequence: Synthetic oligonucleotide
ccugacacaaguggaagcc

SEQ ID NO: 606236 - RNA, 19 nt, Artificial Sequence
  Description of Artificial Sequence: Synthetic oligonucleotide
agggaaaccccuugcggau

SEQ ID NO: 606237 - RNA, 19 nt, Artificial Sequence
  Description of Artificial Sequence: Synthetic oligonucleotide
uccaagccccacauaccac

SEQ ID NO: 606238 - RNA, 19 nt, Artificial Sequence
  Description of Artificial Sequence: Synthetic oligonucleotide
gacgcuccagaccccggag

SEQ ID NO: 606239 - RNA, 19 nt, Artificial Sequence
  Description of Artificial Sequence: Synthetic oligonucleotide
cuggcaaccuuggccaggg

SEQ ID NO: 606240 - RNA, 19 nt, Artificial Sequence
  Description of Artificial Sequence: Synthetic oligonucleotide
uguggcagguaaacccguc

SEQ ID NO: 606241 - RNA, 19 nt, Artificial Sequence
  Description of Artificial Sequence: Synthetic oligonucleotide
accccuugcggauccuauc

SEQ ID NO: 606242 - RNA, 19 nt, Artificial Sequence
  Description of Artificial Sequence: Synthetic oligonucleotide
acuacucagcaggugguga

SEQ ID NO: 606243 - RNA, 19 nt, Artificial Sequence
  Description of Artificial Sequence: Synthetic oligonucleotide
acguagaggaugccaugca

SEQ ID NO: 606244 - RNA, 19 nt, Artificial Sequence
  Description of Artificial Sequence: Synthetic oligonucleotide
uacucagcagguggugacc

SEQ ID NO: 606245 - RNA, 19 nt, Artificial Sequence
  Description of Artificial Sequence: Synthetic oligonucleotide
uccuguguacaugcaggug

SEQ ID NO: 606246 - RNA, 19 nt, Artificial Sequence
  Description of Artificial Sequence: Synthetic oligonucleotide
cagauacccgcuccauagc

SEQ ID NO: 606247 - RNA, 19 nt, Artificial Sequence
  Description of Artificial Sequence: Synthetic oligonucleotide
cauugccuggcuguccacc

SEQ ID NO: 606248 - RNA, 19 nt, Artificial Sequence
  Description of Artificial Sequence: Synthetic oligonucleotide
agguccauggcagggucag

SEQ ID NO: 606249 - RNA, 19 nt, Artificial Sequence
  Description of Artificial Sequence: Synthetic oligonucleotide
cuccgaucuggcuggggag

SEQ ID NO: 606250 - RNA, 19 nt, Artificial Sequence
  Description of Artificial Sequence: Synthetic oligonucleotide
ucuaaccgagagagcugcu

SEQ ID NO: 606251 - RNA, 19 nt, Artificial Sequence
  Description of Artificial Sequence: Synthetic oligonucleotide
guuccaagccccacauacc

SEQ ID NO: 606252 - RNA, 19 nt, Artificial Sequence
  Description of Artificial Sequence: Synthetic oligonucleotide
cuaaccgagagagcugcuc

SEQ ID NO: 606253 - RNA, 19 nt, Artificial Sequence
  Description of Artificial Sequence: Synthetic oligonucleotide
cugcucagauaacaggaga

SEQ ID NO: 606254 - RNA, 19 nt, Artificial Sequence
  Description of Artificial Sequence: Synthetic oligonucleotide
cacaucaccagcacgugcu

SEQ ID NO: 606255 - RNA, 19 nt, Artificial Sequence
  Description of Artificial Sequence: Synthetic oligonucleotide
cugacaucugaccuggacu

SEQ ID NO: 606256 - RNA, 19 nt, Artificial Sequence
  Description of Artificial Sequence: Synthetic oligonucleotide
ucacaucuacuugcuccag

SEQ ID NO: 606257 - RNA, 19 nt, Artificial Sequence
  Description of Artificial Sequence: Synthetic oligonucleotide
uguggacauuucgcaaaca

SEQ ID NO: 606258 - RNA, 19 nt, Artificial Sequence
  Description of Artificial Sequence: Synthetic oligonucleotide
cagaaacucuccaaugacu

SEQ ID NO: 606259 - RNA, 19 nt, Artificial Sequence
  Description of Artificial Sequence: Synthetic oligonucleotide
ggaaaccccuugcggaucc

SEQ ID NO: 606260 - RNA, 19 nt, Artificial Sequence
  Description of Artificial Sequence: Synthetic oligonucleotide
ggguaugguugcugguugg

SEQ ID NO: 606261 - RNA, 19 nt, Artificial Sequence
  Description of Artificial Sequence: Synthetic oligonucleotide
gcucaaccccaacauagug

SEQ ID NO: 606262 - RNA, 19 nt, Artificial Sequence
  Description of Artificial Sequence: Synthetic oligonucleotide
ccaccuggcaaccuuggcc

SEQ ID NO: 606263 - RNA, 19 nt, Artificial Sequence
  Description of Artificial Sequence: Synthetic oligonucleotide
cuagcacugccaccagaug

SEQ ID NO: 606264 - RNA, 19 nt, Artificial Sequence
  Description of Artificial Sequence: Synthetic oligonucleotide
aucaggccuucagugguag

SEQ ID NO: 606265 - RNA, 19 nt, Artificial Sequence
  Description of Artificial Sequence: Synthetic oligonucleotide
cugguguggcagguaaacc

SEQ ID NO: 606266 - RNA, 19 nt, Artificial Sequence
  Description of Artificial Sequence: Synthetic oligonucleotide
aguugccuccucucagccu

SEQ ID NO: 606267 - RNA, 19 nt, Artificial Sequence
  Description of Artificial Sequence: Synthetic oligonucleotide
guaaggacuuccuggugcu

SEQ ID NO: 606268 - RNA, 19 nt, Artificial Sequence
  Description of Artificial Sequence: Synthetic oligonucleotide
agacgcuccagaccccgga

SEQ ID NO: 606269 - RNA, 19 nt, Artificial Sequence
  Description of Artificial Sequence: Synthetic oligonucleotide
guaugguugcugguuggac

SEQ ID NO: 606270 - RNA, 19 nt, Artificial Sequence
  Description of Artificial Sequence: Synthetic oligonucleotide
caguggcacacaucaccag

SEQ ID NO: 606271 - RNA, 19 nt, Artificial Sequence
  Description of Artificial Sequence: Synthetic oligonucleotide
cagacagcaucacuccaca

SEQ ID NO: 606272 - RNA, 19 nt, Artificial Sequence
  Description of Artificial Sequence: Synthetic oligonucleotide
gacucacugucagguguag

SEQ ID NO: 606273 - RNA, 19 nt, Artificial Sequence
  Description of Artificial Sequence: Synthetic oligonucleotide
auauuccugcacagcccac

SEQ ID NO: 606274 - RNA, 19 nt, Artificial Sequence
  Description of Artificial Sequence: Synthetic oligonucleotide
acacuccaacacguagagg

SEQ ID NO: 606275 - RNA, 19 nt, Artificial Sequence
  Description of Artificial Sequence: Synthetic oligonucleotide
acggagcugucagaaggag

SEQ ID NO: 606276 - RNA, 19 nt, Artificial Sequence
  Description of Artificial Sequence: Synthetic oligonucleotide
agaugcagcgaggccaggu

SEQ ID NO: 606277 - RNA, 19 nt, Artificial Sequence
  Description of Artificial Sequence: Synthetic oligonucleotide
uccuggggaaagugugggu

SEQ ID NO: 606278 - RNA, 19 nt, Artificial Sequence
  Description of Artificial Sequence: Synthetic oligonucleotide
uguucacgcagugggcuau

SEQ ID NO: 606279 - RNA, 19 nt, Artificial Sequence
  Description of Artificial Sequence: Synthetic oligonucleotide
ugcggucgaauuccuccuc

SEQ ID NO: 606280 - RNA, 19 nt, Artificial Sequence
  Description of Artificial Sequence: Synthetic oligonucleotide
acacaaguggaagccugca

SEQ ID NO: 606281 - RNA, 19 nt, Artificial Sequence
  Description of Artificial Sequence: Synthetic oligonucleotide
ggacaagagggcucagaac

SEQ ID NO: 606282 - RNA, 19 nt, Artificial Sequence
  Description of Artificial Sequence: Synthetic oligonucleotide
caccagaugcagcgaggcc

SEQ ID NO: 606283 - RNA, 19 nt, Artificial Sequence
  Description of Artificial Sequence: Synthetic oligonucleotide
cacagugcaaagcacuccu

SEQ ID NO: 606284 - RNA, 19 nt, Artificial Sequence
  Description of Artificial Sequence: Synthetic oligonucleotide
aaggaucgcugaaacccau

SEQ ID NO: 606285 - RNA, 19 nt, Artificial Sequence
  Description of Artificial Sequence: Synthetic oligonucleotide
guaaacccguccuggggaa

SEQ ID NO: 606286 - RNA, 19 nt, Artificial Sequence
  Description of Artificial Sequence: Synthetic oligonucleotide
cacgcagugggcuauuccu

SEQ ID NO: 606287 - RNA, 19 nt, Artificial Sequence
  Description of Artificial Sequence: Synthetic oligonucleotide
agguucacaucuacuugcu

SEQ ID NO: 606288 - RNA, 19 nt, Artificial Sequence
  Description of Artificial Sequence: Synthetic oligonucleotide
caacacguagaggaugcca

SEQ ID NO: 606289 - RNA, 19 nt, Artificial Sequence
  Description of Artificial Sequence: Synthetic oligonucleotide
gauacccgcuccauagcaa

SEQ ID NO: 606290 - RNA, 19 nt, Artificial Sequence
  Description of Artificial Sequence: Synthetic oligonucleotide
gggcucagaaccaucuggc

SEQ ID NO: 606291 - RNA, 19 nt, Artificial Sequence
  Description of Artificial Sequence: Synthetic oligonucleotide
accuagcacugccaccaga

SEQ ID NO: 606292 - RNA, 19 nt, Artificial Sequence
  Description of Artificial Sequence: Synthetic oligonucleotide
gcugcucagauaacaggag

SEQ ID NO: 606293 - RNA, 19 nt, Artificial Sequence
  Description of Artificial Sequence: Synthetic oligonucleotide
cacacuuagcuugaccaaa

SEQ ID NO: 606294 - RNA, 19 nt, Artificial Sequence
  Description of Artificial Sequence: Synthetic oligonucleotide
ggcaaccuuggccagggga

SEQ ID NO: 606295 - RNA, 19 nt, Artificial Sequence
  Description of Artificial Sequence: Synthetic oligonucleotide
auguucacgcagugggcua

SEQ ID NO: 606296 - RNA, 19 nt, Artificial Sequence
  Description of Artificial Sequence: Synthetic oligonucleotide
caucuggcaagagcuagga

SEQ ID NO: 606297 - RNA, 19 nt, Artificial Sequence
  Description of Artificial Sequence: Synthetic oligonucleotide
ggagacgcuccagaccccg

SEQ ID NO: 606298 - RNA, 19 nt, Artificial Sequence
  Description of Artificial Sequence: Synthetic oligonucleotide
cacucauuuuauguccaga

SEQ ID NO: 606299 - RNA, 19 nt, Artificial Sequence
  Description of Artificial Sequence: Synthetic oligonucleotide
agggucagauggaacggca

SEQ ID NO: 606300 - RNA, 19 nt, Artificial Sequence
  Description of Artificial Sequence: Synthetic oligonucleotide
acuggucaagucacagccu

SEQ ID NO: 606301 - RNA, 19 nt, Artificial Sequence
  Description of Artificial Sequence: Synthetic oligonucleotide
ugccauugccuggcugucc

SEQ ID NO: 606302 - RNA, 19 nt, Artificial Sequence
  Description of Artificial Sequence: Synthetic oligonucleotide
ccuggggaaagugugggug

SEQ ID NO: 606303 - RNA, 19 nt, Artificial Sequence
  Description of Artificial Sequence: Synthetic oligonucleotide
ugggaccgaggcuguucag

SEQ ID NO: 606304 - RNA, 19 nt, Artificial Sequence
  Description of Artificial Sequence: Synthetic oligonucleotide
aggcggagcugcugacauc

SEQ ID NO: 606305 - RNA, 19 nt, Artificial Sequence
  Description of Artificial Sequence: Synthetic oligonucleotide
aaccccuugcggauccuau

SEQ ID NO: 606306 - RNA, 19 nt, Artificial Sequence
  Description of Artificial Sequence: Synthetic oligonucleotide
cugggaccgaggcuguuca

SEQ ID NO: 606307 - RNA, 19 nt, Artificial Sequence
  Description of Artificial Sequence: Synthetic oligonucleotide
cagugguagucugagagcu

SEQ ID NO: 606308 - RNA, 19 nt, Artificial Sequence
  Description of Artificial Sequence: Synthetic oligonucleotide
gcuguggcucaagaugucc

SEQ ID NO: 606309 - RNA, 19 nt, Artificial Sequence
  Description of Artificial Sequence: Synthetic oligonucleotide
aagugugugcugggaccga

SEQ ID NO: 606310 - RNA, 19 nt, Artificial Sequence
  Description of Artificial Sequence: Synthetic oligonucleotide
caaccaggcagaaaagguu

SEQ ID NO: 606311 - RNA, 19 nt, Artificial Sequence
  Description of Artificial Sequence: Synthetic oligonucleotide
agcuguggcucaagauguc

SEQ ID NO: 606312 - RNA, 19 nt, Artificial Sequence
  Description of Artificial Sequence: Synthetic oligonucleotide
ggagacacccgaagaagca

SEQ ID NO: 606313 - RNA, 19 nt, Artificial Sequence
  Description of Artificial Sequence: Synthetic oligonucleotide
aggagacgcuccagacccc

SEQ ID NO: 606314 - RNA, 19 nt, Artificial Sequence
  Description of Artificial Sequence: Synthetic oligonucleotide
agguuggacagcagauagu

SEQ ID NO: 606315 - RNA, 19 nt, Artificial Sequence
  Description of Artificial Sequence: Synthetic oligonucleotide
gcuccgaucuggcugggga

SEQ ID NO: 606316 - RNA, 19 nt, Artificial Sequence
  Description of Artificial Sequence: Synthetic oligonucleotide
gcacaauuuacggagcugu

SEQ ID NO: 606317 - RNA, 19 nt, Artificial Sequence
  Description of Artificial Sequence: Synthetic oligonucleotide
ccguccuggggaaagugug

SEQ ID NO: 606318 - RNA, 19 nt, Artificial Sequence
  Description of Artificial Sequence: Synthetic oligonucleotide
aaaccccuugcggauccua

SEQ ID NO: 606319 - RNA, 19 nt, Artificial Sequence
  Description of Artificial Sequence: Synthetic oligonucleotide
aguuggacagggacagcau

SEQ ID NO: 606320 - RNA, 19 nt, Artificial Sequence
  Description of Artificial Sequence: Synthetic oligonucleotide
acuccaacacguagaggau

SEQ ID NO: 606321 - RNA, 19 nt, Artificial Sequence
  Description of Artificial Sequence: Synthetic oligonucleotide
cagugggcuauuccuuuga

SEQ ID NO: 606322 - RNA, 19 nt, Artificial Sequence
  Description of Artificial Sequence: Synthetic oligonucleotide
aggaucgcugaaacccaug

SEQ ID NO: 606323 - RNA, 19 nt, Artificial Sequence
  Description of Artificial Sequence: Synthetic oligonucleotide
cuugugccacagguacuac

SEQ ID NO: 606324 - RNA, 19 nt, Artificial Sequence
  Description of Artificial Sequence: Synthetic oligonucleotide
ccacucauuuuauguccag

SEQ ID NO: 606325 - RNA, 19 nt, Artificial Sequence
  Description of Artificial Sequence: Synthetic oligonucleotide
agcaacgaucacagacuca

SEQ ID NO: 606326 - RNA, 19 nt, Artificial Sequence
  Description of Artificial Sequence: Synthetic oligonucleotide
gugaccuuguggacauuuc

SEQ ID NO: 606327 - RNA, 19 nt, Artificial Sequence
  Description of Artificial Sequence: Synthetic oligonucleotide
ggcucagaaccaucuggca

SEQ ID NO: 606328 - RNA, 19 nt, Artificial Sequence
  Description of Artificial Sequence: Synthetic oligonucleotide
uucacgcagugggcuauuc

SEQ ID NO: 606329 - RNA, 19 nt, Artificial Sequence
  Description of Artificial Sequence: Synthetic oligonucleotide
aucacuccacacaucugua

SEQ ID NO: 606330 - RNA, 19 nt, Artificial Sequence
  Description of Artificial Sequence: Synthetic oligonucleotide
ugcugacaucugaccugga

SEQ ID NO: 606331 - RNA, 19 nt, Artificial Sequence
  Description of Artificial Sequence: Synthetic oligonucleotide
acucuguaucuaaccgaga

SEQ ID NO: 606332 - RNA, 19 nt, Artificial Sequence
  Description of Artificial Sequence: Synthetic oligonucleotide
cugcacaauuuacggagcu

SEQ ID NO: 606333 - RNA, 19 nt, Artificial Sequence
  Description of Artificial Sequence: Synthetic oligonucleotide
uguccacacuuagcuugac

SEQ ID NO: 606334 - RNA, 19 nt, Artificial Sequence
  Description of Artificial Sequence: Synthetic oligonucleotide
ccaucagauagaaugcagu

SEQ ID NO: 606335 - RNA, 19 nt, Artificial Sequence
  Description of Artificial Sequence: Synthetic oligonucleotide
gcggauccuaucaaagaga

SEQ ID NO: 606336 - RNA, 19 nt, Artificial Sequence
  Description of Artificial Sequence: Synthetic oligonucleotide
cuccucuaucuggugucug

SEQ ID NO: 606337 - RNA, 19 nt, Artificial Sequence
  Description of Artificial Sequence: Synthetic oligonucleotide
gguaugguugcugguugga

SEQ ID NO: 606338 - RNA, 19 nt, Artificial Sequence
  Description of Artificial Sequence: Synthetic oligonucleotide
caucuugaggugggaagaa

SEQ ID NO: 606339 - RNA, 19 nt, Artificial Sequence
  Description of Artificial Sequence: Synthetic oligonucleotide
aggaguggagacacccgaa

SEQ ID NO: 606340 - RNA, 19 nt, Artificial Sequence
  Description of Artificial Sequence: Synthetic oligonucleotide
gguguagcagggcuagggu

SEQ ID NO: 606341 - RNA, 19 nt, Artificial Sequence
  Description of Artificial Sequence: Synthetic oligonucleotide
ccacagugcaaagcacucc

SEQ ID NO: 606342 - RNA, 19 nt, Artificial Sequence
  Description of Artificial Sequence: Synthetic oligonucleotide
cacauaccacucauuuuau

SEQ ID NO: 606343 - RNA, 19 nt, Artificial Sequence
  Description of Artificial Sequence: Synthetic oligonucleotide
cggauccuaucaaagagaa

SEQ ID NO: 606344 - RNA, 19 nt, Artificial Sequence
  Description of Artificial Sequence: Synthetic oligonucleotide
gcugguagaugcacugaca

SEQ ID NO: 606345 - RNA, 19 nt, Artificial Sequence
  Description of Artificial Sequence: Synthetic oligonucleotide
ggauccuaucaaagagaac

SEQ ID NO: 606346 - RNA, 19 nt, Artificial Sequence
  Description of Artificial Sequence: Synthetic oligonucleotide
ccacauaccagggcagcug

SEQ ID NO: 606347 - RNA, 19 nt, Artificial Sequence
  Description of Artificial Sequence: Synthetic oligonucleotide
caucaggccuagggcugcc

SEQ ID NO: 606348 - RNA, 19 nt, Artificial Sequence
  Description of Artificial Sequence: Synthetic oligonucleotide
gggucagauggaacggcac

SEQ ID NO: 606349 - RNA, 19 nt, Artificial Sequence
  Description of Artificial Sequence: Synthetic oligonucleotide
ggguaguuuuccaucagau

SEQ ID NO: 606350 - RNA, 19 nt, Artificial Sequence
  Description of Artificial Sequence: Synthetic oligonucleotide
gcuccauagcaacgaucac

SEQ ID NO: 606351 - RNA, 19 nt, Artificial Sequence
  Description of Artificial Sequence: Synthetic oligonucleotide
cagguacuacucagcaggu

SEQ ID NO: 606352 - RNA, 19 nt, Artificial Sequence
  Description of Artificial Sequence: Synthetic oligonucleotide
cagaggcugcaaaggcgga

SEQ ID NO: 606353 - RNA, 19 nt, Artificial Sequence
  Description of Artificial Sequence: Synthetic oligonucleotide
ugaaacccaugggcuggua

SEQ ID NO: 606354 - RNA, 19 nt, Artificial Sequence
  Description of Artificial Sequence: Synthetic oligonucleotide
agcgagcucuccaccaauu

SEQ ID NO: 606355 - RNA, 19 nt, Artificial Sequence
  Description of Artificial Sequence: Synthetic oligonucleotide
caggcucaaccccaacaua

SEQ ID NO: 606356 - RNA, 19 nt, Artificial Sequence
  Description of Artificial Sequence: Synthetic oligonucleotide
cucuugugccacagguacu

SEQ ID NO: 606357 - RNA, 19 nt, Artificial Sequence
  Description of Artificial Sequence: Synthetic oligonucleotide
cugcggucgaauuccuccu

SEQ ID NO: 606358 - RNA, 19 nt, Artificial Sequence
  Description of Artificial Sequence: Synthetic oligonucleotide
cagaccccggagggcacag

SEQ ID NO: 606359 - RNA, 19 nt, Artificial Sequence
  Description of Artificial Sequence: Synthetic oligonucleotide
guugcugguuggacagaaa

SEQ ID NO: 606360 - RNA, 19 nt, Artificial Sequence
  Description of Artificial Sequence: Synthetic oligonucleotide
caucuguaucacagaugcu

SEQ ID NO: 606361 - RNA, 19 nt, Artificial Sequence
  Description of Artificial Sequence: Synthetic oligonucleotide
cagcacuggucaagucaca

SEQ ID NO: 606362 - RNA, 19 nt, Artificial Sequence
  Description of Artificial Sequence: Synthetic oligonucleotide
ggucaaccuagcacugcca

SEQ ID NO: 606363 - RNA, 19 nt, Artificial Sequence
  Description of Artificial Sequence: Synthetic oligonucleotide
cacaaguggaagccugcau

SEQ ID NO: 606364 - RNA, 19 nt, Artificial Sequence
  Description of Artificial Sequence: Synthetic oligonucleotide
ggucgaauuccuccucuau

SEQ ID NO: 606365 - RNA, 19 nt, Artificial Sequence
  Description of Artificial Sequence: Synthetic oligonucleotide
ccuagcacugccaccagau

SEQ ID NO: 606366 - RNA, 19 nt, Artificial Sequence
  Description of Artificial Sequence: Synthetic oligonucleotide
ccacacuuagcuugaccaa

SEQ ID NO: 606367 - RNA, 19 nt, Artificial Sequence
  Description of Artificial Sequence: Synthetic oligonucleotide
cagcuggugguaaggacuu

SEQ ID NO: 606368 - RNA, 19 nt, Artificial Sequence
  Description of Artificial Sequence: Synthetic oligonucleotide
ccgcuccauagcaacgauc

SEQ ID NO: 606369 - RNA, 19 nt, Artificial Sequence
  Description of Artificial Sequence: Synthetic oligonucleotide
gcagcgagcucuccaccaa

SEQ ID NO: 606370 - RNA, 19 nt, Artificial Sequence
  Description of Artificial Sequence: Synthetic oligonucleotide
gaaagcccugcggucgaau

SEQ ID NO: 606371 - RNA, 19 nt, Artificial Sequence
  Description of Artificial Sequence: Synthetic oligonucleotide
gcugggaccgaggcuguuc

SEQ ID NO: 606372 - RNA, 19 nt, Artificial Sequence
  Description of Artificial Sequence: Synthetic oligonucleotide
cuauuccuuugagguugga

SEQ ID NO: 606373 - RNA, 19 nt, Artificial Sequence
  Description of Artificial Sequence: Synthetic oligonucleotide
ggugagcaucaggccuagg

SEQ ID NO: 606374 - RNA, 19 nt, Artificial Sequence
  Description of Artificial Sequence: Synthetic oligonucleotide
uggcucggugugggcuuug

SEQ ID NO: 606375 - RNA, 19 nt, Artificial Sequence
  Description of Artificial Sequence: Synthetic oligonucleotide
guguggcagguaaacccgu

SEQ ID NO: 606376 - RNA, 19 nt, Artificial Sequence
  Description of Artificial Sequence: Synthetic oligonucleotide
ccgaggcuguucagugaug

SEQ ID NO: 606377 - RNA, 19 nt, Artificial Sequence
  Description of Artificial Sequence: Synthetic oligonucleotide
gcggucgaauuccuccucu

SEQ ID NO: 606378 - RNA, 19 nt, Artificial Sequence
  Description of Artificial Sequence: Synthetic oligonucleotide
ggcucaaccccaacauagu

SEQ ID NO: 606379 - RNA, 19 nt, Artificial Sequence
  Description of Artificial Sequence: Synthetic oligonucleotide
caguuccaagccccacaua

SEQ ID NO: 606380 - RNA, 19 nt, Artificial Sequence
  Description of Artificial Sequence: Synthetic oligonucleotide
ccccacauaccacucauuu

SEQ ID NO: 606381 - RNA, 19 nt, Artificial Sequence
  Description of Artificial Sequence: Synthetic oligonucleotide
gaacggcacugaacuggcu

SEQ ID NO: 606382 - RNA, 19 nt, Artificial Sequence
  Description of Artificial Sequence: Synthetic oligonucleotide
cgugcugcuggcuaugaau

SEQ ID NO: 606383 - RNA, 19 nt, Artificial Sequence
  Description of Artificial Sequence: Synthetic oligonucleotide
ggccaugaacuguggguau

SEQ ID NO: 606384 - RNA, 19 nt, Artificial Sequence
  Description of Artificial Sequence: Synthetic oligonucleotide
gguucugccuggacuggcu

SEQ ID NO: 606385 - RNA, 19 nt, Artificial Sequence
  Description of Artificial Sequence: Synthetic oligonucleotide
gaaaccccuugcggauccu

SEQ ID NO: 606386 - RNA, 19 nt, Artificial Sequence
  Description of Artificial Sequence: Synthetic oligonucleotide
ccaagaggucacacuccaa

SEQ ID NO: 606387 - RNA, 19 nt, Artificial Sequence
  Description of Artificial Sequence: Synthetic oligonucleotide
gggcacagugguaaaugau

SEQ ID NO: 606388 - RNA, 19 nt, Artificial Sequence
  Description of Artificial Sequence: Synthetic oligonucleotide
cccugcggucgaauuccuc

SEQ ID NO: 606389 - RNA, 19 nt, Artificial Sequence
  Description of Artificial Sequence: Synthetic oligonucleotide
gcgagcucuccaccaauuu

SEQ ID NO: 606390 - RNA, 19 nt, Artificial Sequence
  Description of Artificial Sequence: Synthetic oligonucleotide
ccuagaggcucuggcucca

SEQ ID NO: 606391 - RNA, 19 nt, Artificial Sequence
  Description of Artificial Sequence: Synthetic oligonucleotide
ccagcccagugggacaaga

SEQ ID NO: 606392 - RNA, 19 nt, Artificial Sequence
  Description of Artificial Sequence: Synthetic oligonucleotide
ccgagagagcugcucagau

SEQ ID NO: 606393 - RNA, 19 nt, Artificial Sequence
  Description of Artificial Sequence: Synthetic oligonucleotide
cccguccuggggaaagugu

SEQ ID NO: 606394 - RNA, 19 nt, Artificial Sequence
  Description of Artificial Sequence: Synthetic oligonucleotide
gguccauggcagggucaga

SEQ ID NO: 606395 - RNA, 19 nt, Artificial Sequence
  Description of Artificial Sequence: Synthetic oligonucleotide
ggaaagcccugcggucgaa

SEQ ID NO: 606396 - RNA, 19 nt, Artificial Sequence
  Description of Artificial Sequence: Synthetic oligonucleotide
guucacgcagugggcuauu

SEQ ID NO: 606397 - RNA, 19 nt, Artificial Sequence
  Description of Artificial Sequence: Synthetic oligonucleotide
ggcuagggucagagguucu

SEQ ID NO: 606398 - RNA, 19 nt, Artificial Sequence
  Description of Artificial Sequence: Synthetic oligonucleotide
cggucgaauuccuccucua

SEQ ID NO: 606399 - RNA, 19 nt, Artificial Sequence
  Description of Artificial Sequence: Synthetic oligonucleotide
ccagaccccggagggcaca

SEQ ID NO: 606400 - RNA, 19 nt, Artificial Sequence
  Description of Artificial Sequence: Synthetic oligonucleotide
cccgcuccauagcaacgau

SEQ ID NO: 606401 - RNA, 19 nt, Artificial Sequence
  Description of Artificial Sequence: Synthetic oligonucleotide
gcccugcggucgaauuccu

SEQ ID NO: 606402 - RNA, 19 nt, Artificial Sequence
  Description of Artificial Sequence: Synthetic oligonucleotide
ccccaacauagugcauauu

SEQ ID NO: 606403 - RNA, 19 nt, Artificial Sequence
  Description of Artificial Sequence: Synthetic oligonucleotide
aagaccuagaacuuacucc

SEQ ID NO: 606404 - RNA, 19 nt, Artificial Sequence
  Description of Artificial Sequence: Synthetic oligonucleotide
aaaucuuuauaggacaugc

SEQ ID NO: 606405 - RNA, 19 nt, Artificial Sequence
  Description of Artificial Sequence: Synthetic oligonucleotide
aaccuuuugaaccagcaac

SEQ ID NO: 606406 - RNA, 19 nt, Artificial Sequence
  Description of Artificial Sequence: Synthetic oligonucleotide
aauaaauagcuuuuggcug

SEQ ID NO: 606407 - RNA, 19 nt, Artificial Sequence
  Description of Artificial Sequence: Synthetic oligonucleotide
uacauaugaaagcugaggg

SEQ ID NO: 606408 - RNA, 19 nt, Artificial Sequence
  Description of Artificial Sequence: Synthetic oligonucleotide
aaaauuagaaggcacccag

SEQ ID NO: 606409 - RNA, 19 nt, Artificial Sequence
  Description of Artificial Sequence: Synthetic oligonucleotide
uuugucacagugaaggugg

SEQ ID NO: 606410 - RNA, 19 nt, Artificial Sequence
  Description of Artificial Sequence: Synthetic oligonucleotide
aguauagagaacuagcaag

SEQ ID NO: 606411 - RNA, 19 nt, Artificial Sequence
  Description of Artificial Sequence: Synthetic oligonucleotide
aagugcgaugcauagaagg

SEQ ID NO: 606412 - RNA, 19 nt, Artificial Sequence
  Description of Artificial Sequence: Synthetic oligonucleotide
cuuguauuaguccaaaggc

SEQ ID NO: 606413 - RNA, 19 nt, Artificial Sequence
  Description of Artificial Sequence: Synthetic oligonucleotide
agauauagaauaucuuuac

SEQ ID NO: 606414 - RNA, 19 nt, Artificial Sequence
  Description of Artificial Sequence: Synthetic oligonucleotide
aagaauugggaaugcuucc

SEQ ID NO: 606415 - RNA, 19 nt, Artificial Sequence
  Description of Artificial Sequence: Synthetic oligonucleotide
auuggguuaauguugauca

SEQ ID NO: 606416 - RNA, 19 nt, Artificial Sequence
  Description of Artificial Sequence: Synthetic oligonucleotide
aauaagacauuacugguau

SEQ ID NO: 606417 - RNA, 19 nt, Artificial Sequence
  Description of Artificial Sequence: Synthetic oligonucleotide
caaguaguacauaugaaag

SEQ ID NO: 606418 - RNA, 19 nt, Artificial Sequence
  Description of Artificial Sequence: Synthetic oligonucleotide
aaugucaagaugaauaaga

SEQ ID NO: 606419 - RNA, 19 nt, Artificial Sequence
  Description of Artificial Sequence: Synthetic oligonucleotide
ucuuuauaggacaugcagc

SEQ ID NO: 606420 - RNA, 19 nt, Artificial Sequence
  Description of Artificial Sequence: Synthetic oligonucleotide
uaucuuagccaauaaaaca

SEQ ID NO: 606421 - RNA, 19 nt, Artificial Sequence
  Description of Artificial Sequence: Synthetic oligonucleotide
guagguagcagguucauag

SEQ ID NO: 606422 - RNA, 19 nt, Artificial Sequence
  Description of Artificial Sequence: Synthetic oligonucleotide
agaacuagcaagcagaguu

SEQ ID NO: 606423 - RNA, 19 nt, Artificial Sequence
  Description of Artificial Sequence: Synthetic oligonucleotide
aauaaaacaaugguccaca

SEQ ID NO: 606424 - RNA, 19 nt, Artificial Sequence
  Description of Artificial Sequence: Synthetic oligonucleotide
cauacaaaagaaaggguag

SEQ ID NO: 606425 - RNA, 19 nt, Artificial Sequence
  Description of Artificial Sequence: Synthetic oligonucleotide
agagaaagaugcuacauga

SEQ ID NO: 606426 - RNA, 19 nt, Artificial Sequence
  Description of Artificial Sequence: Synthetic oligonucleotide
acuauuccaagugcgaugc

SEQ ID NO: 606427 - RNA, 19 nt, Artificial Sequence
  Description of Artificial Sequence: Synthetic oligonucleotide
uguauuaguccaaaggcuc

SEQ ID NO: 606428 - RNA, 19 nt, Artificial Sequence
  Description of Artificial Sequence: Synthetic oligonucleotide
agguuugucauagagaaag

SEQ ID NO: 606429 - RNA, 19 nt, Artificial Sequence
  Description of Artificial Sequence: Synthetic oligonucleotide
ugaguuagagccuauugga

SEQ ID NO: 606430 - RNA, 19 nt, Artificial Sequence
  Description of Artificial Sequence: Synthetic oligonucleotide
uuacagacuauuccaagug

SEQ ID NO: 606431 - RNA, 19 nt, Artificial Sequence
  Description of Artificial Sequence: Synthetic oligonucleotide
aaauaacagguuaaaaugu

SEQ ID NO: 606432 - RNA, 19 nt, Artificial Sequence
  Description of Artificial Sequence: Synthetic oligonucleotide
ugcaguauaguacauuuuc

SEQ ID NO: 606433 - RNA, 19 nt, Artificial Sequence
  Description of Artificial Sequence: Synthetic oligonucleotide
auuacugguaucaugauga

SEQ ID NO: 606434 - RNA, 19 nt, Artificial Sequence
  Description of Artificial Sequence: Synthetic oligonucleotide
uaucaguaagcauauaaaa

SEQ ID NO: 606435 - RNA, 19 nt, Artificial Sequence
  Description of Artificial Sequence: Synthetic oligonucleotide
acaaguaguacauaugaaa

SEQ ID NO: 606436 - RNA, 19 nt, Artificial Sequence
  Description of Artificial Sequence: Synthetic oligonucleotide
agagaugucccucggaguc

SEQ ID NO: 606437 - RNA, 19 nt, Artificial Sequence
  Description of Artificial Sequence: Synthetic oligonucleotide
cauaaugaaaguugaugag

SEQ ID NO: 606438 - RNA, 19 nt, Artificial Sequence
  Description of Artificial Sequence: Synthetic oligonucleotide
aacgguguagagauguccc

SEQ ID NO: 606439 - RNA, 19 nt, Artificial Sequence
  Description of Artificial Sequence: Synthetic oligonucleotide
aaagugaugcuuguauuag

SEQ ID NO: 606440 - RNA, 19 nt, Artificial Sequence
  Description of Artificial Sequence: Synthetic oligonucleotide
uuguauuaguccaaaggcu

SEQ ID NO: 606441 - RNA, 19 nt, Artificial Sequence
  Description of Artificial Sequence: Synthetic oligonucleotide
ucucgguauagauauaaca

SEQ ID NO: 606442 - RNA, 19 nt, Artificial Sequence
  Description of Artificial Sequence: Synthetic oligonucleotide
ugauauuaaggucuccaac

SEQ ID NO: 606443 - RNA, 19 nt, Artificial Sequence
  Description of Artificial Sequence: Synthetic oligonucleotide
cacgucaucguugagaugc

SEQ ID NO: 606444 - RNA, 19 nt, Artificial Sequence
  Description of Artificial Sequence: Synthetic oligonucleotide
auaaauagcuuuuggcugu

SEQ ID NO: 606445 - RNA, 19 nt, Artificial Sequence
  Description of Artificial Sequence: Synthetic oligonucleotide
auacaaaagaaaggguagc

SEQ ID NO: 606446 - RNA, 19 nt, Artificial Sequence
  Description of Artificial Sequence: Synthetic oligonucleotide
gagucuacguauuugcccc

SEQ ID NO: 606447 - RNA, 19 nt, Artificial Sequence
  Description of Artificial Sequence: Synthetic oligonucleotide
uagagaaagaugcuacaug

SEQ ID NO: 606448 - RNA, 19 nt, Artificial Sequence
  Description of Artificial Sequence: Synthetic oligonucleotide
agaaccauuucccaaguga

SEQ ID NO: 606449 - RNA, 19 nt, Artificial Sequence
  Description of Artificial Sequence: Synthetic oligonucleotide
gauauuaaggucuccaacu

SEQ ID NO: 606450 - RNA, 19 nt, Artificial Sequence
  Description of Artificial Sequence: Synthetic oligonucleotide
gaugaguuagagccuauug

SEQ ID NO: 606451 - RNA, 19 nt, Artificial Sequence
  Description of Artificial Sequence: Synthetic oligonucleotide
augaaaguugaugaguuag

SEQ ID NO: 606452 - RNA, 19 nt, Artificial Sequence
  Description of Artificial Sequence: Synthetic oligonucleotide
cuuuauaggacaugcagca

SEQ ID NO: 606453 - RNA, 19 nt, Artificial Sequence
  Description of Artificial Sequence: Synthetic oligonucleotide
auuacagacuauuccaagu

SEQ ID NO: 606454 - RNA, 19 nt, Artificial Sequence
  Description of Artificial Sequence: Synthetic oligonucleotide
aaaugccccagaugagcgc

SEQ ID NO: 606455 - RNA, 19 nt, Artificial Sequence
  Description of Artificial Sequence: Synthetic oligonucleotide
aauaaaagcccaccuggaa

SEQ ID NO: 606456 - RNA, 19 nt, Artificial Sequence
  Description of Artificial Sequence: Synthetic oligonucleotide
ucuaggaagaacagacaug

SEQ ID NO: 606457 - RNA, 19 nt, Artificial Sequence
  Description of Artificial Sequence: Synthetic oligonucleotide
uaagcauauaaaauuucau

SEQ ID NO: 606458 - RNA, 19 nt, Artificial Sequence
  Description of Artificial Sequence: Synthetic oligonucleotide
agauggaauaaacacggcu

SEQ ID NO: 606459 - RNA, 19 nt, Artificial Sequence
  Description of Artificial Sequence: Synthetic oligonucleotide
aagaugaauaagacauuac

SEQ ID NO: 606460 - RNA, 19 nt, Artificial Sequence
  Description of Artificial Sequence: Synthetic oligonucleotide
gacauuacugguaucauga

SEQ ID NO: 606461 - RNA, 19 nt, Artificial Sequence
  Description of Artificial Sequence: Synthetic oligonucleotide
acugacuuacaugagacug

SEQ ID NO: 606462 - RNA, 19 nt, Artificial Sequence
  Description of Artificial Sequence: Synthetic oligonucleotide
uaacagucaaacugugucc

SEQ ID NO: 606463 - RNA, 19 nt, Artificial Sequence
  Description of Artificial Sequence: Synthetic oligonucleotide
cauuugucugcuuuaaauc

SEQ ID NO: 606464 - RNA, 19 nt, Artificial Sequence
  Description of Artificial Sequence: Synthetic oligonucleotide
uuauaggacaugcagcaua

SEQ ID NO: 606465 - RNA, 19 nt, Artificial Sequence
  Description of Artificial Sequence: Synthetic oligonucleotide
uacagacuauuccaagugc

SEQ ID NO: 606466 - RNA, 19 nt, Artificial Sequence
  Description of Artificial Sequence: Synthetic oligonucleotide
accuagaacuuacuccagc

SEQ ID NO: 606467 - RNA, 19 nt, Artificial Sequence
  Description of Artificial Sequence: Synthetic oligonucleotide
ugguucugcaaucacgucu

SEQ ID NO: 606468 - RNA, 19 nt, Artificial Sequence
  Description of Artificial Sequence: Synthetic oligonucleotide
gauagugaucgcuauuuca

SEQ ID NO: 606469 - RNA, 19 nt, Artificial Sequence
  Description of Artificial Sequence: Synthetic oligonucleotide
ugcacuggaucucaaucag

SEQ ID NO: 606470 - RNA, 19 nt, Artificial Sequence
  Description of Artificial Sequence: Synthetic oligonucleotide
acagguuaaaaugucaaga

SEQ ID NO: 606471 - RNA, 19 nt, Artificial Sequence
  Description of Artificial Sequence: Synthetic oligonucleotide
uuuuaggaaagcugcuggc

SEQ ID NO: 606472 - RNA, 19 nt, Artificial Sequence
  Description of Artificial Sequence: Synthetic oligonucleotide
uuacaugagacugagcauc

SEQ ID NO: 606473 - RNA, 19 nt, Artificial Sequence
  Description of Artificial Sequence: Synthetic oligonucleotide
uuuaacagucaaacugugu

SEQ ID NO: 606474 - RNA, 19 nt, Artificial Sequence
  Description of Artificial Sequence: Synthetic oligonucleotide
aaacugagagaggaaauga

SEQ ID NO: 606475 - RNA, 19 nt, Artificial Sequence
  Description of Artificial Sequence: Synthetic oligonucleotide
uauaggacaugcagcauaa

SEQ ID NO: 606476 - RNA, 19 nt, Artificial Sequence
  Description of Artificial Sequence: Synthetic oligonucleotide
guauagagaacuagcaagc

SEQ ID NO: 606477 - RNA, 19 nt, Artificial Sequence
  Description of Artificial Sequence: Synthetic oligonucleotide
auuagaaggcacccagguc

SEQ ID NO: 606478 - RNA, 19 nt, Artificial Sequence
  Description of Artificial Sequence: Synthetic oligonucleotide
agaugcuacaugacaaagc

SEQ ID NO: 606479 - RNA, 19 nt, Artificial Sequence
  Description of Artificial Sequence: Synthetic oligonucleotide
aucuaggaagaacagacau

SEQ ID NO: 606480 - RNA, 19 nt, Artificial Sequence
  Description of Artificial Sequence: Synthetic oligonucleotide
uuuuguuauuguccccucc

SEQ ID NO: 606481 - RNA, 19 nt, Artificial Sequence
  Description of Artificial Sequence: Synthetic oligonucleotide
auguuuguaucuuagccaa

SEQ ID NO: 606482 - RNA, 19 nt, Artificial Sequence
  Description of Artificial Sequence: Synthetic oligonucleotide
gaugauauuaaggucucca

SEQ ID NO: 606483 - RNA, 19 nt, Artificial Sequence
  Description of Artificial Sequence: Synthetic oligonucleotide
augagcgccauagggaugc

SEQ ID NO: 606484 - RNA, 19 nt, Artificial Sequence
  Description of Artificial Sequence: Synthetic oligonucleotide
cacauucaaucacugagag

SEQ ID NO: 606485 - RNA, 19 nt, Artificial Sequence
  Description of Artificial Sequence: Synthetic oligonucleotide
auuaccucaagcuuuuguu

SEQ ID NO: 606486 - RNA, 19 nt, Artificial Sequence
  Description of Artificial Sequence: Synthetic oligonucleotide
agccaauaaaacaaugguc

SEQ ID NO: 606487 - RNA, 19 nt, Artificial Sequence
  Description of Artificial Sequence: Synthetic oligonucleotide
aacuagcaagcagaguuuc

SEQ ID NO: 606488 - RNA, 19 nt, Artificial Sequence
  Description of Artificial Sequence: Synthetic oligonucleotide
acggauauugcugaauauc

SEQ ID NO: 606489 - RNA, 19 nt, Artificial Sequence
  Description of Artificial Sequence: Synthetic oligonucleotide
aguaagcauauaaaauuuc

SEQ ID NO: 606490 - RNA, 19 nt, Artificial Sequence
  Description of Artificial Sequence: Synthetic oligonucleotide
ucggagucuacguauuugc

SEQ ID NO: 606491 - RNA, 19 nt, Artificial Sequence
  Description of Artificial Sequence: Synthetic oligonucleotide
aacagucaaacugugucca

SEQ ID NO: 606492 - RNA, 19 nt, Artificial Sequence
  Description of Artificial Sequence: Synthetic oligonucleotide
accaagacaaaccauucau

SEQ ID NO: 606493 - RNA, 19 nt, Artificial Sequence
  Description of Artificial Sequence: Synthetic oligonucleotide
uucaacagguucuguaugu

SEQ ID NO: 606494 - RNA, 19 nt, Artificial Sequence
  Description of Artificial Sequence: Synthetic oligonucleotide
cagcauuacagacuauucc

SEQ ID NO: 606495 - RNA, 19 nt, Artificial Sequence
  Description of Artificial Sequence: Synthetic oligonucleotide
agugaucgcuauuucaaca

SEQ ID NO: 606496 - RNA, 19 nt, Artificial Sequence
  Description of Artificial Sequence: Synthetic oligonucleotide
aaccaguauagagaacuag

SEQ ID NO: 606497 - RNA, 19 nt, Artificial Sequence
  Description of Artificial Sequence: Synthetic oligonucleotide
aacaauauguuuguaucuu

SEQ ID NO: 606498 - RNA, 19 nt, Artificial Sequence
  Description of Artificial Sequence: Synthetic oligonucleotide
uugagacggauauugcuga

SEQ ID NO: 606499 - RNA, 19 nt, Artificial Sequence
  Description of Artificial Sequence: Synthetic oligonucleotide
acagacuauuccaagugcg

SEQ ID NO: 606500 - RNA, 19 nt, Artificial Sequence
  Description of Artificial Sequence: Synthetic oligonucleotide
acauaugaaagcugaggga

SEQ ID NO: 606501 - RNA, 19 nt, Artificial Sequence
  Description of Artificial Sequence: Synthetic oligonucleotide
agcgguaaaaccaauauuu

SEQ ID NO: 606502 - RNA, 19 nt, Artificial Sequence
  Description of Artificial Sequence: Synthetic oligonucleotide
uuguaucuuagccaauaaa

SEQ ID NO: 606503 - RNA, 19 nt, Artificial Sequence
  Description of Artificial Sequence: Synthetic oligonucleotide
caaugguccacauacaaaa

SEQ ID NO: 606504 - RNA, 19 nt, Artificial Sequence
  Description of Artificial Sequence: Synthetic oligonucleotide
ugaauugcagaaccauuuc

SEQ ID NO: 606505 - RNA, 19 nt, Artificial Sequence
  Description of Artificial Sequence: Synthetic oligonucleotide
gacuauuccaagugcgaug

SEQ ID NO: 606506 - RNA, 19 nt, Artificial Sequence
  Description of Artificial Sequence: Synthetic oligonucleotide
uaugaaagcugagggaaca

SEQ ID NO: 606507 - RNA, 19 nt, Artificial Sequence
  Description of Artificial Sequence: Synthetic oligonucleotide
gaugcaugguacaacugcc

SEQ ID NO: 606508 - RNA, 19 nt, Artificial Sequence
  Description of Artificial Sequence: Synthetic oligonucleotide
aaggugguaaagcuggcuu

SEQ ID NO: 606509 - RNA, 19 nt, Artificial Sequence
  Description of Artificial Sequence: Synthetic oligonucleotide
uaaaagcccaccuggaauu

SEQ ID NO: 606510 - RNA, 19 nt, Artificial Sequence
  Description of Artificial Sequence: Synthetic oligonucleotide
ucagguauacaggugaaau

SEQ ID NO: 606511 - RNA, 19 nt, Artificial Sequence
  Description of Artificial Sequence: Synthetic oligonucleotide
guaagcauauaaaauuuca

SEQ ID NO: 606512 - RNA, 19 nt, Artificial Sequence
  Description of Artificial Sequence: Synthetic oligonucleotide
caagacaaaccauucauaa

SEQ ID NO: 606513 - RNA, 19 nt, Artificial Sequence
  Description of Artificial Sequence: Synthetic oligonucleotide
aucuuagccaauaaaacaa

SEQ ID NO: 606514 - RNA, 19 nt, Artificial Sequence
  Description of Artificial Sequence: Synthetic oligonucleotide
guuauguacacaguuuaac

SEQ ID NO: 606515 - RNA, 19 nt, Artificial Sequence
  Description of Artificial Sequence: Synthetic oligonucleotide
aaugaaaguugaugaguua

SEQ ID NO: 606516 - RNA, 19 nt, Artificial Sequence
  Description of Artificial Sequence: Synthetic oligonucleotide
cacugaucagcugagaaug

SEQ ID NO: 606517 - RNA, 19 nt, Artificial Sequence
  Description of Artificial Sequence: Synthetic oligonucleotide
agacauuacugguaucaug

SEQ ID NO: 606518 - RNA, 19 nt, Artificial Sequence
  Description of Artificial Sequence: Synthetic oligonucleotide
ugacuuacaugagacugag

SEQ ID NO: 606519 - RNA, 19 nt, Artificial Sequence
  Description of Artificial Sequence: Synthetic oligonucleotide
guaaaugccccagaugagc

SEQ ID NO: 606520 - RNA, 19 nt, Artificial Sequence
  Description of Artificial Sequence: Synthetic oligonucleotide
aagugaugcuuguauuagu

SEQ ID NO: 606521 - RNA, 19 nt, Artificial Sequence
  Description of Artificial Sequence: Synthetic oligonucleotide
agcagaguuucuuucugug

SEQ ID NO: 606522 - RNA, 19 nt, Artificial Sequence
  Description of Artificial Sequence: Synthetic oligonucleotide
ucaugcuugcaacagcuuu

SEQ ID NO: 606523 - RNA, 19 nt, Artificial Sequence
  Description of Artificial Sequence: Synthetic oligonucleotide
aagugagucucuuucuaua

SEQ ID NO: 606524 - RNA, 19 nt, Artificial Sequence
  Description of Artificial Sequence: Synthetic oligonucleotide
agcucuugaugcaugguac

SEQ ID NO: 606525 - RNA, 19 nt, Artificial Sequence
  Description of Artificial Sequence: Synthetic oligonucleotide
uucuuggagagccuucccu

SEQ ID NO: 606526 - RNA, 19 nt, Artificial Sequence
  Description of Artificial Sequence: Synthetic oligonucleotide
uugauagugaucgcuauuu

SEQ ID NO: 606527 - RNA, 19 nt, Artificial Sequence
  Description of Artificial Sequence: Synthetic oligonucleotide
guauaguacauuuucaguu

SEQ ID NO: 606528 - RNA, 19 nt, Artificial Sequence
  Description of Artificial Sequence: Synthetic oligonucleotide
uagacaacaagcgguaaaa

SEQ ID NO: 606529 - RNA, 19 nt, Artificial Sequence
  Description of Artificial Sequence: Synthetic oligonucleotide
agaugagcgccauagggau

SEQ ID NO: 606530 - RNA, 19 nt, Artificial Sequence
  Description of Artificial Sequence: Synthetic oligonucleotide
cauaugaaagcugagggaa

SEQ ID NO: 606531 - RNA, 19 nt, Artificial Sequence
  Description of Artificial Sequence: Synthetic oligonucleotide
ugucacucauauuucuuuc

SEQ ID NO: 606532 - RNA, 19 nt, Artificial Sequence
  Description of Artificial Sequence: Synthetic oligonucleotide
ucgcuauuucaacaauaug

SEQ ID NO: 606533 - RNA, 19 nt, Artificial Sequence
  Description of Artificial Sequence: Synthetic oligonucleotide
acagcauuacagacuauuc

SEQ ID NO: 606534 - RNA, 19 nt, Artificial Sequence
  Description of Artificial Sequence: Synthetic oligonucleotide
aaacacggcugaugcacug

SEQ ID NO: 606535 - RNA, 19 nt, Artificial Sequence
  Description of Artificial Sequence: Synthetic oligonucleotide
ugcgaugcauagaagggau

SEQ ID NO: 606536 - RNA, 19 nt, Artificial Sequence
  Description of Artificial Sequence: Synthetic oligonucleotide
aagcgguaaaaccaauauu

SEQ ID NO: 606537 - RNA, 19 nt, Artificial Sequence
  Description of Artificial Sequence: Synthetic oligonucleotide
gaguuagagccuauuggag

SEQ ID NO: 606538 - RNA, 19 nt, Artificial Sequence
  Description of Artificial Sequence: Synthetic oligonucleotide
uuaccucaagcuuuuguua

SEQ ID NO: 606539 - RNA, 19 nt, Artificial Sequence
  Description of Artificial Sequence: Synthetic oligonucleotide
augauauuaaggucuccaa

SEQ ID NO: 606540 - RNA, 19 nt, Artificial Sequence
  Description of Artificial Sequence: Synthetic oligonucleotide
guguaaaauauaucaguaa

SEQ ID NO: 606541 - RNA, 19 nt, Artificial Sequence
  Description of Artificial Sequence: Synthetic oligonucleotide
gagacaaguaguacauaug

SEQ ID NO: 606542 - RNA, 19 nt, Artificial Sequence
  Description of Artificial Sequence: Synthetic oligonucleotide
auaugaaagcugagggaac

SEQ ID NO: 606543 - RNA, 19 nt, Artificial Sequence
  Description of Artificial Sequence: Synthetic oligonucleotide
ucguugagaugcuuggggu

SEQ ID NO: 606544 - RNA, 19 nt, Artificial Sequence
  Description of Artificial Sequence: Synthetic oligonucleotide
gguguagagaugucccucg

SEQ ID NO: 606545 - RNA, 19 nt, Artificial Sequence
  Description of Artificial Sequence: Synthetic oligonucleotide
agugagucucuuucuauaa

SEQ ID NO: 606546 - RNA, 19 nt, Artificial Sequence
  Description of Artificial Sequence: Synthetic oligonucleotide
ccuaacaaagugaugcuug

SEQ ID NO: 606547 - RNA, 19 nt, Artificial Sequence
  Description of Artificial Sequence: Synthetic oligonucleotide
guugagaugcuuggggucc

SEQ ID NO: 606548 - RNA, 19 nt, Artificial Sequence
  Description of Artificial Sequence: Synthetic oligonucleotide
accacgucaucguugagau

SEQ ID NO: 606549 - RNA, 19 nt, Artificial Sequence
  Description of Artificial Sequence: Synthetic oligonucleotide
auagugaucgcuauuucaa

SEQ ID NO: 606550 - RNA, 19 nt, Artificial Sequence
  Description of Artificial Sequence: Synthetic oligonucleotide
auauucaggaacacaaaau

SEQ ID NO: 606551 - RNA, 19 nt, Artificial Sequence
  Description of Artificial Sequence: Synthetic oligonucleotide
agcuuuaauaugagugggg

SEQ ID NO: 606552 - RNA, 19 nt, Artificial Sequence
  Description of Artificial Sequence: Synthetic oligonucleotide
uuuggguucagaagaccua

SEQ ID NO: 606553 - RNA, 19 nt, Artificial Sequence
  Description of Artificial Sequence: Synthetic oligonucleotide
agaaaggguagcaaugggu

SEQ ID NO: 606554 - RNA, 19 nt, Artificial Sequence
  Description of Artificial Sequence: Synthetic oligonucleotide
agaacuuacuccagcaaga

SEQ ID NO: 606555 - RNA, 19 nt, Artificial Sequence
  Description of Artificial Sequence: Synthetic oligonucleotide
ugauagugaucgcuauuuc

SEQ ID NO: 606556 - RNA, 19 nt, Artificial Sequence
  Description of Artificial Sequence: Synthetic oligonucleotide
agacggauauugcugaaua

SEQ ID NO: 606557 - RNA, 19 nt, Artificial Sequence
  Description of Artificial Sequence: Synthetic oligonucleotide
guauuaguccaaaggcucc

SEQ ID NO: 606558 - RNA, 19 nt, Artificial Sequence
  Description of Artificial Sequence: Synthetic oligonucleotide
uaaacacggcugaugcacu

SEQ ID NO: 606559 - RNA, 19 nt, Artificial Sequence
  Description of Artificial Sequence: Synthetic oligonucleotide
gcuggcauaaugaaaguug

SEQ ID NO: 606560 - RNA, 19 nt, Artificial Sequence
  Description of Artificial Sequence: Synthetic oligonucleotide
acaauauguuuguaucuua

SEQ ID NO: 606561 - RNA, 19 nt, Artificial Sequence
  Description of Artificial Sequence: Synthetic oligonucleotide
agagaacuagcaagcagag

SEQ ID NO: 606562 - RNA, 19 nt, Artificial Sequence
  Description of Artificial Sequence: Synthetic oligonucleotide
ugguagacaacaagcggua

SEQ ID NO: 606563 - RNA, 19 nt, Artificial Sequence
  Description of Artificial Sequence: Synthetic oligonucleotide
gaauaagacauuacuggua

SEQ ID NO: 606564 - RNA, 19 nt, Artificial Sequence
  Description of Artificial Sequence: Synthetic oligonucleotide
augcaugguacaacugccc

SEQ ID NO: 606565 - RNA, 19 nt, Artificial Sequence
  Description of Artificial Sequence: Synthetic oligonucleotide
acugaucagcugagaaugc

SEQ ID NO: 606566 - RNA, 19 nt, Artificial Sequence
  Description of Artificial Sequence: Synthetic oligonucleotide
aguacauaugaaagcugag

SEQ ID NO: 606567 - RNA, 19 nt, Artificial Sequence
  Description of Artificial Sequence: Synthetic oligonucleotide
gcagaauuccaauaaaugu

SEQ ID NO: 606568 - RNA, 19 nt, Artificial Sequence
  Description of Artificial Sequence: Synthetic oligonucleotide
uuucuagaggacucaggua

SEQ ID NO: 606569 - RNA, 19 nt, Artificial Sequence
  Description of Artificial Sequence: Synthetic oligonucleotide
gagggaacaacuucuuugu

SEQ ID NO: 606570 - RNA, 19 nt, Artificial Sequence
  Description of Artificial Sequence: Synthetic oligonucleotide
guaguacauaugaaagcug

SEQ ID NO: 606571 - RNA, 19 nt, Artificial Sequence
  Description of Artificial Sequence: Synthetic oligonucleotide
guagcagguucauaguuaa

SEQ ID NO: 606572 - RNA, 19 nt, Artificial Sequence
  Description of Artificial Sequence: Synthetic oligonucleotide
cauuggguuaauguugauc

SEQ ID NO: 606573 - RNA, 19 nt, Artificial Sequence
  Description of Artificial Sequence: Synthetic oligonucleotide
aacuugauagugaucgcua

SEQ ID NO: 606574 - RNA, 19 nt, Artificial Sequence
  Description of Artificial Sequence: Synthetic oligonucleotide
uagagaugucccucggagu

SEQ ID NO: 606575 - RNA, 19 nt, Artificial Sequence
  Description of Artificial Sequence: Synthetic oligonucleotide
ugguaucaugaugauauua

SEQ ID NO: 606576 - RNA, 19 nt, Artificial Sequence
  Description of Artificial Sequence: Synthetic oligonucleotide
aagacauuacugguaucau

SEQ ID NO: 606577 - RNA, 19 nt, Artificial Sequence
  Description of Artificial Sequence: Synthetic oligonucleotide
aucgcuauuucaacaauau

SEQ ID NO: 606578 - RNA, 19 nt, Artificial Sequence
  Description of Artificial Sequence: Synthetic oligonucleotide
guaggccauuuucuagagg

SEQ ID NO: 606579 - RNA, 19 nt, Artificial Sequence
  Description of Artificial Sequence: Synthetic oligonucleotide
cagaugagcgccauaggga

SEQ ID NO: 606580 - RNA, 19 nt, Artificial Sequence
  Description of Artificial Sequence: Synthetic oligonucleotide
ggaauaaacacggcugaug

SEQ ID NO: 606581 - RNA, 19 nt, Artificial Sequence
  Description of Artificial Sequence: Synthetic oligonucleotide
ugcugaauaucuugccaau

SEQ ID NO: 606582 - RNA, 19 nt, Artificial Sequence
  Description of Artificial Sequence: Synthetic oligonucleotide
gugaucgcuauuucaacaa

SEQ ID NO: 606583 - RNA, 19 nt, Artificial Sequence
  Description of Artificial Sequence: Synthetic oligonucleotide
uagguagcagguucauagu

SEQ ID NO: 606584 - RNA, 19 nt, Artificial Sequence
  Description of Artificial Sequence: Synthetic oligonucleotide
uuaaggucuccaacuugau

SEQ ID NO: 606585 - RNA, 19 nt, Artificial Sequence
  Description of Artificial Sequence: Synthetic oligonucleotide
guagacaacaagcgguaaa

SEQ ID NO: 606586 - RNA, 19 nt, Artificial Sequence
  Description of Artificial Sequence: Synthetic oligonucleotide
cagaugugcaggaaagaga

SEQ ID NO: 606587 - RNA, 19 nt, Artificial Sequence
  Description of Artificial Sequence: Synthetic oligonucleotide
ucauuucauuggguuaaug

SEQ ID NO: 606588 - RNA, 19 nt, Artificial Sequence
  Description of Artificial Sequence: Synthetic oligonucleotide
ugucccucggagucuacgu

SEQ ID NO: 606589 - RNA, 19 nt, Artificial Sequence
  Description of Artificial Sequence: Synthetic oligonucleotide
cugacuuacaugagacuga

SEQ ID NO: 606590 - RNA, 19 nt, Artificial Sequence
  Description of Artificial Sequence: Synthetic oligonucleotide
aaccauuucccaagugagu

SEQ ID NO: 606591 - RNA, 19 nt, Artificial Sequence
  Description of Artificial Sequence: Synthetic oligonucleotide
cuuggugugcgcgucguac

SEQ ID NO: 606592 - RNA, 19 nt, Artificial Sequence
  Description of Artificial Sequence: Synthetic oligonucleotide
ugaugauauuaaggucucc

SEQ ID NO: 606593 - RNA, 19 nt, Artificial Sequence
  Description of Artificial Sequence: Synthetic oligonucleotide
agcaucuaggaagaacaga

SEQ ID NO: 606594 - RNA, 19 nt, Artificial Sequence
  Description of Artificial Sequence: Synthetic oligonucleotide
uuggugugcgcgucguaca

SEQ ID NO: 606595 - RNA, 19 nt, Artificial Sequence
  Description of Artificial Sequence: Synthetic oligonucleotide
gguucauaguuaaaguguc

SEQ ID NO: 606596 - RNA, 19 nt, Artificial Sequence
  Description of Artificial Sequence: Synthetic oligonucleotide
ggacauagauggaauaaac

SEQ ID NO: 606597 - RNA, 19 nt, Artificial Sequence
  Description of Artificial Sequence: Synthetic oligonucleotide
agaaaccaguauagagaac

SEQ ID NO: 606598 - RNA, 19 nt, Artificial Sequence
  Description of Artificial Sequence: Synthetic oligonucleotide
agcaagaacauuaccucaa

SEQ ID NO: 606599 - RNA, 19 nt, Artificial Sequence
  Description of Artificial Sequence: Synthetic oligonucleotide
gugcgcgucguacacuugc

SEQ ID NO: 606600 - RNA, 19 nt, Artificial Sequence
  Description of Artificial Sequence: Synthetic oligonucleotide
uuuauaggacaugcagcau

SEQ ID NO: 606601 - RNA, 19 nt, Artificial Sequence
  Description of Artificial Sequence: Synthetic oligonucleotide
caagugcgaugcauagaag

SEQ ID NO: 606602 - RNA, 19 nt, Artificial Sequence
  Description of Artificial Sequence: Synthetic oligonucleotide
cugccagcucuagagagag

SEQ ID NO: 606603 - RNA, 19 nt, Artificial Sequence
  Description of Artificial Sequence: Synthetic oligonucleotide
uguuuguaucuuagccaau

SEQ ID NO: 606604 - RNA, 19 nt, Artificial Sequence
  Description of Artificial Sequence: Synthetic oligonucleotide
uguucccggaugggaacgg

SEQ ID NO: 606605 - RNA, 19 nt, Artificial Sequence
  Description of Artificial Sequence: Synthetic oligonucleotide
uggguucagaagaccuaga

SEQ ID NO: 606606 - RNA, 19 nt, Artificial Sequence
  Description of Artificial Sequence: Synthetic oligonucleotide
caucguugagaugcuuggg

SEQ ID NO: 606607 - RNA, 19 nt, Artificial Sequence
  Description of Artificial Sequence: Synthetic oligonucleotide
ucuguaugucagagucaga

SEQ ID NO: 606608 - RNA, 19 nt, Artificial Sequence
  Description of Artificial Sequence: Synthetic oligonucleotide
gaucgcuauuucaacaaua

SEQ ID NO: 606609 - RNA, 19 nt, Artificial Sequence
  Description of Artificial Sequence: Synthetic oligonucleotide
ucccucggagucuacguau

SEQ ID NO: 606610 - RNA, 19 nt, Artificial Sequence
  Description of Artificial Sequence: Synthetic oligonucleotide
caugguacaacugcccaga

SEQ ID NO: 606611 - RNA, 19 nt, Artificial Sequence
  Description of Artificial Sequence: Synthetic oligonucleotide
uggugugcgcgucguacac

SEQ ID NO: 606612 - RNA, 19 nt, Artificial Sequence
  Description of Artificial Sequence: Synthetic oligonucleotide
caacaagcgguaaaaccaa

SEQ ID NO: 606613 - RNA, 19 nt, Artificial Sequence
  Description of Artificial Sequence: Synthetic oligonucleotide
gaacauuaccucaagcuuu

SEQ ID NO: 606614 - RNA, 19 nt, Artificial Sequence
  Description of Artificial Sequence: Synthetic oligonucleotide
uccuaacaaagugaugcuu

SEQ ID NO: 606615 - RNA, 19 nt, Artificial Sequence
  Description of Artificial Sequence: Synthetic oligonucleotide
gaacuuacuccagcaagaa

SEQ ID NO: 606616 - RNA, 19 nt, Artificial Sequence
  Description of Artificial Sequence: Synthetic oligonucleotide
agaugcuuggggucccggu

SEQ ID NO: 606617 - RNA, 19 nt, Artificial Sequence
  Description of Artificial Sequence: Synthetic oligonucleotide
aaaccaguauagagaacua

SEQ ID NO: 606618 - RNA, 19 nt, Artificial Sequence
  Description of Artificial Sequence: Synthetic oligonucleotide
auuaguccaaaggcuccug

SEQ ID NO: 606619 - RNA, 19 nt, Artificial Sequence
  Description of Artificial Sequence: Synthetic oligonucleotide
guagcucaaaagagacaag

SEQ ID NO: 606620 - RNA, 19 nt, Artificial Sequence
  Description of Artificial Sequence: Synthetic oligonucleotide
gggaucaugcuugcaacag

SEQ ID NO: 606621 - RNA, 19 nt, Artificial Sequence
  Description of Artificial Sequence: Synthetic oligonucleotide
acaaugguccacauacaaa

SEQ ID NO: 606622 - RNA, 19 nt, Artificial Sequence
  Description of Artificial Sequence: Synthetic oligonucleotide
cuagaacuuacuccagcaa

SEQ ID NO: 606623 - RNA, 19 nt, Artificial Sequence
  Description of Artificial Sequence: Synthetic oligonucleotide
aaauagcuuuuggcugucu

SEQ ID NO: 606624 - RNA, 19 nt, Artificial Sequence
  Description of Artificial Sequence: Synthetic oligonucleotide
ugagacggauauugcugaa

SEQ ID NO: 606625 - RNA, 19 nt, Artificial Sequence
  Description of Artificial Sequence: Synthetic oligonucleotide
cauagaagggaucaugcuu

SEQ ID NO: 606626 - RNA, 19 nt, Artificial Sequence
  Description of Artificial Sequence: Synthetic oligonucleotide
guugcccuguucccggaug

SEQ ID NO: 606627 - RNA, 19 nt, Artificial Sequence
  Description of Artificial Sequence: Synthetic oligonucleotide
cuaacaaagugaugcuugu

SEQ ID NO: 606628 - RNA, 19 nt, Artificial Sequence
  Description of Artificial Sequence: Synthetic oligonucleotide
uggaauaaacacggcugau

SEQ ID NO: 606629 - RNA, 19 nt, Artificial Sequence
  Description of Artificial Sequence: Synthetic oligonucleotide
uaaauagcuuuuggcuguc

SEQ ID NO: 606630 - RNA, 19 nt, Artificial Sequence
  Description of Artificial Sequence: Synthetic oligonucleotide
gcaugguacaacugcccag

SEQ ID NO: 606631 - RNA, 19 nt, Artificial Sequence
  Description of Artificial Sequence: Synthetic oligonucleotide
cgguaaaaccaauauuuug

SEQ ID NO: 606632 - RNA, 19 nt, Artificial Sequence
  Description of Artificial Sequence: Synthetic oligonucleotide
caagcgguaaaaccaauau

SEQ ID NO: 606633 - RNA, 19 nt, Artificial Sequence
  Description of Artificial Sequence: Synthetic oligonucleotide
ugcgcgucguacacuugcu

SEQ ID NO: 606634 - RNA, 19 nt, Artificial Sequence
  Description of Artificial Sequence: Synthetic oligonucleotide
gcaaaacugagagaggaaa

SEQ ID NO: 606635 - RNA, 19 nt, Artificial Sequence
  Description of Artificial Sequence: Synthetic oligonucleotide
guuuggguucagaagaccu

SEQ ID NO: 606636 - RNA, 19 nt, Artificial Sequence
  Description of Artificial Sequence: Synthetic oligonucleotide
ugagaugcuuggggucccg

SEQ ID NO: 606637 - RNA, 19 nt, Artificial Sequence
  Description of Artificial Sequence: Synthetic oligonucleotide
agcaacugacuuacaugag

SEQ ID NO: 606638 - RNA, 19 nt, Artificial Sequence
  Description of Artificial Sequence: Synthetic oligonucleotide
agcgccauagggaugccga

SEQ ID NO: 606639 - RNA, 19 nt, Artificial Sequence
  Description of Artificial Sequence: Synthetic oligonucleotide
aaguagguagcagguucau

SEQ ID NO: 606640 - RNA, 19 nt, Artificial Sequence
  Description of Artificial Sequence: Synthetic oligonucleotide
gcagucucauuuugguggc

SEQ ID NO: 606641 - RNA, 19 nt, Artificial Sequence
  Description of Artificial Sequence: Synthetic oligonucleotide
ccuagaacuuacuccagca

SEQ ID NO: 606642 - RNA, 19 nt, Artificial Sequence
  Description of Artificial Sequence: Synthetic oligonucleotide
aacaagcgguaaaaccaau

SEQ ID NO: 606643 - RNA, 19 nt, Artificial Sequence
  Description of Artificial Sequence: Synthetic oligonucleotide
agcaauggguuuaaacauu

SEQ ID NO: 606644 - RNA, 19 nt, Artificial Sequence
  Description of Artificial Sequence: Synthetic oligonucleotide
gaugagcgccauagggaug

SEQ ID NO: 606645 - RNA, 19 nt, Artificial Sequence
  Description of Artificial Sequence: Synthetic oligonucleotide
cagaaccauuucccaagug

SEQ ID NO: 606646 - RNA, 19 nt, Artificial Sequence
  Description of Artificial Sequence: Synthetic oligonucleotide
gggaugccgaagaugguag

SEQ ID NO: 606647 - RNA, 19 nt, Artificial Sequence
  Description of Artificial Sequence: Synthetic oligonucleotide
gugagucucuuucuauaaa

SEQ ID NO: 606648 - RNA, 19 nt, Artificial Sequence
  Description of Artificial Sequence: Synthetic oligonucleotide
gcaaucacgucuucaaagu

SEQ ID NO: 606649 - RNA, 19 nt, Artificial Sequence
  Description of Artificial Sequence: Synthetic oligonucleotide
uagggaugccgaagauggu

SEQ ID NO: 606650 - RNA, 19 nt, Artificial Sequence
  Description of Artificial Sequence: Synthetic oligonucleotide
acaagcgguaaaaccaaua

SEQ ID NO: 606651 - RNA, 19 nt, Artificial Sequence
  Description of Artificial Sequence: Synthetic oligonucleotide
ugggaacgguguagagaug

SEQ ID NO: 606652 - RNA, 19 nt, Artificial Sequence
  Description of Artificial Sequence: Synthetic oligonucleotide
acaugcuggcgcguggcug

SEQ ID NO: 606653 - RNA, 19 nt, Artificial Sequence
  Description of Artificial Sequence: Synthetic oligonucleotide
gacuuacaugagacugagc

SEQ ID NO: 606654 - RNA, 19 nt, Artificial Sequence
  Description of Artificial Sequence: Synthetic oligonucleotide
gacaugucuugggacccac

SEQ ID NO: 606655 - RNA, 19 nt, Artificial Sequence
  Description of Artificial Sequence: Synthetic oligonucleotide
ugugcgcgucguacacuug

SEQ ID NO: 606656 - RNA, 19 nt, Artificial Sequence
  Description of Artificial Sequence: Synthetic oligonucleotide
ucauuggguuaauguugau

SEQ ID NO: 606657 - RNA, 19 nt, Artificial Sequence
  Description of Artificial Sequence: Synthetic oligonucleotide
gucucgguauagauauaac

SEQ ID NO: 606658 - RNA, 19 nt, Artificial Sequence
  Description of Artificial Sequence: Synthetic oligonucleotide
gagcgccauagggaugccg

SEQ ID NO: 606659 - RNA, 19 nt, Artificial Sequence
  Description of Artificial Sequence: Synthetic oligonucleotide
uucccaagugagucucuuu

SEQ ID NO: 606660 - RNA, 19 nt, Artificial Sequence
  Description of Artificial Sequence: Synthetic oligonucleotide
ugcccuguucccggauggg

SEQ ID NO: 606661 - RNA, 19 nt, Artificial Sequence
  Description of Artificial Sequence: Synthetic oligonucleotide
guacacaguuuaacaguca

SEQ ID NO: 606662 - RNA, 19 nt, Artificial Sequence
  Description of Artificial Sequence: Synthetic oligonucleotide
uguugcccuguucccggau

SEQ ID NO: 606663 - RNA, 19 nt, Artificial Sequence
  Description of Artificial Sequence: Synthetic oligonucleotide
caacuugauagugaucgcu

SEQ ID NO: 606664 - RNA, 19 nt, Artificial Sequence
  Description of Artificial Sequence: Synthetic oligonucleotide
ggaccaagacaaaccauuc

SEQ ID NO: 606665 - RNA, 19 nt, Artificial Sequence
  Description of Artificial Sequence: Synthetic oligonucleotide
augguacaacugcccagau

SEQ ID NO: 606666 - RNA, 19 nt, Artificial Sequence
  Description of Artificial Sequence: Synthetic oligonucleotide
augccagugucuguuuaaa

SEQ ID NO: 606667 - RNA, 19 nt, Artificial Sequence
  Description of Artificial Sequence: Synthetic oligonucleotide
gcacuggaucucaaucagg

SEQ ID NO: 606668 - RNA, 19 nt, Artificial Sequence
  Description of Artificial Sequence: Synthetic oligonucleotide
cuccuaacaaagugaugcu

SEQ ID NO: 606669 - RNA, 19 nt, Artificial Sequence
  Description of Artificial Sequence: Synthetic oligonucleotide
guacaacugcccagaugug

SEQ ID NO: 606670 - RNA, 19 nt, Artificial Sequence
  Description of Artificial Sequence: Synthetic oligonucleotide
uccuuggugugcgcgucgu

SEQ ID NO: 606671 - RNA, 19 nt, Artificial Sequence
  Description of Artificial Sequence: Synthetic oligonucleotide
aguagguagcagguucaua

SEQ ID NO: 606672 - RNA, 19 nt, Artificial Sequence
  Description of Artificial Sequence: Synthetic oligonucleotide
gaacuagcaagcagaguuu

SEQ ID NO: 606673 - RNA, 19 nt, Artificial Sequence
  Description of Artificial Sequence: Synthetic oligonucleotide
auguugcccuguucccgga

SEQ ID NO: 606674 - RNA, 19 nt, Artificial Sequence
  Description of Artificial Sequence: Synthetic oligonucleotide
cagguauacaggugaaauu

SEQ ID NO: 606675 - RNA, 19 nt, Artificial Sequence
  Description of Artificial Sequence: Synthetic oligonucleotide
gggaacgguguagagaugu

SEQ ID NO: 606676 - RNA, 19 nt, Artificial Sequence
  Description of Artificial Sequence: Synthetic oligonucleotide
cuucaaagagugggucaca

SEQ ID NO: 606677 - RNA, 19 nt, Artificial Sequence
  Description of Artificial Sequence: Synthetic oligonucleotide
gcauagaagggaucaugcu

SEQ ID NO: 606678 - RNA, 19 nt, Artificial Sequence
  Description of Artificial Sequence: Synthetic oligonucleotide
ccaagacaaaccauucaua

SEQ ID NO: 606679 - RNA, 19 nt, Artificial Sequence
  Description of Artificial Sequence: Synthetic oligonucleotide
gagacggauauugcugaau

SEQ ID NO: 606680 - RNA, 19 nt, Artificial Sequence
  Description of Artificial Sequence: Synthetic oligonucleotide
gcccaccuggaauuuaaaa

SEQ ID NO: 606681 - RNA, 19 nt, Artificial Sequence
  Description of Artificial Sequence: Synthetic oligonucleotide
auaggacaugcagcauaaa

SEQ ID NO: 606682 - RNA, 19 nt, Artificial Sequence
  Description of Artificial Sequence: Synthetic oligonucleotide
cuauuccaagugcgaugca

SEQ ID NO: 606683 - RNA, 19 nt, Artificial Sequence
  Description of Artificial Sequence: Synthetic oligonucleotide
cgcgucguacacuugcuuc

SEQ ID NO: 606684 - RNA, 19 nt, Artificial Sequence
  Description of Artificial Sequence: Synthetic oligonucleotide
ggggucccgguugaccagg

SEQ ID NO: 606685 - RNA, 19 nt, Artificial Sequence
  Description of Artificial Sequence: Synthetic oligonucleotide
gagaugucccucggagucu

SEQ ID NO: 606686 - RNA, 19 nt, Artificial Sequence
  Description of Artificial Sequence: Synthetic oligonucleotide
gucccucggagucuacgua

SEQ ID NO: 606687 - RNA, 19 nt, Artificial Sequence
  Description of Artificial Sequence: Synthetic oligonucleotide
ugagcgccauagggaugcc

SEQ ID NO: 606688 - RNA, 19 nt, Artificial Sequence
  Description of Artificial Sequence: Synthetic oligonucleotide
gugugcgcgucguacacuu

SEQ ID NO: 606689 - RNA, 19 nt, Artificial Sequence
  Description of Artificial Sequence: Synthetic oligonucleotide
acgucaucguugagaugcu

SEQ ID NO: 606690 - RNA, 19 nt, Artificial Sequence
  Description of Artificial Sequence: Synthetic oligonucleotide
acaugagacugagcaucua

SEQ ID NO: 606691 - RNA, 19 nt, Artificial Sequence
  Description of Artificial Sequence: Synthetic oligonucleotide
gcgcguggcuggcugcagg

SEQ ID NO: 606692 - RNA, 19 nt, Artificial Sequence
  Description of Artificial Sequence: Synthetic oligonucleotide
gguagacaacaagcgguaa

SEQ ID NO: 606693 - RNA, 19 nt, Artificial Sequence
  Description of Artificial Sequence: Synthetic oligonucleotide
ggaacgguguagagauguc

SEQ ID NO: 606694 - RNA, 19 nt, Artificial Sequence
  Description of Artificial Sequence: Synthetic oligonucleotide
ccagacaugcuggcgcgug

SEQ ID NO: 606695 - RNA, 19 nt, Artificial Sequence
  Description of Artificial Sequence: Synthetic oligonucleotide
ccgguugaccaggucaauc

SEQ ID NO: 606696 - RNA, 19 nt, Artificial Sequence
  Description of Artificial Sequence: Synthetic oligonucleotide
agcccaccuggaauuuaaa

SEQ ID NO: 606697 - RNA, 19 nt, Artificial Sequence
  Description of Artificial Sequence: Synthetic oligonucleotide
ccacugaucagcugagaau

SEQ ID NO: 606698 - RNA, 19 nt, Artificial Sequence
  Description of Artificial Sequence: Synthetic oligonucleotide
gcgaugcauagaagggauc

SEQ ID NO: 606699 - RNA, 19 nt, Artificial Sequence
  Description of Artificial Sequence: Synthetic oligonucleotide
gcgguaaaaccaauauuuu

SEQ ID NO: 606700 - RNA, 19 nt, Artificial Sequence
  Description of Artificial Sequence: Synthetic oligonucleotide
cgccauagggaugccgaag

SEQ ID NO: 606701 - RNA, 19 nt, Artificial Sequence
  Description of Artificial Sequence: Synthetic oligonucleotide
cccauuugucugcuuuaaa

SEQ ID NO: 606702 - RNA, 19 nt, Artificial Sequence
  Description of Artificial Sequence: Synthetic oligonucleotide
guucccggaugggaacggu

SEQ ID NO: 606703 - RNA, 19 nt, Artificial Sequence
  Description of Artificial Sequence: Synthetic oligonucleotide
gcgccauagggaugccgaa

SEQ ID NO: 606704 - RNA, 19 nt, Artificial Sequence
  Description of Artificial Sequence: Synthetic oligonucleotide
ggugugcgcgucguacacu

SEQ ID NO: 606705 - RNA, 19 nt, Artificial Sequence
  Description of Artificial Sequence: Synthetic oligonucleotide
cagucucauuuugguggcu

SEQ ID NO: 606706 - RNA, 19 nt, Artificial Sequence
  Description of Artificial Sequence: Synthetic oligonucleotide
ccauagggaugccgaagau

SEQ ID NO: 606707 - RNA, 19 nt, Artificial Sequence
  Description of Artificial Sequence: Synthetic oligonucleotide
ggguagcaauggguuuaaa

SEQ ID NO: 606708 - RNA, 19 nt, Artificial Sequence
  Description of Artificial Sequence: Synthetic oligonucleotide
gcgcgucguacacuugcuu

SEQ ID NO: 606709 - RNA, 19 nt, Artificial Sequence
  Description of Artificial Sequence: Synthetic oligonucleotide
cccucggagucuacguauu

SEQ ID NO: 606710 - RNA, 19 nt, Artificial Sequence
  Description of Artificial Sequence: Synthetic oligonucleotide
gccccagaugagcgccaua

SEQ ID NO: 606711 - RNA, 19 nt, Artificial Sequence
  Description of Artificial Sequence: Synthetic oligonucleotide
ccuuguuguugggcuugua

SEQ ID NO: 606712 - RNA, 19 nt, Artificial Sequence
  Description of Artificial Sequence: Synthetic oligonucleotide
agaaguuuaaggcaagucc

SEQ ID NO: 606713 - RNA, 19 nt, Artificial Sequence
  Description of Artificial Sequence: Synthetic oligonucleotide
aaugaaugcagagacaauc

SEQ ID NO: 606714 - RNA, 19 nt, Artificial Sequence
  Description of Artificial Sequence: Synthetic oligonucleotide
aaagucgucaugucagugc

SEQ ID NO: 606715 - RNA, 19 nt, Artificial Sequence
  Description of Artificial Sequence: Synthetic oligonucleotide
aagggguucauccagagga

SEQ ID NO: 606716 - RNA, 19 nt, Artificial Sequence
  Description of Artificial Sequence: Synthetic oligonucleotide
gauacauucauagaaggcc

SEQ ID NO: 606717 - RNA, 19 nt, Artificial Sequence
  Description of Artificial Sequence: Synthetic oligonucleotide
gaacacuacacuuucagug

SEQ ID NO: 606718 - RNA, 19 nt, Artificial Sequence
  Description of Artificial Sequence: Synthetic oligonucleotide
auugaguggaucugggugc

SEQ ID NO: 606719 - RNA, 19 nt, Artificial Sequence
  Description of Artificial Sequence: Synthetic oligonucleotide
ugacguaauucuaagcccg

SEQ ID NO: 606720 - RNA, 19 nt, Artificial Sequence
  Description of Artificial Sequence: Synthetic oligonucleotide
ucauauaaaaucacacuga

SEQ ID NO: 606721 - RNA, 19 nt, Artificial Sequence
  Description of Artificial Sequence: Synthetic oligonucleotide
cuguaugauacauucauag

SEQ ID NO: 606722 - RNA, 19 nt, Artificial Sequence
  Description of Artificial Sequence: Synthetic oligonucleotide
gaucuuuucuccuacgcag

SEQ ID NO: 606723 - RNA, 19 nt, Artificial Sequence
  Description of Artificial Sequence: Synthetic oligonucleotide
ucaaguauacucagcuugg

SEQ ID NO: 606724 - RNA, 19 nt, Artificial Sequence
  Description of Artificial Sequence: Synthetic oligonucleotide
aagaccaacaggauuacag

SEQ ID NO: 606725 - RNA, 19 nt, Artificial Sequence
  Description of Artificial Sequence: Synthetic oligonucleotide
gacacuguaugauacauuc

SEQ ID NO: 606726 - RNA, 19 nt, Artificial Sequence
  Description of Artificial Sequence: Synthetic oligonucleotide
accgaaaacagucauggug

SEQ ID NO: 606727 - RNA, 19 nt, Artificial Sequence
  Description of Artificial Sequence: Synthetic oligonucleotide
ugauacauucauagaaggc

SEQ ID NO: 606728 - RNA, 19 nt, Artificial Sequence
  Description of Artificial Sequence: Synthetic oligonucleotide
ucaugauugagaagcagcu

SEQ ID NO: 606729 - RNA, 19 nt, Artificial Sequence
  Description of Artificial Sequence: Synthetic oligonucleotide
cacacacacacacagagag

SEQ ID NO: 606730 - RNA, 19 nt, Artificial Sequence
  Description of Artificial Sequence: Synthetic oligonucleotide
uguacugacguaauucuaa

SEQ ID NO: 606731 - RNA, 19 nt, Artificial Sequence
  Description of Artificial Sequence: Synthetic oligonucleotide
agugaaauaaaagcaggag

SEQ ID NO: 606732 - RNA, 19 nt, Artificial Sequence
  Description of Artificial Sequence: Synthetic oligonucleotide
ugcaugcucagacacaugu

SEQ ID NO: 606733 - RNA, 19 nt, Artificial Sequence
  Description of Artificial Sequence: Synthetic oligonucleotide
ugcacacacacacacacac

SEQ ID NO: 606734 - RNA, 19 nt, Artificial Sequence
  Description of Artificial Sequence: Synthetic oligonucleotide
caaggguccacucugacug

SEQ ID NO: 606735 - RNA, 19 nt, Artificial Sequence
  Description of Artificial Sequence: Synthetic oligonucleotide
aggauuacaguuaugggag

SEQ ID NO: 606736 - RNA, 19 nt, Artificial Sequence
  Description of Artificial Sequence: Synthetic oligonucleotide
uuuucuccuacgcaguugu

SEQ ID NO: 606737 - RNA, 19 nt, Artificial Sequence
  Description of Artificial Sequence: Synthetic oligonucleotide
cuuguugagggacuguugc

SEQ ID NO: 606738 - RNA, 19 nt, Artificial Sequence
  Description of Artificial Sequence: Synthetic oligonucleotide
uguguacugacguaauucu

SEQ ID NO: 606739 - RNA, 19 nt, Artificial Sequence
  Description of Artificial Sequence: Synthetic oligonucleotide
ugaacaacacugccgauuc

SEQ ID NO: 606740 - RNA, 19 nt, Artificial Sequence
  Description of Artificial Sequence: Synthetic oligonucleotide
uguaugauacauucauaga

SEQ ID NO: 606741 - RNA, 19 nt, Artificial Sequence
  Description of Artificial Sequence: Synthetic oligonucleotide
acacugccgauucugacac

SEQ ID NO: 606742 - RNA, 19 nt, Artificial Sequence
  Description of Artificial Sequence: Synthetic oligonucleotide
aucauugcauauugagugg

SEQ ID NO: 606743 - RNA, 19 nt, Artificial Sequence
  Description of Artificial Sequence: Synthetic oligonucleotide
uggaucuggacacuguaug

SEQ ID NO: 606744 - RNA, 19 nt, Artificial Sequence
  Description of Artificial Sequence: Synthetic oligonucleotide
aaucggaagccaacgaagg

SEQ ID NO: 606745 - RNA, 19 nt, Artificial Sequence
  Description of Artificial Sequence: Synthetic oligonucleotide
ucuggacacuguaugauac

SEQ ID NO: 606746 - RNA, 19 nt, Artificial Sequence
  Description of Artificial Sequence: Synthetic oligonucleotide
ugugucucugcacaggagu

SEQ ID NO: 606747 - RNA, 19 nt, Artificial Sequence
  Description of Artificial Sequence: Synthetic oligonucleotide
agucgccugaaucggaagc

SEQ ID NO: 606748 - RNA, 19 nt, Artificial Sequence
  Description of Artificial Sequence: Synthetic oligonucleotide
uaguaagggagugugcugg

SEQ ID NO: 606749 - RNA, 19 nt, Artificial Sequence
  Description of Artificial Sequence: Synthetic oligonucleotide
uaauucuaagcccgcacca

SEQ ID NO: 606750 - RNA, 19 nt, Artificial Sequence
  Description of Artificial Sequence: Synthetic oligonucleotide
cacacacacacacacagag

SEQ ID NO: 606751 - RNA, 19 nt, Artificial Sequence
  Description of Artificial Sequence: Synthetic oligonucleotide
gcaaaagcgacugacaccg

SEQ ID NO: 606752 - RNA, 19 nt, Artificial Sequence
  Description of Artificial Sequence: Synthetic oligonucleotide
ugaaagacagcuugucuac

SEQ ID NO: 606753 - RNA, 19 nt, Artificial Sequence
  Description of Artificial Sequence: Synthetic oligonucleotide
ugccugaacaacacugccg

SEQ ID NO: 606754 - RNA, 19 nt, Artificial Sequence
  Description of Artificial Sequence: Synthetic oligonucleotide
cacacacacacacacacag

SEQ ID NO: 606755 - RNA, 19 nt, Artificial Sequence
  Description of Artificial Sequence: Synthetic oligonucleotide
uaaggcaaguccccugagg

SEQ ID NO: 606756 - RNA, 19 nt, Artificial Sequence
  Description of Artificial Sequence: Synthetic oligonucleotide
gacgguuuacuuuauuuca

SEQ ID NO: 606757 - RNA, 19 nt, Artificial Sequence
  Description of Artificial Sequence: Synthetic oligonucleotide
caugcacacacacacacac

SEQ ID NO: 606758 - RNA, 19 nt, Artificial Sequence
  Description of Artificial Sequence: Synthetic oligonucleotide
guauacucagcuuggauuc

SEQ ID NO: 606759 - RNA, 19 nt, Artificial Sequence
  Description of Artificial Sequence: Synthetic oligonucleotide
guaauucuaagcccgcacc

SEQ ID NO: 606760 - RNA, 19 nt, Artificial Sequence
  Description of Artificial Sequence: Synthetic oligonucleotide
aagucgucaugucagugcu

SEQ ID NO: 606761 - RNA, 19 nt, Artificial Sequence
  Description of Artificial Sequence: Synthetic oligonucleotide
uacauagugaagagcacaa

SEQ ID NO: 606762 - RNA, 19 nt, Artificial Sequence
  Description of Artificial Sequence: Synthetic oligonucleotide
uuugcucacugcguuaggg

SEQ ID NO: 606763 - RNA, 19 nt, Artificial Sequence
  Description of Artificial Sequence: Synthetic oligonucleotide
ugaaucggaagccaacgaa

SEQ ID NO: 606764 - RNA, 19 nt, Artificial Sequence
  Description of Artificial Sequence: Synthetic oligonucleotide
gaaucggaagccaacgaag

SEQ ID NO: 606765 - RNA, 19 nt, Artificial Sequence
  Description of Artificial Sequence: Synthetic oligonucleotide
ucuccuacgcaguuguuca

SEQ ID NO: 606766 - RNA, 19 nt, Artificial Sequence
  Description of Artificial Sequence: Synthetic oligonucleotide
cuuggauucaccgccacag

SEQ ID NO: 606767 - RNA, 19 nt, Artificial Sequence
  Description of Artificial Sequence: Synthetic oligonucleotide
acucagcuuggauucaccg

SEQ ID NO: 606768 - RNA, 19 nt, Artificial Sequence
  Description of Artificial Sequence: Synthetic oligonucleotide
cacacacacacacacacac

SEQ ID NO: 606769 - RNA, 19 nt, Artificial Sequence
  Description of Artificial Sequence: Synthetic oligonucleotide
uccgaauacaucucuugca

SEQ ID NO: 606770 - RNA, 19 nt, Artificial Sequence
  Description of Artificial Sequence: Synthetic oligonucleotide
uccccuacagugcugggcc

SEQ ID NO: 606771 - RNA, 19 nt, Artificial Sequence
  Description of Artificial Sequence: Synthetic oligonucleotide
uccaucuacccacaaggcu

SEQ ID NO: 606772 - RNA, 19 nt, Artificial Sequence
  Description of Artificial Sequence: Synthetic oligonucleotide
ugcguuagggcuaggcuca

SEQ ID NO: 606773 - RNA, 19 nt, Artificial Sequence
  Description of Artificial Sequence: Synthetic oligonucleotide
aaaagcgacugacaccgaa

SEQ ID NO: 606774 - RNA, 19 nt, Artificial Sequence
  Description of Artificial Sequence: Synthetic oligonucleotide
cacacacacacagagagac

SEQ ID NO: 606775 - RNA, 19 nt, Artificial Sequence
  Description of Artificial Sequence: Synthetic oligonucleotide
aguuaugggaggugagaag

SEQ ID NO: 606776 - RNA, 19 nt, Artificial Sequence
  Description of Artificial Sequence: Synthetic oligonucleotide
aacaaccuagaaguuuaag

SEQ ID NO: 606777 - RNA, 19 nt, Artificial Sequence
  Description of Artificial Sequence: Synthetic oligonucleotide
cacaugcacacacacacac

SEQ ID NO: 606778 - RNA, 19 nt, Artificial Sequence
  Description of Artificial Sequence: Synthetic oligonucleotide
auucuaagcccgcaccaag

SEQ ID NO: 606779 - RNA, 19 nt, Artificial Sequence
  Description of Artificial Sequence: Synthetic oligonucleotide
uuuguggcauugccuuugg

SEQ ID NO: 606780 - RNA, 19 nt, Artificial Sequence
  Description of Artificial Sequence: Synthetic oligonucleotide
uggauucaccgccacagac

SEQ ID NO: 606781 - RNA, 19 nt, Artificial Sequence
  Description of Artificial Sequence: Synthetic oligonucleotide
aaucugaggucacgcuguc

SEQ ID NO: 606782 - RNA, 19 nt, Artificial Sequence
  Description of Artificial Sequence: Synthetic oligonucleotide
uggcccuaaguccaugaag

SEQ ID NO: 606783 - RNA, 19 nt, Artificial Sequence
  Description of Artificial Sequence: Synthetic oligonucleotide
cugaucuuuucuccuacgc

SEQ ID NO: 606784 - RNA, 19 nt, Artificial Sequence
  Description of Artificial Sequence: Synthetic oligonucleotide
aaggguccacucugacugc

SEQ ID NO: 606785 - RNA, 19 nt, Artificial Sequence
  Description of Artificial Sequence: Synthetic oligonucleotide
agaccaacaggauuacagu

SEQ ID NO: 606786 - RNA, 19 nt, Artificial Sequence
  Description of Artificial Sequence: Synthetic oligonucleotide
guacugacguaauucuaag

SEQ ID NO: 606787 - RNA, 19 nt, Artificial Sequence
  Description of Artificial Sequence: Synthetic oligonucleotide
aagauggccuccuggggcu

SEQ ID NO: 606788 - RNA, 19 nt, Artificial Sequence
  Description of Artificial Sequence: Synthetic oligonucleotide
uacugacguaauucuaagc

SEQ ID NO: 606789 - RNA, 19 nt, Artificial Sequence
  Description of Artificial Sequence: Synthetic oligonucleotide
gugaacgugaagaacagga

SEQ ID NO: 606790 - RNA, 19 nt, Artificial Sequence
  Description of Artificial Sequence: Synthetic oligonucleotide
uucacuguucagugcuagg

SEQ ID NO: 606791 - RNA, 19 nt, Artificial Sequence
  Description of Artificial Sequence: Synthetic oligonucleotide
ucccaacagggaaacacug

SEQ ID NO: 606792 - RNA, 19 nt, Artificial Sequence
  Description of Artificial Sequence: Synthetic oligonucleotide
uuaacuguggacgguuuac

SEQ ID NO: 606793 - RNA, 19 nt, Artificial Sequence
  Description of Artificial Sequence: Synthetic oligonucleotide
aagcgacugacaccgaaaa

SEQ ID NO: 606794 - RNA, 19 nt, Artificial Sequence
  Description of Artificial Sequence: Synthetic oligonucleotide
ccaacgaagggguucaucc

SEQ ID NO: 606795 - RNA, 19 nt, Artificial Sequence
  Description of Artificial Sequence: Synthetic oligonucleotide
aaccucagcucacugcccu

SEQ ID NO: 606796 - RNA, 19 nt, Artificial Sequence
  Description of Artificial Sequence: Synthetic oligonucleotide
ucugucagaccacucucac

SEQ ID NO: 606797 - RNA, 19 nt, Artificial Sequence
  Description of Artificial Sequence: Synthetic oligonucleotide
ugugggaugcucacacaug

SEQ ID NO: 606798 - RNA, 19 nt, Artificial Sequence
  Description of Artificial Sequence: Synthetic oligonucleotide
uuagcccuccauuugcagu

SEQ ID NO: 606799 - RNA, 19 nt, Artificial Sequence
  Description of Artificial Sequence: Synthetic oligonucleotide
gagcauggacugaagacag

SEQ ID NO: 606800 - RNA, 19 nt, Artificial Sequence
  Description of Artificial Sequence: Synthetic oligonucleotide
cucucacucagcagcaaag

SEQ ID NO: 606801 - RNA, 19 nt, Artificial Sequence
  Description of Artificial Sequence: Synthetic oligonucleotide
uucuaguaagggagugugc

SEQ ID NO: 606802 - RNA, 19 nt, Artificial Sequence
  Description of Artificial Sequence: Synthetic oligonucleotide
gaagggguucauccagagg

SEQ ID NO: 606803 - RNA, 19 nt, Artificial Sequence
  Description of Artificial Sequence: Synthetic oligonucleotide
accccuucuaguaagggag

SEQ ID NO: 606804 - RNA, 19 nt, Artificial Sequence
  Description of Artificial Sequence: Synthetic oligonucleotide
uggacgguuuacuuuauuu

SEQ ID NO: 606805 - RNA, 19 nt, Artificial Sequence
  Description of Artificial Sequence: Synthetic oligonucleotide
ucauugcauauugagugga

SEQ ID NO: 606806 - RNA, 19 nt, Artificial Sequence
  Description of Artificial Sequence: Synthetic oligonucleotide
aguaagggagugugcuggg

SEQ ID NO: 606807 - RNA, 19 nt, Artificial Sequence
  Description of Artificial Sequence: Synthetic oligonucleotide
uuuaacuguggacgguuua

SEQ ID NO: 606808 - RNA, 19 nt, Artificial Sequence
  Description of Artificial Sequence: Synthetic oligonucleotide
gagacaaucugaggucacg

SEQ ID NO: 606809 - RNA, 19 nt, Artificial Sequence
  Description of Artificial Sequence: Synthetic oligonucleotide
cucgaucucuguuucauca

SEQ ID NO: 606810 - RNA, 19 nt, Artificial Sequence
  Description of Artificial Sequence: Synthetic oligonucleotide
uguugcaugcuguuaguuu

SEQ ID NO: 606811 - RNA, 19 nt, Artificial Sequence
  Description of Artificial Sequence: Synthetic oligonucleotide
auaaagucgucaugucagu

SEQ ID NO: 606812 - RNA, 19 nt, Artificial Sequence
  Description of Artificial Sequence: Synthetic oligonucleotide
ugcaaacucuccauguauu

SEQ ID NO: 606813 - RNA, 19 nt, Artificial Sequence
  Description of Artificial Sequence: Synthetic oligonucleotide
auauugaguggaucugggu

SEQ ID NO: 606814 - RNA, 19 nt, Artificial Sequence
  Description of Artificial Sequence: Synthetic oligonucleotide
acaaaaccucagcucacug

SEQ ID NO: 606815 - RNA, 19 nt, Artificial Sequence
  Description of Artificial Sequence: Synthetic oligonucleotide
cacuuguagaucaccucgc

SEQ ID NO: 606816 - RNA, 19 nt, Artificial Sequence
  Description of Artificial Sequence: Synthetic oligonucleotide
agcgacugacaccgaaaac

SEQ ID NO: 606817 - RNA, 19 nt, Artificial Sequence
  Description of Artificial Sequence: Synthetic oligonucleotide
uaaagucgucaugucagug

SEQ ID NO: 606818 - RNA, 19 nt, Artificial Sequence
  Description of Artificial Sequence: Synthetic oligonucleotide
acugcguuagggcuaggcu

SEQ ID NO: 606819 - RNA, 19 nt, Artificial Sequence
  Description of Artificial Sequence: Synthetic oligonucleotide
cugcguuagggcuaggcuc

SEQ ID NO: 606820 - RNA, 19 nt, Artificial Sequence
  Description of Artificial Sequence: Synthetic oligonucleotide
aggaagaccaacaggauua

SEQ ID NO: 606821 - RNA, 19 nt, Artificial Sequence
  Description of Artificial Sequence: Synthetic oligonucleotide
ugccuguggcccuaagucc

SEQ ID NO: 606822 - RNA, 19 nt, Artificial Sequence
  Description of Artificial Sequence: Synthetic oligonucleotide
aacuguggacgguuuacuu

SEQ ID NO: 606823 - RNA, 19 nt, Artificial Sequence
  Description of Artificial Sequence: Synthetic oligonucleotide
aucuuccgaauacaucucu

SEQ ID NO: 606824 - RNA, 19 nt, Artificial Sequence
  Description of Artificial Sequence: Synthetic oligonucleotide
ugacaccgaaaacagucau

SEQ ID NO: 606825 - RNA, 19 nt, Artificial Sequence
  Description of Artificial Sequence: Synthetic oligonucleotide
cuaguaagggagugugcug

SEQ ID NO: 606826 - RNA, 19 nt, Artificial Sequence
  Description of Artificial Sequence: Synthetic oligonucleotide
aauucuaagcccgcaccaa

SEQ ID NO: 606827 - RNA, 19 nt, Artificial Sequence
  Description of Artificial Sequence: Synthetic oligonucleotide
cugaggaauugaaaaguca

SEQ ID NO: 606828 - RNA, 19 nt, Artificial Sequence
  Description of Artificial Sequence: Synthetic oligonucleotide
ccaccuuccuuguugaggg

SEQ ID NO: 606829 - RNA, 19 nt, Artificial Sequence
  Description of Artificial Sequence: Synthetic oligonucleotide
aggcaugccuguucuuugg

SEQ ID NO: 606830 - RNA, 19 nt, Artificial Sequence
  Description of Artificial Sequence: Synthetic oligonucleotide
gugggaugcucacacauga

SEQ ID NO: 606831 - RNA, 19 nt, Artificial Sequence
  Description of Artificial Sequence: Synthetic oligonucleotide
cuccaucuacccacaaggc

SEQ ID NO: 606832 - RNA, 19 nt, Artificial Sequence
  Description of Artificial Sequence: Synthetic oligonucleotide
uuuuaacuguggacgguuu

SEQ ID NO: 606833 - RNA, 19 nt, Artificial Sequence
  Description of Artificial Sequence: Synthetic oligonucleotide
uugcagucgccugaaucgg

SEQ ID NO: 606834 - RNA, 19 nt, Artificial Sequence
  Description of Artificial Sequence: Synthetic oligonucleotide
cucccauguaggcuucucg

SEQ ID NO: 606835 - RNA, 19 nt, Artificial Sequence
  Description of Artificial Sequence: Synthetic oligonucleotide
aagcccgcaccaagggucc

SEQ ID NO: 606836 - RNA, 19 nt, Artificial Sequence
  Description of Artificial Sequence: Synthetic oligonucleotide
agugaacgugaagaacagg

SEQ ID NO: 606837 - RNA, 19 nt, Artificial Sequence
  Description of Artificial Sequence: Synthetic oligonucleotide
uguggcccuaaguccauga

SEQ ID NO: 606838 - RNA, 19 nt, Artificial Sequence
  Description of Artificial Sequence: Synthetic oligonucleotide
augacugcagugaacguga

SEQ ID NO: 606839 - RNA, 19 nt, Artificial Sequence
  Description of Artificial Sequence: Synthetic oligonucleotide
acuguggacgguuuacuuu

SEQ ID NO: 606840 - RNA, 19 nt, Artificial Sequence
  Description of Artificial Sequence: Synthetic oligonucleotide
gaaagacagcuugucuacc

SEQ ID NO: 606841 - RNA, 19 nt, Artificial Sequence
  Description of Artificial Sequence: Synthetic oligonucleotide
cugcccucgaacacuacac

SEQ ID NO: 606842 - RNA, 19 nt, Artificial Sequence
  Description of Artificial Sequence: Synthetic oligonucleotide
ggcccuaaguccaugaagc

SEQ ID NO: 606843 - RNA, 19 nt, Artificial Sequence
  Description of Artificial Sequence: Synthetic oligonucleotide
aagccaacgaagggguuca

SEQ ID NO: 606844 - RNA, 19 nt, Artificial Sequence
  Description of Artificial Sequence: Synthetic oligonucleotide
gaagccaacgaagggguuc

SEQ ID NO: 606845 - RNA, 19 nt, Artificial Sequence
  Description of Artificial Sequence: Synthetic oligonucleotide
gguguuggagcccuccaag

SEQ ID NO: 606846 - RNA, 19 nt, Artificial Sequence
  Description of Artificial Sequence: Synthetic oligonucleotide
uucuccuacgcaguuguuc

SEQ ID NO: 606847 - RNA, 19 nt, Artificial Sequence
  Description of Artificial Sequence: Synthetic oligonucleotide
gacuccacacuggagggug

SEQ ID NO: 606848 - RNA, 19 nt, Artificial Sequence
  Description of Artificial Sequence: Synthetic oligonucleotide
ggacgguuuacuuuauuuc

SEQ ID NO: 606849 - RNA, 19 nt, Artificial Sequence
  Description of Artificial Sequence: Synthetic oligonucleotide
ugucuaccacacgagugcc

SEQ ID NO: 606850 - RNA, 19 nt, Artificial Sequence
  Description of Artificial Sequence: Synthetic oligonucleotide
uccuacgcaguuguucacc

SEQ ID NO: 606851 - RNA, 19 nt, Artificial Sequence
  Description of Artificial Sequence: Synthetic oligonucleotide
ugcccauucugggacagca

SEQ ID NO: 606852 - RNA, 19 nt, Artificial Sequence
  Description of Artificial Sequence: Synthetic oligonucleotide
uguccacugcccucggaca

SEQ ID NO: 606853 - RNA, 19 nt, Artificial Sequence
  Description of Artificial Sequence: Synthetic oligonucleotide
agcuuggauucaccgccac

SEQ ID NO: 606854 - RNA, 19 nt, Artificial Sequence
  Description of Artificial Sequence: Synthetic oligonucleotide
uggacugaagacagagcua

SEQ ID NO: 606855 - RNA, 19 nt, Artificial Sequence
  Description of Artificial Sequence: Synthetic oligonucleotide
acgagugccugaacaacac

SEQ ID NO: 606856 - RNA, 19 nt, Artificial Sequence
  Description of Artificial Sequence: Synthetic oligonucleotide
aaagcgacugacaccgaaa

SEQ ID NO: 606857 - RNA, 19 nt, Artificial Sequence
  Description of Artificial Sequence: Synthetic oligonucleotide
ggcaaaagcgacugacacc

SEQ ID NO: 606858 - RNA, 19 nt, Artificial Sequence
  Description of Artificial Sequence: Synthetic oligonucleotide
aggcaccaggcugucaccc

SEQ ID NO: 606859 - RNA, 19 nt, Artificial Sequence
  Description of Artificial Sequence: Synthetic oligonucleotide
agccuucgcucccauguag

SEQ ID NO: 606860 - RNA, 19 nt, Artificial Sequence
  Description of Artificial Sequence: Synthetic oligonucleotide
caaacgggcccaaggcagc

SEQ ID NO: 606861 - RNA, 19 nt, Artificial Sequence
  Description of Artificial Sequence: Synthetic oligonucleotide
acacuacacuuucagugaa

SEQ ID NO: 606862 - RNA, 19 nt, Artificial Sequence
  Description of Artificial Sequence: Synthetic oligonucleotide
agucaaguauacucagcuu

SEQ ID NO: 606863 - RNA, 19 nt, Artificial Sequence
  Description of Artificial Sequence: Synthetic oligonucleotide
gggcaaaagcgacugacac

SEQ ID NO: 606864 - RNA, 19 nt, Artificial Sequence
  Description of Artificial Sequence: Synthetic oligonucleotide
gacguaauucuaagcccgc

SEQ ID NO: 606865 - RNA, 19 nt, Artificial Sequence
  Description of Artificial Sequence: Synthetic oligonucleotide
uaacuguggacgguuuacu

SEQ ID NO: 606866 - RNA, 19 nt, Artificial Sequence
  Description of Artificial Sequence: Synthetic oligonucleotide
gacagaaaggcagcugguc

SEQ ID NO: 606867 - RNA, 19 nt, Artificial Sequence
  Description of Artificial Sequence: Synthetic oligonucleotide
uauacucagcuuggauuca

SEQ ID NO: 606868 - RNA, 19 nt, Artificial Sequence
  Description of Artificial Sequence: Synthetic oligonucleotide
ugcccucgaacacuacacu

SEQ ID NO: 606869 - RNA, 19 nt, Artificial Sequence
  Description of Artificial Sequence: Synthetic oligonucleotide
gcgacugacaccgaaaaca

SEQ ID NO: 606870 - RNA, 19 nt, Artificial Sequence
  Description of Artificial Sequence: Synthetic oligonucleotide
ugacucgggccccacaguu

SEQ ID NO: 606871 - RNA, 19 nt, Artificial Sequence
  Description of Artificial Sequence: Synthetic oligonucleotide
acacuggagggugacacca

SEQ ID NO: 606872 - RNA, 19 nt, Artificial Sequence
  Description of Artificial Sequence: Synthetic oligonucleotide
caucuuccgaauacaucuc

SEQ ID NO: 606873 - RNA, 19 nt, Artificial Sequence
  Description of Artificial Sequence: Synthetic oligonucleotide
guagagcauugguucuuag

SEQ ID NO: 606874 - RNA, 19 nt, Artificial Sequence
  Description of Artificial Sequence: Synthetic oligonucleotide
cagaccacucucacucagc

SEQ ID NO: 606875 - RNA, 19 nt, Artificial Sequence
  Description of Artificial Sequence: Synthetic oligonucleotide
ccaaacgggcccaaggcag

SEQ ID NO: 606876 - RNA, 19 nt, Artificial Sequence
  Description of Artificial Sequence: Synthetic oligonucleotide
aguagcauaggagcccaga

SEQ ID NO: 606877 - RNA, 19 nt, Artificial Sequence
  Description of Artificial Sequence: Synthetic oligonucleotide
cacuguaugauacauucau

SEQ ID NO: 606878 - RNA, 19 nt, Artificial Sequence
  Description of Artificial Sequence: Synthetic oligonucleotide
agggaaacacugugucucu

SEQ ID NO: 606879 - RNA, 19 nt, Artificial Sequence
  Description of Artificial Sequence: Synthetic oligonucleotide
ugggaugcucacacaugac

SEQ ID NO: 606880 - RNA, 19 nt, Artificial Sequence
  Description of Artificial Sequence: Synthetic oligonucleotide
ucgaucucuguuucaucau

SEQ ID NO: 606881 - RNA, 19 nt, Artificial Sequence
  Description of Artificial Sequence: Synthetic oligonucleotide
agcaaaggaacaaccuaga

SEQ ID NO: 606882 - RNA, 19 nt, Artificial Sequence
  Description of Artificial Sequence: Synthetic oligonucleotide
cacgagugccugaacaaca

SEQ ID NO: 606883 - RNA, 19 nt, Artificial Sequence
  Description of Artificial Sequence: Synthetic oligonucleotide
gagcacaagaaucucugau

SEQ ID NO: 606884 - RNA, 19 nt, Artificial Sequence
  Description of Artificial Sequence: Synthetic oligonucleotide
cuguggacgguuuacuuua

SEQ ID NO: 606885 - RNA, 19 nt, Artificial Sequence
  Description of Artificial Sequence: Synthetic oligonucleotide
ccgauucugacacaugcac

SEQ ID NO: 606886 - RNA, 19 nt, Artificial Sequence
  Description of Artificial Sequence: Synthetic oligonucleotide
acugccgauucugacacau

SEQ ID NO: 606887 - RNA, 19 nt, Artificial Sequence
  Description of Artificial Sequence: Synthetic oligonucleotide
gucgccugaaucggaagcc

SEQ ID NO: 606888 - RNA, 19 nt, Artificial Sequence
  Description of Artificial Sequence: Synthetic oligonucleotide
ugcuagguguuggagcccu

SEQ ID NO: 606889 - RNA, 19 nt, Artificial Sequence
  Description of Artificial Sequence: Synthetic oligonucleotide
gauuacaguuaugggaggu

SEQ ID NO: 606890 - RNA, 19 nt, Artificial Sequence
  Description of Artificial Sequence: Synthetic oligonucleotide
accacacgagugccugaac

SEQ ID NO: 606891 - RNA, 19 nt, Artificial Sequence
  Description of Artificial Sequence: Synthetic oligonucleotide
ccugaaucggaagccaacg

SEQ ID NO: 606892 - RNA, 19 nt, Artificial Sequence
  Description of Artificial Sequence: Synthetic oligonucleotide
guagaucaccucgccaggc

SEQ ID NO: 606893 - RNA, 19 nt, Artificial Sequence
  Description of Artificial Sequence: Synthetic oligonucleotide
ugcaugcuguuaguuuggc

SEQ ID NO: 606894 - RNA, 19 nt, Artificial Sequence
  Description of Artificial Sequence: Synthetic oligonucleotide
gaaggcucauacagagaac

SEQ ID NO: 606895 - RNA, 19 nt, Artificial Sequence
  Description of Artificial Sequence: Synthetic oligonucleotide
gcaaacucuccauguauuc

SEQ ID NO: 606896 - RNA, 19 nt, Artificial Sequence
  Description of Artificial Sequence: Synthetic oligonucleotide
cucacugcguuagggcuag

SEQ ID NO: 606897 - RNA, 19 nt, Artificial Sequence
  Description of Artificial Sequence: Synthetic oligonucleotide
gaccaacaggauuacaguu

SEQ ID NO: 606898 - RNA, 19 nt, Artificial Sequence
  Description of Artificial Sequence: Synthetic oligonucleotide
ccuagaaguuuaaggcaag

SEQ ID NO: 606899 - RNA, 19 nt, Artificial Sequence
  Description of Artificial Sequence: Synthetic oligonucleotide
gugggcacgcucuggcuug

SEQ ID NO: 606900 - RNA, 19 nt, Artificial Sequence
  Description of Artificial Sequence: Synthetic oligonucleotide
ggcucauacagagaacuca

SEQ ID NO: 606901 - RNA, 19 nt, Artificial Sequence
  Description of Artificial Sequence: Synthetic oligonucleotide
cugaaucggaagccaacga

SEQ ID NO: 606902 - RNA, 19 nt, Artificial Sequence
  Description of Artificial Sequence: Synthetic oligonucleotide
cuccuagcaguggcuaugc

SEQ ID NO: 606903 - RNA, 19 nt, Artificial Sequence
  Description of Artificial Sequence: Synthetic oligonucleotide
uggugguaagauggccucc

SEQ ID NO: 606904 - RNA, 19 nt, Artificial Sequence
  Description of Artificial Sequence: Synthetic oligonucleotide
cagagacaaucugagguca

SEQ ID NO: 606905 - RNA, 19 nt, Artificial Sequence
  Description of Artificial Sequence: Synthetic oligonucleotide
ccuacgcaguuguucaccc

SEQ ID NO: 606906 - RNA, 19 nt, Artificial Sequence
  Description of Artificial Sequence: Synthetic oligonucleotide
uguggacgguuuacuuuau

SEQ ID NO: 606907 - RNA, 19 nt, Artificial Sequence
  Description of Artificial Sequence: Synthetic oligonucleotide
cacugcguuagggcuaggc

SEQ ID NO: 606908 - RNA, 19 nt, Artificial Sequence
  Description of Artificial Sequence: Synthetic oligonucleotide
acgguuuacuuuauuucau

SEQ ID NO: 606909 - RNA, 19 nt, Artificial Sequence
  Description of Artificial Sequence: Synthetic oligonucleotide
ggugagaagucacugcacu

SEQ ID NO: 606910 - RNA, 19 nt, Artificial Sequence
  Description of Artificial Sequence: Synthetic oligonucleotide
caacgaagggguucaucca

SEQ ID NO: 606911 - RNA, 19 nt, Artificial Sequence
  Description of Artificial Sequence: Synthetic oligonucleotide
aaacgggcccaaggcagcu

SEQ ID NO: 606912 - RNA, 19 nt, Artificial Sequence
  Description of Artificial Sequence: Synthetic oligonucleotide
aaggaacaaccuagaaguu

SEQ ID NO: 606913 - RNA, 19 nt, Artificial Sequence
  Description of Artificial Sequence: Synthetic oligonucleotide
ugaggucacgcugucccuc

SEQ ID NO: 606914 - RNA, 19 nt, Artificial Sequence
  Description of Artificial Sequence: Synthetic oligonucleotide
uguauuccuuuguggcauu

SEQ ID NO: 606915 - RNA, 19 nt, Artificial Sequence
  Description of Artificial Sequence: Synthetic oligonucleotide
ucgccugaaucggaagcca

SEQ ID NO: 606916 - RNA, 19 nt, Artificial Sequence
  Description of Artificial Sequence: Synthetic oligonucleotide
cagucgccugaaucggaag

SEQ ID NO: 606917 - RNA, 19 nt, Artificial Sequence
  Description of Artificial Sequence: Synthetic oligonucleotide
ucccaccgcagccuucgcu

SEQ ID NO: 606918 - RNA, 19 nt, Artificial Sequence
  Description of Artificial Sequence: Synthetic oligonucleotide
ccgaaaacagucauggugu

SEQ ID NO: 606919 - RNA, 19 nt, Artificial Sequence
  Description of Artificial Sequence: Synthetic oligonucleotide
ggaugggccagccggacuc

SEQ ID NO: 606920 - RNA, 19 nt, Artificial Sequence
  Description of Artificial Sequence: Synthetic oligonucleotide
acguaauucuaagcccgca

SEQ ID NO: 606921 - RNA, 19 nt, Artificial Sequence
  Description of Artificial Sequence: Synthetic oligonucleotide
ugcuguuaguuuggcugga

SEQ ID NO: 606922 - RNA, 19 nt, Artificial Sequence
  Description of Artificial Sequence: Synthetic oligonucleotide
ggaaccccuucuaguaagg

SEQ ID NO: 606923 - RNA, 19 nt, Artificial Sequence
  Description of Artificial Sequence: Synthetic oligonucleotide
caguuaugggaggugagaa

SEQ ID NO: 606924 - RNA, 19 nt, Artificial Sequence
  Description of Artificial Sequence: Synthetic oligonucleotide
uccuagcaguggcuaugcu

SEQ ID NO: 606925 - RNA, 19 nt, Artificial Sequence
  Description of Artificial Sequence: Synthetic oligonucleotide
caggagggugggcccaugc

SEQ ID NO: 606926 - RNA, 19 nt, Artificial Sequence
  Description of Artificial Sequence: Synthetic oligonucleotide
guagcauaggagcccagau

SEQ ID NO: 606927 - RNA, 19 nt, Artificial Sequence
  Description of Artificial Sequence: Synthetic oligonucleotide
acacacacacacacagaga

SEQ ID NO: 606928 - RNA, 19 nt, Artificial Sequence
  Description of Artificial Sequence: Synthetic oligonucleotide
acauacagacuugcuggaa

SEQ ID NO: 606929 - RNA, 19 nt, Artificial Sequence
  Description of Artificial Sequence: Synthetic oligonucleotide
guacagaaauaaagucguc

SEQ ID NO: 606930 - RNA, 19 nt, Artificial Sequence
  Description of Artificial Sequence: Synthetic oligonucleotide
gcauugguucuuagguggg

SEQ ID NO: 606931 - RNA, 19 nt, Artificial Sequence
  Description of Artificial Sequence: Synthetic oligonucleotide
acaugcacacacacacaca

SEQ ID NO: 606932 - RNA, 19 nt, Artificial Sequence
  Description of Artificial Sequence: Synthetic oligonucleotide
cguaauucuaagcccgcac

SEQ ID NO: 606933 - RNA, 19 nt, Artificial Sequence
  Description of Artificial Sequence: Synthetic oligonucleotide
gggguucauccagaggagg

SEQ ID NO: 606934 - RNA, 19 nt, Artificial Sequence
  Description of Artificial Sequence: Synthetic oligonucleotide
ccgucagcuggccagcucc

SEQ ID NO: 606935 - RNA, 19 nt, Artificial Sequence
  Description of Artificial Sequence: Synthetic oligonucleotide
ccacuucccugaaacacug

SEQ ID NO: 606936 - RNA, 19 nt, Artificial Sequence
  Description of Artificial Sequence: Synthetic oligonucleotide
ugacugcagugaacgugaa

SEQ ID NO: 606937 - RNA, 19 nt, Artificial Sequence
  Description of Artificial Sequence: Synthetic oligonucleotide
ucgucaugucagugcucug

SEQ ID NO: 606938 - RNA, 19 nt, Artificial Sequence
  Description of Artificial Sequence: Synthetic oligonucleotide
acacacacacacacacaca

SEQ ID NO: 606939 - RNA, 19 nt, Artificial Sequence
  Description of Artificial Sequence: Synthetic oligonucleotide
acgcucuggcuugaugcag

SEQ ID NO: 606940 - RNA, 19 nt, Artificial Sequence
  Description of Artificial Sequence: Synthetic oligonucleotide
caaguauacucagcuugga

SEQ ID NO: 606941 - RNA, 19 nt, Artificial Sequence
  Description of Artificial Sequence: Synthetic oligonucleotide
acacacacacacagagaga

SEQ ID NO: 606942 - RNA, 19 nt, Artificial Sequence
  Description of Artificial Sequence: Synthetic oligonucleotide
acacaugcacacacacaca

SEQ ID NO: 606943 - RNA, 19 nt, Artificial Sequence
  Description of Artificial Sequence: Synthetic oligonucleotide
cacaguuugcucacugcgu

SEQ ID NO: 606944 - RNA, 19 nt, Artificial Sequence
  Description of Artificial Sequence: Synthetic oligonucleotide
acacacacacacacacaga

SEQ ID NO: 606945 - RNA, 19 nt, Artificial Sequence
  Description of Artificial Sequence: Synthetic oligonucleotide
gaugggccagccggacucc

SEQ ID NO: 606946 - RNA, 19 nt, Artificial Sequence
  Description of Artificial Sequence: Synthetic oligonucleotide
ccgaauacaucucuugcaa

SEQ ID NO: 606947 - RNA, 19 nt, Artificial Sequence
  Description of Artificial Sequence: Synthetic oligonucleotide
cccgaagacagacuucauc

SEQ ID NO: 606948 - RNA, 19 nt, Artificial Sequence
  Description of Artificial Sequence: Synthetic oligonucleotide
gaacaaccuagaaguuuaa

SEQ ID NO: 606949 - RNA, 19 nt, Artificial Sequence
  Description of Artificial Sequence: Synthetic oligonucleotide
uuucuccuacgcaguuguu

SEQ ID NO: 606950 - RNA, 19 nt, Artificial Sequence
  Description of Artificial Sequence: Synthetic oligonucleotide
cacuacacuuucagugaaa

SEQ ID NO: 606951 - RNA, 19 nt, Artificial Sequence
  Description of Artificial Sequence: Synthetic oligonucleotide
auggccccgucagcuggcc

SEQ ID NO: 606952 - RNA, 19 nt, Artificial Sequence
  Description of Artificial Sequence: Synthetic oligonucleotide
caguagcauaggagcccag

SEQ ID NO: 606953 - RNA, 19 nt, Artificial Sequence
  Description of Artificial Sequence: Synthetic oligonucleotide
cccuaaguccaugaagcug

SEQ ID NO: 606954 - RNA, 19 nt, Artificial Sequence
  Description of Artificial Sequence: Synthetic oligonucleotide
cugcaugcucagacacaug

SEQ ID NO: 606955 - RNA, 19 nt, Artificial Sequence
  Description of Artificial Sequence: Synthetic oligonucleotide
aagugucaggaugguggua

SEQ ID NO: 606956 - RNA, 19 nt, Artificial Sequence
  Description of Artificial Sequence: Synthetic oligonucleotide
cugcaaacucuccauguau

SEQ ID NO: 606957 - RNA, 19 nt, Artificial Sequence
  Description of Artificial Sequence: Synthetic oligonucleotide
augcacacacacacacaca

SEQ ID NO: 606958 - RNA, 19 nt, Artificial Sequence
  Description of Artificial Sequence: Synthetic oligonucleotide
caagggccagcagugcguc

SEQ ID NO: 606959 - RNA, 19 nt, Artificial Sequence
  Description of Artificial Sequence: Synthetic oligonucleotide
cuacgcaguuguucaccca

SEQ ID NO: 606960 - RNA, 19 nt, Artificial Sequence
  Description of Artificial Sequence: Synthetic oligonucleotide
cugugggaugcucacacau

SEQ ID NO: 606961 - RNA, 19 nt, Artificial Sequence
  Description of Artificial Sequence: Synthetic oligonucleotide
agccggacuccuagcagug

SEQ ID NO: 606962 - RNA, 19 nt, Artificial Sequence
  Description of Artificial Sequence: Synthetic oligonucleotide
ccacacgagugccugaaca

SEQ ID NO: 606963 - RNA, 19 nt, Artificial Sequence
  Description of Artificial Sequence: Synthetic oligonucleotide
cccaccgcagccuucgcuc

SEQ ID NO: 606964 - RNA, 19 nt, Artificial Sequence
  Description of Artificial Sequence: Synthetic oligonucleotide
cauugcauauugaguggau

SEQ ID NO: 606965 - RNA, 19 nt, Artificial Sequence
  Description of Artificial Sequence: Synthetic oligonucleotide
caaguccccugaggggagc

SEQ ID NO: 606966 - RNA, 19 nt, Artificial Sequence
  Description of Artificial Sequence: Synthetic oligonucleotide
guggcccuaaguccaugaa

SEQ ID NO: 606967 - RNA, 19 nt, Artificial Sequence
  Description of Artificial Sequence: Synthetic oligonucleotide
uucccaccgcagccuucgc

SEQ ID NO: 606968 - RNA, 19 nt, Artificial Sequence
  Description of Artificial Sequence: Synthetic oligonucleotide
gaacaacacugccgauucu

SEQ ID NO: 606969 - RNA, 19 nt, Artificial Sequence
  Description of Artificial Sequence: Synthetic oligonucleotide
caccgcagccuucgcuccc

SEQ ID NO: 606970 - RNA, 19 nt, Artificial Sequence
  Description of Artificial Sequence: Synthetic oligonucleotide
cagcuuggauucaccgcca

SEQ ID NO: 606971 - RNA, 19 nt, Artificial Sequence
  Description of Artificial Sequence: Synthetic oligonucleotide
cccucaaggcacaggaaga

SEQ ID NO: 606972 - RNA, 19 nt, Artificial Sequence
  Description of Artificial Sequence: Synthetic oligonucleotide
aggaguggacucacaggaa

SEQ ID NO: 606973 - RNA, 19 nt, Artificial Sequence
  Description of Artificial Sequence: Synthetic oligonucleotide
gacuccuagcaguggcuau

SEQ ID NO: 606974 - RNA, 19 nt, Artificial Sequence
  Description of Artificial Sequence: Synthetic oligonucleotide
gugcuagguguuggagccc

SEQ ID NO: 606975 - RNA, 19 nt, Artificial Sequence
  Description of Artificial Sequence: Synthetic oligonucleotide
gcuuggauucaccgccaca

SEQ ID NO: 606976 - RNA, 19 nt, Artificial Sequence
  Description of Artificial Sequence: Synthetic oligonucleotide
cugucagaccacucucacu

SEQ ID NO: 606977 - RNA, 19 nt, Artificial Sequence
  Description of Artificial Sequence: Synthetic oligonucleotide
acaagugccuguggcccua

SEQ ID NO: 606978 - RNA, 19 nt, Artificial Sequence
  Description of Artificial Sequence: Synthetic oligonucleotide
cucucgaucucuguuucau

SEQ ID NO: 606979 - RNA, 19 nt, Artificial Sequence
  Description of Artificial Sequence: Synthetic oligonucleotide
cgggucaaguagagcauug

SEQ ID NO: 606980 - RNA, 19 nt, Artificial Sequence
  Description of Artificial Sequence: Synthetic oligonucleotide
cccaaacgggcccaaggca

SEQ ID NO: 606981 - RNA, 19 nt, Artificial Sequence
  Description of Artificial Sequence: Synthetic oligonucleotide
cagucucuguggaaccccu

SEQ ID NO: 606982 - RNA, 19 nt, Artificial Sequence
  Description of Artificial Sequence: Synthetic oligonucleotide
aacgggcccaaggcagcuu

SEQ ID NO: 606983 - RNA, 19 nt, Artificial Sequence
  Description of Artificial Sequence: Synthetic oligonucleotide
ccauggguacagaaauaaa

SEQ ID NO: 606984 - RNA, 19 nt, Artificial Sequence
  Description of Artificial Sequence: Synthetic oligonucleotide
ggcuaggcucacagguccc

SEQ ID NO: 606985 - RNA, 19 nt, Artificial Sequence
  Description of Artificial Sequence: Synthetic oligonucleotide
ucacugcguuagggcuagg

SEQ ID NO: 606986 - RNA, 19 nt, Artificial Sequence
  Description of Artificial Sequence: Synthetic oligonucleotide
gcacacacacacacacaca

SEQ ID NO: 606987 - RNA, 19 nt, Artificial Sequence
  Description of Artificial Sequence: Synthetic oligonucleotide
gucaccccugcagcaccug

SEQ ID NO: 606988 - RNA, 19 nt, Artificial Sequence
  Description of Artificial Sequence: Synthetic oligonucleotide
gcaugcuguuaguuuggcu

SEQ ID NO: 606989 - RNA, 19 nt, Artificial Sequence
  Description of Artificial Sequence: Synthetic oligonucleotide
ggacuccuagcaguggcua

SEQ ID NO: 606990 - RNA, 19 nt, Artificial Sequence
  Description of Artificial Sequence: Synthetic oligonucleotide
guguguguacugacguaau

SEQ ID NO: 606991 - RNA, 19 nt, Artificial Sequence
  Description of Artificial Sequence: Synthetic oligonucleotide
cacugccgauucugacaca

SEQ ID NO: 606992 - RNA, 19 nt, Artificial Sequence
  Description of Artificial Sequence: Synthetic oligonucleotide
guggacgguuuacuuuauu

SEQ ID NO: 606993 - RNA, 19 nt, Artificial Sequence
  Description of Artificial Sequence: Synthetic oligonucleotide
ccaaggguccacucugacu

SEQ ID NO: 606994 - RNA, 19 nt, Artificial Sequence
  Description of Artificial Sequence: Synthetic oligonucleotide
gcccucgaacacuacacuu

SEQ ID NO: 606995 - RNA, 19 nt, Artificial Sequence
  Description of Artificial Sequence: Synthetic oligonucleotide
gcucacugcguuagggcua

SEQ ID NO: 606996 - RNA, 19 nt, Artificial Sequence
  Description of Artificial Sequence: Synthetic oligonucleotide
gcucccauguaggcuucuc

SEQ ID NO: 606997 - RNA, 19 nt, Artificial Sequence
  Description of Artificial Sequence: Synthetic oligonucleotide
gacucgggccccacaguuu

SEQ ID NO: 606998 - RNA, 19 nt, Artificial Sequence
  Description of Artificial Sequence: Synthetic oligonucleotide
ccauuugcagucgccugaa

SEQ ID NO: 606999 - RNA, 19 nt, Artificial Sequence
  Description of Artificial Sequence: Synthetic oligonucleotide
agccaacgaagggguucau

SEQ ID NO: 607000 - RNA, 19 nt, Artificial Sequence
  Description of Artificial Sequence: Synthetic oligonucleotide
cauuugcagucgccugaau

SEQ ID NO: 607001 - RNA, 19 nt, Artificial Sequence
  Description of Artificial Sequence: Synthetic oligonucleotide
agcccgcaccaagggucca

SEQ ID NO: 607002 - RNA, 19 nt, Artificial Sequence
  Description of Artificial Sequence: Synthetic oligonucleotide
gggaugggccagccggacu

SEQ ID NO: 607003 - RNA, 19 nt, Artificial Sequence
  Description of Artificial Sequence: Synthetic oligonucleotide
gccccgucagcuggccagc

SEQ ID NO: 607004 - RNA, 19 nt, Artificial Sequence
  Description of Artificial Sequence: Synthetic oligonucleotide
caagugccuguggcccuaa

SEQ ID NO: 607005 - RNA, 19 nt, Artificial Sequence
  Description of Artificial Sequence: Synthetic oligonucleotide
cccgucagcuggccagcuc

SEQ ID NO: 607006 - RNA, 19 nt, Artificial Sequence
  Description of Artificial Sequence: Synthetic oligonucleotide
cgggcccaaggcagcuugc

SEQ ID NO: 607007 - RNA, 19 nt, Artificial Sequence
  Description of Artificial Sequence: Synthetic oligonucleotide
ccccuucuaguaagggagu

SEQ ID NO: 607008 - RNA, 19 nt, Artificial Sequence
  Description of Artificial Sequence: Synthetic oligonucleotide
gcuagguguuggagcccuc

SEQ ID NO: 607009 - RNA, 19 nt, Artificial Sequence
  Description of Artificial Sequence: Synthetic oligonucleotide
gcguuagggcuaggcucac

SEQ ID NO: 607010 - RNA, 19 nt, Artificial Sequence
  Description of Artificial Sequence: Synthetic oligonucleotide
cguuagggcuaggcucaca

SEQ ID NO: 607011 - RNA, 19 nt, Artificial Sequence
  Description of Artificial Sequence: Synthetic oligonucleotide
ccgggucaaguagagcauu

SEQ ID NO: 607012 - RNA, 19 nt, Artificial Sequence
  Description of Artificial Sequence: Synthetic oligonucleotide
uuaauuaucaauaacuugu

SEQ ID NO: 607013 - RNA, 19 nt, Artificial Sequence
  Description of Artificial Sequence: Synthetic oligonucleotide
aaucuuagcacacacuacc

SEQ ID NO: 607014 - RNA, 19 nt, Artificial Sequence
  Description of Artificial Sequence: Synthetic oligonucleotide
uuuaaaucaacaaagcacu

SEQ ID NO: 607015 - RNA, 19 nt, Artificial Sequence
  Description of Artificial Sequence: Synthetic oligonucleotide
aauaauaucuauaacuauc

SEQ ID NO: 607016 - RNA, 19 nt, Artificial Sequence
  Description of Artificial Sequence: Synthetic oligonucleotide
uuaauauucacuccuaaga

SEQ ID NO: 607017 - RNA, 19 nt, Artificial Sequence
  Description of Artificial Sequence: Synthetic oligonucleotide
cuauauaucacccaucugc

SEQ ID NO: 607018 - RNA, 19 nt, Artificial Sequence
  Description of Artificial Sequence: Synthetic oligonucleotide
aauuauacgguucugggga

SEQ ID NO: 607019 - RNA, 19 nt, Artificial Sequence
  Description of Artificial Sequence: Synthetic oligonucleotide
uuuacauuacuaaagguac

SEQ ID NO: 607020 - RNA, 19 nt, Artificial Sequence
  Description of Artificial Sequence: Synthetic oligonucleotide
auuaucgcuauauaucacc

SEQ ID NO: 607021 - RNA, 19 nt, Artificial Sequence
  Description of Artificial Sequence: Synthetic oligonucleotide
aaauacagaagacucgauc

SEQ ID NO: 607022 - RNA, 19 nt, Artificial Sequence
  Description of Artificial Sequence: Synthetic oligonucleotide
aggucuauuauccaagccc

SEQ ID NO: 607023 - RNA, 19 nt, Artificial Sequence
  Description of Artificial Sequence: Synthetic oligonucleotide
aagacuaacaccaagcaag

SEQ ID NO: 607024 - RNA, 19 nt, Artificial Sequence
  Description of Artificial Sequence: Synthetic oligonucleotide
aaaaguucaucccuauagg

SEQ ID NO: 607025 - RNA, 19 nt, Artificial Sequence
  Description of Artificial Sequence: Synthetic oligonucleotide
aauaaugguacggggaacc

SEQ ID NO: 607026 - RNA, 19 nt, Artificial Sequence
  Description of Artificial Sequence: Synthetic oligonucleotide
agaacuaauuauuaucaac

SEQ ID NO: 607027 - RNA, 19 nt, Artificial Sequence
  Description of Artificial Sequence: Synthetic oligonucleotide
ugaauuuugaaaaucaguu

SEQ ID NO: 607028 - RNA, 19 nt, Artificial Sequence
  Description of Artificial Sequence: Synthetic oligonucleotide
aacuaucugaauuaagucu

SEQ ID NO: 607029 - RNA, 19 nt, Artificial Sequence
  Description of Artificial Sequence: Synthetic oligonucleotide
uuauauaacugauuaaagu

SEQ ID NO: 607030 - RNA, 19 nt, Artificial Sequence
  Description of Artificial Sequence: Synthetic oligonucleotide
ugaauuaagucuuccacag

SEQ ID NO: 607031 - RNA, 19 nt, Artificial Sequence
  Description of Artificial Sequence: Synthetic oligonucleotide
aaaaucuuagcacacacua

SEQ ID NO: 607032 - RNA, 19 nt, Artificial Sequence
  Description of Artificial Sequence: Synthetic oligonucleotide
ucuauuaucgcuauauauc

SEQ ID NO: 607033 - RNA, 19 nt, Artificial Sequence
  Description of Artificial Sequence: Synthetic oligonucleotide
aaacgcaacagccaaagca

SEQ ID NO: 607034 - RNA, 19 nt, Artificial Sequence
  Description of Artificial Sequence: Synthetic oligonucleotide
uuaucaauaacuugucagc

SEQ ID NO: 607035 - RNA, 19 nt, Artificial Sequence
  Description of Artificial Sequence: Synthetic oligonucleotide
aaagaacuaauuauuauca

SEQ ID NO: 607036 - RNA, 19 nt, Artificial Sequence
  Description of Artificial Sequence: Synthetic oligonucleotide
aauaccugaaagcaaacau

SEQ ID NO: 607037 - RNA, 19 nt, Artificial Sequence
  Description of Artificial Sequence: Synthetic oligonucleotide
ucaugauuaauauucacuc

SEQ ID NO: 607038 - RNA, 19 nt, Artificial Sequence
  Description of Artificial Sequence: Synthetic oligonucleotide
uaaguuuaaaccuugucuc

SEQ ID NO: 607039 - RNA, 19 nt, Artificial Sequence
  Description of Artificial Sequence: Synthetic oligonucleotide
aauaacuugucagcuaagg

SEQ ID NO: 607040 - RNA, 19 nt, Artificial Sequence
  Description of Artificial Sequence: Synthetic oligonucleotide
aaugguacggggaaccucc

SEQ ID NO: 607041 - RNA, 19 nt, Artificial Sequence
  Description of Artificial Sequence: Synthetic oligonucleotide
aguucaucccuauaggagg

SEQ ID NO: 607042 - RNA, 19 nt, Artificial Sequence
  Description of Artificial Sequence: Synthetic oligonucleotide
cuaacaccaagcaaggucc

SEQ ID NO: 607043 - RNA, 19 nt, Artificial Sequence
  Description of Artificial Sequence: Synthetic oligonucleotide
uugcuuagguuuuaaauag

SEQ ID NO: 607044 - RNA, 19 nt, Artificial Sequence
  Description of Artificial Sequence: Synthetic oligonucleotide
aguucagacacuaaaacag

SEQ ID NO: 607045 - RNA, 19 nt, Artificial Sequence
  Description of Artificial Sequence: Synthetic oligonucleotide
augauuaauauucacuccu

SEQ ID NO: 607046 - RNA, 19 nt, Artificial Sequence
  Description of Artificial Sequence: Synthetic oligonucleotide
acuacaaacagagaaaacu

SEQ ID NO: 607047 - RNA, 19 nt, Artificial Sequence
  Description of Artificial Sequence: Synthetic oligonucleotide
cuuaauuaucaauaacuug

SEQ ID NO: 607048 - RNA, 19 nt, Artificial Sequence
  Description of Artificial Sequence: Synthetic oligonucleotide
aacgcaacagccaaagcac

SEQ ID NO: 607049 - RNA, 19 nt, Artificial Sequence
  Description of Artificial Sequence: Synthetic oligonucleotide
guuacaauaaugguacggg

SEQ ID NO: 607050 - RNA, 19 nt, Artificial Sequence
  Description of Artificial Sequence: Synthetic oligonucleotide
ucuauaacuaucugaauua

SEQ ID NO: 607051 - RNA, 19 nt, Artificial Sequence
  Description of Artificial Sequence: Synthetic oligonucleotide
uauauaucacccaucugca

SEQ ID NO: 607052 - RNA, 19 nt, Artificial Sequence
  Description of Artificial Sequence: Synthetic oligonucleotide
ggaaauaaaagccuguuac

SEQ ID NO: 607053 - RNA, 19 nt, Artificial Sequence
  Description of Artificial Sequence: Synthetic oligonucleotide
ucaauaacuugucagcuaa

SEQ ID NO: 607054 - RNA, 19 nt, Artificial Sequence
  Description of Artificial Sequence: Synthetic oligonucleotide
ugauauaggcucaaguggu

SEQ ID NO: 607055 - RNA, 19 nt, Artificial Sequence
  Description of Artificial Sequence: Synthetic oligonucleotide
uuacaauaaugguacgggg

SEQ ID NO: 607056 - RNA, 19 nt, Artificial Sequence
  Description of Artificial Sequence: Synthetic oligonucleotide
uauaucacccaucugcaac

SEQ ID NO: 607057 - RNA, 19 nt, Artificial Sequence
  Description of Artificial Sequence: Synthetic oligonucleotide
ucauuauaauguaauucug

SEQ ID NO: 607058 - RNA, 19 nt, Artificial Sequence
  Description of Artificial Sequence: Synthetic oligonucleotide
uuccuugugaaauagcagu

SEQ ID NO: 607059 - RNA, 19 nt, Artificial Sequence
  Description of Artificial Sequence: Synthetic oligonucleotide
uuaucgcuauauaucaccc

SEQ ID NO: 607060 - RNA, 19 nt, Artificial Sequence
  Description of Artificial Sequence: Synthetic oligonucleotide
uaauauagagcacuacaaa

SEQ ID NO: 607061 - RNA, 19 nt, Artificial Sequence
  Description of Artificial Sequence: Synthetic oligonucleotide
uguacagauacacccuucc

SEQ ID NO: 607062 - RNA, 19 nt, Artificial Sequence
  Description of Artificial Sequence: Synthetic oligonucleotide
uauccaagcccacauuuag

SEQ ID NO: 607063 - RNA, 19 nt, Artificial Sequence
  Description of Artificial Sequence: Synthetic oligonucleotide
aacuaauuauuaucaacaa

SEQ ID NO: 607064 - RNA, 19 nt, Artificial Sequence
  Description of Artificial Sequence: Synthetic oligonucleotide
agacacuaaaacaggaagc

SEQ ID NO: 607065 - RNA, 19 nt, Artificial Sequence
  Description of Artificial Sequence: Synthetic oligonucleotide
uuaagucuuccacagacau

SEQ ID NO: 607066 - RNA, 19 nt, Artificial Sequence
  Description of Artificial Sequence: Synthetic oligonucleotide
aucuauaacuaucugaauu

SEQ ID NO: 607067 - RNA, 19 nt, Artificial Sequence
  Description of Artificial Sequence: Synthetic oligonucleotide
aaauuagacaaagaacuaa

SEQ ID NO: 607068 - RNA, 19 nt, Artificial Sequence
  Description of Artificial Sequence: Synthetic oligonucleotide
uaauacugaacccauuaau

SEQ ID NO: 607069 - RNA, 19 nt, Artificial Sequence
  Description of Artificial Sequence: Synthetic oligonucleotide
uaacuugucagcuaaggua

SEQ ID NO: 607070 - RNA, 19 nt, Artificial Sequence
  Description of Artificial Sequence: Synthetic oligonucleotide
cacguuucagaauauuugc

SEQ ID NO: 607071 - RNA, 19 nt, Artificial Sequence
  Description of Artificial Sequence: Synthetic oligonucleotide
caugauuaauauucacucc

SEQ ID NO: 607072 - RNA, 19 nt, Artificial Sequence
  Description of Artificial Sequence: Synthetic oligonucleotide
cacgguacuguacagauac

SEQ ID NO: 607073 - RNA, 19 nt, Artificial Sequence
  Description of Artificial Sequence: Synthetic oligonucleotide
aguggcuacuuuucgugcc

SEQ ID NO: 607074 - RNA, 19 nt, Artificial Sequence
  Description of Artificial Sequence: Synthetic oligonucleotide
agggcuuaaacacugguga

SEQ ID NO: 607075 - RNA, 19 nt, Artificial Sequence
  Description of Artificial Sequence: Synthetic oligonucleotide
cuauuaucgcuauauauca

SEQ ID NO: 607076 - RNA, 19 nt, Artificial Sequence
  Description of Artificial Sequence: Synthetic oligonucleotide
ugauugaaacaagacuugg

SEQ ID NO: 607077 - RNA, 19 nt, Artificial Sequence
  Description of Artificial Sequence: Synthetic oligonucleotide
ugcaacacgguacuguaca

SEQ ID NO: 607078 - RNA, 19 nt, Artificial Sequence
  Description of Artificial Sequence: Synthetic oligonucleotide
cugauuaaaguuacaguac

SEQ ID NO: 607079 - RNA, 19 nt, Artificial Sequence
  Description of Artificial Sequence: Synthetic oligonucleotide
aaagacuaacaccaagcaa

SEQ ID NO: 607080 - RNA, 19 nt, Artificial Sequence
  Description of Artificial Sequence: Synthetic oligonucleotide
aaguuuaaaccuugucuca

SEQ ID NO: 607081 - RNA, 19 nt, Artificial Sequence
  Description of Artificial Sequence: Synthetic oligonucleotide
cugugcuauucuauuaucg

SEQ ID NO: 607082 - RNA, 19 nt, Artificial Sequence
  Description of Artificial Sequence: Synthetic oligonucleotide
ucaaucucuaucucccucc

SEQ ID NO: 607083 - RNA, 19 nt, Artificial Sequence
  Description of Artificial Sequence: Synthetic oligonucleotide
aacaggacucacuuuaaaa

SEQ ID NO: 607084 - RNA, 19 nt, Artificial Sequence
  Description of Artificial Sequence: Synthetic oligonucleotide
cagacacuaaaacaggaag

SEQ ID NO: 607085 - RNA, 19 nt, Artificial Sequence
  Description of Artificial Sequence: Synthetic oligonucleotide
agaccuuccagaccucugc

SEQ ID NO: 607086 - RNA, 19 nt, Artificial Sequence
  Description of Artificial Sequence: Synthetic oligonucleotide
aauuagacaaagaacuaau

SEQ ID NO: 607087 - RNA, 19 nt, Artificial Sequence
  Description of Artificial Sequence: Synthetic oligonucleotide
cagaucacagccauagcgg

SEQ ID NO: 607088 - RNA, 19 nt, Artificial Sequence
  Description of Artificial Sequence: Synthetic oligonucleotide
uaacuaucugaauuaaguc

SEQ ID NO: 607089 - RNA, 19 nt, Artificial Sequence
  Description of Artificial Sequence: Synthetic oligonucleotide
auuagguacacguuucaga

SEQ ID NO: 607090 - RNA, 19 nt, Artificial Sequence
  Description of Artificial Sequence: Synthetic oligonucleotide
auuaucaacaacaguacca

SEQ ID NO: 607091 - RNA, 19 nt, Artificial Sequence
  Description of Artificial Sequence: Synthetic oligonucleotide
uaaaacaggaagcaacauu

SEQ ID NO: 607092 - RNA, 19 nt, Artificial Sequence
  Description of Artificial Sequence: Synthetic oligonucleotide
caugcaggaagcaagucug

SEQ ID NO: 607093 - RNA, 19 nt, Artificial Sequence
  Description of Artificial Sequence: Synthetic oligonucleotide
ugugcccauuacauaaggg

SEQ ID NO: 607094 - RNA, 19 nt, Artificial Sequence
  Description of Artificial Sequence: Synthetic oligonucleotide
uaacugauauuuauucagu

SEQ ID NO: 607095 - RNA, 19 nt, Artificial Sequence
  Description of Artificial Sequence: Synthetic oligonucleotide
auuacauaagggagugucc

SEQ ID NO: 607096 - RNA, 19 nt, Artificial Sequence
  Description of Artificial Sequence: Synthetic oligonucleotide
agacauguuaccuggaaau

SEQ ID NO: 607097 - RNA, 19 nt, Artificial Sequence
  Description of Artificial Sequence: Synthetic oligonucleotide
uacugaacccauuaauugu

SEQ ID NO: 607098 - RNA, 19 nt, Artificial Sequence
  Description of Artificial Sequence: Synthetic oligonucleotide
cagaguaauaaauaggaaa

SEQ ID NO: 607099 - RNA, 19 nt, Artificial Sequence
  Description of Artificial Sequence: Synthetic oligonucleotide
agagucauaucugaaaaga

SEQ ID NO: 607100 - RNA, 19 nt, Artificial Sequence
  Description of Artificial Sequence: Synthetic oligonucleotide
aagaacuaauuauuaucaa

SEQ ID NO: 607101 - RNA, 19 nt, Artificial Sequence
  Description of Artificial Sequence: Synthetic oligonucleotide
aaacacucugggaugauug

SEQ ID NO: 607102 - RNA, 19 nt, Artificial Sequence
  Description of Artificial Sequence: Synthetic oligonucleotide
gagcacuacaaacagagaa

SEQ ID NO: 607103 - RNA, 19 nt, Artificial Sequence
  Description of Artificial Sequence: Synthetic oligonucleotide
ucaacaacaguaccacaac

SEQ ID NO: 607104 - RNA, 19 nt, Artificial Sequence
  Description of Artificial Sequence: Synthetic oligonucleotide
cacuggaggucuauuaucc

SEQ ID NO: 607105 - RNA, 19 nt, Artificial Sequence
  Description of Artificial Sequence: Synthetic oligonucleotide
ugcuauguaaaauggccac

SEQ ID NO: 607106 - RNA, 19 nt, Artificial Sequence
  Description of Artificial Sequence: Synthetic oligonucleotide
uuacauuacuaaagguaca

SEQ ID NO: 607107 - RNA, 19 nt, Artificial Sequence
  Description of Artificial Sequence: Synthetic oligonucleotide
uuacauaagggagugucca

SEQ ID NO: 607108 - RNA, 19 nt, Artificial Sequence
  Description of Artificial Sequence: Synthetic oligonucleotide
uagugugcccauuacauaa

SEQ ID NO: 607109 - RNA, 19 nt, Artificial Sequence
  Description of Artificial Sequence: Synthetic oligonucleotide
acagagaaaacugaucugu

SEQ ID NO: 607110 - RNA, 19 nt, Artificial Sequence
  Description of Artificial Sequence: Synthetic oligonucleotide
gaguucagacacuaaaaca

SEQ ID NO: 607111 - RNA, 19 nt, Artificial Sequence
  Description of Artificial Sequence: Synthetic oligonucleotide
cucaagugguuuauaaaac

SEQ ID NO: 607112 - RNA, 19 nt, Artificial Sequence
  Description of Artificial Sequence: Synthetic oligonucleotide
acggugguuacaauaaugg

SEQ ID NO: 607113 - RNA, 19 nt, Artificial Sequence
  Description of Artificial Sequence: Synthetic oligonucleotide
uuauauugaucuguguagu

SEQ ID NO: 607114 - RNA, 19 nt, Artificial Sequence
  Description of Artificial Sequence: Synthetic oligonucleotide
auaacuugucagcuaaggu

SEQ ID NO: 607115 - RNA, 19 nt, Artificial Sequence
  Description of Artificial Sequence: Synthetic oligonucleotide
acauuaagcaucccgugga

SEQ ID NO: 607116 - RNA, 19 nt, Artificial Sequence
  Description of Artificial Sequence: Synthetic oligonucleotide
uaucaauaacuugucagcu

SEQ ID NO: 607117 - RNA, 19 nt, Artificial Sequence
  Description of Artificial Sequence: Synthetic oligonucleotide
uccgguugcagccuuauau

SEQ ID NO: 607118 - RNA, 19 nt, Artificial Sequence
  Description of Artificial Sequence: Synthetic oligonucleotide
ucaacaaagcacugacagc

SEQ ID NO: 607119 - RNA, 19 nt, Artificial Sequence
  Description of Artificial Sequence: Synthetic oligonucleotide
aaauaccugaaagcaaaca

SEQ ID NO: 607120 - RNA, 19 nt, Artificial Sequence
  Description of Artificial Sequence: Synthetic oligonucleotide
aaggcccauauuuugugca

SEQ ID NO: 607121 - RNA, 19 nt, Artificial Sequence
  Description of Artificial Sequence: Synthetic oligonucleotide
aauaucuggagcacaauuu

SEQ ID NO: 607122 - RNA, 19 nt, Artificial Sequence
  Description of Artificial Sequence: Synthetic oligonucleotide
auauugaucuguguaguug

SEQ ID NO: 607123 - RNA, 19 nt, Artificial Sequence
  Description of Artificial Sequence: Synthetic oligonucleotide
ugagacuccuugcuuaggu

SEQ ID NO: 607124 - RNA, 19 nt, Artificial Sequence
  Description of Artificial Sequence: Synthetic oligonucleotide
auagcaguaagaaucacaa

SEQ ID NO: 607125 - RNA, 19 nt, Artificial Sequence
  Description of Artificial Sequence: Synthetic oligonucleotide
agaagacucgaucaaucca

SEQ ID NO: 607126 - RNA, 19 nt, Artificial Sequence
  Description of Artificial Sequence: Synthetic oligonucleotide
aucaguuuaccuguaacca

SEQ ID NO: 607127 - RNA, 19 nt, Artificial Sequence
  Description of Artificial Sequence: Synthetic oligonucleotide
auaauauagagcacuacaa

SEQ ID NO: 607128 - RNA, 19 nt, Artificial Sequence
  Description of Artificial Sequence: Synthetic oligonucleotide
uugugaaauagcaguuucu

SEQ ID NO: 607129 - RNA, 19 nt, Artificial Sequence
  Description of Artificial Sequence: Synthetic oligonucleotide
cagaagacucgaucaaucc

SEQ ID NO: 607130 - RNA, 19 nt, Artificial Sequence
  Description of Artificial Sequence: Synthetic oligonucleotide
ugaauauuagguucuccua

SEQ ID NO: 607131 - RNA, 19 nt, Artificial Sequence
  Description of Artificial Sequence: Synthetic oligonucleotide
aguaguucagugaauuuug

SEQ ID NO: 607132 - RNA, 19 nt, Artificial Sequence
  Description of Artificial Sequence: Synthetic oligonucleotide
uauuaucgcuauauaucac

SEQ ID NO: 607133 - RNA, 19 nt, Artificial Sequence
  Description of Artificial Sequence: Synthetic oligonucleotide
guaguugccaguccauugc

SEQ ID NO: 607134 - RNA, 19 nt, Artificial Sequence
  Description of Artificial Sequence: Synthetic oligonucleotide
aucgcuauauaucacccau

SEQ ID NO: 607135 - RNA, 19 nt, Artificial Sequence
  Description of Artificial Sequence: Synthetic oligonucleotide
agugaauuuugaaaaucag

SEQ ID NO: 607136 - RNA, 19 nt, Artificial Sequence
  Description of Artificial Sequence: Synthetic oligonucleotide
ucacuccuaagaauuuuca

SEQ ID NO: 607137 - RNA, 19 nt, Artificial Sequence
  Description of Artificial Sequence: Synthetic oligonucleotide
acguuucagaauauuugcc

SEQ ID NO: 607138 - RNA, 19 nt, Artificial Sequence
  Description of Artificial Sequence: Synthetic oligonucleotide
auaucacccaucugcaaca

SEQ ID NO: 607139 - RNA, 19 nt, Artificial Sequence
  Description of Artificial Sequence: Synthetic oligonucleotide
caauaagcaaagcuacaac

SEQ ID NO: 607140 - RNA, 19 nt, Artificial Sequence
  Description of Artificial Sequence: Synthetic oligonucleotide
uccuacugcuggaaaacgc

SEQ ID NO: 607141 - RNA, 19 nt, Artificial Sequence
  Description of Artificial Sequence: Synthetic oligonucleotide
uauuagguacacguuucag

SEQ ID NO: 607142 - RNA, 19 nt, Artificial Sequence
  Description of Artificial Sequence: Synthetic oligonucleotide
accuuuaacugauauuuau

SEQ ID NO: 607143 - RNA, 19 nt, Artificial Sequence
  Description of Artificial Sequence: Synthetic oligonucleotide
aguuuaaaccuugucucag

SEQ ID NO: 607144 - RNA, 19 nt, Artificial Sequence
  Description of Artificial Sequence: Synthetic oligonucleotide
uuagguucuccuacugcug

SEQ ID NO: 607145 - RNA, 19 nt, Artificial Sequence
  Description of Artificial Sequence: Synthetic oligonucleotide
uucacuccuaagaauuuuc

SEQ ID NO: 607146 - RNA, 19 nt, Artificial Sequence
  Description of Artificial Sequence: Synthetic oligonucleotide
aaaauuagacaaagaacua

SEQ ID NO: 607147 - RNA, 19 nt, Artificial Sequence
  Description of Artificial Sequence: Synthetic oligonucleotide
caguuuaccuguaaccaug

SEQ ID NO: 607148 - RNA, 19 nt, Artificial Sequence
  Description of Artificial Sequence: Synthetic oligonucleotide
aagcuacaaccagaguggc

SEQ ID NO: 607149 - RNA, 19 nt, Artificial Sequence
  Description of Artificial Sequence: Synthetic oligonucleotide
ucccguggaagaccaaggg

SEQ ID NO: 607150 - RNA, 19 nt, Artificial Sequence
  Description of Artificial Sequence: Synthetic oligonucleotide
ucuauuauccaagcccaca

SEQ ID NO: 607151 - RNA, 19 nt, Artificial Sequence
  Description of Artificial Sequence: Synthetic oligonucleotide
auaauguaauucugcuuca

SEQ ID NO: 607152 - RNA, 19 nt, Artificial Sequence
  Description of Artificial Sequence: Synthetic oligonucleotide
ugcuuagguuuuaaauagc

SEQ ID NO: 607153 - RNA, 19 nt, Artificial Sequence
  Description of Artificial Sequence: Synthetic oligonucleotide
uauacgguucuggggaagg

SEQ ID NO: 607154 - RNA, 19 nt, Artificial Sequence
  Description of Artificial Sequence: Synthetic oligonucleotide
acucgaucaauccauggaa

SEQ ID NO: 607155 - RNA, 19 nt, Artificial Sequence
  Description of Artificial Sequence: Synthetic oligonucleotide
aacggugguuacaauaaug

SEQ ID NO: 607156 - RNA, 19 nt, Artificial Sequence
  Description of Artificial Sequence: Synthetic oligonucleotide
gaauaggugcacugccuag

SEQ ID NO: 607157 - RNA, 19 nt, Artificial Sequence
  Description of Artificial Sequence: Synthetic oligonucleotide
aagcauuaggucaaacacu

SEQ ID NO: 607158 - RNA, 19 nt, Artificial Sequence
  Description of Artificial Sequence: Synthetic oligonucleotide
uggaaauaaaagccuguua

SEQ ID NO: 607159 - RNA, 19 nt, Artificial Sequence
  Description of Artificial Sequence: Synthetic oligonucleotide
auauuagguucuccuacug

SEQ ID NO: 607160 - RNA, 19 nt, Artificial Sequence
  Description of Artificial Sequence: Synthetic oligonucleotide
gguuacaauaaugguacgg

SEQ ID NO: 607161 - RNA, 19 nt, Artificial Sequence
  Description of Artificial Sequence: Synthetic oligonucleotide
aguucauuauaauguaauu

SEQ ID NO: 607162 - RNA, 19 nt, Artificial Sequence
  Description of Artificial Sequence: Synthetic oligonucleotide
agacucgaucaauccaugg

SEQ ID NO: 607163 - RNA, 19 nt, Artificial Sequence
  Description of Artificial Sequence: Synthetic oligonucleotide
uccaagcccacauuuagua

SEQ ID NO: 607164 - RNA, 19 nt, Artificial Sequence
  Description of Artificial Sequence: Synthetic oligonucleotide
gauggcguguucaagagaa

SEQ ID NO: 607165 - RNA, 19 nt, Artificial Sequence
  Description of Artificial Sequence: Synthetic oligonucleotide
uucagugaauuuugaaaau

SEQ ID NO: 607166 - RNA, 19 nt, Artificial Sequence
  Description of Artificial Sequence: Synthetic oligonucleotide
aagucuggcugugcuauuc

SEQ ID NO: 607167 - RNA, 19 nt, Artificial Sequence
  Description of Artificial Sequence: Synthetic oligonucleotide
aagaccaagggagaccaga

SEQ ID NO: 607168 - RNA, 19 nt, Artificial Sequence
  Description of Artificial Sequence: Synthetic oligonucleotide
ucgaucaauccauggaauc

SEQ ID NO: 607169 - RNA, 19 nt, Artificial Sequence
  Description of Artificial Sequence: Synthetic oligonucleotide
gaggucuauuauccaagcc

SEQ ID NO: 607170 - RNA, 19 nt, Artificial Sequence
  Description of Artificial Sequence: Synthetic oligonucleotide
cagagucauaucugaaaag

SEQ ID NO: 607171 - RNA, 19 nt, Artificial Sequence
  Description of Artificial Sequence: Synthetic oligonucleotide
acaaacagagucauaucug

SEQ ID NO: 607172 - RNA, 19 nt, Artificial Sequence
  Description of Artificial Sequence: Synthetic oligonucleotide
acuaucugaauuaagucuu

SEQ ID NO: 607173 - RNA, 19 nt, Artificial Sequence
  Description of Artificial Sequence: Synthetic oligonucleotide
aggucuuaauuaucaauaa

SEQ ID NO: 607174 - RNA, 19 nt, Artificial Sequence
  Description of Artificial Sequence: Synthetic oligonucleotide
gaagcagcauaggaggggc

SEQ ID NO: 607175 - RNA, 19 nt, Artificial Sequence
  Description of Artificial Sequence: Synthetic oligonucleotide
agcugagaggcugcaaccc

SEQ ID NO: 607176 - RNA, 19 nt, Artificial Sequence
  Description of Artificial Sequence: Synthetic oligonucleotide
uaguaguucagugaauuuu

SEQ ID NO: 607177 - RNA, 19 nt, Artificial Sequence
  Description of Artificial Sequence: Synthetic oligonucleotide
agacuaacaccaagcaagg

SEQ ID NO: 607178 - RNA, 19 nt, Artificial Sequence
  Description of Artificial Sequence: Synthetic oligonucleotide
cauccaucccuguagugug

SEQ ID NO: 607179 - RNA, 19 nt, Artificial Sequence
  Description of Artificial Sequence: Synthetic oligonucleotide
uaucgcuauauaucaccca

SEQ ID NO: 607180 - RNA, 19 nt, Artificial Sequence
  Description of Artificial Sequence: Synthetic oligonucleotide
ucccuccacacacauuaag

SEQ ID NO: 607181 - RNA, 19 nt, Artificial Sequence
  Description of Artificial Sequence: Synthetic oligonucleotide
uauauugaucuguguaguu

SEQ ID NO: 607182 - RNA, 19 nt, Artificial Sequence
  Description of Artificial Sequence: Synthetic oligonucleotide
uugcuaauacugaacccau

SEQ ID NO: 607183 - RNA, 19 nt, Artificial Sequence
  Description of Artificial Sequence: Synthetic oligonucleotide
caucccuauaggaggaaug

SEQ ID NO: 607184 - RNA, 19 nt, Artificial Sequence
  Description of Artificial Sequence: Synthetic oligonucleotide
cacgcuauuagguacacgu

SEQ ID NO: 607185 - RNA, 19 nt, Artificial Sequence
  Description of Artificial Sequence: Synthetic oligonucleotide
cagagaaaacugaucugug

SEQ ID NO: 607186 - RNA, 19 nt, Artificial Sequence
  Description of Artificial Sequence: Synthetic oligonucleotide
uauaggcucaagugguuua

SEQ ID NO: 607187 - RNA, 19 nt, Artificial Sequence
  Description of Artificial Sequence: Synthetic oligonucleotide
gugugcccauuacauaagg

SEQ ID NO: 607188 - RNA, 19 nt, Artificial Sequence
  Description of Artificial Sequence: Synthetic oligonucleotide
ugaacccauuaauuguuau

SEQ ID NO: 607189 - RNA, 19 nt, Artificial Sequence
  Description of Artificial Sequence: Synthetic oligonucleotide
agaauaggugcacugccua

SEQ ID NO: 607190 - RNA, 19 nt, Artificial Sequence
  Description of Artificial Sequence: Synthetic oligonucleotide
cagauggcguguucaagag

SEQ ID NO: 607191 - RNA, 19 nt, Artificial Sequence
  Description of Artificial Sequence: Synthetic oligonucleotide
gccauagcggcacuggagg

SEQ ID NO: 607192 - RNA, 19 nt, Artificial Sequence
  Description of Artificial Sequence: Synthetic oligonucleotide
agcauuaggucaaacacua

SEQ ID NO: 607193 - RNA, 19 nt, Artificial Sequence
  Description of Artificial Sequence: Synthetic oligonucleotide
ccguggaagaccaagggag

SEQ ID NO: 607194 - RNA, 19 nt, Artificial Sequence
  Description of Artificial Sequence: Synthetic oligonucleotide
aucaauaacuugucagcua

SEQ ID NO: 607195 - RNA, 19 nt, Artificial Sequence
  Description of Artificial Sequence: Synthetic oligonucleotide
guggcuacuuuucgugccg

SEQ ID NO: 607196 - RNA, 19 nt, Artificial Sequence
  Description of Artificial Sequence: Synthetic oligonucleotide
acacacuaccacuuuugga

SEQ ID NO: 607197 - RNA, 19 nt, Artificial Sequence
  Description of Artificial Sequence: Synthetic oligonucleotide
agaccaagggagaccagac

SEQ ID NO: 607198 - RNA, 19 nt, Artificial Sequence
  Description of Artificial Sequence: Synthetic oligonucleotide
gcagucaagggcuuaaaca

SEQ ID NO: 607199 - RNA, 19 nt, Artificial Sequence
  Description of Artificial Sequence: Synthetic oligonucleotide
uauuauccaagcccacauu

SEQ ID NO: 607200 - RNA, 19 nt, Artificial Sequence
  Description of Artificial Sequence: Synthetic oligonucleotide
gaguccaagugcaguagag

SEQ ID NO: 607201 - RNA, 19 nt, Artificial Sequence
  Description of Artificial Sequence: Synthetic oligonucleotide
cacuacaaacagagaaaac

SEQ ID NO: 607202 - RNA, 19 nt, Artificial Sequence
  Description of Artificial Sequence: Synthetic oligonucleotide
ccaauaauaucuauaacua

SEQ ID NO: 607203 - RNA, 19 nt, Artificial Sequence
  Description of Artificial Sequence: Synthetic oligonucleotide
caauaacuugucagcuaag

SEQ ID NO: 607204 - RNA, 19 nt, Artificial Sequence
  Description of Artificial Sequence: Synthetic oligonucleotide
uacuuuucgugccgggaaa

SEQ ID NO: 607205 - RNA, 19 nt, Artificial Sequence
  Description of Artificial Sequence: Synthetic oligonucleotide
ggaugauugaaacaagacu

SEQ ID NO: 607206 - RNA, 19 nt, Artificial Sequence
  Description of Artificial Sequence: Synthetic oligonucleotide
uggcguguucaagagaaac

SEQ ID NO: 607207 - RNA, 19 nt, Artificial Sequence
  Description of Artificial Sequence: Synthetic oligonucleotide
cauguuaccuggaaauaaa

SEQ ID NO: 607208 - RNA, 19 nt, Artificial Sequence
  Description of Artificial Sequence: Synthetic oligonucleotide
ugccuaggugcuuuggaaa

SEQ ID NO: 607209 - RNA, 19 nt, Artificial Sequence
  Description of Artificial Sequence: Synthetic oligonucleotide
ucucuugucucuccccauc

SEQ ID NO: 607210 - RNA, 19 nt, Artificial Sequence
  Description of Artificial Sequence: Synthetic oligonucleotide
gacugauauaggcucaagu

SEQ ID NO: 607211 - RNA, 19 nt, Artificial Sequence
  Description of Artificial Sequence: Synthetic oligonucleotide
ugcaguagagcaguacaaa

SEQ ID NO: 607212 - RNA, 19 nt, Artificial Sequence
  Description of Artificial Sequence: Synthetic oligonucleotide
gaauaucuggagcacaauu

SEQ ID NO: 607213 - RNA, 19 nt, Artificial Sequence
  Description of Artificial Sequence: Synthetic oligonucleotide
aacucuacagagauuccuu

SEQ ID NO: 607214 - RNA, 19 nt, Artificial Sequence
  Description of Artificial Sequence: Synthetic oligonucleotide
acaguacacaauggcaucu

SEQ ID NO: 607215 - RNA, 19 nt, Artificial Sequence
  Description of Artificial Sequence: Synthetic oligonucleotide
aucccuauaggaggaauga

SEQ ID NO: 607216 - RNA, 19 nt, Artificial Sequence
  Description of Artificial Sequence: Synthetic oligonucleotide
acugccuaggugcuuugga

SEQ ID NO: 607217 - RNA, 19 nt, Artificial Sequence
  Description of Artificial Sequence: Synthetic oligonucleotide
uaggguagaagggucaauu

SEQ ID NO: 607218 - RNA, 19 nt, Artificial Sequence
  Description of Artificial Sequence: Synthetic oligonucleotide
guacaaacagagucauauc

SEQ ID NO: 607219 - RNA, 19 nt, Artificial Sequence
  Description of Artificial Sequence: Synthetic oligonucleotide
agcacuacaaacagagaaa

SEQ ID NO: 607220 - RNA, 19 nt, Artificial Sequence
  Description of Artificial Sequence: Synthetic oligonucleotide
uacgguucuggggaaggcc

SEQ ID NO: 607221 - RNA, 19 nt, Artificial Sequence
  Description of Artificial Sequence: Synthetic oligonucleotide
auacgguucuggggaaggc

SEQ ID NO: 607222 - RNA, 19 nt, Artificial Sequence
  Description of Artificial Sequence: Synthetic oligonucleotide
cacacauuaagcaucccgu

SEQ ID NO: 607223 - RNA, 19 nt, Artificial Sequence
  Description of Artificial Sequence: Synthetic oligonucleotide
guagcccguacugggaacg

SEQ ID NO: 607224 - RNA, 19 nt, Artificial Sequence
  Description of Artificial Sequence: Synthetic oligonucleotide
auuauacgguucuggggaa

SEQ ID NO: 607225 - RNA, 19 nt, Artificial Sequence
  Description of Artificial Sequence: Synthetic oligonucleotide
aagacucgaucaauccaug

SEQ ID NO: 607226 - RNA, 19 nt, Artificial Sequence
  Description of Artificial Sequence: Synthetic oligonucleotide
auaccugaaagcaaacauu

SEQ ID NO: 607227 - RNA, 19 nt, Artificial Sequence
  Description of Artificial Sequence: Synthetic oligonucleotide
gugaauuuugaaaaucagu

SEQ ID NO: 607228 - RNA, 19 nt, Artificial Sequence
  Description of Artificial Sequence: Synthetic oligonucleotide
cccuauaggaggaaugaug

SEQ ID NO: 607229 - RNA, 19 nt, Artificial Sequence
  Description of Artificial Sequence: Synthetic oligonucleotide
aguccauugcuaauacuga

SEQ ID NO: 607230 - RNA, 19 nt, Artificial Sequence
  Description of Artificial Sequence: Synthetic oligonucleotide
ucgcuauauaucacccauc

SEQ ID NO: 607231 - RNA, 19 nt, Artificial Sequence
  Description of Artificial Sequence: Synthetic oligonucleotide
ggugguuacaauaauggua

SEQ ID NO: 607232 - RNA, 19 nt, Artificial Sequence
  Description of Artificial Sequence: Synthetic oligonucleotide
gaagacucgaucaauccau

SEQ ID NO: 607233 - RNA, 19 nt, Artificial Sequence
  Description of Artificial Sequence: Synthetic oligonucleotide
gagucauaucugaaaagaa

SEQ ID NO: 607234 - RNA, 19 nt, Artificial Sequence
  Description of Artificial Sequence: Synthetic oligonucleotide
augaugugcuauguaaaau

SEQ ID NO: 607235 - RNA, 19 nt, Artificial Sequence
  Description of Artificial Sequence: Synthetic oligonucleotide
gauugaaacaagacuuggu

SEQ ID NO: 607236 - RNA, 19 nt, Artificial Sequence
  Description of Artificial Sequence: Synthetic oligonucleotide
aucaugcaggaagcaaguc

SEQ ID NO: 607237 - RNA, 19 nt, Artificial Sequence
  Description of Artificial Sequence: Synthetic oligonucleotide
ggucuauuauccaagccca

SEQ ID NO: 607238 - RNA, 19 nt, Artificial Sequence
  Description of Artificial Sequence: Synthetic oligonucleotide
cuauuagguacacguuuca

SEQ ID NO: 607239 - RNA, 19 nt, Artificial Sequence
  Description of Artificial Sequence: Synthetic oligonucleotide
caaagcacgcuauuaggua

SEQ ID NO: 607240 - RNA, 19 nt, Artificial Sequence
  Description of Artificial Sequence: Synthetic oligonucleotide
agccuuauauugaucugug

SEQ ID NO: 607241 - RNA, 19 nt, Artificial Sequence
  Description of Artificial Sequence: Synthetic oligonucleotide
uguaggguagaagggucaa

SEQ ID NO: 607242 - RNA, 19 nt, Artificial Sequence
  Description of Artificial Sequence: Synthetic oligonucleotide
aaaccuugucucagaagaa

SEQ ID NO: 607243 - RNA, 19 nt, Artificial Sequence
  Description of Artificial Sequence: Synthetic oligonucleotide
aagcacgcuauuagguaca

SEQ ID NO: 607244 - RNA, 19 nt, Artificial Sequence
  Description of Artificial Sequence: Synthetic oligonucleotide
cuccuacugcuggaaaacg

SEQ ID NO: 607245 - RNA, 19 nt, Artificial Sequence
  Description of Artificial Sequence: Synthetic oligonucleotide
ugacugauauaggcucaag

SEQ ID NO: 607246 - RNA, 19 nt, Artificial Sequence
  Description of Artificial Sequence: Synthetic oligonucleotide
gccuaggugcuuuggaaag

SEQ ID NO: 607247 - RNA, 19 nt, Artificial Sequence
  Description of Artificial Sequence: Synthetic oligonucleotide
gaacaggacucacuuuaaa

SEQ ID NO: 607248 - RNA, 19 nt, Artificial Sequence
  Description of Artificial Sequence: Synthetic oligonucleotide
agucaccauuuaaaucaac

SEQ ID NO: 607249 - RNA, 19 nt, Artificial Sequence
  Description of Artificial Sequence: Synthetic oligonucleotide
gcuuagguuuuaaauagca

SEQ ID NO: 607250 - RNA, 19 nt, Artificial Sequence
  Description of Artificial Sequence: Synthetic oligonucleotide
uuuaggagccacgggugaa

SEQ ID NO: 607251 - RNA, 19 nt, Artificial Sequence
  Description of Artificial Sequence: Synthetic oligonucleotide
uaaugguacggggaaccuc

SEQ ID NO: 607252 - RNA, 19 nt, Artificial Sequence
  Description of Artificial Sequence: Synthetic oligonucleotide
agacaacaucugaauaucu

SEQ ID NO: 607253 - RNA, 19 nt, Artificial Sequence
  Description of Artificial Sequence: Synthetic oligonucleotide
uaccuguaaccaugcuggc

SEQ ID NO: 607254 - RNA, 19 nt, Artificial Sequence
  Description of Artificial Sequence: Synthetic oligonucleotide
ccuugauuuacauuacuaa

SEQ ID NO: 607255 - RNA, 19 nt, Artificial Sequence
  Description of Artificial Sequence: Synthetic oligonucleotide
gcauauuguugaauauuag

SEQ ID NO: 607256 - RNA, 19 nt, Artificial Sequence
  Description of Artificial Sequence: Synthetic oligonucleotide
agugugcccauuacauaag

SEQ ID NO: 607257 - RNA, 19 nt, Artificial Sequence
  Description of Artificial Sequence: Synthetic oligonucleotide
cuacaaccagaguggcuac

SEQ ID NO: 607258 - RNA, 19 nt, Artificial Sequence
  Description of Artificial Sequence: Synthetic oligonucleotide
aucuuagcacacacuacca

SEQ ID NO: 607259 - RNA, 19 nt, Artificial Sequence
  Description of Artificial Sequence: Synthetic oligonucleotide
auaaugguacggggaaccu

SEQ ID NO: 607260 - RNA, 19 nt, Artificial Sequence
  Description of Artificial Sequence: Synthetic oligonucleotide
gcguguucaagagaaacac

SEQ ID NO: 607261 - RNA, 19 nt, Artificial Sequence
  Description of Artificial Sequence: Synthetic oligonucleotide
acaguucauuauaauguaa

SEQ ID NO: 607262 - RNA, 19 nt, Artificial Sequence
  Description of Artificial Sequence: Synthetic oligonucleotide
agcacgcuauuagguacac

SEQ ID NO: 607263 - RNA, 19 nt, Artificial Sequence
  Description of Artificial Sequence: Synthetic oligonucleotide
ugcuaauacugaacccauu

SEQ ID NO: 607264 - RNA, 19 nt, Artificial Sequence
  Description of Artificial Sequence: Synthetic oligonucleotide
uggcuacuuuucgugccgg

SEQ ID NO: 607265 - RNA, 19 nt, Artificial Sequence
  Description of Artificial Sequence: Synthetic oligonucleotide
ggaagaccaagggagacca

SEQ ID NO: 607266 - RNA, 19 nt, Artificial Sequence
  Description of Artificial Sequence: Synthetic oligonucleotide
cuacuuuucgugccgggaa

SEQ ID NO: 607267 - RNA, 19 nt, Artificial Sequence
  Description of Artificial Sequence: Synthetic oligonucleotide
auauaggcucaagugguuu

SEQ ID NO: 607268 - RNA, 19 nt, Artificial Sequence
  Description of Artificial Sequence: Synthetic oligonucleotide
ugccaguccauugcuaaua

SEQ ID NO: 607269 - RNA, 19 nt, Artificial Sequence
  Description of Artificial Sequence: Synthetic oligonucleotide
cacucugggaugauugaaa

SEQ ID NO: 607270 - RNA, 19 nt, Artificial Sequence
  Description of Artificial Sequence: Synthetic oligonucleotide
gcuauuagguacacguuuc

SEQ ID NO: 607271 - RNA, 19 nt, Artificial Sequence
  Description of Artificial Sequence: Synthetic oligonucleotide
augagacuccuugcuuagg

SEQ ID NO: 607272 - RNA, 19 nt, Artificial Sequence
  Description of Artificial Sequence: Synthetic oligonucleotide
ucaucccuauaggaggaau

SEQ ID NO: 607273 - RNA, 19 nt, Artificial Sequence
  Description of Artificial Sequence: Synthetic oligonucleotide
gcuauauaucacccaucug

SEQ ID NO: 607274 - RNA, 19 nt, Artificial Sequence
  Description of Artificial Sequence: Synthetic oligonucleotide
cuauuauccaagcccacau

SEQ ID NO: 607275 - RNA, 19 nt, Artificial Sequence
  Description of Artificial Sequence: Synthetic oligonucleotide
guggaagaccaagggagac

SEQ ID NO: 607276 - RNA, 19 nt, Artificial Sequence
  Description of Artificial Sequence: Synthetic oligonucleotide
ggcagucaagggcuuaaac

SEQ ID NO: 607277 - RNA, 19 nt, Artificial Sequence
  Description of Artificial Sequence: Synthetic oligonucleotide
uacugggaacggugguuac

SEQ ID NO: 607278 - RNA, 19 nt, Artificial Sequence
  Description of Artificial Sequence: Synthetic oligonucleotide
gucagcuaagguacauuca

SEQ ID NO: 607279 - RNA, 19 nt, Artificial Sequence
  Description of Artificial Sequence: Synthetic oligonucleotide
uugccaguccauugcuaau

SEQ ID NO: 607280 - RNA, 19 nt, Artificial Sequence
  Description of Artificial Sequence: Synthetic oligonucleotide
ccuacugcuggaaaacgca

SEQ ID NO: 607281 - RNA, 19 nt, Artificial Sequence
  Description of Artificial Sequence: Synthetic oligonucleotide
agggaguguccaggcagac

SEQ ID NO: 607282 - RNA, 19 nt, Artificial Sequence
  Description of Artificial Sequence: Synthetic oligonucleotide
uagcccguacugggaacgg

SEQ ID NO: 607283 - RNA, 19 nt, Artificial Sequence
  Description of Artificial Sequence: Synthetic oligonucleotide
ucccuauaggaggaaugau

SEQ ID NO: 607284 - RNA, 19 nt, Artificial Sequence
  Description of Artificial Sequence: Synthetic oligonucleotide
cccauuacauaagggagug

SEQ ID NO: 607285 - RNA, 19 nt, Artificial Sequence
  Description of Artificial Sequence: Synthetic oligonucleotide
gggaacggugguuacaaua

SEQ ID NO: 607286 - RNA, 19 nt, Artificial Sequence
  Description of Artificial Sequence: Synthetic oligonucleotide
augacugauauaggcucaa

SEQ ID NO: 607287 - RNA, 19 nt, Artificial Sequence
  Description of Artificial Sequence: Synthetic oligonucleotide
auccaagcccacauuuagu

SEQ ID NO: 607288 - RNA, 19 nt, Artificial Sequence
  Description of Artificial Sequence: Synthetic oligonucleotide
gcugugcuauucuauuauc

SEQ ID NO: 607289 - RNA, 19 nt, Artificial Sequence
  Description of Artificial Sequence: Synthetic oligonucleotide
gggagaccagaccuuccag

SEQ ID NO: 607290 - RNA, 19 nt, Artificial Sequence
  Description of Artificial Sequence: Synthetic oligonucleotide
ggcuacuuuucgugccggg

SEQ ID NO: 607291 - RNA, 19 nt, Artificial Sequence
  Description of Artificial Sequence: Synthetic oligonucleotide
gguugcagccuuauauuga

SEQ ID NO: 607292 - RNA, 19 nt, Artificial Sequence
  Description of Artificial Sequence: Synthetic oligonucleotide
cccguacugggaacggugg

SEQ ID NO: 607293 - RNA, 19 nt, Artificial Sequence
  Description of Artificial Sequence: Synthetic oligonucleotide
guaaccaugcuggcaaccu

SEQ ID NO: 607294 - RNA, 19 nt, Artificial Sequence
  Description of Artificial Sequence: Synthetic oligonucleotide
cagcauaggaggggcaguc

SEQ ID NO: 607295 - RNA, 19 nt, Artificial Sequence
  Description of Artificial Sequence: Synthetic oligonucleotide
cagaauaggugcacugccu

SEQ ID NO: 607296 - RNA, 19 nt, Artificial Sequence
  Description of Artificial Sequence: Synthetic oligonucleotide
gccaguccauugcuaauac

SEQ ID NO: 607297 - RNA, 19 nt, Artificial Sequence
  Description of Artificial Sequence: Synthetic oligonucleotide
gcuauguaaaauggccaca

SEQ ID NO: 607298 - RNA, 19 nt, Artificial Sequence
  Description of Artificial Sequence: Synthetic oligonucleotide
cucgaucaauccauggaau

SEQ ID NO: 607299 - RNA, 19 nt, Artificial Sequence
  Description of Artificial Sequence: Synthetic oligonucleotide
guacugggaacggugguua

SEQ ID NO: 607300 - RNA, 19 nt, Artificial Sequence
  Description of Artificial Sequence: Synthetic oligonucleotide
ggcuuaaacacuggugaaa

SEQ ID NO: 607301 - RNA, 19 nt, Artificial Sequence
  Description of Artificial Sequence: Synthetic oligonucleotide
cagccuuauauugaucugu

SEQ ID NO: 607302 - RNA, 19 nt, Artificial Sequence
  Description of Artificial Sequence: Synthetic oligonucleotide
cagaguggcuacuuuucgu

SEQ ID NO: 607303 - RNA, 19 nt, Artificial Sequence
  Description of Artificial Sequence: Synthetic oligonucleotide
ggcaaccuuuaacugauau

SEQ ID NO: 607304 - RNA, 19 nt, Artificial Sequence
  Description of Artificial Sequence: Synthetic oligonucleotide
gguagcccguacugggaac

SEQ ID NO: 607305 - RNA, 19 nt, Artificial Sequence
  Description of Artificial Sequence: Synthetic oligonucleotide
gcuuaaacacuggugaaau

SEQ ID NO: 607306 - RNA, 19 nt, Artificial Sequence
  Description of Artificial Sequence: Synthetic oligonucleotide
ugcaacccgagaggccaga

SEQ ID NO: 607307 - RNA, 19 nt, Artificial Sequence
  Description of Artificial Sequence: Synthetic oligonucleotide
agaaacacucugggaugau

SEQ ID NO: 607308 - RNA, 19 nt, Artificial Sequence
  Description of Artificial Sequence: Synthetic oligonucleotide
ccaaagcacgcuauuaggu

SEQ ID NO: 607309 - RNA, 19 nt, Artificial Sequence
  Description of Artificial Sequence: Synthetic oligonucleotide
ugggaacggugguuacaau

SEQ ID NO: 607310 - RNA, 19 nt, Artificial Sequence
  Description of Artificial Sequence: Synthetic oligonucleotide
gaaacucccugguguuccu

SEQ ID NO: 607311 - RNA, 19 nt, Artificial Sequence
  Description of Artificial Sequence: Synthetic oligonucleotide
gggcuuaaacacuggugaa

SEQ ID NO: 607312 - RNA, 19 nt, Artificial Sequence
  Description of Artificial Sequence: Synthetic oligonucleotide
gaaacacucugggaugauu

SEQ ID NO: 607313 - RNA, 19 nt, Artificial Sequence
  Description of Artificial Sequence: Synthetic oligonucleotide
gcuacuuuucgugccggga

SEQ ID NO: 607314 - RNA, 19 nt, Artificial Sequence
  Description of Artificial Sequence: Synthetic oligonucleotide
acgcuauuagguacacguu

SEQ ID NO: 607315 - RNA, 19 nt, Artificial Sequence
  Description of Artificial Sequence: Synthetic oligonucleotide
cgaucaauccauggaauca

SEQ ID NO: 607316 - RNA, 19 nt, Artificial Sequence
  Description of Artificial Sequence: Synthetic oligonucleotide
acccgagaggccagagucu

SEQ ID NO: 607317 - RNA, 19 nt, Artificial Sequence
  Description of Artificial Sequence: Synthetic oligonucleotide
ggaaaacgcaacagccaaa

SEQ ID NO: 607318 - RNA, 19 nt, Artificial Sequence
  Description of Artificial Sequence: Synthetic oligonucleotide
gcacgcuauuagguacacg

SEQ ID NO: 607319 - RNA, 19 nt, Artificial Sequence
  Description of Artificial Sequence: Synthetic oligonucleotide
acgguacuguacagauaca

SEQ ID NO: 607320 - RNA, 19 nt, Artificial Sequence
  Description of Artificial Sequence: Synthetic oligonucleotide
cgcuauauaucacccaucu

SEQ ID NO: 607321 - RNA, 19 nt, Artificial Sequence
  Description of Artificial Sequence: Synthetic oligonucleotide
agcccguacugggaacggu

SEQ ID NO: 607322 - RNA, 19 nt, Artificial Sequence
  Description of Artificial Sequence: Synthetic oligonucleotide
caccaagcaaggucccugu

SEQ ID NO: 607323 - RNA, 19 nt, Artificial Sequence
  Description of Artificial Sequence: Synthetic oligonucleotide
cccguggaagaccaaggga

SEQ ID NO: 607324 - RNA, 19 nt, Artificial Sequence
  Description of Artificial Sequence: Synthetic oligonucleotide
cuugucagcuaagguacau

SEQ ID NO: 607325 - RNA, 19 nt, Artificial Sequence
  Description of Artificial Sequence: Synthetic oligonucleotide
gcccauuacauaagggagu

SEQ ID NO: 607326 - RNA, 19 nt, Artificial Sequence
  Description of Artificial Sequence: Synthetic oligonucleotide
augguacggggaaccuccu

SEQ ID NO: 607327 - RNA, 19 nt, Artificial Sequence
  Description of Artificial Sequence: Synthetic oligonucleotide
guacacguuucagaauauu

SEQ ID NO: 607328 - RNA, 19 nt, Artificial Sequence
  Description of Artificial Sequence: Synthetic oligonucleotide
gccuuauauugaucugugu

SEQ ID NO: 607329 - RNA, 19 nt, Artificial Sequence
  Description of Artificial Sequence: Synthetic oligonucleotide
auggcguguucaagagaaa

SEQ ID NO: 607330 - RNA, 19 nt, Artificial Sequence
  Description of Artificial Sequence: Synthetic oligonucleotide
cccgagaggccagagucuc

SEQ ID NO: 607331 - RNA, 19 nt, Artificial Sequence
  Description of Artificial Sequence: Synthetic oligonucleotide
guguaguugccaguccauu

SEQ ID NO: 607332 - RNA, 19 nt, Artificial Sequence
  Description of Artificial Sequence: Synthetic oligonucleotide
cgcaagacaacaucugaau

SEQ ID NO: 607333 - RNA, 19 nt, Artificial Sequence
  Description of Artificial Sequence: Synthetic oligonucleotide
guaggguagaagggucaau

SEQ ID NO: 607334 - RNA, 19 nt, Artificial Sequence
  Description of Artificial Sequence: Synthetic oligonucleotide
ggcccauauuuugugcaua

SEQ ID NO: 607335 - RNA, 19 nt, Artificial Sequence
  Description of Artificial Sequence: Synthetic oligonucleotide
ggugcacugccuaggugcu

SEQ ID NO: 607336 - RNA, 19 nt, Artificial Sequence
  Description of Artificial Sequence: Synthetic oligonucleotide
gguacacguuucagaauau

SEQ ID NO: 607337 - RNA, 19 nt, Artificial Sequence
  Description of Artificial Sequence: Synthetic oligonucleotide
cguguucaagagaaacacu

SEQ ID NO: 607338 - RNA, 19 nt, Artificial Sequence
  Description of Artificial Sequence: Synthetic oligonucleotide
cgcuauuagguacacguuu

SEQ ID NO: 607339 - RNA, 19 nt, Artificial Sequence
  Description of Artificial Sequence: Synthetic oligonucleotide
caguacacaauggcaucuu

SEQ ID NO: 607340 - RNA, 19 nt, Artificial Sequence
  Description of Artificial Sequence: Synthetic oligonucleotide
cggugguuacaauaauggu

SEQ ID NO: 607341 - RNA, 19 nt, Artificial Sequence
  Description of Artificial Sequence: Synthetic oligonucleotide
gggcagucaagggcuuaaa

SEQ ID NO: 607342 - RNA, 19 nt, Artificial Sequence
  Description of Artificial Sequence: Synthetic oligonucleotide
guaccacaacugugcccuu

SEQ ID NO: 607343 - RNA, 19 nt, Artificial Sequence
  Description of Artificial Sequence: Synthetic oligonucleotide
ccguacugggaacgguggu

SEQ ID NO: 607344 - RNA, 19 nt, Artificial Sequence
  Description of Artificial Sequence: Synthetic oligonucleotide
cguacugggaacggugguu

SEQ ID NO: 607345 - RNA, 19 nt, Artificial Sequence
  Description of Artificial Sequence: Synthetic oligonucleotide
ccgagaggccagagucucu

SEQ ID NO: 607346 - RNA, 19 nt, Artificial Sequence
  Description of Artificial Sequence: Synthetic oligonucleotide
gcaucccguggaagaccaa

SEQ ID NO: 607347 - RNA, 19 nt, Artificial Sequence
  Description of Artificial Sequence: Synthetic oligonucleotide
gugcacugccuaggugcuu

SEQ ID NO: 607348 - RNA, 19 nt, Artificial Sequence
  Description of Artificial Sequence: Synthetic oligonucleotide
gcggcacuggaggucuauu

SEQ ID NO: 607349 - RNA, 19 nt, Artificial Sequence
  Description of Artificial Sequence: Synthetic oligonucleotide
aaaacaauaauugaggucu

SEQ ID NO: 607350 - RNA, 19 nt, Artificial Sequence
  Description of Artificial Sequence: Synthetic oligonucleotide
aaaguaaugguauugcguc

SEQ ID NO: 607351 - RNA, 19 nt, Artificial Sequence
  Description of Artificial Sequence: Synthetic oligonucleotide
aagcuuuaaacucacgugc

SEQ ID NO: 607352 - RNA, 19 nt, Artificial Sequence
  Description of Artificial Sequence: Synthetic oligonucleotide
guagacauaaaucacaagg

SEQ ID NO: 607353 - RNA, 19 nt, Artificial Sequence
  Description of Artificial Sequence: Synthetic oligonucleotide
aauuguuuaacaguuauag

SEQ ID NO: 607354 - RNA, 19 nt, Artificial Sequence
  Description of Artificial Sequence: Synthetic oligonucleotide
uguaauguauguauaagag

SEQ ID NO: 607355 - RNA, 19 nt, Artificial Sequence
  Description of Artificial Sequence: Synthetic oligonucleotide
aaugaguucuaacuucagc

SEQ ID NO: 607356 - RNA, 19 nt, Artificial Sequence
  Description of Artificial Sequence: Synthetic oligonucleotide
uguaucaucauccuaggug

SEQ ID NO: 607357 - RNA, 19 nt, Artificial Sequence
  Description of Artificial Sequence: Synthetic oligonucleotide
aaaagcuuuaaacucacgu

SEQ ID NO: 607358 - RNA, 19 nt, Artificial Sequence
  Description of Artificial Sequence: Synthetic oligonucleotide
aaguagauccaccaucccc

SEQ ID NO: 607359 - RNA, 19 nt, Artificial Sequence
  Description of Artificial Sequence: Synthetic oligonucleotide
ucagugaucaaucaaaauc

SEQ ID NO: 607360 - RNA, 19 nt, Artificial Sequence
  Description of Artificial Sequence: Synthetic oligonucleotide
ucuaacuucagcucgacug

SEQ ID NO: 607361 - RNA, 19 nt, Artificial Sequence
  Description of Artificial Sequence: Synthetic oligonucleotide
aucuauccgagccaaaucc

SEQ ID NO: 607362 - RNA, 19 nt, Artificial Sequence
  Description of Artificial Sequence: Synthetic oligonucleotide
uucacuuuaauuguagacg

SEQ ID NO: 607363 - RNA, 19 nt, Artificial Sequence
  Description of Artificial Sequence: Synthetic oligonucleotide
aaagcuuuaaacucacgug

SEQ ID NO: 607364 - RNA, 19 nt, Artificial Sequence
  Description of Artificial Sequence: Synthetic oligonucleotide
ucaaaaucaauuacauucc

SEQ ID NO: 607365 - RNA, 19 nt, Artificial Sequence
  Description of Artificial Sequence: Synthetic oligonucleotide
aauguuucacuuuaauugu

SEQ ID NO: 607366 - RNA, 19 nt, Artificial Sequence
  Description of Artificial Sequence: Synthetic oligonucleotide
ugaucaaucaaaaucaauu

SEQ ID NO: 607367 - RNA, 19 nt, Artificial Sequence
  Description of Artificial Sequence: Synthetic oligonucleotide
ucaauuacauuccccaucc

SEQ ID NO: 607368 - RNA, 19 nt, Artificial Sequence
  Description of Artificial Sequence: Synthetic oligonucleotide
uuuucaacaugcaucaaca

SEQ ID NO: 607369 - RNA, 19 nt, Artificial Sequence
  Description of Artificial Sequence: Synthetic oligonucleotide
auuucauacaaacaccaag

SEQ ID NO: 607370 - RNA, 19 nt, Artificial Sequence
  Description of Artificial Sequence: Synthetic oligonucleotide
aucauaaugaguucuaacu

SEQ ID NO: 607371 - RNA, 19 nt, Artificial Sequence
  Description of Artificial Sequence: Synthetic oligonucleotide
ugucauagggaccuggccg

SEQ ID NO: 607372 - RNA, 19 nt, Artificial Sequence
  Description of Artificial Sequence: Synthetic oligonucleotide
guaacuagagaaaagcugg

SEQ ID NO: 607373 - RNA, 19 nt, Artificial Sequence
  Description of Artificial Sequence: Synthetic oligonucleotide
caauguucacuuaagagag

SEQ ID NO: 607374 - RNA, 19 nt, Artificial Sequence
  Description of Artificial Sequence: Synthetic oligonucleotide
uuguuuaacaguuauaguu

SEQ ID NO: 607375 - RNA, 19 nt, Artificial Sequence
  Description of Artificial Sequence: Synthetic oligonucleotide
ugcuuuaaccuaaauacgc

SEQ ID NO: 607376 - RNA, 19 nt, Artificial Sequence
  Description of Artificial Sequence: Synthetic oligonucleotide
uguuuaacaguuauaguuc

SEQ ID NO: 607377 - RNA, 19 nt, Artificial Sequence
  Description of Artificial Sequence: Synthetic oligonucleotide
ugauugaaaaucacuggag

SEQ ID NO: 607378 - RNA, 19 nt, Artificial Sequence
  Description of Artificial Sequence: Synthetic oligonucleotide
uaaaguaaugguauugcgu

SEQ ID NO: 607379 - RNA, 19 nt, Artificial Sequence
  Description of Artificial Sequence: Synthetic oligonucleotide
uuuaauuguagacgcagcu

SEQ ID NO: 607380 - RNA, 19 nt, Artificial Sequence
  Description of Artificial Sequence: Synthetic oligonucleotide
ucacuuuaauuguagacgc

SEQ ID NO: 607381 - RNA, 19 nt, Artificial Sequence
  Description of Artificial Sequence: Synthetic oligonucleotide
uuacugcuuacacacaucc

SEQ ID NO: 607382 - RNA, 19 nt, Artificial Sequence
  Description of Artificial Sequence: Synthetic oligonucleotide
acgcuuacugcuuacacac

SEQ ID NO: 607383 - RNA, 19 nt, Artificial Sequence
  Description of Artificial Sequence: Synthetic oligonucleotide
uaagagaguagacauaaau

SEQ ID NO: 607384 - RNA, 19 nt, Artificial Sequence
  Description of Artificial Sequence: Synthetic oligonucleotide
aguuauaguucacuguauc

SEQ ID NO: 607385 - RNA, 19 nt, Artificial Sequence
  Description of Artificial Sequence: Synthetic oligonucleotide
acauaaaucacaaggcugg

SEQ ID NO: 607386 - RNA, 19 nt, Artificial Sequence
  Description of Artificial Sequence: Synthetic oligonucleotide
aaucuauccgagccaaauc

SEQ ID NO: 607387 - RNA, 19 nt, Artificial Sequence
  Description of Artificial Sequence: Synthetic oligonucleotide
uuuggcuaccauaagcacc

SEQ ID NO: 607388 - RNA, 19 nt, Artificial Sequence
  Description of Artificial Sequence: Synthetic oligonucleotide
uguuucacuuuaauuguag

SEQ ID NO: 607389 - RNA, 19 nt, Artificial Sequence
  Description of Artificial Sequence: Synthetic oligonucleotide
aauguuugauugaaaauca

SEQ ID NO: 607390 - RNA, 19 nt, Artificial Sequence
  Description of Artificial Sequence: Synthetic oligonucleotide
gaguucuaacuucagcucg

SEQ ID NO: 607391 - RNA, 19 nt, Artificial Sequence
  Description of Artificial Sequence: Synthetic oligonucleotide
uguucaauguaauguaugu

SEQ ID NO: 607392 - RNA, 19 nt, Artificial Sequence
  Description of Artificial Sequence: Synthetic oligonucleotide
ucaacaguguucaauguaa

SEQ ID NO: 607393 - RNA, 19 nt, Artificial Sequence
  Description of Artificial Sequence: Synthetic oligonucleotide
uucaaggccaauuugacuu

SEQ ID NO: 607394 - RNA, 19 nt, Artificial Sequence
  Description of Artificial Sequence: Synthetic oligonucleotide
acaugcuagacaucccucc

SEQ ID NO: 607395 - RNA, 19 nt, Artificial Sequence
  Description of Artificial Sequence: Synthetic oligonucleotide
guaauguauguauaagagc

SEQ ID NO: 607396 - RNA, 19 nt, Artificial Sequence
  Description of Artificial Sequence: Synthetic oligonucleotide
aacauaauucaacugcuuu

SEQ ID NO: 607397 - RNA, 19 nt, Artificial Sequence
  Description of Artificial Sequence: Synthetic oligonucleotide
agcgcaauacaccuaaaag

SEQ ID NO: 607398 - RNA, 19 nt, Artificial Sequence
  Description of Artificial Sequence: Synthetic oligonucleotide
ucccauuccauucacgccc

SEQ ID NO: 607399 - RNA, 19 nt, Artificial Sequence
  Description of Artificial Sequence: Synthetic oligonucleotide
uggauugcaaaacuguuaa

SEQ ID NO: 607400 - RNA, 19 nt, Artificial Sequence
  Description of Artificial Sequence: Synthetic oligonucleotide
ugacaagguucacuuagcg

SEQ ID NO: 607401 - RNA, 19 nt, Artificial Sequence
  Description of Artificial Sequence: Synthetic oligonucleotide
gaaaguagauccaccaucc

SEQ ID NO: 607402 - RNA, 19 nt, Artificial Sequence
  Description of Artificial Sequence: Synthetic oligonucleotide
aauccuaaaguaaugguau

SEQ ID NO: 607403 - RNA, 19 nt, Artificial Sequence
  Description of Artificial Sequence: Synthetic oligonucleotide
aaucacaaggcuggauugc

SEQ ID NO: 607404 - RNA, 19 nt, Artificial Sequence
  Description of Artificial Sequence: Synthetic oligonucleotide
aaauuagaacaaacaugcc

SEQ ID NO: 607405 - RNA, 19 nt, Artificial Sequence
  Description of Artificial Sequence: Synthetic oligonucleotide
ugaaacgaauaccuugggc

SEQ ID NO: 607406 - RNA, 19 nt, Artificial Sequence
  Description of Artificial Sequence: Synthetic oligonucleotide
aauaccuugggccccauuu

SEQ ID NO: 607407 - RNA, 19 nt, Artificial Sequence
  Description of Artificial Sequence: Synthetic oligonucleotide
aaaagcugggaauuguuua

SEQ ID NO: 607408 - RNA, 19 nt, Artificial Sequence
  Description of Artificial Sequence: Synthetic oligonucleotide
aaagccucgccacucgguc

SEQ ID NO: 607409 - RNA, 19 nt, Artificial Sequence
  Description of Artificial Sequence: Synthetic oligonucleotide
cauucacgcccauagaugc

SEQ ID NO: 607410 - RNA, 19 nt, Artificial Sequence
  Description of Artificial Sequence: Synthetic oligonucleotide
auccuaggugacuauauuc

SEQ ID NO: 607411 - RNA, 19 nt, Artificial Sequence
  Description of Artificial Sequence: Synthetic oligonucleotide
uccuaggugacuauauucu

SEQ ID NO: 607412 - RNA, 19 nt, Artificial Sequence
  Description of Artificial Sequence: Synthetic oligonucleotide
aguagauccaccauccccg

SEQ ID NO: 607413 - RNA, 19 nt, Artificial Sequence
  Description of Artificial Sequence: Synthetic oligonucleotide
auggccauaaguuuucgug

SEQ ID NO: 607414 - RNA, 19 nt, Artificial Sequence
  Description of Artificial Sequence: Synthetic oligonucleotide
ugcgucucaaaauuucucc

SEQ ID NO: 607415 - RNA, 19 nt, Artificial Sequence
  Description of Artificial Sequence: Synthetic oligonucleotide
ucauaaugaguucuaacuu

SEQ ID NO: 607416 - RNA, 19 nt, Artificial Sequence
  Description of Artificial Sequence: Synthetic oligonucleotide
cauccuacaguaacuagag

SEQ ID NO: 607417 - RNA, 19 nt, Artificial Sequence
  Description of Artificial Sequence: Synthetic oligonucleotide
guaucaucauccuagguga

SEQ ID NO: 607418 - RNA, 19 nt, Artificial Sequence
  Description of Artificial Sequence: Synthetic oligonucleotide
uuugacaagcccaugccuc

SEQ ID NO: 607419 - RNA, 19 nt, Artificial Sequence
  Description of Artificial Sequence: Synthetic oligonucleotide
aguaacuagagaaaagcug

SEQ ID NO: 607420 - RNA, 19 nt, Artificial Sequence
  Description of Artificial Sequence: Synthetic oligonucleotide
augaccaagagucagugau

SEQ ID NO: 607421 - RNA, 19 nt, Artificial Sequence
  Description of Artificial Sequence: Synthetic oligonucleotide
auuuggcuaccauaagcac

SEQ ID NO: 607422 - RNA, 19 nt, Artificial Sequence
  Description of Artificial Sequence: Synthetic oligonucleotide
aaguuuucgugguggauca

SEQ ID NO: 607423 - RNA, 19 nt, Artificial Sequence
  Description of Artificial Sequence: Synthetic oligonucleotide
uauucucaaccuuaguccu

SEQ ID NO: 607424 - RNA, 19 nt, Artificial Sequence
  Description of Artificial Sequence: Synthetic oligonucleotide
ggugacuauauucucaacc

SEQ ID NO: 607425 - RNA, 19 nt, Artificial Sequence
  Description of Artificial Sequence: Synthetic oligonucleotide
gcgcaauacaccuaaaagg

SEQ ID NO: 607426 - RNA, 19 nt, Artificial Sequence
  Description of Artificial Sequence: Synthetic oligonucleotide
ugguuugacaagcccaugc

SEQ ID NO: 607427 - RNA, 19 nt, Artificial Sequence
  Description of Artificial Sequence: Synthetic oligonucleotide
auuagaacaaacaugccaa

SEQ ID NO: 607428 - RNA, 19 nt, Artificial Sequence
  Description of Artificial Sequence: Synthetic oligonucleotide
agacgcagcuccuauagag

SEQ ID NO: 607429 - RNA, 19 nt, Artificial Sequence
  Description of Artificial Sequence: Synthetic oligonucleotide
acaguuauaguucacugua

SEQ ID NO: 607430 - RNA, 19 nt, Artificial Sequence
  Description of Artificial Sequence: Synthetic oligonucleotide
gaucauaaugaguucuaac

SEQ ID NO: 607431 - RNA, 19 nt, Artificial Sequence
  Description of Artificial Sequence: Synthetic oligonucleotide
uucacuuaagagaguagac

SEQ ID NO: 607432 - RNA, 19 nt, Artificial Sequence
  Description of Artificial Sequence: Synthetic oligonucleotide
aaaugaccaagagucagug

SEQ ID NO: 607433 - RNA, 19 nt, Artificial Sequence
  Description of Artificial Sequence: Synthetic oligonucleotide
auacgcuuacugcuuacac

SEQ ID NO: 607434 - RNA, 19 nt, Artificial Sequence
  Description of Artificial Sequence: Synthetic oligonucleotide
auagaugcacggcuuccgc

SEQ ID NO: 607435 - RNA, 19 nt, Artificial Sequence
  Description of Artificial Sequence: Synthetic oligonucleotide
cugcuuuaaccuaaauacg

SEQ ID NO: 607436 - RNA, 19 nt, Artificial Sequence
  Description of Artificial Sequence: Synthetic oligonucleotide
aaaucacuggaguuuuccu

SEQ ID NO: 607437 - RNA, 19 nt, Artificial Sequence
  Description of Artificial Sequence: Synthetic oligonucleotide
uauugcgucucaaaauuuc

SEQ ID NO: 607438 - RNA, 19 nt, Artificial Sequence
  Description of Artificial Sequence: Synthetic oligonucleotide
uuguacucuggaaaguaga

SEQ ID NO: 607439 - RNA, 19 nt, Artificial Sequence
  Description of Artificial Sequence: Synthetic oligonucleotide
aacgaauaccuugggcccc

SEQ ID NO: 607440 - RNA, 19 nt, Artificial Sequence
  Description of Artificial Sequence: Synthetic oligonucleotide
caaaaucaauuacauuccc

SEQ ID NO: 607441 - RNA, 19 nt, Artificial Sequence
  Description of Artificial Sequence: Synthetic oligonucleotide
acuagagaaaagcugggaa

SEQ ID NO: 607442 - RNA, 19 nt, Artificial Sequence
  Description of Artificial Sequence: Synthetic oligonucleotide
cauuauagccauuguaauc

SEQ ID NO: 607443 - RNA, 19 nt, Artificial Sequence
  Description of Artificial Sequence: Synthetic oligonucleotide
aucauuauagccauuguaa

SEQ ID NO: 607444 - RNA, 19 nt, Artificial Sequence
  Description of Artificial Sequence: Synthetic oligonucleotide
aucuguguucguaagcacc

SEQ ID NO: 607445 - RNA, 19 nt, Artificial Sequence
  Description of Artificial Sequence: Synthetic oligonucleotide
uccaccggcaauguuaucc

SEQ ID NO: 607446 - RNA, 19 nt, Artificial Sequence
  Description of Artificial Sequence: Synthetic oligonucleotide
gcaauguuaucccauuugg

SEQ ID NO: 607447 - RNA, 19 nt, Artificial Sequence
  Description of Artificial Sequence: Synthetic oligonucleotide
ucauuauagccauuguaau

SEQ ID NO: 607448 - RNA, 19 nt, Artificial Sequence
  Description of Artificial Sequence: Synthetic oligonucleotide
uccuauagaguuuuacaaa

SEQ ID NO: 607449 - RNA, 19 nt, Artificial Sequence
  Description of Artificial Sequence: Synthetic oligonucleotide
auuguuuaacaguuauagu

SEQ ID NO: 607450 - RNA, 19 nt, Artificial Sequence
  Description of Artificial Sequence: Synthetic oligonucleotide
gacaagguucacuuagcgc

SEQ ID NO: 607451 - RNA, 19 nt, Artificial Sequence
  Description of Artificial Sequence: Synthetic oligonucleotide
aauccccgcauguguacac

SEQ ID NO: 607452 - RNA, 19 nt, Artificial Sequence
  Description of Artificial Sequence: Synthetic oligonucleotide
ucauccgcggagcaggacc

SEQ ID NO: 607453 - RNA, 19 nt, Artificial Sequence
  Description of Artificial Sequence: Synthetic oligonucleotide
aaacccgcugcacuucauc

SEQ ID NO: 607454 - RNA, 19 nt, Artificial Sequence
  Description of Artificial Sequence: Synthetic oligonucleotide
caauguuaucccauuuggc

SEQ ID NO: 607455 - RNA, 19 nt, Artificial Sequence
  Description of Artificial Sequence: Synthetic oligonucleotide
auccgagccaaauccauag

SEQ ID NO: 607456 - RNA, 19 nt, Artificial Sequence
  Description of Artificial Sequence: Synthetic oligonucleotide
aaguaaugguauugcgucu

SEQ ID NO: 607457 - RNA, 19 nt, Artificial Sequence
  Description of Artificial Sequence: Synthetic oligonucleotide
uccuaaaguaaugguauug

SEQ ID NO: 607458 - RNA, 19 nt, Artificial Sequence
  Description of Artificial Sequence: Synthetic oligonucleotide
agcuuuaaacucacgugcc

SEQ ID NO: 607459 - RNA, 19 nt, Artificial Sequence
  Description of Artificial Sequence: Synthetic oligonucleotide
uauguauaagagcaacauu

SEQ ID NO: 607460 - RNA, 19 nt, Artificial Sequence
  Description of Artificial Sequence: Synthetic oligonucleotide
ucaacguuguuugacuuga

SEQ ID NO: 607461 - RNA, 19 nt, Artificial Sequence
  Description of Artificial Sequence: Synthetic oligonucleotide
auaucuguguucguaagca

SEQ ID NO: 607462 - RNA, 19 nt, Artificial Sequence
  Description of Artificial Sequence: Synthetic oligonucleotide
uuauuugacaagguucacu

SEQ ID NO: 607463 - RNA, 19 nt, Artificial Sequence
  Description of Artificial Sequence: Synthetic oligonucleotide
ucauggguugcaaacucga

SEQ ID NO: 607464 - RNA, 19 nt, Artificial Sequence
  Description of Artificial Sequence: Synthetic oligonucleotide
gaugccaauguucacuuaa

SEQ ID NO: 607465 - RNA, 19 nt, Artificial Sequence
  Description of Artificial Sequence: Synthetic oligonucleotide
uuuucgugguggaucauaa

SEQ ID NO: 607466 - RNA, 19 nt, Artificial Sequence
  Description of Artificial Sequence: Synthetic oligonucleotide
ugaguucuaacuucagcuc

SEQ ID NO: 607467 - RNA, 19 nt, Artificial Sequence
  Description of Artificial Sequence: Synthetic oligonucleotide
uguguucguaagcaccacc

SEQ ID NO: 607468 - RNA, 19 nt, Artificial Sequence
  Description of Artificial Sequence: Synthetic oligonucleotide
ucuauccgagccaaaucca

SEQ ID NO: 607469 - RNA, 19 nt, Artificial Sequence
  Description of Artificial Sequence: Synthetic oligonucleotide
uugacaagguucacuuagc

SEQ ID NO: 607470 - RNA, 19 nt, Artificial Sequence
  Description of Artificial Sequence: Synthetic oligonucleotide
aguagacauaaaucacaag

SEQ ID NO: 607471 - RNA, 19 nt, Artificial Sequence
  Description of Artificial Sequence: Synthetic oligonucleotide
uucaacguuguuugacuug

SEQ ID NO: 607472 - RNA, 19 nt, Artificial Sequence
  Description of Artificial Sequence: Synthetic oligonucleotide
auagggaccuggccgcugc

SEQ ID NO: 607473 - RNA, 19 nt, Artificial Sequence
  Description of Artificial Sequence: Synthetic oligonucleotide
aaaaugaccaagagucagu

SEQ ID NO: 607474 - RNA, 19 nt, Artificial Sequence
  Description of Artificial Sequence: Synthetic oligonucleotide
aacguuguuugacuugaau

SEQ ID NO: 607475 - RNA, 19 nt, Artificial Sequence
  Description of Artificial Sequence: Synthetic oligonucleotide
agaguagacauaaaucaca

SEQ ID NO: 607476 - RNA, 19 nt, Artificial Sequence
  Description of Artificial Sequence: Synthetic oligonucleotide
accaguuacucugccaucg

SEQ ID NO: 607477 - RNA, 19 nt, Artificial Sequence
  Description of Artificial Sequence: Synthetic oligonucleotide
uacgcuuacugcuuacaca

SEQ ID NO: 607478 - RNA, 19 nt, Artificial Sequence
  Description of Artificial Sequence: Synthetic oligonucleotide
acuauauucucaaccuuag

SEQ ID NO: 607479 - RNA, 19 nt, Artificial Sequence
  Description of Artificial Sequence: Synthetic oligonucleotide
augaaacgaauaccuuggg

SEQ ID NO: 607480 - RNA, 19 nt, Artificial Sequence
  Description of Artificial Sequence: Synthetic oligonucleotide
acguuguuugacuugaaua

SEQ ID NO: 607481 - RNA, 19 nt, Artificial Sequence
  Description of Artificial Sequence: Synthetic oligonucleotide
auaaugaguucuaacuuca

SEQ ID NO: 607482 - RNA, 19 nt, Artificial Sequence
  Description of Artificial Sequence: Synthetic oligonucleotide
caucauuuggcuaccauaa

SEQ ID NO: 607483 - RNA, 19 nt, Artificial Sequence
  Description of Artificial Sequence: Synthetic oligonucleotide
uaggugacuauauucucaa

SEQ ID NO: 607484 - RNA, 19 nt, Artificial Sequence
  Description of Artificial Sequence: Synthetic oligonucleotide
uuuaaacucacgugccuua

SEQ ID NO: 607485 - RNA, 19 nt, Artificial Sequence
  Description of Artificial Sequence: Synthetic oligonucleotide
guguucguaagcaccaccg

SEQ ID NO: 607486 - RNA, 19 nt, Artificial Sequence
  Description of Artificial Sequence: Synthetic oligonucleotide
aaugaccaagagucaguga

SEQ ID NO: 607487 - RNA, 19 nt, Artificial Sequence
  Description of Artificial Sequence: Synthetic oligonucleotide
uguucguaagcaccaccgc

SEQ ID NO: 607488 - RNA, 19 nt, Artificial Sequence
  Description of Artificial Sequence: Synthetic oligonucleotide
uuaauuguagacgcagcuc

SEQ ID NO: 607489 - RNA, 19 nt, Artificial Sequence
  Description of Artificial Sequence: Synthetic oligonucleotide
acagugucccguuguacuc

SEQ ID NO: 607490 - RNA, 19 nt, Artificial Sequence
  Description of Artificial Sequence: Synthetic oligonucleotide
augcuguuauacccucugc

SEQ ID NO: 607491 - RNA, 19 nt, Artificial Sequence
  Description of Artificial Sequence: Synthetic oligonucleotide
aaacaauaauugaggucuc

SEQ ID NO: 607492 - RNA, 19 nt, Artificial Sequence
  Description of Artificial Sequence: Synthetic oligonucleotide
ucauacuggacaugcuaga

SEQ ID NO: 607493 - RNA, 19 nt, Artificial Sequence
  Description of Artificial Sequence: Synthetic oligonucleotide
uccgcuauuguaguagcug

SEQ ID NO: 607494 - RNA, 19 nt, Artificial Sequence
  Description of Artificial Sequence: Synthetic oligonucleotide
ucauccuaggugacuauau

SEQ ID NO: 607495 - RNA, 19 nt, Artificial Sequence
  Description of Artificial Sequence: Synthetic oligonucleotide
ugguauugcgucucaaaau

SEQ ID NO: 607496 - RNA, 19 nt, Artificial Sequence
  Description of Artificial Sequence: Synthetic oligonucleotide
uccuuggcuaccuaugcaa

SEQ ID NO: 607497 - RNA, 19 nt, Artificial Sequence
  Description of Artificial Sequence: Synthetic oligonucleotide
auacuggacaugcuagaca

SEQ ID NO: 607498 - RNA, 19 nt, Artificial Sequence
  Description of Artificial Sequence: Synthetic oligonucleotide
aauacgcuuacugcuuaca

SEQ ID NO: 607499 - RNA, 19 nt, Artificial Sequence
  Description of Artificial Sequence: Synthetic oligonucleotide
ugccuuacagguuuaucaa

SEQ ID NO: 607500 - RNA, 19 nt, Artificial Sequence
  Description of Artificial Sequence: Synthetic oligonucleotide
accguagccaccuccauaa

SEQ ID NO: 607501 - RNA, 19 nt, Artificial Sequence
  Description of Artificial Sequence: Synthetic oligonucleotide
agcucgacugcucuuaaau

SEQ ID NO: 607502 - RNA, 19 nt, Artificial Sequence
  Description of Artificial Sequence: Synthetic oligonucleotide
uuagaacaaacaugccaaa

SEQ ID NO: 607503 - RNA, 19 nt, Artificial Sequence
  Description of Artificial Sequence: Synthetic oligonucleotide
agcuccuauagaguuuuac

SEQ ID NO: 607504 - RNA, 19 nt, Artificial Sequence
  Description of Artificial Sequence: Synthetic oligonucleotide
uuugagugaugccaauguu

SEQ ID NO: 607505 - RNA, 19 nt, Artificial Sequence
  Description of Artificial Sequence: Synthetic oligonucleotide
uaccuugggccccauuuug

SEQ ID NO: 607506 - RNA, 19 nt, Artificial Sequence
  Description of Artificial Sequence: Synthetic oligonucleotide
uuuagagccuuuucagcua

SEQ ID NO: 607507 - RNA, 19 nt, Artificial Sequence
  Description of Artificial Sequence: Synthetic oligonucleotide
cugcuuacacacauccuac

SEQ ID NO: 607508 - RNA, 19 nt, Artificial Sequence
  Description of Artificial Sequence: Synthetic oligonucleotide
cuaggugacuauauucuca

SEQ ID NO: 607509 - RNA, 19 nt, Artificial Sequence
  Description of Artificial Sequence: Synthetic oligonucleotide
gugacuauauucucaaccu

SEQ ID NO: 607510 - RNA, 19 nt, Artificial Sequence
  Description of Artificial Sequence: Synthetic oligonucleotide
uggacugguuugacaagcc

SEQ ID NO: 607511 - RNA, 19 nt, Artificial Sequence
  Description of Artificial Sequence: Synthetic oligonucleotide
ugcaucaacaguguucaau

SEQ ID NO: 607512 - RNA, 19 nt, Artificial Sequence
  Description of Artificial Sequence: Synthetic oligonucleotide
acggcuuccgcuauuguag

SEQ ID NO: 607513 - RNA, 19 nt, Artificial Sequence
  Description of Artificial Sequence: Synthetic oligonucleotide
uucucguccgcccacgcau

SEQ ID NO: 607514 - RNA, 19 nt, Artificial Sequence
  Description of Artificial Sequence: Synthetic oligonucleotide
ucuuuugacauagcugcaa

SEQ ID NO: 607515 - RNA, 19 nt, Artificial Sequence
  Description of Artificial Sequence: Synthetic oligonucleotide
cuuagcgcaauacaccuaa

SEQ ID NO: 607516 - RNA, 19 nt, Artificial Sequence
  Description of Artificial Sequence: Synthetic oligonucleotide
cuuccgcuauuguaguagc

SEQ ID NO: 607517 - RNA, 19 nt, Artificial Sequence
  Description of Artificial Sequence: Synthetic oligonucleotide
ucguaagcaccaccgcuug

SEQ ID NO: 607518 - RNA, 19 nt, Artificial Sequence
  Description of Artificial Sequence: Synthetic oligonucleotide
accuaugcaauguuugauu

SEQ ID NO: 607519 - RNA, 19 nt, Artificial Sequence
  Description of Artificial Sequence: Synthetic oligonucleotide
ugacuauauucucaaccuu

SEQ ID NO: 607520 - RNA, 19 nt, Artificial Sequence
  Description of Artificial Sequence: Synthetic oligonucleotide
gacuauauucucaaccuua

SEQ ID NO: 607521 - RNA, 19 nt, Artificial Sequence
  Description of Artificial Sequence: Synthetic oligonucleotide
ggcaauguuaucccauuug

SEQ ID NO: 607522 - RNA, 19 nt, Artificial Sequence
  Description of Artificial Sequence: Synthetic oligonucleotide
uugcgucucaaaauuucuc

SEQ ID NO: 607523 - RNA, 19 nt, Artificial Sequence
  Description of Artificial Sequence: Synthetic oligonucleotide
acagguuuaucaaaugaaa

SEQ ID NO: 607524 - RNA, 19 nt, Artificial Sequence
  Description of Artificial Sequence: Synthetic oligonucleotide
uuucaacguuguuugacuu

SEQ ID NO: 607525 - RNA, 19 nt, Artificial Sequence
  Description of Artificial Sequence: Synthetic oligonucleotide
uaucuguguucguaagcac

SEQ ID NO: 607526 - RNA, 19 nt, Artificial Sequence
  Description of Artificial Sequence: Synthetic oligonucleotide
aaguccaccggcaauguua

SEQ ID NO: 607527 - RNA, 19 nt, Artificial Sequence
  Description of Artificial Sequence: Synthetic oligonucleotide
ucaucauccuaggugacua

SEQ ID NO: 607528 - RNA, 19 nt, Artificial Sequence
  Description of Artificial Sequence: Synthetic oligonucleotide
cuggacugguuugacaagc

SEQ ID NO: 607529 - RNA, 19 nt, Artificial Sequence
  Description of Artificial Sequence: Synthetic oligonucleotide
ccuaaaguaaugguauugc

SEQ ID NO: 607530 - RNA, 19 nt, Artificial Sequence
  Description of Artificial Sequence: Synthetic oligonucleotide
ugcuuacacacauccuaca

SEQ ID NO: 607531 - RNA, 19 nt, Artificial Sequence
  Description of Artificial Sequence: Synthetic oligonucleotide
accguaacuggacugguuu

SEQ ID NO: 607532 - RNA, 19 nt, Artificial Sequence
  Description of Artificial Sequence: Synthetic oligonucleotide
gcuuacacacauccuacag

SEQ ID NO: 607533 - RNA, 19 nt, Artificial Sequence
  Description of Artificial Sequence: Synthetic oligonucleotide
ugaccaagagucagugauc

SEQ ID NO: 607534 - RNA, 19 nt, Artificial Sequence
  Description of Artificial Sequence: Synthetic oligonucleotide
uagaacaaacaugccaaau

SEQ ID NO: 607535 - RNA, 19 nt, Artificial Sequence
  Description of Artificial Sequence: Synthetic oligonucleotide
ccuaugcaauguuugauug

SEQ ID NO: 607536 - RNA, 19 nt, Artificial Sequence
  Description of Artificial Sequence: Synthetic oligonucleotide
accauccccguaucugugg

SEQ ID NO: 607537 - RNA, 19 nt, Artificial Sequence
  Description of Artificial Sequence: Synthetic oligonucleotide
aacaugcaucaacaguguu

SEQ ID NO: 607538 - RNA, 19 nt, Artificial Sequence
  Description of Artificial Sequence: Synthetic oligonucleotide
cuuacugcuuacacacauc

SEQ ID NO: 607539 - RNA, 19 nt, Artificial Sequence
  Description of Artificial Sequence: Synthetic oligonucleotide
aggugacuauauucucaac

SEQ ID NO: 607540 - RNA, 19 nt, Artificial Sequence
  Description of Artificial Sequence: Synthetic oligonucleotide
acuggacugguuugacaag

SEQ ID NO: 607541 - RNA, 19 nt, Artificial Sequence
  Description of Artificial Sequence: Synthetic oligonucleotide
ucgacugcucuuaaauauu

SEQ ID NO: 607542 - RNA, 19 nt, Artificial Sequence
  Description of Artificial Sequence: Synthetic oligonucleotide
ugcuagacaucccucccau

SEQ ID NO: 607543 - RNA, 19 nt, Artificial Sequence
  Description of Artificial Sequence: Synthetic oligonucleotide
ucacgcccauagaugcacg

SEQ ID NO: 607544 - RNA, 19 nt, Artificial Sequence
  Description of Artificial Sequence: Synthetic oligonucleotide
accuuaguccuuugaguga

SEQ ID NO: 607545 - RNA, 19 nt, Artificial Sequence
  Description of Artificial Sequence: Synthetic oligonucleotide
caucccucccauuccauuc

SEQ ID NO: 607546 - RNA, 19 nt, Artificial Sequence
  Description of Artificial Sequence: Synthetic oligonucleotide
auucaacugcuuuaaccua

SEQ ID NO: 607547 - RNA, 19 nt, Artificial Sequence
  Description of Artificial Sequence: Synthetic oligonucleotide
uggacaugcuagacauccc

SEQ ID NO: 607548 - RNA, 19 nt, Artificial Sequence
  Description of Artificial Sequence: Synthetic oligonucleotide
ucaaggccaauuugacuuc

SEQ ID NO: 607549 - RNA, 19 nt, Artificial Sequence
  Description of Artificial Sequence: Synthetic oligonucleotide
auugcgucucaaaauuucu

SEQ ID NO: 607550 - RNA, 19 nt, Artificial Sequence
  Description of Artificial Sequence: Synthetic oligonucleotide
uuguagacgcagcuccuau

SEQ ID NO: 607551 - RNA, 19 nt, Artificial Sequence
  Description of Artificial Sequence: Synthetic oligonucleotide
cuaccuaugcaauguuuga

SEQ ID NO: 607552 - RNA, 19 nt, Artificial Sequence
  Description of Artificial Sequence: Synthetic oligonucleotide
gcuaccuaugcaauguuug

SEQ ID NO: 607553 - RNA, 19 nt, Artificial Sequence
  Description of Artificial Sequence: Synthetic oligonucleotide
cuguucacugcuccuuggc

SEQ ID NO: 607554 - RNA, 19 nt, Artificial Sequence
  Description of Artificial Sequence: Synthetic oligonucleotide
uauccgagccaaauccaua

SEQ ID NO: 607555 - RNA, 19 nt, Artificial Sequence
  Description of Artificial Sequence: Synthetic oligonucleotide
uagaugcacggcuuccgcu

SEQ ID NO: 607556 - RNA, 19 nt, Artificial Sequence
  Description of Artificial Sequence: Synthetic oligonucleotide
uuccauucacgcccauaga

SEQ ID NO: 607557 - RNA, 19 nt, Artificial Sequence
  Description of Artificial Sequence: Synthetic oligonucleotide
ucacuguaucaucauccua

SEQ ID NO: 607558 - RNA, 19 nt, Artificial Sequence
  Description of Artificial Sequence: Synthetic oligonucleotide
aauguucacuuaagagagu

SEQ ID NO: 607559 - RNA, 19 nt, Artificial Sequence
  Description of Artificial Sequence: Synthetic oligonucleotide
uaccuaugcaauguuugau

SEQ ID NO: 607560 - RNA, 19 nt, Artificial Sequence
  Description of Artificial Sequence: Synthetic oligonucleotide
aaaagccucgccacucggu

SEQ ID NO: 607561 - RNA, 19 nt, Artificial Sequence
  Description of Artificial Sequence: Synthetic oligonucleotide
gcuccuauagaguuuuaca

SEQ ID NO: 607562 - RNA, 19 nt, Artificial Sequence
  Description of Artificial Sequence: Synthetic oligonucleotide
aguguucaauguaauguau

SEQ ID NO: 607563 - RNA, 19 nt, Artificial Sequence
  Description of Artificial Sequence: Synthetic oligonucleotide
augcuagacaucccuccca

SEQ ID NO: 607564 - RNA, 19 nt, Artificial Sequence
  Description of Artificial Sequence: Synthetic oligonucleotide
cacgcccauagaugcacgg

SEQ ID NO: 607565 - RNA, 19 nt, Artificial Sequence
  Description of Artificial Sequence: Synthetic oligonucleotide
cugggaauuguuuaacagu

SEQ ID NO: 607566 - RNA, 19 nt, Artificial Sequence
  Description of Artificial Sequence: Synthetic oligonucleotide
uuccgcuauuguaguagcu

SEQ ID NO: 607567 - RNA, 19 nt, Artificial Sequence
  Description of Artificial Sequence: Synthetic oligonucleotide
acgcccauagaugcacggc

SEQ ID NO: 607568 - RNA, 19 nt, Artificial Sequence
  Description of Artificial Sequence: Synthetic oligonucleotide
aagccucgccacucggucu

SEQ ID NO: 607569 - RNA, 19 nt, Artificial Sequence
  Description of Artificial Sequence: Synthetic oligonucleotide
agaugcacggcuuccgcua

SEQ ID NO: 607570 - RNA, 19 nt, Artificial Sequence
  Description of Artificial Sequence: Synthetic oligonucleotide
uagacgcagcuccuauaga

SEQ ID NO: 607571 - RNA, 19 nt, Artificial Sequence
  Description of Artificial Sequence: Synthetic oligonucleotide
guucuacauaucuguguuc

SEQ ID NO: 607572 - RNA, 19 nt, Artificial Sequence
  Description of Artificial Sequence: Synthetic oligonucleotide
uacauuccccauccaccac

SEQ ID NO: 607573 - RNA, 19 nt, Artificial Sequence
  Description of Artificial Sequence: Synthetic oligonucleotide
cucaaaauuucuccaucaa

SEQ ID NO: 607574 - RNA, 19 nt, Artificial Sequence
  Description of Artificial Sequence: Synthetic oligonucleotide
uguagacgcagcuccuaua

SEQ ID NO: 607575 - RNA, 19 nt, Artificial Sequence
  Description of Artificial Sequence: Synthetic oligonucleotide
aucacaaggcuggauugca

SEQ ID NO: 607576 - RNA, 19 nt, Artificial Sequence
  Description of Artificial Sequence: Synthetic oligonucleotide
ggaauuguuuaacaguuau

SEQ ID NO: 607577 - RNA, 19 nt, Artificial Sequence
  Description of Artificial Sequence: Synthetic oligonucleotide
uaauccccgcauguguaca

SEQ ID NO: 607578 - RNA, 19 nt, Artificial Sequence
  Description of Artificial Sequence: Synthetic oligonucleotide
uccccauccaccacucaua

SEQ ID NO: 607579 - RNA, 19 nt, Artificial Sequence
  Description of Artificial Sequence: Synthetic oligonucleotide
auccccguaucugugguca

SEQ ID NO: 607580 - RNA, 19 nt, Artificial Sequence
  Description of Artificial Sequence: Synthetic oligonucleotide
caguaacuagagaaaagcu

SEQ ID NO: 607581 - RNA, 19 nt, Artificial Sequence
  Description of Artificial Sequence: Synthetic oligonucleotide
aucaucauccuaggugacu

SEQ ID NO: 607582 - RNA, 19 nt, Artificial Sequence
  Description of Artificial Sequence: Synthetic oligonucleotide
cucgacugcucuuaaauau

SEQ ID NO: 607583 - RNA, 19 nt, Artificial Sequence
  Description of Artificial Sequence: Synthetic oligonucleotide
cccguuguacucuggaaag

SEQ ID NO: 607584 - RNA, 19 nt, Artificial Sequence
  Description of Artificial Sequence: Synthetic oligonucleotide
acgcagcuccuauagaguu

SEQ ID NO: 607585 - RNA, 19 nt, Artificial Sequence
  Description of Artificial Sequence: Synthetic oligonucleotide
caggucugucauagggacc

SEQ ID NO: 607586 - RNA, 19 nt, Artificial Sequence
  Description of Artificial Sequence: Synthetic oligonucleotide
acugguuugacaagcccau

SEQ ID NO: 607587 - RNA, 19 nt, Artificial Sequence
  Description of Artificial Sequence: Synthetic oligonucleotide
ugcacggcuuccgcuauug

SEQ ID NO: 607588 - RNA, 19 nt, Artificial Sequence
  Description of Artificial Sequence: Synthetic oligonucleotide
gcuuccgcuauuguaguag

SEQ ID NO: 607589 - RNA, 19 nt, Artificial Sequence
  Description of Artificial Sequence: Synthetic oligonucleotide
guaaugguauugcgucuca

SEQ ID NO: 607590 - RNA, 19 nt, Artificial Sequence
  Description of Artificial Sequence: Synthetic oligonucleotide
guucguaagcaccaccgcu

SEQ ID NO: 607591 - RNA, 19 nt, Artificial Sequence
  Description of Artificial Sequence: Synthetic oligonucleotide
auaaguuuucgugguggau

SEQ ID NO: 607592 - RNA, 19 nt, Artificial Sequence
  Description of Artificial Sequence: Synthetic oligonucleotide
cacuuagcgcaauacaccu

SEQ ID NO: 607593 - RNA, 19 nt, Artificial Sequence
  Description of Artificial Sequence: Synthetic oligonucleotide
ccgcuauuguaguagcugc

SEQ ID NO: 607594 - RNA, 19 nt, Artificial Sequence
  Description of Artificial Sequence: Synthetic oligonucleotide
agccucgccacucggucug

SEQ ID NO: 607595 - RNA, 19 nt, Artificial Sequence
  Description of Artificial Sequence: Synthetic oligonucleotide
agaaaagcugggaauuguu

SEQ ID NO: 607596 - RNA, 19 nt, Artificial Sequence
  Description of Artificial Sequence: Synthetic oligonucleotide
uuagcgcaauacaccuaaa

SEQ ID NO: 607597 - RNA, 19 nt, Artificial Sequence
  Description of Artificial Sequence: Synthetic oligonucleotide
gcuauuguaguagcugcug

SEQ ID NO: 607598 - RNA, 19 nt, Artificial Sequence
  Description of Artificial Sequence: Synthetic oligonucleotide
ucagcucgacugcucuuaa

SEQ ID NO: 607599 - RNA, 19 nt, Artificial Sequence
  Description of Artificial Sequence: Synthetic oligonucleotide
cacuuuaauuguagacgca

SEQ ID NO: 607600 - RNA, 19 nt, Artificial Sequence
  Description of Artificial Sequence: Synthetic oligonucleotide
uuucgugguggaucauaau

SEQ ID NO: 607601 - RNA, 19 nt, Artificial Sequence
  Description of Artificial Sequence: Synthetic oligonucleotide
ccccaggucugucauaggg

SEQ ID NO: 607602 - RNA, 19 nt, Artificial Sequence
  Description of Artificial Sequence: Synthetic oligonucleotide
ccgugucaggacuauuugg

SEQ ID NO: 607603 - RNA, 19 nt, Artificial Sequence
  Description of Artificial Sequence: Synthetic oligonucleotide
caaccuuaguccuuugagu

SEQ ID NO: 607604 - RNA, 19 nt, Artificial Sequence
  Description of Artificial Sequence: Synthetic oligonucleotide
uaaugguauugcgucucaa

SEQ ID NO: 607605 - RNA, 19 nt, Artificial Sequence
  Description of Artificial Sequence: Synthetic oligonucleotide
guucaauguaauguaugua

SEQ ID NO: 607606 - RNA, 19 nt, Artificial Sequence
  Description of Artificial Sequence: Synthetic oligonucleotide
gaaaaucacuggaguuuuc

SEQ ID NO: 607607 - RNA, 19 nt, Artificial Sequence
  Description of Artificial Sequence: Synthetic oligonucleotide
gguucacuuagcgcaauac

SEQ ID NO: 607608 - RNA, 19 nt, Artificial Sequence
  Description of Artificial Sequence: Synthetic oligonucleotide
ucucaaccuuaguccuuug

SEQ ID NO: 607609 - RNA, 19 nt, Artificial Sequence
  Description of Artificial Sequence: Synthetic oligonucleotide
ccauuuugaauuuugcagu

SEQ ID NO: 607610 - RNA, 19 nt, Artificial Sequence
  Description of Artificial Sequence: Synthetic oligonucleotide
guggaucauaaugaguucu

SEQ ID NO: 607611 - RNA, 19 nt, Artificial Sequence
  Description of Artificial Sequence: Synthetic oligonucleotide
cuacauaucuguguucgua

SEQ ID NO: 607612 - RNA, 19 nt, Artificial Sequence
  Description of Artificial Sequence: Synthetic oligonucleotide
cacgcaucaucgucucuuc

SEQ ID NO: 607613 - RNA, 19 nt, Artificial Sequence
  Description of Artificial Sequence: Synthetic oligonucleotide
aggcuggauugcaaaacug

SEQ ID NO: 607614 - RNA, 19 nt, Artificial Sequence
  Description of Artificial Sequence: Synthetic oligonucleotide
uccuuugagugaugccaau

SEQ ID NO: 607615 - RNA, 19 nt, Artificial Sequence
  Description of Artificial Sequence: Synthetic oligonucleotide
gccaccguaacuggacugg

SEQ ID NO: 607616 - RNA, 19 nt, Artificial Sequence
  Description of Artificial Sequence: Synthetic oligonucleotide
acaucccucccauuccauu

SEQ ID NO: 607617 - RNA, 19 nt, Artificial Sequence
  Description of Artificial Sequence: Synthetic oligonucleotide
cgugguggaucauaaugag

SEQ ID NO: 607618 - RNA, 19 nt, Artificial Sequence
  Description of Artificial Sequence: Synthetic oligonucleotide
ccuaggugacuauauucuc

SEQ ID NO: 607619 - RNA, 19 nt, Artificial Sequence
  Description of Artificial Sequence: Synthetic oligonucleotide
cauaaaucacaaggcugga

SEQ ID NO: 607620 - RNA, 19 nt, Artificial Sequence
  Description of Artificial Sequence: Synthetic oligonucleotide
gcgucucaaaauuucucca

SEQ ID NO: 607621 - RNA, 19 nt, Artificial Sequence
  Description of Artificial Sequence: Synthetic oligonucleotide
caccauccccguaucugug

SEQ ID NO: 607622 - RNA, 19 nt, Artificial Sequence
  Description of Artificial Sequence: Synthetic oligonucleotide
caagguucacuuagcgcaa

SEQ ID NO: 607623 - RNA, 19 nt, Artificial Sequence
  Description of Artificial Sequence: Synthetic oligonucleotide
guucuaacuucagcucgac

SEQ ID NO: 607624 - RNA, 19 nt, Artificial Sequence
  Description of Artificial Sequence: Synthetic oligonucleotide
guccgcccacgcaucaucg

SEQ ID NO: 607625 - RNA, 19 nt, Artificial Sequence
  Description of Artificial Sequence: Synthetic oligonucleotide
uggcuaccuaugcaauguu

SEQ ID NO: 607626 - RNA, 19 nt, Artificial Sequence
  Description of Artificial Sequence: Synthetic oligonucleotide
uccccguaucuguggucag

SEQ ID NO: 607627 - RNA, 19 nt, Artificial Sequence
  Description of Artificial Sequence: Synthetic oligonucleotide
gccgugucaggacuauuug

SEQ ID NO: 607628 - RNA, 19 nt, Artificial Sequence
  Description of Artificial Sequence: Synthetic oligonucleotide
uggcugggccaccguaacu

SEQ ID NO: 607629 - RNA, 19 nt, Artificial Sequence
  Description of Artificial Sequence: Synthetic oligonucleotide
cauccgcggagcaggacca

SEQ ID NO: 607630 - RNA, 19 nt, Artificial Sequence
  Description of Artificial Sequence: Synthetic oligonucleotide
guuuucgugguggaucaua

SEQ ID NO: 607631 - RNA, 19 nt, Artificial Sequence
  Description of Artificial Sequence: Synthetic oligonucleotide
caacaugcaucaacagugu

SEQ ID NO: 607632 - RNA, 19 nt, Artificial Sequence
  Description of Artificial Sequence: Synthetic oligonucleotide
guuaucccauuuggcacga

SEQ ID NO: 607633 - RNA, 19 nt, Artificial Sequence
  Description of Artificial Sequence: Synthetic oligonucleotide
gcuacauccaaaagggagu

SEQ ID NO: 607634 - RNA, 19 nt, Artificial Sequence
  Description of Artificial Sequence: Synthetic oligonucleotide
acaagcccaugccucccau

SEQ ID NO: 607635 - RNA, 19 nt, Artificial Sequence
  Description of Artificial Sequence: Synthetic oligonucleotide
cacggcuuccgcuauugua

SEQ ID NO: 607636 - RNA, 19 nt, Artificial Sequence
  Description of Artificial Sequence: Synthetic oligonucleotide
uagauccaccauccccgua

SEQ ID NO: 607637 - RNA, 19 nt, Artificial Sequence
  Description of Artificial Sequence: Synthetic oligonucleotide
acgaauaccuugggcccca

SEQ ID NO: 607638 - RNA, 19 nt, Artificial Sequence
  Description of Artificial Sequence: Synthetic oligonucleotide
accggcaauguuaucccau

SEQ ID NO: 607639 - RNA, 19 nt, Artificial Sequence
  Description of Artificial Sequence: Synthetic oligonucleotide
auucacgcccauagaugca

SEQ ID NO: 607640 - RNA, 19 nt, Artificial Sequence
  Description of Artificial Sequence: Synthetic oligonucleotide
cauccccguaucugugguc

SEQ ID NO: 607641 - RNA, 19 nt, Artificial Sequence
  Description of Artificial Sequence: Synthetic oligonucleotide
aaaacccgcugcacuucau

SEQ ID NO: 607642 - RNA, 19 nt, Artificial Sequence
  Description of Artificial Sequence: Synthetic oligonucleotide
ccacucaugcugcucuggc

SEQ ID NO: 607643 - RNA, 19 nt, Artificial Sequence
  Description of Artificial Sequence: Synthetic oligonucleotide
cuguguucguaagcaccac

SEQ ID NO: 607644 - RNA, 19 nt, Artificial Sequence
  Description of Artificial Sequence: Synthetic oligonucleotide
guacuccuccccuggaagu

SEQ ID NO: 607645 - RNA, 19 nt, Artificial Sequence
  Description of Artificial Sequence: Synthetic oligonucleotide
ggaucauaaugaguucuaa

SEQ ID NO: 607646 - RNA, 19 nt, Artificial Sequence
  Description of Artificial Sequence: Synthetic oligonucleotide
gacgcagcuccuauagagu

SEQ ID NO: 607647 - RNA, 19 nt, Artificial Sequence
  Description of Artificial Sequence: Synthetic oligonucleotide
gcuuuaaccuaaauacgcu

SEQ ID NO: 607648 - RNA, 19 nt, Artificial Sequence
  Description of Artificial Sequence: Synthetic oligonucleotide
caauuacauuccccaucca

SEQ ID NO: 607649 - RNA, 19 nt, Artificial Sequence
  Description of Artificial Sequence: Synthetic oligonucleotide
gucccguuguacucuggaa

SEQ ID NO: 607650 - RNA, 19 nt, Artificial Sequence
  Description of Artificial Sequence: Synthetic oligonucleotide
ccguaacuggacugguuug

SEQ ID NO: 607651 - RNA, 19 nt, Artificial Sequence
  Description of Artificial Sequence: Synthetic oligonucleotide
gccccauuuugaauuuugc

SEQ ID NO: 607652 - RNA, 19 nt, Artificial Sequence
  Description of Artificial Sequence: Synthetic oligonucleotide
gggaccuggccgcugcaug

SEQ ID NO: 607653 - RNA, 19 nt, Artificial Sequence
  Description of Artificial Sequence: Synthetic oligonucleotide
ggauugcaaaacuguuaaa

SEQ ID NO: 607654 - RNA, 19 nt, Artificial Sequence
  Description of Artificial Sequence: Synthetic oligonucleotide
cuucauccgcggagcagga

SEQ ID NO: 607655 - RNA, 19 nt, Artificial Sequence
  Description of Artificial Sequence: Synthetic oligonucleotide
cuguuaaacugaagguuuu

SEQ ID NO: 607656 - RNA, 19 nt, Artificial Sequence
  Description of Artificial Sequence: Synthetic oligonucleotide
uucauccgcggagcaggac

SEQ ID NO: 607657 - RNA, 19 nt, Artificial Sequence
  Description of Artificial Sequence: Synthetic oligonucleotide
gaccagggcaagccccgga

SEQ ID NO: 607658 - RNA, 19 nt, Artificial Sequence
  Description of Artificial Sequence: Synthetic oligonucleotide
cacaggguugaguggugaa

SEQ ID NO: 607659 - RNA, 19 nt, Artificial Sequence
  Description of Artificial Sequence: Synthetic oligonucleotide
gccuuacagguuuaucaaa

SEQ ID NO: 607660 - RNA, 19 nt, Artificial Sequence
  Description of Artificial Sequence: Synthetic oligonucleotide
gcuuuaaacucacgugccu

SEQ ID NO: 607661 - RNA, 19 nt, Artificial Sequence
  Description of Artificial Sequence: Synthetic oligonucleotide
ccuuacagguuuaucaaau

SEQ ID NO: 607662 - RNA, 19 nt, Artificial Sequence
  Description of Artificial Sequence: Synthetic oligonucleotide
cuucucguccgcccacgca

SEQ ID NO: 607663 - RNA, 19 nt, Artificial Sequence
  Description of Artificial Sequence: Synthetic oligonucleotide
ggccaccguagccaccucc

SEQ ID NO: 607664 - RNA, 19 nt, Artificial Sequence
  Description of Artificial Sequence: Synthetic oligonucleotide
uuggccgugucaggacuau

SEQ ID NO: 607665 - RNA, 19 nt, Artificial Sequence
  Description of Artificial Sequence: Synthetic oligonucleotide
cauggccauaaguuuucgu

SEQ ID NO: 607666 - RNA, 19 nt, Artificial Sequence
  Description of Artificial Sequence: Synthetic oligonucleotide
auccccgcauguguacaca

SEQ ID NO: 607667 - RNA, 19 nt, Artificial Sequence
  Description of Artificial Sequence: Synthetic oligonucleotide
guagauccaccauccccgu

SEQ ID NO: 607668 - RNA, 19 nt, Artificial Sequence
  Description of Artificial Sequence: Synthetic oligonucleotide
ccccauccaccacucauac

SEQ ID NO: 607669 - RNA, 19 nt, Artificial Sequence
  Description of Artificial Sequence: Synthetic oligonucleotide
acuuagcgcaauacaccua

SEQ ID NO: 607670 - RNA, 19 nt, Artificial Sequence
  Description of Artificial Sequence: Synthetic oligonucleotide
gcucgacugcucuuaaaua

SEQ ID NO: 607671 - RNA, 19 nt, Artificial Sequence
  Description of Artificial Sequence: Synthetic oligonucleotide
cuguaucaucauccuaggu

SEQ ID NO: 607672 - RNA, 19 nt, Artificial Sequence
  Description of Artificial Sequence: Synthetic oligonucleotide
augcaucaacaguguucaa

SEQ ID NO: 607673 - RNA, 19 nt, Artificial Sequence
  Description of Artificial Sequence: Synthetic oligonucleotide
gugucccguuguacucugg

SEQ ID NO: 607674 - RNA, 19 nt, Artificial Sequence
  Description of Artificial Sequence: Synthetic oligonucleotide
cauccuaggugacuauauu

SEQ ID NO: 607675 - RNA, 19 nt, Artificial Sequence
  Description of Artificial Sequence: Synthetic oligonucleotide
caacguuguuugacuugaa

SEQ ID NO: 607676 - RNA, 19 nt, Artificial Sequence
  Description of Artificial Sequence: Synthetic oligonucleotide
aguuuucgugguggaucau

SEQ ID NO: 607677 - RNA, 19 nt, Artificial Sequence
  Description of Artificial Sequence: Synthetic oligonucleotide
cgcugcacuucauccgcgg

SEQ ID NO: 607678 - RNA, 19 nt, Artificial Sequence
  Description of Artificial Sequence: Synthetic oligonucleotide
gccgcugcauggccauaag

SEQ ID NO: 607679 - RNA, 19 nt, Artificial Sequence
  Description of Artificial Sequence: Synthetic oligonucleotide
auccgcggagcaggaccag

SEQ ID NO: 607680 - RNA, 19 nt, Artificial Sequence
  Description of Artificial Sequence: Synthetic oligonucleotide
gccaccguagccaccucca

SEQ ID NO: 607681 - RNA, 19 nt, Artificial Sequence
  Description of Artificial Sequence: Synthetic oligonucleotide
cagcucgacugcucuuaaa

SEQ ID NO: 607682 - RNA, 19 nt, Artificial Sequence
  Description of Artificial Sequence: Synthetic oligonucleotide
ucguccgcccacgcaucau

SEQ ID NO: 607683 - RNA, 19 nt, Artificial Sequence
  Description of Artificial Sequence: Synthetic oligonucleotide
gcccacgcaucaucgucuc

SEQ ID NO: 607684 - RNA, 19 nt, Artificial Sequence
  Description of Artificial Sequence: Synthetic oligonucleotide
gcagcuccuauagaguuuu

SEQ ID NO: 607685 - RNA, 19 nt, Artificial Sequence
  Description of Artificial Sequence: Synthetic oligonucleotide
agggcaagccccggaccuu

SEQ ID NO: 607686 - RNA, 19 nt, Artificial Sequence
  Description of Artificial Sequence: Synthetic oligonucleotide
cacgugccuuacagguuua

SEQ ID NO: 607687 - RNA, 19 nt, Artificial Sequence
  Description of Artificial Sequence: Synthetic oligonucleotide
ccaucauuauagccauugu

SEQ ID NO: 607688 - RNA, 19 nt, Artificial Sequence
  Description of Artificial Sequence: Synthetic oligonucleotide
ggcuuccgcuauuguagua

SEQ ID NO: 607689 - RNA, 19 nt, Artificial Sequence
  Description of Artificial Sequence: Synthetic oligonucleotide
uggccgugucaggacuauu

SEQ ID NO: 607690 - RNA, 19 nt, Artificial Sequence
  Description of Artificial Sequence: Synthetic oligonucleotide
cgugccuuacagguuuauc

SEQ ID NO: 607691 - RNA, 19 nt, Artificial Sequence
  Description of Artificial Sequence: Synthetic oligonucleotide
ggccgugucaggacuauuu

SEQ ID NO: 607692 - RNA, 19 nt, Artificial Sequence
  Description of Artificial Sequence: Synthetic oligonucleotide
caccguaacuggacugguu

SEQ ID NO: 607693 - RNA, 19 nt, Artificial Sequence
  Description of Artificial Sequence: Synthetic oligonucleotide
ccuuggcuaccuaugcaau

SEQ ID NO: 607694 - RNA, 19 nt, Artificial Sequence
  Description of Artificial Sequence: Synthetic oligonucleotide
ccuguaaaacuuggucaua

SEQ ID NO: 607695 - RNA, 19 nt, Artificial Sequence
  Description of Artificial Sequence: Synthetic oligonucleotide
ccguagccaccuccauaac

SEQ ID NO: 607696 - RNA, 19 nt, Artificial Sequence
  Description of Artificial Sequence: Synthetic oligonucleotide
cagcuccuauagaguuuua

SEQ ID NO: 607697 - RNA, 19 nt, Artificial Sequence
  Description of Artificial Sequence: Synthetic oligonucleotide
uggccgcugcauggccaua

SEQ ID NO: 607698 - RNA, 19 nt, Artificial Sequence
  Description of Artificial Sequence: Synthetic oligonucleotide
ccacgcaucaucgucucuu

SEQ ID NO: 607699 - RNA, 19 nt, Artificial Sequence
  Description of Artificial Sequence: Synthetic oligonucleotide
ggcaagccccggaccuuca

SEQ ID NO: 607700 - RNA, 19 nt, Artificial Sequence
  Description of Artificial Sequence: Synthetic oligonucleotide
gcuagacaucccucccauu

SEQ ID NO: 607701 - RNA, 19 nt, Artificial Sequence
  Description of Artificial Sequence: Synthetic oligonucleotide
ccggcaauguuaucccauu

SEQ ID NO: 607702 - RNA, 19 nt, Artificial Sequence
  Description of Artificial Sequence: Synthetic oligonucleotide
ccccguaucuguggucaga

SEQ ID NO: 607703 - RNA, 19 nt, Artificial Sequence
  Description of Artificial Sequence: Synthetic oligonucleotide
cccguacuccuccccugga

SEQ ID NO: 607704 - RNA, 19 nt, Artificial Sequence
  Description of Artificial Sequence: Synthetic oligonucleotide
gcaccacgccucauucucu

SEQ ID NO: 607705 - RNA, 19 nt, Artificial Sequence
  Description of Artificial Sequence: Synthetic oligonucleotide
ccguuguacucuggaaagu

SEQ ID NO: 607706 - RNA, 19 nt, Artificial Sequence
  Description of Artificial Sequence: Synthetic oligonucleotide
gcacggcuuccgcuauugu

SEQ ID NO: 607707 - RNA, 19 nt, Artificial Sequence
  Description of Artificial Sequence: Synthetic oligonucleotide
cgcccacgcaucaucgucu

SEQ ID NO: 607708 - RNA, 19 nt, Artificial Sequence
  Description of Artificial Sequence: Synthetic oligonucleotide
ccaccguaacuggacuggu

SEQ ID NO: 607709 - RNA, 19 nt, Artificial Sequence
  Description of Artificial Sequence: Synthetic oligonucleotide
cggcuuccgcuauuguagu

SEQ ID NO: 607710 - RNA, 19 nt, Artificial Sequence
  Description of Artificial Sequence: Synthetic oligonucleotide
gggccccauuuugaauuuu

SEQ ID NO: 607711 - RNA, 19 nt, Artificial Sequence
  Description of Artificial Sequence: Synthetic oligonucleotide
cccacgcaucaucgucucu

SEQ ID NO: 607712 - RNA, 19 nt, Artificial Sequence
  Description of Artificial Sequence: Synthetic oligonucleotide
cgaauaccuugggccccau

SEQ ID NO: 607713 - RNA, 19 nt, Artificial Sequence
  Description of Artificial Sequence: Synthetic oligonucleotide
auuaaaacuauagaaaccc

SEQ ID NO: 607714 - RNA, 19 nt, Artificial Sequence
  Description of Artificial Sequence: Synthetic oligonucleotide
aaauagauacuuuaaaaug

SEQ ID NO: 607715 - RNA, 19 nt, Artificial Sequence
  Description of Artificial Sequence: Synthetic oligonucleotide
uuuuagaaggguuauaagg

SEQ ID NO: 607716 - RNA, 19 nt, Artificial Sequence
  Description of Artificial Sequence: Synthetic oligonucleotide
uuagaucuaaaauagauac

SEQ ID NO: 607717 - RNA, 19 nt, Artificial Sequence
  Description of Artificial Sequence: Synthetic oligonucleotide
acuaauacaauacucaugu

SEQ ID NO: 607718 - RNA, 19 nt, Artificial Sequence
  Description of Artificial Sequence: Synthetic oligonucleotide
uuuagaaggguuauaaggc

SEQ ID NO: 607719 - RNA, 19 nt, Artificial Sequence
  Description of Artificial Sequence: Synthetic oligonucleotide
aauuuaaguaccuuaugug

SEQ ID NO: 607720 - RNA, 19 nt, Artificial Sequence
  Description of Artificial Sequence: Synthetic oligonucleotide
uugaaaagcaaacuaauac

SEQ ID NO: 607721 - RNA, 19 nt, Artificial Sequence
  Description of Artificial Sequence: Synthetic oligonucleotide
aaugugaacaaaugauggg

SEQ ID NO: 607722 - RNA, 19 nt, Artificial Sequence
  Description of Artificial Sequence: Synthetic oligonucleotide
aaugaacgguuacuaaacc

SEQ ID NO: 607723 - RNA, 19 nt, Artificial Sequence
  Description of Artificial Sequence: Synthetic oligonucleotide
aaaugugaacaaaugaugg

SEQ ID NO: 607724 - RNA, 19 nt, Artificial Sequence
  Description of Artificial Sequence: Synthetic oligonucleotide
uuuauauuauugcuaaaca

SEQ ID NO: 607725 - RNA, 19 nt, Artificial Sequence
  Description of Artificial Sequence: Synthetic oligonucleotide
aauuguaucaaauuacaua

SEQ ID NO: 607726 - RNA, 19 nt, Artificial Sequence
  Description of Artificial Sequence: Synthetic oligonucleotide
ugaagaauguaguagacac

SEQ ID NO: 607727 - RNA, 19 nt, Artificial Sequence
  Description of Artificial Sequence: Synthetic oligonucleotide
aagaacucaaagcaguaag

SEQ ID NO: 607728 - RNA, 19 nt, Artificial Sequence
  Description of Artificial Sequence: Synthetic oligonucleotide
uauuggagaacccaguuug

SEQ ID NO: 607729 - RNA, 19 nt, Artificial Sequence
  Description of Artificial Sequence: Synthetic oligonucleotide
aauagauacuuuaaaaugu

SEQ ID NO: 607730 - RNA, 19 nt, Artificial Sequence
  Description of Artificial Sequence: Synthetic oligonucleotide
uuaaauuucaaaccacaga

SEQ ID NO: 607731 - RNA, 19 nt, Artificial Sequence
  Description of Artificial Sequence: Synthetic oligonucleotide
auuaguagugauguguucc

SEQ ID NO: 607732 - RNA, 19 nt, Artificial Sequence
  Description of Artificial Sequence: Synthetic oligonucleotide
uuaacaugcguauauguug

SEQ ID NO: 607733 - RNA, 19 nt, Artificial Sequence
  Description of Artificial Sequence: Synthetic oligonucleotide
ugcucuuaaaaucucauac

SEQ ID NO: 607734 - RNA, 19 nt, Artificial Sequence
  Description of Artificial Sequence: Synthetic oligonucleotide
aguauagcuaacuguauuc

SEQ ID NO: 607735 - RNA, 19 nt, Artificial Sequence
  Description of Artificial Sequence: Synthetic oligonucleotide
uuauauuauugcuaaacac

SEQ ID NO: 607736 - RNA, 19 nt, Artificial Sequence
  Description of Artificial Sequence: Synthetic oligonucleotide
auuaccaggaaauacaaau

SEQ ID NO: 607737 - RNA, 19 nt, Artificial Sequence
  Description of Artificial Sequence: Synthetic oligonucleotide
aaaacgacaaauucauccu

SEQ ID NO: 607738 - RNA, 19 nt, Artificial Sequence
  Description of Artificial Sequence: Synthetic oligonucleotide
aaaugaacgguuacuaaac

SEQ ID NO: 607739 - RNA, 19 nt, Artificial Sequence
  Description of Artificial Sequence: Synthetic oligonucleotide
aguaccuuaugugacagcc

SEQ ID NO: 607740 - RNA, 19 nt, Artificial Sequence
  Description of Artificial Sequence: Synthetic oligonucleotide
ucuugaagcaagauaaugu

SEQ ID NO: 607741 - RNA, 19 nt, Artificial Sequence
  Description of Artificial Sequence: Synthetic oligonucleotide
augaacgguuacuaaaccc

SEQ ID NO: 607742 - RNA, 19 nt, Artificial Sequence
  Description of Artificial Sequence: Synthetic oligonucleotide
aaaaugaccagucuuccaa

SEQ ID NO: 607743 - RNA, 19 nt, Artificial Sequence
  Description of Artificial Sequence: Synthetic oligonucleotide
aaacacgcaugacaugggc

SEQ ID NO: 607744 - RNA, 19 nt, Artificial Sequence
  Description of Artificial Sequence: Synthetic oligonucleotide
ugaacgguuacuaaaccca

SEQ ID NO: 607745 - RNA, 19 nt, Artificial Sequence
  Description of Artificial Sequence: Synthetic oligonucleotide
cuagacuuaacaaauucac

SEQ ID NO: 607746 - RNA, 19 nt, Artificial Sequence
  Description of Artificial Sequence: Synthetic oligonucleotide
augaguggcaauuaccagg

SEQ ID NO: 607747 - RNA, 19 nt, Artificial Sequence
  Description of Artificial Sequence: Synthetic oligonucleotide
ugaggaauacccacaacag

SEQ ID NO: 607748 - RNA, 19 nt, Artificial Sequence
  Description of Artificial Sequence: Synthetic oligonucleotide
auugcuaaacaccaucuug

SEQ ID NO: 607749 - RNA, 19 nt, Artificial Sequence
  Description of Artificial Sequence: Synthetic oligonucleotide
aaacgacaaauucauccuc

SEQ ID NO: 607750 - RNA, 19 nt, Artificial Sequence
  Description of Artificial Sequence: Synthetic oligonucleotide
uguguuccaauaaaugcgc

SEQ ID NO: 607751 - RNA, 19 nt, Artificial Sequence
  Description of Artificial Sequence: Synthetic oligonucleotide
aaacuaauacaauacucau

SEQ ID NO: 607752 - RNA, 19 nt, Artificial Sequence
  Description of Artificial Sequence: Synthetic oligonucleotide
uccacaagaauauuucccc

SEQ ID NO: 607753 - RNA, 19 nt, Artificial Sequence
  Description of Artificial Sequence: Synthetic oligonucleotide
uccucagcgaccuuaagcc

SEQ ID NO: 607754 - RNA, 19 nt, Artificial Sequence
  Description of Artificial Sequence: Synthetic oligonucleotide
gguaauacaaggaaauugg

SEQ ID NO: 607755 - RNA, 19 nt, Artificial Sequence
  Description of Artificial Sequence: Synthetic oligonucleotide
aacucaaagcaguaagaug

SEQ ID NO: 607756 - RNA, 19 nt, Artificial Sequence
  Description of Artificial Sequence: Synthetic oligonucleotide
uauccuauaguaauugcuc

SEQ ID NO: 607757 - RNA, 19 nt, Artificial Sequence
  Description of Artificial Sequence: Synthetic oligonucleotide
auaaaguggauauguguag

SEQ ID NO: 607758 - RNA, 19 nt, Artificial Sequence
  Description of Artificial Sequence: Synthetic oligonucleotide
uuuacucuuaacaugcgua

SEQ ID NO: 607759 - RNA, 19 nt, Artificial Sequence
  Description of Artificial Sequence: Synthetic oligonucleotide
aacccgugauuccaagugc

SEQ ID NO: 607760 - RNA, 19 nt, Artificial Sequence
  Description of Artificial Sequence: Synthetic oligonucleotide
uucuaguaagagcugaaga

SEQ ID NO: 607761 - RNA, 19 nt, Artificial Sequence
  Description of Artificial Sequence: Synthetic oligonucleotide
uuauugcuaaacaccaucu

SEQ ID NO: 607762 - RNA, 19 nt, Artificial Sequence
  Description of Artificial Sequence: Synthetic oligonucleotide
caagccgugaggaauaccc

SEQ ID NO: 607763 - RNA, 19 nt, Artificial Sequence
  Description of Artificial Sequence: Synthetic oligonucleotide
uauguguaggugaaaucag

SEQ ID NO: 607764 - RNA, 19 nt, Artificial Sequence
  Description of Artificial Sequence: Synthetic oligonucleotide
uuaccaggaaauacaaaug

SEQ ID NO: 607765 - RNA, 19 nt, Artificial Sequence
  Description of Artificial Sequence: Synthetic oligonucleotide
uacccaauugcacacauuc

SEQ ID NO: 607766 - RNA, 19 nt, Artificial Sequence
  Description of Artificial Sequence: Synthetic oligonucleotide
aguaauuugcuacucggga

SEQ ID NO: 607767 - RNA, 19 nt, Artificial Sequence
  Description of Artificial Sequence: Synthetic oligonucleotide
uaagccuagacuuaacaaa

SEQ ID NO: 607768 - RNA, 19 nt, Artificial Sequence
  Description of Artificial Sequence: Synthetic oligonucleotide
acauguguaaaauuuguaa

SEQ ID NO: 607769 - RNA, 19 nt, Artificial Sequence
  Description of Artificial Sequence: Synthetic oligonucleotide
ucagaguauagcuaacugu

SEQ ID NO: 607770 - RNA, 19 nt, Artificial Sequence
  Description of Artificial Sequence: Synthetic oligonucleotide
caucaauuuccaaaaggcc

SEQ ID NO: 607771 - RNA, 19 nt, Artificial Sequence
  Description of Artificial Sequence: Synthetic oligonucleotide
aaaguuacgcauauauuca

SEQ ID NO: 607772 - RNA, 19 nt, Artificial Sequence
  Description of Artificial Sequence: Synthetic oligonucleotide
uguaucuucagaguauagc

SEQ ID NO: 607773 - RNA, 19 nt, Artificial Sequence
  Description of Artificial Sequence: Synthetic oligonucleotide
uuauaaggcuaucaugagu

SEQ ID NO: 607774 - RNA, 19 nt, Artificial Sequence
  Description of Artificial Sequence: Synthetic oligonucleotide
acagguaaugcuaugagug

SEQ ID NO: 607775 - RNA, 19 nt, Artificial Sequence
  Description of Artificial Sequence: Synthetic oligonucleotide
auaauguuacaagugaaca

SEQ ID NO: 607776 - RNA, 19 nt, Artificial Sequence
  Description of Artificial Sequence: Synthetic oligonucleotide
uaacaugcguauauguugu

SEQ ID NO: 607777 - RNA, 19 nt, Artificial Sequence
  Description of Artificial Sequence: Synthetic oligonucleotide
uccacuacccaauugcaca

SEQ ID NO: 607778 - RNA, 19 nt, Artificial Sequence
  Description of Artificial Sequence: Synthetic oligonucleotide
gauaauguuacaagugaac

SEQ ID NO: 607779 - RNA, 19 nt, Artificial Sequence
  Description of Artificial Sequence: Synthetic oligonucleotide
ugaguggcaauuaccagga

SEQ ID NO: 607780 - RNA, 19 nt, Artificial Sequence
  Description of Artificial Sequence: Synthetic oligonucleotide
aaugcuaugaguggcaauu

SEQ ID NO: 607781 - RNA, 19 nt, Artificial Sequence
  Description of Artificial Sequence: Synthetic oligonucleotide
uguaguagacacaugugua

SEQ ID NO: 607782 - RNA, 19 nt, Artificial Sequence
  Description of Artificial Sequence: Synthetic oligonucleotide
cugagcaguaauuugcuac

SEQ ID NO: 607783 - RNA, 19 nt, Artificial Sequence
  Description of Artificial Sequence: Synthetic oligonucleotide
agaucuaaaauagauacuu

SEQ ID NO: 607784 - RNA, 19 nt, Artificial Sequence
  Description of Artificial Sequence: Synthetic oligonucleotide
uuagaaggguuauaaggcu

SEQ ID NO: 607785 - RNA, 19 nt, Artificial Sequence
  Description of Artificial Sequence: Synthetic oligonucleotide
uuaagccuagacuuaacaa

SEQ ID NO: 607786 - RNA, 19 nt, Artificial Sequence
  Description of Artificial Sequence: Synthetic oligonucleotide
cacacuuguagucauaguc

SEQ ID NO: 607787 - RNA, 19 nt, Artificial Sequence
  Description of Artificial Sequence: Synthetic oligonucleotide
uguaauaguuuauauuauu

SEQ ID NO: 607788 - RNA, 19 nt, Artificial Sequence
  Description of Artificial Sequence: Synthetic oligonucleotide
aucgcaaaccauucccagc

SEQ ID NO: 607789 - RNA, 19 nt, Artificial Sequence
  Description of Artificial Sequence: Synthetic oligonucleotide
aaagcaguaagaugacaaa

SEQ ID NO: 607790 - RNA, 19 nt, Artificial Sequence
  Description of Artificial Sequence: Synthetic oligonucleotide
uuacaaaaugaacgguuac

SEQ ID NO: 607791 - RNA, 19 nt, Artificial Sequence
  Description of Artificial Sequence: Synthetic oligonucleotide
uaauuugcuacucgggauc

SEQ ID NO: 607792 - RNA, 19 nt, Artificial Sequence
  Description of Artificial Sequence: Synthetic oligonucleotide
ugugaacaaaugaugggaa

SEQ ID NO: 607793 - RNA, 19 nt, Artificial Sequence
  Description of Artificial Sequence: Synthetic oligonucleotide
uaccuuaugugacagccac

SEQ ID NO: 607794 - RNA, 19 nt, Artificial Sequence
  Description of Artificial Sequence: Synthetic oligonucleotide
ucccuuauguaaacaagug

SEQ ID NO: 607795 - RNA, 19 nt, Artificial Sequence
  Description of Artificial Sequence: Synthetic oligonucleotide
ugauuccaagugcuuaucc

SEQ ID NO: 607796 - RNA, 19 nt, Artificial Sequence
  Description of Artificial Sequence: Synthetic oligonucleotide
acagugggaauccacaaga

SEQ ID NO: 607797 - RNA, 19 nt, Artificial Sequence
  Description of Artificial Sequence: Synthetic oligonucleotide
ucauuacucaucacauccc

SEQ ID NO: 607798 - RNA, 19 nt, Artificial Sequence
  Description of Artificial Sequence: Synthetic oligonucleotide
aacuaauacaauacucaug

SEQ ID NO: 607799 - RNA, 19 nt, Artificial Sequence
  Description of Artificial Sequence: Synthetic oligonucleotide
uccguuuuggguuuaucca

SEQ ID NO: 607800 - RNA, 19 nt, Artificial Sequence
  Description of Artificial Sequence: Synthetic oligonucleotide
ugugaucccggguagaaaa

SEQ ID NO: 607801 - RNA, 19 nt, Artificial Sequence
  Description of Artificial Sequence: Synthetic oligonucleotide
aaaugcuaaugguuuucug

SEQ ID NO: 607802 - RNA, 19 nt, Artificial Sequence
  Description of Artificial Sequence: Synthetic oligonucleotide
aaguaccuuaugugacagc

SEQ ID NO: 607803 - RNA, 19 nt, Artificial Sequence
  Description of Artificial Sequence: Synthetic oligonucleotide
uguuccaauaaaugcgcug

SEQ ID NO: 607804 - RNA, 19 nt, Artificial Sequence
  Description of Artificial Sequence: Synthetic oligonucleotide
uuauaaaggcaaauuucau

SEQ ID NO: 607805 - RNA, 19 nt, Artificial Sequence
  Description of Artificial Sequence: Synthetic oligonucleotide
guuacgcauauauucauca

SEQ ID NO: 607806 - RNA, 19 nt, Artificial Sequence
  Description of Artificial Sequence: Synthetic oligonucleotide
uucacucgcuguaucauca

SEQ ID NO: 607807 - RNA, 19 nt, Artificial Sequence
  Description of Artificial Sequence: Synthetic oligonucleotide
auccucauuacucaucaca

SEQ ID NO: 607808 - RNA, 19 nt, Artificial Sequence
  Description of Artificial Sequence: Synthetic oligonucleotide
uacgcauauauucaucaau

SEQ ID NO: 607809 - RNA, 19 nt, Artificial Sequence
  Description of Artificial Sequence: Synthetic oligonucleotide
cuaugaguggcaauuacca

SEQ ID NO: 607810 - RNA, 19 nt, Artificial Sequence
  Description of Artificial Sequence: Synthetic oligonucleotide
agguaaugcuaugaguggc

SEQ ID NO: 607811 - RNA, 19 nt, Artificial Sequence
  Description of Artificial Sequence: Synthetic oligonucleotide
ugggaaaugcuaaugguuu

SEQ ID NO: 607812 - RNA, 19 nt, Artificial Sequence
  Description of Artificial Sequence: Synthetic oligonucleotide
uaugaguggcaauuaccag

SEQ ID NO: 607813 - RNA, 19 nt, Artificial Sequence
  Description of Artificial Sequence: Synthetic oligonucleotide
ugagcaguaauuugcuacu

SEQ ID NO: 607814 - RNA, 19 nt, Artificial Sequence
  Description of Artificial Sequence: Synthetic oligonucleotide
guuauaaggcuaucaugag

SEQ ID NO: 607815 - RNA, 19 nt, Artificial Sequence
  Description of Artificial Sequence: Synthetic oligonucleotide
agcaaauuauaaauaacca

SEQ ID NO: 607816 - RNA, 19 nt, Artificial Sequence
  Description of Artificial Sequence: Synthetic oligonucleotide
ccuuauguaaacaaguguc

SEQ ID NO: 607817 - RNA, 19 nt, Artificial Sequence
  Description of Artificial Sequence: Synthetic oligonucleotide
aauguaguagacacaugug

SEQ ID NO: 607818 - RNA, 19 nt, Artificial Sequence
  Description of Artificial Sequence: Synthetic oligonucleotide
aggaauacccacaacagcu

SEQ ID NO: 607819 - RNA, 19 nt, Artificial Sequence
  Description of Artificial Sequence: Synthetic oligonucleotide
augcuaaugguuuucugcu

SEQ ID NO: 607820 - RNA, 19 nt, Artificial Sequence
  Description of Artificial Sequence: Synthetic oligonucleotide
gauuacaagguuugugauc

SEQ ID NO: 607821 - RNA, 19 nt, Artificial Sequence
  Description of Artificial Sequence: Synthetic oligonucleotide
cauauccuauaguaauugc

SEQ ID NO: 607822 - RNA, 19 nt, Artificial Sequence
  Description of Artificial Sequence: Synthetic oligonucleotide
gguuauaaggcuaucauga

SEQ ID NO: 607823 - RNA, 19 nt, Artificial Sequence
  Description of Artificial Sequence: Synthetic oligonucleotide
aucaugagucuucuagauc

SEQ ID NO: 607824 - RNA, 19 nt, Artificial Sequence
  Description of Artificial Sequence: Synthetic oligonucleotide
acgguuacuaaacccauga

SEQ ID NO: 607825 - RNA, 19 nt, Artificial Sequence
  Description of Artificial Sequence: Synthetic oligonucleotide
uccucauuacucaucacau

SEQ ID NO: 607826 - RNA, 19 nt, Artificial Sequence
  Description of Artificial Sequence: Synthetic oligonucleotide
uuuccccuuguauugaagu

SEQ ID NO: 607827 - RNA, 19 nt, Artificial Sequence
  Description of Artificial Sequence: Synthetic oligonucleotide
cccaucacaagccaaaacg

SEQ ID NO: 607828 - RNA, 19 nt, Artificial Sequence
  Description of Artificial Sequence: Synthetic oligonucleotide
uaucgcaaaccauucccag

SEQ ID NO: 607829 - RNA, 19 nt, Artificial Sequence
  Description of Artificial Sequence: Synthetic oligonucleotide
uaaguaccuuaugugacag

SEQ ID NO: 607830 - RNA, 19 nt, Artificial Sequence
  Description of Artificial Sequence: Synthetic oligonucleotide
caguaauuugcuacucggg

SEQ ID NO: 607831 - RNA, 19 nt, Artificial Sequence
  Description of Artificial Sequence: Synthetic oligonucleotide
aaguuacgcauauauucau

SEQ ID NO: 607832 - RNA, 19 nt, Artificial Sequence
  Description of Artificial Sequence: Synthetic oligonucleotide
uaucaugagucuucuagau

SEQ ID NO: 607833 - RNA, 19 nt, Artificial Sequence
  Description of Artificial Sequence: Synthetic oligonucleotide
acucuuaacaugcguauau

SEQ ID NO: 607834 - RNA, 19 nt, Artificial Sequence
  Description of Artificial Sequence: Synthetic oligonucleotide
uuacucuuaacaugcguau

SEQ ID NO: 607835 - RNA, 19 nt, Artificial Sequence
  Description of Artificial Sequence: Synthetic oligonucleotide
cagguaaugcuaugagugg

SEQ ID NO: 607836 - RNA, 19 nt, Artificial Sequence
  Description of Artificial Sequence: Synthetic oligonucleotide
acauauccuauaguaauug

SEQ ID NO: 607837 - RNA, 19 nt, Artificial Sequence
  Description of Artificial Sequence: Synthetic oligonucleotide
augugaacaaaugauggga

SEQ ID NO: 607838 - RNA, 19 nt, Artificial Sequence
  Description of Artificial Sequence: Synthetic oligonucleotide
uuacuaaacccaugaaaau

SEQ ID NO: 607839 - RNA, 19 nt, Artificial Sequence
  Description of Artificial Sequence: Synthetic oligonucleotide
aaacagugggaauccacaa

SEQ ID NO: 607840 - RNA, 19 nt, Artificial Sequence
  Description of Artificial Sequence: Synthetic oligonucleotide
auucacucgcuguaucauc

SEQ ID NO: 607841 - RNA, 19 nt, Artificial Sequence
  Description of Artificial Sequence: Synthetic oligonucleotide
guacagguaaugcuaugag

SEQ ID NO: 607842 - RNA, 19 nt, Artificial Sequence
  Description of Artificial Sequence: Synthetic oligonucleotide
caucggauuacaagguuug

SEQ ID NO: 607843 - RNA, 19 nt, Artificial Sequence
  Description of Artificial Sequence: Synthetic oligonucleotide
auccuauaguaauugcuca

SEQ ID NO: 607844 - RNA, 19 nt, Artificial Sequence
  Description of Artificial Sequence: Synthetic oligonucleotide
aaccauucccagcaccaug

SEQ ID NO: 607845 - RNA, 19 nt, Artificial Sequence
  Description of Artificial Sequence: Synthetic oligonucleotide
gagauaccgcuaaugaacc

SEQ ID NO: 607846 - RNA, 19 nt, Artificial Sequence
  Description of Artificial Sequence: Synthetic oligonucleotide
guauagcuaacuguauucc

SEQ ID NO: 607847 - RNA, 19 nt, Artificial Sequence
  Description of Artificial Sequence: Synthetic oligonucleotide
auauccuauaguaauugcu

SEQ ID NO: 607848 - RNA, 19 nt, Artificial Sequence
  Description of Artificial Sequence: Synthetic oligonucleotide
aaaacacgcaugacauggg

SEQ ID NO: 607849 - RNA, 19 nt, Artificial Sequence
  Description of Artificial Sequence: Synthetic oligonucleotide
aaaugcgcugagcaguaau

SEQ ID NO: 607850 - RNA, 19 nt, Artificial Sequence
  Description of Artificial Sequence: Synthetic oligonucleotide
agccgugaggaauacccac

SEQ ID NO: 607851 - RNA, 19 nt, Artificial Sequence
  Description of Artificial Sequence: Synthetic oligonucleotide
uuccaauaaaugcgcugag

SEQ ID NO: 607852 - RNA, 19 nt, Artificial Sequence
  Description of Artificial Sequence: Synthetic oligonucleotide
caagguuugugaucccggg

SEQ ID NO: 607853 - RNA, 19 nt, Artificial Sequence
  Description of Artificial Sequence: Synthetic oligonucleotide
uuauuggagaacccaguuu

SEQ ID NO: 607854 - RNA, 19 nt, Artificial Sequence
  Description of Artificial Sequence: Synthetic oligonucleotide
aguacagguaaugcuauga

SEQ ID NO: 607855 - RNA, 19 nt, Artificial Sequence
  Description of Artificial Sequence: Synthetic oligonucleotide
uuauccaacuguaucucuu

SEQ ID NO: 607856 - RNA, 19 nt, Artificial Sequence
  Description of Artificial Sequence: Synthetic oligonucleotide
aaccacaaaaggcuuccaa

SEQ ID NO: 607857 - RNA, 19 nt, Artificial Sequence
  Description of Artificial Sequence: Synthetic oligonucleotide
aggguuauaaggcuaucau

SEQ ID NO: 607858 - RNA, 19 nt, Artificial Sequence
  Description of Artificial Sequence: Synthetic oligonucleotide
acucgcuguaucaucacac

SEQ ID NO: 607859 - RNA, 19 nt, Artificial Sequence
  Description of Artificial Sequence: Synthetic oligonucleotide
uguccacuacccaauugca

SEQ ID NO: 607860 - RNA, 19 nt, Artificial Sequence
  Description of Artificial Sequence: Synthetic oligonucleotide
aagccuagacuuaacaaau

SEQ ID NO: 607861 - RNA, 19 nt, Artificial Sequence
  Description of Artificial Sequence: Synthetic oligonucleotide
gcuaacuguauucccaugc

SEQ ID NO: 607862 - RNA, 19 nt, Artificial Sequence
  Description of Artificial Sequence: Synthetic oligonucleotide
ucagcgaccuuaagccuag

SEQ ID NO: 607863 - RNA, 19 nt, Artificial Sequence
  Description of Artificial Sequence: Synthetic oligonucleotide
ucgcuguaucaucacacug

SEQ ID NO: 607864 - RNA, 19 nt, Artificial Sequence
  Description of Artificial Sequence: Synthetic oligonucleotide
gcucauauccaaaacagug

SEQ ID NO: 607865 - RNA, 19 nt, Artificial Sequence
  Description of Artificial Sequence: Synthetic oligonucleotide
uauuauugcuaaacaccau

SEQ ID NO: 607866 - RNA, 19 nt, Artificial Sequence
  Description of Artificial Sequence: Synthetic oligonucleotide
ugcuaugaguggcaauuac

SEQ ID NO: 607867 - RNA, 19 nt, Artificial Sequence
  Description of Artificial Sequence: Synthetic oligonucleotide
cagaguauagcuaacugua

SEQ ID NO: 607868 - RNA, 19 nt, Artificial Sequence
  Description of Artificial Sequence: Synthetic oligonucleotide
uuccaucggauuacaaggu

SEQ ID NO: 607869 - RNA, 19 nt, Artificial Sequence
  Description of Artificial Sequence: Synthetic oligonucleotide
accaucuugaagcaagaua

SEQ ID NO: 607870 - RNA, 19 nt, Artificial Sequence
  Description of Artificial Sequence: Synthetic oligonucleotide
uccuauaguaauugcucaa

SEQ ID NO: 607871 - RNA, 19 nt, Artificial Sequence
  Description of Artificial Sequence: Synthetic oligonucleotide
uaggugaaaucagaacgcc

SEQ ID NO: 607872 - RNA, 19 nt, Artificial Sequence
  Description of Artificial Sequence: Synthetic oligonucleotide
caacccgugauuccaagug

SEQ ID NO: 607873 - RNA, 19 nt, Artificial Sequence
  Description of Artificial Sequence: Synthetic oligonucleotide
uccaauaaaugcgcugagc

SEQ ID NO: 607874 - RNA, 19 nt, Artificial Sequence
  Description of Artificial Sequence: Synthetic oligonucleotide
agcgaccuuaagccuagac

SEQ ID NO: 607875 - RNA, 19 nt, Artificial Sequence
  Description of Artificial Sequence: Synthetic oligonucleotide
aggugaaaucagaacgccc

SEQ ID NO: 607876 - RNA, 19 nt, Artificial Sequence
  Description of Artificial Sequence: Synthetic oligonucleotide
aguuacgcauauauucauc

SEQ ID NO: 607877 - RNA, 19 nt, Artificial Sequence
  Description of Artificial Sequence: Synthetic oligonucleotide
ugcaccucaggcacauuug

SEQ ID NO: 607878 - RNA, 19 nt, Artificial Sequence
  Description of Artificial Sequence: Synthetic oligonucleotide
aacaugcguauauguugug

SEQ ID NO: 607879 - RNA, 19 nt, Artificial Sequence
  Description of Artificial Sequence: Synthetic oligonucleotide
guaguagacacauguguaa

SEQ ID NO: 607880 - RNA, 19 nt, Artificial Sequence
  Description of Artificial Sequence: Synthetic oligonucleotide
aauacccacaacagcugug

SEQ ID NO: 607881 - RNA, 19 nt, Artificial Sequence
  Description of Artificial Sequence: Synthetic oligonucleotide
ucuucagaguauagcuaac

SEQ ID NO: 607882 - RNA, 19 nt, Artificial Sequence
  Description of Artificial Sequence: Synthetic oligonucleotide
cucgggauccagcaugacc

SEQ ID NO: 607883 - RNA, 19 nt, Artificial Sequence
  Description of Artificial Sequence: Synthetic oligonucleotide
uuacgcauauauucaucaa

SEQ ID NO: 607884 - RNA, 19 nt, Artificial Sequence
  Description of Artificial Sequence: Synthetic oligonucleotide
acccuuaauguaucuucag

SEQ ID NO: 607885 - RNA, 19 nt, Artificial Sequence
  Description of Artificial Sequence: Synthetic oligonucleotide
agugaacauuauuggagaa

SEQ ID NO: 607886 - RNA, 19 nt, Artificial Sequence
  Description of Artificial Sequence: Synthetic oligonucleotide
cauccacacacuuguaguc

SEQ ID NO: 607887 - RNA, 19 nt, Artificial Sequence
  Description of Artificial Sequence: Synthetic oligonucleotide
cgagauaccgcuaaugaac

SEQ ID NO: 607888 - RNA, 19 nt, Artificial Sequence
  Description of Artificial Sequence: Synthetic oligonucleotide
caaauucacagagauccuc

SEQ ID NO: 607889 - RNA, 19 nt, Artificial Sequence
  Description of Artificial Sequence: Synthetic oligonucleotide
ggguuauaaggcuaucaug

SEQ ID NO: 607890 - RNA, 19 nt, Artificial Sequence
  Description of Artificial Sequence: Synthetic oligonucleotide
aggacagcucgugagucac

SEQ ID NO: 607891 - RNA, 19 nt, Artificial Sequence
  Description of Artificial Sequence: Synthetic oligonucleotide
aguguccacuacccaauug

SEQ ID NO: 607892 - RNA, 19 nt, Artificial Sequence
  Description of Artificial Sequence: Synthetic oligonucleotide
cacgagauaccgcuaauga

SEQ ID NO: 607893 - RNA, 19 nt, Artificial Sequence
  Description of Artificial Sequence: Synthetic oligonucleotide
cauccuugcaugcugcuca

SEQ ID NO: 607894 - RNA, 19 nt, Artificial Sequence
  Description of Artificial Sequence: Synthetic oligonucleotide
acaagccaaaacgacaaau

SEQ ID NO: 607895 - RNA, 19 nt, Artificial Sequence
  Description of Artificial Sequence: Synthetic oligonucleotide
agaacgcccacugccgucg

SEQ ID NO: 607896 - RNA, 19 nt, Artificial Sequence
  Description of Artificial Sequence: Synthetic oligonucleotide
accgcuaaugaaccauuca

SEQ ID NO: 607897 - RNA, 19 nt, Artificial Sequence
  Description of Artificial Sequence: Synthetic oligonucleotide
cagaguacagguaaugcua

SEQ ID NO: 607898 - RNA, 19 nt, Artificial Sequence
  Description of Artificial Sequence: Synthetic oligonucleotide
gcuguaucaucacacugcc

SEQ ID NO: 607899 - RNA, 19 nt, Artificial Sequence
  Description of Artificial Sequence: Synthetic oligonucleotide
caguuugguaauacaagga

SEQ ID NO: 607900 - RNA, 19 nt, Artificial Sequence
  Description of Artificial Sequence: Synthetic oligonucleotide
cauuaguagugauguguuc

SEQ ID NO: 607901 - RNA, 19 nt, Artificial Sequence
  Description of Artificial Sequence: Synthetic oligonucleotide
acgagauaccgcuaaugaa

SEQ ID NO: 607902 - RNA, 19 nt, Artificial Sequence
  Description of Artificial Sequence: Synthetic oligonucleotide
ggugaaaucagaacgccca

SEQ ID NO: 607903 - RNA, 19 nt, Artificial Sequence
  Description of Artificial Sequence: Synthetic oligonucleotide
gcaauuaccaggaaauaca

SEQ ID NO: 607904 - RNA, 19 nt, Artificial Sequence
  Description of Artificial Sequence: Synthetic oligonucleotide
aguuuauauuauugcuaaa

SEQ ID NO: 607905 - RNA, 19 nt, Artificial Sequence
  Description of Artificial Sequence: Synthetic oligonucleotide
ucuagaucuccagcgcccc

SEQ ID NO: 607906 - RNA, 19 nt, Artificial Sequence
  Description of Artificial Sequence: Synthetic oligonucleotide
guggauucagucuacuaua

SEQ ID NO: 607907 - RNA, 19 nt, Artificial Sequence
  Description of Artificial Sequence: Synthetic oligonucleotide
ucagaacgcccacugccgu

SEQ ID NO: 607908 - RNA, 19 nt, Artificial Sequence
  Description of Artificial Sequence: Synthetic oligonucleotide
gaaccauucacucgcugua

SEQ ID NO: 607909 - RNA, 19 nt, Artificial Sequence
  Description of Artificial Sequence: Synthetic oligonucleotide
gcuaaacaccaucuugaag

SEQ ID NO: 607910 - RNA, 19 nt, Artificial Sequence
  Description of Artificial Sequence: Synthetic oligonucleotide
acuacccaauugcacacau

SEQ ID NO: 607911 - RNA, 19 nt, Artificial Sequence
  Description of Artificial Sequence: Synthetic oligonucleotide
caauugcacacauucucca

SEQ ID NO: 607912 - RNA, 19 nt, Artificial Sequence
  Description of Artificial Sequence: Synthetic oligonucleotide
ccuuaugugacagccacgc

SEQ ID NO: 607913 - RNA, 19 nt, Artificial Sequence
  Description of Artificial Sequence: Synthetic oligonucleotide
cauuccuacacaggacagc

SEQ ID NO: 607914 - RNA, 19 nt, Artificial Sequence
  Description of Artificial Sequence: Synthetic oligonucleotide
ugauaccagucuuaacauu

SEQ ID NO: 607915 - RNA, 19 nt, Artificial Sequence
  Description of Artificial Sequence: Synthetic oligonucleotide
cauggcgcuugccagcgag

SEQ ID NO: 607916 - RNA, 19 nt, Artificial Sequence
  Description of Artificial Sequence: Synthetic oligonucleotide
ugcuaaugguuuucugcuc

SEQ ID NO: 607917 - RNA, 19 nt, Artificial Sequence
  Description of Artificial Sequence: Synthetic oligonucleotide
agagacaagcuguucuguu

SEQ ID NO: 607918 - RNA, 19 nt, Artificial Sequence
  Description of Artificial Sequence: Synthetic oligonucleotide
uguaccgcguccaguguua

SEQ ID NO: 607919 - RNA, 19 nt, Artificial Sequence
  Description of Artificial Sequence: Synthetic oligonucleotide
acgcauauauucaucaauu

SEQ ID NO: 607920 - RNA, 19 nt, Artificial Sequence
  Description of Artificial Sequence: Synthetic oligonucleotide
gcuaaugguuuucugcuca

SEQ ID NO: 607921 - RNA, 19 nt, Artificial Sequence
  Description of Artificial Sequence: Synthetic oligonucleotide
ugcguauauguuguguuuu

SEQ ID NO: 607922 - RNA, 19 nt, Artificial Sequence
  Description of Artificial Sequence: Synthetic oligonucleotide
cuccauuccuacacaggac

SEQ ID NO: 607923 - RNA, 19 nt, Artificial Sequence
  Description of Artificial Sequence: Synthetic oligonucleotide
acaugcguauauguugugu

SEQ ID NO: 607924 - RNA, 19 nt, Artificial Sequence
  Description of Artificial Sequence: Synthetic oligonucleotide
uccaucggauuacaagguu

SEQ ID NO: 607925 - RNA, 19 nt, Artificial Sequence
  Description of Artificial Sequence: Synthetic oligonucleotide
cucuuaacaugcguauaug

SEQ ID NO: 607926 - RNA, 19 nt, Artificial Sequence
  Description of Artificial Sequence: Synthetic oligonucleotide
aaugaaccauucacucgcu

SEQ ID NO: 607927 - RNA, 19 nt, Artificial Sequence
  Description of Artificial Sequence: Synthetic oligonucleotide
gcuaugaguggcaauuacc

SEQ ID NO: 607928 - RNA, 19 nt, Artificial Sequence
  Description of Artificial Sequence: Synthetic oligonucleotide
augcaccucaggcacauuu

SEQ ID NO: 607929 - RNA, 19 nt, Artificial Sequence
  Description of Artificial Sequence: Synthetic oligonucleotide
gugaacaaaugaugggaaa

SEQ ID NO: 607930 - RNA, 19 nt, Artificial Sequence
  Description of Artificial Sequence: Synthetic oligonucleotide
ucuuccaagccgugaggaa

SEQ ID NO: 607931 - RNA, 19 nt, Artificial Sequence
  Description of Artificial Sequence: Synthetic oligonucleotide
augggaaaugcuaaugguu

SEQ ID NO: 607932 - RNA, 19 nt, Artificial Sequence
  Description of Artificial Sequence: Synthetic oligonucleotide
ucccuagacuucuccagaa

SEQ ID NO: 607933 - RNA, 19 nt, Artificial Sequence
  Description of Artificial Sequence: Synthetic oligonucleotide
uaaugcuaugaguggcaau

SEQ ID NO: 607934 - RNA, 19 nt, Artificial Sequence
  Description of Artificial Sequence: Synthetic oligonucleotide
guaauuugcuacucgggau

SEQ ID NO: 607935 - RNA, 19 nt, Artificial Sequence
  Description of Artificial Sequence: Synthetic oligonucleotide
gccuagacuuaacaaauuc

SEQ ID NO: 607936 - RNA, 19 nt, Artificial Sequence
  Description of Artificial Sequence: Synthetic oligonucleotide
gguuugugaucccggguag

SEQ ID NO: 607937 - RNA, 19 nt, Artificial Sequence
  Description of Artificial Sequence: Synthetic oligonucleotide
aggagguaaguuugggaua

SEQ ID NO: 607938 - RNA, 19 nt, Artificial Sequence
  Description of Artificial Sequence: Synthetic oligonucleotide
agaaggguuauaaggcuau

SEQ ID NO: 607939 - RNA, 19 nt, Artificial Sequence
  Description of Artificial Sequence: Synthetic oligonucleotide
agauaccgcuaaugaacca

SEQ ID NO: 607940 - RNA, 19 nt, Artificial Sequence
  Description of Artificial Sequence: Synthetic oligonucleotide
ccuagacuuaacaaauuca

SEQ ID NO: 607941 - RNA, 19 nt, Artificial Sequence
  Description of Artificial Sequence: Synthetic oligonucleotide
augcguauauguuguguuu

SEQ ID NO: 607942 - RNA, 19 nt, Artificial Sequence
  Description of Artificial Sequence: Synthetic oligonucleotide
cuugccagcgagccucccc

SEQ ID NO: 607943 - RNA, 19 nt, Artificial Sequence
  Description of Artificial Sequence: Synthetic oligonucleotide
cugaagaauguaguagaca

SEQ ID NO: 607944 - RNA, 19 nt, Artificial Sequence
  Description of Artificial Sequence: Synthetic oligonucleotide
ccgcuaaugaaccauucac

SEQ ID NO: 607945 - RNA, 19 nt, Artificial Sequence
  Description of Artificial Sequence: Synthetic oligonucleotide
gaucccggguagaaaagca

SEQ ID NO: 607946 - RNA, 19 nt, Artificial Sequence
  Description of Artificial Sequence: Synthetic oligonucleotide
gaguauagcuaacuguauu

SEQ ID NO: 607947 - RNA, 19 nt, Artificial Sequence
  Description of Artificial Sequence: Synthetic oligonucleotide
gacagcucgugagucacca

SEQ ID NO: 607948 - RNA, 19 nt, Artificial Sequence
  Description of Artificial Sequence: Synthetic oligonucleotide
gcaaaccauucccagcacc

SEQ ID NO: 607949 - RNA, 19 nt, Artificial Sequence
  Description of Artificial Sequence: Synthetic oligonucleotide
acagcucgugagucaccac

SEQ ID NO: 607950 - RNA, 19 nt, Artificial Sequence
  Description of Artificial Sequence: Synthetic oligonucleotide
accgcguccaguguuacaa

SEQ ID NO: 607951 - RNA, 19 nt, Artificial Sequence
  Description of Artificial Sequence: Synthetic oligonucleotide
agaguacagguaaugcuau

SEQ ID NO: 607952 - RNA, 19 nt, Artificial Sequence
  Description of Artificial Sequence: Synthetic oligonucleotide
gaaaagcagacuucuccau

SEQ ID NO: 607953 - RNA, 19 nt, Artificial Sequence
  Description of Artificial Sequence: Synthetic oligonucleotide
aaccauucacucgcuguau

SEQ ID NO: 607954 - RNA, 19 nt, Artificial Sequence
  Description of Artificial Sequence: Synthetic oligonucleotide
gauaccgcuaaugaaccau

SEQ ID NO: 607955 - RNA, 19 nt, Artificial Sequence
  Description of Artificial Sequence: Synthetic oligonucleotide
gauccucauuacucaucac

SEQ ID NO: 607956 - RNA, 19 nt, Artificial Sequence
  Description of Artificial Sequence: Synthetic oligonucleotide
auguaucuucagaguauag

SEQ ID NO: 607957 - RNA, 19 nt, Artificial Sequence
  Description of Artificial Sequence: Synthetic oligonucleotide
uccugauaccagucuuaac

SEQ ID NO: 607958 - RNA, 19 nt, Artificial Sequence
  Description of Artificial Sequence: Synthetic oligonucleotide
cuacacaggacagcucgug

SEQ ID NO: 607959 - RNA, 19 nt, Artificial Sequence
  Description of Artificial Sequence: Synthetic oligonucleotide
agcucgugagucaccacag

SEQ ID NO: 607960 - RNA, 19 nt, Artificial Sequence
  Description of Artificial Sequence: Synthetic oligonucleotide
uacucuuaacaugcguaua

SEQ ID NO: 607961 - RNA, 19 nt, Artificial Sequence
  Description of Artificial Sequence: Synthetic oligonucleotide
gagcacgagauaccgcuaa

SEQ ID NO: 607962 - RNA, 19 nt, Artificial Sequence
  Description of Artificial Sequence: Synthetic oligonucleotide
gagggcucaagagcagagc

SEQ ID NO: 607963 - RNA, 19 nt, Artificial Sequence
  Description of Artificial Sequence: Synthetic oligonucleotide
agguaaguuugggauauuu

SEQ ID NO: 607964 - RNA, 19 nt, Artificial Sequence
  Description of Artificial Sequence: Synthetic oligonucleotide
uggcgcuugccagcgagcc

SEQ ID NO: 607965 - RNA, 19 nt, Artificial Sequence
  Description of Artificial Sequence: Synthetic oligonucleotide
agaguauagcuaacuguau

SEQ ID NO: 607966 - RNA, 19 nt, Artificial Sequence
  Description of Artificial Sequence: Synthetic oligonucleotide
agaauguaguagacacaug

SEQ ID NO: 607967 - RNA, 19 nt, Artificial Sequence
  Description of Artificial Sequence: Synthetic oligonucleotide
ggaauacccacaacagcug

SEQ ID NO: 607968 - RNA, 19 nt, Artificial Sequence
  Description of Artificial Sequence: Synthetic oligonucleotide
accuuaagccuagacuuaa

SEQ ID NO: 607969 - RNA, 19 nt, Artificial Sequence
  Description of Artificial Sequence: Synthetic oligonucleotide
cagcucgugagucaccaca

SEQ ID NO: 607970 - RNA, 19 nt, Artificial Sequence
  Description of Artificial Sequence: Synthetic oligonucleotide
guauugaagucaaaagcau

SEQ ID NO: 607971 - RNA, 19 nt, Artificial Sequence
  Description of Artificial Sequence: Synthetic oligonucleotide
auaaaugcgcugagcagua

SEQ ID NO: 607972 - RNA, 19 nt, Artificial Sequence
  Description of Artificial Sequence: Synthetic oligonucleotide
guaauacaaggaaauuggu

SEQ ID NO: 607973 - RNA, 19 nt, Artificial Sequence
  Description of Artificial Sequence: Synthetic oligonucleotide
accuuaugugacagccacg

SEQ ID NO: 607974 - RNA, 19 nt, Artificial Sequence
  Description of Artificial Sequence: Synthetic oligonucleotide
aagccgugaggaauaccca

SEQ ID NO: 607975 - RNA, 19 nt, Artificial Sequence
  Description of Artificial Sequence: Synthetic oligonucleotide
guagacacauguguaaaau

SEQ ID NO: 607976 - RNA, 19 nt, Artificial Sequence
  Description of Artificial Sequence: Synthetic oligonucleotide
ccaucacaagccaaaacga

SEQ ID NO: 607977 - RNA, 19 nt, Artificial Sequence
  Description of Artificial Sequence: Synthetic oligonucleotide
cuauaguaauugcucaaau

SEQ ID NO: 607978 - RNA, 19 nt, Artificial Sequence
  Description of Artificial Sequence: Synthetic oligonucleotide
gugaucccggguagaaaag

SEQ ID NO: 607979 - RNA, 19 nt, Artificial Sequence
  Description of Artificial Sequence: Synthetic oligonucleotide
gguaaugcuaugaguggca

SEQ ID NO: 607980 - RNA, 19 nt, Artificial Sequence
  Description of Artificial Sequence: Synthetic oligonucleotide
cggauuacaagguuuguga

SEQ ID NO: 607981 - RNA, 19 nt, Artificial Sequence
  Description of Artificial Sequence: Synthetic oligonucleotide
gagcaguaauuugcuacuc

SEQ ID NO: 607982 - RNA, 19 nt, Artificial Sequence
  Description of Artificial Sequence: Synthetic oligonucleotide
gcgcugagcaguaauuugc

SEQ ID NO: 607983 - RNA, 19 nt, Artificial Sequence
  Description of Artificial Sequence: Synthetic oligonucleotide
guaaugcuaugaguggcaa

SEQ ID NO: 607984 - RNA, 19 nt, Artificial Sequence
  Description of Artificial Sequence: Synthetic oligonucleotide
gucugaaaaguuacgcaua

SEQ ID NO: 607985 - RNA, 19 nt, Artificial Sequence
  Description of Artificial Sequence: Synthetic oligonucleotide
ccauuccuacacaggacag

SEQ ID NO: 607986 - RNA, 19 nt, Artificial Sequence
  Description of Artificial Sequence: Synthetic oligonucleotide
guccacuacccaauugcac

SEQ ID NO: 607987 - RNA, 19 nt, Artificial Sequence
  Description of Artificial Sequence: Synthetic oligonucleotide
caugcguauauguuguguu

SEQ ID NO: 607988 - RNA, 19 nt, Artificial Sequence
  Description of Artificial Sequence: Synthetic oligonucleotide
acccgugauuccaagugcu

SEQ ID NO: 607989 - RNA, 19 nt, Artificial Sequence
  Description of Artificial Sequence: Synthetic oligonucleotide
gaaggguuauaaggcuauc

SEQ ID NO: 607990 - RNA, 19 nt, Artificial Sequence
  Description of Artificial Sequence: Synthetic oligonucleotide
gcagaguacagguaaugcu

SEQ ID NO: 607991 - RNA, 19 nt, Artificial Sequence
  Description of Artificial Sequence: Synthetic oligonucleotide
aucggauuacaagguuugu

SEQ ID NO: 607992 - RNA, 19 nt, Artificial Sequence
  Description of Artificial Sequence: Synthetic oligonucleotide
auggcgcuugccagcgagc

SEQ ID NO: 607993 - RNA, 19 nt, Artificial Sequence
  Description of Artificial Sequence: Synthetic oligonucleotide
cauuugguuucaaaagauu

SEQ ID NO: 607994 - RNA, 19 nt, Artificial Sequence
  Description of Artificial Sequence: Synthetic oligonucleotide
agcacgagauaccgcuaau

SEQ ID NO: 607995 - RNA, 19 nt, Artificial Sequence
  Description of Artificial Sequence: Synthetic oligonucleotide
acgcaugacaugggcaaga

SEQ ID NO: 607996 - RNA, 19 nt, Artificial Sequence
  Description of Artificial Sequence: Synthetic oligonucleotide
uugugaucccggguagaaa

SEQ ID NO: 607997 - RNA, 19 nt, Artificial Sequence
  Description of Artificial Sequence: Synthetic oligonucleotide
cugcagacaaaacacgcau

SEQ ID NO: 607998 - RNA, 19 nt, Artificial Sequence
  Description of Artificial Sequence: Synthetic oligonucleotide
gcuuauccaacuguaucuc

SEQ ID NO: 607999 - RNA, 19 nt, Artificial Sequence
  Description of Artificial Sequence: Synthetic oligonucleotide
acccaauugcacacauucu

SEQ ID NO: 608000 - RNA, 19 nt, Artificial Sequence
  Description of Artificial Sequence: Synthetic oligonucleotide
ccacuacccaauugcacac

SEQ ID NO: 608001 - RNA, 19 nt, Artificial Sequence
  Description of Artificial Sequence: Synthetic oligonucleotide
guaccuuaugugacagcca

SEQ ID NO: 608002 - RNA, 19 nt, Artificial Sequence
  Description of Artificial Sequence: Synthetic oligonucleotide
gcgaccuuaagccuagacu

SEQ ID NO: 608003 - RNA, 19 nt, Artificial Sequence
  Description of Artificial Sequence: Synthetic oligonucleotide
cacaagaauauuuccccuu

SEQ ID NO: 608004 - RNA, 19 nt, Artificial Sequence
  Description of Artificial Sequence: Synthetic oligonucleotide
uccaagccgugaggaauac

SEQ ID NO: 608005 - RNA, 19 nt, Artificial Sequence
  Description of Artificial Sequence: Synthetic oligonucleotide
guguggauucagucuacua

SEQ ID NO: 608006 - RNA, 19 nt, Artificial Sequence
  Description of Artificial Sequence: Synthetic oligonucleotide
cacgcaugacaugggcaag

SEQ ID NO: 608007 - RNA, 19 nt, Artificial Sequence
  Description of Artificial Sequence: Synthetic oligonucleotide
cagaacgcccacugccguc

SEQ ID NO: 608008 - RNA, 19 nt, Artificial Sequence
  Description of Artificial Sequence: Synthetic oligonucleotide
uaaaugcgcugagcaguaa

SEQ ID NO: 608009 - RNA, 19 nt, Artificial Sequence
  Description of Artificial Sequence: Synthetic oligonucleotide
cacagagauccucauuacu

SEQ ID NO: 608010 - RNA, 19 nt, Artificial Sequence
  Description of Artificial Sequence: Synthetic oligonucleotide
auaccgcuaaugaaccauu

SEQ ID NO: 608011 - RNA, 19 nt, Artificial Sequence
  Description of Artificial Sequence: Synthetic oligonucleotide
cccuuaauguaucuucaga

SEQ ID NO: 608012 - RNA, 19 nt, Artificial Sequence
  Description of Artificial Sequence: Synthetic oligonucleotide
gaccuuaagccuagacuua

SEQ ID NO: 608013 - RNA, 19 nt, Artificial Sequence
  Description of Artificial Sequence: Synthetic oligonucleotide
cagugggaauccacaagaa

SEQ ID NO: 608014 - RNA, 19 nt, Artificial Sequence
  Description of Artificial Sequence: Synthetic oligonucleotide
gcacgagauaccgcuaaug

SEQ ID NO: 608015 - RNA, 19 nt, Artificial Sequence
  Description of Artificial Sequence: Synthetic oligonucleotide
aggccaguccugauaccag

SEQ ID NO: 608016 - RNA, 19 nt, Artificial Sequence
  Description of Artificial Sequence: Synthetic oligonucleotide
uaccgcguccaguguuaca

SEQ ID NO: 608017 - RNA, 19 nt, Artificial Sequence
  Description of Artificial Sequence: Synthetic oligonucleotide
ggauuacaagguuugugau

SEQ ID NO: 608018 - RNA, 19 nt, Artificial Sequence
  Description of Artificial Sequence: Synthetic oligonucleotide
guuugugaucccggguaga

SEQ ID NO: 608019 - RNA, 19 nt, Artificial Sequence
  Description of Artificial Sequence: Synthetic oligonucleotide
guccugauaccagucuuaa

SEQ ID NO: 608020 - RNA, 19 nt, Artificial Sequence
  Description of Artificial Sequence: Synthetic oligonucleotide
gaacgguuacuaaacccau

SEQ ID NO: 608021 - RNA, 19 nt, Artificial Sequence
  Description of Artificial Sequence: Synthetic oligonucleotide
cucgcuguaucaucacacu

SEQ ID NO: 608022 - RNA, 19 nt, Artificial Sequence
  Description of Artificial Sequence: Synthetic oligonucleotide
acucgggauccagcaugac

SEQ ID NO: 608023 - RNA, 19 nt, Artificial Sequence
  Description of Artificial Sequence: Synthetic oligonucleotide
augcuaugaguggcaauua

SEQ ID NO: 608024 - RNA, 19 nt, Artificial Sequence
  Description of Artificial Sequence: Synthetic oligonucleotide
ggagguaaguuugggauau

SEQ ID NO: 608025 - RNA, 19 nt, Artificial Sequence
  Description of Artificial Sequence: Synthetic oligonucleotide
cgugagucaccacaguuga

SEQ ID NO: 608026 - RNA, 19 nt, Artificial Sequence
  Description of Artificial Sequence: Synthetic oligonucleotide
aacgcccacugccgucgaa

SEQ ID NO: 608027 - RNA, 19 nt, Artificial Sequence
  Description of Artificial Sequence: Synthetic oligonucleotide
ccuauaguaauugcucaaa

SEQ ID NO: 608028 - RNA, 19 nt, Artificial Sequence
  Description of Artificial Sequence: Synthetic oligonucleotide
ccguuuuggguuuauccaa

SEQ ID NO: 608029 - RNA, 19 nt, Artificial Sequence
  Description of Artificial Sequence: Synthetic oligonucleotide
auacugcagaguacaggua

SEQ ID NO: 608030 - RNA, 19 nt, Artificial Sequence
  Description of Artificial Sequence: Synthetic oligonucleotide
cacaagccaaaacgacaaa

SEQ ID NO: 608031 - RNA, 19 nt, Artificial Sequence
  Description of Artificial Sequence: Synthetic oligonucleotide
ucgaaccgcuccuguccau

SEQ ID NO: 608032 - RNA, 19 nt, Artificial Sequence
  Description of Artificial Sequence: Synthetic oligonucleotide
ccccagagcacgagauacc

SEQ ID NO: 608033 - RNA, 19 nt, Artificial Sequence
  Description of Artificial Sequence: Synthetic oligonucleotide
cccuuauguaaacaagugu

SEQ ID NO: 608034 - RNA, 19 nt, Artificial Sequence
  Description of Artificial Sequence: Synthetic oligonucleotide
cgaccuuaagccuagacuu

SEQ ID NO: 608035 - RNA, 19 nt, Artificial Sequence
  Description of Artificial Sequence: Synthetic oligonucleotide
gguaaguuugggauauuuu

SEQ ID NO: 608036 - RNA, 19 nt, Artificial Sequence
  Description of Artificial Sequence: Synthetic oligonucleotide
gaguggcaauuaccaggaa

SEQ ID NO: 608037 - RNA, 19 nt, Artificial Sequence
  Description of Artificial Sequence: Synthetic oligonucleotide
cugaaaaguuacgcauaua

SEQ ID NO: 608038 - RNA, 19 nt, Artificial Sequence
  Description of Artificial Sequence: Synthetic oligonucleotide
guaccgcguccaguguuac

SEQ ID NO: 608039 - RNA, 19 nt, Artificial Sequence
  Description of Artificial Sequence: Synthetic oligonucleotide
gcgcuugccagcgagccuc

SEQ ID NO: 608040 - RNA, 19 nt, Artificial Sequence
  Description of Artificial Sequence: Synthetic oligonucleotide
guguuccaauaaaugcgcu

SEQ ID NO: 608041 - RNA, 19 nt, Artificial Sequence
  Description of Artificial Sequence: Synthetic oligonucleotide
gccgugaggaauacccaca

SEQ ID NO: 608042 - RNA, 19 nt, Artificial Sequence
  Description of Artificial Sequence: Synthetic oligonucleotide
cuguaucaucacacugccu

SEQ ID NO: 608043 - RNA, 19 nt, Artificial Sequence
  Description of Artificial Sequence: Synthetic oligonucleotide
gaacgcccacugccgucga

SEQ ID NO: 608044 - RNA, 19 nt, Artificial Sequence
  Description of Artificial Sequence: Synthetic oligonucleotide
aggccguaucgcaaaccau

SEQ ID NO: 608045 - RNA, 19 nt, Artificial Sequence
  Description of Artificial Sequence: Synthetic oligonucleotide
caguccugauaccagucuu

SEQ ID NO: 608046 - RNA, 19 nt, Artificial Sequence
  Description of Artificial Sequence: Synthetic oligonucleotide
cugugugcgcaucuuccau

SEQ ID NO: 608047 - RNA, 19 nt, Artificial Sequence
  Description of Artificial Sequence: Synthetic oligonucleotide
guugggcccuugccaucca

SEQ ID NO: 608048 - RNA, 19 nt, Artificial Sequence
  Description of Artificial Sequence: Synthetic oligonucleotide
cgugaggaauacccacaac

SEQ ID NO: 608049 - RNA, 19 nt, Artificial Sequence
  Description of Artificial Sequence: Synthetic oligonucleotide
ggccaguccugauaccagu

SEQ ID NO: 608050 - RNA, 19 nt, Artificial Sequence
  Description of Artificial Sequence: Synthetic oligonucleotide
ccugcauuuuggauucgcu

SEQ ID NO: 608051 - RNA, 19 nt, Artificial Sequence
  Description of Artificial Sequence: Synthetic oligonucleotide
caccaugagcauuguguuu

SEQ ID NO: 608052 - RNA, 19 nt, Artificial Sequence
  Description of Artificial Sequence: Synthetic oligonucleotide
ggacagcucgugagucacc

SEQ ID NO: 608053 - RNA, 19 nt, Artificial Sequence
  Description of Artificial Sequence: Synthetic oligonucleotide
ccaucggauuacaagguuu

SEQ ID NO: 608054 - RNA, 19 nt, Artificial Sequence
  Description of Artificial Sequence: Synthetic oligonucleotide
ccagcaugaccaucauaaa

SEQ ID NO: 608055 - RNA, 19 nt, Artificial Sequence
  Description of Artificial Sequence: Synthetic oligonucleotide
ccaagccgugaggaauacc

SEQ ID NO: 608056 - RNA, 19 nt, Artificial Sequence
  Description of Artificial Sequence: Synthetic oligonucleotide
ccgugaggaauacccacaa

SEQ ID NO: 608057 - RNA, 19 nt, Artificial Sequence
  Description of Artificial Sequence: Synthetic oligonucleotide
ccgucgaaccgcuccuguc

SEQ ID NO: 608058 - RNA, 19 nt, Artificial Sequence
  Description of Artificial Sequence: Synthetic oligonucleotide
gcauuccuuccucccuaga

SEQ ID NO: 608059 - RNA, 19 nt, Artificial Sequence
  Description of Artificial Sequence: Synthetic oligonucleotide
cuguaccgcguccaguguu

SEQ ID NO: 608060 - RNA, 19 nt, Artificial Sequence
  Description of Artificial Sequence: Synthetic oligonucleotide
cuacccaauugcacacauu

SEQ ID NO: 608061 - RNA, 19 nt, Artificial Sequence
  Description of Artificial Sequence: Synthetic oligonucleotide
caccucaggcacauuuguu

SEQ ID NO: 608062 - RNA, 19 nt, Artificial Sequence
  Description of Artificial Sequence: Synthetic oligonucleotide
gggcaagaucaggcauucc

SEQ ID NO: 608063 - RNA, 19 nt, Artificial Sequence
  Description of Artificial Sequence: Synthetic oligonucleotide
ggcuaucaugagucuucua

SEQ ID NO: 608064 - RNA, 19 nt, Artificial Sequence
  Description of Artificial Sequence: Synthetic oligonucleotide
cacugccgucgaaccgcuc

SEQ ID NO: 608065 - RNA, 19 nt, Artificial Sequence
  Description of Artificial Sequence: Synthetic oligonucleotide
gcuacucgggauccagcau

SEQ ID NO: 608066 - RNA, 19 nt, Artificial Sequence
  Description of Artificial Sequence: Synthetic oligonucleotide
ccgugauuccaagugcuua

SEQ ID NO: 608067 - RNA, 19 nt, Artificial Sequence
  Description of Artificial Sequence: Synthetic oligonucleotide
cgcguccaguguuacaaaa

SEQ ID NO: 608068 - RNA, 19 nt, Artificial Sequence
  Description of Artificial Sequence: Synthetic oligonucleotide
cgcauauauucaucaauuu

SEQ ID NO: 608069 - RNA, 19 nt, Artificial Sequence
  Description of Artificial Sequence: Synthetic oligonucleotide
gcucgugagucaccacagu

SEQ ID NO: 608070 - RNA, 19 nt, Artificial Sequence
  Description of Artificial Sequence: Synthetic oligonucleotide
gagguaaguuugggauauu

SEQ ID NO: 608071 - RNA, 19 nt, Artificial Sequence
  Description of Artificial Sequence: Synthetic oligonucleotide
ccggguagaaaagcagacu

SEQ ID NO: 608072 - RNA, 19 nt, Artificial Sequence
  Description of Artificial Sequence: Synthetic oligonucleotide
gcuugccagcgagccuccc

SEQ ID NO: 608073 - RNA, 19 nt, Artificial Sequence
  Description of Artificial Sequence: Synthetic oligonucleotide
ggcgcuugccagcgagccu

SEQ ID NO: 608074 - RNA, 19 nt, Artificial Sequence
  Description of Artificial Sequence: Synthetic oligonucleotide
cagccacgcuguaccgcgu

SEQ ID NO: 608075 - RNA, 19 nt, Artificial Sequence
  Description of Artificial Sequence: Synthetic oligonucleotide
ccgcguccaguguuacaaa

SEQ ID NO: 608076 - RNA, 19 nt, Artificial Sequence
  Description of Artificial Sequence: Synthetic oligonucleotide
cagcgaccuuaagccuaga

SEQ ID NO: 608077 - RNA, 19 nt, Artificial Sequence
  Description of Artificial Sequence: Synthetic oligonucleotide
caugcaccucaggcacauu

SEQ ID NO: 608078 - RNA, 19 nt, Artificial Sequence
  Description of Artificial Sequence: Synthetic oligonucleotide
aagagaugaaccucuagcc

SEQ ID NO: 608079 - RNA, 19 nt, Artificial Sequence
  Description of Artificial Sequence: Synthetic oligonucleotide
agaggcacgucauagaugc

SEQ ID NO: 608080 - RNA, 19 nt, Artificial Sequence
  Description of Artificial Sequence: Synthetic oligonucleotide
aaaagcaguagguaugggg

SEQ ID NO: 608081 - RNA, 19 nt, Artificial Sequence
  Description of Artificial Sequence: Synthetic oligonucleotide
aguguuaucguagagugcc

SEQ ID NO: 608082 - RNA, 19 nt, Artificial Sequence
  Description of Artificial Sequence: Synthetic oligonucleotide
acuuucguguuccaaaacc

SEQ ID NO: 608083 - RNA, 19 nt, Artificial Sequence
  Description of Artificial Sequence: Synthetic oligonucleotide
aaauucagaagcuguaggu

SEQ ID NO: 608084 - RNA, 19 nt, Artificial Sequence
  Description of Artificial Sequence: Synthetic oligonucleotide
augaggagaguccaguccc

SEQ ID NO: 608085 - RNA, 19 nt, Artificial Sequence
  Description of Artificial Sequence: Synthetic oligonucleotide
aagcuggggagucauaggg

SEQ ID NO: 608086 - RNA, 19 nt, Artificial Sequence
  Description of Artificial Sequence: Synthetic oligonucleotide
agcaauucgggauccaugg

SEQ ID NO: 608087 - RNA, 19 nt, Artificial Sequence
  Description of Artificial Sequence: Synthetic oligonucleotide
aguuucgcugacuucagcg

SEQ ID NO: 608088 - RNA, 19 nt, Artificial Sequence
  Description of Artificial Sequence: Synthetic oligonucleotide
cugagcuuuauccacaccc

SEQ ID NO: 608089 - RNA, 19 nt, Artificial Sequence
  Description of Artificial Sequence: Synthetic oligonucleotide
ucauagaccucuaacacau

SEQ ID NO: 608090 - RNA, 19 nt, Artificial Sequence
  Description of Artificial Sequence: Synthetic oligonucleotide
ugaguggcuaagaugacca

SEQ ID NO: 608091 - RNA, 19 nt, Artificial Sequence
  Description of Artificial Sequence: Synthetic oligonucleotide
ggaacucugagcuuuaucc

SEQ ID NO: 608092 - RNA, 19 nt, Artificial Sequence
  Description of Artificial Sequence: Synthetic oligonucleotide
cuuucguguuccaaaaccc

SEQ ID NO: 608093 - RNA, 19 nt, Artificial Sequence
  Description of Artificial Sequence: Synthetic oligonucleotide
aggcacaauacccugcugg

SEQ ID NO: 608094 - RNA, 19 nt, Artificial Sequence
  Description of Artificial Sequence: Synthetic oligonucleotide
ggcguagaaauucagaagc

SEQ ID NO: 608095 - RNA, 19 nt, Artificial Sequence
  Description of Artificial Sequence: Synthetic oligonucleotide
gaugcugggaggcacauca

SEQ ID NO: 608096 - RNA, 19 nt, Artificial Sequence
  Description of Artificial Sequence: Synthetic oligonucleotide
ugaggugagacuuggcuug

SEQ ID NO: 608097 - RNA, 19 nt, Artificial Sequence
  Description of Artificial Sequence: Synthetic oligonucleotide
uuagcaggcacaauacccu

SEQ ID NO: 608098 - RNA, 19 nt, Artificial Sequence
  Description of Artificial Sequence: Synthetic oligonucleotide
caauucgggauccauggcg

SEQ ID NO: 608099 - RNA, 19 nt, Artificial Sequence
  Description of Artificial Sequence: Synthetic oligonucleotide
acaaauaccaggcgaugag

SEQ ID NO: 608100 - RNA, 19 nt, Artificial Sequence
  Description of Artificial Sequence: Synthetic oligonucleotide
agagugguaaagcgcaggg

SEQ ID NO: 608101 - RNA, 19 nt, Artificial Sequence
  Description of Artificial Sequence: Synthetic oligonucleotide
caucauagaccucuaacac

SEQ ID NO: 608102 - RNA, 19 nt, Artificial Sequence
  Description of Artificial Sequence: Synthetic oligonucleotide
acgaucuagcuagaggucc

SEQ ID NO: 608103 - RNA, 19 nt, Artificial Sequence
  Description of Artificial Sequence: Synthetic oligonucleotide
uaaccaggcaggcagggug

SEQ ID NO: 608104 - RNA, 19 nt, Artificial Sequence
  Description of Artificial Sequence: Synthetic oligonucleotide
aguacuggacaugagagcu

SEQ ID NO: 608105 - RNA, 19 nt, Artificial Sequence
  Description of Artificial Sequence: Synthetic oligonucleotide
agcacgaucuagcuagagg

SEQ ID NO: 608106 - RNA, 19 nt, Artificial Sequence
  Description of Artificial Sequence: Synthetic oligonucleotide
aggagcuucacucgguuag

SEQ ID NO: 608107 - RNA, 19 nt, Artificial Sequence
  Description of Artificial Sequence: Synthetic oligonucleotide
guuagcaggcacaauaccc

SEQ ID NO: 608108 - RNA, 19 nt, Artificial Sequence
  Description of Artificial Sequence: Synthetic oligonucleotide
agauggguagccuaaggca

SEQ ID NO: 608109 - RNA, 19 nt, Artificial Sequence
  Description of Artificial Sequence: Synthetic oligonucleotide
agaacauccccucugcgga

SEQ ID NO: 608110 - RNA, 19 nt, Artificial Sequence
  Description of Artificial Sequence: Synthetic oligonucleotide
aacaaauaccaggcgauga

SEQ ID NO: 608111 - RNA, 19 nt, Artificial Sequence
  Description of Artificial Sequence: Synthetic oligonucleotide
uuaucguagagugcccugg

SEQ ID NO: 608112 - RNA, 19 nt, Artificial Sequence
  Description of Artificial Sequence: Synthetic oligonucleotide
auaccaggcgaugagcagc

SEQ ID NO: 608113 - RNA, 19 nt, Artificial Sequence
  Description of Artificial Sequence: Synthetic oligonucleotide
agaccucuaacacaucucu

SEQ ID NO: 608114 - RNA, 19 nt, Artificial Sequence
  Description of Artificial Sequence: Synthetic oligonucleotide
aucauagaccucuaacaca

SEQ ID NO: 608115 - RNA, 19 nt, Artificial Sequence
  Description of Artificial Sequence: Synthetic oligonucleotide
cucgcagaggugcagaggc

SEQ ID NO: 608116 - RNA, 19 nt, Artificial Sequence
  Description of Artificial Sequence: Synthetic oligonucleotide
ucuggccuagcauuguacc

SEQ ID NO: 608117 - RNA, 19 nt, Artificial Sequence
  Description of Artificial Sequence: Synthetic oligonucleotide
agacuaaggcugcacgaac

SEQ ID NO: 608118 - RNA, 19 nt, Artificial Sequence
  Description of Artificial Sequence: Synthetic oligonucleotide
aaauaccaggcgaugagca

SEQ ID NO: 608119 - RNA, 19 nt, Artificial Sequence
  Description of Artificial Sequence: Synthetic oligonucleotide
ucuagcuagagguccugag

SEQ ID NO: 608120 - RNA, 19 nt, Artificial Sequence
  Description of Artificial Sequence: Synthetic oligonucleotide
aucucuuggaccgcagugc

SEQ ID NO: 608121 - RNA, 19 nt, Artificial Sequence
  Description of Artificial Sequence: Synthetic oligonucleotide
ucgucuaccucccugcacu

SEQ ID NO: 608122 - RNA, 19 nt, Artificial Sequence
  Description of Artificial Sequence: Synthetic oligonucleotide
auugggaugccuucguacu

SEQ ID NO: 608123 - RNA, 19 nt, Artificial Sequence
  Description of Artificial Sequence: Synthetic oligonucleotide
aaccugugcucgcagaggu

SEQ ID NO: 608124 - RNA, 19 nt, Artificial Sequence
  Description of Artificial Sequence: Synthetic oligonucleotide
ugagcuuuauccacacccu

SEQ ID NO: 608125 - RNA, 19 nt, Artificial Sequence
  Description of Artificial Sequence: Synthetic oligonucleotide
agcgucgccugcuucagac

SEQ ID NO: 608126 - RNA, 19 nt, Artificial Sequence
  Description of Artificial Sequence: Synthetic oligonucleotide
ugacagcaagcacaguagc

SEQ ID NO: 608127 - RNA, 19 nt, Artificial Sequence
  Description of Artificial Sequence: Synthetic oligonucleotide
cuucacucgguuagcaggc

SEQ ID NO: 608128 - RNA, 19 nt, Artificial Sequence
  Description of Artificial Sequence: Synthetic oligonucleotide
ucugcaguguuaucguaga

SEQ ID NO: 608129 - RNA, 19 nt, Artificial Sequence
  Description of Artificial Sequence: Synthetic oligonucleotide
cacauacaccucuugcucc

SEQ ID NO: 608130 - RNA, 19 nt, Artificial Sequence
  Description of Artificial Sequence: Synthetic oligonucleotide
uugccaguaguuccucggg

SEQ ID NO: 608131 - RNA, 19 nt, Artificial Sequence
  Description of Artificial Sequence: Synthetic oligonucleotide
cacgaacaggcccuuaggg

SEQ ID NO: 608132 - RNA, 19 nt, Artificial Sequence
  Description of Artificial Sequence: Synthetic oligonucleotide
aggcaguacagcgaccucc

SEQ ID NO: 608133 - RNA, 19 nt, Artificial Sequence
  Description of Artificial Sequence: Synthetic oligonucleotide
gaagcuggggagucauagg

SEQ ID NO: 608134 - RNA, 19 nt, Artificial Sequence
  Description of Artificial Sequence: Synthetic oligonucleotide
cuucguacucauugugagg

SEQ ID NO: 608135 - RNA, 19 nt, Artificial Sequence
  Description of Artificial Sequence: Synthetic oligonucleotide
uacgcaucgugccaucucu

SEQ ID NO: 608136 - RNA, 19 nt, Artificial Sequence
  Description of Artificial Sequence: Synthetic oligonucleotide
uuccccauuugccaguagu

SEQ ID NO: 608137 - RNA, 19 nt, Artificial Sequence
  Description of Artificial Sequence: Synthetic oligonucleotide
gagacaugguggcugguug

SEQ ID NO: 608138 - RNA, 19 nt, Artificial Sequence
  Description of Artificial Sequence: Synthetic oligonucleotide
cauugggaugccuucguac

SEQ ID NO: 608139 - RNA, 19 nt, Artificial Sequence
  Description of Artificial Sequence: Synthetic oligonucleotide
uacagguugaggagagcug

SEQ ID NO: 608140 - RNA, 19 nt, Artificial Sequence
  Description of Artificial Sequence: Synthetic oligonucleotide
agagaugccucggugagug

SEQ ID NO: 608141 - RNA, 19 nt, Artificial Sequence
  Description of Artificial Sequence: Synthetic oligonucleotide
auagaugccuucaucugag

SEQ ID NO: 608142 - RNA, 19 nt, Artificial Sequence
  Description of Artificial Sequence: Synthetic oligonucleotide
acucuggggaccuuguaga

SEQ ID NO: 608143 - RNA, 19 nt, Artificial Sequence
  Description of Artificial Sequence: Synthetic oligonucleotide
auuugccaguaguuccucg

SEQ ID NO: 608144 - RNA, 19 nt, Artificial Sequence
  Description of Artificial Sequence: Synthetic oligonucleotide
cucaacauggagccagggc

SEQ ID NO: 608145 - RNA, 19 nt, Artificial Sequence
  Description of Artificial Sequence: Synthetic oligonucleotide
ggaacgacagcuccugggg

SEQ ID NO: 608146 - RNA, 19 nt, Artificial Sequence
  Description of Artificial Sequence: Synthetic oligonucleotide
gaagcuuuauccagggguc

SEQ ID NO: 608147 - RNA, 19 nt, Artificial Sequence
  Description of Artificial Sequence: Synthetic oligonucleotide
ugcaguacccguagaacau

SEQ ID NO: 608148 - RNA, 19 nt, Artificial Sequence
  Description of Artificial Sequence: Synthetic oligonucleotide
ugggcaaagcaagaaauau

SEQ ID NO: 608149 - RNA, 19 nt, Artificial Sequence
  Description of Artificial Sequence: Synthetic oligonucleotide
uacuggacaugagagcugc

SEQ ID NO: 608150 - RNA, 19 nt, Artificial Sequence
  Description of Artificial Sequence: Synthetic oligonucleotide
ucguagagugcccuggcaa

SEQ ID NO: 608151 - RNA, 19 nt, Artificial Sequence
  Description of Artificial Sequence: Synthetic oligonucleotide
uucccggccuccaagccag

SEQ ID NO: 608152 - RNA, 19 nt, Artificial Sequence
  Description of Artificial Sequence: Synthetic oligonucleotide
gugcacauagucauauucc

SEQ ID NO: 608153 - RNA, 19 nt, Artificial Sequence
  Description of Artificial Sequence: Synthetic oligonucleotide
guagaacauccccucugcg

SEQ ID NO: 608154 - RNA, 19 nt, Artificial Sequence
  Description of Artificial Sequence: Synthetic oligonucleotide
uaucguagagugcccuggc

SEQ ID NO: 608155 - RNA, 19 nt, Artificial Sequence
  Description of Artificial Sequence: Synthetic oligonucleotide
guggugguaccacauacac

SEQ ID NO: 608156 - RNA, 19 nt, Artificial Sequence
  Description of Artificial Sequence: Synthetic oligonucleotide
ccucccuaccccuagaggg

SEQ ID NO: 608157 - RNA, 19 nt, Artificial Sequence
  Description of Artificial Sequence: Synthetic oligonucleotide
uguaggucuccaguggaca

SEQ ID NO: 608158 - RNA, 19 nt, Artificial Sequence
  Description of Artificial Sequence: Synthetic oligonucleotide
ggugcacauagucauauuc

SEQ ID NO: 608159 - RNA, 19 nt, Artificial Sequence
  Description of Artificial Sequence: Synthetic oligonucleotide
acgaacaggcccuuaggga

SEQ ID NO: 608160 - RNA, 19 nt, Artificial Sequence
  Description of Artificial Sequence: Synthetic oligonucleotide
caaauaccaggcgaugagc

SEQ ID NO: 608161 - RNA, 19 nt, Artificial Sequence
  Description of Artificial Sequence: Synthetic oligonucleotide
uucgaccuggggcaggaga

SEQ ID NO: 608162 - RNA, 19 nt, Artificial Sequence
  Description of Artificial Sequence: Synthetic oligonucleotide
uuucgcugacuucagcgau

SEQ ID NO: 608163 - RNA, 19 nt, Artificial Sequence
  Description of Artificial Sequence: Synthetic oligonucleotide
ucgaccuggggcaggagac

SEQ ID NO: 608164 - RNA, 19 nt, Artificial Sequence
  Description of Artificial Sequence: Synthetic oligonucleotide
uagaccucuaacacaucuc

SEQ ID NO: 608165 - RNA, 19 nt, Artificial Sequence
  Description of Artificial Sequence: Synthetic oligonucleotide
caguacccguagaacaucc

SEQ ID NO: 608166 - RNA, 19 nt, Artificial Sequence
  Description of Artificial Sequence: Synthetic oligonucleotide
aucgucuaccucccugcac

SEQ ID NO: 608167 - RNA, 19 nt, Artificial Sequence
  Description of Artificial Sequence: Synthetic oligonucleotide
cuagagguccugaggcagg

SEQ ID NO: 608168 - RNA, 19 nt, Artificial Sequence
  Description of Artificial Sequence: Synthetic oligonucleotide
auggcggaagcuuuaucca

SEQ ID NO: 608169 - RNA, 19 nt, Artificial Sequence
  Description of Artificial Sequence: Synthetic oligonucleotide
agaaggaagcuggggaguc

SEQ ID NO: 608170 - RNA, 19 nt, Artificial Sequence
  Description of Artificial Sequence: Synthetic oligonucleotide
accucuagccacccucaac

SEQ ID NO: 608171 - RNA, 19 nt, Artificial Sequence
  Description of Artificial Sequence: Synthetic oligonucleotide
agacuuucguguuccaaaa

SEQ ID NO: 608172 - RNA, 19 nt, Artificial Sequence
  Description of Artificial Sequence: Synthetic oligonucleotide
uucgcugacuucagcgaug

SEQ ID NO: 608173 - RNA, 19 nt, Artificial Sequence
  Description of Artificial Sequence: Synthetic oligonucleotide
uguccggcguagaaauuca

SEQ ID NO: 608174 - RNA, 19 nt, Artificial Sequence
  Description of Artificial Sequence: Synthetic oligonucleotide
guucgaaggggcagaauag

SEQ ID NO: 608175 - RNA, 19 nt, Artificial Sequence
  Description of Artificial Sequence: Synthetic oligonucleotide
ucgcugacuucagcgaugg

SEQ ID NO: 608176 - RNA, 19 nt, Artificial Sequence
  Description of Artificial Sequence: Synthetic oligonucleotide
cccguuucagguucgaagg

SEQ ID NO: 608177 - RNA, 19 nt, Artificial Sequence
  Description of Artificial Sequence: Synthetic oligonucleotide
uguuaucguagagugcccu

SEQ ID NO: 608178 - RNA, 19 nt, Artificial Sequence
  Description of Artificial Sequence: Synthetic oligonucleotide
guuucagguucgaaggggc

SEQ ID NO: 608179 - RNA, 19 nt, Artificial Sequence
  Description of Artificial Sequence: Synthetic oligonucleotide
gugggagccucagagacag

SEQ ID NO: 608180 - RNA, 19 nt, Artificial Sequence
  Description of Artificial Sequence: Synthetic oligonucleotide
guuaucguagagugcccug

SEQ ID NO: 608181 - RNA, 19 nt, Artificial Sequence
  Description of Artificial Sequence: Synthetic oligonucleotide
aacaggcccuuagggaagg

SEQ ID NO: 608182 - RNA, 19 nt, Artificial Sequence
  Description of Artificial Sequence: Synthetic oligonucleotide
ugaggcccguuucagguuc

SEQ ID NO: 608183 - RNA, 19 nt, Artificial Sequence
  Description of Artificial Sequence: Synthetic oligonucleotide
cacucgcuugccauggggc

SEQ ID NO: 608184 - RNA, 19 nt, Artificial Sequence
  Description of Artificial Sequence: Synthetic oligonucleotide
uucgaaggggcagaauaga

SEQ ID NO: 608185 - RNA, 19 nt, Artificial Sequence
  Description of Artificial Sequence: Synthetic oligonucleotide
ucugagcuuuauccacacc

SEQ ID NO: 608186 - RNA, 19 nt, Artificial Sequence
  Description of Artificial Sequence: Synthetic oligonucleotide
gagcagagugguaaagcgc

SEQ ID NO: 608187 - RNA, 19 nt, Artificial Sequence
  Description of Artificial Sequence: Synthetic oligonucleotide
gucaucgucuaccucccug

SEQ ID NO: 608188 - RNA, 19 nt, Artificial Sequence
  Description of Artificial Sequence: Synthetic oligonucleotide
ggaagcuuuauccaggggu

SEQ ID NO: 608189 - RNA, 19 nt, Artificial Sequence
  Description of Artificial Sequence: Synthetic oligonucleotide
uccgcuacgcaucgugcca

SEQ ID NO: 608190 - RNA, 19 nt, Artificial Sequence
  Description of Artificial Sequence: Synthetic oligonucleotide
gguagccuaaggcagcccc

SEQ ID NO: 608191 - RNA, 19 nt, Artificial Sequence
  Description of Artificial Sequence: Synthetic oligonucleotide
gggagacuaaggcugcacg

SEQ ID NO: 608192 - RNA, 19 nt, Artificial Sequence
  Description of Artificial Sequence: Synthetic oligonucleotide
aggggcagaauagagggga

SEQ ID NO: 608193 - RNA, 19 nt, Artificial Sequence
  Description of Artificial Sequence: Synthetic oligonucleotide
agccaccagacuuucgugu

SEQ ID NO: 608194 - RNA, 19 nt, Artificial Sequence
  Description of Artificial Sequence: Synthetic oligonucleotide
auggguagccuaaggcagc

SEQ ID NO: 608195 - RNA, 19 nt, Artificial Sequence
  Description of Artificial Sequence: Synthetic oligonucleotide
ugguaaagcgcagggcuug

SEQ ID NO: 608196 - RNA, 19 nt, Artificial Sequence
  Description of Artificial Sequence: Synthetic oligonucleotide
aaggcacaucguagggagc

SEQ ID NO: 608197 - RNA, 19 nt, Artificial Sequence
  Description of Artificial Sequence: Synthetic oligonucleotide
cugccccucaccaugguuc

SEQ ID NO: 608198 - RNA, 19 nt, Artificial Sequence
  Description of Artificial Sequence: Synthetic oligonucleotide
guacucauugugagggucc

SEQ ID NO: 608199 - RNA, 19 nt, Artificial Sequence
  Description of Artificial Sequence: Synthetic oligonucleotide
agugagcagagugguaaag

SEQ ID NO: 608200 - RNA, 19 nt, Artificial Sequence
  Description of Artificial Sequence: Synthetic oligonucleotide
gugagcagagugguaaagc

SEQ ID NO: 608201 - RNA, 19 nt, Artificial Sequence
  Description of Artificial Sequence: Synthetic oligonucleotide
caguggacaggaccagugg

SEQ ID NO: 608202 - RNA, 19 nt, Artificial Sequence
  Description of Artificial Sequence: Synthetic oligonucleotide
ugagucccugcuuucccca

SEQ ID NO: 608203 - RNA, 19 nt, Artificial Sequence
  Description of Artificial Sequence: Synthetic oligonucleotide
guuucgcugacuucagcga

SEQ ID NO: 608204 - RNA, 19 nt, Artificial Sequence
  Description of Artificial Sequence: Synthetic oligonucleotide
ugaggguccgcugagucau

SEQ ID NO: 608205 - RNA, 19 nt, Artificial Sequence
  Description of Artificial Sequence: Synthetic oligonucleotide
gacuuucguguuccaaaac

SEQ ID NO: 608206 - RNA, 19 nt, Artificial Sequence
  Description of Artificial Sequence: Synthetic oligonucleotide
ggaccgcagugccagaugg

SEQ ID NO: 608207 - RNA, 19 nt, Artificial Sequence
  Description of Artificial Sequence: Synthetic oligonucleotide
caguguuaucguagagugc

SEQ ID NO: 608208 - RNA, 19 nt, Artificial Sequence
  Description of Artificial Sequence: Synthetic oligonucleotide
auugacucuggggaccuug

SEQ ID NO: 608209 - RNA, 19 nt, Artificial Sequence
  Description of Artificial Sequence: Synthetic oligonucleotide
cuaaggcugcacgaacagg

SEQ ID NO: 608210 - RNA, 19 nt, Artificial Sequence
  Description of Artificial Sequence: Synthetic oligonucleotide
cucccuaccccuagagggc

SEQ ID NO: 608211 - RNA, 19 nt, Artificial Sequence
  Description of Artificial Sequence: Synthetic oligonucleotide
agcuccgcuacgcaucgug

SEQ ID NO: 608212 - RNA, 19 nt, Artificial Sequence
  Description of Artificial Sequence: Synthetic oligonucleotide
caguagcccgcaaagucug

SEQ ID NO: 608213 - RNA, 19 nt, Artificial Sequence
  Description of Artificial Sequence: Synthetic oligonucleotide
ccuucguacucauugugag

SEQ ID NO: 608214 - RNA, 19 nt, Artificial Sequence
  Description of Artificial Sequence: Synthetic oligonucleotide
cugagucccugcuuucccc

SEQ ID NO: 608215 - RNA, 19 nt, Artificial Sequence
  Description of Artificial Sequence: Synthetic oligonucleotide
aguacccguagaacauccc

SEQ ID NO: 608216 - RNA, 19 nt, Artificial Sequence
  Description of Artificial Sequence: Synthetic oligonucleotide
augguucccggccuccaag

SEQ ID NO: 608217 - RNA, 19 nt, Artificial Sequence
  Description of Artificial Sequence: Synthetic oligonucleotide
cuccaagccagaaggucac

SEQ ID NO: 608218 - RNA, 19 nt, Artificial Sequence
  Description of Artificial Sequence: Synthetic oligonucleotide
ucgggauccauggcggaag

SEQ ID NO: 608219 - RNA, 19 nt, Artificial Sequence
  Description of Artificial Sequence: Synthetic oligonucleotide
ggaagcuggggagucauag

SEQ ID NO: 608220 - RNA, 19 nt, Artificial Sequence
  Description of Artificial Sequence: Synthetic oligonucleotide
gcgaugagcagccaccacc

SEQ ID NO: 608221 - RNA, 19 nt, Artificial Sequence
  Description of Artificial Sequence: Synthetic oligonucleotide
gacuaaggcugcacgaaca

SEQ ID NO: 608222 - RNA, 19 nt, Artificial Sequence
  Description of Artificial Sequence: Synthetic oligonucleotide
gugaguggcuaagaugacc

SEQ ID NO: 608223 - RNA, 19 nt, Artificial Sequence
  Description of Artificial Sequence: Synthetic oligonucleotide
ucacucgguuagcaggcac

SEQ ID NO: 608224 - RNA, 19 nt, Artificial Sequence
  Description of Artificial Sequence: Synthetic oligonucleotide
cagagugguaaagcgcagg

SEQ ID NO: 608225 - RNA, 19 nt, Artificial Sequence
  Description of Artificial Sequence: Synthetic oligonucleotide
cuccgcuacgcaucgugcc

SEQ ID NO: 608226 - RNA, 19 nt, Artificial Sequence
  Description of Artificial Sequence: Synthetic oligonucleotide
gguuagcaggcacaauacc

SEQ ID NO: 608227 - RNA, 19 nt, Artificial Sequence
  Description of Artificial Sequence: Synthetic oligonucleotide
uccccauuugccaguaguu

SEQ ID NO: 608228 - RNA, 19 nt, Artificial Sequence
  Description of Artificial Sequence: Synthetic oligonucleotide
uggaugcugcccuuucgac

SEQ ID NO: 608229 - RNA, 19 nt, Artificial Sequence
  Description of Artificial Sequence: Synthetic oligonucleotide
aagcgcagggcuugcccug

SEQ ID NO: 608230 - RNA, 19 nt, Artificial Sequence
  Description of Artificial Sequence: Synthetic oligonucleotide
aagcuuuauccaggggucu

SEQ ID NO: 608231 - RNA, 19 nt, Artificial Sequence
  Description of Artificial Sequence: Synthetic oligonucleotide
uagcccgcaaagucuggcc

SEQ ID NO: 608232 - RNA, 19 nt, Artificial Sequence
  Description of Artificial Sequence: Synthetic oligonucleotide
ugguucccggccuccaagc

SEQ ID NO: 608233 - RNA, 19 nt, Artificial Sequence
  Description of Artificial Sequence: Synthetic oligonucleotide
aggcacgucauagaugccu

SEQ ID NO: 608234 - RNA, 19 nt, Artificial Sequence
  Description of Artificial Sequence: Synthetic oligonucleotide
acucgcuugccauggggca

SEQ ID NO: 608235 - RNA, 19 nt, Artificial Sequence
  Description of Artificial Sequence: Synthetic oligonucleotide
ucagcggaggaagaagcuc

SEQ ID NO: 608236 - RNA, 19 nt, Artificial Sequence
  Description of Artificial Sequence: Synthetic oligonucleotide
ggcagaauagaggggaggc

SEQ ID NO: 608237 - RNA, 19 nt, Artificial Sequence
  Description of Artificial Sequence: Synthetic oligonucleotide
ucgugccaucucuuggacc

SEQ ID NO: 608238 - RNA, 19 nt, Artificial Sequence
  Description of Artificial Sequence: Synthetic oligonucleotide
acggacagauggcuucaag

SEQ ID NO: 608239 - RNA, 19 nt, Artificial Sequence
  Description of Artificial Sequence: Synthetic oligonucleotide
aggccaaaggcacaucgua

SEQ ID NO: 608240 - RNA, 19 nt, Artificial Sequence
  Description of Artificial Sequence: Synthetic oligonucleotide
gaugagcacgaucuagcua

SEQ ID NO: 608241 - RNA, 19 nt, Artificial Sequence
  Description of Artificial Sequence: Synthetic oligonucleotide
ccucuaacacaucucuggg

SEQ ID NO: 608242 - RNA, 19 nt, Artificial Sequence
  Description of Artificial Sequence: Synthetic oligonucleotide
gagugguaaagcgcagggc

SEQ ID NO: 608243 - RNA, 19 nt, Artificial Sequence
  Description of Artificial Sequence: Synthetic oligonucleotide
aggcacaucguagggagcu

SEQ ID NO: 608244 - RNA, 19 nt, Artificial Sequence
  Description of Artificial Sequence: Synthetic oligonucleotide
aguggcuaagaugaccaaa

SEQ ID NO: 608245 - RNA, 19 nt, Artificial Sequence
  Description of Artificial Sequence: Synthetic oligonucleotide
gcaucgugccaucucuugg

SEQ ID NO: 608246 - RNA, 19 nt, Artificial Sequence
  Description of Artificial Sequence: Synthetic oligonucleotide
cacgaucuagcuagagguc

SEQ ID NO: 608247 - RNA, 19 nt, Artificial Sequence
  Description of Artificial Sequence: Synthetic oligonucleotide
cagaggcacgucauagaug

SEQ ID NO: 608248 - RNA, 19 nt, Artificial Sequence
  Description of Artificial Sequence: Synthetic oligonucleotide
guggcuaagaugaccaaaa

SEQ ID NO: 608249 - RNA, 19 nt, Artificial Sequence
  Description of Artificial Sequence: Synthetic oligonucleotide
gagagcugaggcccguuuc

SEQ ID NO: 608250 - RNA, 19 nt, Artificial Sequence
  Description of Artificial Sequence: Synthetic oligonucleotide
gcccguuucagguucgaag

SEQ ID NO: 608251 - RNA, 19 nt, Artificial Sequence
  Description of Artificial Sequence: Synthetic oligonucleotide
uggccugaguacuggacau

SEQ ID NO: 608252 - RNA, 19 nt, Artificial Sequence
  Description of Artificial Sequence: Synthetic oligonucleotide
uggaccgcagugccagaug

SEQ ID NO: 608253 - RNA, 19 nt, Artificial Sequence
  Description of Artificial Sequence: Synthetic oligonucleotide
caucgugccaucucuugga

SEQ ID NO: 608254 - RNA, 19 nt, Artificial Sequence
  Description of Artificial Sequence: Synthetic oligonucleotide
ggggcaguuagcugugucc

SEQ ID NO: 608255 - RNA, 19 nt, Artificial Sequence
  Description of Artificial Sequence: Synthetic oligonucleotide
gcacgaucuagcuagaggu

SEQ ID NO: 608256 - RNA, 19 nt, Artificial Sequence
  Description of Artificial Sequence: Synthetic oligonucleotide
gagacuaaggcugcacgaa

SEQ ID NO: 608257 - RNA, 19 nt, Artificial Sequence
  Description of Artificial Sequence: Synthetic oligonucleotide
cagaaggucaccccaagcu

SEQ ID NO: 608258 - RNA, 19 nt, Artificial Sequence
  Description of Artificial Sequence: Synthetic oligonucleotide
agccccaaccugugcucgc

SEQ ID NO: 608259 - RNA, 19 nt, Artificial Sequence
  Description of Artificial Sequence: Synthetic oligonucleotide
ccaaaggcacaucguaggg

SEQ ID NO: 608260 - RNA, 19 nt, Artificial Sequence
  Description of Artificial Sequence: Synthetic oligonucleotide
guuagcugugucccauuga

SEQ ID NO: 608261 - RNA, 19 nt, Artificial Sequence
  Description of Artificial Sequence: Synthetic oligonucleotide
uagagggccugaugccugc

SEQ ID NO: 608262 - RNA, 19 nt, Artificial Sequence
  Description of Artificial Sequence: Synthetic oligonucleotide
gucaggagaggaugagcac

SEQ ID NO: 608263 - RNA, 19 nt, Artificial Sequence
  Description of Artificial Sequence: Synthetic oligonucleotide
gaccucuaacacaucucug

SEQ ID NO: 608264 - RNA, 19 nt, Artificial Sequence
  Description of Artificial Sequence: Synthetic oligonucleotide
ugugcucgcagaggugcag

SEQ ID NO: 608265 - RNA, 19 nt, Artificial Sequence
  Description of Artificial Sequence: Synthetic oligonucleotide
guagagugcccuggcaagc

SEQ ID NO: 608266 - RNA, 19 nt, Artificial Sequence
  Description of Artificial Sequence: Synthetic oligonucleotide
uggcaagcugggccgacgu

SEQ ID NO: 608267 - RNA, 19 nt, Artificial Sequence
  Description of Artificial Sequence: Synthetic oligonucleotide
uggguagccuaaggcagcc

SEQ ID NO: 608268 - RNA, 19 nt, Artificial Sequence
  Description of Artificial Sequence: Synthetic oligonucleotide
auagaggggaggcccuggu

SEQ ID NO: 608269 - RNA, 19 nt, Artificial Sequence
  Description of Artificial Sequence: Synthetic oligonucleotide
acucauugugaggguccgc

SEQ ID NO: 608270 - RNA, 19 nt, Artificial Sequence
  Description of Artificial Sequence: Synthetic oligonucleotide
ugagcacgaucuagcuaga

SEQ ID NO: 608271 - RNA, 19 nt, Artificial Sequence
  Description of Artificial Sequence: Synthetic oligonucleotide
ggagacuaaggcugcacga

SEQ ID NO: 608272 - RNA, 19 nt, Artificial Sequence
  Description of Artificial Sequence: Synthetic oligonucleotide
ggcucuagacuccagcguc

SEQ ID NO: 608273 - RNA, 19 nt, Artificial Sequence
  Description of Artificial Sequence: Synthetic oligonucleotide
gcggaagcuuuauccaggg

SEQ ID NO: 608274 - RNA, 19 nt, Artificial Sequence
  Description of Artificial Sequence: Synthetic oligonucleotide
augccugccugggcaaagc

SEQ ID NO: 608275 - RNA, 19 nt, Artificial Sequence
  Description of Artificial Sequence: Synthetic oligonucleotide
uccgcugagucaucgucua

SEQ ID NO: 608276 - RNA, 19 nt, Artificial Sequence
  Description of Artificial Sequence: Synthetic oligonucleotide
ucgguggagggcagccgag

SEQ ID NO: 608277 - RNA, 19 nt, Artificial Sequence
  Description of Artificial Sequence: Synthetic oligonucleotide
gaugccugccugggcaaag

SEQ ID NO: 608278 - RNA, 19 nt, Artificial Sequence
  Description of Artificial Sequence: Synthetic oligonucleotide
gaucuagcuagagguccug

SEQ ID NO: 608279 - RNA, 19 nt, Artificial Sequence
  Description of Artificial Sequence: Synthetic oligonucleotide
ccagcuacggacagauggc

SEQ ID NO: 608280 - RNA, 19 nt, Artificial Sequence
  Description of Artificial Sequence: Synthetic oligonucleotide
ugcugaggugagacuuggc

SEQ ID NO: 608281 - RNA, 19 nt, Artificial Sequence
  Description of Artificial Sequence: Synthetic oligonucleotide
ggcggaagcuuuauccagg

SEQ ID NO: 608282 - RNA, 19 nt, Artificial Sequence
  Description of Artificial Sequence: Synthetic oligonucleotide
ucccucggguuugaggccc

SEQ ID NO: 608283 - RNA, 19 nt, Artificial Sequence
  Description of Artificial Sequence: Synthetic oligonucleotide
acgucauagaugccuucau

SEQ ID NO: 608284 - RNA, 19 nt, Artificial Sequence
  Description of Artificial Sequence: Synthetic oligonucleotide
cagggcuugcccugcgagc

SEQ ID NO: 608285 - RNA, 19 nt, Artificial Sequence
  Description of Artificial Sequence: Synthetic oligonucleotide
cugguuggccugaguacug

SEQ ID NO: 608286 - RNA, 19 nt, Artificial Sequence
  Description of Artificial Sequence: Synthetic oligonucleotide
gaaggucaccccaagcugu

SEQ ID NO: 608287 - RNA, 19 nt, Artificial Sequence
  Description of Artificial Sequence: Synthetic oligonucleotide
ucguacucauugugagggu

SEQ ID NO: 608288 - RNA, 19 nt, Artificial Sequence
  Description of Artificial Sequence: Synthetic oligonucleotide
ugcgagcuccgcuacgcau

SEQ ID NO: 608289 - RNA, 19 nt, Artificial Sequence
  Description of Artificial Sequence: Synthetic oligonucleotide
gagaugccucggugagugg

SEQ ID NO: 608290 - RNA, 19 nt, Artificial Sequence
  Description of Artificial Sequence: Synthetic oligonucleotide
gaaccucuagccacccuca

SEQ ID NO: 608291 - RNA, 19 nt, Artificial Sequence
  Description of Artificial Sequence: Synthetic oligonucleotide
gcacgaacaggcccuuagg

SEQ ID NO: 608292 - RNA, 19 nt, Artificial Sequence
  Description of Artificial Sequence: Synthetic oligonucleotide
ggguguccccaacaaauac

SEQ ID NO: 608293 - RNA, 19 nt, Artificial Sequence
  Description of Artificial Sequence: Synthetic oligonucleotide
aaccucuagccacccucaa

SEQ ID NO: 608294 - RNA, 19 nt, Artificial Sequence
  Description of Artificial Sequence: Synthetic oligonucleotide
caguuucgcugacuucagc

SEQ ID NO: 608295 - RNA, 19 nt, Artificial Sequence
  Description of Artificial Sequence: Synthetic oligonucleotide
cccaacaaauaccaggcga

SEQ ID NO: 608296 - RNA, 19 nt, Artificial Sequence
  Description of Artificial Sequence: Synthetic oligonucleotide
guagcccgcaaagucuggc

SEQ ID NO: 608297 - RNA, 19 nt, Artificial Sequence
  Description of Artificial Sequence: Synthetic oligonucleotide
ggccaaaggcacaucguag

SEQ ID NO: 608298 - RNA, 19 nt, Artificial Sequence
  Description of Artificial Sequence: Synthetic oligonucleotide
cuggacaugagagcugcca

SEQ ID NO: 608299 - RNA, 19 nt, Artificial Sequence
  Description of Artificial Sequence: Synthetic oligonucleotide
cuacgcaucgugccaucuc

SEQ ID NO: 608300 - RNA, 19 nt, Artificial Sequence
  Description of Artificial Sequence: Synthetic oligonucleotide
caaaggcacaucguaggga

SEQ ID NO: 608301 - RNA, 19 nt, Artificial Sequence
  Description of Artificial Sequence: Synthetic oligonucleotide
gggcaguuagcuguguccc

SEQ ID NO: 608302 - RNA, 19 nt, Artificial Sequence
  Description of Artificial Sequence: Synthetic oligonucleotide
cugggcaaagcaagaaaua

SEQ ID NO: 608303 - RNA, 19 nt, Artificial Sequence
  Description of Artificial Sequence: Synthetic oligonucleotide
gagcacgaucuagcuagag

SEQ ID NO: 608304 - RNA, 19 nt, Artificial Sequence
  Description of Artificial Sequence: Synthetic oligonucleotide
gguugggugggagaugcug

SEQ ID NO: 608305 - RNA, 19 nt, Artificial Sequence
  Description of Artificial Sequence: Synthetic oligonucleotide
accacucgcuugccauggg

SEQ ID NO: 608306 - RNA, 19 nt, Artificial Sequence
  Description of Artificial Sequence: Synthetic oligonucleotide
uaccucccugcacucugga

SEQ ID NO: 608307 - RNA, 19 nt, Artificial Sequence
  Description of Artificial Sequence: Synthetic oligonucleotide
agugccagauggguagccu

SEQ ID NO: 608308 - RNA, 19 nt, Artificial Sequence
  Description of Artificial Sequence: Synthetic oligonucleotide
ugcccugcgagcuccgcua

SEQ ID NO: 608309 - RNA, 19 nt, Artificial Sequence
  Description of Artificial Sequence: Synthetic oligonucleotide
cauagaccucuaacacauc

SEQ ID NO: 608310 - RNA, 19 nt, Artificial Sequence
  Description of Artificial Sequence: Synthetic oligonucleotide
guacuggacaugagagcug

SEQ ID NO: 608311 - RNA, 19 nt, Artificial Sequence
  Description of Artificial Sequence: Synthetic oligonucleotide
guucccggccuccaagcca

SEQ ID NO: 608312 - RNA, 19 nt, Artificial Sequence
  Description of Artificial Sequence: Synthetic oligonucleotide
cguagaacauccccucugc

SEQ ID NO: 608313 - RNA, 19 nt, Artificial Sequence
  Description of Artificial Sequence: Synthetic oligonucleotide
ggacucuggagauggugac

SEQ ID NO: 608314 - RNA, 19 nt, Artificial Sequence
  Description of Artificial Sequence: Synthetic oligonucleotide
caguguccaggucagcgga

SEQ ID NO: 608315 - RNA, 19 nt, Artificial Sequence
  Description of Artificial Sequence: Synthetic oligonucleotide
cucccucggguuugaggcc

SEQ ID NO: 608316 - RNA, 19 nt, Artificial Sequence
  Description of Artificial Sequence: Synthetic oligonucleotide
uucgggauccauggcggaa

SEQ ID NO: 608317 - RNA, 19 nt, Artificial Sequence
  Description of Artificial Sequence: Synthetic oligonucleotide
cucugcggaacgacagcuc

SEQ ID NO: 608318 - RNA, 19 nt, Artificial Sequence
  Description of Artificial Sequence: Synthetic oligonucleotide
guguuaucguagagugccc

SEQ ID NO: 608319 - RNA, 19 nt, Artificial Sequence
  Description of Artificial Sequence: Synthetic oligonucleotide
ccauaaccaggcaggcagg

SEQ ID NO: 608320 - RNA, 19 nt, Artificial Sequence
  Description of Artificial Sequence: Synthetic oligonucleotide
aguagcccgcaaagucugg

SEQ ID NO: 608321 - RNA, 19 nt, Artificial Sequence
  Description of Artificial Sequence: Synthetic oligonucleotide
gcugaguaguggcucuggc

SEQ ID NO: 608322 - RNA, 19 nt, Artificial Sequence
  Description of Artificial Sequence: Synthetic oligonucleotide
uucacucgguuagcaggca

SEQ ID NO: 608323 - RNA, 19 nt, Artificial Sequence
  Description of Artificial Sequence: Synthetic oligonucleotide
aucuagcuagagguccuga

SEQ ID NO: 608324 - RNA, 19 nt, Artificial Sequence
  Description of Artificial Sequence: Synthetic oligonucleotide
gcucuagacuccagcgucg

SEQ ID NO: 608325 - RNA, 19 nt, Artificial Sequence
  Description of Artificial Sequence: Synthetic oligonucleotide
gcccuuucgaccuggggca

SEQ ID NO: 608326 - RNA, 19 nt, Artificial Sequence
  Description of Artificial Sequence: Synthetic oligonucleotide
gagcuucacucgguuagca

SEQ ID NO: 608327 - RNA, 19 nt, Artificial Sequence
  Description of Artificial Sequence: Synthetic oligonucleotide
gaacauccccucugcggaa

SEQ ID NO: 608328 - RNA, 19 nt, Artificial Sequence
  Description of Artificial Sequence: Synthetic oligonucleotide
uuggaccgcagugccagau

SEQ ID NO: 608329 - RNA, 19 nt, Artificial Sequence
  Description of Artificial Sequence: Synthetic oligonucleotide
cauuugccaguaguuccuc

SEQ ID NO: 608330 - RNA, 19 nt, Artificial Sequence
  Description of Artificial Sequence: Synthetic oligonucleotide
gcagaauagaggggaggcc

SEQ ID NO: 608331 - RNA, 19 nt, Artificial Sequence
  Description of Artificial Sequence: Synthetic oligonucleotide
ccggcguagaaauucagaa

SEQ ID NO: 608332 - RNA, 19 nt, Artificial Sequence
  Description of Artificial Sequence: Synthetic oligonucleotide
ccguuucagguucgaaggg

SEQ ID NO: 608333 - RNA, 19 nt, Artificial Sequence
  Description of Artificial Sequence: Synthetic oligonucleotide
ccaagccagaaggucaccc

SEQ ID NO: 608334 - RNA, 19 nt, Artificial Sequence
  Description of Artificial Sequence: Synthetic oligonucleotide
gaggcccguuucagguucg

SEQ ID NO: 608335 - RNA, 19 nt, Artificial Sequence
  Description of Artificial Sequence: Synthetic oligonucleotide
gaguggcuaagaugaccaa

SEQ ID NO: 608336 - RNA, 19 nt, Artificial Sequence
  Description of Artificial Sequence: Synthetic oligonucleotide
gaaggagcuucacucgguu

SEQ ID NO: 608337 - RNA, 19 nt, Artificial Sequence
  Description of Artificial Sequence: Synthetic oligonucleotide
cacuguccggcguagaaau

SEQ ID NO: 608338 - RNA, 19 nt, Artificial Sequence
  Description of Artificial Sequence: Synthetic oligonucleotide
gagccagguugggugggag

SEQ ID NO: 608339 - RNA, 19 nt, Artificial Sequence
  Description of Artificial Sequence: Synthetic oligonucleotide
cggaacgacagcuccuggg

SEQ ID NO: 608340 - RNA, 19 nt, Artificial Sequence
  Description of Artificial Sequence: Synthetic oligonucleotide
cagccccaaccugugcucg

SEQ ID NO: 608341 - RNA, 19 nt, Artificial Sequence
  Description of Artificial Sequence: Synthetic oligonucleotide
aggucaccccaagcugugg

SEQ ID NO: 608342 - RNA, 19 nt, Artificial Sequence
  Description of Artificial Sequence: Synthetic oligonucleotide
cggcguagaaauucagaag

SEQ ID NO: 608343 - RNA, 19 nt, Artificial Sequence
  Description of Artificial Sequence: Synthetic oligonucleotide
ccguagaacauccccucug

SEQ ID NO: 608344 - RNA, 19 nt, Artificial Sequence
  Description of Artificial Sequence: Synthetic oligonucleotide
gguucccggccuccaagcc

SEQ ID NO: 608345 - RNA, 19 nt, Artificial Sequence
  Description of Artificial Sequence: Synthetic oligonucleotide
uccagcaauucgggaucca

SEQ ID NO: 608346 - RNA, 19 nt, Artificial Sequence
  Description of Artificial Sequence: Synthetic oligonucleotide
aggcgaugagcagccacca

SEQ ID NO: 608347 - RNA, 19 nt, Artificial Sequence
  Description of Artificial Sequence: Synthetic oligonucleotide
gccgacguggcaauggcca

SEQ ID NO: 608348 - RNA, 19 nt, Artificial Sequence
  Description of Artificial Sequence: Synthetic oligonucleotide
guccggcguagaaauucag

SEQ ID NO: 608349 - RNA, 19 nt, Artificial Sequence
  Description of Artificial Sequence: Synthetic oligonucleotide
guacagcgaccuccacccc

SEQ ID NO: 608350 - RNA, 19 nt, Artificial Sequence
  Description of Artificial Sequence: Synthetic oligonucleotide
gcagaaggcaguacagcga

SEQ ID NO: 608351 - RNA, 19 nt, Artificial Sequence
  Description of Artificial Sequence: Synthetic oligonucleotide
cuacggacagauggcuuca

SEQ ID NO: 608352 - RNA, 19 nt, Artificial Sequence
  Description of Artificial Sequence: Synthetic oligonucleotide
gguaaagcgcagggcuugc

SEQ ID NO: 608353 - RNA, 19 nt, Artificial Sequence
  Description of Artificial Sequence: Synthetic oligonucleotide
ccaacaaauaccaggcgau

SEQ ID NO: 608354 - RNA, 19 nt, Artificial Sequence
  Description of Artificial Sequence: Synthetic oligonucleotide
ccccucugcggaacgacag

SEQ ID NO: 608355 - RNA, 19 nt, Artificial Sequence
  Description of Artificial Sequence: Synthetic oligonucleotide
caucgucuaccucccugca

SEQ ID NO: 608356 - RNA, 19 nt, Artificial Sequence
  Description of Artificial Sequence: Synthetic oligonucleotide
gccugaguacuggacauga

SEQ ID NO: 608357 - RNA, 19 nt, Artificial Sequence
  Description of Artificial Sequence: Synthetic oligonucleotide
gaucucccucggguuugag

SEQ ID NO: 608358 - RNA, 19 nt, Artificial Sequence
  Description of Artificial Sequence: Synthetic oligonucleotide
accucccugcacucuggau

SEQ ID NO: 608359 - RNA, 19 nt, Artificial Sequence
  Description of Artificial Sequence: Synthetic oligonucleotide
ugccucggugaguggcuaa

SEQ ID NO: 608360 - RNA, 19 nt, Artificial Sequence
  Description of Artificial Sequence: Synthetic oligonucleotide
gucgccugcuucagaccag

SEQ ID NO: 608361 - RNA, 19 nt, Artificial Sequence
  Description of Artificial Sequence: Synthetic oligonucleotide
ccugcgagcuccgcuacgc

SEQ ID NO: 608362 - RNA, 19 nt, Artificial Sequence
  Description of Artificial Sequence: Synthetic oligonucleotide
uacggacagauggcuucaa

SEQ ID NO: 608363 - RNA, 19 nt, Artificial Sequence
  Description of Artificial Sequence: Synthetic oligonucleotide
ggcaguacagcgaccucca

SEQ ID NO: 608364 - RNA, 19 nt, Artificial Sequence
  Description of Artificial Sequence: Synthetic oligonucleotide
gggccgacguggcaauggc

SEQ ID NO: 608365 - RNA, 19 nt, Artificial Sequence
  Description of Artificial Sequence: Synthetic oligonucleotide
cuccagcuacggacagaug

SEQ ID NO: 608366 - RNA, 19 nt, Artificial Sequence
  Description of Artificial Sequence: Synthetic oligonucleotide
cuugcccugcgagcuccgc

SEQ ID NO: 608367 - RNA, 19 nt, Artificial Sequence
  Description of Artificial Sequence: Synthetic oligonucleotide
gcgggacaggcucucggug

SEQ ID NO: 608368 - RNA, 19 nt, Artificial Sequence
  Description of Artificial Sequence: Synthetic oligonucleotide
ccccucaccaugguucccg

SEQ ID NO: 608369 - RNA, 19 nt, Artificial Sequence
  Description of Artificial Sequence: Synthetic oligonucleotide
ggcaguuagcuguguccca

SEQ ID NO: 608370 - RNA, 19 nt, Artificial Sequence
  Description of Artificial Sequence: Synthetic oligonucleotide
gcggaacgacagcuccugg

SEQ ID NO: 608371 - RNA, 19 nt, Artificial Sequence
  Description of Artificial Sequence: Synthetic oligonucleotide
cugugcucgcagaggugca

SEQ ID NO: 608372 - RNA, 19 nt, Artificial Sequence
  Description of Artificial Sequence: Synthetic oligonucleotide
gcgauggcugccccucacc

SEQ ID NO: 608373 - RNA, 19 nt, Artificial Sequence
  Description of Artificial Sequence: Synthetic oligonucleotide
agcuacggacagauggcuu

SEQ ID NO: 608374 - RNA, 19 nt, Artificial Sequence
  Description of Artificial Sequence: Synthetic oligonucleotide
cgagcuccgcuacgcaucg

SEQ ID NO: 608375 - RNA, 19 nt, Artificial Sequence
  Description of Artificial Sequence: Synthetic oligonucleotide
ccccauuugccaguaguuc

SEQ ID NO: 608376 - RNA, 19 nt, Artificial Sequence
  Description of Artificial Sequence: Synthetic oligonucleotide
cucggugaguggcuaagau

SEQ ID NO: 608377 - RNA, 19 nt, Artificial Sequence
  Description of Artificial Sequence: Synthetic oligonucleotide
ggcuugcccugcgagcucc

SEQ ID NO: 608378 - RNA, 19 nt, Artificial Sequence
  Description of Artificial Sequence: Synthetic oligonucleotide
cagaggcugccagccggcc

SEQ ID NO: 608379 - RNA, 19 nt, Artificial Sequence
  Description of Artificial Sequence: Synthetic oligonucleotide
ggcaagcugggccgacgug

SEQ ID NO: 608380 - RNA, 19 nt, Artificial Sequence
  Description of Artificial Sequence: Synthetic oligonucleotide
accugugcucgcagaggug

SEQ ID NO: 608381 - RNA, 19 nt, Artificial Sequence
  Description of Artificial Sequence: Synthetic oligonucleotide
ggugaguggcuaagaugac

SEQ ID NO: 608382 - RNA, 19 nt, Artificial Sequence
  Description of Artificial Sequence: Synthetic oligonucleotide
ccuaggguguccccaacaa

SEQ ID NO: 608383 - RNA, 19 nt, Artificial Sequence
  Description of Artificial Sequence: Synthetic oligonucleotide
gccucggugaguggcuaag

SEQ ID NO: 608384 - RNA, 19 nt, Artificial Sequence
  Description of Artificial Sequence: Synthetic oligonucleotide
gcuccgcuacgcaucgugc

SEQ ID NO: 608385 - RNA, 19 nt, Artificial Sequence
  Description of Artificial Sequence: Synthetic oligonucleotide
gccuaggguguccccaaca

SEQ ID NO: 608386 - RNA, 19 nt, Artificial Sequence
  Description of Artificial Sequence: Synthetic oligonucleotide
gugcucgcagaggugcaga

SEQ ID NO: 608387 - RNA, 19 nt, Artificial Sequence
  Description of Artificial Sequence: Synthetic oligonucleotide
gagggccugaugccugccu

SEQ ID NO: 608388 - RNA, 19 nt, Artificial Sequence
  Description of Artificial Sequence: Synthetic oligonucleotide
cgcaucgugccaucucuug

SEQ ID NO: 608389 - RNA, 19 nt, Artificial Sequence
  Description of Artificial Sequence: Synthetic oligonucleotide
ggcgaugagcagccaccac

SEQ ID NO: 608390 - RNA, 19 nt, Artificial Sequence
  Description of Artificial Sequence: Synthetic oligonucleotide
gcagggucgagcugguggu

SEQ ID NO: 608391 - RNA, 19 nt, Artificial Sequence
  Description of Artificial Sequence: Synthetic oligonucleotide
cuuggaccgcagugccaga

SEQ ID NO: 608392 - RNA, 19 nt, Artificial Sequence
  Description of Artificial Sequence: Synthetic oligonucleotide
ggccugaguacuggacaug

SEQ ID NO: 608393 - RNA, 19 nt, Artificial Sequence
  Description of Artificial Sequence: Synthetic oligonucleotide
gcgucgccugcuucagacc

SEQ ID NO: 608394 - RNA, 19 nt, Artificial Sequence
  Description of Artificial Sequence: Synthetic oligonucleotide
cagggucgagcugguggug

SEQ ID NO: 608395 - RNA, 19 nt, Artificial Sequence
  Description of Artificial Sequence: Synthetic oligonucleotide
cagcgaccuccaccccagg

SEQ ID NO: 608396 - RNA, 19 nt, Artificial Sequence
  Description of Artificial Sequence: Synthetic oligonucleotide
cugccagccggccuagggu

SEQ ID NO: 608397 - RNA, 19 nt, Artificial Sequence
  Description of Artificial Sequence: Synthetic oligonucleotide
cgaccuccaccccaggcug

SEQ ID NO: 608398 - RNA, 19 nt, Artificial Sequence
  Description of Artificial Sequence: Synthetic oligonucleotide
agguucgaaggggcagaau

SEQ ID NO: 608399 - RNA, 19 nt, Artificial Sequence
  Description of Artificial Sequence: Synthetic oligonucleotide
gcguagaaauucagaagcu

SEQ ID NO: 608400 - RNA, 19 nt, Artificial Sequence
  Description of Artificial Sequence: Synthetic oligonucleotide
agccgaggccugugcugga

SEQ ID NO: 608401 - RNA, 19 nt, Artificial Sequence
  Description of Artificial Sequence: Synthetic oligonucleotide
cugcgagcuccgcuacgca

SEQ ID NO: 608402 - RNA, 19 nt, Artificial Sequence
  Description of Artificial Sequence: Synthetic oligonucleotide
cgucgccugcuucagacca

SEQ ID NO: 608403 - RNA, 19 nt, Artificial Sequence
  Description of Artificial Sequence: Synthetic oligonucleotide
cgcaaagucuggccuagca

SEQ ID NO: 608404 - RNA, 19 nt, Artificial Sequence
  Description of Artificial Sequence: Synthetic oligonucleotide
ggccgacguggcaauggcc

SEQ ID NO: 608405 - RNA, 19 nt, Artificial Sequence
  Description of Artificial Sequence: Synthetic oligonucleotide
acuguccggcguagaaauu

SEQ ID NO: 608406 - RNA, 19 nt, Artificial Sequence
  Description of Artificial Sequence: Synthetic oligonucleotide
acaggcccuuagggaagga

SEQ ID NO: 608407 - RNA, 19 nt, Artificial Sequence
  Description of Artificial Sequence: Synthetic oligonucleotide
cauccccucugcggaacga

SEQ ID NO: 608408 - RNA, 19 nt, Artificial Sequence
  Description of Artificial Sequence: Synthetic oligonucleotide
ggugggacaugagccaggu

SEQ ID NO: 608409 - RNA, 19 nt, Artificial Sequence
  Description of Artificial Sequence: Synthetic oligonucleotide
cagcuacggacagauggcu

SEQ ID NO: 608410 - RNA, 19 nt, Artificial Sequence
  Description of Artificial Sequence: Synthetic oligonucleotide
augccucggugaguggcua

SEQ ID NO: 608411 - RNA, 19 nt, Artificial Sequence
  Description of Artificial Sequence: Synthetic oligonucleotide
cuuagggaaggaggccagu

SEQ ID NO: 608412 - RNA, 19 nt, Artificial Sequence
  Description of Artificial Sequence: Synthetic oligonucleotide
ucccggccuccaagccaga

SEQ ID NO: 608413 - RNA, 19 nt, Artificial Sequence
  Description of Artificial Sequence: Synthetic oligonucleotide
gcacuguccggcguagaaa

SEQ ID NO: 608414 - RNA, 19 nt, Artificial Sequence
  Description of Artificial Sequence: Synthetic oligonucleotide
cagguucgaaggggcagaa

SEQ ID NO: 608415 - RNA, 19 nt, Artificial Sequence
  Description of Artificial Sequence: Synthetic oligonucleotide
acgcaucgugccaucucuu

SEQ ID NO: 608416 - RNA, 19 nt, Artificial Sequence
  Description of Artificial Sequence: Synthetic oligonucleotide
ggguagccuaaggcagccc

SEQ ID NO: 608417 - RNA, 19 nt, Artificial Sequence
  Description of Artificial Sequence: Synthetic oligonucleotide
cugggccgacguggcaaug

SEQ ID NO: 608418 - RNA, 19 nt, Artificial Sequence
  Description of Artificial Sequence: Synthetic oligonucleotide
aggcccguuucagguucga

SEQ ID NO: 608419 - RNA, 19 nt, Artificial Sequence
  Description of Artificial Sequence: Synthetic oligonucleotide
gcaguuagcugugucccau

SEQ ID NO: 608420 - RNA, 19 nt, Artificial Sequence
  Description of Artificial Sequence: Synthetic oligonucleotide
cccugcgagcuccgcuacg

SEQ ID NO: 608421 - RNA, 19 nt, Artificial Sequence
  Description of Artificial Sequence: Synthetic oligonucleotide
ggcgggacaggcucucggu

SEQ ID NO: 608422 - RNA, 19 nt, Artificial Sequence
  Description of Artificial Sequence: Synthetic oligonucleotide
cgauggcugccccucacca

SEQ ID NO: 608423 - RNA, 19 nt, Artificial Sequence
  Description of Artificial Sequence: Synthetic oligonucleotide
gcccgcaaagucuggccua

SEQ ID NO: 608424 - RNA, 19 nt, Artificial Sequence
  Description of Artificial Sequence: Synthetic oligonucleotide
gcuugcccugcgagcuccg

SEQ ID NO: 608425 - RNA, 19 nt, Artificial Sequence
  Description of Artificial Sequence: Synthetic oligonucleotide
ccagacuuucguguuccaa

SEQ ID NO: 608426 - RNA, 19 nt, Artificial Sequence
  Description of Artificial Sequence: Synthetic oligonucleotide
ucccugcacucuggaucuc

SEQ ID NO: 608427 - RNA, 19 nt, Artificial Sequence
  Description of Artificial Sequence: Synthetic oligonucleotide
cggcgggacaggcucucgg

SEQ ID NO: 608428 - RNA, 19 nt, Artificial Sequence
  Description of Artificial Sequence: Synthetic oligonucleotide
gcccugcgagcuccgcuac

SEQ ID NO: 608429 - RNA, 19 nt, Artificial Sequence
  Description of Artificial Sequence: Synthetic oligonucleotide
cccucggguuugaggcccc

SEQ ID NO: 608430 - RNA, 19 nt, Artificial Sequence
  Description of Artificial Sequence: Synthetic oligonucleotide
cgucuaccucccugcacuc

SEQ ID NO: 608431 - RNA, 19 nt, Artificial Sequence
  Description of Artificial Sequence: Synthetic oligonucleotide
cagcgucgccugcuucaga

SEQ ID NO: 608432 - RNA, 19 nt, Artificial Sequence
  Description of Artificial Sequence: Synthetic oligonucleotide
gccggccuagggugucccc

SEQ ID NO: 608433 - RNA, 19 nt, Artificial Sequence
  Description of Artificial Sequence: Synthetic oligonucleotide
ccgcugagucaucgucuac

SEQ ID NO: 608434 - RNA, 19 nt, Artificial Sequence
  Description of Artificial Sequence: Synthetic oligonucleotide
ggcacgucauagaugccuu

SEQ ID NO: 608435 - RNA, 19 nt, Artificial Sequence
  Description of Artificial Sequence: Synthetic oligonucleotide
ccauugggaugccuucgua

SEQ ID NO: 608436 - RNA, 19 nt, Artificial Sequence
  Description of Artificial Sequence: Synthetic oligonucleotide
cgaucuagcuagagguccu

SEQ ID NO: 608437 - RNA, 19 nt, Artificial Sequence
  Description of Artificial Sequence: Synthetic oligonucleotide
gcuacgcaucgugccaucu

SEQ ID NO: 608438 - RNA, 19 nt, Artificial Sequence
  Description of Artificial Sequence: Synthetic oligonucleotide
ccuggcaagcugggccgac

SEQ ID NO: 608439 - RNA, 19 nt, Artificial Sequence
  Description of Artificial Sequence: Synthetic oligonucleotide
ccggccuagggugucccca

SEQ ID NO: 608440 - RNA, 19 nt, Artificial Sequence
  Description of Artificial Sequence: Synthetic oligonucleotide
ccgcaaagucuggccuagc

SEQ ID NO: 608441 - RNA, 19 nt, Artificial Sequence
  Description of Artificial Sequence: Synthetic oligonucleotide
ccgcagugccagaugggua

SEQ ID NO: 608442 - RNA, 19 nt, Artificial Sequence
  Description of Artificial Sequence: Synthetic oligonucleotide
cccguagaacauccccucu

SEQ ID NO: 608443 - RNA, 19 nt, Artificial Sequence
  Description of Artificial Sequence: Synthetic oligonucleotide
gggauccauggcggaagcu

SEQ ID NO: 608444 - RNA, 19 nt, Artificial Sequence
  Description of Artificial Sequence: Synthetic oligonucleotide
gcugggccgacguggcaau

SEQ ID NO: 608445 - RNA, 19 nt, Artificial Sequence
  Description of Artificial Sequence: Synthetic oligonucleotide
gugggacaugagccagguu

SEQ ID NO: 608446 - RNA, 19 nt, Artificial Sequence
  Description of Artificial Sequence: Synthetic oligonucleotide
cgcuacgcaucgugccauc

SEQ ID NO: 608447 - RNA, 19 nt, Artificial Sequence
  Description of Artificial Sequence: Synthetic oligonucleotide
gccuagcauuguaccugca

SEQ ID NO: 608448 - RNA, 19 nt, Artificial Sequence
  Description of Artificial Sequence: Synthetic oligonucleotide
cugcacgaacaggcccuua

SEQ ID NO: 608449 - RNA, 19 nt, Artificial Sequence
  Description of Artificial Sequence: Synthetic oligonucleotide
guccaccggcacccucccu

SEQ ID NO: 608450 - RNA, 19 nt, Artificial Sequence
  Description of Artificial Sequence: Synthetic oligonucleotide
gagcuccgcuacgcaucgu

SEQ ID NO: 608451 - RNA, 19 nt, Artificial Sequence
  Description of Artificial Sequence: Synthetic oligonucleotide
ccgacguggcaauggccau

SEQ ID NO: 608452 - RNA, 19 nt, Artificial Sequence
  Description of Artificial Sequence: Synthetic oligonucleotide
cccuggcaagcugggccga

SEQ ID NO: 608453 - RNA, 19 nt, Artificial Sequence
  Description of Artificial Sequence: Synthetic oligonucleotide
ccgcuacgcaucgugccau

SEQ ID NO: 608454 - RNA, 19 nt, Artificial Sequence
  Description of Artificial Sequence: Synthetic oligonucleotide
uauauauauauauauaugu

SEQ ID NO: 608455 - RNA, 19 nt, Artificial Sequence
  Description of Artificial Sequence: Synthetic oligonucleotide
auauauauaauauauauuu

SEQ ID NO: 608456 - RNA, 19 nt, Artificial Sequence
  Description of Artificial Sequence: Synthetic oligonucleotide
uauauauauauauauguca

SEQ ID NO: 608457 - RNA, 19 nt, Artificial Sequence
  Description of Artificial Sequence: Synthetic oligonucleotide
uauauauauauauauauau

SEQ ID NO: 608458 - RNA, 19 nt, Artificial Sequence
  Description of Artificial Sequence: Synthetic oligonucleotide
aauaacuacauucaaguaa

SEQ ID NO: 608459 - RNA, 19 nt, Artificial Sequence
  Description of Artificial Sequence: Synthetic oligonucleotide
uacaguaucccucugaaag

SEQ ID NO: 608460 - RNA, 19 nt, Artificial Sequence
  Description of Artificial Sequence: Synthetic oligonucleotide
auauauaauauauauuuca

SEQ ID NO: 608461 - RNA, 19 nt, Artificial Sequence
  Description of Artificial Sequence: Synthetic oligonucleotide
ugagaaucaggguagacgg

SEQ ID NO: 608462 - RNA, 19 nt, Artificial Sequence
  Description of Artificial Sequence: Synthetic oligonucleotide
aagacgaagcgaucaaugc

SEQ ID NO: 608463 - RNA, 19 nt, Artificial Sequence
  Description of Artificial Sequence: Synthetic oligonucleotide
aauucgugguucuugaugu

SEQ ID NO: 608464 - RNA, 19 nt, Artificial Sequence
  Description of Artificial Sequence: Synthetic oligonucleotide
uacugagcaauauauacag

SEQ ID NO: 608465 - RNA, 19 nt, Artificial Sequence
  Description of Artificial Sequence: Synthetic oligonucleotide
ucuauacugagcaauauau

SEQ ID NO: 608466 - RNA, 19 nt, Artificial Sequence
  Description of Artificial Sequence: Synthetic oligonucleotide
uuuccugucacuccuagcc

SEQ ID NO: 608467 - RNA, 19 nt, Artificial Sequence
  Description of Artificial Sequence: Synthetic oligonucleotide
gaggaagguacuuugagcc

SEQ ID NO: 608468 - RNA, 19 nt, Artificial Sequence
  Description of Artificial Sequence: Synthetic oligonucleotide
uauacagccuauuauauau

SEQ ID NO: 608469 - RNA, 19 nt, Artificial Sequence
  Description of Artificial Sequence: Synthetic oligonucleotide
agcugcauaaaacguagcc

SEQ ID NO: 608470 - RNA, 19 nt, Artificial Sequence
  Description of Artificial Sequence: Synthetic oligonucleotide
auugccggcauuuguagcc

SEQ ID NO: 608471 - RNA, 19 nt, Artificial Sequence
  Description of Artificial Sequence: Synthetic oligonucleotide
uauauauaauauauauuuc

SEQ ID NO: 608472 - RNA, 19 nt, Artificial Sequence
  Description of Artificial Sequence: Synthetic oligonucleotide
guugcuauagucugcagag

SEQ ID NO: 608473 - RNA, 19 nt, Artificial Sequence
  Description of Artificial Sequence: Synthetic oligonucleotide
aaggggugaauccugaugu

SEQ ID NO: 608474 - RNA, 19 nt, Artificial Sequence
  Description of Artificial Sequence: Synthetic oligonucleotide
auauauauauauauauguc

SEQ ID NO: 608475 - RNA, 19 nt, Artificial Sequence
  Description of Artificial Sequence: Synthetic oligonucleotide
agaggaagguacuuugagc

SEQ ID NO: 608476 - RNA, 19 nt, Artificial Sequence
  Description of Artificial Sequence: Synthetic oligonucleotide
uauauuccaaaacucucug

SEQ ID NO: 608477 - RNA, 19 nt, Artificial Sequence
  Description of Artificial Sequence: Synthetic oligonucleotide
ucagcugcauaaaacguag

SEQ ID NO: 608478 - RNA, 19 nt, Artificial Sequence
  Description of Artificial Sequence: Synthetic oligonucleotide
aguaccgacacacccacgg

SEQ ID NO: 608479 - RNA, 19 nt, Artificial Sequence
  Description of Artificial Sequence: Synthetic oligonucleotide
auauauacagccuauuaua

SEQ ID NO: 608480 - RNA, 19 nt, Artificial Sequence
  Description of Artificial Sequence: Synthetic oligonucleotide
auauauauauaugucauau

SEQ ID NO: 608481 - RNA, 19 nt, Artificial Sequence
  Description of Artificial Sequence: Synthetic oligonucleotide
agaaaguaggucugggauc

SEQ ID NO: 608482 - RNA, 19 nt, Artificial Sequence
  Description of Artificial Sequence: Synthetic oligonucleotide
gauuuuggcuuguuuaaug

SEQ ID NO: 608483 - RNA, 19 nt, Artificial Sequence
  Description of Artificial Sequence: Synthetic oligonucleotide
auauauauauauauauaug

SEQ ID NO: 608484 - RNA, 19 nt, Artificial Sequence
  Description of Artificial Sequence: Synthetic oligonucleotide
agaaucaggguagacgggc

SEQ ID NO: 608485 - RNA, 19 nt, Artificial Sequence
  Description of Artificial Sequence: Synthetic oligonucleotide
uuuacaguaucccucugaa

SEQ ID NO: 608486 - RNA, 19 nt, Artificial Sequence
  Description of Artificial Sequence: Synthetic oligonucleotide
ugcuauagucugcagagga

SEQ ID NO: 608487 - RNA, 19 nt, Artificial Sequence
  Description of Artificial Sequence: Synthetic oligonucleotide
cuuggcaugaggcugcagg

SEQ ID NO: 608488 - RNA, 19 nt, Artificial Sequence
  Description of Artificial Sequence: Synthetic oligonucleotide
ggauuuacaaaggagaagc

SEQ ID NO: 608489 - RNA, 19 nt, Artificial Sequence
  Description of Artificial Sequence: Synthetic oligonucleotide
agcaguaccuugccaaagc

SEQ ID NO: 608490 - RNA, 19 nt, Artificial Sequence
  Description of Artificial Sequence: Synthetic oligonucleotide
ugguugaugccacauaggu

SEQ ID NO: 608491 - RNA, 19 nt, Artificial Sequence
  Description of Artificial Sequence: Synthetic oligonucleotide
uaaaacguagcccgguaga

SEQ ID NO: 608492 - RNA, 19 nt, Artificial Sequence
  Description of Artificial Sequence: Synthetic oligonucleotide
acuuuguggaagacgaagc

SEQ ID NO: 608493 - RNA, 19 nt, Artificial Sequence
  Description of Artificial Sequence: Synthetic oligonucleotide
ucgaucaacaccacguccu

SEQ ID NO: 608494 - RNA, 19 nt, Artificial Sequence
  Description of Artificial Sequence: Synthetic oligonucleotide
ucgucgaucaacaccacgu

SEQ ID NO: 608495 - RNA, 19 nt, Artificial Sequence
  Description of Artificial Sequence: Synthetic oligonucleotide
gaagguggcgaugaauucg

SEQ ID NO: 608496 - RNA, 19 nt, Artificial Sequence
  Description of Artificial Sequence: Synthetic oligonucleotide
auauauauauauaugucau

SEQ ID NO: 608497 - RNA, 19 nt, Artificial Sequence
  Description of Artificial Sequence: Synthetic oligonucleotide
auaaaacguagcccgguag

SEQ ID NO: 608498 - RNA, 19 nt, Artificial Sequence
  Description of Artificial Sequence: Synthetic oligonucleotide
uccuacaugcuuucuauac

SEQ ID NO: 608499 - RNA, 19 nt, Artificial Sequence
  Description of Artificial Sequence: Synthetic oligonucleotide
agguacuuugagcccagcc

SEQ ID NO: 608500 - RNA, 19 nt, Artificial Sequence
  Description of Artificial Sequence: Synthetic oligonucleotide
uguagcccgcaaaugaucu

SEQ ID NO: 608501 - RNA, 19 nt, Artificial Sequence
  Description of Artificial Sequence: Synthetic oligonucleotide
ugcauauauauaauauaua

SEQ ID NO: 608502 - RNA, 19 nt, Artificial Sequence
  Description of Artificial Sequence: Synthetic oligonucleotide
aaggcgggguuucucacuc

SEQ ID NO: 608503 - RNA, 19 nt, Artificial Sequence
  Description of Artificial Sequence: Synthetic oligonucleotide
uauauauauauaugucaua

SEQ ID NO: 608504 - RNA, 19 nt, Artificial Sequence
  Description of Artificial Sequence: Synthetic oligonucleotide
ucucacuuguccaggagcu

SEQ ID NO: 608505 - RNA, 19 nt, Artificial Sequence
  Description of Artificial Sequence: Synthetic oligonucleotide
aaaacguagcccgguagag

SEQ ID NO: 608506 - RNA, 19 nt, Artificial Sequence
  Description of Artificial Sequence: Synthetic oligonucleotide
aguugcuauagucugcaga

SEQ ID NO: 608507 - RNA, 19 nt, Artificial Sequence
  Description of Artificial Sequence: Synthetic oligonucleotide
gacgaagcgaucaaugcug

SEQ ID NO: 608508 - RNA, 19 nt, Artificial Sequence
  Description of Artificial Sequence: Synthetic oligonucleotide
ugagaaagggauucuccca

SEQ ID NO: 608509 - RNA, 19 nt, Artificial Sequence
  Description of Artificial Sequence: Synthetic oligonucleotide
ucagccaguaccgacacac

SEQ ID NO: 608510 - RNA, 19 nt, Artificial Sequence
  Description of Artificial Sequence: Synthetic oligonucleotide
gugagaaagggauucuccc

SEQ ID NO: 608511 - RNA, 19 nt, Artificial Sequence
  Description of Artificial Sequence: Synthetic oligonucleotide
ucaggggcgauguaaucag

SEQ ID NO: 608512 - RNA, 19 nt, Artificial Sequence
  Description of Artificial Sequence: Synthetic oligonucleotide
caaucacccagucaucugc

SEQ ID NO: 608513 - RNA, 19 nt, Artificial Sequence
  Description of Artificial Sequence: Synthetic oligonucleotide
ugcagguccagccacgaac

SEQ ID NO: 608514 - RNA, 19 nt, Artificial Sequence
  Description of Artificial Sequence: Synthetic oligonucleotide
uugaccgcaaagaacuggu

SEQ ID NO: 608515 - RNA, 19 nt, Artificial Sequence
  Description of Artificial Sequence: Synthetic oligonucleotide
aucaacaccacguccuucu

SEQ ID NO: 608516 - RNA, 19 nt, Artificial Sequence
  Description of Artificial Sequence: Synthetic oligonucleotide
ucucagcugcauaaaacgu

SEQ ID NO: 608517 - RNA, 19 nt, Artificial Sequence
  Description of Artificial Sequence: Synthetic oligonucleotide
gguguguccacccggauag

SEQ ID NO: 608518 - RNA, 19 nt, Artificial Sequence
  Description of Artificial Sequence: Synthetic oligonucleotide
uuuagcuccgcaagcagua

SEQ ID NO: 608519 - RNA, 19 nt, Artificial Sequence
  Description of Artificial Sequence: Synthetic oligonucleotide
uucuauacugagcaauaua

SEQ ID NO: 608520 - RNA, 19 nt, Artificial Sequence
  Description of Artificial Sequence: Synthetic oligonucleotide
acccacgguaaccucagac

SEQ ID NO: 608521 - RNA, 19 nt, Artificial Sequence
  Description of Artificial Sequence: Synthetic oligonucleotide
uacagccuauuauauauau

SEQ ID NO: 608522 - RNA, 19 nt, Artificial Sequence
  Description of Artificial Sequence: Synthetic oligonucleotide
uacgcauagacuguuugca

SEQ ID NO: 608523 - RNA, 19 nt, Artificial Sequence
  Description of Artificial Sequence: Synthetic oligonucleotide
uucgacuccuuggugaucc

SEQ ID NO: 608524 - RNA, 19 nt, Artificial Sequence
  Description of Artificial Sequence: Synthetic oligonucleotide
auagaugugggcaucaaau

SEQ ID NO: 608525 - RNA, 19 nt, Artificial Sequence
  Description of Artificial Sequence: Synthetic oligonucleotide
caaaguugcuauagucugc

SEQ ID NO: 608526 - RNA, 19 nt, Artificial Sequence
  Description of Artificial Sequence: Synthetic oligonucleotide
aucaaugcugcaccgggug

SEQ ID NO: 608527 - RNA, 19 nt, Artificial Sequence
  Description of Artificial Sequence: Synthetic oligonucleotide
uccuucgacuccuugguga

SEQ ID NO: 608528 - RNA, 19 nt, Artificial Sequence
  Description of Artificial Sequence: Synthetic oligonucleotide
agacgaagcgaucaaugcu

SEQ ID NO: 608529 - RNA, 19 nt, Artificial Sequence
  Description of Artificial Sequence: Synthetic oligonucleotide
auauauauauauauauaua

SEQ ID NO: 608530 - RNA, 19 nt, Artificial Sequence
  Description of Artificial Sequence: Synthetic oligonucleotide
uccgugaagaucucuggcu

SEQ ID NO: 608531 - RNA, 19 nt, Artificial Sequence
  Description of Artificial Sequence: Synthetic oligonucleotide
caugauguccuucgacucc

SEQ ID NO: 608532 - RNA, 19 nt, Artificial Sequence
  Description of Artificial Sequence: Synthetic oligonucleotide
cauagacucgaugagguuc

SEQ ID NO: 608533 - RNA, 19 nt, Artificial Sequence
  Description of Artificial Sequence: Synthetic oligonucleotide
caaaggaccaccaguccac

SEQ ID NO: 608534 - RNA, 19 nt, Artificial Sequence
  Description of Artificial Sequence: Synthetic oligonucleotide
ucuccuacaugcuuucuau

SEQ ID NO: 608535 - RNA, 19 nt, Artificial Sequence
  Description of Artificial Sequence: Synthetic oligonucleotide
uuugucacacagagcagaa

SEQ ID NO: 608536 - RNA, 19 nt, Artificial Sequence
  Description of Artificial Sequence: Synthetic oligonucleotide
gauagugugguguguccac

SEQ ID NO: 608537 - RNA, 19 nt, Artificial Sequence
  Description of Artificial Sequence: Synthetic oligonucleotide
cucugaaaggcaaagggaa

SEQ ID NO: 608538 - RNA, 19 nt, Artificial Sequence
  Description of Artificial Sequence: Synthetic oligonucleotide
uacaugcuuucuauacuga

SEQ ID NO: 608539 - RNA, 19 nt, Artificial Sequence
  Description of Artificial Sequence: Synthetic oligonucleotide
ucgaaucccugguauauuc

SEQ ID NO: 608540 - RNA, 19 nt, Artificial Sequence
  Description of Artificial Sequence: Synthetic oligonucleotide
ugaucucagcugcauaaaa

SEQ ID NO: 608541 - RNA, 19 nt, Artificial Sequence
  Description of Artificial Sequence: Synthetic oligonucleotide
gcauauauauaauauauau

SEQ ID NO: 608542 - RNA, 19 nt, Artificial Sequence
  Description of Artificial Sequence: Synthetic oligonucleotide
uauagucugcagaggauuu

SEQ ID NO: 608543 - RNA, 19 nt, Artificial Sequence
  Description of Artificial Sequence: Synthetic oligonucleotide
aaucccgaguccagcuucc

SEQ ID NO: 608544 - RNA, 19 nt, Artificial Sequence
  Description of Artificial Sequence: Synthetic oligonucleotide
agcccagccaacaagagcu

SEQ ID NO: 608545 - RNA, 19 nt, Artificial Sequence
  Description of Artificial Sequence: Synthetic oligonucleotide
ucaaugcugcaccgggugc

SEQ ID NO: 608546 - RNA, 19 nt, Artificial Sequence
  Description of Artificial Sequence: Synthetic oligonucleotide
cuugaccgcaaagaacugg

SEQ ID NO: 608547 - RNA, 19 nt, Artificial Sequence
  Description of Artificial Sequence: Synthetic oligonucleotide
uccagcggggauagugugg

SEQ ID NO: 608548 - RNA, 19 nt, Artificial Sequence
  Description of Artificial Sequence: Synthetic oligonucleotide
acgguaaccucagacagug

SEQ ID NO: 608549 - RNA, 19 nt, Artificial Sequence
  Description of Artificial Sequence: Synthetic oligonucleotide
gaucuugccauaggucccg

SEQ ID NO: 608550 - RNA, 19 nt, Artificial Sequence
  Description of Artificial Sequence: Synthetic oligonucleotide
ugacacggccuucauagau

SEQ ID NO: 608551 - RNA, 19 nt, Artificial Sequence
  Description of Artificial Sequence: Synthetic oligonucleotide
gaucuugucaaugcauuuc

SEQ ID NO: 608552 - RNA, 19 nt, Artificial Sequence
  Description of Artificial Sequence: Synthetic oligonucleotide
acgaacucagccuugccau

SEQ ID NO: 608553 - RNA, 19 nt, Artificial Sequence
  Description of Artificial Sequence: Synthetic oligonucleotide
aaaggcgggguuucucacu

SEQ ID NO: 608554 - RNA, 19 nt, Artificial Sequence
  Description of Artificial Sequence: Synthetic oligonucleotide
agcgaucaaugcugcaccg

SEQ ID NO: 608555 - RNA, 19 nt, Artificial Sequence
  Description of Artificial Sequence: Synthetic oligonucleotide
ggguuucucacucaggaac

SEQ ID NO: 608556 - RNA, 19 nt, Artificial Sequence
  Description of Artificial Sequence: Synthetic oligonucleotide
agugugguguguccacccg

SEQ ID NO: 608557 - RNA, 19 nt, Artificial Sequence
  Description of Artificial Sequence: Synthetic oligonucleotide
cccggauagacucaaagag

SEQ ID NO: 608558 - RNA, 19 nt, Artificial Sequence
  Description of Artificial Sequence: Synthetic oligonucleotide
cugguugaugccacauagg

SEQ ID NO: 608559 - RNA, 19 nt, Artificial Sequence
  Description of Artificial Sequence: Synthetic oligonucleotide
aaacuguagcccgcaaaug

SEQ ID NO: 608560 - RNA, 19 nt, Artificial Sequence
  Description of Artificial Sequence: Synthetic oligonucleotide
gucgaucaacaccacgucc

SEQ ID NO: 608561 - RNA, 19 nt, Artificial Sequence
  Description of Artificial Sequence: Synthetic oligonucleotide
ucuggcaaucccgagucca

SEQ ID NO: 608562 - RNA, 19 nt, Artificial Sequence
  Description of Artificial Sequence: Synthetic oligonucleotide
ugaaccuucugaggguaag

SEQ ID NO: 608563 - RNA, 19 nt, Artificial Sequence
  Description of Artificial Sequence: Synthetic oligonucleotide
uccuccucgcuacgcauag

SEQ ID NO: 608564 - RNA, 19 nt, Artificial Sequence
  Description of Artificial Sequence: Synthetic oligonucleotide
ugagcccagccaacaagag

SEQ ID NO: 608565 - RNA, 19 nt, Artificial Sequence
  Description of Artificial Sequence: Synthetic oligonucleotide
gguacuuugagcccagcca

SEQ ID NO: 608566 - RNA, 19 nt, Artificial Sequence
  Description of Artificial Sequence: Synthetic oligonucleotide
gucacuccuagccucuugc

SEQ ID NO: 608567 - RNA, 19 nt, Artificial Sequence
  Description of Artificial Sequence: Synthetic oligonucleotide
acgcauagacuguuugcag

SEQ ID NO: 608568 - RNA, 19 nt, Artificial Sequence
  Description of Artificial Sequence: Synthetic oligonucleotide
cacucaggaacucuugguc

SEQ ID NO: 608569 - RNA, 19 nt, Artificial Sequence
  Description of Artificial Sequence: Synthetic oligonucleotide
aaaggucaacacauugcca

SEQ ID NO: 608570 - RNA, 19 nt, Artificial Sequence
  Description of Artificial Sequence: Synthetic oligonucleotide
gaaaguaggucugggaucu

SEQ ID NO: 608571 - RNA, 19 nt, Artificial Sequence
  Description of Artificial Sequence: Synthetic oligonucleotide
acccggauagacucaaaga

SEQ ID NO: 608572 - RNA, 19 nt, Artificial Sequence
  Description of Artificial Sequence: Synthetic oligonucleotide
gacucgaugagguucuugu

SEQ ID NO: 608573 - RNA, 19 nt, Artificial Sequence
  Description of Artificial Sequence: Synthetic oligonucleotide
ccauuguucuucuugcagc

SEQ ID NO: 608574 - RNA, 19 nt, Artificial Sequence
  Description of Artificial Sequence: Synthetic oligonucleotide
guacuuugagcccagccaa

SEQ ID NO: 608575 - RNA, 19 nt, Artificial Sequence
  Description of Artificial Sequence: Synthetic oligonucleotide
cauauauauaauauauauu

SEQ ID NO: 608576 - RNA, 19 nt, Artificial Sequence
  Description of Artificial Sequence: Synthetic oligonucleotide
acacggccuucauagaugu

SEQ ID NO: 608577 - RNA, 19 nt, Artificial Sequence
  Description of Artificial Sequence: Synthetic oligonucleotide
acaucaucgucgaucaaca

SEQ ID NO: 608578 - RNA, 19 nt, Artificial Sequence
  Description of Artificial Sequence: Synthetic oligonucleotide
cuccucgcuacgcauagac

SEQ ID NO: 608579 - RNA, 19 nt, Artificial Sequence
  Description of Artificial Sequence: Synthetic oligonucleotide
auagucugcagaggauuuc

SEQ ID NO: 608580 - RNA, 19 nt, Artificial Sequence
  Description of Artificial Sequence: Synthetic oligonucleotide
uugcuauagucugcagagg

SEQ ID NO: 608581 - RNA, 19 nt, Artificial Sequence
  Description of Artificial Sequence: Synthetic oligonucleotide
uagcuccgcaagcaguacc

SEQ ID NO: 608582 - RNA, 19 nt, Artificial Sequence
  Description of Artificial Sequence: Synthetic oligonucleotide
gugcauauauauaauauau

SEQ ID NO: 608583 - RNA, 19 nt, Artificial Sequence
  Description of Artificial Sequence: Synthetic oligonucleotide
gguauauuccaaaacucuc

SEQ ID NO: 608584 - RNA, 19 nt, Artificial Sequence
  Description of Artificial Sequence: Synthetic oligonucleotide
acgaagcgaucaaugcugc

SEQ ID NO: 608585 - RNA, 19 nt, Artificial Sequence
  Description of Artificial Sequence: Synthetic oligonucleotide
ucucgaaucccugguauau

SEQ ID NO: 608586 - RNA, 19 nt, Artificial Sequence
  Description of Artificial Sequence: Synthetic oligonucleotide
uagcccgcaaaugaucuca

SEQ ID NO: 608587 - RNA, 19 nt, Artificial Sequence
  Description of Artificial Sequence: Synthetic oligonucleotide
aaacguagcccgguagagu

SEQ ID NO: 608588 - RNA, 19 nt, Artificial Sequence
  Description of Artificial Sequence: Synthetic oligonucleotide
gagaaucaggguagacggg

SEQ ID NO: 608589 - RNA, 19 nt, Artificial Sequence
  Description of Artificial Sequence: Synthetic oligonucleotide
agcaaucacccagucaucu

SEQ ID NO: 608590 - RNA, 19 nt, Artificial Sequence
  Description of Artificial Sequence: Synthetic oligonucleotide
uccacggcgguucaugguu

SEQ ID NO: 608591 - RNA, 19 nt, Artificial Sequence
  Description of Artificial Sequence: Synthetic oligonucleotide
cauugccggcauuuguagc

SEQ ID NO: 608592 - RNA, 19 nt, Artificial Sequence
  Description of Artificial Sequence: Synthetic oligonucleotide
caguaccuugccaaagcug

SEQ ID NO: 608593 - RNA, 19 nt, Artificial Sequence
  Description of Artificial Sequence: Synthetic oligonucleotide
cuacccucccagaucuugc

SEQ ID NO: 608594 - RNA, 19 nt, Artificial Sequence
  Description of Artificial Sequence: Synthetic oligonucleotide
acucuuugucacacagagc

SEQ ID NO: 608595 - RNA, 19 nt, Artificial Sequence
  Description of Artificial Sequence: Synthetic oligonucleotide
cuuugucacacagagcaga

SEQ ID NO: 608596 - RNA, 19 nt, Artificial Sequence
  Description of Artificial Sequence: Synthetic oligonucleotide
ugucggauggcagcauugc

SEQ ID NO: 608597 - RNA, 19 nt, Artificial Sequence
  Description of Artificial Sequence: Synthetic oligonucleotide
uucucucggcacuuguggu

SEQ ID NO: 608598 - RNA, 19 nt, Artificial Sequence
  Description of Artificial Sequence: Synthetic oligonucleotide
uaaucaggggugccacaga

SEQ ID NO: 608599 - RNA, 19 nt, Artificial Sequence
  Description of Artificial Sequence: Synthetic oligonucleotide
uuacaguaucccucugaaa

SEQ ID NO: 608600 - RNA, 19 nt, Artificial Sequence
  Description of Artificial Sequence: Synthetic oligonucleotide
ucccuguaaaugaugccuu

SEQ ID NO: 608601 - RNA, 19 nt, Artificial Sequence
  Description of Artificial Sequence: Synthetic oligonucleotide
ggugagaaagggauucucc

SEQ ID NO: 608602 - RNA, 19 nt, Artificial Sequence
  Description of Artificial Sequence: Synthetic oligonucleotide
guauauuccaaaacucucu

SEQ ID NO: 608603 - RNA, 19 nt, Artificial Sequence
  Description of Artificial Sequence: Synthetic oligonucleotide
agccuauuauauauaugug

SEQ ID NO: 608604 - RNA, 19 nt, Artificial Sequence
  Description of Artificial Sequence: Synthetic oligonucleotide
cuugccuggcucccucucg

SEQ ID NO: 608605 - RNA, 19 nt, Artificial Sequence
  Description of Artificial Sequence: Synthetic oligonucleotide
gaugagaaucaggguagac

SEQ ID NO: 608606 - RNA, 19 nt, Artificial Sequence
  Description of Artificial Sequence: Synthetic oligonucleotide
aggguagacgggccuguuc

SEQ ID NO: 608607 - RNA, 19 nt, Artificial Sequence
  Description of Artificial Sequence: Synthetic oligonucleotide
auaggucccguuguugucu

SEQ ID NO: 608608 - RNA, 19 nt, Artificial Sequence
  Description of Artificial Sequence: Synthetic oligonucleotide
guuggccaccuucucucgg

SEQ ID NO: 608609 - RNA, 19 nt, Artificial Sequence
  Description of Artificial Sequence: Synthetic oligonucleotide
guggaagacgaagcgauca

SEQ ID NO: 608610 - RNA, 19 nt, Artificial Sequence
  Description of Artificial Sequence: Synthetic oligonucleotide
ugccauuguucuucuugca

SEQ ID NO: 608611 - RNA, 19 nt, Artificial Sequence
  Description of Artificial Sequence: Synthetic oligonucleotide
caaucccgaguccagcuuc

SEQ ID NO: 608612 - RNA, 19 nt, Artificial Sequence
  Description of Artificial Sequence: Synthetic oligonucleotide
gcuacgcauagacuguuug

SEQ ID NO: 608613 - RNA, 19 nt, Artificial Sequence
  Description of Artificial Sequence: Synthetic oligonucleotide
acagccuauuauauauaug

SEQ ID NO: 608614 - RNA, 19 nt, Artificial Sequence
  Description of Artificial Sequence: Synthetic oligonucleotide
cuggcaaucccgaguccag

SEQ ID NO: 608615 - RNA, 19 nt, Artificial Sequence
  Description of Artificial Sequence: Synthetic oligonucleotide
ccacgguaaccucagacag

SEQ ID NO: 608616 - RNA, 19 nt, Artificial Sequence
  Description of Artificial Sequence: Synthetic oligonucleotide
cuccgcaagcaguaccuug

SEQ ID NO: 608617 - RNA, 19 nt, Artificial Sequence
  Description of Artificial Sequence: Synthetic oligonucleotide
uucucgaaucccugguaua

SEQ ID NO: 608618 - RNA, 19 nt, Artificial Sequence
  Description of Artificial Sequence: Synthetic oligonucleotide
agcggggauaguguggugu

SEQ ID NO: 608619 - RNA, 19 nt, Artificial Sequence
  Description of Artificial Sequence: Synthetic oligonucleotide
gugcacauucaugccacag

SEQ ID NO: 608620 - RNA, 19 nt, Artificial Sequence
  Description of Artificial Sequence: Synthetic oligonucleotide
agcauugcauugccggcau

SEQ ID NO: 608621 - RNA, 19 nt, Artificial Sequence
  Description of Artificial Sequence: Synthetic oligonucleotide
ugaccgcaaagaacugguc

SEQ ID NO: 608622 - RNA, 19 nt, Artificial Sequence
  Description of Artificial Sequence: Synthetic oligonucleotide
cccguuguugucuggggcg

SEQ ID NO: 608623 - RNA, 19 nt, Artificial Sequence
  Description of Artificial Sequence: Synthetic oligonucleotide
caucaucgucgaucaacac

SEQ ID NO: 608624 - RNA, 19 nt, Artificial Sequence
  Description of Artificial Sequence: Synthetic oligonucleotide
guaugaaaggcgggguuuc

SEQ ID NO: 608625 - RNA, 19 nt, Artificial Sequence
  Description of Artificial Sequence: Synthetic oligonucleotide
ggaagguacagaagaggug

SEQ ID NO: 608626 - RNA, 19 nt, Artificial Sequence
  Description of Artificial Sequence: Synthetic oligonucleotide
cugguccauagacucgaug

SEQ ID NO: 608627 - RNA, 19 nt, Artificial Sequence
  Description of Artificial Sequence: Synthetic oligonucleotide
cgaucaaugcugcaccggg

SEQ ID NO: 608628 - RNA, 19 nt, Artificial Sequence
  Description of Artificial Sequence: Synthetic oligonucleotide
cauagaugugggcaucaaa

SEQ ID NO: 608629 - RNA, 19 nt, Artificial Sequence
  Description of Artificial Sequence: Synthetic oligonucleotide
caggauuuacaguaucccu

SEQ ID NO: 608630 - RNA, 19 nt, Artificial Sequence
  Description of Artificial Sequence: Synthetic oligonucleotide
cauaaaacguagcccggua

SEQ ID NO: 608631 - RNA, 19 nt, Artificial Sequence
  Description of Artificial Sequence: Synthetic oligonucleotide
cacggcgguucaugguugg

SEQ ID NO: 608632 - RNA, 19 nt, Artificial Sequence
  Description of Artificial Sequence: Synthetic oligonucleotide
gggcaugcggaugagaauc

SEQ ID NO: 608633 - RNA, 19 nt, Artificial Sequence
  Description of Artificial Sequence: Synthetic oligonucleotide
uuagcuccgcaagcaguac

SEQ ID NO: 608634 - RNA, 19 nt, Artificial Sequence
  Description of Artificial Sequence: Synthetic oligonucleotide
gacacacccacgguaaccu

SEQ ID NO: 608635 - RNA, 19 nt, Artificial Sequence
  Description of Artificial Sequence: Synthetic oligonucleotide
agcuccgcaagcaguaccu

SEQ ID NO: 608636 - RNA, 19 nt, Artificial Sequence
  Description of Artificial Sequence: Synthetic oligonucleotide
ugggcaugcggaugagaau

SEQ ID NO: 608637 - RNA, 19 nt, Artificial Sequence
  Description of Artificial Sequence: Synthetic oligonucleotide
uggcaaucccgaguccagc

SEQ ID NO: 608638 - RNA, 19 nt, Artificial Sequence
  Description of Artificial Sequence: Synthetic oligonucleotide
augacacggccuucauaga

SEQ ID NO: 608639 - RNA, 19 nt, Artificial Sequence
  Description of Artificial Sequence: Synthetic oligonucleotide
gggaucucacuuguccagg

SEQ ID NO: 608640 - RNA, 19 nt, Artificial Sequence
  Description of Artificial Sequence: Synthetic oligonucleotide
gugcuacccucccagaucu

SEQ ID NO: 608641 - RNA, 19 nt, Artificial Sequence
  Description of Artificial Sequence: Synthetic oligonucleotide
ugccuagcacuuuguggaa

SEQ ID NO: 608642 - RNA, 19 nt, Artificial Sequence
  Description of Artificial Sequence: Synthetic oligonucleotide
ccaugauguccuucgacuc

SEQ ID NO: 608643 - RNA, 19 nt, Artificial Sequence
  Description of Artificial Sequence: Synthetic oligonucleotide
ggcgggguuucucacucag

SEQ ID NO: 608644 - RNA, 19 nt, Artificial Sequence
  Description of Artificial Sequence: Synthetic oligonucleotide
aguaucccucugaaaggca

SEQ ID NO: 608645 - RNA, 19 nt, Artificial Sequence
  Description of Artificial Sequence: Synthetic oligonucleotide
ggcgaugaauucgugguuc

SEQ ID NO: 608646 - RNA, 19 nt, Artificial Sequence
  Description of Artificial Sequence: Synthetic oligonucleotide
agacucgaugagguucuug

SEQ ID NO: 608647 - RNA, 19 nt, Artificial Sequence
  Description of Artificial Sequence: Synthetic oligonucleotide
accgacacacccacgguaa

SEQ ID NO: 608648 - RNA, 19 nt, Artificial Sequence
  Description of Artificial Sequence: Synthetic oligonucleotide
gaguucgaagcggccuuug

SEQ ID NO: 608649 - RNA, 19 nt, Artificial Sequence
  Description of Artificial Sequence: Synthetic oligonucleotide
cucuuggucaaaguugcua

SEQ ID NO: 608650 - RNA, 19 nt, Artificial Sequence
  Description of Artificial Sequence: Synthetic oligonucleotide
gguagaguucgaagcggcc

SEQ ID NO: 608651 - RNA, 19 nt, Artificial Sequence
  Description of Artificial Sequence: Synthetic oligonucleotide
aaugcugcaccgggugcua

SEQ ID NO: 608652 - RNA, 19 nt, Artificial Sequence
  Description of Artificial Sequence: Synthetic oligonucleotide
acuugaccgcaaagaacug

SEQ ID NO: 608653 - RNA, 19 nt, Artificial Sequence
  Description of Artificial Sequence: Synthetic oligonucleotide
caguaccgacacacccacg

SEQ ID NO: 608654 - RNA, 19 nt, Artificial Sequence
  Description of Artificial Sequence: Synthetic oligonucleotide
guagcccgcaaaugaucuc

SEQ ID NO: 608655 - RNA, 19 nt, Artificial Sequence
  Description of Artificial Sequence: Synthetic oligonucleotide
uagacgggccuguucuguu

SEQ ID NO: 608656 - RNA, 19 nt, Artificial Sequence
  Description of Artificial Sequence: Synthetic oligonucleotide
cuuugagcccagccaacaa

SEQ ID NO: 608657 - RNA, 19 nt, Artificial Sequence
  Description of Artificial Sequence: Synthetic oligonucleotide
guuguugucuggggcguca

SEQ ID NO: 608658 - RNA, 19 nt, Artificial Sequence
  Description of Artificial Sequence: Synthetic oligonucleotide
cucuggcaaucccgagucc

SEQ ID NO: 608659 - RNA, 19 nt, Artificial Sequence
  Description of Artificial Sequence: Synthetic oligonucleotide
gauccagcggggauagugu

SEQ ID NO: 608660 - RNA, 19 nt, Artificial Sequence
  Description of Artificial Sequence: Synthetic oligonucleotide
cgaaucccugguauauucc

SEQ ID NO: 608661 - RNA, 19 nt, Artificial Sequence
  Description of Artificial Sequence: Synthetic oligonucleotide
auacagccuauuauauaua

SEQ ID NO: 608662 - RNA, 19 nt, Artificial Sequence
  Description of Artificial Sequence: Synthetic oligonucleotide
aggucccguuguugucugg

SEQ ID NO: 608663 - RNA, 19 nt, Artificial Sequence
  Description of Artificial Sequence: Synthetic oligonucleotide
gcacuugaccgcaaagaac

SEQ ID NO: 608664 - RNA, 19 nt, Artificial Sequence
  Description of Artificial Sequence: Synthetic oligonucleotide
caucgucgaucaacaccac

SEQ ID NO: 608665 - RNA, 19 nt, Artificial Sequence
  Description of Artificial Sequence: Synthetic oligonucleotide
ggaucucacuuguccagga

SEQ ID NO: 608666 - RNA, 19 nt, Artificial Sequence
  Description of Artificial Sequence: Synthetic oligonucleotide
gguugggaauuuuggccuc

SEQ ID NO: 608667 - RNA, 19 nt, Artificial Sequence
  Description of Artificial Sequence: Synthetic oligonucleotide
ccgugaagaucucuggcuc

SEQ ID NO: 608668 - RNA, 19 nt, Artificial Sequence
  Description of Artificial Sequence: Synthetic oligonucleotide
gcgaucaaugcugcaccgg

SEQ ID NO: 608669 - RNA, 19 nt, Artificial Sequence
  Description of Artificial Sequence: Synthetic oligonucleotide
aggggugaauccugauguu

SEQ ID NO: 608670 - RNA, 19 nt, Artificial Sequence
  Description of Artificial Sequence: Synthetic oligonucleotide
guaaccucagacagugggu

SEQ ID NO: 608671 - RNA, 19 nt, Artificial Sequence
  Description of Artificial Sequence: Synthetic oligonucleotide
ggguagacgggccuguucu

SEQ ID NO: 608672 - RNA, 19 nt, Artificial Sequence
  Description of Artificial Sequence: Synthetic oligonucleotide
gguagacgggccuguucug

SEQ ID NO: 608673 - RNA, 19 nt, Artificial Sequence
  Description of Artificial Sequence: Synthetic oligonucleotide
ucucggcacuuguggugca

SEQ ID NO: 608674 - RNA, 19 nt, Artificial Sequence
  Description of Artificial Sequence: Synthetic oligonucleotide
gcuacccucccagaucuug

SEQ ID NO: 608675 - RNA, 19 nt, Artificial Sequence
  Description of Artificial Sequence: Synthetic oligonucleotide
cagcauugcauugccggca

SEQ ID NO: 608676 - RNA, 19 nt, Artificial Sequence
  Description of Artificial Sequence: Synthetic oligonucleotide
cccacgguaaccucagaca

SEQ ID NO: 608677 - RNA, 19 nt, Artificial Sequence
  Description of Artificial Sequence: Synthetic oligonucleotide
ccuuggugauccagcgggg

SEQ ID NO: 608678 - RNA, 19 nt, Artificial Sequence
  Description of Artificial Sequence: Synthetic oligonucleotide
acguagcccgguagaguuc

SEQ ID NO: 608679 - RNA, 19 nt, Artificial Sequence
  Description of Artificial Sequence: Synthetic oligonucleotide
cucgcuacgcauagacugu

SEQ ID NO: 608680 - RNA, 19 nt, Artificial Sequence
  Description of Artificial Sequence: Synthetic oligonucleotide
cuagcaggcaccaguugau

SEQ ID NO: 608681 - RNA, 19 nt, Artificial Sequence
  Description of Artificial Sequence: Synthetic oligonucleotide
gcuuucuauacugagcaau

SEQ ID NO: 608682 - RNA, 19 nt, Artificial Sequence
  Description of Artificial Sequence: Synthetic oligonucleotide
agcccgcaaaugaucucag

SEQ ID NO: 608683 - RNA, 19 nt, Artificial Sequence
  Description of Artificial Sequence: Synthetic oligonucleotide
agcuuccgugaagaucucu

SEQ ID NO: 608684 - RNA, 19 nt, Artificial Sequence
  Description of Artificial Sequence: Synthetic oligonucleotide
ccgguagaguucgaagcgg

SEQ ID NO: 608685 - RNA, 19 nt, Artificial Sequence
  Description of Artificial Sequence: Synthetic oligonucleotide
cguagcccgguagaguucg

SEQ ID NO: 608686 - RNA, 19 nt, Artificial Sequence
  Description of Artificial Sequence: Synthetic oligonucleotide
cgguagaguucgaagcggc

SEQ ID NO: 608687 - RNA, 19 nt, Artificial Sequence
  Description of Artificial Sequence: Synthetic oligonucleotide
aggcgagugccagcacccg

SEQ ID NO: 608688 - RNA, 19 nt, Artificial Sequence
  Description of Artificial Sequence: Synthetic oligonucleotide
acggcgguucaugguuggg

SEQ ID NO: 608689 - RNA, 19 nt, Artificial Sequence
  Description of Artificial Sequence: Synthetic oligonucleotide
ggggauagugugguguguc

SEQ ID NO: 608690 - RNA, 19 nt, Artificial Sequence
  Description of Artificial Sequence: Synthetic oligonucleotide
ggcauuuguagccuugcuu

SEQ ID NO: 608691 - RNA, 19 nt, Artificial Sequence
  Description of Artificial Sequence: Synthetic oligonucleotide
ucgcuacgcauagacuguu

SEQ ID NO: 608692 - RNA, 19 nt, Artificial Sequence
  Description of Artificial Sequence: Synthetic oligonucleotide
ggcgagugccagcacccgc

SEQ ID NO: 608693 - RNA, 19 nt, Artificial Sequence
  Description of Artificial Sequence: Synthetic oligonucleotide
cacuccuagccucuugccu

SEQ ID NO: 608694 - RNA, 19 nt, Artificial Sequence
  Description of Artificial Sequence: Synthetic oligonucleotide
caccgggugcuacccuccc

SEQ ID NO: 608695 - RNA, 19 nt, Artificial Sequence
  Description of Artificial Sequence: Synthetic oligonucleotide
cccgcaaaugaucucagcu

SEQ ID NO: 608696 - RNA, 19 nt, Artificial Sequence
  Description of Artificial Sequence: Synthetic oligonucleotide
cauugcauugccggcauuu

SEQ ID NO: 608697 - RNA, 19 nt, Artificial Sequence
  Description of Artificial Sequence: Synthetic oligonucleotide
gcaugcggaugagaaucag

SEQ ID NO: 608698 - RNA, 19 nt, Artificial Sequence
  Description of Artificial Sequence: Synthetic oligonucleotide
agaguucgaagcggccuuu

SEQ ID NO: 608699 - RNA, 19 nt, Artificial Sequence
  Description of Artificial Sequence: Synthetic oligonucleotide
gcaguaccuugccaaagcu

SEQ ID NO: 608700 - RNA, 19 nt, Artificial Sequence
  Description of Artificial Sequence: Synthetic oligonucleotide
gggacuggccaauaagcau

SEQ ID NO: 608701 - RNA, 19 nt, Artificial Sequence
  Description of Artificial Sequence: Synthetic oligonucleotide
cacgguaaccucagacagu

SEQ ID NO: 608702 - RNA, 19 nt, Artificial Sequence
  Description of Artificial Sequence: Synthetic oligonucleotide
cgggguuucucacucagga

SEQ ID NO: 608703 - RNA, 19 nt, Artificial Sequence
  Description of Artificial Sequence: Synthetic oligonucleotide
cuucgacuccuuggugauc

SEQ ID NO: 608704 - RNA, 19 nt, Artificial Sequence
  Description of Artificial Sequence: Synthetic oligonucleotide
cucggcacuuguggugcac

SEQ ID NO: 608705 - RNA, 19 nt, Artificial Sequence
  Description of Artificial Sequence: Synthetic oligonucleotide
guagacgggccuguucugu

SEQ ID NO: 608706 - RNA, 19 nt, Artificial Sequence
  Description of Artificial Sequence: Synthetic oligonucleotide
aggcgggguuucucacuca

SEQ ID NO: 608707 - RNA, 19 nt, Artificial Sequence
  Description of Artificial Sequence: Synthetic oligonucleotide
guaccgacacacccacggu

SEQ ID NO: 608708 - RNA, 19 nt, Artificial Sequence
  Description of Artificial Sequence: Synthetic oligonucleotide
ccggauagacucaaagagu

SEQ ID NO: 608709 - RNA, 19 nt, Artificial Sequence
  Description of Artificial Sequence: Synthetic oligonucleotide
uccuagccucuugccuggc

SEQ ID NO: 608710 - RNA, 19 nt, Artificial Sequence
  Description of Artificial Sequence: Synthetic oligonucleotide
caugggcaugcggaugaga

SEQ ID NO: 608711 - RNA, 19 nt, Artificial Sequence
  Description of Artificial Sequence: Synthetic oligonucleotide
cuugcagcgcucagccagu

SEQ ID NO: 608712 - RNA, 19 nt, Artificial Sequence
  Description of Artificial Sequence: Synthetic oligonucleotide
caaugcugcaccgggugcu

SEQ ID NO: 608713 - RNA, 19 nt, Artificial Sequence
  Description of Artificial Sequence: Synthetic oligonucleotide
cuugcuuguugaggcccca

SEQ ID NO: 608714 - RNA, 19 nt, Artificial Sequence
  Description of Artificial Sequence: Synthetic oligonucleotide
ggugcacauucaugccaca

SEQ ID NO: 608715 - RNA, 19 nt, Artificial Sequence
  Description of Artificial Sequence: Synthetic oligonucleotide
ccggcauuuguagccuugc

SEQ ID NO: 608716 - RNA, 19 nt, Artificial Sequence
  Description of Artificial Sequence: Synthetic oligonucleotide
ggcaugcggaugagaauca

SEQ ID NO: 608717 - RNA, 19 nt, Artificial Sequence
  Description of Artificial Sequence: Synthetic oligonucleotide
cuccuccucgcuacgcaua

SEQ ID NO: 608718 - RNA, 19 nt, Artificial Sequence
  Description of Artificial Sequence: Synthetic oligonucleotide
cggauagacucaaagaguu

SEQ ID NO: 608719 - RNA, 19 nt, Artificial Sequence
  Description of Artificial Sequence: Synthetic oligonucleotide
ugcuacccucccagaucuu

SEQ ID NO: 608720 - RNA, 19 nt, Artificial Sequence
  Description of Artificial Sequence: Synthetic oligonucleotide
gcauaaaacguagcccggu

SEQ ID NO: 608721 - RNA, 19 nt, Artificial Sequence
  Description of Artificial Sequence: Synthetic oligonucleotide
cccagaucuugccauaggu

SEQ ID NO: 608722 - RNA, 19 nt, Artificial Sequence
  Description of Artificial Sequence: Synthetic oligonucleotide
ccacgaacucagccuugcc

SEQ ID NO: 608723 - RNA, 19 nt, Artificial Sequence
  Description of Artificial Sequence: Synthetic oligonucleotide
ccacggcgguucaugguug

SEQ ID NO: 608724 - RNA, 19 nt, Artificial Sequence
  Description of Artificial Sequence: Synthetic oligonucleotide
cagcuuccgugaagaucuc

SEQ ID NO: 608725 - RNA, 19 nt, Artificial Sequence
  Description of Artificial Sequence: Synthetic oligonucleotide
agguggcgaugaauucgug

SEQ ID NO: 608726 - RNA, 19 nt, Artificial Sequence
  Description of Artificial Sequence: Synthetic oligonucleotide
cgacacacccacgguaacc

SEQ ID NO: 608727 - RNA, 19 nt, Artificial Sequence
  Description of Artificial Sequence: Synthetic oligonucleotide
gcgaugaauucgugguucu

SEQ ID NO: 608728 - RNA, 19 nt, Artificial Sequence
  Description of Artificial Sequence: Synthetic oligonucleotide
gucugggaucucacuuguc

SEQ ID NO: 608729 - RNA, 19 nt, Artificial Sequence
  Description of Artificial Sequence: Synthetic oligonucleotide
gcagguccagccacgaacu

SEQ ID NO: 608730 - RNA, 19 nt, Artificial Sequence
  Description of Artificial Sequence: Synthetic oligonucleotide
ccgaguccagcuuccguga

SEQ ID NO: 608731 - RNA, 19 nt, Artificial Sequence
  Description of Artificial Sequence: Synthetic oligonucleotide
ggaagacgaagcgaucaau

SEQ ID NO: 608732 - RNA, 19 nt, Artificial Sequence
  Description of Artificial Sequence: Synthetic oligonucleotide
cgcucagccaguaccgaca

SEQ ID NO: 608733 - RNA, 19 nt, Artificial Sequence
  Description of Artificial Sequence: Synthetic oligonucleotide
ggggcgucauccccagaaa

SEQ ID NO: 608734 - RNA, 19 nt, Artificial Sequence
  Description of Artificial Sequence: Synthetic oligonucleotide
cccgguucuccccaaauau

SEQ ID NO: 608735 - RNA, 19 nt, Artificial Sequence
  Description of Artificial Sequence: Synthetic oligonucleotide
ccgacacacccacgguaac

SEQ ID NO: 608736 - RNA, 19 nt, Artificial Sequence
  Description of Artificial Sequence: Synthetic oligonucleotide
ccgguucuccccaaauaua

SEQ ID NO: 608737 - RNA, 19 nt, Artificial Sequence
  Description of Artificial Sequence: Synthetic oligonucleotide
cgguaaccucagacagugg

SEQ ID NO: 608738 - RNA, 19 nt, Artificial Sequence
  Description of Artificial Sequence: Synthetic oligonucleotide
cgguucuccccaaauauau

SEQ ID NO: 608739 - RNA, 19 nt, Artificial Sequence
  Description of Artificial Sequence: Synthetic oligonucleotide
gcccgguucuccccaaaua

SEQ ID NO: 608740 - RNA, 19 nt, Artificial Sequence
  Description of Artificial Sequence: Synthetic oligonucleotide
ggggugaauccugauguuu

SEQ ID NO: 608741 - RNA, 19 nt, Artificial Sequence
  Description of Artificial Sequence: Synthetic oligonucleotide
cucgaaucccugguauauu

SEQ ID NO: 608742 - RNA, 19 nt, Artificial Sequence
  Description of Artificial Sequence: Synthetic oligonucleotide
ccuucgacuccuuggugau

SEQ ID NO: 608743 - RNA, 19 nt, Artificial Sequence
  Description of Artificial Sequence: Synthetic oligonucleotide
gguucuccccaaauauauu

SEQ ID NO: 608744 - RNA, 19 nt, Artificial Sequence
  Description of Artificial Sequence: Synthetic oligonucleotide
gcaaucccgaguccagcuu

SEQ ID NO: 608745 - RNA, 19 nt, Artificial Sequence
  Description of Artificial Sequence: Synthetic oligonucleotide
guagcccgguagaguucga

SEQ ID NO: 608746 - RNA, 19 nt, Artificial Sequence
  Description of Artificial Sequence: Synthetic oligonucleotide
cacccacgguaaccucaga

SEQ ID NO: 608747 - RNA, 19 nt, Artificial Sequence
  Description of Artificial Sequence: Synthetic oligonucleotide
ccagcggggauaguguggu

SEQ ID NO: 608748 - RNA, 19 nt, Artificial Sequence
  Description of Artificial Sequence: Synthetic oligonucleotide
ggcccgguucuccccaaau

SEQ ID NO: 608749 - RNA, 19 nt, Artificial Sequence
  Description of Artificial Sequence: Synthetic oligonucleotide
gggauucucccaggcgagu

SEQ ID NO: 608750 - RNA, 19 nt, Artificial Sequence
  Description of Artificial Sequence: Synthetic oligonucleotide
cugcaccgggugcuacccu

SEQ ID NO: 608751 - RNA, 19 nt, Artificial Sequence
  Description of Artificial Sequence: Synthetic oligonucleotide
gugauccagcggggauagu

SEQ ID NO: 608752 - RNA, 19 nt, Artificial Sequence
  Description of Artificial Sequence: Synthetic oligonucleotide
ccgcaaagaacuggucuuu

SEQ ID NO: 608753 - RNA, 19 nt, Artificial Sequence
  Description of Artificial Sequence: Synthetic oligonucleotide
gcauugcauugccggcauu

SEQ ID NO: 608754 - RNA, 19 nt, Artificial Sequence
  Description of Artificial Sequence: Synthetic oligonucleotide
ccuccucgcuacgcauaga

SEQ ID NO: 608755 - RNA, 19 nt, Artificial Sequence
  Description of Artificial Sequence: Synthetic oligonucleotide
cggcauuuguagccuugcu

SEQ ID NO: 608756 - RNA, 19 nt, Artificial Sequence
  Description of Artificial Sequence: Synthetic oligonucleotide
gcuccgcaagcaguaccuu

SEQ ID NO: 608757 - RNA, 19 nt, Artificial Sequence
  Description of Artificial Sequence: Synthetic oligonucleotide
cggggauaguguggugugu

SEQ ID NO: 608758 - RNA, 19 nt, Artificial Sequence
  Description of Artificial Sequence: Synthetic oligonucleotide
aaaacaauaauaucgcucc

SEQ ID NO: 608759 - RNA, 19 nt, Artificial Sequence
  Description of Artificial Sequence: Synthetic oligonucleotide
aauaauaucgcuccuagau

SEQ ID NO: 608760 - RNA, 19 nt, Artificial Sequence
  Description of Artificial Sequence: Synthetic oligonucleotide
acaauauuaauuuaguugu

SEQ ID NO: 608761 - RNA, 19 nt, Artificial Sequence
  Description of Artificial Sequence: Synthetic oligonucleotide
acugacuagacauagaaag

SEQ ID NO: 608762 - RNA, 19 nt, Artificial Sequence
  Description of Artificial Sequence: Synthetic oligonucleotide
aacaauaagaauggugugc

SEQ ID NO: 608763 - RNA, 19 nt, Artificial Sequence
  Description of Artificial Sequence: Synthetic oligonucleotide
cuggcuaacaauaagcugg

SEQ ID NO: 608764 - RNA, 19 nt, Artificial Sequence
  Description of Artificial Sequence: Synthetic oligonucleotide
ugaaacaugauacugacuu

SEQ ID NO: 608765 - RNA, 19 nt, Artificial Sequence
  Description of Artificial Sequence: Synthetic oligonucleotide
aaugccugguucuaaaauc

SEQ ID NO: 608766 - RNA, 19 nt, Artificial Sequence
  Description of Artificial Sequence: Synthetic oligonucleotide
uaugauauggcuucaaaac

SEQ ID NO: 608767 - RNA, 19 nt, Artificial Sequence
  Description of Artificial Sequence: Synthetic oligonucleotide
uuaauuuaguuguauguag

SEQ ID NO: 608768 - RNA, 19 nt, Artificial Sequence
  Description of Artificial Sequence: Synthetic oligonucleotide
aaugugauuaucaucagug

SEQ ID NO: 608769 - RNA, 19 nt, Artificial Sequence
  Description of Artificial Sequence: Synthetic oligonucleotide
agguacagauaucagagcc

SEQ ID NO: 608770 - RNA, 19 nt, Artificial Sequence
  Description of Artificial Sequence: Synthetic oligonucleotide
aaaaucccaagguagcuuc

SEQ ID NO: 608771 - RNA, 19 nt, Artificial Sequence
  Description of Artificial Sequence: Synthetic oligonucleotide
auugagaaaacaaugggac

SEQ ID NO: 608772 - RNA, 19 nt, Artificial Sequence
  Description of Artificial Sequence: Synthetic oligonucleotide
uuaguuguauguagcaugg

SEQ ID NO: 608773 - RNA, 19 nt, Artificial Sequence
  Description of Artificial Sequence: Synthetic oligonucleotide
gacauuacgaaccaaacuc

SEQ ID NO: 608774 - RNA, 19 nt, Artificial Sequence
  Description of Artificial Sequence: Synthetic oligonucleotide
ucaaguaugaaacaugaua

SEQ ID NO: 608775 - RNA, 19 nt, Artificial Sequence
  Description of Artificial Sequence: Synthetic oligonucleotide
cuagauccuaucuaaaagg

SEQ ID NO: 608776 - RNA, 19 nt, Artificial Sequence
  Description of Artificial Sequence: Synthetic oligonucleotide
uaauaucgcuccuagaucc

SEQ ID NO: 608777 - RNA, 19 nt, Artificial Sequence
  Description of Artificial Sequence: Synthetic oligonucleotide
uuuaguuguauguagcaug

SEQ ID NO: 608778 - RNA, 19 nt, Artificial Sequence
  Description of Artificial Sequence: Synthetic oligonucleotide
acuaggcucacauuuaagg

SEQ ID NO: 608779 - RNA, 19 nt, Artificial Sequence
  Description of Artificial Sequence: Synthetic oligonucleotide
aaaaugauaagugggauau

SEQ ID NO: 608780 - RNA, 19 nt, Artificial Sequence
  Description of Artificial Sequence: Synthetic oligonucleotide
aucaaagcaacacuacugg

SEQ ID NO: 608781 - RNA, 19 nt, Artificial Sequence
  Description of Artificial Sequence: Synthetic oligonucleotide
aaggucugggacaugaugc

SEQ ID NO: 608782 - RNA, 19 nt, Artificial Sequence
  Description of Artificial Sequence: Synthetic oligonucleotide
cuaacaauaagcuggcuug

SEQ ID NO: 608783 - RNA, 19 nt, Artificial Sequence
  Description of Artificial Sequence: Synthetic oligonucleotide
aggguuuacagccaacagc

SEQ ID NO: 608784 - RNA, 19 nt, Artificial Sequence
  Description of Artificial Sequence: Synthetic oligonucleotide
aauaagaauggugugccag

SEQ ID NO: 608785 - RNA, 19 nt, Artificial Sequence
  Description of Artificial Sequence: Synthetic oligonucleotide
agauaucagagccaugugg

SEQ ID NO: 608786 - RNA, 19 nt, Artificial Sequence
  Description of Artificial Sequence: Synthetic oligonucleotide
uaauuuaguuguauguagc

SEQ ID NO: 608787 - RNA, 19 nt, Artificial Sequence
  Description of Artificial Sequence: Synthetic oligonucleotide
agaauugagaaaacaaugg

SEQ ID NO: 608788 - RNA, 19 nt, Artificial Sequence
  Description of Artificial Sequence: Synthetic oligonucleotide
uacuuaucgaagcagcugc

SEQ ID NO: 608789 - RNA, 19 nt, Artificial Sequence
  Description of Artificial Sequence: Synthetic oligonucleotide
cuaucuaaaaggcaaugcc

SEQ ID NO: 608790 - RNA, 19 nt, Artificial Sequence
  Description of Artificial Sequence: Synthetic oligonucleotide
gaugguaagauaaggauac

SEQ ID NO: 608791 - RNA, 19 nt, Artificial Sequence
  Description of Artificial Sequence: Synthetic oligonucleotide
auaagaauggugugccagc

SEQ ID NO: 608792 - RNA, 19 nt, Artificial Sequence
  Description of Artificial Sequence: Synthetic oligonucleotide
acuuaucccagucagacca

SEQ ID NO: 608793 - RNA, 19 nt, Artificial Sequence
  Description of Artificial Sequence: Synthetic oligonucleotide
ucagaauugagaaaacaau

SEQ ID NO: 608794 - RNA, 19 nt, Artificial Sequence
  Description of Artificial Sequence: Synthetic oligonucleotide
ugauauggcuucaaaacac

SEQ ID NO: 608795 - RNA, 19 nt, Artificial Sequence
  Description of Artificial Sequence: Synthetic oligonucleotide
auauuaauuuaguuguaug

SEQ ID NO: 608796 - RNA, 19 nt, Artificial Sequence
  Description of Artificial Sequence: Synthetic oligonucleotide
auaauaucgcuccuagauc

SEQ ID NO: 608797 - RNA, 19 nt, Artificial Sequence
  Description of Artificial Sequence: Synthetic oligonucleotide
caaaacaauaauaucgcuc

SEQ ID NO: 608798 - RNA, 19 nt, Artificial Sequence
  Description of Artificial Sequence: Synthetic oligonucleotide
aaagcuagggccacagagc

SEQ ID NO: 608799 - RNA, 19 nt, Artificial Sequence
  Description of Artificial Sequence: Synthetic oligonucleotide
aauuaaggugaguacuaug

SEQ ID NO: 608800 - RNA, 19 nt, Artificial Sequence
  Description of Artificial Sequence: Synthetic oligonucleotide
aaucaaagcaacacuacug

SEQ ID NO: 608801 - RNA, 19 nt, Artificial Sequence
  Description of Artificial Sequence: Synthetic oligonucleotide
cuuacuggguaugauaugg

SEQ ID NO: 608802 - RNA, 19 nt, Artificial Sequence
  Description of Artificial Sequence: Synthetic oligonucleotide
acuagacauagaaagaggg

SEQ ID NO: 608803 - RNA, 19 nt, Artificial Sequence
  Description of Artificial Sequence: Synthetic oligonucleotide
cuguuguucagccagacac

SEQ ID NO: 608804 - RNA, 19 nt, Artificial Sequence
  Description of Artificial Sequence: Synthetic oligonucleotide
uggucuuagaauucaauac

SEQ ID NO: 608805 - RNA, 19 nt, Artificial Sequence
  Description of Artificial Sequence: Synthetic oligonucleotide
uuacgaaccaaacucucug

SEQ ID NO: 608806 - RNA, 19 nt, Artificial Sequence
  Description of Artificial Sequence: Synthetic oligonucleotide
cuaggcucacauuuaaggg

SEQ ID NO: 608807 - RNA, 19 nt, Artificial Sequence
  Description of Artificial Sequence: Synthetic oligonucleotide
augugguacuuaucgaagc

SEQ ID NO: 608808 - RNA, 19 nt, Artificial Sequence
  Description of Artificial Sequence: Synthetic oligonucleotide
auucaauacuuucucaaca

SEQ ID NO: 608809 - RNA, 19 nt, Artificial Sequence
  Description of Artificial Sequence: Synthetic oligonucleotide
aaaggucugggacaugaug

SEQ ID NO: 608810 - RNA, 19 nt, Artificial Sequence
  Description of Artificial Sequence: Synthetic oligonucleotide
aagagucuguuccaaggag

SEQ ID NO: 608811 - RNA, 19 nt, Artificial Sequence
  Description of Artificial Sequence: Synthetic oligonucleotide
aaaugugauuaucaucagu

SEQ ID NO: 608812 - RNA, 19 nt, Artificial Sequence
  Description of Artificial Sequence: Synthetic oligonucleotide
cuuuacaccaccaguuuag

SEQ ID NO: 608813 - RNA, 19 nt, Artificial Sequence
  Description of Artificial Sequence: Synthetic oligonucleotide
uuuugggccacucaaguau

SEQ ID NO: 608814 - RNA, 19 nt, Artificial Sequence
  Description of Artificial Sequence: Synthetic oligonucleotide
aacggauggucuuagaauu

SEQ ID NO: 608815 - RNA, 19 nt, Artificial Sequence
  Description of Artificial Sequence: Synthetic oligonucleotide
gucgacaagagucuguucc

SEQ ID NO: 608816 - RNA, 19 nt, Artificial Sequence
  Description of Artificial Sequence: Synthetic oligonucleotide
acccugaucacuugcuucc

SEQ ID NO: 608817 - RNA, 19 nt, Artificial Sequence
  Description of Artificial Sequence: Synthetic oligonucleotide
aagcaauucauucgacuug

SEQ ID NO: 608818 - RNA, 19 nt, Artificial Sequence
  Description of Artificial Sequence: Synthetic oligonucleotide
augauauggcuucaaaaca

SEQ ID NO: 608819 - RNA, 19 nt, Artificial Sequence
  Description of Artificial Sequence: Synthetic oligonucleotide
uguggccccaaacacaagc

SEQ ID NO: 608820 - RNA, 19 nt, Artificial Sequence
  Description of Artificial Sequence: Synthetic oligonucleotide
ugggaucaaaagaugaggu

SEQ ID NO: 608821 - RNA, 19 nt, Artificial Sequence
  Description of Artificial Sequence: Synthetic oligonucleotide
auuaaggugaguacuaugu

SEQ ID NO: 608822 - RNA, 19 nt, Artificial Sequence
  Description of Artificial Sequence: Synthetic oligonucleotide
ugacauuacgaaccaaacu

SEQ ID NO: 608823 - RNA, 19 nt, Artificial Sequence
  Description of Artificial Sequence: Synthetic oligonucleotide
auucauucgacuuggugga

SEQ ID NO: 608824 - RNA, 19 nt, Artificial Sequence
  Description of Artificial Sequence: Synthetic oligonucleotide
ugggauaugagcugcuacc

SEQ ID NO: 608825 - RNA, 19 nt, Artificial Sequence
  Description of Artificial Sequence: Synthetic oligonucleotide
aucaguacuacuguacuag

SEQ ID NO: 608826 - RNA, 19 nt, Artificial Sequence
  Description of Artificial Sequence: Synthetic oligonucleotide
augugauuaucaucagugg

SEQ ID NO: 608827 - RNA, 19 nt, Artificial Sequence
  Description of Artificial Sequence: Synthetic oligonucleotide
ugcggugaaguucuuuggg

SEQ ID NO: 608828 - RNA, 19 nt, Artificial Sequence
  Description of Artificial Sequence: Synthetic oligonucleotide
cuauacuguaaucaaagca

SEQ ID NO: 608829 - RNA, 19 nt, Artificial Sequence
  Description of Artificial Sequence: Synthetic oligonucleotide
uaccugucaagcuuuuggg

SEQ ID NO: 608830 - RNA, 19 nt, Artificial Sequence
  Description of Artificial Sequence: Synthetic oligonucleotide
agccaauuuccucauuugg

SEQ ID NO: 608831 - RNA, 19 nt, Artificial Sequence
  Description of Artificial Sequence: Synthetic oligonucleotide
uucccaugggaauauacca

SEQ ID NO: 608832 - RNA, 19 nt, Artificial Sequence
  Description of Artificial Sequence: Synthetic oligonucleotide
ugguacuuaucgaagcagc

SEQ ID NO: 608833 - RNA, 19 nt, Artificial Sequence
  Description of Artificial Sequence: Synthetic oligonucleotide
cugcuauuagaacggaugg

SEQ ID NO: 608834 - RNA, 19 nt, Artificial Sequence
  Description of Artificial Sequence: Synthetic oligonucleotide
acauuuaagggaaaccguc

SEQ ID NO: 608835 - RNA, 19 nt, Artificial Sequence
  Description of Artificial Sequence: Synthetic oligonucleotide
ugauuaucaucaguggcag

SEQ ID NO: 608836 - RNA, 19 nt, Artificial Sequence
  Description of Artificial Sequence: Synthetic oligonucleotide
uaggucgaggccaugaggu

SEQ ID NO: 608837 - RNA, 19 nt, Artificial Sequence
  Description of Artificial Sequence: Synthetic oligonucleotide
ggaaaagguagcuugcucc

SEQ ID NO: 608838 - RNA, 19 nt, Artificial Sequence
  Description of Artificial Sequence: Synthetic oligonucleotide
acaugauacugacuuacug

SEQ ID NO: 608839 - RNA, 19 nt, Artificial Sequence
  Description of Artificial Sequence: Synthetic oligonucleotide
agcaauucauucgacuugg

SEQ ID NO: 608840 - RNA, 19 nt, Artificial Sequence
  Description of Artificial Sequence: Synthetic oligonucleotide
ucaguacuacuguacuagg

SEQ ID NO: 608841 - RNA, 19 nt, Artificial Sequence
  Description of Artificial Sequence: Synthetic oligonucleotide
ucuggcuaacaauaagcug

SEQ ID NO: 608842 - RNA, 19 nt, Artificial Sequence
  Description of Artificial Sequence: Synthetic oligonucleotide
agcaccagccuuuacacca

SEQ ID NO: 608843 - RNA, 19 nt, Artificial Sequence
  Description of Artificial Sequence: Synthetic oligonucleotide
auaagugggauaugagcug

SEQ ID NO: 608844 - RNA, 19 nt, Artificial Sequence
  Description of Artificial Sequence: Synthetic oligonucleotide
guugcauugacauuacgaa

SEQ ID NO: 608845 - RNA, 19 nt, Artificial Sequence
  Description of Artificial Sequence: Synthetic oligonucleotide
cuaagucaggcuuuggauc

SEQ ID NO: 608846 - RNA, 19 nt, Artificial Sequence
  Description of Artificial Sequence: Synthetic oligonucleotide
acgaaccaaacucucugac

SEQ ID NO: 608847 - RNA, 19 nt, Artificial Sequence
  Description of Artificial Sequence: Synthetic oligonucleotide
gacuagacauagaaagagg

SEQ ID NO: 608848 - RNA, 19 nt, Artificial Sequence
  Description of Artificial Sequence: Synthetic oligonucleotide
agcuuuugggaccccaagg

SEQ ID NO: 608849 - RNA, 19 nt, Artificial Sequence
  Description of Artificial Sequence: Synthetic oligonucleotide
guuccaaggaggcaccagg

SEQ ID NO: 608850 - RNA, 19 nt, Artificial Sequence
  Description of Artificial Sequence: Synthetic oligonucleotide
gauaagugggauaugagcu

SEQ ID NO: 608851 - RNA, 19 nt, Artificial Sequence
  Description of Artificial Sequence: Synthetic oligonucleotide
acuugagaccuucugucag

SEQ ID NO: 608852 - RNA, 19 nt, Artificial Sequence
  Description of Artificial Sequence: Synthetic oligonucleotide
uuacaccaccaguuuaggg

SEQ ID NO: 608853 - RNA, 19 nt, Artificial Sequence
  Description of Artificial Sequence: Synthetic oligonucleotide
gguagcuuccaauuuaaug

SEQ ID NO: 608854 - RNA, 19 nt, Artificial Sequence
  Description of Artificial Sequence: Synthetic oligonucleotide
ucugaaucuaagucaggcu

SEQ ID NO: 608855 - RNA, 19 nt, Artificial Sequence
  Description of Artificial Sequence: Synthetic oligonucleotide
gauccuaucuaaaaggcaa

SEQ ID NO: 608856 - RNA, 19 nt, Artificial Sequence
  Description of Artificial Sequence: Synthetic oligonucleotide
gaaaccgucauaagcuugc

SEQ ID NO: 608857 - RNA, 19 nt, Artificial Sequence
  Description of Artificial Sequence: Synthetic oligonucleotide
acaagcaauucauucgacu

SEQ ID NO: 608858 - RNA, 19 nt, Artificial Sequence
  Description of Artificial Sequence: Synthetic oligonucleotide
uuagcuuuuguaguugggu

SEQ ID NO: 608859 - RNA, 19 nt, Artificial Sequence
  Description of Artificial Sequence: Synthetic oligonucleotide
ucccauuggacagaguugc

SEQ ID NO: 608860 - RNA, 19 nt, Artificial Sequence
  Description of Artificial Sequence: Synthetic oligonucleotide
cuacuuaucccagucagac

SEQ ID NO: 608861 - RNA, 19 nt, Artificial Sequence
  Description of Artificial Sequence: Synthetic oligonucleotide
auaggucgaggccaugagg

SEQ ID NO: 608862 - RNA, 19 nt, Artificial Sequence
  Description of Artificial Sequence: Synthetic oligonucleotide
ucuaggacacauccugucu

SEQ ID NO: 608863 - RNA, 19 nt, Artificial Sequence
  Description of Artificial Sequence: Synthetic oligonucleotide
cuacuggaaagccucaaac

SEQ ID NO: 608864 - RNA, 19 nt, Artificial Sequence
  Description of Artificial Sequence: Synthetic oligonucleotide
augaagaccuuacacccug

SEQ ID NO: 608865 - RNA, 19 nt, Artificial Sequence
  Description of Artificial Sequence: Synthetic oligonucleotide
aggauaaugcaggcuauac

SEQ ID NO: 608866 - RNA, 19 nt, Artificial Sequence
  Description of Artificial Sequence: Synthetic oligonucleotide
ucaggauugggccuucccu

SEQ ID NO: 608867 - RNA, 19 nt, Artificial Sequence
  Description of Artificial Sequence: Synthetic oligonucleotide
cuucaguuccgauggacag

SEQ ID NO: 608868 - RNA, 19 nt, Artificial Sequence
  Description of Artificial Sequence: Synthetic oligonucleotide
agccucaaacuagaguucc

SEQ ID NO: 608869 - RNA, 19 nt, Artificial Sequence
  Description of Artificial Sequence: Synthetic oligonucleotide
aaguugcauugacauuacg

SEQ ID NO: 608870 - RNA, 19 nt, Artificial Sequence
  Description of Artificial Sequence: Synthetic oligonucleotide
uugcauugacauuacgaac

SEQ ID NO: 608871 - RNA, 19 nt, Artificial Sequence
  Description of Artificial Sequence: Synthetic oligonucleotide
ucaguuccgauggacaggc

SEQ ID NO: 608872 - RNA, 19 nt, Artificial Sequence
  Description of Artificial Sequence: Synthetic oligonucleotide
aguugcauugacauuacga

SEQ ID NO: 608873 - RNA, 19 nt, Artificial Sequence
  Description of Artificial Sequence: Synthetic oligonucleotide
cucagaauugagaaaacaa

SEQ ID NO: 608874 - RNA, 19 nt, Artificial Sequence
  Description of Artificial Sequence: Synthetic oligonucleotide
auggucuuagaauucaaua

SEQ ID NO: 608875 - RNA, 19 nt, Artificial Sequence
  Description of Artificial Sequence: Synthetic oligonucleotide
aaauaggucgaggccauga

SEQ ID NO: 608876 - RNA, 19 nt, Artificial Sequence
  Description of Artificial Sequence: Synthetic oligonucleotide
ugcuauggcagucacugau

SEQ ID NO: 608877 - RNA, 19 nt, Artificial Sequence
  Description of Artificial Sequence: Synthetic oligonucleotide
uuugggaccccaaggauuu

SEQ ID NO: 608878 - RNA, 19 nt, Artificial Sequence
  Description of Artificial Sequence: Synthetic oligonucleotide
uuuugggaccccaaggauu

SEQ ID NO: 608879 - RNA, 19 nt, Artificial Sequence
  Description of Artificial Sequence: Synthetic oligonucleotide
ggguuuacagccaacagcc

SEQ ID NO: 608880 - RNA, 19 nt, Artificial Sequence
  Description of Artificial Sequence: Synthetic oligonucleotide
agaguugcccaccccagag

SEQ ID NO: 608881 - RNA, 19 nt, Artificial Sequence
  Description of Artificial Sequence: Synthetic oligonucleotide
gcuaccagcgcaauuaagg

SEQ ID NO: 608882 - RNA, 19 nt, Artificial Sequence
  Description of Artificial Sequence: Synthetic oligonucleotide
agaacggauggucuuagaa

SEQ ID NO: 608883 - RNA, 19 nt, Artificial Sequence
  Description of Artificial Sequence: Synthetic oligonucleotide
uaagugggauaugagcugc

SEQ ID NO: 608884 - RNA, 19 nt, Artificial Sequence
  Description of Artificial Sequence: Synthetic oligonucleotide
ugaaaaugauaagugggau

SEQ ID NO: 608885 - RNA, 19 nt, Artificial Sequence
  Description of Artificial Sequence: Synthetic oligonucleotide
uuugggccacucaaguaug

SEQ ID NO: 608886 - RNA, 19 nt, Artificial Sequence
  Description of Artificial Sequence: Synthetic oligonucleotide
uguuguucagccagacacu

SEQ ID NO: 608887 - RNA, 19 nt, Artificial Sequence
  Description of Artificial Sequence: Synthetic oligonucleotide
auuuaagggaaaccgucau

SEQ ID NO: 608888 - RNA, 19 nt, Artificial Sequence
  Description of Artificial Sequence: Synthetic oligonucleotide
uuacuggguaugauauggc

SEQ ID NO: 608889 - RNA, 19 nt, Artificial Sequence
  Description of Artificial Sequence: Synthetic oligonucleotide
ugaguacuaugucuccucu

SEQ ID NO: 608890 - RNA, 19 nt, Artificial Sequence
  Description of Artificial Sequence: Synthetic oligonucleotide
accgucauaagcuugccua

SEQ ID NO: 608891 - RNA, 19 nt, Artificial Sequence
  Description of Artificial Sequence: Synthetic oligonucleotide
aaaccgucauaagcuugcc

SEQ ID NO: 608892 - RNA, 19 nt, Artificial Sequence
  Description of Artificial Sequence: Synthetic oligonucleotide
ucagaccauccagagaugc

SEQ ID NO: 608893 - RNA, 19 nt, Artificial Sequence
  Description of Artificial Sequence: Synthetic oligonucleotide
cauucgacuugguggaagc

SEQ ID NO: 608894 - RNA, 19 nt, Artificial Sequence
  Description of Artificial Sequence: Synthetic oligonucleotide
uguuuagcuuuuguaguug

SEQ ID NO: 608895 - RNA, 19 nt, Artificial Sequence
  Description of Artificial Sequence: Synthetic oligonucleotide
agaugcaaugccugguucu

SEQ ID NO: 608896 - RNA, 19 nt, Artificial Sequence
  Description of Artificial Sequence: Synthetic oligonucleotide
caauucauucgacuuggug

SEQ ID NO: 608897 - RNA, 19 nt, Artificial Sequence
  Description of Artificial Sequence: Synthetic oligonucleotide
auauggcuucaaaacacac

SEQ ID NO: 608898 - RNA, 19 nt, Artificial Sequence
  Description of Artificial Sequence: Synthetic oligonucleotide
uacuggguaugauauggcu

SEQ ID NO: 608899 - RNA, 19 nt, Artificial Sequence
  Description of Artificial Sequence: Synthetic oligonucleotide
ucgacuugguggaagcacu

SEQ ID NO: 608900 - RNA, 19 nt, Artificial Sequence
  Description of Artificial Sequence: Synthetic oligonucleotide
ugguuuugggccacucaag

SEQ ID NO: 608901 - RNA, 19 nt, Artificial Sequence
  Description of Artificial Sequence: Synthetic oligonucleotide
uacuacuguacuaggcuuc

SEQ ID NO: 608902 - RNA, 19 nt, Artificial Sequence
  Description of Artificial Sequence: Synthetic oligonucleotide
uaucccagucagaccaucc

SEQ ID NO: 608903 - RNA, 19 nt, Artificial Sequence
  Description of Artificial Sequence: Synthetic oligonucleotide
aucaguggcagcaauggug

SEQ ID NO: 608904 - RNA, 19 nt, Artificial Sequence
  Description of Artificial Sequence: Synthetic oligonucleotide
uuuaagggaaaccgucaua

SEQ ID NO: 608905 - RNA, 19 nt, Artificial Sequence
  Description of Artificial Sequence: Synthetic oligonucleotide
ugacuuacuggguaugaua

SEQ ID NO: 608906 - RNA, 19 nt, Artificial Sequence
  Description of Artificial Sequence: Synthetic oligonucleotide
ugggaauauaccagagaaa

SEQ ID NO: 608907 - RNA, 19 nt, Artificial Sequence
  Description of Artificial Sequence: Synthetic oligonucleotide
uaccagcgcaauuaaggug

SEQ ID NO: 608908 - RNA, 19 nt, Artificial Sequence
  Description of Artificial Sequence: Synthetic oligonucleotide
accagcgcaauuaagguga

SEQ ID NO: 608909 - RNA, 19 nt, Artificial Sequence
  Description of Artificial Sequence: Synthetic oligonucleotide
cauuacgaaccaaacucuc

SEQ ID NO: 608910 - RNA, 19 nt, Artificial Sequence
  Description of Artificial Sequence: Synthetic oligonucleotide
gacagaguugcccacccca

SEQ ID NO: 608911 - RNA, 19 nt, Artificial Sequence
  Description of Artificial Sequence: Synthetic oligonucleotide
uuguuuagcuuuuguaguu

SEQ ID NO: 608912 - RNA, 19 nt, Artificial Sequence
  Description of Artificial Sequence: Synthetic oligonucleotide
uuagaacggauggucuuag

SEQ ID NO: 608913 - RNA, 19 nt, Artificial Sequence
  Description of Artificial Sequence: Synthetic oligonucleotide
gcuauguggacucaggaga

SEQ ID NO: 608914 - RNA, 19 nt, Artificial Sequence
  Description of Artificial Sequence: Synthetic oligonucleotide
agguagguccuccugaaau

SEQ ID NO: 608915 - RNA, 19 nt, Artificial Sequence
  Description of Artificial Sequence: Synthetic oligonucleotide
uuucuccugcacagguagg

SEQ ID NO: 608916 - RNA, 19 nt, Artificial Sequence
  Description of Artificial Sequence: Synthetic oligonucleotide
uggaaaagguagcuugcuc

SEQ ID NO: 608917 - RNA, 19 nt, Artificial Sequence
  Description of Artificial Sequence: Synthetic oligonucleotide
ccuagauccuaucuaaaag

SEQ ID NO: 608918 - RNA, 19 nt, Artificial Sequence
  Description of Artificial Sequence: Synthetic oligonucleotide
uacugacuagacauagaaa

SEQ ID NO: 608919 - RNA, 19 nt, Artificial Sequence
  Description of Artificial Sequence: Synthetic oligonucleotide
cauuuaagggaaaccguca

SEQ ID NO: 608920 - RNA, 19 nt, Artificial Sequence
  Description of Artificial Sequence: Synthetic oligonucleotide
uacgaaccaaacucucuga

SEQ ID NO: 608921 - RNA, 19 nt, Artificial Sequence
  Description of Artificial Sequence: Synthetic oligonucleotide
uccuaucuaaaaggcaaug

SEQ ID NO: 608922 - RNA, 19 nt, Artificial Sequence
  Description of Artificial Sequence: Synthetic oligonucleotide
agugauuacaucaguacua

SEQ ID NO: 608923 - RNA, 19 nt, Artificial Sequence
  Description of Artificial Sequence: Synthetic oligonucleotide
aggaccuugaaaggccagc

SEQ ID NO: 608924 - RNA, 19 nt, Artificial Sequence
  Description of Artificial Sequence: Synthetic oligonucleotide
ggcaagaaaggucugggac

SEQ ID NO: 608925 - RNA, 19 nt, Artificial Sequence
  Description of Artificial Sequence: Synthetic oligonucleotide
ugauacugacuuacugggu

SEQ ID NO: 608926 - RNA, 19 nt, Artificial Sequence
  Description of Artificial Sequence: Synthetic oligonucleotide
ggcuacuuaucccagucag

SEQ ID NO: 608927 - RNA, 19 nt, Artificial Sequence
  Description of Artificial Sequence: Synthetic oligonucleotide
ggccgcugcuauuagaacg

SEQ ID NO: 608928 - RNA, 19 nt, Artificial Sequence
  Description of Artificial Sequence: Synthetic oligonucleotide
agcgcaauuaaggugagua

SEQ ID NO: 608929 - RNA, 19 nt, Artificial Sequence
  Description of Artificial Sequence: Synthetic oligonucleotide
caugcucaccuagagaaug

SEQ ID NO: 608930 - RNA, 19 nt, Artificial Sequence
  Description of Artificial Sequence: Synthetic oligonucleotide
aagccucaaacuagaguuc

SEQ ID NO: 608931 - RNA, 19 nt, Artificial Sequence
  Description of Artificial Sequence: Synthetic oligonucleotide
ucauucgacuugguggaag

SEQ ID NO: 608932 - RNA, 19 nt, Artificial Sequence
  Description of Artificial Sequence: Synthetic oligonucleotide
uucuaggacacauccuguc

SEQ ID NO: 608933 - RNA, 19 nt, Artificial Sequence
  Description of Artificial Sequence: Synthetic oligonucleotide
aaaugauaagugggauaug

SEQ ID NO: 608934 - RNA, 19 nt, Artificial Sequence
  Description of Artificial Sequence: Synthetic oligonucleotide
auuuaguuguauguagcau

SEQ ID NO: 608935 - RNA, 19 nt, Artificial Sequence
  Description of Artificial Sequence: Synthetic oligonucleotide
cuuguuuagcuuuuguagu

SEQ ID NO: 608936 - RNA, 19 nt, Artificial Sequence
  Description of Artificial Sequence: Synthetic oligonucleotide
ugccugguucuaaaauccc

SEQ ID NO: 608937 - RNA, 19 nt, Artificial Sequence
  Description of Artificial Sequence: Synthetic oligonucleotide
agaccuucugucaggauug

SEQ ID NO: 608938 - RNA, 19 nt, Artificial Sequence
  Description of Artificial Sequence: Synthetic oligonucleotide
acuuacuggguaugauaug

SEQ ID NO: 608939 - RNA, 19 nt, Artificial Sequence
  Description of Artificial Sequence: Synthetic oligonucleotide
acauuacgaaccaaacucu

SEQ ID NO: 608940 - RNA, 19 nt, Artificial Sequence
  Description of Artificial Sequence: Synthetic oligonucleotide
uuuagggagauggcaaaau

SEQ ID NO: 608941 - RNA, 19 nt, Artificial Sequence
  Description of Artificial Sequence: Synthetic oligonucleotide
aaccgucauaagcuugccu

SEQ ID NO: 608942 - RNA, 19 nt, Artificial Sequence
  Description of Artificial Sequence: Synthetic oligonucleotide
cugaucacuugcuucccac

SEQ ID NO: 608943 - RNA, 19 nt, Artificial Sequence
  Description of Artificial Sequence: Synthetic oligonucleotide
gguucuaaaaucccaaggu

SEQ ID NO: 608944 - RNA, 19 nt, Artificial Sequence
  Description of Artificial Sequence: Synthetic oligonucleotide
ugcuaccagcgcaauuaag

SEQ ID NO: 608945 - RNA, 19 nt, Artificial Sequence
  Description of Artificial Sequence: Synthetic oligonucleotide
cuuuccagcaucuggcuaa

SEQ ID NO: 608946 - RNA, 19 nt, Artificial Sequence
  Description of Artificial Sequence: Synthetic oligonucleotide
aacaugauacugacuuacu

SEQ ID NO: 608947 - RNA, 19 nt, Artificial Sequence
  Description of Artificial Sequence: Synthetic oligonucleotide
acggcaagaaaggucuggg

SEQ ID NO: 608948 - RNA, 19 nt, Artificial Sequence
  Description of Artificial Sequence: Synthetic oligonucleotide
guacuuaucgaagcagcug

SEQ ID NO: 608949 - RNA, 19 nt, Artificial Sequence
  Description of Artificial Sequence: Synthetic oligonucleotide
uucgacuugguggaagcac

SEQ ID NO: 608950 - RNA, 19 nt, Artificial Sequence
  Description of Artificial Sequence: Synthetic oligonucleotide
ugcacucgguaagugugcg

SEQ ID NO: 608951 - RNA, 19 nt, Artificial Sequence
  Description of Artificial Sequence: Synthetic oligonucleotide
aacaaucccauuggacaga

SEQ ID NO: 608952 - RNA, 19 nt, Artificial Sequence
  Description of Artificial Sequence: Synthetic oligonucleotide
auuacgaaccaaacucucu

SEQ ID NO: 608953 - RNA, 19 nt, Artificial Sequence
  Description of Artificial Sequence: Synthetic oligonucleotide
ucggugggagucauugcca

SEQ ID NO: 608954 - RNA, 19 nt, Artificial Sequence
  Description of Artificial Sequence: Synthetic oligonucleotide
cuugcuccucucaacaaga

SEQ ID NO: 608955 - RNA, 19 nt, Artificial Sequence
  Description of Artificial Sequence: Synthetic oligonucleotide
gacccugaucacuugcuuc

SEQ ID NO: 608956 - RNA, 19 nt, Artificial Sequence
  Description of Artificial Sequence: Synthetic oligonucleotide
ggcuauguggacucaggag

SEQ ID NO: 608957 - RNA, 19 nt, Artificial Sequence
  Description of Artificial Sequence: Synthetic oligonucleotide
agauaaggauacaggaccu

SEQ ID NO: 608958 - RNA, 19 nt, Artificial Sequence
  Description of Artificial Sequence: Synthetic oligonucleotide
ugcuauuagaacggauggu

SEQ ID NO: 608959 - RNA, 19 nt, Artificial Sequence
  Description of Artificial Sequence: Synthetic oligonucleotide
auacugacuuacuggguau

SEQ ID NO: 608960 - RNA, 19 nt, Artificial Sequence
  Description of Artificial Sequence: Synthetic oligonucleotide
ugggaccccaaggauuugg

SEQ ID NO: 608961 - RNA, 19 nt, Artificial Sequence
  Description of Artificial Sequence: Synthetic oligonucleotide
aggaugugguacuuaucga

SEQ ID NO: 608962 - RNA, 19 nt, Artificial Sequence
  Description of Artificial Sequence: Synthetic oligonucleotide
ugccacucuccaaaugcac

SEQ ID NO: 608963 - RNA, 19 nt, Artificial Sequence
  Description of Artificial Sequence: Synthetic oligonucleotide
acuacuggaaagccucaaa

SEQ ID NO: 608964 - RNA, 19 nt, Artificial Sequence
  Description of Artificial Sequence: Synthetic oligonucleotide
acaaucccauuggacagag

SEQ ID NO: 608965 - RNA, 19 nt, Artificial Sequence
  Description of Artificial Sequence: Synthetic oligonucleotide
gagaugcaaugccugguuc

SEQ ID NO: 608966 - RNA, 19 nt, Artificial Sequence
  Description of Artificial Sequence: Synthetic oligonucleotide
aggauugggccuucccuug

SEQ ID NO: 608967 - RNA, 19 nt, Artificial Sequence
  Description of Artificial Sequence: Synthetic oligonucleotide
gugaguacuaugucuccuc

SEQ ID NO: 608968 - RNA, 19 nt, Artificial Sequence
  Description of Artificial Sequence: Synthetic oligonucleotide
ggucuuagaauucaauacu

SEQ ID NO: 608969 - RNA, 19 nt, Artificial Sequence
  Description of Artificial Sequence: Synthetic oligonucleotide
gaacggauggucuuagaau

SEQ ID NO: 608970 - RNA, 19 nt, Artificial Sequence
  Description of Artificial Sequence: Synthetic oligonucleotide
gugggauaugagcugcuac

SEQ ID NO: 608971 - RNA, 19 nt, Artificial Sequence
  Description of Artificial Sequence: Synthetic oligonucleotide
ggacacauccugucuuugg

SEQ ID NO: 608972 - RNA, 19 nt, Artificial Sequence
  Description of Artificial Sequence: Synthetic oligonucleotide
ucgcuccuagauccuaucu

SEQ ID NO: 608973 - RNA, 19 nt, Artificial Sequence
  Description of Artificial Sequence: Synthetic oligonucleotide
cacuaggcucacauuuaag

SEQ ID NO: 608974 - RNA, 19 nt, Artificial Sequence
  Description of Artificial Sequence: Synthetic oligonucleotide
gcaagaaaggucugggaca

SEQ ID NO: 608975 - RNA, 19 nt, Artificial Sequence
  Description of Artificial Sequence: Synthetic oligonucleotide
augggguuuccucccagca

SEQ ID NO: 608976 - RNA, 19 nt, Artificial Sequence
  Description of Artificial Sequence: Synthetic oligonucleotide
uguuccaaggaggcaccag

SEQ ID NO: 608977 - RNA, 19 nt, Artificial Sequence
  Description of Artificial Sequence: Synthetic oligonucleotide
ccuaucuaaaaggcaaugc

SEQ ID NO: 608978 - RNA, 19 nt, Artificial Sequence
  Description of Artificial Sequence: Synthetic oligonucleotide
augcaggcuauacuguaau

SEQ ID NO: 608979 - RNA, 19 nt, Artificial Sequence
  Description of Artificial Sequence: Synthetic oligonucleotide
cacaagcaauucauucgac

SEQ ID NO: 608980 - RNA, 19 nt, Artificial Sequence
  Description of Artificial Sequence: Synthetic oligonucleotide
uauggcagucacugaugac

SEQ ID NO: 608981 - RNA, 19 nt, Artificial Sequence
  Description of Artificial Sequence: Synthetic oligonucleotide
ggaugugguacuuaucgaa

SEQ ID NO: 608982 - RNA, 19 nt, Artificial Sequence
  Description of Artificial Sequence: Synthetic oligonucleotide
uaucgcuccuagauccuau

SEQ ID NO: 608983 - RNA, 19 nt, Artificial Sequence
  Description of Artificial Sequence: Synthetic oligonucleotide
gacuuacuggguaugauau

SEQ ID NO: 608984 - RNA, 19 nt, Artificial Sequence
  Description of Artificial Sequence: Synthetic oligonucleotide
caggcuauacuguaaucaa

SEQ ID NO: 608985 - RNA, 19 nt, Artificial Sequence
  Description of Artificial Sequence: Synthetic oligonucleotide
ggauaugagcugcuaccag

SEQ ID NO: 608986 - RNA, 19 nt, Artificial Sequence
  Description of Artificial Sequence: Synthetic oligonucleotide
auuagaacggauggucuua

SEQ ID NO: 608987 - RNA, 19 nt, Artificial Sequence
  Description of Artificial Sequence: Synthetic oligonucleotide
gagaccuucugucaggauu

SEQ ID NO: 608988 - RNA, 19 nt, Artificial Sequence
  Description of Artificial Sequence: Synthetic oligonucleotide
cacggcaagaaaggucugg

SEQ ID NO: 608989 - RNA, 19 nt, Artificial Sequence
  Description of Artificial Sequence: Synthetic oligonucleotide
gaacaaagccaggaaagcu

SEQ ID NO: 608990 - RNA, 19 nt, Artificial Sequence
  Description of Artificial Sequence: Synthetic oligonucleotide
aaaauaggucgaggccaug

SEQ ID NO: 608991 - RNA, 19 nt, Artificial Sequence
  Description of Artificial Sequence: Synthetic oligonucleotide
uugggccacucaaguauga

SEQ ID NO: 608992 - RNA, 19 nt, Artificial Sequence
  Description of Artificial Sequence: Synthetic oligonucleotide
ugggucgacaagagucugu

SEQ ID NO: 608993 - RNA, 19 nt, Artificial Sequence
  Description of Artificial Sequence: Synthetic oligonucleotide
cugguuuugggccacucaa

SEQ ID NO: 608994 - RNA, 19 nt, Artificial Sequence
  Description of Artificial Sequence: Synthetic oligonucleotide
uccgugucugcaagugaac

SEQ ID NO: 608995 - RNA, 19 nt, Artificial Sequence
  Description of Artificial Sequence: Synthetic oligonucleotide
acugacuuacuggguauga

SEQ ID NO: 608996 - RNA, 19 nt, Artificial Sequence
  Description of Artificial Sequence: Synthetic oligonucleotide
gggagucauugccaggcgg

SEQ ID NO: 608997 - RNA, 19 nt, Artificial Sequence
  Description of Artificial Sequence: Synthetic oligonucleotide
caagcaauucauucgacuu

SEQ ID NO: 608998 - RNA, 19 nt, Artificial Sequence
  Description of Artificial Sequence: Synthetic oligonucleotide
ugcaggcuauacuguaauc

SEQ ID NO: 608999 - RNA, 19 nt, Artificial Sequence
  Description of Artificial Sequence: Synthetic oligonucleotide
ucucggugggagucauugc

SEQ ID NO: 609000 - RNA, 19 nt, Artificial Sequence
  Description of Artificial Sequence: Synthetic oligonucleotide
acggauggucuuagaauuc

SEQ ID NO: 609001 - RNA, 19 nt, Artificial Sequence
  Description of Artificial Sequence: Synthetic oligonucleotide
ugcacagguagguccuccu

SEQ ID NO: 609002 - RNA, 19 nt, Artificial Sequence
  Description of Artificial Sequence: Synthetic oligonucleotide
caauauuaauuuaguugua

SEQ ID NO: 609003 - RNA, 19 nt, Artificial Sequence
  Description of Artificial Sequence: Synthetic oligonucleotide
gucaggauugggccuuccc

SEQ ID NO: 609004 - RNA, 19 nt, Artificial Sequence
  Description of Artificial Sequence: Synthetic oligonucleotide
gcaggcuauacuguaauca

SEQ ID NO: 609005 - RNA, 19 nt, Artificial Sequence
  Description of Artificial Sequence: Synthetic oligonucleotide
agggcuauguggacucagg

SEQ ID NO: 609006 - RNA, 19 nt, Artificial Sequence
  Description of Artificial Sequence: Synthetic oligonucleotide
uugcuccucucaacaagaa

SEQ ID NO: 609007 - RNA, 19 nt, Artificial Sequence
  Description of Artificial Sequence: Synthetic oligonucleotide
aucccauuggacagaguug

SEQ ID NO: 609008 - RNA, 19 nt, Artificial Sequence
  Description of Artificial Sequence: Synthetic oligonucleotide
agccuuuacaccaccaguu

SEQ ID NO: 609009 - RNA, 19 nt, Artificial Sequence
  Description of Artificial Sequence: Synthetic oligonucleotide
gcaacacuacuggaaagcc

SEQ ID NO: 609010 - RNA, 19 nt, Artificial Sequence
  Description of Artificial Sequence: Synthetic oligonucleotide
ugcucaccuagagaaugac

SEQ ID NO: 609011 - RNA, 19 nt, Artificial Sequence
  Description of Artificial Sequence: Synthetic oligonucleotide
gguaugauauggcuucaaa

SEQ ID NO: 609012 - RNA, 19 nt, Artificial Sequence
  Description of Artificial Sequence: Synthetic oligonucleotide
uagaacggauggucuuaga

SEQ ID NO: 609013 - RNA, 19 nt, Artificial Sequence
  Description of Artificial Sequence: Synthetic oligonucleotide
gccgcugcuauuagaacgg

SEQ ID NO: 609014 - RNA, 19 nt, Artificial Sequence
  Description of Artificial Sequence: Synthetic oligonucleotide
acucgguaagugugcggug

SEQ ID NO: 609015 - RNA, 19 nt, Artificial Sequence
  Description of Artificial Sequence: Synthetic oligonucleotide
gagggcuauguggacucag

SEQ ID NO: 609016 - RNA, 19 nt, Artificial Sequence
  Description of Artificial Sequence: Synthetic oligonucleotide
cuccgugucugcaagugaa

SEQ ID NO: 609017 - RNA, 19 nt, Artificial Sequence
  Description of Artificial Sequence: Synthetic oligonucleotide
cuaccagcgcaauuaaggu

SEQ ID NO: 609018 - RNA, 19 nt, Artificial Sequence
  Description of Artificial Sequence: Synthetic oligonucleotide
caauaagaauggugugcca

SEQ ID NO: 609019 - RNA, 19 nt, Artificial Sequence
  Description of Artificial Sequence: Synthetic oligonucleotide
uggucucucggugggaguc

SEQ ID NO: 609020 - RNA, 19 nt, Artificial Sequence
  Description of Artificial Sequence: Synthetic oligonucleotide
ccaacagccagaccccuag

SEQ ID NO: 609021 - RNA, 19 nt, Artificial Sequence
  Description of Artificial Sequence: Synthetic oligonucleotide
uugcuauggcagucacuga

SEQ ID NO: 609022 - RNA, 19 nt, Artificial Sequence
  Description of Artificial Sequence: Synthetic oligonucleotide
guuuugggccacucaagua

SEQ ID NO: 609023 - RNA, 19 nt, Artificial Sequence
  Description of Artificial Sequence: Synthetic oligonucleotide
ggaaaccgucauaagcuug

SEQ ID NO: 609024 - RNA, 19 nt, Artificial Sequence
  Description of Artificial Sequence: Synthetic oligonucleotide
uaguuguauguagcaugga

SEQ ID NO: 609025 - RNA, 19 nt, Artificial Sequence
  Description of Artificial Sequence: Synthetic oligonucleotide
uuaucccagucagaccauc

SEQ ID NO: 609026 - RNA, 19 nt, Artificial Sequence
  Description of Artificial Sequence: Synthetic oligonucleotide
ccaguccugaagaaaacca

SEQ ID NO: 609027 - RNA, 19 nt, Artificial Sequence
  Description of Artificial Sequence: Synthetic oligonucleotide
acaggccgcugcuauuaga

SEQ ID NO: 609028 - RNA, 19 nt, Artificial Sequence
  Description of Artificial Sequence: Synthetic oligonucleotide
accauuuccccaggcaaaa

SEQ ID NO: 609029 - RNA, 19 nt, Artificial Sequence
  Description of Artificial Sequence: Synthetic oligonucleotide
agcuagggccacagagccc

SEQ ID NO: 609030 - RNA, 19 nt, Artificial Sequence
  Description of Artificial Sequence: Synthetic oligonucleotide
gauggucuuagaauucaau

SEQ ID NO: 609031 - RNA, 19 nt, Artificial Sequence
  Description of Artificial Sequence: Synthetic oligonucleotide
acuuaucgaagcagcugcu

SEQ ID NO: 609032 - RNA, 19 nt, Artificial Sequence
  Description of Artificial Sequence: Synthetic oligonucleotide
gcauugacauuacgaacca

SEQ ID NO: 609033 - RNA, 19 nt, Artificial Sequence
  Description of Artificial Sequence: Synthetic oligonucleotide
agacccugaucacuugcuu

SEQ ID NO: 609034 - RNA, 19 nt, Artificial Sequence
  Description of Artificial Sequence: Synthetic oligonucleotide
accccagagaugggguuuc

SEQ ID NO: 609035 - RNA, 19 nt, Artificial Sequence
  Description of Artificial Sequence: Synthetic oligonucleotide
acaggaccuugaaaggcca

SEQ ID NO: 609036 - RNA, 19 nt, Artificial Sequence
  Description of Artificial Sequence: Synthetic oligonucleotide
gcuaacaauaagcuggcuu

SEQ ID NO: 609037 - RNA, 19 nt, Artificial Sequence
  Description of Artificial Sequence: Synthetic oligonucleotide
auucgacuugguggaagca

SEQ ID NO: 609038 - RNA, 19 nt, Artificial Sequence
  Description of Artificial Sequence: Synthetic oligonucleotide
ggggcuacuuaucccaguc

SEQ ID NO: 609039 - RNA, 19 nt, Artificial Sequence
  Description of Artificial Sequence: Synthetic oligonucleotide
gaccuuacacccugccucu

SEQ ID NO: 609040 - RNA, 19 nt, Artificial Sequence
  Description of Artificial Sequence: Synthetic oligonucleotide
gguuuugggccacucaagu

SEQ ID NO: 609041 - RNA, 19 nt, Artificial Sequence
  Description of Artificial Sequence: Synthetic oligonucleotide
uucuaccugucaagcuuuu

SEQ ID NO: 609042 - RNA, 19 nt, Artificial Sequence
  Description of Artificial Sequence: Synthetic oligonucleotide
gcgcaauuaaggugaguac

SEQ ID NO: 609043 - RNA, 19 nt, Artificial Sequence
  Description of Artificial Sequence: Synthetic oligonucleotide
cucgguaagugugcgguga

SEQ ID NO: 609044 - RNA, 19 nt, Artificial Sequence
  Description of Artificial Sequence: Synthetic oligonucleotide
auccuaucuaaaaggcaau

SEQ ID NO: 609045 - RNA, 19 nt, Artificial Sequence
  Description of Artificial Sequence: Synthetic oligonucleotide
ccgucauaagcuugccuag

SEQ ID NO: 609046 - RNA, 19 nt, Artificial Sequence
  Description of Artificial Sequence: Synthetic oligonucleotide
cuagaguucccaugggaau

SEQ ID NO: 609047 - RNA, 19 nt, Artificial Sequence
  Description of Artificial Sequence: Synthetic oligonucleotide
guacuacuguacuaggcuu

SEQ ID NO: 609048 - RNA, 19 nt, Artificial Sequence
  Description of Artificial Sequence: Synthetic oligonucleotide
ggaaagccucaaacuagag

SEQ ID NO: 609049 - RNA, 19 nt, Artificial Sequence
  Description of Artificial Sequence: Synthetic oligonucleotide
ccaagcagaagcagugcuc

SEQ ID NO: 609050 - RNA, 19 nt, Artificial Sequence
  Description of Artificial Sequence: Synthetic oligonucleotide
ucacccuuuccagcaucug

SEQ ID NO: 609051 - RNA, 19 nt, Artificial Sequence
  Description of Artificial Sequence: Synthetic oligonucleotide
caccauuuccccaggcaaa

SEQ ID NO: 609052 - RNA, 19 nt, Artificial Sequence
  Description of Artificial Sequence: Synthetic oligonucleotide
gguagguccuccugaaaua

SEQ ID NO: 609053 - RNA, 19 nt, Artificial Sequence
  Description of Artificial Sequence: Synthetic oligonucleotide
gguucuaccugucaagcuu

SEQ ID NO: 609054 - RNA, 19 nt, Artificial Sequence
  Description of Artificial Sequence: Synthetic oligonucleotide
gggauaugagcugcuacca

SEQ ID NO: 609055 - RNA, 19 nt, Artificial Sequence
  Description of Artificial Sequence: Synthetic oligonucleotide
ugagaccuucugucaggau

SEQ ID NO: 609056 - RNA, 19 nt, Artificial Sequence
  Description of Artificial Sequence: Synthetic oligonucleotide
ugggccacucaaguaugaa

SEQ ID NO: 609057 - RNA, 19 nt, Artificial Sequence
  Description of Artificial Sequence: Synthetic oligonucleotide
ggucgaggccaugagguac

SEQ ID NO: 609058 - RNA, 19 nt, Artificial Sequence
  Description of Artificial Sequence: Synthetic oligonucleotide
gcuugcagccaauuuccuc

SEQ ID NO: 609059 - RNA, 19 nt, Artificial Sequence
  Description of Artificial Sequence: Synthetic oligonucleotide
gcaauuaaggugaguacua

SEQ ID NO: 609060 - RNA, 19 nt, Artificial Sequence
  Description of Artificial Sequence: Synthetic oligonucleotide
uuccgauggacaggccgcu

SEQ ID NO: 609061 - RNA, 19 nt, Artificial Sequence
  Description of Artificial Sequence: Synthetic oligonucleotide
cuucuaggacacauccugu

SEQ ID NO: 609062 - RNA, 19 nt, Artificial Sequence
  Description of Artificial Sequence: Synthetic oligonucleotide
guaagugugcggugaaguu

SEQ ID NO: 609063 - RNA, 19 nt, Artificial Sequence
  Description of Artificial Sequence: Synthetic oligonucleotide
ccugguucuaaaaucccaa

SEQ ID NO: 609064 - RNA, 19 nt, Artificial Sequence
  Description of Artificial Sequence: Synthetic oligonucleotide
gaggauaaugcaggcuaua

SEQ ID NO: 609065 - RNA, 19 nt, Artificial Sequence
  Description of Artificial Sequence: Synthetic oligonucleotide
cuccuagauccuaucuaaa

SEQ ID NO: 609066 - RNA, 19 nt, Artificial Sequence
  Description of Artificial Sequence: Synthetic oligonucleotide
gguaagugugcggugaagu

SEQ ID NO: 609067 - RNA, 19 nt, Artificial Sequence
  Description of Artificial Sequence: Synthetic oligonucleotide
agcacuaggcucacauuua

SEQ ID NO: 609068 - RNA, 19 nt, Artificial Sequence
  Description of Artificial Sequence: Synthetic oligonucleotide
agugggauaugagcugcua

SEQ ID NO: 609069 - RNA, 19 nt, Artificial Sequence
  Description of Artificial Sequence: Synthetic oligonucleotide
uucauucgacuugguggaa

SEQ ID NO: 609070 - RNA, 19 nt, Artificial Sequence
  Description of Artificial Sequence: Synthetic oligonucleotide
agugagcuugcagccaauu

SEQ ID NO: 609071 - RNA, 19 nt, Artificial Sequence
  Description of Artificial Sequence: Synthetic oligonucleotide
ugucaggauugggccuucc

SEQ ID NO: 609072 - RNA, 19 nt, Artificial Sequence
  Description of Artificial Sequence: Synthetic oligonucleotide
ucgaggccaugagguacag

SEQ ID NO: 609073 - RNA, 19 nt, Artificial Sequence
  Description of Artificial Sequence: Synthetic oligonucleotide
gucauugccaggcggccgu

SEQ ID NO: 609074 - RNA, 19 nt, Artificial Sequence
  Description of Artificial Sequence: Synthetic oligonucleotide
gucgaggccaugagguaca

SEQ ID NO: 609075 - RNA, 19 nt, Artificial Sequence
  Description of Artificial Sequence: Synthetic oligonucleotide
cugggucgacaagagucug

SEQ ID NO: 609076 - RNA, 19 nt, Artificial Sequence
  Description of Artificial Sequence: Synthetic oligonucleotide
ugagggcuauguggacuca

SEQ ID NO: 609077 - RNA, 19 nt, Artificial Sequence
  Description of Artificial Sequence: Synthetic oligonucleotide
auaucgcuccuagauccua

SEQ ID NO: 609078 - RNA, 19 nt, Artificial Sequence
  Description of Artificial Sequence: Synthetic oligonucleotide
cucaaacuagaguucccau

SEQ ID NO: 609079 - RNA, 19 nt, Artificial Sequence
  Description of Artificial Sequence: Synthetic oligonucleotide
cuuuugggaccccaaggau

SEQ ID NO: 609080 - RNA, 19 nt, Artificial Sequence
  Description of Artificial Sequence: Synthetic oligonucleotide
cugcccugcgcuccguguc

SEQ ID NO: 609081 - RNA, 19 nt, Artificial Sequence
  Description of Artificial Sequence: Synthetic oligonucleotide
cacccugccucucaggccu

SEQ ID NO: 609082 - RNA, 19 nt, Artificial Sequence
  Description of Artificial Sequence: Synthetic oligonucleotide
cucugcacucgguaagugu

SEQ ID NO: 609083 - RNA, 19 nt, Artificial Sequence
  Description of Artificial Sequence: Synthetic oligonucleotide
cacucgguaagugugcggu

SEQ ID NO: 609084 - RNA, 19 nt, Artificial Sequence
  Description of Artificial Sequence: Synthetic oligonucleotide
uccgauggacaggccgcug

SEQ ID NO: 609085 - RNA, 19 nt, Artificial Sequence
  Description of Artificial Sequence: Synthetic oligonucleotide
cagccuuuacaccaccagu

SEQ ID NO: 609086 - RNA, 19 nt, Artificial Sequence
  Description of Artificial Sequence: Synthetic oligonucleotide
cggugaaguucuuuggguc

SEQ ID NO: 609087 - RNA, 19 nt, Artificial Sequence
  Description of Artificial Sequence: Synthetic oligonucleotide
gaguacuaugucuccucuu

SEQ ID NO: 609088 - RNA, 19 nt, Artificial Sequence
  Description of Artificial Sequence: Synthetic oligonucleotide
gcacuaggcucacauuuaa

SEQ ID NO: 609089 - RNA, 19 nt, Artificial Sequence
  Description of Artificial Sequence: Synthetic oligonucleotide
ggcuuuggauccauuucca

SEQ ID NO: 609090 - RNA, 19 nt, Artificial Sequence
  Description of Artificial Sequence: Synthetic oligonucleotide
gcaaugccugguucuaaaa

SEQ ID NO: 609091 - RNA, 19 nt, Artificial Sequence
  Description of Artificial Sequence: Synthetic oligonucleotide
ggugccuggggcuacuuau

SEQ ID NO: 609092 - RNA, 19 nt, Artificial Sequence
  Description of Artificial Sequence: Synthetic oligonucleotide
caauuaaggugaguacuau

SEQ ID NO: 609093 - RNA, 19 nt, Artificial Sequence
  Description of Artificial Sequence: Synthetic oligonucleotide
agcuugcagccaauuuccu

SEQ ID NO: 609094 - RNA, 19 nt, Artificial Sequence
  Description of Artificial Sequence: Synthetic oligonucleotide
gcuacuuaucccagucaga

SEQ ID NO: 609095 - RNA, 19 nt, Artificial Sequence
  Description of Artificial Sequence: Synthetic oligonucleotide
auggaggaugugguacuua

SEQ ID NO: 609096 - RNA, 19 nt, Artificial Sequence
  Description of Artificial Sequence: Synthetic oligonucleotide
caggauugggccuucccuu

SEQ ID NO: 609097 - RNA, 19 nt, Artificial Sequence
  Description of Artificial Sequence: Synthetic oligonucleotide
gacuagaggcugggucgac

SEQ ID NO: 609098 - RNA, 19 nt, Artificial Sequence
  Description of Artificial Sequence: Synthetic oligonucleotide
cugcuaccagcgcaauuaa

SEQ ID NO: 609099 - RNA, 19 nt, Artificial Sequence
  Description of Artificial Sequence: Synthetic oligonucleotide
guucuaccugucaagcuuu

SEQ ID NO: 609100 - RNA, 19 nt, Artificial Sequence
  Description of Artificial Sequence: Synthetic oligonucleotide
agguagcuuccaauuuaau

SEQ ID NO: 609101 - RNA, 19 nt, Artificial Sequence
  Description of Artificial Sequence: Synthetic oligonucleotide
cuuugggucccaguuuccu

SEQ ID NO: 609102 - RNA, 19 nt, Artificial Sequence
  Description of Artificial Sequence: Synthetic oligonucleotide
gcggugaaguucuuugggu

SEQ ID NO: 609103 - RNA, 19 nt, Artificial Sequence
  Description of Artificial Sequence: Synthetic oligonucleotide
cauugccaggcggccguug

SEQ ID NO: 609104 - RNA, 19 nt, Artificial Sequence
  Description of Artificial Sequence: Synthetic oligonucleotide
ggugaguacuaugucuccu

SEQ ID NO: 609105 - RNA, 19 nt, Artificial Sequence
  Description of Artificial Sequence: Synthetic oligonucleotide
gugccuggggcuacuuauc

SEQ ID NO: 609106 - RNA, 19 nt, Artificial Sequence
  Description of Artificial Sequence: Synthetic oligonucleotide
ccagcgcaauuaaggugag

SEQ ID NO: 609107 - RNA, 19 nt, Artificial Sequence
  Description of Artificial Sequence: Synthetic oligonucleotide
ccuuuacaccaccaguuua

SEQ ID NO: 609108 - RNA, 19 nt, Artificial Sequence
  Description of Artificial Sequence: Synthetic oligonucleotide
gauugggccuucccuuguu

SEQ ID NO: 609109 - RNA, 19 nt, Artificial Sequence
  Description of Artificial Sequence: Synthetic oligonucleotide
ucucucggugggagucauu

SEQ ID NO: 609110 - RNA, 19 nt, Artificial Sequence
  Description of Artificial Sequence: Synthetic oligonucleotide
gagguacagagcugcuguu

SEQ ID NO: 609111 - RNA, 19 nt, Artificial Sequence
  Description of Artificial Sequence: Synthetic oligonucleotide
cacuacuggaaagccucaa

SEQ ID NO: 609112 - RNA, 19 nt, Artificial Sequence
  Description of Artificial Sequence: Synthetic oligonucleotide
cagagaugcaaugccuggu

SEQ ID NO: 609113 - RNA, 19 nt, Artificial Sequence
  Description of Artificial Sequence: Synthetic oligonucleotide
cuuaucccagucagaccau

SEQ ID NO: 609114 - RNA, 19 nt, Artificial Sequence
  Description of Artificial Sequence: Synthetic oligonucleotide
gucaagcuuuugggacccc

SEQ ID NO: 609115 - RNA, 19 nt, Artificial Sequence
  Description of Artificial Sequence: Synthetic oligonucleotide
ggauggucuuagaauucaa

SEQ ID NO: 609116 - RNA, 19 nt, Artificial Sequence
  Description of Artificial Sequence: Synthetic oligonucleotide
cgcaauuaaggugaguacu

SEQ ID NO: 609117 - RNA, 19 nt, Artificial Sequence
  Description of Artificial Sequence: Synthetic oligonucleotide
cugacuuacuggguaugau

SEQ ID NO: 609118 - RNA, 19 nt, Artificial Sequence
  Description of Artificial Sequence: Synthetic oligonucleotide
gcugggucgacaagagucu

SEQ ID NO: 609119 - RNA, 19 nt, Artificial Sequence
  Description of Artificial Sequence: Synthetic oligonucleotide
ccugaucacuugcuuccca

SEQ ID NO: 609120 - RNA, 19 nt, Artificial Sequence
  Description of Artificial Sequence: Synthetic oligonucleotide
ccgugucugcaagugaaca

SEQ ID NO: 609121 - RNA, 19 nt, Artificial Sequence
  Description of Artificial Sequence: Synthetic oligonucleotide
cccugaucacuugcuuccc

SEQ ID NO: 609122 - RNA, 19 nt, Artificial Sequence
  Description of Artificial Sequence: Synthetic oligonucleotide
ucauugccaggcggccguu

SEQ ID NO: 609123 - RNA, 19 nt, Artificial Sequence
  Description of Artificial Sequence: Synthetic oligonucleotide
ggguaugauauggcuucaa

SEQ ID NO: 609124 - RNA, 19 nt, Artificial Sequence
  Description of Artificial Sequence: Synthetic oligonucleotide
gaguucccaugggaauaua

SEQ ID NO: 609125 - RNA, 19 nt, Artificial Sequence
  Description of Artificial Sequence: Synthetic oligonucleotide
gccuuuacaccaccaguuu

SEQ ID NO: 609126 - RNA, 19 nt, Artificial Sequence
  Description of Artificial Sequence: Synthetic oligonucleotide
ggauugggccuucccuugu

SEQ ID NO: 609127 - RNA, 19 nt, Artificial Sequence
  Description of Artificial Sequence: Synthetic oligonucleotide
ggucucucggugggaguca

SEQ ID NO: 609128 - RNA, 19 nt, Artificial Sequence
  Description of Artificial Sequence: Synthetic oligonucleotide
gggucgacaagagucuguu

SEQ ID NO: 609129 - RNA, 19 nt, Artificial Sequence
  Description of Artificial Sequence: Synthetic oligonucleotide
cgguaagugugcggugaag

SEQ ID NO: 609130 - RNA, 19 nt, Artificial Sequence
  Description of Artificial Sequence: Synthetic oligonucleotide
cggcaagaaaggucuggga

SEQ ID NO: 609131 - RNA, 19 nt, Artificial Sequence
  Description of Artificial Sequence: Synthetic oligonucleotide
cagccacggcaagaaaggu

SEQ ID NO: 609132 - RNA, 19 nt, Artificial Sequence
  Description of Artificial Sequence: Synthetic oligonucleotide
ggcucacauuuaagggaaa

SEQ ID NO: 609133 - RNA, 19 nt, Artificial Sequence
  Description of Artificial Sequence: Synthetic oligonucleotide
agugugcggugaaguucuu

SEQ ID NO: 609134 - RNA, 19 nt, Artificial Sequence
  Description of Artificial Sequence: Synthetic oligonucleotide
gucucucggugggagucau

SEQ ID NO: 609135 - RNA, 19 nt, Artificial Sequence
  Description of Artificial Sequence: Synthetic oligonucleotide
gugugcggugaaguucuuu

SEQ ID NO: 609136 - RNA, 19 nt, Artificial Sequence
  Description of Artificial Sequence: Synthetic oligonucleotide
ggcuaacaauaagcuggcu

SEQ ID NO: 609137 - RNA, 19 nt, Artificial Sequence
  Description of Artificial Sequence: Synthetic oligonucleotide
gcggccguugccaccauuu

SEQ ID NO: 609138 - RNA, 19 nt, Artificial Sequence
  Description of Artificial Sequence: Synthetic oligonucleotide
aggcggccguugccaccau

SEQ ID NO: 609139 - RNA, 19 nt, Artificial Sequence
  Description of Artificial Sequence: Synthetic oligonucleotide
cagcgcaauuaaggugagu

SEQ ID NO: 609140 - RNA, 19 nt, Artificial Sequence
  Description of Artificial Sequence: Synthetic oligonucleotide
ccgcugcuauuagaacgga

SEQ ID NO: 609141 - RNA, 19 nt, Artificial Sequence
  Description of Artificial Sequence: Synthetic oligonucleotide
cgcugcuauuagaacggau

SEQ ID NO: 609142 - RNA, 19 nt, Artificial Sequence
  Description of Artificial Sequence: Synthetic oligonucleotide
gcgcuccgugucugcaagu

SEQ ID NO: 609143 - RNA, 19 nt, Artificial Sequence
  Description of Artificial Sequence: Synthetic oligonucleotide
ggcggccguugccaccauu

SEQ ID NO: 609144 - RNA, 19 nt, Artificial Sequence
  Description of Artificial Sequence: Synthetic oligonucleotide
uuagguaucuuuaaaagug

SEQ ID NO: 609145 - RNA, 19 nt, Artificial Sequence
  Description of Artificial Sequence: Synthetic oligonucleotide
aaauccagcaaaucuauuc

SEQ ID NO: 609146 - RNA, 19 nt, Artificial Sequence
  Description of Artificial Sequence: Synthetic oligonucleotide
auguuuaacauguaacacc

SEQ ID NO: 609147 - RNA, 19 nt, Artificial Sequence
  Description of Artificial Sequence: Synthetic oligonucleotide
uuuaggguagcucauuugg

SEQ ID NO: 609148 - RNA, 19 nt, Artificial Sequence
  Description of Artificial Sequence: Synthetic oligonucleotide
auuaaccugacauuggcgg

SEQ ID NO: 609149 - RNA, 19 nt, Artificial Sequence
  Description of Artificial Sequence: Synthetic oligonucleotide
uguaaacggagugagaugg

SEQ ID NO: 609150 - RNA, 19 nt, Artificial Sequence
  Description of Artificial Sequence: Synthetic oligonucleotide
auccauauaauauauauau

SEQ ID NO: 609151 - RNA, 19 nt, Artificial Sequence
  Description of Artificial Sequence: Synthetic oligonucleotide
uauauuuaugccuuaagaa

SEQ ID NO: 609152 - RNA, 19 nt, Artificial Sequence
  Description of Artificial Sequence: Synthetic oligonucleotide
aaaguauuaccuuuauuga

SEQ ID NO: 609153 - RNA, 19 nt, Artificial Sequence
  Description of Artificial Sequence: Synthetic oligonucleotide
aaguauuaccuuuauugag

SEQ ID NO: 609154 - RNA, 19 nt, Artificial Sequence
  Description of Artificial Sequence: Synthetic oligonucleotide
aaaugagagguuuguauag

SEQ ID NO: 609155 - RNA, 19 nt, Artificial Sequence
  Description of Artificial Sequence: Synthetic oligonucleotide
uguuagguaucuuuaaaag

SEQ ID NO: 609156 - RNA, 19 nt, Artificial Sequence
  Description of Artificial Sequence: Synthetic oligonucleotide
aaacaugcaaggaugggcc

SEQ ID NO: 609157 - RNA, 19 nt, Artificial Sequence
  Description of Artificial Sequence: Synthetic oligonucleotide
uaaacuugcucauacucgg

SEQ ID NO: 609158 - RNA, 19 nt, Artificial Sequence
  Description of Artificial Sequence: Synthetic oligonucleotide
uauacagucucucauuccc

SEQ ID NO: 609159 - RNA, 19 nt, Artificial Sequence
  Description of Artificial Sequence: Synthetic oligonucleotide
uugauaacuguaaacggag

SEQ ID NO: 609160 - RNA, 19 nt, Artificial Sequence
  Description of Artificial Sequence: Synthetic oligonucleotide
uugaauaugaaggcgaugc

SEQ ID NO: 609161 - RNA, 19 nt, Artificial Sequence
  Description of Artificial Sequence: Synthetic oligonucleotide
uauuuaugccuuaagaaaa

SEQ ID NO: 609162 - RNA, 19 nt, Artificial Sequence
  Description of Artificial Sequence: Synthetic oligonucleotide
auguugauaacuguaaacg

SEQ ID NO: 609163 - RNA, 19 nt, Artificial Sequence
  Description of Artificial Sequence: Synthetic oligonucleotide
aaugaaacauuaaauguug

SEQ ID NO: 609164 - RNA, 19 nt, Artificial Sequence
  Description of Artificial Sequence: Synthetic oligonucleotide
auuuacuucagcaugagug

SEQ ID NO: 609165 - RNA, 19 nt, Artificial Sequence
  Description of Artificial Sequence: Synthetic oligonucleotide
ugaguguuauaccaaaaug

SEQ ID NO: 609166 - RNA, 19 nt, Artificial Sequence
  Description of Artificial Sequence: Synthetic oligonucleotide
ugcacuucagaauaguuug

SEQ ID NO: 609167 - RNA, 19 nt, Artificial Sequence
  Description of Artificial Sequence: Synthetic oligonucleotide
uauaacgucagagcaaagg

SEQ ID NO: 609168 - RNA, 19 nt, Artificial Sequence
  Description of Artificial Sequence: Synthetic oligonucleotide
uguuaggcauuucagaaga

SEQ ID NO: 609169 - RNA, 19 nt, Artificial Sequence
  Description of Artificial Sequence: Synthetic oligonucleotide
aaugugggaacgguaaugg

SEQ ID NO: 609170 - RNA, 19 nt, Artificial Sequence
  Description of Artificial Sequence: Synthetic oligonucleotide
aauacugauucucccuuuc

SEQ ID NO: 609171 - RNA, 19 nt, Artificial Sequence
  Description of Artificial Sequence: Synthetic oligonucleotide
gauaccggguauuaucucg

SEQ ID NO: 609172 - RNA, 19 nt, Artificial Sequence
  Description of Artificial Sequence: Synthetic oligonucleotide
auauuuaugccuuaagaaa

SEQ ID NO: 609173 - RNA, 19 nt, Artificial Sequence
  Description of Artificial Sequence: Synthetic oligonucleotide
augguaauuaaccugacau

SEQ ID NO: 609174 - RNA, 19 nt, Artificial Sequence
  Description of Artificial Sequence: Synthetic oligonucleotide
guuucaaucagacuugcug

SEQ ID NO: 609175 - RNA, 19 nt, Artificial Sequence
  Description of Artificial Sequence: Synthetic oligonucleotide
auuaucucggauuaucuca

SEQ ID NO: 609176 - RNA, 19 nt, Artificial Sequence
  Description of Artificial Sequence: Synthetic oligonucleotide
gauaacuguaaacggagug

SEQ ID NO: 609177 - RNA, 19 nt, Artificial Sequence
  Description of Artificial Sequence: Synthetic oligonucleotide
aauacacuccaggauaccg

SEQ ID NO: 609178 - RNA, 19 nt, Artificial Sequence
  Description of Artificial Sequence: Synthetic oligonucleotide
uuuccaauggguaaaguau

SEQ ID NO: 609179 - RNA, 19 nt, Artificial Sequence
  Description of Artificial Sequence: Synthetic oligonucleotide
aguggcucuaaaaucaucc

SEQ ID NO: 609180 - RNA, 19 nt, Artificial Sequence
  Description of Artificial Sequence: Synthetic oligonucleotide
uuucaaucagacuugcuga

SEQ ID NO: 609181 - RNA, 19 nt, Artificial Sequence
  Description of Artificial Sequence: Synthetic oligonucleotide
aaagguguaaauucacuaa

SEQ ID NO: 609182 - RNA, 19 nt, Artificial Sequence
  Description of Artificial Sequence: Synthetic oligonucleotide
uguguaaaacuucccuugg

SEQ ID NO: 609183 - RNA, 19 nt, Artificial Sequence
  Description of Artificial Sequence: Synthetic oligonucleotide
uuagcaauaaguucuggaa

SEQ ID NO: 609184 - RNA, 19 nt, Artificial Sequence
  Description of Artificial Sequence: Synthetic oligonucleotide
agucuaauccaccauagga

SEQ ID NO: 609185 - RNA, 19 nt, Artificial Sequence
  Description of Artificial Sequence: Synthetic oligonucleotide
ucuacuucuuuccacccag

SEQ ID NO: 609186 - RNA, 19 nt, Artificial Sequence
  Description of Artificial Sequence: Synthetic oligonucleotide
accauaggaacacaucaac

SEQ ID NO: 609187 - RNA, 19 nt, Artificial Sequence
  Description of Artificial Sequence: Synthetic oligonucleotide
uaaucuguaagauggccgc

SEQ ID NO: 609188 - RNA, 19 nt, Artificial Sequence
  Description of Artificial Sequence: Synthetic oligonucleotide
cauuacuucaugcuuuucc

SEQ ID NO: 609189 - RNA, 19 nt, Artificial Sequence
  Description of Artificial Sequence: Synthetic oligonucleotide
guaaaguauaacgucagag

SEQ ID NO: 609190 - RNA, 19 nt, Artificial Sequence
  Description of Artificial Sequence: Synthetic oligonucleotide
uggguaaaguauaacguca

SEQ ID NO: 609191 - RNA, 19 nt, Artificial Sequence
  Description of Artificial Sequence: Synthetic oligonucleotide
ucuucaguacuuauccaag

SEQ ID NO: 609192 - RNA, 19 nt, Artificial Sequence
  Description of Artificial Sequence: Synthetic oligonucleotide
ugaaagacaagugaggcuc

SEQ ID NO: 609193 - RNA, 19 nt, Artificial Sequence
  Description of Artificial Sequence: Synthetic oligonucleotide
uguauacuguauaauaaua

SEQ ID NO: 609194 - RNA, 19 nt, Artificial Sequence
  Description of Artificial Sequence: Synthetic oligonucleotide
aacuguucgcugcucgggc

SEQ ID NO: 609195 - RNA, 19 nt, Artificial Sequence
  Description of Artificial Sequence: Synthetic oligonucleotide
aaaacuucccuugguaaag

SEQ ID NO: 609196 - RNA, 19 nt, Artificial Sequence
  Description of Artificial Sequence: Synthetic oligonucleotide
ucuaauccaccauaggaac

SEQ ID NO: 609197 - RNA, 19 nt, Artificial Sequence
  Description of Artificial Sequence: Synthetic oligonucleotide
gauccaguauuauuuacac

SEQ ID NO: 609198 - RNA, 19 nt, Artificial Sequence
  Description of Artificial Sequence: Synthetic oligonucleotide
uuaagcucuuaucagucga

SEQ ID NO: 609199 - RNA, 19 nt, Artificial Sequence
  Description of Artificial Sequence: Synthetic oligonucleotide
ucauuuguuggaauacuga

SEQ ID NO: 609200 - RNA, 19 nt, Artificial Sequence
  Description of Artificial Sequence: Synthetic oligonucleotide
ucaccuauuaguuuaggau

SEQ ID NO: 609201 - RNA, 19 nt, Artificial Sequence
  Description of Artificial Sequence: Synthetic oligonucleotide
cauguuaagcucuuaucag

SEQ ID NO: 609202 - RNA, 19 nt, Artificial Sequence
  Description of Artificial Sequence: Synthetic oligonucleotide
aauuaaccugacauuggcg

SEQ ID NO: 609203 - RNA, 19 nt, Artificial Sequence
  Description of Artificial Sequence: Synthetic oligonucleotide
uaguuuaggauuccauuug

SEQ ID NO: 609204 - RNA, 19 nt, Artificial Sequence
  Description of Artificial Sequence: Synthetic oligonucleotide
aauaugaaggcgaugcaga

SEQ ID NO: 609205 - RNA, 19 nt, Artificial Sequence
  Description of Artificial Sequence: Synthetic oligonucleotide
acauauguuaggcauuuca

SEQ ID NO: 609206 - RNA, 19 nt, Artificial Sequence
  Description of Artificial Sequence: Synthetic oligonucleotide
aagguguaaauucacuaau

SEQ ID NO: 609207 - RNA, 19 nt, Artificial Sequence
  Description of Artificial Sequence: Synthetic oligonucleotide
guuagcaugagcuuuucca

SEQ ID NO: 609208 - RNA, 19 nt, Artificial Sequence
  Description of Artificial Sequence: Synthetic oligonucleotide
uuaguuuaggauuccauuu

SEQ ID NO: 609209 - RNA, 19 nt, Artificial Sequence
  Description of Artificial Sequence: Synthetic oligonucleotide
guaaacuugcucauacucg

SEQ ID NO: 609210 - RNA, 19 nt, Artificial Sequence
  Description of Artificial Sequence: Synthetic oligonucleotide
aaagucuaauccaccauag

SEQ ID NO: 609211 - RNA, 19 nt, Artificial Sequence
  Description of Artificial Sequence: Synthetic oligonucleotide
cuaauuaugccuucugcuc

SEQ ID NO: 609212 - RNA, 19 nt, Artificial Sequence
  Description of Artificial Sequence: Synthetic oligonucleotide
ugcaugaaugaucagugaa

SEQ ID NO: 609213 - RNA, 19 nt, Artificial Sequence
  Description of Artificial Sequence: Synthetic oligonucleotide
agaaguguggaguaaaaua

SEQ ID NO: 609214 - RNA, 19 nt, Artificial Sequence
  Description of Artificial Sequence: Synthetic oligonucleotide
uguuaagcucuuaucaguc

SEQ ID NO: 609215 - RNA, 19 nt, Artificial Sequence
  Description of Artificial Sequence: Synthetic oligonucleotide
uuuguccccucuaagacaa

SEQ ID NO: 609216 - RNA, 19 nt, Artificial Sequence
  Description of Artificial Sequence: Synthetic oligonucleotide
uuguauaguuagcaugagc

SEQ ID NO: 609217 - RNA, 19 nt, Artificial Sequence
  Description of Artificial Sequence: Synthetic oligonucleotide
uguugcaugaaugaucagu

SEQ ID NO: 609218 - RNA, 19 nt, Artificial Sequence
  Description of Artificial Sequence: Synthetic oligonucleotide
auacugauucucccuuucc

SEQ ID NO: 609219 - RNA, 19 nt, Artificial Sequence
  Description of Artificial Sequence: Synthetic oligonucleotide
agaagcacaauuccaggug

SEQ ID NO: 609220 - RNA, 19 nt, Artificial Sequence
  Description of Artificial Sequence: Synthetic oligonucleotide
ggacguaaaacaugcaagg

SEQ ID NO: 609221 - RNA, 19 nt, Artificial Sequence
  Description of Artificial Sequence: Synthetic oligonucleotide
gguaauuaaccugacauug

SEQ ID NO: 609222 - RNA, 19 nt, Artificial Sequence
  Description of Artificial Sequence: Synthetic oligonucleotide
auuaucucacucuguacug

SEQ ID NO: 609223 - RNA, 19 nt, Artificial Sequence
  Description of Artificial Sequence: Synthetic oligonucleotide
auuaguuuaggauuccauu

SEQ ID NO: 609224 - RNA, 19 nt, Artificial Sequence
  Description of Artificial Sequence: Synthetic oligonucleotide
aagauggccgcaugcagug

SEQ ID NO: 609225 - RNA, 19 nt, Artificial Sequence
  Description of Artificial Sequence: Synthetic oligonucleotide
ugcaaguccaauaccaaau

SEQ ID NO: 609226 - RNA, 19 nt, Artificial Sequence
  Description of Artificial Sequence: Synthetic oligonucleotide
cuacccaggaucaauuuac

SEQ ID NO: 609227 - RNA, 19 nt, Artificial Sequence
  Description of Artificial Sequence: Synthetic oligonucleotide
uaggguagcucauuuggag

SEQ ID NO: 609228 - RNA, 19 nt, Artificial Sequence
  Description of Artificial Sequence: Synthetic oligonucleotide
uaucagucgaaguaacacu

SEQ ID NO: 609229 - RNA, 19 nt, Artificial Sequence
  Description of Artificial Sequence: Synthetic oligonucleotide
ucaauuauugugcguguuc

SEQ ID NO: 609230 - RNA, 19 nt, Artificial Sequence
  Description of Artificial Sequence: Synthetic oligonucleotide
uauuaauuggaaguacuuc

SEQ ID NO: 609231 - RNA, 19 nt, Artificial Sequence
  Description of Artificial Sequence: Synthetic oligonucleotide
uauuaguuuaggauuccau

SEQ ID NO: 609232 - RNA, 19 nt, Artificial Sequence
  Description of Artificial Sequence: Synthetic oligonucleotide
agucuacuucuuuccaccc

SEQ ID NO: 609233 - RNA, 19 nt, Artificial Sequence
  Description of Artificial Sequence: Synthetic oligonucleotide
gaaguguggaguaaaauaa

SEQ ID NO: 609234 - RNA, 19 nt, Artificial Sequence
  Description of Artificial Sequence: Synthetic oligonucleotide
uuaucucggauuaucucac

SEQ ID NO: 609235 - RNA, 19 nt, Artificial Sequence
  Description of Artificial Sequence: Synthetic oligonucleotide
guuaagcucuuaucagucg

SEQ ID NO: 609236 - RNA, 19 nt, Artificial Sequence
  Description of Artificial Sequence: Synthetic oligonucleotide
gguuuguauaguuagcaug

SEQ ID NO: 609237 - RNA, 19 nt, Artificial Sequence
  Description of Artificial Sequence: Synthetic oligonucleotide
gguacucucagcgaggugg

SEQ ID NO: 609238 - RNA, 19 nt, Artificial Sequence
  Description of Artificial Sequence: Synthetic oligonucleotide
agagcaacgggaagaaggc

SEQ ID NO: 609239 - RNA, 19 nt, Artificial Sequence
  Description of Artificial Sequence: Synthetic oligonucleotide
ucauacucgggaagaaaug

SEQ ID NO: 609240 - RNA, 19 nt, Artificial Sequence
  Description of Artificial Sequence: Synthetic oligonucleotide
accaguuuuaguuuugcau

SEQ ID NO: 609241 - RNA, 19 nt, Artificial Sequence
  Description of Artificial Sequence: Synthetic oligonucleotide
aauuauugugcguguuccu

SEQ ID NO: 609242 - RNA, 19 nt, Artificial Sequence
  Description of Artificial Sequence: Synthetic oligonucleotide
uacuuauccaagcaaguuu

SEQ ID NO: 609243 - RNA, 19 nt, Artificial Sequence
  Description of Artificial Sequence: Synthetic oligonucleotide
caauuauugugcguguucc

SEQ ID NO: 609244 - RNA, 19 nt, Artificial Sequence
  Description of Artificial Sequence: Synthetic oligonucleotide
uucaccuauuaguuuagga

SEQ ID NO: 609245 - RNA, 19 nt, Artificial Sequence
  Description of Artificial Sequence: Synthetic oligonucleotide
uaacauguaacaccaguuu

SEQ ID NO: 609246 - RNA, 19 nt, Artificial Sequence
  Description of Artificial Sequence: Synthetic oligonucleotide
aguuagcaugagcuuuucc

SEQ ID NO: 609247 - RNA, 19 nt, Artificial Sequence
  Description of Artificial Sequence: Synthetic oligonucleotide
guaagcauccagcauacuc

SEQ ID NO: 609248 - RNA, 19 nt, Artificial Sequence
  Description of Artificial Sequence: Synthetic oligonucleotide
uaguuuugcaugcaugcuc

SEQ ID NO: 609249 - RNA, 19 nt, Artificial Sequence
  Description of Artificial Sequence: Synthetic oligonucleotide
aaauuauccagaccacauu

SEQ ID NO: 609250 - RNA, 19 nt, Artificial Sequence
  Description of Artificial Sequence: Synthetic oligonucleotide
ccaaguuacauguacacac

SEQ ID NO: 609251 - RNA, 19 nt, Artificial Sequence
  Description of Artificial Sequence: Synthetic oligonucleotide
uggcggacguaaaacaugc

SEQ ID NO: 609252 - RNA, 19 nt, Artificial Sequence
  Description of Artificial Sequence: Synthetic oligonucleotide
ucuuaucagucgaaguaac

SEQ ID NO: 609253 - RNA, 19 nt, Artificial Sequence
  Description of Artificial Sequence: Synthetic oligonucleotide
cucucugugauguuuaaca

SEQ ID NO: 609254 - RNA, 19 nt, Artificial Sequence
  Description of Artificial Sequence: Synthetic oligonucleotide
auguuaagcucuuaucagu

SEQ ID NO: 609255 - RNA, 19 nt, Artificial Sequence
  Description of Artificial Sequence: Synthetic oligonucleotide
caucugaugcaauaagcug

SEQ ID NO: 609256 - RNA, 19 nt, Artificial Sequence
  Description of Artificial Sequence: Synthetic oligonucleotide
uaacgucagagcaaaggcu

SEQ ID NO: 609257 - RNA, 19 nt, Artificial Sequence
  Description of Artificial Sequence: Synthetic oligonucleotide
guuuguauaguuagcauga

SEQ ID NO: 609258 - RNA, 19 nt, Artificial Sequence
  Description of Artificial Sequence: Synthetic oligonucleotide
aucagucgaaguaacacuc

SEQ ID NO: 609259 - RNA, 19 nt, Artificial Sequence
  Description of Artificial Sequence: Synthetic oligonucleotide
auguuaggcauuucagaag

SEQ ID NO: 609260 - RNA, 19 nt, Artificial Sequence
  Description of Artificial Sequence: Synthetic oligonucleotide
aauucacuaauuaugccuu

SEQ ID NO: 609261 - RNA, 19 nt, Artificial Sequence
  Description of Artificial Sequence: Synthetic oligonucleotide
aacgguuuccaauggguaa

SEQ ID NO: 609262 - RNA, 19 nt, Artificial Sequence
  Description of Artificial Sequence: Synthetic oligonucleotide
cugcguaucacuucauuac

SEQ ID NO: 609263 - RNA, 19 nt, Artificial Sequence
  Description of Artificial Sequence: Synthetic oligonucleotide
acguaaaacaugcaaggau

SEQ ID NO: 609264 - RNA, 19 nt, Artificial Sequence
  Description of Artificial Sequence: Synthetic oligonucleotide
ugcguaucacuucauuaca

SEQ ID NO: 609265 - RNA, 19 nt, Artificial Sequence
  Description of Artificial Sequence: Synthetic oligonucleotide
aguauuaauuggaaguacu

SEQ ID NO: 609266 - RNA, 19 nt, Artificial Sequence
  Description of Artificial Sequence: Synthetic oligonucleotide
uggaccaaugauagaaccu

SEQ ID NO: 609267 - RNA, 19 nt, Artificial Sequence
  Description of Artificial Sequence: Synthetic oligonucleotide
aacugauuaacaaguuuca

SEQ ID NO: 609268 - RNA, 19 nt, Artificial Sequence
  Description of Artificial Sequence: Synthetic oligonucleotide
acucgggaagaaaugaaac

SEQ ID NO: 609269 - RNA, 19 nt, Artificial Sequence
  Description of Artificial Sequence: Synthetic oligonucleotide
accuauuaguuuaggauuc

SEQ ID NO: 609270 - RNA, 19 nt, Artificial Sequence
  Description of Artificial Sequence: Synthetic oligonucleotide
acauuggcggacguaaaac

SEQ ID NO: 609271 - RNA, 19 nt, Artificial Sequence
  Description of Artificial Sequence: Synthetic oligonucleotide
ugaguauuaauuggaagua

SEQ ID NO: 609272 - RNA, 19 nt, Artificial Sequence
  Description of Artificial Sequence: Synthetic oligonucleotide
uaacaaggaucucucauuu

SEQ ID NO: 609273 - RNA, 19 nt, Artificial Sequence
  Description of Artificial Sequence: Synthetic oligonucleotide
cauaauguugauaacugua

SEQ ID NO: 609274 - RNA, 19 nt, Artificial Sequence
  Description of Artificial Sequence: Synthetic oligonucleotide
ugcaguguauacuguauaa

SEQ ID NO: 609275 - RNA, 19 nt, Artificial Sequence
  Description of Artificial Sequence: Synthetic oligonucleotide
uuaggguagcucauuugga

SEQ ID NO: 609276 - RNA, 19 nt, Artificial Sequence
  Description of Artificial Sequence: Synthetic oligonucleotide
caggugaacuuuaauuuug

SEQ ID NO: 609277 - RNA, 19 nt, Artificial Sequence
  Description of Artificial Sequence: Synthetic oligonucleotide
cugaguauuaauuggaagu

SEQ ID NO: 609278 - RNA, 19 nt, Artificial Sequence
  Description of Artificial Sequence: Synthetic oligonucleotide
gugauguuuaacauguaac

SEQ ID NO: 609279 - RNA, 19 nt, Artificial Sequence
  Description of Artificial Sequence: Synthetic oligonucleotide
aacgguaauggcugccaug

SEQ ID NO: 609280 - RNA, 19 nt, Artificial Sequence
  Description of Artificial Sequence: Synthetic oligonucleotide
ucuauucaacuguucgcug

SEQ ID NO: 609281 - RNA, 19 nt, Artificial Sequence
  Description of Artificial Sequence: Synthetic oligonucleotide
cauuuguguaaaacuuccc

SEQ ID NO: 609282 - RNA, 19 nt, Artificial Sequence
  Description of Artificial Sequence: Synthetic oligonucleotide
acuguucgcugcucgggcc

SEQ ID NO: 609283 - RNA, 19 nt, Artificial Sequence
  Description of Artificial Sequence: Synthetic oligonucleotide
augauagaaccuaaaucuc

SEQ ID NO: 609284 - RNA, 19 nt, Artificial Sequence
  Description of Artificial Sequence: Synthetic oligonucleotide
uuggcggacguaaaacaug

SEQ ID NO: 609285 - RNA, 19 nt, Artificial Sequence
  Description of Artificial Sequence: Synthetic oligonucleotide
aguccaauaccaaauccag

SEQ ID NO: 609286 - RNA, 19 nt, Artificial Sequence
  Description of Artificial Sequence: Synthetic oligonucleotide
guuggaauacugauucucc

SEQ ID NO: 609287 - RNA, 19 nt, Artificial Sequence
  Description of Artificial Sequence: Synthetic oligonucleotide
ugugcguguuccuugaaua

SEQ ID NO: 609288 - RNA, 19 nt, Artificial Sequence
  Description of Artificial Sequence: Synthetic oligonucleotide
agcaugguaauuaaccuga

SEQ ID NO: 609289 - RNA, 19 nt, Artificial Sequence
  Description of Artificial Sequence: Synthetic oligonucleotide
aaaggcauggccaccacau

SEQ ID NO: 609290 - RNA, 19 nt, Artificial Sequence
  Description of Artificial Sequence: Synthetic oligonucleotide
ugauaacuguaaacggagu

SEQ ID NO: 609291 - RNA, 19 nt, Artificial Sequence
  Description of Artificial Sequence: Synthetic oligonucleotide
uccauauaauauauauauu

SEQ ID NO: 609292 - RNA, 19 nt, Artificial Sequence
  Description of Artificial Sequence: Synthetic oligonucleotide
uuaaccugacauuggcgga

SEQ ID NO: 609293 - RNA, 19 nt, Artificial Sequence
  Description of Artificial Sequence: Synthetic oligonucleotide
uacucgggaagaaaugaaa

SEQ ID NO: 609294 - RNA, 19 nt, Artificial Sequence
  Description of Artificial Sequence: Synthetic oligonucleotide
uuccaauggguaaaguaua

SEQ ID NO: 609295 - RNA, 19 nt, Artificial Sequence
  Description of Artificial Sequence: Synthetic oligonucleotide
guggcucuaaaaucauccg

SEQ ID NO: 609296 - RNA, 19 nt, Artificial Sequence
  Description of Artificial Sequence: Synthetic oligonucleotide
uccaauggguaaaguauaa

SEQ ID NO: 609297 - RNA, 19 nt, Artificial Sequence
  Description of Artificial Sequence: Synthetic oligonucleotide
ugagagguuuguauaguua

SEQ ID NO: 609298 - RNA, 19 nt, Artificial Sequence
  Description of Artificial Sequence: Synthetic oligonucleotide
agcgagguggcuauuacag

SEQ ID NO: 609299 - RNA, 19 nt, Artificial Sequence
  Description of Artificial Sequence: Synthetic oligonucleotide
cuugcucauacucgggaag

SEQ ID NO: 609300 - RNA, 19 nt, Artificial Sequence
  Description of Artificial Sequence: Synthetic oligonucleotide
uuuguauaguuagcaugag

SEQ ID NO: 609301 - RNA, 19 nt, Artificial Sequence
  Description of Artificial Sequence: Synthetic oligonucleotide
uauugugcguguuccuuga

SEQ ID NO: 609302 - RNA, 19 nt, Artificial Sequence
  Description of Artificial Sequence: Synthetic oligonucleotide
cagaauuaggaggacaauc

SEQ ID NO: 609303 - RNA, 19 nt, Artificial Sequence
  Description of Artificial Sequence: Synthetic oligonucleotide
guuagguaucuuuaaaagu

SEQ ID NO: 609304 - RNA, 19 nt, Artificial Sequence
  Description of Artificial Sequence: Synthetic oligonucleotide
auugucaauuauugugcgu

SEQ ID NO: 609305 - RNA, 19 nt, Artificial Sequence
  Description of Artificial Sequence: Synthetic oligonucleotide
ugccaugauuguuagguau

SEQ ID NO: 609306 - RNA, 19 nt, Artificial Sequence
  Description of Artificial Sequence: Synthetic oligonucleotide
ucuacccaggaucaauuua

SEQ ID NO: 609307 - RNA, 19 nt, Artificial Sequence
  Description of Artificial Sequence: Synthetic oligonucleotide
ugucgggaagaugagugag

SEQ ID NO: 609308 - RNA, 19 nt, Artificial Sequence
  Description of Artificial Sequence: Synthetic oligonucleotide
uccaaucccuucuuuaaua

SEQ ID NO: 609309 - RNA, 19 nt, Artificial Sequence
  Description of Artificial Sequence: Synthetic oligonucleotide
cuggucuaugagaacuugc

SEQ ID NO: 609310 - RNA, 19 nt, Artificial Sequence
  Description of Artificial Sequence: Synthetic oligonucleotide
ucccagucuacuucuuucc

SEQ ID NO: 609311 - RNA, 19 nt, Artificial Sequence
  Description of Artificial Sequence: Synthetic oligonucleotide
ucgguugggcaacaucugc

SEQ ID NO: 609312 - RNA, 19 nt, Artificial Sequence
  Description of Artificial Sequence: Synthetic oligonucleotide
aggccuaucacccuuccaa

SEQ ID NO: 609313 - RNA, 19 nt, Artificial Sequence
  Description of Artificial Sequence: Synthetic oligonucleotide
cucggauuaucucacucug

SEQ ID NO: 609314 - RNA, 19 nt, Artificial Sequence
  Description of Artificial Sequence: Synthetic oligonucleotide
gaguauuaauuggaaguac

SEQ ID NO: 609315 - RNA, 19 nt, Artificial Sequence
  Description of Artificial Sequence: Synthetic oligonucleotide
guuuccaauggguaaagua

SEQ ID NO: 609316 - RNA, 19 nt, Artificial Sequence
  Description of Artificial Sequence: Synthetic oligonucleotide
ucagucgaaguaacacucu

SEQ ID NO: 609317 - RNA, 19 nt, Artificial Sequence
  Description of Artificial Sequence: Synthetic oligonucleotide
aacaugcaaggaugggcca

SEQ ID NO: 609318 - RNA, 19 nt, Artificial Sequence
  Description of Artificial Sequence: Synthetic oligonucleotide
gauagaaccuaaaucucaa

SEQ ID NO: 609319 - RNA, 19 nt, Artificial Sequence
  Description of Artificial Sequence: Synthetic oligonucleotide
acgggaagaaggcgcuugc

SEQ ID NO: 609320 - RNA, 19 nt, Artificial Sequence
  Description of Artificial Sequence: Synthetic oligonucleotide
ugguaauuaaccugacauu

SEQ ID NO: 609321 - RNA, 19 nt, Artificial Sequence
  Description of Artificial Sequence: Synthetic oligonucleotide
acugcguaucacuucauua

SEQ ID NO: 609322 - RNA, 19 nt, Artificial Sequence
  Description of Artificial Sequence: Synthetic oligonucleotide
aaacuugcucauacucggg

SEQ ID NO: 609323 - RNA, 19 nt, Artificial Sequence
  Description of Artificial Sequence: Synthetic oligonucleotide
acucccuggacaauaaaug

SEQ ID NO: 609324 - RNA, 19 nt, Artificial Sequence
  Description of Artificial Sequence: Synthetic oligonucleotide
uuaguuuugcaugcaugcu

SEQ ID NO: 609325 - RNA, 19 nt, Artificial Sequence
  Description of Artificial Sequence: Synthetic oligonucleotide
ucagacuugcugaguaaaa

SEQ ID NO: 609326 - RNA, 19 nt, Artificial Sequence
  Description of Artificial Sequence: Synthetic oligonucleotide
auacacuccaggauaccgg

SEQ ID NO: 609327 - RNA, 19 nt, Artificial Sequence
  Description of Artificial Sequence: Synthetic oligonucleotide
cauauaauauauauauuuu

SEQ ID NO: 609328 - RNA, 19 nt, Artificial Sequence
  Description of Artificial Sequence: Synthetic oligonucleotide
uccaccauaggaacacauc

SEQ ID NO: 609329 - RNA, 19 nt, Artificial Sequence
  Description of Artificial Sequence: Synthetic oligonucleotide
aaguauaacgucagagcaa

SEQ ID NO: 609330 - RNA, 19 nt, Artificial Sequence
  Description of Artificial Sequence: Synthetic oligonucleotide
ucuauauauuuaugccuua

SEQ ID NO: 609331 - RNA, 19 nt, Artificial Sequence
  Description of Artificial Sequence: Synthetic oligonucleotide
aacgggaagaaggcgcuug

SEQ ID NO: 609332 - RNA, 19 nt, Artificial Sequence
  Description of Artificial Sequence: Synthetic oligonucleotide
cucgggaagaaaugaaaca

SEQ ID NO: 609333 - RNA, 19 nt, Artificial Sequence
  Description of Artificial Sequence: Synthetic oligonucleotide
uacacagcuauaugucuau

SEQ ID NO: 609334 - RNA, 19 nt, Artificial Sequence
  Description of Artificial Sequence: Synthetic oligonucleotide
ucucaauucccagucuacu

SEQ ID NO: 609335 - RNA, 19 nt, Artificial Sequence
  Description of Artificial Sequence: Synthetic oligonucleotide
gaugcagacaagaaagcua

SEQ ID NO: 609336 - RNA, 19 nt, Artificial Sequence
  Description of Artificial Sequence: Synthetic oligonucleotide
acgguaauggcugccauga

SEQ ID NO: 609337 - RNA, 19 nt, Artificial Sequence
  Description of Artificial Sequence: Synthetic oligonucleotide
gaaagguuuugauccagua

SEQ ID NO: 609338 - RNA, 19 nt, Artificial Sequence
  Description of Artificial Sequence: Synthetic oligonucleotide
acuuauccaagcaaguuua

SEQ ID NO: 609339 - RNA, 19 nt, Artificial Sequence
  Description of Artificial Sequence: Synthetic oligonucleotide
uugcaugaaugaucaguga

SEQ ID NO: 609340 - RNA, 19 nt, Artificial Sequence
  Description of Artificial Sequence: Synthetic oligonucleotide
ucucucauucccucauacu

SEQ ID NO: 609341 - RNA, 19 nt, Artificial Sequence
  Description of Artificial Sequence: Synthetic oligonucleotide
cagaacgguuuccaauggg

SEQ ID NO: 609342 - RNA, 19 nt, Artificial Sequence
  Description of Artificial Sequence: Synthetic oligonucleotide
ucgaaguaacacucucugu

SEQ ID NO: 609343 - RNA, 19 nt, Artificial Sequence
  Description of Artificial Sequence: Synthetic oligonucleotide
ccuaucacccuuccaaucc

SEQ ID NO: 609344 - RNA, 19 nt, Artificial Sequence
  Description of Artificial Sequence: Synthetic oligonucleotide
uuccaaucccuucuuuaau

SEQ ID NO: 609345 - RNA, 19 nt, Artificial Sequence
  Description of Artificial Sequence: Synthetic oligonucleotide
uccccucuaagacaaguuu

SEQ ID NO: 609346 - RNA, 19 nt, Artificial Sequence
  Description of Artificial Sequence: Synthetic oligonucleotide
uuaucucacucuguacugu

SEQ ID NO: 609347 - RNA, 19 nt, Artificial Sequence
  Description of Artificial Sequence: Synthetic oligonucleotide
ucagcgagguggcuauuac

SEQ ID NO: 609348 - RNA, 19 nt, Artificial Sequence
  Description of Artificial Sequence: Synthetic oligonucleotide
augaucagugaacugcgua

SEQ ID NO: 609349 - RNA, 19 nt, Artificial Sequence
  Description of Artificial Sequence: Synthetic oligonucleotide
uacagucucucauucccuc

SEQ ID NO: 609350 - RNA, 19 nt, Artificial Sequence
  Description of Artificial Sequence: Synthetic oligonucleotide
cccaggaucaauuuacuuc

SEQ ID NO: 609351 - RNA, 19 nt, Artificial Sequence
  Description of Artificial Sequence: Synthetic oligonucleotide
auaccggguauuaucucgg

SEQ ID NO: 609352 - RNA, 19 nt, Artificial Sequence
  Description of Artificial Sequence: Synthetic oligonucleotide
gguaaucuguaagauggcc

SEQ ID NO: 609353 - RNA, 19 nt, Artificial Sequence
  Description of Artificial Sequence: Synthetic oligonucleotide
gucuaauccaccauaggaa

SEQ ID NO: 609354 - RNA, 19 nt, Artificial Sequence
  Description of Artificial Sequence: Synthetic oligonucleotide
aacugcguaucacuucauu

SEQ ID NO: 609355 - RNA, 19 nt, Artificial Sequence
  Description of Artificial Sequence: Synthetic oligonucleotide
ucggauuaucucacucugu

SEQ ID NO: 609356 - RNA, 19 nt, Artificial Sequence
  Description of Artificial Sequence: Synthetic oligonucleotide
gacguaaaacaugcaagga

SEQ ID NO: 609357 - RNA, 19 nt, Artificial Sequence
  Description of Artificial Sequence: Synthetic oligonucleotide
aacaaggaucucucauuuu

SEQ ID NO: 609358 - RNA, 19 nt, Artificial Sequence
  Description of Artificial Sequence: Synthetic oligonucleotide
cauuggcggacguaaaaca

SEQ ID NO: 609359 - RNA, 19 nt, Artificial Sequence
  Description of Artificial Sequence: Synthetic oligonucleotide
aaguguggaguaaaauaau

SEQ ID NO: 609360 - RNA, 19 nt, Artificial Sequence
  Description of Artificial Sequence: Synthetic oligonucleotide
cauacucgggaagaaauga

SEQ ID NO: 609361 - RNA, 19 nt, Artificial Sequence
  Description of Artificial Sequence: Synthetic oligonucleotide
guuuaggauuccauuugug

SEQ ID NO: 609362 - RNA, 19 nt, Artificial Sequence
  Description of Artificial Sequence: Synthetic oligonucleotide
gguauuaucucggauuauc

SEQ ID NO: 609363 - RNA, 19 nt, Artificial Sequence
  Description of Artificial Sequence: Synthetic oligonucleotide
aacaccaguuuuaguuuug

SEQ ID NO: 609364 - RNA, 19 nt, Artificial Sequence
  Description of Artificial Sequence: Synthetic oligonucleotide
aaacggagugagaugguaa

SEQ ID NO: 609365 - RNA, 19 nt, Artificial Sequence
  Description of Artificial Sequence: Synthetic oligonucleotide
cuaauccaccauaggaaca

SEQ ID NO: 609366 - RNA, 19 nt, Artificial Sequence
  Description of Artificial Sequence: Synthetic oligonucleotide
auagaaccuaaaucucaaa

SEQ ID NO: 609367 - RNA, 19 nt, Artificial Sequence
  Description of Artificial Sequence: Synthetic oligonucleotide
uagguaaugugggaacggu

SEQ ID NO: 609368 - RNA, 19 nt, Artificial Sequence
  Description of Artificial Sequence: Synthetic oligonucleotide
guaaagagacuugcaaguc

SEQ ID NO: 609369 - RNA, 19 nt, Artificial Sequence
  Description of Artificial Sequence: Synthetic oligonucleotide
aggauaccggguauuaucu

SEQ ID NO: 609370 - RNA, 19 nt, Artificial Sequence
  Description of Artificial Sequence: Synthetic oligonucleotide
uugcucauacucgggaaga

SEQ ID NO: 609371 - RNA, 19 nt, Artificial Sequence
  Description of Artificial Sequence: Synthetic oligonucleotide
uaauacacuccaggauacc

SEQ ID NO: 609372 - RNA, 19 nt, Artificial Sequence
  Description of Artificial Sequence: Synthetic oligonucleotide
uugugcguguuccuugaau

SEQ ID NO: 609373 - RNA, 19 nt, Artificial Sequence
  Description of Artificial Sequence: Synthetic oligonucleotide
aagggaaucccaaguuaca

SEQ ID NO: 609374 - RNA, 19 nt, Artificial Sequence
  Description of Artificial Sequence: Synthetic oligonucleotide
uacucacacauuacuucau

SEQ ID NO: 609375 - RNA, 19 nt, Artificial Sequence
  Description of Artificial Sequence: Synthetic oligonucleotide
ccauauaauauauauauuu

SEQ ID NO: 609376 - RNA, 19 nt, Artificial Sequence
  Description of Artificial Sequence: Synthetic oligonucleotide
gacauuggcggacguaaaa

SEQ ID NO: 609377 - RNA, 19 nt, Artificial Sequence
  Description of Artificial Sequence: Synthetic oligonucleotide
guguuuugauggcuuacuc

SEQ ID NO: 609378 - RNA, 19 nt, Artificial Sequence
  Description of Artificial Sequence: Synthetic oligonucleotide
aaugaucagugaacugcgu

SEQ ID NO: 609379 - RNA, 19 nt, Artificial Sequence
  Description of Artificial Sequence: Synthetic oligonucleotide
uaaacggagugagauggua

SEQ ID NO: 609380 - RNA, 19 nt, Artificial Sequence
  Description of Artificial Sequence: Synthetic oligonucleotide
aggucuguauugucaauua

SEQ ID NO: 609381 - RNA, 19 nt, Artificial Sequence
  Description of Artificial Sequence: Synthetic oligonucleotide
guaaugccgagcaugguaa

SEQ ID NO: 609382 - RNA, 19 nt, Artificial Sequence
  Description of Artificial Sequence: Synthetic oligonucleotide
acauguaacaccaguuuua

SEQ ID NO: 609383 - RNA, 19 nt, Artificial Sequence
  Description of Artificial Sequence: Synthetic oligonucleotide
acugauuaacaaguuucau

SEQ ID NO: 609384 - RNA, 19 nt, Artificial Sequence
  Description of Artificial Sequence: Synthetic oligonucleotide
acaugcaaggaugggccag

SEQ ID NO: 609385 - RNA, 19 nt, Artificial Sequence
  Description of Artificial Sequence: Synthetic oligonucleotide
gagcaacgggaagaaggcg

SEQ ID NO: 609386 - RNA, 19 nt, Artificial Sequence
  Description of Artificial Sequence: Synthetic oligonucleotide
caggcaugaagggaauccc

SEQ ID NO: 609387 - RNA, 19 nt, Artificial Sequence
  Description of Artificial Sequence: Synthetic oligonucleotide
cagucgaaguaacacucuc

SEQ ID NO: 609388 - RNA, 19 nt, Artificial Sequence
  Description of Artificial Sequence: Synthetic oligonucleotide
cuuacucuugauggucaag

SEQ ID NO: 609389 - RNA, 19 nt, Artificial Sequence
  Description of Artificial Sequence: Synthetic oligonucleotide
caacuguucgcugcucggg

SEQ ID NO: 609390 - RNA, 19 nt, Artificial Sequence
  Description of Artificial Sequence: Synthetic oligonucleotide
ggguaaaguauaacgucag

SEQ ID NO: 609391 - RNA, 19 nt, Artificial Sequence
  Description of Artificial Sequence: Synthetic oligonucleotide
augcaugcucgguugggca

SEQ ID NO: 609392 - RNA, 19 nt, Artificial Sequence
  Description of Artificial Sequence: Synthetic oligonucleotide
caugcaugcucgguugggc

SEQ ID NO: 609393 - RNA, 19 nt, Artificial Sequence
  Description of Artificial Sequence: Synthetic oligonucleotide
cucauacugaguauuaauu

SEQ ID NO: 609394 - RNA, 19 nt, Artificial Sequence
  Description of Artificial Sequence: Synthetic oligonucleotide
ggcacugcacuucagaaua

SEQ ID NO: 609395 - RNA, 19 nt, Artificial Sequence
  Description of Artificial Sequence: Synthetic oligonucleotide
guucaccuauuaguuuagg

SEQ ID NO: 609396 - RNA, 19 nt, Artificial Sequence
  Description of Artificial Sequence: Synthetic oligonucleotide
augcaguguauacuguaua

SEQ ID NO: 609397 - RNA, 19 nt, Artificial Sequence
  Description of Artificial Sequence: Synthetic oligonucleotide
caugaaugaucagugaacu

SEQ ID NO: 609398 - RNA, 19 nt, Artificial Sequence
  Description of Artificial Sequence: Synthetic oligonucleotide
cuugcaaguccaauaccaa

SEQ ID NO: 609399 - RNA, 19 nt, Artificial Sequence
  Description of Artificial Sequence: Synthetic oligonucleotide
uccacccagcauuuuacuu

SEQ ID NO: 609400 - RNA, 19 nt, Artificial Sequence
  Description of Artificial Sequence: Synthetic oligonucleotide
cggacguaaaacaugcaag

SEQ ID NO: 609401 - RNA, 19 nt, Artificial Sequence
  Description of Artificial Sequence: Synthetic oligonucleotide
gugaacugcguaucacuuc

SEQ ID NO: 609402 - RNA, 19 nt, Artificial Sequence
  Description of Artificial Sequence: Synthetic oligonucleotide
ucagaauuaggaggacaau

SEQ ID NO: 609403 - RNA, 19 nt, Artificial Sequence
  Description of Artificial Sequence: Synthetic oligonucleotide
gguaaugugggaacgguaa

SEQ ID NO: 609404 - RNA, 19 nt, Artificial Sequence
  Description of Artificial Sequence: Synthetic oligonucleotide
aaggcgaugcagaacgguu

SEQ ID NO: 609405 - RNA, 19 nt, Artificial Sequence
  Description of Artificial Sequence: Synthetic oligonucleotide
ggauuaucucacucuguac

SEQ ID NO: 609406 - RNA, 19 nt, Artificial Sequence
  Description of Artificial Sequence: Synthetic oligonucleotide
gcucuuaucagucgaagua

SEQ ID NO: 609407 - RNA, 19 nt, Artificial Sequence
  Description of Artificial Sequence: Synthetic oligonucleotide
gcaugaaugaucagugaac

SEQ ID NO: 609408 - RNA, 19 nt, Artificial Sequence
  Description of Artificial Sequence: Synthetic oligonucleotide
gaagaaguguggaguaaaa

SEQ ID NO: 609409 - RNA, 19 nt, Artificial Sequence
  Description of Artificial Sequence: Synthetic oligonucleotide
ugcaugcucgguugggcaa

SEQ ID NO: 609410 - RNA, 19 nt, Artificial Sequence
  Description of Artificial Sequence: Synthetic oligonucleotide
auuuucuaguaaagagacu

SEQ ID NO: 609411 - RNA, 19 nt, Artificial Sequence
  Description of Artificial Sequence: Synthetic oligonucleotide
guaacaaggaucucucauu

SEQ ID NO: 609412 - RNA, 19 nt, Artificial Sequence
  Description of Artificial Sequence: Synthetic oligonucleotide
gcucuaaaaucauccgaug

SEQ ID NO: 609413 - RNA, 19 nt, Artificial Sequence
  Description of Artificial Sequence: Synthetic oligonucleotide
auuggcggacguaaaacau

SEQ ID NO: 609414 - RNA, 19 nt, Artificial Sequence
  Description of Artificial Sequence: Synthetic oligonucleotide
uggcuuacucuugaugguc

SEQ ID NO: 609415 - RNA, 19 nt, Artificial Sequence
  Description of Artificial Sequence: Synthetic oligonucleotide
cucauacucgggaagaaau

SEQ ID NO: 609416 - RNA, 19 nt, Artificial Sequence
  Description of Artificial Sequence: Synthetic oligonucleotide
gguaaugccgagcauggua

SEQ ID NO: 609417 - RNA, 19 nt, Artificial Sequence
  Description of Artificial Sequence: Synthetic oligonucleotide
aaugccgagcaugguaauu

SEQ ID NO: 609418 - RNA, 19 nt, Artificial Sequence
  Description of Artificial Sequence: Synthetic oligonucleotide
cucgguugggcaacaucug

SEQ ID NO: 609419 - RNA, 19 nt, Artificial Sequence
  Description of Artificial Sequence: Synthetic oligonucleotide
ugcucgguugggcaacauc

SEQ ID NO: 609420 - RNA, 19 nt, Artificial Sequence
  Description of Artificial Sequence: Synthetic oligonucleotide
cucuuaucagucgaaguaa

SEQ ID NO: 609421 - RNA, 19 nt, Artificial Sequence
  Description of Artificial Sequence: Synthetic oligonucleotide
acauuacuucaugcuuuuc

SEQ ID NO: 609422 - RNA, 19 nt, Artificial Sequence
  Description of Artificial Sequence: Synthetic oligonucleotide
caccuauuaguuuaggauu

SEQ ID NO: 609423 - RNA, 19 nt, Artificial Sequence
  Description of Artificial Sequence: Synthetic oligonucleotide
gguaaaguauaacgucaga

SEQ ID NO: 609424 - RNA, 19 nt, Artificial Sequence
  Description of Artificial Sequence: Synthetic oligonucleotide
agugaacugcguaucacuu

SEQ ID NO: 609425 - RNA, 19 nt, Artificial Sequence
  Description of Artificial Sequence: Synthetic oligonucleotide
gucuauauauuuaugccuu

SEQ ID NO: 609426 - RNA, 19 nt, Artificial Sequence
  Description of Artificial Sequence: Synthetic oligonucleotide
cuguacuguuucaaucaga

SEQ ID NO: 609427 - RNA, 19 nt, Artificial Sequence
  Description of Artificial Sequence: Synthetic oligonucleotide
ugaggcacgcccaggccua

SEQ ID NO: 609428 - RNA, 19 nt, Artificial Sequence
  Description of Artificial Sequence: Synthetic oligonucleotide
agagacuugcaaguccaau

SEQ ID NO: 609429 - RNA, 19 nt, Artificial Sequence
  Description of Artificial Sequence: Synthetic oligonucleotide
gucucaauucccagucuac

SEQ ID NO: 609430 - RNA, 19 nt, Artificial Sequence
  Description of Artificial Sequence: Synthetic oligonucleotide
ugacucccuggacaauaaa

SEQ ID NO: 609431 - RNA, 19 nt, Artificial Sequence
  Description of Artificial Sequence: Synthetic oligonucleotide
gauggccgcaugcagugua

SEQ ID NO: 609432 - RNA, 19 nt, Artificial Sequence
  Description of Artificial Sequence: Synthetic oligonucleotide
acgucagagcaaaggcugg

SEQ ID NO: 609433 - RNA, 19 nt, Artificial Sequence
  Description of Artificial Sequence: Synthetic oligonucleotide
ugccgagcaugguaauuaa

SEQ ID NO: 609434 - RNA, 19 nt, Artificial Sequence
  Description of Artificial Sequence: Synthetic oligonucleotide
guauuaccuuuauugaguu

SEQ ID NO: 609435 - RNA, 19 nt, Artificial Sequence
  Description of Artificial Sequence: Synthetic oligonucleotide
gccauguuaagcucuuauc

SEQ ID NO: 609436 - RNA, 19 nt, Artificial Sequence
  Description of Artificial Sequence: Synthetic oligonucleotide
caccauaggaacacaucaa

SEQ ID NO: 609437 - RNA, 19 nt, Artificial Sequence
  Description of Artificial Sequence: Synthetic oligonucleotide
acgguuuccaauggguaaa

SEQ ID NO: 609438 - RNA, 19 nt, Artificial Sequence
  Description of Artificial Sequence: Synthetic oligonucleotide
uaccggguauuaucucgga

SEQ ID NO: 609439 - RNA, 19 nt, Artificial Sequence
  Description of Artificial Sequence: Synthetic oligonucleotide
gaacgguuuccaaugggua

SEQ ID NO: 609440 - RNA, 19 nt, Artificial Sequence
  Description of Artificial Sequence: Synthetic oligonucleotide
accaaugauagaaccuaaa

SEQ ID NO: 609441 - RNA, 19 nt, Artificial Sequence
  Description of Artificial Sequence: Synthetic oligonucleotide
acggagugagaugguaaug

SEQ ID NO: 609442 - RNA, 19 nt, Artificial Sequence
  Description of Artificial Sequence: Synthetic oligonucleotide
uaaugccgagcaugguaau

SEQ ID NO: 609443 - RNA, 19 nt, Artificial Sequence
  Description of Artificial Sequence: Synthetic oligonucleotide
ccgcaugcaguguauacug

SEQ ID NO: 609444 - RNA, 19 nt, Artificial Sequence
  Description of Artificial Sequence: Synthetic oligonucleotide
auacucgggaagaaaugaa

SEQ ID NO: 609445 - RNA, 19 nt, Artificial Sequence
  Description of Artificial Sequence: Synthetic oligonucleotide
accggguauuaucucggau

SEQ ID NO: 609446 - RNA, 19 nt, Artificial Sequence
  Description of Artificial Sequence: Synthetic oligonucleotide
ccagucuacuucuuuccac

SEQ ID NO: 609447 - RNA, 19 nt, Artificial Sequence
  Description of Artificial Sequence: Synthetic oligonucleotide
guauuaauuggaaguacuu

SEQ ID NO: 609448 - RNA, 19 nt, Artificial Sequence
  Description of Artificial Sequence: Synthetic oligonucleotide
gcgagguggcuauuacagg

SEQ ID NO: 609449 - RNA, 19 nt, Artificial Sequence
  Description of Artificial Sequence: Synthetic oligonucleotide
ugcucauacucgggaagaa

SEQ ID NO: 609450 - RNA, 19 nt, Artificial Sequence
  Description of Artificial Sequence: Synthetic oligonucleotide
gcggacguaaaacaugcaa

SEQ ID NO: 609451 - RNA, 19 nt, Artificial Sequence
  Description of Artificial Sequence: Synthetic oligonucleotide
guauaguuagcaugagcuu

SEQ ID NO: 609452 - RNA, 19 nt, Artificial Sequence
  Description of Artificial Sequence: Synthetic oligonucleotide
aucccuucuuuaauacacu

SEQ ID NO: 609453 - RNA, 19 nt, Artificial Sequence
  Description of Artificial Sequence: Synthetic oligonucleotide
uggcuauuacaggucuuuc

SEQ ID NO: 609454 - RNA, 19 nt, Artificial Sequence
  Description of Artificial Sequence: Synthetic oligonucleotide
ccccucuaagacaaguuuc

SEQ ID NO: 609455 - RNA, 19 nt, Artificial Sequence
  Description of Artificial Sequence: Synthetic oligonucleotide
agguuuugauccaguauua

SEQ ID NO: 609456 - RNA, 19 nt, Artificial Sequence
  Description of Artificial Sequence: Synthetic oligonucleotide
gacucccuggacaauaaau

SEQ ID NO: 609457 - RNA, 19 nt, Artificial Sequence
  Description of Artificial Sequence: Synthetic oligonucleotide
caugcaguguauacuguau

SEQ ID NO: 609458 - RNA, 19 nt, Artificial Sequence
  Description of Artificial Sequence: Synthetic oligonucleotide
aagacaagugaggcuccuu

SEQ ID NO: 609459 - RNA, 19 nt, Artificial Sequence
  Description of Artificial Sequence: Synthetic oligonucleotide
cacagcuauaugucuauau

SEQ ID NO: 609460 - RNA, 19 nt, Artificial Sequence
  Description of Artificial Sequence: Synthetic oligonucleotide
cagugaacugcguaucacu

SEQ ID NO: 609461 - RNA, 19 nt, Artificial Sequence
  Description of Artificial Sequence: Synthetic oligonucleotide
ccuauuaguuuaggauucc

SEQ ID NO: 609462 - RNA, 19 nt, Artificial Sequence
  Description of Artificial Sequence: Synthetic oligonucleotide
gguaucuuuaaaaguggcu

SEQ ID NO: 609463 - RNA, 19 nt, Artificial Sequence
  Description of Artificial Sequence: Synthetic oligonucleotide
uaguuagcaugagcuuuuc

SEQ ID NO: 609464 - RNA, 19 nt, Artificial Sequence
  Description of Artificial Sequence: Synthetic oligonucleotide
ggcgaugcagaacgguuuc

SEQ ID NO: 609465 - RNA, 19 nt, Artificial Sequence
  Description of Artificial Sequence: Synthetic oligonucleotide
ggcuauuacaggucuuucu

SEQ ID NO: 609466 - RNA, 19 nt, Artificial Sequence
  Description of Artificial Sequence: Synthetic oligonucleotide
ccauagggcucuugguccc

SEQ ID NO: 609467 - RNA, 19 nt, Artificial Sequence
  Description of Artificial Sequence: Synthetic oligonucleotide
auugugcguguuccuugaa

SEQ ID NO: 609468 - RNA, 19 nt, Artificial Sequence
  Description of Artificial Sequence: Synthetic oligonucleotide
guaaugugggaacgguaau

SEQ ID NO: 609469 - RNA, 19 nt, Artificial Sequence
  Description of Artificial Sequence: Synthetic oligonucleotide
acucucagcgagguggcua

SEQ ID NO: 609470 - RNA, 19 nt, Artificial Sequence
  Description of Artificial Sequence: Synthetic oligonucleotide
gaaggcgaugcagaacggu

SEQ ID NO: 609471 - RNA, 19 nt, Artificial Sequence
  Description of Artificial Sequence: Synthetic oligonucleotide
cagcgagguggcuauuaca

SEQ ID NO: 609472 - RNA, 19 nt, Artificial Sequence
  Description of Artificial Sequence: Synthetic oligonucleotide
gugaggcacgcccaggccu

SEQ ID NO: 609473 - RNA, 19 nt, Artificial Sequence
  Description of Artificial Sequence: Synthetic oligonucleotide
ugguaaugccgagcauggu

SEQ ID NO: 609474 - RNA, 19 nt, Artificial Sequence
  Description of Artificial Sequence: Synthetic oligonucleotide
ccaauggguaaaguauaac

SEQ ID NO: 609475 - RNA, 19 nt, Artificial Sequence
  Description of Artificial Sequence: Synthetic oligonucleotide
ggcucuaaaaucauccgau

SEQ ID NO: 609476 - RNA, 19 nt, Artificial Sequence
  Description of Artificial Sequence: Synthetic oligonucleotide
gccaugauuguuagguauc

SEQ ID NO: 609477 - RNA, 19 nt, Artificial Sequence
  Description of Artificial Sequence: Synthetic oligonucleotide
agguaaugugggaacggua

SEQ ID NO: 609478 - RNA, 19 nt, Artificial Sequence
  Description of Artificial Sequence: Synthetic oligonucleotide
ggaacgguaauggcugcca

SEQ ID NO: 609479 - RNA, 19 nt, Artificial Sequence
  Description of Artificial Sequence: Synthetic oligonucleotide
ggccgcaugcaguguauac

SEQ ID NO: 609480 - RNA, 19 nt, Artificial Sequence
  Description of Artificial Sequence: Synthetic oligonucleotide
ggcuuacucuugaugguca

SEQ ID NO: 609481 - RNA, 19 nt, Artificial Sequence
  Description of Artificial Sequence: Synthetic oligonucleotide
gcucgguugggcaacaucu

SEQ ID NO: 609482 - RNA, 19 nt, Artificial Sequence
  Description of Artificial Sequence: Synthetic oligonucleotide
cugguguuuugauggcuua

SEQ ID NO: 609483 - RNA, 19 nt, Artificial Sequence
  Description of Artificial Sequence: Synthetic oligonucleotide
ccaaugauagaaccuaaau

SEQ ID NO: 609484 - RNA, 19 nt, Artificial Sequence
  Description of Artificial Sequence: Synthetic oligonucleotide
gaacgguaauggcugccau

SEQ ID NO: 609485 - RNA, 19 nt, Artificial Sequence
  Description of Artificial Sequence: Synthetic oligonucleotide
aggcgaugcagaacgguuu

SEQ ID NO: 609486 - RNA, 19 nt, Artificial Sequence
  Description of Artificial Sequence: Synthetic oligonucleotide
ccauaggaacacaucaacu

SEQ ID NO: 609487 - RNA, 19 nt, Artificial Sequence
  Description of Artificial Sequence: Synthetic oligonucleotide
gugcguguuccuugaauau

SEQ ID NO: 609488 - RNA, 19 nt, Artificial Sequence
  Description of Artificial Sequence: Synthetic oligonucleotide
uacucucagcgagguggcu

SEQ ID NO: 609489 - RNA, 19 nt, Artificial Sequence
  Description of Artificial Sequence: Synthetic oligonucleotide
uacucugcauggggcuggu

SEQ ID NO: 609490 - RNA, 19 nt, Artificial Sequence
  Description of Artificial Sequence: Synthetic oligonucleotide
gcagacaagaaagcuauuu

SEQ ID NO: 609491 - RNA, 19 nt, Artificial Sequence
  Description of Artificial Sequence: Synthetic oligonucleotide
cccucuaagacaaguuucu

SEQ ID NO: 609492 - RNA, 19 nt, Artificial Sequence
  Description of Artificial Sequence: Synthetic oligonucleotide
gcuuacucuugauggucaa

SEQ ID NO: 609493 - RNA, 19 nt, Artificial Sequence
  Description of Artificial Sequence: Synthetic oligonucleotide
cucucagcgagguggcuau

SEQ ID NO: 609494 - RNA, 19 nt, Artificial Sequence
  Description of Artificial Sequence: Synthetic oligonucleotide
ggccauguuaagcucuuau

SEQ ID NO: 609495 - RNA, 19 nt, Artificial Sequence
  Description of Artificial Sequence: Synthetic oligonucleotide
acacuccaggauaccgggu

SEQ ID NO: 609496 - RNA, 19 nt, Artificial Sequence
  Description of Artificial Sequence: Synthetic oligonucleotide
gcguaucacuucauuacaa

SEQ ID NO: 609497 - RNA, 19 nt, Artificial Sequence
  Description of Artificial Sequence: Synthetic oligonucleotide
gcaugguaauuaaccugac

SEQ ID NO: 609498 - RNA, 19 nt, Artificial Sequence
  Description of Artificial Sequence: Synthetic oligonucleotide
aucacccuuccaaucccuu

SEQ ID NO: 609499 - RNA, 19 nt, Artificial Sequence
  Description of Artificial Sequence: Synthetic oligonucleotide
guaaacggagugagauggu

SEQ ID NO: 609500 - RNA, 19 nt, Artificial Sequence
  Description of Artificial Sequence: Synthetic oligonucleotide
cccaaguuacauguacaca

SEQ ID NO: 609501 - RNA, 19 nt, Artificial Sequence
  Description of Artificial Sequence: Synthetic oligonucleotide
cggauuaucucacucugua

SEQ ID NO: 609502 - RNA, 19 nt, Artificial Sequence
  Description of Artificial Sequence: Synthetic oligonucleotide
caggccuaucacccuucca

SEQ ID NO: 609503 - RNA, 19 nt, Artificial Sequence
  Description of Artificial Sequence: Synthetic oligonucleotide
ccaggccuaucacccuucc

SEQ ID NO: 609504 - RNA, 19 nt, Artificial Sequence
  Description of Artificial Sequence: Synthetic oligonucleotide
gcaaaucuauucaacuguu

SEQ ID NO: 609505 - RNA, 19 nt, Artificial Sequence
  Description of Artificial Sequence: Synthetic oligonucleotide
cucagcgagguggcuauua

SEQ ID NO: 609506 - RNA, 19 nt, Artificial Sequence
  Description of Artificial Sequence: Synthetic oligonucleotide
gcucauacucgggaagaaa

SEQ ID NO: 609507 - RNA, 19 nt, Artificial Sequence
  Description of Artificial Sequence: Synthetic oligonucleotide
gcgaugcagaacgguuucc

SEQ ID NO: 609508 - RNA, 19 nt, Artificial Sequence
  Description of Artificial Sequence: Synthetic oligonucleotide
cugguacucucagcgaggu

SEQ ID NO: 609509 - RNA, 19 nt, Artificial Sequence
  Description of Artificial Sequence: Synthetic oligonucleotide
auggccgcaugcaguguau

SEQ ID NO: 609510 - RNA, 19 nt, Artificial Sequence
  Description of Artificial Sequence: Synthetic oligonucleotide
gcaugcucgguugggcaac

SEQ ID NO: 609511 - RNA, 19 nt, Artificial Sequence
  Description of Artificial Sequence: Synthetic oligonucleotide
gcaguguauacuguauaau

SEQ ID NO: 609512 - RNA, 19 nt, Artificial Sequence
  Description of Artificial Sequence: Synthetic oligonucleotide
caugcaaggaugggccagu

SEQ ID NO: 609513 - RNA, 19 nt, Artificial Sequence
  Description of Artificial Sequence: Synthetic oligonucleotide
uggccgcaugcaguguaua

SEQ ID NO: 609514 - RNA, 19 nt, Artificial Sequence
  Description of Artificial Sequence: Synthetic oligonucleotide
gccgagcaugguaauuaac

SEQ ID NO: 609515 - RNA, 19 nt, Artificial Sequence
  Description of Artificial Sequence: Synthetic oligonucleotide
cggguauuaucucggauua

SEQ ID NO: 609516 - RNA, 19 nt, Artificial Sequence
  Description of Artificial Sequence: Synthetic oligonucleotide
cgggaagaugagugagagc

SEQ ID NO: 609517 - RNA, 19 nt, Artificial Sequence
  Description of Artificial Sequence: Synthetic oligonucleotide
ccggguauuaucucggauu

SEQ ID NO: 609518 - RNA, 19 nt, Artificial Sequence
  Description of Artificial Sequence: Synthetic oligonucleotide
caugcucgguugggcaaca

SEQ ID NO: 609519 - RNA, 19 nt, Artificial Sequence
  Description of Artificial Sequence: Synthetic oligonucleotide
ccuugguaaagguguaaau

SEQ ID NO: 609520 - RNA, 19 nt, Artificial Sequence
  Description of Artificial Sequence: Synthetic oligonucleotide
gcuucuacccaggaucaau

SEQ ID NO: 609521 - RNA, 19 nt, Artificial Sequence
  Description of Artificial Sequence: Synthetic oligonucleotide
ggccuaucacccuuccaau

SEQ ID NO: 609522 - RNA, 19 nt, Artificial Sequence
  Description of Artificial Sequence: Synthetic oligonucleotide
cccuugguaaagguguaaa

SEQ ID NO: 609523 - RNA, 19 nt, Artificial Sequence
  Description of Artificial Sequence: Synthetic oligonucleotide
gccgcaugcaguguauacu

SEQ ID NO: 609524 - RNA, 19 nt, Artificial Sequence
  Description of Artificial Sequence: Synthetic oligonucleotide
ccaugauuguuagguaucu

SEQ ID NO: 609525 - RNA, 19 nt, Artificial Sequence
  Description of Artificial Sequence: Synthetic oligonucleotide
cgguuuccaauggguaaag

SEQ ID NO: 609526 - RNA, 19 nt, Artificial Sequence
  Description of Artificial Sequence: Synthetic oligonucleotide
ucucagcgagguggcuauu

SEQ ID NO: 609527 - RNA, 19 nt, Artificial Sequence
  Description of Artificial Sequence: Synthetic oligonucleotide
cgaugcagaacgguuucca

SEQ ID NO: 609528 - RNA, 19 nt, Artificial Sequence
  Description of Artificial Sequence: Synthetic oligonucleotide
ggcggacguaaaacaugca

SEQ ID NO: 609529 - RNA, 19 nt, Artificial Sequence
  Description of Artificial Sequence: Synthetic oligonucleotide
augcucgguugggcaacau

SEQ ID NO: 609530 - RNA, 19 nt, Artificial Sequence
  Description of Artificial Sequence: Synthetic oligonucleotide
gguagcucauuuggagaau

SEQ ID NO: 609531 - RNA, 19 nt, Artificial Sequence
  Description of Artificial Sequence: Synthetic oligonucleotide
ggguauuaucucggauuau

SEQ ID NO: 609532 - RNA, 19 nt, Artificial Sequence
  Description of Artificial Sequence: Synthetic oligonucleotide
cuccaggauaccggguauu

SEQ ID NO: 609533 - RNA, 19 nt, Artificial Sequence
  Description of Artificial Sequence: Synthetic oligonucleotide
cgcaugcaguguauacugu

SEQ ID NO: 609534 - RNA, 19 nt, Artificial Sequence
  Description of Artificial Sequence: Synthetic oligonucleotide
ccucuaagacaaguuucuu

SEQ ID NO: 609535 - RNA, 19 nt, Artificial Sequence
  Description of Artificial Sequence: Synthetic oligonucleotide
caacgggaagaaggcgcuu

SEQ ID NO: 609536 - RNA, 19 nt, Artificial Sequence
  Description of Artificial Sequence: Synthetic oligonucleotide
uuuauaagcauccagcuug

SEQ ID NO: 609537 - RNA, 19 nt, Artificial Sequence
  Description of Artificial Sequence: Synthetic oligonucleotide
aaaagaaucagcagagucc

SEQ ID NO: 609538 - RNA, 19 nt, Artificial Sequence
  Description of Artificial Sequence: Synthetic oligonucleotide
gaugaaaauaaugaggcgg

SEQ ID NO: 609539 - RNA, 19 nt, Artificial Sequence
  Description of Artificial Sequence: Synthetic oligonucleotide
uuaaauacaggucacggga

SEQ ID NO: 609540 - RNA, 19 nt, Artificial Sequence
  Description of Artificial Sequence: Synthetic oligonucleotide
uugaaaagaaucagcagag

SEQ ID NO: 609541 - RNA, 19 nt, Artificial Sequence
  Description of Artificial Sequence: Synthetic oligonucleotide
uuuaaauacaggucacggg

SEQ ID NO: 609542 - RNA, 19 nt, Artificial Sequence
  Description of Artificial Sequence: Synthetic oligonucleotide
ucgagauuuuaccagcucg

SEQ ID NO: 609543 - RNA, 19 nt, Artificial Sequence
  Description of Artificial Sequence: Synthetic oligonucleotide
gaucauaacucauagccug

SEQ ID NO: 609544 - RNA, 19 nt, Artificial Sequence
  Description of Artificial Sequence: Synthetic oligonucleotide
acucauagggcagaaaugc

SEQ ID NO: 609545 - RNA, 19 nt, Artificial Sequence
  Description of Artificial Sequence: Synthetic oligonucleotide
auacuuuaaacacugagau

SEQ ID NO: 609546 - RNA, 19 nt, Artificial Sequence
  Description of Artificial Sequence: Synthetic oligonucleotide
aauugugauucccucgguc

SEQ ID NO: 609547 - RNA, 19 nt, Artificial Sequence
  Description of Artificial Sequence: Synthetic oligonucleotide
uauuagacucaaaugcugc

SEQ ID NO: 609548 - RNA, 19 nt, Artificial Sequence
  Description of Artificial Sequence: Synthetic oligonucleotide
uaaauaaggagagagucca

SEQ ID NO: 609549 - RNA, 19 nt, Artificial Sequence
  Description of Artificial Sequence: Synthetic oligonucleotide
cuucuugugggauacauac

SEQ ID NO: 609550 - RNA, 19 nt, Artificial Sequence
  Description of Artificial Sequence: Synthetic oligonucleotide
acaauugugauucccucgg

SEQ ID NO: 609551 - RNA, 19 nt, Artificial Sequence
  Description of Artificial Sequence: Synthetic oligonucleotide
aggugagucgaauacuugc

SEQ ID NO: 609552 - RNA, 19 nt, Artificial Sequence
  Description of Artificial Sequence: Synthetic oligonucleotide
agcuuuauaagcauccagc

SEQ ID NO: 609553 - RNA, 19 nt, Artificial Sequence
  Description of Artificial Sequence: Synthetic oligonucleotide
aaugcaauguugauuuccg

SEQ ID NO: 609554 - RNA, 19 nt, Artificial Sequence
  Description of Artificial Sequence: Synthetic oligonucleotide
uuuaccagcucguuaaaca

SEQ ID NO: 609555 - RNA, 19 nt, Artificial Sequence
  Description of Artificial Sequence: Synthetic oligonucleotide
aaagaaucagcagagucca

SEQ ID NO: 609556 - RNA, 19 nt, Artificial Sequence
  Description of Artificial Sequence: Synthetic oligonucleotide
agguacacggccucuaggc

SEQ ID NO: 609557 - RNA, 19 nt, Artificial Sequence
  Description of Artificial Sequence: Synthetic oligonucleotide
uugauauccuccacaauug

SEQ ID NO: 609558 - RNA, 19 nt, Artificial Sequence
  Description of Artificial Sequence: Synthetic oligonucleotide
gauuuuaccagcucguuaa

SEQ ID NO: 609559 - RNA, 19 nt, Artificial Sequence
  Description of Artificial Sequence: Synthetic oligonucleotide
ucguuaaacaggcuggaca

SEQ ID NO: 609560 - RNA, 19 nt, Artificial Sequence
  Description of Artificial Sequence: Synthetic oligonucleotide
agcagaucauaacucauag

SEQ ID NO: 609561 - RNA, 19 nt, Artificial Sequence
  Description of Artificial Sequence: Synthetic oligonucleotide
ucucauauuuguaaacguc

SEQ ID NO: 609562 - RNA, 19 nt, Artificial Sequence
  Description of Artificial Sequence: Synthetic oligonucleotide
uugcaugucaacuucuugu

SEQ ID NO: 609563 - RNA, 19 nt, Artificial Sequence
  Description of Artificial Sequence: Synthetic oligonucleotide
gagauugagaauuucaagu

SEQ ID NO: 609564 - RNA, 19 nt, Artificial Sequence
  Description of Artificial Sequence: Synthetic oligonucleotide
uuugucguaagugcugacg

SEQ ID NO: 609565 - RNA, 19 nt, Artificial Sequence
  Description of Artificial Sequence: Synthetic oligonucleotide
uguagagaaggaugaugcg

SEQ ID NO: 609566 - RNA, 19 nt, Artificial Sequence
  Description of Artificial Sequence: Synthetic oligonucleotide
aacacauuacucucuugcu

SEQ ID NO: 609567 - RNA, 19 nt, Artificial Sequence
  Description of Artificial Sequence: Synthetic oligonucleotide
gauaggauucuucaucuga

SEQ ID NO: 609568 - RNA, 19 nt, Artificial Sequence
  Description of Artificial Sequence: Synthetic oligonucleotide
ugucacuucauaagcgcag

SEQ ID NO: 609569 - RNA, 19 nt, Artificial Sequence
  Description of Artificial Sequence: Synthetic oligonucleotide
ugugcguggauccuaucag

SEQ ID NO: 609570 - RNA, 19 nt, Artificial Sequence
  Description of Artificial Sequence: Synthetic oligonucleotide
uggucuagaguucuugaug

SEQ ID NO: 609571 - RNA, 19 nt, Artificial Sequence
  Description of Artificial Sequence: Synthetic oligonucleotide
acugaugcgcuccuuccgc

SEQ ID NO: 609572 - RNA, 19 nt, Artificial Sequence
  Description of Artificial Sequence: Synthetic oligonucleotide
aauaaggagagaguccacu

SEQ ID NO: 609573 - RNA, 19 nt, Artificial Sequence
  Description of Artificial Sequence: Synthetic oligonucleotide
ucugcgaugugcuugugac

SEQ ID NO: 609574 - RNA, 19 nt, Artificial Sequence
  Description of Artificial Sequence: Synthetic oligonucleotide
aacucauagccugaaaagu

SEQ ID NO: 609575 - RNA, 19 nt, Artificial Sequence
  Description of Artificial Sequence: Synthetic oligonucleotide
gaagaacacaugugcagcc

SEQ ID NO: 609576 - RNA, 19 nt, Artificial Sequence
  Description of Artificial Sequence: Synthetic oligonucleotide
cucauauuuguaaacguca

SEQ ID NO: 609577 - RNA, 19 nt, Artificial Sequence
  Description of Artificial Sequence: Synthetic oligonucleotide
gugcuugugacgcagcgcg

SEQ ID NO: 609578 - RNA, 19 nt, Artificial Sequence
  Description of Artificial Sequence: Synthetic oligonucleotide
uguccuuaaugauuggggu

SEQ ID NO: 609579 - RNA, 19 nt, Artificial Sequence
  Description of Artificial Sequence: Synthetic oligonucleotide
agcggguagagauguaugg

SEQ ID NO: 609580 - RNA, 19 nt, Artificial Sequence
  Description of Artificial Sequence: Synthetic oligonucleotide
gagagaucccgcauggugg

SEQ ID NO: 609581 - RNA, 19 nt, Artificial Sequence
  Description of Artificial Sequence: Synthetic oligonucleotide
uugucguaagugcugacgu

SEQ ID NO: 609582 - RNA, 19 nt, Artificial Sequence
  Description of Artificial Sequence: Synthetic oligonucleotide
ucauauuuguaaacgucau

SEQ ID NO: 609583 - RNA, 19 nt, Artificial Sequence
  Description of Artificial Sequence: Synthetic oligonucleotide
ugcaugucaacuucuugug

SEQ ID NO: 609584 - RNA, 19 nt, Artificial Sequence
  Description of Artificial Sequence: Synthetic oligonucleotide
agauugagaauuucaaguu

SEQ ID NO: 609585 - RNA, 19 nt, Artificial Sequence
  Description of Artificial Sequence: Synthetic oligonucleotide
uccacaauugugauucccu

SEQ ID NO: 609586 - RNA, 19 nt, Artificial Sequence
  Description of Artificial Sequence: Synthetic oligonucleotide
cuggcuugcuccuacgacg

SEQ ID NO: 609587 - RNA, 19 nt, Artificial Sequence
  Description of Artificial Sequence: Synthetic oligonucleotide
auacaccugggacucauag

SEQ ID NO: 609588 - RNA, 19 nt, Artificial Sequence
  Description of Artificial Sequence: Synthetic oligonucleotide
ugggagagaucccgcaugg

SEQ ID NO: 609589 - RNA, 19 nt, Artificial Sequence
  Description of Artificial Sequence: Synthetic oligonucleotide
ucagacggggugaugaggu

SEQ ID NO: 609590 - RNA, 19 nt, Artificial Sequence
  Description of Artificial Sequence: Synthetic oligonucleotide
caaugcauuguccuuguac

SEQ ID NO: 609591 - RNA, 19 nt, Artificial Sequence
  Description of Artificial Sequence: Synthetic oligonucleotide
auagcgggcgcugacagcg

SEQ ID NO: 609592 - RNA, 19 nt, Artificial Sequence
  Description of Artificial Sequence: Synthetic oligonucleotide
guagugucgagucugugac

SEQ ID NO: 609593 - RNA, 19 nt, Artificial Sequence
  Description of Artificial Sequence: Synthetic oligonucleotide
ggucuagaguucuugaugc

SEQ ID NO: 609594 - RNA, 19 nt, Artificial Sequence
  Description of Artificial Sequence: Synthetic oligonucleotide
caugagucugugaagaaca

SEQ ID NO: 609595 - RNA, 19 nt, Artificial Sequence
  Description of Artificial Sequence: Synthetic oligonucleotide
agcgcagcgcaucucauuc

SEQ ID NO: 609596 - RNA, 19 nt, Artificial Sequence
  Description of Artificial Sequence: Synthetic oligonucleotide
agggaauacaccugggacu

SEQ ID NO: 609597 - RNA, 19 nt, Artificial Sequence
  Description of Artificial Sequence: Synthetic oligonucleotide
ugugcagcccgguauuuag

SEQ ID NO: 609598 - RNA, 19 nt, Artificial Sequence
  Description of Artificial Sequence: Synthetic oligonucleotide
gauucccucggucaugaug

SEQ ID NO: 609599 - RNA, 19 nt, Artificial Sequence
  Description of Artificial Sequence: Synthetic oligonucleotide
gaguaaccgaggcauugcg

SEQ ID NO: 609600 - RNA, 19 nt, Artificial Sequence
  Description of Artificial Sequence: Synthetic oligonucleotide
cuagaguucuugaugcuuc

SEQ ID NO: 609601 - RNA, 19 nt, Artificial Sequence
  Description of Artificial Sequence: Synthetic oligonucleotide
uggguacuccuuuagggug

SEQ ID NO: 609602 - RNA, 19 nt, Artificial Sequence
  Description of Artificial Sequence: Synthetic oligonucleotide
ggaccgacuucucagacgg

SEQ ID NO: 609603 - RNA, 19 nt, Artificial Sequence
  Description of Artificial Sequence: Synthetic oligonucleotide
ucggucaugaugucuguca

SEQ ID NO: 609604 - RNA, 19 nt, Artificial Sequence
  Description of Artificial Sequence: Synthetic oligonucleotide
caucgugagagcugguagg

SEQ ID NO: 609605 - RNA, 19 nt, Artificial Sequence
  Description of Artificial Sequence: Synthetic oligonucleotide
aaggacucagcguggcaag

SEQ ID NO: 609606 - RNA, 19 nt, Artificial Sequence
  Description of Artificial Sequence: Synthetic oligonucleotide
uacugcggcauuuucuuca

SEQ ID NO: 609607 - RNA, 19 nt, Artificial Sequence
  Description of Artificial Sequence: Synthetic oligonucleotide
ugcucgagauuuuaccagc

SEQ ID NO: 609608 - RNA, 19 nt, Artificial Sequence
  Description of Artificial Sequence: Synthetic oligonucleotide
ugacguuugcauccagcag

SEQ ID NO: 609609 - RNA, 19 nt, Artificial Sequence
  Description of Artificial Sequence: Synthetic oligonucleotide
ggucucauauuuguaaacg

SEQ ID NO: 609610 - RNA, 19 nt, Artificial Sequence
  Description of Artificial Sequence: Synthetic oligonucleotide
agaguaaccgaggcauugc

SEQ ID NO: 609611 - RNA, 19 nt, Artificial Sequence
  Description of Artificial Sequence: Synthetic oligonucleotide
auaccgcacagcuggguac

SEQ ID NO: 609612 - RNA, 19 nt, Artificial Sequence
  Description of Artificial Sequence: Synthetic oligonucleotide
auaggauucuucaucugag

SEQ ID NO: 609613 - RNA, 19 nt, Artificial Sequence
  Description of Artificial Sequence: Synthetic oligonucleotide
ugagcgaugaugucuuuau

SEQ ID NO: 609614 - RNA, 19 nt, Artificial Sequence
  Description of Artificial Sequence: Synthetic oligonucleotide
aaauaaggagagaguccac

SEQ ID NO: 609615 - RNA, 19 nt, Artificial Sequence
  Description of Artificial Sequence: Synthetic oligonucleotide
gauauccuccacaauugug

SEQ ID NO: 609616 - RNA, 19 nt, Artificial Sequence
  Description of Artificial Sequence: Synthetic oligonucleotide
auucccucggucaugaugu

SEQ ID NO: 609617 - RNA, 19 nt, Artificial Sequence
  Description of Artificial Sequence: Synthetic oligonucleotide
ccaguauucauccucuugc

SEQ ID NO: 609618 - RNA, 19 nt, Artificial Sequence
  Description of Artificial Sequence: Synthetic oligonucleotide
ggaugaaaauaaugaggcg

SEQ ID NO: 609619 - RNA, 19 nt, Artificial Sequence
  Description of Artificial Sequence: Synthetic oligonucleotide
agcucguuaaacaggcugg

SEQ ID NO: 609620 - RNA, 19 nt, Artificial Sequence
  Description of Artificial Sequence: Synthetic oligonucleotide
uacgacguagugucgaguc

SEQ ID NO: 609621 - RNA, 19 nt, Artificial Sequence
  Description of Artificial Sequence: Synthetic oligonucleotide
uggaccgacuucucagacg

SEQ ID NO: 609622 - RNA, 19 nt, Artificial Sequence
  Description of Artificial Sequence: Synthetic oligonucleotide
agcaaggugcaggugaguc

SEQ ID NO: 609623 - RNA, 19 nt, Artificial Sequence
  Description of Artificial Sequence: Synthetic oligonucleotide
aguaaccgaggcauugcgc

SEQ ID NO: 609624 - RNA, 19 nt, Artificial Sequence
  Description of Artificial Sequence: Synthetic oligonucleotide
ucuggcuugcuccuacgac

SEQ ID NO: 609625 - RNA, 19 nt, Artificial Sequence
  Description of Artificial Sequence: Synthetic oligonucleotide
gagagaguccacuuggucu

SEQ ID NO: 609626 - RNA, 19 nt, Artificial Sequence
  Description of Artificial Sequence: Synthetic oligonucleotide
uggucucauauuuguaaac

SEQ ID NO: 609627 - RNA, 19 nt, Artificial Sequence
  Description of Artificial Sequence: Synthetic oligonucleotide
guugcaaucugcucugcca

SEQ ID NO: 609628 - RNA, 19 nt, Artificial Sequence
  Description of Artificial Sequence: Synthetic oligonucleotide
cccgauaccgcacagcugg

SEQ ID NO: 609629 - RNA, 19 nt, Artificial Sequence
  Description of Artificial Sequence: Synthetic oligonucleotide
ucguaagugcugacguuug

SEQ ID NO: 609630 - RNA, 19 nt, Artificial Sequence
  Description of Artificial Sequence: Synthetic oligonucleotide
accgugccuugucaggacc

SEQ ID NO: 609631 - RNA, 19 nt, Artificial Sequence
  Description of Artificial Sequence: Synthetic oligonucleotide
caauguugauuuccgucag

SEQ ID NO: 609632 - RNA, 19 nt, Artificial Sequence
  Description of Artificial Sequence: Synthetic oligonucleotide
agugucgagucugugacga

SEQ ID NO: 609633 - RNA, 19 nt, Artificial Sequence
  Description of Artificial Sequence: Synthetic oligonucleotide
gcaauguugauuuccguca

SEQ ID NO: 609634 - RNA, 19 nt, Artificial Sequence
  Description of Artificial Sequence: Synthetic oligonucleotide
ucaauucaugaagcacagg

SEQ ID NO: 609635 - RNA, 19 nt, Artificial Sequence
  Description of Artificial Sequence: Synthetic oligonucleotide
uuuuaccagcucguuaaac

SEQ ID NO: 609636 - RNA, 19 nt, Artificial Sequence
  Description of Artificial Sequence: Synthetic oligonucleotide
guacacggccucuaggcug

SEQ ID NO: 609637 - RNA, 19 nt, Artificial Sequence
  Description of Artificial Sequence: Synthetic oligonucleotide
agauuuuaccagcucguua

SEQ ID NO: 609638 - RNA, 19 nt, Artificial Sequence
  Description of Artificial Sequence: Synthetic oligonucleotide
gucacgggaucauaaauaa

SEQ ID NO: 609639 - RNA, 19 nt, Artificial Sequence
  Description of Artificial Sequence: Synthetic oligonucleotide
ugcggauuuugucguaagu

SEQ ID NO: 609640 - RNA, 19 nt, Artificial Sequence
  Description of Artificial Sequence: Synthetic oligonucleotide
ugucgagucugugacgaug

SEQ ID NO: 609641 - RNA, 19 nt, Artificial Sequence
  Description of Artificial Sequence: Synthetic oligonucleotide
agacggggugaugagguac

SEQ ID NO: 609642 - RNA, 19 nt, Artificial Sequence
  Description of Artificial Sequence: Synthetic oligonucleotide
agaucauaacucauagccu

SEQ ID NO: 609643 - RNA, 19 nt, Artificial Sequence
  Description of Artificial Sequence: Synthetic oligonucleotide
gcuccuacgacguaguguc

SEQ ID NO: 609644 - RNA, 19 nt, Artificial Sequence
  Description of Artificial Sequence: Synthetic oligonucleotide
uuggucuagaguucuugau

SEQ ID NO: 609645 - RNA, 19 nt, Artificial Sequence
  Description of Artificial Sequence: Synthetic oligonucleotide
uguuuuguggggugagaau

SEQ ID NO: 609646 - RNA, 19 nt, Artificial Sequence
  Description of Artificial Sequence: Synthetic oligonucleotide
gaacacaugugcagcccgg

SEQ ID NO: 609647 - RNA, 19 nt, Artificial Sequence
  Description of Artificial Sequence: Synthetic oligonucleotide
cagauccuguuccacgcgg

SEQ ID NO: 609648 - RNA, 19 nt, Artificial Sequence
  Description of Artificial Sequence: Synthetic oligonucleotide
cuugccguuggccuguguc

SEQ ID NO: 609649 - RNA, 19 nt, Artificial Sequence
  Description of Artificial Sequence: Synthetic oligonucleotide
ccugugucacuucauaagc

SEQ ID NO: 609650 - RNA, 19 nt, Artificial Sequence
  Description of Artificial Sequence: Synthetic oligonucleotide
uuccacgcggcaccguaag

SEQ ID NO: 609651 - RNA, 19 nt, Artificial Sequence
  Description of Artificial Sequence: Synthetic oligonucleotide
ucgaauacuugcugagcuc

SEQ ID NO: 609652 - RNA, 19 nt, Artificial Sequence
  Description of Artificial Sequence: Synthetic oligonucleotide
uugugacgcagcgcgaucc

SEQ ID NO: 609653 - RNA, 19 nt, Artificial Sequence
  Description of Artificial Sequence: Synthetic oligonucleotide
ucucagacggggugaugag

SEQ ID NO: 609654 - RNA, 19 nt, Artificial Sequence
  Description of Artificial Sequence: Synthetic oligonucleotide
agcgucuugaugacuuugg

SEQ ID NO: 609655 - RNA, 19 nt, Artificial Sequence
  Description of Artificial Sequence: Synthetic oligonucleotide
uugccguuggccuguguca

SEQ ID NO: 609656 - RNA, 19 nt, Artificial Sequence
  Description of Artificial Sequence: Synthetic oligonucleotide
guccuuaaugauugggguc

SEQ ID NO: 609657 - RNA, 19 nt, Artificial Sequence
  Description of Artificial Sequence: Synthetic oligonucleotide
uggcuugcuccuacgacgu

SEQ ID NO: 609658 - RNA, 19 nt, Artificial Sequence
  Description of Artificial Sequence: Synthetic oligonucleotide
gugcaggugagucgaauac

SEQ ID NO: 609659 - RNA, 19 nt, Artificial Sequence
  Description of Artificial Sequence: Synthetic oligonucleotide
ugacgcagcgcgauccaca

SEQ ID NO: 609660 - RNA, 19 nt, Artificial Sequence
  Description of Artificial Sequence: Synthetic oligonucleotide
agagaucccgcaugguggu

SEQ ID NO: 609661 - RNA, 19 nt, Artificial Sequence
  Description of Artificial Sequence: Synthetic oligonucleotide
aggcauugcgcuggggagc

SEQ ID NO: 609662 - RNA, 19 nt, Artificial Sequence
  Description of Artificial Sequence: Synthetic oligonucleotide
guaaccgaggcauugcgcu

SEQ ID NO: 609663 - RNA, 19 nt, Artificial Sequence
  Description of Artificial Sequence: Synthetic oligonucleotide
uuucaauaggcagcagauc

SEQ ID NO: 609664 - RNA, 19 nt, Artificial Sequence
  Description of Artificial Sequence: Synthetic oligonucleotide
aguggaccgacuucucaga

SEQ ID NO: 609665 - RNA, 19 nt, Artificial Sequence
  Description of Artificial Sequence: Synthetic oligonucleotide
gugagaaugugcguggauc

SEQ ID NO: 609666 - RNA, 19 nt, Artificial Sequence
  Description of Artificial Sequence: Synthetic oligonucleotide
agauccuguuccacgcggc

SEQ ID NO: 609667 - RNA, 19 nt, Artificial Sequence
  Description of Artificial Sequence: Synthetic oligonucleotide
cuuggucuagaguucuuga

SEQ ID NO: 609668 - RNA, 19 nt, Artificial Sequence
  Description of Artificial Sequence: Synthetic oligonucleotide
uuagcaguugguggguccu

SEQ ID NO: 609669 - RNA, 19 nt, Artificial Sequence
  Description of Artificial Sequence: Synthetic oligonucleotide
aguuuccgucuacggugcc

SEQ ID NO: 609670 - RNA, 19 nt, Artificial Sequence
  Description of Artificial Sequence: Synthetic oligonucleotide
gucgaauacuugcugagcu

SEQ ID NO: 609671 - RNA, 19 nt, Artificial Sequence
  Description of Artificial Sequence: Synthetic oligonucleotide
aggucacgggaucauaaau

SEQ ID NO: 609672 - RNA, 19 nt, Artificial Sequence
  Description of Artificial Sequence: Synthetic oligonucleotide
ugcuccuacgacguagugu

SEQ ID NO: 609673 - RNA, 19 nt, Artificial Sequence
  Description of Artificial Sequence: Synthetic oligonucleotide
cacacgugccucuccaaug

SEQ ID NO: 609674 - RNA, 19 nt, Artificial Sequence
  Description of Artificial Sequence: Synthetic oligonucleotide
uuaggguggcacacagggu

SEQ ID NO: 609675 - RNA, 19 nt, Artificial Sequence
  Description of Artificial Sequence: Synthetic oligonucleotide
accuccaaggaugaaaaua

SEQ ID NO: 609676 - RNA, 19 nt, Artificial Sequence
  Description of Artificial Sequence: Synthetic oligonucleotide
ugugcuugugacgcagcgc

SEQ ID NO: 609677 - RNA, 19 nt, Artificial Sequence
  Description of Artificial Sequence: Synthetic oligonucleotide
uccuacgacguagugucga

SEQ ID NO: 609678 - RNA, 19 nt, Artificial Sequence
  Description of Artificial Sequence: Synthetic oligonucleotide
gaaggacucagcguggcaa

SEQ ID NO: 609679 - RNA, 19 nt, Artificial Sequence
  Description of Artificial Sequence: Synthetic oligonucleotide
ucauaacucauagccugaa

SEQ ID NO: 609680 - RNA, 19 nt, Artificial Sequence
  Description of Artificial Sequence: Synthetic oligonucleotide
ggcugcucgagauuuuacc

SEQ ID NO: 609681 - RNA, 19 nt, Artificial Sequence
  Description of Artificial Sequence: Synthetic oligonucleotide
uuuugucguaagugcugac

SEQ ID NO: 609682 - RNA, 19 nt, Artificial Sequence
  Description of Artificial Sequence: Synthetic oligonucleotide
guuucaagacagacuaguc

SEQ ID NO: 609683 - RNA, 19 nt, Artificial Sequence
  Description of Artificial Sequence: Synthetic oligonucleotide
ucucugcgcuuguugauau

SEQ ID NO: 609684 - RNA, 19 nt, Artificial Sequence
  Description of Artificial Sequence: Synthetic oligonucleotide
ggcaccguaaguuuccguc

SEQ ID NO: 609685 - RNA, 19 nt, Artificial Sequence
  Description of Artificial Sequence: Synthetic oligonucleotide
ugugacgcagcgcgaucca

SEQ ID NO: 609686 - RNA, 19 nt, Artificial Sequence
  Description of Artificial Sequence: Synthetic oligonucleotide
gugcguggauccuaucagc

SEQ ID NO: 609687 - RNA, 19 nt, Artificial Sequence
  Description of Artificial Sequence: Synthetic oligonucleotide
ugcuagaggaaaaguccuu

SEQ ID NO: 609688 - RNA, 19 nt, Artificial Sequence
  Description of Artificial Sequence: Synthetic oligonucleotide
gucucauauuuguaaacgu

SEQ ID NO: 609689 - RNA, 19 nt, Artificial Sequence
  Description of Artificial Sequence: Synthetic oligonucleotide
ggcuguagaagcuuugaaa

SEQ ID NO: 609690 - RNA, 19 nt, Artificial Sequence
  Description of Artificial Sequence: Synthetic oligonucleotide
cuccacaauugugauuccc

SEQ ID NO: 609691 - RNA, 19 nt, Artificial Sequence
  Description of Artificial Sequence: Synthetic oligonucleotide
ggggugagaaugugcgugg

SEQ ID NO: 609692 - RNA, 19 nt, Artificial Sequence
  Description of Artificial Sequence: Synthetic oligonucleotide
gggcacaccaaggugagcc

SEQ ID NO: 609693 - RNA, 19 nt, Artificial Sequence
  Description of Artificial Sequence: Synthetic oligonucleotide
aacacaugugcagcccggu

SEQ ID NO: 609694 - RNA, 19 nt, Artificial Sequence
  Description of Artificial Sequence: Synthetic oligonucleotide
gcggauuuugucguaagug

SEQ ID NO: 609695 - RNA, 19 nt, Artificial Sequence
  Description of Artificial Sequence: Synthetic oligonucleotide
cucagacggggugaugagg

SEQ ID NO: 609696 - RNA, 19 nt, Artificial Sequence
  Description of Artificial Sequence: Synthetic oligonucleotide
auuuuaccagcucguuaaa

SEQ ID NO: 609697 - RNA, 19 nt, Artificial Sequence
  Description of Artificial Sequence: Synthetic oligonucleotide
caugggguccuugauuuuc

SEQ ID NO: 609698 - RNA, 19 nt, Artificial Sequence
  Description of Artificial Sequence: Synthetic oligonucleotide
auguauggguagugcuuug

SEQ ID NO: 609699 - RNA, 19 nt, Artificial Sequence
  Description of Artificial Sequence: Synthetic oligonucleotide
caggugagucgaauacuug

SEQ ID NO: 609700 - RNA, 19 nt, Artificial Sequence
  Description of Artificial Sequence: Synthetic oligonucleotide
gcucacaccuccaaggaug

SEQ ID NO: 609701 - RNA, 19 nt, Artificial Sequence
  Description of Artificial Sequence: Synthetic oligonucleotide
auccuguuccacgcggcac

SEQ ID NO: 609702 - RNA, 19 nt, Artificial Sequence
  Description of Artificial Sequence: Synthetic oligonucleotide
ggcagcagaucauaacuca

SEQ ID NO: 609703 - RNA, 19 nt, Artificial Sequence
  Description of Artificial Sequence: Synthetic oligonucleotide
cauugcgcuggggagcugc

SEQ ID NO: 609704 - RNA, 19 nt, Artificial Sequence
  Description of Artificial Sequence: Synthetic oligonucleotide
cucgagauuuuaccagcuc

SEQ ID NO: 609705 - RNA, 19 nt, Artificial Sequence
  Description of Artificial Sequence: Synthetic oligonucleotide
aucgugagagcugguaggu

SEQ ID NO: 609706 - RNA, 19 nt, Artificial Sequence
  Description of Artificial Sequence: Synthetic oligonucleotide
aucauaacucauagccuga

SEQ ID NO: 609707 - RNA, 19 nt, Artificial Sequence
  Description of Artificial Sequence: Synthetic oligonucleotide
gauccuguuccacgcggca

SEQ ID NO: 609708 - RNA, 19 nt, Artificial Sequence
  Description of Artificial Sequence: Synthetic oligonucleotide
uuuccgucagcgucuugau

SEQ ID NO: 609709 - RNA, 19 nt, Artificial Sequence
  Description of Artificial Sequence: Synthetic oligonucleotide
guuaaacaggcuggacaug

SEQ ID NO: 609710 - RNA, 19 nt, Artificial Sequence
  Description of Artificial Sequence: Synthetic oligonucleotide
acgacguagugucgagucu

SEQ ID NO: 609711 - RNA, 19 nt, Artificial Sequence
  Description of Artificial Sequence: Synthetic oligonucleotide
gcuuuauaagcauccagcu

SEQ ID NO: 609712 - RNA, 19 nt, Artificial Sequence
  Description of Artificial Sequence: Synthetic oligonucleotide
aagaaucagcagaguccag

SEQ ID NO: 609713 - RNA, 19 nt, Artificial Sequence
  Description of Artificial Sequence: Synthetic oligonucleotide
ugucguaagugcugacguu

SEQ ID NO: 609714 - RNA, 19 nt, Artificial Sequence
  Description of Artificial Sequence: Synthetic oligonucleotide
gguugcaaucugcucugcc

SEQ ID NO: 609715 - RNA, 19 nt, Artificial Sequence
  Description of Artificial Sequence: Synthetic oligonucleotide
gaugcggauuuugucguaa

SEQ ID NO: 609716 - RNA, 19 nt, Artificial Sequence
  Description of Artificial Sequence: Synthetic oligonucleotide
cacauuacucucuugcuuu

SEQ ID NO: 609717 - RNA, 19 nt, Artificial Sequence
  Description of Artificial Sequence: Synthetic oligonucleotide
cucacaccuccaaggauga

SEQ ID NO: 609718 - RNA, 19 nt, Artificial Sequence
  Description of Artificial Sequence: Synthetic oligonucleotide
gggaauacaccugggacuc

SEQ ID NO: 609719 - RNA, 19 nt, Artificial Sequence
  Description of Artificial Sequence: Synthetic oligonucleotide
aagcgcagcgcaucucauu

SEQ ID NO: 609720 - RNA, 19 nt, Artificial Sequence
  Description of Artificial Sequence: Synthetic oligonucleotide
caugaagcacaggagagcu

SEQ ID NO: 609721 - RNA, 19 nt, Artificial Sequence
  Description of Artificial Sequence: Synthetic oligonucleotide
ccaucgugagagcugguag

SEQ ID NO: 609722 - RNA, 19 nt, Artificial Sequence
  Description of Artificial Sequence: Synthetic oligonucleotide
uccaucgugagagcuggua

SEQ ID NO: 609723 - RNA, 19 nt, Artificial Sequence
  Description of Artificial Sequence: Synthetic oligonucleotide
uaagcgcagcgcaucucau

SEQ ID NO: 609724 - RNA, 19 nt, Artificial Sequence
  Description of Artificial Sequence: Synthetic oligonucleotide
augccguucuuaaggaaga

SEQ ID NO: 609725 - RNA, 19 nt, Artificial Sequence
  Description of Artificial Sequence: Synthetic oligonucleotide
cauagggcagaaaugcaau

SEQ ID NO: 609726 - RNA, 19 nt, Artificial Sequence
  Description of Artificial Sequence: Synthetic oligonucleotide
gcggguagagauguauggg

SEQ ID NO: 609727 - RNA, 19 nt, Artificial Sequence
  Description of Artificial Sequence: Synthetic oligonucleotide
cucguuaaacaggcuggac

SEQ ID NO: 609728 - RNA, 19 nt, Artificial Sequence
  Description of Artificial Sequence: Synthetic oligonucleotide
gcuugcuccuacgacguag

SEQ ID NO: 609729 - RNA, 19 nt, Artificial Sequence
  Description of Artificial Sequence: Synthetic oligonucleotide
gugucacuucauaagcgca

SEQ ID NO: 609730 - RNA, 19 nt, Artificial Sequence
  Description of Artificial Sequence: Synthetic oligonucleotide
ccguucuuaaggaagaugu

SEQ ID NO: 609731 - RNA, 19 nt, Artificial Sequence
  Description of Artificial Sequence: Synthetic oligonucleotide
acaggucacgggaucauaa

SEQ ID NO: 609732 - RNA, 19 nt, Artificial Sequence
  Description of Artificial Sequence: Synthetic oligonucleotide
ugcuugugacgcagcgcga

SEQ ID NO: 609733 - RNA, 19 nt, Artificial Sequence
  Description of Artificial Sequence: Synthetic oligonucleotide
cucaugggguccuugauuu

SEQ ID NO: 609734 - RNA, 19 nt, Artificial Sequence
  Description of Artificial Sequence: Synthetic oligonucleotide
ggagagaguccacuugguc

SEQ ID NO: 609735 - RNA, 19 nt, Artificial Sequence
  Description of Artificial Sequence: Synthetic oligonucleotide
caucuugcagcaggaggac

SEQ ID NO: 609736 - RNA, 19 nt, Artificial Sequence
  Description of Artificial Sequence: Synthetic oligonucleotide
gccacgauccaggaucagg

SEQ ID NO: 609737 - RNA, 19 nt, Artificial Sequence
  Description of Artificial Sequence: Synthetic oligonucleotide
cuccuacgacguagugucg

SEQ ID NO: 609738 - RNA, 19 nt, Artificial Sequence
  Description of Artificial Sequence: Synthetic oligonucleotide
cuggguacuccuuuagggu

SEQ ID NO: 609739 - RNA, 19 nt, Artificial Sequence
  Description of Artificial Sequence: Synthetic oligonucleotide
acguuugcauccagcagga

SEQ ID NO: 609740 - RNA, 19 nt, Artificial Sequence
  Description of Artificial Sequence: Synthetic oligonucleotide
cuugugacgcagcgcgauc

SEQ ID NO: 609741 - RNA, 19 nt, Artificial Sequence
  Description of Artificial Sequence: Synthetic oligonucleotide
agaaugugcguggauccua

SEQ ID NO: 609742 - RNA, 19 nt, Artificial Sequence
  Description of Artificial Sequence: Synthetic oligonucleotide
ugccguuggccugugucac

SEQ ID NO: 609743 - RNA, 19 nt, Artificial Sequence
  Description of Artificial Sequence: Synthetic oligonucleotide
gacggggugaugagguaca

SEQ ID NO: 609744 - RNA, 19 nt, Artificial Sequence
  Description of Artificial Sequence: Synthetic oligonucleotide
uaccgcacagcuggguacu

SEQ ID NO: 609745 - RNA, 19 nt, Artificial Sequence
  Description of Artificial Sequence: Synthetic oligonucleotide
uguccauagcgggcgcuga

SEQ ID NO: 609746 - RNA, 19 nt, Artificial Sequence
  Description of Artificial Sequence: Synthetic oligonucleotide
cuuuauaagcauccagcuu

SEQ ID NO: 609747 - RNA, 19 nt, Artificial Sequence
  Description of Artificial Sequence: Synthetic oligonucleotide
gaccgugccuugucaggac

SEQ ID NO: 609748 - RNA, 19 nt, Artificial Sequence
  Description of Artificial Sequence: Synthetic oligonucleotide
ccacaauugugauucccuc

SEQ ID NO: 609749 - RNA, 19 nt, Artificial Sequence
  Description of Artificial Sequence: Synthetic oligonucleotide
uagcgggcgcugacagcgg

SEQ ID NO: 609750 - RNA, 19 nt, Artificial Sequence
  Description of Artificial Sequence: Synthetic oligonucleotide
uccacgcggcaccguaagu

SEQ ID NO: 609751 - RNA, 19 nt, Artificial Sequence
  Description of Artificial Sequence: Synthetic oligonucleotide
gcgucuugaugacuuuggc

SEQ ID NO: 609752 - RNA, 19 nt, Artificial Sequence
  Description of Artificial Sequence: Synthetic oligonucleotide
cuccaaugccgcuggucuc

SEQ ID NO: 609753 - RNA, 19 nt, Artificial Sequence
  Description of Artificial Sequence: Synthetic oligonucleotide
cagcgucuugaugacuuug

SEQ ID NO: 609754 - RNA, 19 nt, Artificial Sequence
  Description of Artificial Sequence: Synthetic oligonucleotide
ccacgauccaggaucagga

SEQ ID NO: 609755 - RNA, 19 nt, Artificial Sequence
  Description of Artificial Sequence: Synthetic oligonucleotide
guacugcggcauuuucuuc

SEQ ID NO: 609756 - RNA, 19 nt, Artificial Sequence
  Description of Artificial Sequence: Synthetic oligonucleotide
acggggugaugagguacac

SEQ ID NO: 609757 - RNA, 19 nt, Artificial Sequence
  Description of Artificial Sequence: Synthetic oligonucleotide
caccuccuucacacgugcc

SEQ ID NO: 609758 - RNA, 19 nt, Artificial Sequence
  Description of Artificial Sequence: Synthetic oligonucleotide
ucccucggucaugaugucu

SEQ ID NO: 609759 - RNA, 19 nt, Artificial Sequence
  Description of Artificial Sequence: Synthetic oligonucleotide
ggucacgggaucauaaaua

SEQ ID NO: 609760 - RNA, 19 nt, Artificial Sequence
  Description of Artificial Sequence: Synthetic oligonucleotide
caauaggcagcagaucaua

SEQ ID NO: 609761 - RNA, 19 nt, Artificial Sequence
  Description of Artificial Sequence: Synthetic oligonucleotide
aggcguuccaggauaggau

SEQ ID NO: 609762 - RNA, 19 nt, Artificial Sequence
  Description of Artificial Sequence: Synthetic oligonucleotide
ccuacgacguagugucgag

SEQ ID NO: 609763 - RNA, 19 nt, Artificial Sequence
  Description of Artificial Sequence: Synthetic oligonucleotide
uacaggucacgggaucaua

SEQ ID NO: 609764 - RNA, 19 nt, Artificial Sequence
  Description of Artificial Sequence: Synthetic oligonucleotide
gaauacaccugggacucau

SEQ ID NO: 609765 - RNA, 19 nt, Artificial Sequence
  Description of Artificial Sequence: Synthetic oligonucleotide
gugacgaugggcacaccaa

SEQ ID NO: 609766 - RNA, 19 nt, Artificial Sequence
  Description of Artificial Sequence: Synthetic oligonucleotide
ggugcaggugagucgaaua

SEQ ID NO: 609767 - RNA, 19 nt, Artificial Sequence
  Description of Artificial Sequence: Synthetic oligonucleotide
ccguaaguuuccgucuacg

SEQ ID NO: 609768 - RNA, 19 nt, Artificial Sequence
  Description of Artificial Sequence: Synthetic oligonucleotide
cagcgcgauccacagguca

SEQ ID NO: 609769 - RNA, 19 nt, Artificial Sequence
  Description of Artificial Sequence: Synthetic oligonucleotide
acgcggcaccguaaguuuc

SEQ ID NO: 609770 - RNA, 19 nt, Artificial Sequence
  Description of Artificial Sequence: Synthetic oligonucleotide
cuugcuccuacgacguagu

SEQ ID NO: 609771 - RNA, 19 nt, Artificial Sequence
  Description of Artificial Sequence: Synthetic oligonucleotide
uucuugugccaguguccau

SEQ ID NO: 609772 - RNA, 19 nt, Artificial Sequence
  Description of Artificial Sequence: Synthetic oligonucleotide
cgguauuuagcaguuggug

SEQ ID NO: 609773 - RNA, 19 nt, Artificial Sequence
  Description of Artificial Sequence: Synthetic oligonucleotide
ccucuugcuagaggaaaag

SEQ ID NO: 609774 - RNA, 19 nt, Artificial Sequence
  Description of Artificial Sequence: Synthetic oligonucleotide
gccguucuuaaggaagaug

SEQ ID NO: 609775 - RNA, 19 nt, Artificial Sequence
  Description of Artificial Sequence: Synthetic oligonucleotide
ugccuugguaaugcuucau

SEQ ID NO: 609776 - RNA, 19 nt, Artificial Sequence
  Description of Artificial Sequence: Synthetic oligonucleotide
cagcccgguauuuagcagu

SEQ ID NO: 609777 - RNA, 19 nt, Artificial Sequence
  Description of Artificial Sequence: Synthetic oligonucleotide
caguguccauagcgggcgc

SEQ ID NO: 609778 - RNA, 19 nt, Artificial Sequence
  Description of Artificial Sequence: Synthetic oligonucleotide
gaccgacuucucagacggg

SEQ ID NO: 609779 - RNA, 19 nt, Artificial Sequence
  Description of Artificial Sequence: Synthetic oligonucleotide
ugccguucuuaaggaagau

SEQ ID NO: 609780 - RNA, 19 nt, Artificial Sequence
  Description of Artificial Sequence: Synthetic oligonucleotide
acggugccuugguaaugcu

SEQ ID NO: 609781 - RNA, 19 nt, Artificial Sequence
  Description of Artificial Sequence: Synthetic oligonucleotide
cucggucaugaugucuguc

SEQ ID NO: 609782 - RNA, 19 nt, Artificial Sequence
  Description of Artificial Sequence: Synthetic oligonucleotide
agcgcgauccacaggucau

SEQ ID NO: 609783 - RNA, 19 nt, Artificial Sequence
  Description of Artificial Sequence: Synthetic oligonucleotide
gucguaagugcugacguuu

SEQ ID NO: 609784 - RNA, 19 nt, Artificial Sequence
  Description of Artificial Sequence: Synthetic oligonucleotide
gagaaugugcguggauccu

SEQ ID NO: 609785 - RNA, 19 nt, Artificial Sequence
  Description of Artificial Sequence: Synthetic oligonucleotide
cucugcgcuuguugauauc

SEQ ID NO: 609786 - RNA, 19 nt, Artificial Sequence
  Description of Artificial Sequence: Synthetic oligonucleotide
cauagccugaaaagucaau

SEQ ID NO: 609787 - RNA, 19 nt, Artificial Sequence
  Description of Artificial Sequence: Synthetic oligonucleotide
cagcugagccagcaaugca

SEQ ID NO: 609788 - RNA, 19 nt, Artificial Sequence
  Description of Artificial Sequence: Synthetic oligonucleotide
gguacuccuuuaggguggc

SEQ ID NO: 609789 - RNA, 19 nt, Artificial Sequence
  Description of Artificial Sequence: Synthetic oligonucleotide
uucccucggucaugauguc

SEQ ID NO: 609790 - RNA, 19 nt, Artificial Sequence
  Description of Artificial Sequence: Synthetic oligonucleotide
ccgugccuugucaggaccc

SEQ ID NO: 609791 - RNA, 19 nt, Artificial Sequence
  Description of Artificial Sequence: Synthetic oligonucleotide
caaggugagccauguuggu

SEQ ID NO: 609792 - RNA, 19 nt, Artificial Sequence
  Description of Artificial Sequence: Synthetic oligonucleotide
cucuugcuagaggaaaagu

SEQ ID NO: 609793 - RNA, 19 nt, Artificial Sequence
  Description of Artificial Sequence: Synthetic oligonucleotide
ccuucacacgugccucucc

SEQ ID NO: 609794 - RNA, 19 nt, Artificial Sequence
  Description of Artificial Sequence: Synthetic oligonucleotide
ugauucccucggucaugau

SEQ ID NO: 609795 - RNA, 19 nt, Artificial Sequence
  Description of Artificial Sequence: Synthetic oligonucleotide
gcuuuguauccaguuuguc

SEQ ID NO: 609796 - RNA, 19 nt, Artificial Sequence
  Description of Artificial Sequence: Synthetic oligonucleotide
gguacacggccucuaggcu

SEQ ID NO: 609797 - RNA, 19 nt, Artificial Sequence
  Description of Artificial Sequence: Synthetic oligonucleotide
gagaaggaugaugcggauu

SEQ ID NO: 609798 - RNA, 19 nt, Artificial Sequence
  Description of Artificial Sequence: Synthetic oligonucleotide
cucucugcgcuuguugaua

SEQ ID NO: 609799 - RNA, 19 nt, Artificial Sequence
  Description of Artificial Sequence: Synthetic oligonucleotide
ggaccgugccuugucagga

SEQ ID NO: 609800 - RNA, 19 nt, Artificial Sequence
  Description of Artificial Sequence: Synthetic oligonucleotide
cgcagcgcaucucauucag

SEQ ID NO: 609801 - RNA, 19 nt, Artificial Sequence
  Description of Artificial Sequence: Synthetic oligonucleotide
augugcagcccgguauuua

SEQ ID NO: 609802 - RNA, 19 nt, Artificial Sequence
  Description of Artificial Sequence: Synthetic oligonucleotide
ggcucuugcaugucaacuu

SEQ ID NO: 609803 - RNA, 19 nt, Artificial Sequence
  Description of Artificial Sequence: Synthetic oligonucleotide
gacguagugucgagucugu

SEQ ID NO: 609804 - RNA, 19 nt, Artificial Sequence
  Description of Artificial Sequence: Synthetic oligonucleotide
gugacgcagcgcgauccac

SEQ ID NO: 609805 - RNA, 19 nt, Artificial Sequence
  Description of Artificial Sequence: Synthetic oligonucleotide
auugcgcuggggagcugca

SEQ ID NO: 609806 - RNA, 19 nt, Artificial Sequence
  Description of Artificial Sequence: Synthetic oligonucleotide
cgacguagugucgagucug

SEQ ID NO: 609807 - RNA, 19 nt, Artificial Sequence
  Description of Artificial Sequence: Synthetic oligonucleotide
gcucguuaaacaggcugga

SEQ ID NO: 609808 - RNA, 19 nt, Artificial Sequence
  Description of Artificial Sequence: Synthetic oligonucleotide
gccgcuggucucauauuug

SEQ ID NO: 609809 - RNA, 19 nt, Artificial Sequence
  Description of Artificial Sequence: Synthetic oligonucleotide
caauugugauucccucggu

SEQ ID NO: 609810 - RNA, 19 nt, Artificial Sequence
  Description of Artificial Sequence: Synthetic oligonucleotide
agcccgguauuuagcaguu

SEQ ID NO: 609811 - RNA, 19 nt, Artificial Sequence
  Description of Artificial Sequence: Synthetic oligonucleotide
ggccucuaggcuggggagc

SEQ ID NO: 609812 - RNA, 19 nt, Artificial Sequence
  Description of Artificial Sequence: Synthetic oligonucleotide
guggcacacaggguugcaa

SEQ ID NO: 609813 - RNA, 19 nt, Artificial Sequence
  Description of Artificial Sequence: Synthetic oligonucleotide
guuuccgucuacggugccu

SEQ ID NO: 609814 - RNA, 19 nt, Artificial Sequence
  Description of Artificial Sequence: Synthetic oligonucleotide
ggcguuccaggauaggauu

SEQ ID NO: 609815 - RNA, 19 nt, Artificial Sequence
  Description of Artificial Sequence: Synthetic oligonucleotide
cugaugcgcuccuuccgcu

SEQ ID NO: 609816 - RNA, 19 nt, Artificial Sequence
  Description of Artificial Sequence: Synthetic oligonucleotide
cgcgauccacaggucaucg

SEQ ID NO: 609817 - RNA, 19 nt, Artificial Sequence
  Description of Artificial Sequence: Synthetic oligonucleotide
cacggccucuaggcugggg

SEQ ID NO: 609818 - RNA, 19 nt, Artificial Sequence
  Description of Artificial Sequence: Synthetic oligonucleotide
gccaggcguuccaggauag

SEQ ID NO: 609819 - RNA, 19 nt, Artificial Sequence
  Description of Artificial Sequence: Synthetic oligonucleotide
gcggcaccguaaguuuccg

SEQ ID NO: 609820 - RNA, 19 nt, Artificial Sequence
  Description of Artificial Sequence: Synthetic oligonucleotide
guuccacgcggcaccguaa

SEQ ID NO: 609821 - RNA, 19 nt, Artificial Sequence
  Description of Artificial Sequence: Synthetic oligonucleotide
cacgcggcaccguaaguuu

SEQ ID NO: 609822 - RNA, 19 nt, Artificial Sequence
  Description of Artificial Sequence: Synthetic oligonucleotide
cagacggggugaugaggua

SEQ ID NO: 609823 - RNA, 19 nt, Artificial Sequence
  Description of Artificial Sequence: Synthetic oligonucleotide
cuacgacguagugucgagu

SEQ ID NO: 609824 - RNA, 19 nt, Artificial Sequence
  Description of Artificial Sequence: Synthetic oligonucleotide
cggguagagauguaugggu

SEQ ID NO: 609825 - RNA, 19 nt, Artificial Sequence
  Description of Artificial Sequence: Synthetic oligonucleotide
ccccgauaccgcacagcug

SEQ ID NO: 609826 - RNA, 19 nt, Artificial Sequence
  Description of Artificial Sequence: Synthetic oligonucleotide
gcgcagcgcaucucauuca

SEQ ID NO: 609827 - RNA, 19 nt, Artificial Sequence
  Description of Artificial Sequence: Synthetic oligonucleotide
ggugaccuccugggacacc

SEQ ID NO: 609828 - RNA, 19 nt, Artificial Sequence
  Description of Artificial Sequence: Synthetic oligonucleotide
gcucgagauuuuaccagcu

SEQ ID NO: 609829 - RNA, 19 nt, Artificial Sequence
  Description of Artificial Sequence: Synthetic oligonucleotide
ggcauugcgcuggggagcu

SEQ ID NO: 609830 - RNA, 19 nt, Artificial Sequence
  Description of Artificial Sequence: Synthetic oligonucleotide
cuuaaugauugggguccau

SEQ ID NO: 609831 - RNA, 19 nt, Artificial Sequence
  Description of Artificial Sequence: Synthetic oligonucleotide
cggggugaugagguacacg

SEQ ID NO: 609832 - RNA, 19 nt, Artificial Sequence
  Description of Artificial Sequence: Synthetic oligonucleotide
guacuccuuuaggguggca

SEQ ID NO: 609833 - RNA, 19 nt, Artificial Sequence
  Description of Artificial Sequence: Synthetic oligonucleotide
ccgcuggucucauauuugu

SEQ ID NO: 609834 - RNA, 19 nt, Artificial Sequence
  Description of Artificial Sequence: Synthetic oligonucleotide
gcuugugacgcagcgcgau

SEQ ID NO: 609835 - RNA, 19 nt, Artificial Sequence
  Description of Artificial Sequence: Synthetic oligonucleotide
gugucgagucugugacgau

SEQ ID NO: 609836 - RNA, 19 nt, Artificial Sequence
  Description of Artificial Sequence: Synthetic oligonucleotide
gcgcgauccacaggucauc

SEQ ID NO: 609837 - RNA, 19 nt, Artificial Sequence
  Description of Artificial Sequence: Synthetic oligonucleotide
gcccgguauuuagcaguug

SEQ ID NO: 609838 - RNA, 19 nt, Artificial Sequence
  Description of Artificial Sequence: Synthetic oligonucleotide
ccgacuucucagacggggu

SEQ ID NO: 609839 - RNA, 19 nt, Artificial Sequence
  Description of Artificial Sequence: Synthetic oligonucleotide
gcgauccacaggucaucgu

SEQ ID NO: 609840 - RNA, 19 nt, Artificial Sequence
  Description of Artificial Sequence: Synthetic oligonucleotide
gcagcgcgauccacagguc

SEQ ID NO: 609841 - RNA, 19 nt, Artificial Sequence
  Description of Artificial Sequence: Synthetic oligonucleotide
ccgcaugguggucuucucu

SEQ ID NO: 609842 - RNA, 19 nt, Artificial Sequence
  Description of Artificial Sequence: Synthetic oligonucleotide
ggcuugcuccuacgacgua

SEQ ID NO: 609843 - RNA, 19 nt, Artificial Sequence
  Description of Artificial Sequence: Synthetic oligonucleotide
ccgaggcauugcgcugggg

SEQ ID NO: 609844 - RNA, 19 nt, Artificial Sequence
  Description of Artificial Sequence: Synthetic oligonucleotide
ccgucuacggugccuuggu

SEQ ID NO: 609845 - RNA, 19 nt, Artificial Sequence
  Description of Artificial Sequence: Synthetic oligonucleotide
cagcaaggugcaggugagu

SEQ ID NO: 609846 - RNA, 19 nt, Artificial Sequence
  Description of Artificial Sequence: Synthetic oligonucleotide
gccguuggccugugucacu

SEQ ID NO: 609847 - RNA, 19 nt, Artificial Sequence
  Description of Artificial Sequence: Synthetic oligonucleotide
ggagcggcucucugcgcuu

SEQ ID NO: 609848 - RNA, 19 nt, Artificial Sequence
  Description of Artificial Sequence: Synthetic oligonucleotide
ccacgcggcaccguaaguu

SEQ ID NO: 609849 - RNA, 19 nt, Artificial Sequence
  Description of Artificial Sequence: Synthetic oligonucleotide
guccaucgugagagcuggu

SEQ ID NO: 609850 - RNA, 19 nt, Artificial Sequence
  Description of Artificial Sequence: Synthetic oligonucleotide
gcauugcgcuggggagcug

SEQ ID NO: 609851 - RNA, 19 nt, Artificial Sequence
  Description of Artificial Sequence: Synthetic oligonucleotide
cggugccuugguaaugcuu

SEQ ID NO: 609852 - RNA, 19 nt, Artificial Sequence
  Description of Artificial Sequence: Synthetic oligonucleotide
cgugccuugucaggacccu

SEQ ID NO: 609853 - RNA, 19 nt, Artificial Sequence
  Description of Artificial Sequence: Synthetic oligonucleotide
ccuugccguuggccugugu

SEQ ID NO: 609854 - RNA, 19 nt, Artificial Sequence
  Description of Artificial Sequence: Synthetic oligonucleotide
cguuugcauccagcaggau

SEQ ID NO: 609855 - RNA, 19 nt, Artificial Sequence
  Description of Artificial Sequence: Synthetic oligonucleotide
uguauaaaccaccuggugg

SEQ ID NO: 609856 - RNA, 19 nt, Artificial Sequence
  Description of Artificial Sequence: Synthetic oligonucleotide
aguuguauaaaccaccugg

SEQ ID NO: 609857 - RNA, 19 nt, Artificial Sequence
  Description of Artificial Sequence: Synthetic oligonucleotide
agcuauacaguccugaugg

SEQ ID NO: 609858 - RNA, 19 nt, Artificial Sequence
  Description of Artificial Sequence: Synthetic oligonucleotide
  modified_base (3)..(3): a, c, u, g, unknown or other
ucnuaguuggcgcaggucg

SEQ ID NO: 609859 - RNA, 19 nt, Artificial Sequence
  Description of Artificial Sequence: Synthetic oligonucleotide
uuaaguaucgucuuuggcu

SEQ ID NO: 609860 - RNA, 19 nt, Artificial Sequence
  Description of Artificial Sequence: Synthetic oligonucleotide
aaaacguuugguuaauucu

SEQ ID NO: 609861 - RNA, 19 nt, Artificial Sequence
  Description of Artificial Sequence: Synthetic oligonucleotide
gaagcuaaaggcuccaagg

SEQ ID NO: 609862 - RNA, 19 nt, Artificial Sequence
  Description of Artificial Sequence: Synthetic oligonucleotide
uguguuacauucacggugg

SEQ ID NO: 609863 - RNA, 19 nt, Artificial Sequence
  Description of Artificial Sequence: Synthetic oligonucleotide
uuuacauugaauucaugca

SEQ ID NO: 609864 - RNA, 19 nt, Artificial Sequence
  Description of Artificial Sequence: Synthetic oligonucleotide
aauuauuauacuucaguua

SEQ ID NO: 609865 - RNA, 19 nt, Artificial Sequence
  Description of Artificial Sequence: Synthetic oligonucleotide
ucuguauugggccucgggg

SEQ ID NO: 609866 - RNA, 19 nt, Artificial Sequence
  Description of Artificial Sequence: Synthetic oligonucleotide
aaacguaaguaguguacac

SEQ ID NO: 609867 - RNA, 19 nt, Artificial Sequence
  Description of Artificial Sequence: Synthetic oligonucleotide
uguggaacuuugaaaagag

SEQ ID NO: 609868 - RNA, 19 nt, Artificial Sequence
  Description of Artificial Sequence: Synthetic oligonucleotide
aguugucugagauugcaac

SEQ ID NO: 609869 - RNA, 19 nt, Artificial Sequence
  Description of Artificial Sequence: Synthetic oligonucleotide
  modified_base (9)..(9): a, c, u, g, unknown or other
aagugcucnuaguuggcgc

SEQ ID NO: 609870 - RNA, 19 nt, Artificial Sequence
  Description of Artificial Sequence: Synthetic oligonucleotide
uuuacaacauacgugguug

SEQ ID NO: 609871 - RNA, 19 nt, Artificial Sequence
  Description of Artificial Sequence: Synthetic oligonucleotide
ugaaucauugcuagaagcu

SEQ ID NO: 609872 - RNA, 19 nt, Artificial Sequence
  Description of Artificial Sequence: Synthetic oligonucleotide
caagagaucuugcacaagg

SEQ ID NO: 609873 - RNA, 19 nt, Artificial Sequence
  Description of Artificial Sequence: Synthetic oligonucleotide
ucugauuuagaacguuucc

SEQ ID NO: 609874 - RNA, 19 nt, Artificial Sequence
  Description of Artificial Sequence: Synthetic oligonucleotide
uguucuuuucuuaaguauc

SEQ ID NO: 609875 - RNA, 19 nt, Artificial Sequence
  Description of Artificial Sequence: Synthetic oligonucleotide
gcuaaaagcagauuacugg

SEQ ID NO: 609876 - RNA, 19 nt, Artificial Sequence
  Description of Artificial Sequence: Synthetic oligonucleotide
uuggcuguaaucuugacuu

SEQ ID NO: 609877 - RNA, 19 nt, Artificial Sequence
  Description of Artificial Sequence: Synthetic oligonucleotide
acguaaguaguguacacuc

SEQ ID NO: 609878 - RNA, 19 nt, Artificial Sequence
  Description of Artificial Sequence: Synthetic oligonucleotide
auugcuagaagcuuuccca

SEQ ID NO: 609879 - RNA, 19 nt, Artificial Sequence
  Description of Artificial Sequence: Synthetic oligonucleotide
auacgugguugucugaggc

SEQ ID NO: 609880 - RNA, 19 nt, Artificial Sequence
  Description of Artificial Sequence: Synthetic oligonucleotide
cuugcugccagacacaaac

SEQ ID NO: 609881 - RNA, 19 nt, Artificial Sequence
  Description of Artificial Sequence: Synthetic oligonucleotide
uuuagaacguuuccgucug

SEQ ID NO: 609882 - RNA, 19 nt, Artificial Sequence
  Description of Artificial Sequence: Synthetic oligonucleotide
gacacaaacugagugagag

SEQ ID NO: 609883 - RNA, 19 nt, Artificial Sequence
  Description of Artificial Sequence: Synthetic oligonucleotide
ucugcgaugugcuaucugc

SEQ ID NO: 609884 - RNA, 19 nt, Artificial Sequence
  Description of Artificial Sequence: Synthetic oligonucleotide
uuggcugucuccaaaacgu

SEQ ID NO: 609885 - RNA, 19 nt, Artificial Sequence
  Description of Artificial Sequence: Synthetic oligonucleotide
ugaguaguggcaacuacug

SEQ ID NO: 609886 - RNA, 19 nt, Artificial Sequence
  Description of Artificial Sequence: Synthetic oligonucleotide
uaagcauagagaugguagc

SEQ ID NO: 609887 - RNA, 19 nt, Artificial Sequence
  Description of Artificial Sequence: Synthetic oligonucleotide
ugcuaaaagcagauuacug

SEQ ID NO: 609888 - RNA, 19 nt, Artificial Sequence
  Description of Artificial Sequence: Synthetic oligonucleotide
ugaugagcuauacaguccu

SEQ ID NO: 609889 - RNA, 19 nt, Artificial Sequence
  Description of Artificial Sequence: Synthetic oligonucleotide
ucuuaaguaucgucuuugg

SEQ ID NO: 609890 - RNA, 19 nt, Artificial Sequence
  Description of Artificial Sequence: Synthetic oligonucleotide
aacccgagcuugcugaagg

SEQ ID NO: 609891 - RNA, 19 nt, Artificial Sequence
  Description of Artificial Sequence: Synthetic oligonucleotide
auuuagaacguuuccgucu

SEQ ID NO: 609892 - RNA, 19 nt, Artificial Sequence
  Description of Artificial Sequence: Synthetic oligonucleotide
acauuguuauugcugcugg

SEQ ID NO: 609893 - RNA, 19 nt, Artificial Sequence
  Description of Artificial Sequence: Synthetic oligonucleotide
aacguuuccgucuggaaaa

SEQ ID NO: 609894 - RNA, 19 nt, Artificial Sequence
  Description of Artificial Sequence: Synthetic oligonucleotide
agcggcacagcuucggucc

SEQ ID NO: 609895 - RNA, 19 nt, Artificial Sequence
  Description of Artificial Sequence: Synthetic oligonucleotide
gaugaagugcuaaaagcag

SEQ ID NO: 609896 - RNA, 19 nt, Artificial Sequence
  Description of Artificial Sequence: Synthetic oligonucleotide
ucuauuuuggccuguaguu

SEQ ID NO: 609897 - RNA, 19 nt, Artificial Sequence
  Description of Artificial Sequence: Synthetic oligonucleotide
auugcaacggucgagauau

SEQ ID NO: 609898 - RNA, 19 nt, Artificial Sequence
  Description of Artificial Sequence: Synthetic oligonucleotide
uguacagccagcguugucc

SEQ ID NO: 609899 - RNA, 19 nt, Artificial Sequence
  Description of Artificial Sequence: Synthetic oligonucleotide
ucuuaacagaagaaucuac

SEQ ID NO: 609900 - RNA, 19 nt, Artificial Sequence
  Description of Artificial Sequence: Synthetic oligonucleotide
ucgcuaacauuucuuuugg

SEQ ID NO: 609901 - RNA, 19 nt, Artificial Sequence
  Description of Artificial Sequence: Synthetic oligonucleotide
ucguaguggagccugagcu

SEQ ID NO: 609902 - RNA, 19 nt, Artificial Sequence
  Description of Artificial Sequence: Synthetic oligonucleotide
guugucugagauugcaacg

SEQ ID NO: 609903 - RNA, 19 nt, Artificial Sequence
  Description of Artificial Sequence: Synthetic oligonucleotide
guuguuuacaacauacgug

SEQ ID NO: 609904 - RNA, 19 nt, Artificial Sequence
  Description of Artificial Sequence: Synthetic oligonucleotide
cugauuuagaacguuuccg

SEQ ID NO: 609905 - RNA, 19 nt, Artificial Sequence
  Description of Artificial Sequence: Synthetic oligonucleotide
acucgugccaacuucaagu

SEQ ID NO: 609906 - RNA, 19 nt, Artificial Sequence
  Description of Artificial Sequence: Synthetic oligonucleotide
aagacacuguauucacagg

SEQ ID NO: 609907 - RNA, 19 nt, Artificial Sequence
  Description of Artificial Sequence: Synthetic oligonucleotide
aguguacacucaucugucc

SEQ ID NO: 609908 - RNA, 19 nt, Artificial Sequence
  Description of Artificial Sequence: Synthetic oligonucleotide
acaaacguaaguaguguac

SEQ ID NO: 609909 - RNA, 19 nt, Artificial Sequence
  Description of Artificial Sequence: Synthetic oligonucleotide
cucgcuaacauuucuuuug

SEQ ID NO: 609910 - RNA, 19 nt, Artificial Sequence
  Description of Artificial Sequence: Synthetic oligonucleotide
ugggacaguuguauaaacc

SEQ ID NO: 609911 - RNA, 19 nt, Artificial Sequence
  Description of Artificial Sequence: Synthetic oligonucleotide
gacaguuguauaaaccacc

SEQ ID NO: 609912 - RNA, 19 nt, Artificial Sequence
  Description of Artificial Sequence: Synthetic oligonucleotide
uccacuaggcaccugagua

SEQ ID NO: 609913 - RNA, 19 nt, Artificial Sequence
  Description of Artificial Sequence: Synthetic oligonucleotide
cuaguaaccacuguaugac

SEQ ID NO: 609914 - RNA, 19 nt, Artificial Sequence
  Description of Artificial Sequence: Synthetic oligonucleotide
uuacauucacggugguugg

SEQ ID NO: 609915 - RNA, 19 nt, Artificial Sequence
  Description of Artificial Sequence: Synthetic oligonucleotide
aaacaaacguaaguagugu

SEQ ID NO: 609916 - RNA, 19 nt, Artificial Sequence
  Description of Artificial Sequence: Synthetic oligonucleotide
uucugauuuagaacguuuc

SEQ ID NO: 609917 - RNA, 19 nt, Artificial Sequence
  Description of Artificial Sequence: Synthetic oligonucleotide
ugaacucgugccaacuuca

SEQ ID NO: 609918 - RNA, 19 nt, Artificial Sequence
  Description of Artificial Sequence: Synthetic oligonucleotide
ugagaggucacggcaacgg

SEQ ID NO: 609919 - RNA, 19 nt, Artificial Sequence
  Description of Artificial Sequence: Synthetic oligonucleotide
caaaacguuugguuaauuc

SEQ ID NO: 609920 - RNA, 19 nt, Artificial Sequence
  Description of Artificial Sequence: Synthetic oligonucleotide
cugacucugaacucgugcc

SEQ ID NO: 609921 - RNA, 19 nt, Artificial Sequence
  Description of Artificial Sequence: Synthetic oligonucleotide
ugagagugcaagccauggg

SEQ ID NO: 609922 - RNA, 19 nt, Artificial Sequence
  Description of Artificial Sequence: Synthetic oligonucleotide
gauuacugggauuuucauc

SEQ ID NO: 609923 - RNA, 19 nt, Artificial Sequence
  Description of Artificial Sequence: Synthetic oligonucleotide
cuuaaguaucgucuuuggc

SEQ ID NO: 609924 - RNA, 19 nt, Artificial Sequence
  Description of Artificial Sequence: Synthetic oligonucleotide
agucccucguaguggagcc

SEQ ID NO: 609925 - RNA, 19 nt, Artificial Sequence
  Description of Artificial Sequence: Synthetic oligonucleotide
ucgauguguuacauucacg

SEQ ID NO: 609926 - RNA, 19 nt, Artificial Sequence
  Description of Artificial Sequence: Synthetic oligonucleotide
guuugguuaauucuggucu

SEQ ID NO: 609927 - RNA, 19 nt, Artificial Sequence
  Description of Artificial Sequence: Synthetic oligonucleotide
gacuacugacgacugcugg

SEQ ID NO: 609928 - RNA, 19 nt, Artificial Sequence
  Description of Artificial Sequence: Synthetic oligonucleotide
aacaaacguaaguagugua

SEQ ID NO: 609929 - RNA, 19 nt, Artificial Sequence
  Description of Artificial Sequence: Synthetic oligonucleotide
auagcgccgacguuuggac

SEQ ID NO: 609930 - RNA, 19 nt, Artificial Sequence
  Description of Artificial Sequence: Synthetic oligonucleotide
gacuugaaacucugccucg

SEQ ID NO: 609931 - RNA, 19 nt, Artificial Sequence
  Description of Artificial Sequence: Synthetic oligonucleotide
gacaagacuggcugaagac

SEQ ID NO: 609932 - RNA, 19 nt, Artificial Sequence
  Description of Artificial Sequence: Synthetic oligonucleotide
ugaguuacuggucgaugug

SEQ ID NO: 609933 - RNA, 19 nt, Artificial Sequence
  Description of Artificial Sequence: Synthetic oligonucleotide
aacguaaguaguguacacu

SEQ ID NO: 609934 - RNA, 19 nt, Artificial Sequence
  Description of Artificial Sequence: Synthetic oligonucleotide
aguaguguacacucaucug

SEQ ID NO: 609935 - RNA, 19 nt, Artificial Sequence
  Description of Artificial Sequence: Synthetic oligonucleotide
cacacaacuucucuucuag

SEQ ID NO: 609936 - RNA, 19 nt, Artificial Sequence
  Description of Artificial Sequence: Synthetic oligonucleotide
cacgaugccguucugacuc

SEQ ID NO: 609937 - RNA, 19 nt, Artificial Sequence
  Description of Artificial Sequence: Synthetic oligonucleotide
cauugcuagaagcuuuccc

SEQ ID NO: 609938 - RNA, 19 nt, Artificial Sequence
  Description of Artificial Sequence: Synthetic oligonucleotide
aagauuaaaacaagcccaa

SEQ ID NO: 609939 - RNA, 19 nt, Artificial Sequence
  Description of Artificial Sequence: Synthetic oligonucleotide
uccuuucuacuucuggaga

SEQ ID NO: 609940 - RNA, 19 nt, Artificial Sequence
  Description of Artificial Sequence: Synthetic oligonucleotide
uucuauaggucacauuguu

SEQ ID NO: 609941 - RNA, 19 nt, Artificial Sequence
  Description of Artificial Sequence: Synthetic oligonucleotide
uguauucacaggaguuuga

SEQ ID NO: 609942 - RNA, 19 nt, Artificial Sequence
  Description of Artificial Sequence: Synthetic oligonucleotide
uguuugucugguuuucagu

SEQ ID NO: 609943 - RNA, 19 nt, Artificial Sequence
  Description of Artificial Sequence: Synthetic oligonucleotide
ugcaacggucgagauaugg

SEQ ID NO: 609944 - RNA, 19 nt, Artificial Sequence
  Description of Artificial Sequence: Synthetic oligonucleotide
uucggugagaacugcuuug

SEQ ID NO: 609945 - RNA, 19 nt, Artificial Sequence
  Description of Artificial Sequence: Synthetic oligonucleotide
ucuauaggucacauuguua

SEQ ID NO: 609946 - RNA, 19 nt, Artificial Sequence
  Description of Artificial Sequence: Synthetic oligonucleotide
guaaguggauaguugucug

SEQ ID NO: 609947 - RNA, 19 nt, Artificial Sequence
  Description of Artificial Sequence: Synthetic oligonucleotide
  modified_base (2)..(2): a, c, u, g, unknown or other
cnuaguuggcgcaggucgg

SEQ ID NO: 609948 - RNA, 19 nt, Artificial Sequence
  Description of Artificial Sequence: Synthetic oligonucleotide
uguuuugaggguugaccug

SEQ ID NO: 609949 - RNA, 19 nt, Artificial Sequence
  Description of Artificial Sequence: Synthetic oligonucleotide
cuuguggccugcacaauag

SEQ ID NO: 609950 - RNA, 19 nt, Artificial Sequence
  Description of Artificial Sequence: Synthetic oligonucleotide
caacauacgugguugucug

SEQ ID NO: 609951 - RNA, 19 nt, Artificial Sequence
  Description of Artificial Sequence: Synthetic oligonucleotide
augcacaagauuaaaacaa

SEQ ID NO: 609952 - RNA, 19 nt, Artificial Sequence
  Description of Artificial Sequence: Synthetic oligonucleotide
cuggcggacagcaggagcc

SEQ ID NO: 609953 - RNA, 19 nt, Artificial Sequence
  Description of Artificial Sequence: Synthetic oligonucleotide
uaguguacacucaucuguc

SEQ ID NO: 609954 - RNA, 19 nt, Artificial Sequence
  Description of Artificial Sequence: Synthetic oligonucleotide
ugagauugcaacggucgag

SEQ ID NO: 609955 - RNA, 19 nt, Artificial Sequence
  Description of Artificial Sequence: Synthetic oligonucleotide
agggcuuugacuucgccaa

SEQ ID NO: 609956 - RNA, 19 nt, Artificial Sequence
  Description of Artificial Sequence: Synthetic oligonucleotide
cacuguaugaccuucugaa

SEQ ID NO: 609957 - RNA, 19 nt, Artificial Sequence
  Description of Artificial Sequence: Synthetic oligonucleotide
caaaacggccauaaauguc

SEQ ID NO: 609958 - RNA, 19 nt, Artificial Sequence
  Description of Artificial Sequence: Synthetic oligonucleotide
uguacacucaucuguccaa

SEQ ID NO: 609959 - RNA, 19 nt, Artificial Sequence
  Description of Artificial Sequence: Synthetic oligonucleotide
gagcuauacaguccugaug

SEQ ID NO: 609960 - RNA, 19 nt, Artificial Sequence
  Description of Artificial Sequence: Synthetic oligonucleotide
cuuaacagaagaaucuacu

SEQ ID NO: 609961 - RNA, 19 nt, Artificial Sequence
  Description of Artificial Sequence: Synthetic oligonucleotide
acguuuggacugcacauug

SEQ ID NO: 609962 - RNA, 19 nt, Artificial Sequence
  Description of Artificial Sequence: Synthetic oligonucleotide
acuacugacgacugcugga

SEQ ID NO: 609963 - RNA, 19 nt, Artificial Sequence
  Description of Artificial Sequence: Synthetic oligonucleotide
gaacguuuccgucuggaaa

SEQ ID NO: 609964 - RNA, 19 nt, Artificial Sequence
  Description of Artificial Sequence: Synthetic oligonucleotide
ucuaacuguucugggagga

SEQ ID NO: 609965 - RNA, 19 nt, Artificial Sequence
  Description of Artificial Sequence: Synthetic oligonucleotide
uagaagcuuucccacucug

SEQ ID NO: 609966 - RNA, 19 nt, Artificial Sequence
  Description of Artificial Sequence: Synthetic oligonucleotide
aagaaucuacuguuuuguu

SEQ ID NO: 609967 - RNA, 19 nt, Artificial Sequence
  Description of Artificial Sequence: Synthetic oligonucleotide
uuugguuaauucuggucua

SEQ ID NO: 609968 - RNA, 19 nt, Artificial Sequence
  Description of Artificial Sequence: Synthetic oligonucleotide
ucgagauauggcugagaag

SEQ ID NO: 609969 - RNA, 19 nt, Artificial Sequence
  Description of Artificial Sequence: Synthetic oligonucleotide
uugcuagaagcuuucccac

SEQ ID NO: 609970 - RNA, 19 nt, Artificial Sequence
  Description of Artificial Sequence: Synthetic oligonucleotide
acgugguugucugaggcac

SEQ ID NO: 609971 - RNA, 19 nt, Artificial Sequence
  Description of Artificial Sequence: Synthetic oligonucleotide
auaguugucugagauugca

SEQ ID NO: 609972 - RNA, 19 nt, Artificial Sequence
  Description of Artificial Sequence: Synthetic oligonucleotide
uaguaaccacuguaugacc

SEQ ID NO: 609973 - RNA, 19 nt, Artificial Sequence
  Description of Artificial Sequence: Synthetic oligonucleotide
gggacaguuguauaaacca

SEQ ID NO: 609974 - RNA, 19 nt, Artificial Sequence
  Description of Artificial Sequence: Synthetic oligonucleotide
aguaaccacuguaugaccu

SEQ ID NO: 609975 - RNA, 19 nt, Artificial Sequence
  Description of Artificial Sequence: Synthetic oligonucleotide
uuauuauacuucaguuaua

SEQ ID NO: 609976 - RNA, 19 nt, Artificial Sequence
  Description of Artificial Sequence: Synthetic oligonucleotide
gucgauguguuacauucac

SEQ ID NO: 609977 - RNA, 19 nt, Artificial Sequence
  Description of Artificial Sequence: Synthetic oligonucleotide
ucgccaaucuucuuccacu

SEQ ID NO: 609978 - RNA, 19 nt, Artificial Sequence
  Description of Artificial Sequence: Synthetic oligonucleotide
acggccauaaauguccuug

SEQ ID NO: 609979 - RNA, 19 nt, Artificial Sequence
  Description of Artificial Sequence: Synthetic oligonucleotide
uuagaacguuuccgucugg

SEQ ID NO: 609980 - RNA, 19 nt, Artificial Sequence
  Description of Artificial Sequence: Synthetic oligonucleotide
uguauugggccucggggau

SEQ ID NO: 609981 - RNA, 19 nt, Artificial Sequence
  Description of Artificial Sequence: Synthetic oligonucleotide
gauauagcgccgacguuug

SEQ ID NO: 609982 - RNA, 19 nt, Artificial Sequence
  Description of Artificial Sequence: Synthetic oligonucleotide
uguuauugcugcuggcauc

SEQ ID NO: 609983 - RNA, 19 nt, Artificial Sequence
  Description of Artificial Sequence: Synthetic oligonucleotide
  modified_base (8)..(8): a, c, u, g, unknown or other
agugcucnuaguuggcgca

SEQ ID NO: 609984 - RNA, 19 nt, Artificial Sequence
  Description of Artificial Sequence: Synthetic oligonucleotide
auucacggugguuggagcu

SEQ ID NO: 609985 - RNA, 19 nt, Artificial Sequence
  Description of Artificial Sequence: Synthetic oligonucleotide
cauacgugguugucugagg

SEQ ID NO: 609986 - RNA, 19 nt, Artificial Sequence
  Description of Artificial Sequence: Synthetic oligonucleotide
cuaggcaccugaguagugg

SEQ ID NO: 609987 - RNA, 19 nt, Artificial Sequence
  Description of Artificial Sequence: Synthetic oligonucleotide
ucggggauuguuugaugag

SEQ ID NO: 609988 - RNA, 19 nt, Artificial Sequence
  Description of Artificial Sequence: Synthetic oligonucleotide
ugcgaugugcuaucugcca

SEQ ID NO: 609989 - RNA, 19 nt, Artificial Sequence
  Description of Artificial Sequence: Synthetic oligonucleotide
uuacaacauacgugguugu

SEQ ID NO: 609990 - RNA, 19 nt, Artificial Sequence
  Description of Artificial Sequence: Synthetic oligonucleotide
agcgccgacguuuggacug

SEQ ID NO: 609991 - RNA, 19 nt, Artificial Sequence
  Description of Artificial Sequence: Synthetic oligonucleotide
uacugggauuuucaucugu

SEQ ID NO: 609992 - RNA, 19 nt, Artificial Sequence
  Description of Artificial Sequence: Synthetic oligonucleotide
uauagcgccgacguuugga

SEQ ID NO: 609993 - RNA, 19 nt, Artificial Sequence
  Description of Artificial Sequence: Synthetic oligonucleotide
aggcacucgaacuguaaca

SEQ ID NO: 609994 - RNA, 19 nt, Artificial Sequence
  Description of Artificial Sequence: Synthetic oligonucleotide
aagguggauuuacauugaa

SEQ ID NO: 609995 - RNA, 19 nt, Artificial Sequence
  Description of Artificial Sequence: Synthetic oligonucleotide
ugucugagauugcaacggu

SEQ ID NO: 609996 - RNA, 19 nt, Artificial Sequence
  Description of Artificial Sequence: Synthetic oligonucleotide
aacggucgagauauggcug

SEQ ID NO: 609997 - RNA, 19 nt, Artificial Sequence
  Description of Artificial Sequence: Synthetic oligonucleotide
ucaucuguauugggccucg

SEQ ID NO: 609998 - RNA, 19 nt, Artificial Sequence
  Description of Artificial Sequence: Synthetic oligonucleotide
aagagaucuugcacaaggu

SEQ ID NO: 609999 - RNA, 19 nt, Artificial Sequence
  Description of Artificial Sequence: Synthetic oligonucleotide
cucgugccaacuucaagug

SEQ ID NO: 610000 - RNA, 19 nt, Artificial Sequence
  Description of Artificial Sequence: Synthetic oligonucleotide
gucgggacggccuguacag

SEQ ID NO: 610001 - RNA, 19 nt, Artificial Sequence
  Description of Artificial Sequence: Synthetic oligonucleotide
acaguuguauaaaccaccu

SEQ ID NO: 610002 - RNA, 19 nt, Artificial Sequence
  Description of Artificial Sequence: Synthetic oligonucleotide
ucgaacuguaacacuguuu

SEQ ID NO: 610003 - RNA, 19 nt, Artificial Sequence
  Description of Artificial Sequence: Synthetic oligonucleotide
ugcagcuuaggcugacuac

SEQ ID NO: 610004 - RNA, 19 nt, Artificial Sequence
  Description of Artificial Sequence: Synthetic oligonucleotide
agauuguaggcugaggauu

SEQ ID NO: 610005 - RNA, 19 nt, Artificial Sequence
  Description of Artificial Sequence: Synthetic oligonucleotide
aacauacgugguugucuga

SEQ ID NO: 610006 - RNA, 19 nt, Artificial Sequence
  Description of Artificial Sequence: Synthetic oligonucleotide
gagauugcaacggucgaga

SEQ ID NO: 610007 - RNA, 19 nt, Artificial Sequence
  Description of Artificial Sequence: Synthetic oligonucleotide
ugaccuucugaagcuuccg

SEQ ID NO: 610008 - RNA, 19 nt, Artificial Sequence
  Description of Artificial Sequence: Synthetic oligonucleotide
cauucacggugguuggagc

SEQ ID NO: 610009 - RNA, 19 nt, Artificial Sequence
  Description of Artificial Sequence: Synthetic oligonucleotide
uaguugucugagauugcaa

SEQ ID NO: 610010 - RNA, 19 nt, Artificial Sequence
  Description of Artificial Sequence: Synthetic oligonucleotide
cuggguuccucaugguaag

SEQ ID NO: 610011 - RNA, 19 nt, Artificial Sequence
  Description of Artificial Sequence: Synthetic oligonucleotide
cccguuguuuacaacauac

SEQ ID NO: 610012 - RNA, 19 nt, Artificial Sequence
  Description of Artificial Sequence: Synthetic oligonucleotide
cuuggcgcgcacugcaaag

SEQ ID NO: 610013 - RNA, 19 nt, Artificial Sequence
  Description of Artificial Sequence: Synthetic oligonucleotide
cugcgaugugcuaucugcc

SEQ ID NO: 610014 - RNA, 19 nt, Artificial Sequence
  Description of Artificial Sequence: Synthetic oligonucleotide
uccgucuggaaaauucauu

SEQ ID NO: 610015 - RNA, 19 nt, Artificial Sequence
  Description of Artificial Sequence: Synthetic oligonucleotide
uacgugguugucugaggca

SEQ ID NO: 610016 - RNA, 19 nt, Artificial Sequence
  Description of Artificial Sequence: Synthetic oligonucleotide
ggaguuugaaaggauggug

SEQ ID NO: 610017 - RNA, 19 nt, Artificial Sequence
  Description of Artificial Sequence: Synthetic oligonucleotide
guagcugucaacagcggca

SEQ ID NO: 610018 - RNA, 19 nt, Artificial Sequence
  Description of Artificial Sequence: Synthetic oligonucleotide
caaacguaaguaguguaca

SEQ ID NO: 610019 - RNA, 19 nt, Artificial Sequence
  Description of Artificial Sequence: Synthetic oligonucleotide
aguggauaguugucugaga

SEQ ID NO: 610020 - RNA, 19 nt, Artificial Sequence
  Description of Artificial Sequence: Synthetic oligonucleotide
aguaucgucuuuggcuguc

SEQ ID NO: 610021 - RNA, 19 nt, Artificial Sequence
  Description of Artificial Sequence: Synthetic oligonucleotide
cucggggauuguuugauga

SEQ ID NO: 610022 - RNA, 19 nt, Artificial Sequence
  Description of Artificial Sequence: Synthetic oligonucleotide
ggucacauuguuauugcug

SEQ ID NO: 610023 - RNA, 19 nt, Artificial Sequence
  Description of Artificial Sequence: Synthetic oligonucleotide
uaguucggugagaacugcu

SEQ ID NO: 610024 - RNA, 19 nt, Artificial Sequence
  Description of Artificial Sequence: Synthetic oligonucleotide
acuguauucacaggaguuu

SEQ ID NO: 610025 - RNA, 19 nt, Artificial Sequence
  Description of Artificial Sequence: Synthetic oligonucleotide
gauaguugucugagauugc

SEQ ID NO: 610026 - RNA, 19 nt, Artificial Sequence
  Description of Artificial Sequence: Synthetic oligonucleotide
cagcccguuguuuacaaca

SEQ ID NO: 610027 - RNA, 19 nt, Artificial Sequence
  Description of Artificial Sequence: Synthetic oligonucleotide
uugcacaagguggauuuac

SEQ ID NO: 610028 - RNA, 19 nt, Artificial Sequence
  Description of Artificial Sequence: Synthetic oligonucleotide
uagaacguuuccgucugga

SEQ ID NO: 610029 - RNA, 19 nt, Artificial Sequence
  Description of Artificial Sequence: Synthetic oligonucleotide
uuccacuaggcaccugagu

SEQ ID NO: 610030 - RNA, 19 nt, Artificial Sequence
  Description of Artificial Sequence: Synthetic oligonucleotide
acggucgagauauggcuga

SEQ ID NO: 610031 - RNA, 19 nt, Artificial Sequence
  Description of Artificial Sequence: Synthetic oligonucleotide
agugcaagccauggguaag

SEQ ID NO: 610032 - RNA, 19 nt, Artificial Sequence
  Description of Artificial Sequence: Synthetic oligonucleotide
cauagagaugguagcuguc

SEQ ID NO: 610033 - RNA, 19 nt, Artificial Sequence
  Description of Artificial Sequence: Synthetic oligonucleotide
ccacuugaaucauugcuag

SEQ ID NO: 610034 - RNA, 19 nt, Artificial Sequence
  Description of Artificial Sequence: Synthetic oligonucleotide
uauugggccucggggauug

SEQ ID NO: 610035 - RNA, 19 nt, Artificial Sequence
  Description of Artificial Sequence: Synthetic oligonucleotide
ggcugaauuauuauacuuc

SEQ ID NO: 610036 - RNA, 19 nt, Artificial Sequence
  Description of Artificial Sequence: Synthetic oligonucleotide
agguaaguggauaguuguc

SEQ ID NO: 610037 - RNA, 19 nt, Artificial Sequence
  Description of Artificial Sequence: Synthetic oligonucleotide
agucgggacggccuguaca

SEQ ID NO: 610038 - RNA, 19 nt, Artificial Sequence
  Description of Artificial Sequence: Synthetic oligonucleotide
aucacguccguggacugag

SEQ ID NO: 610039 - RNA, 19 nt, Artificial Sequence
  Description of Artificial Sequence: Synthetic oligonucleotide
uauaggucacauuguuauu

SEQ ID NO: 610040 - RNA, 19 nt, Artificial Sequence
  Description of Artificial Sequence: Synthetic oligonucleotide
cacguccguggacugaggg

SEQ ID NO: 610041 - RNA, 19 nt, Artificial Sequence
  Description of Artificial Sequence: Synthetic oligonucleotide
  modified_base (6)..(6): a, c, u, g, unknown or other
ugcucnuaguuggcgcagg

SEQ ID NO: 610042 - RNA, 19 nt, Artificial Sequence
  Description of Artificial Sequence: Synthetic oligonucleotide
ucugccguacugugccugc

SEQ ID NO: 610043 - RNA, 19 nt, Artificial Sequence
  Description of Artificial Sequence: Synthetic oligonucleotide
cucguaguggagccugagc

SEQ ID NO: 610044 - RNA, 19 nt, Artificial Sequence
  Description of Artificial Sequence: Synthetic oligonucleotide
uggauaguugucugagauu

SEQ ID NO: 610045 - RNA, 19 nt, Artificial Sequence
  Description of Artificial Sequence: Synthetic oligonucleotide
aucuacuguuuuguuuguc

SEQ ID NO: 610046 - RNA, 19 nt, Artificial Sequence
  Description of Artificial Sequence: Synthetic oligonucleotide
acaugcagaaucacuggca

SEQ ID NO: 610047 - RNA, 19 nt, Artificial Sequence
  Description of Artificial Sequence: Synthetic oligonucleotide
cucgauauagcgccgacgu

SEQ ID NO: 610048 - RNA, 19 nt, Artificial Sequence
  Description of Artificial Sequence: Synthetic oligonucleotide
guaaguaguguacacucau

SEQ ID NO: 610049 - RNA, 19 nt, Artificial Sequence
  Description of Artificial Sequence: Synthetic oligonucleotide
uggugguggacccucgcua

SEQ ID NO: 610050 - RNA, 19 nt, Artificial Sequence
  Description of Artificial Sequence: Synthetic oligonucleotide
agaacguuuccgucuggaa

SEQ ID NO: 610051 - RNA, 19 nt, Artificial Sequence
  Description of Artificial Sequence: Synthetic oligonucleotide
guacacucaucuguccaag

SEQ ID NO: 610052 - RNA, 19 nt, Artificial Sequence
  Description of Artificial Sequence: Synthetic oligonucleotide
ucgugccaacuucaagugu

SEQ ID NO: 610053 - RNA, 19 nt, Artificial Sequence
  Description of Artificial Sequence: Synthetic oligonucleotide
acguuugguuaauucuggu

SEQ ID NO: 610054 - RNA, 19 nt, Artificial Sequence
  Description of Artificial Sequence: Synthetic oligonucleotide
ucggugagaacugcuuugu

SEQ ID NO: 610055 - RNA, 19 nt, Artificial Sequence
  Description of Artificial Sequence: Synthetic oligonucleotide
acggccuguacagccagcg

SEQ ID NO: 610056 - RNA, 19 nt, Artificial Sequence
  Description of Artificial Sequence: Synthetic oligonucleotide
uugaccuggcggacagcag

SEQ ID NO: 610057 - RNA, 19 nt, Artificial Sequence
  Description of Artificial Sequence: Synthetic oligonucleotide
cuaucuuuuccacucgugu

SEQ ID NO: 610058 - RNA, 19 nt, Artificial Sequence
  Description of Artificial Sequence: Synthetic oligonucleotide
cuuccucgauauagcgccg

SEQ ID NO: 610059 - RNA, 19 nt, Artificial Sequence
  Description of Artificial Sequence: Synthetic oligonucleotide
gauugcaacggucgagaua

SEQ ID NO: 610060 - RNA, 19 nt, Artificial Sequence
  Description of Artificial Sequence: Synthetic oligonucleotide
auauagcgccgacguuugg

SEQ ID NO: 610061 - RNA, 19 nt, Artificial Sequence
  Description of Artificial Sequence: Synthetic oligonucleotide
cagagcuauuuuguucugc

SEQ ID NO: 610062 - RNA, 19 nt, Artificial Sequence
  Description of Artificial Sequence: Synthetic oligonucleotide
ggugauguagguggguuug

SEQ ID NO: 610063 - RNA, 19 nt, Artificial Sequence
  Description of Artificial Sequence: Synthetic oligonucleotide
ugaaaggauggugguggac

SEQ ID NO: 610064 - RNA, 19 nt, Artificial Sequence
  Description of Artificial Sequence: Synthetic oligonucleotide
uacaacauacgugguuguc

SEQ ID NO: 610065 - RNA, 19 nt, Artificial Sequence
  Description of Artificial Sequence: Synthetic oligonucleotide
caguuguauaaaccaccug

SEQ ID NO: 610066 - RNA, 19 nt, Artificial Sequence
  Description of Artificial Sequence: Synthetic oligonucleotide
uaucgucuuuggcugucuc

SEQ ID NO: 610067 - RNA, 19 nt, Artificial Sequence
  Description of Artificial Sequence: Synthetic oligonucleotide
cagguaaguggauaguugu

SEQ ID NO: 610068 - RNA, 19 nt, Artificial Sequence
  Description of Artificial Sequence: Synthetic oligonucleotide
acaagcccaaaauguggaa

SEQ ID NO: 610069 - RNA, 19 nt, Artificial Sequence
  Description of Artificial Sequence: Synthetic oligonucleotide
ccguuguuuacaacauacg

SEQ ID NO: 610070 - RNA, 19 nt, Artificial Sequence
  Description of Artificial Sequence: Synthetic oligonucleotide
uagcugucaacagcggcac

SEQ ID NO: 610071 - RNA, 19 nt, Artificial Sequence
  Description of Artificial Sequence: Synthetic oligonucleotide
acuugaaacucugccucgu

SEQ ID NO: 610072 - RNA, 19 nt, Artificial Sequence
  Description of Artificial Sequence: Synthetic oligonucleotide
gagauuguaggcugaggau

SEQ ID NO: 610073 - RNA, 19 nt, Artificial Sequence
  Description of Artificial Sequence: Synthetic oligonucleotide
cagcguuguccccaaggag

SEQ ID NO: 610074 - RNA, 19 nt, Artificial Sequence
  Description of Artificial Sequence: Synthetic oligonucleotide
cgugccaacuucaagugug

SEQ ID NO: 610075 - RNA, 19 nt, Artificial Sequence
  Description of Artificial Sequence: Synthetic oligonucleotide
cugaguaguggcaacuacu

SEQ ID NO: 610076 - RNA, 19 nt, Artificial Sequence
  Description of Artificial Sequence: Synthetic oligonucleotide
ucacguccguggacugagg

SEQ ID NO: 610077 - RNA, 19 nt, Artificial Sequence
  Description of Artificial Sequence: Synthetic oligonucleotide
aggaagagaucacguccgu

SEQ ID NO: 610078 - RNA, 19 nt, Artificial Sequence
  Description of Artificial Sequence: Synthetic oligonucleotide
ucccucguaguggagccug

SEQ ID NO: 610079 - RNA, 19 nt, Artificial Sequence
  Description of Artificial Sequence: Synthetic oligonucleotide
guaguucggugagaacugc

SEQ ID NO: 610080 - RNA, 19 nt, Artificial Sequence
  Description of Artificial Sequence: Synthetic oligonucleotide
agauugcaacggucgagau

SEQ ID NO: 610081 - RNA, 19 nt, Artificial Sequence
  Description of Artificial Sequence: Synthetic oligonucleotide
gccagcguuguccccaagg

SEQ ID NO: 610082 - RNA, 19 nt, Artificial Sequence
  Description of Artificial Sequence: Synthetic oligonucleotide
gaugagcuauacaguccug

SEQ ID NO: 610083 - RNA, 19 nt, Artificial Sequence
  Description of Artificial Sequence: Synthetic oligonucleotide
ggcacucgaacuguaacac

SEQ ID NO: 610084 - RNA, 19 nt, Artificial Sequence
  Description of Artificial Sequence: Synthetic oligonucleotide
ugguugucugaggcacucg

SEQ ID NO: 610085 - RNA, 19 nt, Artificial Sequence
  Description of Artificial Sequence: Synthetic oligonucleotide
ugguggacccucgcuaaca

SEQ ID NO: 610086 - RNA, 19 nt, Artificial Sequence
  Description of Artificial Sequence: Synthetic oligonucleotide
caacggucgagauauggcu

SEQ ID NO: 610087 - RNA, 19 nt, Artificial Sequence
  Description of Artificial Sequence: Synthetic oligonucleotide
aagacuggcugaagacacu

SEQ ID NO: 610088 - RNA, 19 nt, Artificial Sequence
  Description of Artificial Sequence: Synthetic oligonucleotide
agauuaaaacaagcccaaa

SEQ ID NO: 610089 - RNA, 19 nt, Artificial Sequence
  Description of Artificial Sequence: Synthetic oligonucleotide
ggacaguuguauaaaccac

SEQ ID NO: 610090 - RNA, 19 nt, Artificial Sequence
  Description of Artificial Sequence: Synthetic oligonucleotide
cugacgacugcuggaggag

SEQ ID NO: 610091 - RNA, 19 nt, Artificial Sequence
  Description of Artificial Sequence: Synthetic oligonucleotide
cagucccucguaguggagc

SEQ ID NO: 610092 - RNA, 19 nt, Artificial Sequence
  Description of Artificial Sequence: Synthetic oligonucleotide
gccguucugacucugaacu

SEQ ID NO: 610093 - RNA, 19 nt, Artificial Sequence
  Description of Artificial Sequence: Synthetic oligonucleotide
gcaggagccugcauaacag

SEQ ID NO: 610094 - RNA, 19 nt, Artificial Sequence
  Description of Artificial Sequence: Synthetic oligonucleotide
acguccguggacugagggu

SEQ ID NO: 610095 - RNA, 19 nt, Artificial Sequence
  Description of Artificial Sequence: Synthetic oligonucleotide
uguuacauucacggugguu

SEQ ID NO: 610096 - RNA, 19 nt, Artificial Sequence
  Description of Artificial Sequence: Synthetic oligonucleotide
agggagauuguaggcugag

SEQ ID NO: 610097 - RNA, 19 nt, Artificial Sequence
  Description of Artificial Sequence: Synthetic oligonucleotide
  modified_base (7)..(7): a, c, u, g, unknown or other
gugcucnuaguuggcgcag

SEQ ID NO: 610098 - RNA, 19 nt, Artificial Sequence
  Description of Artificial Sequence: Synthetic oligonucleotide
  modified_base (4)..(4): a, c, u, g, unknown or other
cucnuaguuggcgcagguc

SEQ ID NO: 610099 - RNA, 19 nt, Artificial Sequence
  Description of Artificial Sequence: Synthetic oligonucleotide
ccugcauaacagucccucg

SEQ ID NO: 610100 - RNA, 19 nt, Artificial Sequence
  Description of Artificial Sequence: Synthetic oligonucleotide
gcugaucccagggucagcc

SEQ ID NO: 610101 - RNA, 19 nt, Artificial Sequence
  Description of Artificial Sequence: Synthetic oligonucleotide
gaaucauugcuagaagcuu

SEQ ID NO: 610102 - RNA, 19 nt, Artificial Sequence
  Description of Artificial Sequence: Synthetic oligonucleotide
cugagaggucacggcaacg

SEQ ID NO: 610103 - RNA, 19 nt, Artificial Sequence
  Description of Artificial Sequence: Synthetic oligonucleotide
aggucacggcaacggggac

SEQ ID NO: 610104 - RNA, 19 nt, Artificial Sequence
  Description of Artificial Sequence: Synthetic oligonucleotide
ucagcccguuguuuacaac

SEQ ID NO: 610105 - RNA, 19 nt, Artificial Sequence
  Description of Artificial Sequence: Synthetic oligonucleotide
cugagauugcaacggucga

SEQ ID NO: 610106 - RNA, 19 nt, Artificial Sequence
  Description of Artificial Sequence: Synthetic oligonucleotide
gacucugaacucgugccaa

SEQ ID NO: 610107 - RNA, 19 nt, Artificial Sequence
  Description of Artificial Sequence: Synthetic oligonucleotide
gcaacggucgagauauggc

SEQ ID NO: 610108 - RNA, 19 nt, Artificial Sequence
  Description of Artificial Sequence: Synthetic oligonucleotide
gguaaguggauaguugucu

SEQ ID NO: 610109 - RNA, 19 nt, Artificial Sequence
  Description of Artificial Sequence: Synthetic oligonucleotide
gaacccgagcuugcugaag

SEQ ID NO: 610110 - RNA, 19 nt, Artificial Sequence
  Description of Artificial Sequence: Synthetic oligonucleotide
ccacuaggcaccugaguag

SEQ ID NO: 610111 - RNA, 19 nt, Artificial Sequence
  Description of Artificial Sequence: Synthetic oligonucleotide
gcuaaaggcuccaaggucu

SEQ ID NO: 610112 - RNA, 19 nt, Artificial Sequence
  Description of Artificial Sequence: Synthetic oligonucleotide
ucgauauagcgccgacguu

SEQ ID NO: 610113 - RNA, 19 nt, Artificial Sequence
  Description of Artificial Sequence: Synthetic oligonucleotide
cugaucccagggucagccc

SEQ ID NO: 610114 - RNA, 19 nt, Artificial Sequence
  Description of Artificial Sequence: Synthetic oligonucleotide
uuggcgcgcacugcaaagu

SEQ ID NO: 610115 - RNA, 19 nt, Artificial Sequence
  Description of Artificial Sequence: Synthetic oligonucleotide
gaguuacuggucgaugugu

SEQ ID NO: 610116 - RNA, 19 nt, Artificial Sequence
  Description of Artificial Sequence: Synthetic oligonucleotide
aggucggcugacuuagcuu

SEQ ID NO: 610117 - RNA, 19 nt, Artificial Sequence
  Description of Artificial Sequence: Synthetic oligonucleotide
aguucggugagaacugcuu

SEQ ID NO: 610118 - RNA, 19 nt, Artificial Sequence
  Description of Artificial Sequence: Synthetic oligonucleotide
guuacuggucgauguguua

SEQ ID NO: 610119 - RNA, 19 nt, Artificial Sequence
  Description of Artificial Sequence: Synthetic oligonucleotide
gauuguaggcugaggauuu

SEQ ID NO: 610120 - RNA, 19 nt, Artificial Sequence
  Description of Artificial Sequence: Synthetic oligonucleotide
aguuacuggucgauguguu

SEQ ID NO: 610121 - RNA, 19 nt, Artificial Sequence
  Description of Artificial Sequence: Synthetic oligonucleotide
uggcgcgcacugcaaagua

SEQ ID NO: 610122 - RNA, 19 nt, Artificial Sequence
  Description of Artificial Sequence: Synthetic oligonucleotide
cucugcgaugugcuaucug

SEQ ID NO: 610123 - RNA, 19 nt, Artificial Sequence
  Description of Artificial Sequence: Synthetic oligonucleotide
gucaccugaguuacugguc

SEQ ID NO: 610124 - RNA, 19 nt, Artificial Sequence
  Description of Artificial Sequence: Synthetic oligonucleotide
ccaaggucuaacuguucug

SEQ ID NO: 610125 - RNA, 19 nt, Artificial Sequence
  Description of Artificial Sequence: Synthetic oligonucleotide
aucugccguacugugccug

SEQ ID NO: 610126 - RNA, 19 nt, Artificial Sequence
  Description of Artificial Sequence: Synthetic oligonucleotide
uacuucuggagagcucguc

SEQ ID NO: 610127 - RNA, 19 nt, Artificial Sequence
  Description of Artificial Sequence: Synthetic oligonucleotide
caacagcggcacagcuucg

SEQ ID NO: 610128 - RNA, 19 nt, Artificial Sequence
  Description of Artificial Sequence: Synthetic oligonucleotide
ugccguacugugccugcau

SEQ ID NO: 610129 - RNA, 19 nt, Artificial Sequence
  Description of Artificial Sequence: Synthetic oligonucleotide
uagcgccgacguuuggacu

SEQ ID NO: 610130 - RNA, 19 nt, Artificial Sequence
  Description of Artificial Sequence: Synthetic oligonucleotide
ugccaacuucaaguguggu

SEQ ID NO: 610131 - RNA, 19 nt, Artificial Sequence
  Description of Artificial Sequence: Synthetic oligonucleotide
ccugaguaguggcaacuac

SEQ ID NO: 610132 - RNA, 19 nt, Artificial Sequence
  Description of Artificial Sequence: Synthetic oligonucleotide
gcugacuacugacgacugc

SEQ ID NO: 610133 - RNA, 19 nt, Artificial Sequence
  Description of Artificial Sequence: Synthetic oligonucleotide
ggagucuuguggucaccug

SEQ ID NO: 610134 - RNA, 19 nt, Artificial Sequence
  Description of Artificial Sequence: Synthetic oligonucleotide
gaugccguucugacucuga

SEQ ID NO: 610135 - RNA, 19 nt, Artificial Sequence
  Description of Artificial Sequence: Synthetic oligonucleotide
cugcauaacagucccucgu

SEQ ID NO: 610136 - RNA, 19 nt, Artificial Sequence
  Description of Artificial Sequence: Synthetic oligonucleotide
cagcggcacagcuucgguc

SEQ ID NO: 610137 - RNA, 19 nt, Artificial Sequence
  Description of Artificial Sequence: Synthetic oligonucleotide
gcagauuacugggauuuuc

SEQ ID NO: 610138 - RNA, 19 nt, Artificial Sequence
  Description of Artificial Sequence: Synthetic oligonucleotide
aucuugcacaagguggauu

SEQ ID NO: 610139 - RNA, 19 nt, Artificial Sequence
  Description of Artificial Sequence: Synthetic oligonucleotide
ggauuguuugaugagcuau

SEQ ID NO: 610140 - RNA, 19 nt, Artificial Sequence
  Description of Artificial Sequence: Synthetic oligonucleotide
uaguuggcgcaggucggcu

SEQ ID NO: 610141 - RNA, 19 nt, Artificial Sequence
  Description of Artificial Sequence: Synthetic oligonucleotide
guggcggccggugaugcac

SEQ ID NO: 610142 - RNA, 19 nt, Artificial Sequence
  Description of Artificial Sequence: Synthetic oligonucleotide
gcugccagacacaaacuga

SEQ ID NO: 610143 - RNA, 19 nt, Artificial Sequence
  Description of Artificial Sequence: Synthetic oligonucleotide
gcccaaaacggccauaaau

SEQ ID NO: 610144 - RNA, 19 nt, Artificial Sequence
  Description of Artificial Sequence: Synthetic oligonucleotide
gugcagucgggacggccug

SEQ ID NO: 610145 - RNA, 19 nt, Artificial Sequence
  Description of Artificial Sequence: Synthetic oligonucleotide
uggucuauuuuggccugua

SEQ ID NO: 610146 - RNA, 19 nt, Artificial Sequence
  Description of Artificial Sequence: Synthetic oligonucleotide
gccggugaugcaccgugag

SEQ ID NO: 610147 - RNA, 19 nt, Artificial Sequence
  Description of Artificial Sequence: Synthetic oligonucleotide
acuaggcaccugaguagug

SEQ ID NO: 610148 - RNA, 19 nt, Artificial Sequence
  Description of Artificial Sequence: Synthetic oligonucleotide
gggguaaagaaguccuugu

SEQ ID NO: 610149 - RNA, 19 nt, Artificial Sequence
  Description of Artificial Sequence: Synthetic oligonucleotide
guacuugcugccagacaca

SEQ ID NO: 610150 - RNA, 19 nt, Artificial Sequence
  Description of Artificial Sequence: Synthetic oligonucleotide
uugcaacggucgagauaug

SEQ ID NO: 610151 - RNA, 19 nt, Artificial Sequence
  Description of Artificial Sequence: Synthetic oligonucleotide
agcccguuguuuacaacau

SEQ ID NO: 610152 - RNA, 19 nt, Artificial Sequence
  Description of Artificial Sequence: Synthetic oligonucleotide
cagggagauuguaggcuga

SEQ ID NO: 610153 - RNA, 19 nt, Artificial Sequence
  Description of Artificial Sequence: Synthetic oligonucleotide
cuugaaacucugccucgua

SEQ ID NO: 610154 - RNA, 19 nt, Artificial Sequence
  Description of Artificial Sequence: Synthetic oligonucleotide
ccaaaacggccauaaaugu

SEQ ID NO: 610155 - RNA, 19 nt, Artificial Sequence
  Description of Artificial Sequence: Synthetic oligonucleotide
gccugcauaacagucccuc

SEQ ID NO: 610156 - RNA, 19 nt, Artificial Sequence
  Description of Artificial Sequence: Synthetic oligonucleotide
uuauugcugcuggcaucac

SEQ ID NO: 610157 - RNA, 19 nt, Artificial Sequence
  Description of Artificial Sequence: Synthetic oligonucleotide
guaaccacuguaugaccuu

SEQ ID NO: 610158 - RNA, 19 nt, Artificial Sequence
  Description of Artificial Sequence: Synthetic oligonucleotide
ggugguggacccucgcuaa

SEQ ID NO: 610159 - RNA, 19 nt, Artificial Sequence
  Description of Artificial Sequence: Synthetic oligonucleotide
ggcaacggggacaugcaga

SEQ ID NO: 610160 - RNA, 19 nt, Artificial Sequence
  Description of Artificial Sequence: Synthetic oligonucleotide
gaacucgugccaacuucaa

SEQ ID NO: 610161 - RNA, 19 nt, Artificial Sequence
  Description of Artificial Sequence: Synthetic oligonucleotide
gcucuugguacagggaguc

SEQ ID NO: 610162 - RNA, 19 nt, Artificial Sequence
  Description of Artificial Sequence: Synthetic oligonucleotide
ccucgauauagcgccgacg

SEQ ID NO: 610163 - RNA, 19 nt, Artificial Sequence
  Description of Artificial Sequence: Synthetic oligonucleotide
guucggugagaacugcuuu

SEQ ID NO: 610164 - RNA, 19 nt, Artificial Sequence
  Description of Artificial Sequence: Synthetic oligonucleotide
gguggcagagcuauuuugu

SEQ ID NO: 610165 - RNA, 19 nt, Artificial Sequence
  Description of Artificial Sequence: Synthetic oligonucleotide
cguuguuuacaacauacgu

SEQ ID NO: 610166 - RNA, 19 nt, Artificial Sequence
  Description of Artificial Sequence: Synthetic oligonucleotide
cuagaagcuuucccacucu

SEQ ID NO: 610167 - RNA, 19 nt, Artificial Sequence
  Description of Artificial Sequence: Synthetic oligonucleotide
gugguggacccucgcuaac

SEQ ID NO: 610168 - RNA, 19 nt, Artificial Sequence
  Description of Artificial Sequence: Synthetic oligonucleotide
ggauuuacauugaauucau

SEQ ID NO: 610169 - RNA, 19 nt, Artificial Sequence
  Description of Artificial Sequence: Synthetic oligonucleotide
agcugucaacagcggcaca

SEQ ID NO: 610170 - RNA, 19 nt, Artificial Sequence
  Description of Artificial Sequence: Synthetic oligonucleotide
caucuguauugggccucgg

SEQ ID NO: 610171 - RNA, 19 nt, Artificial Sequence
  Description of Artificial Sequence: Synthetic oligonucleotide
accugaguaguggcaacua

SEQ ID NO: 610172 - RNA, 19 nt, Artificial Sequence
  Description of Artificial Sequence: Synthetic oligonucleotide
caucguccauugugagguc

SEQ ID NO: 610173 - RNA, 19 nt, Artificial Sequence
  Description of Artificial Sequence: Synthetic oligonucleotide
cuucgccaaucuucuucca

SEQ ID NO: 610174 - RNA, 19 nt, Artificial Sequence
  Description of Artificial Sequence: Synthetic oligonucleotide
ucgggacggccuguacagc

SEQ ID NO: 610175 - RNA, 19 nt, Artificial Sequence
  Description of Artificial Sequence: Synthetic oligonucleotide
uccguggacugagggucac

SEQ ID NO: 610176 - RNA, 19 nt, Artificial Sequence
  Description of Artificial Sequence: Synthetic oligonucleotide
caccugaguuacuggucga

SEQ ID NO: 610177 - RNA, 19 nt, Artificial Sequence
  Description of Artificial Sequence: Synthetic oligonucleotide
gcgcacugcaaaguaguac

SEQ ID NO: 610178 - RNA, 19 nt, Artificial Sequence
  Description of Artificial Sequence: Synthetic oligonucleotide
cuaacuguucugggaggaa

SEQ ID NO: 610179 - RNA, 19 nt, Artificial Sequence
  Description of Artificial Sequence: Synthetic oligonucleotide
cggggauuguuugaugagc

SEQ ID NO: 610180 - RNA, 19 nt, Artificial Sequence
  Description of Artificial Sequence: Synthetic oligonucleotide
ccaacuucaagugugguuu

SEQ ID NO: 610181 - RNA, 19 nt, Artificial Sequence
  Description of Artificial Sequence: Synthetic oligonucleotide
ccgacguuuggacugcaca

SEQ ID NO: 610182 - RNA, 19 nt, Artificial Sequence
  Description of Artificial Sequence: Synthetic oligonucleotide
agcagauuacugggauuuu

SEQ ID NO: 610183 - RNA, 19 nt, Artificial Sequence
  Description of Artificial Sequence: Synthetic oligonucleotide
cauuucuauaggucacauu

SEQ ID NO: 610184 - RNA, 19 nt, Artificial Sequence
  Description of Artificial Sequence: Synthetic oligonucleotide
acguuuccgucuggaaaau

SEQ ID NO: 610185 - RNA, 19 nt, Artificial Sequence
  Description of Artificial Sequence: Synthetic oligonucleotide
gccggcagagaacccgagc

SEQ ID NO: 610186 - RNA, 19 nt, Artificial Sequence
  Description of Artificial Sequence: Synthetic oligonucleotide
cgcacugcaaaguaguacu

SEQ ID NO: 610187 - RNA, 19 nt, Artificial Sequence
  Description of Artificial Sequence: Synthetic oligonucleotide
ugcagucgggacggccugu

SEQ ID NO: 610188 - RNA, 19 nt, Artificial Sequence
  Description of Artificial Sequence: Synthetic oligonucleotide
ggcaccugaguaguggcaa

SEQ ID NO: 610189 - RNA, 19 nt, Artificial Sequence
  Description of Artificial Sequence: Synthetic oligonucleotide
acccucgcuaacauuucuu

SEQ ID NO: 610190 - RNA, 19 nt, Artificial Sequence
  Description of Artificial Sequence: Synthetic oligonucleotide
cacuaggcaccugaguagu

SEQ ID NO: 610191 - RNA, 19 nt, Artificial Sequence
  Description of Artificial Sequence: Synthetic oligonucleotide
ccgucuggaaaauucauuu

SEQ ID NO: 610192 - RNA, 19 nt, Artificial Sequence
  Description of Artificial Sequence: Synthetic oligonucleotide
ggucacggcaacggggaca

SEQ ID NO: 610193 - RNA, 19 nt, Artificial Sequence
  Description of Artificial Sequence: Synthetic oligonucleotide
cucuucuaguaaccacugu

SEQ ID NO: 610194 - RNA, 19 nt, Artificial Sequence
  Description of Artificial Sequence: Synthetic oligonucleotide
cacggugguuggagcugug

SEQ ID NO: 610195 - RNA, 19 nt, Artificial Sequence
  Description of Artificial Sequence: Synthetic oligonucleotide
gccuguaguucggugagaa

SEQ ID NO: 610196 - RNA, 19 nt, Artificial Sequence
  Description of Artificial Sequence: Synthetic oligonucleotide
cagucgggacggccuguac

SEQ ID NO: 610197 - RNA, 19 nt, Artificial Sequence
  Description of Artificial Sequence: Synthetic oligonucleotide
gucacggcaacggggacau

SEQ ID NO: 610198 - RNA, 19 nt, Artificial Sequence
  Description of Artificial Sequence: Synthetic oligonucleotide
cagcacgaugccguucuga

SEQ ID NO: 610199 - RNA, 19 nt, Artificial Sequence
  Description of Artificial Sequence: Synthetic oligonucleotide
caggagccugcauaacagu

SEQ ID NO: 610200 - RNA, 19 nt, Artificial Sequence
  Description of Artificial Sequence: Synthetic oligonucleotide
ccguucugacucugaacuc

SEQ ID NO: 610201 - RNA, 19 nt, Artificial Sequence
  Description of Artificial Sequence: Synthetic oligonucleotide
cucugaacucgugccaacu

SEQ ID NO: 610202 - RNA, 19 nt, Artificial Sequence
  Description of Artificial Sequence: Synthetic oligonucleotide
ggcggccggugaugcaccg

SEQ ID NO: 610203 - RNA, 19 nt, Artificial Sequence
  Description of Artificial Sequence: Synthetic oligonucleotide
cucgaacuguaacacuguu

SEQ ID NO: 610204 - RNA, 19 nt, Artificial Sequence
  Description of Artificial Sequence: Synthetic oligonucleotide
ggccuguacagccagcguu

SEQ ID NO: 610205 - RNA, 19 nt, Artificial Sequence
  Description of Artificial Sequence: Synthetic oligonucleotide
ggggacaugcagaaucacu

SEQ ID NO: 610206 - RNA, 19 nt, Artificial Sequence
  Description of Artificial Sequence: Synthetic oligonucleotide
gccaacuucaagugugguu

SEQ ID NO: 610207 - RNA, 19 nt, Artificial Sequence
  Description of Artificial Sequence: Synthetic oligonucleotide
ggucgagauauggcugaga

SEQ ID NO: 610208 - RNA, 19 nt, Artificial Sequence
  Description of Artificial Sequence: Synthetic oligonucleotide
guccguggacugaggguca

SEQ ID NO: 610209 - RNA, 19 nt, Artificial Sequence
  Description of Artificial Sequence: Synthetic oligonucleotide
guguuacauucacgguggu

SEQ ID NO: 610210 - RNA, 19 nt, Artificial Sequence
  Description of Artificial Sequence: Synthetic oligonucleotide
guaucgucuuuggcugucu

SEQ ID NO: 610211 - RNA, 19 nt, Artificial Sequence
  Description of Artificial Sequence: Synthetic oligonucleotide
ggcagguaaguggauaguu

SEQ ID NO: 610212 - RNA, 19 nt, Artificial Sequence
  Description of Artificial Sequence: Synthetic oligonucleotide
agccugcauaacagucccu

SEQ ID NO: 610213 - RNA, 19 nt, Artificial Sequence
  Description of Artificial Sequence: Synthetic oligonucleotide
  modified_base (5)..(5): a, c, u, g, unknown or other
gcucnuaguuggcgcaggu

SEQ ID NO: 610214 - RNA, 19 nt, Artificial Sequence
  Description of Artificial Sequence: Synthetic oligonucleotide
gguggacccucgcuaacau

SEQ ID NO: 610215 - RNA, 19 nt, Artificial Sequence
  Description of Artificial Sequence: Synthetic oligonucleotide
ccucguaguggagccugag

SEQ ID NO: 610216 - RNA, 19 nt, Artificial Sequence
  Description of Artificial Sequence: Synthetic oligonucleotide
gcauuucuauaggucacau

SEQ ID NO: 610217 - RNA, 19 nt, Artificial Sequence
  Description of Artificial Sequence: Synthetic oligonucleotide
ggacagcacgaugccguuc

SEQ ID NO: 610218 - RNA, 19 nt, Artificial Sequence
  Description of Artificial Sequence: Synthetic oligonucleotide
cggccggugaugcaccgug

SEQ ID NO: 610219 - RNA, 19 nt, Artificial Sequence
  Description of Artificial Sequence: Synthetic oligonucleotide
cggugaugcaccgugagcu

SEQ ID NO: 610220 - RNA, 19 nt, Artificial Sequence
  Description of Artificial Sequence: Synthetic oligonucleotide
cugccguacugugccugca

SEQ ID NO: 610221 - RNA, 19 nt, Artificial Sequence
  Description of Artificial Sequence: Synthetic oligonucleotide
gcccguuguuuacaacaua

SEQ ID NO: 610222 - RNA, 19 nt, Artificial Sequence
  Description of Artificial Sequence: Synthetic oligonucleotide
ggcccaaaacggccauaaa

SEQ ID NO: 610223 - RNA, 19 nt, Artificial Sequence
  Description of Artificial Sequence: Synthetic oligonucleotide
gcacgaugccguucugacu

SEQ ID NO: 610224 - RNA, 19 nt, Artificial Sequence
  Description of Artificial Sequence: Synthetic oligonucleotide
cgcuaacauuucuuuugga

SEQ ID NO: 610225 - RNA, 19 nt, Artificial Sequence
  Description of Artificial Sequence: Synthetic oligonucleotide
cgauauagcgccgacguuu

SEQ ID NO: 610226 - RNA, 19 nt, Artificial Sequence
  Description of Artificial Sequence: Synthetic oligonucleotide
ucacggcaacggggacaug

SEQ ID NO: 610227 - RNA, 19 nt, Artificial Sequence
  Description of Artificial Sequence: Synthetic oligonucleotide
cggcaacggggacaugcag

SEQ ID NO: 610228 - RNA, 19 nt, Artificial Sequence
  Description of Artificial Sequence: Synthetic oligonucleotide
ggcugucuccaaaacguuu

SEQ ID NO: 610229 - RNA, 19 nt, Artificial Sequence
  Description of Artificial Sequence: Synthetic oligonucleotide
gcgccgacguuuggacugc

SEQ ID NO: 610230 - RNA, 19 nt, Artificial Sequence
  Description of Artificial Sequence: Synthetic oligonucleotide
cgacguuuggacugcacau

SEQ ID NO: 610231 - RNA, 19 nt, Artificial Sequence
  Description of Artificial Sequence: Synthetic oligonucleotide
ccuuggcgcgcacugcaaa

SEQ ID NO: 610232 - RNA, 19 nt, Artificial Sequence
  Description of Artificial Sequence: Synthetic oligonucleotide
gccgacguuuggacugcac

SEQ ID NO: 610233 - RNA, 19 nt, Artificial Sequence
  Description of Artificial Sequence: Synthetic oligonucleotide
guauugggccucggggauu

SEQ ID NO: 610234 - RNA, 19 nt, Artificial Sequence
  Description of Artificial Sequence: Synthetic oligonucleotide
cccucgcuaacauuucuuu

SEQ ID NO: 610235 - RNA, 19 nt, Artificial Sequence
  Description of Artificial Sequence: Synthetic oligonucleotide
gcggcacagcuucggucca

SEQ ID NO: 610236 - RNA, 19 nt, Artificial Sequence
  Description of Artificial Sequence: Synthetic oligonucleotide
cgaugugcuaucugccacu

SEQ ID NO: 610237 - RNA, 19 nt, Artificial Sequence
  Description of Artificial Sequence: Synthetic oligonucleotide
gcaggucggcugacuuagc

SEQ ID NO: 610238 - RNA, 19 nt, Artificial Sequence
  Description of Artificial Sequence: Synthetic oligonucleotide
ccucgcuaacauuucuuuu

SEQ ID NO: 610239 - RNA, 19 nt, Artificial Sequence
  Description of Artificial Sequence: Synthetic oligonucleotide
gccguacugugccugcauu

SEQ ID NO: 610240 - RNA, 19 nt, Artificial Sequence
  Description of Artificial Sequence: Synthetic oligonucleotide
ggccggugaugcaccguga

SEQ ID NO: 610241 - RNA, 19 nt, Artificial Sequence
  Description of Artificial Sequence: Synthetic oligonucleotide
cggucgagauauggcugag

SEQ ID NO: 610242 - RNA, 19 nt, Artificial Sequence
  Description of Artificial Sequence: Synthetic oligonucleotide
gucccucguaguggagccu

SEQ ID NO: 610243 - RNA, 19 nt, Artificial Sequence
  Description of Artificial Sequence: Synthetic oligonucleotide
gucggcugacuuagcuuuu

SEQ ID NO: 610244 - RNA, 19 nt, Artificial Sequence
  Description of Artificial Sequence: Synthetic oligonucleotide
cccucguaguggagccuga

SEQ ID NO: 610245 - RNA, 19 nt, Artificial Sequence
  Description of Artificial Sequence: Synthetic oligonucleotide
cgaugccguucugacucug

SEQ ID NO: 610246 - RNA, 19 nt, Artificial Sequence
  Description of Artificial Sequence: Synthetic oligonucleotide
cgcgcacugcaaaguagua

SEQ ID NO: 610247 - RNA, 19 nt, Artificial Sequence
  Description of Artificial Sequence: Synthetic oligonucleotide
cguuuccgucuggaaaauu

SEQ ID NO: 610248 - RNA, 19 nt, Artificial Sequence
  Description of Artificial Sequence: Synthetic oligonucleotide
cgccgacguuuggacugca

SEQ ID NO: 610249 - RNA, 19 nt, Artificial Sequence
  Description of Artificial Sequence: Synthetic oligonucleotide
aaugugauaaacuugguca

SEQ ID NO: 610250 - RNA, 19 nt, Artificial Sequence
  Description of Artificial Sequence: Synthetic oligonucleotide
aauaguaauauuuacugca

SEQ ID NO: 610251 - RNA, 19 nt, Artificial Sequence
  Description of Artificial Sequence: Synthetic oligonucleotide
aauaacagcaccucccacc

SEQ ID NO: 610252 - RNA, 19 nt, Artificial Sequence
  Description of Artificial Sequence: Synthetic oligonucleotide
aagggaauguauuugugcc

SEQ ID NO: 610253 - RNA, 19 nt, Artificial Sequence
  Description of Artificial Sequence: Synthetic oligonucleotide
uaugguaauaauuuauugg

SEQ ID NO: 610254 - RNA, 19 nt, Artificial Sequence
  Description of Artificial Sequence: Synthetic oligonucleotide
uuaauaucagguauaauug

SEQ ID NO: 610255 - RNA, 19 nt, Artificial Sequence
  Description of Artificial Sequence: Synthetic oligonucleotide
aaagcauaaaucuugggca

SEQ ID NO: 610256 - RNA, 19 nt, Artificial Sequence
  Description of Artificial Sequence: Synthetic oligonucleotide
augguaauaauuuauuggg

SEQ ID NO: 610257 - RNA, 19 nt, Artificial Sequence
  Description of Artificial Sequence: Synthetic oligonucleotide
aaagcauucggugagguac

SEQ ID NO: 610258 - RNA, 19 nt, Artificial Sequence
  Description of Artificial Sequence: Synthetic oligonucleotide
agcauagucggucugaggc

SEQ ID NO: 610259 - RNA, 19 nt, Artificial Sequence
  Description of Artificial Sequence: Synthetic oligonucleotide
gaaagcauaaaucuugggc

SEQ ID NO: 610260 - RNA, 19 nt, Artificial Sequence
  Description of Artificial Sequence: Synthetic oligonucleotide
aaaaggagcaagcagguca

SEQ ID NO: 610261 - RNA, 19 nt, Artificial Sequence
  Description of Artificial Sequence: Synthetic oligonucleotide
aagaauucaacugugauau

SEQ ID NO: 610262 - RNA, 19 nt, Artificial Sequence
  Description of Artificial Sequence: Synthetic oligonucleotide
gaagcagauacauaauagg

SEQ ID NO: 610263 - RNA, 19 nt, Artificial Sequence
  Description of Artificial Sequence: Synthetic oligonucleotide
aauagcucagcucuauguc

SEQ ID NO: 610264 - RNA, 19 nt, Artificial Sequence
  Description of Artificial Sequence: Synthetic oligonucleotide
ucgauugacaacuagauua

SEQ ID NO: 610265 - RNA, 19 nt, Artificial Sequence
  Description of Artificial Sequence: Synthetic oligonucleotide
ucuaccacgaugaguaacg

SEQ ID NO: 610266 - RNA, 19 nt, Artificial Sequence
  Description of Artificial Sequence: Synthetic oligonucleotide
guacaagagagccacaugg

SEQ ID NO: 610267 - RNA, 19 nt, Artificial Sequence
  Description of Artificial Sequence: Synthetic oligonucleotide
ugaacuaccucauuguucu

SEQ ID NO: 610268 - RNA, 19 nt, Artificial Sequence
  Description of Artificial Sequence: Synthetic oligonucleotide
ugucuaaucccacuaauga

SEQ ID NO: 610269 - RNA, 19 nt, Artificial Sequence
  Description of Artificial Sequence: Synthetic oligonucleotide
aaucccacuaaugaacuac

SEQ ID NO: 610270 - RNA, 19 nt, Artificial Sequence
  Description of Artificial Sequence: Synthetic oligonucleotide
auucaacugugauauaugg

SEQ ID NO: 610271 - RNA, 19 nt, Artificial Sequence
  Description of Artificial Sequence: Synthetic oligonucleotide
uccaaauuuacuccucagg

SEQ ID NO: 610272 - RNA, 19 nt, Artificial Sequence
  Description of Artificial Sequence: Synthetic oligonucleotide
acaacuagauuacaaauga

SEQ ID NO: 610273 - RNA, 19 nt, Artificial Sequence
  Description of Artificial Sequence: Synthetic oligonucleotide
auaauuguauaauuuaaaa

SEQ ID NO: 610274 - RNA, 19 nt, Artificial Sequence
  Description of Artificial Sequence: Synthetic oligonucleotide
gugaaugugauaaacuugg

SEQ ID NO: 610275 - RNA, 19 nt, Artificial Sequence
  Description of Artificial Sequence: Synthetic oligonucleotide
ugagugguaagucagguuc

SEQ ID NO: 610276 - RNA, 19 nt, Artificial Sequence
  Description of Artificial Sequence: Synthetic oligonucleotide
ugcccaacguauaaaauag

SEQ ID NO: 610277 - RNA, 19 nt, Artificial Sequence
  Description of Artificial Sequence: Synthetic oligonucleotide
aggaauacugcuuuggugu

SEQ ID NO: 610278 - RNA, 19 nt, Artificial Sequence
  Description of Artificial Sequence: Synthetic oligonucleotide
cuguauagcuugaaaaucc

SEQ ID NO: 610279 - RNA, 19 nt, Artificial Sequence
  Description of Artificial Sequence: Synthetic oligonucleotide
uacuuaagcagugugaaug

SEQ ID NO: 610280 - RNA, 19 nt, Artificial Sequence
  Description of Artificial Sequence: Synthetic oligonucleotide
aagaggugaucucucuccc

SEQ ID NO: 610281 - RNA, 19 nt, Artificial Sequence
  Description of Artificial Sequence: Synthetic oligonucleotide
uucaacugugauauauggg

SEQ ID NO: 610282 - RNA, 19 nt, Artificial Sequence
  Description of Artificial Sequence: Synthetic oligonucleotide
uaucuguauagcuugaaaa

SEQ ID NO: 610283 - RNA, 19 nt, Artificial Sequence
  Description of Artificial Sequence: Synthetic oligonucleotide
uuucguagaaaagagacaa

SEQ ID NO: 610284 - RNA, 19 nt, Artificial Sequence
  Description of Artificial Sequence: Synthetic oligonucleotide
cauucggugagguacacag

SEQ ID NO: 610285 - RNA, 19 nt, Artificial Sequence
  Description of Artificial Sequence: Synthetic oligonucleotide
agacauaucugggacaucg

SEQ ID NO: 610286 - RNA, 19 nt, Artificial Sequence
  Description of Artificial Sequence: Synthetic oligonucleotide
uagauuacaaaugagggua

SEQ ID NO: 610287 - RNA, 19 nt, Artificial Sequence
  Description of Artificial Sequence: Synthetic oligonucleotide
auugccaaagcauucggug

SEQ ID NO: 610288 - RNA, 19 nt, Artificial Sequence
  Description of Artificial Sequence: Synthetic oligonucleotide
auaggugacacuucuucuc

SEQ ID NO: 610289 - RNA, 19 nt, Artificial Sequence
  Description of Artificial Sequence: Synthetic oligonucleotide
auuguucuuaagucuaaag

SEQ ID NO: 610290 - RNA, 19 nt, Artificial Sequence
  Description of Artificial Sequence: Synthetic oligonucleotide
ucauuacuuaagcagugug

SEQ ID NO: 610291 - RNA, 19 nt, Artificial Sequence
  Description of Artificial Sequence: Synthetic oligonucleotide
aauguauguaaaccucugu

SEQ ID NO: 610292 - RNA, 19 nt, Artificial Sequence
  Description of Artificial Sequence: Synthetic oligonucleotide
aauuuacuccucaggauuc

SEQ ID NO: 610293 - RNA, 19 nt, Artificial Sequence
  Description of Artificial Sequence: Synthetic oligonucleotide
auauauggggacauucugc

SEQ ID NO: 610294 - RNA, 19 nt, Artificial Sequence
  Description of Artificial Sequence: Synthetic oligonucleotide
aaaggcuuaaucacacuuc

SEQ ID NO: 610295 - RNA, 19 nt, Artificial Sequence
  Description of Artificial Sequence: Synthetic oligonucleotide
ucucacauccuguacaaga

SEQ ID NO: 610296 - RNA, 19 nt, Artificial Sequence
  Description of Artificial Sequence: Synthetic oligonucleotide
ucuaaagggaauguauuug

SEQ ID NO: 610297 - RNA, 19 nt, Artificial Sequence
  Description of Artificial Sequence: Synthetic oligonucleotide
uauauggggacauucugcu

SEQ ID NO: 610298 - RNA, 19 nt, Artificial Sequence
  Description of Artificial Sequence: Synthetic oligonucleotide
aauaauuuauuggggagau

SEQ ID NO: 610299 - RNA, 19 nt, Artificial Sequence
  Description of Artificial Sequence: Synthetic oligonucleotide
guaugguaauaauuuauug

SEQ ID NO: 610300 - RNA, 19 nt, Artificial Sequence
  Description of Artificial Sequence: Synthetic oligonucleotide
guaagcuucgcccucuggg

SEQ ID NO: 610301 - RNA, 19 nt, Artificial Sequence
  Description of Artificial Sequence: Synthetic oligonucleotide
acugacggcacaguguucc

SEQ ID NO: 610302 - RNA, 19 nt, Artificial Sequence
  Description of Artificial Sequence: Synthetic oligonucleotide
cacaguauugcacaaugag

SEQ ID NO: 610303 - RNA, 19 nt, Artificial Sequence
  Description of Artificial Sequence: Synthetic oligonucleotide
ucaagaauucaacugugau

SEQ ID NO: 610304 - RNA, 19 nt, Artificial Sequence
  Description of Artificial Sequence: Synthetic oligonucleotide
gauacauaauaggugacac

SEQ ID NO: 610305 - RNA, 19 nt, Artificial Sequence
  Description of Artificial Sequence: Synthetic oligonucleotide
ugauauauggggacauucu

SEQ ID NO: 610306 - RNA, 19 nt, Artificial Sequence
  Description of Artificial Sequence: Synthetic oligonucleotide
agaaaacacgguuuuccuc

SEQ ID NO: 610307 - RNA, 19 nt, Artificial Sequence
  Description of Artificial Sequence: Synthetic oligonucleotide
ucccaauucauuacuuaag

SEQ ID NO: 610308 - RNA, 19 nt, Artificial Sequence
  Description of Artificial Sequence: Synthetic oligonucleotide
ucauuaacuguuuauucau

SEQ ID NO: 610309 - RNA, 19 nt, Artificial Sequence
  Description of Artificial Sequence: Synthetic oligonucleotide
cuucauauguuccagucuc

SEQ ID NO: 610310 - RNA, 19 nt, Artificial Sequence
  Description of Artificial Sequence: Synthetic oligonucleotide
auaguaauauuuacugcac

SEQ ID NO: 610311 - RNA, 19 nt, Artificial Sequence
  Description of Artificial Sequence: Synthetic oligonucleotide
uguauagcuugaaaaucca

SEQ ID NO: 610312 - RNA, 19 nt, Artificial Sequence
  Description of Artificial Sequence: Synthetic oligonucleotide
cauucuaccacgaugagua

SEQ ID NO: 610313 - RNA, 19 nt, Artificial Sequence
  Description of Artificial Sequence: Synthetic oligonucleotide
uguagaaagcauaaaucuu

SEQ ID NO: 610314 - RNA, 19 nt, Artificial Sequence
  Description of Artificial Sequence: Synthetic oligonucleotide
aagcagauacauaauaggu

SEQ ID NO: 610315 - RNA, 19 nt, Artificial Sequence
  Description of Artificial Sequence: Synthetic oligonucleotide
uucccuaucauccuuuaau

SEQ ID NO: 610316 - RNA, 19 nt, Artificial Sequence
  Description of Artificial Sequence: Synthetic oligonucleotide
aagcuucgcccucugggcc

SEQ ID NO: 610317 - RNA, 19 nt, Artificial Sequence
  Description of Artificial Sequence: Synthetic oligonucleotide
ugauuucaugacuaucacc

SEQ ID NO: 610318 - RNA, 19 nt, Artificial Sequence
  Description of Artificial Sequence: Synthetic oligonucleotide
ucuugagugguaagucagg

SEQ ID NO: 610319 - RNA, 19 nt, Artificial Sequence
  Description of Artificial Sequence: Synthetic oligonucleotide
agaaaagagacaaauguaa

SEQ ID NO: 610320 - RNA, 19 nt, Artificial Sequence
  Description of Artificial Sequence: Synthetic oligonucleotide
uccauacugcccauacugg

SEQ ID NO: 610321 - RNA, 19 nt, Artificial Sequence
  Description of Artificial Sequence: Synthetic oligonucleotide
ugucuugggaaggaaaugc

SEQ ID NO: 610322 - RNA, 19 nt, Artificial Sequence
  Description of Artificial Sequence: Synthetic oligonucleotide
caagaggugaucucucucc

SEQ ID NO: 610323 - RNA, 19 nt, Artificial Sequence
  Description of Artificial Sequence: Synthetic oligonucleotide
cuugaaaauccaugccugg

SEQ ID NO: 610324 - RNA, 19 nt, Artificial Sequence
  Description of Artificial Sequence: Synthetic oligonucleotide
uguugguugaggcugcaac

SEQ ID NO: 610325 - RNA, 19 nt, Artificial Sequence
  Description of Artificial Sequence: Synthetic oligonucleotide
caucauuguugguugaggc

SEQ ID NO: 610326 - RNA, 19 nt, Artificial Sequence
  Description of Artificial Sequence: Synthetic oligonucleotide
ucuaugucuaaucccacua

SEQ ID NO: 610327 - RNA, 19 nt, Artificial Sequence
  Description of Artificial Sequence: Synthetic oligonucleotide
gacaauagggcugagaugu

SEQ ID NO: 610328 - RNA, 19 nt, Artificial Sequence
  Description of Artificial Sequence: Synthetic oligonucleotide
auacuguagccuguggugc

SEQ ID NO: 610329 - RNA, 19 nt, Artificial Sequence
  Description of Artificial Sequence: Synthetic oligonucleotide
guccauacugcccauacug

SEQ ID NO: 610330 - RNA, 19 nt, Artificial Sequence
  Description of Artificial Sequence: Synthetic oligonucleotide
aaugaacuaccucauuguu

SEQ ID NO: 610331 - RNA, 19 nt, Artificial Sequence
  Description of Artificial Sequence: Synthetic oligonucleotide
agaaagcauaaaucuuggg

SEQ ID NO: 610332 - RNA, 19 nt, Artificial Sequence
  Description of Artificial Sequence: Synthetic oligonucleotide
ucuucauauguuccagucu

SEQ ID NO: 610333 - RNA, 19 nt, Artificial Sequence
  Description of Artificial Sequence: Synthetic oligonucleotide
cauacuguagccuguggug

SEQ ID NO: 610334 - RNA, 19 nt, Artificial Sequence
  Description of Artificial Sequence: Synthetic oligonucleotide
ugaaaggccauugccaaug

SEQ ID NO: 610335 - RNA, 19 nt, Artificial Sequence
  Description of Artificial Sequence: Synthetic oligonucleotide
aguauugcacaaugagaag

SEQ ID NO: 610336 - RNA, 19 nt, Artificial Sequence
  Description of Artificial Sequence: Synthetic oligonucleotide
ucucucgaaagcacgcucc

SEQ ID NO: 610337 - RNA, 19 nt, Artificial Sequence
  Description of Artificial Sequence: Synthetic oligonucleotide
ugauuuggcaaugagcaaa

SEQ ID NO: 610338 - RNA, 19 nt, Artificial Sequence
  Description of Artificial Sequence: Synthetic oligonucleotide
aacguauaaaauagcucag

SEQ ID NO: 610339 - RNA, 19 nt, Artificial Sequence
  Description of Artificial Sequence: Synthetic oligonucleotide
aaauguauguaaaccucug

SEQ ID NO: 610340 - RNA, 19 nt, Artificial Sequence
  Description of Artificial Sequence: Synthetic oligonucleotide
cuuaagucuaaagggaaug

SEQ ID NO: 610341 - RNA, 19 nt, Artificial Sequence
  Description of Artificial Sequence: Synthetic oligonucleotide
ucuguauagcuugaaaauc

SEQ ID NO: 610342 - RNA, 19 nt, Artificial Sequence
  Description of Artificial Sequence: Synthetic oligonucleotide
aaagcuaucuguauagcuu

SEQ ID NO: 610343 - RNA, 19 nt, Artificial Sequence
  Description of Artificial Sequence: Synthetic oligonucleotide
ugcuaaaccagaccugcac

SEQ ID NO: 610344 - RNA, 19 nt, Artificial Sequence
  Description of Artificial Sequence: Synthetic oligonucleotide
uaugucuaaucccacuaau

SEQ ID NO: 610345 - RNA, 19 nt, Artificial Sequence
  Description of Artificial Sequence: Synthetic oligonucleotide
uuacaaaugaggguauggu

SEQ ID NO: 610346 - RNA, 19 nt, Artificial Sequence
  Description of Artificial Sequence: Synthetic oligonucleotide
ugaggguaugguaauaauu

SEQ ID NO: 610347 - RNA, 19 nt, Artificial Sequence
  Description of Artificial Sequence: Synthetic oligonucleotide
ugguguaccgugcucggag

SEQ ID NO: 610348 - RNA, 19 nt, Artificial Sequence
  Description of Artificial Sequence: Synthetic oligonucleotide
cuuugguguaccgugcucg

SEQ ID NO: 610349 - RNA, 19 nt, Artificial Sequence
  Description of Artificial Sequence: Synthetic oligonucleotide
uuggccauugccaaagcau

SEQ ID NO: 610350 - RNA, 19 nt, Artificial Sequence
  Description of Artificial Sequence: Synthetic oligonucleotide
uggguucgaaggaauacug

SEQ ID NO: 610351 - RNA, 19 nt, Artificial Sequence
  Description of Artificial Sequence: Synthetic oligonucleotide
aacggcaucacuguagaaa

SEQ ID NO: 610352 - RNA, 19 nt, Artificial Sequence
  Description of Artificial Sequence: Synthetic oligonucleotide
ucguagaaaagagacaaau

SEQ ID NO: 610353 - RNA, 19 nt, Artificial Sequence
  Description of Artificial Sequence: Synthetic oligonucleotide
gucgaugcuguguuuagcc

SEQ ID NO: 610354 - RNA, 19 nt, Artificial Sequence
  Description of Artificial Sequence: Synthetic oligonucleotide
aucagguauaauuguauaa

SEQ ID NO: 610355 - RNA, 19 nt, Artificial Sequence
  Description of Artificial Sequence: Synthetic oligonucleotide
ccuuucguagaaaagagac

SEQ ID NO: 610356 - RNA, 19 nt, Artificial Sequence
  Description of Artificial Sequence: Synthetic oligonucleotide
uugcccaacguauaaaaua

SEQ ID NO: 610357 - RNA, 19 nt, Artificial Sequence
  Description of Artificial Sequence: Synthetic oligonucleotide
uagucuaacuuccuaugaa

SEQ ID NO: 610358 - RNA, 19 nt, Artificial Sequence
  Description of Artificial Sequence: Synthetic oligonucleotide
ucuuaagucuaaagggaau

SEQ ID NO: 610359 - RNA, 19 nt, Artificial Sequence
  Description of Artificial Sequence: Synthetic oligonucleotide
gagacaaauguaaacggca

SEQ ID NO: 610360 - RNA, 19 nt, Artificial Sequence
  Description of Artificial Sequence: Synthetic oligonucleotide
auagcucagcucuaugucu

SEQ ID NO: 610361 - RNA, 19 nt, Artificial Sequence
  Description of Artificial Sequence: Synthetic oligonucleotide
uaagcuucgcccucugggc

SEQ ID NO: 610362 - RNA, 19 nt, Artificial Sequence
  Description of Artificial Sequence: Synthetic oligonucleotide
guauggguucucucgaaag

SEQ ID NO: 610363 - RNA, 19 nt, Artificial Sequence
  Description of Artificial Sequence: Synthetic oligonucleotide
accgugguuggucagaagu

SEQ ID NO: 610364 - RNA, 19 nt, Artificial Sequence
  Description of Artificial Sequence: Synthetic oligonucleotide
uacaagagagccacaugga

SEQ ID NO: 610365 - RNA, 19 nt, Artificial Sequence
  Description of Artificial Sequence: Synthetic oligonucleotide
gacaucgauugacaacuag

SEQ ID NO: 610366 - RNA, 19 nt, Artificial Sequence
  Description of Artificial Sequence: Synthetic oligonucleotide
aggcuuacuuuguccauac

SEQ ID NO: 610367 - RNA, 19 nt, Artificial Sequence
  Description of Artificial Sequence: Synthetic oligonucleotide
ggaugaaaggcuuaaucac

SEQ ID NO: 610368 - RNA, 19 nt, Artificial Sequence
  Description of Artificial Sequence: Synthetic oligonucleotide
aagucaaggauuccuccau

SEQ ID NO: 610369 - RNA, 19 nt, Artificial Sequence
  Description of Artificial Sequence: Synthetic oligonucleotide
agcagauacauaauaggug

SEQ ID NO: 610370 - RNA, 19 nt, Artificial Sequence
  Description of Artificial Sequence: Synthetic oligonucleotide
uacaaaugaggguauggua

SEQ ID NO: 610371 - RNA, 19 nt, Artificial Sequence
  Description of Artificial Sequence: Synthetic oligonucleotide
uaucauccuuuaauaucag

SEQ ID NO: 610372 - RNA, 19 nt, Artificial Sequence
  Description of Artificial Sequence: Synthetic oligonucleotide
uuccaaaugaaugugucuu

SEQ ID NO: 610373 - RNA, 19 nt, Artificial Sequence
  Description of Artificial Sequence: Synthetic oligonucleotide
agaugugggaagacugucc

SEQ ID NO: 610374 - RNA, 19 nt, Artificial Sequence
  Description of Artificial Sequence: Synthetic oligonucleotide
guaaacggcaucacuguag

SEQ ID NO: 610375 - RNA, 19 nt, Artificial Sequence
  Description of Artificial Sequence: Synthetic oligonucleotide
augaacuaccucauuguuc

SEQ ID NO: 610376 - RNA, 19 nt, Artificial Sequence
  Description of Artificial Sequence: Synthetic oligonucleotide
caacuagauuacaaaugag

SEQ ID NO: 610377 - RNA, 19 nt, Artificial Sequence
  Description of Artificial Sequence: Synthetic oligonucleotide
gugauaaacuuggucagcc

SEQ ID NO: 610378 - RNA, 19 nt, Artificial Sequence
  Description of Artificial Sequence: Synthetic oligonucleotide
uaucagguauaauuguaua

SEQ ID NO: 610379 - RNA, 19 nt, Artificial Sequence
  Description of Artificial Sequence: Synthetic oligonucleotide
auacauaauaggugacacu

SEQ ID NO: 610380 - RNA, 19 nt, Artificial Sequence
  Description of Artificial Sequence: Synthetic oligonucleotide
aucauuguugguugaggcu

SEQ ID NO: 610381 - RNA, 19 nt, Artificial Sequence
  Description of Artificial Sequence: Synthetic oligonucleotide
agauuuauugacauccuaa

SEQ ID NO: 610382 - RNA, 19 nt, Artificial Sequence
  Description of Artificial Sequence: Synthetic oligonucleotide
guauaauuguauaauuuaa

SEQ ID NO: 610383 - RNA, 19 nt, Artificial Sequence
  Description of Artificial Sequence: Synthetic oligonucleotide
uaccugaggugaaaggcca

SEQ ID NO: 610384 - RNA, 19 nt, Artificial Sequence
  Description of Artificial Sequence: Synthetic oligonucleotide
cugcauucuaccacgauga

SEQ ID NO: 610385 - RNA, 19 nt, Artificial Sequence
  Description of Artificial Sequence: Synthetic oligonucleotide
aucugggacaucgauugac

SEQ ID NO: 610386 - RNA, 19 nt, Artificial Sequence
  Description of Artificial Sequence: Synthetic oligonucleotide
uguaagcuucgcccucugg

SEQ ID NO: 610387 - RNA, 19 nt, Artificial Sequence
  Description of Artificial Sequence: Synthetic oligonucleotide
uaccacgaugaguaacggg

SEQ ID NO: 610388 - RNA, 19 nt, Artificial Sequence
  Description of Artificial Sequence: Synthetic oligonucleotide
acaucauuguugguugagg

SEQ ID NO: 610389 - RNA, 19 nt, Artificial Sequence
  Description of Artificial Sequence: Synthetic oligonucleotide
aguacaagagagccacaug

SEQ ID NO: 610390 - RNA, 19 nt, Artificial Sequence
  Description of Artificial Sequence: Synthetic oligonucleotide
ucacugacggcacaguguu

SEQ ID NO: 610391 - RNA, 19 nt, Artificial Sequence
  Description of Artificial Sequence: Synthetic oligonucleotide
ugguucuacuccuucgcug

SEQ ID NO: 610392 - RNA, 19 nt, Artificial Sequence
  Description of Artificial Sequence: Synthetic oligonucleotide
aaaacacgguuuuccuccu

SEQ ID NO: 610393 - RNA, 19 nt, Artificial Sequence
  Description of Artificial Sequence: Synthetic oligonucleotide
ucacccuugcccaacguau

SEQ ID NO: 610394 - RNA, 19 nt, Artificial Sequence
  Description of Artificial Sequence: Synthetic oligonucleotide
aucccacuaaugaacuacc

SEQ ID NO: 610395 - RNA, 19 nt, Artificial Sequence
  Description of Artificial Sequence: Synthetic oligonucleotide
agugugaaugugauaaacu

SEQ ID NO: 610396 - RNA, 19 nt, Artificial Sequence
  Description of Artificial Sequence: Synthetic oligonucleotide
uccauacuguagccugugg

SEQ ID NO: 610397 - RNA, 19 nt, Artificial Sequence
  Description of Artificial Sequence: Synthetic oligonucleotide
uauguuccagucucugacu

SEQ ID NO: 610398 - RNA, 19 nt, Artificial Sequence
  Description of Artificial Sequence: Synthetic oligonucleotide
agcuagucuaacuuccuau

SEQ ID NO: 610399 - RNA, 19 nt, Artificial Sequence
  Description of Artificial Sequence: Synthetic oligonucleotide
acaguauugcacaaugaga

SEQ ID NO: 610400 - RNA, 19 nt, Artificial Sequence
  Description of Artificial Sequence: Synthetic oligonucleotide
ugaaugugauaaacuuggu

SEQ ID NO: 610401 - RNA, 19 nt, Artificial Sequence
  Description of Artificial Sequence: Synthetic oligonucleotide
uccucccugguguaaaugu

SEQ ID NO: 610402 - RNA, 19 nt, Artificial Sequence
  Description of Artificial Sequence: Synthetic oligonucleotide
agcucuaugucuaauccca

SEQ ID NO: 610403 - RNA, 19 nt, Artificial Sequence
  Description of Artificial Sequence: Synthetic oligonucleotide
uuuucauaucagguuccag

SEQ ID NO: 610404 - RNA, 19 nt, Artificial Sequence
  Description of Artificial Sequence: Synthetic oligonucleotide
cugauuucaugacuaucac

SEQ ID NO: 610405 - RNA, 19 nt, Artificial Sequence
  Description of Artificial Sequence: Synthetic oligonucleotide
aauuuauuggggagauccu

SEQ ID NO: 610406 - RNA, 19 nt, Artificial Sequence
  Description of Artificial Sequence: Synthetic oligonucleotide
uuuucucgcuuuccucugc

SEQ ID NO: 610407 - RNA, 19 nt, Artificial Sequence
  Description of Artificial Sequence: Synthetic oligonucleotide
ucauuguucuuaagucuaa

SEQ ID NO: 610408 - RNA, 19 nt, Artificial Sequence
  Description of Artificial Sequence: Synthetic oligonucleotide
uuccaggaggaacuacccc

SEQ ID NO: 610409 - RNA, 19 nt, Artificial Sequence
  Description of Artificial Sequence: Synthetic oligonucleotide
auuuacuccucaggauucg

SEQ ID NO: 610410 - RNA, 19 nt, Artificial Sequence
  Description of Artificial Sequence: Synthetic oligonucleotide
acaucgauugacaacuaga

SEQ ID NO: 610411 - RNA, 19 nt, Artificial Sequence
  Description of Artificial Sequence: Synthetic oligonucleotide
gggaagacuguccacauuc

SEQ ID NO: 610412 - RNA, 19 nt, Artificial Sequence
  Description of Artificial Sequence: Synthetic oligonucleotide
ucagcggugaaggugguuc

SEQ ID NO: 610413 - RNA, 19 nt, Artificial Sequence
  Description of Artificial Sequence: Synthetic oligonucleotide
caagaauucaacugugaua

SEQ ID NO: 610414 - RNA, 19 nt, Artificial Sequence
  Description of Artificial Sequence: Synthetic oligonucleotide
cagcucuaugucuaauccc

SEQ ID NO: 610415 - RNA, 19 nt, Artificial Sequence
  Description of Artificial Sequence: Synthetic oligonucleotide
ugaguaacgggcugacaaa

SEQ ID NO: 610416 - RNA, 19 nt, Artificial Sequence
  Description of Artificial Sequence: Synthetic oligonucleotide
uguaaacggcaucacugua

SEQ ID NO: 610417 - RNA, 19 nt, Artificial Sequence
  Description of Artificial Sequence: Synthetic oligonucleotide
gucggucugaggcuggugc

SEQ ID NO: 610418 - RNA, 19 nt, Artificial Sequence
  Description of Artificial Sequence: Synthetic oligonucleotide
guguuccgaucacagacag

SEQ ID NO: 610419 - RNA, 19 nt, Artificial Sequence
  Description of Artificial Sequence: Synthetic oligonucleotide
ugcauucuaccacgaugag

SEQ ID NO: 610420 - RNA, 19 nt, Artificial Sequence
  Description of Artificial Sequence: Synthetic oligonucleotide
ucggucugaggcuggugcg

SEQ ID NO: 610421 - RNA, 19 nt, Artificial Sequence
  Description of Artificial Sequence: Synthetic oligonucleotide
cagacuggcuuccaaauga

SEQ ID NO: 610422 - RNA, 19 nt, Artificial Sequence
  Description of Artificial Sequence: Synthetic oligonucleotide
gaauucaacugugauauau

SEQ ID NO: 610423 - RNA, 19 nt, Artificial Sequence
  Description of Artificial Sequence: Synthetic oligonucleotide
acauaauaggugacacuuc

SEQ ID NO: 610424 - RNA, 19 nt, Artificial Sequence
  Description of Artificial Sequence: Synthetic oligonucleotide
cauaauaggugacacuucu

SEQ ID NO: 610425 - RNA, 19 nt, Artificial Sequence
  Description of Artificial Sequence: Synthetic oligonucleotide
acuaucaccuuggccauug

SEQ ID NO: 610426 - RNA, 19 nt, Artificial Sequence
  Description of Artificial Sequence: Synthetic oligonucleotide
augucuaaucccacuaaug

SEQ ID NO: 610427 - RNA, 19 nt, Artificial Sequence
  Description of Artificial Sequence: Synthetic oligonucleotide
auucgguggaacucacuga

SEQ ID NO: 610428 - RNA, 19 nt, Artificial Sequence
  Description of Artificial Sequence: Synthetic oligonucleotide
uucguagaaaagagacaaa

SEQ ID NO: 610429 - RNA, 19 nt, Artificial Sequence
  Description of Artificial Sequence: Synthetic oligonucleotide
auucccaauucauuacuua

SEQ ID NO: 610430 - RNA, 19 nt, Artificial Sequence
  Description of Artificial Sequence: Synthetic oligonucleotide
ucgaaggaauacugcuuug

SEQ ID NO: 610431 - RNA, 19 nt, Artificial Sequence
  Description of Artificial Sequence: Synthetic oligonucleotide
cagugugaaugugauaaac

SEQ ID NO: 610432 - RNA, 19 nt, Artificial Sequence
  Description of Artificial Sequence: Synthetic oligonucleotide
cuagucuaacuuccuauga

SEQ ID NO: 610433 - RNA, 19 nt, Artificial Sequence
  Description of Artificial Sequence: Synthetic oligonucleotide
agguucagagucaauguca

SEQ ID NO: 610434 - RNA, 19 nt, Artificial Sequence
  Description of Artificial Sequence: Synthetic oligonucleotide
ggagauccuucacagcuag

SEQ ID NO: 610435 - RNA, 19 nt, Artificial Sequence
  Description of Artificial Sequence: Synthetic oligonucleotide
cuuccucucuagauccgcc

SEQ ID NO: 610436 - RNA, 19 nt, Artificial Sequence
  Description of Artificial Sequence: Synthetic oligonucleotide
acugugauauauggggaca

SEQ ID NO: 610437 - RNA, 19 nt, Artificial Sequence
  Description of Artificial Sequence: Synthetic oligonucleotide
uuacuuaagcagugugaau

SEQ ID NO: 610438 - RNA, 19 nt, Artificial Sequence
  Description of Artificial Sequence: Synthetic oligonucleotide
gucuaaucccacuaaugaa

SEQ ID NO: 610439 - RNA, 19 nt, Artificial Sequence
  Description of Artificial Sequence: Synthetic oligonucleotide
uucuaccacgaugaguaac

SEQ ID NO: 610440 - RNA, 19 nt, Artificial Sequence
  Description of Artificial Sequence: Synthetic oligonucleotide
gcuagucuaacuuccuaug

SEQ ID NO: 610441 - RNA, 19 nt, Artificial Sequence
  Description of Artificial Sequence: Synthetic oligonucleotide
gaggguaugguaauaauuu

SEQ ID NO: 610442 - RNA, 19 nt, Artificial Sequence
  Description of Artificial Sequence: Synthetic oligonucleotide
auggguucucucgaaagca

SEQ ID NO: 610443 - RNA, 19 nt, Artificial Sequence
  Description of Artificial Sequence: Synthetic oligonucleotide
aucgauugacaacuagauu

SEQ ID NO: 610444 - RNA, 19 nt, Artificial Sequence
  Description of Artificial Sequence: Synthetic oligonucleotide
aggugaaaggccauugcca

SEQ ID NO: 610445 - RNA, 19 nt, Artificial Sequence
  Description of Artificial Sequence: Synthetic oligonucleotide
aggguaugguaauaauuua

SEQ ID NO: 610446 - RNA, 19 nt, Artificial Sequence
  Description of Artificial Sequence: Synthetic oligonucleotide
uguuccgaucacagacagc

SEQ ID NO: 610447 - RNA, 19 nt, Artificial Sequence
  Description of Artificial Sequence: Synthetic oligonucleotide
cugccuuucguagaaaaga

SEQ ID NO: 610448 - RNA, 19 nt, Artificial Sequence
  Description of Artificial Sequence: Synthetic oligonucleotide
uggucguggguuccaggcc

SEQ ID NO: 610449 - RNA, 19 nt, Artificial Sequence
  Description of Artificial Sequence: Synthetic oligonucleotide
auuuauuggggagauccuu

SEQ ID NO: 610450 - RNA, 19 nt, Artificial Sequence
  Description of Artificial Sequence: Synthetic oligonucleotide
caccugcaaaauauaguuc

SEQ ID NO: 610451 - RNA, 19 nt, Artificial Sequence
  Description of Artificial Sequence: Synthetic oligonucleotide
cauuguugauuuggcaaug

SEQ ID NO: 610452 - RNA, 19 nt, Artificial Sequence
  Description of Artificial Sequence: Synthetic oligonucleotide
aacugauacugggaugaaa

SEQ ID NO: 610453 - RNA, 19 nt, Artificial Sequence
  Description of Artificial Sequence: Synthetic oligonucleotide
ucaguugauuggccccagc

SEQ ID NO: 610454 - RNA, 19 nt, Artificial Sequence
  Description of Artificial Sequence: Synthetic oligonucleotide
ucgaaagcacgcuccaguu

SEQ ID NO: 610455 - RNA, 19 nt, Artificial Sequence
  Description of Artificial Sequence: Synthetic oligonucleotide
ugacuaucaccuuggccau

SEQ ID NO: 610456 - RNA, 19 nt, Artificial Sequence
  Description of Artificial Sequence: Synthetic oligonucleotide
gcaaugagcaaauaucacu

SEQ ID NO: 610457 - RNA, 19 nt, Artificial Sequence
  Description of Artificial Sequence: Synthetic oligonucleotide
uuccucucuagauccgccu

SEQ ID NO: 610458 - RNA, 19 nt, Artificial Sequence
  Description of Artificial Sequence: Synthetic oligonucleotide
aagacauaucugggacauc

SEQ ID NO: 610459 - RNA, 19 nt, Artificial Sequence
  Description of Artificial Sequence: Synthetic oligonucleotide
agacaaauguaaacggcau

SEQ ID NO: 610460 - RNA, 19 nt, Artificial Sequence
  Description of Artificial Sequence: Synthetic oligonucleotide
gagccuucguccgacugag

SEQ ID NO: 610461 - RNA, 19 nt, Artificial Sequence
  Description of Artificial Sequence: Synthetic oligonucleotide
uccucucuagauccgccuc

SEQ ID NO: 610462 - RNA, 19 nt, Artificial Sequence
  Description of Artificial Sequence: Synthetic oligonucleotide
agccacauggacauuucug

SEQ ID NO: 610463 - RNA, 19 nt, Artificial Sequence
  Description of Artificial Sequence: Synthetic oligonucleotide
guguaccgugcucggaggg

SEQ ID NO: 610464 - RNA, 19 nt, Artificial Sequence
  Description of Artificial Sequence: Synthetic oligonucleotide
cuuaagcagugugaaugug

SEQ ID NO: 610465 - RNA, 19 nt, Artificial Sequence
  Description of Artificial Sequence: Synthetic oligonucleotide
aaggcuuacuuuguccaua

SEQ ID NO: 610466 - RNA, 19 nt, Artificial Sequence
  Description of Artificial Sequence: Synthetic oligonucleotide
cuaucuguauagcuugaaa

SEQ ID NO: 610467 - RNA, 19 nt, Artificial Sequence
  Description of Artificial Sequence: Synthetic oligonucleotide
agauacuaugucuccuguu

SEQ ID NO: 610468 - RNA, 19 nt, Artificial Sequence
  Description of Artificial Sequence: Synthetic oligonucleotide
uaucugggacaucgauuga

SEQ ID NO: 610469 - RNA, 19 nt, Artificial Sequence
  Description of Artificial Sequence: Synthetic oligonucleotide
caucgauugacaacuagau

SEQ ID NO: 610470 - RNA, 19 nt, Artificial Sequence
  Description of Artificial Sequence: Synthetic oligonucleotide
acaccguggucguggguuc

SEQ ID NO: 610471 - RNA, 19 nt, Artificial Sequence
  Description of Artificial Sequence: Synthetic oligonucleotide
gagaugugggaagacuguc

SEQ ID NO: 610472 - RNA, 19 nt, Artificial Sequence
  Description of Artificial Sequence: Synthetic oligonucleotide
uugugccuaccucauucau

SEQ ID NO: 610473 - RNA, 19 nt, Artificial Sequence
  Description of Artificial Sequence: Synthetic oligonucleotide
ugguguugauuuucauauc

SEQ ID NO: 610474 - RNA, 19 nt, Artificial Sequence
  Description of Artificial Sequence: Synthetic oligonucleotide
ucucgaaagcacgcuccag

SEQ ID NO: 610475 - RNA, 19 nt, Artificial Sequence
  Description of Artificial Sequence: Synthetic oligonucleotide
aagcauucggugagguaca

SEQ ID NO: 610476 - RNA, 19 nt, Artificial Sequence
  Description of Artificial Sequence: Synthetic oligonucleotide
cacgaugaguaacgggcug

SEQ ID NO: 610477 - RNA, 19 nt, Artificial Sequence
  Description of Artificial Sequence: Synthetic oligonucleotide
ggucguggguuccaggccc

SEQ ID NO: 610478 - RNA, 19 nt, Artificial Sequence
  Description of Artificial Sequence: Synthetic oligonucleotide
gccauugccaaagcauucg

SEQ ID NO: 610479 - RNA, 19 nt, Artificial Sequence
  Description of Artificial Sequence: Synthetic oligonucleotide
gccuucguccgacugaggc

SEQ ID NO: 610480 - RNA, 19 nt, Artificial Sequence
  Description of Artificial Sequence: Synthetic oligonucleotide
gguucgaaggaauacugcu

SEQ ID NO: 610481 - RNA, 19 nt, Artificial Sequence
  Description of Artificial Sequence: Synthetic oligonucleotide
ccaucaguugauuggcccc

SEQ ID NO: 610482 - RNA, 19 nt, Artificial Sequence
  Description of Artificial Sequence: Synthetic oligonucleotide
agaacguccaaggcuuacu

SEQ ID NO: 610483 - RNA, 19 nt, Artificial Sequence
  Description of Artificial Sequence: Synthetic oligonucleotide
acggcgguugcuaaaccag

SEQ ID NO: 610484 - RNA, 19 nt, Artificial Sequence
  Description of Artificial Sequence: Synthetic oligonucleotide
uacugcuuugguguaccgu

SEQ ID NO: 610485 - RNA, 19 nt, Artificial Sequence
  Description of Artificial Sequence: Synthetic oligonucleotide
uccgacugaggcgcugagg

SEQ ID NO: 610486 - RNA, 19 nt, Artificial Sequence
  Description of Artificial Sequence: Synthetic oligonucleotide
gguguaccgugcucggagg

SEQ ID NO: 610487 - RNA, 19 nt, Artificial Sequence
  Description of Artificial Sequence: Synthetic oligonucleotide
cuaugucuaaucccacuaa

SEQ ID NO: 610488 - RNA, 19 nt, Artificial Sequence
  Description of Artificial Sequence: Synthetic oligonucleotide
caucucacauccuguacaa

SEQ ID NO: 610489 - RNA, 19 nt, Artificial Sequence
  Description of Artificial Sequence: Synthetic oligonucleotide
gaguaacgggcugacaaaa

SEQ ID NO: 610490 - RNA, 19 nt, Artificial Sequence
  Description of Artificial Sequence: Synthetic oligonucleotide
uguaccgugcucggaggga

SEQ ID NO: 610491 - RNA, 19 nt, Artificial Sequence
  Description of Artificial Sequence: Synthetic oligonucleotide
ggugcgguaccccaccgug

SEQ ID NO: 610492 - RNA, 19 nt, Artificial Sequence
  Description of Artificial Sequence: Synthetic oligonucleotide
acgaugaguaacgggcuga

SEQ ID NO: 610493 - RNA, 19 nt, Artificial Sequence
  Description of Artificial Sequence: Synthetic oligonucleotide
gggacaucgauugacaacu

SEQ ID NO: 610494 - RNA, 19 nt, Artificial Sequence
  Description of Artificial Sequence: Synthetic oligonucleotide
gguucucucgaaagcacgc

SEQ ID NO: 610495 - RNA, 19 nt, Artificial Sequence
  Description of Artificial Sequence: Synthetic oligonucleotide
ugaggcucgcucgcucagg

SEQ ID NO: 610496 - RNA, 19 nt, Artificial Sequence
  Description of Artificial Sequence: Synthetic oligonucleotide
gacggaggcacaaagcuau

SEQ ID NO: 610497 - RNA, 19 nt, Artificial Sequence
  Description of Artificial Sequence: Synthetic oligonucleotide
auccuaaaugucaccacau

SEQ ID NO: 610498 - RNA, 19 nt, Artificial Sequence
  Description of Artificial Sequence: Synthetic oligonucleotide
cgauugacaacuagauuac

SEQ ID NO: 610499 - RNA, 19 nt, Artificial Sequence
  Description of Artificial Sequence: Synthetic oligonucleotide
agucaaggauuccuccauu

SEQ ID NO: 610500 - RNA, 19 nt, Artificial Sequence
  Description of Artificial Sequence: Synthetic oligonucleotide
ucuugcacggcgguugcua

SEQ ID NO: 610501 - RNA, 19 nt, Artificial Sequence
  Description of Artificial Sequence: Synthetic oligonucleotide
uagaacguccaaggcuuac

SEQ ID NO: 610502 - RNA, 19 nt, Artificial Sequence
  Description of Artificial Sequence: Synthetic oligonucleotide
gucuaaagggaauguauuu

SEQ ID NO: 610503 - RNA, 19 nt, Artificial Sequence
  Description of Artificial Sequence: Synthetic oligonucleotide
ccuucguccgacugaggcg

SEQ ID NO: 610504 - RNA, 19 nt, Artificial Sequence
  Description of Artificial Sequence: Synthetic oligonucleotide
ugugauauauggggacauu

SEQ ID NO: 610505 - RNA, 19 nt, Artificial Sequence
  Description of Artificial Sequence: Synthetic oligonucleotide
agcauucggugagguacac

SEQ ID NO: 610506 - RNA, 19 nt, Artificial Sequence
  Description of Artificial Sequence: Synthetic oligonucleotide
acacaguauugcacaauga

SEQ ID NO: 610507 - RNA, 19 nt, Artificial Sequence
  Description of Artificial Sequence: Synthetic oligonucleotide
acggcacaguguuccgauc

SEQ ID NO: 610508 - RNA, 19 nt, Artificial Sequence
  Description of Artificial Sequence: Synthetic oligonucleotide
ccgaucacagacagcgucc

SEQ ID NO: 610509 - RNA, 19 nt, Artificial Sequence
  Description of Artificial Sequence: Synthetic oligonucleotide
augccgucgaugcuguguu

SEQ ID NO: 610510 - RNA, 19 nt, Artificial Sequence
  Description of Artificial Sequence: Synthetic oligonucleotide
cucgcucaggaugccgucg

SEQ ID NO: 610511 - RNA, 19 nt, Artificial Sequence
  Description of Artificial Sequence: Synthetic oligonucleotide
cacauccuguacaagacau

SEQ ID NO: 610512 - RNA, 19 nt, Artificial Sequence
  Description of Artificial Sequence: Synthetic oligonucleotide
uuccgaucacagacagcgu

SEQ ID NO: 610513 - RNA, 19 nt, Artificial Sequence
  Description of Artificial Sequence: Synthetic oligonucleotide
acacgggccucuguaagcu

SEQ ID NO: 610514 - RNA, 19 nt, Artificial Sequence
  Description of Artificial Sequence: Synthetic oligonucleotide
aggcaagaggugaucucuc

SEQ ID NO: 610515 - RNA, 19 nt, Artificial Sequence
  Description of Artificial Sequence: Synthetic oligonucleotide
ccauugccaaagcauucgg

SEQ ID NO: 610516 - RNA, 19 nt, Artificial Sequence
  Description of Artificial Sequence: Synthetic oligonucleotide
ggccauugccaauggcggg

SEQ ID NO: 610517 - RNA, 19 nt, Artificial Sequence
  Description of Artificial Sequence: Synthetic oligonucleotide
uucucgcccugccuuucgu

SEQ ID NO: 610518 - RNA, 19 nt, Artificial Sequence
  Description of Artificial Sequence: Synthetic oligonucleotide
gagucaaugucagagccuu

SEQ ID NO: 610519 - RNA, 19 nt, Artificial Sequence
  Description of Artificial Sequence: Synthetic oligonucleotide
cacggcgguugcuaaacca

SEQ ID NO: 610520 - RNA, 19 nt, Artificial Sequence
  Description of Artificial Sequence: Synthetic oligonucleotide
gguaccccaccgugguugg

SEQ ID NO: 610521 - RNA, 19 nt, Artificial Sequence
  Description of Artificial Sequence: Synthetic oligonucleotide
gauuuggcaaugagcaaau

SEQ ID NO: 610522 - RNA, 19 nt, Artificial Sequence
  Description of Artificial Sequence: Synthetic oligonucleotide
cccacuaaugaacuaccuc

SEQ ID NO: 610523 - RNA, 19 nt, Artificial Sequence
  Description of Artificial Sequence: Synthetic oligonucleotide
gcgguugcuaaaccagacc

SEQ ID NO: 610524 - RNA, 19 nt, Artificial Sequence
  Description of Artificial Sequence: Synthetic oligonucleotide
ugggaagacuguccacauu

SEQ ID NO: 610525 - RNA, 19 nt, Artificial Sequence
  Description of Artificial Sequence: Synthetic oligonucleotide
cucgaaagcacgcuccagu

SEQ ID NO: 610526 - RNA, 19 nt, Artificial Sequence
  Description of Artificial Sequence: Synthetic oligonucleotide
auucuaccacgaugaguaa

SEQ ID NO: 610527 - RNA, 19 nt, Artificial Sequence
  Description of Artificial Sequence: Synthetic oligonucleotide
ucgcccugccuuucguaga

SEQ ID NO: 610528 - RNA, 19 nt, Artificial Sequence
  Description of Artificial Sequence: Synthetic oligonucleotide
uggugcgguaccccaccgu

SEQ ID NO: 610529 - RNA, 19 nt, Artificial Sequence
  Description of Artificial Sequence: Synthetic oligonucleotide
cucacugacggcacagugu

SEQ ID NO: 610530 - RNA, 19 nt, Artificial Sequence
  Description of Artificial Sequence: Synthetic oligonucleotide
guccauacuguagccugug

SEQ ID NO: 610531 - RNA, 19 nt, Artificial Sequence
  Description of Artificial Sequence: Synthetic oligonucleotide
cuggugcgguaccccaccg

SEQ ID NO: 610532 - RNA, 19 nt, Artificial Sequence
  Description of Artificial Sequence: Synthetic oligonucleotide
cuagauccgccuccuccuc

SEQ ID NO: 610533 - RNA, 19 nt, Artificial Sequence
  Description of Artificial Sequence: Synthetic oligonucleotide
caagacauaucugggacau

SEQ ID NO: 610534 - RNA, 19 nt, Artificial Sequence
  Description of Artificial Sequence: Synthetic oligonucleotide
ggguucgaaggaauacugc

SEQ ID NO: 610535 - RNA, 19 nt, Artificial Sequence
  Description of Artificial Sequence: Synthetic oligonucleotide
gaacguccaaggcuuacuu

SEQ ID NO: 610536 - RNA, 19 nt, Artificial Sequence
  Description of Artificial Sequence: Synthetic oligonucleotide
cucucgaaagcacgcucca

SEQ ID NO: 610537 - RNA, 19 nt, Artificial Sequence
  Description of Artificial Sequence: Synthetic oligonucleotide
uaccccaccgugguugguc

SEQ ID NO: 610538 - RNA, 19 nt, Artificial Sequence
  Description of Artificial Sequence: Synthetic oligonucleotide
uggcugacaccguggucgu

SEQ ID NO: 610539 - RNA, 19 nt, Artificial Sequence
  Description of Artificial Sequence: Synthetic oligonucleotide
cugcaacacaaagauacua

SEQ ID NO: 610540 - RNA, 19 nt, Artificial Sequence
  Description of Artificial Sequence: Synthetic oligonucleotide
ccucucuagauccgccucc

SEQ ID NO: 610541 - RNA, 19 nt, Artificial Sequence
  Description of Artificial Sequence: Synthetic oligonucleotide
cccaacguauaaaauagcu

SEQ ID NO: 610542 - RNA, 19 nt, Artificial Sequence
  Description of Artificial Sequence: Synthetic oligonucleotide
cauugccaaagcauucggu

SEQ ID NO: 610543 - RNA, 19 nt, Artificial Sequence
  Description of Artificial Sequence: Synthetic oligonucleotide
cuugagugguaagucaggu

SEQ ID NO: 610544 - RNA, 19 nt, Artificial Sequence
  Description of Artificial Sequence: Synthetic oligonucleotide
gguugaggcugcaacacaa

SEQ ID NO: 610545 - RNA, 19 nt, Artificial Sequence
  Description of Artificial Sequence: Synthetic oligonucleotide
gguauggguucucucgaaa

SEQ ID NO: 610546 - RNA, 19 nt, Artificial Sequence
  Description of Artificial Sequence: Synthetic oligonucleotide
cauuguucuuaagucuaaa

SEQ ID NO: 610547 - RNA, 19 nt, Artificial Sequence
  Description of Artificial Sequence: Synthetic oligonucleotide
ggguuggagggccccgacg

SEQ ID NO: 610548 - RNA, 19 nt, Artificial Sequence
  Description of Artificial Sequence: Synthetic oligonucleotide
caguugauuggccccagcu

SEQ ID NO: 610549 - RNA, 19 nt, Artificial Sequence
  Description of Artificial Sequence: Synthetic oligonucleotide
gugcgguaccccaccgugg

SEQ ID NO: 610550 - RNA, 19 nt, Artificial Sequence
  Description of Artificial Sequence: Synthetic oligonucleotide
gacggcacaguguuccgau

SEQ ID NO: 610551 - RNA, 19 nt, Artificial Sequence
  Description of Artificial Sequence: Synthetic oligonucleotide
gugaucucucucccuucca

SEQ ID NO: 610552 - RNA, 19 nt, Artificial Sequence
  Description of Artificial Sequence: Synthetic oligonucleotide
uugcacggcgguugcuaaa

SEQ ID NO: 610553 - RNA, 19 nt, Artificial Sequence
  Description of Artificial Sequence: Synthetic oligonucleotide
gcuggugcgguaccccacc

SEQ ID NO: 610554 - RNA, 19 nt, Artificial Sequence
  Description of Artificial Sequence: Synthetic oligonucleotide
guucccuaucauccuuuaa

SEQ ID NO: 610555 - RNA, 19 nt, Artificial Sequence
  Description of Artificial Sequence: Synthetic oligonucleotide
cccugguguaaaugucugg

SEQ ID NO: 610556 - RNA, 19 nt, Artificial Sequence
  Description of Artificial Sequence: Synthetic oligonucleotide
cuguaagcuucgcccucug

SEQ ID NO: 610557 - RNA, 19 nt, Artificial Sequence
  Description of Artificial Sequence: Synthetic oligonucleotide
gacaccguggucguggguu

SEQ ID NO: 610558 - RNA, 19 nt, Artificial Sequence
  Description of Artificial Sequence: Synthetic oligonucleotide
caagcaggucagggcauug

SEQ ID NO: 610559 - RNA, 19 nt, Artificial Sequence
  Description of Artificial Sequence: Synthetic oligonucleotide
cuugcacggcgguugcuaa

SEQ ID NO: 610560 - RNA, 19 nt, Artificial Sequence
  Description of Artificial Sequence: Synthetic oligonucleotide
ggaauacugcuuuggugua

SEQ ID NO: 610561 - RNA, 19 nt, Artificial Sequence
  Description of Artificial Sequence: Synthetic oligonucleotide
uaccgugcucggagggaaa

SEQ ID NO: 610562 - RNA, 19 nt, Artificial Sequence
  Description of Artificial Sequence: Synthetic oligonucleotide
cccgacggaggcacaaagc

SEQ ID NO: 610563 - RNA, 19 nt, Artificial Sequence
  Description of Artificial Sequence: Synthetic oligonucleotide
gguuccagugugucaaagu

SEQ ID NO: 610564 - RNA, 19 nt, Artificial Sequence
  Description of Artificial Sequence: Synthetic oligonucleotide
cauucccaauucauuacuu

SEQ ID NO: 610565 - RNA, 19 nt, Artificial Sequence
  Description of Artificial Sequence: Synthetic oligonucleotide
ccuagaacguccaaggcuu

SEQ ID NO: 610566 - RNA, 19 nt, Artificial Sequence
  Description of Artificial Sequence: Synthetic oligonucleotide
gcgggguucaugggguugg

SEQ ID NO: 610567 - RNA, 19 nt, Artificial Sequence
  Description of Artificial Sequence: Synthetic oligonucleotide
aggaugccgucgaugcugu

SEQ ID NO: 610568 - RNA, 19 nt, Artificial Sequence
  Description of Artificial Sequence: Synthetic oligonucleotide
cuggguucgaaggaauacu

SEQ ID NO: 610569 - RNA, 19 nt, Artificial Sequence
  Description of Artificial Sequence: Synthetic oligonucleotide
uucguccgacugaggcgcu

SEQ ID NO: 610570 - RNA, 19 nt, Artificial Sequence
  Description of Artificial Sequence: Synthetic oligonucleotide
ggcgguugcuaaaccagac

SEQ ID NO: 610571 - RNA, 19 nt, Artificial Sequence
  Description of Artificial Sequence: Synthetic oligonucleotide
ccgugguuggucagaaguc

SEQ ID NO: 610572 - RNA, 19 nt, Artificial Sequence
  Description of Artificial Sequence: Synthetic oligonucleotide
guauuugugccuaccucau

SEQ ID NO: 610573 - RNA, 19 nt, Artificial Sequence
  Description of Artificial Sequence: Synthetic oligonucleotide
gcguccuugaguaauuugu

SEQ ID NO: 610574 - RNA, 19 nt, Artificial Sequence
  Description of Artificial Sequence: Synthetic oligonucleotide
acggaggcacaaagcuauc

SEQ ID NO: 610575 - RNA, 19 nt, Artificial Sequence
  Description of Artificial Sequence: Synthetic oligonucleotide
caccgugguuggucagaag

SEQ ID NO: 610576 - RNA, 19 nt, Artificial Sequence
  Description of Artificial Sequence: Synthetic oligonucleotide
guaccgugcucggagggaa

SEQ ID NO: 610577 - RNA, 19 nt, Artificial Sequence
  Description of Artificial Sequence: Synthetic oligonucleotide
gcccaacguauaaaauagc

SEQ ID NO: 610578 - RNA, 19 nt, Artificial Sequence
  Description of Artificial Sequence: Synthetic oligonucleotide
agacagcguccuugaguaa

SEQ ID NO: 610579 - RNA, 19 nt, Artificial Sequence
  Description of Artificial Sequence: Synthetic oligonucleotide
gcuuugguguaccgugcuc

SEQ ID NO: 610580 - RNA, 19 nt, Artificial Sequence
  Description of Artificial Sequence: Synthetic oligonucleotide
cacugacggcacaguguuc

SEQ ID NO: 610581 - RNA, 19 nt, Artificial Sequence
  Description of Artificial Sequence: Synthetic oligonucleotide
guucucucgaaagcacgcu

SEQ ID NO: 610582 - RNA, 19 nt, Artificial Sequence
  Description of Artificial Sequence: Synthetic oligonucleotide
gucguggguuccaggcccc

SEQ ID NO: 610583 - RNA, 19 nt, Artificial Sequence
  Description of Artificial Sequence: Synthetic oligonucleotide
gccuuucguagaaaagaga

SEQ ID NO: 610584 - RNA, 19 nt, Artificial Sequence
  Description of Artificial Sequence: Synthetic oligonucleotide
ucguccgacugaggcgcug

SEQ ID NO: 610585 - RNA, 19 nt, Artificial Sequence
  Description of Artificial Sequence: Synthetic oligonucleotide
gcagugugaaugugauaaa

SEQ ID NO: 610586 - RNA, 19 nt, Artificial Sequence
  Description of Artificial Sequence: Synthetic oligonucleotide
caaggcuuacuuuguccau

SEQ ID NO: 610587 - RNA, 19 nt, Artificial Sequence
  Description of Artificial Sequence: Synthetic oligonucleotide
gcucuaugucuaaucccac

SEQ ID NO: 610588 - RNA, 19 nt, Artificial Sequence
  Description of Artificial Sequence: Synthetic oligonucleotide
gugcucggagggaaagcca

SEQ ID NO: 610589 - RNA, 19 nt, Artificial Sequence
  Description of Artificial Sequence: Synthetic oligonucleotide
ggcaagaggugaucucucu

SEQ ID NO: 610590 - RNA, 19 nt, Artificial Sequence
  Description of Artificial Sequence: Synthetic oligonucleotide
cccuagaacguccaaggcu

SEQ ID NO: 610591 - RNA, 19 nt, Artificial Sequence
  Description of Artificial Sequence: Synthetic oligonucleotide
ggugacacuucuucuccau

SEQ ID NO: 610592 - RNA, 19 nt, Artificial Sequence
  Description of Artificial Sequence: Synthetic oligonucleotide
ccauacuguagccuguggu

SEQ ID NO: 610593 - RNA, 19 nt, Artificial Sequence
  Description of Artificial Sequence: Synthetic oligonucleotide
gcuaucuguauagcuugaa

SEQ ID NO: 610594 - RNA, 19 nt, Artificial Sequence
  Description of Artificial Sequence: Synthetic oligonucleotide
cugugauauauggggacau

SEQ ID NO: 610595 - RNA, 19 nt, Artificial Sequence
  Description of Artificial Sequence: Synthetic oligonucleotide
cucgcucgcucaggaugcc

SEQ ID NO: 610596 - RNA, 19 nt, Artificial Sequence
  Description of Artificial Sequence: Synthetic oligonucleotide
ccccgacggaggcacaaag

SEQ ID NO: 610597 - RNA, 19 nt, Artificial Sequence
  Description of Artificial Sequence: Synthetic oligonucleotide
ccgacggaggcacaaagcu

SEQ ID NO: 610598 - RNA, 19 nt, Artificial Sequence
  Description of Artificial Sequence: Synthetic oligonucleotide
gcacggcgguugcuaaacc

SEQ ID NO: 610599 - RNA, 19 nt, Artificial Sequence
  Description of Artificial Sequence: Synthetic oligonucleotide
gcauucuaccacgaugagu

SEQ ID NO: 610600 - RNA, 19 nt, Artificial Sequence
  Description of Artificial Sequence: Synthetic oligonucleotide
aucuugcacggcgguugcu

SEQ ID NO: 610601 - RNA, 19 nt, Artificial Sequence
  Description of Artificial Sequence: Synthetic oligonucleotide
ugccgucgaugcuguguuu

SEQ ID NO: 610602 - RNA, 19 nt, Artificial Sequence
  Description of Artificial Sequence: Synthetic oligonucleotide
agccuucguccgacugagg

SEQ ID NO: 610603 - RNA, 19 nt, Artificial Sequence
  Description of Artificial Sequence: Synthetic oligonucleotide
uggcgggguucaugggguu

SEQ ID NO: 610604 - RNA, 19 nt, Artificial Sequence
  Description of Artificial Sequence: Synthetic oligonucleotide
ccuucacagcuagucuaac

SEQ ID NO: 610605 - RNA, 19 nt, Artificial Sequence
  Description of Artificial Sequence: Synthetic oligonucleotide
cgguaccccaccgugguug

SEQ ID NO: 610606 - RNA, 19 nt, Artificial Sequence
  Description of Artificial Sequence: Synthetic oligonucleotide
cggcacaguguuccgauca

SEQ ID NO: 610607 - RNA, 19 nt, Artificial Sequence
  Description of Artificial Sequence: Synthetic oligonucleotide
cgucgaugcuguguuuagc

SEQ ID NO: 610608 - RNA, 19 nt, Artificial Sequence
  Description of Artificial Sequence: Synthetic oligonucleotide
gggguuggagggccccgac

SEQ ID NO: 610609 - RNA, 19 nt, Artificial Sequence
  Description of Artificial Sequence: Synthetic oligonucleotide
ccacgaugaguaacgggcu

SEQ ID NO: 610610 - RNA, 19 nt, Artificial Sequence
  Description of Artificial Sequence: Synthetic oligonucleotide
caucacccuugcccaacgu

SEQ ID NO: 610611 - RNA, 19 nt, Artificial Sequence
  Description of Artificial Sequence: Synthetic oligonucleotide
gguccauacuguagccugu

SEQ ID NO: 610612 - RNA, 19 nt, Artificial Sequence
  Description of Artificial Sequence: Synthetic oligonucleotide
ggcuuacuuuguccauacu

SEQ ID NO: 610613 - RNA, 19 nt, Artificial Sequence
  Description of Artificial Sequence: Synthetic oligonucleotide
ggacaucgauugacaacua

SEQ ID NO: 610614 - RNA, 19 nt, Artificial Sequence
  Description of Artificial Sequence: Synthetic oligonucleotide
cggcgguugcuaaaccaga

SEQ ID NO: 610615 - RNA, 19 nt, Artificial Sequence
  Description of Artificial Sequence: Synthetic oligonucleotide
ccguggucguggguuccag

SEQ ID NO: 610616 - RNA, 19 nt, Artificial Sequence
  Description of Artificial Sequence: Synthetic oligonucleotide
cccaccgugguuggucaga

SEQ ID NO: 610617 - RNA, 19 nt, Artificial Sequence
  Description of Artificial Sequence: Synthetic oligonucleotide
ccaccgugguuggucagaa

SEQ ID NO: 610618 - RNA, 19 nt, Artificial Sequence
  Description of Artificial Sequence: Synthetic oligonucleotide
ggccccgacggaggcacaa

SEQ ID NO: 610619 - RNA, 19 nt, Artificial Sequence
  Description of Artificial Sequence: Synthetic oligonucleotide
cagcguccuugaguaauuu

SEQ ID NO: 610620 - RNA, 19 nt, Artificial Sequence
  Description of Artificial Sequence: Synthetic oligonucleotide
cacgggccucuguaagcuu

SEQ ID NO: 610621 - RNA, 19 nt, Artificial Sequence
  Description of Artificial Sequence: Synthetic oligonucleotide
cgcucgcucaggaugccgu

SEQ ID NO: 610622 - RNA, 19 nt, Artificial Sequence
  Description of Artificial Sequence: Synthetic oligonucleotide
cguccgacugaggcgcuga

SEQ ID NO: 610623 - RNA, 19 nt, Artificial Sequence
  Description of Artificial Sequence: Synthetic oligonucleotide
cggaggcacaaagcuaucu

SEQ ID NO: 610624 - RNA, 19 nt, Artificial Sequence
  Description of Artificial Sequence: Synthetic oligonucleotide
gccccgacggaggcacaaa

SEQ ID NO: 610625 - RNA, 19 nt, Artificial Sequence
  Description of Artificial Sequence: Synthetic oligonucleotide
gcgguaccccaccgugguu

SEQ ID NO: 610626 - RNA, 19 nt, Artificial Sequence
  Description of Artificial Sequence: Synthetic oligonucleotide
gggccccgacggaggcaca

SEQ ID NO: 610627 - RNA, 19 nt, Artificial Sequence
  Description of Artificial Sequence: Synthetic oligonucleotide
ugaugaaugucuuagaugc

SEQ ID NO: 610628 - RNA, 19 nt, Artificial Sequence
  Description of Artificial Sequence: Synthetic oligonucleotide
guuccuaaaacucagagcc

SEQ ID NO: 610629 - RNA, 19 nt, Artificial Sequence
  Description of Artificial Sequence: Synthetic oligonucleotide
cuugcugaugacuagaucg

SEQ ID NO: 610630 - RNA, 19 nt, Artificial Sequence
  Description of Artificial Sequence: Synthetic oligonucleotide
uuaggugaggaacacaaag

SEQ ID NO: 610631 - RNA, 19 nt, Artificial Sequence
  Description of Artificial Sequence: Synthetic oligonucleotide
agcaugaccaaucuucacc

SEQ ID NO: 610632 - RNA, 19 nt, Artificial Sequence
  Description of Artificial Sequence: Synthetic oligonucleotide
aguuccuaaaacucagagc

SEQ ID NO: 610633 - RNA, 19 nt, Artificial Sequence
  Description of Artificial Sequence: Synthetic oligonucleotide
agcuaaucugaaaagaggc

SEQ ID NO: 610634 - RNA, 19 nt, Artificial Sequence
  Description of Artificial Sequence: Synthetic oligonucleotide
uguaaauggacuccaguga

SEQ ID NO: 610635 - RNA, 19 nt, Artificial Sequence
  Description of Artificial Sequence: Synthetic oligonucleotide
aaacauggcagacuguugu

SEQ ID NO: 610636 - RNA, 19 nt, Artificial Sequence
  Description of Artificial Sequence: Synthetic oligonucleotide
aagcucuuaagacuacagg

SEQ ID NO: 610637 - RNA, 19 nt, Artificial Sequence
  Description of Artificial Sequence: Synthetic oligonucleotide
caugcuacaguccaugacc

SEQ ID NO: 610638 - RNA, 19 nt, Artificial Sequence
  Description of Artificial Sequence: Synthetic oligonucleotide
acuagcaauguccuggaag

SEQ ID NO: 610639 - RNA, 19 nt, Artificial Sequence
  Description of Artificial Sequence: Synthetic oligonucleotide
aguccgguuccuuaagugc

SEQ ID NO: 610640 - RNA, 19 nt, Artificial Sequence
  Description of Artificial Sequence: Synthetic oligonucleotide
uaggaguacuccauuacag

SEQ ID NO: 610641 - RNA, 19 nt, Artificial Sequence
  Description of Artificial Sequence: Synthetic oligonucleotide
ugagcuggguuuaagcugc

SEQ ID NO: 610642 - RNA, 19 nt, Artificial Sequence
  Description of Artificial Sequence: Synthetic oligonucleotide
acaugcuuagcucugcauc

SEQ ID NO: 610643 - RNA, 19 nt, Artificial Sequence
  Description of Artificial Sequence: Synthetic oligonucleotide
gaagggaccacacauguca

SEQ ID NO: 610644 - RNA, 19 nt, Artificial Sequence
  Description of Artificial Sequence: Synthetic oligonucleotide
augucuuagaugccuuucc

SEQ ID NO: 610645 - RNA, 19 nt, Artificial Sequence
  Description of Artificial Sequence: Synthetic oligonucleotide
ugguuuaagggucucugag

SEQ ID NO: 610646 - RNA, 19 nt, Artificial Sequence
  Description of Artificial Sequence: Synthetic oligonucleotide
gacuccagugaguugaugc

SEQ ID NO: 610647 - RNA, 19 nt, Artificial Sequence
  Description of Artificial Sequence: Synthetic oligonucleotide
acuacagggaaacagcccu

SEQ ID NO: 610648 - RNA, 19 nt, Artificial Sequence
  Description of Artificial Sequence: Synthetic oligonucleotide
aaugucuuagaugccuuuc

SEQ ID NO: 610649 - RNA, 19 nt, Artificial Sequence
  Description of Artificial Sequence: Synthetic oligonucleotide
uugcugaugacuagaucgg

SEQ ID NO: 610650 - RNA, 19 nt, Artificial Sequence
  Description of Artificial Sequence: Synthetic oligonucleotide
ucugggcaaacacccaugg

SEQ ID NO: 610651 - RNA, 19 nt, Artificial Sequence
  Description of Artificial Sequence: Synthetic oligonucleotide
ugucggaugagcacaaagu

SEQ ID NO: 610652 - RNA, 19 nt, Artificial Sequence
  Description of Artificial Sequence: Synthetic oligonucleotide
cuuaagacuacagggaaac

SEQ ID NO: 610653 - RNA, 19 nt, Artificial Sequence
  Description of Artificial Sequence: Synthetic oligonucleotide
gaccggacaaccuuugugc

SEQ ID NO: 610654 - RNA, 19 nt, Artificial Sequence
  Description of Artificial Sequence: Synthetic oligonucleotide
cuaaucugaaaagaggcug

SEQ ID NO: 610655 - RNA, 19 nt, Artificial Sequence
  Description of Artificial Sequence: Synthetic oligonucleotide
gagcuaaucugaaaagagg

SEQ ID NO: 610656 - RNA, 19 nt, Artificial Sequence
  Description of Artificial Sequence: Synthetic oligonucleotide
cacacuagcaauguccugg

SEQ ID NO: 610657 - RNA, 19 nt, Artificial Sequence
  Description of Artificial Sequence: Synthetic oligonucleotide
cuuucaacgggugucacag

SEQ ID NO: 610658 - RNA, 19 nt, Artificial Sequence
  Description of Artificial Sequence: Synthetic oligonucleotide
uucaacgggugucacagga

SEQ ID NO: 610659 - RNA, 19 nt, Artificial Sequence
  Description of Artificial Sequence: Synthetic oligonucleotide
cucggcuuuggcuucaucc

SEQ ID NO: 610660 - RNA, 19 nt, Artificial Sequence
  Description of Artificial Sequence: Synthetic oligonucleotide
ugucacaggacacccagcu

SEQ ID NO: 610661 - RNA, 19 nt, Artificial Sequence
  Description of Artificial Sequence: Synthetic oligonucleotide
uggggaaaguuccuaaaac

SEQ ID NO: 610662 - RNA, 19 nt, Artificial Sequence
  Description of Artificial Sequence: Synthetic oligonucleotide
auaguaugucuguucaaug

SEQ ID NO: 610663 - RNA, 19 nt, Artificial Sequence
  Description of Artificial Sequence: Synthetic oligonucleotide
uguagcaucucucgguggu

SEQ ID NO: 610664 - RNA, 19 nt, Artificial Sequence
  Description of Artificial Sequence: Synthetic oligonucleotide
aguaagacacaauggcucu

SEQ ID NO: 610665 - RNA, 19 nt, Artificial Sequence
  Description of Artificial Sequence: Synthetic oligonucleotide
cuacccagagcuuguaccg

SEQ ID NO: 610666 - RNA, 19 nt, Artificial Sequence
  Description of Artificial Sequence: Synthetic oligonucleotide
gaacgcauuugucagggac

SEQ ID NO: 610667 - RNA, 19 nt, Artificial Sequence
  Description of Artificial Sequence: Synthetic oligonucleotide
agaagcugaacgcauuugu

SEQ ID NO: 610668 - RNA, 19 nt, Artificial Sequence
  Description of Artificial Sequence: Synthetic oligonucleotide
uggacaguuagcugguuca

SEQ ID NO: 610669 - RNA, 19 nt, Artificial Sequence
  Description of Artificial Sequence: Synthetic oligonucleotide
gaugaguugucuguccucc

SEQ ID NO: 610670 - RNA, 19 nt, Artificial Sequence
  Description of Artificial Sequence: Synthetic oligonucleotide
cacagcguagguuccaucc

SEQ ID NO: 610671 - RNA, 19 nt, Artificial Sequence
  Description of Artificial Sequence: Synthetic oligonucleotide
acaauaaggccacuaaauu

SEQ ID NO: 610672 - RNA, 19 nt, Artificial Sequence
  Description of Artificial Sequence: Synthetic oligonucleotide
agcaauguccuggaagucg

SEQ ID NO: 610673 - RNA, 19 nt, Artificial Sequence
  Description of Artificial Sequence: Synthetic oligonucleotide
guuauagcggcaugcauuc

SEQ ID NO: 610674 - RNA, 19 nt, Artificial Sequence
  Description of Artificial Sequence: Synthetic oligonucleotide
cuggguuuaagcugcuagg

SEQ ID NO: 610675 - RNA, 19 nt, Artificial Sequence
  Description of Artificial Sequence: Synthetic oligonucleotide
ugagugagcaugaccaauc

SEQ ID NO: 610676 - RNA, 19 nt, Artificial Sequence
  Description of Artificial Sequence: Synthetic oligonucleotide
aguguagcaucucucggug

SEQ ID NO: 610677 - RNA, 19 nt, Artificial Sequence
  Description of Artificial Sequence: Synthetic oligonucleotide
accggacaaccuuugugcc

SEQ ID NO: 610678 - RNA, 19 nt, Artificial Sequence
  Description of Artificial Sequence: Synthetic oligonucleotide
uauagcggcaugcauucuc

SEQ ID NO: 610679 - RNA, 19 nt, Artificial Sequence
  Description of Artificial Sequence: Synthetic oligonucleotide
gagccaacgguacuucuag

SEQ ID NO: 610680 - RNA, 19 nt, Artificial Sequence
  Description of Artificial Sequence: Synthetic oligonucleotide
agguuacugcaguucacac

SEQ ID NO: 610681 - RNA, 19 nt, Artificial Sequence
  Description of Artificial Sequence: Synthetic oligonucleotide
gaaaguaggcaguguagca

SEQ ID NO: 610682 - RNA, 19 nt, Artificial Sequence
  Description of Artificial Sequence: Synthetic oligonucleotide
augacuagaucggugauga

SEQ ID NO: 610683 - RNA, 19 nt, Artificial Sequence
  Description of Artificial Sequence: Synthetic oligonucleotide
ucuuaagacuacagggaaa

SEQ ID NO: 610684 - RNA, 19 nt, Artificial Sequence
  Description of Artificial Sequence: Synthetic oligonucleotide
aaaggcuggcgacugcugu

SEQ ID NO: 610685 - RNA, 19 nt, Artificial Sequence
  Description of Artificial Sequence: Synthetic oligonucleotide
uuacaccaagaucuugaca

SEQ ID NO: 610686 - RNA, 19 nt, Artificial Sequence
  Description of Artificial Sequence: Synthetic oligonucleotide
auccgcaugggccaccagg

SEQ ID NO: 610687 - RNA, 19 nt, Artificial Sequence
  Description of Artificial Sequence: Synthetic oligonucleotide
uuggcgucaaugaaggguu

SEQ ID NO: 610688 - RNA, 19 nt, Artificial Sequence
  Description of Artificial Sequence: Synthetic oligonucleotide
ggcucugucacaauaaggc

SEQ ID NO: 610689 - RNA, 19 nt, Artificial Sequence
  Description of Artificial Sequence: Synthetic oligonucleotide
uucuccgccaugccaaaug

SEQ ID NO: 610690 - RNA, 19 nt, Artificial Sequence
  Description of Artificial Sequence: Synthetic oligonucleotide
caccaaacauggcagacug

SEQ ID NO: 610691 - RNA, 19 nt, Artificial Sequence
  Description of Artificial Sequence: Synthetic oligonucleotide
ugccaaaugcaugcugucg

SEQ ID NO: 610692 - RNA, 19 nt, Artificial Sequence
  Description of Artificial Sequence: Synthetic oligonucleotide
uaaauggacuccagugagu

SEQ ID NO: 610693 - RNA, 19 nt, Artificial Sequence
  Description of Artificial Sequence: Synthetic oligonucleotide
gaacacaaaggcuggcgac

SEQ ID NO: 610694 - RNA, 19 nt, Artificial Sequence
  Description of Artificial Sequence: Synthetic oligonucleotide
ucggugaugaguugucugu

SEQ ID NO: 610695 - RNA, 19 nt, Artificial Sequence
  Description of Artificial Sequence: Synthetic oligonucleotide
acagcguagguuccauccg

SEQ ID NO: 610696 - RNA, 19 nt, Artificial Sequence
  Description of Artificial Sequence: Synthetic oligonucleotide
gacacggcaguccugguuc

SEQ ID NO: 610697 - RNA, 19 nt, Artificial Sequence
  Description of Artificial Sequence: Synthetic oligonucleotide
ugugccauuccggagcacc

SEQ ID NO: 610698 - RNA, 19 nt, Artificial Sequence
  Description of Artificial Sequence: Synthetic oligonucleotide
uugcccaugccugagugag

SEQ ID NO: 610699 - RNA, 19 nt, Artificial Sequence
  Description of Artificial Sequence: Synthetic oligonucleotide
aaucaguggcaugcuacag

SEQ ID NO: 610700 - RNA, 19 nt, Artificial Sequence
  Description of Artificial Sequence: Synthetic oligonucleotide
uccuaaaacucagagccaa

SEQ ID NO: 610701 - RNA, 19 nt, Artificial Sequence
  Description of Artificial Sequence: Synthetic oligonucleotide
caaugagugggaauuucuc

SEQ ID NO: 610702 - RNA, 19 nt, Artificial Sequence
  Description of Artificial Sequence: Synthetic oligonucleotide
gaugacuagaucggugaug

SEQ ID NO: 610703 - RNA, 19 nt, Artificial Sequence
  Description of Artificial Sequence: Synthetic oligonucleotide
aggaguacuccauuacaga

SEQ ID NO: 610704 - RNA, 19 nt, Artificial Sequence
  Description of Artificial Sequence: Synthetic oligonucleotide
aagcugcuaggaguacucc

SEQ ID NO: 610705 - RNA, 19 nt, Artificial Sequence
  Description of Artificial Sequence: Synthetic oligonucleotide
uuuagggagcagagggucu

SEQ ID NO: 610706 - RNA, 19 nt, Artificial Sequence
  Description of Artificial Sequence: Synthetic oligonucleotide
uuccggagcaccugcaugu

SEQ ID NO: 610707 - RNA, 19 nt, Artificial Sequence
  Description of Artificial Sequence: Synthetic oligonucleotide
uccgccaugccaaaugcau

SEQ ID NO: 610708 - RNA, 19 nt, Artificial Sequence
  Description of Artificial Sequence: Synthetic oligonucleotide
ugcuguuauagcggcaugc

SEQ ID NO: 610709 - RNA, 19 nt, Artificial Sequence
  Description of Artificial Sequence: Synthetic oligonucleotide
gauaucauacuuggcguca

SEQ ID NO: 610710 - RNA, 19 nt, Artificial Sequence
  Description of Artificial Sequence: Synthetic oligonucleotide
gaccacacaugucaaguca

SEQ ID NO: 610711 - RNA, 19 nt, Artificial Sequence
  Description of Artificial Sequence: Synthetic oligonucleotide
cugaugacuagaucgguga

SEQ ID NO: 610712 - RNA, 19 nt, Artificial Sequence
  Description of Artificial Sequence: Synthetic oligonucleotide
cuggcgacugcuguuauag

SEQ ID NO: 610713 - RNA, 19 nt, Artificial Sequence
  Description of Artificial Sequence: Synthetic oligonucleotide
uggguuuaagcugcuagga

SEQ ID NO: 610714 - RNA, 19 nt, Artificial Sequence
  Description of Artificial Sequence: Synthetic oligonucleotide
aucggugaugaguugucug

SEQ ID NO: 610715 - RNA, 19 nt, Artificial Sequence
  Description of Artificial Sequence: Synthetic oligonucleotide
aacgcauuugucagggacu

SEQ ID NO: 610716 - RNA, 19 nt, Artificial Sequence
  Description of Artificial Sequence: Synthetic oligonucleotide
ugagauggauguccucaug

SEQ ID NO: 610717 - RNA, 19 nt, Artificial Sequence
  Description of Artificial Sequence: Synthetic oligonucleotide
aucaguggcaugcuacagu

SEQ ID NO: 610718 - RNA, 19 nt, Artificial Sequence
  Description of Artificial Sequence: Synthetic oligonucleotide
uaagacacaauggcucugu

SEQ ID NO: 610719 - RNA, 19 nt, Artificial Sequence
  Description of Artificial Sequence: Synthetic oligonucleotide
cauagguuugggugagggc

SEQ ID NO: 610720 - RNA, 19 nt, Artificial Sequence
  Description of Artificial Sequence: Synthetic oligonucleotide
uaagggucucugaggagga

SEQ ID NO: 610721 - RNA, 19 nt, Artificial Sequence
  Description of Artificial Sequence: Synthetic oligonucleotide
ugguucucuugguucaaca

SEQ ID NO: 610722 - RNA, 19 nt, Artificial Sequence
  Description of Artificial Sequence: Synthetic oligonucleotide
cugucggaugagcacaaag

SEQ ID NO: 610723 - RNA, 19 nt, Artificial Sequence
  Description of Artificial Sequence: Synthetic oligonucleotide
ggugucacaggacacccag

SEQ ID NO: 610724 - RNA, 19 nt, Artificial Sequence
  Description of Artificial Sequence: Synthetic oligonucleotide
uagaucggugaugaguugu

SEQ ID NO: 610725 - RNA, 19 nt, Artificial Sequence
  Description of Artificial Sequence: Synthetic oligonucleotide
aacgggugucacaggacac

SEQ ID NO: 610726 - RNA, 19 nt, Artificial Sequence
  Description of Artificial Sequence: Synthetic oligonucleotide
uucauuaggugaggaacac

SEQ ID NO: 610727 - RNA, 19 nt, Artificial Sequence
  Description of Artificial Sequence: Synthetic oligonucleotide
ugaaugucuuagaugccuu

SEQ ID NO: 610728 - RNA, 19 nt, Artificial Sequence
  Description of Artificial Sequence: Synthetic oligonucleotide
ggccacuaaauucacagca

SEQ ID NO: 610729 - RNA, 19 nt, Artificial Sequence
  Description of Artificial Sequence: Synthetic oligonucleotide
gcauuugucagggacugcg

SEQ ID NO: 610730 - RNA, 19 nt, Artificial Sequence
  Description of Artificial Sequence: Synthetic oligonucleotide
acgggugucacaggacacc

SEQ ID NO: 610731 - RNA, 19 nt, Artificial Sequence
  Description of Artificial Sequence: Synthetic oligonucleotide
guugaugaaugucuuagau

SEQ ID NO: 610732 - RNA, 19 nt, Artificial Sequence
  Description of Artificial Sequence: Synthetic oligonucleotide
gacuacaaggacaugcuua

SEQ ID NO: 610733 - RNA, 19 nt, Artificial Sequence
  Description of Artificial Sequence: Synthetic oligonucleotide
cuaggaguacuccauuaca

SEQ ID NO: 610734 - RNA, 19 nt, Artificial Sequence
  Description of Artificial Sequence: Synthetic oligonucleotide
ucaacgggugucacaggac

SEQ ID NO: 610735 - RNA, 19 nt, Artificial Sequence
  Description of Artificial Sequence: Synthetic oligonucleotide
uuucaacgggugucacagg

SEQ ID NO: 610736 - RNA, 19 nt, Artificial Sequence
  Description of Artificial Sequence: Synthetic oligonucleotide
cugaaaauuccgccuguuc

SEQ ID NO: 610737 - RNA, 19 nt, Artificial Sequence
  Description of Artificial Sequence: Synthetic oligonucleotide
gugggaauuucuccccucc

SEQ ID NO: 610738 - RNA, 19 nt, Artificial Sequence
  Description of Artificial Sequence: Synthetic oligonucleotide
gucacaauaaggccacuaa

SEQ ID NO: 610739 - RNA, 19 nt, Artificial Sequence
  Description of Artificial Sequence: Synthetic oligonucleotide
gauaguaugucuguucaau

SEQ ID NO: 610740 - RNA, 19 nt, Artificial Sequence
  Description of Artificial Sequence: Synthetic oligonucleotide
cucucggugguugggauag

SEQ ID NO: 610741 - RNA, 19 nt, Artificial Sequence
  Description of Artificial Sequence: Synthetic oligonucleotide
ugccauguacagcuuugac

SEQ ID NO: 610742 - RNA, 19 nt, Artificial Sequence
  Description of Artificial Sequence: Synthetic oligonucleotide
gagaccaucaccuggucau

SEQ ID NO: 610743 - RNA, 19 nt, Artificial Sequence
  Description of Artificial Sequence: Synthetic oligonucleotide
ugucaagucauggaacauu

SEQ ID NO: 610744 - RNA, 19 nt, Artificial Sequence
  Description of Artificial Sequence: Synthetic oligonucleotide
ugaugacuagaucggugau

SEQ ID NO: 610745 - RNA, 19 nt, Artificial Sequence
  Description of Artificial Sequence: Synthetic oligonucleotide
cucaggguaggcaccugcc

SEQ ID NO: 610746 - RNA, 19 nt, Artificial Sequence
  Description of Artificial Sequence: Synthetic oligonucleotide
ugcacgaauuacugagcac

SEQ ID NO: 610747 - RNA, 19 nt, Artificial Sequence
  Description of Artificial Sequence: Synthetic oligonucleotide
ggaaaguuccuaaaacuca

SEQ ID NO: 610748 - RNA, 19 nt, Artificial Sequence
  Description of Artificial Sequence: Synthetic oligonucleotide
cauguacagcuuugacugc

SEQ ID NO: 610749 - RNA, 19 nt, Artificial Sequence
  Description of Artificial Sequence: Synthetic oligonucleotide
gcuuugacugcacagaugu

SEQ ID NO: 610750 - RNA, 19 nt, Artificial Sequence
  Description of Artificial Sequence: Synthetic oligonucleotide
aggggagccgacguggagg

SEQ ID NO: 610751 - RNA, 19 nt, Artificial Sequence
  Description of Artificial Sequence: Synthetic oligonucleotide
gggauaguaugucuguuca

SEQ ID NO: 610752 - RNA, 19 nt, Artificial Sequence
  Description of Artificial Sequence: Synthetic oligonucleotide
ccaucuuugccauguacag

SEQ ID NO: 610753 - RNA, 19 nt, Artificial Sequence
  Description of Artificial Sequence: Synthetic oligonucleotide
agcugcuaggaguacucca

SEQ ID NO: 610754 - RNA, 19 nt, Artificial Sequence
  Description of Artificial Sequence: Synthetic oligonucleotide
gccaacgguacuucuaggc

SEQ ID NO: 610755 - RNA, 19 nt, Artificial Sequence
  Description of Artificial Sequence: Synthetic oligonucleotide
gguuuaagcugcuaggagu

SEQ ID NO: 610756 - RNA, 19 nt, Artificial Sequence
  Description of Artificial Sequence: Synthetic oligonucleotide
ggguuuaagcugcuaggag

SEQ ID NO: 610757 - RNA, 19 nt, Artificial Sequence
  Description of Artificial Sequence: Synthetic oligonucleotide
uccuggacaguuagcuggu

SEQ ID NO: 610758 - RNA, 19 nt, Artificial Sequence
  Description of Artificial Sequence: Synthetic oligonucleotide
ucguguaucugaagagcua

SEQ ID NO: 610759 - RNA, 19 nt, Artificial Sequence
  Description of Artificial Sequence: Synthetic oligonucleotide
ggugcaucuccgugggugg

SEQ ID NO: 610760 - RNA, 19 nt, Artificial Sequence
  Description of Artificial Sequence: Synthetic oligonucleotide
cagcguagguuccauccgc

SEQ ID NO: 610761 - RNA, 19 nt, Artificial Sequence
  Description of Artificial Sequence: Synthetic oligonucleotide
agccaacgguacuucuagg

SEQ ID NO: 610762 - RNA, 19 nt, Artificial Sequence
  Description of Artificial Sequence: Synthetic oligonucleotide
ugacugcacagauguccag

SEQ ID NO: 610763 - RNA, 19 nt, Artificial Sequence
  Description of Artificial Sequence: Synthetic oligonucleotide
gguguuccccaaucagugg

SEQ ID NO: 610764 - RNA, 19 nt, Artificial Sequence
  Description of Artificial Sequence: Synthetic oligonucleotide
ugucacaauaaggccacua

SEQ ID NO: 610765 - RNA, 19 nt, Artificial Sequence
  Description of Artificial Sequence: Synthetic oligonucleotide
gauggucccgaggggagcc

SEQ ID NO: 610766 - RNA, 19 nt, Artificial Sequence
  Description of Artificial Sequence: Synthetic oligonucleotide
gcaguguagcaucucucgg

SEQ ID NO: 610767 - RNA, 19 nt, Artificial Sequence
  Description of Artificial Sequence: Synthetic oligonucleotide
cugcacgaauuacugagca

SEQ ID NO: 610768 - RNA, 19 nt, Artificial Sequence
  Description of Artificial Sequence: Synthetic oligonucleotide
gguugggauaguaugucug

SEQ ID NO: 610769 - RNA, 19 nt, Artificial Sequence
  Description of Artificial Sequence: Synthetic oligonucleotide
ucggugguugggauaguau

SEQ ID NO: 610770 - RNA, 19 nt, Artificial Sequence
  Description of Artificial Sequence: Synthetic oligonucleotide
gcacgaauuacugagcaca

SEQ ID NO: 610771 - RNA, 19 nt, Artificial Sequence
  Description of Artificial Sequence: Synthetic oligonucleotide
acgcauuugucagggacug

SEQ ID NO: 610772 - RNA, 19 nt, Artificial Sequence
  Description of Artificial Sequence: Synthetic oligonucleotide
caacgguacuucuaggcaa

SEQ ID NO: 610773 - RNA, 19 nt, Artificial Sequence
  Description of Artificial Sequence: Synthetic oligonucleotide
caugcuuagcucugcaucu

SEQ ID NO: 610774 - RNA, 19 nt, Artificial Sequence
  Description of Artificial Sequence: Synthetic oligonucleotide
uuugccccgaaagcacuug

SEQ ID NO: 610775 - RNA, 19 nt, Artificial Sequence
  Description of Artificial Sequence: Synthetic oligonucleotide
cuuguaccggucugacaug

SEQ ID NO: 610776 - RNA, 19 nt, Artificial Sequence
  Description of Artificial Sequence: Synthetic oligonucleotide
caacgggugucacaggaca

SEQ ID NO: 610777 - RNA, 19 nt, Artificial Sequence
  Description of Artificial Sequence: Synthetic oligonucleotide
acagagauccuuggcuuca

SEQ ID NO: 610778 - RNA, 19 nt, Artificial Sequence
  Description of Artificial Sequence: Synthetic oligonucleotide
caugaccaaucuucaccac

SEQ ID NO: 610779 - RNA, 19 nt, Artificial Sequence
  Description of Artificial Sequence: Synthetic oligonucleotide
gggaaaguaggcaguguag

SEQ ID NO: 610780 - RNA, 19 nt, Artificial Sequence
  Description of Artificial Sequence: Synthetic oligonucleotide
gucguagugauuuccacuu

SEQ ID NO: 610781 - RNA, 19 nt, Artificial Sequence
  Description of Artificial Sequence: Synthetic oligonucleotide
ugcgacuugcugugaugca

SEQ ID NO: 610782 - RNA, 19 nt, Artificial Sequence
  Description of Artificial Sequence: Synthetic oligonucleotide
cacagguagcacugacuac

SEQ ID NO: 610783 - RNA, 19 nt, Artificial Sequence
  Description of Artificial Sequence: Synthetic oligonucleotide
gcuuguaccggucugacau

SEQ ID NO: 610784 - RNA, 19 nt, Artificial Sequence
  Description of Artificial Sequence: Synthetic oligonucleotide
uccgguuccuuaagugcuc

SEQ ID NO: 610785 - RNA, 19 nt, Artificial Sequence
  Description of Artificial Sequence: Synthetic oligonucleotide
guaagacacaauggcucug

SEQ ID NO: 610786 - RNA, 19 nt, Artificial Sequence
  Description of Artificial Sequence: Synthetic oligonucleotide
acacaauggcucugucaca

SEQ ID NO: 610787 - RNA, 19 nt, Artificial Sequence
  Description of Artificial Sequence: Synthetic oligonucleotide
cugggcaaacacccauggc

SEQ ID NO: 610788 - RNA, 19 nt, Artificial Sequence
  Description of Artificial Sequence: Synthetic oligonucleotide
uugccauguacagcuuuga

SEQ ID NO: 610789 - RNA, 19 nt, Artificial Sequence
  Description of Artificial Sequence: Synthetic oligonucleotide
cucguguaucugaagagcu

SEQ ID NO: 610790 - RNA, 19 nt, Artificial Sequence
  Description of Artificial Sequence: Synthetic oligonucleotide
accggucugacauggcgau

SEQ ID NO: 610791 - RNA, 19 nt, Artificial Sequence
  Description of Artificial Sequence: Synthetic oligonucleotide
uuccccaaucaguggcaug

SEQ ID NO: 610792 - RNA, 19 nt, Artificial Sequence
  Description of Artificial Sequence: Synthetic oligonucleotide
ugaugcuagggaggccugc

SEQ ID NO: 610793 - RNA, 19 nt, Artificial Sequence
  Description of Artificial Sequence: Synthetic oligonucleotide
cuuggcgucaaugaagggu

SEQ ID NO: 610794 - RNA, 19 nt, Artificial Sequence
  Description of Artificial Sequence: Synthetic oligonucleotide
cacccauggcuugucacag

SEQ ID NO: 610795 - RNA, 19 nt, Artificial Sequence
  Description of Artificial Sequence: Synthetic oligonucleotide
aggcaguguagcaucucuc

SEQ ID NO: 610796 - RNA, 19 nt, Artificial Sequence
  Description of Artificial Sequence: Synthetic oligonucleotide
cuuugacugcacagauguc

SEQ ID NO: 610797 - RNA, 19 nt, Artificial Sequence
  Description of Artificial Sequence: Synthetic oligonucleotide
caagcuccggauggucucg

SEQ ID NO: 610798 - RNA, 19 nt, Artificial Sequence
  Description of Artificial Sequence: Synthetic oligonucleotide
gcuacaguccaugaccuca

SEQ ID NO: 610799 - RNA, 19 nt, Artificial Sequence
  Description of Artificial Sequence: Synthetic oligonucleotide
cacgaauuacugagcacaa

SEQ ID NO: 610800 - RNA, 19 nt, Artificial Sequence
  Description of Artificial Sequence: Synthetic oligonucleotide
gagugagcaugaccaaucu

SEQ ID NO: 610801 - RNA, 19 nt, Artificial Sequence
  Description of Artificial Sequence: Synthetic oligonucleotide
ucguagugauuuccacuuu

SEQ ID NO: 610802 - RNA, 19 nt, Artificial Sequence
  Description of Artificial Sequence: Synthetic oligonucleotide
aucucucggugguugggau

SEQ ID NO: 610803 - RNA, 19 nt, Artificial Sequence
  Description of Artificial Sequence: Synthetic oligonucleotide
gcugaugacuagaucggug

SEQ ID NO: 610804 - RNA, 19 nt, Artificial Sequence
  Description of Artificial Sequence: Synthetic oligonucleotide
gaacccggauaucauacuu

SEQ ID NO: 610805 - RNA, 19 nt, Artificial Sequence
  Description of Artificial Sequence: Synthetic oligonucleotide
ccucguguaucugaagagc

SEQ ID NO: 610806 - RNA, 19 nt, Artificial Sequence
  Description of Artificial Sequence: Synthetic oligonucleotide
gccccgaaagcacuuggcc

SEQ ID NO: 610807 - RNA, 19 nt, Artificial Sequence
  Description of Artificial Sequence: Synthetic oligonucleotide
gggugcaucuccgugggug

SEQ ID NO: 610808 - RNA, 19 nt, Artificial Sequence
  Description of Artificial Sequence: Synthetic oligonucleotide
gucuguucaaugaguggga

SEQ ID NO: 610809 - RNA, 19 nt, Artificial Sequence
  Description of Artificial Sequence: Synthetic oligonucleotide
ugcuacaguccaugaccuc

SEQ ID NO: 610810 - RNA, 19 nt, Artificial Sequence
  Description of Artificial Sequence: Synthetic oligonucleotide
uccggauggucucggcuuu

SEQ ID NO: 610811 - RNA, 19 nt, Artificial Sequence
  Description of Artificial Sequence: Synthetic oligonucleotide
gucugaaggaccggacaac

SEQ ID NO: 610812 - RNA, 19 nt, Artificial Sequence
  Description of Artificial Sequence: Synthetic oligonucleotide
ggcaaacacccauggcuug

SEQ ID NO: 610813 - RNA, 19 nt, Artificial Sequence
  Description of Artificial Sequence: Synthetic oligonucleotide
ugcccaugccugagugagc

SEQ ID NO: 610814 - RNA, 19 nt, Artificial Sequence
  Description of Artificial Sequence: Synthetic oligonucleotide
ggacacccagcuuugggga

SEQ ID NO: 610815 - RNA, 19 nt, Artificial Sequence
  Description of Artificial Sequence: Synthetic oligonucleotide
ccgacguggaggcagcacc

SEQ ID NO: 610816 - RNA, 19 nt, Artificial Sequence
  Description of Artificial Sequence: Synthetic oligonucleotide
gcgacuugcugugaugcag

SEQ ID NO: 610817 - RNA, 19 nt, Artificial Sequence
  Description of Artificial Sequence: Synthetic oligonucleotide
ccaagguuacugcaguuca

SEQ ID NO: 610818 - RNA, 19 nt, Artificial Sequence
  Description of Artificial Sequence: Synthetic oligonucleotide
cagggaagaguaagacaca

SEQ ID NO: 610819 - RNA, 19 nt, Artificial Sequence
  Description of Artificial Sequence: Synthetic oligonucleotide
caguguagcaucucucggu

SEQ ID NO: 610820 - RNA, 19 nt, Artificial Sequence
  Description of Artificial Sequence: Synthetic oligonucleotide
ggcgucuacccagagcuug

SEQ ID NO: 610821 - RNA, 19 nt, Artificial Sequence
  Description of Artificial Sequence: Synthetic oligonucleotide
uuauagcggcaugcauucu

SEQ ID NO: 610822 - RNA, 19 nt, Artificial Sequence
  Description of Artificial Sequence: Synthetic oligonucleotide
cugcauuccuugggguugc

SEQ ID NO: 610823 - RNA, 19 nt, Artificial Sequence
  Description of Artificial Sequence: Synthetic oligonucleotide
augcuagggaggccugcgu

SEQ ID NO: 610824 - RNA, 19 nt, Artificial Sequence
  Description of Artificial Sequence: Synthetic oligonucleotide
ccuaaaacucagagccaac

SEQ ID NO: 610825 - RNA, 19 nt, Artificial Sequence
  Description of Artificial Sequence: Synthetic oligonucleotide
uccucaagcuccggauggu

SEQ ID NO: 610826 - RNA, 19 nt, Artificial Sequence
  Description of Artificial Sequence: Synthetic oligonucleotide
uggcgucaaugaaggguuc

SEQ ID NO: 610827 - RNA, 19 nt, Artificial Sequence
  Description of Artificial Sequence: Synthetic oligonucleotide
acgaauuacugagcacaaa

SEQ ID NO: 610828 - RNA, 19 nt, Artificial Sequence
  Description of Artificial Sequence: Synthetic oligonucleotide
agagccaacgguacuucua

SEQ ID NO: 610829 - RNA, 19 nt, Artificial Sequence
  Description of Artificial Sequence: Synthetic oligonucleotide
aucuccguggguggcggug

SEQ ID NO: 610830 - RNA, 19 nt, Artificial Sequence
  Description of Artificial Sequence: Synthetic oligonucleotide
ccaacgguacuucuaggca

SEQ ID NO: 610831 - RNA, 19 nt, Artificial Sequence
  Description of Artificial Sequence: Synthetic oligonucleotide
gcguacugcaugccaauga

SEQ ID NO: 610832 - RNA, 19 nt, Artificial Sequence
  Description of Artificial Sequence: Synthetic oligonucleotide
acggcaguccugguucucu

SEQ ID NO: 610833 - RNA, 19 nt, Artificial Sequence
  Description of Artificial Sequence: Synthetic oligonucleotide
gcuguuauagcggcaugca

SEQ ID NO: 610834 - RNA, 19 nt, Artificial Sequence
  Description of Artificial Sequence: Synthetic oligonucleotide
gguggggccgcccugccuc

SEQ ID NO: 610835 - RNA, 19 nt, Artificial Sequence
  Description of Artificial Sequence: Synthetic oligonucleotide
uccacagcguagguuccau

SEQ ID NO: 610836 - RNA, 19 nt, Artificial Sequence
  Description of Artificial Sequence: Synthetic oligonucleotide
agcguagguuccauccgca

SEQ ID NO: 610837 - RNA, 19 nt, Artificial Sequence
  Description of Artificial Sequence: Synthetic oligonucleotide
ggauaguaugucuguucaa

SEQ ID NO: 610838 - RNA, 19 nt, Artificial Sequence
  Description of Artificial Sequence: Synthetic oligonucleotide
cauggaacauugccaccaa

SEQ ID NO: 610839 - RNA, 19 nt, Artificial Sequence
  Description of Artificial Sequence: Synthetic oligonucleotide
ccaugccugagugagcaug

SEQ ID NO: 610840 - RNA, 19 nt, Artificial Sequence
  Description of Artificial Sequence: Synthetic oligonucleotide
ucucggcuuuggcuucauc

SEQ ID NO: 610841 - RNA, 19 nt, Artificial Sequence
  Description of Artificial Sequence: Synthetic oligonucleotide
guccgguuccuuaagugcu

SEQ ID NO: 610842 - RNA, 19 nt, Artificial Sequence
  Description of Artificial Sequence: Synthetic oligonucleotide
gcuaaucugaaaagaggcu

SEQ ID NO: 610843 - RNA, 19 nt, Artificial Sequence
  Description of Artificial Sequence: Synthetic oligonucleotide
gaucggugaugaguugucu

SEQ ID NO: 610844 - RNA, 19 nt, Artificial Sequence
  Description of Artificial Sequence: Synthetic oligonucleotide
gcggcaugcauucucuucu

SEQ ID NO: 610845 - RNA, 19 nt, Artificial Sequence
  Description of Artificial Sequence: Synthetic oligonucleotide
cagagauccuuggcuucac

SEQ ID NO: 610846 - RNA, 19 nt, Artificial Sequence
  Description of Artificial Sequence: Synthetic oligonucleotide
gagccgacguggaggcagc

SEQ ID NO: 610847 - RNA, 19 nt, Artificial Sequence
  Description of Artificial Sequence: Synthetic oligonucleotide
gcgucaaugaaggguucug

SEQ ID NO: 610848 - RNA, 19 nt, Artificial Sequence
  Description of Artificial Sequence: Synthetic oligonucleotide
uccauccgcaugggccacc

SEQ ID NO: 610849 - RNA, 19 nt, Artificial Sequence
  Description of Artificial Sequence: Synthetic oligonucleotide
cccggauaucauacuuggc

SEQ ID NO: 610850 - RNA, 19 nt, Artificial Sequence
  Description of Artificial Sequence: Synthetic oligonucleotide
gacugcgacuugcugugau

SEQ ID NO: 610851 - RNA, 19 nt, Artificial Sequence
  Description of Artificial Sequence: Synthetic oligonucleotide
ccgaggggagccgacgugg

SEQ ID NO: 610852 - RNA, 19 nt, Artificial Sequence
  Description of Artificial Sequence: Synthetic oligonucleotide
ccaaaugcaugcugucgga

SEQ ID NO: 610853 - RNA, 19 nt, Artificial Sequence
  Description of Artificial Sequence: Synthetic oligonucleotide
ggcgcccucguguaucuga

SEQ ID NO: 610854 - RNA, 19 nt, Artificial Sequence
  Description of Artificial Sequence: Synthetic oligonucleotide
gggaccacacaugucaagu

SEQ ID NO: 610855 - RNA, 19 nt, Artificial Sequence
  Description of Artificial Sequence: Synthetic oligonucleotide
ugcauuccuugggguugcc

SEQ ID NO: 610856 - RNA, 19 nt, Artificial Sequence
  Description of Artificial Sequence: Synthetic oligonucleotide
uuccauccgcaugggccac

SEQ ID NO: 610857 - RNA, 19 nt, Artificial Sequence
  Description of Artificial Sequence: Synthetic oligonucleotide
gcccaugccugagugagca

SEQ ID NO: 610858 - RNA, 19 nt, Artificial Sequence
  Description of Artificial Sequence: Synthetic oligonucleotide
uagcggcaugcauucucuu

SEQ ID NO: 610859 - RNA, 19 nt, Artificial Sequence
  Description of Artificial Sequence: Synthetic oligonucleotide
cuguucaaugagugggaau

SEQ ID NO: 610860 - RNA, 19 nt, Artificial Sequence
  Description of Artificial Sequence: Synthetic oligonucleotide
ccgccaugccaaaugcaug

SEQ ID NO: 610861 - RNA, 19 nt, Artificial Sequence
  Description of Artificial Sequence: Synthetic oligonucleotide
ggucugacauggcgaucug

SEQ ID NO: 610862 - RNA, 19 nt, Artificial Sequence
  Description of Artificial Sequence: Synthetic oligonucleotide
cuguuauagcggcaugcau

SEQ ID NO: 610863 - RNA, 19 nt, Artificial Sequence
  Description of Artificial Sequence: Synthetic oligonucleotide
ccugcguacugcaugccaa

SEQ ID NO: 610864 - RNA, 19 nt, Artificial Sequence
  Description of Artificial Sequence: Synthetic oligonucleotide
gguaggcaccugcccugag

SEQ ID NO: 610865 - RNA, 19 nt, Artificial Sequence
  Description of Artificial Sequence: Synthetic oligonucleotide
cugggugguuuaagggucu

SEQ ID NO: 610866 - RNA, 19 nt, Artificial Sequence
  Description of Artificial Sequence: Synthetic oligonucleotide
agaccaucaccuggucauu

SEQ ID NO: 610867 - RNA, 19 nt, Artificial Sequence
  Description of Artificial Sequence: Synthetic oligonucleotide
cuccggauggucucggcuu

SEQ ID NO: 610868 - RNA, 19 nt, Artificial Sequence
  Description of Artificial Sequence: Synthetic oligonucleotide
agggugcaucuccgugggu

SEQ ID NO: 610869 - RNA, 19 nt, Artificial Sequence
  Description of Artificial Sequence: Synthetic oligonucleotide
cauccgcaugggccaccag

SEQ ID NO: 610870 - RNA, 19 nt, Artificial Sequence
  Description of Artificial Sequence: Synthetic oligonucleotide
ggaguccgguuccuuaagu

SEQ ID NO: 610871 - RNA, 19 nt, Artificial Sequence
  Description of Artificial Sequence: Synthetic oligonucleotide
cuguggcauagguuugggu

SEQ ID NO: 610872 - RNA, 19 nt, Artificial Sequence
  Description of Artificial Sequence: Synthetic oligonucleotide
ccgguuccuuaagugcucc

SEQ ID NO: 610873 - RNA, 19 nt, Artificial Sequence
  Description of Artificial Sequence: Synthetic oligonucleotide
caaaugcaugcugucggau

SEQ ID NO: 610874 - RNA, 19 nt, Artificial Sequence
  Description of Artificial Sequence: Synthetic oligonucleotide
ccggacaaccuuugugcca

SEQ ID NO: 610875 - RNA, 19 nt, Artificial Sequence
  Description of Artificial Sequence: Synthetic oligonucleotide
caucucagagcaggcgucu

SEQ ID NO: 610876 - RNA, 19 nt, Artificial Sequence
  Description of Artificial Sequence: Synthetic oligonucleotide
cacuagcaauguccuggaa

SEQ ID NO: 610877 - RNA, 19 nt, Artificial Sequence
  Description of Artificial Sequence: Synthetic oligonucleotide
cuagggaggccugcguacu

SEQ ID NO: 610878 - RNA, 19 nt, Artificial Sequence
  Description of Artificial Sequence: Synthetic oligonucleotide
guacuccauuacagagauc

SEQ ID NO: 610879 - RNA, 19 nt, Artificial Sequence
  Description of Artificial Sequence: Synthetic oligonucleotide
cuacagggaaacagcccuu

SEQ ID NO: 610880 - RNA, 19 nt, Artificial Sequence
  Description of Artificial Sequence: Synthetic oligonucleotide
ggcgaucugcuccagcauu

SEQ ID NO: 610881 - RNA, 19 nt, Artificial Sequence
  Description of Artificial Sequence: Synthetic oligonucleotide
cugcguacugcaugccaau

SEQ ID NO: 610882 - RNA, 19 nt, Artificial Sequence
  Description of Artificial Sequence: Synthetic oligonucleotide
cacggcaguccugguucuc

SEQ ID NO: 610883 - RNA, 19 nt, Artificial Sequence
  Description of Artificial Sequence: Synthetic oligonucleotide
gcuccggauggucucggcu

SEQ ID NO: 610884 - RNA, 19 nt, Artificial Sequence
  Description of Artificial Sequence: Synthetic oligonucleotide
ggcgguggggccgcccugc

SEQ ID NO: 610885 - RNA, 19 nt, Artificial Sequence
  Description of Artificial Sequence: Synthetic oligonucleotide
gcaccuugccuggggcugc

SEQ ID NO: 610886 - RNA, 19 nt, Artificial Sequence
  Description of Artificial Sequence: Synthetic oligonucleotide
ggcgucaaugaaggguucu

SEQ ID NO: 610887 - RNA, 19 nt, Artificial Sequence
  Description of Artificial Sequence: Synthetic oligonucleotide
cugcuaggaguacuccauu

SEQ ID NO: 610888 - RNA, 19 nt, Artificial Sequence
  Description of Artificial Sequence: Synthetic oligonucleotide
ccauuccggagcaccugca

SEQ ID NO: 610889 - RNA, 19 nt, Artificial Sequence
  Description of Artificial Sequence: Synthetic oligonucleotide
gcacaaagucuggucugaa

SEQ ID NO: 610890 - RNA, 19 nt, Artificial Sequence
  Description of Artificial Sequence: Synthetic oligonucleotide
gggugucacaggacaccca

SEQ ID NO: 610891 - RNA, 19 nt, Artificial Sequence
  Description of Artificial Sequence: Synthetic oligonucleotide
gccgacguggaggcagcac

SEQ ID NO: 610892 - RNA, 19 nt, Artificial Sequence
  Description of Artificial Sequence: Synthetic oligonucleotide
ggacaguuagcugguucau

SEQ ID NO: 610893 - RNA, 19 nt, Artificial Sequence
  Description of Artificial Sequence: Synthetic oligonucleotide
ccagagcuuguaccggucu

SEQ ID NO: 610894 - RNA, 19 nt, Artificial Sequence
  Description of Artificial Sequence: Synthetic oligonucleotide
ggccugcguacugcaugcc

SEQ ID NO: 610895 - RNA, 19 nt, Artificial Sequence
  Description of Artificial Sequence: Synthetic oligonucleotide
aggcgucuacccagagcuu

SEQ ID NO: 610896 - RNA, 19 nt, Artificial Sequence
  Description of Artificial Sequence: Synthetic oligonucleotide
gguggcgguggggccgccc

SEQ ID NO: 610897 - RNA, 19 nt, Artificial Sequence
  Description of Artificial Sequence: Synthetic oligonucleotide
ccaccaaacauggcagacu

SEQ ID NO: 610898 - RNA, 19 nt, Artificial Sequence
  Description of Artificial Sequence: Synthetic oligonucleotide
gcguagguuccauccgcau

SEQ ID NO: 610899 - RNA, 19 nt, Artificial Sequence
  Description of Artificial Sequence: Synthetic oligonucleotide
ccgggcgcccucguguauc

SEQ ID NO: 610900 - RNA, 19 nt, Artificial Sequence
  Description of Artificial Sequence: Synthetic oligonucleotide
gcgcccucguguaucugaa

SEQ ID NO: 610901 - RNA, 19 nt, Artificial Sequence
  Description of Artificial Sequence: Synthetic oligonucleotide
ccggauggucucggcuuug

SEQ ID NO: 610902 - RNA, 19 nt, Artificial Sequence
  Description of Artificial Sequence: Synthetic oligonucleotide
gcgucuacccagagcuugu

SEQ ID NO: 610903 - RNA, 19 nt, Artificial Sequence
  Description of Artificial Sequence: Synthetic oligonucleotide
gcugucggaugagcacaaa

SEQ ID NO: 610904 - RNA, 19 nt, Artificial Sequence
  Description of Artificial Sequence: Synthetic oligonucleotide
cgaggggagccgacgugga

SEQ ID NO: 610905 - RNA, 19 nt, Artificial Sequence
  Description of Artificial Sequence: Synthetic oligonucleotide
cggacaaccuuugugccau

SEQ ID NO: 610906 - RNA, 19 nt, Artificial Sequence
  Description of Artificial Sequence: Synthetic oligonucleotide
ccucucaggguaggcaccu

SEQ ID NO: 610907 - RNA, 19 nt, Artificial Sequence
  Description of Artificial Sequence: Synthetic oligonucleotide
ccggucugacauggcgauc

SEQ ID NO: 610908 - RNA, 19 nt, Artificial Sequence
  Description of Artificial Sequence: Synthetic oligonucleotide
cggcaugcauucucuucua

SEQ ID NO: 610909 - RNA, 19 nt, Artificial Sequence
  Description of Artificial Sequence: Synthetic oligonucleotide
gucucggcuuuggcuucau

SEQ ID NO: 610910 - RNA, 19 nt, Artificial Sequence
  Description of Artificial Sequence: Synthetic oligonucleotide
ggacaaccuuugugccauu

SEQ ID NO: 610911 - RNA, 19 nt, Artificial Sequence
  Description of Artificial Sequence: Synthetic oligonucleotide
ccgcugagguggggucuug

SEQ ID NO: 610912 - RNA, 19 nt, Artificial Sequence
  Description of Artificial Sequence: Synthetic oligonucleotide
cgucuacccagagcuugua

SEQ ID NO: 610913 - RNA, 19 nt, Artificial Sequence
  Description of Artificial Sequence: Synthetic oligonucleotide
cccaugccugagugagcau

SEQ ID NO: 610914 - RNA, 19 nt, Artificial Sequence
  Description of Artificial Sequence: Synthetic oligonucleotide
aaauugaucucauucaccu

SEQ ID NO: 610915 - RNA, 19 nt, Artificial Sequence
  Description of Artificial Sequence: Synthetic oligonucleotide
aauaugaggguggagcacc

SEQ ID NO: 610916 - RNA, 19 nt, Artificial Sequence
  Description of Artificial Sequence: Synthetic oligonucleotide
ucuguauacaugcuugagg

SEQ ID NO: 610917 - RNA, 19 nt, Artificial Sequence
  Description of Artificial Sequence: Synthetic oligonucleotide
aauccgagagaccuucugc

SEQ ID NO: 610918 - RNA, 19 nt, Artificial Sequence
  Description of Artificial Sequence: Synthetic oligonucleotide
aucgucauuacucauguuc

SEQ ID NO: 610919 - RNA, 19 nt, Artificial Sequence
  Description of Artificial Sequence: Synthetic oligonucleotide
auuuuguugacaguauggc

SEQ ID NO: 610920 - RNA, 19 nt, Artificial Sequence
  Description of Artificial Sequence: Synthetic oligonucleotide
uuuuguugacaguauggcg

SEQ ID NO: 610921 - RNA, 19 nt, Artificial Sequence
  Description of Artificial Sequence: Synthetic oligonucleotide
aagaaguuauacuuuucca

SEQ ID NO: 610922 - RNA, 19 nt, Artificial Sequence
  Description of Artificial Sequence: Synthetic oligonucleotide
auaucuccugguucaaugc

SEQ ID NO: 610923 - RNA, 19 nt, Artificial Sequence
  Description of Artificial Sequence: Synthetic oligonucleotide
guauacaugcuugaggagg

SEQ ID NO: 610924 - RNA, 19 nt, Artificial Sequence
  Description of Artificial Sequence: Synthetic oligonucleotide
acgaagaccgcucaauccg

SEQ ID NO: 610925 - RNA, 19 nt, Artificial Sequence
  Description of Artificial Sequence: Synthetic oligonucleotide
auggaugccuacuagaggu

SEQ ID NO: 610926 - RNA, 19 nt, Artificial Sequence
  Description of Artificial Sequence: Synthetic oligonucleotide
uaaauaugaggguggagca

SEQ ID NO: 610927 - RNA, 19 nt, Artificial Sequence
  Description of Artificial Sequence: Synthetic oligonucleotide
ugguuuguguacaaucucc

SEQ ID NO: 610928 - RNA, 19 nt, Artificial Sequence
  Description of Artificial Sequence: Synthetic oligonucleotide
uguaacagcauaucuccug

SEQ ID NO: 610929 - RNA, 19 nt, Artificial Sequence
  Description of Artificial Sequence: Synthetic oligonucleotide
uuuacgauggcugccaugu

SEQ ID NO: 610930 - RNA, 19 nt, Artificial Sequence
  Description of Artificial Sequence: Synthetic oligonucleotide
agaaguuauacuuuuccau

SEQ ID NO: 610931 - RNA, 19 nt, Artificial Sequence
  Description of Artificial Sequence: Synthetic oligonucleotide
guaacagcauaucuccugg

SEQ ID NO: 610932 - RNA, 19 nt, Artificial Sequence
  Description of Artificial Sequence: Synthetic oligonucleotide
uguacaaucucccgaagua

SEQ ID NO: 610933 - RNA, 19 nt, Artificial Sequence
  Description of Artificial Sequence: Synthetic oligonucleotide
aaugcguccaucggcugcc

SEQ ID NO: 610934 - RNA, 19 nt, Artificial Sequence
  Description of Artificial Sequence: Synthetic oligonucleotide
gaaccuccaacccugauuc

SEQ ID NO: 610935 - RNA, 19 nt, Artificial Sequence
  Description of Artificial Sequence: Synthetic oligonucleotide
ucccgaaguacucggacgg

SEQ ID NO: 610936 - RNA, 19 nt, Artificial Sequence
  Description of Artificial Sequence: Synthetic oligonucleotide
aaauaugaggguggagcac

SEQ ID NO: 610937 - RNA, 19 nt, Artificial Sequence
  Description of Artificial Sequence: Synthetic oligonucleotide
uauagugggguaaaaucaa

SEQ ID NO: 610938 - RNA, 19 nt, Artificial Sequence
  Description of Artificial Sequence: Synthetic oligonucleotide
aaaggguuuggacggggag

SEQ ID NO: 610939 - RNA, 19 nt, Artificial Sequence
  Description of Artificial Sequence: Synthetic oligonucleotide
ucggcuccuaaauaugagg

SEQ ID NO: 610940 - RNA, 19 nt, Artificial Sequence
  Description of Artificial Sequence: Synthetic oligonucleotide
gaugcagccggcgucaggg

SEQ ID NO: 610941 - RNA, 19 nt, Artificial Sequence
  Description of Artificial Sequence: Synthetic oligonucleotide
aaccgacugauggagaaag

SEQ ID NO: 610942 - RNA, 19 nt, Artificial Sequence
  Description of Artificial Sequence: Synthetic oligonucleotide
aaguacucggacggcaucg

SEQ ID NO: 610943 - RNA, 19 nt, Artificial Sequence
  Description of Artificial Sequence: Synthetic oligonucleotide
uaaaaucaagaucucugua

SEQ ID NO: 610944 - RNA, 19 nt, Artificial Sequence
  Description of Artificial Sequence: Synthetic oligonucleotide
ugauuuggaguccccagcu

SEQ ID NO: 610945 - RNA, 19 nt, Artificial Sequence
  Description of Artificial Sequence: Synthetic oligonucleotide
cuccuaaauaugagggugg

SEQ ID NO: 610946 - RNA, 19 nt, Artificial Sequence
  Description of Artificial Sequence: Synthetic oligonucleotide
ugcccaagaaguuauacuu

SEQ ID NO: 610947 - RNA, 19 nt, Artificial Sequence
  Description of Artificial Sequence: Synthetic oligonucleotide
gacgaagaccgcucaaucc

SEQ ID NO: 610948 - RNA, 19 nt, Artificial Sequence
  Description of Artificial Sequence: Synthetic oligonucleotide
ucgugaagugacagguugg

SEQ ID NO: 610949 - RNA, 19 nt, Artificial Sequence
  Description of Artificial Sequence: Synthetic oligonucleotide
uuggcuacagucagaguga

SEQ ID NO: 610950 - RNA, 19 nt, Artificial Sequence
  Description of Artificial Sequence: Synthetic oligonucleotide
uagugggguaaaaucaaga

SEQ ID NO: 610951 - RNA, 19 nt, Artificial Sequence
  Description of Artificial Sequence: Synthetic oligonucleotide
ccuguaacagcauaucucc

SEQ ID NO: 610952 - RNA, 19 nt, Artificial Sequence
  Description of Artificial Sequence: Synthetic oligonucleotide
agccacguggacuuggguc

SEQ ID NO: 610953 - RNA, 19 nt, Artificial Sequence
  Description of Artificial Sequence: Synthetic oligonucleotide
aguauggcggaugaaacca

SEQ ID NO: 610954 - RNA, 19 nt, Artificial Sequence
  Description of Artificial Sequence: Synthetic oligonucleotide
guauagugggguaaaauca

SEQ ID NO: 610955 - RNA, 19 nt, Artificial Sequence
  Description of Artificial Sequence: Synthetic oligonucleotide
agagacauaguggagucug

SEQ ID NO: 610956 - RNA, 19 nt, Artificial Sequence
  Description of Artificial Sequence: Synthetic oligonucleotide
guucaaugcguccaucggc

SEQ ID NO: 610957 - RNA, 19 nt, Artificial Sequence
  Description of Artificial Sequence: Synthetic oligonucleotide
uucaccuguaacagcauau

SEQ ID NO: 610958 - RNA, 19 nt, Artificial Sequence
  Description of Artificial Sequence: Synthetic oligonucleotide
gucgugaagugacagguug

SEQ ID NO: 610959 - RNA, 19 nt, Artificial Sequence
  Description of Artificial Sequence: Synthetic oligonucleotide
caaggagucagucuccgug

SEQ ID NO: 610960 - RNA, 19 nt, Artificial Sequence
  Description of Artificial Sequence: Synthetic oligonucleotide
ugaggguggagcaccagga

SEQ ID NO: 610961 - RNA, 19 nt, Artificial Sequence
  Description of Artificial Sequence: Synthetic oligonucleotide
aaagggaugcagccggcgu

SEQ ID NO: 610962 - RNA, 19 nt, Artificial Sequence
  Description of Artificial Sequence: Synthetic oligonucleotide
ggacuaaagccauggacgg

SEQ ID NO: 610963 - RNA, 19 nt, Artificial Sequence
  Description of Artificial Sequence: Synthetic oligonucleotide
agaguaacugugaugauau

SEQ ID NO: 610964 - RNA, 19 nt, Artificial Sequence
  Description of Artificial Sequence: Synthetic oligonucleotide
ucguugggcagacaccaag

SEQ ID NO: 610965 - RNA, 19 nt, Artificial Sequence
  Description of Artificial Sequence: Synthetic oligonucleotide
aacagcauaucuccugguu

SEQ ID NO: 610966 - RNA, 19 nt, Artificial Sequence
  Description of Artificial Sequence: Synthetic oligonucleotide
uacucggacggcaucguca

SEQ ID NO: 610967 - RNA, 19 nt, Artificial Sequence
  Description of Artificial Sequence: Synthetic oligonucleotide
ugagcgcucacuuggcgcc

SEQ ID NO: 610968 - RNA, 19 nt, Artificial Sequence
  Description of Artificial Sequence: Synthetic oligonucleotide
auugagccgggcugcgugc

SEQ ID NO: 610969 - RNA, 19 nt, Artificial Sequence
  Description of Artificial Sequence: Synthetic oligonucleotide
uacugguaagggaaagcca

SEQ ID NO: 610970 - RNA, 19 nt, Artificial Sequence
  Description of Artificial Sequence: Synthetic oligonucleotide
uauggcggaugaaaccagc

SEQ ID NO: 610971 - RNA, 19 nt, Artificial Sequence
  Description of Artificial Sequence: Synthetic oligonucleotide
gacggcaucgucauuacuc

SEQ ID NO: 610972 - RNA, 19 nt, Artificial Sequence
  Description of Artificial Sequence: Synthetic oligonucleotide
ugugcucgcuggcugcugg

SEQ ID NO: 610973 - RNA, 19 nt, Artificial Sequence
  Description of Artificial Sequence: Synthetic oligonucleotide
ugaaggacgaagaccgcuc

SEQ ID NO: 610974 - RNA, 19 nt, Artificial Sequence
  Description of Artificial Sequence: Synthetic oligonucleotide
cucauaaggguagaugaac

SEQ ID NO: 610975 - RNA, 19 nt, Artificial Sequence
  Description of Artificial Sequence: Synthetic oligonucleotide
accgcucaauccgagagac

SEQ ID NO: 610976 - RNA, 19 nt, Artificial Sequence
  Description of Artificial Sequence: Synthetic oligonucleotide
uuaggcgcgaggcacugcu

SEQ ID NO: 610977 - RNA, 19 nt, Artificial Sequence
  Description of Artificial Sequence: Synthetic oligonucleotide
ugcuggucagcgaauggug

SEQ ID NO: 610978 - RNA, 19 nt, Artificial Sequence
  Description of Artificial Sequence: Synthetic oligonucleotide
guaaugugaagcagccacg

SEQ ID NO: 610979 - RNA, 19 nt, Artificial Sequence
  Description of Artificial Sequence: Synthetic oligonucleotide
caguauggcggaugaaacc

SEQ ID NO: 610980 - RNA, 19 nt, Artificial Sequence
  Description of Artificial Sequence: Synthetic oligonucleotide
uccgcgguaaugugaagca

SEQ ID NO: 610981 - RNA, 19 nt, Artificial Sequence
  Description of Artificial Sequence: Synthetic oligonucleotide
cuggccgucaguuccgggg

SEQ ID NO: 610982 - RNA, 19 nt, Artificial Sequence
  Description of Artificial Sequence: Synthetic oligonucleotide
agcauggaugccuacuaga

SEQ ID NO: 610983 - RNA, 19 nt, Artificial Sequence
  Description of Artificial Sequence: Synthetic oligonucleotide
gacggggcaguuaggaagg

SEQ ID NO: 610984 - RNA, 19 nt, Artificial Sequence
  Description of Artificial Sequence: Synthetic oligonucleotide
uguguugacugcuggcgcu

SEQ ID NO: 610985 - RNA, 19 nt, Artificial Sequence
  Description of Artificial Sequence: Synthetic oligonucleotide
uuuuacgauggcugccaug

SEQ ID NO: 610986 - RNA, 19 nt, Artificial Sequence
  Description of Artificial Sequence: Synthetic oligonucleotide
gaugcccaagaaguuauac

SEQ ID NO: 610987 - RNA, 19 nt, Artificial Sequence
  Description of Artificial Sequence: Synthetic oligonucleotide
agaaccgacugauggagaa

SEQ ID NO: 610988 - RNA, 19 nt, Artificial Sequence
  Description of Artificial Sequence: Synthetic oligonucleotide
guccgugaauccuuccacg

SEQ ID NO: 610989 - RNA, 19 nt, Artificial Sequence
  Description of Artificial Sequence: Synthetic oligonucleotide
ucgcaguuccauugagccg

SEQ ID NO: 610990 - RNA, 19 nt, Artificial Sequence
  Description of Artificial Sequence: Synthetic oligonucleotide
gacggggacgcucucguug

SEQ ID NO: 610991 - RNA, 19 nt, Artificial Sequence
  Description of Artificial Sequence: Synthetic oligonucleotide
gacaguauggcggaugaaa

SEQ ID NO: 610992 - RNA, 19 nt, Artificial Sequence
  Description of Artificial Sequence: Synthetic oligonucleotide
uccgugaauccuuccacgu

SEQ ID NO: 610993 - RNA, 19 nt, Artificial Sequence
  Description of Artificial Sequence: Synthetic oligonucleotide
ugcggcaaaggagccaggg

SEQ ID NO: 610994 - RNA, 19 nt, Artificial Sequence
  Description of Artificial Sequence: Synthetic oligonucleotide
ggacggggcaguuaggaag

SEQ ID NO: 610995 - RNA, 19 nt, Artificial Sequence
  Description of Artificial Sequence: Synthetic oligonucleotide
agacccaggcugcuggguc

SEQ ID NO: 610996 - RNA, 19 nt, Artificial Sequence
  Description of Artificial Sequence: Synthetic oligonucleotide
cugagcgcucacuuggcgc

SEQ ID NO: 610997 - RNA, 19 nt, Artificial Sequence
  Description of Artificial Sequence: Synthetic oligonucleotide
ucacuccgcgguaauguga

SEQ ID NO: 610998 - RNA, 19 nt, Artificial Sequence
  Description of Artificial Sequence: Synthetic oligonucleotide
ugaaccugcugguggaguc

SEQ ID NO: 610999 - RNA, 19 nt, Artificial Sequence
  Description of Artificial Sequence: Synthetic oligonucleotide
cauagcucgggugugugug

SEQ ID NO: 611000 - RNA, 19 nt, Artificial Sequence
  Description of Artificial Sequence: Synthetic oligonucleotide
caucuaggcguucuguguc

SEQ ID NO: 611001 - RNA, 19 nt, Artificial Sequence
  Description of Artificial Sequence: Synthetic oligonucleotide
ucauuaggcgcgaggcacu

SEQ ID NO: 611002 - RNA, 19 nt, Artificial Sequence
  Description of Artificial Sequence: Synthetic oligonucleotide
gguaagggaaagccauagg

SEQ ID NO: 611003 - RNA, 19 nt, Artificial Sequence
  Description of Artificial Sequence: Synthetic oligonucleotide
uccuaaauaugagggugga

SEQ ID NO: 611004 - RNA, 19 nt, Artificial Sequence
  Description of Artificial Sequence: Synthetic oligonucleotide
ucccguggaccucucagac

SEQ ID NO: 611005 - RNA, 19 nt, Artificial Sequence
  Description of Artificial Sequence: Synthetic oligonucleotide
ucagcgaaugguggcugcg

SEQ ID NO: 611006 - RNA, 19 nt, Artificial Sequence
  Description of Artificial Sequence: Synthetic oligonucleotide
cauggucgugaagugacag

SEQ ID NO: 611007 - RNA, 19 nt, Artificial Sequence
  Description of Artificial Sequence: Synthetic oligonucleotide
uggaugccuacuagaggug

SEQ ID NO: 611008 - RNA, 19 nt, Artificial Sequence
  Description of Artificial Sequence: Synthetic oligonucleotide
uaaagccauggacggggca

SEQ ID NO: 611009 - RNA, 19 nt, Artificial Sequence
  Description of Artificial Sequence: Synthetic oligonucleotide
agcuguagggugaaggacu

SEQ ID NO: 611010 - RNA, 19 nt, Artificial Sequence
  Description of Artificial Sequence: Synthetic oligonucleotide
uggagucguccucaucuga

SEQ ID NO: 611011 - RNA, 19 nt, Artificial Sequence
  Description of Artificial Sequence: Synthetic oligonucleotide
cuaaagccauggacggggc

SEQ ID NO: 611012 - RNA, 19 nt, Artificial Sequence
  Description of Artificial Sequence: Synthetic oligonucleotide
ucauggucgugaagugaca

SEQ ID NO: 611013 - RNA, 19 nt, Artificial Sequence
  Description of Artificial Sequence: Synthetic oligonucleotide
cuccgcgguaaugugaagc

SEQ ID NO: 611014 - RNA, 19 nt, Artificial Sequence
  Description of Artificial Sequence: Synthetic oligonucleotide
cucuguauacaugcuugag

SEQ ID NO: 611015 - RNA, 19 nt, Artificial Sequence
  Description of Artificial Sequence: Synthetic oligonucleotide
agucuccgugucauugucc

SEQ ID NO: 611016 - RNA, 19 nt, Artificial Sequence
  Description of Artificial Sequence: Synthetic oligonucleotide
gucuccgugucauugucca

SEQ ID NO: 611017 - RNA, 19 nt, Artificial Sequence
  Description of Artificial Sequence: Synthetic oligonucleotide
ggccugagcgcucacuugg

SEQ ID NO: 611018 - RNA, 19 nt, Artificial Sequence
  Description of Artificial Sequence: Synthetic oligonucleotide
cucacugcucauaagggua

SEQ ID NO: 611019 - RNA, 19 nt, Artificial Sequence
  Description of Artificial Sequence: Synthetic oligonucleotide
ucaccuguaacagcauauc

SEQ ID NO: 611020 - RNA, 19 nt, Artificial Sequence
  Description of Artificial Sequence: Synthetic oligonucleotide
ugaauccuuccacguugug

SEQ ID NO: 611021 - RNA, 19 nt, Artificial Sequence
  Description of Artificial Sequence: Synthetic oligonucleotide
agaagcugguagucuccag

SEQ ID NO: 611022 - RNA, 19 nt, Artificial Sequence
  Description of Artificial Sequence: Synthetic oligonucleotide
gaaggacuaaagccaugga

SEQ ID NO: 611023 - RNA, 19 nt, Artificial Sequence
  Description of Artificial Sequence: Synthetic oligonucleotide
ucggacggcaucgucauua

SEQ ID NO: 611024 - RNA, 19 nt, Artificial Sequence
  Description of Artificial Sequence: Synthetic oligonucleotide
uaacagcauaucuccuggu

SEQ ID NO: 611025 - RNA, 19 nt, Artificial Sequence
  Description of Artificial Sequence: Synthetic oligonucleotide
caauccgagagaccuucug

SEQ ID NO: 611026 - RNA, 19 nt, Artificial Sequence
  Description of Artificial Sequence: Synthetic oligonucleotide
ucgaugggccggaugggcu

SEQ ID NO: 611027 - RNA, 19 nt, Artificial Sequence
  Description of Artificial Sequence: Synthetic oligonucleotide
aucccuccgacggggacgc

SEQ ID NO: 611028 - RNA, 19 nt, Artificial Sequence
  Description of Artificial Sequence: Synthetic oligonucleotide
aucuaggcguucuguguca

SEQ ID NO: 611029 - RNA, 19 nt, Artificial Sequence
  Description of Artificial Sequence: Synthetic oligonucleotide
gaagcagccacguggacuu

SEQ ID NO: 611030 - RNA, 19 nt, Artificial Sequence
  Description of Artificial Sequence: Synthetic oligonucleotide
aaggacgaagaccgcucaa

SEQ ID NO: 611031 - RNA, 19 nt, Artificial Sequence
  Description of Artificial Sequence: Synthetic oligonucleotide
agguggcuacagcuguagg

SEQ ID NO: 611032 - RNA, 19 nt, Artificial Sequence
  Description of Artificial Sequence: Synthetic oligonucleotide
ucuaggcguucugugucag

SEQ ID NO: 611033 - RNA, 19 nt, Artificial Sequence
  Description of Artificial Sequence: Synthetic oligonucleotide
augcggaggugguggguac

SEQ ID NO: 611034 - RNA, 19 nt, Artificial Sequence
  Description of Artificial Sequence: Synthetic oligonucleotide
ggauuguagggaugcggag

SEQ ID NO: 611035 - RNA, 19 nt, Artificial Sequence
  Description of Artificial Sequence: Synthetic oligonucleotide
agacagcauggaugccuac

SEQ ID NO: 611036 - RNA, 19 nt, Artificial Sequence
  Description of Artificial Sequence: Synthetic oligonucleotide
gcucaugccauaggcaggg

SEQ ID NO: 611037 - RNA, 19 nt, Artificial Sequence
  Description of Artificial Sequence: Synthetic oligonucleotide
gguuuggacggggaguggg

SEQ ID NO: 611038 - RNA, 19 nt, Artificial Sequence
  Description of Artificial Sequence: Synthetic oligonucleotide
ugcugggucgaugggccgg

SEQ ID NO: 611039 - RNA, 19 nt, Artificial Sequence
  Description of Artificial Sequence: Synthetic oligonucleotide
ggaugccuacuagaggugg

SEQ ID NO: 611040 - RNA, 19 nt, Artificial Sequence
  Description of Artificial Sequence: Synthetic oligonucleotide
caucggcugccacagcccc

SEQ ID NO: 611041 - RNA, 19 nt, Artificial Sequence
  Description of Artificial Sequence: Synthetic oligonucleotide
cuacuagagguggcuacag

SEQ ID NO: 611042 - RNA, 19 nt, Artificial Sequence
  Description of Artificial Sequence: Synthetic oligonucleotide
agucaucuaggcguucugu

SEQ ID NO: 611043 - RNA, 19 nt, Artificial Sequence
  Description of Artificial Sequence: Synthetic oligonucleotide
agcgaaugguggcugcggu

SEQ ID NO: 611044 - RNA, 19 nt, Artificial Sequence
  Description of Artificial Sequence: Synthetic oligonucleotide
cucgcucguugcuuuggcc

SEQ ID NO: 611045 - RNA, 19 nt, Artificial Sequence
  Description of Artificial Sequence: Synthetic oligonucleotide
uucccauugccaugcggaa

SEQ ID NO: 611046 - RNA, 19 nt, Artificial Sequence
  Description of Artificial Sequence: Synthetic oligonucleotide
cggcuccuaaauaugaggg

SEQ ID NO: 611047 - RNA, 19 nt, Artificial Sequence
  Description of Artificial Sequence: Synthetic oligonucleotide
guaggcaaaaggguuugga

SEQ ID NO: 611048 - RNA, 19 nt, Artificial Sequence
  Description of Artificial Sequence: Synthetic oligonucleotide
cagcauggaugccuacuag

SEQ ID NO: 611049 - RNA, 19 nt, Artificial Sequence
  Description of Artificial Sequence: Synthetic oligonucleotide
acucggacggcaucgucau

SEQ ID NO: 611050 - RNA, 19 nt, Artificial Sequence
  Description of Artificial Sequence: Synthetic oligonucleotide
cucacuccgcgguaaugug

SEQ ID NO: 611051 - RNA, 19 nt, Artificial Sequence
  Description of Artificial Sequence: Synthetic oligonucleotide
agguaggcaaaaggguuug

SEQ ID NO: 611052 - RNA, 19 nt, Artificial Sequence
  Description of Artificial Sequence: Synthetic oligonucleotide
cuaggcguucugugucagg

SEQ ID NO: 611053 - RNA, 19 nt, Artificial Sequence
  Description of Artificial Sequence: Synthetic oligonucleotide
uggcggaugaaaccagcuu

SEQ ID NO: 611054 - RNA, 19 nt, Artificial Sequence
  Description of Artificial Sequence: Synthetic oligonucleotide
ccgacugauggagaaaggg

SEQ ID NO: 611055 - RNA, 19 nt, Artificial Sequence
  Description of Artificial Sequence: Synthetic oligonucleotide
gaagugacagguuggccau

SEQ ID NO: 611056 - RNA, 19 nt, Artificial Sequence
  Description of Artificial Sequence: Synthetic oligonucleotide
aagaaccgacugauggaga

SEQ ID NO: 611057 - RNA, 19 nt, Artificial Sequence
  Description of Artificial Sequence: Synthetic oligonucleotide
gccggaugggcucacuccg

SEQ ID NO: 611058 - RNA, 19 nt, Artificial Sequence
  Description of Artificial Sequence: Synthetic oligonucleotide
ucuccgugucauuguccag

SEQ ID NO: 611059 - RNA, 19 nt, Artificial Sequence
  Description of Artificial Sequence: Synthetic oligonucleotide
ccguggaccucucagacug

SEQ ID NO: 611060 - RNA, 19 nt, Artificial Sequence
  Description of Artificial Sequence: Synthetic oligonucleotide
gucggcuccuaaauaugag

SEQ ID NO: 611061 - RNA, 19 nt, Artificial Sequence
  Description of Artificial Sequence: Synthetic oligonucleotide
guauggcggaugaaaccag

SEQ ID NO: 611062 - RNA, 19 nt, Artificial Sequence
  Description of Artificial Sequence: Synthetic oligonucleotide
auuaggcgcgaggcacugc

SEQ ID NO: 611063 - RNA, 19 nt, Artificial Sequence
  Description of Artificial Sequence: Synthetic oligonucleotide
uggguccaagaagggacag

SEQ ID NO: 611064 - RNA, 19 nt, Artificial Sequence
  Description of Artificial Sequence: Synthetic oligonucleotide
gcucucguugggcagacac

SEQ ID NO: 611065 - RNA, 19 nt, Artificial Sequence
  Description of Artificial Sequence: Synthetic oligonucleotide
ugccugucauggcugcagu

SEQ ID NO: 611066 - RNA, 19 nt, Artificial Sequence
  Description of Artificial Sequence: Synthetic oligonucleotide
ggcaucgucauuacucaug

SEQ ID NO: 611067 - RNA, 19 nt, Artificial Sequence
  Description of Artificial Sequence: Synthetic oligonucleotide
cgugaauccuuccacguug

SEQ ID NO: 611068 - RNA, 19 nt, Artificial Sequence
  Description of Artificial Sequence: Synthetic oligonucleotide
gucagcgaaugguggcugc

SEQ ID NO: 611069 - RNA, 19 nt, Artificial Sequence
  Description of Artificial Sequence: Synthetic oligonucleotide
ugcuggcguacuuccgggc

SEQ ID NO: 611070 - RNA, 19 nt, Artificial Sequence
  Description of Artificial Sequence: Synthetic oligonucleotide
gguccgugaauccuuccac

SEQ ID NO: 611071 - RNA, 19 nt, Artificial Sequence
  Description of Artificial Sequence: Synthetic oligonucleotide
agcagccacguggacuugg

SEQ ID NO: 611072 - RNA, 19 nt, Artificial Sequence
  Description of Artificial Sequence: Synthetic oligonucleotide
ggugauggaggagcuagug

SEQ ID NO: 611073 - RNA, 19 nt, Artificial Sequence
  Description of Artificial Sequence: Synthetic oligonucleotide
guguacaaucucccgaagu

SEQ ID NO: 611074 - RNA, 19 nt, Artificial Sequence
  Description of Artificial Sequence: Synthetic oligonucleotide
uggacggggcaguuaggaa

SEQ ID NO: 611075 - RNA, 19 nt, Artificial Sequence
  Description of Artificial Sequence: Synthetic oligonucleotide
aggacgaagaccgcucaau

SEQ ID NO: 611076 - RNA, 19 nt, Artificial Sequence
  Description of Artificial Sequence: Synthetic oligonucleotide
cgcgguaaugugaagcagc

SEQ ID NO: 611077 - RNA, 19 nt, Artificial Sequence
  Description of Artificial Sequence: Synthetic oligonucleotide
gcugcuggucagcgaaugg

SEQ ID NO: 611078 - RNA, 19 nt, Artificial Sequence
  Description of Artificial Sequence: Synthetic oligonucleotide
ugcggucucgaaccuccaa

SEQ ID NO: 611079 - RNA, 19 nt, Artificial Sequence
  Description of Artificial Sequence: Synthetic oligonucleotide
accgacugauggagaaagg

SEQ ID NO: 611080 - RNA, 19 nt, Artificial Sequence
  Description of Artificial Sequence: Synthetic oligonucleotide
ggacgaagaccgcucaauc

SEQ ID NO: 611081 - RNA, 19 nt, Artificial Sequence
  Description of Artificial Sequence: Synthetic oligonucleotide
gugccugucauggcugcag

SEQ ID NO: 611082 - RNA, 19 nt, Artificial Sequence
  Description of Artificial Sequence: Synthetic oligonucleotide
gcgguaaugugaagcagcc

SEQ ID NO: 611083 - RNA, 19 nt, Artificial Sequence
  Description of Artificial Sequence: Synthetic oligonucleotide
gucgaugggccggaugggc

SEQ ID NO: 611084 - RNA, 19 nt, Artificial Sequence
  Description of Artificial Sequence: Synthetic oligonucleotide
uuacgauggcugccauguc

SEQ ID NO: 611085 - RNA, 19 nt, Artificial Sequence
  Description of Artificial Sequence: Synthetic oligonucleotide
cacuccgcgguaaugugaa

SEQ ID NO: 611086 - RNA, 19 nt, Artificial Sequence
  Description of Artificial Sequence: Synthetic oligonucleotide
cucgggugugugugguggc

SEQ ID NO: 611087 - RNA, 19 nt, Artificial Sequence
  Description of Artificial Sequence: Synthetic oligonucleotide
gcucccguggaccucucag

SEQ ID NO: 611088 - RNA, 19 nt, Artificial Sequence
  Description of Artificial Sequence: Synthetic oligonucleotide
caccguagcuguagcccag

SEQ ID NO: 611089 - RNA, 19 nt, Artificial Sequence
  Description of Artificial Sequence: Synthetic oligonucleotide
cagcgaaugguggcugcgg

SEQ ID NO: 611090 - RNA, 19 nt, Artificial Sequence
  Description of Artificial Sequence: Synthetic oligonucleotide
auggcggaugaaaccagcu

SEQ ID NO: 611091 - RNA, 19 nt, Artificial Sequence
  Description of Artificial Sequence: Synthetic oligonucleotide
agucagagugaugggcccu

SEQ ID NO: 611092 - RNA, 19 nt, Artificial Sequence
  Description of Artificial Sequence: Synthetic oligonucleotide
gagaugcccaagaaguuau

SEQ ID NO: 611093 - RNA, 19 nt, Artificial Sequence
  Description of Artificial Sequence: Synthetic oligonucleotide
ucuccuugcgccggucgcu

SEQ ID NO: 611094 - RNA, 19 nt, Artificial Sequence
  Description of Artificial Sequence: Synthetic oligonucleotide
caccugauuuggagucccc

SEQ ID NO: 611095 - RNA, 19 nt, Artificial Sequence
  Description of Artificial Sequence: Synthetic oligonucleotide
agugggaaugaggguguga

SEQ ID NO: 611096 - RNA, 19 nt, Artificial Sequence
  Description of Artificial Sequence: Synthetic oligonucleotide
uguugacugcuggcgcuac

SEQ ID NO: 611097 - RNA, 19 nt, Artificial Sequence
  Description of Artificial Sequence: Synthetic oligonucleotide
ucgaaccuccaacccugau

SEQ ID NO: 611098 - RNA, 19 nt, Artificial Sequence
  Description of Artificial Sequence: Synthetic oligonucleotide
cauuaggcgcgaggcacug

SEQ ID NO: 611099 - RNA, 19 nt, Artificial Sequence
  Description of Artificial Sequence: Synthetic oligonucleotide
aggcguucugugucaggga

SEQ ID NO: 611100 - RNA, 19 nt, Artificial Sequence
  Description of Artificial Sequence: Synthetic oligonucleotide
gccuacuagagguggcuac

SEQ ID NO: 611101 - RNA, 19 nt, Artificial Sequence
  Description of Artificial Sequence: Synthetic oligonucleotide
gcggucucgaaccuccaac

SEQ ID NO: 611102 - RNA, 19 nt, Artificial Sequence
  Description of Artificial Sequence: Synthetic oligonucleotide
gcuuuuacgauggcugcca

SEQ ID NO: 611103 - RNA, 19 nt, Artificial Sequence
  Description of Artificial Sequence: Synthetic oligonucleotide
ggccggaugggcucacucc

SEQ ID NO: 611104 - RNA, 19 nt, Artificial Sequence
  Description of Artificial Sequence: Synthetic oligonucleotide
gguaggcaaaaggguuugg

SEQ ID NO: 611105 - RNA, 19 nt, Artificial Sequence
  Description of Artificial Sequence: Synthetic oligonucleotide
ggcuuuuacgauggcugcc

SEQ ID NO: 611106 - RNA, 19 nt, Artificial Sequence
  Description of Artificial Sequence: Synthetic oligonucleotide
ggugucaguauaguggggu

SEQ ID NO: 611107 - RNA, 19 nt, Artificial Sequence
  Description of Artificial Sequence: Synthetic oligonucleotide
gagucguccucaucugagu

SEQ ID NO: 611108 - RNA, 19 nt, Artificial Sequence
  Description of Artificial Sequence: Synthetic oligonucleotide
acuccgcgguaaugugaag

SEQ ID NO: 611109 - RNA, 19 nt, Artificial Sequence
  Description of Artificial Sequence: Synthetic oligonucleotide
cccaccguagcuguagccc

SEQ ID NO: 611110 - RNA, 19 nt, Artificial Sequence
  Description of Artificial Sequence: Synthetic oligonucleotide
ugcgugcucugggccaucc

SEQ ID NO: 611111 - RNA, 19 nt, Artificial Sequence
  Description of Artificial Sequence: Synthetic oligonucleotide
ucgggugugugugguggcu

SEQ ID NO: 611112 - RNA, 19 nt, Artificial Sequence
  Description of Artificial Sequence: Synthetic oligonucleotide
uccgggcgggccauagcuc

SEQ ID NO: 611113 - RNA, 19 nt, Artificial Sequence
  Description of Artificial Sequence: Synthetic oligonucleotide
gacgcucucguugggcaga

SEQ ID NO: 611114 - RNA, 19 nt, Artificial Sequence
  Description of Artificial Sequence: Synthetic oligonucleotide
augggcccugguuugugua

SEQ ID NO: 611115 - RNA, 19 nt, Artificial Sequence
  Description of Artificial Sequence: Synthetic oligonucleotide
caccgaggccaggucacgg

SEQ ID NO: 611116 - RNA, 19 nt, Artificial Sequence
  Description of Artificial Sequence: Synthetic oligonucleotide
aucaccucgcucguugcuu

SEQ ID NO: 611117 - RNA, 19 nt, Artificial Sequence
  Description of Artificial Sequence: Synthetic oligonucleotide
ugccaugcggaaggacugu

SEQ ID NO: 611118 - RNA, 19 nt, Artificial Sequence
  Description of Artificial Sequence: Synthetic oligonucleotide
ccgggcgggccauagcucg

SEQ ID NO: 611119 - RNA, 19 nt, Artificial Sequence
  Description of Artificial Sequence: Synthetic oligonucleotide
ccuaaauaugaggguggag

SEQ ID NO: 611120 - RNA, 19 nt, Artificial Sequence
  Description of Artificial Sequence: Synthetic oligonucleotide
gaaccgacugauggagaaa

SEQ ID NO: 611121 - RNA, 19 nt, Artificial Sequence
  Description of Artificial Sequence: Synthetic oligonucleotide
ggucggcuccuaaauauga

SEQ ID NO: 611122 - RNA, 19 nt, Artificial Sequence
  Description of Artificial Sequence: Synthetic oligonucleotide
ccgagagaccuucugcuuc

SEQ ID NO: 611123 - RNA, 19 nt, Artificial Sequence
  Description of Artificial Sequence: Synthetic oligonucleotide
cucccguggaccucucaga

SEQ ID NO: 611124 - RNA, 19 nt, Artificial Sequence
  Description of Artificial Sequence: Synthetic oligonucleotide
ugcguccaucggcugccac

SEQ ID NO: 611125 - RNA, 19 nt, Artificial Sequence
  Description of Artificial Sequence: Synthetic oligonucleotide
ugccuacuagagguggcua

SEQ ID NO: 611126 - RNA, 19 nt, Artificial Sequence
  Description of Artificial Sequence: Synthetic oligonucleotide
ugacaguauggcggaugaa

SEQ ID NO: 611127 - RNA, 19 nt, Artificial Sequence
  Description of Artificial Sequence: Synthetic oligonucleotide
gaugggcccugguuugugu

SEQ ID NO: 611128 - RNA, 19 nt, Artificial Sequence
  Description of Artificial Sequence: Synthetic oligonucleotide
ugggcucacuccgcgguaa

SEQ ID NO: 611129 - RNA, 19 nt, Artificial Sequence
  Description of Artificial Sequence: Synthetic oligonucleotide
ccaucggcugccacagccc

SEQ ID NO: 611130 - RNA, 19 nt, Artificial Sequence
  Description of Artificial Sequence: Synthetic oligonucleotide
gcgaaugguggcugcggug

SEQ ID NO: 611131 - RNA, 19 nt, Artificial Sequence
  Description of Artificial Sequence: Synthetic oligonucleotide
gaugggccggaugggcuca

SEQ ID NO: 611132 - RNA, 19 nt, Artificial Sequence
  Description of Artificial Sequence: Synthetic oligonucleotide
cuguaacagcauaucuccu

SEQ ID NO: 611133 - RNA, 19 nt, Artificial Sequence
  Description of Artificial Sequence: Synthetic oligonucleotide
cugaaggacgaagaccgcu

SEQ ID NO: 611134 - RNA, 19 nt, Artificial Sequence
  Description of Artificial Sequence: Synthetic oligonucleotide
ggcuccuaaauaugagggu

SEQ ID NO: 611135 - RNA, 19 nt, Artificial Sequence
  Description of Artificial Sequence: Synthetic oligonucleotide
ggucagcgaaugguggcug

SEQ ID NO: 611136 - RNA, 19 nt, Artificial Sequence
  Description of Artificial Sequence: Synthetic oligonucleotide
gggucggcuccuaaauaug

SEQ ID NO: 611137 - RNA, 19 nt, Artificial Sequence
  Description of Artificial Sequence: Synthetic oligonucleotide
ggggucggcuccuaaauau

SEQ ID NO: 611138 - RNA, 19 nt, Artificial Sequence
  Description of Artificial Sequence: Synthetic oligonucleotide
ccaccugauuuggaguccc

SEQ ID NO: 611139 - RNA, 19 nt, Artificial Sequence
  Description of Artificial Sequence: Synthetic oligonucleotide
ccucucagacugcugcgug

SEQ ID NO: 611140 - RNA, 19 nt, Artificial Sequence
  Description of Artificial Sequence: Synthetic oligonucleotide
cuccuugcgccggucgcug

SEQ ID NO: 611141 - RNA, 19 nt, Artificial Sequence
  Description of Artificial Sequence: Synthetic oligonucleotide
gcugcguguaguguggucu

SEQ ID NO: 611142 - RNA, 19 nt, Artificial Sequence
  Description of Artificial Sequence: Synthetic oligonucleotide
gcucauaaggguagaugaa

SEQ ID NO: 611143 - RNA, 19 nt, Artificial Sequence
  Description of Artificial Sequence: Synthetic oligonucleotide
gggccaucccuccgacggg

SEQ ID NO: 611144 - RNA, 19 nt, Artificial Sequence
  Description of Artificial Sequence: Synthetic oligonucleotide
cuccgggcgggccauagcu

SEQ ID NO: 611145 - RNA, 19 nt, Artificial Sequence
  Description of Artificial Sequence: Synthetic oligonucleotide
gcguccaucggcugccaca

SEQ ID NO: 611146 - RNA, 19 nt, Artificial Sequence
  Description of Artificial Sequence: Synthetic oligonucleotide
ucccgccgguccgugaauc

SEQ ID NO: 611147 - RNA, 19 nt, Artificial Sequence
  Description of Artificial Sequence: Synthetic oligonucleotide
ggcguucugugucagggau

SEQ ID NO: 611148 - RNA, 19 nt, Artificial Sequence
  Description of Artificial Sequence: Synthetic oligonucleotide
cugcuggucagcgaauggu

SEQ ID NO: 611149 - RNA, 19 nt, Artificial Sequence
  Description of Artificial Sequence: Synthetic oligonucleotide
ccucgcucguugcuuuggc

SEQ ID NO: 611150 - RNA, 19 nt, Artificial Sequence
  Description of Artificial Sequence: Synthetic oligonucleotide
ggggcucaugccauaggca

SEQ ID NO: 611151 - RNA, 19 nt, Artificial Sequence
  Description of Artificial Sequence: Synthetic oligonucleotide
ccaccguagcuguagccca

SEQ ID NO: 611152 - RNA, 19 nt, Artificial Sequence
  Description of Artificial Sequence: Synthetic oligonucleotide
ccuacuagagguggcuaca

SEQ ID NO: 611153 - RNA, 19 nt, Artificial Sequence
  Description of Artificial Sequence: Synthetic oligonucleotide
gcgggccauagcucgggug

SEQ ID NO: 611154 - RNA, 19 nt, Artificial Sequence
  Description of Artificial Sequence: Synthetic oligonucleotide
gcuggccgucaguuccggg

SEQ ID NO: 611155 - RNA, 19 nt, Artificial Sequence
  Description of Artificial Sequence: Synthetic oligonucleotide
cguugugguacagccaguc

SEQ ID NO: 611156 - RNA, 19 nt, Artificial Sequence
  Description of Artificial Sequence: Synthetic oligonucleotide
gccauagcucgggugugug

SEQ ID NO: 611157 - RNA, 19 nt, Artificial Sequence
  Description of Artificial Sequence: Synthetic oligonucleotide
agaugcccaagaaguuaua

SEQ ID NO: 611158 - RNA, 19 nt, Artificial Sequence
  Description of Artificial Sequence: Synthetic oligonucleotide
ggggacgcucucguugggc

SEQ ID NO: 611159 - RNA, 19 nt, Artificial Sequence
  Description of Artificial Sequence: Synthetic oligonucleotide
ccccaccguagcuguagcc

SEQ ID NO: 611160 - RNA, 19 nt, Artificial Sequence
  Description of Artificial Sequence: Synthetic oligonucleotide
ggguuuggacggggagugg

SEQ ID NO: 611161 - RNA, 19 nt, Artificial Sequence
  Description of Artificial Sequence: Synthetic oligonucleotide
cucguugggcagacaccaa

SEQ ID NO: 611162 - RNA, 19 nt, Artificial Sequence
  Description of Artificial Sequence: Synthetic oligonucleotide
acguugugguacagccagu

SEQ ID NO: 611163 - RNA, 19 nt, Artificial Sequence
  Description of Artificial Sequence: Synthetic oligonucleotide
agccccugggugcggcaaa

SEQ ID NO: 611164 - RNA, 19 nt, Artificial Sequence
  Description of Artificial Sequence: Synthetic oligonucleotide
gugcggcaaaggagccagg

SEQ ID NO: 611165 - RNA, 19 nt, Artificial Sequence
  Description of Artificial Sequence: Synthetic oligonucleotide
cuuuuacgauggcugccau

SEQ ID NO: 611166 - RNA, 19 nt, Artificial Sequence
  Description of Artificial Sequence: Synthetic oligonucleotide
gcuacagcuguagggugaa

SEQ ID NO: 611167 - RNA, 19 nt, Artificial Sequence
  Description of Artificial Sequence: Synthetic oligonucleotide
caguuccauugagccgggc

SEQ ID NO: 611168 - RNA, 19 nt, Artificial Sequence
  Description of Artificial Sequence: Synthetic oligonucleotide
gggccggaugggcucacuc

SEQ ID NO: 611169 - RNA, 19 nt, Artificial Sequence
  Description of Artificial Sequence: Synthetic oligonucleotide
aucggcugccacagcccca

SEQ ID NO: 611170 - RNA, 19 nt, Artificial Sequence
  Description of Artificial Sequence: Synthetic oligonucleotide
cccgccgguccgugaaucc

SEQ ID NO: 611171 - RNA, 19 nt, Artificial Sequence
  Description of Artificial Sequence: Synthetic oligonucleotide
gcaccgaggccaggucacg

SEQ ID NO: 611172 - RNA, 19 nt, Artificial Sequence
  Description of Artificial Sequence: Synthetic oligonucleotide
ggguccaagaagggacaga

SEQ ID NO: 611173 - RNA, 19 nt, Artificial Sequence
  Description of Artificial Sequence: Synthetic oligonucleotide
ccgcgguaaugugaagcag

SEQ ID NO: 611174 - RNA, 19 nt, Artificial Sequence
  Description of Artificial Sequence: Synthetic oligonucleotide
cgaagaccgcucaauccga

SEQ ID NO: 611175 - RNA, 19 nt, Artificial Sequence
  Description of Artificial Sequence: Synthetic oligonucleotide
cccgaaguacucggacggc

SEQ ID NO: 611176 - RNA, 19 nt, Artificial Sequence
  Description of Artificial Sequence: Synthetic oligonucleotide
ccgaaguacucggacggca

SEQ ID NO: 611177 - RNA, 19 nt, Artificial Sequence
  Description of Artificial Sequence: Synthetic oligonucleotide
gccugagcgcucacuuggc

SEQ ID NO: 611178 - RNA, 19 nt, Artificial Sequence
  Description of Artificial Sequence: Synthetic oligonucleotide
ggcugcggugacugugcuc

SEQ ID NO: 611179 - RNA, 19 nt, Artificial Sequence
  Description of Artificial Sequence: Synthetic oligonucleotide
agccuggguguggauugua

SEQ ID NO: 611180 - RNA, 19 nt, Artificial Sequence
  Description of Artificial Sequence: Synthetic oligonucleotide
cuguagggugaaggacuaa

SEQ ID NO: 611181 - RNA, 19 nt, Artificial Sequence
  Description of Artificial Sequence: Synthetic oligonucleotide
augcguccaucggcugcca

SEQ ID NO: 611182 - RNA, 19 nt, Artificial Sequence
  Description of Artificial Sequence: Synthetic oligonucleotide
gucacggccuggaggggcu

SEQ ID NO: 611183 - RNA, 19 nt, Artificial Sequence
  Description of Artificial Sequence: Synthetic oligonucleotide
gggcacuccgggcgggcca

SEQ ID NO: 611184 - RNA, 19 nt, Artificial Sequence
  Description of Artificial Sequence: Synthetic oligonucleotide
ggcccugaucacaucacau

SEQ ID NO: 611185 - RNA, 19 nt, Artificial Sequence
  Description of Artificial Sequence: Synthetic oligonucleotide
ggacggggagugggaauga

SEQ ID NO: 611186 - RNA, 19 nt, Artificial Sequence
  Description of Artificial Sequence: Synthetic oligonucleotide
gcgcccgcucccguggacc

SEQ ID NO: 611187 - RNA, 19 nt, Artificial Sequence
  Description of Artificial Sequence: Synthetic oligonucleotide
gggugcggcaaaggagcca

SEQ ID NO: 611188 - RNA, 19 nt, Artificial Sequence
  Description of Artificial Sequence: Synthetic oligonucleotide
gcccaagaaguuauacuuu

SEQ ID NO: 611189 - RNA, 19 nt, Artificial Sequence
  Description of Artificial Sequence: Synthetic oligonucleotide
gcugggucgaugggccgga

SEQ ID NO: 611190 - RNA, 19 nt, Artificial Sequence
  Description of Artificial Sequence: Synthetic oligonucleotide
gccgguccgugaauccuuc

SEQ ID NO: 611191 - RNA, 19 nt, Artificial Sequence
  Description of Artificial Sequence: Synthetic oligonucleotide
ggacggcaucgucauuacu

SEQ ID NO: 611192 - RNA, 19 nt, Artificial Sequence
  Description of Artificial Sequence: Synthetic oligonucleotide
cacuucuguuggagccacu

SEQ ID NO: 611193 - RNA, 19 nt, Artificial Sequence
  Description of Artificial Sequence: Synthetic oligonucleotide
cgcuugugucuccucauua

SEQ ID NO: 611194 - RNA, 19 nt, Artificial Sequence
  Description of Artificial Sequence: Synthetic oligonucleotide
cgugcucugggccaucccu

SEQ ID NO: 611195 - RNA, 19 nt, Artificial Sequence
  Description of Artificial Sequence: Synthetic oligonucleotide
ccuccgacggggacgcucu

SEQ ID NO: 611196 - RNA, 19 nt, Artificial Sequence
  Description of Artificial Sequence: Synthetic oligonucleotide
cgggugugugugguggcug

SEQ ID NO: 611197 - RNA, 19 nt, Artificial Sequence
  Description of Artificial Sequence: Synthetic oligonucleotide
ggcgcccgcucccguggac

SEQ ID NO: 611198 - RNA, 19 nt, Artificial Sequence
  Description of Artificial Sequence: Synthetic oligonucleotide
ccauagcucgggugugugu

SEQ ID NO: 611199 - RNA, 19 nt, Artificial Sequence
  Description of Artificial Sequence: Synthetic oligonucleotide
ggccauagcucgggugugu

SEQ ID NO: 611200 - RNA, 19 nt, Artificial Sequence
  Description of Artificial Sequence: Synthetic oligonucleotide
ccaaggagucagucuccgu

SEQ ID NO: 611201 - RNA, 19 nt, Artificial Sequence
  Description of Artificial Sequence: Synthetic oligonucleotide
cugcugcguguaguguggu

SEQ ID NO: 611202 - RNA, 19 nt, Artificial Sequence
  Description of Artificial Sequence: Synthetic oligonucleotide
cggggacgcucucguuggg

SEQ ID NO: 611203 - RNA, 19 nt, Artificial Sequence
  Description of Artificial Sequence: Synthetic oligonucleotide
cgguaaugugaagcagcca

SEQ ID NO: 611204 - RNA, 19 nt, Artificial Sequence
  Description of Artificial Sequence: Synthetic oligonucleotide
ccaugucacuguggaugga

SEQ ID NO: 611205 - RNA, 19 nt, Artificial Sequence
  Description of Artificial Sequence: Synthetic oligonucleotide
ccgugaauccuuccacguu

SEQ ID NO: 611206 - RNA, 19 nt, Artificial Sequence
  Description of Artificial Sequence: Synthetic oligonucleotide
gcugcgugcucugggccau

SEQ ID NO: 611207 - RNA, 19 nt, Artificial Sequence
  Description of Artificial Sequence: Synthetic oligonucleotide
gccucccgccgguccguga

SEQ ID NO: 611208 - RNA, 19 nt, Artificial Sequence
  Description of Artificial Sequence: Synthetic oligonucleotide
ggccucccgccgguccgug

SEQ ID NO: 611209 - RNA, 19 nt, Artificial Sequence
  Description of Artificial Sequence: Synthetic oligonucleotide
ccgccgcuugugucuccuc

SEQ ID NO: 611210 - RNA, 19 nt, Artificial Sequence
  Description of Artificial Sequence: Synthetic oligonucleotide
cucccgccgguccgugaau

SEQ ID NO: 611211 - RNA, 19 nt, Artificial Sequence
  Description of Artificial Sequence: Synthetic oligonucleotide
gccgccgcuugugucuccu

SEQ ID NO: 611212 - RNA, 19 nt, Artificial Sequence
  Description of Artificial Sequence: Synthetic oligonucleotide
gcccugguuuguguacaau

SEQ ID NO: 611213 - RNA, 19 nt, Artificial Sequence
  Description of Artificial Sequence: Synthetic oligonucleotide
cucggacggcaucgucauu

SEQ ID NO: 611214 - RNA, 19 nt, Artificial Sequence
  Description of Artificial Sequence: Synthetic oligonucleotide
ggcacuccgggcgggccau

SEQ ID NO: 611215 - RNA, 19 nt, Artificial Sequence
  Description of Artificial Sequence: Synthetic oligonucleotide
gcgccggucgcugccacuu

SEQ ID NO: 611216 - RNA, 19 nt, Artificial Sequence
  Description of Artificial Sequence: Synthetic oligonucleotide
ccgccgguccgugaauccu

SEQ ID NO: 611217 - RNA, 19 nt, Artificial Sequence
  Description of Artificial Sequence: Synthetic oligonucleotide
cggcaucgucauuacucau

SEQ ID NO: 611218 - RNA, 19 nt, Artificial Sequence
  Description of Artificial Sequence: Synthetic oligonucleotide
cgcucccguggaccucuca

SEQ ID NO: 611219 - RNA, 19 nt, Artificial Sequence
  Description of Artificial Sequence: Synthetic oligonucleotide
cgcccgcucccguggaccu

SEQ ID NO: 611220 - RNA, 19 nt, Artificial Sequence
  Description of Artificial Sequence: Synthetic oligonucleotide
cgcgaggcacugcucuguu

SEQ ID NO: 611221 - RNA, 19 nt, Artificial Sequence
  Description of Artificial Sequence: Synthetic oligonucleotide
cgacggggacgcucucguu

SEQ ID NO: 611222 - RNA, 19 nt, Artificial Sequence
  Description of Artificial Sequence: Synthetic oligonucleotide
aaaacuuucuggcucuugg

SEQ ID NO: 611223 - RNA, 19 nt, Artificial Sequence
  Description of Artificial Sequence: Synthetic oligonucleotide
ucuacggaugcaauggugg

SEQ ID NO: 611224 - RNA, 19 nt, Artificial Sequence
  Description of Artificial Sequence: Synthetic oligonucleotide
aaaguuucgcucuaggcgu

SEQ ID NO: 611225 - RNA, 19 nt, Artificial Sequence
  Description of Artificial Sequence: Synthetic oligonucleotide
aguuaagcugguuaaggac

SEQ ID NO: 611226 - RNA, 19 nt, Artificial Sequence
  Description of Artificial Sequence: Synthetic oligonucleotide
acaaaguuucgcucuaggc

SEQ ID NO: 611227 - RNA, 19 nt, Artificial Sequence
  Description of Artificial Sequence: Synthetic oligonucleotide
uucaccauagcaaugcgcu

SEQ ID NO: 611228 - RNA, 19 nt, Artificial Sequence
  Description of Artificial Sequence: Synthetic oligonucleotide
aacaagcuaaccgagaggu

SEQ ID NO: 611229 - RNA, 19 nt, Artificial Sequence
  Description of Artificial Sequence: Synthetic oligonucleotide
gaagcuaggugcuacauca

SEQ ID NO: 611230 - RNA, 19 nt, Artificial Sequence
  Description of Artificial Sequence: Synthetic oligonucleotide
agcgcuuccggucaggggc

SEQ ID NO: 611231 - RNA, 19 nt, Artificial Sequence
  Description of Artificial Sequence: Synthetic oligonucleotide
uguguagcucuguagagag

SEQ ID NO: 611232 - RNA, 19 nt, Artificial Sequence
  Description of Artificial Sequence: Synthetic oligonucleotide
aggauuuguggccacaagg

SEQ ID NO: 611233 - RNA, 19 nt, Artificial Sequence
  Description of Artificial Sequence: Synthetic oligonucleotide
ugguuaaggacacuguuga

SEQ ID NO: 611234 - RNA, 19 nt, Artificial Sequence
  Description of Artificial Sequence: Synthetic oligonucleotide
acucgcaacaagcuaaccg

SEQ ID NO: 611235 - RNA, 19 nt, Artificial Sequence
  Description of Artificial Sequence: Synthetic oligonucleotide
uaaccgagaggucaaagca

SEQ ID NO: 611236 - RNA, 19 nt, Artificial Sequence
  Description of Artificial Sequence: Synthetic oligonucleotide
uccaagacucgcaacaagc

SEQ ID NO: 611237 - RNA, 19 nt, Artificial Sequence
  Description of Artificial Sequence: Synthetic oligonucleotide
aaugucggugccuacgaug

SEQ ID NO: 611238 - RNA, 19 nt, Artificial Sequence
  Description of Artificial Sequence: Synthetic oligonucleotide
gauggccacgcuuagguag

SEQ ID NO: 611239 - RNA, 19 nt, Artificial Sequence
  Description of Artificial Sequence: Synthetic oligonucleotide
ucuuucgaaggugugagag

SEQ ID NO: 611240 - RNA, 19 nt, Artificial Sequence
  Description of Artificial Sequence: Synthetic oligonucleotide
uagcauauggaccggagcu

SEQ ID NO: 611241 - RNA, 19 nt, Artificial Sequence
  Description of Artificial Sequence: Synthetic oligonucleotide
aauaucucaggcaccagug

SEQ ID NO: 611242 - RNA, 19 nt, Artificial Sequence
  Description of Artificial Sequence: Synthetic oligonucleotide
uguauagcgguacccaaac

SEQ ID NO: 611243 - RNA, 19 nt, Artificial Sequence
  Description of Artificial Sequence: Synthetic oligonucleotide
agggccguugcucauaggg

SEQ ID NO: 611244 - RNA, 19 nt, Artificial Sequence
  Description of Artificial Sequence: Synthetic oligonucleotide
aagacgccgaagcagcauc

SEQ ID NO: 611245 - RNA, 19 nt, Artificial Sequence
  Description of Artificial Sequence: Synthetic oligonucleotide
aguaaaacuuucuggcucu

SEQ ID NO: 611246 - RNA, 19 nt, Artificial Sequence
  Description of Artificial Sequence: Synthetic oligonucleotide
uccucuacggaugcaaugg

SEQ ID NO: 611247 - RNA, 19 nt, Artificial Sequence
  Description of Artificial Sequence: Synthetic oligonucleotide
cuuuaagggucuuucgaag

SEQ ID NO: 611248 - RNA, 19 nt, Artificial Sequence
  Description of Artificial Sequence: Synthetic oligonucleotide
cuaaccgagaggucaaagc

SEQ ID NO: 611249 - RNA, 19 nt, Artificial Sequence
  Description of Artificial Sequence: Synthetic oligonucleotide
aaagagacccugugcgguc

SEQ ID NO: 611250 - RNA, 19 nt, Artificial Sequence
  Description of Artificial Sequence: Synthetic oligonucleotide
guggcagccguguauagcg

SEQ ID NO: 611251 - RNA, 19 nt, Artificial Sequence
  Description of Artificial Sequence: Synthetic oligonucleotide
uuucgaaggugugagagga

SEQ ID NO: 611252 - RNA, 19 nt, Artificial Sequence
  Description of Artificial Sequence: Synthetic oligonucleotide
caucucagagguaggacgg

SEQ ID NO: 611253 - RNA, 19 nt, Artificial Sequence
  Description of Artificial Sequence: Synthetic oligonucleotide
uguagagagaagcgcuucc

SEQ ID NO: 611254 - RNA, 19 nt, Artificial Sequence
  Description of Artificial Sequence: Synthetic oligonucleotide
uuaagggucuuucgaaggu

SEQ ID NO: 611255 - RNA, 19 nt, Artificial Sequence
  Description of Artificial Sequence: Synthetic oligonucleotide
guagauauccagcaucuuc

SEQ ID NO: 611256 - RNA, 19 nt, Artificial Sequence
  Description of Artificial Sequence: Synthetic oligonucleotide
caaagccgcaccaggaucc

SEQ ID NO: 611257 - RNA, 19 nt, Artificial Sequence
  Description of Artificial Sequence: Synthetic oligonucleotide
cagugagucucgaaugucg

SEQ ID NO: 611258 - RNA, 19 nt, Artificial Sequence
  Description of Artificial Sequence: Synthetic oligonucleotide
ugcucgaugguccguaggc

SEQ ID NO: 611259 - RNA, 19 nt, Artificial Sequence
  Description of Artificial Sequence: Synthetic oligonucleotide
auggaccggagcuggaagc

SEQ ID NO: 611260 - RNA, 19 nt, Artificial Sequence
  Description of Artificial Sequence: Synthetic oligonucleotide
cuaggugcuacaucagggc

SEQ ID NO: 611261 - RNA, 19 nt, Artificial Sequence
  Description of Artificial Sequence: Synthetic oligonucleotide
acacgcaacagccaguaga

SEQ ID NO: 611262 - RNA, 19 nt, Artificial Sequence
  Description of Artificial Sequence: Synthetic oligonucleotide
ugucguagaagaucugcca

SEQ ID NO: 611263 - RNA, 19 nt, Artificial Sequence
  Description of Artificial Sequence: Synthetic oligonucleotide
cacauagcuggccagggcc

SEQ ID NO: 611264 - RNA, 19 nt, Artificial Sequence
  Description of Artificial Sequence: Synthetic oligonucleotide
ucagagguaggacgggacc

SEQ ID NO: 611265 - RNA, 19 nt, Artificial Sequence
  Description of Artificial Sequence: Synthetic oligonucleotide
augucggugccuacgaugc

SEQ ID NO: 611266 - RNA, 19 nt, Artificial Sequence
  Description of Artificial Sequence: Synthetic oligonucleotide
cucacgagaccucugcucc

SEQ ID NO: 611267 - RNA, 19 nt, Artificial Sequence
  Description of Artificial Sequence: Synthetic oligonucleotide
ugugcgguccccgugcucg

SEQ ID NO: 611268 - RNA, 19 nt, Artificial Sequence
  Description of Artificial Sequence: Synthetic oligonucleotide
cuuucgaaggugugagagg

SEQ ID NO: 611269 - RNA, 19 nt, Artificial Sequence
  Description of Artificial Sequence: Synthetic oligonucleotide
caugccgaugaacucagag

SEQ ID NO: 611270 - RNA, 19 nt, Artificial Sequence
  Description of Artificial Sequence: Synthetic oligonucleotide
augguccguaggcagacac

SEQ ID NO: 611271 - RNA, 19 nt, Artificial Sequence
  Description of Artificial Sequence: Synthetic oligonucleotide
cugguuaaggacacuguug

SEQ ID NO: 611272 - RNA, 19 nt, Artificial Sequence
  Description of Artificial Sequence: Synthetic oligonucleotide
gccaaaauaauucuugaga

SEQ ID NO: 611273 - RNA, 19 nt, Artificial Sequence
  Description of Artificial Sequence: Synthetic oligonucleotide
ucaauguccucacgagacc

SEQ ID NO: 611274 - RNA, 19 nt, Artificial Sequence
  Description of Artificial Sequence: Synthetic oligonucleotide
aggcccucauuccaguggc

SEQ ID NO: 611275 - RNA, 19 nt, Artificial Sequence
  Description of Artificial Sequence: Synthetic oligonucleotide
aagacucgcaacaagcuaa

SEQ ID NO: 611276 - RNA, 19 nt, Artificial Sequence
  Description of Artificial Sequence: Synthetic oligonucleotide
uagggugccaaaagguucu

SEQ ID NO: 611277 - RNA, 19 nt, Artificial Sequence
  Description of Artificial Sequence: Synthetic oligonucleotide
guuaagcugguuaaggaca

SEQ ID NO: 611278 - RNA, 19 nt, Artificial Sequence
  Description of Artificial Sequence: Synthetic oligonucleotide
gaagcgguuggcucggccc

SEQ ID NO: 611279 - RNA, 19 nt, Artificial Sequence
  Description of Artificial Sequence: Synthetic oligonucleotide
uuccaagacucgcaacaag

SEQ ID NO: 611280 - RNA, 19 nt, Artificial Sequence
  Description of Artificial Sequence: Synthetic oligonucleotide
ucguagaagaucugccaug

SEQ ID NO: 611281 - RNA, 19 nt, Artificial Sequence
  Description of Artificial Sequence: Synthetic oligonucleotide
gcaucucagagguaggacg

SEQ ID NO: 611282 - RNA, 19 nt, Artificial Sequence
  Description of Artificial Sequence: Synthetic oligonucleotide
ucgaaugucggugccuacg

SEQ ID NO: 611283 - RNA, 19 nt, Artificial Sequence
  Description of Artificial Sequence: Synthetic oligonucleotide
cucgcaacaagcuaaccga

SEQ ID NO: 611284 - RNA, 19 nt, Artificial Sequence
  Description of Artificial Sequence: Synthetic oligonucleotide
ucuugagagcacuguagcu

SEQ ID NO: 611285 - RNA, 19 nt, Artificial Sequence
  Description of Artificial Sequence: Synthetic oligonucleotide
gaugcaaugguggcuuugc

SEQ ID NO: 611286 - RNA, 19 nt, Artificial Sequence
  Description of Artificial Sequence: Synthetic oligonucleotide
cacaaaguuucgcucuagg

SEQ ID NO: 611287 - RNA, 19 nt, Artificial Sequence
  Description of Artificial Sequence: Synthetic oligonucleotide
gcaacaagcuaaccgagag

SEQ ID NO: 611288 - RNA, 19 nt, Artificial Sequence
  Description of Artificial Sequence: Synthetic oligonucleotide
ucgcaacaagcuaaccgag

SEQ ID NO: 611289 - RNA, 19 nt, Artificial Sequence
  Description of Artificial Sequence: Synthetic oligonucleotide
agggccauugcauacucgu

SEQ ID NO: 611290 - RNA, 19 nt, Artificial Sequence
  Description of Artificial Sequence: Synthetic oligonucleotide
guagcauauggaccggagc

SEQ ID NO: 611291 - RNA, 19 nt, Artificial Sequence
  Description of Artificial Sequence: Synthetic oligonucleotide
guagagagaagcgcuuccg

SEQ ID NO: 611292 - RNA, 19 nt, Artificial Sequence
  Description of Artificial Sequence: Synthetic oligonucleotide
auacucguugacaucauga

SEQ ID NO: 611293 - RNA, 19 nt, Artificial Sequence
  Description of Artificial Sequence: Synthetic oligonucleotide
aaauuggcauccucugguu

SEQ ID NO: 611294 - RNA, 19 nt, Artificial Sequence
  Description of Artificial Sequence: Synthetic oligonucleotide
agcgagcgaaccuucaccu

SEQ ID NO: 611295 - RNA, 19 nt, Artificial Sequence
  Description of Artificial Sequence: Synthetic oligonucleotide
cacgauauuggcuuuggaa

SEQ ID NO: 611296 - RNA, 19 nt, Artificial Sequence
  Description of Artificial Sequence: Synthetic oligonucleotide
agugagucucgaaugucgg

SEQ ID NO: 611297 - RNA, 19 nt, Artificial Sequence
  Description of Artificial Sequence: Synthetic oligonucleotide
ugguccguaggcagacacg

SEQ ID NO: 611298 - RNA, 19 nt, Artificial Sequence
  Description of Artificial Sequence: Synthetic oligonucleotide
cuacggaugcaaugguggc

SEQ ID NO: 611299 - RNA, 19 nt, Artificial Sequence
  Description of Artificial Sequence: Synthetic oligonucleotide
gauauuggcuuuggaagca

SEQ ID NO: 611300 - RNA, 19 nt, Artificial Sequence
  Description of Artificial Sequence: Synthetic oligonucleotide
uccacggucagcgagcgaa

SEQ ID NO: 611301 - RNA, 19 nt, Artificial Sequence
  Description of Artificial Sequence: Synthetic oligonucleotide
augaccgugccauccagga

SEQ ID NO: 611302 - RNA, 19 nt, Artificial Sequence
  Description of Artificial Sequence: Synthetic oligonucleotide
ggauccguuccacagcccg

SEQ ID NO: 611303 - RNA, 19 nt, Artificial Sequence
  Description of Artificial Sequence: Synthetic oligonucleotide
aauguccucacgagaccuc

SEQ ID NO: 611304 - RNA, 19 nt, Artificial Sequence
  Description of Artificial Sequence: Synthetic oligonucleotide
uccacacucuccaggccag

SEQ ID NO: 611305 - RNA, 19 nt, Artificial Sequence
  Description of Artificial Sequence: Synthetic oligonucleotide
aucacgauauuggcuuugg

SEQ ID NO: 611306 - RNA, 19 nt, Artificial Sequence
  Description of Artificial Sequence: Synthetic oligonucleotide
acccaggcaagacggcggc

SEQ ID NO: 611307 - RNA, 19 nt, Artificial Sequence
  Description of Artificial Sequence: Synthetic oligonucleotide
cucuaggcguucagcagcc

SEQ ID NO: 611308 - RNA, 19 nt, Artificial Sequence
  Description of Artificial Sequence: Synthetic oligonucleotide
cucuacggaugcaauggug

SEQ ID NO: 611309 - RNA, 19 nt, Artificial Sequence
  Description of Artificial Sequence: Synthetic oligonucleotide
cauuuccaagacucgcaac

SEQ ID NO: 611310 - RNA, 19 nt, Artificial Sequence
  Description of Artificial Sequence: Synthetic oligonucleotide
uuucgcucuaggcguucag

SEQ ID NO: 611311 - RNA, 19 nt, Artificial Sequence
  Description of Artificial Sequence: Synthetic oligonucleotide
gaccgugccauccaggacu

SEQ ID NO: 611312 - RNA, 19 nt, Artificial Sequence
  Description of Artificial Sequence: Synthetic oligonucleotide
uacgaugcgugggucagca

SEQ ID NO: 611313 - RNA, 19 nt, Artificial Sequence
  Description of Artificial Sequence: Synthetic oligonucleotide
cacuguagcuguugauggc

SEQ ID NO: 611314 - RNA, 19 nt, Artificial Sequence
  Description of Artificial Sequence: Synthetic oligonucleotide
cuuguaugggacgcugggc

SEQ ID NO: 611315 - RNA, 19 nt, Artificial Sequence
  Description of Artificial Sequence: Synthetic oligonucleotide
gaagccguagggugacuac

SEQ ID NO: 611316 - RNA, 19 nt, Artificial Sequence
  Description of Artificial Sequence: Synthetic oligonucleotide
aggacgggaccagucaagg

SEQ ID NO: 611317 - RNA, 19 nt, Artificial Sequence
  Description of Artificial Sequence: Synthetic oligonucleotide
uaggguagugguccacacu

SEQ ID NO: 611318 - RNA, 19 nt, Artificial Sequence
  Description of Artificial Sequence: Synthetic oligonucleotide
ggucuuucgaaggugugag

SEQ ID NO: 611319 - RNA, 19 nt, Artificial Sequence
  Description of Artificial Sequence: Synthetic oligonucleotide
agcagauugggcagagguc

SEQ ID NO: 611320 - RNA, 19 nt, Artificial Sequence
  Description of Artificial Sequence: Synthetic oligonucleotide
auagcgguacccaaaccca

SEQ ID NO: 611321 - RNA, 19 nt, Artificial Sequence
  Description of Artificial Sequence: Synthetic oligonucleotide
cucagagguaggacgggac

SEQ ID NO: 611322 - RNA, 19 nt, Artificial Sequence
  Description of Artificial Sequence: Synthetic oligonucleotide
ucggugccuacgaugcgug

SEQ ID NO: 611323 - RNA, 19 nt, Artificial Sequence
  Description of Artificial Sequence: Synthetic oligonucleotide
uucgcucuaggcguucagc

SEQ ID NO: 611324 - RNA, 19 nt, Artificial Sequence
  Description of Artificial Sequence: Synthetic oligonucleotide
aggucauccaugguagcug

SEQ ID NO: 611325 - RNA, 19 nt, Artificial Sequence
  Description of Artificial Sequence: Synthetic oligonucleotide
ugucggugccuacgaugcg

SEQ ID NO: 611326 - RNA, 19 nt, Artificial Sequence
  Description of Artificial Sequence: Synthetic oligonucleotide
ccaguuaagcugguuaagg

SEQ ID NO: 611327 - RNA, 19 nt, Artificial Sequence
  Description of Artificial Sequence: Synthetic oligonucleotide
agacucgcaacaagcuaac

SEQ ID NO: 611328 - RNA, 19 nt, Artificial Sequence
  Description of Artificial Sequence: Synthetic oligonucleotide
accauagcaaugcgcugcu

SEQ ID NO: 611329 - RNA, 19 nt, Artificial Sequence
  Description of Artificial Sequence: Synthetic oligonucleotide
guugauggccacgcuuagg

SEQ ID NO: 611330 - RNA, 19 nt, Artificial Sequence
  Description of Artificial Sequence: Synthetic oligonucleotide
uagccugggagcucuucca

SEQ ID NO: 611331 - RNA, 19 nt, Artificial Sequence
  Description of Artificial Sequence: Synthetic oligonucleotide
guccucuacggaugcaaug

SEQ ID NO: 611332 - RNA, 19 nt, Artificial Sequence
  Description of Artificial Sequence: Synthetic oligonucleotide
agcauauggaccggagcug

SEQ ID NO: 611333 - RNA, 19 nt, Artificial Sequence
  Description of Artificial Sequence: Synthetic oligonucleotide
uacggaugcaaugguggcu

SEQ ID NO: 611334 - RNA, 19 nt, Artificial Sequence
  Description of Artificial Sequence: Synthetic oligonucleotide
uccucacgagaccucugcu

SEQ ID NO: 611335 - RNA, 19 nt, Artificial Sequence
  Description of Artificial Sequence: Synthetic oligonucleotide
ccguagggugacuacacgg

SEQ ID NO: 611336 - RNA, 19 nt, Artificial Sequence
  Description of Artificial Sequence: Synthetic oligonucleotide
gcauauggaccggagcugg

SEQ ID NO: 611337 - RNA, 19 nt, Artificial Sequence
  Description of Artificial Sequence: Synthetic oligonucleotide
gaggaagcgguuggcucgg

SEQ ID NO: 611338 - RNA, 19 nt, Artificial Sequence
  Description of Artificial Sequence: Synthetic oligonucleotide
ggccguugcucauagggug

SEQ ID NO: 611339 - RNA, 19 nt, Artificial Sequence
  Description of Artificial Sequence: Synthetic oligonucleotide
gguuaaggacacuguugag

SEQ ID NO: 611340 - RNA, 19 nt, Artificial Sequence
  Description of Artificial Sequence: Synthetic oligonucleotide
aagcuaggugcuacaucag

SEQ ID NO: 611341 - RNA, 19 nt, Artificial Sequence
  Description of Artificial Sequence: Synthetic oligonucleotide
cuguugauggccacgcuua

SEQ ID NO: 611342 - RNA, 19 nt, Artificial Sequence
  Description of Artificial Sequence: Synthetic oligonucleotide
cagggcuuguaugggacgc

SEQ ID NO: 611343 - RNA, 19 nt, Artificial Sequence
  Description of Artificial Sequence: Synthetic oligonucleotide
gagguagcauauggaccgg

SEQ ID NO: 611344 - RNA, 19 nt, Artificial Sequence
  Description of Artificial Sequence: Synthetic oligonucleotide
cacgcuuagguagaacuca

SEQ ID NO: 611345 - RNA, 19 nt, Artificial Sequence
  Description of Artificial Sequence: Synthetic oligonucleotide
ggugccuacgaugcguggg

SEQ ID NO: 611346 - RNA, 19 nt, Artificial Sequence
  Description of Artificial Sequence: Synthetic oligonucleotide
cuggaucaugccgaugaac

SEQ ID NO: 611347 - RNA, 19 nt, Artificial Sequence
  Description of Artificial Sequence: Synthetic oligonucleotide
gaggaagcuaggugcuaca

SEQ ID NO: 611348 - RNA, 19 nt, Artificial Sequence
  Description of Artificial Sequence: Synthetic oligonucleotide
gaccaugcaccaggaggcg

SEQ ID NO: 611349 - RNA, 19 nt, Artificial Sequence
  Description of Artificial Sequence: Synthetic oligonucleotide
ugaccgugccauccaggac

SEQ ID NO: 611350 - RNA, 19 nt, Artificial Sequence
  Description of Artificial Sequence: Synthetic oligonucleotide
acagcccgcagagagugug

SEQ ID NO: 611351 - RNA, 19 nt, Artificial Sequence
  Description of Artificial Sequence: Synthetic oligonucleotide
gugcucgaugguccguagg

SEQ ID NO: 611352 - RNA, 19 nt, Artificial Sequence
  Description of Artificial Sequence: Synthetic oligonucleotide
gacacgcaacagccaguag

SEQ ID NO: 611353 - RNA, 19 nt, Artificial Sequence
  Description of Artificial Sequence: Synthetic oligonucleotide
ugggcgagcuccucugcac

SEQ ID NO: 611354 - RNA, 19 nt, Artificial Sequence
  Description of Artificial Sequence: Synthetic oligonucleotide
ucacgagaccucugcucca

SEQ ID NO: 611355 - RNA, 19 nt, Artificial Sequence
  Description of Artificial Sequence: Synthetic oligonucleotide
ggugcugguugaugcaggc

SEQ ID NO: 611356 - RNA, 19 nt, Artificial Sequence
  Description of Artificial Sequence: Synthetic oligonucleotide
gacgcagcugucaggugug

SEQ ID NO: 611357 - RNA, 19 nt, Artificial Sequence
  Description of Artificial Sequence: Synthetic oligonucleotide
guagcaggguggaagggca

SEQ ID NO: 611358 - RNA, 19 nt, Artificial Sequence
  Description of Artificial Sequence: Synthetic oligonucleotide
gauccguuccacagcccgc

SEQ ID NO: 611359 - RNA, 19 nt, Artificial Sequence
  Description of Artificial Sequence: Synthetic oligonucleotide
ggcgcugaaggucaaagua

SEQ ID NO: 611360 - RNA, 19 nt, Artificial Sequence
  Description of Artificial Sequence: Synthetic oligonucleotide
gguaggacgggaccaguca

SEQ ID NO: 611361 - RNA, 19 nt, Artificial Sequence
  Description of Artificial Sequence: Synthetic oligonucleotide
uugcucauagggugccaaa

SEQ ID NO: 611362 - RNA, 19 nt, Artificial Sequence
  Description of Artificial Sequence: Synthetic oligonucleotide
acgcuuagguagaacucag

SEQ ID NO: 611363 - RNA, 19 nt, Artificial Sequence
  Description of Artificial Sequence: Synthetic oligonucleotide
aggugcuacaucagggccu

SEQ ID NO: 611364 - RNA, 19 nt, Artificial Sequence
  Description of Artificial Sequence: Synthetic oligonucleotide
aagcuaaccgagaggucaa

SEQ ID NO: 611365 - RNA, 19 nt, Artificial Sequence
  Description of Artificial Sequence: Synthetic oligonucleotide
cacccgguucagcaccugg

SEQ ID NO: 611366 - RNA, 19 nt, Artificial Sequence
  Description of Artificial Sequence: Synthetic oligonucleotide
acggucaaacagguuccuc

SEQ ID NO: 611367 - RNA, 19 nt, Artificial Sequence
  Description of Artificial Sequence: Synthetic oligonucleotide
guaggacgggaccagucaa

SEQ ID NO: 611368 - RNA, 19 nt, Artificial Sequence
  Description of Artificial Sequence: Synthetic oligonucleotide
acggaugcaaugguggcuu

SEQ ID NO: 611369 - RNA, 19 nt, Artificial Sequence
  Description of Artificial Sequence: Synthetic oligonucleotide
gucaaucacgauauuggcu

SEQ ID NO: 611370 - RNA, 19 nt, Artificial Sequence
  Description of Artificial Sequence: Synthetic oligonucleotide
caagacucgcaacaagcua

SEQ ID NO: 611371 - RNA, 19 nt, Artificial Sequence
  Description of Artificial Sequence: Synthetic oligonucleotide
aguuucgcucuaggcguuc

SEQ ID NO: 611372 - RNA, 19 nt, Artificial Sequence
  Description of Artificial Sequence: Synthetic oligonucleotide
aaagccgcaccaggaucca

SEQ ID NO: 611373 - RNA, 19 nt, Artificial Sequence
  Description of Artificial Sequence: Synthetic oligonucleotide
auguccucacgagaccucu

SEQ ID NO: 611374 - RNA, 19 nt, Artificial Sequence
  Description of Artificial Sequence: Synthetic oligonucleotide
guagcugaggaggcggcac

SEQ ID NO: 611375 - RNA, 19 nt, Artificial Sequence
  Description of Artificial Sequence: Synthetic oligonucleotide
ggaguagaugguggcgugg

SEQ ID NO: 611376 - RNA, 19 nt, Artificial Sequence
  Description of Artificial Sequence: Synthetic oligonucleotide
ggaagcuaggugcuacauc

SEQ ID NO: 611377 - RNA, 19 nt, Artificial Sequence
  Description of Artificial Sequence: Synthetic oligonucleotide
gucguagaagaucugccau

SEQ ID NO: 611378 - RNA, 19 nt, Artificial Sequence
  Description of Artificial Sequence: Synthetic oligonucleotide
agacacgcaacagccagua

SEQ ID NO: 611379 - RNA, 19 nt, Artificial Sequence
  Description of Artificial Sequence: Synthetic oligonucleotide
gacucgcaacaagcuaacc

SEQ ID NO: 611380 - RNA, 19 nt, Artificial Sequence
  Description of Artificial Sequence: Synthetic oligonucleotide
uccguuccacagcccgcag

SEQ ID NO: 611381 - RNA, 19 nt, Artificial Sequence
  Description of Artificial Sequence: Synthetic oligonucleotide
guuggcucggcccaggguu

SEQ ID NO: 611382 - RNA, 19 nt, Artificial Sequence
  Description of Artificial Sequence: Synthetic oligonucleotide
guaugggacgcugggccgc

SEQ ID NO: 611383 - RNA, 19 nt, Artificial Sequence
  Description of Artificial Sequence: Synthetic oligonucleotide
gccauugcauacucguuga

SEQ ID NO: 611384 - RNA, 19 nt, Artificial Sequence
  Description of Artificial Sequence: Synthetic oligonucleotide
gcggaguuuguccucugug

SEQ ID NO: 611385 - RNA, 19 nt, Artificial Sequence
  Description of Artificial Sequence: Synthetic oligonucleotide
cagcccgcagagagugugg

SEQ ID NO: 611386 - RNA, 19 nt, Artificial Sequence
  Description of Artificial Sequence: Synthetic oligonucleotide
auccguuccacagcccgca

SEQ ID NO: 611387 - RNA, 19 nt, Artificial Sequence
  Description of Artificial Sequence: Synthetic oligonucleotide
agacccugugcgguccccg

SEQ ID NO: 611388 - RNA, 19 nt, Artificial Sequence
  Description of Artificial Sequence: Synthetic oligonucleotide
gcuaaccgagaggucaaag

SEQ ID NO: 611389 - RNA, 19 nt, Artificial Sequence
  Description of Artificial Sequence: Synthetic oligonucleotide
ugggccgacgcagcuguca

SEQ ID NO: 611390 - RNA, 19 nt, Artificial Sequence
  Description of Artificial Sequence: Synthetic oligonucleotide
ucaugccgaugaacucaga

SEQ ID NO: 611391 - RNA, 19 nt, Artificial Sequence
  Description of Artificial Sequence: Synthetic oligonucleotide
uaugggacgcugggccgcc

SEQ ID NO: 611392 - RNA, 19 nt, Artificial Sequence
  Description of Artificial Sequence: Synthetic oligonucleotide
gcaccggcggaguuugucc

SEQ ID NO: 611393 - RNA, 19 nt, Artificial Sequence
  Description of Artificial Sequence: Synthetic oligonucleotide
cacgcaacagccaguagau

SEQ ID NO: 611394 - RNA, 19 nt, Artificial Sequence
  Description of Artificial Sequence: Synthetic oligonucleotide
gggucaugaggcucacagc

SEQ ID NO: 611395 - RNA, 19 nt, Artificial Sequence
  Description of Artificial Sequence: Synthetic oligonucleotide
cuggaccaugcaccaggag

SEQ ID NO: 611396 - RNA, 19 nt, Artificial Sequence
  Description of Artificial Sequence: Synthetic oligonucleotide
aggaagcuaggugcuacau

SEQ ID NO: 611397 - RNA, 19 nt, Artificial Sequence
  Description of Artificial Sequence: Synthetic oligonucleotide
guguauagcgguacccaaa

SEQ ID NO: 611398 - RNA, 19 nt, Artificial Sequence
  Description of Artificial Sequence: Synthetic oligonucleotide
cacggucagcgagcgaacc

SEQ ID NO: 611399 - RNA, 19 nt, Artificial Sequence
  Description of Artificial Sequence: Synthetic oligonucleotide
gcaucagugagucucgaau

SEQ ID NO: 611400 - RNA, 19 nt, Artificial Sequence
  Description of Artificial Sequence: Synthetic oligonucleotide
gccacgcuuagguagaacu

SEQ ID NO: 611401 - RNA, 19 nt, Artificial Sequence
  Description of Artificial Sequence: Synthetic oligonucleotide
guaccaggaugccggucac

SEQ ID NO: 611402 - RNA, 19 nt, Artificial Sequence
  Description of Artificial Sequence: Synthetic oligonucleotide
gucuuucgaaggugugaga

SEQ ID NO: 611403 - RNA, 19 nt, Artificial Sequence
  Description of Artificial Sequence: Synthetic oligonucleotide
ggauccaguuggucugggc

SEQ ID NO: 611404 - RNA, 19 nt, Artificial Sequence
  Description of Artificial Sequence: Synthetic oligonucleotide
gcccucaauguccucacga

SEQ ID NO: 611405 - RNA, 19 nt, Artificial Sequence
  Description of Artificial Sequence: Synthetic oligonucleotide
guugcucauagggugccaa

SEQ ID NO: 611406 - RNA, 19 nt, Artificial Sequence
  Description of Artificial Sequence: Synthetic oligonucleotide
agcgguacccaaacccaca

SEQ ID NO: 611407 - RNA, 19 nt, Artificial Sequence
  Description of Artificial Sequence: Synthetic oligonucleotide
cacgagaccucugcuccac

SEQ ID NO: 611408 - RNA, 19 nt, Artificial Sequence
  Description of Artificial Sequence: Synthetic oligonucleotide
cagccguguauagcgguac

SEQ ID NO: 611409 - RNA, 19 nt, Artificial Sequence
  Description of Artificial Sequence: Synthetic oligonucleotide
cgccguggggucaugaggc

SEQ ID NO: 611410 - RNA, 19 nt, Artificial Sequence
  Description of Artificial Sequence: Synthetic oligonucleotide
ggcccaguuaagcugguua

SEQ ID NO: 611411 - RNA, 19 nt, Artificial Sequence
  Description of Artificial Sequence: Synthetic oligonucleotide
ccaaagccgcaccaggauc

SEQ ID NO: 611412 - RNA, 19 nt, Artificial Sequence
  Description of Artificial Sequence: Synthetic oligonucleotide
ccacgcuuagguagaacuc

SEQ ID NO: 611413 - RNA, 19 nt, Artificial Sequence
  Description of Artificial Sequence: Synthetic oligonucleotide
ugccggucacugccaccag

SEQ ID NO: 611414 - RNA, 19 nt, Artificial Sequence
  Description of Artificial Sequence: Synthetic oligonucleotide
agguagcauauggaccgga

SEQ ID NO: 611415 - RNA, 19 nt, Artificial Sequence
  Description of Artificial Sequence: Synthetic oligonucleotide
gauugggcagagguccucu

SEQ ID NO: 611416 - RNA, 19 nt, Artificial Sequence
  Description of Artificial Sequence: Synthetic oligonucleotide
aaguuucgcucuaggcguu

SEQ ID NO: 611417 - RNA, 19 nt, Artificial Sequence
  Description of Artificial Sequence: Synthetic oligonucleotide
ccuacgaugcgugggucag

SEQ ID NO: 611418 - RNA, 19 nt, Artificial Sequence
  Description of Artificial Sequence: Synthetic oligonucleotide
caugcaccaggaggcguac

SEQ ID NO: 611419 - RNA, 19 nt, Artificial Sequence
  Description of Artificial Sequence: Synthetic oligonucleotide
gcccaguuaagcugguuaa

SEQ ID NO: 611420 - RNA, 19 nt, Artificial Sequence
  Description of Artificial Sequence: Synthetic oligonucleotide
caauguccucacgagaccu

SEQ ID NO: 611421 - RNA, 19 nt, Artificial Sequence
  Description of Artificial Sequence: Synthetic oligonucleotide
agacgccgaagcagcaucu

SEQ ID NO: 611422 - RNA, 19 nt, Artificial Sequence
  Description of Artificial Sequence: Synthetic oligonucleotide
cuacgaugcgugggucagc

SEQ ID NO: 611423 - RNA, 19 nt, Artificial Sequence
  Description of Artificial Sequence: Synthetic oligonucleotide
gcgggcaaggcagugccag

SEQ ID NO: 611424 - RNA, 19 nt, Artificial Sequence
  Description of Artificial Sequence: Synthetic oligonucleotide
uuccggucaggggcgggca

SEQ ID NO: 611425 - RNA, 19 nt, Artificial Sequence
  Description of Artificial Sequence: Synthetic oligonucleotide
gccguguauagcgguaccc

SEQ ID NO: 611426 - RNA, 19 nt, Artificial Sequence
  Description of Artificial Sequence: Synthetic oligonucleotide
gggccgacgcagcugucag

SEQ ID NO: 611427 - RNA, 19 nt, Artificial Sequence
  Description of Artificial Sequence: Synthetic oligonucleotide
gggucuuucgaagguguga

SEQ ID NO: 611428 - RNA, 19 nt, Artificial Sequence
  Description of Artificial Sequence: Synthetic oligonucleotide
gugagucucgaaugucggu

SEQ ID NO: 611429 - RNA, 19 nt, Artificial Sequence
  Description of Artificial Sequence: Synthetic oligonucleotide
caguccucuacggaugcaa

SEQ ID NO: 611430 - RNA, 19 nt, Artificial Sequence
  Description of Artificial Sequence: Synthetic oligonucleotide
agggcuuguaugggacgcu

SEQ ID NO: 611431 - RNA, 19 nt, Artificial Sequence
  Description of Artificial Sequence: Synthetic oligonucleotide
guuucgcucuaggcguuca

SEQ ID NO: 611432 - RNA, 19 nt, Artificial Sequence
  Description of Artificial Sequence: Synthetic oligonucleotide
gugccuacgaugcgugggu

SEQ ID NO: 611433 - RNA, 19 nt, Artificial Sequence
  Description of Artificial Sequence: Synthetic oligonucleotide
gaaugucggugccuacgau

SEQ ID NO: 611434 - RNA, 19 nt, Artificial Sequence
  Description of Artificial Sequence: Synthetic oligonucleotide
ucuaggcguucagcagccu

SEQ ID NO: 611435 - RNA, 19 nt, Artificial Sequence
  Description of Artificial Sequence: Synthetic oligonucleotide
agguuccucucagcuguca

SEQ ID NO: 611436 - RNA, 19 nt, Artificial Sequence
  Description of Artificial Sequence: Synthetic oligonucleotide
ccgccguggggucaugagg

SEQ ID NO: 611437 - RNA, 19 nt, Artificial Sequence
  Description of Artificial Sequence: Synthetic oligonucleotide
gccguugcucauagggugc

SEQ ID NO: 611438 - RNA, 19 nt, Artificial Sequence
  Description of Artificial Sequence: Synthetic oligonucleotide
caggcaagacggcggcuca

SEQ ID NO: 611439 - RNA, 19 nt, Artificial Sequence
  Description of Artificial Sequence: Synthetic oligonucleotide
cagcugccugggccgacgc

SEQ ID NO: 611440 - RNA, 19 nt, Artificial Sequence
  Description of Artificial Sequence: Synthetic oligonucleotide
ggaugccggucacugccac

SEQ ID NO: 611441 - RNA, 19 nt, Artificial Sequence
  Description of Artificial Sequence: Synthetic oligonucleotide
gggcuuguaugggacgcug

SEQ ID NO: 611442 - RNA, 19 nt, Artificial Sequence
  Description of Artificial Sequence: Synthetic oligonucleotide
cagggccguugcucauagg

SEQ ID NO: 611443 - RNA, 19 nt, Artificial Sequence
  Description of Artificial Sequence: Synthetic oligonucleotide
gucagcgagcgaaccuuca

SEQ ID NO: 611444 - RNA, 19 nt, Artificial Sequence
  Description of Artificial Sequence: Synthetic oligonucleotide
ccagggccguugcucauag

SEQ ID NO: 611445 - RNA, 19 nt, Artificial Sequence
  Description of Artificial Sequence: Synthetic oligonucleotide
uuggggcaccggcggaguu

SEQ ID NO: 611446 - RNA, 19 nt, Artificial Sequence
  Description of Artificial Sequence: Synthetic oligonucleotide
ccaagacucgcaacaagcu

SEQ ID NO: 611447 - RNA, 19 nt, Artificial Sequence
  Description of Artificial Sequence: Synthetic oligonucleotide
ggaccggagcuggaagcag

SEQ ID NO: 611448 - RNA, 19 nt, Artificial Sequence
  Description of Artificial Sequence: Synthetic oligonucleotide
gucggugccuacgaugcgu

SEQ ID NO: 611449 - RNA, 19 nt, Artificial Sequence
  Description of Artificial Sequence: Synthetic oligonucleotide
uggggcaccggcggaguuu

SEQ ID NO: 611450 - RNA, 19 nt, Artificial Sequence
  Description of Artificial Sequence: Synthetic oligonucleotide
agcuaaccgagaggucaaa

SEQ ID NO: 611451 - RNA, 19 nt, Artificial Sequence
  Description of Artificial Sequence: Synthetic oligonucleotide
gguggcuugcucugucucu

SEQ ID NO: 611452 - RNA, 19 nt, Artificial Sequence
  Description of Artificial Sequence: Synthetic oligonucleotide
ggauaggguagugguccac

SEQ ID NO: 611453 - RNA, 19 nt, Artificial Sequence
  Description of Artificial Sequence: Synthetic oligonucleotide
ggggcaccggcggaguuug

SEQ ID NO: 611454 - RNA, 19 nt, Artificial Sequence
  Description of Artificial Sequence: Synthetic oligonucleotide
gccgccguggggucaugag

SEQ ID NO: 611455 - RNA, 19 nt, Artificial Sequence
  Description of Artificial Sequence: Synthetic oligonucleotide
guguagcucuguagagaga

SEQ ID NO: 611456 - RNA, 19 nt, Artificial Sequence
  Description of Artificial Sequence: Synthetic oligonucleotide
ccacaaaguuucgcucuag

SEQ ID NO: 611457 - RNA, 19 nt, Artificial Sequence
  Description of Artificial Sequence: Synthetic oligonucleotide
ggaggcguaccaggaugcc

SEQ ID NO: 611458 - RNA, 19 nt, Artificial Sequence
  Description of Artificial Sequence: Synthetic oligonucleotide
gagcugccggcuguccaca

SEQ ID NO: 611459 - RNA, 19 nt, Artificial Sequence
  Description of Artificial Sequence: Synthetic oligonucleotide
aggcuggaacacagcagaa

SEQ ID NO: 611460 - RNA, 19 nt, Artificial Sequence
  Description of Artificial Sequence: Synthetic oligonucleotide
gcugugcaagacgccgaag

SEQ ID NO: 611461 - RNA, 19 nt, Artificial Sequence
  Description of Artificial Sequence: Synthetic oligonucleotide
cgguccccgugcucgaugg

SEQ ID NO: 611462 - RNA, 19 nt, Artificial Sequence
  Description of Artificial Sequence: Synthetic oligonucleotide
cagauugggcagagguccu

SEQ ID NO: 611463 - RNA, 19 nt, Artificial Sequence
  Description of Artificial Sequence: Synthetic oligonucleotide
gggucuccucauagccugg

SEQ ID NO: 611464 - RNA, 19 nt, Artificial Sequence
  Description of Artificial Sequence: Synthetic oligonucleotide
cagcugucacccgguucag

SEQ ID NO: 611465 - RNA, 19 nt, Artificial Sequence
  Description of Artificial Sequence: Synthetic oligonucleotide
acgaugcgugggucagcaa

SEQ ID NO: 611466 - RNA, 19 nt, Artificial Sequence
  Description of Artificial Sequence: Synthetic oligonucleotide
ggaagccguagggugacua

SEQ ID NO: 611467 - RNA, 19 nt, Artificial Sequence
  Description of Artificial Sequence: Synthetic oligonucleotide
cgaaugucggugccuacga

SEQ ID NO: 611468 - RNA, 19 nt, Artificial Sequence
  Description of Artificial Sequence: Synthetic oligonucleotide
gcucgaugguccguaggca

SEQ ID NO: 611469 - RNA, 19 nt, Artificial Sequence
  Description of Artificial Sequence: Synthetic oligonucleotide
gcgcuuccggucaggggcg

SEQ ID NO: 611470 - RNA, 19 nt, Artificial Sequence
  Description of Artificial Sequence: Synthetic oligonucleotide
caaucacgauauuggcuuu

SEQ ID NO: 611471 - RNA, 19 nt, Artificial Sequence
  Description of Artificial Sequence: Synthetic oligonucleotide
ccguugcucauagggugcc

SEQ ID NO: 611472 - RNA, 19 nt, Artificial Sequence
  Description of Artificial Sequence: Synthetic oligonucleotide
ccguguauagcgguaccca

SEQ ID NO: 611473 - RNA, 19 nt, Artificial Sequence
  Description of Artificial Sequence: Synthetic oligonucleotide
ggucagcgagcgaaccuuc

SEQ ID NO: 611474 - RNA, 19 nt, Artificial Sequence
  Description of Artificial Sequence: Synthetic oligonucleotide
uggccacgcuuagguagaa

SEQ ID NO: 611475 - RNA, 19 nt, Artificial Sequence
  Description of Artificial Sequence: Synthetic oligonucleotide
aggcguucagcagccuguu

SEQ ID NO: 611476 - RNA, 19 nt, Artificial Sequence
  Description of Artificial Sequence: Synthetic oligonucleotide
caccggcggaguuuguccu

SEQ ID NO: 611477 - RNA, 19 nt, Artificial Sequence
  Description of Artificial Sequence: Synthetic oligonucleotide
ccgccguugggguuugcuc

SEQ ID NO: 611478 - RNA, 19 nt, Artificial Sequence
  Description of Artificial Sequence: Synthetic oligonucleotide
accgugccauccaggacuu

SEQ ID NO: 611479 - RNA, 19 nt, Artificial Sequence
  Description of Artificial Sequence: Synthetic oligonucleotide
ggcagccguguauagcggu

SEQ ID NO: 611480 - RNA, 19 nt, Artificial Sequence
  Description of Artificial Sequence: Synthetic oligonucleotide
cugugcgguccccgugcuc

SEQ ID NO: 611481 - RNA, 19 nt, Artificial Sequence
  Description of Artificial Sequence: Synthetic oligonucleotide
cguguauagcgguacccaa

SEQ ID NO: 611482 - RNA, 19 nt, Artificial Sequence
  Description of Artificial Sequence: Synthetic oligonucleotide
ggcaccggcggaguuuguc

SEQ ID NO: 611483 - RNA, 19 nt, Artificial Sequence
  Description of Artificial Sequence: Synthetic oligonucleotide
acgcaacagccaguagaua

SEQ ID NO: 611484 - RNA, 19 nt, Artificial Sequence
  Description of Artificial Sequence: Synthetic oligonucleotide
cguagggugacuacacggu

SEQ ID NO: 611485 - RNA, 19 nt, Artificial Sequence
  Description of Artificial Sequence: Synthetic oligonucleotide
aggaagccguagggugacu

SEQ ID NO: 611486 - RNA, 19 nt, Artificial Sequence
  Description of Artificial Sequence: Synthetic oligonucleotide
cgaugguccguaggcagac

SEQ ID NO: 611487 - RNA, 19 nt, Artificial Sequence
  Description of Artificial Sequence: Synthetic oligonucleotide
gcgguccccgugcucgaug

SEQ ID NO: 611488 - RNA, 19 nt, Artificial Sequence
  Description of Artificial Sequence: Synthetic oligonucleotide
guaaaacuuucuggcucuu

SEQ ID NO: 611489 - RNA, 19 nt, Artificial Sequence
  Description of Artificial Sequence: Synthetic oligonucleotide
gcaagacgccgaagcagca

SEQ ID NO: 611490 - RNA, 19 nt, Artificial Sequence
  Description of Artificial Sequence: Synthetic oligonucleotide
cgugcucgaugguccguag

SEQ ID NO: 611491 - RNA, 19 nt, Artificial Sequence
  Description of Artificial Sequence: Synthetic oligonucleotide
gggauccguuccacagccc

SEQ ID NO: 611492 - RNA, 19 nt, Artificial Sequence
  Description of Artificial Sequence: Synthetic oligonucleotide
agggugccaaaagguucuu

SEQ ID NO: 611493 - RNA, 19 nt, Artificial Sequence
  Description of Artificial Sequence: Synthetic oligonucleotide
gcguggacccaggcaagac

SEQ ID NO: 611494 - RNA, 19 nt, Artificial Sequence
  Description of Artificial Sequence: Synthetic oligonucleotide
caagacgccgaagcagcau

SEQ ID NO: 611495 - RNA, 19 nt, Artificial Sequence
  Description of Artificial Sequence: Synthetic oligonucleotide
ggcguggacccaggcaaga

SEQ ID NO: 611496 - RNA, 19 nt, Artificial Sequence
  Description of Artificial Sequence: Synthetic oligonucleotide
gcuuccggucaggggcggg

SEQ ID NO: 611497 - RNA, 19 nt, Artificial Sequence
  Description of Artificial Sequence: Synthetic oligonucleotide
ggugcuacaucagggccuu

SEQ ID NO: 611498 - RNA, 19 nt, Artificial Sequence
  Description of Artificial Sequence: Synthetic oligonucleotide
cguugacaucaugaccgug

SEQ ID NO: 611499 - RNA, 19 nt, Artificial Sequence
  Description of Artificial Sequence: Synthetic oligonucleotide
ggccacgcuuagguagaac

SEQ ID NO: 611500 - RNA, 19 nt, Artificial Sequence
  Description of Artificial Sequence: Synthetic oligonucleotide
cggugccuacgaugcgugg

SEQ ID NO: 611501 - RNA, 19 nt, Artificial Sequence
  Description of Artificial Sequence: Synthetic oligonucleotide
cacggucaaacagguuccu

SEQ ID NO: 611502 - RNA, 19 nt, Artificial Sequence
  Description of Artificial Sequence: Synthetic oligonucleotide
ccggucaggggcgggcaag

SEQ ID NO: 611503 - RNA, 19 nt, Artificial Sequence
  Description of Artificial Sequence: Synthetic oligonucleotide
agacggcggcucagguggu

SEQ ID NO: 611504 - RNA, 19 nt, Artificial Sequence
  Description of Artificial Sequence: Synthetic oligonucleotide
gcagccguguauagcggua

SEQ ID NO: 611505 - RNA, 19 nt, Artificial Sequence
  Description of Artificial Sequence: Synthetic oligonucleotide
gggccguugcucauagggu

SEQ ID NO: 611506 - RNA, 19 nt, Artificial Sequence
  Description of Artificial Sequence: Synthetic oligonucleotide
cuuggggcaccggcggagu

SEQ ID NO: 611507 - RNA, 19 nt, Artificial Sequence
  Description of Artificial Sequence: Synthetic oligonucleotide
cgacgcagcugucaggugu

SEQ ID NO: 611508 - RNA, 19 nt, Artificial Sequence
  Description of Artificial Sequence: Synthetic oligonucleotide
ccguggggucaugaggcuc

SEQ ID NO: 611509 - RNA, 19 nt, Artificial Sequence
  Description of Artificial Sequence: Synthetic oligonucleotide
ccgacgcagcugucaggug

SEQ ID NO: 611510 - RNA, 19 nt, Artificial Sequence
  Description of Artificial Sequence: Synthetic oligonucleotide
ccucuacggaugcaauggu

SEQ ID NO: 611511 - RNA, 19 nt, Artificial Sequence
  Description of Artificial Sequence: Synthetic oligonucleotide
cuccacggucagcgagcga

SEQ ID NO: 611512 - RNA, 19 nt, Artificial Sequence
  Description of Artificial Sequence: Synthetic oligonucleotide
cgccguugggguuugcucu

SEQ ID NO: 611513 - RNA, 19 nt, Artificial Sequence
  Description of Artificial Sequence: Synthetic oligonucleotide
ccaguuggucugggcccag

SEQ ID NO: 611514 - RNA, 19 nt, Artificial Sequence
  Description of Artificial Sequence: Synthetic oligonucleotide
gccgcaccaggauccaguu

SEQ ID NO: 611515 - RNA, 19 nt, Artificial Sequence
  Description of Artificial Sequence: Synthetic oligonucleotide
gccguugggguuugcucuu

SEQ ID NO: 611516 - RNA, 19 nt, Artificial Sequence
  Description of Artificial Sequence: Synthetic oligonucleotide
ggcgggcaaggcagugcca

SEQ ID NO: 611517 - RNA, 19 nt, Artificial Sequence
  Description of Artificial Sequence: Synthetic oligonucleotide
ccaguccucuacggaugca

SEQ ID NO: 611518 - RNA, 19 nt, Artificial Sequence
  Description of Artificial Sequence: Synthetic oligonucleotide
gggccauugcauacucguu

SEQ ID NO: 611519 - RNA, 19 nt, Artificial Sequence
  Description of Artificial Sequence: Synthetic oligonucleotide
ggccgccguggggucauga

SEQ ID NO: 611520 - RNA, 19 nt, Artificial Sequence
  Description of Artificial Sequence: Synthetic oligonucleotide
gccgccguugggguuugcu

SEQ ID NO: 611521 - RNA, 19 nt, Artificial Sequence
  Description of Artificial Sequence: Synthetic oligonucleotide
ccgugcucgaugguccgua

SEQ ID NO: 611522 - RNA, 19 nt, Artificial Sequence
  Description of Artificial Sequence: Synthetic oligonucleotide
ggggugggcauagcagauu

SEQ ID NO: 611523 - RNA, 19 nt, Artificial Sequence
  Description of Artificial Sequence: Synthetic oligonucleotide
aggccgccguggggucaug

SEQ ID NO: 611524 - RNA, 19 nt, Artificial Sequence
  Description of Artificial Sequence: Synthetic oligonucleotide
cgcuuccggucaggggcgg

SEQ ID NO: 611525 - RNA, 19 nt, Artificial Sequence
  Description of Artificial Sequence: Synthetic oligonucleotide
cguugcucauagggugcca

SEQ ID NO: 611526 - RNA, 19 nt, Artificial Sequence
  Description of Artificial Sequence: Synthetic oligonucleotide
ggccugcaucagugagucu

SEQ ID NO: 611527 - RNA, 19 nt, Artificial Sequence
  Description of Artificial Sequence: Synthetic oligonucleotide
ccugugcgguccccgugcu

SEQ ID NO: 611528 - RNA, 19 nt, Artificial Sequence
  Description of Artificial Sequence: Synthetic oligonucleotide
caccagugugauggucauu

SEQ ID NO: 611529 - RNA, 19 nt, Artificial Sequence
  Description of Artificial Sequence: Synthetic oligonucleotide
ccgauggccagggcuugua

SEQ ID NO: 611530 - RNA, 19 nt, Artificial Sequence
  Description of Artificial Sequence: Synthetic oligonucleotide
gggacgcugggccgccguu

SEQ ID NO: 611531 - RNA, 19 nt, Artificial Sequence
  Description of Artificial Sequence: Synthetic oligonucleotide
cggucagcgagcgaaccuu

SEQ ID NO: 611532 - RNA, 19 nt, Artificial Sequence
  Description of Artificial Sequence: Synthetic oligonucleotide
ccgugccauccaggacuuc

SEQ ID NO: 611533 - RNA, 19 nt, Artificial Sequence
  Description of Artificial Sequence: Synthetic oligonucleotide
cggaugcaaugguggcuuu

SEQ ID NO: 611534 - RNA, 19 nt, Artificial Sequence
  Description of Artificial Sequence: Synthetic oligonucleotide
gggcaccggcggaguuugu

SEQ ID NO: 611535 - RNA, 19 nt, Artificial Sequence
  Description of Artificial Sequence: Synthetic oligonucleotide
aauaauaugaaauugccgg

SEQ ID NO: 611536 - RNA, 19 nt, Artificial Sequence
  Description of Artificial Sequence: Synthetic oligonucleotide
aauauguucagggucaucc

SEQ ID NO: 611537 - RNA, 19 nt, Artificial Sequence
  Description of Artificial Sequence: Synthetic oligonucleotide
auucuagugacacuaaugc

SEQ ID NO: 611538 - RNA, 19 nt, Artificial Sequence
  Description of Artificial Sequence: Synthetic oligonucleotide
guuguuaaaacauaguucc

SEQ ID NO: 611539 - RNA, 19 nt, Artificial Sequence
  Description of Artificial Sequence: Synthetic oligonucleotide
aaguauauuauuucuauga

SEQ ID NO: 611540 - RNA, 19 nt, Artificial Sequence
  Description of Artificial Sequence: Synthetic oligonucleotide
uaauauuauauugugaugc

SEQ ID NO: 611541 - RNA, 19 nt, Artificial Sequence
  Description of Artificial Sequence: Synthetic oligonucleotide
ucuaauguggcugugauag

SEQ ID NO: 611542 - RNA, 19 nt, Artificial Sequence
  Description of Artificial Sequence: Synthetic oligonucleotide
uuaaguuugugcacaaugg

SEQ ID NO: 611543 - RNA, 19 nt, Artificial Sequence
  Description of Artificial Sequence: Synthetic oligonucleotide
uuuauuacuagcgaaaaug

SEQ ID NO: 611544 - RNA, 19 nt, Artificial Sequence
  Description of Artificial Sequence: Synthetic oligonucleotide
ugaguaguaaugaagaaac

SEQ ID NO: 611545 - RNA, 19 nt, Artificial Sequence
  Description of Artificial Sequence: Synthetic oligonucleotide
ucuuccaacaucuuuaggc

SEQ ID NO: 611546 - RNA, 19 nt, Artificial Sequence
  Description of Artificial Sequence: Synthetic oligonucleotide
aaugcuuacuagcccaacc

SEQ ID NO: 611547 - RNA, 19 nt, Artificial Sequence
  Description of Artificial Sequence: Synthetic oligonucleotide
aaagaagcaauacauuugu

SEQ ID NO: 611548 - RNA, 19 nt, Artificial Sequence
  Description of Artificial Sequence: Synthetic oligonucleotide
uauuauauugugaugcucu

SEQ ID NO: 611549 - RNA, 19 nt, Artificial Sequence
  Description of Artificial Sequence: Synthetic oligonucleotide
agaagcaauacauuuguuc

SEQ ID NO: 611550 - RNA, 19 nt, Artificial Sequence
  Description of Artificial Sequence: Synthetic oligonucleotide
aggaauacguucuuugacc

SEQ ID NO: 611551 - RNA, 19 nt, Artificial Sequence
  Description of Artificial Sequence: Synthetic oligonucleotide
acaugaaucugucuaaaac

SEQ ID NO: 611552 - RNA, 19 nt, Artificial Sequence
  Description of Artificial Sequence: Synthetic oligonucleotide
uguaguuuagcugaugggg

SEQ ID NO: 611553 - RNA, 19 nt, Artificial Sequence
  Description of Artificial Sequence: Synthetic oligonucleotide
ucugucuaaaaccagacaa

SEQ ID NO: 611554 - RNA, 19 nt, Artificial Sequence
  Description of Artificial Sequence: Synthetic oligonucleotide
auuucuaugaauuuucuau

SEQ ID NO: 611555 - RNA, 19 nt, Artificial Sequence
  Description of Artificial Sequence: Synthetic oligonucleotide
agcgaaaaugcuuacuagc

SEQ ID NO: 611556 - RNA, 19 nt, Artificial Sequence
  Description of Artificial Sequence: Synthetic oligonucleotide
accaucaacagccauuggc

SEQ ID NO: 611557 - RNA, 19 nt, Artificial Sequence
  Description of Artificial Sequence: Synthetic oligonucleotide
acaauaauaugaaauugcc

SEQ ID NO: 611558 - RNA, 19 nt, Artificial Sequence
  Description of Artificial Sequence: Synthetic oligonucleotide
acugaauauguucaggguc

SEQ ID NO: 611559 - RNA, 19 nt, Artificial Sequence
  Description of Artificial Sequence: Synthetic oligonucleotide
aacacaagcagucauucca

SEQ ID NO: 611560 - RNA, 19 nt, Artificial Sequence
  Description of Artificial Sequence: Synthetic oligonucleotide
agugauaacuguuuaaaca

SEQ ID NO: 611561 - RNA, 19 nt, Artificial Sequence
  Description of Artificial Sequence: Synthetic oligonucleotide
agucauuccaggcaaaauc

SEQ ID NO: 611562 - RNA, 19 nt, Artificial Sequence
  Description of Artificial Sequence: Synthetic oligonucleotide
uaaagaagcaauacauuug

SEQ ID NO: 611563 - RNA, 19 nt, Artificial Sequence
  Description of Artificial Sequence: Synthetic oligonucleotide
uguuguuaaaacauaguuc

SEQ ID NO: 611564 - RNA, 19 nt, Artificial Sequence
  Description of Artificial Sequence: Synthetic oligonucleotide
aauauuauauugugaugcu

SEQ ID NO: 611565 - RNA, 19 nt, Artificial Sequence
  Description of Artificial Sequence: Synthetic oligonucleotide
uucuuugaccauaauaaca

SEQ ID NO: 611566 - RNA, 19 nt, Artificial Sequence
  Description of Artificial Sequence: Synthetic oligonucleotide
ugaaugcucaaauaugagc

SEQ ID NO: 611567 - RNA, 19 nt, Artificial Sequence
  Description of Artificial Sequence: Synthetic oligonucleotide
accaaguaauuauuaaggg

SEQ ID NO: 611568 - RNA, 19 nt, Artificial Sequence
  Description of Artificial Sequence: Synthetic oligonucleotide
ucuacaucguugaauacca

SEQ ID NO: 611569 - RNA, 19 nt, Artificial Sequence
  Description of Artificial Sequence: Synthetic oligonucleotide
aauguaugcacuuguggcu

SEQ ID NO: 611570 - RNA, 19 nt, Artificial Sequence
  Description of Artificial Sequence: Synthetic oligonucleotide
auuauuauggacaaguuaa

SEQ ID NO: 611571 - RNA, 19 nt, Artificial Sequence
  Description of Artificial Sequence: Synthetic oligonucleotide
auaauaacaaacucacgca

SEQ ID NO: 611572 - RNA, 19 nt, Artificial Sequence
  Description of Artificial Sequence: Synthetic oligonucleotide
auguguacaguccaucuac

SEQ ID NO: 611573 - RNA, 19 nt, Artificial Sequence
  Description of Artificial Sequence: Synthetic oligonucleotide
ucuagugacacuaaugcua

SEQ ID NO: 611574 - RNA, 19 nt, Artificial Sequence
  Description of Artificial Sequence: Synthetic oligonucleotide
aaaucagggugugugaagg

SEQ ID NO: 611575 - RNA, 19 nt, Artificial Sequence
  Description of Artificial Sequence: Synthetic oligonucleotide
gaggaacuucuuuacaugg

SEQ ID NO: 611576 - RNA, 19 nt, Artificial Sequence
  Description of Artificial Sequence: Synthetic oligonucleotide
aaacucacgcaaaagacag

SEQ ID NO: 611577 - RNA, 19 nt, Artificial Sequence
  Description of Artificial Sequence: Synthetic oligonucleotide
aucuacaucguugaauacc

SEQ ID NO: 611578 - RNA, 19 nt, Artificial Sequence
  Description of Artificial Sequence: Synthetic oligonucleotide
uguaugacuuuauuaauaa

SEQ ID NO: 611579 - RNA, 19 nt, Artificial Sequence
  Description of Artificial Sequence: Synthetic oligonucleotide
uggauagccacaauuauau

SEQ ID NO: 611580 - RNA, 19 nt, Artificial Sequence
  Description of Artificial Sequence: Synthetic oligonucleotide
augcuuacuagcccaaccc

SEQ ID NO: 611581 - RNA, 19 nt, Artificial Sequence
  Description of Artificial Sequence: Synthetic oligonucleotide
uuuacaugguuccagcgac

SEQ ID NO: 611582 - RNA, 19 nt, Artificial Sequence
  Description of Artificial Sequence: Synthetic oligonucleotide
aaaugugggaucacauugc

SEQ ID NO: 611583 - RNA, 19 nt, Artificial Sequence
  Description of Artificial Sequence: Synthetic oligonucleotide
auuaaauuccuuagcauuc

SEQ ID NO: 611584 - RNA, 19 nt, Artificial Sequence
  Description of Artificial Sequence: Synthetic oligonucleotide
ucuugaaucuuguugaaau

SEQ ID NO: 611585 - RNA, 19 nt, Artificial Sequence
  Description of Artificial Sequence: Synthetic oligonucleotide
uauauugugaugcucucuc

SEQ ID NO: 611586 - RNA, 19 nt, Artificial Sequence
  Description of Artificial Sequence: Synthetic oligonucleotide
agucaaauucuagugacac

SEQ ID NO: 611587 - RNA, 19 nt, Artificial Sequence
  Description of Artificial Sequence: Synthetic oligonucleotide
uaaguuugugcacaauggc

SEQ ID NO: 611588 - RNA, 19 nt, Artificial Sequence
  Description of Artificial Sequence: Synthetic oligonucleotide
uuuacuaccccuugaguga

SEQ ID NO: 611589 - RNA, 19 nt, Artificial Sequence
  Description of Artificial Sequence: Synthetic oligonucleotide
auuuagauuggaaacaucu

SEQ ID NO: 611590 - RNA, 19 nt, Artificial Sequence
  Description of Artificial Sequence: Synthetic oligonucleotide
aacuuuacauguaucuaac

SEQ ID NO: 611591 - RNA, 19 nt, Artificial Sequence
  Description of Artificial Sequence: Synthetic oligonucleotide
uauuaaggggaauguaugc

SEQ ID NO: 611592 - RNA, 19 nt, Artificial Sequence
  Description of Artificial Sequence: Synthetic oligonucleotide
agucuaaaaccucuuguag

SEQ ID NO: 611593 - RNA, 19 nt, Artificial Sequence
  Description of Artificial Sequence: Synthetic oligonucleotide
gaaaaugcuuacuagccca

SEQ ID NO: 611594 - RNA, 19 nt, Artificial Sequence
  Description of Artificial Sequence: Synthetic oligonucleotide
aaaacugccuauuuagauu

SEQ ID NO: 611595 - RNA, 19 nt, Artificial Sequence
  Description of Artificial Sequence: Synthetic oligonucleotide
cugagguggauaaaguucc

SEQ ID NO: 611596 - RNA, 19 nt, Artificial Sequence
  Description of Artificial Sequence: Synthetic oligonucleotide
guaauuauuaaggggaaug

SEQ ID NO: 611597 - RNA, 19 nt, Artificial Sequence
  Description of Artificial Sequence: Synthetic oligonucleotide
ugaaucuuguugaaaugug

SEQ ID NO: 611598 - RNA, 19 nt, Artificial Sequence
  Description of Artificial Sequence: Synthetic oligonucleotide
uguaucuaacaagaacugg

SEQ ID NO: 611599 - RNA, 19 nt, Artificial Sequence
  Description of Artificial Sequence: Synthetic oligonucleotide
auagguaacaccucuaaua

SEQ ID NO: 611600 - RNA, 19 nt, Artificial Sequence
  Description of Artificial Sequence: Synthetic oligonucleotide
aauucuagugacacuaaug

SEQ ID NO: 611601 - RNA, 19 nt, Artificial Sequence
  Description of Artificial Sequence: Synthetic oligonucleotide
gaaagauugggccuuguuc

SEQ ID NO: 611602 - RNA, 19 nt, Artificial Sequence
  Description of Artificial Sequence: Synthetic oligonucleotide
uugguucgaaaucagggug

SEQ ID NO: 611603 - RNA, 19 nt, Artificial Sequence
  Description of Artificial Sequence: Synthetic oligonucleotide
auuccuauacacgugaaug

SEQ ID NO: 611604 - RNA, 19 nt, Artificial Sequence
  Description of Artificial Sequence: Synthetic oligonucleotide
aacauccuuacauacucga

SEQ ID NO: 611605 - RNA, 19 nt, Artificial Sequence
  Description of Artificial Sequence: Synthetic oligonucleotide
aaugcucaaauaugagcug

SEQ ID NO: 611606 - RNA, 19 nt, Artificial Sequence
  Description of Artificial Sequence: Synthetic oligonucleotide
aaaaugacgucaauuaaau

SEQ ID NO: 611607 - RNA, 19 nt, Artificial Sequence
  Description of Artificial Sequence: Synthetic oligonucleotide
gaaucuuguugaaaugugg

SEQ ID NO: 611608 - RNA, 19 nt, Artificial Sequence
  Description of Artificial Sequence: Synthetic oligonucleotide
uacaucguugaauaccaag

SEQ ID NO: 611609 - RNA, 19 nt, Artificial Sequence
  Description of Artificial Sequence: Synthetic oligonucleotide
uuaggaauucugcagcaac

SEQ ID NO: 611610 - RNA, 19 nt, Artificial Sequence
  Description of Artificial Sequence: Synthetic oligonucleotide
aaguucaauuuucaagaga

SEQ ID NO: 611611 - RNA, 19 nt, Artificial Sequence
  Description of Artificial Sequence: Synthetic oligonucleotide
aacaccucuaauauuauau

SEQ ID NO: 611612 - RNA, 19 nt, Artificial Sequence
  Description of Artificial Sequence: Synthetic oligonucleotide
gaacaauggagcuuggauc

SEQ ID NO: 611613 - RNA, 19 nt, Artificial Sequence
  Description of Artificial Sequence: Synthetic oligonucleotide
uagguaacaccucuaauau

SEQ ID NO: 611614 - RNA, 19 nt, Artificial Sequence
  Description of Artificial Sequence: Synthetic oligonucleotide
auguuguuaaaacauaguu

SEQ ID NO: 611615 - RNA, 19 nt, Artificial Sequence
  Description of Artificial Sequence: Synthetic oligonucleotide
agguggauaaaguuccagg

SEQ ID NO: 611616 - RNA, 19 nt, Artificial Sequence
  Description of Artificial Sequence: Synthetic oligonucleotide
uuaauguuguuaaaacaua

SEQ ID NO: 611617 - RNA, 19 nt, Artificial Sequence
  Description of Artificial Sequence: Synthetic oligonucleotide
aaugucuuggaaagauugg

SEQ ID NO: 611618 - RNA, 19 nt, Artificial Sequence
  Description of Artificial Sequence: Synthetic oligonucleotide
guacuaaucuguaauacug

SEQ ID NO: 611619 - RNA, 19 nt, Artificial Sequence
  Description of Artificial Sequence: Synthetic oligonucleotide
auauguucagggucauccc

SEQ ID NO: 611620 - RNA, 19 nt, Artificial Sequence
  Description of Artificial Sequence: Synthetic oligonucleotide
gguggauaaaguuccaggg

SEQ ID NO: 611621 - RNA, 19 nt, Artificial Sequence
  Description of Artificial Sequence: Synthetic oligonucleotide
auugugaugcucucuccac

SEQ ID NO: 611622 - RNA, 19 nt, Artificial Sequence
  Description of Artificial Sequence: Synthetic oligonucleotide
ugagucuauagguaacacc

SEQ ID NO: 611623 - RNA, 19 nt, Artificial Sequence
  Description of Artificial Sequence: Synthetic oligonucleotide
ucuuuaggccuaaauaaaa

SEQ ID NO: 611624 - RNA, 19 nt, Artificial Sequence
  Description of Artificial Sequence: Synthetic oligonucleotide
uggucagauagucuaaaac

SEQ ID NO: 611625 - RNA, 19 nt, Artificial Sequence
  Description of Artificial Sequence: Synthetic oligonucleotide
ugucuaaaaccagacaaug

SEQ ID NO: 611626 - RNA, 19 nt, Artificial Sequence
  Description of Artificial Sequence: Synthetic oligonucleotide
uucgaaaucagggugugug

SEQ ID NO: 611627 - RNA, 19 nt, Artificial Sequence
  Description of Artificial Sequence: Synthetic oligonucleotide
uucucucugcuucaaaugu

SEQ ID NO: 611628 - RNA, 19 nt, Artificial Sequence
  Description of Artificial Sequence: Synthetic oligonucleotide
auaauaugaaauugccggu

SEQ ID NO: 611629 - RNA, 19 nt, Artificial Sequence
  Description of Artificial Sequence: Synthetic oligonucleotide
cucgauacaguguucuggg

SEQ ID NO: 611630 - RNA, 19 nt, Artificial Sequence
  Description of Artificial Sequence: Synthetic oligonucleotide
agucccaauucuuuuaaug

SEQ ID NO: 611631 - RNA, 19 nt, Artificial Sequence
  Description of Artificial Sequence: Synthetic oligonucleotide
gauauacucuagcugucag

SEQ ID NO: 611632 - RNA, 19 nt, Artificial Sequence
  Description of Artificial Sequence: Synthetic oligonucleotide
auaugaguaguaaugaaga

SEQ ID NO: 611633 - RNA, 19 nt, Artificial Sequence
  Description of Artificial Sequence: Synthetic oligonucleotide
gaggaagcuggcuacacgc

SEQ ID NO: 611634 - RNA, 19 nt, Artificial Sequence
  Description of Artificial Sequence: Synthetic oligonucleotide
auauugugaugcucucucc

SEQ ID NO: 611635 - RNA, 19 nt, Artificial Sequence
  Description of Artificial Sequence: Synthetic oligonucleotide
uuguaguuuagcugauggg

SEQ ID NO: 611636 - RNA, 19 nt, Artificial Sequence
  Description of Artificial Sequence: Synthetic oligonucleotide
uuacuagcgaaaaugcuua

SEQ ID NO: 611637 - RNA, 19 nt, Artificial Sequence
  Description of Artificial Sequence: Synthetic oligonucleotide
aguauauuauuucuaugaa

SEQ ID NO: 611638 - RNA, 19 nt, Artificial Sequence
  Description of Artificial Sequence: Synthetic oligonucleotide
ugaacacccauugucuugg

SEQ ID NO: 611639 - RNA, 19 nt, Artificial Sequence
  Description of Artificial Sequence: Synthetic oligonucleotide
uuaaggggaauguaugcac

SEQ ID NO: 611640 - RNA, 19 nt, Artificial Sequence
  Description of Artificial Sequence: Synthetic oligonucleotide
agcuccaaucacuagaacu

SEQ ID NO: 611641 - RNA, 19 nt, Artificial Sequence
  Description of Artificial Sequence: Synthetic oligonucleotide
ugaccauaauaacaaacuc

SEQ ID NO: 611642 - RNA, 19 nt, Artificial Sequence
  Description of Artificial Sequence: Synthetic oligonucleotide
gauaucagcauuccauuga

SEQ ID NO: 611643 - RNA, 19 nt, Artificial Sequence
  Description of Artificial Sequence: Synthetic oligonucleotide
ucugcucaaggauacauuc

SEQ ID NO: 611644 - RNA, 19 nt, Artificial Sequence
  Description of Artificial Sequence: Synthetic oligonucleotide
acaauguaugacuuuauua

SEQ ID NO: 611645 - RNA, 19 nt, Artificial Sequence
  Description of Artificial Sequence: Synthetic oligonucleotide
aucuaauggaaccccaucu

SEQ ID NO: 611646 - RNA, 19 nt, Artificial Sequence
  Description of Artificial Sequence: Synthetic oligonucleotide
gaacuuuacauguaucuaa

SEQ ID NO: 611647 - RNA, 19 nt, Artificial Sequence
  Description of Artificial Sequence: Synthetic oligonucleotide
aaagagucauucauuauau

SEQ ID NO: 611648 - RNA, 19 nt, Artificial Sequence
  Description of Artificial Sequence: Synthetic oligonucleotide
cuaauggaaccccaucucc

SEQ ID NO: 611649 - RNA, 19 nt, Artificial Sequence
  Description of Artificial Sequence: Synthetic oligonucleotide
uguaaguacaguguccugu

SEQ ID NO: 611650 - RNA, 19 nt, Artificial Sequence
  Description of Artificial Sequence: Synthetic oligonucleotide
uuguccugcucuaaagaag

SEQ ID NO: 611651 - RNA, 19 nt, Artificial Sequence
  Description of Artificial Sequence: Synthetic oligonucleotide
aaucagggugugugaaggg

SEQ ID NO: 611652 - RNA, 19 nt, Artificial Sequence
  Description of Artificial Sequence: Synthetic oligonucleotide
uuauaugaguaguaaugaa

SEQ ID NO: 611653 - RNA, 19 nt, Artificial Sequence
  Description of Artificial Sequence: Synthetic oligonucleotide
uacuaaucuguaauacugu

SEQ ID NO: 611654 - RNA, 19 nt, Artificial Sequence
  Description of Artificial Sequence: Synthetic oligonucleotide
ccaaguaauuauuaagggg

SEQ ID NO: 611655 - RNA, 19 nt, Artificial Sequence
  Description of Artificial Sequence: Synthetic oligonucleotide
ucuauaguguccauaucua

SEQ ID NO: 611656 - RNA, 19 nt, Artificial Sequence
  Description of Artificial Sequence: Synthetic oligonucleotide
ucuaauggaaccccaucuc

SEQ ID NO: 611657 - RNA, 19 nt, Artificial Sequence
  Description of Artificial Sequence: Synthetic oligonucleotide
ucagugauaacuguuuaaa

SEQ ID NO: 611658 - RNA, 19 nt, Artificial Sequence
  Description of Artificial Sequence: Synthetic oligonucleotide
auaacaaacucacgcaaaa

SEQ ID NO: 611659 - RNA, 19 nt, Artificial Sequence
  Description of Artificial Sequence: Synthetic oligonucleotide
ucagguuguaauauuuaau

SEQ ID NO: 611660 - RNA, 19 nt, Artificial Sequence
  Description of Artificial Sequence: Synthetic oligonucleotide
auauuauauugugaugcuc

SEQ ID NO: 611661 - RNA, 19 nt, Artificial Sequence
  Description of Artificial Sequence: Synthetic oligonucleotide
uuugaauaguacagucugu

SEQ ID NO: 611662 - RNA, 19 nt, Artificial Sequence
  Description of Artificial Sequence: Synthetic oligonucleotide
uauuauggacaaguuaaac

SEQ ID NO: 611663 - RNA, 19 nt, Artificial Sequence
  Description of Artificial Sequence: Synthetic oligonucleotide
uucuuuacaugguuccagc

SEQ ID NO: 611664 - RNA, 19 nt, Artificial Sequence
  Description of Artificial Sequence: Synthetic oligonucleotide
gaaugcucaaauaugagcu

SEQ ID NO: 611665 - RNA, 19 nt, Artificial Sequence
  Description of Artificial Sequence: Synthetic oligonucleotide
auaauuuagaagagauauc

SEQ ID NO: 611666 - RNA, 19 nt, Artificial Sequence
  Description of Artificial Sequence: Synthetic oligonucleotide
uaugaaauugccgguagaa

SEQ ID NO: 611667 - RNA, 19 nt, Artificial Sequence
  Description of Artificial Sequence: Synthetic oligonucleotide
aaauugccgguagaaagug

SEQ ID NO: 611668 - RNA, 19 nt, Artificial Sequence
  Description of Artificial Sequence: Synthetic oligonucleotide
uaaugaagaaacagccuau

SEQ ID NO: 611669 - RNA, 19 nt, Artificial Sequence
  Description of Artificial Sequence: Synthetic oligonucleotide
aauagaugucacugacugu

SEQ ID NO: 611670 - RNA, 19 nt, Artificial Sequence
  Description of Artificial Sequence: Synthetic oligonucleotide
acacgcaggacaauuuucc

SEQ ID NO: 611671 - RNA, 19 nt, Artificial Sequence
  Description of Artificial Sequence: Synthetic oligonucleotide
cauaauuuagaagagauau

SEQ ID NO: 611672 - RNA, 19 nt, Artificial Sequence
  Description of Artificial Sequence: Synthetic oligonucleotide
acauacucgauacaguguu

SEQ ID NO: 611673 - RNA, 19 nt, Artificial Sequence
  Description of Artificial Sequence: Synthetic oligonucleotide
agauaucagcauuccauug

SEQ ID NO: 611674 - RNA, 19 nt, Artificial Sequence
  Description of Artificial Sequence: Synthetic oligonucleotide
uagcgaaaaugcuuacuag

SEQ ID NO: 611675 - RNA, 19 nt, Artificial Sequence
  Description of Artificial Sequence: Synthetic oligonucleotide
aggagcucgcauccuaagc

SEQ ID NO: 611676 - RNA, 19 nt, Artificial Sequence
  Description of Artificial Sequence: Synthetic oligonucleotide
ugauucguuuuacuacccc

SEQ ID NO: 611677 - RNA, 19 nt, Artificial Sequence
  Description of Artificial Sequence: Synthetic oligonucleotide
gggcauuuccuuuaaagcc

SEQ ID NO: 611678 - RNA, 19 nt, Artificial Sequence
  Description of Artificial Sequence: Synthetic oligonucleotide
aagagauaucagcauucca

SEQ ID NO: 611679 - RNA, 19 nt, Artificial Sequence
  Description of Artificial Sequence: Synthetic oligonucleotide
guaucuaacaagaacugga

SEQ ID NO: 611680 - RNA, 19 nt, Artificial Sequence
  Description of Artificial Sequence: Synthetic oligonucleotide
uguccauaucuauaacaug

SEQ ID NO: 611681 - RNA, 19 nt, Artificial Sequence
  Description of Artificial Sequence: Synthetic oligonucleotide
ugugguguagugacaucag

SEQ ID NO: 611682 - RNA, 19 nt, Artificial Sequence
  Description of Artificial Sequence: Synthetic oligonucleotide
ugcuuacuagcccaacccc

SEQ ID NO: 611683 - RNA, 19 nt, Artificial Sequence
  Description of Artificial Sequence: Synthetic oligonucleotide
ucacgcaaaagacaguguu

SEQ ID NO: 611684 - RNA, 19 nt, Artificial Sequence
  Description of Artificial Sequence: Synthetic oligonucleotide
uucguuuuacuaccccuug

SEQ ID NO: 611685 - RNA, 19 nt, Artificial Sequence
  Description of Artificial Sequence: Synthetic oligonucleotide
guuccagcgaccuucccag

SEQ ID NO: 611686 - RNA, 19 nt, Artificial Sequence
  Description of Artificial Sequence: Synthetic oligonucleotide
gagucuauagguaacaccu

SEQ ID NO: 611687 - RNA, 19 nt, Artificial Sequence
  Description of Artificial Sequence: Synthetic oligonucleotide
aguuaaacucuacaauaau

SEQ ID NO: 611688 - RNA, 19 nt, Artificial Sequence
  Description of Artificial Sequence: Synthetic oligonucleotide
ugacgucaauuaaauuucc

SEQ ID NO: 611689 - RNA, 19 nt, Artificial Sequence
  Description of Artificial Sequence: Synthetic oligonucleotide
ugaccugagguggauaaag

SEQ ID NO: 611690 - RNA, 19 nt, Artificial Sequence
  Description of Artificial Sequence: Synthetic oligonucleotide
uaaaaccucuuguaguuua

SEQ ID NO: 611691 - RNA, 19 nt, Artificial Sequence
  Description of Artificial Sequence: Synthetic oligonucleotide
acaauuauaugaguaguaa

SEQ ID NO: 611692 - RNA, 19 nt, Artificial Sequence
  Description of Artificial Sequence: Synthetic oligonucleotide
cuaucaaaggaacaaugga

SEQ ID NO: 611693 - RNA, 19 nt, Artificial Sequence
  Description of Artificial Sequence: Synthetic oligonucleotide
aauacguucuuugaccaua

SEQ ID NO: 611694 - RNA, 19 nt, Artificial Sequence
  Description of Artificial Sequence: Synthetic oligonucleotide
uaauguggcugugauagcu

SEQ ID NO: 611695 - RNA, 19 nt, Artificial Sequence
  Description of Artificial Sequence: Synthetic oligonucleotide
agugcuugguucgaaauca

SEQ ID NO: 611696 - RNA, 19 nt, Artificial Sequence
  Description of Artificial Sequence: Synthetic oligonucleotide
cucaaauaugagcugagga

SEQ ID NO: 611697 - RNA, 19 nt, Artificial Sequence
  Description of Artificial Sequence: Synthetic oligonucleotide
augaaucugucuaaaacca

SEQ ID NO: 611698 - RNA, 19 nt, Artificial Sequence
  Description of Artificial Sequence: Synthetic oligonucleotide
uugaacacccauugucuug

SEQ ID NO: 611699 - RNA, 19 nt, Artificial Sequence
  Description of Artificial Sequence: Synthetic oligonucleotide
uuagcugauggggaaaacu

SEQ ID NO: 611700 - RNA, 19 nt, Artificial Sequence
  Description of Artificial Sequence: Synthetic oligonucleotide
auugccgguagaaaguguc

SEQ ID NO: 611701 - RNA, 19 nt, Artificial Sequence
  Description of Artificial Sequence: Synthetic oligonucleotide
aaaugcuuacuagcccaac

SEQ ID NO: 611702 - RNA, 19 nt, Artificial Sequence
  Description of Artificial Sequence: Synthetic oligonucleotide
gugcacucaacacaagcag

SEQ ID NO: 611703 - RNA, 19 nt, Artificial Sequence
  Description of Artificial Sequence: Synthetic oligonucleotide
auagaugcaauggugcaca

SEQ ID NO: 611704 - RNA, 19 nt, Artificial Sequence
  Description of Artificial Sequence: Synthetic oligonucleotide
ugguuuaaguuugugcaca

SEQ ID NO: 611705 - RNA, 19 nt, Artificial Sequence
  Description of Artificial Sequence: Synthetic oligonucleotide
agggaagcacuauugguca

SEQ ID NO: 611706 - RNA, 19 nt, Artificial Sequence
  Description of Artificial Sequence: Synthetic oligonucleotide
cuuguucguucuucaauag

SEQ ID NO: 611707 - RNA, 19 nt, Artificial Sequence
  Description of Artificial Sequence: Synthetic oligonucleotide
uucuagugacacuaaugcu

SEQ ID NO: 611708 - RNA, 19 nt, Artificial Sequence
  Description of Artificial Sequence: Synthetic oligonucleotide
auuaaggggaauguaugca

SEQ ID NO: 611709 - RNA, 19 nt, Artificial Sequence
  Description of Artificial Sequence: Synthetic oligonucleotide
uccauaucuauaacaugaa

SEQ ID NO: 611710 - RNA, 19 nt, Artificial Sequence
  Description of Artificial Sequence: Synthetic oligonucleotide
gcuaugauagaguccaggc

SEQ ID NO: 611711 - RNA, 19 nt, Artificial Sequence
  Description of Artificial Sequence: Synthetic oligonucleotide
ugguucgaaaucagggugu

SEQ ID NO: 611712 - RNA, 19 nt, Artificial Sequence
  Description of Artificial Sequence: Synthetic oligonucleotide
uuguuaaaacauaguuccu

SEQ ID NO: 611713 - RNA, 19 nt, Artificial Sequence
  Description of Artificial Sequence: Synthetic oligonucleotide
acgcaaaagacaguguuug

SEQ ID NO: 611714 - RNA, 19 nt, Artificial Sequence
  Description of Artificial Sequence: Synthetic oligonucleotide
aucguugaauaccaaguaa

SEQ ID NO: 611715 - RNA, 19 nt, Artificial Sequence
  Description of Artificial Sequence: Synthetic oligonucleotide
acuaaucuguaauacuguu

SEQ ID NO: 611716 - RNA, 19 nt, Artificial Sequence
  Description of Artificial Sequence: Synthetic oligonucleotide
acgucaauuaaauuuccuu

SEQ ID NO: 611717 - RNA, 19 nt, Artificial Sequence
  Description of Artificial Sequence: Synthetic oligonucleotide
uuaaaacauaguuccucau

SEQ ID NO: 611718 - RNA, 19 nt, Artificial Sequence
  Description of Artificial Sequence: Synthetic oligonucleotide
uguguacaguccaucuaca

SEQ ID NO: 611719 - RNA, 19 nt, Artificial Sequence
  Description of Artificial Sequence: Synthetic oligonucleotide
uuugcagggaagcacuauu

SEQ ID NO: 611720 - RNA, 19 nt, Artificial Sequence
  Description of Artificial Sequence: Synthetic oligonucleotide
acaucguugaauaccaagu

SEQ ID NO: 611721 - RNA, 19 nt, Artificial Sequence
  Description of Artificial Sequence: Synthetic oligonucleotide
gugauaacuguuuaaacau

SEQ ID NO: 611722 - RNA, 19 nt, Artificial Sequence
  Description of Artificial Sequence: Synthetic oligonucleotide
gccacauacaauaauauga

SEQ ID NO: 611723 - RNA, 19 nt, Artificial Sequence
  Description of Artificial Sequence: Synthetic oligonucleotide
uucuucaauagaugucacu

SEQ ID NO: 611724 - RNA, 19 nt, Artificial Sequence
  Description of Artificial Sequence: Synthetic oligonucleotide
auaucagcauuccauugau

SEQ ID NO: 611725 - RNA, 19 nt, Artificial Sequence
  Description of Artificial Sequence: Synthetic oligonucleotide
gcuugguucgaaaucaggg

SEQ ID NO: 611726 - RNA, 19 nt, Artificial Sequence
  Description of Artificial Sequence: Synthetic oligonucleotide
uaauaugaaauugccggua

SEQ ID NO: 611727 - RNA, 19 nt, Artificial Sequence
  Description of Artificial Sequence: Synthetic oligonucleotide
gggaaauugaccugaggug

SEQ ID NO: 611728 - RNA, 19 nt, Artificial Sequence
  Description of Artificial Sequence: Synthetic oligonucleotide
acuuuacauguaucuaaca

SEQ ID NO: 611729 - RNA, 19 nt, Artificial Sequence
  Description of Artificial Sequence: Synthetic oligonucleotide
aacgagucccaauucuuuu

SEQ ID NO: 611730 - RNA, 19 nt, Artificial Sequence
  Description of Artificial Sequence: Synthetic oligonucleotide
cuucuuuacaugguuccag

SEQ ID NO: 611731 - RNA, 19 nt, Artificial Sequence
  Description of Artificial Sequence: Synthetic oligonucleotide
auaugagcugaggaauacg

SEQ ID NO: 611732 - RNA, 19 nt, Artificial Sequence
  Description of Artificial Sequence: Synthetic oligonucleotide
ggucauccccaucuaaugg

SEQ ID NO: 611733 - RNA, 19 nt, Artificial Sequence
  Description of Artificial Sequence: Synthetic oligonucleotide
ugauauacucuagcuguca

SEQ ID NO: 611734 - RNA, 19 nt, Artificial Sequence
  Description of Artificial Sequence: Synthetic oligonucleotide
gaagcuggcuacacgcagg

SEQ ID NO: 611735 - RNA, 19 nt, Artificial Sequence
  Description of Artificial Sequence: Synthetic oligonucleotide
acguucuuugaccauaaua

SEQ ID NO: 611736 - RNA, 19 nt, Artificial Sequence
  Description of Artificial Sequence: Synthetic oligonucleotide
uuauauugugaugcucucu

SEQ ID NO: 611737 - RNA, 19 nt, Artificial Sequence
  Description of Artificial Sequence: Synthetic oligonucleotide
auuuggauagccacaauua

SEQ ID NO: 611738 - RNA, 19 nt, Artificial Sequence
  Description of Artificial Sequence: Synthetic oligonucleotide
uuugaacacccauugucuu

SEQ ID NO: 611739 - RNA, 19 nt, Artificial Sequence
  Description of Artificial Sequence: Synthetic oligonucleotide
ucguuuuacuaccccuuga

SEQ ID NO: 611740 - RNA, 19 nt, Artificial Sequence
  Description of Artificial Sequence: Synthetic oligonucleotide
aucagugauaacuguuuaa

SEQ ID NO: 611741 - RNA, 19 nt, Artificial Sequence
  Description of Artificial Sequence: Synthetic oligonucleotide
ucgaaaucaggguguguga

SEQ ID NO: 611742 - RNA, 19 nt, Artificial Sequence
  Description of Artificial Sequence: Synthetic oligonucleotide
auaugaaauugccgguaga

SEQ ID NO: 611743 - RNA, 19 nt, Artificial Sequence
  Description of Artificial Sequence: Synthetic oligonucleotide
cuuuacaugguuccagcga

SEQ ID NO: 611744 - RNA, 19 nt, Artificial Sequence
  Description of Artificial Sequence: Synthetic oligonucleotide
uggaaacaucuauaguguc

SEQ ID NO: 611745 - RNA, 19 nt, Artificial Sequence
  Description of Artificial Sequence: Synthetic oligonucleotide
ggaaacaucuauagugucc

SEQ ID NO: 611746 - RNA, 19 nt, Artificial Sequence
  Description of Artificial Sequence: Synthetic oligonucleotide
ccuugagugagucuauagg

SEQ ID NO: 611747 - RNA, 19 nt, Artificial Sequence
  Description of Artificial Sequence: Synthetic oligonucleotide
cuagcgaaaaugcuuacua

SEQ ID NO: 611748 - RNA, 19 nt, Artificial Sequence
  Description of Artificial Sequence: Synthetic oligonucleotide
gccucuauaacauugcaaa

SEQ ID NO: 611749 - RNA, 19 nt, Artificial Sequence
  Description of Artificial Sequence: Synthetic oligonucleotide
uuacuaccccuugagugag

SEQ ID NO: 611750 - RNA, 19 nt, Artificial Sequence
  Description of Artificial Sequence: Synthetic oligonucleotide
gauucguuuuacuaccccu

SEQ ID NO: 611751 - RNA, 19 nt, Artificial Sequence
  Description of Artificial Sequence: Synthetic oligonucleotide
gguaacaccucuaauauua

SEQ ID NO: 611752 - RNA, 19 nt, Artificial Sequence
  Description of Artificial Sequence: Synthetic oligonucleotide
uaguuuagcugauggggaa

SEQ ID NO: 611753 - RNA, 19 nt, Artificial Sequence
  Description of Artificial Sequence: Synthetic oligonucleotide
uuccccucuaauguggcug

SEQ ID NO: 611754 - RNA, 19 nt, Artificial Sequence
  Description of Artificial Sequence: Synthetic oligonucleotide
ucauccccaucuaauggaa

SEQ ID NO: 611755 - RNA, 19 nt, Artificial Sequence
  Description of Artificial Sequence: Synthetic oligonucleotide
ugaaggguccagaucgcuc

SEQ ID NO: 611756 - RNA, 19 nt, Artificial Sequence
  Description of Artificial Sequence: Synthetic oligonucleotide
caagcagucauuccaggca

SEQ ID NO: 611757 - RNA, 19 nt, Artificial Sequence
  Description of Artificial Sequence: Synthetic oligonucleotide
uccagaucgcucgaggaac

SEQ ID NO: 611758 - RNA, 19 nt, Artificial Sequence
  Description of Artificial Sequence: Synthetic oligonucleotide
agugagucuauagguaaca

SEQ ID NO: 611759 - RNA, 19 nt, Artificial Sequence
  Description of Artificial Sequence: Synthetic oligonucleotide
caacacaagcagucauucc

SEQ ID NO: 611760 - RNA, 19 nt, Artificial Sequence
  Description of Artificial Sequence: Synthetic oligonucleotide
gucacugacuguaaguaca

SEQ ID NO: 611761 - RNA, 19 nt, Artificial Sequence
  Description of Artificial Sequence: Synthetic oligonucleotide
gugaaugcucaaauaugag

SEQ ID NO: 611762 - RNA, 19 nt, Artificial Sequence
  Description of Artificial Sequence: Synthetic oligonucleotide
guugaauaccaaguaauua

SEQ ID NO: 611763 - RNA, 19 nt, Artificial Sequence
  Description of Artificial Sequence: Synthetic oligonucleotide
gauaaaguuccagggugca

SEQ ID NO: 611764 - RNA, 19 nt, Artificial Sequence
  Description of Artificial Sequence: Synthetic oligonucleotide
agaacuuuacauguaucua

SEQ ID NO: 611765 - RNA, 19 nt, Artificial Sequence
  Description of Artificial Sequence: Synthetic oligonucleotide
aaccagacaaugccagauu

SEQ ID NO: 611766 - RNA, 19 nt, Artificial Sequence
  Description of Artificial Sequence: Synthetic oligonucleotide
gcaguuaggaacucuguca

SEQ ID NO: 611767 - RNA, 19 nt, Artificial Sequence
  Description of Artificial Sequence: Synthetic oligonucleotide
ugcgaugacugcauuugua

SEQ ID NO: 611768 - RNA, 19 nt, Artificial Sequence
  Description of Artificial Sequence: Synthetic oligonucleotide
acgugaaugcucaaauaug

SEQ ID NO: 611769 - RNA, 19 nt, Artificial Sequence
  Description of Artificial Sequence: Synthetic oligonucleotide
gcgaaaaugcuuacuagcc

SEQ ID NO: 611770 - RNA, 19 nt, Artificial Sequence
  Description of Artificial Sequence: Synthetic oligonucleotide
aaaaccucaguggcacaca

SEQ ID NO: 611771 - RNA, 19 nt, Artificial Sequence
  Description of Artificial Sequence: Synthetic oligonucleotide
gagguggauaaaguuccag

SEQ ID NO: 611772 - RNA, 19 nt, Artificial Sequence
  Description of Artificial Sequence: Synthetic oligonucleotide
uugccgguagaaaguguca

SEQ ID NO: 611773 - RNA, 19 nt, Artificial Sequence
  Description of Artificial Sequence: Synthetic oligonucleotide
guaguuuagcugaugggga

SEQ ID NO: 611774 - RNA, 19 nt, Artificial Sequence
  Description of Artificial Sequence: Synthetic oligonucleotide
cugauauacucuagcuguc

SEQ ID NO: 611775 - RNA, 19 nt, Artificial Sequence
  Description of Artificial Sequence: Synthetic oligonucleotide
gaaauugccgguagaaagu

SEQ ID NO: 611776 - RNA, 19 nt, Artificial Sequence
  Description of Artificial Sequence: Synthetic oligonucleotide
uccccaucuaauggaaccc

SEQ ID NO: 611777 - RNA, 19 nt, Artificial Sequence
  Description of Artificial Sequence: Synthetic oligonucleotide
uuuaggaauucugcagcaa

SEQ ID NO: 611778 - RNA, 19 nt, Artificial Sequence
  Description of Artificial Sequence: Synthetic oligonucleotide
uaguguccauaucuauaac

SEQ ID NO: 611779 - RNA, 19 nt, Artificial Sequence
  Description of Artificial Sequence: Synthetic oligonucleotide
cacaauuauaugaguagua

SEQ ID NO: 611780 - RNA, 19 nt, Artificial Sequence
  Description of Artificial Sequence: Synthetic oligonucleotide
caggcaaaaucacccgggc

SEQ ID NO: 611781 - RNA, 19 nt, Artificial Sequence
  Description of Artificial Sequence: Synthetic oligonucleotide
cucuauaacauugcaaaua

SEQ ID NO: 611782 - RNA, 19 nt, Artificial Sequence
  Description of Artificial Sequence: Synthetic oligonucleotide
ugagguggauaaaguucca

SEQ ID NO: 611783 - RNA, 19 nt, Artificial Sequence
  Description of Artificial Sequence: Synthetic oligonucleotide
gaaguuugaauaguacagu

SEQ ID NO: 611784 - RNA, 19 nt, Artificial Sequence
  Description of Artificial Sequence: Synthetic oligonucleotide
cuauagguaacaccucuaa

SEQ ID NO: 611785 - RNA, 19 nt, Artificial Sequence
  Description of Artificial Sequence: Synthetic oligonucleotide
aguaauuauuaaggggaau

SEQ ID NO: 611786 - RNA, 19 nt, Artificial Sequence
  Description of Artificial Sequence: Synthetic oligonucleotide
aaaaugcuuacuagcccaa

SEQ ID NO: 611787 - RNA, 19 nt, Artificial Sequence
  Description of Artificial Sequence: Synthetic oligonucleotide
uuuccaugcacagguacua

SEQ ID NO: 611788 - RNA, 19 nt, Artificial Sequence
  Description of Artificial Sequence: Synthetic oligonucleotide
gggaaaacugaauguuuug

SEQ ID NO: 611789 - RNA, 19 nt, Artificial Sequence
  Description of Artificial Sequence: Synthetic oligonucleotide
uucugcucaaggauacauu

SEQ ID NO: 611790 - RNA, 19 nt, Artificial Sequence
  Description of Artificial Sequence: Synthetic oligonucleotide
cuaauguggcugugauagc

SEQ ID NO: 611791 - RNA, 19 nt, Artificial Sequence
  Description of Artificial Sequence: Synthetic oligonucleotide
cauccuuacauacucgaua

SEQ ID NO: 611792 - RNA, 19 nt, Artificial Sequence
  Description of Artificial Sequence: Synthetic oligonucleotide
cugacuguaaguacagugu

SEQ ID NO: 611793 - RNA, 19 nt, Artificial Sequence
  Description of Artificial Sequence: Synthetic oligonucleotide
agucuauagguaacaccuc

SEQ ID NO: 611794 - RNA, 19 nt, Artificial Sequence
  Description of Artificial Sequence: Synthetic oligonucleotide
uaucagcauuccauugauc

SEQ ID NO: 611795 - RNA, 19 nt, Artificial Sequence
  Description of Artificial Sequence: Synthetic oligonucleotide
ggagagauucagugcuugg

SEQ ID NO: 611796 - RNA, 19 nt, Artificial Sequence
  Description of Artificial Sequence: Synthetic oligonucleotide
acuagcgaaaaugcuuacu

SEQ ID NO: 611797 - RNA, 19 nt, Artificial Sequence
  Description of Artificial Sequence: Synthetic oligonucleotide
uucaggagcucgcauccua

SEQ ID NO: 611798 - RNA, 19 nt, Artificial Sequence
  Description of Artificial Sequence: Synthetic oligonucleotide
aacugccuauuuagauugg

SEQ ID NO: 611799 - RNA, 19 nt, Artificial Sequence
  Description of Artificial Sequence: Synthetic oligonucleotide
ccauaauaacaaacucacg

SEQ ID NO: 611800 - RNA, 19 nt, Artificial Sequence
  Description of Artificial Sequence: Synthetic oligonucleotide
ccaaucacuagaacuuuac

SEQ ID NO: 611801 - RNA, 19 nt, Artificial Sequence
  Description of Artificial Sequence: Synthetic oligonucleotide
uacuagcgaaaaugcuuac

SEQ ID NO: 611802 - RNA, 19 nt, Artificial Sequence
  Description of Artificial Sequence: Synthetic oligonucleotide
uccaucaacgagucccaau

SEQ ID NO: 611803 - RNA, 19 nt, Artificial Sequence
  Description of Artificial Sequence: Synthetic oligonucleotide
uccagcgaccuucccaguc

SEQ ID NO: 611804 - RNA, 19 nt, Artificial Sequence
  Description of Artificial Sequence: Synthetic oligonucleotide
cauacucgauacaguguuc

SEQ ID NO: 611805 - RNA, 19 nt, Artificial Sequence
  Description of Artificial Sequence: Synthetic oligonucleotide
ggcuaugauagaguccagg

SEQ ID NO: 611806 - RNA, 19 nt, Artificial Sequence
  Description of Artificial Sequence: Synthetic oligonucleotide
gagauaucagcauuccauu

SEQ ID NO: 611807 - RNA, 19 nt, Artificial Sequence
  Description of Artificial Sequence: Synthetic oligonucleotide
cuuacauacucgauacagu

SEQ ID NO: 611808 - RNA, 19 nt, Artificial Sequence
  Description of Artificial Sequence: Synthetic oligonucleotide
cuuacuagcccaaccccaa

SEQ ID NO: 611809 - RNA, 19 nt, Artificial Sequence
  Description of Artificial Sequence: Synthetic oligonucleotide
uggauccaauacaccgucu

SEQ ID NO: 611810 - RNA, 19 nt, Artificial Sequence
  Description of Artificial Sequence: Synthetic oligonucleotide
cauccuaagccaccagcuc

SEQ ID NO: 611811 - RNA, 19 nt, Artificial Sequence
  Description of Artificial Sequence: Synthetic oligonucleotide
cugugguguagugacauca

SEQ ID NO: 611812 - RNA, 19 nt, Artificial Sequence
  Description of Artificial Sequence: Synthetic oligonucleotide
aauugccgguagaaagugu

SEQ ID NO: 611813 - RNA, 19 nt, Artificial Sequence
  Description of Artificial Sequence: Synthetic oligonucleotide
caucaacgagucccaauuc

SEQ ID NO: 611814 - RNA, 19 nt, Artificial Sequence
  Description of Artificial Sequence: Synthetic oligonucleotide
uccccucuaauguggcugu

SEQ ID NO: 611815 - RNA, 19 nt, Artificial Sequence
  Description of Artificial Sequence: Synthetic oligonucleotide
uauacacgugaaugcucaa

SEQ ID NO: 611816 - RNA, 19 nt, Artificial Sequence
  Description of Artificial Sequence: Synthetic oligonucleotide
acaccgucuucauaauuua

SEQ ID NO: 611817 - RNA, 19 nt, Artificial Sequence
  Description of Artificial Sequence: Synthetic oligonucleotide
uuacuagcccaaccccaaa

SEQ ID NO: 611818 - RNA, 19 nt, Artificial Sequence
  Description of Artificial Sequence: Synthetic oligonucleotide
caaauaugagcugaggaau

SEQ ID NO: 611819 - RNA, 19 nt, Artificial Sequence
  Description of Artificial Sequence: Synthetic oligonucleotide
gacaauguaugacuuuauu

SEQ ID NO: 611820 - RNA, 19 nt, Artificial Sequence
  Description of Artificial Sequence: Synthetic oligonucleotide
acacgugaaugcucaaaua

SEQ ID NO: 611821 - RNA, 19 nt, Artificial Sequence
  Description of Artificial Sequence: Synthetic oligonucleotide
cagggugcacucaacacaa

SEQ ID NO: 611822 - RNA, 19 nt, Artificial Sequence
  Description of Artificial Sequence: Synthetic oligonucleotide
aaggguccagaucgcucga

SEQ ID NO: 611823 - RNA, 19 nt, Artificial Sequence
  Description of Artificial Sequence: Synthetic oligonucleotide
cauccccaucuaauggaac

SEQ ID NO: 611824 - RNA, 19 nt, Artificial Sequence
  Description of Artificial Sequence: Synthetic oligonucleotide
cuuggauccaauacaccgu

SEQ ID NO: 611825 - RNA, 19 nt, Artificial Sequence
  Description of Artificial Sequence: Synthetic oligonucleotide
cauuuggauagccacaauu

SEQ ID NO: 611826 - RNA, 19 nt, Artificial Sequence
  Description of Artificial Sequence: Synthetic oligonucleotide
agcucgcauccuaagccac

SEQ ID NO: 611827 - RNA, 19 nt, Artificial Sequence
  Description of Artificial Sequence: Synthetic oligonucleotide
agguaacaccucuaauauu

SEQ ID NO: 611828 - RNA, 19 nt, Artificial Sequence
  Description of Artificial Sequence: Synthetic oligonucleotide
cucaaggauacauuccuau

SEQ ID NO: 611829 - RNA, 19 nt, Artificial Sequence
  Description of Artificial Sequence: Synthetic oligonucleotide
gugagucuauagguaacac

SEQ ID NO: 611830 - RNA, 19 nt, Artificial Sequence
  Description of Artificial Sequence: Synthetic oligonucleotide
ugauagcuggagacuucau

SEQ ID NO: 611831 - RNA, 19 nt, Artificial Sequence
  Description of Artificial Sequence: Synthetic oligonucleotide
caggagcucgcauccuaag

SEQ ID NO: 611832 - RNA, 19 nt, Artificial Sequence
  Description of Artificial Sequence: Synthetic oligonucleotide
ggaacaauggagcuuggau

SEQ ID NO: 611833 - RNA, 19 nt, Artificial Sequence
  Description of Artificial Sequence: Synthetic oligonucleotide
guguccauaucuauaacau

SEQ ID NO: 611834 - RNA, 19 nt, Artificial Sequence
  Description of Artificial Sequence: Synthetic oligonucleotide
cugccuauuuagauuggaa

SEQ ID NO: 611835 - RNA, 19 nt, Artificial Sequence
  Description of Artificial Sequence: Synthetic oligonucleotide
aacucacgcaaaagacagu

SEQ ID NO: 611836 - RNA, 19 nt, Artificial Sequence
  Description of Artificial Sequence: Synthetic oligonucleotide
ggauagccacaauuauaug

SEQ ID NO: 611837 - RNA, 19 nt, Artificial Sequence
  Description of Artificial Sequence: Synthetic oligonucleotide
gauccaucuucuggcuaug

SEQ ID NO: 611838 - RNA, 19 nt, Artificial Sequence
  Description of Artificial Sequence: Synthetic oligonucleotide
gaucgcucgaggaacuucu

SEQ ID NO: 611839 - RNA, 19 nt, Artificial Sequence
  Description of Artificial Sequence: Synthetic oligonucleotide
ccuauacacgugaaugcuc

SEQ ID NO: 611840 - RNA, 19 nt, Artificial Sequence
  Description of Artificial Sequence: Synthetic oligonucleotide
cucgaggaacuucuuuaca

SEQ ID NO: 611841 - RNA, 19 nt, Artificial Sequence
  Description of Artificial Sequence: Synthetic oligonucleotide
gcucgaggaacuucuuuac

SEQ ID NO: 611842 - RNA, 19 nt, Artificial Sequence
  Description of Artificial Sequence: Synthetic oligonucleotide
cugucuaaaaccagacaau

SEQ ID NO: 611843 - RNA, 19 nt, Artificial Sequence
  Description of Artificial Sequence: Synthetic oligonucleotide
acagccuaugucugauaua

SEQ ID NO: 611844 - RNA, 19 nt, Artificial Sequence
  Description of Artificial Sequence: Synthetic oligonucleotide
caucagugauaacuguuua

SEQ ID NO: 611845 - RNA, 19 nt, Artificial Sequence
  Description of Artificial Sequence: Synthetic oligonucleotide
auuugcagggaagcacuau

SEQ ID NO: 611846 - RNA, 19 nt, Artificial Sequence
  Description of Artificial Sequence: Synthetic oligonucleotide
ggugcacauggggaaauug

SEQ ID NO: 611847 - RNA, 19 nt, Artificial Sequence
  Description of Artificial Sequence: Synthetic oligonucleotide
augcaauggugcacauggg

SEQ ID NO: 611848 - RNA, 19 nt, Artificial Sequence
  Description of Artificial Sequence: Synthetic oligonucleotide
gaauauguucagggucauc

SEQ ID NO: 611849 - RNA, 19 nt, Artificial Sequence
  Description of Artificial Sequence: Synthetic oligonucleotide
aggaacaauggagcuugga

SEQ ID NO: 611850 - RNA, 19 nt, Artificial Sequence
  Description of Artificial Sequence: Synthetic oligonucleotide
uacguucuuugaccauaau

SEQ ID NO: 611851 - RNA, 19 nt, Artificial Sequence
  Description of Artificial Sequence: Synthetic oligonucleotide
guaaguacaguguccuguu

SEQ ID NO: 611852 - RNA, 19 nt, Artificial Sequence
  Description of Artificial Sequence: Synthetic oligonucleotide
cacugaauauguucagggu

SEQ ID NO: 611853 - RNA, 19 nt, Artificial Sequence
  Description of Artificial Sequence: Synthetic oligonucleotide
cccuugagugagucuauag

SEQ ID NO: 611854 - RNA, 19 nt, Artificial Sequence
  Description of Artificial Sequence: Synthetic oligonucleotide
gcacucaacacaagcaguc

SEQ ID NO: 611855 - RNA, 19 nt, Artificial Sequence
  Description of Artificial Sequence: Synthetic oligonucleotide
acucugucauuuaggaauu

SEQ ID NO: 611856 - RNA, 19 nt, Artificial Sequence
  Description of Artificial Sequence: Synthetic oligonucleotide
agcgaccuucccagucucc

SEQ ID NO: 611857 - RNA, 19 nt, Artificial Sequence
  Description of Artificial Sequence: Synthetic oligonucleotide
gguuuaaguuugugcacaa

SEQ ID NO: 611858 - RNA, 19 nt, Artificial Sequence
  Description of Artificial Sequence: Synthetic oligonucleotide
cgaggaacuucuuuacaug

SEQ ID NO: 611859 - RNA, 19 nt, Artificial Sequence
  Description of Artificial Sequence: Synthetic oligonucleotide
agacaauguaugacuuuau

SEQ ID NO: 611860 - RNA, 19 nt, Artificial Sequence
  Description of Artificial Sequence: Synthetic oligonucleotide
acauccuuacauacucgau

SEQ ID NO: 611861 - RNA, 19 nt, Artificial Sequence
  Description of Artificial Sequence: Synthetic oligonucleotide
uuucaggagcucgcauccu

SEQ ID NO: 611862 - RNA, 19 nt, Artificial Sequence
  Description of Artificial Sequence: Synthetic oligonucleotide
gguucgaaaucagggugug

SEQ ID NO: 611863 - RNA, 19 nt, Artificial Sequence
  Description of Artificial Sequence: Synthetic oligonucleotide
ccaucuaucaaaggaacaa

SEQ ID NO: 611864 - RNA, 19 nt, Artificial Sequence
  Description of Artificial Sequence: Synthetic oligonucleotide
gggaagcacuauuggucag

SEQ ID NO: 611865 - RNA, 19 nt, Artificial Sequence
  Description of Artificial Sequence: Synthetic oligonucleotide
ccuuguucguucuucaaua

SEQ ID NO: 611866 - RNA, 19 nt, Artificial Sequence
  Description of Artificial Sequence: Synthetic oligonucleotide
caccaucaacagccauugg

SEQ ID NO: 611867 - RNA, 19 nt, Artificial Sequence
  Description of Artificial Sequence: Synthetic oligonucleotide
cacccauugucuugguuua

SEQ ID NO: 611868 - RNA, 19 nt, Artificial Sequence
  Description of Artificial Sequence: Synthetic oligonucleotide
gcuuacuagcccaacccca

SEQ ID NO: 611869 - RNA, 19 nt, Artificial Sequence
  Description of Artificial Sequence: Synthetic oligonucleotide
guacaguguccuguucuuc

SEQ ID NO: 611870 - RNA, 19 nt, Artificial Sequence
  Description of Artificial Sequence: Synthetic oligonucleotide
gaagcacuauuggucagau

SEQ ID NO: 611871 - RNA, 19 nt, Artificial Sequence
  Description of Artificial Sequence: Synthetic oligonucleotide
cucgcauccuaagccacca

SEQ ID NO: 611872 - RNA, 19 nt, Artificial Sequence
  Description of Artificial Sequence: Synthetic oligonucleotide
ccagggugcacucaacaca

SEQ ID NO: 611873 - RNA, 19 nt, Artificial Sequence
  Description of Artificial Sequence: Synthetic oligonucleotide
ggaagcacuauuggucaga

SEQ ID NO: 611874 - RNA, 19 nt, Artificial Sequence
  Description of Artificial Sequence: Synthetic oligonucleotide
acauuccuauacacgugaa

SEQ ID NO: 611875 - RNA, 19 nt, Artificial Sequence
  Description of Artificial Sequence: Synthetic oligonucleotide
cucuaauguggcugugaua

SEQ ID NO: 611876 - RNA, 19 nt, Artificial Sequence
  Description of Artificial Sequence: Synthetic oligonucleotide
cauuccuauacacgugaau

SEQ ID NO: 611877 - RNA, 19 nt, Artificial Sequence
  Description of Artificial Sequence: Synthetic oligonucleotide
gcagggaagcacuauuggu

SEQ ID NO: 611878 - RNA, 19 nt, Artificial Sequence
  Description of Artificial Sequence: Synthetic oligonucleotide
auauuuccaugcacaggua

SEQ ID NO: 611879 - RNA, 19 nt, Artificial Sequence
  Description of Artificial Sequence: Synthetic oligonucleotide
cacgcaaaagacaguguuu

SEQ ID NO: 611880 - RNA, 19 nt, Artificial Sequence
  Description of Artificial Sequence: Synthetic oligonucleotide
agauugggccuuguucguu

SEQ ID NO: 611881 - RNA, 19 nt, Artificial Sequence
  Description of Artificial Sequence: Synthetic oligonucleotide
cuacaucguugaauaccaa

SEQ ID NO: 611882 - RNA, 19 nt, Artificial Sequence
  Description of Artificial Sequence: Synthetic oligonucleotide
uuccagcgaccuucccagu

SEQ ID NO: 611883 - RNA, 19 nt, Artificial Sequence
  Description of Artificial Sequence: Synthetic oligonucleotide
cagcgaccuucccagucuc

SEQ ID NO: 611884 - RNA, 19 nt, Artificial Sequence
  Description of Artificial Sequence: Synthetic oligonucleotide
cacgcaggacaauuuuccu

SEQ ID NO: 611885 - RNA, 19 nt, Artificial Sequence
  Description of Artificial Sequence: Synthetic oligonucleotide
cuacacgcaggacaauuuu

SEQ ID NO: 611886 - RNA, 19 nt, Artificial Sequence
  Description of Artificial Sequence: Synthetic oligonucleotide
uugggccuuguucguucuu

SEQ ID NO: 611887 - RNA, 19 nt, Artificial Sequence
  Description of Artificial Sequence: Synthetic oligonucleotide
gggugugugaaggguccag

SEQ ID NO: 611888 - RNA, 19 nt, Artificial Sequence
  Description of Artificial Sequence: Synthetic oligonucleotide
ccccaucuaauggaacccc

SEQ ID NO: 611889 - RNA, 19 nt, Artificial Sequence
  Description of Artificial Sequence: Synthetic oligonucleotide
caauggagcuuggauccaa

SEQ ID NO: 611890 - RNA, 19 nt, Artificial Sequence
  Description of Artificial Sequence: Synthetic oligonucleotide
cgucaauuaaauuuccuuu

SEQ ID NO: 611891 - RNA, 19 nt, Artificial Sequence
  Description of Artificial Sequence: Synthetic oligonucleotide
guacagucugugguguagu

SEQ ID NO: 611892 - RNA, 19 nt, Artificial Sequence
  Description of Artificial Sequence: Synthetic oligonucleotide
uggugcacauggggaaauu

SEQ ID NO: 611893 - RNA, 19 nt, Artificial Sequence
  Description of Artificial Sequence: Synthetic oligonucleotide
gcucgcauccuaagccacc

SEQ ID NO: 611894 - RNA, 19 nt, Artificial Sequence
  Description of Artificial Sequence: Synthetic oligonucleotide
cugugauagcuggagacuu

SEQ ID NO: 611895 - RNA, 19 nt, Artificial Sequence
  Description of Artificial Sequence: Synthetic oligonucleotide
cuaaaaccucuuguaguuu

SEQ ID NO: 611896 - RNA, 19 nt, Artificial Sequence
  Description of Artificial Sequence: Synthetic oligonucleotide
gcugugauagcuggagacu

SEQ ID NO: 611897 - RNA, 19 nt, Artificial Sequence
  Description of Artificial Sequence: Synthetic oligonucleotide
acccauugucuugguuuaa

SEQ ID NO: 611898 - RNA, 19 nt, Artificial Sequence
  Description of Artificial Sequence: Synthetic oligonucleotide
guucgaaaucagggugugu

SEQ ID NO: 611899 - RNA, 19 nt, Artificial Sequence
  Description of Artificial Sequence: Synthetic oligonucleotide
ccucuauaacauugcaaau

SEQ ID NO: 611900 - RNA, 19 nt, Artificial Sequence
  Description of Artificial Sequence: Synthetic oligonucleotide
cgagucccaauucuuuuaa

SEQ ID NO: 611901 - RNA, 19 nt, Artificial Sequence
  Description of Artificial Sequence: Synthetic oligonucleotide
cagucauuccaggcaaaau

SEQ ID NO: 611902 - RNA, 19 nt, Artificial Sequence
  Description of Artificial Sequence: Synthetic oligonucleotide
gcucaaggauacauuccua

SEQ ID NO: 611903 - RNA, 19 nt, Artificial Sequence
  Description of Artificial Sequence: Synthetic oligonucleotide
cgcaggacaauuuuccuuu

SEQ ID NO: 611904 - RNA, 19 nt, Artificial Sequence
  Description of Artificial Sequence: Synthetic oligonucleotide
aucgcucgaggaacuucuu

SEQ ID NO: 611905 - RNA, 19 nt, Artificial Sequence
  Description of Artificial Sequence: Synthetic oligonucleotide
gccauuggcuccucgccau

SEQ ID NO: 611906 - RNA, 19 nt, Artificial Sequence
  Description of Artificial Sequence: Synthetic oligonucleotide
ggcuacacgcaggacaauu

SEQ ID NO: 611907 - RNA, 19 nt, Artificial Sequence
  Description of Artificial Sequence: Synthetic oligonucleotide
cgguagaaagugucauuaa

SEQ ID NO: 611908 - RNA, 19 nt, Artificial Sequence
  Description of Artificial Sequence: Synthetic oligonucleotide
gcuacacgcaggacaauuu

SEQ ID NO: 611909 - RNA, 19 nt, Artificial Sequence
  Description of Artificial Sequence: Synthetic oligonucleotide
ccauuggcuccucgccauc

SEQ ID NO: 611910 - RNA, 19 nt, Artificial Sequence
  Description of Artificial Sequence: Synthetic oligonucleotide
ccagaucgcucgaggaacu

SEQ ID NO: 611911 - RNA, 19 nt, Artificial Sequence
  Description of Artificial Sequence: Synthetic oligonucleotide
cucuagcugucagguugua

SEQ ID NO: 611912 - RNA, 19 nt, Artificial Sequence
  Description of Artificial Sequence: Synthetic oligonucleotide
ccuguucuuccccucuaau

SEQ ID NO: 611913 - RNA, 19 nt, Artificial Sequence
  Description of Artificial Sequence: Synthetic oligonucleotide
ccccgcucuuuaauuaaau

SEQ ID NO: 611914 - RNA, 19 nt, Artificial Sequence
  Description of Artificial Sequence: Synthetic oligonucleotide
ccccucuaauguggcugug

SEQ ID NO: 611915 - RNA, 19 nt, Artificial Sequence
  Description of Artificial Sequence: Synthetic oligonucleotide
cagaucgcucgaggaacuu

SEQ ID NO: 611916 - RNA, 19 nt, Artificial Sequence
  Description of Artificial Sequence: Synthetic oligonucleotide
cagcugcgaugacugcauu

SEQ ID NO: 611917 - RNA, 19 nt, Artificial Sequence
  Description of Artificial Sequence: Synthetic oligonucleotide
cccgggcauuuccuuuaaa

SEQ ID NO: 611918 - RNA, 19 nt, Artificial Sequence
  Description of Artificial Sequence: Synthetic oligonucleotide
aauacuaccauucuucccc

SEQ ID NO: 611919 - RNA, 19 nt, Artificial Sequence
  Description of Artificial Sequence: Synthetic oligonucleotide
aaaaugaagagacaacgac

SEQ ID NO: 611920 - RNA, 19 nt, Artificial Sequence
  Description of Artificial Sequence: Synthetic oligonucleotide
uuaauggccacuuaaacgg

SEQ ID NO: 611921 - RNA, 19 nt, Artificial Sequence
  Description of Artificial Sequence: Synthetic oligonucleotide
aauacugcgcuuuaauggc

SEQ ID NO: 611922 - RNA, 19 nt, Artificial Sequence
  Description of Artificial Sequence: Synthetic oligonucleotide
aaaauacuaccauucuucc

SEQ ID NO: 611923 - RNA, 19 nt, Artificial Sequence
  Description of Artificial Sequence: Synthetic oligonucleotide
aacucaauggacuaacagg

SEQ ID NO: 611924 - RNA, 19 nt, Artificial Sequence
  Description of Artificial Sequence: Synthetic oligonucleotide
aaagucuuaaaaugaagag

SEQ ID NO: 611925 - RNA, 19 nt, Artificial Sequence
  Description of Artificial Sequence: Synthetic oligonucleotide
gaaaauuaugcaugaaccg

SEQ ID NO: 611926 - RNA, 19 nt, Artificial Sequence
  Description of Artificial Sequence: Synthetic oligonucleotide
ugaaccgaaaucaaugagg

SEQ ID NO: 611927 - RNA, 19 nt, Artificial Sequence
  Description of Artificial Sequence: Synthetic oligonucleotide
acuaagaugaaacccuggc

SEQ ID NO: 611928 - RNA, 19 nt, Artificial Sequence
  Description of Artificial Sequence: Synthetic oligonucleotide
aagcuaaaauuaaugaagc

SEQ ID NO: 611929 - RNA, 19 nt, Artificial Sequence
  Description of Artificial Sequence: Synthetic oligonucleotide
uguauuuagaacuuggaau

SEQ ID NO: 611930 - RNA, 19 nt, Artificial Sequence
  Description of Artificial Sequence: Synthetic oligonucleotide
aaauacuaccauucuuccc

SEQ ID NO: 611931 - RNA, 19 nt, Artificial Sequence
  Description of Artificial Sequence: Synthetic oligonucleotide
aaaauuaaugaagcaacuc

SEQ ID NO: 611932 - RNA, 19 nt, Artificial Sequence
  Description of Artificial Sequence: Synthetic oligonucleotide
aacgcagacacucugauaa

SEQ ID NO: 611933 - RNA, 19 nt, Artificial Sequence
  Description of Artificial Sequence: Synthetic oligonucleotide
uuuagaacuuggaauauga

SEQ ID NO: 611934 - RNA, 19 nt, Artificial Sequence
  Description of Artificial Sequence: Synthetic oligonucleotide
agagacaacgacuaaauga

SEQ ID NO: 611935 - RNA, 19 nt, Artificial Sequence
  Description of Artificial Sequence: Synthetic oligonucleotide
cugaaucacauuuacaaag

SEQ ID NO: 611936 - RNA, 19 nt, Artificial Sequence
  Description of Artificial Sequence: Synthetic oligonucleotide
uauuuaaagugguuugggg

SEQ ID NO: 611937 - RNA, 19 nt, Artificial Sequence
  Description of Artificial Sequence: Synthetic oligonucleotide
acgcaagucagccagauuc

SEQ ID NO: 611938 - RNA, 19 nt, Artificial Sequence
  Description of Artificial Sequence: Synthetic oligonucleotide
gauauuguaaaucaaugaa

SEQ ID NO: 611939 - RNA, 19 nt, Artificial Sequence
  Description of Artificial Sequence: Synthetic oligonucleotide
aaaauuaugcaugaaccga

SEQ ID NO: 611940 - RNA, 19 nt, Artificial Sequence
  Description of Artificial Sequence: Synthetic oligonucleotide
agguaaucaaaauagauuu

SEQ ID NO: 611941 - RNA, 19 nt, Artificial Sequence
  Description of Artificial Sequence: Synthetic oligonucleotide
gagacaacgacuaaaugag

SEQ ID NO: 611942 - RNA, 19 nt, Artificial Sequence
  Description of Artificial Sequence: Synthetic oligonucleotide
guuagaauucucuugguac

SEQ ID NO: 611943 - RNA, 19 nt, Artificial Sequence
  Description of Artificial Sequence: Synthetic oligonucleotide
gauucuuaggccuagguaa

SEQ ID NO: 611944 - RNA, 19 nt, Artificial Sequence
  Description of Artificial Sequence: Synthetic oligonucleotide
gauauuuaaagugguuugg

SEQ ID NO: 611945 - RNA, 19 nt, Artificial Sequence
  Description of Artificial Sequence: Synthetic oligonucleotide
agauuggauacacuguaac

SEQ ID NO: 611946 - RNA, 19 nt, Artificial Sequence
  Description of Artificial Sequence: Synthetic oligonucleotide
acaaauaacuccggaaggc

SEQ ID NO: 611947 - RNA, 19 nt, Artificial Sequence
  Description of Artificial Sequence: Synthetic oligonucleotide
cacaacaauaaaauucugc

SEQ ID NO: 611948 - RNA, 19 nt, Artificial Sequence
  Description of Artificial Sequence: Synthetic oligonucleotide
ucaauggacuaacaggccc

SEQ ID NO: 611949 - RNA, 19 nt, Artificial Sequence
  Description of Artificial Sequence: Synthetic oligonucleotide
acaacgacuaaaugagugg

SEQ ID NO: 611950 - RNA, 19 nt, Artificial Sequence
  Description of Artificial Sequence: Synthetic oligonucleotide
uuugcauagacauccucag

SEQ ID NO: 611951 - RNA, 19 nt, Artificial Sequence
  Description of Artificial Sequence: Synthetic oligonucleotide
augaacaguuguuugggcg

SEQ ID NO: 611952 - RNA, 19 nt, Artificial Sequence
  Description of Artificial Sequence: Synthetic oligonucleotide
auagguacgcgcucguacc

SEQ ID NO: 611953 - RNA, 19 nt, Artificial Sequence
  Description of Artificial Sequence: Synthetic oligonucleotide
ugguacaucacaacaauaa

SEQ ID NO: 611954 - RNA, 19 nt, Artificial Sequence
  Description of Artificial Sequence: Synthetic oligonucleotide
uagaacuuggaauaugaac

SEQ ID NO: 611955 - RNA, 19 nt, Artificial Sequence
  Description of Artificial Sequence: Synthetic oligonucleotide
uuaugcaugaaccgaaauc

SEQ ID NO: 611956 - RNA, 19 nt, Artificial Sequence
  Description of Artificial Sequence: Synthetic oligonucleotide
uaaacgggaaaauuaugca

SEQ ID NO: 611957 - RNA, 19 nt, Artificial Sequence
  Description of Artificial Sequence: Synthetic oligonucleotide
augaggaacguacacgcgg

SEQ ID NO: 611958 - RNA, 19 nt, Artificial Sequence
  Description of Artificial Sequence: Synthetic oligonucleotide
uagguaaucaaaauagauu

SEQ ID NO: 611959 - RNA, 19 nt, Artificial Sequence
  Description of Artificial Sequence: Synthetic oligonucleotide
aauccuaaucagucccugg

SEQ ID NO: 611960 - RNA, 19 nt, Artificial Sequence
  Description of Artificial Sequence: Synthetic oligonucleotide
aagauauuuaaagugguuu

SEQ ID NO: 611961 - RNA, 19 nt, Artificial Sequence
  Description of Artificial Sequence: Synthetic oligonucleotide
uaugcuauacacacacaca

SEQ ID NO: 611962 - RNA, 19 nt, Artificial Sequence
  Description of Artificial Sequence: Synthetic oligonucleotide
aacaaguuucuuccccuuc

SEQ ID NO: 611963 - RNA, 19 nt, Artificial Sequence
  Description of Artificial Sequence: Synthetic oligonucleotide
ugauaacaacagaaagggg

SEQ ID NO: 611964 - RNA, 19 nt, Artificial Sequence
  Description of Artificial Sequence: Synthetic oligonucleotide
aacgggaaaauuaugcaug

SEQ ID NO: 611965 - RNA, 19 nt, Artificial Sequence
  Description of Artificial Sequence: Synthetic oligonucleotide
uguuaacagucccaguuca

SEQ ID NO: 611966 - RNA, 19 nt, Artificial Sequence
  Description of Artificial Sequence: Synthetic oligonucleotide
gacaaucacauuaagagaa

SEQ ID NO: 611967 - RNA, 19 nt, Artificial Sequence
  Description of Artificial Sequence: Synthetic oligonucleotide
auauuuaaagugguuuggg

SEQ ID NO: 611968 - RNA, 19 nt, Artificial Sequence
  Description of Artificial Sequence: Synthetic oligonucleotide
aucacaacaauaaaauucu

SEQ ID NO: 611969 - RNA, 19 nt, Artificial Sequence
  Description of Artificial Sequence: Synthetic oligonucleotide
acauuaagagaaucgggug

SEQ ID NO: 611970 - RNA, 19 nt, Artificial Sequence
  Description of Artificial Sequence: Synthetic oligonucleotide
aaccccuggucuuaauuuc

SEQ ID NO: 611971 - RNA, 19 nt, Artificial Sequence
  Description of Artificial Sequence: Synthetic oligonucleotide
auccuaaucagucccuggg

SEQ ID NO: 611972 - RNA, 19 nt, Artificial Sequence
  Description of Artificial Sequence: Synthetic oligonucleotide
aguguuaacagucccaguu

SEQ ID NO: 611973 - RNA, 19 nt, Artificial Sequence
  Description of Artificial Sequence: Synthetic oligonucleotide
ugugcacagagcauggcca

SEQ ID NO: 611974 - RNA, 19 nt, Artificial Sequence
  Description of Artificial Sequence: Synthetic oligonucleotide
aauaacuccggaaggcauc

SEQ ID NO: 611975 - RNA, 19 nt, Artificial Sequence
  Description of Artificial Sequence: Synthetic oligonucleotide
gaaaauuuccagacacggg

SEQ ID NO: 611976 - RNA, 19 nt, Artificial Sequence
  Description of Artificial Sequence: Synthetic oligonucleotide
gaugcgaacugcucggugc

SEQ ID NO: 611977 - RNA, 19 nt, Artificial Sequence
  Description of Artificial Sequence: Synthetic oligonucleotide
gacaacgacuaaaugagug

SEQ ID NO: 611978 - RNA, 19 nt, Artificial Sequence
  Description of Artificial Sequence: Synthetic oligonucleotide
aaaaugugcagaucuuuua

SEQ ID NO: 611979 - RNA, 19 nt, Artificial Sequence
  Description of Artificial Sequence: Synthetic oligonucleotide
uggaauuaaaaguuacaau

SEQ ID NO: 611980 - RNA, 19 nt, Artificial Sequence
  Description of Artificial Sequence: Synthetic oligonucleotide
uugaccaagcuguagacua

SEQ ID NO: 611981 - RNA, 19 nt, Artificial Sequence
  Description of Artificial Sequence: Synthetic oligonucleotide
uggaauaugaacaguuguu

SEQ ID NO: 611982 - RNA, 19 nt, Artificial Sequence
  Description of Artificial Sequence: Synthetic oligonucleotide
gauuggauacacuguaaca

SEQ ID NO: 611983 - RNA, 19 nt, Artificial Sequence
  Description of Artificial Sequence: Synthetic oligonucleotide
acuaacaggccccauuugu

SEQ ID NO: 611984 - RNA, 19 nt, Artificial Sequence
  Description of Artificial Sequence: Synthetic oligonucleotide
aauucacagguuggcaccg

SEQ ID NO: 611985 - RNA, 19 nt, Artificial Sequence
  Description of Artificial Sequence: Synthetic oligonucleotide
agacaaucacauuaagaga

SEQ ID NO: 611986 - RNA, 19 nt, Artificial Sequence
  Description of Artificial Sequence: Synthetic oligonucleotide
ugguugaccaagcuguaga

SEQ ID NO: 611987 - RNA, 19 nt, Artificial Sequence
  Description of Artificial Sequence: Synthetic oligonucleotide
ugcagaucuuuuaacauuu

SEQ ID NO: 611988 - RNA, 19 nt, Artificial Sequence
  Description of Artificial Sequence: Synthetic oligonucleotide
auggugggaauucacaggu

SEQ ID NO: 611989 - RNA, 19 nt, Artificial Sequence
  Description of Artificial Sequence: Synthetic oligonucleotide
uuugauacaguagguaauc

SEQ ID NO: 611990 - RNA, 19 nt, Artificial Sequence
  Description of Artificial Sequence: Synthetic oligonucleotide
acgcggaugaucugguccc

SEQ ID NO: 611991 - RNA, 19 nt, Artificial Sequence
  Description of Artificial Sequence: Synthetic oligonucleotide
augaaccgaaaucaaugag

SEQ ID NO: 611992 - RNA, 19 nt, Artificial Sequence
  Description of Artificial Sequence: Synthetic oligonucleotide
acgggcuuaacauuuaaaa

SEQ ID NO: 611993 - RNA, 19 nt, Artificial Sequence
  Description of Artificial Sequence: Synthetic oligonucleotide
ugucacugaaauaauucua

SEQ ID NO: 611994 - RNA, 19 nt, Artificial Sequence
  Description of Artificial Sequence: Synthetic oligonucleotide
aaauuaugcaugaaccgaa

SEQ ID NO: 611995 - RNA, 19 nt, Artificial Sequence
  Description of Artificial Sequence: Synthetic oligonucleotide
acguacacgcgguaaagag

SEQ ID NO: 611996 - RNA, 19 nt, Artificial Sequence
  Description of Artificial Sequence: Synthetic oligonucleotide
auggaugcgaacugcucgg

SEQ ID NO: 611997 - RNA, 19 nt, Artificial Sequence
  Description of Artificial Sequence: Synthetic oligonucleotide
guacacgcgguaaagagcc

SEQ ID NO: 611998 - RNA, 19 nt, Artificial Sequence
  Description of Artificial Sequence: Synthetic oligonucleotide
gaucauagguacgcgcucg

SEQ ID NO: 611999 - RNA, 19 nt, Artificial Sequence
  Description of Artificial Sequence: Synthetic oligonucleotide
ugauucuuaggccuaggua

SEQ ID NO: 612000 - RNA, 19 nt, Artificial Sequence
  Description of Artificial Sequence: Synthetic oligonucleotide
agcaacucaauggacuaac

SEQ ID NO: 612001 - RNA, 19 nt, Artificial Sequence
  Description of Artificial Sequence: Synthetic oligonucleotide
gggaaaauuaugcaugaac

SEQ ID NO: 612002 - RNA, 19 nt, Artificial Sequence
  Description of Artificial Sequence: Synthetic oligonucleotide
caauggacuaacaggcccc

SEQ ID NO: 612003 - RNA, 19 nt, Artificial Sequence
  Description of Artificial Sequence: Synthetic oligonucleotide
aacuccggaaggcaucaug

SEQ ID NO: 612004 - RNA, 19 nt, Artificial Sequence
  Description of Artificial Sequence: Synthetic oligonucleotide
auuccucggacaucccggc

SEQ ID NO: 612005 - RNA, 19 nt, Artificial Sequence
  Description of Artificial Sequence: Synthetic oligonucleotide
augcgaacugcucggugcc

SEQ ID NO: 612006 - RNA, 19 nt, Artificial Sequence
  Description of Artificial Sequence: Synthetic oligonucleotide
ugcaauacuucagauugga

SEQ ID NO: 612007 - RNA, 19 nt, Artificial Sequence
  Description of Artificial Sequence: Synthetic oligonucleotide
agagaaucggguguguuug

SEQ ID NO: 612008 - RNA, 19 nt, Artificial Sequence
  Description of Artificial Sequence: Synthetic oligonucleotide
uuaggccuagguaauuuuc

SEQ ID NO: 612009 - RNA, 19 nt, Artificial Sequence
  Description of Artificial Sequence: Synthetic oligonucleotide
uaccgcuucacgcggauga

SEQ ID NO: 612010 - RNA, 19 nt, Artificial Sequence
  Description of Artificial Sequence: Synthetic oligonucleotide
aagagaaucggguguguuu

SEQ ID NO: 612011 - RNA, 19 nt, Artificial Sequence
  Description of Artificial Sequence: Synthetic oligonucleotide
uaggccuagguaauuuucu

SEQ ID NO: 612012 - RNA, 19 nt, Artificial Sequence
  Description of Artificial Sequence: Synthetic oligonucleotide
aauaacgcagacacucuga

SEQ ID NO: 612013 - RNA, 19 nt, Artificial Sequence
  Description of Artificial Sequence: Synthetic oligonucleotide
aaugaggaacguacacgcg

SEQ ID NO: 612014 - RNA, 19 nt, Artificial Sequence
  Description of Artificial Sequence: Synthetic oligonucleotide
cuaaucagucccuggguug

SEQ ID NO: 612015 - RNA, 19 nt, Artificial Sequence
  Description of Artificial Sequence: Synthetic oligonucleotide
acccugugauucuuaggcc

SEQ ID NO: 612016 - RNA, 19 nt, Artificial Sequence
  Description of Artificial Sequence: Synthetic oligonucleotide
acagauauuguaaaucaau

SEQ ID NO: 612017 - RNA, 19 nt, Artificial Sequence
  Description of Artificial Sequence: Synthetic oligonucleotide
ugaggaacguacacgcggu

SEQ ID NO: 612018 - RNA, 19 nt, Artificial Sequence
  Description of Artificial Sequence: Synthetic oligonucleotide
acacccugcaacaaauaac

SEQ ID NO: 612019 - RNA, 19 nt, Artificial Sequence
  Description of Artificial Sequence: Synthetic oligonucleotide
aaacuuuugcuugccggug

SEQ ID NO: 612020 - RNA, 19 nt, Artificial Sequence
  Description of Artificial Sequence: Synthetic oligonucleotide
uagguacgcgcucguaccg

SEQ ID NO: 612021 - RNA, 19 nt, Artificial Sequence
  Description of Artificial Sequence: Synthetic oligonucleotide
cauagguacgcgcucguac

SEQ ID NO: 612022 - RNA, 19 nt, Artificial Sequence
  Description of Artificial Sequence: Synthetic oligonucleotide
cacaugugcaauacuucag

SEQ ID NO: 612023 - RNA, 19 nt, Artificial Sequence
  Description of Artificial Sequence: Synthetic oligonucleotide
gucgcugccaaccacaaaa

SEQ ID NO: 612024 - RNA, 19 nt, Artificial Sequence
  Description of Artificial Sequence: Synthetic oligonucleotide
caugaaccgaaaucaauga

SEQ ID NO: 612025 - RNA, 19 nt, Artificial Sequence
  Description of Artificial Sequence: Synthetic oligonucleotide
auuuagaacuuggaauaug

SEQ ID NO: 612026 - RNA, 19 nt, Artificial Sequence
  Description of Artificial Sequence: Synthetic oligonucleotide
augguauggucauacccug

SEQ ID NO: 612027 - RNA, 19 nt, Artificial Sequence
  Description of Artificial Sequence: Synthetic oligonucleotide
uucauaugguuuucucaga

SEQ ID NO: 612028 - RNA, 19 nt, Artificial Sequence
  Description of Artificial Sequence: Synthetic oligonucleotide
gaaacccuggccauucuug

SEQ ID NO: 612029 - RNA, 19 nt, Artificial Sequence
  Description of Artificial Sequence: Synthetic oligonucleotide
ucacaugguauggucauac

SEQ ID NO: 612030 - RNA, 19 nt, Artificial Sequence
  Description of Artificial Sequence: Synthetic oligonucleotide
acggcgacgaauccacuuc

SEQ ID NO: 612031 - RNA, 19 nt, Artificial Sequence
  Description of Artificial Sequence: Synthetic oligonucleotide
ugcccucuccguaugacga

SEQ ID NO: 612032 - RNA, 19 nt, Artificial Sequence
  Description of Artificial Sequence: Synthetic oligonucleotide
gacuaagaugaaacccugg

SEQ ID NO: 612033 - RNA, 19 nt, Artificial Sequence
  Description of Artificial Sequence: Synthetic oligonucleotide
aggccuagguaauuuucuc

SEQ ID NO: 612034 - RNA, 19 nt, Artificial Sequence
  Description of Artificial Sequence: Synthetic oligonucleotide
agaaucggguguguuuggc

SEQ ID NO: 612035 - RNA, 19 nt, Artificial Sequence
  Description of Artificial Sequence: Synthetic oligonucleotide
guaacaagaacccaacuuu

SEQ ID NO: 612036 - RNA, 19 nt, Artificial Sequence
  Description of Artificial Sequence: Synthetic oligonucleotide
cuaccauucuuccccagac

SEQ ID NO: 612037 - RNA, 19 nt, Artificial Sequence
  Description of Artificial Sequence: Synthetic oligonucleotide
auuaugcaugaaccgaaau

SEQ ID NO: 612038 - RNA, 19 nt, Artificial Sequence
  Description of Artificial Sequence: Synthetic oligonucleotide
cacuuaaacgggaaaauua

SEQ ID NO: 612039 - RNA, 19 nt, Artificial Sequence
  Description of Artificial Sequence: Synthetic oligonucleotide
agcagaacagcagauucug

SEQ ID NO: 612040 - RNA, 19 nt, Artificial Sequence
  Description of Artificial Sequence: Synthetic oligonucleotide
aguuguuugggcgaacccu

SEQ ID NO: 612041 - RNA, 19 nt, Artificial Sequence
  Description of Artificial Sequence: Synthetic oligonucleotide
uccuaaucagucccugggu

SEQ ID NO: 612042 - RNA, 19 nt, Artificial Sequence
  Description of Artificial Sequence: Synthetic oligonucleotide
cacgcggaugaucuggucc

SEQ ID NO: 612043 - RNA, 19 nt, Artificial Sequence
  Description of Artificial Sequence: Synthetic oligonucleotide
gcuaaaauuaaugaagcaa

SEQ ID NO: 612044 - RNA, 19 nt, Artificial Sequence
  Description of Artificial Sequence: Synthetic oligonucleotide
cuaacaggccccauuuguc

SEQ ID NO: 612045 - RNA, 19 nt, Artificial Sequence
  Description of Artificial Sequence: Synthetic oligonucleotide
cacauuaagagaaucgggu

SEQ ID NO: 612046 - RNA, 19 nt, Artificial Sequence
  Description of Artificial Sequence: Synthetic oligonucleotide
cuucacgcggaugaucugg

SEQ ID NO: 612047 - RNA, 19 nt, Artificial Sequence
  Description of Artificial Sequence: Synthetic oligonucleotide
aaauaacuccggaaggcau

SEQ ID NO: 612048 - RNA, 19 nt, Artificial Sequence
  Description of Artificial Sequence: Synthetic oligonucleotide
caggaucauagguacgcgc

SEQ ID NO: 612049 - RNA, 19 nt, Artificial Sequence
  Description of Artificial Sequence: Synthetic oligonucleotide
uuuggcggaugucuccaug

SEQ ID NO: 612050 - RNA, 19 nt, Artificial Sequence
  Description of Artificial Sequence: Synthetic oligonucleotide
ugggaauucacagguuggc

SEQ ID NO: 612051 - RNA, 19 nt, Artificial Sequence
  Description of Artificial Sequence: Synthetic oligonucleotide
auaacgcagacacucugau

SEQ ID NO: 612052 - RNA, 19 nt, Artificial Sequence
  Description of Artificial Sequence: Synthetic oligonucleotide
uacugcgcuuuaauggcca

SEQ ID NO: 612053 - RNA, 19 nt, Artificial Sequence
  Description of Artificial Sequence: Synthetic oligonucleotide
aguggaauuaaaaguuaca

SEQ ID NO: 612054 - RNA, 19 nt, Artificial Sequence
  Description of Artificial Sequence: Synthetic oligonucleotide
aguagguaaucaaaauaga

SEQ ID NO: 612055 - RNA, 19 nt, Artificial Sequence
  Description of Artificial Sequence: Synthetic oligonucleotide
ugccgaacgaucucugcga

SEQ ID NO: 612056 - RNA, 19 nt, Artificial Sequence
  Description of Artificial Sequence: Synthetic oligonucleotide
uggguugcccuuccaagcu

SEQ ID NO: 612057 - RNA, 19 nt, Artificial Sequence
  Description of Artificial Sequence: Synthetic oligonucleotide
acuaccauucuuccccaga

SEQ ID NO: 612058 - RNA, 19 nt, Artificial Sequence
  Description of Artificial Sequence: Synthetic oligonucleotide
ucaaucuccuugcgguaga

SEQ ID NO: 612059 - RNA, 19 nt, Artificial Sequence
  Description of Artificial Sequence: Synthetic oligonucleotide
cauuaucacagauauugua

SEQ ID NO: 612060 - RNA, 19 nt, Artificial Sequence
  Description of Artificial Sequence: Synthetic oligonucleotide
gucuuggauggucaggaac

SEQ ID NO: 612061 - RNA, 19 nt, Artificial Sequence
  Description of Artificial Sequence: Synthetic oligonucleotide
gacacccugcaacaaauaa

SEQ ID NO: 612062 - RNA, 19 nt, Artificial Sequence
  Description of Artificial Sequence: Synthetic oligonucleotide
gcaugaaccgaaaucaaug

SEQ ID NO: 612063 - RNA, 19 nt, Artificial Sequence
  Description of Artificial Sequence: Synthetic oligonucleotide
acuaaaugaguggaauuaa

SEQ ID NO: 612064 - RNA, 19 nt, Artificial Sequence
  Description of Artificial Sequence: Synthetic oligonucleotide
gaggcuuuguuuuggcgga

SEQ ID NO: 612065 - RNA, 19 nt, Artificial Sequence
  Description of Artificial Sequence: Synthetic oligonucleotide
gaacguacacgcgguaaag

SEQ ID NO: 612066 - RNA, 19 nt, Artificial Sequence
  Description of Artificial Sequence: Synthetic oligonucleotide
aauuaugcaugaaccgaaa

SEQ ID NO: 612067 - RNA, 19 nt, Artificial Sequence
  Description of Artificial Sequence: Synthetic oligonucleotide
uguuugggcgaacccuccc

SEQ ID NO: 612068 - RNA, 19 nt, Artificial Sequence
  Description of Artificial Sequence: Synthetic oligonucleotide
auacugcgcuuuaauggcc

SEQ ID NO: 612069 - RNA, 19 nt, Artificial Sequence
  Description of Artificial Sequence: Synthetic oligonucleotide
uccguaugacgaccucgcg

SEQ ID NO: 612070 - RNA, 19 nt, Artificial Sequence
  Description of Artificial Sequence: Synthetic oligonucleotide
cugcgaacagcucauccac

SEQ ID NO: 612071 - RNA, 19 nt, Artificial Sequence
  Description of Artificial Sequence: Synthetic oligonucleotide
gaauccuaaucagucccug

SEQ ID NO: 612072 - RNA, 19 nt, Artificial Sequence
  Description of Artificial Sequence: Synthetic oligonucleotide
aacguacacgcgguaaaga

SEQ ID NO: 612073 - RNA, 19 nt, Artificial Sequence
  Description of Artificial Sequence: Synthetic oligonucleotide
caugguauggucauacccu

SEQ ID NO: 612074 - RNA, 19 nt, Artificial Sequence
  Description of Artificial Sequence: Synthetic oligonucleotide
uugccggugucaagcagcc

SEQ ID NO: 612075 - RNA, 19 nt, Artificial Sequence
  Description of Artificial Sequence: Synthetic oligonucleotide
guguuaacagucccaguuc

SEQ ID NO: 612076 - RNA, 19 nt, Artificial Sequence
  Description of Artificial Sequence: Synthetic oligonucleotide
ugcgccgcguaguucaucu

SEQ ID NO: 612077 - RNA, 19 nt, Artificial Sequence
  Description of Artificial Sequence: Synthetic oligonucleotide
uggacuaacaggccccauu

SEQ ID NO: 612078 - RNA, 19 nt, Artificial Sequence
  Description of Artificial Sequence: Synthetic oligonucleotide
acugcgcuuuaauggccac

SEQ ID NO: 612079 - RNA, 19 nt, Artificial Sequence
  Description of Artificial Sequence: Synthetic oligonucleotide
guuugggcgaacccucccc

SEQ ID NO: 612080 - RNA, 19 nt, Artificial Sequence
  Description of Artificial Sequence: Synthetic oligonucleotide
acgacuaaaugaguggaau

SEQ ID NO: 612081 - RNA, 19 nt, Artificial Sequence
  Description of Artificial Sequence: Synthetic oligonucleotide
accccuggucuuaauuucc

SEQ ID NO: 612082 - RNA, 19 nt, Artificial Sequence
  Description of Artificial Sequence: Synthetic oligonucleotide
cauuaagagaaucgggugu

SEQ ID NO: 612083 - RNA, 19 nt, Artificial Sequence
  Description of Artificial Sequence: Synthetic oligonucleotide
gacuaacaggccccauuug

SEQ ID NO: 612084 - RNA, 19 nt, Artificial Sequence
  Description of Artificial Sequence: Synthetic oligonucleotide
gcucguaccgcuucacgcg

SEQ ID NO: 612085 - RNA, 19 nt, Artificial Sequence
  Description of Artificial Sequence: Synthetic oligonucleotide
uucugggagucacauggua

SEQ ID NO: 612086 - RNA, 19 nt, Artificial Sequence
  Description of Artificial Sequence: Synthetic oligonucleotide
auaacuccggaaggcauca

SEQ ID NO: 612087 - RNA, 19 nt, Artificial Sequence
  Description of Artificial Sequence: Synthetic oligonucleotide
agacuaagaugaaacccug

SEQ ID NO: 612088 - RNA, 19 nt, Artificial Sequence
  Description of Artificial Sequence: Synthetic oligonucleotide
uucacgcggaugaucuggu

SEQ ID NO: 612089 - RNA, 19 nt, Artificial Sequence
  Description of Artificial Sequence: Synthetic oligonucleotide
uaucuggcccuguccacca

SEQ ID NO: 612090 - RNA, 19 nt, Artificial Sequence
  Description of Artificial Sequence: Synthetic oligonucleotide
acgcagacacucugauaac

SEQ ID NO: 612091 - RNA, 19 nt, Artificial Sequence
  Description of Artificial Sequence: Synthetic oligonucleotide
cacaugguauggucauacc

SEQ ID NO: 612092 - RNA, 19 nt, Artificial Sequence
  Description of Artificial Sequence: Synthetic oligonucleotide
ggccuagguaauuuucucc

SEQ ID NO: 612093 - RNA, 19 nt, Artificial Sequence
  Description of Artificial Sequence: Synthetic oligonucleotide
uagguaauuuucucccauu

SEQ ID NO: 612094 - RNA, 19 nt, Artificial Sequence
  Description of Artificial Sequence: Synthetic oligonucleotide
caaauaacuccggaaggca

SEQ ID NO: 612095 - RNA, 19 nt, Artificial Sequence
  Description of Artificial Sequence: Synthetic oligonucleotide
guagguaaucaaaauagau

SEQ ID NO: 612096 - RNA, 19 nt, Artificial Sequence
  Description of Artificial Sequence: Synthetic oligonucleotide
uuaagagaaucgggugugu

SEQ ID NO: 612097 - RNA, 19 nt, Artificial Sequence
  Description of Artificial Sequence: Synthetic oligonucleotide
aguuugggguuucuuuaaa

SEQ ID NO: 612098 - RNA, 19 nt, Artificial Sequence
  Description of Artificial Sequence: Synthetic oligonucleotide
ugcgaacagcucauccacu

SEQ ID NO: 612099 - RNA, 19 nt, Artificial Sequence
  Description of Artificial Sequence: Synthetic oligonucleotide
gacagcauuaucacagaua

SEQ ID NO: 612100 - RNA, 19 nt, Artificial Sequence
  Description of Artificial Sequence: Synthetic oligonucleotide
cucggaccccggcugaagg

SEQ ID NO: 612101 - RNA, 19 nt, Artificial Sequence
  Description of Artificial Sequence: Synthetic oligonucleotide
guaucuggcccuguccacc

SEQ ID NO: 612102 - RNA, 19 nt, Artificial Sequence
  Description of Artificial Sequence: Synthetic oligonucleotide
caacgacuaaaugagugga

SEQ ID NO: 612103 - RNA, 19 nt, Artificial Sequence
  Description of Artificial Sequence: Synthetic oligonucleotide
cacagauauuguaaaucaa

SEQ ID NO: 612104 - RNA, 19 nt, Artificial Sequence
  Description of Artificial Sequence: Synthetic oligonucleotide
gguugaccaagcuguagac

SEQ ID NO: 612105 - RNA, 19 nt, Artificial Sequence
  Description of Artificial Sequence: Synthetic oligonucleotide
ggugucaagcagccaauac

SEQ ID NO: 612106 - RNA, 19 nt, Artificial Sequence
  Description of Artificial Sequence: Synthetic oligonucleotide
uacuaccauucuuccccag

SEQ ID NO: 612107 - RNA, 19 nt, Artificial Sequence
  Description of Artificial Sequence: Synthetic oligonucleotide
ucggacaucccggccaaca

SEQ ID NO: 612108 - RNA, 19 nt, Artificial Sequence
  Description of Artificial Sequence: Synthetic oligonucleotide
agguacgcgcucguaccgc

SEQ ID NO: 612109 - RNA, 19 nt, Artificial Sequence
  Description of Artificial Sequence: Synthetic oligonucleotide
aucauagguacgcgcucgu

SEQ ID NO: 612110 - RNA, 19 nt, Artificial Sequence
  Description of Artificial Sequence: Synthetic oligonucleotide
ccuuugauacaguagguaa

SEQ ID NO: 612111 - RNA, 19 nt, Artificial Sequence
  Description of Artificial Sequence: Synthetic oligonucleotide
agaauccuaaucagucccu

SEQ ID NO: 612112 - RNA, 19 nt, Artificial Sequence
  Description of Artificial Sequence: Synthetic oligonucleotide
ucauacccugugauucuua

SEQ ID NO: 612113 - RNA, 19 nt, Artificial Sequence
  Description of Artificial Sequence: Synthetic oligonucleotide
gucacugaaauaauucuau

SEQ ID NO: 612114 - RNA, 19 nt, Artificial Sequence
  Description of Artificial Sequence: Synthetic oligonucleotide
acuccccuuugauacagua

SEQ ID NO: 612115 - RNA, 19 nt, Artificial Sequence
  Description of Artificial Sequence: Synthetic oligonucleotide
uaagagaaucggguguguu

SEQ ID NO: 612116 - RNA, 19 nt, Artificial Sequence
  Description of Artificial Sequence: Synthetic oligonucleotide
gucgccguugggcugcgcc

SEQ ID NO: 612117 - RNA, 19 nt, Artificial Sequence
  Description of Artificial Sequence: Synthetic oligonucleotide
ucggaccccggcugaaggc

SEQ ID NO: 612118 - RNA, 19 nt, Artificial Sequence
  Description of Artificial Sequence: Synthetic oligonucleotide
guuaacagucccaguucac

SEQ ID NO: 612119 - RNA, 19 nt, Artificial Sequence
  Description of Artificial Sequence: Synthetic oligonucleotide
gucacccaauuugucacug

SEQ ID NO: 612120 - RNA, 19 nt, Artificial Sequence
  Description of Artificial Sequence: Synthetic oligonucleotide
ugcuugccggugucaagca

SEQ ID NO: 612121 - RNA, 19 nt, Artificial Sequence
  Description of Artificial Sequence: Synthetic oligonucleotide
uaacgcagacacucugaua

SEQ ID NO: 612122 - RNA, 19 nt, Artificial Sequence
  Description of Artificial Sequence: Synthetic oligonucleotide
uacgcgcucguaccgcuuc

SEQ ID NO: 612123 - RNA, 19 nt, Artificial Sequence
  Description of Artificial Sequence: Synthetic oligonucleotide
uuccucggacaucccggcc

SEQ ID NO: 612124 - RNA, 19 nt, Artificial Sequence
  Description of Artificial Sequence: Synthetic oligonucleotide
auucuuaggccuagguaau

SEQ ID NO: 612125 - RNA, 19 nt, Artificial Sequence
  Description of Artificial Sequence: Synthetic oligonucleotide
acaaucacauuaagagaau

SEQ ID NO: 612126 - RNA, 19 nt, Artificial Sequence
  Description of Artificial Sequence: Synthetic oligonucleotide
guuuuggcggaugucucca

SEQ ID NO: 612127 - RNA, 19 nt, Artificial Sequence
  Description of Artificial Sequence: Synthetic oligonucleotide
uggcaccccacacuguauu

SEQ ID NO: 612128 - RNA, 19 nt, Artificial Sequence
  Description of Artificial Sequence: Synthetic oligonucleotide
gguugcccuuccaagcugg

SEQ ID NO: 612129 - RNA, 19 nt, Artificial Sequence
  Description of Artificial Sequence: Synthetic oligonucleotide
gaaucggguguguuuggcu

SEQ ID NO: 612130 - RNA, 19 nt, Artificial Sequence
  Description of Artificial Sequence: Synthetic oligonucleotide
agacacgggcuuaacauuu

SEQ ID NO: 612131 - RNA, 19 nt, Artificial Sequence
  Description of Artificial Sequence: Synthetic oligonucleotide
gggagaaaauuuccagaca

SEQ ID NO: 612132 - RNA, 19 nt, Artificial Sequence
  Description of Artificial Sequence: Synthetic oligonucleotide
ccaacacaaagucgucucc

SEQ ID NO: 612133 - RNA, 19 nt, Artificial Sequence
  Description of Artificial Sequence: Synthetic oligonucleotide
cagauuggauacacuguaa

SEQ ID NO: 612134 - RNA, 19 nt, Artificial Sequence
  Description of Artificial Sequence: Synthetic oligonucleotide
ccguaugacgaccucgcgc

SEQ ID NO: 612135 - RNA, 19 nt, Artificial Sequence
  Description of Artificial Sequence: Synthetic oligonucleotide
ggcccugaaucacauuuac

SEQ ID NO: 612136 - RNA, 19 nt, Artificial Sequence
  Description of Artificial Sequence: Synthetic oligonucleotide
cguacacgcgguaaagagc

SEQ ID NO: 612137 - RNA, 19 nt, Artificial Sequence
  Description of Artificial Sequence: Synthetic oligonucleotide
acgaccucgcgcucgcccu

SEQ ID NO: 612138 - RNA, 19 nt, Artificial Sequence
  Description of Artificial Sequence: Synthetic oligonucleotide
cuugcccucuccguaugac

SEQ ID NO: 612139 - RNA, 19 nt, Artificial Sequence
  Description of Artificial Sequence: Synthetic oligonucleotide
aggaacguacacgcgguaa

SEQ ID NO: 612140 - RNA, 19 nt, Artificial Sequence
  Description of Artificial Sequence: Synthetic oligonucleotide
cacccaauuugucacugaa

SEQ ID NO: 612141 - RNA, 19 nt, Artificial Sequence
  Description of Artificial Sequence: Synthetic oligonucleotide
ugaaggcacucugcagaca

SEQ ID NO: 612142 - RNA, 19 nt, Artificial Sequence
  Description of Artificial Sequence: Synthetic oligonucleotide
uacacgcgguaaagagcca

SEQ ID NO: 612143 - RNA, 19 nt, Artificial Sequence
  Description of Artificial Sequence: Synthetic oligonucleotide
augaaacccuggccauucu

SEQ ID NO: 612144 - RNA, 19 nt, Artificial Sequence
  Description of Artificial Sequence: Synthetic oligonucleotide
gugauucuuaggccuaggu

SEQ ID NO: 612145 - RNA, 19 nt, Artificial Sequence
  Description of Artificial Sequence: Synthetic oligonucleotide
uuuuggcggaugucuccau

SEQ ID NO: 612146 - RNA, 19 nt, Artificial Sequence
  Description of Artificial Sequence: Synthetic oligonucleotide
agacaacgacuaaaugagu

SEQ ID NO: 612147 - RNA, 19 nt, Artificial Sequence
  Description of Artificial Sequence: Synthetic oligonucleotide
ggaacguacacgcgguaaa

SEQ ID NO: 612148 - RNA, 19 nt, Artificial Sequence
  Description of Artificial Sequence: Synthetic oligonucleotide
agcaccgacggcgacgaau

SEQ ID NO: 612149 - RNA, 19 nt, Artificial Sequence
  Description of Artificial Sequence: Synthetic oligonucleotide
ucguaccgcuucacgcgga

SEQ ID NO: 612150 - RNA, 19 nt, Artificial Sequence
  Description of Artificial Sequence: Synthetic oligonucleotide
ggaucauagguacgcgcuc

SEQ ID NO: 612151 - RNA, 19 nt, Artificial Sequence
  Description of Artificial Sequence: Synthetic oligonucleotide
guugggcugcgccgcguag

SEQ ID NO: 612152 - RNA, 19 nt, Artificial Sequence
  Description of Artificial Sequence: Synthetic oligonucleotide
ggcugcgccgcguaguuca

SEQ ID NO: 612153 - RNA, 19 nt, Artificial Sequence
  Description of Artificial Sequence: Synthetic oligonucleotide
gcaccccacacuguauugg

SEQ ID NO: 612154 - RNA, 19 nt, Artificial Sequence
  Description of Artificial Sequence: Synthetic oligonucleotide
ugucgcugccaaccacaaa

SEQ ID NO: 612155 - RNA, 19 nt, Artificial Sequence
  Description of Artificial Sequence: Synthetic oligonucleotide
gccggugucaagcagccaa

SEQ ID NO: 612156 - RNA, 19 nt, Artificial Sequence
  Description of Artificial Sequence: Synthetic oligonucleotide
accgacggcgacgaaucca

SEQ ID NO: 612157 - RNA, 19 nt, Artificial Sequence
  Description of Artificial Sequence: Synthetic oligonucleotide
aaggaaccccuggucuuaa

SEQ ID NO: 612158 - RNA, 19 nt, Artificial Sequence
  Description of Artificial Sequence: Synthetic oligonucleotide
cacgggcuuaacauuuaaa

SEQ ID NO: 612159 - RNA, 19 nt, Artificial Sequence
  Description of Artificial Sequence: Synthetic oligonucleotide
uucuuaggccuagguaauu

SEQ ID NO: 612160 - RNA, 19 nt, Artificial Sequence
  Description of Artificial Sequence: Synthetic oligonucleotide
gccccauuuguccuggcuc

SEQ ID NO: 612161 - RNA, 19 nt, Artificial Sequence
  Description of Artificial Sequence: Synthetic oligonucleotide
uugggcugcgccgcguagu

SEQ ID NO: 612162 - RNA, 19 nt, Artificial Sequence
  Description of Artificial Sequence: Synthetic oligonucleotide
cacgcgguaaagagccaca

SEQ ID NO: 612163 - RNA, 19 nt, Artificial Sequence
  Description of Artificial Sequence: Synthetic oligonucleotide
uggaugcgaacugcucggu

SEQ ID NO: 612164 - RNA, 19 nt, Artificial Sequence
  Description of Artificial Sequence: Synthetic oligonucleotide
ucauagguacgcgcucgua

SEQ ID NO: 612165 - RNA, 19 nt, Artificial Sequence
  Description of Artificial Sequence: Synthetic oligonucleotide
ugcgaacugcucggugccc

SEQ ID NO: 612166 - RNA, 19 nt, Artificial Sequence
  Description of Artificial Sequence: Synthetic oligonucleotide
ccgacggcgacgaauccac

SEQ ID NO: 612167 - RNA, 19 nt, Artificial Sequence
  Description of Artificial Sequence: Synthetic oligonucleotide
ggcaccccacacuguauug

SEQ ID NO: 612168 - RNA, 19 nt, Artificial Sequence
  Description of Artificial Sequence: Synthetic oligonucleotide
acccaauuugucacugaaa

SEQ ID NO: 612169 - RNA, 19 nt, Artificial Sequence
  Description of Artificial Sequence: Synthetic oligonucleotide
ugggcugcgccgcguaguu

SEQ ID NO: 612170 - RNA, 19 nt, Artificial Sequence
  Description of Artificial Sequence: Synthetic oligonucleotide
ucacgcggaugaucugguc

SEQ ID NO: 612171 - RNA, 19 nt, Artificial Sequence
  Description of Artificial Sequence: Synthetic oligonucleotide
cccggccaacacaaagucg

SEQ ID NO: 612172 - RNA, 19 nt, Artificial Sequence
  Description of Artificial Sequence: Synthetic oligonucleotide
guugaccaagcuguagacu

SEQ ID NO: 612173 - RNA, 19 nt, Artificial Sequence
  Description of Artificial Sequence: Synthetic oligonucleotide
ggccacuuaaacgggaaaa

SEQ ID NO: 612174 - RNA, 19 nt, Artificial Sequence
  Description of Artificial Sequence: Synthetic oligonucleotide
agcugaguuugaaggcacu

SEQ ID NO: 612175 - RNA, 19 nt, Artificial Sequence
  Description of Artificial Sequence: Synthetic oligonucleotide
gcuugccggugucaagcag

SEQ ID NO: 612176 - RNA, 19 nt, Artificial Sequence
  Description of Artificial Sequence: Synthetic oligonucleotide
cuuaggccuagguaauuuu

SEQ ID NO: 612177 - RNA, 19 nt, Artificial Sequence
  Description of Artificial Sequence: Synthetic oligonucleotide
aucauguaucuggcccugu

SEQ ID NO: 612178 - RNA, 19 nt, Artificial Sequence
  Description of Artificial Sequence: Synthetic oligonucleotide
gacggcgacgaauccacuu

SEQ ID NO: 612179 - RNA, 19 nt, Artificial Sequence
  Description of Artificial Sequence: Synthetic oligonucleotide
gcguaguucaucugccgaa

SEQ ID NO: 612180 - RNA, 19 nt, Artificial Sequence
  Description of Artificial Sequence: Synthetic oligonucleotide
ccggccaacacaaagucgu

SEQ ID NO: 612181 - RNA, 19 nt, Artificial Sequence
  Description of Artificial Sequence: Synthetic oligonucleotide
acgcgguaaagagccacau

SEQ ID NO: 612182 - RNA, 19 nt, Artificial Sequence
  Description of Artificial Sequence: Synthetic oligonucleotide
gcgcucguaccgcuucacg

SEQ ID NO: 612183 - RNA, 19 nt, Artificial Sequence
  Description of Artificial Sequence: Synthetic oligonucleotide
ggacuaacaggccccauuu

SEQ ID NO: 612184 - RNA, 19 nt, Artificial Sequence
  Description of Artificial Sequence: Synthetic oligonucleotide
guaugacgaccucgcgcuc

SEQ ID NO: 612185 - RNA, 19 nt, Artificial Sequence
  Description of Artificial Sequence: Synthetic oligonucleotide
ccgcguaguucaucugccg

SEQ ID NO: 612186 - RNA, 19 nt, Artificial Sequence
  Description of Artificial Sequence: Synthetic oligonucleotide
gggauauggugggaauuca

SEQ ID NO: 612187 - RNA, 19 nt, Artificial Sequence
  Description of Artificial Sequence: Synthetic oligonucleotide
gugcccgcgguguccagga

SEQ ID NO: 612188 - RNA, 19 nt, Artificial Sequence
  Description of Artificial Sequence: Synthetic oligonucleotide
cguaugacgaccucgcgcu

SEQ ID NO: 612189 - RNA, 19 nt, Artificial Sequence
  Description of Artificial Sequence: Synthetic oligonucleotide
gccgcguaguucaucugcc

SEQ ID NO: 612190 - RNA, 19 nt, Artificial Sequence
  Description of Artificial Sequence: Synthetic oligonucleotide
ggucauacccugugauucu

SEQ ID NO: 612191 - RNA, 19 nt, Artificial Sequence
  Description of Artificial Sequence: Synthetic oligonucleotide
cugucgcugccaaccacaa

SEQ ID NO: 612192 - RNA, 19 nt, Artificial Sequence
  Description of Artificial Sequence: Synthetic oligonucleotide
gacacgggcuuaacauuua

SEQ ID NO: 612193 - RNA, 19 nt, Artificial Sequence
  Description of Artificial Sequence: Synthetic oligonucleotide
gcaccgacggcgacgaauc

SEQ ID NO: 612194 - RNA, 19 nt, Artificial Sequence
  Description of Artificial Sequence: Synthetic oligonucleotide
acgcgcucguaccgcuuca

SEQ ID NO: 612195 - RNA, 19 nt, Artificial Sequence
  Description of Artificial Sequence: Synthetic oligonucleotide
gcaacucaauggacuaaca

SEQ ID NO: 612196 - RNA, 19 nt, Artificial Sequence
  Description of Artificial Sequence: Synthetic oligonucleotide
cgccgcguaguucaucugc

SEQ ID NO: 612197 - RNA, 19 nt, Artificial Sequence
  Description of Artificial Sequence: Synthetic oligonucleotide
ccgcaugggcuugaugucc

SEQ ID NO: 612198 - RNA, 19 nt, Artificial Sequence
  Description of Artificial Sequence: Synthetic oligonucleotide
aggaaccccuggucuuaau

SEQ ID NO: 612199 - RNA, 19 nt, Artificial Sequence
  Description of Artificial Sequence: Synthetic oligonucleotide
guaccgcuucacgcggaug

SEQ ID NO: 612200 - RNA, 19 nt, Artificial Sequence
  Description of Artificial Sequence: Synthetic oligonucleotide
gcuucacgcggaugaucug

SEQ ID NO: 612201 - RNA, 19 nt, Artificial Sequence
  Description of Artificial Sequence: Synthetic oligonucleotide
cguaguucaucugccgaac

SEQ ID NO: 612202 - RNA, 19 nt, Artificial Sequence
  Description of Artificial Sequence: Synthetic oligonucleotide
cagacacgggcuuaacauu

SEQ ID NO: 612203 - RNA, 19 nt, Artificial Sequence
  Description of Artificial Sequence: Synthetic oligonucleotide
cccucuccguaugacgacc

SEQ ID NO: 612204 - RNA, 19 nt, Artificial Sequence
  Description of Artificial Sequence: Synthetic oligonucleotide
agacauccucagaauccua

SEQ ID NO: 612205 - RNA, 19 nt, Artificial Sequence
  Description of Artificial Sequence: Synthetic oligonucleotide
ccgaacgaucucugcgaac

SEQ ID NO: 612206 - RNA, 19 nt, Artificial Sequence
  Description of Artificial Sequence: Synthetic oligonucleotide
uaacuccggaaggcaucau

SEQ ID NO: 612207 - RNA, 19 nt, Artificial Sequence
  Description of Artificial Sequence: Synthetic oligonucleotide
ggaaccccuggucuuaauu

SEQ ID NO: 612208 - RNA, 19 nt, Artificial Sequence
  Description of Artificial Sequence: Synthetic oligonucleotide
ggcuggaacagcugaguuu

SEQ ID NO: 612209 - RNA, 19 nt, Artificial Sequence
  Description of Artificial Sequence: Synthetic oligonucleotide
ugacgaccucgcgcucgcc

SEQ ID NO: 612210 - RNA, 19 nt, Artificial Sequence
  Description of Artificial Sequence: Synthetic oligonucleotide
auggacuaacaggccccau

SEQ ID NO: 612211 - RNA, 19 nt, Artificial Sequence
  Description of Artificial Sequence: Synthetic oligonucleotide
uggcaccggcuggaacagc

SEQ ID NO: 612212 - RNA, 19 nt, Artificial Sequence
  Description of Artificial Sequence: Synthetic oligonucleotide
gccgaacgaucucugcgaa

SEQ ID NO: 612213 - RNA, 19 nt, Artificial Sequence
  Description of Artificial Sequence: Synthetic oligonucleotide
gcccugaaucacauuuaca

SEQ ID NO: 612214 - RNA, 19 nt, Artificial Sequence
  Description of Artificial Sequence: Synthetic oligonucleotide
gccuugcccucuccguaug

SEQ ID NO: 612215 - RNA, 19 nt, Artificial Sequence
  Description of Artificial Sequence: Synthetic oligonucleotide
gcccucuccguaugacgac

SEQ ID NO: 612216 - RNA, 19 nt, Artificial Sequence
  Description of Artificial Sequence: Synthetic oligonucleotide
gguacgcgcucguaccgcu

SEQ ID NO: 612217 - RNA, 19 nt, Artificial Sequence
  Description of Artificial Sequence: Synthetic oligonucleotide
gcccgcgguguccaggauc

SEQ ID NO: 612218 - RNA, 19 nt, Artificial Sequence
  Description of Artificial Sequence: Synthetic oligonucleotide
gcagcccucgucgccguug

SEQ ID NO: 612219 - RNA, 19 nt, Artificial Sequence
  Description of Artificial Sequence: Synthetic oligonucleotide
gccguugggcugcgccgcg

SEQ ID NO: 612220 - RNA, 19 nt, Artificial Sequence
  Description of Artificial Sequence: Synthetic oligonucleotide
ggccaacacaaagucgucu

SEQ ID NO: 612221 - RNA, 19 nt, Artificial Sequence
  Description of Artificial Sequence: Synthetic oligonucleotide
cggacaucccggccaacac

SEQ ID NO: 612222 - RNA, 19 nt, Artificial Sequence
  Description of Artificial Sequence: Synthetic oligonucleotide
ugcccgcgguguccaggau

SEQ ID NO: 612223 - RNA, 19 nt, Artificial Sequence
  Description of Artificial Sequence: Synthetic oligonucleotide
ggucccgcauggaugcgaa

SEQ ID NO: 612224 - RNA, 19 nt, Artificial Sequence
  Description of Artificial Sequence: Synthetic oligonucleotide
gcaccggcuggaacagcug

SEQ ID NO: 612225 - RNA, 19 nt, Artificial Sequence
  Description of Artificial Sequence: Synthetic oligonucleotide
ggccccauuuguccuggcu

SEQ ID NO: 612226 - RNA, 19 nt, Artificial Sequence
  Description of Artificial Sequence: Synthetic oligonucleotide
cuggcaccccacacuguau

SEQ ID NO: 612227 - RNA, 19 nt, Artificial Sequence
  Description of Artificial Sequence: Synthetic oligonucleotide
cugcgccgcguaguucauc

SEQ ID NO: 612228 - RNA, 19 nt, Artificial Sequence
  Description of Artificial Sequence: Synthetic oligonucleotide
ggacacccugcaacaaaua

SEQ ID NO: 612229 - RNA, 19 nt, Artificial Sequence
  Description of Artificial Sequence: Synthetic oligonucleotide
agcagcccucgucgccguu

SEQ ID NO: 612230 - RNA, 19 nt, Artificial Sequence
  Description of Artificial Sequence: Synthetic oligonucleotide
gcgccgcguaguucaucug

SEQ ID NO: 612231 - RNA, 19 nt, Artificial Sequence
  Description of Artificial Sequence: Synthetic oligonucleotide
cggccaacacaaagucguc

SEQ ID NO: 612232 - RNA, 19 nt, Artificial Sequence
  Description of Artificial Sequence: Synthetic oligonucleotide
ccuugcccucuccguauga

SEQ ID NO: 612233 - RNA, 19 nt, Artificial Sequence
  Description of Artificial Sequence: Synthetic oligonucleotide
ccgcuucacgcggaugauc

SEQ ID NO: 612234 - RNA, 19 nt, Artificial Sequence
  Description of Artificial Sequence: Synthetic oligonucleotide
gcgcuuuaauggccacuua

SEQ ID NO: 612235 - RNA, 19 nt, Artificial Sequence
  Description of Artificial Sequence: Synthetic oligonucleotide
ccucuccguaugacgaccu

SEQ ID NO: 612236 - RNA, 19 nt, Artificial Sequence
  Description of Artificial Sequence: Synthetic oligonucleotide
cacgcaagucagccagauu

SEQ ID NO: 612237 - RNA, 19 nt, Artificial Sequence
  Description of Artificial Sequence: Synthetic oligonucleotide
gcagaucuuuuaacauuuu

SEQ ID NO: 612238 - RNA, 19 nt, Artificial Sequence
  Description of Artificial Sequence: Synthetic oligonucleotide
cgcaugggcuugauguccu

SEQ ID NO: 612239 - RNA, 19 nt, Artificial Sequence
  Description of Artificial Sequence: Synthetic oligonucleotide
cgaaaucaaugaggaacgu

SEQ ID NO: 612240 - RNA, 19 nt, Artificial Sequence
  Description of Artificial Sequence: Synthetic oligonucleotide
guacgcgcucguaccgcuu

SEQ ID NO: 612241 - RNA, 19 nt, Artificial Sequence
  Description of Artificial Sequence: Synthetic oligonucleotide
gggcugcgccgcguaguuc

SEQ ID NO: 612242 - RNA, 19 nt, Artificial Sequence
  Description of Artificial Sequence: Synthetic oligonucleotide
cgcgcucguaccgcuucac

SEQ ID NO: 612243 - RNA, 19 nt, Artificial Sequence
  Description of Artificial Sequence: Synthetic oligonucleotide
ccacgcaagucagccagau

SEQ ID NO: 612244 - RNA, 19 nt, Artificial Sequence
  Description of Artificial Sequence: Synthetic oligonucleotide
cguugggcugcgccgcgua

SEQ ID NO: 612245 - RNA, 19 nt, Artificial Sequence
  Description of Artificial Sequence: Synthetic oligonucleotide
cagcaccgacggcgacgaa

SEQ ID NO: 612246 - RNA, 19 nt, Artificial Sequence
  Description of Artificial Sequence: Synthetic oligonucleotide
cguaccgcuucacgcggau

SEQ ID NO: 612247 - RNA, 19 nt, Artificial Sequence
  Description of Artificial Sequence: Synthetic oligonucleotide
cgcgguaaagagccacauu

SEQ ID NO: 612248 - RNA, 19 nt, Artificial Sequence
  Description of Artificial Sequence: Synthetic oligonucleotide
cccucggaccccggcugaa

SEQ ID NO: 612249 - RNA, 19 nt, Artificial Sequence
  Description of Artificial Sequence: Synthetic oligonucleotide
gcugcgccgcguaguucau

SEQ ID NO: 612250 - RNA, 19 nt, Artificial Sequence
  Description of Artificial Sequence: Synthetic oligonucleotide
cgacggcgacgaauccacu

SEQ ID NO: 612251 - RNA, 19 nt, Artificial Sequence
  Description of Artificial Sequence: Synthetic oligonucleotide
ccguugggcugcgccgcgu

SEQ ID NO: 612252 - RNA, 19 nt, Artificial Sequence
  Description of Artificial Sequence: Synthetic oligonucleotide
aauuuaacgaucgaucguc

SEQ ID NO: 612253 - RNA, 19 nt, Artificial Sequence
  Description of Artificial Sequence: Synthetic oligonucleotide
caaacuuacacacggacgg

SEQ ID NO: 612254 - RNA, 19 nt, Artificial Sequence
  Description of Artificial Sequence: Synthetic oligonucleotide
guaaucacaggguagaagc

SEQ ID NO: 612255 - RNA, 19 nt, Artificial Sequence
  Description of Artificial Sequence: Synthetic oligonucleotide
uuugaggaauugaaggucc

SEQ ID NO: 612256 - RNA, 19 nt, Artificial Sequence
  Description of Artificial Sequence: Synthetic oligonucleotide
ucuacaaaaccauaagguc

SEQ ID NO: 612257 - RNA, 19 nt, Artificial Sequence
  Description of Artificial Sequence: Synthetic oligonucleotide
uauuuaauacguguuagac

SEQ ID NO: 612258 - RNA, 19 nt, Artificial Sequence
  Description of Artificial Sequence: Synthetic oligonucleotide
aagcuagagccgaagaugc

SEQ ID NO: 612259 - RNA, 19 nt, Artificial Sequence
  Description of Artificial Sequence: Synthetic oligonucleotide
aaauuuaacgaucgaucgu

SEQ ID NO: 612260 - RNA, 19 nt, Artificial Sequence
  Description of Artificial Sequence: Synthetic oligonucleotide
auaauacaagucucuacuc

SEQ ID NO: 612261 - RNA, 19 nt, Artificial Sequence
  Description of Artificial Sequence: Synthetic oligonucleotide
cuauaaacuccguauuucc

SEQ ID NO: 612262 - RNA, 19 nt, Artificial Sequence
  Description of Artificial Sequence: Synthetic oligonucleotide
aaaaccuuaucagcucccc

SEQ ID NO: 612263 - RNA, 19 nt, Artificial Sequence
  Description of Artificial Sequence: Synthetic oligonucleotide
auuuaauacguguuagaca

SEQ ID NO: 612264 - RNA, 19 nt, Artificial Sequence
  Description of Artificial Sequence: Synthetic oligonucleotide
uucucuauaaacuccguau

SEQ ID NO: 612265 - RNA, 19 nt, Artificial Sequence
  Description of Artificial Sequence: Synthetic oligonucleotide
auaagguccuuccacuuag

SEQ ID NO: 612266 - RNA, 19 nt, Artificial Sequence
  Description of Artificial Sequence: Synthetic oligonucleotide
agaucaaauggggaacucc

SEQ ID NO: 612267 - RNA, 19 nt, Artificial Sequence
  Description of Artificial Sequence: Synthetic oligonucleotide
ugcguuagucgcuaaacug

SEQ ID NO: 612268 - RNA, 19 nt, Artificial Sequence
  Description of Artificial Sequence: Synthetic oligonucleotide
gagguucuagcuuucauga

SEQ ID NO: 612269 - RNA, 19 nt, Artificial Sequence
  Description of Artificial Sequence: Synthetic oligonucleotide
aacuuacacacggacggac

SEQ ID NO: 612270 - RNA, 19 nt, Artificial Sequence
  Description of Artificial Sequence: Synthetic oligonucleotide
gaagcuagagccgaagaug

SEQ ID NO: 612271 - RNA, 19 nt, Artificial Sequence
  Description of Artificial Sequence: Synthetic oligonucleotide
accaacgacaccaagaggu

SEQ ID NO: 612272 - RNA, 19 nt, Artificial Sequence
  Description of Artificial Sequence: Synthetic oligonucleotide
uucgccgcagacaacaaac

SEQ ID NO: 612273 - RNA, 19 nt, Artificial Sequence
  Description of Artificial Sequence: Synthetic oligonucleotide
caugagaguguguaaaguc

SEQ ID NO: 612274 - RNA, 19 nt, Artificial Sequence
  Description of Artificial Sequence: Synthetic oligonucleotide
gaugcggugagccuccagc

SEQ ID NO: 612275 - RNA, 19 nt, Artificial Sequence
  Description of Artificial Sequence: Synthetic oligonucleotide
ugaggaaacgccacucggc

SEQ ID NO: 612276 - RNA, 19 nt, Artificial Sequence
  Description of Artificial Sequence: Synthetic oligonucleotide
acguguuagacacguaaag

SEQ ID NO: 612277 - RNA, 19 nt, Artificial Sequence
  Description of Artificial Sequence: Synthetic oligonucleotide
uuaauacguguuagacacg

SEQ ID NO: 612278 - RNA, 19 nt, Artificial Sequence
  Description of Artificial Sequence: Synthetic oligonucleotide
ucgucuguaaacuuuguuu

SEQ ID NO: 612279 - RNA, 19 nt, Artificial Sequence
  Description of Artificial Sequence: Synthetic oligonucleotide
agguuugccacguucccgg

SEQ ID NO: 612280 - RNA, 19 nt, Artificial Sequence
  Description of Artificial Sequence: Synthetic oligonucleotide
acaaacuuacacacggacg

SEQ ID NO: 612281 - RNA, 19 nt, Artificial Sequence
  Description of Artificial Sequence: Synthetic oligonucleotide
uuaacgaucgaucguccuc

SEQ ID NO: 612282 - RNA, 19 nt, Artificial Sequence
  Description of Artificial Sequence: Synthetic oligonucleotide
ugagacucgagagccacgg

SEQ ID NO: 612283 - RNA, 19 nt, Artificial Sequence
  Description of Artificial Sequence: Synthetic oligonucleotide
auaaacuccguauuuccaa

SEQ ID NO: 612284 - RNA, 19 nt, Artificial Sequence
  Description of Artificial Sequence: Synthetic oligonucleotide
uaauacguguuagacacgu

SEQ ID NO: 612285 - RNA, 19 nt, Artificial Sequence
  Description of Artificial Sequence: Synthetic oligonucleotide
auacguguuagacacguaa

SEQ ID NO: 612286 - RNA, 19 nt, Artificial Sequence
  Description of Artificial Sequence: Synthetic oligonucleotide
gaaaagacccggugacgcg

SEQ ID NO: 612287 - RNA, 19 nt, Artificial Sequence
  Description of Artificial Sequence: Synthetic oligonucleotide
accugaucugcguuagucg

SEQ ID NO: 612288 - RNA, 19 nt, Artificial Sequence
  Description of Artificial Sequence: Synthetic oligonucleotide
gacacguaaaguuacauuu

SEQ ID NO: 612289 - RNA, 19 nt, Artificial Sequence
  Description of Artificial Sequence: Synthetic oligonucleotide
uuagacacguaaaguuaca

SEQ ID NO: 612290 - RNA, 19 nt, Artificial Sequence
  Description of Artificial Sequence: Synthetic oligonucleotide
uccgauaagccuccaacuc

SEQ ID NO: 612291 - RNA, 19 nt, Artificial Sequence
  Description of Artificial Sequence: Synthetic oligonucleotide
cagaguaaucacaggguag

SEQ ID NO: 612292 - RNA, 19 nt, Artificial Sequence
  Description of Artificial Sequence: Synthetic oligonucleotide
auuuaacgaucgaucgucc

SEQ ID NO: 612293 - RNA, 19 nt, Artificial Sequence
  Description of Artificial Sequence: Synthetic oligonucleotide
agaguaaucacaggguaga

SEQ ID NO: 612294 - RNA, 19 nt, Artificial Sequence
  Description of Artificial Sequence: Synthetic oligonucleotide
cuagacgauggggugaacg

SEQ ID NO: 612295 - RNA, 19 nt, Artificial Sequence
  Description of Artificial Sequence: Synthetic oligonucleotide
gaugccgccgcgcuggacc

SEQ ID NO: 612296 - RNA, 19 nt, Artificial Sequence
  Description of Artificial Sequence: Synthetic oligonucleotide
uuccacuuagagcucgucu

SEQ ID NO: 612297 - RNA, 19 nt, Artificial Sequence
  Description of Artificial Sequence: Synthetic oligonucleotide
uuuaacgaucgaucguccu

SEQ ID NO: 612298 - RNA, 19 nt, Artificial Sequence
  Description of Artificial Sequence: Synthetic oligonucleotide
guuagacacguaaaguuac

SEQ ID NO: 612299 - RNA, 19 nt, Artificial Sequence
  Description of Artificial Sequence: Synthetic oligonucleotide
uguaguaaguucugagcua

SEQ ID NO: 612300 - RNA, 19 nt, Artificial Sequence
  Description of Artificial Sequence: Synthetic oligonucleotide
agaagcuagagccgaagau

SEQ ID NO: 612301 - RNA, 19 nt, Artificial Sequence
  Description of Artificial Sequence: Synthetic oligonucleotide
uacguguuagacacguaaa

SEQ ID NO: 612302 - RNA, 19 nt, Artificial Sequence
  Description of Artificial Sequence: Synthetic oligonucleotide
ggaaacgccacucggcgcg

SEQ ID NO: 612303 - RNA, 19 nt, Artificial Sequence
  Description of Artificial Sequence: Synthetic oligonucleotide
aacgacaccaagagguucu

SEQ ID NO: 612304 - RNA, 19 nt, Artificial Sequence
  Description of Artificial Sequence: Synthetic oligonucleotide
ugucgcagcagaucugccc

SEQ ID NO: 612305 - RNA, 19 nt, Artificial Sequence
  Description of Artificial Sequence: Synthetic oligonucleotide
ucucgucugaggaaauccu

SEQ ID NO: 612306 - RNA, 19 nt, Artificial Sequence
  Description of Artificial Sequence: Synthetic oligonucleotide
gcacgggucacucagguag

SEQ ID NO: 612307 - RNA, 19 nt, Artificial Sequence
  Description of Artificial Sequence: Synthetic oligonucleotide
aaaagacccggugacgcgu

SEQ ID NO: 612308 - RNA, 19 nt, Artificial Sequence
  Description of Artificial Sequence: Synthetic oligonucleotide
cuugagaggggucgagccg

SEQ ID NO: 612309 - RNA, 19 nt, Artificial Sequence
  Description of Artificial Sequence: Synthetic oligonucleotide
cuuacacacggacggacac

SEQ ID NO: 612310 - RNA, 19 nt, Artificial Sequence
  Description of Artificial Sequence: Synthetic oligonucleotide
gaaagcucgguggagaaaa

SEQ ID NO: 612311 - RNA, 19 nt, Artificial Sequence
  Description of Artificial Sequence: Synthetic oligonucleotide
ucugcguuagucgcuaaac

SEQ ID NO: 612312 - RNA, 19 nt, Artificial Sequence
  Description of Artificial Sequence: Synthetic oligonucleotide
ucgagaguggcgccuagac

SEQ ID NO: 612313 - RNA, 19 nt, Artificial Sequence
  Description of Artificial Sequence: Synthetic oligonucleotide
uuccguaggagucccgaga

SEQ ID NO: 612314 - RNA, 19 nt, Artificial Sequence
  Description of Artificial Sequence: Synthetic oligonucleotide
aacucccucucgucugagg

SEQ ID NO: 612315 - RNA, 19 nt, Artificial Sequence
  Description of Artificial Sequence: Synthetic oligonucleotide
agcuugaacucuucuguga

SEQ ID NO: 612316 - RNA, 19 nt, Artificial Sequence
  Description of Artificial Sequence: Synthetic oligonucleotide
uccguaggagucccgagaa

SEQ ID NO: 612317 - RNA, 19 nt, Artificial Sequence
  Description of Artificial Sequence: Synthetic oligonucleotide
ucugagcuagagcuuuuaa

SEQ ID NO: 612318 - RNA, 19 nt, Artificial Sequence
  Description of Artificial Sequence: Synthetic oligonucleotide
uuuuccguaggagucccga

SEQ ID NO: 612319 - RNA, 19 nt, Artificial Sequence
  Description of Artificial Sequence: Synthetic oligonucleotide
gguucuagcuuucaugaga

SEQ ID NO: 612320 - RNA, 19 nt, Artificial Sequence
  Description of Artificial Sequence: Synthetic oligonucleotide
uuuccguaggagucccgag

SEQ ID NO: 612321 - RNA, 19 nt, Artificial Sequence
  Description of Artificial Sequence: Synthetic oligonucleotide
gagguuugccacguucccg

SEQ ID NO: 612322 - RNA, 19 nt, Artificial Sequence
  Description of Artificial Sequence: Synthetic oligonucleotide
agacacguaaaguuacauu

SEQ ID NO: 612323 - RNA, 19 nt, Artificial Sequence
  Description of Artificial Sequence: Synthetic oligonucleotide
gaagccaucgcgcgcggac

SEQ ID NO: 612324 - RNA, 19 nt, Artificial Sequence
  Description of Artificial Sequence: Synthetic oligonucleotide
acccgcgaguuguagaucu

SEQ ID NO: 612325 - RNA, 19 nt, Artificial Sequence
  Description of Artificial Sequence: Synthetic oligonucleotide
gacccggugacgcguagcc

SEQ ID NO: 612326 - RNA, 19 nt, Artificial Sequence
  Description of Artificial Sequence: Synthetic oligonucleotide
aguggcgccuagacgaugg

SEQ ID NO: 612327 - RNA, 19 nt, Artificial Sequence
  Description of Artificial Sequence: Synthetic oligonucleotide
augcugacgaugcggugag

SEQ ID NO: 612328 - RNA, 19 nt, Artificial Sequence
  Description of Artificial Sequence: Synthetic oligonucleotide
ucgccgcagacaacaaacc

SEQ ID NO: 612329 - RNA, 19 nt, Artificial Sequence
  Description of Artificial Sequence: Synthetic oligonucleotide
aaacuuacacacggacgga

SEQ ID NO: 612330 - RNA, 19 nt, Artificial Sequence
  Description of Artificial Sequence: Synthetic oligonucleotide
cuagagccgaagaugcuga

SEQ ID NO: 612331 - RNA, 19 nt, Artificial Sequence
  Description of Artificial Sequence: Synthetic oligonucleotide
agcgccuacggucucggcu

SEQ ID NO: 612332 - RNA, 19 nt, Artificial Sequence
  Description of Artificial Sequence: Synthetic oligonucleotide
guguuagacacguaaaguu

SEQ ID NO: 612333 - RNA, 19 nt, Artificial Sequence
  Description of Artificial Sequence: Synthetic oligonucleotide
aagccaucgcgcgcggacg

SEQ ID NO: 612334 - RNA, 19 nt, Artificial Sequence
  Description of Artificial Sequence: Synthetic oligonucleotide
cagggcacgggucacucag

SEQ ID NO: 612335 - RNA, 19 nt, Artificial Sequence
  Description of Artificial Sequence: Synthetic oligonucleotide
cugagcuagagcuuuuaaa

SEQ ID NO: 612336 - RNA, 19 nt, Artificial Sequence
  Description of Artificial Sequence: Synthetic oligonucleotide
uagacacguaaaguuacau

SEQ ID NO: 612337 - RNA, 19 nt, Artificial Sequence
  Description of Artificial Sequence: Synthetic oligonucleotide
cuacuccaggcgaacuccc

SEQ ID NO: 612338 - RNA, 19 nt, Artificial Sequence
  Description of Artificial Sequence: Synthetic oligonucleotide
aggagucccgagaagcuag

SEQ ID NO: 612339 - RNA, 19 nt, Artificial Sequence
  Description of Artificial Sequence: Synthetic oligonucleotide
ugagaggggucgagccggg

SEQ ID NO: 612340 - RNA, 19 nt, Artificial Sequence
  Description of Artificial Sequence: Synthetic oligonucleotide
uacggucucggcucguccu

SEQ ID NO: 612341 - RNA, 19 nt, Artificial Sequence
  Description of Artificial Sequence: Synthetic oligonucleotide
aaagcucgguggagaaaag

SEQ ID NO: 612342 - RNA, 19 nt, Artificial Sequence
  Description of Artificial Sequence: Synthetic oligonucleotide
ggcuucuugagaggggucg

SEQ ID NO: 612343 - RNA, 19 nt, Artificial Sequence
  Description of Artificial Sequence: Synthetic oligonucleotide
acuggagucaccguaucua

SEQ ID NO: 612344 - RNA, 19 nt, Artificial Sequence
  Description of Artificial Sequence: Synthetic oligonucleotide
cucggcucguccucggggc

SEQ ID NO: 612345 - RNA, 19 nt, Artificial Sequence
  Description of Artificial Sequence: Synthetic oligonucleotide
gucccuuaauguucugcug

SEQ ID NO: 612346 - RNA, 19 nt, Artificial Sequence
  Description of Artificial Sequence: Synthetic oligonucleotide
aaaccugaucugcguuagu

SEQ ID NO: 612347 - RNA, 19 nt, Artificial Sequence
  Description of Artificial Sequence: Synthetic oligonucleotide
cucuacuccaggcgaacuc

SEQ ID NO: 612348 - RNA, 19 nt, Artificial Sequence
  Description of Artificial Sequence: Synthetic oligonucleotide
ugacgaugcggugagccuc

SEQ ID NO: 612349 - RNA, 19 nt, Artificial Sequence
  Description of Artificial Sequence: Synthetic oligonucleotide
uucggggcgaugugcugcc

SEQ ID NO: 612350 - RNA, 19 nt, Artificial Sequence
  Description of Artificial Sequence: Synthetic oligonucleotide
caccaacgacaccaagagg

SEQ ID NO: 612351 - RNA, 19 nt, Artificial Sequence
  Description of Artificial Sequence: Synthetic oligonucleotide
ucggcggcugaaagcucgg

SEQ ID NO: 612352 - RNA, 19 nt, Artificial Sequence
  Description of Artificial Sequence: Synthetic oligonucleotide
uggacccgcgaguuguaga

SEQ ID NO: 612353 - RNA, 19 nt, Artificial Sequence
  Description of Artificial Sequence: Synthetic oligonucleotide
cuuuuccguaggagucccg

SEQ ID NO: 612354 - RNA, 19 nt, Artificial Sequence
  Description of Artificial Sequence: Synthetic oligonucleotide
aaacgccacucggcgcgcc

SEQ ID NO: 612355 - RNA, 19 nt, Artificial Sequence
  Description of Artificial Sequence: Synthetic oligonucleotide
ugaucugcguuagucgcua

SEQ ID NO: 612356 - RNA, 19 nt, Artificial Sequence
  Description of Artificial Sequence: Synthetic oligonucleotide
ugccucucggcccgggaga

SEQ ID NO: 612357 - RNA, 19 nt, Artificial Sequence
  Description of Artificial Sequence: Synthetic oligonucleotide
acggucucggcucguccuc

SEQ ID NO: 612358 - RNA, 19 nt, Artificial Sequence
  Description of Artificial Sequence: Synthetic oligonucleotide
ucucgagaguggcgccuag

SEQ ID NO: 612359 - RNA, 19 nt, Artificial Sequence
  Description of Artificial Sequence: Synthetic oligonucleotide
guuagucgcuaaacugagc

SEQ ID NO: 612360 - RNA, 19 nt, Artificial Sequence
  Description of Artificial Sequence: Synthetic oligonucleotide
gcucuccccaaccggaggg

SEQ ID NO: 612361 - RNA, 19 nt, Artificial Sequence
  Description of Artificial Sequence: Synthetic oligonucleotide
acuuacacacggacggaca

SEQ ID NO: 612362 - RNA, 19 nt, Artificial Sequence
  Description of Artificial Sequence: Synthetic oligonucleotide
acguguccgggccgccucc

SEQ ID NO: 612363 - RNA, 19 nt, Artificial Sequence
  Description of Artificial Sequence: Synthetic oligonucleotide
gcuagagccgaagaugcug

SEQ ID NO: 612364 - RNA, 19 nt, Artificial Sequence
  Description of Artificial Sequence: Synthetic oligonucleotide
agagccgaagaugcugaug

SEQ ID NO: 612365 - RNA, 19 nt, Artificial Sequence
  Description of Artificial Sequence: Synthetic oligonucleotide
gcugacgaugcggugagcc

SEQ ID NO: 612366 - RNA, 19 nt, Artificial Sequence
  Description of Artificial Sequence: Synthetic oligonucleotide
uuccaagcuugaacucuuc

SEQ ID NO: 612367 - RNA, 19 nt, Artificial Sequence
  Description of Artificial Sequence: Synthetic oligonucleotide
cuacggucucggcucgucc

SEQ ID NO: 612368 - RNA, 19 nt, Artificial Sequence
  Description of Artificial Sequence: Synthetic oligonucleotide
uccccguagggccggccag

SEQ ID NO: 612369 - RNA, 19 nt, Artificial Sequence
  Description of Artificial Sequence: Synthetic oligonucleotide
gcgaguuguagaucuugcc

SEQ ID NO: 612370 - RNA, 19 nt, Artificial Sequence
  Description of Artificial Sequence: Synthetic oligonucleotide
ccaagaucaaauggggaac

SEQ ID NO: 612371 - RNA, 19 nt, Artificial Sequence
  Description of Artificial Sequence: Synthetic oligonucleotide
uuauccccuuugaggaauu

SEQ ID NO: 612372 - RNA, 19 nt, Artificial Sequence
  Description of Artificial Sequence: Synthetic oligonucleotide
ugaaagcucgguggagaaa

SEQ ID NO: 612373 - RNA, 19 nt, Artificial Sequence
  Description of Artificial Sequence: Synthetic oligonucleotide
aucugcguuagucgcuaaa

SEQ ID NO: 612374 - RNA, 19 nt, Artificial Sequence
  Description of Artificial Sequence: Synthetic oligonucleotide
gaggcggaaacaggaucgc

SEQ ID NO: 612375 - RNA, 19 nt, Artificial Sequence
  Description of Artificial Sequence: Synthetic oligonucleotide
cccaagaucaaauggggaa

SEQ ID NO: 612376 - RNA, 19 nt, Artificial Sequence
  Description of Artificial Sequence: Synthetic oligonucleotide
ucgagagccacggcccagc

SEQ ID NO: 612377 - RNA, 19 nt, Artificial Sequence
  Description of Artificial Sequence: Synthetic oligonucleotide
ucuucgccgcagacaacaa

SEQ ID NO: 612378 - RNA, 19 nt, Artificial Sequence
  Description of Artificial Sequence: Synthetic oligonucleotide
acacguaaaguuacauuuu

SEQ ID NO: 612379 - RNA, 19 nt, Artificial Sequence
  Description of Artificial Sequence: Synthetic oligonucleotide
gccgcagacaacaaaccug

SEQ ID NO: 612380 - RNA, 19 nt, Artificial Sequence
  Description of Artificial Sequence: Synthetic oligonucleotide
cguagggccggccagguag

SEQ ID NO: 612381 - RNA, 19 nt, Artificial Sequence
  Description of Artificial Sequence: Synthetic oligonucleotide
cguuagucgcuaaacugag

SEQ ID NO: 612382 - RNA, 19 nt, Artificial Sequence
  Description of Artificial Sequence: Synthetic oligonucleotide
ggggugaacgccgaagcug

SEQ ID NO: 612383 - RNA, 19 nt, Artificial Sequence
  Description of Artificial Sequence: Synthetic oligonucleotide
gcgccgaugagguucuagc

SEQ ID NO: 612384 - RNA, 19 nt, Artificial Sequence
  Description of Artificial Sequence: Synthetic oligonucleotide
gcguuagucgcuaaacuga

SEQ ID NO: 612385 - RNA, 19 nt, Artificial Sequence
  Description of Artificial Sequence: Synthetic oligonucleotide
cacaggguagaagcgcuuc

SEQ ID NO: 612386 - RNA, 19 nt, Artificial Sequence
  Description of Artificial Sequence: Synthetic oligonucleotide
acgggucacucagguagac

SEQ ID NO: 612387 - RNA, 19 nt, Artificial Sequence
  Description of Artificial Sequence: Synthetic oligonucleotide
cgaacuucggggacgcccg

SEQ ID NO: 612388 - RNA, 19 nt, Artificial Sequence
  Description of Artificial Sequence: Synthetic oligonucleotide
aauacguguuagacacgua

SEQ ID NO: 612389 - RNA, 19 nt, Artificial Sequence
  Description of Artificial Sequence: Synthetic oligonucleotide
ccccuuugaggaauugaag

SEQ ID NO: 612390 - RNA, 19 nt, Artificial Sequence
  Description of Artificial Sequence: Synthetic oligonucleotide
ggagacucagaaggccacg

SEQ ID NO: 612391 - RNA, 19 nt, Artificial Sequence
  Description of Artificial Sequence: Synthetic oligonucleotide
aacgaucgaucguccucuu

SEQ ID NO: 612392 - RNA, 19 nt, Artificial Sequence
  Description of Artificial Sequence: Synthetic oligonucleotide
aacuucggggacgcccgcu

SEQ ID NO: 612393 - RNA, 19 nt, Artificial Sequence
  Description of Artificial Sequence: Synthetic oligonucleotide
cacccucggcggcugaaag

SEQ ID NO: 612394 - RNA, 19 nt, Artificial Sequence
  Description of Artificial Sequence: Synthetic oligonucleotide
auccccguagggccggcca

SEQ ID NO: 612395 - RNA, 19 nt, Artificial Sequence
  Description of Artificial Sequence: Synthetic oligonucleotide
gaacuucggggacgcccgc

SEQ ID NO: 612396 - RNA, 19 nt, Artificial Sequence
  Description of Artificial Sequence: Synthetic oligonucleotide
ggcaccgucgggauccccg

SEQ ID NO: 612397 - RNA, 19 nt, Artificial Sequence
  Description of Artificial Sequence: Synthetic oligonucleotide
cuucggggacgcccgcugc

SEQ ID NO: 612398 - RNA, 19 nt, Artificial Sequence
  Description of Artificial Sequence: Synthetic oligonucleotide
acccggugacgcguagccc

SEQ ID NO: 612399 - RNA, 19 nt, Artificial Sequence
  Description of Artificial Sequence: Synthetic oligonucleotide
caucgcgcgcggacgcucc

SEQ ID NO: 612400 - RNA, 19 nt, Artificial Sequence
  Description of Artificial Sequence: Synthetic oligonucleotide
ccgcagacaacaaaccuga

SEQ ID NO: 612401 - RNA, 19 nt, Artificial Sequence
  Description of Artificial Sequence: Synthetic oligonucleotide
ggggcgaugugcugcccgg

SEQ ID NO: 612402 - RNA, 19 nt, Artificial Sequence
  Description of Artificial Sequence: Synthetic oligonucleotide
gcggaaacaggaucgccuc

SEQ ID NO: 612403 - RNA, 19 nt, Artificial Sequence
  Description of Artificial Sequence: Synthetic oligonucleotide
uagagccgaagaugcugau

SEQ ID NO: 612404 - RNA, 19 nt, Artificial Sequence
  Description of Artificial Sequence: Synthetic oligonucleotide
cgaagcugcgagaggagag

SEQ ID NO: 612405 - RNA, 19 nt, Artificial Sequence
  Description of Artificial Sequence: Synthetic oligonucleotide
cuuccgaguuccggcgcgg

SEQ ID NO: 612406 - RNA, 19 nt, Artificial Sequence
  Description of Artificial Sequence: Synthetic oligonucleotide
ccgagcuucccguucccgg

SEQ ID NO: 612407 - RNA, 19 nt, Artificial Sequence
  Description of Artificial Sequence: Synthetic oligonucleotide
ccacggccgaacuucgggg

SEQ ID NO: 612408 - RNA, 19 nt, Artificial Sequence
  Description of Artificial Sequence: Synthetic oligonucleotide
gaggaauugaaggucccuu

SEQ ID NO: 612409 - RNA, 19 nt, Artificial Sequence
  Description of Artificial Sequence: Synthetic oligonucleotide
gaaaggccacggccgaacu

SEQ ID NO: 612410 - RNA, 19 nt, Artificial Sequence
  Description of Artificial Sequence: Synthetic oligonucleotide
cuccacgcggccccaagca

SEQ ID NO: 612411 - RNA, 19 nt, Artificial Sequence
  Description of Artificial Sequence: Synthetic oligonucleotide
gucucuacuccaggcgaac

SEQ ID NO: 612412 - RNA, 19 nt, Artificial Sequence
  Description of Artificial Sequence: Synthetic oligonucleotide
aaagacccggugacgcgua

SEQ ID NO: 612413 - RNA, 19 nt, Artificial Sequence
  Description of Artificial Sequence: Synthetic oligonucleotide
gcuuuuccguaggaguccc

SEQ ID NO: 612414 - RNA, 19 nt, Artificial Sequence
  Description of Artificial Sequence: Synthetic oligonucleotide
cacggccgaacuucgggga

SEQ ID NO: 612415 - RNA, 19 nt, Artificial Sequence
  Description of Artificial Sequence: Synthetic oligonucleotide
ggaaaggccacggccgaac

SEQ ID NO: 612416 - RNA, 19 nt, Artificial Sequence
  Description of Artificial Sequence: Synthetic oligonucleotide
ccgaacuucggggacgccc

SEQ ID NO: 612417 - RNA, 19 nt, Artificial Sequence
  Description of Artificial Sequence: Synthetic oligonucleotide
cuuccacuuagagcucguc

SEQ ID NO: 612418 - RNA, 19 nt, Artificial Sequence
  Description of Artificial Sequence: Synthetic oligonucleotide
cccggcguguggcacaccg

SEQ ID NO: 612419 - RNA, 19 nt, Artificial Sequence
  Description of Artificial Sequence: Synthetic oligonucleotide
agucucuacuccaggcgaa

SEQ ID NO: 612420 - RNA, 19 nt, Artificial Sequence
  Description of Artificial Sequence: Synthetic oligonucleotide
cugcguuagucgcuaaacu

SEQ ID NO: 612421 - RNA, 19 nt, Artificial Sequence
  Description of Artificial Sequence: Synthetic oligonucleotide
cgcgaguuguagaucuugc

SEQ ID NO: 612422 - RNA, 19 nt, Artificial Sequence
  Description of Artificial Sequence: Synthetic oligonucleotide
cgagaguggcgccuagacg

SEQ ID NO: 612423 - RNA, 19 nt, Artificial Sequence
  Description of Artificial Sequence: Synthetic oligonucleotide
cuggacccgcgaguuguag

SEQ ID NO: 612424 - RNA, 19 nt, Artificial Sequence
  Description of Artificial Sequence: Synthetic oligonucleotide
guucccggcguguggcaca

SEQ ID NO: 612425 - RNA, 19 nt, Artificial Sequence
  Description of Artificial Sequence: Synthetic oligonucleotide
cuccgagcuucccguuccc

SEQ ID NO: 612426 - RNA, 19 nt, Artificial Sequence
  Description of Artificial Sequence: Synthetic oligonucleotide
gaguggcgccuagacgaug

SEQ ID NO: 612427 - RNA, 19 nt, Artificial Sequence
  Description of Artificial Sequence: Synthetic oligonucleotide
gugaacgccgaagcugcga

SEQ ID NO: 612428 - RNA, 19 nt, Artificial Sequence
  Description of Artificial Sequence: Synthetic oligonucleotide
gcgccuacggucucggcuc

SEQ ID NO: 612429 - RNA, 19 nt, Artificial Sequence
  Description of Artificial Sequence: Synthetic oligonucleotide
cuucgccgcagacaacaaa

SEQ ID NO: 612430 - RNA, 19 nt, Artificial Sequence
  Description of Artificial Sequence: Synthetic oligonucleotide
cacgggucacucagguaga

SEQ ID NO: 612431 - RNA, 19 nt, Artificial Sequence
  Description of Artificial Sequence: Synthetic oligonucleotide
cugcgccgcgcuuccuggg

SEQ ID NO: 612432 - RNA, 19 nt, Artificial Sequence
  Description of Artificial Sequence: Synthetic oligonucleotide
agcuagagccgaagaugcu

SEQ ID NO: 612433 - RNA, 19 nt, Artificial Sequence
  Description of Artificial Sequence: Synthetic oligonucleotide
agccgcacgggcggcgcac

SEQ ID NO: 612434 - RNA, 19 nt, Artificial Sequence
  Description of Artificial Sequence: Synthetic oligonucleotide
cacguguccgggccgccuc

SEQ ID NO: 612435 - RNA, 19 nt, Artificial Sequence
  Description of Artificial Sequence: Synthetic oligonucleotide
cucggcgcgccgaugaggu

SEQ ID NO: 612436 - RNA, 19 nt, Artificial Sequence
  Description of Artificial Sequence: Synthetic oligonucleotide
uucccggcguguggcacac

SEQ ID NO: 612437 - RNA, 19 nt, Artificial Sequence
  Description of Artificial Sequence: Synthetic oligonucleotide
uggcgggcgcugcgcagca

SEQ ID NO: 612438 - RNA, 19 nt, Artificial Sequence
  Description of Artificial Sequence: Synthetic oligonucleotide
gcgccuagacgauggggug

SEQ ID NO: 612439 - RNA, 19 nt, Artificial Sequence
  Description of Artificial Sequence: Synthetic oligonucleotide
gaucugcguuagucgcuaa

SEQ ID NO: 612440 - RNA, 19 nt, Artificial Sequence
  Description of Artificial Sequence: Synthetic oligonucleotide
caaagacuggagucaccgu

SEQ ID NO: 612441 - RNA, 19 nt, Artificial Sequence
  Description of Artificial Sequence: Synthetic oligonucleotide
cacucggcgcgccgaugag

SEQ ID NO: 612442 - RNA, 19 nt, Artificial Sequence
  Description of Artificial Sequence: Synthetic oligonucleotide
guggcacaccgaagggcgc

SEQ ID NO: 612443 - RNA, 19 nt, Artificial Sequence
  Description of Artificial Sequence: Synthetic oligonucleotide
ccggagacucagaaggcca

SEQ ID NO: 612444 - RNA, 19 nt, Artificial Sequence
  Description of Artificial Sequence: Synthetic oligonucleotide
caggcgaacucccucucgu

SEQ ID NO: 612445 - RNA, 19 nt, Artificial Sequence
  Description of Artificial Sequence: Synthetic oligonucleotide
ggcggaaacaggaucgccu

SEQ ID NO: 612446 - RNA, 19 nt, Artificial Sequence
  Description of Artificial Sequence: Synthetic oligonucleotide
cugacgaugcggugagccu

SEQ ID NO: 612447 - RNA, 19 nt, Artificial Sequence
  Description of Artificial Sequence: Synthetic oligonucleotide
ggggcacguguccgggccg

SEQ ID NO: 612448 - RNA, 19 nt, Artificial Sequence
  Description of Artificial Sequence: Synthetic oligonucleotide
gagcucgucuguaaacuuu

SEQ ID NO: 612449 - RNA, 19 nt, Artificial Sequence
  Description of Artificial Sequence: Synthetic oligonucleotide
gagaggggucgagccgggc

SEQ ID NO: 612450 - RNA, 19 nt, Artificial Sequence
  Description of Artificial Sequence: Synthetic oligonucleotide
gacccgcgaguuguagauc

SEQ ID NO: 612451 - RNA, 19 nt, Artificial Sequence
  Description of Artificial Sequence: Synthetic oligonucleotide
ggucgagccgggcgccggg

SEQ ID NO: 612452 - RNA, 19 nt, Artificial Sequence
  Description of Artificial Sequence: Synthetic oligonucleotide
ggcgaugugcugcccggca

SEQ ID NO: 612453 - RNA, 19 nt, Artificial Sequence
  Description of Artificial Sequence: Synthetic oligonucleotide
acgauggggugaacgccga

SEQ ID NO: 612454 - RNA, 19 nt, Artificial Sequence
  Description of Artificial Sequence: Synthetic oligonucleotide
ggcgccuagacgauggggu

SEQ ID NO: 612455 - RNA, 19 nt, Artificial Sequence
  Description of Artificial Sequence: Synthetic oligonucleotide
ugcugacgaugcggugagc

SEQ ID NO: 612456 - RNA, 19 nt, Artificial Sequence
  Description of Artificial Sequence: Synthetic oligonucleotide
ccccaagaucaaaugggga

SEQ ID NO: 612457 - RNA, 19 nt, Artificial Sequence
  Description of Artificial Sequence: Synthetic oligonucleotide
ccccaaccuuuauacaaca

SEQ ID NO: 612458 - RNA, 19 nt, Artificial Sequence
  Description of Artificial Sequence: Synthetic oligonucleotide
ccccuacgcgcccagcgcc

SEQ ID NO: 612459 - RNA, 19 nt, Artificial Sequence
  Description of Artificial Sequence: Synthetic oligonucleotide
cuacgcgcccagcgccuac

SEQ ID NO: 612460 - RNA, 19 nt, Artificial Sequence
  Description of Artificial Sequence: Synthetic oligonucleotide
ggacccgcgaguuguagau

SEQ ID NO: 612461 - RNA, 19 nt, Artificial Sequence
  Description of Artificial Sequence: Synthetic oligonucleotide
guagggccggccagguaga

SEQ ID NO: 612462 - RNA, 19 nt, Artificial Sequence
  Description of Artificial Sequence: Synthetic oligonucleotide
ccgauaagccuccaacucu

SEQ ID NO: 612463 - RNA, 19 nt, Artificial Sequence
  Description of Artificial Sequence: Synthetic oligonucleotide
ggccgaacuucggggacgc

SEQ ID NO: 612464 - RNA, 19 nt, Artificial Sequence
  Description of Artificial Sequence: Synthetic oligonucleotide
ggcguguggcacaccgaag

SEQ ID NO: 612465 - RNA, 19 nt, Artificial Sequence
  Description of Artificial Sequence: Synthetic oligonucleotide
cacgggcggcgcacugccc

SEQ ID NO: 612466 - RNA, 19 nt, Artificial Sequence
  Description of Artificial Sequence: Synthetic oligonucleotide
cgauaagccuccaacucua

SEQ ID NO: 612467 - RNA, 19 nt, Artificial Sequence
  Description of Artificial Sequence: Synthetic oligonucleotide
cucgagccauucagcagcu

SEQ ID NO: 612468 - RNA, 19 nt, Artificial Sequence
  Description of Artificial Sequence: Synthetic oligonucleotide
cucgagaguggcgccuaga

SEQ ID NO: 612469 - RNA, 19 nt, Artificial Sequence
  Description of Artificial Sequence: Synthetic oligonucleotide
cccguucggggcgaugugc

SEQ ID NO: 612470 - RNA, 19 nt, Artificial Sequence
  Description of Artificial Sequence: Synthetic oligonucleotide
ccgcgaguuguagaucuug

SEQ ID NO: 612471 - RNA, 19 nt, Artificial Sequence
  Description of Artificial Sequence: Synthetic oligonucleotide
ccguaggagucccgagaag

SEQ ID NO: 612472 - RNA, 19 nt, Artificial Sequence
  Description of Artificial Sequence: Synthetic oligonucleotide
ccgcagggcuuuuccguag

SEQ ID NO: 612473 - RNA, 19 nt, Artificial Sequence
  Description of Artificial Sequence: Synthetic oligonucleotide
ccgaugagguucuagcuuu

SEQ ID NO: 612474 - RNA, 19 nt, Artificial Sequence
  Description of Artificial Sequence: Synthetic oligonucleotide
cgccgagucugccucucgg

SEQ ID NO: 612475 - RNA, 19 nt, Artificial Sequence
  Description of Artificial Sequence: Synthetic oligonucleotide
cgcggcuucuugagagggg

SEQ ID NO: 612476 - RNA, 19 nt, Artificial Sequence
  Description of Artificial Sequence: Synthetic oligonucleotide
cguguuagacacguaaagu

SEQ ID NO: 612477 - RNA, 19 nt, Artificial Sequence
  Description of Artificial Sequence: Synthetic oligonucleotide
cccgggagagcguccccag

SEQ ID NO: 612478 - RNA, 19 nt, Artificial Sequence
  Description of Artificial Sequence: Synthetic oligonucleotide
ccacucggcgcgccgauga

SEQ ID NO: 612479 - RNA, 19 nt, Artificial Sequence
  Description of Artificial Sequence: Synthetic oligonucleotide
ggagucccgagaagcuaga

SEQ ID NO: 612480 - RNA, 19 nt, Artificial Sequence
  Description of Artificial Sequence: Synthetic oligonucleotide
ugccccguucggggcgaug

SEQ ID NO: 612481 - RNA, 19 nt, Artificial Sequence
  Description of Artificial Sequence: Synthetic oligonucleotide
gcggacgcuccacgcggcc

SEQ ID NO: 612482 - RNA, 19 nt, Artificial Sequence
  Description of Artificial Sequence: Synthetic oligonucleotide
gacggcggaggcggcucuc

SEQ ID NO: 612483 - RNA, 19 nt, Artificial Sequence
  Description of Artificial Sequence: Synthetic oligonucleotide
gcggcuucuugagaggggu

SEQ ID NO: 612484 - RNA, 19 nt, Artificial Sequence
  Description of Artificial Sequence: Synthetic oligonucleotide
gggcacguguccgggccgc

SEQ ID NO: 612485 - RNA, 19 nt, Artificial Sequence
  Description of Artificial Sequence: Synthetic oligonucleotide
ccuacggucucggcucguc

SEQ ID NO: 612486 - RNA, 19 nt, Artificial Sequence
  Description of Artificial Sequence: Synthetic oligonucleotide
ucggcgcgccgaugagguu

SEQ ID NO: 612487 - RNA, 19 nt, Artificial Sequence
  Description of Artificial Sequence: Synthetic oligonucleotide
caggguagaagcgcuucuu

SEQ ID NO: 612488 - RNA, 19 nt, Artificial Sequence
  Description of Artificial Sequence: Synthetic oligonucleotide
cuccggccaggcggcgcgg

SEQ ID NO: 612489 - RNA, 19 nt, Artificial Sequence
  Description of Artificial Sequence: Synthetic oligonucleotide
ccgggcugccccguucggg

SEQ ID NO: 612490 - RNA, 19 nt, Artificial Sequence
  Description of Artificial Sequence: Synthetic oligonucleotide
gguuugccacguucccggu

SEQ ID NO: 612491 - RNA, 19 nt, Artificial Sequence
  Description of Artificial Sequence: Synthetic oligonucleotide
cguucggggcgaugugcug

SEQ ID NO: 612492 - RNA, 19 nt, Artificial Sequence
  Description of Artificial Sequence: Synthetic oligonucleotide
ccgccgagucugccucucg

SEQ ID NO: 612493 - RNA, 19 nt, Artificial Sequence
  Description of Artificial Sequence: Synthetic oligonucleotide
gcgcuggacccgcgaguug

SEQ ID NO: 612494 - RNA, 19 nt, Artificial Sequence
  Description of Artificial Sequence: Synthetic oligonucleotide
cgaguuccggcgcggcuuc

SEQ ID NO: 612495 - RNA, 19 nt, Artificial Sequence
  Description of Artificial Sequence: Synthetic oligonucleotide
cgccuacggucucggcucg

SEQ ID NO: 612496 - RNA, 19 nt, Artificial Sequence
  Description of Artificial Sequence: Synthetic oligonucleotide
cggcgcgccgaugagguuc

SEQ ID NO: 612497 - RNA, 19 nt, Artificial Sequence
  Description of Artificial Sequence: Synthetic oligonucleotide
gcgugagacucgagagcca

SEQ ID NO: 612498 - RNA, 19 nt, Artificial Sequence
  Description of Artificial Sequence: Synthetic oligonucleotide
gcaccgucgggauccccgu

SEQ ID NO: 612499 - RNA, 19 nt, Artificial Sequence
  Description of Artificial Sequence: Synthetic oligonucleotide
ggcacguguccgggccgcc

SEQ ID NO: 612500 - RNA, 19 nt, Artificial Sequence
  Description of Artificial Sequence: Synthetic oligonucleotide
cgaugcggugagccuccag

SEQ ID NO: 612501 - RNA, 19 nt, Artificial Sequence
  Description of Artificial Sequence: Synthetic oligonucleotide
ccguucggggcgaugugcu

SEQ ID NO: 612502 - RNA, 19 nt, Artificial Sequence
  Description of Artificial Sequence: Synthetic oligonucleotide
ccccguucggggcgaugug

SEQ ID NO: 612503 - RNA, 19 nt, Artificial Sequence
  Description of Artificial Sequence: Synthetic oligonucleotide
ccaucgcgcgcggacgcuc

SEQ ID NO: 612504 - RNA, 19 nt, Artificial Sequence
  Description of Artificial Sequence: Synthetic oligonucleotide
ccggcuccgagcuucccgu

SEQ ID NO: 612505 - RNA, 19 nt, Artificial Sequence
  Description of Artificial Sequence: Synthetic oligonucleotide
caccgucgggauccccgua

SEQ ID NO: 612506 - RNA, 19 nt, Artificial Sequence
  Description of Artificial Sequence: Synthetic oligonucleotide
gccacucggcgcgccgaug

SEQ ID NO: 612507 - RNA, 19 nt, Artificial Sequence
  Description of Artificial Sequence: Synthetic oligonucleotide
cgccgaugagguucuagcu

SEQ ID NO: 612508 - RNA, 19 nt, Artificial Sequence
  Description of Artificial Sequence: Synthetic oligonucleotide
cgccgcagacaacaaaccu

SEQ ID NO: 612509 - RNA, 19 nt, Artificial Sequence
  Description of Artificial Sequence: Synthetic oligonucleotide
cggcucguccucggggccg

SEQ ID NO: 612510 - RNA, 19 nt, Artificial Sequence
  Description of Artificial Sequence: Synthetic oligonucleotide
gccgaacuucggggacgcc

SEQ ID NO: 612511 - RNA, 19 nt, Artificial Sequence
  Description of Artificial Sequence: Synthetic oligonucleotide
ccgcgcuuccugggacacg

SEQ ID NO: 612512 - RNA, 19 nt, Artificial Sequence
  Description of Artificial Sequence: Synthetic oligonucleotide
cccugccucgagccauuca

SEQ ID NO: 612513 - RNA, 19 nt, Artificial Sequence
  Description of Artificial Sequence: Synthetic oligonucleotide
gaguuccggcgcggcuucu

SEQ ID NO: 612514 - RNA, 19 nt, Artificial Sequence
  Description of Artificial Sequence: Synthetic oligonucleotide
ccguucccggcguguggca

SEQ ID NO: 612515 - RNA, 19 nt, Artificial Sequence
  Description of Artificial Sequence: Synthetic oligonucleotide
acgcuccacgcggccccaa

SEQ ID NO: 612516 - RNA, 19 nt, Artificial Sequence
  Description of Artificial Sequence: Synthetic oligonucleotide
cgccucuucgccgcagaca

SEQ ID NO: 612517 - RNA, 19 nt, Artificial Sequence
  Description of Artificial Sequence: Synthetic oligonucleotide
gcuggacccgcgaguugua

SEQ ID NO: 612518 - RNA, 19 nt, Artificial Sequence
  Description of Artificial Sequence: Synthetic oligonucleotide
cgcuggacccgcgaguugu

SEQ ID NO: 612519 - RNA, 19 nt, Artificial Sequence
  Description of Artificial Sequence: Synthetic oligonucleotide
cggaaacaggaucgccucu

SEQ ID NO: 612520 - RNA, 19 nt, Artificial Sequence
  Description of Artificial Sequence: Synthetic oligonucleotide
gcggcaccgucgggauccc

SEQ ID NO: 612521 - RNA, 19 nt, Artificial Sequence
  Description of Artificial Sequence: Synthetic oligonucleotide
ccgaguuccggcgcggcuu

SEQ ID NO: 612522 - RNA, 19 nt, Artificial Sequence
  Description of Artificial Sequence: Synthetic oligonucleotide
cccgcgaguuguagaucuu

SEQ ID NO: 612523 - RNA, 19 nt, Artificial Sequence
  Description of Artificial Sequence: Synthetic oligonucleotide
cucccgcugcgccgcgcuu

SEQ ID NO: 612524 - RNA, 19 nt, Artificial Sequence
  Description of Artificial Sequence: Synthetic oligonucleotide
ccguagggccggccaggua

SEQ ID NO: 612525 - RNA, 19 nt, Artificial Sequence
  Description of Artificial Sequence: Synthetic oligonucleotide
cggcaccgucgggaucccc

SEQ ID NO: 612526 - RNA, 19 nt, Artificial Sequence
  Description of Artificial Sequence: Synthetic oligonucleotide
gccuacggucucggcucgu

SEQ ID NO: 612527 - RNA, 19 nt, Artificial Sequence
  Description of Artificial Sequence: Synthetic oligonucleotide
cgcgcuggacccgcgaguu

SEQ ID NO: 612528 - RNA, 19 nt, Artificial Sequence
  Description of Artificial Sequence: Synthetic oligonucleotide
ccggugcucggcugcucuu

SEQ ID NO: 612529 - RNA, 19 nt, Artificial Sequence
  Description of Artificial Sequence: Synthetic oligonucleotide
cugccccguucggggcgau

SEQ ID NO: 612530 - RNA, 19 nt, Artificial Sequence
  Description of Artificial Sequence: Synthetic oligonucleotide
cggcggcugaaagcucggu

SEQ ID NO: 612531 - RNA, 19 nt, Artificial Sequence
  Description of Artificial Sequence: Synthetic oligonucleotide
cggcuccgagcuucccguu

SEQ ID NO: 612532 - RNA, 19 nt, Artificial Sequence
  Description of Artificial Sequence: Synthetic oligonucleotide
gcgcgccgaugagguucua

SEQ ID NO: 612533 - RNA, 19 nt, Artificial Sequence
  Description of Artificial Sequence: Synthetic oligonucleotide
ggccgcccgcagggcuuuu

SEQ ID NO: 612534 - RNA, 19 nt, Artificial Sequence
  Description of Artificial Sequence: Synthetic oligonucleotide
agauacuucgucuugguac

SEQ ID NO: 612535 - RNA, 19 nt, Artificial Sequence
  Description of Artificial Sequence: Synthetic oligonucleotide
aaaugcacacuuuuacuac

SEQ ID NO: 612536 - RNA, 19 nt, Artificial Sequence
  Description of Artificial Sequence: Synthetic oligonucleotide
auaguugugggcuggaagc

SEQ ID NO: 612537 - RNA, 19 nt, Artificial Sequence
  Description of Artificial Sequence: Synthetic oligonucleotide
uuuuagugcaacaaacucc

SEQ ID NO: 612538 - RNA, 19 nt, Artificial Sequence
  Description of Artificial Sequence: Synthetic oligonucleotide
agcuaguugagccagggcc

SEQ ID NO: 612539 - RNA, 19 nt, Artificial Sequence
  Description of Artificial Sequence: Synthetic oligonucleotide
agacauuacugccacaacc

SEQ ID NO: 612540 - RNA, 19 nt, Artificial Sequence
  Description of Artificial Sequence: Synthetic oligonucleotide
  modified_base (9)..(9): a, c, u, g, unknown or other
aguauuacnccccaaagcu

SEQ ID NO: 612541 - RNA, 19 nt, Artificial Sequence
  Description of Artificial Sequence: Synthetic oligonucleotide
aguagaagccacuuucugc

SEQ ID NO: 612542 - RNA, 19 nt, Artificial Sequence
  Description of Artificial Sequence: Synthetic oligonucleotide
uaauuuacuguauucacac

SEQ ID NO: 612543 - RNA, 19 nt, Artificial Sequence
  Description of Artificial Sequence: Synthetic oligonucleotide
ucaaacuugauucuugggu

SEQ ID NO: 612544 - RNA, 19 nt, Artificial Sequence
  Description of Artificial Sequence: Synthetic oligonucleotide
aauuuacuguauucacacc

SEQ ID NO: 612545 - RNA, 19 nt, Artificial Sequence
  Description of Artificial Sequence: Synthetic oligonucleotide
uuuguuagacauuacugcc

SEQ ID NO: 612546 - RNA, 19 nt, Artificial Sequence
  Description of Artificial Sequence: Synthetic oligonucleotide
  modified_base (7)..(7): a, c, u, g, unknown or other
uauuacnccccaaagcuga

SEQ ID NO: 612547 - RNA, 19 nt, Artificial Sequence
  Description of Artificial Sequence: Synthetic oligonucleotide
auuacugcccgguacacac

SEQ ID NO: 612548 - RNA, 19 nt, Artificial Sequence
  Description of Artificial Sequence: Synthetic oligonucleotide
aaaacugaauagcccgggc

SEQ ID NO: 612549 - RNA, 19 nt, Artificial Sequence
  Description of Artificial Sequence: Synthetic oligonucleotide
aaauuggauguuuguuacc

SEQ ID NO: 612550 - RNA, 19 nt, Artificial Sequence
  Description of Artificial Sequence: Synthetic oligonucleotide
caauccucaaacuugauuc

SEQ ID NO: 612551 - RNA, 19 nt, Artificial Sequence
  Description of Artificial Sequence: Synthetic oligonucleotide
uauuucucauuacugcccg

SEQ ID NO: 612552 - RNA, 19 nt, Artificial Sequence
  Description of Artificial Sequence: Synthetic oligonucleotide
uguugcuucuuaaaauggg

SEQ ID NO: 612553 - RNA, 19 nt, Artificial Sequence
  Description of Artificial Sequence: Synthetic oligonucleotide
agaacuuccaaccaugaga

SEQ ID NO: 612554 - RNA, 19 nt, Artificial Sequence
  Description of Artificial Sequence: Synthetic oligonucleotide
uaaaauggggccuuccucc

SEQ ID NO: 612555 - RNA, 19 nt, Artificial Sequence
  Description of Artificial Sequence: Synthetic oligonucleotide
  modified_base (10)..(10): a, c, u, g, unknown or other
gaguauuacnccccaaagc

SEQ ID NO: 612556 - RNA, 19 nt, Artificial Sequence
  Description of Artificial Sequence: Synthetic oligonucleotide
uuuggugggauacucaaga

SEQ ID NO: 612557 - RNA, 19 nt, Artificial Sequence
  Description of Artificial Sequence: Synthetic oligonucleotide
aaacaaggcaguagaagcc

SEQ ID NO: 612558 - RNA, 19 nt, Artificial Sequence
  Description of Artificial Sequence: Synthetic oligonucleotide
ugacucgugacucaaacac

SEQ ID NO: 612559 - RNA, 19 nt, Artificial Sequence
  Description of Artificial Sequence: Synthetic oligonucleotide
  modified_base (4)..(4): a, c, u, g, unknown or other
uacnccccaaagcugaagg

SEQ ID NO: 612560 - RNA, 19 nt, Artificial Sequence
  Description of Artificial Sequence: Synthetic oligonucleotide
uaagccuggguuauaaccc

SEQ ID NO: 612561 - RNA, 19 nt, Artificial Sequence
  Description of Artificial Sequence: Synthetic oligonucleotide
aguuuaaccagacaguaaa

SEQ ID NO: 612562 - RNA, 19 nt, Artificial Sequence
  Description of Artificial Sequence: Synthetic oligonucleotide
ucaaucaagucuuucagau

SEQ ID NO: 612563 - RNA, 19 nt, Artificial Sequence
  Description of Artificial Sequence: Synthetic oligonucleotide
aucacuauaagccuggguu

SEQ ID NO: 612564 - RNA, 19 nt, Artificial Sequence
  Description of Artificial Sequence: Synthetic oligonucleotide
ggugacgaaaccuugacag

SEQ ID NO: 612565 - RNA, 19 nt, Artificial Sequence
  Description of Artificial Sequence: Synthetic oligonucleotide
aauuggauguuuguuacca

SEQ ID NO: 612566 - RNA, 19 nt, Artificial Sequence
  Description of Artificial Sequence: Synthetic oligonucleotide
gauacuucgucuugguacc

SEQ ID NO: 612567 - RNA, 19 nt, Artificial Sequence
  Description of Artificial Sequence: Synthetic oligonucleotide
uggguuauaacccuggguu

SEQ ID NO: 612568 - RNA, 19 nt, Artificial Sequence
  Description of Artificial Sequence: Synthetic oligonucleotide
uugaugaugaucuguggug

SEQ ID NO: 612569 - RNA, 19 nt, Artificial Sequence
  Description of Artificial Sequence: Synthetic oligonucleotide
uagguucuaaauccaagcc

SEQ ID NO: 612570 - RNA, 19 nt, Artificial Sequence
  Description of Artificial Sequence: Synthetic oligonucleotide
auauuugggugacgaaacc

SEQ ID NO: 612571 - RNA, 19 nt, Artificial Sequence
  Description of Artificial Sequence: Synthetic oligonucleotide
uggaguggggcucuugugg

SEQ ID NO: 612572 - RNA, 19 nt, Artificial Sequence
  Description of Artificial Sequence: Synthetic oligonucleotide
acuguauucacacccugag

SEQ ID NO: 612573 - RNA, 19 nt, Artificial Sequence
  Description of Artificial Sequence: Synthetic oligonucleotide
aaacugaauagcccgggcu

SEQ ID NO: 612574 - RNA, 19 nt, Artificial Sequence
  Description of Artificial Sequence: Synthetic oligonucleotide
agugcaacaaacuccacaa

SEQ ID NO: 612575 - RNA, 19 nt, Artificial Sequence
  Description of Artificial Sequence: Synthetic oligonucleotide
uguuaggaagcucuguuuc

SEQ ID NO: 612576 - RNA, 19 nt, Artificial Sequence
  Description of Artificial Sequence: Synthetic oligonucleotide
uguuagacauuacugccac

SEQ ID NO: 612577 - RNA, 19 nt, Artificial Sequence
  Description of Artificial Sequence: Synthetic oligonucleotide
uuuuacuacucaaggacaa

SEQ ID NO: 612578 - RNA, 19 nt, Artificial Sequence
  Description of Artificial Sequence: Synthetic oligonucleotide
acucuagucucuuguacac

SEQ ID NO: 612579 - RNA, 19 nt, Artificial Sequence
  Description of Artificial Sequence: Synthetic oligonucleotide
aauucgucacuuucuucag

SEQ ID NO: 612580 - RNA, 19 nt, Artificial Sequence
  Description of Artificial Sequence: Synthetic oligonucleotide
aagguaucgguguccacag

SEQ ID NO: 612581 - RNA, 19 nt, Artificial Sequence
  Description of Artificial Sequence: Synthetic oligonucleotide
uacucaagaaccaggacau

SEQ ID NO: 612582 - RNA, 19 nt, Artificial Sequence
  Description of Artificial Sequence: Synthetic oligonucleotide
uguaggaguucuccugugg

SEQ ID NO: 612583 - RNA, 19 nt, Artificial Sequence
  Description of Artificial Sequence: Synthetic oligonucleotide
aauagcccgggcugugccc

SEQ ID NO: 612584 - RNA, 19 nt, Artificial Sequence
  Description of Artificial Sequence: Synthetic oligonucleotide
agcuuuuagugcaacaaac

SEQ ID NO: 612585 - RNA, 19 nt, Artificial Sequence
  Description of Artificial Sequence: Synthetic oligonucleotide
uuguuagacauuacugcca

SEQ ID NO: 612586 - RNA, 19 nt, Artificial Sequence
  Description of Artificial Sequence: Synthetic oligonucleotide
uagugcaacaaacuccaca

SEQ ID NO: 612587 - RNA, 19 nt, Artificial Sequence
  Description of Artificial Sequence: Synthetic oligonucleotide
auggaugagccuuccauag

SEQ ID NO: 612588 - RNA, 19 nt, Artificial Sequence
  Description of Artificial Sequence: Synthetic oligonucleotide
ugugacucgugacucaaac

SEQ ID NO: 612589 - RNA, 19 nt, Artificial Sequence
  Description of Artificial Sequence: Synthetic oligonucleotide
agucgauccuccaaggagc

SEQ ID NO: 612590 - RNA, 19 nt, Artificial Sequence
  Description of Artificial Sequence: Synthetic oligonucleotide
cuuaguuuuggugggauac

SEQ ID NO: 612591 - RNA, 19 nt, Artificial Sequence
  Description of Artificial Sequence: Synthetic oligonucleotide
auuagaacuuuugaugucu

SEQ ID NO: 612592 - RNA, 19 nt, Artificial Sequence
  Description of Artificial Sequence: Synthetic oligonucleotide
guagaagccacuuucugca

SEQ ID NO: 612593 - RNA, 19 nt, Artificial Sequence
  Description of Artificial Sequence: Synthetic oligonucleotide
  modified_base (18)..(18): a, c, u, g, unknown or other
agggucucgaguauuacnc

SEQ ID NO: 612594 - RNA, 19 nt, Artificial Sequence
  Description of Artificial Sequence: Synthetic oligonucleotide
ugcaaagcggcugaaacga

SEQ ID NO: 612595 - RNA, 19 nt, Artificial Sequence
  Description of Artificial Sequence: Synthetic oligonucleotide
acgaaaccuugacagcugc

SEQ ID NO: 612596 - RNA, 19 nt, Artificial Sequence
  Description of Artificial Sequence: Synthetic oligonucleotide
aagcuaguugagccagggc

SEQ ID NO: 612597 - RNA, 19 nt, Artificial Sequence
  Description of Artificial Sequence: Synthetic oligonucleotide
ucgugacucaaacacagaa

SEQ ID NO: 612598 - RNA, 19 nt, Artificial Sequence
  Description of Artificial Sequence: Synthetic oligonucleotide
aacuucggugggcaggguc

SEQ ID NO: 612599 - RNA, 19 nt, Artificial Sequence
  Description of Artificial Sequence: Synthetic oligonucleotide
auuggaguagcccaagcau

SEQ ID NO: 612600 - RNA, 19 nt, Artificial Sequence
  Description of Artificial Sequence: Synthetic oligonucleotide
agguucuaaauccaagccu

SEQ ID NO: 612601 - RNA, 19 nt, Artificial Sequence
  Description of Artificial Sequence: Synthetic oligonucleotide
gcaacaagcuaguugagcc

SEQ ID NO: 612602 - RNA, 19 nt, Artificial Sequence
  Description of Artificial Sequence: Synthetic oligonucleotide
gagccuuccauaguugugg

SEQ ID NO: 612603 - RNA, 19 nt, Artificial Sequence
  Description of Artificial Sequence: Synthetic oligonucleotide
uuguacaccugggucaugg

SEQ ID NO: 612604 - RNA, 19 nt, Artificial Sequence
  Description of Artificial Sequence: Synthetic oligonucleotide
ucaagugccaggagugcag

SEQ ID NO: 612605 - RNA, 19 nt, Artificial Sequence
  Description of Artificial Sequence: Synthetic oligonucleotide
accucuagcucccaaggag

SEQ ID NO: 612606 - RNA, 19 nt, Artificial Sequence
  Description of Artificial Sequence: Synthetic oligonucleotide
  modified_base (12)..(12): a, c, u, g, unknown or other
ucgaguauuacnccccaaa

SEQ ID NO: 612607 - RNA, 19 nt, Artificial Sequence
  Description of Artificial Sequence: Synthetic oligonucleotide
uccucaaacuugauucuug

SEQ ID NO: 612608 - RNA, 19 nt, Artificial Sequence
  Description of Artificial Sequence: Synthetic oligonucleotide
aaucacuauaagccugggu

SEQ ID NO: 612609 - RNA, 19 nt, Artificial Sequence
  Description of Artificial Sequence: Synthetic oligonucleotide
  modified_base (19)..(19): a, c, u, g, unknown or other
aagggucucgaguauuacn

SEQ ID NO: 612610 - RNA, 19 nt, Artificial Sequence
  Description of Artificial Sequence: Synthetic oligonucleotide
ugucuggguaccacaaagc

SEQ ID NO: 612611 - RNA, 19 nt, Artificial Sequence
  Description of Artificial Sequence: Synthetic oligonucleotide
uacugugcaaguccgggcu

SEQ ID NO: 612612 - RNA, 19 nt, Artificial Sequence
  Description of Artificial Sequence: Synthetic oligonucleotide
  modified_base (14)..(14): a, c, u, g, unknown or other
ucucgaguauuacncccca

SEQ ID NO: 612613 - RNA, 19 nt, Artificial Sequence
  Description of Artificial Sequence: Synthetic oligonucleotide
ugacgaaaccuugacagcu

SEQ ID NO: 612614 - RNA, 19 nt, Artificial Sequence
  Description of Artificial Sequence: Synthetic oligonucleotide
aaucgauccccagucuggg

SEQ ID NO: 612615 - RNA, 19 nt, Artificial Sequence
  Description of Artificial Sequence: Synthetic oligonucleotide
ugagaacuuugacaucuga

SEQ ID NO: 612616 - RNA, 19 nt, Artificial Sequence
  Description of Artificial Sequence: Synthetic oligonucleotide
cugcaaagcggcugaaacg

SEQ ID NO: 612617 - RNA, 19 nt, Artificial Sequence
  Description of Artificial Sequence: Synthetic oligonucleotide
auguagugugacucgugac

SEQ ID NO: 612618 - RNA, 19 nt, Artificial Sequence
  Description of Artificial Sequence: Synthetic oligonucleotide
acuuugacaucugagucug

SEQ ID NO: 612619 - RNA, 19 nt, Artificial Sequence
  Description of Artificial Sequence: Synthetic oligonucleotide
ucuuauagaucugggcagc

SEQ ID NO: 612620 - RNA, 19 nt, Artificial Sequence
  Description of Artificial Sequence: Synthetic oligonucleotide
uacuguauucacacccuga

SEQ ID NO: 612621 - RNA, 19 nt, Artificial Sequence
  Description of Artificial Sequence: Synthetic oligonucleotide
caauuagaacuuuugaugu

SEQ ID NO: 612622 - RNA, 19 nt, Artificial Sequence
  Description of Artificial Sequence: Synthetic oligonucleotide
cugucuggguaccacaaag

SEQ ID NO: 612623 - RNA, 19 nt, Artificial Sequence
  Description of Artificial Sequence: Synthetic oligonucleotide
gcugaaacgagccaggcca

SEQ ID NO: 612624 - RNA, 19 nt, Artificial Sequence
  Description of Artificial Sequence: Synthetic oligonucleotide
caggcuauccaagaguccc

SEQ ID NO: 612625 - RNA, 19 nt, Artificial Sequence
  Description of Artificial Sequence: Synthetic oligonucleotide
caaccucuagcucccaagg

SEQ ID NO: 612626 - RNA, 19 nt, Artificial Sequence
  Description of Artificial Sequence: Synthetic oligonucleotide
acuucggugggcagggucc

SEQ ID NO: 612627 - RNA, 19 nt, Artificial Sequence
  Description of Artificial Sequence: Synthetic oligonucleotide
gguaucgguguccacagcc

SEQ ID NO: 612628 - RNA, 19 nt, Artificial Sequence
  Description of Artificial Sequence: Synthetic oligonucleotide
caaagcggcugaaacgagc

SEQ ID NO: 612629 - RNA, 19 nt, Artificial Sequence
  Description of Artificial Sequence: Synthetic oligonucleotide
gucguugaggccaggauag

SEQ ID NO: 612630 - RNA, 19 nt, Artificial Sequence
  Description of Artificial Sequence: Synthetic oligonucleotide
acucgugacucaaacacag

SEQ ID NO: 612631 - RNA, 19 nt, Artificial Sequence
  Description of Artificial Sequence: Synthetic oligonucleotide
agcacaauuagaacuuuug

SEQ ID NO: 612632 - RNA, 19 nt, Artificial Sequence
  Description of Artificial Sequence: Synthetic oligonucleotide
  modified_base (16)..(16): a, c, u, g, unknown or other
ggucucgaguauuacnccc

SEQ ID NO: 612633 - RNA, 19 nt, Artificial Sequence
  Description of Artificial Sequence: Synthetic oligonucleotide
uucgucuugguaccuugug

SEQ ID NO: 612634 - RNA, 19 nt, Artificial Sequence
  Description of Artificial Sequence: Synthetic oligonucleotide
aggaagcucuguuucacca

SEQ ID NO: 612635 - RNA, 19 nt, Artificial Sequence
  Description of Artificial Sequence: Synthetic oligonucleotide
aaguccgggcuacaguacu

SEQ ID NO: 612636 - RNA, 19 nt, Artificial Sequence
  Description of Artificial Sequence: Synthetic oligonucleotide
uuacuacucaaggacaaau

SEQ ID NO: 612637 - RNA, 19 nt, Artificial Sequence
  Description of Artificial Sequence: Synthetic oligonucleotide
uggguuacuuuugaagaca

SEQ ID NO: 612638 - RNA, 19 nt, Artificial Sequence
  Description of Artificial Sequence: Synthetic oligonucleotide
ucgucuugguaccuugugu

SEQ ID NO: 612639 - RNA, 19 nt, Artificial Sequence
  Description of Artificial Sequence: Synthetic oligonucleotide
ucacuauaagccuggguua

SEQ ID NO: 612640 - RNA, 19 nt, Artificial Sequence
  Description of Artificial Sequence: Synthetic oligonucleotide
cuggguuacuuuugaagac

SEQ ID NO: 612641 - RNA, 19 nt, Artificial Sequence
  Description of Artificial Sequence: Synthetic oligonucleotide
caaccaguaccuuggacuc

SEQ ID NO: 612642 - RNA, 19 nt, Artificial Sequence
  Description of Artificial Sequence: Synthetic oligonucleotide
aguccacucuaggucagcc

SEQ ID NO: 612643 - RNA, 19 nt, Artificial Sequence
  Description of Artificial Sequence: Synthetic oligonucleotide
ucagauacuucgucuuggu

SEQ ID NO: 612644 - RNA, 19 nt, Artificial Sequence
  Description of Artificial Sequence: Synthetic oligonucleotide
uuucuggagcugccgagca

SEQ ID NO: 612645 - RNA, 19 nt, Artificial Sequence
  Description of Artificial Sequence: Synthetic oligonucleotide
ugccacaaccaguaccuug

SEQ ID NO: 612646 - RNA, 19 nt, Artificial Sequence
  Description of Artificial Sequence: Synthetic oligonucleotide
guagcccaagcaucugugg

SEQ ID NO: 612647 - RNA, 19 nt, Artificial Sequence
  Description of Artificial Sequence: Synthetic oligonucleotide
aaccucuagcucccaagga

SEQ ID NO: 612648 - RNA, 19 nt, Artificial Sequence
  Description of Artificial Sequence: Synthetic oligonucleotide
uaccagugcuucacagggg

SEQ ID NO: 612649 - RNA, 19 nt, Artificial Sequence
  Description of Artificial Sequence: Synthetic oligonucleotide
uguuggggcccuuaguuuu

SEQ ID NO: 612650 - RNA, 19 nt, Artificial Sequence
  Description of Artificial Sequence: Synthetic oligonucleotide
uauaagccuggguuauaac

SEQ ID NO: 612651 - RNA, 19 nt, Artificial Sequence
  Description of Artificial Sequence: Synthetic oligonucleotide
uggcuggcaaccucuagcu

SEQ ID NO: 612652 - RNA, 19 nt, Artificial Sequence
  Description of Artificial Sequence: Synthetic oligonucleotide
agucguugaggccaggaua

SEQ ID NO: 612653 - RNA, 19 nt, Artificial Sequence
  Description of Artificial Sequence: Synthetic oligonucleotide
aauuugccuggguggacaa

SEQ ID NO: 612654 - RNA, 19 nt, Artificial Sequence
  Description of Artificial Sequence: Synthetic oligonucleotide
uggguggcuaccuggaguc

SEQ ID NO: 612655 - RNA, 19 nt, Artificial Sequence
  Description of Artificial Sequence: Synthetic oligonucleotide
caagcuaguugagccaggg

SEQ ID NO: 612656 - RNA, 19 nt, Artificial Sequence
  Description of Artificial Sequence: Synthetic oligonucleotide
ugcaaguccgggcuacagu

SEQ ID NO: 612657 - RNA, 19 nt, Artificial Sequence
  Description of Artificial Sequence: Synthetic oligonucleotide
guuaggaagcucuguuuca

SEQ ID NO: 612658 - RNA, 19 nt, Artificial Sequence
  Description of Artificial Sequence: Synthetic oligonucleotide
cacaauuagaacuuuugau

SEQ ID NO: 612659 - RNA, 19 nt, Artificial Sequence
  Description of Artificial Sequence: Synthetic oligonucleotide
ucuugguaccuuguguccu

SEQ ID NO: 612660 - RNA, 19 nt, Artificial Sequence
  Description of Artificial Sequence: Synthetic oligonucleotide
  modified_base (8)..(8): a, c, u, g, unknown or other
guauuacnccccaaagcug

SEQ ID NO: 612661 - RNA, 19 nt, Artificial Sequence
  Description of Artificial Sequence: Synthetic oligonucleotide
cauguagugugacucguga

SEQ ID NO: 612662 - RNA, 19 nt, Artificial Sequence
  Description of Artificial Sequence: Synthetic oligonucleotide
uuaguuuuggugggauacu

SEQ ID NO: 612663 - RNA, 19 nt, Artificial Sequence
  Description of Artificial Sequence: Synthetic oligonucleotide
cuggcaaccucuagcuccc

SEQ ID NO: 612664 - RNA, 19 nt, Artificial Sequence
  Description of Artificial Sequence: Synthetic oligonucleotide
aucagcucugaaauucguc

SEQ ID NO: 612665 - RNA, 19 nt, Artificial Sequence
  Description of Artificial Sequence: Synthetic oligonucleotide
guggagguugcacaccaug

SEQ ID NO: 612666 - RNA, 19 nt, Artificial Sequence
  Description of Artificial Sequence: Synthetic oligonucleotide
uuauagaucugggcagcga

SEQ ID NO: 612667 - RNA, 19 nt, Artificial Sequence
  Description of Artificial Sequence: Synthetic oligonucleotide
uuugggcuacuguggaggu

SEQ ID NO: 612668 - RNA, 19 nt, Artificial Sequence
  Description of Artificial Sequence: Synthetic oligonucleotide
gauguuggggcccuuaguu

SEQ ID NO: 612669 - RNA, 19 nt, Artificial Sequence
  Description of Artificial Sequence: Synthetic oligonucleotide
cacucuagucucuuguaca

SEQ ID NO: 612670 - RNA, 19 nt, Artificial Sequence
  Description of Artificial Sequence: Synthetic oligonucleotide
ggaaucgauccccagucug

SEQ ID NO: 612671 - RNA, 19 nt, Artificial Sequence
  Description of Artificial Sequence: Synthetic oligonucleotide
gaugagccuuccauaguug

SEQ ID NO: 612672 - RNA, 19 nt, Artificial Sequence
  Description of Artificial Sequence: Synthetic oligonucleotide
uuuacuacucaaggacaaa

SEQ ID NO: 612673 - RNA, 19 nt, Artificial Sequence
  Description of Artificial Sequence: Synthetic oligonucleotide
aaucagcucugaaauucgu

SEQ ID NO: 612674 - RNA, 19 nt, Artificial Sequence
  Description of Artificial Sequence: Synthetic oligonucleotide
cucauuacugcccgguaca

SEQ ID NO: 612675 - RNA, 19 nt, Artificial Sequence
  Description of Artificial Sequence: Synthetic oligonucleotide
aaauggggccuuccucccu

SEQ ID NO: 612676 - RNA, 19 nt, Artificial Sequence
  Description of Artificial Sequence: Synthetic oligonucleotide
uggagucaagugccaggag

SEQ ID NO: 612677 - RNA, 19 nt, Artificial Sequence
  Description of Artificial Sequence: Synthetic oligonucleotide
uggaugagccuuccauagu

SEQ ID NO: 612678 - RNA, 19 nt, Artificial Sequence
  Description of Artificial Sequence: Synthetic oligonucleotide
uggguggacaaaucagcuc

SEQ ID NO: 612679 - RNA, 19 nt, Artificial Sequence
  Description of Artificial Sequence: Synthetic oligonucleotide
caaguuuaaccagacagua

SEQ ID NO: 612680 - RNA, 19 nt, Artificial Sequence
  Description of Artificial Sequence: Synthetic oligonucleotide
  modified_base (3)..(3): a, c, u, g, unknown or other
acnccccaaagcugaaggu

SEQ ID NO: 612681 - RNA, 19 nt, Artificial Sequence
  Description of Artificial Sequence: Synthetic oligonucleotide
agguaucgguguccacagc

SEQ ID NO: 612682 - RNA, 19 nt, Artificial Sequence
  Description of Artificial Sequence: Synthetic oligonucleotide
gacgaaaccuugacagcug

SEQ ID NO: 612683 - RNA, 19 nt, Artificial Sequence
  Description of Artificial Sequence: Synthetic oligonucleotide
gaguacgccccacaccuga

SEQ ID NO: 612684 - RNA, 19 nt, Artificial Sequence
  Description of Artificial Sequence: Synthetic oligonucleotide
auucacacccugagaacag

SEQ ID NO: 612685 - RNA, 19 nt, Artificial Sequence
  Description of Artificial Sequence: Synthetic oligonucleotide
aguagcccaagcaucugug

SEQ ID NO: 612686 - RNA, 19 nt, Artificial Sequence
  Description of Artificial Sequence: Synthetic oligonucleotide
gcuuuugggguuuucucac

SEQ ID NO: 612687 - RNA, 19 nt, Artificial Sequence
  Description of Artificial Sequence: Synthetic oligonucleotide
gguuauaacccuggguuac

SEQ ID NO: 612688 - RNA, 19 nt, Artificial Sequence
  Description of Artificial Sequence: Synthetic oligonucleotide
ugaauagcccgggcugugc

SEQ ID NO: 612689 - RNA, 19 nt, Artificial Sequence
  Description of Artificial Sequence: Synthetic oligonucleotide
augggcuuggguggcuacc

SEQ ID NO: 612690 - RNA, 19 nt, Artificial Sequence
  Description of Artificial Sequence: Synthetic oligonucleotide
uucucauuacugcccggua

SEQ ID NO: 612691 - RNA, 19 nt, Artificial Sequence
  Description of Artificial Sequence: Synthetic oligonucleotide
uuagugcaacaaacuccac

SEQ ID NO: 612692 - RNA, 19 nt, Artificial Sequence
  Description of Artificial Sequence: Synthetic oligonucleotide
cagcgauuggaguagccca

SEQ ID NO: 612693 - RNA, 19 nt, Artificial Sequence
  Description of Artificial Sequence: Synthetic oligonucleotide
ucauuacugcccgguacac

SEQ ID NO: 612694 - RNA, 19 nt, Artificial Sequence
  Description of Artificial Sequence: Synthetic oligonucleotide
uuacugcccgguacacaca

SEQ ID NO: 612695 - RNA, 19 nt, Artificial Sequence
  Description of Artificial Sequence: Synthetic oligonucleotide
gugacucgugacucaaaca

SEQ ID NO: 612696 - RNA, 19 nt, Artificial Sequence
  Description of Artificial Sequence: Synthetic oligonucleotide
caaagcugaagguaucggu

SEQ ID NO: 612697 - RNA, 19 nt, Artificial Sequence
  Description of Artificial Sequence: Synthetic oligonucleotide
ggguggacaaaucagcucu

SEQ ID NO: 612698 - RNA, 19 nt, Artificial Sequence
  Description of Artificial Sequence: Synthetic oligonucleotide
cagugguggacauguagga

SEQ ID NO: 612699 - RNA, 19 nt, Artificial Sequence
  Description of Artificial Sequence: Synthetic oligonucleotide
caaguccgggcuacaguac

SEQ ID NO: 612700 - RNA, 19 nt, Artificial Sequence
  Description of Artificial Sequence: Synthetic oligonucleotide
caggacauguaaagcauua

SEQ ID NO: 612701 - RNA, 19 nt, Artificial Sequence
  Description of Artificial Sequence: Synthetic oligonucleotide
ggcauggcaagagaauagc

SEQ ID NO: 612702 - RNA, 19 nt, Artificial Sequence
  Description of Artificial Sequence: Synthetic oligonucleotide
cuauaagccuggguuauaa

SEQ ID NO: 612703 - RNA, 19 nt, Artificial Sequence
  Description of Artificial Sequence: Synthetic oligonucleotide
gacucgugacucaaacaca

SEQ ID NO: 612704 - RNA, 19 nt, Artificial Sequence
  Description of Artificial Sequence: Synthetic oligonucleotide
ccaggcccaacuucggugg

SEQ ID NO: 612705 - RNA, 19 nt, Artificial Sequence
  Description of Artificial Sequence: Synthetic oligonucleotide
uuauaacccuggguuacuu

SEQ ID NO: 612706 - RNA, 19 nt, Artificial Sequence
  Description of Artificial Sequence: Synthetic oligonucleotide
  modified_base (11)..(11): a, c, u, g, unknown or other
cgaguauuacnccccaaag

SEQ ID NO: 612707 - RNA, 19 nt, Artificial Sequence
  Description of Artificial Sequence: Synthetic oligonucleotide
cugagaacagcagguucac

SEQ ID NO: 612708 - RNA, 19 nt, Artificial Sequence
  Description of Artificial Sequence: Synthetic oligonucleotide
gaugggcuuggguggcuac

SEQ ID NO: 612709 - RNA, 19 nt, Artificial Sequence
  Description of Artificial Sequence: Synthetic oligonucleotide
gguaggcgaggguaccccg

SEQ ID NO: 612710 - RNA, 19 nt, Artificial Sequence
  Description of Artificial Sequence: Synthetic oligonucleotide
cuccuguggggaagagggg

SEQ ID NO: 612711 - RNA, 19 nt, Artificial Sequence
  Description of Artificial Sequence: Synthetic oligonucleotide
gucgauccuccaaggagcc

SEQ ID NO: 612712 - RNA, 19 nt, Artificial Sequence
  Description of Artificial Sequence: Synthetic oligonucleotide
aggcgaggguaccccguac

SEQ ID NO: 612713 - RNA, 19 nt, Artificial Sequence
  Description of Artificial Sequence: Synthetic oligonucleotide
agugugacucgugacucaa

SEQ ID NO: 612714 - RNA, 19 nt, Artificial Sequence
  Description of Artificial Sequence: Synthetic oligonucleotide
cccguacugugcaaguccg

SEQ ID NO: 612715 - RNA, 19 nt, Artificial Sequence
  Description of Artificial Sequence: Synthetic oligonucleotide
cuguauucacacccugaga

SEQ ID NO: 612716 - RNA, 19 nt, Artificial Sequence
  Description of Artificial Sequence: Synthetic oligonucleotide
ucguugaggccaggauagg

SEQ ID NO: 612717 - RNA, 19 nt, Artificial Sequence
  Description of Artificial Sequence: Synthetic oligonucleotide
cucaagaaccaggacaugu

SEQ ID NO: 612718 - RNA, 19 nt, Artificial Sequence
  Description of Artificial Sequence: Synthetic oligonucleotide
ucgucacuuucuucagguc

SEQ ID NO: 612719 - RNA, 19 nt, Artificial Sequence
  Description of Artificial Sequence: Synthetic oligonucleotide
guaccccguacugugcaag

SEQ ID NO: 612720 - RNA, 19 nt, Artificial Sequence
  Description of Artificial Sequence: Synthetic oligonucleotide
aguggggcucuugugggca

SEQ ID NO: 612721 - RNA, 19 nt, Artificial Sequence
  Description of Artificial Sequence: Synthetic oligonucleotide
aggguaccccguacugugc

SEQ ID NO: 612722 - RNA, 19 nt, Artificial Sequence
  Description of Artificial Sequence: Synthetic oligonucleotide
ggggcauguagugugacuc

SEQ ID NO: 612723 - RNA, 19 nt, Artificial Sequence
  Description of Artificial Sequence: Synthetic oligonucleotide
  modified_base (17)..(17): a, c, u, g, unknown or other
gggucucgaguauuacncc

SEQ ID NO: 612724 - RNA, 19 nt, Artificial Sequence
  Description of Artificial Sequence: Synthetic oligonucleotide
cauguaggaguucuccugu

SEQ ID NO: 612725 - RNA, 19 nt, Artificial Sequence
  Description of Artificial Sequence: Synthetic oligonucleotide
gggaacacucucaucacuc

SEQ ID NO: 612726 - RNA, 19 nt, Artificial Sequence
  Description of Artificial Sequence: Synthetic oligonucleotide
ugcccauggaugagccuuc

SEQ ID NO: 612727 - RNA, 19 nt, Artificial Sequence
  Description of Artificial Sequence: Synthetic oligonucleotide
uccgggcuacaguacugcu

SEQ ID NO: 612728 - RNA, 19 nt, Artificial Sequence
  Description of Artificial Sequence: Synthetic oligonucleotide
gcagcgauuggaguagccc

SEQ ID NO: 612729 - RNA, 19 nt, Artificial Sequence
  Description of Artificial Sequence: Synthetic oligonucleotide
ggcucuugugggcacuacc

SEQ ID NO: 612730 - RNA, 19 nt, Artificial Sequence
  Description of Artificial Sequence: Synthetic oligonucleotide
gaguagcccaagcaucugu

SEQ ID NO: 612731 - RNA, 19 nt, Artificial Sequence
  Description of Artificial Sequence: Synthetic oligonucleotide
cauaugugguauuucucau

SEQ ID NO: 612732 - RNA, 19 nt, Artificial Sequence
  Description of Artificial Sequence: Synthetic oligonucleotide
ggguuacuuuugaagacac

SEQ ID NO: 612733 - RNA, 19 nt, Artificial Sequence
  Description of Artificial Sequence: Synthetic oligonucleotide
gcaaguccgggcuacagua

SEQ ID NO: 612734 - RNA, 19 nt, Artificial Sequence
  Description of Artificial Sequence: Synthetic oligonucleotide
gggcauggcaagagaauag

SEQ ID NO: 612735 - RNA, 19 nt, Artificial Sequence
  Description of Artificial Sequence: Synthetic oligonucleotide
accccguacugugcaaguc

SEQ ID NO: 612736 - RNA, 19 nt, Artificial Sequence
  Description of Artificial Sequence: Synthetic oligonucleotide
uaggcgaggguaccccgua

SEQ ID NO: 612737 - RNA, 19 nt, Artificial Sequence
  Description of Artificial Sequence: Synthetic oligonucleotide
guaucgguguccacagcca

SEQ ID NO: 612738 - RNA, 19 nt, Artificial Sequence
  Description of Artificial Sequence: Synthetic oligonucleotide
ccaacuucggugggcaggg

SEQ ID NO: 612739 - RNA, 19 nt, Artificial Sequence
  Description of Artificial Sequence: Synthetic oligonucleotide
guaccacaaagcuuggcuu

SEQ ID NO: 612740 - RNA, 19 nt, Artificial Sequence
  Description of Artificial Sequence: Synthetic oligonucleotide
ccacucuagucucuuguac

SEQ ID NO: 612741 - RNA, 19 nt, Artificial Sequence
  Description of Artificial Sequence: Synthetic oligonucleotide
ugaaacgagccaggccaaa

SEQ ID NO: 612742 - RNA, 19 nt, Artificial Sequence
  Description of Artificial Sequence: Synthetic oligonucleotide
guuggggcccuuaguuuug

SEQ ID NO: 612743 - RNA, 19 nt, Artificial Sequence
  Description of Artificial Sequence: Synthetic oligonucleotide
auccucaaacuugauucuu

SEQ ID NO: 612744 - RNA, 19 nt, Artificial Sequence
  Description of Artificial Sequence: Synthetic oligonucleotide
guccgggcuacaguacugc

SEQ ID NO: 612745 - RNA, 19 nt, Artificial Sequence
  Description of Artificial Sequence: Synthetic oligonucleotide
gcuaguugagccagggcca

SEQ ID NO: 612746 - RNA, 19 nt, Artificial Sequence
  Description of Artificial Sequence: Synthetic oligonucleotide
acucaagaaccaggacaug

SEQ ID NO: 612747 - RNA, 19 nt, Artificial Sequence
  Description of Artificial Sequence: Synthetic oligonucleotide
cugaauagcccgggcugug

SEQ ID NO: 612748 - RNA, 19 nt, Artificial Sequence
  Description of Artificial Sequence: Synthetic oligonucleotide
acugugcaaguccgggcua

SEQ ID NO: 612749 - RNA, 19 nt, Artificial Sequence
  Description of Artificial Sequence: Synthetic oligonucleotide
gugcaaguccgggcuacag

SEQ ID NO: 612750 - RNA, 19 nt, Artificial Sequence
  Description of Artificial Sequence: Synthetic oligonucleotide
agcgauuggaguagcccaa

SEQ ID NO: 612751 - RNA, 19 nt, Artificial Sequence
  Description of Artificial Sequence: Synthetic oligonucleotide
caccugacuccuuugggcu

SEQ ID NO: 612752 - RNA, 19 nt, Artificial Sequence
  Description of Artificial Sequence: Synthetic oligonucleotide
gccuggguuauaacccugg

SEQ ID NO: 612753 - RNA, 19 nt, Artificial Sequence
  Description of Artificial Sequence: Synthetic oligonucleotide
uagcucccaaggaggcccu

SEQ ID NO: 612754 - RNA, 19 nt, Artificial Sequence
  Description of Artificial Sequence: Synthetic oligonucleotide
auagaucugggcagcgauu

SEQ ID NO: 612755 - RNA, 19 nt, Artificial Sequence
  Description of Artificial Sequence: Synthetic oligonucleotide
cuggguuauaacccugggu

SEQ ID NO: 612756 - RNA, 19 nt, Artificial Sequence
  Description of Artificial Sequence: Synthetic oligonucleotide
gggugacgaaaccuugaca

SEQ ID NO: 612757 - RNA, 19 nt, Artificial Sequence
  Description of Artificial Sequence: Synthetic oligonucleotide
ccacucuaggucagccucc

SEQ ID NO: 612758 - RNA, 19 nt, Artificial Sequence
  Description of Artificial Sequence: Synthetic oligonucleotide
ggguuauaacccuggguua

SEQ ID NO: 612759 - RNA, 19 nt, Artificial Sequence
  Description of Artificial Sequence: Synthetic oligonucleotide
cccaacuucggugggcagg

SEQ ID NO: 612760 - RNA, 19 nt, Artificial Sequence
  Description of Artificial Sequence: Synthetic oligonucleotide
cugaaacgagccaggccaa

SEQ ID NO: 612761 - RNA, 19 nt, Artificial Sequence
  Description of Artificial Sequence: Synthetic oligonucleotide
  modified_base (6)..(6): a, c, u, g, unknown or other
auuacnccccaaagcugaa

SEQ ID NO: 612762 - RNA, 19 nt, Artificial Sequence
  Description of Artificial Sequence: Synthetic oligonucleotide
cauuacugcccgguacaca

SEQ ID NO: 612763 - RNA, 19 nt, Artificial Sequence
  Description of Artificial Sequence: Synthetic oligonucleotide
auacuucgucuugguaccu

SEQ ID NO: 612764 - RNA, 19 nt, Artificial Sequence
  Description of Artificial Sequence: Synthetic oligonucleotide
  modified_base (2)..(2): a, c, u, g, unknown or other
cnccccaaagcugaaggua

SEQ ID NO: 612765 - RNA, 19 nt, Artificial Sequence
  Description of Artificial Sequence: Synthetic oligonucleotide
acuauaagccuggguuaua

SEQ ID NO: 612766 - RNA, 19 nt, Artificial Sequence
  Description of Artificial Sequence: Synthetic oligonucleotide
gcgaggguaccccguacug

SEQ ID NO: 612767 - RNA, 19 nt, Artificial Sequence
  Description of Artificial Sequence: Synthetic oligonucleotide
  modified_base (13)..(13): a, c, u, g, unknown or other
cucgaguauuacnccccaa

SEQ ID NO: 612768 - RNA, 19 nt, Artificial Sequence
  Description of Artificial Sequence: Synthetic oligonucleotide
guuauaacccuggguuacu

SEQ ID NO: 612769 - RNA, 19 nt, Artificial Sequence
  Description of Artificial Sequence: Synthetic oligonucleotide
ucgauccuccaaggagcca

SEQ ID NO: 612770 - RNA, 19 nt, Artificial Sequence
  Description of Artificial Sequence: Synthetic oligonucleotide
aggcuauccaagagucccu

SEQ ID NO: 612771 - RNA, 19 nt, Artificial Sequence
  Description of Artificial Sequence: Synthetic oligonucleotide
gcggcugaaacgagccagg

SEQ ID NO: 612772 - RNA, 19 nt, Artificial Sequence
  Description of Artificial Sequence: Synthetic oligonucleotide
agccuggguuauaacccug

SEQ ID NO: 612773 - RNA, 19 nt, Artificial Sequence
  Description of Artificial Sequence: Synthetic oligonucleotide
ggguaccccguacugugca

SEQ ID NO: 612774 - RNA, 19 nt, Artificial Sequence
  Description of Artificial Sequence: Synthetic oligonucleotide
ggggccguggcuggcaacc

SEQ ID NO: 612775 - RNA, 19 nt, Artificial Sequence
  Description of Artificial Sequence: Synthetic oligonucleotide
agaguacgccccacaccug

SEQ ID NO: 612776 - RNA, 19 nt, Artificial Sequence
  Description of Artificial Sequence: Synthetic oligonucleotide
cuacuggcugguuggggcu

SEQ ID NO: 612777 - RNA, 19 nt, Artificial Sequence
  Description of Artificial Sequence: Synthetic oligonucleotide
gcaaagcggcugaaacgag

SEQ ID NO: 612778 - RNA, 19 nt, Artificial Sequence
  Description of Artificial Sequence: Synthetic oligonucleotide
guggggaagaggggccgug

SEQ ID NO: 612779 - RNA, 19 nt, Artificial Sequence
  Description of Artificial Sequence: Synthetic oligonucleotide
gcaggcuauccaagagucc

SEQ ID NO: 612780 - RNA, 19 nt, Artificial Sequence
  Description of Artificial Sequence: Synthetic oligonucleotide
ccguacugugcaaguccgg

SEQ ID NO: 612781 - RNA, 19 nt, Artificial Sequence
  Description of Artificial Sequence: Synthetic oligonucleotide
cugggcauggcaagagaau

SEQ ID NO: 612782 - RNA, 19 nt, Artificial Sequence
  Description of Artificial Sequence: Synthetic oligonucleotide
uggcccgacggugcaugca

SEQ ID NO: 612783 - RNA, 19 nt, Artificial Sequence
  Description of Artificial Sequence: Synthetic oligonucleotide
ggcuauccaagagucccuc

SEQ ID NO: 612784 - RNA, 19 nt, Artificial Sequence
  Description of Artificial Sequence: Synthetic oligonucleotide
cacuauaagccuggguuau

SEQ ID NO: 612785 - RNA, 19 nt, Artificial Sequence
  Description of Artificial Sequence: Synthetic oligonucleotide
ccgggcuacaguacugcuc

SEQ ID NO: 612786 - RNA, 19 nt, Artificial Sequence
  Description of Artificial Sequence: Synthetic oligonucleotide
guccacucuaggucagccu

SEQ ID NO: 612787 - RNA, 19 nt, Artificial Sequence
  Description of Artificial Sequence: Synthetic oligonucleotide
cauugggcaggaagccaua

SEQ ID NO: 612788 - RNA, 19 nt, Artificial Sequence
  Description of Artificial Sequence: Synthetic oligonucleotide
cggugcaugcagcaacaag

SEQ ID NO: 612789 - RNA, 19 nt, Artificial Sequence
  Description of Artificial Sequence: Synthetic oligonucleotide
gcuuggguuggccccugca

SEQ ID NO: 612790 - RNA, 19 nt, Artificial Sequence
  Description of Artificial Sequence: Synthetic oligonucleotide
gccacucuagucucuugua

SEQ ID NO: 612791 - RNA, 19 nt, Artificial Sequence
  Description of Artificial Sequence: Synthetic oligonucleotide
gcccgucuugauguacucc

SEQ ID NO: 612792 - RNA, 19 nt, Artificial Sequence
  Description of Artificial Sequence: Synthetic oligonucleotide
cuucggugggcagggucca

SEQ ID NO: 612793 - RNA, 19 nt, Artificial Sequence
  Description of Artificial Sequence: Synthetic oligonucleotide
ggcccaacuucggugggca

SEQ ID NO: 612794 - RNA, 19 nt, Artificial Sequence
  Description of Artificial Sequence: Synthetic oligonucleotide
gguaccccguacugugcaa

SEQ ID NO: 612795 - RNA, 19 nt, Artificial Sequence
  Description of Artificial Sequence: Synthetic oligonucleotide
cagucguugaggccaggau

SEQ ID NO: 612796 - RNA, 19 nt, Artificial Sequence
  Description of Artificial Sequence: Synthetic oligonucleotide
ggcgaggguaccccguacu

SEQ ID NO: 612797 - RNA, 19 nt, Artificial Sequence
  Description of Artificial Sequence: Synthetic oligonucleotide
gggaaucgauccccagucu

SEQ ID NO: 612798 - RNA, 19 nt, Artificial Sequence
  Description of Artificial Sequence: Synthetic oligonucleotide
ccuuaguuuuggugggaua

SEQ ID NO: 612799 - RNA, 19 nt, Artificial Sequence
  Description of Artificial Sequence: Synthetic oligonucleotide
guaggcgaggguaccccgu

SEQ ID NO: 612800 - RNA, 19 nt, Artificial Sequence
  Description of Artificial Sequence: Synthetic oligonucleotide
gugugacucgugacucaaa

SEQ ID NO: 612801 - RNA, 19 nt, Artificial Sequence
  Description of Artificial Sequence: Synthetic oligonucleotide
ccaagagucccuccucaua

SEQ ID NO: 612802 - RNA, 19 nt, Artificial Sequence
  Description of Artificial Sequence: Synthetic oligonucleotide
cccgacggugcaugcagca

SEQ ID NO: 612803 - RNA, 19 nt, Artificial Sequence
  Description of Artificial Sequence: Synthetic oligonucleotide
ggcuuggguuggccccugc

SEQ ID NO: 612804 - RNA, 19 nt, Artificial Sequence
  Description of Artificial Sequence: Synthetic oligonucleotide
caguaccuuggacucuuuu

SEQ ID NO: 612805 - RNA, 19 nt, Artificial Sequence
  Description of Artificial Sequence: Synthetic oligonucleotide
ccuggaguggggcucuugu

SEQ ID NO: 612806 - RNA, 19 nt, Artificial Sequence
  Description of Artificial Sequence: Synthetic oligonucleotide
ccggguacagccagccucu

SEQ ID NO: 612807 - RNA, 19 nt, Artificial Sequence
  Description of Artificial Sequence: Synthetic oligonucleotide
cggcugaaacgagccaggc

SEQ ID NO: 612808 - RNA, 19 nt, Artificial Sequence
  Description of Artificial Sequence: Synthetic oligonucleotide
gcccuuaguuuugguggga

SEQ ID NO: 612809 - RNA, 19 nt, Artificial Sequence
  Description of Artificial Sequence: Synthetic oligonucleotide
ggguggcuaccuggaguca

SEQ ID NO: 612810 - RNA, 19 nt, Artificial Sequence
  Description of Artificial Sequence: Synthetic oligonucleotide
ccggcccgucuugauguac

SEQ ID NO: 612811 - RNA, 19 nt, Artificial Sequence
  Description of Artificial Sequence: Synthetic oligonucleotide
gucuggaguccaagugcuu

SEQ ID NO: 612812 - RNA, 19 nt, Artificial Sequence
  Description of Artificial Sequence: Synthetic oligonucleotide
ccgacggugcaugcagcaa

SEQ ID NO: 612813 - RNA, 19 nt, Artificial Sequence
  Description of Artificial Sequence: Synthetic oligonucleotide
cggcccgucuugauguacu

SEQ ID NO: 612814 - RNA, 19 nt, Artificial Sequence
  Description of Artificial Sequence: Synthetic oligonucleotide
cgaggguaccccguacugu

SEQ ID NO: 612815 - RNA, 19 nt, Artificial Sequence
  Description of Artificial Sequence: Synthetic oligonucleotide
gccggcccgucuugaugua

SEQ ID NO: 612816 - RNA, 19 nt, Artificial Sequence
  Description of Artificial Sequence: Synthetic oligonucleotide
ccguggcuggcaaccucua

SEQ ID NO: 612817 - RNA, 19 nt, Artificial Sequence
  Description of Artificial Sequence: Synthetic oligonucleotide
ccaguaccuuggacucuuu

SEQ ID NO: 612818 - RNA, 19 nt, Artificial Sequence
  Description of Artificial Sequence: Synthetic oligonucleotide
ucaaaugucacccacaagu

SEQ ID NO: 612819 - RNA, 19 nt, Artificial Sequence
  Description of Artificial Sequence: Synthetic oligonucleotide
ucuauauaaaccuccauga

SEQ ID NO: 612820 - RNA, 19 nt, Artificial Sequence
  Description of Artificial Sequence: Synthetic oligonucleotide
uauauaaaccuccaugaug

SEQ ID NO: 612821 - RNA, 19 nt, Artificial Sequence
  Description of Artificial Sequence: Synthetic oligonucleotide
uaaaccuccaugaugaggu

SEQ ID NO: 612822 - RNA, 19 nt, Artificial Sequence
  Description of Artificial Sequence: Synthetic oligonucleotide
aaagaacauggauaagguc

SEQ ID NO: 612823 - RNA, 19 nt, Artificial Sequence
  Description of Artificial Sequence: Synthetic oligonucleotide
aaauucagccaagagucgc

SEQ ID NO: 612824 - RNA, 19 nt, Artificial Sequence
  Description of Artificial Sequence: Synthetic oligonucleotide
uagagaugcccgaugaggg

SEQ ID NO: 612825 - RNA, 19 nt, Artificial Sequence
  Description of Artificial Sequence: Synthetic oligonucleotide
ggaaugacgacguaaaacc

SEQ ID NO: 612826 - RNA, 19 nt, Artificial Sequence
  Description of Artificial Sequence: Synthetic oligonucleotide
gacacaauuauccgggagc

SEQ ID NO: 612827 - RNA, 19 nt, Artificial Sequence
  Description of Artificial Sequence: Synthetic oligonucleotide
aauacaggguccuuccugu

SEQ ID NO: 612828 - RNA, 19 nt, Artificial Sequence
  Description of Artificial Sequence: Synthetic oligonucleotide
agcagcacacuucuguacc

SEQ ID NO: 612829 - RNA, 19 nt, Artificial Sequence
  Description of Artificial Sequence: Synthetic oligonucleotide
agagucgcaggcuacgggc

SEQ ID NO: 612830 - RNA, 19 nt, Artificial Sequence
  Description of Artificial Sequence: Synthetic oligonucleotide
acgacguaaaaccaccgac

SEQ ID NO: 612831 - RNA, 19 nt, Artificial Sequence
  Description of Artificial Sequence: Synthetic oligonucleotide
uauuccaugcugcaaaguc

SEQ ID NO: 612832 - RNA, 19 nt, Artificial Sequence
  Description of Artificial Sequence: Synthetic oligonucleotide
uccgauauacaccuuccag

SEQ ID NO: 612833 - RNA, 19 nt, Artificial Sequence
  Description of Artificial Sequence: Synthetic oligonucleotide
aaaguguucccguggucgg

SEQ ID NO: 612834 - RNA, 19 nt, Artificial Sequence
  Description of Artificial Sequence: Synthetic oligonucleotide
uucuguacccgauagagau

SEQ ID NO: 612835 - RNA, 19 nt, Artificial Sequence
  Description of Artificial Sequence: Synthetic oligonucleotide
guuuacucgaggcaggcag

SEQ ID NO: 612836 - RNA, 19 nt, Artificial Sequence
  Description of Artificial Sequence: Synthetic oligonucleotide
aggaaugacgacguaaaac

SEQ ID NO: 612837 - RNA, 19 nt, Artificial Sequence
  Description of Artificial Sequence: Synthetic oligonucleotide
uaaauucagccaagagucg

SEQ ID NO: 612838 - RNA, 19 nt, Artificial Sequence
  Description of Artificial Sequence: Synthetic oligonucleotide
cuaucauccccucggaugg

SEQ ID NO: 612839 - RNA, 19 nt, Artificial Sequence
  Description of Artificial Sequence: Synthetic oligonucleotide
aucuuauccaguaucaaag

SEQ ID NO: 612840 - RNA, 19 nt, Artificial Sequence
  Description of Artificial Sequence: Synthetic oligonucleotide
uccguguucaagaauuuca

SEQ ID NO: 612841 - RNA, 19 nt, Artificial Sequence
  Description of Artificial Sequence: Synthetic oligonucleotide
acuaucauccccucggaug

SEQ ID NO: 612842 - RNA, 19 nt, Artificial Sequence
  Description of Artificial Sequence: Synthetic oligonucleotide
cuguucuauauaaaccucc

SEQ ID NO: 612843 - RNA, 19 nt, Artificial Sequence
  Description of Artificial Sequence: Synthetic oligonucleotide
uacccgauagagaugcccg

SEQ ID NO: 612844 - RNA, 19 nt, Artificial Sequence
  Description of Artificial Sequence: Synthetic oligonucleotide
auagagaugcccgaugagg

SEQ ID NO: 612845 - RNA, 19 nt, Artificial Sequence
  Description of Artificial Sequence: Synthetic oligonucleotide
agggguuugaucaaaggac

SEQ ID NO: 612846 - RNA, 19 nt, Artificial Sequence
  Description of Artificial Sequence: Synthetic oligonucleotide
acuucugacgagcaagguc

SEQ ID NO: 612847 - RNA, 19 nt, Artificial Sequence
  Description of Artificial Sequence: Synthetic oligonucleotide
aaaaccaccgacugcuggu

SEQ ID NO: 612848 - RNA, 19 nt, Artificial Sequence
  Description of Artificial Sequence: Synthetic oligonucleotide
uaagcucagggaaagcccc

SEQ ID NO: 612849 - RNA, 19 nt, Artificial Sequence
  Description of Artificial Sequence: Synthetic oligonucleotide
aagcguuugagugugucag

SEQ ID NO: 612850 - RNA, 19 nt, Artificial Sequence
  Description of Artificial Sequence: Synthetic oligonucleotide
agucuagccgaccuucccc

SEQ ID NO: 612851 - RNA, 19 nt, Artificial Sequence
  Description of Artificial Sequence: Synthetic oligonucleotide
cauccuagggcaaaagcag

SEQ ID NO: 612852 - RNA, 19 nt, Artificial Sequence
  Description of Artificial Sequence: Synthetic oligonucleotide
ggagacuuuucucagaagc

SEQ ID NO: 612853 - RNA, 19 nt, Artificial Sequence
  Description of Artificial Sequence: Synthetic oligonucleotide
gacguaaaaccaccgacug

SEQ ID NO: 612854 - RNA, 19 nt, Artificial Sequence
  Description of Artificial Sequence: Synthetic oligonucleotide
uccuaaauucagccaagag

SEQ ID NO: 612855 - RNA, 19 nt, Artificial Sequence
  Description of Artificial Sequence: Synthetic oligonucleotide
uuuccgauauacaccuucc

SEQ ID NO: 612856 - RNA, 19 nt, Artificial Sequence
  Description of Artificial Sequence: Synthetic oligonucleotide
agaggugcaucuuauccag

SEQ ID NO: 612857 - RNA, 19 nt, Artificial Sequence
  Description of Artificial Sequence: Synthetic oligonucleotide
augauagggaugucucccc

SEQ ID NO: 612858 - RNA, 19 nt, Artificial Sequence
  Description of Artificial Sequence: Synthetic oligonucleotide
ucuacaaaguguucccgug

SEQ ID NO: 612859 - RNA, 19 nt, Artificial Sequence
  Description of Artificial Sequence: Synthetic oligonucleotide
caaaguguucccguggucg

SEQ ID NO: 612860 - RNA, 19 nt, Artificial Sequence
  Description of Artificial Sequence: Synthetic oligonucleotide
aagucugucccugauguug

SEQ ID NO: 612861 - RNA, 19 nt, Artificial Sequence
  Description of Artificial Sequence: Synthetic oligonucleotide
cugcuguucuauauaaacc

SEQ ID NO: 612862 - RNA, 19 nt, Artificial Sequence
  Description of Artificial Sequence: Synthetic oligonucleotide
gaggaccgcucuuugaagg

SEQ ID NO: 612863 - RNA, 19 nt, Artificial Sequence
  Description of Artificial Sequence: Synthetic oligonucleotide
guuuggguagguaaacugg

SEQ ID NO: 612864 - RNA, 19 nt, Artificial Sequence
  Description of Artificial Sequence: Synthetic oligonucleotide
guuucgugugcacaucugg

SEQ ID NO: 612865 - RNA, 19 nt, Artificial Sequence
  Description of Artificial Sequence: Synthetic oligonucleotide
acaaugauagggaugucuc

SEQ ID NO: 612866 - RNA, 19 nt, Artificial Sequence
  Description of Artificial Sequence: Synthetic oligonucleotide
gauauacaccuuccagccg

SEQ ID NO: 612867 - RNA, 19 nt, Artificial Sequence
  Description of Artificial Sequence: Synthetic oligonucleotide
ugacacaauuauccgggag

SEQ ID NO: 612868 - RNA, 19 nt, Artificial Sequence
  Description of Artificial Sequence: Synthetic oligonucleotide
aagagucgcaggcuacggg

SEQ ID NO: 612869 - RNA, 19 nt, Artificial Sequence
  Description of Artificial Sequence: Synthetic oligonucleotide
augacgacguaaaaccacc

SEQ ID NO: 612870 - RNA, 19 nt, Artificial Sequence
  Description of Artificial Sequence: Synthetic oligonucleotide
uuguauuucuccaggcgcu

SEQ ID NO: 612871 - RNA, 19 nt, Artificial Sequence
  Description of Artificial Sequence: Synthetic oligonucleotide
aagggcauagugccaaacu

SEQ ID NO: 612872 - RNA, 19 nt, Artificial Sequence
  Description of Artificial Sequence: Synthetic oligonucleotide
ugauagggaugucuccccg

SEQ ID NO: 612873 - RNA, 19 nt, Artificial Sequence
  Description of Artificial Sequence: Synthetic oligonucleotide
ugcaaagucuagccgaccu

SEQ ID NO: 612874 - RNA, 19 nt, Artificial Sequence
  Description of Artificial Sequence: Synthetic oligonucleotide
acguaaaaccaccgacugc

SEQ ID NO: 612875 - RNA, 19 nt, Artificial Sequence
  Description of Artificial Sequence: Synthetic oligonucleotide
agucccacaucucauccuc

SEQ ID NO: 612876 - RNA, 19 nt, Artificial Sequence
  Description of Artificial Sequence: Synthetic oligonucleotide
uguugaaaugcugguggcg

SEQ ID NO: 612877 - RNA, 19 nt, Artificial Sequence
  Description of Artificial Sequence: Synthetic oligonucleotide
auaaaccuccaugaugagg

SEQ ID NO: 612878 - RNA, 19 nt, Artificial Sequence
  Description of Artificial Sequence: Synthetic oligonucleotide
uccauccuagggcaaaagc

SEQ ID NO: 612879 - RNA, 19 nt, Artificial Sequence
  Description of Artificial Sequence: Synthetic oligonucleotide
ucuuauccaguaucaaagu

SEQ ID NO: 612880 - RNA, 19 nt, Artificial Sequence
  Description of Artificial Sequence: Synthetic oligonucleotide
ggugacacaauuauccggg

SEQ ID NO: 612881 - RNA, 19 nt, Artificial Sequence
  Description of Artificial Sequence: Synthetic oligonucleotide
agggugacacaauuauccg

SEQ ID NO: 612882 - RNA, 19 nt, Artificial Sequence
  Description of Artificial Sequence: Synthetic oligonucleotide
uguuggagguuuuaacuuc

SEQ ID NO: 612883 - RNA, 19 nt, Artificial Sequence
  Description of Artificial Sequence: Synthetic oligonucleotide
gauagggaugucuccccgg

SEQ ID NO: 612884 - RNA, 19 nt, Artificial Sequence
  Description of Artificial Sequence: Synthetic oligonucleotide
ucgaaagaagcguuugagu

SEQ ID NO: 612885 - RNA, 19 nt, Artificial Sequence
  Description of Artificial Sequence: Synthetic oligonucleotide
gucuggaacacacuaggug

SEQ ID NO: 612886 - RNA, 19 nt, Artificial Sequence
  Description of Artificial Sequence: Synthetic oligonucleotide
gagugugucaguaacaucu

SEQ ID NO: 612887 - RNA, 19 nt, Artificial Sequence
  Description of Artificial Sequence: Synthetic oligonucleotide
cagaggaggaaugacgacg

SEQ ID NO: 612888 - RNA, 19 nt, Artificial Sequence
  Description of Artificial Sequence: Synthetic oligonucleotide
ugacgacguaaaaccaccg

SEQ ID NO: 612889 - RNA, 19 nt, Artificial Sequence
  Description of Artificial Sequence: Synthetic oligonucleotide
gauagagaugcccgaugag

SEQ ID NO: 612890 - RNA, 19 nt, Artificial Sequence
  Description of Artificial Sequence: Synthetic oligonucleotide
cuuccaugguaccauacug

SEQ ID NO: 612891 - RNA, 19 nt, Artificial Sequence
  Description of Artificial Sequence: Synthetic oligonucleotide
uuucgugugcacaucuggu

SEQ ID NO: 612892 - RNA, 19 nt, Artificial Sequence
  Description of Artificial Sequence: Synthetic oligonucleotide
cauagugccaaacuucuga

SEQ ID NO: 612893 - RNA, 19 nt, Artificial Sequence
  Description of Artificial Sequence: Synthetic oligonucleotide
uagugccaaacuucugacg

SEQ ID NO: 612894 - RNA, 19 nt, Artificial Sequence
  Description of Artificial Sequence: Synthetic oligonucleotide
cuagguuggaaguguuggg

SEQ ID NO: 612895 - RNA, 19 nt, Artificial Sequence
  Description of Artificial Sequence: Synthetic oligonucleotide
uguaguauccgcaccucau

SEQ ID NO: 612896 - RNA, 19 nt, Artificial Sequence
  Description of Artificial Sequence: Synthetic oligonucleotide
uuuacucgaggcaggcagc

SEQ ID NO: 612897 - RNA, 19 nt, Artificial Sequence
  Description of Artificial Sequence: Synthetic oligonucleotide
cuuuccgauauacaccuuc

SEQ ID NO: 612898 - RNA, 19 nt, Artificial Sequence
  Description of Artificial Sequence: Synthetic oligonucleotide
gguuuuaacuucuugcgga

SEQ ID NO: 612899 - RNA, 19 nt, Artificial Sequence
  Description of Artificial Sequence: Synthetic oligonucleotide
caaugauagggaugucucc

SEQ ID NO: 612900 - RNA, 19 nt, Artificial Sequence
  Description of Artificial Sequence: Synthetic oligonucleotide
cucacgacaccguagcaac

SEQ ID NO: 612901 - RNA, 19 nt, Artificial Sequence
  Description of Artificial Sequence: Synthetic oligonucleotide
agguuggaaguguugggag

SEQ ID NO: 612902 - RNA, 19 nt, Artificial Sequence
  Description of Artificial Sequence: Synthetic oligonucleotide
cuucuugcggauucccagg

SEQ ID NO: 612903 - RNA, 19 nt, Artificial Sequence
  Description of Artificial Sequence: Synthetic oligonucleotide
ucucgaaagaagcguuuga

SEQ ID NO: 612904 - RNA, 19 nt, Artificial Sequence
  Description of Artificial Sequence: Synthetic oligonucleotide
uccgucuggaacacacuag

SEQ ID NO: 612905 - RNA, 19 nt, Artificial Sequence
  Description of Artificial Sequence: Synthetic oligonucleotide
aguguucggcgguuuacuc

SEQ ID NO: 612906 - RNA, 19 nt, Artificial Sequence
  Description of Artificial Sequence: Synthetic oligonucleotide
aagcggcuucccaacaagc

SEQ ID NO: 612907 - RNA, 19 nt, Artificial Sequence
  Description of Artificial Sequence: Synthetic oligonucleotide
uggccucucaagcucuccg

SEQ ID NO: 612908 - RNA, 19 nt, Artificial Sequence
  Description of Artificial Sequence: Synthetic oligonucleotide
guguucggcgguuuacucg

SEQ ID NO: 612909 - RNA, 19 nt, Artificial Sequence
  Description of Artificial Sequence: Synthetic oligonucleotide
ugguuacucaguuccucag

SEQ ID NO: 612910 - RNA, 19 nt, Artificial Sequence
  Description of Artificial Sequence: Synthetic oligonucleotide
cauggauaagguccuccgg

SEQ ID NO: 612911 - RNA, 19 nt, Artificial Sequence
  Description of Artificial Sequence: Synthetic oligonucleotide
uccuugguaagcucaggga

SEQ ID NO: 612912 - RNA, 19 nt, Artificial Sequence
  Description of Artificial Sequence: Synthetic oligonucleotide
accguagcaaccccacccg

SEQ ID NO: 612913 - RNA, 19 nt, Artificial Sequence
  Description of Artificial Sequence: Synthetic oligonucleotide
uuacucaguuccucagcag

SEQ ID NO: 612914 - RNA, 19 nt, Artificial Sequence
  Description of Artificial Sequence: Synthetic oligonucleotide
uaagaaugcuuguggucca

SEQ ID NO: 612915 - RNA, 19 nt, Artificial Sequence
  Description of Artificial Sequence: Synthetic oligonucleotide
augcugcaaagucuagccg

SEQ ID NO: 612916 - RNA, 19 nt, Artificial Sequence
  Description of Artificial Sequence: Synthetic oligonucleotide
caccguagcaaccccaccc

SEQ ID NO: 612917 - RNA, 19 nt, Artificial Sequence
  Description of Artificial Sequence: Synthetic oligonucleotide
uugagugugucaguaacau

SEQ ID NO: 612918 - RNA, 19 nt, Artificial Sequence
  Description of Artificial Sequence: Synthetic oligonucleotide
ucggcgguuuacucgaggc

SEQ ID NO: 612919 - RNA, 19 nt, Artificial Sequence
  Description of Artificial Sequence: Synthetic oligonucleotide
aggggugucuuugacuugg

SEQ ID NO: 612920 - RNA, 19 nt, Artificial Sequence
  Description of Artificial Sequence: Synthetic oligonucleotide
aagcucucgaaagaagcgu

SEQ ID NO: 612921 - RNA, 19 nt, Artificial Sequence
  Description of Artificial Sequence: Synthetic oligonucleotide
ugaggaccgcucuuugaag

SEQ ID NO: 612922 - RNA, 19 nt, Artificial Sequence
  Description of Artificial Sequence: Synthetic oligonucleotide
agucguccauccuagggca

SEQ ID NO: 612923 - RNA, 19 nt, Artificial Sequence
  Description of Artificial Sequence: Synthetic oligonucleotide
ccgauauacaccuuccagc

SEQ ID NO: 612924 - RNA, 19 nt, Artificial Sequence
  Description of Artificial Sequence: Synthetic oligonucleotide
ucuguacccgauagagaug

SEQ ID NO: 612925 - RNA, 19 nt, Artificial Sequence
  Description of Artificial Sequence: Synthetic oligonucleotide
guaagcucagggaaagccc

SEQ ID NO: 612926 - RNA, 19 nt, Artificial Sequence
  Description of Artificial Sequence: Synthetic oligonucleotide
guuuagagcucuucuuuuc

SEQ ID NO: 612927 - RNA, 19 nt, Artificial Sequence
  Description of Artificial Sequence: Synthetic oligonucleotide
agcgagguggcuccucacg

SEQ ID NO: 612928 - RNA, 19 nt, Artificial Sequence
  Description of Artificial Sequence: Synthetic oligonucleotide
caucccuccuaaauucagc

SEQ ID NO: 612929 - RNA, 19 nt, Artificial Sequence
  Description of Artificial Sequence: Synthetic oligonucleotide
agucgcaggcuacgggccc

SEQ ID NO: 612930 - RNA, 19 nt, Artificial Sequence
  Description of Artificial Sequence: Synthetic oligonucleotide
agaagcguuugaguguguc

SEQ ID NO: 612931 - RNA, 19 nt, Artificial Sequence
  Description of Artificial Sequence: Synthetic oligonucleotide
cugggaaggacuuucugga

SEQ ID NO: 612932 - RNA, 19 nt, Artificial Sequence
  Description of Artificial Sequence: Synthetic oligonucleotide
guaguauccgcaccucaug

SEQ ID NO: 612933 - RNA, 19 nt, Artificial Sequence
  Description of Artificial Sequence: Synthetic oligonucleotide
ugccaaacuucugacgagc

SEQ ID NO: 612934 - RNA, 19 nt, Artificial Sequence
  Description of Artificial Sequence: Synthetic oligonucleotide
gggugacacaauuauccgg

SEQ ID NO: 612935 - RNA, 19 nt, Artificial Sequence
  Description of Artificial Sequence: Synthetic oligonucleotide
ugucccucgcaucuccagc

SEQ ID NO: 612936 - RNA, 19 nt, Artificial Sequence
  Description of Artificial Sequence: Synthetic oligonucleotide
gaaugcuugugguccaguc

SEQ ID NO: 612937 - RNA, 19 nt, Artificial Sequence
  Description of Artificial Sequence: Synthetic oligonucleotide
ccaguaucaaagugaagcc

SEQ ID NO: 612938 - RNA, 19 nt, Artificial Sequence
  Description of Artificial Sequence: Synthetic oligonucleotide
acgacaccguagcaacccc

SEQ ID NO: 612939 - RNA, 19 nt, Artificial Sequence
  Description of Artificial Sequence: Synthetic oligonucleotide
acacaauuauccgggagcu

SEQ ID NO: 612940 - RNA, 19 nt, Artificial Sequence
  Description of Artificial Sequence: Synthetic oligonucleotide
agcaaccuagcagagguca

SEQ ID NO: 612941 - RNA, 19 nt, Artificial Sequence
  Description of Artificial Sequence: Synthetic oligonucleotide
ggucagaggaggaaugacg

SEQ ID NO: 612942 - RNA, 19 nt, Artificial Sequence
  Description of Artificial Sequence: Synthetic oligonucleotide
auuauccgggagcugcugu

SEQ ID NO: 612943 - RNA, 19 nt, Artificial Sequence
  Description of Artificial Sequence: Synthetic oligonucleotide
gaagcguuugaguguguca

SEQ ID NO: 612944 - RNA, 19 nt, Artificial Sequence
  Description of Artificial Sequence: Synthetic oligonucleotide
cgauauacaccuuccagcc

SEQ ID NO: 612945 - RNA, 19 nt, Artificial Sequence
  Description of Artificial Sequence: Synthetic oligonucleotide
uucuugcggauucccaggu

SEQ ID NO: 612946 - RNA, 19 nt, Artificial Sequence
  Description of Artificial Sequence: Synthetic oligonucleotide
aauuauccgggagcugcug

SEQ ID NO: 612947 - RNA, 19 nt, Artificial Sequence
  Description of Artificial Sequence: Synthetic oligonucleotide
uauccgcaccucaugcucu

SEQ ID NO: 612948 - RNA, 19 nt, Artificial Sequence
  Description of Artificial Sequence: Synthetic oligonucleotide
ucgugugcacaucugguuu

SEQ ID NO: 612949 - RNA, 19 nt, Artificial Sequence
  Description of Artificial Sequence: Synthetic oligonucleotide
aagugaagccccacggugu

SEQ ID NO: 612950 - RNA, 19 nt, Artificial Sequence
  Description of Artificial Sequence: Synthetic oligonucleotide
agucgaucugagcugccug

SEQ ID NO: 612951 - RNA, 19 nt, Artificial Sequence
  Description of Artificial Sequence: Synthetic oligonucleotide
ucucacgccggacuccugu

SEQ ID NO: 612952 - RNA, 19 nt, Artificial Sequence
  Description of Artificial Sequence: Synthetic oligonucleotide
acaccguagcaaccccacc

SEQ ID NO: 612953 - RNA, 19 nt, Artificial Sequence
  Description of Artificial Sequence: Synthetic oligonucleotide
uugacuuggcuguccacuc

SEQ ID NO: 612954 - RNA, 19 nt, Artificial Sequence
  Description of Artificial Sequence: Synthetic oligonucleotide
uagguaaacugggugccug

SEQ ID NO: 612955 - RNA, 19 nt, Artificial Sequence
  Description of Artificial Sequence: Synthetic oligonucleotide
aaagccccgaccuccucau

SEQ ID NO: 612956 - RNA, 19 nt, Artificial Sequence
  Description of Artificial Sequence: Synthetic oligonucleotide
agggcauagugccaaacuu

SEQ ID NO: 612957 - RNA, 19 nt, Artificial Sequence
  Description of Artificial Sequence: Synthetic oligonucleotide
gagaugcccgaugagggug

SEQ ID NO: 612958 - RNA, 19 nt, Artificial Sequence
  Description of Artificial Sequence: Synthetic oligonucleotide
agguuucgugugcacaucu

SEQ ID NO: 612959 - RNA, 19 nt, Artificial Sequence
  Description of Artificial Sequence: Synthetic oligonucleotide
gacgacguaaaaccaccga

SEQ ID NO: 612960 - RNA, 19 nt, Artificial Sequence
  Description of Artificial Sequence: Synthetic oligonucleotide
ugggcucucacgccggacu

SEQ ID NO: 612961 - RNA, 19 nt, Artificial Sequence
  Description of Artificial Sequence: Synthetic oligonucleotide
ucgaugagcuccuguagua

SEQ ID NO: 612962 - RNA, 19 nt, Artificial Sequence
  Description of Artificial Sequence: Synthetic oligonucleotide
gauuccagagucguccauc

SEQ ID NO: 612963 - RNA, 19 nt, Artificial Sequence
  Description of Artificial Sequence: Synthetic oligonucleotide
ugauguugucccucgcauc

SEQ ID NO: 612964 - RNA, 19 nt, Artificial Sequence
  Description of Artificial Sequence: Synthetic oligonucleotide
uuacucgaggcaggcagcc

SEQ ID NO: 612965 - RNA, 19 nt, Artificial Sequence
  Description of Artificial Sequence: Synthetic oligonucleotide
ggugcaguggccucucaag

SEQ ID NO: 612966 - RNA, 19 nt, Artificial Sequence
  Description of Artificial Sequence: Synthetic oligonucleotide
cacgacaccguagcaaccc

SEQ ID NO: 612967 - RNA, 19 nt, Artificial Sequence
  Description of Artificial Sequence: Synthetic oligonucleotide
guauccgcaccucaugcuc

SEQ ID NO: 612968 - RNA, 19 nt, Artificial Sequence
  Description of Artificial Sequence: Synthetic oligonucleotide
gauaagguccuccgguugu

SEQ ID NO: 612969 - RNA, 19 nt, Artificial Sequence
  Description of Artificial Sequence: Synthetic oligonucleotide
agagaugcccgaugagggu

SEQ ID NO: 612970 - RNA, 19 nt, Artificial Sequence
  Description of Artificial Sequence: Synthetic oligonucleotide
ugggacaacugcacauccu

SEQ ID NO: 612971 - RNA, 19 nt, Artificial Sequence
  Description of Artificial Sequence: Synthetic oligonucleotide
cuggagaauagucuggugu

SEQ ID NO: 612972 - RNA, 19 nt, Artificial Sequence
  Description of Artificial Sequence: Synthetic oligonucleotide
uucgugugcacaucugguu

SEQ ID NO: 612973 - RNA, 19 nt, Artificial Sequence
  Description of Artificial Sequence: Synthetic oligonucleotide
gguagguaaacugggugcc

SEQ ID NO: 612974 - RNA, 19 nt, Artificial Sequence
  Description of Artificial Sequence: Synthetic oligonucleotide
ucacgacaccguagcaacc

SEQ ID NO: 612975 - RNA, 19 nt, Artificial Sequence
  Description of Artificial Sequence: Synthetic oligonucleotide
gggguuugaucaaaggacc

SEQ ID NO: 612976 - RNA, 19 nt, Artificial Sequence
  Description of Artificial Sequence: Synthetic oligonucleotide
guacccgauagagaugccc

SEQ ID NO: 612977 - RNA, 19 nt, Artificial Sequence
  Description of Artificial Sequence: Synthetic oligonucleotide
ucccuccuaaauucagcca

SEQ ID NO: 612978 - RNA, 19 nt, Artificial Sequence
  Description of Artificial Sequence: Synthetic oligonucleotide
uguucccguggucggagcu

SEQ ID NO: 612979 - RNA, 19 nt, Artificial Sequence
  Description of Artificial Sequence: Synthetic oligonucleotide
auacaggguccuuccuguc

SEQ ID NO: 612980 - RNA, 19 nt, Artificial Sequence
  Description of Artificial Sequence: Synthetic oligonucleotide
uugcggauucccagguaga

SEQ ID NO: 612981 - RNA, 19 nt, Artificial Sequence
  Description of Artificial Sequence: Synthetic oligonucleotide
cucggaugggcagcaaggg

SEQ ID NO: 612982 - RNA, 19 nt, Artificial Sequence
  Description of Artificial Sequence: Synthetic oligonucleotide
cucucgaaagaagcguuug

SEQ ID NO: 612983 - RNA, 19 nt, Artificial Sequence
  Description of Artificial Sequence: Synthetic oligonucleotide
augucuccccggcucaucu

SEQ ID NO: 612984 - RNA, 19 nt, Artificial Sequence
  Description of Artificial Sequence: Synthetic oligonucleotide
ggcgguuuacucgaggcag

SEQ ID NO: 612985 - RNA, 19 nt, Artificial Sequence
  Description of Artificial Sequence: Synthetic oligonucleotide
aaccaccgacugcugguca

SEQ ID NO: 612986 - RNA, 19 nt, Artificial Sequence
  Description of Artificial Sequence: Synthetic oligonucleotide
caagagucgcaggcuacgg

SEQ ID NO: 612987 - RNA, 19 nt, Artificial Sequence
  Description of Artificial Sequence: Synthetic oligonucleotide
accuagcagaggucacagg

SEQ ID NO: 612988 - RNA, 19 nt, Artificial Sequence
  Description of Artificial Sequence: Synthetic oligonucleotide
ugaugagacugaccuccaa

SEQ ID NO: 612989 - RNA, 19 nt, Artificial Sequence
  Description of Artificial Sequence: Synthetic oligonucleotide
ccgucuggaacacacuagg

SEQ ID NO: 612990 - RNA, 19 nt, Artificial Sequence
  Description of Artificial Sequence: Synthetic oligonucleotide
ugguuuagagcagcacacu

SEQ ID NO: 612991 - RNA, 19 nt, Artificial Sequence
  Description of Artificial Sequence: Synthetic oligonucleotide
cuggaacacacuaggugca

SEQ ID NO: 612992 - RNA, 19 nt, Artificial Sequence
  Description of Artificial Sequence: Synthetic oligonucleotide
cuggcaaggggugucuuug

SEQ ID NO: 612993 - RNA, 19 nt, Artificial Sequence
  Description of Artificial Sequence: Synthetic oligonucleotide
ugcaagcauccacaaugau

SEQ ID NO: 612994 - RNA, 19 nt, Artificial Sequence
  Description of Artificial Sequence: Synthetic oligonucleotide
gguuugaucaaaggaccug

SEQ ID NO: 612995 - RNA, 19 nt, Artificial Sequence
  Description of Artificial Sequence: Synthetic oligonucleotide
ggauaagguccuccgguug

SEQ ID NO: 612996 - RNA, 19 nt, Artificial Sequence
  Description of Artificial Sequence: Synthetic oligonucleotide
ccauccuagggcaaaagca

SEQ ID NO: 612997 - RNA, 19 nt, Artificial Sequence
  Description of Artificial Sequence: Synthetic oligonucleotide
agcacacuucuguacccga

SEQ ID NO: 612998 - RNA, 19 nt, Artificial Sequence
  Description of Artificial Sequence: Synthetic oligonucleotide
uccugugaaaaggcagcca

SEQ ID NO: 612999 - RNA, 19 nt, Artificial Sequence
  Description of Artificial Sequence: Synthetic oligonucleotide
uccgguuguguagccgccg

SEQ ID NO: 613000 - RNA, 19 nt, Artificial Sequence
  Description of Artificial Sequence: Synthetic oligonucleotide
uuauccgggagcugcuguu

SEQ ID NO: 613001 - RNA, 19 nt, Artificial Sequence
  Description of Artificial Sequence: Synthetic oligonucleotide
uguacccgauagagaugcc

SEQ ID NO: 613002 - RNA, 19 nt, Artificial Sequence
  Description of Artificial Sequence: Synthetic oligonucleotide
ucacgccggacuccuguga

SEQ ID NO: 613003 - RNA, 19 nt, Artificial Sequence
  Description of Artificial Sequence: Synthetic oligonucleotide
cugaggaccgcucuuugaa

SEQ ID NO: 613004 - RNA, 19 nt, Artificial Sequence
  Description of Artificial Sequence: Synthetic oligonucleotide
cauccccucggaugggcag

SEQ ID NO: 613005 - RNA, 19 nt, Artificial Sequence
  Description of Artificial Sequence: Synthetic oligonucleotide
uccuccgguuguguagccg

SEQ ID NO: 613006 - RNA, 19 nt, Artificial Sequence
  Description of Artificial Sequence: Synthetic oligonucleotide
agcuucacugaccgggcau

SEQ ID NO: 613007 - RNA, 19 nt, Artificial Sequence
  Description of Artificial Sequence: Synthetic oligonucleotide
augcaagcauccacaauga

SEQ ID NO: 613008 - RNA, 19 nt, Artificial Sequence
  Description of Artificial Sequence: Synthetic oligonucleotide
agcguuugagugugucagu

SEQ ID NO: 613009 - RNA, 19 nt, Artificial Sequence
  Description of Artificial Sequence: Synthetic oligonucleotide
agugaagccccacgguguu

SEQ ID NO: 613010 - RNA, 19 nt, Artificial Sequence
  Description of Artificial Sequence: Synthetic oligonucleotide
gagacagggguuugaucaa

SEQ ID NO: 613011 - RNA, 19 nt, Artificial Sequence
  Description of Artificial Sequence: Synthetic oligonucleotide
ccagagaccacucccguuc

SEQ ID NO: 613012 - RNA, 19 nt, Artificial Sequence
  Description of Artificial Sequence: Synthetic oligonucleotide
agaguggcuccacuaucau

SEQ ID NO: 613013 - RNA, 19 nt, Artificial Sequence
  Description of Artificial Sequence: Synthetic oligonucleotide
gagucgcaggcuacgggcc

SEQ ID NO: 613014 - RNA, 19 nt, Artificial Sequence
  Description of Artificial Sequence: Synthetic oligonucleotide
guuuuaacuucuugcggau

SEQ ID NO: 613015 - RNA, 19 nt, Artificial Sequence
  Description of Artificial Sequence: Synthetic oligonucleotide
cucuccguguucaagaauu

SEQ ID NO: 613016 - RNA, 19 nt, Artificial Sequence
  Description of Artificial Sequence: Synthetic oligonucleotide
cuucacugaccgggcaucc

SEQ ID NO: 613017 - RNA, 19 nt, Artificial Sequence
  Description of Artificial Sequence: Synthetic oligonucleotide
agcucuccguguucaagaa

SEQ ID NO: 613018 - RNA, 19 nt, Artificial Sequence
  Description of Artificial Sequence: Synthetic oligonucleotide
gucccucgcaucuccagca

SEQ ID NO: 613019 - RNA, 19 nt, Artificial Sequence
  Description of Artificial Sequence: Synthetic oligonucleotide
acccgauagagaugcccga

SEQ ID NO: 613020 - RNA, 19 nt, Artificial Sequence
  Description of Artificial Sequence: Synthetic oligonucleotide
auguagccgucgaugagcu

SEQ ID NO: 613021 - RNA, 19 nt, Artificial Sequence
  Description of Artificial Sequence: Synthetic oligonucleotide
uagccgucgaugagcuccu

SEQ ID NO: 613022 - RNA, 19 nt, Artificial Sequence
  Description of Artificial Sequence: Synthetic oligonucleotide
cacaaugauagggaugucu

SEQ ID NO: 613023 - RNA, 19 nt, Artificial Sequence
  Description of Artificial Sequence: Synthetic oligonucleotide
aaguguucccguggucgga

SEQ ID NO: 613024 - RNA, 19 nt, Artificial Sequence
  Description of Artificial Sequence: Synthetic oligonucleotide
ugguaagcucagggaaagc

SEQ ID NO: 613025 - RNA, 19 nt, Artificial Sequence
  Description of Artificial Sequence: Synthetic oligonucleotide
cagagucguccauccuagg

SEQ ID NO: 613026 - RNA, 19 nt, Artificial Sequence
  Description of Artificial Sequence: Synthetic oligonucleotide
cuguaguauccgcaccuca

SEQ ID NO: 613027 - RNA, 19 nt, Artificial Sequence
  Description of Artificial Sequence: Synthetic oligonucleotide
ugucucuaccaggaccaaa

SEQ ID NO: 613028 - RNA, 19 nt, Artificial Sequence
  Description of Artificial Sequence: Synthetic oligonucleotide
ugucuccccggcucaucug

SEQ ID NO: 613029 - RNA, 19 nt, Artificial Sequence
  Description of Artificial Sequence: Synthetic oligonucleotide
ggaguuuggguagguaaac

SEQ ID NO: 613030 - RNA, 19 nt, Artificial Sequence
  Description of Artificial Sequence: Synthetic oligonucleotide
ccuccgguuguguagccgc

SEQ ID NO: 613031 - RNA, 19 nt, Artificial Sequence
  Description of Artificial Sequence: Synthetic oligonucleotide
uaagguccuccgguugugu

SEQ ID NO: 613032 - RNA, 19 nt, Artificial Sequence
  Description of Artificial Sequence: Synthetic oligonucleotide
acccacaagucugucccug

SEQ ID NO: 613033 - RNA, 19 nt, Artificial Sequence
  Description of Artificial Sequence: Synthetic oligonucleotide
gugacacaauuauccggga

SEQ ID NO: 613034 - RNA, 19 nt, Artificial Sequence
  Description of Artificial Sequence: Synthetic oligonucleotide
cuccguguucaagaauuuc

SEQ ID NO: 613035 - RNA, 19 nt, Artificial Sequence
  Description of Artificial Sequence: Synthetic oligonucleotide
guaaacugggugccugugu

SEQ ID NO: 613036 - RNA, 19 nt, Artificial Sequence
  Description of Artificial Sequence: Synthetic oligonucleotide
ccuccuaaauucagccaag

SEQ ID NO: 613037 - RNA, 19 nt, Artificial Sequence
  Description of Artificial Sequence: Synthetic oligonucleotide
auguugucccucgcaucuc

SEQ ID NO: 613038 - RNA, 19 nt, Artificial Sequence
  Description of Artificial Sequence: Synthetic oligonucleotide
aaaggaccuguggcuggca

SEQ ID NO: 613039 - RNA, 19 nt, Artificial Sequence
  Description of Artificial Sequence: Synthetic oligonucleotide
acaagcgagguggcuccuc

SEQ ID NO: 613040 - RNA, 19 nt, Artificial Sequence
  Description of Artificial Sequence: Synthetic oligonucleotide
ccuugguaagcucagggaa

SEQ ID NO: 613041 - RNA, 19 nt, Artificial Sequence
  Description of Artificial Sequence: Synthetic oligonucleotide
cucacgccggacuccugug

SEQ ID NO: 613042 - RNA, 19 nt, Artificial Sequence
  Description of Artificial Sequence: Synthetic oligonucleotide
accaccgacugcuggucau

SEQ ID NO: 613043 - RNA, 19 nt, Artificial Sequence
  Description of Artificial Sequence: Synthetic oligonucleotide
gcaagcauccacaaugaua

SEQ ID NO: 613044 - RNA, 19 nt, Artificial Sequence
  Description of Artificial Sequence: Synthetic oligonucleotide
ggaggcuagguuggaagug

SEQ ID NO: 613045 - RNA, 19 nt, Artificial Sequence
  Description of Artificial Sequence: Synthetic oligonucleotide
gaggcuagguuggaagugu

SEQ ID NO: 613046 - RNA, 19 nt, Artificial Sequence
  Description of Artificial Sequence: Synthetic oligonucleotide
gguaaacugggugccugug

SEQ ID NO: 613047 - RNA, 19 nt, Artificial Sequence
  Description of Artificial Sequence: Synthetic oligonucleotide
aggcuacgggcccgagcac

SEQ ID NO: 613048 - RNA, 19 nt, Artificial Sequence
  Description of Artificial Sequence: Synthetic oligonucleotide
cugcaaagucuagccgacc

SEQ ID NO: 613049 - RNA, 19 nt, Artificial Sequence
  Description of Artificial Sequence: Synthetic oligonucleotide
agcucucgaaagaagcguu

SEQ ID NO: 613050 - RNA, 19 nt, Artificial Sequence
  Description of Artificial Sequence: Synthetic oligonucleotide
cuccuaaauucagccaaga

SEQ ID NO: 613051 - RNA, 19 nt, Artificial Sequence
  Description of Artificial Sequence: Synthetic oligonucleotide
ggcuguauuccaugcugca

SEQ ID NO: 613052 - RNA, 19 nt, Artificial Sequence
  Description of Artificial Sequence: Synthetic oligonucleotide
caaccuagcagaggucaca

SEQ ID NO: 613053 - RNA, 19 nt, Artificial Sequence
  Description of Artificial Sequence: Synthetic oligonucleotide
cacugaccgggcaucccuc

SEQ ID NO: 613054 - RNA, 19 nt, Artificial Sequence
  Description of Artificial Sequence: Synthetic oligonucleotide
guagccgccgcagggucug

SEQ ID NO: 613055 - RNA, 19 nt, Artificial Sequence
  Description of Artificial Sequence: Synthetic oligonucleotide
gaacauggauaagguccuc

SEQ ID NO: 613056 - RNA, 19 nt, Artificial Sequence
  Description of Artificial Sequence: Synthetic oligonucleotide
cacuucuguacccgauaga

SEQ ID NO: 613057 - RNA, 19 nt, Artificial Sequence
  Description of Artificial Sequence: Synthetic oligonucleotide
gaccuccaagucgaucuga

SEQ ID NO: 613058 - RNA, 19 nt, Artificial Sequence
  Description of Artificial Sequence: Synthetic oligonucleotide
augcccgaugaggguggcc

SEQ ID NO: 613059 - RNA, 19 nt, Artificial Sequence
  Description of Artificial Sequence: Synthetic oligonucleotide
cccuccuaaauucagccaa

SEQ ID NO: 613060 - RNA, 19 nt, Artificial Sequence
  Description of Artificial Sequence: Synthetic oligonucleotide
cagcaaccuagcagagguc

SEQ ID NO: 613061 - RNA, 19 nt, Artificial Sequence
  Description of Artificial Sequence: Synthetic oligonucleotide
caucuugcuccuccacaga

SEQ ID NO: 613062 - RNA, 19 nt, Artificial Sequence
  Description of Artificial Sequence: Synthetic oligonucleotide
gguuucgugugcacaucug

SEQ ID NO: 613063 - RNA, 19 nt, Artificial Sequence
  Description of Artificial Sequence: Synthetic oligonucleotide
gcggcuucccaacaagcga

SEQ ID NO: 613064 - RNA, 19 nt, Artificial Sequence
  Description of Artificial Sequence: Synthetic oligonucleotide
gcugcaaagucuagccgac

SEQ ID NO: 613065 - RNA, 19 nt, Artificial Sequence
  Description of Artificial Sequence: Synthetic oligonucleotide
uacucgaggcaggcagcca

SEQ ID NO: 613066 - RNA, 19 nt, Artificial Sequence
  Description of Artificial Sequence: Synthetic oligonucleotide
cauugcagggccugcucua

SEQ ID NO: 613067 - RNA, 19 nt, Artificial Sequence
  Description of Artificial Sequence: Synthetic oligonucleotide
gaugucuccccggcucauc

SEQ ID NO: 613068 - RNA, 19 nt, Artificial Sequence
  Description of Artificial Sequence: Synthetic oligonucleotide
guuggaaguguugggaguu

SEQ ID NO: 613069 - RNA, 19 nt, Artificial Sequence
  Description of Artificial Sequence: Synthetic oligonucleotide
gguuggaaguguugggagu

SEQ ID NO: 613070 - RNA, 19 nt, Artificial Sequence
  Description of Artificial Sequence: Synthetic oligonucleotide
cugguuuagagcucuucuu

SEQ ID NO: 613071 - RNA, 19 nt, Artificial Sequence
  Description of Artificial Sequence: Synthetic oligonucleotide
ccacccgugggcucucacg

SEQ ID NO: 613072 - RNA, 19 nt, Artificial Sequence
  Description of Artificial Sequence: Synthetic oligonucleotide
cccgugggcucucacgccg

SEQ ID NO: 613073 - RNA, 19 nt, Artificial Sequence
  Description of Artificial Sequence: Synthetic oligonucleotide
gcgguuuacucgaggcagg

SEQ ID NO: 613074 - RNA, 19 nt, Artificial Sequence
  Description of Artificial Sequence: Synthetic oligonucleotide
gcggccguguccuugguaa

SEQ ID NO: 613075 - RNA, 19 nt, Artificial Sequence
  Description of Artificial Sequence: Synthetic oligonucleotide
ucgaggcaggcagccaauc

SEQ ID NO: 613076 - RNA, 19 nt, Artificial Sequence
  Description of Artificial Sequence: Synthetic oligonucleotide
gguuuagagcagcacacuu

SEQ ID NO: 613077 - RNA, 19 nt, Artificial Sequence
  Description of Artificial Sequence: Synthetic oligonucleotide
cagccgaagcccaugcugu

SEQ ID NO: 613078 - RNA, 19 nt, Artificial Sequence
  Description of Artificial Sequence: Synthetic oligonucleotide
gaugcccgaugaggguggc

SEQ ID NO: 613079 - RNA, 19 nt, Artificial Sequence
  Description of Artificial Sequence: Synthetic oligonucleotide
cucuccccgcccauccguc

SEQ ID NO: 613080 - RNA, 19 nt, Artificial Sequence
  Description of Artificial Sequence: Synthetic oligonucleotide
cuccccggcucaucugcug

SEQ ID NO: 613081 - RNA, 19 nt, Artificial Sequence
  Description of Artificial Sequence: Synthetic oligonucleotide
cccuuuccgauauacaccu

SEQ ID NO: 613082 - RNA, 19 nt, Artificial Sequence
  Description of Artificial Sequence: Synthetic oligonucleotide
acugggugccuguguugaa

SEQ ID NO: 613083 - RNA, 19 nt, Artificial Sequence
  Description of Artificial Sequence: Synthetic oligonucleotide
cagguuucgugugcacauc

SEQ ID NO: 613084 - RNA, 19 nt, Artificial Sequence
  Description of Artificial Sequence: Synthetic oligonucleotide
ccguguucaagaauuucaa

SEQ ID NO: 613085 - RNA, 19 nt, Artificial Sequence
  Description of Artificial Sequence: Synthetic oligonucleotide
cgauagagaugcccgauga

SEQ ID NO: 613086 - RNA, 19 nt, Artificial Sequence
  Description of Artificial Sequence: Synthetic oligonucleotide
cuccccgcccauccgucug

SEQ ID NO: 613087 - RNA, 19 nt, Artificial Sequence
  Description of Artificial Sequence: Synthetic oligonucleotide
gcggauucccagguagacc

SEQ ID NO: 613088 - RNA, 19 nt, Artificial Sequence
  Description of Artificial Sequence: Synthetic oligonucleotide
acucccguucugguuuaga

SEQ ID NO: 613089 - RNA, 19 nt, Artificial Sequence
  Description of Artificial Sequence: Synthetic oligonucleotide
gugaugagacugaccucca

SEQ ID NO: 613090 - RNA, 19 nt, Artificial Sequence
  Description of Artificial Sequence: Synthetic oligonucleotide
gcgagguggcuccucacga

SEQ ID NO: 613091 - RNA, 19 nt, Artificial Sequence
  Description of Artificial Sequence: Synthetic oligonucleotide
guccuccgguuguguagcc

SEQ ID NO: 613092 - RNA, 19 nt, Artificial Sequence
  Description of Artificial Sequence: Synthetic oligonucleotide
guggccucucaagcucucc

SEQ ID NO: 613093 - RNA, 19 nt, Artificial Sequence
  Description of Artificial Sequence: Synthetic oligonucleotide
ggccguguccuugguaagc

SEQ ID NO: 613094 - RNA, 19 nt, Artificial Sequence
  Description of Artificial Sequence: Synthetic oligonucleotide
gggaugucuccccggcuca

SEQ ID NO: 613095 - RNA, 19 nt, Artificial Sequence
  Description of Artificial Sequence: Synthetic oligonucleotide
cacgccggacuccugugaa

SEQ ID NO: 613096 - RNA, 19 nt, Artificial Sequence
  Description of Artificial Sequence: Synthetic oligonucleotide
ggcaucccuccuaaauuca

SEQ ID NO: 613097 - RNA, 19 nt, Artificial Sequence
  Description of Artificial Sequence: Synthetic oligonucleotide
ccgccgcagggucugauug

SEQ ID NO: 613098 - RNA, 19 nt, Artificial Sequence
  Description of Artificial Sequence: Synthetic oligonucleotide
caaccccacccgugggcuc

SEQ ID NO: 613099 - RNA, 19 nt, Artificial Sequence
  Description of Artificial Sequence: Synthetic oligonucleotide
guucggcgguuuacucgag

SEQ ID NO: 613100 - RNA, 19 nt, Artificial Sequence
  Description of Artificial Sequence: Synthetic oligonucleotide
gcaaccuagcagaggucac

SEQ ID NO: 613101 - RNA, 19 nt, Artificial Sequence
  Description of Artificial Sequence: Synthetic oligonucleotide
gguuuacucgaggcaggca

SEQ ID NO: 613102 - RNA, 19 nt, Artificial Sequence
  Description of Artificial Sequence: Synthetic oligonucleotide
ccaguguucggcgguuuac

SEQ ID NO: 613103 - RNA, 19 nt, Artificial Sequence
  Description of Artificial Sequence: Synthetic oligonucleotide
ggaacacacuaggugcaaa

SEQ ID NO: 613104 - RNA, 19 nt, Artificial Sequence
  Description of Artificial Sequence: Synthetic oligonucleotide
caccgacugcuggucauca

SEQ ID NO: 613105 - RNA, 19 nt, Artificial Sequence
  Description of Artificial Sequence: Synthetic oligonucleotide
cauccgucuggaacacacu

SEQ ID NO: 613106 - RNA, 19 nt, Artificial Sequence
  Description of Artificial Sequence: Synthetic oligonucleotide
cuacgggcccgagcacccc

SEQ ID NO: 613107 - RNA, 19 nt, Artificial Sequence
  Description of Artificial Sequence: Synthetic oligonucleotide
cucucacgccggacuccug

SEQ ID NO: 613108 - RNA, 19 nt, Artificial Sequence
  Description of Artificial Sequence: Synthetic oligonucleotide
gccaagagucgcaggcuac

SEQ ID NO: 613109 - RNA, 19 nt, Artificial Sequence
  Description of Artificial Sequence: Synthetic oligonucleotide
gcguuugagugugucagua

SEQ ID NO: 613110 - RNA, 19 nt, Artificial Sequence
  Description of Artificial Sequence: Synthetic oligonucleotide
gaccacucccguucugguu

SEQ ID NO: 613111 - RNA, 19 nt, Artificial Sequence
  Description of Artificial Sequence: Synthetic oligonucleotide
ccuguaguauccgcaccuc

SEQ ID NO: 613112 - RNA, 19 nt, Artificial Sequence
  Description of Artificial Sequence: Synthetic oligonucleotide
cgacguaaaaccaccgacu

SEQ ID NO: 613113 - RNA, 19 nt, Artificial Sequence
  Description of Artificial Sequence: Synthetic oligonucleotide
aggcuagguuggaaguguu

SEQ ID NO: 613114 - RNA, 19 nt, Artificial Sequence
  Description of Artificial Sequence: Synthetic oligonucleotide
caguguucggcgguuuacu

SEQ ID NO: 613115 - RNA, 19 nt, Artificial Sequence
  Description of Artificial Sequence: Synthetic oligonucleotide
ccccgaccuccucauacac

SEQ ID NO: 613116 - RNA, 19 nt, Artificial Sequence
  Description of Artificial Sequence: Synthetic oligonucleotide
cacuaucauccccucggau

SEQ ID NO: 613117 - RNA, 19 nt, Artificial Sequence
  Description of Artificial Sequence: Synthetic oligonucleotide
gucaugugagaggcuggcu

SEQ ID NO: 613118 - RNA, 19 nt, Artificial Sequence
  Description of Artificial Sequence: Synthetic oligonucleotide
cagagaccacucccguucu

SEQ ID NO: 613119 - RNA, 19 nt, Artificial Sequence
  Description of Artificial Sequence: Synthetic oligonucleotide
gaggugcaucuuauccagu

SEQ ID NO: 613120 - RNA, 19 nt, Artificial Sequence
  Description of Artificial Sequence: Synthetic oligonucleotide
ggccagguuucgugugcac

SEQ ID NO: 613121 - RNA, 19 nt, Artificial Sequence
  Description of Artificial Sequence: Synthetic oligonucleotide
gcgugugccauggagacuu

SEQ ID NO: 613122 - RNA, 19 nt, Artificial Sequence
  Description of Artificial Sequence: Synthetic oligonucleotide
ccucacgacaccguagcaa

SEQ ID NO: 613123 - RNA, 19 nt, Artificial Sequence
  Description of Artificial Sequence: Synthetic oligonucleotide
ccgugggcucucacgccgg

SEQ ID NO: 613124 - RNA, 19 nt, Artificial Sequence
  Description of Artificial Sequence: Synthetic oligonucleotide
gugggcucucacgccggac

SEQ ID NO: 613125 - RNA, 19 nt, Artificial Sequence
  Description of Artificial Sequence: Synthetic oligonucleotide
ccguucugguuuagagcuc

SEQ ID NO: 613126 - RNA, 19 nt, Artificial Sequence
  Description of Artificial Sequence: Synthetic oligonucleotide
gggugucuuugacuuggcu

SEQ ID NO: 613127 - RNA, 19 nt, Artificial Sequence
  Description of Artificial Sequence: Synthetic oligonucleotide
ccacuaucauccccucgga

SEQ ID NO: 613128 - RNA, 19 nt, Artificial Sequence
  Description of Artificial Sequence: Synthetic oligonucleotide
gcaaagucuagccgaccuu

SEQ ID NO: 613129 - RNA, 19 nt, Artificial Sequence
  Description of Artificial Sequence: Synthetic oligonucleotide
agccagcgugugccaugga

SEQ ID NO: 613130 - RNA, 19 nt, Artificial Sequence
  Description of Artificial Sequence: Synthetic oligonucleotide
gucguccauccuagggcaa

SEQ ID NO: 613131 - RNA, 19 nt, Artificial Sequence
  Description of Artificial Sequence: Synthetic oligonucleotide
cucgaggcaggcagccaau

SEQ ID NO: 613132 - RNA, 19 nt, Artificial Sequence
  Description of Artificial Sequence: Synthetic oligonucleotide
accccacccgugggcucuc

SEQ ID NO: 613133 - RNA, 19 nt, Artificial Sequence
  Description of Artificial Sequence: Synthetic oligonucleotide
cgacaccguagcaacccca

SEQ ID NO: 613134 - RNA, 19 nt, Artificial Sequence
  Description of Artificial Sequence: Synthetic oligonucleotide
gugccugaggaccgcucuu

SEQ ID NO: 613135 - RNA, 19 nt, Artificial Sequence
  Description of Artificial Sequence: Synthetic oligonucleotide
gcuggcaaggggugucuuu

SEQ ID NO: 613136 - RNA, 19 nt, Artificial Sequence
  Description of Artificial Sequence: Synthetic oligonucleotide
guucccguggucggagcuu

SEQ ID NO: 613137 - RNA, 19 nt, Artificial Sequence
  Description of Artificial Sequence: Synthetic oligonucleotide
ccaugguaccauacuggau

SEQ ID NO: 613138 - RNA, 19 nt, Artificial Sequence
  Description of Artificial Sequence: Synthetic oligonucleotide
agccgccgcagggucugau

SEQ ID NO: 613139 - RNA, 19 nt, Artificial Sequence
  Description of Artificial Sequence: Synthetic oligonucleotide
cggccguguccuugguaag

SEQ ID NO: 613140 - RNA, 19 nt, Artificial Sequence
  Description of Artificial Sequence: Synthetic oligonucleotide
cggcgguuuacucgaggca

SEQ ID NO: 613141 - RNA, 19 nt, Artificial Sequence
  Description of Artificial Sequence: Synthetic oligonucleotide
ggcggccguguccuuggua

SEQ ID NO: 613142 - RNA, 19 nt, Artificial Sequence
  Description of Artificial Sequence: Synthetic oligonucleotide
gacugaccuccaagucgau

SEQ ID NO: 613143 - RNA, 19 nt, Artificial Sequence
  Description of Artificial Sequence: Synthetic oligonucleotide
cccacccgugggcucucac

SEQ ID NO: 613144 - RNA, 19 nt, Artificial Sequence
  Description of Artificial Sequence: Synthetic oligonucleotide
gccccacgguguuggaggu

SEQ ID NO: 613145 - RNA, 19 nt, Artificial Sequence
  Description of Artificial Sequence: Synthetic oligonucleotide
cgccggacuccugugaaaa

SEQ ID NO: 613146 - RNA, 19 nt, Artificial Sequence
  Description of Artificial Sequence: Synthetic oligonucleotide
ccacaagucugucccugau

SEQ ID NO: 613147 - RNA, 19 nt, Artificial Sequence
  Description of Artificial Sequence: Synthetic oligonucleotide
ccgaagcccaugcuguguu

SEQ ID NO: 613148 - RNA, 19 nt, Artificial Sequence
  Description of Artificial Sequence: Synthetic oligonucleotide
cccacgguguuggagguuu

SEQ ID NO: 613149 - RNA, 19 nt, Artificial Sequence
  Description of Artificial Sequence: Synthetic oligonucleotide
ccacucccguucugguuua

SEQ ID NO: 613150 - RNA, 19 nt, Artificial Sequence
  Description of Artificial Sequence: Synthetic oligonucleotide
cccgauagagaugcccgau

SEQ ID NO: 613151 - RNA, 19 nt, Artificial Sequence
  Description of Artificial Sequence: Synthetic oligonucleotide
ccccgugccugaggaccgc

SEQ ID NO: 613152 - RNA, 19 nt, Artificial Sequence
  Description of Artificial Sequence: Synthetic oligonucleotide
ccguagcaaccccacccgu

SEQ ID NO: 613153 - RNA, 19 nt, Artificial Sequence
  Description of Artificial Sequence: Synthetic oligonucleotide
gccgccgcagggucugauu

SEQ ID NO: 613154 - RNA, 19 nt, Artificial Sequence
  Description of Artificial Sequence: Synthetic oligonucleotide
ggccaguguucggcgguuu

SEQ ID NO: 613155 - RNA, 19 nt, Artificial Sequence
  Description of Artificial Sequence: Synthetic oligonucleotide
cgcaggcuacgggcccgag

SEQ ID NO: 613156 - RNA, 19 nt, Artificial Sequence
  Description of Artificial Sequence: Synthetic oligonucleotide
cgugugccauggagacuuu

SEQ ID NO: 613157 - RNA, 19 nt, Artificial Sequence
  Description of Artificial Sequence: Synthetic oligonucleotide
ccccacccgugggcucuca

SEQ ID NO: 613158 - RNA, 19 nt, Artificial Sequence
  Description of Artificial Sequence: Synthetic oligonucleotide
ccccucggaugggcagcaa

SEQ ID NO: 613159 - RNA, 19 nt, Artificial Sequence
  Description of Artificial Sequence: Synthetic oligonucleotide
ccccacgguguuggagguu

SEQ ID NO: 613160 - RNA, 19 nt, Artificial Sequence
  Description of Artificial Sequence: Synthetic oligonucleotide
uagauuaacauaauaaucg

SEQ ID NO: 613161 - RNA, 19 nt, Artificial Sequence
  Description of Artificial Sequence: Synthetic oligonucleotide
aaauuuggcauauagaccu

SEQ ID NO: 613162 - RNA, 19 nt, Artificial Sequence
  Description of Artificial Sequence: Synthetic oligonucleotide
aaaaugaggugacuaaccc

SEQ ID NO: 613163 - RNA, 19 nt, Artificial Sequence
  Description of Artificial Sequence: Synthetic oligonucleotide
aaacuuacccuuuuauucc

SEQ ID NO: 613164 - RNA, 19 nt, Artificial Sequence
  Description of Artificial Sequence: Synthetic oligonucleotide
aaauucagggcccaaaguc

SEQ ID NO: 613165 - RNA, 19 nt, Artificial Sequence
  Description of Artificial Sequence: Synthetic oligonucleotide
gauucaagcauauaaauga

SEQ ID NO: 613166 - RNA, 19 nt, Artificial Sequence
  Description of Artificial Sequence: Synthetic oligonucleotide
aaccuuuuaauuuaaggcu

SEQ ID NO: 613167 - RNA, 19 nt, Artificial Sequence
  Description of Artificial Sequence: Synthetic oligonucleotide
ucacauaggacuucggucg

SEQ ID NO: 613168 - RNA, 19 nt, Artificial Sequence
  Description of Artificial Sequence: Synthetic oligonucleotide
agugcuagugaucaacucc

SEQ ID NO: 613169 - RNA, 19 nt, Artificial Sequence
  Description of Artificial Sequence: Synthetic oligonucleotide
ugucuuacuggaaaugucg

SEQ ID NO: 613170 - RNA, 19 nt, Artificial Sequence
  Description of Artificial Sequence: Synthetic oligonucleotide
auagucuucacauaggacu

SEQ ID NO: 613171 - RNA, 19 nt, Artificial Sequence
  Description of Artificial Sequence: Synthetic oligonucleotide
aaguauucuaaauugaauu

SEQ ID NO: 613172 - RNA, 19 nt, Artificial Sequence
  Description of Artificial Sequence: Synthetic oligonucleotide
uagacuuaacccaaaaggc

SEQ ID NO: 613173 - RNA, 19 nt, Artificial Sequence
  Description of Artificial Sequence: Synthetic oligonucleotide
aaucggaagacuuuugugu

SEQ ID NO: 613174 - RNA, 19 nt, Artificial Sequence
  Description of Artificial Sequence: Synthetic oligonucleotide
aauacuuggauuaacuaug

SEQ ID NO: 613175 - RNA, 19 nt, Artificial Sequence
  Description of Artificial Sequence: Synthetic oligonucleotide
uuuaaggcuacuauuaaau

SEQ ID NO: 613176 - RNA, 19 nt, Artificial Sequence
  Description of Artificial Sequence: Synthetic oligonucleotide
uguuaguuguuagagauag

SEQ ID NO: 613177 - RNA, 19 nt, Artificial Sequence
  Description of Artificial Sequence: Synthetic oligonucleotide
guuauaaauucaauggugg

SEQ ID NO: 613178 - RNA, 19 nt, Artificial Sequence
  Description of Artificial Sequence: Synthetic oligonucleotide
aaaacugugagaaaguuau

SEQ ID NO: 613179 - RNA, 19 nt, Artificial Sequence
  Description of Artificial Sequence: Synthetic oligonucleotide
ucaagcauauaaaugauua

SEQ ID NO: 613180 - RNA, 19 nt, Artificial Sequence
  Description of Artificial Sequence: Synthetic oligonucleotide
ugauucaagcauauaaaug

SEQ ID NO: 613181 - RNA, 19 nt, Artificial Sequence
  Description of Artificial Sequence: Synthetic oligonucleotide
uaaaaugaggugacuaacc

SEQ ID NO: 613182 - RNA, 19 nt, Artificial Sequence
  Description of Artificial Sequence: Synthetic oligonucleotide
aauucagggcccaaagucc

SEQ ID NO: 613183 - RNA, 19 nt, Artificial Sequence
  Description of Artificial Sequence: Synthetic oligonucleotide
ugacaguuaauuaacugug

SEQ ID NO: 613184 - RNA, 19 nt, Artificial Sequence
  Description of Artificial Sequence: Synthetic oligonucleotide
agcauuuaagaugacagac

SEQ ID NO: 613185 - RNA, 19 nt, Artificial Sequence
  Description of Artificial Sequence: Synthetic oligonucleotide
uuugaguacaccagaagga

SEQ ID NO: 613186 - RNA, 19 nt, Artificial Sequence
  Description of Artificial Sequence: Synthetic oligonucleotide
guuuccauuggauaugcgg

SEQ ID NO: 613187 - RNA, 19 nt, Artificial Sequence
  Description of Artificial Sequence: Synthetic oligonucleotide
acuuaguuaaauuuggcau

SEQ ID NO: 613188 - RNA, 19 nt, Artificial Sequence
  Description of Artificial Sequence: Synthetic oligonucleotide
uuacuagaaggcaacaugu

SEQ ID NO: 613189 - RNA, 19 nt, Artificial Sequence
  Description of Artificial Sequence: Synthetic oligonucleotide
cuaauugguuuaaaugugg

SEQ ID NO: 613190 - RNA, 19 nt, Artificial Sequence
  Description of Artificial Sequence: Synthetic oligonucleotide
aucuauacaggaucgggcg

SEQ ID NO: 613191 - RNA, 19 nt, Artificial Sequence
  Description of Artificial Sequence: Synthetic oligonucleotide
uuuccauuggauaugcgga

SEQ ID NO: 613192 - RNA, 19 nt, Artificial Sequence
  Description of Artificial Sequence: Synthetic oligonucleotide
ucuacuaaaaugaggugac

SEQ ID NO: 613193 - RNA, 19 nt, Artificial Sequence
  Description of Artificial Sequence: Synthetic oligonucleotide
aaccagaggaguuagugcu

SEQ ID NO: 613194 - RNA, 19 nt, Artificial Sequence
  Description of Artificial Sequence: Synthetic oligonucleotide
uguuagagauaguaaauac

SEQ ID NO: 613195 - RNA, 19 nt, Artificial Sequence
  Description of Artificial Sequence: Synthetic oligonucleotide
auacguuaguuguucaugg

SEQ ID NO: 613196 - RNA, 19 nt, Artificial Sequence
  Description of Artificial Sequence: Synthetic oligonucleotide
aaugucgugagagaacauc

SEQ ID NO: 613197 - RNA, 19 nt, Artificial Sequence
  Description of Artificial Sequence: Synthetic oligonucleotide
augaaauauucuaaacucc

SEQ ID NO: 613198 - RNA, 19 nt, Artificial Sequence
  Description of Artificial Sequence: Synthetic oligonucleotide
cauucuagcucauuucugg

SEQ ID NO: 613199 - RNA, 19 nt, Artificial Sequence
  Description of Artificial Sequence: Synthetic oligonucleotide
aagcauauaaaugauuaga

SEQ ID NO: 613200 - RNA, 19 nt, Artificial Sequence
  Description of Artificial Sequence: Synthetic oligonucleotide
aaaucggaagacuuuugug

SEQ ID NO: 613201 - RNA, 19 nt, Artificial Sequence
  Description of Artificial Sequence: Synthetic oligonucleotide
ugcaauagcccaaaucacc

SEQ ID NO: 613202 - RNA, 19 nt, Artificial Sequence
  Description of Artificial Sequence: Synthetic oligonucleotide
ggugacuaacccuugaugg

SEQ ID NO: 613203 - RNA, 19 nt, Artificial Sequence
  Description of Artificial Sequence: Synthetic oligonucleotide
ugauggguauuucagugag

SEQ ID NO: 613204 - RNA, 19 nt, Artificial Sequence
  Description of Artificial Sequence: Synthetic oligonucleotide
aacuagcaaaguuagguaa

SEQ ID NO: 613205 - RNA, 19 nt, Artificial Sequence
  Description of Artificial Sequence: Synthetic oligonucleotide
aagguuguguccaagcagg

SEQ ID NO: 613206 - RNA, 19 nt, Artificial Sequence
  Description of Artificial Sequence: Synthetic oligonucleotide
aguuuaagcaccguauacg

SEQ ID NO: 613207 - RNA, 19 nt, Artificial Sequence
  Description of Artificial Sequence: Synthetic oligonucleotide
ucugcguacacguaaugcc

SEQ ID NO: 613208 - RNA, 19 nt, Artificial Sequence
  Description of Artificial Sequence: Synthetic oligonucleotide
aaacauagaggaguacuuc

SEQ ID NO: 613209 - RNA, 19 nt, Artificial Sequence
  Description of Artificial Sequence: Synthetic oligonucleotide
gcuacuauuaaaucggaag

SEQ ID NO: 613210 - RNA, 19 nt, Artificial Sequence
  Description of Artificial Sequence: Synthetic oligonucleotide
uuaagcaccguauacguua

SEQ ID NO: 613211 - RNA, 19 nt, Artificial Sequence
  Description of Artificial Sequence: Synthetic oligonucleotide
uaagcagcggccaggaacc

SEQ ID NO: 613212 - RNA, 19 nt, Artificial Sequence
  Description of Artificial Sequence: Synthetic oligonucleotide
ucagugaguaagcagcggc

SEQ ID NO: 613213 - RNA, 19 nt, Artificial Sequence
  Description of Artificial Sequence: Synthetic oligonucleotide
cugucagccauccugaccc

SEQ ID NO: 613214 - RNA, 19 nt, Artificial Sequence
  Description of Artificial Sequence: Synthetic oligonucleotide
uagugaucaacucccaucu

SEQ ID NO: 613215 - RNA, 19 nt, Artificial Sequence
  Description of Artificial Sequence: Synthetic oligonucleotide
ucgacuacuucuuccaaag

SEQ ID NO: 613216 - RNA, 19 nt, Artificial Sequence
  Description of Artificial Sequence: Synthetic oligonucleotide
agauuaacauaauaaucga

SEQ ID NO: 613217 - RNA, 19 nt, Artificial Sequence
  Description of Artificial Sequence: Synthetic oligonucleotide
uaaaucggaagacuuuugu

SEQ ID NO: 613218 - RNA, 19 nt, Artificial Sequence
  Description of Artificial Sequence: Synthetic oligonucleotide
uaauccaguuuaagcaccg

SEQ ID NO: 613219 - RNA, 19 nt, Artificial Sequence
  Description of Artificial Sequence: Synthetic oligonucleotide
ucggaagccacccugucag

SEQ ID NO: 613220 - RNA, 19 nt, Artificial Sequence
  Description of Artificial Sequence: Synthetic oligonucleotide
acuuggauuaacuauguua

SEQ ID NO: 613221 - RNA, 19 nt, Artificial Sequence
  Description of Artificial Sequence: Synthetic oligonucleotide
uuaguuguuagagauagua

SEQ ID NO: 613222 - RNA, 19 nt, Artificial Sequence
  Description of Artificial Sequence: Synthetic oligonucleotide
uauagaccuaacuagcaaa

SEQ ID NO: 613223 - RNA, 19 nt, Artificial Sequence
  Description of Artificial Sequence: Synthetic oligonucleotide
aguauucuaaauugaauuu

SEQ ID NO: 613224 - RNA, 19 nt, Artificial Sequence
  Description of Artificial Sequence: Synthetic oligonucleotide
aaauguaauccaguuuaag

SEQ ID NO: 613225 - RNA, 19 nt, Artificial Sequence
  Description of Artificial Sequence: Synthetic oligonucleotide
acuggaaaugucgugagag

SEQ ID NO: 613226 - RNA, 19 nt, Artificial Sequence
  Description of Artificial Sequence: Synthetic oligonucleotide
ucuuuaaggugugauguag

SEQ ID NO: 613227 - RNA, 19 nt, Artificial Sequence
  Description of Artificial Sequence: Synthetic oligonucleotide
uugauucaagcauauaaau

SEQ ID NO: 613228 - RNA, 19 nt, Artificial Sequence
  Description of Artificial Sequence: Synthetic oligonucleotide
uuaaauguuagugguaaaa

SEQ ID NO: 613229 - RNA, 19 nt, Artificial Sequence
  Description of Artificial Sequence: Synthetic oligonucleotide
uuaaacgcugcacuagacu

SEQ ID NO: 613230 - RNA, 19 nt, Artificial Sequence
  Description of Artificial Sequence: Synthetic oligonucleotide
uguauaggggacuuucaca

SEQ ID NO: 613231 - RNA, 19 nt, Artificial Sequence
  Description of Artificial Sequence: Synthetic oligonucleotide
aagcauuggccgcuuugcc

SEQ ID NO: 613232 - RNA, 19 nt, Artificial Sequence
  Description of Artificial Sequence: Synthetic oligonucleotide
ugugauguagacguagggc

SEQ ID NO: 613233 - RNA, 19 nt, Artificial Sequence
  Description of Artificial Sequence: Synthetic oligonucleotide
ugccaucuauacaggaucg

SEQ ID NO: 613234 - RNA, 19 nt, Artificial Sequence
  Description of Artificial Sequence: Synthetic oligonucleotide
uauacguuaguuguucaug

SEQ ID NO: 613235 - RNA, 19 nt, Artificial Sequence
  Description of Artificial Sequence: Synthetic oligonucleotide
uggcauauagaccuaacua

SEQ ID NO: 613236 - RNA, 19 nt, Artificial Sequence
  Description of Artificial Sequence: Synthetic oligonucleotide
uuaacuauguuaguuguua

SEQ ID NO: 613237 - RNA, 19 nt, Artificial Sequence
  Description of Artificial Sequence: Synthetic oligonucleotide
uucaaacaacauuauagau

SEQ ID NO: 613238 - RNA, 19 nt, Artificial Sequence
  Description of Artificial Sequence: Synthetic oligonucleotide
uuaaggugugauguagacg

SEQ ID NO: 613239 - RNA, 19 nt, Artificial Sequence
  Description of Artificial Sequence: Synthetic oligonucleotide
acuaaaaugaggugacuaa

SEQ ID NO: 613240 - RNA, 19 nt, Artificial Sequence
  Description of Artificial Sequence: Synthetic oligonucleotide
caucuauacaggaucgggc

SEQ ID NO: 613241 - RNA, 19 nt, Artificial Sequence
  Description of Artificial Sequence: Synthetic oligonucleotide
uuaaaucggaagacuuuug

SEQ ID NO: 613242 - RNA, 19 nt, Artificial Sequence
  Description of Artificial Sequence: Synthetic oligonucleotide
aacccuccaagguuguguc

SEQ ID NO: 613243 - RNA, 19 nt, Artificial Sequence
  Description of Artificial Sequence: Synthetic oligonucleotide
auuggauaugcggacgggc

SEQ ID NO: 613244 - RNA, 19 nt, Artificial Sequence
  Description of Artificial Sequence: Synthetic oligonucleotide
uuggcauauagaccuaacu

SEQ ID NO: 613245 - RNA, 19 nt, Artificial Sequence
  Description of Artificial Sequence: Synthetic oligonucleotide
aucgcugucaaaccuaggu

SEQ ID NO: 613246 - RNA, 19 nt, Artificial Sequence
  Description of Artificial Sequence: Synthetic oligonucleotide
uggcucuacuaaaaugagg

SEQ ID NO: 613247 - RNA, 19 nt, Artificial Sequence
  Description of Artificial Sequence: Synthetic oligonucleotide
cuacuauuaaaucggaaga

SEQ ID NO: 613248 - RNA, 19 nt, Artificial Sequence
  Description of Artificial Sequence: Synthetic oligonucleotide
aaggaaagccauuauucua

SEQ ID NO: 613249 - RNA, 19 nt, Artificial Sequence
  Description of Artificial Sequence: Synthetic oligonucleotide
uuucauaguuuccaaguuu

SEQ ID NO: 613250 - RNA, 19 nt, Artificial Sequence
  Description of Artificial Sequence: Synthetic oligonucleotide
auaggggacuuucacagca

SEQ ID NO: 613251 - RNA, 19 nt, Artificial Sequence
  Description of Artificial Sequence: Synthetic oligonucleotide
uuguguccaagcaggauca

SEQ ID NO: 613252 - RNA, 19 nt, Artificial Sequence
  Description of Artificial Sequence: Synthetic oligonucleotide
agcucggucuaccaugugg

SEQ ID NO: 613253 - RNA, 19 nt, Artificial Sequence
  Description of Artificial Sequence: Synthetic oligonucleotide
aucugcguacacguaaugc

SEQ ID NO: 613254 - RNA, 19 nt, Artificial Sequence
  Description of Artificial Sequence: Synthetic oligonucleotide
uacuauuaaaucggaagac

SEQ ID NO: 613255 - RNA, 19 nt, Artificial Sequence
  Description of Artificial Sequence: Synthetic oligonucleotide
uuaaggcuacuauuaaauc

SEQ ID NO: 613256 - RNA, 19 nt, Artificial Sequence
  Description of Artificial Sequence: Synthetic oligonucleotide
cuagugaucaacucccauc

SEQ ID NO: 613257 - RNA, 19 nt, Artificial Sequence
  Description of Artificial Sequence: Synthetic oligonucleotide
uuacuggaaaugucgugag

SEQ ID NO: 613258 - RNA, 19 nt, Artificial Sequence
  Description of Artificial Sequence: Synthetic oligonucleotide
gugacuaacccuugauggg

SEQ ID NO: 613259 - RNA, 19 nt, Artificial Sequence
  Description of Artificial Sequence: Synthetic oligonucleotide
aacuuacccuuuuauucca

SEQ ID NO: 613260 - RNA, 19 nt, Artificial Sequence
  Description of Artificial Sequence: Synthetic oligonucleotide
ucuauacaggaucgggcgc

SEQ ID NO: 613261 - RNA, 19 nt, Artificial Sequence
  Description of Artificial Sequence: Synthetic oligonucleotide
acuauuaaaucggaagacu

SEQ ID NO: 613262 - RNA, 19 nt, Artificial Sequence
  Description of Artificial Sequence: Synthetic oligonucleotide
ugcacuagacuuaacccaa

SEQ ID NO: 613263 - RNA, 19 nt, Artificial Sequence
  Description of Artificial Sequence: Synthetic oligonucleotide
auggaaacacaguaugacu

SEQ ID NO: 613264 - RNA, 19 nt, Artificial Sequence
  Description of Artificial Sequence: Synthetic oligonucleotide
accgcuuggggucuguacg

SEQ ID NO: 613265 - RNA, 19 nt, Artificial Sequence
  Description of Artificial Sequence: Synthetic oligonucleotide
acuaauugguuuaaaugug

SEQ ID NO: 613266 - RNA, 19 nt, Artificial Sequence
  Description of Artificial Sequence: Synthetic oligonucleotide
guuguguccaagcaggauc

SEQ ID NO: 613267 - RNA, 19 nt, Artificial Sequence
  Description of Artificial Sequence: Synthetic oligonucleotide
auagcccaaaucaccaagc

SEQ ID NO: 613268 - RNA, 19 nt, Artificial Sequence
  Description of Artificial Sequence: Synthetic oligonucleotide
auuuaaggcuacuauuaaa

SEQ ID NO: 613269 - RNA, 19 nt, Artificial Sequence
  Description of Artificial Sequence: Synthetic oligonucleotide
ugguuuacuagaaggcaac

SEQ ID NO: 613270 - RNA, 19 nt, Artificial Sequence
  Description of Artificial Sequence: Synthetic oligonucleotide
acgaguggugucuuacugg

SEQ ID NO: 613271 - RNA, 19 nt, Artificial Sequence
  Description of Artificial Sequence: Synthetic oligonucleotide
uuaguuaaauuuggcauau

SEQ ID NO: 613272 - RNA, 19 nt, Artificial Sequence
  Description of Artificial Sequence: Synthetic oligonucleotide
uaagcaccguauacguuag

SEQ ID NO: 613273 - RNA, 19 nt, Artificial Sequence
  Description of Artificial Sequence: Synthetic oligonucleotide
ugaguacaccagaaggaca

SEQ ID NO: 613274 - RNA, 19 nt, Artificial Sequence
  Description of Artificial Sequence: Synthetic oligonucleotide
agcccgagggcacaccucc

SEQ ID NO: 613275 - RNA, 19 nt, Artificial Sequence
  Description of Artificial Sequence: Synthetic oligonucleotide
guuguucauggaaacacag

SEQ ID NO: 613276 - RNA, 19 nt, Artificial Sequence
  Description of Artificial Sequence: Synthetic oligonucleotide
ucagcaucgcugucaaacc

SEQ ID NO: 613277 - RNA, 19 nt, Artificial Sequence
  Description of Artificial Sequence: Synthetic oligonucleotide
guaugacuugguuuacuag

SEQ ID NO: 613278 - RNA, 19 nt, Artificial Sequence
  Description of Artificial Sequence: Synthetic oligonucleotide
guuagagauaguaaauaca

SEQ ID NO: 613279 - RNA, 19 nt, Artificial Sequence
  Description of Artificial Sequence: Synthetic oligonucleotide
cuguacguuacagugguag

SEQ ID NO: 613280 - RNA, 19 nt, Artificial Sequence
  Description of Artificial Sequence: Synthetic oligonucleotide
uugaguacaccagaaggac

SEQ ID NO: 613281 - RNA, 19 nt, Artificial Sequence
  Description of Artificial Sequence: Synthetic oligonucleotide
uauccgcugaagcauuggc

SEQ ID NO: 613282 - RNA, 19 nt, Artificial Sequence
  Description of Artificial Sequence: Synthetic oligonucleotide
aaaucaccaagcccauggu

SEQ ID NO: 613283 - RNA, 19 nt, Artificial Sequence
  Description of Artificial Sequence: Synthetic oligonucleotide
auagaccuaacuagcaaag

SEQ ID NO: 613284 - RNA, 19 nt, Artificial Sequence
  Description of Artificial Sequence: Synthetic oligonucleotide
auaaggaaucgucauguuu

SEQ ID NO: 613285 - RNA, 19 nt, Artificial Sequence
  Description of Artificial Sequence: Synthetic oligonucleotide
ugauauaaucuuacauuuu

SEQ ID NO: 613286 - RNA, 19 nt, Artificial Sequence
  Description of Artificial Sequence: Synthetic oligonucleotide
uccaagguuguguccaagc

SEQ ID NO: 613287 - RNA, 19 nt, Artificial Sequence
  Description of Artificial Sequence: Synthetic oligonucleotide
gcuuugcccacccauaagg

SEQ ID NO: 613288 - RNA, 19 nt, Artificial Sequence
  Description of Artificial Sequence: Synthetic oligonucleotide
aaaggcauagacgggccug

SEQ ID NO: 613289 - RNA, 19 nt, Artificial Sequence
  Description of Artificial Sequence: Synthetic oligonucleotide
cacuuaguuaaauuuggca

SEQ ID NO: 613290 - RNA, 19 nt, Artificial Sequence
  Description of Artificial Sequence: Synthetic oligonucleotide
cugcguacacguaaugccc

SEQ ID NO: 613291 - RNA, 19 nt, Artificial Sequence
  Description of Artificial Sequence: Synthetic oligonucleotide
aggaguuagugcuagugau

SEQ ID NO: 613292 - RNA, 19 nt, Artificial Sequence
  Description of Artificial Sequence: Synthetic oligonucleotide
uacuaaaaugaggugacua

SEQ ID NO: 613293 - RNA, 19 nt, Artificial Sequence
  Description of Artificial Sequence: Synthetic oligonucleotide
agaccuaacuagcaaaguu

SEQ ID NO: 613294 - RNA, 19 nt, Artificial Sequence
  Description of Artificial Sequence: Synthetic oligonucleotide
ugaguaagcagcggccagg

SEQ ID NO: 613295 - RNA, 19 nt, Artificial Sequence
  Description of Artificial Sequence: Synthetic oligonucleotide
gacgaguggugucuuacug

SEQ ID NO: 613296 - RNA, 19 nt, Artificial Sequence
  Description of Artificial Sequence: Synthetic oligonucleotide
gguuaaagggagucaaagc

SEQ ID NO: 613297 - RNA, 19 nt, Artificial Sequence
  Description of Artificial Sequence: Synthetic oligonucleotide
uguacguuacagugguaga

SEQ ID NO: 613298 - RNA, 19 nt, Artificial Sequence
  Description of Artificial Sequence: Synthetic oligonucleotide
ugaucaacucccaucuuuu

SEQ ID NO: 613299 - RNA, 19 nt, Artificial Sequence
  Description of Artificial Sequence: Synthetic oligonucleotide
cucuacuaaaaugagguga

SEQ ID NO: 613300 - RNA, 19 nt, Artificial Sequence
  Description of Artificial Sequence: Synthetic oligonucleotide
gaucagccagaucgggucg

SEQ ID NO: 613301 - RNA, 19 nt, Artificial Sequence
  Description of Artificial Sequence: Synthetic oligonucleotide
accuaacuagcaaaguuag

SEQ ID NO: 613302 - RNA, 19 nt, Artificial Sequence
  Description of Artificial Sequence: Synthetic oligonucleotide
aaaauccuaauuagccacu

SEQ ID NO: 613303 - RNA, 19 nt, Artificial Sequence
  Description of Artificial Sequence: Synthetic oligonucleotide
uuuggcauauagaccuaac

SEQ ID NO: 613304 - RNA, 19 nt, Artificial Sequence
  Description of Artificial Sequence: Synthetic oligonucleotide
uggaaaugucgugagagaa

SEQ ID NO: 613305 - RNA, 19 nt, Artificial Sequence
  Description of Artificial Sequence: Synthetic oligonucleotide
uuuaaauguuagugguaaa

SEQ ID NO: 613306 - RNA, 19 nt, Artificial Sequence
  Description of Artificial Sequence: Synthetic oligonucleotide
cuuacuggaaaugucguga

SEQ ID NO: 613307 - RNA, 19 nt, Artificial Sequence
  Description of Artificial Sequence: Synthetic oligonucleotide
caguuuaagcaccguauac

SEQ ID NO: 613308 - RNA, 19 nt, Artificial Sequence
  Description of Artificial Sequence: Synthetic oligonucleotide
uuacagugguagauguacu

SEQ ID NO: 613309 - RNA, 19 nt, Artificial Sequence
  Description of Artificial Sequence: Synthetic oligonucleotide
aaccuaggucgacuacuuc

SEQ ID NO: 613310 - RNA, 19 nt, Artificial Sequence
  Description of Artificial Sequence: Synthetic oligonucleotide
cuuaaacgcugcacuagac

SEQ ID NO: 613311 - RNA, 19 nt, Artificial Sequence
  Description of Artificial Sequence: Synthetic oligonucleotide
uugcccacccauaaggaau

SEQ ID NO: 613312 - RNA, 19 nt, Artificial Sequence
  Description of Artificial Sequence: Synthetic oligonucleotide
caccuuuguagcauuuaag

SEQ ID NO: 613313 - RNA, 19 nt, Artificial Sequence
  Description of Artificial Sequence: Synthetic oligonucleotide
guaauccaguuuaagcacc

SEQ ID NO: 613314 - RNA, 19 nt, Artificial Sequence
  Description of Artificial Sequence: Synthetic oligonucleotide
gaucgggucgcucagggaa

SEQ ID NO: 613315 - RNA, 19 nt, Artificial Sequence
  Description of Artificial Sequence: Synthetic oligonucleotide
agaggaguuagugcuagug

SEQ ID NO: 613316 - RNA, 19 nt, Artificial Sequence
  Description of Artificial Sequence: Synthetic oligonucleotide
gcugcacuagacuuaaccc

SEQ ID NO: 613317 - RNA, 19 nt, Artificial Sequence
  Description of Artificial Sequence: Synthetic oligonucleotide
aggccuuaaacgcugcacu

SEQ ID NO: 613318 - RNA, 19 nt, Artificial Sequence
  Description of Artificial Sequence: Synthetic oligonucleotide
aauccuaauuagccacuaa

SEQ ID NO: 613319 - RNA, 19 nt, Artificial Sequence
  Description of Artificial Sequence: Synthetic oligonucleotide
uuccauuggauaugcggac

SEQ ID NO: 613320 - RNA, 19 nt, Artificial Sequence
  Description of Artificial Sequence: Synthetic oligonucleotide
ugacuaacccuugaugggu

SEQ ID NO: 613321 - RNA, 19 nt, Artificial Sequence
  Description of Artificial Sequence: Synthetic oligonucleotide
cuguauaggggacuuucac

SEQ ID NO: 613322 - RNA, 19 nt, Artificial Sequence
  Description of Artificial Sequence: Synthetic oligonucleotide
cuauacaggaucgggcgcc

SEQ ID NO: 613323 - RNA, 19 nt, Artificial Sequence
  Description of Artificial Sequence: Synthetic oligonucleotide
gaggaguuagugcuaguga

SEQ ID NO: 613324 - RNA, 19 nt, Artificial Sequence
  Description of Artificial Sequence: Synthetic oligonucleotide
ggcccugcaauccugaggc

SEQ ID NO: 613325 - RNA, 19 nt, Artificial Sequence
  Description of Artificial Sequence: Synthetic oligonucleotide
uauaggggacuuucacagc

SEQ ID NO: 613326 - RNA, 19 nt, Artificial Sequence
  Description of Artificial Sequence: Synthetic oligonucleotide
acguuaguuguucauggaa

SEQ ID NO: 613327 - RNA, 19 nt, Artificial Sequence
  Description of Artificial Sequence: Synthetic oligonucleotide
gugcuagugaucaacuccc

SEQ ID NO: 613328 - RNA, 19 nt, Artificial Sequence
  Description of Artificial Sequence: Synthetic oligonucleotide
ugucucaccgcuugggguc

SEQ ID NO: 613329 - RNA, 19 nt, Artificial Sequence
  Description of Artificial Sequence: Synthetic oligonucleotide
ggaugcaagucuccuaucc

SEQ ID NO: 613330 - RNA, 19 nt, Artificial Sequence
  Description of Artificial Sequence: Synthetic oligonucleotide
ggcucuuucuuguacgugc

SEQ ID NO: 613331 - RNA, 19 nt, Artificial Sequence
  Description of Artificial Sequence: Synthetic oligonucleotide
gaucgggcgccaaagauca

SEQ ID NO: 613332 - RNA, 19 nt, Artificial Sequence
  Description of Artificial Sequence: Synthetic oligonucleotide
auccggcuaccauacagag

SEQ ID NO: 613333 - RNA, 19 nt, Artificial Sequence
  Description of Artificial Sequence: Synthetic oligonucleotide
ugaggugacuaacccuuga

SEQ ID NO: 613334 - RNA, 19 nt, Artificial Sequence
  Description of Artificial Sequence: Synthetic oligonucleotide
ucaaaccuaggucgacuac

SEQ ID NO: 613335 - RNA, 19 nt, Artificial Sequence
  Description of Artificial Sequence: Synthetic oligonucleotide
augacagcaccacuuaauu

SEQ ID NO: 613336 - RNA, 19 nt, Artificial Sequence
  Description of Artificial Sequence: Synthetic oligonucleotide
gacuuucacagcauccggc

SEQ ID NO: 613337 - RNA, 19 nt, Artificial Sequence
  Description of Artificial Sequence: Synthetic oligonucleotide
cagggaaaccccauggcuc

SEQ ID NO: 613338 - RNA, 19 nt, Artificial Sequence
  Description of Artificial Sequence: Synthetic oligonucleotide
uucagugaguaagcagcgg

SEQ ID NO: 613339 - RNA, 19 nt, Artificial Sequence
  Description of Artificial Sequence: Synthetic oligonucleotide
uuugcccacccauaaggaa

SEQ ID NO: 613340 - RNA, 19 nt, Artificial Sequence
  Description of Artificial Sequence: Synthetic oligonucleotide
aauggugguuucugccaga

SEQ ID NO: 613341 - RNA, 19 nt, Artificial Sequence
  Description of Artificial Sequence: Synthetic oligonucleotide
cugcacuagacuuaaccca

SEQ ID NO: 613342 - RNA, 19 nt, Artificial Sequence
  Description of Artificial Sequence: Synthetic oligonucleotide
ucgcugucaaaccuagguc

SEQ ID NO: 613343 - RNA, 19 nt, Artificial Sequence
  Description of Artificial Sequence: Synthetic oligonucleotide
uacguuaguuguucaugga

SEQ ID NO: 613344 - RNA, 19 nt, Artificial Sequence
  Description of Artificial Sequence: Synthetic oligonucleotide
agggaaaccccauggcucu

SEQ ID NO: 613345 - RNA, 19 nt, Artificial Sequence
  Description of Artificial Sequence: Synthetic oligonucleotide
caauggugguuucugccag

SEQ ID NO: 613346 - RNA, 19 nt, Artificial Sequence
  Description of Artificial Sequence: Synthetic oligonucleotide
gaguacaccagaaggacaa

SEQ ID NO: 613347 - RNA, 19 nt, Artificial Sequence
  Description of Artificial Sequence: Synthetic oligonucleotide
auggguauuucagugagua

SEQ ID NO: 613348 - RNA, 19 nt, Artificial Sequence
  Description of Artificial Sequence: Synthetic oligonucleotide
aggacgaguggugucuuac

SEQ ID NO: 613349 - RNA, 19 nt, Artificial Sequence
  Description of Artificial Sequence: Synthetic oligonucleotide
ucggucuaccauguggcag

SEQ ID NO: 613350 - RNA, 19 nt, Artificial Sequence
  Description of Artificial Sequence: Synthetic oligonucleotide
uaugcggacgggcucuuuc

SEQ ID NO: 613351 - RNA, 19 nt, Artificial Sequence
  Description of Artificial Sequence: Synthetic oligonucleotide
augacagacccagaaguca

SEQ ID NO: 613352 - RNA, 19 nt, Artificial Sequence
  Description of Artificial Sequence: Synthetic oligonucleotide
cuugguuuacuagaaggca

SEQ ID NO: 613353 - RNA, 19 nt, Artificial Sequence
  Description of Artificial Sequence: Synthetic oligonucleotide
gcauagacgggccugucag

SEQ ID NO: 613354 - RNA, 19 nt, Artificial Sequence
  Description of Artificial Sequence: Synthetic oligonucleotide
ugguagauguacuccguua

SEQ ID NO: 613355 - RNA, 19 nt, Artificial Sequence
  Description of Artificial Sequence: Synthetic oligonucleotide
cagaucgggucgcucaggg

SEQ ID NO: 613356 - RNA, 19 nt, Artificial Sequence
  Description of Artificial Sequence: Synthetic oligonucleotide
auagacgggccugucagug

SEQ ID NO: 613357 - RNA, 19 nt, Artificial Sequence
  Description of Artificial Sequence: Synthetic oligonucleotide
gaccuaacuagcaaaguua

SEQ ID NO: 613358 - RNA, 19 nt, Artificial Sequence
  Description of Artificial Sequence: Synthetic oligonucleotide
cuuguguaggagaaaggaa

SEQ ID NO: 613359 - RNA, 19 nt, Artificial Sequence
  Description of Artificial Sequence: Synthetic oligonucleotide
cuagcucauuucuggugcc

SEQ ID NO: 613360 - RNA, 19 nt, Artificial Sequence
  Description of Artificial Sequence: Synthetic oligonucleotide
gcuucuuuaaggugugaug

SEQ ID NO: 613361 - RNA, 19 nt, Artificial Sequence
  Description of Artificial Sequence: Synthetic oligonucleotide
aacccuugauggguauuuc

SEQ ID NO: 613362 - RNA, 19 nt, Artificial Sequence
  Description of Artificial Sequence: Synthetic oligonucleotide
gugccgugagacaugacag

SEQ ID NO: 613363 - RNA, 19 nt, Artificial Sequence
  Description of Artificial Sequence: Synthetic oligonucleotide
acccauaaggaaucgucau

SEQ ID NO: 613364 - RNA, 19 nt, Artificial Sequence
  Description of Artificial Sequence: Synthetic oligonucleotide
cuucuuuaaggugugaugu

SEQ ID NO: 613365 - RNA, 19 nt, Artificial Sequence
  Description of Artificial Sequence: Synthetic oligonucleotide
augucgugagagaacauca

SEQ ID NO: 613366 - RNA, 19 nt, Artificial Sequence
  Description of Artificial Sequence: Synthetic oligonucleotide
aaauccuaauuagccacua

SEQ ID NO: 613367 - RNA, 19 nt, Artificial Sequence
  Description of Artificial Sequence: Synthetic oligonucleotide
ggugccgugagacaugaca

SEQ ID NO: 613368 - RNA, 19 nt, Artificial Sequence
  Description of Artificial Sequence: Synthetic oligonucleotide
ugccgugagacaugacagc

SEQ ID NO: 613369 - RNA, 19 nt, Artificial Sequence
  Description of Artificial Sequence: Synthetic oligonucleotide
acaguaugacuugguuuac

SEQ ID NO: 613370 - RNA, 19 nt, Artificial Sequence
  Description of Artificial Sequence: Synthetic oligonucleotide
gaucugcguacacguaaug

SEQ ID NO: 613371 - RNA, 19 nt, Artificial Sequence
  Description of Artificial Sequence: Synthetic oligonucleotide
accuuuuaauuuaaggcua

SEQ ID NO: 613372 - RNA, 19 nt, Artificial Sequence
  Description of Artificial Sequence: Synthetic oligonucleotide
uccggcuaccauacagagc

SEQ ID NO: 613373 - RNA, 19 nt, Artificial Sequence
  Description of Artificial Sequence: Synthetic oligonucleotide
ugcgguguccgccgagucc

SEQ ID NO: 613374 - RNA, 19 nt, Artificial Sequence
  Description of Artificial Sequence: Synthetic oligonucleotide
ugacagcaccacuuaauuu

SEQ ID NO: 613375 - RNA, 19 nt, Artificial Sequence
  Description of Artificial Sequence: Synthetic oligonucleotide
acccuugauggguauuuca

SEQ ID NO: 613376 - RNA, 19 nt, Artificial Sequence
  Description of Artificial Sequence: Synthetic oligonucleotide
ggucgcagugacuggaugc

SEQ ID NO: 613377 - RNA, 19 nt, Artificial Sequence
  Description of Artificial Sequence: Synthetic oligonucleotide
guagauguacuccguuaca

SEQ ID NO: 613378 - RNA, 19 nt, Artificial Sequence
  Description of Artificial Sequence: Synthetic oligonucleotide
gcuauagucuucacauagg

SEQ ID NO: 613379 - RNA, 19 nt, Artificial Sequence
  Description of Artificial Sequence: Synthetic oligonucleotide
uagaccuaacuagcaaagu

SEQ ID NO: 613380 - RNA, 19 nt, Artificial Sequence
  Description of Artificial Sequence: Synthetic oligonucleotide
cauuauucuagaaggcacu

SEQ ID NO: 613381 - RNA, 19 nt, Artificial Sequence
  Description of Artificial Sequence: Synthetic oligonucleotide
ugcuagugaucaacuccca

SEQ ID NO: 613382 - RNA, 19 nt, Artificial Sequence
  Description of Artificial Sequence: Synthetic oligonucleotide
auggcucuacuaaaaugag

SEQ ID NO: 613383 - RNA, 19 nt, Artificial Sequence
  Description of Artificial Sequence: Synthetic oligonucleotide
aggaucgggcgccaaagau

SEQ ID NO: 613384 - RNA, 19 nt, Artificial Sequence
  Description of Artificial Sequence: Synthetic oligonucleotide
acuagcaaaguuagguaaa

SEQ ID NO: 613385 - RNA, 19 nt, Artificial Sequence
  Description of Artificial Sequence: Synthetic oligonucleotide
uucaaacauagaggaguac

SEQ ID NO: 613386 - RNA, 19 nt, Artificial Sequence
  Description of Artificial Sequence: Synthetic oligonucleotide
auuauucuagaaggcacua

SEQ ID NO: 613387 - RNA, 19 nt, Artificial Sequence
  Description of Artificial Sequence: Synthetic oligonucleotide
acauucuagcucauuucug

SEQ ID NO: 613388 - RNA, 19 nt, Artificial Sequence
  Description of Artificial Sequence: Synthetic oligonucleotide
ucaggccuuaaacgcugca

SEQ ID NO: 613389 - RNA, 19 nt, Artificial Sequence
  Description of Artificial Sequence: Synthetic oligonucleotide
acuccguuacagugucauc

SEQ ID NO: 613390 - RNA, 19 nt, Artificial Sequence
  Description of Artificial Sequence: Synthetic oligonucleotide
cacauaggacuucggucgc

SEQ ID NO: 613391 - RNA, 19 nt, Artificial Sequence
  Description of Artificial Sequence: Synthetic oligonucleotide
cacccauaaggaaucguca

SEQ ID NO: 613392 - RNA, 19 nt, Artificial Sequence
  Description of Artificial Sequence: Synthetic oligonucleotide
cagcauccggcuaccauac

SEQ ID NO: 613393 - RNA, 19 nt, Artificial Sequence
  Description of Artificial Sequence: Synthetic oligonucleotide
cauuggauaugcggacggg

SEQ ID NO: 613394 - RNA, 19 nt, Artificial Sequence
  Description of Artificial Sequence: Synthetic oligonucleotide
ggcucuacuaaaaugaggu

SEQ ID NO: 613395 - RNA, 19 nt, Artificial Sequence
  Description of Artificial Sequence: Synthetic oligonucleotide
gacaugacagcaccacuua

SEQ ID NO: 613396 - RNA, 19 nt, Artificial Sequence
  Description of Artificial Sequence: Synthetic oligonucleotide
gucuguacguuacaguggu

SEQ ID NO: 613397 - RNA, 19 nt, Artificial Sequence
  Description of Artificial Sequence: Synthetic oligonucleotide
uacuuccguuugaaaucag

SEQ ID NO: 613398 - RNA, 19 nt, Artificial Sequence
  Description of Artificial Sequence: Synthetic oligonucleotide
aaaccuaggucgacuacuu

SEQ ID NO: 613399 - RNA, 19 nt, Artificial Sequence
  Description of Artificial Sequence: Synthetic oligonucleotide
ggucuguacguuacagugg

SEQ ID NO: 613400 - RNA, 19 nt, Artificial Sequence
  Description of Artificial Sequence: Synthetic oligonucleotide
cuuugcccacccauaagga

SEQ ID NO: 613401 - RNA, 19 nt, Artificial Sequence
  Description of Artificial Sequence: Synthetic oligonucleotide
aagccacccugucagccau

SEQ ID NO: 613402 - RNA, 19 nt, Artificial Sequence
  Description of Artificial Sequence: Synthetic oligonucleotide
uucggucgcagugacugga

SEQ ID NO: 613403 - RNA, 19 nt, Artificial Sequence
  Description of Artificial Sequence: Synthetic oligonucleotide
ucgggcgccaaagaucaca

SEQ ID NO: 613404 - RNA, 19 nt, Artificial Sequence
  Description of Artificial Sequence: Synthetic oligonucleotide
aaggcacuaauugguuuaa

SEQ ID NO: 613405 - RNA, 19 nt, Artificial Sequence
  Description of Artificial Sequence: Synthetic oligonucleotide
ccaucuauacaggaucggg

SEQ ID NO: 613406 - RNA, 19 nt, Artificial Sequence
  Description of Artificial Sequence: Synthetic oligonucleotide
agacuuuuguguauuucaa

SEQ ID NO: 613407 - RNA, 19 nt, Artificial Sequence
  Description of Artificial Sequence: Synthetic oligonucleotide
uacaggaucgggcgccaaa

SEQ ID NO: 613408 - RNA, 19 nt, Artificial Sequence
  Description of Artificial Sequence: Synthetic oligonucleotide
gcaccguauacguuaguug

SEQ ID NO: 613409 - RNA, 19 nt, Artificial Sequence
  Description of Artificial Sequence: Synthetic oligonucleotide
cccuugauggguauuucag

SEQ ID NO: 613410 - RNA, 19 nt, Artificial Sequence
  Description of Artificial Sequence: Synthetic oligonucleotide
agacaugacagcaccacuu

SEQ ID NO: 613411 - RNA, 19 nt, Artificial Sequence
  Description of Artificial Sequence: Synthetic oligonucleotide
caggucggaagccacccug

SEQ ID NO: 613412 - RNA, 19 nt, Artificial Sequence
  Description of Artificial Sequence: Synthetic oligonucleotide
uccguuacagugucaucuu

SEQ ID NO: 613413 - RNA, 19 nt, Artificial Sequence
  Description of Artificial Sequence: Synthetic oligonucleotide
cuggaaaugucgugagaga

SEQ ID NO: 613414 - RNA, 19 nt, Artificial Sequence
  Description of Artificial Sequence: Synthetic oligonucleotide
cgugagacaugacagcacc

SEQ ID NO: 613415 - RNA, 19 nt, Artificial Sequence
  Description of Artificial Sequence: Synthetic oligonucleotide
gacuuuuguguauuucaau

SEQ ID NO: 613416 - RNA, 19 nt, Artificial Sequence
  Description of Artificial Sequence: Synthetic oligonucleotide
cagaguugccaucuauaca

SEQ ID NO: 613417 - RNA, 19 nt, Artificial Sequence
  Description of Artificial Sequence: Synthetic oligonucleotide
auuuggcauauagaccuaa

SEQ ID NO: 613418 - RNA, 19 nt, Artificial Sequence
  Description of Artificial Sequence: Synthetic oligonucleotide
aggaggacgaguggugucu

SEQ ID NO: 613419 - RNA, 19 nt, Artificial Sequence
  Description of Artificial Sequence: Synthetic oligonucleotide
aggacuucggucgcaguga

SEQ ID NO: 613420 - RNA, 19 nt, Artificial Sequence
  Description of Artificial Sequence: Synthetic oligonucleotide
acuaacccuugauggguau

SEQ ID NO: 613421 - RNA, 19 nt, Artificial Sequence
  Description of Artificial Sequence: Synthetic oligonucleotide
uccuauccgcugaagcauu

SEQ ID NO: 613422 - RNA, 19 nt, Artificial Sequence
  Description of Artificial Sequence: Synthetic oligonucleotide
cuucggucgcagugacugg

SEQ ID NO: 613423 - RNA, 19 nt, Artificial Sequence
  Description of Artificial Sequence: Synthetic oligonucleotide
ggaaaugucgugagagaac

SEQ ID NO: 613424 - RNA, 19 nt, Artificial Sequence
  Description of Artificial Sequence: Synthetic oligonucleotide
caggccuuaaacgcugcac

SEQ ID NO: 613425 - RNA, 19 nt, Artificial Sequence
  Description of Artificial Sequence: Synthetic oligonucleotide
ccacccauaaggaaucguc

SEQ ID NO: 613426 - RNA, 19 nt, Artificial Sequence
  Description of Artificial Sequence: Synthetic oligonucleotide
agugcaccuuuguagcauu

SEQ ID NO: 613427 - RNA, 19 nt, Artificial Sequence
  Description of Artificial Sequence: Synthetic oligonucleotide
augauuagauuaacauaau

SEQ ID NO: 613428 - RNA, 19 nt, Artificial Sequence
  Description of Artificial Sequence: Synthetic oligonucleotide
augcggacgggcucuuucu

SEQ ID NO: 613429 - RNA, 19 nt, Artificial Sequence
  Description of Artificial Sequence: Synthetic oligonucleotide
caucgcugucaaaccuagg

SEQ ID NO: 613430 - RNA, 19 nt, Artificial Sequence
  Description of Artificial Sequence: Synthetic oligonucleotide
cuaggucgacuacuucuuc

SEQ ID NO: 613431 - RNA, 19 nt, Artificial Sequence
  Description of Artificial Sequence: Synthetic oligonucleotide
uaggggacuuucacagcau

SEQ ID NO: 613432 - RNA, 19 nt, Artificial Sequence
  Description of Artificial Sequence: Synthetic oligonucleotide
gugucuuacuggaaauguc

SEQ ID NO: 613433 - RNA, 19 nt, Artificial Sequence
  Description of Artificial Sequence: Synthetic oligonucleotide
cgcugcacuagacuuaacc

SEQ ID NO: 613434 - RNA, 19 nt, Artificial Sequence
  Description of Artificial Sequence: Synthetic oligonucleotide
cuccguuacagugucaucu

SEQ ID NO: 613435 - RNA, 19 nt, Artificial Sequence
  Description of Artificial Sequence: Synthetic oligonucleotide
cccuaggauggcuauaguc

SEQ ID NO: 613436 - RNA, 19 nt, Artificial Sequence
  Description of Artificial Sequence: Synthetic oligonucleotide
gugaucaacucccaucuuu

SEQ ID NO: 613437 - RNA, 19 nt, Artificial Sequence
  Description of Artificial Sequence: Synthetic oligonucleotide
uggcuauagucuucacaua

SEQ ID NO: 613438 - RNA, 19 nt, Artificial Sequence
  Description of Artificial Sequence: Synthetic oligonucleotide
aaaugucgugagagaacau

SEQ ID NO: 613439 - RNA, 19 nt, Artificial Sequence
  Description of Artificial Sequence: Synthetic oligonucleotide
guauacguuaguuguucau

SEQ ID NO: 613440 - RNA, 19 nt, Artificial Sequence
  Description of Artificial Sequence: Synthetic oligonucleotide
aagcaccguauacguuagu

SEQ ID NO: 613441 - RNA, 19 nt, Artificial Sequence
  Description of Artificial Sequence: Synthetic oligonucleotide
gucggaagccacccuguca

SEQ ID NO: 613442 - RNA, 19 nt, Artificial Sequence
  Description of Artificial Sequence: Synthetic oligonucleotide
ugguucgugcuguccaguu

SEQ ID NO: 613443 - RNA, 19 nt, Artificial Sequence
  Description of Artificial Sequence: Synthetic oligonucleotide
guacaccagaaggacaaaa

SEQ ID NO: 613444 - RNA, 19 nt, Artificial Sequence
  Description of Artificial Sequence: Synthetic oligonucleotide
cccauaaggaaucgucaug

SEQ ID NO: 613445 - RNA, 19 nt, Artificial Sequence
  Description of Artificial Sequence: Synthetic oligonucleotide
gaacccuccaagguugugu

SEQ ID NO: 613446 - RNA, 19 nt, Artificial Sequence
  Description of Artificial Sequence: Synthetic oligonucleotide
cauagaggaguacuuccgu

SEQ ID NO: 613447 - RNA, 19 nt, Artificial Sequence
  Description of Artificial Sequence: Synthetic oligonucleotide
agaucgggucgcucaggga

SEQ ID NO: 613448 - RNA, 19 nt, Artificial Sequence
  Description of Artificial Sequence: Synthetic oligonucleotide
agugaucaacucccaucuu

SEQ ID NO: 613449 - RNA, 19 nt, Artificial Sequence
  Description of Artificial Sequence: Synthetic oligonucleotide
caccgcuuggggucuguac

SEQ ID NO: 613450 - RNA, 19 nt, Artificial Sequence
  Description of Artificial Sequence: Synthetic oligonucleotide
aaacugugagaaaguuaua

SEQ ID NO: 613451 - RNA, 19 nt, Artificial Sequence
  Description of Artificial Sequence: Synthetic oligonucleotide
guucgugcuguccaguuuu

SEQ ID NO: 613452 - RNA, 19 nt, Artificial Sequence
  Description of Artificial Sequence: Synthetic oligonucleotide
ggcacuaauugguuuaaau

SEQ ID NO: 613453 - RNA, 19 nt, Artificial Sequence
  Description of Artificial Sequence: Synthetic oligonucleotide
caauagcccaaaucaccaa

SEQ ID NO: 613454 - RNA, 19 nt, Artificial Sequence
  Description of Artificial Sequence: Synthetic oligonucleotide
caaaccuaggucgacuacu

SEQ ID NO: 613455 - RNA, 19 nt, Artificial Sequence
  Description of Artificial Sequence: Synthetic oligonucleotide
ucuguacguuacaguggua

SEQ ID NO: 613456 - RNA, 19 nt, Artificial Sequence
  Description of Artificial Sequence: Synthetic oligonucleotide
ggaguuagugcuagugauc

SEQ ID NO: 613457 - RNA, 19 nt, Artificial Sequence
  Description of Artificial Sequence: Synthetic oligonucleotide
caggaugcaagucuccuau

SEQ ID NO: 613458 - RNA, 19 nt, Artificial Sequence
  Description of Artificial Sequence: Synthetic oligonucleotide
gaggugacuaacccuugau

SEQ ID NO: 613459 - RNA, 19 nt, Artificial Sequence
  Description of Artificial Sequence: Synthetic oligonucleotide
ucggucgcagugacuggau

SEQ ID NO: 613460 - RNA, 19 nt, Artificial Sequence
  Description of Artificial Sequence: Synthetic oligonucleotide
guucauggaaacacaguau

SEQ ID NO: 613461 - RNA, 19 nt, Artificial Sequence
  Description of Artificial Sequence: Synthetic oligonucleotide
gggucgcucagggaaaccc

SEQ ID NO: 613462 - RNA, 19 nt, Artificial Sequence
  Description of Artificial Sequence: Synthetic oligonucleotide
uguccgccgaguccaccuc

SEQ ID NO: 613463 - RNA, 19 nt, Artificial Sequence
  Description of Artificial Sequence: Synthetic oligonucleotide
gaagcucggucuaccaugu

SEQ ID NO: 613464 - RNA, 19 nt, Artificial Sequence
  Description of Artificial Sequence: Synthetic oligonucleotide
ugucagccauccugacccu

SEQ ID NO: 613465 - RNA, 19 nt, Artificial Sequence
  Description of Artificial Sequence: Synthetic oligonucleotide
gccaucuauacaggaucgg

SEQ ID NO: 613466 - RNA, 19 nt, Artificial Sequence
  Description of Artificial Sequence: Synthetic oligonucleotide
ggugucuuacuggaaaugu

SEQ ID NO: 613467 - RNA, 19 nt, Artificial Sequence
  Description of Artificial Sequence: Synthetic oligonucleotide
ccugucagccauccugacc

SEQ ID NO: 613468 - RNA, 19 nt, Artificial Sequence
  Description of Artificial Sequence: Synthetic oligonucleotide
agucuccuauccgcugaag

SEQ ID NO: 613469 - RNA, 19 nt, Artificial Sequence
  Description of Artificial Sequence: Synthetic oligonucleotide
gccccuaggauggcuauag

SEQ ID NO: 613470 - RNA, 19 nt, Artificial Sequence
  Description of Artificial Sequence: Synthetic oligonucleotide
ggaucgggcgccaaagauc

SEQ ID NO: 613471 - RNA, 19 nt, Artificial Sequence
  Description of Artificial Sequence: Synthetic oligonucleotide
aggcuacuauuaaaucgga

SEQ ID NO: 613472 - RNA, 19 nt, Artificial Sequence
  Description of Artificial Sequence: Synthetic oligonucleotide
gguuuacuagaaggcaaca

SEQ ID NO: 613473 - RNA, 19 nt, Artificial Sequence
  Description of Artificial Sequence: Synthetic oligonucleotide
ggcugaucugcguacacgu

SEQ ID NO: 613474 - RNA, 19 nt, Artificial Sequence
  Description of Artificial Sequence: Synthetic oligonucleotide
ugcggacgggcucuuucuu

SEQ ID NO: 613475 - RNA, 19 nt, Artificial Sequence
  Description of Artificial Sequence: Synthetic oligonucleotide
ggugacacccucuuuguuu

SEQ ID NO: 613476 - RNA, 19 nt, Artificial Sequence
  Description of Artificial Sequence: Synthetic oligonucleotide
guacguuacagugguagau

SEQ ID NO: 613477 - RNA, 19 nt, Artificial Sequence
  Description of Artificial Sequence: Synthetic oligonucleotide
ccuuaaacgcugcacuaga

SEQ ID NO: 613478 - RNA, 19 nt, Artificial Sequence
  Description of Artificial Sequence: Synthetic oligonucleotide
ccagaggaguuagugcuag

SEQ ID NO: 613479 - RNA, 19 nt, Artificial Sequence
  Description of Artificial Sequence: Synthetic oligonucleotide
gacuaacccuugaugggua

SEQ ID NO: 613480 - RNA, 19 nt, Artificial Sequence
  Description of Artificial Sequence: Synthetic oligonucleotide
acauaggacuucggucgca

SEQ ID NO: 613481 - RNA, 19 nt, Artificial Sequence
  Description of Artificial Sequence: Synthetic oligonucleotide
aguaagcagcggccaggaa

SEQ ID NO: 613482 - RNA, 19 nt, Artificial Sequence
  Description of Artificial Sequence: Synthetic oligonucleotide
cucggucuaccauguggca

SEQ ID NO: 613483 - RNA, 19 nt, Artificial Sequence
  Description of Artificial Sequence: Synthetic oligonucleotide
gccagaucgggucgcucag

SEQ ID NO: 613484 - RNA, 19 nt, Artificial Sequence
  Description of Artificial Sequence: Synthetic oligonucleotide
aguacaccagaaggacaaa

SEQ ID NO: 613485 - RNA, 19 nt, Artificial Sequence
  Description of Artificial Sequence: Synthetic oligonucleotide
gccgugagacaugacagca

SEQ ID NO: 613486 - RNA, 19 nt, Artificial Sequence
  Description of Artificial Sequence: Synthetic oligonucleotide
ucgggucgcucagggaaac

SEQ ID NO: 613487 - RNA, 19 nt, Artificial Sequence
  Description of Artificial Sequence: Synthetic oligonucleotide
cauuggccgcuuugcccac

SEQ ID NO: 613488 - RNA, 19 nt, Artificial Sequence
  Description of Artificial Sequence: Synthetic oligonucleotide
ccaagcccaugguucgugc

SEQ ID NO: 613489 - RNA, 19 nt, Artificial Sequence
  Description of Artificial Sequence: Synthetic oligonucleotide
acuuacccuuuuauuccau

SEQ ID NO: 613490 - RNA, 19 nt, Artificial Sequence
  Description of Artificial Sequence: Synthetic oligonucleotide
cugucucaccgcuuggggu

SEQ ID NO: 613491 - RNA, 19 nt, Artificial Sequence
  Description of Artificial Sequence: Synthetic oligonucleotide
ccauaaggaaucgucaugu

SEQ ID NO: 613492 - RNA, 19 nt, Artificial Sequence
  Description of Artificial Sequence: Synthetic oligonucleotide
aggucggaagccacccugu

SEQ ID NO: 613493 - RNA, 19 nt, Artificial Sequence
  Description of Artificial Sequence: Synthetic oligonucleotide
gauggguauuucagugagu

SEQ ID NO: 613494 - RNA, 19 nt, Artificial Sequence
  Description of Artificial Sequence: Synthetic oligonucleotide
ccaugguucgugcugucca

SEQ ID NO: 613495 - RNA, 19 nt, Artificial Sequence
  Description of Artificial Sequence: Synthetic oligonucleotide
gcggacgggcucuuucuug

SEQ ID NO: 613496 - RNA, 19 nt, Artificial Sequence
  Description of Artificial Sequence: Synthetic oligonucleotide
ccgugagacaugacagcac

SEQ ID NO: 613497 - RNA, 19 nt, Artificial Sequence
  Description of Artificial Sequence: Synthetic oligonucleotide
cagcaucgcugucaaaccu

SEQ ID NO: 613498 - RNA, 19 nt, Artificial Sequence
  Description of Artificial Sequence: Synthetic oligonucleotide
ggcuacuauuaaaucggaa

SEQ ID NO: 613499 - RNA, 19 nt, Artificial Sequence
  Description of Artificial Sequence: Synthetic oligonucleotide
agcagcggccaggaacccu

SEQ ID NO: 613500 - RNA, 19 nt, Artificial Sequence
  Description of Artificial Sequence: Synthetic oligonucleotide
gaggacgaguggugucuua

SEQ ID NO: 613501 - RNA, 19 nt, Artificial Sequence
  Description of Artificial Sequence: Synthetic oligonucleotide
agcggccaggaacccucca

SEQ ID NO: 613502 - RNA, 19 nt, Artificial Sequence
  Description of Artificial Sequence: Synthetic oligonucleotide
aggcacuaauugguuuaaa

SEQ ID NO: 613503 - RNA, 19 nt, Artificial Sequence
  Description of Artificial Sequence: Synthetic oligonucleotide
cugcgguguccgccgaguc

SEQ ID NO: 613504 - RNA, 19 nt, Artificial Sequence
  Description of Artificial Sequence: Synthetic oligonucleotide
ggauggcuauagucuucac

SEQ ID NO: 613505 - RNA, 19 nt, Artificial Sequence
  Description of Artificial Sequence: Synthetic oligonucleotide
cuacuaaaaugaggugacu

SEQ ID NO: 613506 - RNA, 19 nt, Artificial Sequence
  Description of Artificial Sequence: Synthetic oligonucleotide
uacgugcaggggacacauu

SEQ ID NO: 613507 - RNA, 19 nt, Artificial Sequence
  Description of Artificial Sequence: Synthetic oligonucleotide
cgacuacuucuuccaaagc

SEQ ID NO: 613508 - RNA, 19 nt, Artificial Sequence
  Description of Artificial Sequence: Synthetic oligonucleotide
cuccuauccgcugaagcau

SEQ ID NO: 613509 - RNA, 19 nt, Artificial Sequence
  Description of Artificial Sequence: Synthetic oligonucleotide
cauagacgggccugucagu

SEQ ID NO: 613510 - RNA, 19 nt, Artificial Sequence
  Description of Artificial Sequence: Synthetic oligonucleotide
gcgguguccgccgagucca

SEQ ID NO: 613511 - RNA, 19 nt, Artificial Sequence
  Description of Artificial Sequence: Synthetic oligonucleotide
caagcccaugguucgugcu

SEQ ID NO: 613512 - RNA, 19 nt, Artificial Sequence
  Description of Artificial Sequence: Synthetic oligonucleotide
ggauaugcggacgggcucu

SEQ ID NO: 613513 - RNA, 19 nt, Artificial Sequence
  Description of Artificial Sequence: Synthetic oligonucleotide
guucagcccgagggcacac

SEQ ID NO: 613514 - RNA, 19 nt, Artificial Sequence
  Description of Artificial Sequence: Synthetic oligonucleotide
cguauacguuaguuguuca

SEQ ID NO: 613515 - RNA, 19 nt, Artificial Sequence
  Description of Artificial Sequence: Synthetic oligonucleotide
gcgccaaagaucacagaaa

SEQ ID NO: 613516 - RNA, 19 nt, Artificial Sequence
  Description of Artificial Sequence: Synthetic oligonucleotide
aucgggcgccaaagaucac

SEQ ID NO: 613517 - RNA, 19 nt, Artificial Sequence
  Description of Artificial Sequence: Synthetic oligonucleotide
acgggccugucagugcuua

SEQ ID NO: 613518 - RNA, 19 nt, Artificial Sequence
  Description of Artificial Sequence: Synthetic oligonucleotide
acgcugcacuagacuuaac

SEQ ID NO: 613519 - RNA, 19 nt, Artificial Sequence
  Description of Artificial Sequence: Synthetic oligonucleotide
ggacgaguggugucuuacu

SEQ ID NO: 613520 - RNA, 19 nt, Artificial Sequence
  Description of Artificial Sequence: Synthetic oligonucleotide
ucaccgcuuggggucugua

SEQ ID NO: 613521 - RNA, 19 nt, Artificial Sequence
  Description of Artificial Sequence: Synthetic oligonucleotide
ccagaucgggucgcucagg

SEQ ID NO: 613522 - RNA, 19 nt, Artificial Sequence
  Description of Artificial Sequence: Synthetic oligonucleotide
auacaggaucgggcgccaa

SEQ ID NO: 613523 - RNA, 19 nt, Artificial Sequence
  Description of Artificial Sequence: Synthetic oligonucleotide
guacuccguuacaguguca

SEQ ID NO: 613524 - RNA, 19 nt, Artificial Sequence
  Description of Artificial Sequence: Synthetic oligonucleotide
gcggccaggaacccuccaa

SEQ ID NO: 613525 - RNA, 19 nt, Artificial Sequence
  Description of Artificial Sequence: Synthetic oligonucleotide
cagccagaucgggucgcuc

SEQ ID NO: 613526 - RNA, 19 nt, Artificial Sequence
  Description of Artificial Sequence: Synthetic oligonucleotide
ccuaggucgacuacuucuu

SEQ ID NO: 613527 - RNA, 19 nt, Artificial Sequence
  Description of Artificial Sequence: Synthetic oligonucleotide
auaugcggacgggcucuuu

SEQ ID NO: 613528 - RNA, 19 nt, Artificial Sequence
  Description of Artificial Sequence: Synthetic oligonucleotide
cagaggaguuagugcuagu

SEQ ID NO: 613529 - RNA, 19 nt, Artificial Sequence
  Description of Artificial Sequence: Synthetic oligonucleotide
ggcuaccauacagagcuuu

SEQ ID NO: 613530 - RNA, 19 nt, Artificial Sequence
  Description of Artificial Sequence: Synthetic oligonucleotide
gacuucggucgcagugacu

SEQ ID NO: 613531 - RNA, 19 nt, Artificial Sequence
  Description of Artificial Sequence: Synthetic oligonucleotide
gguucgugcuguccaguuu

SEQ ID NO: 613532 - RNA, 19 nt, Artificial Sequence
  Description of Artificial Sequence: Synthetic oligonucleotide
gaaggcugucucaccgcuu

SEQ ID NO: 613533 - RNA, 19 nt, Artificial Sequence
  Description of Artificial Sequence: Synthetic oligonucleotide
gcacuagacuuaacccaaa

SEQ ID NO: 613534 - RNA, 19 nt, Artificial Sequence
  Description of Artificial Sequence: Synthetic oligonucleotide
gauaugcggacgggcucuu

SEQ ID NO: 613535 - RNA, 19 nt, Artificial Sequence
  Description of Artificial Sequence: Synthetic oligonucleotide
ccgcuuugcccacccauaa

SEQ ID NO: 613536 - RNA, 19 nt, Artificial Sequence
  Description of Artificial Sequence: Synthetic oligonucleotide
ccguuugaaaucaggccuu

SEQ ID NO: 613537 - RNA, 19 nt, Artificial Sequence
  Description of Artificial Sequence: Synthetic oligonucleotide
gcuaccauacagagcuuuu

SEQ ID NO: 613538 - RNA, 19 nt, Artificial Sequence
  Description of Artificial Sequence: Synthetic oligonucleotide
cggucgcagugacuggaug

SEQ ID NO: 613539 - RNA, 19 nt, Artificial Sequence
  Description of Artificial Sequence: Synthetic oligonucleotide
ggacgggcucuuucuugua

SEQ ID NO: 613540 - RNA, 19 nt, Artificial Sequence
  Description of Artificial Sequence: Synthetic oligonucleotide
gugcaccuuuguagcauuu

SEQ ID NO: 613541 - RNA, 19 nt, Artificial Sequence
  Description of Artificial Sequence: Synthetic oligonucleotide
cggacgggcucuuucuugu

SEQ ID NO: 613542 - RNA, 19 nt, Artificial Sequence
  Description of Artificial Sequence: Synthetic oligonucleotide
caccaagcccaugguucgu

SEQ ID NO: 613543 - RNA, 19 nt, Artificial Sequence
  Description of Artificial Sequence: Synthetic oligonucleotide
ccgagggcacaccuccacu

SEQ ID NO: 613544 - RNA, 19 nt, Artificial Sequence
  Description of Artificial Sequence: Synthetic oligonucleotide
ggaggacgaguggugucuu

SEQ ID NO: 613545 - RNA, 19 nt, Artificial Sequence
  Description of Artificial Sequence: Synthetic oligonucleotide
gacgggccugucagugcuu

SEQ ID NO: 613546 - RNA, 19 nt, Artificial Sequence
  Description of Artificial Sequence: Synthetic oligonucleotide
cccacccauaaggaaucgu

SEQ ID NO: 613547 - RNA, 19 nt, Artificial Sequence
  Description of Artificial Sequence: Synthetic oligonucleotide
ccaggucggaagccacccu

SEQ ID NO: 613548 - RNA, 19 nt, Artificial Sequence
  Description of Artificial Sequence: Synthetic oligonucleotide
cgguguccgccgaguccac

SEQ ID NO: 613549 - RNA, 19 nt, Artificial Sequence
  Description of Artificial Sequence: Synthetic oligonucleotide
ccccuaggauggcuauagu

SEQ ID NO: 613550 - RNA, 19 nt, Artificial Sequence
  Description of Artificial Sequence: Synthetic oligonucleotide
cggcuaccauacagagcuu

SEQ ID NO: 613551 - RNA, 19 nt, Artificial Sequence
  Description of Artificial Sequence: Synthetic oligonucleotide
uguguuaauauuauucagg

SEQ ID NO: 613552 - RNA, 19 nt, Artificial Sequence
  Description of Artificial Sequence: Synthetic oligonucleotide
aaagacauuauauaccgug

SEQ ID NO: 613553 - RNA, 19 nt, Artificial Sequence
  Description of Artificial Sequence: Synthetic oligonucleotide
aagauuaaaccugaugggc

SEQ ID NO: 613554 - RNA, 19 nt, Artificial Sequence
  Description of Artificial Sequence: Synthetic oligonucleotide
acguaagaaagauuaaacc

SEQ ID NO: 613555 - RNA, 19 nt, Artificial Sequence
  Description of Artificial Sequence: Synthetic oligonucleotide
uucacuuuagcaacaacgg

SEQ ID NO: 613556 - RNA, 19 nt, Artificial Sequence
  Description of Artificial Sequence: Synthetic oligonucleotide
auaaguguauuauaaaugu

SEQ ID NO: 613557 - RNA, 19 nt, Artificial Sequence
  Description of Artificial Sequence: Synthetic oligonucleotide
uauuauacauauccaggcg

SEQ ID NO: 613558 - RNA, 19 nt, Artificial Sequence
  Description of Artificial Sequence: Synthetic oligonucleotide
uguauuauaaauguaggcu

SEQ ID NO: 613559 - RNA, 19 nt, Artificial Sequence
  Description of Artificial Sequence: Synthetic oligonucleotide
uacauaucguaguagaacc

SEQ ID NO: 613560 - RNA, 19 nt, Artificial Sequence
  Description of Artificial Sequence: Synthetic oligonucleotide
auuccuaugaagcacacca

SEQ ID NO: 613561 - RNA, 19 nt, Artificial Sequence
  Description of Artificial Sequence: Synthetic oligonucleotide
cagcuuauuauacauaucc

SEQ ID NO: 613562 - RNA, 19 nt, Artificial Sequence
  Description of Artificial Sequence: Synthetic oligonucleotide
aauauuauucaggccaagg

SEQ ID NO: 613563 - RNA, 19 nt, Artificial Sequence
  Description of Artificial Sequence: Synthetic oligonucleotide
aaaucauugcuggacacac

SEQ ID NO: 613564 - RNA, 19 nt, Artificial Sequence
  Description of Artificial Sequence: Synthetic oligonucleotide
uccaaagacauuauauacc

SEQ ID NO: 613565 - RNA, 19 nt, Artificial Sequence
  Description of Artificial Sequence: Synthetic oligonucleotide
uauugguggaccauaaaca

SEQ ID NO: 613566 - RNA, 19 nt, Artificial Sequence
  Description of Artificial Sequence: Synthetic oligonucleotide
accuuauugucccuggugc

SEQ ID NO: 613567 - RNA, 19 nt, Artificial Sequence
  Description of Artificial Sequence: Synthetic oligonucleotide
auucacuuuagcaacaacg

SEQ ID NO: 613568 - RNA, 19 nt, Artificial Sequence
  Description of Artificial Sequence: Synthetic oligonucleotide
cuuuggaccauagaaagcg

SEQ ID NO: 613569 - RNA, 19 nt, Artificial Sequence
  Description of Artificial Sequence: Synthetic oligonucleotide
uauuucaauauccccaaga

SEQ ID NO: 613570 - RNA, 19 nt, Artificial Sequence
  Description of Artificial Sequence: Synthetic oligonucleotide
auagacucuuuccauggcc

SEQ ID NO: 613571 - RNA, 19 nt, Artificial Sequence
  Description of Artificial Sequence: Synthetic oligonucleotide
uggagugccaauaaacugc

SEQ ID NO: 613572 - RNA, 19 nt, Artificial Sequence
  Description of Artificial Sequence: Synthetic oligonucleotide
auggaagaaauauaguucu

SEQ ID NO: 613573 - RNA, 19 nt, Artificial Sequence
  Description of Artificial Sequence: Synthetic oligonucleotide
uggagugacaaccuccugg

SEQ ID NO: 613574 - RNA, 19 nt, Artificial Sequence
  Description of Artificial Sequence: Synthetic oligonucleotide
cuugacuaauuccacaugc

SEQ ID NO: 613575 - RNA, 19 nt, Artificial Sequence
  Description of Artificial Sequence: Synthetic oligonucleotide
acuaccaucaccuggcgag

SEQ ID NO: 613576 - RNA, 19 nt, Artificial Sequence
  Description of Artificial Sequence: Synthetic oligonucleotide
uacguaagaaagauuaaac

SEQ ID NO: 613577 - RNA, 19 nt, Artificial Sequence
  Description of Artificial Sequence: Synthetic oligonucleotide
aacaacgguguugucagcc

SEQ ID NO: 613578 - RNA, 19 nt, Artificial Sequence
  Description of Artificial Sequence: Synthetic oligonucleotide
gauggucgcacacuggugg

SEQ ID NO: 613579 - RNA, 19 nt, Artificial Sequence
  Description of Artificial Sequence: Synthetic oligonucleotide
ucauggaagaaauauaguu

SEQ ID NO: 613580 - RNA, 19 nt, Artificial Sequence
  Description of Artificial Sequence: Synthetic oligonucleotide
uuauucaaggugcagccug

SEQ ID NO: 613581 - RNA, 19 nt, Artificial Sequence
  Description of Artificial Sequence: Synthetic oligonucleotide
aauauccggcacuugaacu

SEQ ID NO: 613582 - RNA, 19 nt, Artificial Sequence
  Description of Artificial Sequence: Synthetic oligonucleotide
ugaauuuagcaucauggaa

SEQ ID NO: 613583 - RNA, 19 nt, Artificial Sequence
  Description of Artificial Sequence: Synthetic oligonucleotide
aacauguucucacuguagu

SEQ ID NO: 613584 - RNA, 19 nt, Artificial Sequence
  Description of Artificial Sequence: Synthetic oligonucleotide
uaccgugcgaagaaaaucc

SEQ ID NO: 613585 - RNA, 19 nt, Artificial Sequence
  Description of Artificial Sequence: Synthetic oligonucleotide
ugguggaccauaaacauaa

SEQ ID NO: 613586 - RNA, 19 nt, Artificial Sequence
  Description of Artificial Sequence: Synthetic oligonucleotide
gauuaaaccugaugggcag

SEQ ID NO: 613587 - RNA, 19 nt, Artificial Sequence
  Description of Artificial Sequence: Synthetic oligonucleotide
cauggaagaaauauaguuc

SEQ ID NO: 613588 - RNA, 19 nt, Artificial Sequence
  Description of Artificial Sequence: Synthetic oligonucleotide
ucuuucgaaaguuuguuuc

SEQ ID NO: 613589 - RNA, 19 nt, Artificial Sequence
  Description of Artificial Sequence: Synthetic oligonucleotide
caaagugacuuuaauuggc

SEQ ID NO: 613590 - RNA, 19 nt, Artificial Sequence
  Description of Artificial Sequence: Synthetic oligonucleotide
cacuuuagcaacaacggug

SEQ ID NO: 613591 - RNA, 19 nt, Artificial Sequence
  Description of Artificial Sequence: Synthetic oligonucleotide
aauccagcuggauggucgc

SEQ ID NO: 613592 - RNA, 19 nt, Artificial Sequence
  Description of Artificial Sequence: Synthetic oligonucleotide
acuuuaauuggcuugcuau

SEQ ID NO: 613593 - RNA, 19 nt, Artificial Sequence
  Description of Artificial Sequence: Synthetic oligonucleotide
ugaaaugccguaaauccuc

SEQ ID NO: 613594 - RNA, 19 nt, Artificial Sequence
  Description of Artificial Sequence: Synthetic oligonucleotide
auauuauucaggccaagga

SEQ ID NO: 613595 - RNA, 19 nt, Artificial Sequence
  Description of Artificial Sequence: Synthetic oligonucleotide
aguguauuauaaauguagg

SEQ ID NO: 613596 - RNA, 19 nt, Artificial Sequence
  Description of Artificial Sequence: Synthetic oligonucleotide
ucaccaaacucauucaaac

SEQ ID NO: 613597 - RNA, 19 nt, Artificial Sequence
  Description of Artificial Sequence: Synthetic oligonucleotide
cuauugguggaccauaaac

SEQ ID NO: 613598 - RNA, 19 nt, Artificial Sequence
  Description of Artificial Sequence: Synthetic oligonucleotide
agaaaucauugcuggacac

SEQ ID NO: 613599 - RNA, 19 nt, Artificial Sequence
  Description of Artificial Sequence: Synthetic oligonucleotide
auauucaucacauguugga

SEQ ID NO: 613600 - RNA, 19 nt, Artificial Sequence
  Description of Artificial Sequence: Synthetic oligonucleotide
uuauauaccgugcgaagaa

SEQ ID NO: 613601 - RNA, 19 nt, Artificial Sequence
  Description of Artificial Sequence: Synthetic oligonucleotide
aaucuucggacucucguga

SEQ ID NO: 613602 - RNA, 19 nt, Artificial Sequence
  Description of Artificial Sequence: Synthetic oligonucleotide
auaguuuucugugaggaug

SEQ ID NO: 613603 - RNA, 19 nt, Artificial Sequence
  Description of Artificial Sequence: Synthetic oligonucleotide
gcuuauuauacauauccag

SEQ ID NO: 613604 - RNA, 19 nt, Artificial Sequence
  Description of Artificial Sequence: Synthetic oligonucleotide
agaaucaugcucugcuuuc

SEQ ID NO: 613605 - RNA, 19 nt, Artificial Sequence
  Description of Artificial Sequence: Synthetic oligonucleotide
uuuccuauauucacuccug

SEQ ID NO: 613606 - RNA, 19 nt, Artificial Sequence
  Description of Artificial Sequence: Synthetic oligonucleotide
gaaccuuuugggcauauuc

SEQ ID NO: 613607 - RNA, 19 nt, Artificial Sequence
  Description of Artificial Sequence: Synthetic oligonucleotide
uuuggagugacaaccuccu

SEQ ID NO: 613608 - RNA, 19 nt, Artificial Sequence
  Description of Artificial Sequence: Synthetic oligonucleotide
ucaaggugcagccuggauc

SEQ ID NO: 613609 - RNA, 19 nt, Artificial Sequence
  Description of Artificial Sequence: Synthetic oligonucleotide
uuguugccgaaccuuuugg

SEQ ID NO: 613610 - RNA, 19 nt, Artificial Sequence
  Description of Artificial Sequence: Synthetic oligonucleotide
uguugccgaaccuuuuggg

SEQ ID NO: 613611 - RNA, 19 nt, Artificial Sequence
  Description of Artificial Sequence: Synthetic oligonucleotide
ugacuaauuccacaugcaa

SEQ ID NO: 613612 - RNA, 19 nt, Artificial Sequence
  Description of Artificial Sequence: Synthetic oligonucleotide
ucuguaugucaaucuuugg

SEQ ID NO: 613613 - RNA, 19 nt, Artificial Sequence
  Description of Artificial Sequence: Synthetic oligonucleotide
auugguggaccauaaacau

SEQ ID NO: 613614 - RNA, 19 nt, Artificial Sequence
  Description of Artificial Sequence: Synthetic oligonucleotide
uugacuaauuccacaugca

SEQ ID NO: 613615 - RNA, 19 nt, Artificial Sequence
  Description of Artificial Sequence: Synthetic oligonucleotide
uuacguaagaaagauuaaa

SEQ ID NO: 613616 - RNA, 19 nt, Artificial Sequence
  Description of Artificial Sequence: Synthetic oligonucleotide
gaaucuucggacucucgug

SEQ ID NO: 613617 - RNA, 19 nt, Artificial Sequence
  Description of Artificial Sequence: Synthetic oligonucleotide
agguacauaucguaguaga

SEQ ID NO: 613618 - RNA, 19 nt, Artificial Sequence
  Description of Artificial Sequence: Synthetic oligonucleotide
auuauauaccgugcgaaga

SEQ ID NO: 613619 - RNA, 19 nt, Artificial Sequence
  Description of Artificial Sequence: Synthetic oligonucleotide
cugugagagccccagagag

SEQ ID NO: 613620 - RNA, 19 nt, Artificial Sequence
  Description of Artificial Sequence: Synthetic oligonucleotide
accccauuaaugugggcac

SEQ ID NO: 613621 - RNA, 19 nt, Artificial Sequence
  Description of Artificial Sequence: Synthetic oligonucleotide
ucugauauggugugguuuu

SEQ ID NO: 613622 - RNA, 19 nt, Artificial Sequence
  Description of Artificial Sequence: Synthetic oligonucleotide
ucacuuuagcaacaacggu

SEQ ID NO: 613623 - RNA, 19 nt, Artificial Sequence
  Description of Artificial Sequence: Synthetic oligonucleotide
acauaucguaguagaaccc

SEQ ID NO: 613624 - RNA, 19 nt, Artificial Sequence
  Description of Artificial Sequence: Synthetic oligonucleotide
gaauuuagcaucauggaau

SEQ ID NO: 613625 - RNA, 19 nt, Artificial Sequence
  Description of Artificial Sequence: Synthetic oligonucleotide
aaccuuuugggcauauuca

SEQ ID NO: 613626 - RNA, 19 nt, Artificial Sequence
  Description of Artificial Sequence: Synthetic oligonucleotide
auggucgaacauaagacag

SEQ ID NO: 613627 - RNA, 19 nt, Artificial Sequence
  Description of Artificial Sequence: Synthetic oligonucleotide
aggccaaggauucaacucu

SEQ ID NO: 613628 - RNA, 19 nt, Artificial Sequence
  Description of Artificial Sequence: Synthetic oligonucleotide
uuuggaccauagaaagcgc

SEQ ID NO: 613629 - RNA, 19 nt, Artificial Sequence
  Description of Artificial Sequence: Synthetic oligonucleotide
uccucguuuccuauauuca

SEQ ID NO: 613630 - RNA, 19 nt, Artificial Sequence
  Description of Artificial Sequence: Synthetic oligonucleotide
auaccgugcgaagaaaauc

SEQ ID NO: 613631 - RNA, 19 nt, Artificial Sequence
  Description of Artificial Sequence: Synthetic oligonucleotide
guacauaucguaguagaac

SEQ ID NO: 613632 - RNA, 19 nt, Artificial Sequence
  Description of Artificial Sequence: Synthetic oligonucleotide
aaucuuucgaaaguuuguu

SEQ ID NO: 613633 - RNA, 19 nt, Artificial Sequence
  Description of Artificial Sequence: Synthetic oligonucleotide
uauucaucacauguuggac

SEQ ID NO: 613634 - RNA, 19 nt, Artificial Sequence
  Description of Artificial Sequence: Synthetic oligonucleotide
guugccgaaccuuuugggc

SEQ ID NO: 613635 - RNA, 19 nt, Artificial Sequence
  Description of Artificial Sequence: Synthetic oligonucleotide
cuguaugucaaucuuugga

SEQ ID NO: 613636 - RNA, 19 nt, Artificial Sequence
  Description of Artificial Sequence: Synthetic oligonucleotide
gcaacaacgguguugucag

SEQ ID NO: 613637 - RNA, 19 nt, Artificial Sequence
  Description of Artificial Sequence: Synthetic oligonucleotide
uauaccgugcgaagaaaau

SEQ ID NO: 613638 - RNA, 19 nt, Artificial Sequence
  Description of Artificial Sequence: Synthetic oligonucleotide
ucguuuccuauauucacuc

SEQ ID NO: 613639 - RNA, 19 nt, Artificial Sequence
  Description of Artificial Sequence: Synthetic oligonucleotide
ucugugaggauggcaauca

SEQ ID NO: 613640 - RNA, 19 nt, Artificial Sequence
  Description of Artificial Sequence: Synthetic oligonucleotide
ucugacaugagggccccgg

SEQ ID NO: 613641 - RNA, 19 nt, Artificial Sequence
  Description of Artificial Sequence: Synthetic oligonucleotide
cauuucuaguaaugucucc

SEQ ID NO: 613642 - RNA, 19 nt, Artificial Sequence
  Description of Artificial Sequence: Synthetic oligonucleotide
uucauucaauauccggcac

SEQ ID NO: 613643 - RNA, 19 nt, Artificial Sequence
  Description of Artificial Sequence: Synthetic oligonucleotide
aucuguaugucaaucuuug

SEQ ID NO: 613644 - RNA, 19 nt, Artificial Sequence
  Description of Artificial Sequence: Synthetic oligonucleotide
ucaacucugcucgaccucc

SEQ ID NO: 613645 - RNA, 19 nt, Artificial Sequence
  Description of Artificial Sequence: Synthetic oligonucleotide
aagaaacuuuucuggccga

SEQ ID NO: 613646 - RNA, 19 nt, Artificial Sequence
  Description of Artificial Sequence: Synthetic oligonucleotide
accuauagacaguuguggu

SEQ ID NO: 613647 - RNA, 19 nt, Artificial Sequence
  Description of Artificial Sequence: Synthetic oligonucleotide
aggaccuuggccgaugguc

SEQ ID NO: 613648 - RNA, 19 nt, Artificial Sequence
  Description of Artificial Sequence: Synthetic oligonucleotide
uggcacagaauaugugugc

SEQ ID NO: 613649 - RNA, 19 nt, Artificial Sequence
  Description of Artificial Sequence: Synthetic oligonucleotide
guuuggagugacaaccucc

SEQ ID NO: 613650 - RNA, 19 nt, Artificial Sequence
  Description of Artificial Sequence: Synthetic oligonucleotide
agauuaaaccugaugggca

SEQ ID NO: 613651 - RNA, 19 nt, Artificial Sequence
  Description of Artificial Sequence: Synthetic oligonucleotide
uuccuauauucacuccuga

SEQ ID NO: 613652 - RNA, 19 nt, Artificial Sequence
  Description of Artificial Sequence: Synthetic oligonucleotide
aauauaguucuuggucccu

SEQ ID NO: 613653 - RNA, 19 nt, Artificial Sequence
  Description of Artificial Sequence: Synthetic oligonucleotide
uucuauugguggaccauaa

SEQ ID NO: 613654 - RNA, 19 nt, Artificial Sequence
  Description of Artificial Sequence: Synthetic oligonucleotide
agcaacaacgguguuguca

SEQ ID NO: 613655 - RNA, 19 nt, Artificial Sequence
  Description of Artificial Sequence: Synthetic oligonucleotide
guggaccauaaacauaaac

SEQ ID NO: 613656 - RNA, 19 nt, Artificial Sequence
  Description of Artificial Sequence: Synthetic oligonucleotide
gugcgaagaaaauccaaac

SEQ ID NO: 613657 - RNA, 19 nt, Artificial Sequence
  Description of Artificial Sequence: Synthetic oligonucleotide
auuauucaggccaaggauu

SEQ ID NO: 613658 - RNA, 19 nt, Artificial Sequence
  Description of Artificial Sequence: Synthetic oligonucleotide
auguaggcuccuuugggca

SEQ ID NO: 613659 - RNA, 19 nt, Artificial Sequence
  Description of Artificial Sequence: Synthetic oligonucleotide
ugauauggugugguuuucc

SEQ ID NO: 613660 - RNA, 19 nt, Artificial Sequence
  Description of Artificial Sequence: Synthetic oligonucleotide
caauauccggcacuugaac

SEQ ID NO: 613661 - RNA, 19 nt, Artificial Sequence
  Description of Artificial Sequence: Synthetic oligonucleotide
gcgaagaaaauccaaacaa

SEQ ID NO: 613662 - RNA, 19 nt, Artificial Sequence
  Description of Artificial Sequence: Synthetic oligonucleotide
uggucgaacauaagacagu

SEQ ID NO: 613663 - RNA, 19 nt, Artificial Sequence
  Description of Artificial Sequence: Synthetic oligonucleotide
cucaccccauuaauguggg

SEQ ID NO: 613664 - RNA, 19 nt, Artificial Sequence
  Description of Artificial Sequence: Synthetic oligonucleotide
auauaguucuuggucccuc

SEQ ID NO: 613665 - RNA, 19 nt, Artificial Sequence
  Description of Artificial Sequence: Synthetic oligonucleotide
uugguuccauauuucaaua

SEQ ID NO: 613666 - RNA, 19 nt, Artificial Sequence
  Description of Artificial Sequence: Synthetic oligonucleotide
auauccggcacuugaacuu

SEQ ID NO: 613667 - RNA, 19 nt, Artificial Sequence
  Description of Artificial Sequence: Synthetic oligonucleotide
aucguaguagaacccauuu

SEQ ID NO: 613668 - RNA, 19 nt, Artificial Sequence
  Description of Artificial Sequence: Synthetic oligonucleotide
uguuuggagugacaaccuc

SEQ ID NO: 613669 - RNA, 19 nt, Artificial Sequence
  Description of Artificial Sequence: Synthetic oligonucleotide
uuaaaccugaugggcagcu

SEQ ID NO: 613670 - RNA, 19 nt, Artificial Sequence
  Description of Artificial Sequence: Synthetic oligonucleotide
acagaauaugugugcguca

SEQ ID NO: 613671 - RNA, 19 nt, Artificial Sequence
  Description of Artificial Sequence: Synthetic oligonucleotide
uguuggacccacaggcacu

SEQ ID NO: 613672 - RNA, 19 nt, Artificial Sequence
  Description of Artificial Sequence: Synthetic oligonucleotide
acuuuucuggccgaguaga

SEQ ID NO: 613673 - RNA, 19 nt, Artificial Sequence
  Description of Artificial Sequence: Synthetic oligonucleotide
aagugacuuuaauuggcuu

SEQ ID NO: 613674 - RNA, 19 nt, Artificial Sequence
  Description of Artificial Sequence: Synthetic oligonucleotide
gccguaaauccucuggagg

SEQ ID NO: 613675 - RNA, 19 nt, Artificial Sequence
  Description of Artificial Sequence: Synthetic oligonucleotide
uaucaaagggccacaccua

SEQ ID NO: 613676 - RNA, 19 nt, Artificial Sequence
  Description of Artificial Sequence: Synthetic oligonucleotide
acucucgugaguccuguga

SEQ ID NO: 613677 - RNA, 19 nt, Artificial Sequence
  Description of Artificial Sequence: Synthetic oligonucleotide
cuccccguggaccuuauug

SEQ ID NO: 613678 - RNA, 19 nt, Artificial Sequence
  Description of Artificial Sequence: Synthetic oligonucleotide
aacgguguugucagccagg

SEQ ID NO: 613679 - RNA, 19 nt, Artificial Sequence
  Description of Artificial Sequence: Synthetic oligonucleotide
ucuauugguggaccauaaa

SEQ ID NO: 613680 - RNA, 19 nt, Artificial Sequence
  Description of Artificial Sequence: Synthetic oligonucleotide
gcuuacguaagaaagauua

SEQ ID NO: 613681 - RNA, 19 nt, Artificial Sequence
  Description of Artificial Sequence: Synthetic oligonucleotide
uggccucaccccauuaaug

SEQ ID NO: 613682 - RNA, 19 nt, Artificial Sequence
  Description of Artificial Sequence: Synthetic oligonucleotide
uuucuaguaaugucuccuu

SEQ ID NO: 613683 - RNA, 19 nt, Artificial Sequence
  Description of Artificial Sequence: Synthetic oligonucleotide
cucgugaguccugugagag

SEQ ID NO: 613684 - RNA, 19 nt, Artificial Sequence
  Description of Artificial Sequence: Synthetic oligonucleotide
aaucugauauggugugguu

SEQ ID NO: 613685 - RNA, 19 nt, Artificial Sequence
  Description of Artificial Sequence: Synthetic oligonucleotide
ugcgggauugcuugagcug

SEQ ID NO: 613686 - RNA, 19 nt, Artificial Sequence
  Description of Artificial Sequence: Synthetic oligonucleotide
cacagaauaugugugcguc

SEQ ID NO: 613687 - RNA, 19 nt, Artificial Sequence
  Description of Artificial Sequence: Synthetic oligonucleotide
uuuggggucagggaaugaa

SEQ ID NO: 613688 - RNA, 19 nt, Artificial Sequence
  Description of Artificial Sequence: Synthetic oligonucleotide
acgguguugucagccaggc

SEQ ID NO: 613689 - RNA, 19 nt, Artificial Sequence
  Description of Artificial Sequence: Synthetic oligonucleotide
uccccguggaccuuauugu

SEQ ID NO: 613690 - RNA, 19 nt, Artificial Sequence
  Description of Artificial Sequence: Synthetic oligonucleotide
uggcuuacguaagaaagau

SEQ ID NO: 613691 - RNA, 19 nt, Artificial Sequence
  Description of Artificial Sequence: Synthetic oligonucleotide
augcaaucugauauggugu

SEQ ID NO: 613692 - RNA, 19 nt, Artificial Sequence
  Description of Artificial Sequence: Synthetic oligonucleotide
uuucgaaaguuuguuucuc

SEQ ID NO: 613693 - RNA, 19 nt, Artificial Sequence
  Description of Artificial Sequence: Synthetic oligonucleotide
ucauuccuaugaagcacac

SEQ ID NO: 613694 - RNA, 19 nt, Artificial Sequence
  Description of Artificial Sequence: Synthetic oligonucleotide
uauacauauccaggcgugu

SEQ ID NO: 613695 - RNA, 19 nt, Artificial Sequence
  Description of Artificial Sequence: Synthetic oligonucleotide
aggucaauguccaccauga

SEQ ID NO: 613696 - RNA, 19 nt, Artificial Sequence
  Description of Artificial Sequence: Synthetic oligonucleotide
aagcuccaaagugcagucg

SEQ ID NO: 613697 - RNA, 19 nt, Artificial Sequence
  Description of Artificial Sequence: Synthetic oligonucleotide
aacaaccaggaugaaguua

SEQ ID NO: 613698 - RNA, 19 nt, Artificial Sequence
  Description of Artificial Sequence: Synthetic oligonucleotide
cguaguagaacccauuuuc

SEQ ID NO: 613699 - RNA, 19 nt, Artificial Sequence
  Description of Artificial Sequence: Synthetic oligonucleotide
uaucguaguagaacccauu

SEQ ID NO: 613700 - RNA, 19 nt, Artificial Sequence
  Description of Artificial Sequence: Synthetic oligonucleotide
uauauaccgugcgaagaaa

SEQ ID NO: 613701 - RNA, 19 nt, Artificial Sequence
  Description of Artificial Sequence: Synthetic oligonucleotide
uugguggaccauaaacaua

SEQ ID NO: 613702 - RNA, 19 nt, Artificial Sequence
  Description of Artificial Sequence: Synthetic oligonucleotide
cucggugaacaaucacggg

SEQ ID NO: 613703 - RNA, 19 nt, Artificial Sequence
  Description of Artificial Sequence: Synthetic oligonucleotide
agcuuauuauacauaucca

SEQ ID NO: 613704 - RNA, 19 nt, Artificial Sequence
  Description of Artificial Sequence: Synthetic oligonucleotide
guacuuaaacauuucuagu

SEQ ID NO: 613705 - RNA, 19 nt, Artificial Sequence
  Description of Artificial Sequence: Synthetic oligonucleotide
ugugcuaacugugcauuuc

SEQ ID NO: 613706 - RNA, 19 nt, Artificial Sequence
  Description of Artificial Sequence: Synthetic oligonucleotide
cauaucguaguagaaccca

SEQ ID NO: 613707 - RNA, 19 nt, Artificial Sequence
  Description of Artificial Sequence: Synthetic oligonucleotide
uuccuaugaagcacaccaa

SEQ ID NO: 613708 - RNA, 19 nt, Artificial Sequence
  Description of Artificial Sequence: Synthetic oligonucleotide
auggugugguuuuccagga

SEQ ID NO: 613709 - RNA, 19 nt, Artificial Sequence
  Description of Artificial Sequence: Synthetic oligonucleotide
ucuucggacucucgugagu

SEQ ID NO: 613710 - RNA, 19 nt, Artificial Sequence
  Description of Artificial Sequence: Synthetic oligonucleotide
gagaacauguucucacugu

SEQ ID NO: 613711 - RNA, 19 nt, Artificial Sequence
  Description of Artificial Sequence: Synthetic oligonucleotide
uucaacucugcucgaccuc

SEQ ID NO: 613712 - RNA, 19 nt, Artificial Sequence
  Description of Artificial Sequence: Synthetic oligonucleotide
aucuucggacucucgugag

SEQ ID NO: 613713 - RNA, 19 nt, Artificial Sequence
  Description of Artificial Sequence: Synthetic oligonucleotide
acaccuauagacaguugug

SEQ ID NO: 613714 - RNA, 19 nt, Artificial Sequence
  Description of Artificial Sequence: Synthetic oligonucleotide
cuuacguaagaaagauuaa

SEQ ID NO: 613715 - RNA, 19 nt, Artificial Sequence
  Description of Artificial Sequence: Synthetic oligonucleotide
augaaguuauacugugcua

SEQ ID NO: 613716 - RNA, 19 nt, Artificial Sequence
  Description of Artificial Sequence: Synthetic oligonucleotide
acaacgguguugucagcca

SEQ ID NO: 613717 - RNA, 19 nt, Artificial Sequence
  Description of Artificial Sequence: Synthetic oligonucleotide
auggcuuacguaagaaaga

SEQ ID NO: 613718 - RNA, 19 nt, Artificial Sequence
  Description of Artificial Sequence: Synthetic oligonucleotide
cgauggucgaacauaagac

SEQ ID NO: 613719 - RNA, 19 nt, Artificial Sequence
  Description of Artificial Sequence: Synthetic oligonucleotide
ggcacuaccaucaccuggc

SEQ ID NO: 613720 - RNA, 19 nt, Artificial Sequence
  Description of Artificial Sequence: Synthetic oligonucleotide
cuucggacucucgugaguc

SEQ ID NO: 613721 - RNA, 19 nt, Artificial Sequence
  Description of Artificial Sequence: Synthetic oligonucleotide
ccaacaaccaggaugaagu

SEQ ID NO: 613722 - RNA, 19 nt, Artificial Sequence
  Description of Artificial Sequence: Synthetic oligonucleotide
auauccaggcguguguuaa

SEQ ID NO: 613723 - RNA, 19 nt, Artificial Sequence
  Description of Artificial Sequence: Synthetic oligonucleotide
cauuaaugugggcacugga

SEQ ID NO: 613724 - RNA, 19 nt, Artificial Sequence
  Description of Artificial Sequence: Synthetic oligonucleotide
gagccggcuauugaagaug

SEQ ID NO: 613725 - RNA, 19 nt, Artificial Sequence
  Description of Artificial Sequence: Synthetic oligonucleotide
cacaccuauagacaguugu

SEQ ID NO: 613726 - RNA, 19 nt, Artificial Sequence
  Description of Artificial Sequence: Synthetic oligonucleotide
uuggagugacaaccuccug

SEQ ID NO: 613727 - RNA, 19 nt, Artificial Sequence
  Description of Artificial Sequence: Synthetic oligonucleotide
ggagugacaaccuccugga

SEQ ID NO: 613728 - RNA, 19 nt, Artificial Sequence
  Description of Artificial Sequence: Synthetic oligonucleotide
cguaagaaagauuaaaccu

SEQ ID NO: 613729 - RNA, 19 nt, Artificial Sequence
  Description of Artificial Sequence: Synthetic oligonucleotide
uucggacucucgugagucc

SEQ ID NO: 613730 - RNA, 19 nt, Artificial Sequence
  Description of Artificial Sequence: Synthetic oligonucleotide
cuuucgaaaguuuguuucu

SEQ ID NO: 613731 - RNA, 19 nt, Artificial Sequence
  Description of Artificial Sequence: Synthetic oligonucleotide
auauaccgugcgaagaaaa

SEQ ID NO: 613732 - RNA, 19 nt, Artificial Sequence
  Description of Artificial Sequence: Synthetic oligonucleotide
ccuuauugucccuggugcg

SEQ ID NO: 613733 - RNA, 19 nt, Artificial Sequence
  Description of Artificial Sequence: Synthetic oligonucleotide
caucacauguuggacccac

SEQ ID NO: 613734 - RNA, 19 nt, Artificial Sequence
  Description of Artificial Sequence: Synthetic oligonucleotide
aagaaagauuaaaccugau

SEQ ID NO: 613735 - RNA, 19 nt, Artificial Sequence
  Description of Artificial Sequence: Synthetic oligonucleotide
cagagaaucaugcucugcu

SEQ ID NO: 613736 - RNA, 19 nt, Artificial Sequence
  Description of Artificial Sequence: Synthetic oligonucleotide
agagccggcuauugaagau

SEQ ID NO: 613737 - RNA, 19 nt, Artificial Sequence
  Description of Artificial Sequence: Synthetic oligonucleotide
uuggaacuucucccacucu

SEQ ID NO: 613738 - RNA, 19 nt, Artificial Sequence
  Description of Artificial Sequence: Synthetic oligonucleotide
uccaggucccaaacaacuu

SEQ ID NO: 613739 - RNA, 19 nt, Artificial Sequence
  Description of Artificial Sequence: Synthetic oligonucleotide
gaauccucguuuccuauau

SEQ ID NO: 613740 - RNA, 19 nt, Artificial Sequence
  Description of Artificial Sequence: Synthetic oligonucleotide
auggccucaccccauuaau

SEQ ID NO: 613741 - RNA, 19 nt, Artificial Sequence
  Description of Artificial Sequence: Synthetic oligonucleotide
aucugauauggugugguuu

SEQ ID NO: 613742 - RNA, 19 nt, Artificial Sequence
  Description of Artificial Sequence: Synthetic oligonucleotide
gccaauaaacugccugugc

SEQ ID NO: 613743 - RNA, 19 nt, Artificial Sequence
  Description of Artificial Sequence: Synthetic oligonucleotide
aauccucguuuccuauauu

SEQ ID NO: 613744 - RNA, 19 nt, Artificial Sequence
  Description of Artificial Sequence: Synthetic oligonucleotide
ccucguuuccuauauucac

SEQ ID NO: 613745 - RNA, 19 nt, Artificial Sequence
  Description of Artificial Sequence: Synthetic oligonucleotide
uauucaggccaaggauuca

SEQ ID NO: 613746 - RNA, 19 nt, Artificial Sequence
  Description of Artificial Sequence: Synthetic oligonucleotide
cguguguuaauauuauuca

SEQ ID NO: 613747 - RNA, 19 nt, Artificial Sequence
  Description of Artificial Sequence: Synthetic oligonucleotide
uuggccgauggucgaacau

SEQ ID NO: 613748 - RNA, 19 nt, Artificial Sequence
  Description of Artificial Sequence: Synthetic oligonucleotide
ggagugccaauaaacugcc

SEQ ID NO: 613749 - RNA, 19 nt, Artificial Sequence
  Description of Artificial Sequence: Synthetic oligonucleotide
ugacaaccuccuggaaucc

SEQ ID NO: 613750 - RNA, 19 nt, Artificial Sequence
  Description of Artificial Sequence: Synthetic oligonucleotide
auucaggccaaggauucaa

SEQ ID NO: 613751 - RNA, 19 nt, Artificial Sequence
  Description of Artificial Sequence: Synthetic oligonucleotide
agggaaugaaaugccguaa

SEQ ID NO: 613752 - RNA, 19 nt, Artificial Sequence
  Description of Artificial Sequence: Synthetic oligonucleotide
cuaccaucaccuggcgagg

SEQ ID NO: 613753 - RNA, 19 nt, Artificial Sequence
  Description of Artificial Sequence: Synthetic oligonucleotide
ggauugcuugagcugcugc

SEQ ID NO: 613754 - RNA, 19 nt, Artificial Sequence
  Description of Artificial Sequence: Synthetic oligonucleotide
gagaagcuccaaagugcag

SEQ ID NO: 613755 - RNA, 19 nt, Artificial Sequence
  Description of Artificial Sequence: Synthetic oligonucleotide
agggccacaccuauagaca

SEQ ID NO: 613756 - RNA, 19 nt, Artificial Sequence
  Description of Artificial Sequence: Synthetic oligonucleotide
ucccucccaaucuuccuau

SEQ ID NO: 613757 - RNA, 19 nt, Artificial Sequence
  Description of Artificial Sequence: Synthetic oligonucleotide
cucguuuccuauauucacu

SEQ ID NO: 613758 - RNA, 19 nt, Artificial Sequence
  Description of Artificial Sequence: Synthetic oligonucleotide
auaucguaguagaacccau

SEQ ID NO: 613759 - RNA, 19 nt, Artificial Sequence
  Description of Artificial Sequence: Synthetic oligonucleotide
cagggaaugaaaugccgua

SEQ ID NO: 613760 - RNA, 19 nt, Artificial Sequence
  Description of Artificial Sequence: Synthetic oligonucleotide
ccuauauucacuccugaua

SEQ ID NO: 613761 - RNA, 19 nt, Artificial Sequence
  Description of Artificial Sequence: Synthetic oligonucleotide
ccgauggucgaacauaaga

SEQ ID NO: 613762 - RNA, 19 nt, Artificial Sequence
  Description of Artificial Sequence: Synthetic oligonucleotide
guggaccuuauugucccug

SEQ ID NO: 613763 - RNA, 19 nt, Artificial Sequence
  Description of Artificial Sequence: Synthetic oligonucleotide
gucuuaaucuugccagugu

SEQ ID NO: 613764 - RNA, 19 nt, Artificial Sequence
  Description of Artificial Sequence: Synthetic oligonucleotide
ucccaguauguggaggaau

SEQ ID NO: 613765 - RNA, 19 nt, Artificial Sequence
  Description of Artificial Sequence: Synthetic oligonucleotide
acaugcaaucugauauggu

SEQ ID NO: 613766 - RNA, 19 nt, Artificial Sequence
  Description of Artificial Sequence: Synthetic oligonucleotide
ugguuggaguauucacuuu

SEQ ID NO: 613767 - RNA, 19 nt, Artificial Sequence
  Description of Artificial Sequence: Synthetic oligonucleotide
gcgggauugcuugagcugc

SEQ ID NO: 613768 - RNA, 19 nt, Artificial Sequence
  Description of Artificial Sequence: Synthetic oligonucleotide
caacaacgguguugucagc

SEQ ID NO: 613769 - RNA, 19 nt, Artificial Sequence
  Description of Artificial Sequence: Synthetic oligonucleotide
ucaccccauuaaugugggc

SEQ ID NO: 613770 - RNA, 19 nt, Artificial Sequence
  Description of Artificial Sequence: Synthetic oligonucleotide
agccggcuauugaagaugu

SEQ ID NO: 613771 - RNA, 19 nt, Artificial Sequence
  Description of Artificial Sequence: Synthetic oligonucleotide
gaauuguugccgaaccuuu

SEQ ID NO: 613772 - RNA, 19 nt, Artificial Sequence
  Description of Artificial Sequence: Synthetic oligonucleotide
ugcagucgcuccacaguuu

SEQ ID NO: 613773 - RNA, 19 nt, Artificial Sequence
  Description of Artificial Sequence: Synthetic oligonucleotide
gaaaugccguaaauccucu

SEQ ID NO: 613774 - RNA, 19 nt, Artificial Sequence
  Description of Artificial Sequence: Synthetic oligonucleotide
auagacaguugugguugga

SEQ ID NO: 613775 - RNA, 19 nt, Artificial Sequence
  Description of Artificial Sequence: Synthetic oligonucleotide
acgggccucuucuugucau

SEQ ID NO: 613776 - RNA, 19 nt, Artificial Sequence
  Description of Artificial Sequence: Synthetic oligonucleotide
ccaccauagacucuuucca

SEQ ID NO: 613777 - RNA, 19 nt, Artificial Sequence
  Description of Artificial Sequence: Synthetic oligonucleotide
gguacauaucguaguagaa

SEQ ID NO: 613778 - RNA, 19 nt, Artificial Sequence
  Description of Artificial Sequence: Synthetic oligonucleotide
gaggucuaucaaagggcca

SEQ ID NO: 613779 - RNA, 19 nt, Artificial Sequence
  Description of Artificial Sequence: Synthetic oligonucleotide
agugggcgguccagguccc

SEQ ID NO: 613780 - RNA, 19 nt, Artificial Sequence
  Description of Artificial Sequence: Synthetic oligonucleotide
caggcacuaccaucaccug

SEQ ID NO: 613781 - RNA, 19 nt, Artificial Sequence
  Description of Artificial Sequence: Synthetic oligonucleotide
gaaaauccagcuggauggu

SEQ ID NO: 613782 - RNA, 19 nt, Artificial Sequence
  Description of Artificial Sequence: Synthetic oligonucleotide
auucaaggugcagccugga

SEQ ID NO: 613783 - RNA, 19 nt, Artificial Sequence
  Description of Artificial Sequence: Synthetic oligonucleotide
caguggccggaggucaucc

SEQ ID NO: 613784 - RNA, 19 nt, Artificial Sequence
  Description of Artificial Sequence: Synthetic oligonucleotide
gaccuuggccgauggucga

SEQ ID NO: 613785 - RNA, 19 nt, Artificial Sequence
  Description of Artificial Sequence: Synthetic oligonucleotide
ccaaacaacuuuauucacu

SEQ ID NO: 613786 - RNA, 19 nt, Artificial Sequence
  Description of Artificial Sequence: Synthetic oligonucleotide
cugauauggugugguuuuc

SEQ ID NO: 613787 - RNA, 19 nt, Artificial Sequence
  Description of Artificial Sequence: Synthetic oligonucleotide
cacuuccaaucuuucgaaa

SEQ ID NO: 613788 - RNA, 19 nt, Artificial Sequence
  Description of Artificial Sequence: Synthetic oligonucleotide
accgugcgaagaaaaucca

SEQ ID NO: 613789 - RNA, 19 nt, Artificial Sequence
  Description of Artificial Sequence: Synthetic oligonucleotide
aggcguguguuaauauuau

SEQ ID NO: 613790 - RNA, 19 nt, Artificial Sequence
  Description of Artificial Sequence: Synthetic oligonucleotide
cuuggccgauggucgaaca

SEQ ID NO: 613791 - RNA, 19 nt, Artificial Sequence
  Description of Artificial Sequence: Synthetic oligonucleotide
gucgcacacuggugguagc

SEQ ID NO: 613792 - RNA, 19 nt, Artificial Sequence
  Description of Artificial Sequence: Synthetic oligonucleotide
auccaggcguguguuaaua

SEQ ID NO: 613793 - RNA, 19 nt, Artificial Sequence
  Description of Artificial Sequence: Synthetic oligonucleotide
gccuggauccaggucaaug

SEQ ID NO: 613794 - RNA, 19 nt, Artificial Sequence
  Description of Artificial Sequence: Synthetic oligonucleotide
gcugcgggauugcuugagc

SEQ ID NO: 613795 - RNA, 19 nt, Artificial Sequence
  Description of Artificial Sequence: Synthetic oligonucleotide
cgugcgaagaaaauccaaa

SEQ ID NO: 613796 - RNA, 19 nt, Artificial Sequence
  Description of Artificial Sequence: Synthetic oligonucleotide
cauauccaggcguguguua

SEQ ID NO: 613797 - RNA, 19 nt, Artificial Sequence
  Description of Artificial Sequence: Synthetic oligonucleotide
caggauucaguucccacuu

SEQ ID NO: 613798 - RNA, 19 nt, Artificial Sequence
  Description of Artificial Sequence: Synthetic oligonucleotide
cugcgggauugcuugagcu

SEQ ID NO: 613799 - RNA, 19 nt, Artificial Sequence
  Description of Artificial Sequence: Synthetic oligonucleotide
ggaauccucguuuccuaua

SEQ ID NO: 613800 - RNA, 19 nt, Artificial Sequence
  Description of Artificial Sequence: Synthetic oligonucleotide
caccauagacucuuuccau

SEQ ID NO: 613801 - RNA, 19 nt, Artificial Sequence
  Description of Artificial Sequence: Synthetic oligonucleotide
guuggacccacaggcacua

SEQ ID NO: 613802 - RNA, 19 nt, Artificial Sequence
  Description of Artificial Sequence: Synthetic oligonucleotide
cuuauucaaggugcagccu

SEQ ID NO: 613803 - RNA, 19 nt, Artificial Sequence
  Description of Artificial Sequence: Synthetic oligonucleotide
gucccuggugcggauguuc

SEQ ID NO: 613804 - RNA, 19 nt, Artificial Sequence
  Description of Artificial Sequence: Synthetic oligonucleotide
agccaaccgcagaggcagc

SEQ ID NO: 613805 - RNA, 19 nt, Artificial Sequence
  Description of Artificial Sequence: Synthetic oligonucleotide
ggaauuguugccgaaccuu

SEQ ID NO: 613806 - RNA, 19 nt, Artificial Sequence
  Description of Artificial Sequence: Synthetic oligonucleotide
gccgaguagaaagauucaa

SEQ ID NO: 613807 - RNA, 19 nt, Artificial Sequence
  Description of Artificial Sequence: Synthetic oligonucleotide
gacaaccuccuggaauccu

SEQ ID NO: 613808 - RNA, 19 nt, Artificial Sequence
  Description of Artificial Sequence: Synthetic oligonucleotide
gccaaggauucaacucugc

SEQ ID NO: 613809 - RNA, 19 nt, Artificial Sequence
  Description of Artificial Sequence: Synthetic oligonucleotide
ccucccaaucuuccuauga

SEQ ID NO: 613810 - RNA, 19 nt, Artificial Sequence
  Description of Artificial Sequence: Synthetic oligonucleotide
guaaauccucuggaggguu

SEQ ID NO: 613811 - RNA, 19 nt, Artificial Sequence
  Description of Artificial Sequence: Synthetic oligonucleotide
caguuuggggucagggaau

SEQ ID NO: 613812 - RNA, 19 nt, Artificial Sequence
  Description of Artificial Sequence: Synthetic oligonucleotide
ccugugagagccccagaga

SEQ ID NO: 613813 - RNA, 19 nt, Artificial Sequence
  Description of Artificial Sequence: Synthetic oligonucleotide
ccccguggaccuuauuguc

SEQ ID NO: 613814 - RNA, 19 nt, Artificial Sequence
  Description of Artificial Sequence: Synthetic oligonucleotide
cacgggccucuucuuguca

SEQ ID NO: 613815 - RNA, 19 nt, Artificial Sequence
  Description of Artificial Sequence: Synthetic oligonucleotide
ggccgauggucgaacauaa

SEQ ID NO: 613816 - RNA, 19 nt, Artificial Sequence
  Description of Artificial Sequence: Synthetic oligonucleotide
ccuauagacaguugugguu

SEQ ID NO: 613817 - RNA, 19 nt, Artificial Sequence
  Description of Artificial Sequence: Synthetic oligonucleotide
gucugacaugagggccccg

SEQ ID NO: 613818 - RNA, 19 nt, Artificial Sequence
  Description of Artificial Sequence: Synthetic oligonucleotide
ccaaggauucaacucugcu

SEQ ID NO: 613819 - RNA, 19 nt, Artificial Sequence
  Description of Artificial Sequence: Synthetic oligonucleotide
cggcacuugaacuuguugu

SEQ ID NO: 613820 - RNA, 19 nt, Artificial Sequence
  Description of Artificial Sequence: Synthetic oligonucleotide
ccgaguagaaagauucaau

SEQ ID NO: 613821 - RNA, 19 nt, Artificial Sequence
  Description of Artificial Sequence: Synthetic oligonucleotide
ucuccccguggaccuuauu

SEQ ID NO: 613822 - RNA, 19 nt, Artificial Sequence
  Description of Artificial Sequence: Synthetic oligonucleotide
agcggccgauggcaucuuu

SEQ ID NO: 613823 - RNA, 19 nt, Artificial Sequence
  Description of Artificial Sequence: Synthetic oligonucleotide
gccgauggucgaacauaag

SEQ ID NO: 613824 - RNA, 19 nt, Artificial Sequence
  Description of Artificial Sequence: Synthetic oligonucleotide
ccgugcgaagaaaauccaa

SEQ ID NO: 613825 - RNA, 19 nt, Artificial Sequence
  Description of Artificial Sequence: Synthetic oligonucleotide
agccaggccuugacuaauu

SEQ ID NO: 613826 - RNA, 19 nt, Artificial Sequence
  Description of Artificial Sequence: Synthetic oligonucleotide
ggaccuuauugucccuggu

SEQ ID NO: 613827 - RNA, 19 nt, Artificial Sequence
  Description of Artificial Sequence: Synthetic oligonucleotide
ccuuggccgauggucgaac

SEQ ID NO: 613828 - RNA, 19 nt, Artificial Sequence
  Description of Artificial Sequence: Synthetic oligonucleotide
ggcguguguuaauauuauu

SEQ ID NO: 613829 - RNA, 19 nt, Artificial Sequence
  Description of Artificial Sequence: Synthetic oligonucleotide
gaccccaggauggcucggu

SEQ ID NO: 613830 - RNA, 19 nt, Artificial Sequence
  Description of Artificial Sequence: Synthetic oligonucleotide
gguggaccauaaacauaaa

SEQ ID NO: 613831 - RNA, 19 nt, Artificial Sequence
  Description of Artificial Sequence: Synthetic oligonucleotide
cccggcagaggucuaucaa

SEQ ID NO: 613832 - RNA, 19 nt, Artificial Sequence
  Description of Artificial Sequence: Synthetic oligonucleotide
cggacucucgugaguccug

SEQ ID NO: 613833 - RNA, 19 nt, Artificial Sequence
  Description of Artificial Sequence: Synthetic oligonucleotide
gaacaaucacgggccucuu

SEQ ID NO: 613834 - RNA, 19 nt, Artificial Sequence
  Description of Artificial Sequence: Synthetic oligonucleotide
ggacucucgugaguccugu

SEQ ID NO: 613835 - RNA, 19 nt, Artificial Sequence
  Description of Artificial Sequence: Synthetic oligonucleotide
ccccggcagaggucuauca

SEQ ID NO: 613836 - RNA, 19 nt, Artificial Sequence
  Description of Artificial Sequence: Synthetic oligonucleotide
ggcuuacguaagaaagauu

SEQ ID NO: 613837 - RNA, 19 nt, Artificial Sequence
  Description of Artificial Sequence: Synthetic oligonucleotide
uagcggccgauggcaucuu

SEQ ID NO: 613838 - RNA, 19 nt, Artificial Sequence
  Description of Artificial Sequence: Synthetic oligonucleotide
gcgccaucaccaggauuca

SEQ ID NO: 613839 - RNA, 19 nt, Artificial Sequence
  Description of Artificial Sequence: Synthetic oligonucleotide
cgggauugcuugagcugcu

SEQ ID NO: 613840 - RNA, 19 nt, Artificial Sequence
  Description of Artificial Sequence: Synthetic oligonucleotide
ggccccggcagaggucuau

SEQ ID NO: 613841 - RNA, 19 nt, Artificial Sequence
  Description of Artificial Sequence: Synthetic oligonucleotide
gccggcuauugaagauguu

SEQ ID NO: 613842 - RNA, 19 nt, Artificial Sequence
  Description of Artificial Sequence: Synthetic oligonucleotide
cgaaccuuuugggcauauu

SEQ ID NO: 613843 - RNA, 19 nt, Artificial Sequence
  Description of Artificial Sequence: Synthetic oligonucleotide
gggccccggcagaggucua

SEQ ID NO: 613844 - RNA, 19 nt, Artificial Sequence
  Description of Artificial Sequence: Synthetic oligonucleotide
gauauauuggauaagaagg

SEQ ID NO: 613845 - RNA, 19 nt, Artificial Sequence
  Description of Artificial Sequence: Synthetic oligonucleotide
gauguuuguaggcagaggg

SEQ ID NO: 613846 - RNA, 19 nt, Artificial Sequence
  Description of Artificial Sequence: Synthetic oligonucleotide
cuagcuuugaauauggggc

SEQ ID NO: 613847 - RNA, 19 nt, Artificial Sequence
  Description of Artificial Sequence: Synthetic oligonucleotide
uguuuacacaguuacacgg

SEQ ID NO: 613848 - RNA, 19 nt, Artificial Sequence
  Description of Artificial Sequence: Synthetic oligonucleotide
agauauauuggauaagaag

SEQ ID NO: 613849 - RNA, 19 nt, Artificial Sequence
  Description of Artificial Sequence: Synthetic oligonucleotide
ugaaauagggcacacgccc

SEQ ID NO: 613850 - RNA, 19 nt, Artificial Sequence
  Description of Artificial Sequence: Synthetic oligonucleotide
aguguuuacacaguuacac

SEQ ID NO: 613851 - RNA, 19 nt, Artificial Sequence
  Description of Artificial Sequence: Synthetic oligonucleotide
uuacucaacacaagcaucc

SEQ ID NO: 613852 - RNA, 19 nt, Artificial Sequence
  Description of Artificial Sequence: Synthetic oligonucleotide
aaguaaauucuaaaaggac

SEQ ID NO: 613853 - RNA, 19 nt, Artificial Sequence
  Description of Artificial Sequence: Synthetic oligonucleotide
aaaucccaaguguuuacac

SEQ ID NO: 613854 - RNA, 19 nt, Artificial Sequence
  Description of Artificial Sequence: Synthetic oligonucleotide
gaagcuaagccagacagcg

SEQ ID NO: 613855 - RNA, 19 nt, Artificial Sequence
  Description of Artificial Sequence: Synthetic oligonucleotide
uuacacggagucuuuaugg

SEQ ID NO: 613856 - RNA, 19 nt, Artificial Sequence
  Description of Artificial Sequence: Synthetic oligonucleotide
cuauaagugaaauagggca

SEQ ID NO: 613857 - RNA, 19 nt, Artificial Sequence
  Description of Artificial Sequence: Synthetic oligonucleotide
cauaccuucaccuugcuuc

SEQ ID NO: 613858 - RNA, 19 nt, Artificial Sequence
  Description of Artificial Sequence: Synthetic oligonucleotide
ucuagguucaggauggugu

SEQ ID NO: 613859 - RNA, 19 nt, Artificial Sequence
  Description of Artificial Sequence: Synthetic oligonucleotide
uuuucucggagcaaucggg

SEQ ID NO: 613860 - RNA, 19 nt, Artificial Sequence
  Description of Artificial Sequence: Synthetic oligonucleotide
uauaagugaaauagggcac

SEQ ID NO: 613861 - RNA, 19 nt, Artificial Sequence
  Description of Artificial Sequence: Synthetic oligonucleotide
ucaucugccgcagugaccg

SEQ ID NO: 613862 - RNA, 19 nt, Artificial Sequence
  Description of Artificial Sequence: Synthetic oligonucleotide
gucacuuacauucacugcc

SEQ ID NO: 613863 - RNA, 19 nt, Artificial Sequence
  Description of Artificial Sequence: Synthetic oligonucleotide
cauauuguaugugugauug

SEQ ID NO: 613864 - RNA, 19 nt, Artificial Sequence
  Description of Artificial Sequence: Synthetic oligonucleotide
uguugugcugaacagugcc

SEQ ID NO: 613865 - RNA, 19 nt, Artificial Sequence
  Description of Artificial Sequence: Synthetic oligonucleotide
aauuacuaaauagucuggu

SEQ ID NO: 613866 - RNA, 19 nt, Artificial Sequence
  Description of Artificial Sequence: Synthetic oligonucleotide
gaagauucacuucccaaug

SEQ ID NO: 613867 - RNA, 19 nt, Artificial Sequence
  Description of Artificial Sequence: Synthetic oligonucleotide
cauggugcgaggaaugagg

SEQ ID NO: 613868 - RNA, 19 nt, Artificial Sequence
  Description of Artificial Sequence: Synthetic oligonucleotide
aacauagcuucaucuaaca

SEQ ID NO: 613869 - RNA, 19 nt, Artificial Sequence
  Description of Artificial Sequence: Synthetic oligonucleotide
uuuacucaacacaagcauc

SEQ ID NO: 613870 - RNA, 19 nt, Artificial Sequence
  Description of Artificial Sequence: Synthetic oligonucleotide
auuuagcuagcuuugaaua

SEQ ID NO: 613871 - RNA, 19 nt, Artificial Sequence
  Description of Artificial Sequence: Synthetic oligonucleotide
aaucccaaguguuuacaca

SEQ ID NO: 613872 - RNA, 19 nt, Artificial Sequence
  Description of Artificial Sequence: Synthetic oligonucleotide
guaugugugauuguggccc

SEQ ID NO: 613873 - RNA, 19 nt, Artificial Sequence
  Description of Artificial Sequence: Synthetic oligonucleotide
ucaaagcgcaaguaaauuc

SEQ ID NO: 613874 - RNA, 19 nt, Artificial Sequence
  Description of Artificial Sequence: Synthetic oligonucleotide
caauuacuaaauagucugg

SEQ ID NO: 613875 - RNA, 19 nt, Artificial Sequence
  Description of Artificial Sequence: Synthetic oligonucleotide
ccaauuacuaaauagucug

SEQ ID NO: 613876 - RNA, 19 nt, Artificial Sequence
  Description of Artificial Sequence: Synthetic oligonucleotide
ugggacgggaagaaaagcc

SEQ ID NO: 613877 - RNA, 19 nt, Artificial Sequence
  Description of Artificial Sequence: Synthetic oligonucleotide
uuucuauacccucugcccu

SEQ ID NO: 613878 - RNA, 19 nt, Artificial Sequence
  Description of Artificial Sequence: Synthetic oligonucleotide
ugguauaaacucuggaccu

SEQ ID NO: 613879 - RNA, 19 nt, Artificial Sequence
  Description of Artificial Sequence: Synthetic oligonucleotide
uccgguacugccagaauag

SEQ ID NO: 613880 - RNA, 19 nt, Artificial Sequence
  Description of Artificial Sequence: Synthetic oligonucleotide
ugcaacacaggccucauua

SEQ ID NO: 613881 - RNA, 19 nt, Artificial Sequence
  Description of Artificial Sequence: Synthetic oligonucleotide
gacuagguuuuguugcugg

SEQ ID NO: 613882 - RNA, 19 nt, Artificial Sequence
  Description of Artificial Sequence: Synthetic oligonucleotide
ucgucacuuacauucacug

SEQ ID NO: 613883 - RNA, 19 nt, Artificial Sequence
  Description of Artificial Sequence: Synthetic oligonucleotide
cagaauagcaccccacucc

SEQ ID NO: 613884 - RNA, 19 nt, Artificial Sequence
  Description of Artificial Sequence: Synthetic oligonucleotide
uugaacgcccuccucaaug

SEQ ID NO: 613885 - RNA, 19 nt, Artificial Sequence
  Description of Artificial Sequence: Synthetic oligonucleotide
acuuacauucacugccugg

SEQ ID NO: 613886 - RNA, 19 nt, Artificial Sequence
  Description of Artificial Sequence: Synthetic oligonucleotide
uguaucauuggcugugcca

SEQ ID NO: 613887 - RNA, 19 nt, Artificial Sequence
  Description of Artificial Sequence: Synthetic oligonucleotide
agugcauacugacugggug

SEQ ID NO: 613888 - RNA, 19 nt, Artificial Sequence
  Description of Artificial Sequence: Synthetic oligonucleotide
aaugagaccuucacuccac

SEQ ID NO: 613889 - RNA, 19 nt, Artificial Sequence
  Description of Artificial Sequence: Synthetic oligonucleotide
uuagcuagcuuugaauaug

SEQ ID NO: 613890 - RNA, 19 nt, Artificial Sequence
  Description of Artificial Sequence: Synthetic oligonucleotide
uugucauuggugaauggaa

SEQ ID NO: 613891 - RNA, 19 nt, Artificial Sequence
  Description of Artificial Sequence: Synthetic oligonucleotide
gcuagcuuugaauaugggg

SEQ ID NO: 613892 - RNA, 19 nt, Artificial Sequence
  Description of Artificial Sequence: Synthetic oligonucleotide
guguuuacacaguuacacg

SEQ ID NO: 613893 - RNA, 19 nt, Artificial Sequence
  Description of Artificial Sequence: Synthetic oligonucleotide
caugcucuaaguagggaag

SEQ ID NO: 613894 - RNA, 19 nt, Artificial Sequence
  Description of Artificial Sequence: Synthetic oligonucleotide
aguauuccggcugguagcc

SEQ ID NO: 613895 - RNA, 19 nt, Artificial Sequence
  Description of Artificial Sequence: Synthetic oligonucleotide
agugacaugcuugauguug

SEQ ID NO: 613896 - RNA, 19 nt, Artificial Sequence
  Description of Artificial Sequence: Synthetic oligonucleotide
ggcccuauaagugaaauag

SEQ ID NO: 613897 - RNA, 19 nt, Artificial Sequence
  Description of Artificial Sequence: Synthetic oligonucleotide
uuuagcuagcuuugaauau

SEQ ID NO: 613898 - RNA, 19 nt, Artificial Sequence
  Description of Artificial Sequence: Synthetic oligonucleotide
agaaagaagggaaugggcu

SEQ ID NO: 613899 - RNA, 19 nt, Artificial Sequence
  Description of Artificial Sequence: Synthetic oligonucleotide
uauuggauaagaaggcauu

SEQ ID NO: 613900 - RNA, 19 nt, Artificial Sequence
  Description of Artificial Sequence: Synthetic oligonucleotide
ucuuagugagcguccaccc

SEQ ID NO: 613901 - RNA, 19 nt, Artificial Sequence
  Description of Artificial Sequence: Synthetic oligonucleotide
ggaacucuaccuuuucucg

SEQ ID NO: 613902 - RNA, 19 nt, Artificial Sequence
  Description of Artificial Sequence: Synthetic oligonucleotide
uuguugcugggguuuauag

SEQ ID NO: 613903 - RNA, 19 nt, Artificial Sequence
  Description of Artificial Sequence: Synthetic oligonucleotide
acguucuagguucaggaug

SEQ ID NO: 613904 - RNA, 19 nt, Artificial Sequence
  Description of Artificial Sequence: Synthetic oligonucleotide
cccuauaagugaaauaggg

SEQ ID NO: 613905 - RNA, 19 nt, Artificial Sequence
  Description of Artificial Sequence: Synthetic oligonucleotide
agcaaucgggccuugucuc

SEQ ID NO: 613906 - RNA, 19 nt, Artificial Sequence
  Description of Artificial Sequence: Synthetic oligonucleotide
cugggugccauauuguaug

SEQ ID NO: 613907 - RNA, 19 nt, Artificial Sequence
  Description of Artificial Sequence: Synthetic oligonucleotide
guaaccaacagcaccuucc

SEQ ID NO: 613908 - RNA, 19 nt, Artificial Sequence
  Description of Artificial Sequence: Synthetic oligonucleotide
uacacggagucuuuauggc

SEQ ID NO: 613909 - RNA, 19 nt, Artificial Sequence
  Description of Artificial Sequence: Synthetic oligonucleotide
gagaaagaagggaaugggc

SEQ ID NO: 613910 - RNA, 19 nt, Artificial Sequence
  Description of Artificial Sequence: Synthetic oligonucleotide
cuugucucguugcaagucc

SEQ ID NO: 613911 - RNA, 19 nt, Artificial Sequence
  Description of Artificial Sequence: Synthetic oligonucleotide
aaaaucccaaguguuuaca

SEQ ID NO: 613912 - RNA, 19 nt, Artificial Sequence
  Description of Artificial Sequence: Synthetic oligonucleotide
gaagugcauacugacuggg

SEQ ID NO: 613913 - RNA, 19 nt, Artificial Sequence
  Description of Artificial Sequence: Synthetic oligonucleotide
uagcuuugaauauggggca

SEQ ID NO: 613914 - RNA, 19 nt, Artificial Sequence
  Description of Artificial Sequence: Synthetic oligonucleotide
ugccauauuguauguguga

SEQ ID NO: 613915 - RNA, 19 nt, Artificial Sequence
  Description of Artificial Sequence: Synthetic oligonucleotide
uuaaguccccaauguuagg

SEQ ID NO: 613916 - RNA, 19 nt, Artificial Sequence
  Description of Artificial Sequence: Synthetic oligonucleotide
guuacacggagucuuuaug

SEQ ID NO: 613917 - RNA, 19 nt, Artificial Sequence
  Description of Artificial Sequence: Synthetic oligonucleotide
uaaguccccaauguuaggu

SEQ ID NO: 613918 - RNA, 19 nt, Artificial Sequence
  Description of Artificial Sequence: Synthetic oligonucleotide
uaaauagucuggucauuuc

SEQ ID NO: 613919 - RNA, 19 nt, Artificial Sequence
  Description of Artificial Sequence: Synthetic oligonucleotide
ccuauaagugaaauagggc

SEQ ID NO: 613920 - RNA, 19 nt, Artificial Sequence
  Description of Artificial Sequence: Synthetic oligonucleotide
uccaacauagcuucaucua

SEQ ID NO: 613921 - RNA, 19 nt, Artificial Sequence
  Description of Artificial Sequence: Synthetic oligonucleotide
ucacuucccaauguugugc

SEQ ID NO: 613922 - RNA, 19 nt, Artificial Sequence
  Description of Artificial Sequence: Synthetic oligonucleotide
uccuaggcccuauaaguga

SEQ ID NO: 613923 - RNA, 19 nt, Artificial Sequence
  Description of Artificial Sequence: Synthetic oligonucleotide
aagauauauuggauaagaa

SEQ ID NO: 613924 - RNA, 19 nt, Artificial Sequence
  Description of Artificial Sequence: Synthetic oligonucleotide
uuaggggauuuccuuuucu

SEQ ID NO: 613925 - RNA, 19 nt, Artificial Sequence
  Description of Artificial Sequence: Synthetic oligonucleotide
auccccggcauacugaagu

SEQ ID NO: 613926 - RNA, 19 nt, Artificial Sequence
  Description of Artificial Sequence: Synthetic oligonucleotide
uuguccaagaagucagccu

SEQ ID NO: 613927 - RNA, 19 nt, Artificial Sequence
  Description of Artificial Sequence: Synthetic oligonucleotide
auaagugaaauagggcaca

SEQ ID NO: 613928 - RNA, 19 nt, Artificial Sequence
  Description of Artificial Sequence: Synthetic oligonucleotide
gauuguggcccacaugcuc

SEQ ID NO: 613929 - RNA, 19 nt, Artificial Sequence
  Description of Artificial Sequence: Synthetic oligonucleotide
agcgcaaguaaauucuaaa

SEQ ID NO: 613930 - RNA, 19 nt, Artificial Sequence
  Description of Artificial Sequence: Synthetic oligonucleotide
uguuuagccccugcagagg

SEQ ID NO: 613931 - RNA, 19 nt, Artificial Sequence
  Description of Artificial Sequence: Synthetic oligonucleotide
agcuagugaggguggguac

SEQ ID NO: 613932 - RNA, 19 nt, Artificial Sequence
  Description of Artificial Sequence: Synthetic oligonucleotide
ucgcucagcugguauuugg

SEQ ID NO: 613933 - RNA, 19 nt, Artificial Sequence
  Description of Artificial Sequence: Synthetic oligonucleotide
ggcgggaagauucacuucc

SEQ ID NO: 613934 - RNA, 19 nt, Artificial Sequence
  Description of Artificial Sequence: Synthetic oligonucleotide
gagagugggaagaguacag

SEQ ID NO: 613935 - RNA, 19 nt, Artificial Sequence
  Description of Artificial Sequence: Synthetic oligonucleotide
ccugauguaucauuggcug

SEQ ID NO: 613936 - RNA, 19 nt, Artificial Sequence
  Description of Artificial Sequence: Synthetic oligonucleotide
guacugccagaauagcacc

SEQ ID NO: 613937 - RNA, 19 nt, Artificial Sequence
  Description of Artificial Sequence: Synthetic oligonucleotide
ggcauuuaaguccccaaug

SEQ ID NO: 613938 - RNA, 19 nt, Artificial Sequence
  Description of Artificial Sequence: Synthetic oligonucleotide
agcuauaggcagcuaguga

SEQ ID NO: 613939 - RNA, 19 nt, Artificial Sequence
  Description of Artificial Sequence: Synthetic oligonucleotide
uauuuggacagcagcucau

SEQ ID NO: 613940 - RNA, 19 nt, Artificial Sequence
  Description of Artificial Sequence: Synthetic oligonucleotide
ugauuuugucauuggugaa

SEQ ID NO: 613941 - RNA, 19 nt, Artificial Sequence
  Description of Artificial Sequence: Synthetic oligonucleotide
cuuacauucacugccugga

SEQ ID NO: 613942 - RNA, 19 nt, Artificial Sequence
  Description of Artificial Sequence: Synthetic oligonucleotide
ucggucuuagugagcgucc

SEQ ID NO: 613943 - RNA, 19 nt, Artificial Sequence
  Description of Artificial Sequence: Synthetic oligonucleotide
cuagguucaggaugguguc

SEQ ID NO: 613944 - RNA, 19 nt, Artificial Sequence
  Description of Artificial Sequence: Synthetic oligonucleotide
cuuagugagcguccacccc

SEQ ID NO: 613945 - RNA, 19 nt, Artificial Sequence
  Description of Artificial Sequence: Synthetic oligonucleotide
uuuaggggauuuccuuuuc

SEQ ID NO: 613946 - RNA, 19 nt, Artificial Sequence
  Description of Artificial Sequence: Synthetic oligonucleotide
agucuuuauggcaaagaga

SEQ ID NO: 613947 - RNA, 19 nt, Artificial Sequence
  Description of Artificial Sequence: Synthetic oligonucleotide
aguuacacggagucuuuau

SEQ ID NO: 613948 - RNA, 19 nt, Artificial Sequence
  Description of Artificial Sequence: Synthetic oligonucleotide
ugauuucauccaacauagc

SEQ ID NO: 613949 - RNA, 19 nt, Artificial Sequence
  Description of Artificial Sequence: Synthetic oligonucleotide
gucuuagugagcguccacc

SEQ ID NO: 613950 - RNA, 19 nt, Artificial Sequence
  Description of Artificial Sequence: Synthetic oligonucleotide
uaggggauuuccuuuucuc

SEQ ID NO: 613951 - RNA, 19 nt, Artificial Sequence
  Description of Artificial Sequence: Synthetic oligonucleotide
auguuuguaggcagagggg

SEQ ID NO: 613952 - RNA, 19 nt, Artificial Sequence
  Description of Artificial Sequence: Synthetic oligonucleotide
guggugguagaucagcaga

SEQ ID NO: 613953 - RNA, 19 nt, Artificial Sequence
  Description of Artificial Sequence: Synthetic oligonucleotide
aaauagggcacacgcccua

SEQ ID NO: 613954 - RNA, 19 nt, Artificial Sequence
  Description of Artificial Sequence: Synthetic oligonucleotide
ucucguugcaaguccucca

SEQ ID NO: 613955 - RNA, 19 nt, Artificial Sequence
  Description of Artificial Sequence: Synthetic oligonucleotide
caaagcgcaaguaaauucu

SEQ ID NO: 613956 - RNA, 19 nt, Artificial Sequence
  Description of Artificial Sequence: Synthetic oligonucleotide
accggguugaacgcccucc

SEQ ID NO: 613957 - RNA, 19 nt, Artificial Sequence
  Description of Artificial Sequence: Synthetic oligonucleotide
cacuccagagagcuauagg

SEQ ID NO: 613958 - RNA, 19 nt, Artificial Sequence
  Description of Artificial Sequence: Synthetic oligonucleotide
ucaugcggcagaacuugga

SEQ ID NO: 613959 - RNA, 19 nt, Artificial Sequence
  Description of Artificial Sequence: Synthetic oligonucleotide
ugcaccggguugaacgccc

SEQ ID NO: 613960 - RNA, 19 nt, Artificial Sequence
  Description of Artificial Sequence: Synthetic oligonucleotide
uucuauacccucugcccuc

SEQ ID NO: 613961 - RNA, 19 nt, Artificial Sequence
  Description of Artificial Sequence: Synthetic oligonucleotide
uuacauucacugccuggaa

SEQ ID NO: 613962 - RNA, 19 nt, Artificial Sequence
  Description of Artificial Sequence: Synthetic oligonucleotide
uugucucguugcaaguccu

SEQ ID NO: 613963 - RNA, 19 nt, Artificial Sequence
  Description of Artificial Sequence: Synthetic oligonucleotide
uaugugugauuguggccca

SEQ ID NO: 613964 - RNA, 19 nt, Artificial Sequence
  Description of Artificial Sequence: Synthetic oligonucleotide
acugacccgcagucguccc

SEQ ID NO: 613965 - RNA, 19 nt, Artificial Sequence
  Description of Artificial Sequence: Synthetic oligonucleotide
cauccuaggcccuauaagu

SEQ ID NO: 613966 - RNA, 19 nt, Artificial Sequence
  Description of Artificial Sequence: Synthetic oligonucleotide
aggguagcuagggagggag

SEQ ID NO: 613967 - RNA, 19 nt, Artificial Sequence
  Description of Artificial Sequence: Synthetic oligonucleotide
ucgggagaaagaagggaau

SEQ ID NO: 613968 - RNA, 19 nt, Artificial Sequence
  Description of Artificial Sequence: Synthetic oligonucleotide
aggaggacgcugccauccc

SEQ ID NO: 613969 - RNA, 19 nt, Artificial Sequence
  Description of Artificial Sequence: Synthetic oligonucleotide
gcccacaugcucuaaguag

SEQ ID NO: 613970 - RNA, 19 nt, Artificial Sequence
  Description of Artificial Sequence: Synthetic oligonucleotide
uuggauaagaaggcauuua

SEQ ID NO: 613971 - RNA, 19 nt, Artificial Sequence
  Description of Artificial Sequence: Synthetic oligonucleotide
cucgggagaaagaagggaa

SEQ ID NO: 613972 - RNA, 19 nt, Artificial Sequence
  Description of Artificial Sequence: Synthetic oligonucleotide
ucccaguugggaagcuaag

SEQ ID NO: 613973 - RNA, 19 nt, Artificial Sequence
  Description of Artificial Sequence: Synthetic oligonucleotide
gugaaauagggcacacgcc

SEQ ID NO: 613974 - RNA, 19 nt, Artificial Sequence
  Description of Artificial Sequence: Synthetic oligonucleotide
gugcauacugacuggguga

SEQ ID NO: 613975 - RNA, 19 nt, Artificial Sequence
  Description of Artificial Sequence: Synthetic oligonucleotide
uugcgcuuucggcaguucu

SEQ ID NO: 613976 - RNA, 19 nt, Artificial Sequence
  Description of Artificial Sequence: Synthetic oligonucleotide
ugccagaauagcaccccac

SEQ ID NO: 613977 - RNA, 19 nt, Artificial Sequence
  Description of Artificial Sequence: Synthetic oligonucleotide
cauucacugccuggaaugc

SEQ ID NO: 613978 - RNA, 19 nt, Artificial Sequence
  Description of Artificial Sequence: Synthetic oligonucleotide
cucguugcaaguccuccac

SEQ ID NO: 613979 - RNA, 19 nt, Artificial Sequence
  Description of Artificial Sequence: Synthetic oligonucleotide
ugaccgcaggaacucuacc

SEQ ID NO: 613980 - RNA, 19 nt, Artificial Sequence
  Description of Artificial Sequence: Synthetic oligonucleotide
ggaccugauguaucauugg

SEQ ID NO: 613981 - RNA, 19 nt, Artificial Sequence
  Description of Artificial Sequence: Synthetic oligonucleotide
aaagccgcccaaacaccuc

SEQ ID NO: 613982 - RNA, 19 nt, Artificial Sequence
  Description of Artificial Sequence: Synthetic oligonucleotide
agagcuauaggcagcuagu

SEQ ID NO: 613983 - RNA, 19 nt, Artificial Sequence
  Description of Artificial Sequence: Synthetic oligonucleotide
gguaccacaaagagaggag

SEQ ID NO: 613984 - RNA, 19 nt, Artificial Sequence
  Description of Artificial Sequence: Synthetic oligonucleotide
guuuacacaguuacacgga

SEQ ID NO: 613985 - RNA, 19 nt, Artificial Sequence
  Description of Artificial Sequence: Synthetic oligonucleotide
uucggcaguucugugcagc

SEQ ID NO: 613986 - RNA, 19 nt, Artificial Sequence
  Description of Artificial Sequence: Synthetic oligonucleotide
cccaaagccgcccaaacac

SEQ ID NO: 613987 - RNA, 19 nt, Artificial Sequence
  Description of Artificial Sequence: Synthetic oligonucleotide
ugaguagggccucccguuc

SEQ ID NO: 613988 - RNA, 19 nt, Artificial Sequence
  Description of Artificial Sequence: Synthetic oligonucleotide
auuggauaagaaggcauuu

SEQ ID NO: 613989 - RNA, 19 nt, Artificial Sequence
  Description of Artificial Sequence: Synthetic oligonucleotide
cucaugcggcagaacuugg

SEQ ID NO: 613990 - RNA, 19 nt, Artificial Sequence
  Description of Artificial Sequence: Synthetic oligonucleotide
uggugcgaggaaugaggag

SEQ ID NO: 613991 - RNA, 19 nt, Artificial Sequence
  Description of Artificial Sequence: Synthetic oligonucleotide
guauaaacucuggaccuuc

SEQ ID NO: 613992 - RNA, 19 nt, Artificial Sequence
  Description of Artificial Sequence: Synthetic oligonucleotide
gcauccuaggcccuauaag

SEQ ID NO: 613993 - RNA, 19 nt, Artificial Sequence
  Description of Artificial Sequence: Synthetic oligonucleotide
agcauccuaggcccuauaa

SEQ ID NO: 613994 - RNA, 19 nt, Artificial Sequence
  Description of Artificial Sequence: Synthetic oligonucleotide
ccaaggagaggccugaguc

SEQ ID NO: 613995 - RNA, 19 nt, Artificial Sequence
  Description of Artificial Sequence: Synthetic oligonucleotide
aguuucggucuuagugagc

SEQ ID NO: 613996 - RNA, 19 nt, Artificial Sequence
  Description of Artificial Sequence: Synthetic oligonucleotide
auccuaggcccuauaagug

SEQ ID NO: 613997 - RNA, 19 nt, Artificial Sequence
  Description of Artificial Sequence: Synthetic oligonucleotide
ucguugcaaguccuccaca

SEQ ID NO: 613998 - RNA, 19 nt, Artificial Sequence
  Description of Artificial Sequence: Synthetic oligonucleotide
gcuuucggcaguucugugc

SEQ ID NO: 613999 - RNA, 19 nt, Artificial Sequence
  Description of Artificial Sequence: Synthetic oligonucleotide
ccccaauuacuaaauaguc

SEQ ID NO: 614000 - RNA, 19 nt, Artificial Sequence
  Description of Artificial Sequence: Synthetic oligonucleotide
gauuuugucauuggugaau

SEQ ID NO: 614001 - RNA, 19 nt, Artificial Sequence
  Description of Artificial Sequence: Synthetic oligonucleotide
cacggagucuuuauggcaa

SEQ ID NO: 614002 - RNA, 19 nt, Artificial Sequence
  Description of Artificial Sequence: Synthetic oligonucleotide
aaagcgcaaguaaauucua

SEQ ID NO: 614003 - RNA, 19 nt, Artificial Sequence
  Description of Artificial Sequence: Synthetic oligonucleotide
gcucucaugaggacagugg

SEQ ID NO: 614004 - RNA, 19 nt, Artificial Sequence
  Description of Artificial Sequence: Synthetic oligonucleotide
aagugcauacugacugggu

SEQ ID NO: 614005 - RNA, 19 nt, Artificial Sequence
  Description of Artificial Sequence: Synthetic oligonucleotide
uauacccucugcccuccuc

SEQ ID NO: 614006 - RNA, 19 nt, Artificial Sequence
  Description of Artificial Sequence: Synthetic oligonucleotide
uagcaccccacuccagaga

SEQ ID NO: 614007 - RNA, 19 nt, Artificial Sequence
  Description of Artificial Sequence: Synthetic oligonucleotide
aagcgcaaguaaauucuaa

SEQ ID NO: 614008 - RNA, 19 nt, Artificial Sequence
  Description of Artificial Sequence: Synthetic oligonucleotide
uaggcccuauaagugaaau

SEQ ID NO: 614009 - RNA, 19 nt, Artificial Sequence
  Description of Artificial Sequence: Synthetic oligonucleotide
gccaaguuccgguacugcc

SEQ ID NO: 614010 - RNA, 19 nt, Artificial Sequence
  Description of Artificial Sequence: Synthetic oligonucleotide
gucucguugcaaguccucc

SEQ ID NO: 614011 - RNA, 19 nt, Artificial Sequence
  Description of Artificial Sequence: Synthetic oligonucleotide
ugucucguugcaaguccuc

SEQ ID NO: 614012 - RNA, 19 nt, Artificial Sequence
  Description of Artificial Sequence: Synthetic oligonucleotide
ugggugccauauuguaugu

SEQ ID NO: 614013 - RNA, 19 nt, Artificial Sequence
  Description of Artificial Sequence: Synthetic oligonucleotide
uuugaauauggggcaucuc

SEQ ID NO: 614014 - RNA, 19 nt, Artificial Sequence
  Description of Artificial Sequence: Synthetic oligonucleotide
gagcaaucgggccuugucu

SEQ ID NO: 614015 - RNA, 19 nt, Artificial Sequence
  Description of Artificial Sequence: Synthetic oligonucleotide
uucccaauguugugcugaa

SEQ ID NO: 614016 - RNA, 19 nt, Artificial Sequence
  Description of Artificial Sequence: Synthetic oligonucleotide
uccccggcauacugaagug

SEQ ID NO: 614017 - RNA, 19 nt, Artificial Sequence
  Description of Artificial Sequence: Synthetic oligonucleotide
gguagaucagcagagucaa

SEQ ID NO: 614018 - RNA, 19 nt, Artificial Sequence
  Description of Artificial Sequence: Synthetic oligonucleotide
cuucuguuuagccccugca

SEQ ID NO: 614019 - RNA, 19 nt, Artificial Sequence
  Description of Artificial Sequence: Synthetic oligonucleotide
gcgaggaaugaggaggacg

SEQ ID NO: 614020 - RNA, 19 nt, Artificial Sequence
  Description of Artificial Sequence: Synthetic oligonucleotide
uuucggcaguucugugcag

SEQ ID NO: 614021 - RNA, 19 nt, Artificial Sequence
  Description of Artificial Sequence: Synthetic oligonucleotide
ccugcuuuuccuugcuacc

SEQ ID NO: 614022 - RNA, 19 nt, Artificial Sequence
  Description of Artificial Sequence: Synthetic oligonucleotide
guaucauuggcugugccau

SEQ ID NO: 614023 - RNA, 19 nt, Artificial Sequence
  Description of Artificial Sequence: Synthetic oligonucleotide
gcgcaaguaaauucuaaaa

SEQ ID NO: 614024 - RNA, 19 nt, Artificial Sequence
  Description of Artificial Sequence: Synthetic oligonucleotide
cuagaucuagggucucaga

SEQ ID NO: 614025 - RNA, 19 nt, Artificial Sequence
  Description of Artificial Sequence: Synthetic oligonucleotide
acuaaauagucuggucauu

SEQ ID NO: 614026 - RNA, 19 nt, Artificial Sequence
  Description of Artificial Sequence: Synthetic oligonucleotide
cuggggaccccaauuacua

SEQ ID NO: 614027 - RNA, 19 nt, Artificial Sequence
  Description of Artificial Sequence: Synthetic oligonucleotide
ggguaccacaaagagagga

SEQ ID NO: 614028 - RNA, 19 nt, Artificial Sequence
  Description of Artificial Sequence: Synthetic oligonucleotide
auggugcgaggaaugagga

SEQ ID NO: 614029 - RNA, 19 nt, Artificial Sequence
  Description of Artificial Sequence: Synthetic oligonucleotide
gcccuauaagugaaauagg

SEQ ID NO: 614030 - RNA, 19 nt, Artificial Sequence
  Description of Artificial Sequence: Synthetic oligonucleotide
gucgucccaucugagaaga

SEQ ID NO: 614031 - RNA, 19 nt, Artificial Sequence
  Description of Artificial Sequence: Synthetic oligonucleotide
cacugacccgcagucgucc

SEQ ID NO: 614032 - RNA, 19 nt, Artificial Sequence
  Description of Artificial Sequence: Synthetic oligonucleotide
agcuagggagggagguggc

SEQ ID NO: 614033 - RNA, 19 nt, Artificial Sequence
  Description of Artificial Sequence: Synthetic oligonucleotide
uggggaccccaauuacuaa

SEQ ID NO: 614034 - RNA, 19 nt, Artificial Sequence
  Description of Artificial Sequence: Synthetic oligonucleotide
uuucggucuuagugagcgu

SEQ ID NO: 614035 - RNA, 19 nt, Artificial Sequence
  Description of Artificial Sequence: Synthetic oligonucleotide
ccaaagccgcccaaacacc

SEQ ID NO: 614036 - RNA, 19 nt, Artificial Sequence
  Description of Artificial Sequence: Synthetic oligonucleotide
caugcuugauguuggggcu

SEQ ID NO: 614037 - RNA, 19 nt, Artificial Sequence
  Description of Artificial Sequence: Synthetic oligonucleotide
ggagagugggaagaguaca

SEQ ID NO: 614038 - RNA, 19 nt, Artificial Sequence
  Description of Artificial Sequence: Synthetic oligonucleotide
gcucaugcggcagaacuug

SEQ ID NO: 614039 - RNA, 19 nt, Artificial Sequence
  Description of Artificial Sequence: Synthetic oligonucleotide
aucgggccuugucucguug

SEQ ID NO: 614040 - RNA, 19 nt, Artificial Sequence
  Description of Artificial Sequence: Synthetic oligonucleotide
gaaauagggcacacgcccu

SEQ ID NO: 614041 - RNA, 19 nt, Artificial Sequence
  Description of Artificial Sequence: Synthetic oligonucleotide
aaguuccgguacugccaga

SEQ ID NO: 614042 - RNA, 19 nt, Artificial Sequence
  Description of Artificial Sequence: Synthetic oligonucleotide
cccacucccaguugggaag

SEQ ID NO: 614043 - RNA, 19 nt, Artificial Sequence
  Description of Artificial Sequence: Synthetic oligonucleotide
ggagcaaucgggccuuguc

SEQ ID NO: 614044 - RNA, 19 nt, Artificial Sequence
  Description of Artificial Sequence: Synthetic oligonucleotide
aaucgggccuugucucguu

SEQ ID NO: 614045 - RNA, 19 nt, Artificial Sequence
  Description of Artificial Sequence: Synthetic oligonucleotide
cuaaauagucuggucauuu

SEQ ID NO: 614046 - RNA, 19 nt, Artificial Sequence
  Description of Artificial Sequence: Synthetic oligonucleotide
gcuagugaggguggguacc

SEQ ID NO: 614047 - RNA, 19 nt, Artificial Sequence
  Description of Artificial Sequence: Synthetic oligonucleotide
agcuuugaauauggggcau

SEQ ID NO: 614048 - RNA, 19 nt, Artificial Sequence
  Description of Artificial Sequence: Synthetic oligonucleotide
ccagaauagcaccccacuc

SEQ ID NO: 614049 - RNA, 19 nt, Artificial Sequence
  Description of Artificial Sequence: Synthetic oligonucleotide
acccgcagucgucccaucu

SEQ ID NO: 614050 - RNA, 19 nt, Artificial Sequence
  Description of Artificial Sequence: Synthetic oligonucleotide
gggcuaguggcuggaaucc

SEQ ID NO: 614051 - RNA, 19 nt, Artificial Sequence
  Description of Artificial Sequence: Synthetic oligonucleotide
caaagccgcccaaacaccu

SEQ ID NO: 614052 - RNA, 19 nt, Artificial Sequence
  Description of Artificial Sequence: Synthetic oligonucleotide
ccuugcuaccuuucuugag

SEQ ID NO: 614053 - RNA, 19 nt, Artificial Sequence
  Description of Artificial Sequence: Synthetic oligonucleotide
guagaucagcagagucaag

SEQ ID NO: 614054 - RNA, 19 nt, Artificial Sequence
  Description of Artificial Sequence: Synthetic oligonucleotide
uaccuuucuugagggugcu

SEQ ID NO: 614055 - RNA, 19 nt, Artificial Sequence
  Description of Artificial Sequence: Synthetic oligonucleotide
ugggugaguagggccuccc

SEQ ID NO: 614056 - RNA, 19 nt, Artificial Sequence
  Description of Artificial Sequence: Synthetic oligonucleotide
gagcuguaaccaacagcac

SEQ ID NO: 614057 - RNA, 19 nt, Artificial Sequence
  Description of Artificial Sequence: Synthetic oligonucleotide
ccugcaccggguugaacgc

SEQ ID NO: 614058 - RNA, 19 nt, Artificial Sequence
  Description of Artificial Sequence: Synthetic oligonucleotide
gugaccgcaggaacucuac

SEQ ID NO: 614059 - RNA, 19 nt, Artificial Sequence
  Description of Artificial Sequence: Synthetic oligonucleotide
cccaauuacuaaauagucu

SEQ ID NO: 614060 - RNA, 19 nt, Artificial Sequence
  Description of Artificial Sequence: Synthetic oligonucleotide
cauccccggcauacugaag

SEQ ID NO: 614061 - RNA, 19 nt, Artificial Sequence
  Description of Artificial Sequence: Synthetic oligonucleotide
cccucgggagaaagaaggg

SEQ ID NO: 614062 - RNA, 19 nt, Artificial Sequence
  Description of Artificial Sequence: Synthetic oligonucleotide
cugauguaucauuggcugu

SEQ ID NO: 614063 - RNA, 19 nt, Artificial Sequence
  Description of Artificial Sequence: Synthetic oligonucleotide
uuggaguauuccggcuggu

SEQ ID NO: 614064 - RNA, 19 nt, Artificial Sequence
  Description of Artificial Sequence: Synthetic oligonucleotide
gguugaacgcccuccucaa

SEQ ID NO: 614065 - RNA, 19 nt, Artificial Sequence
  Description of Artificial Sequence: Synthetic oligonucleotide
gugcgaggaaugaggagga

SEQ ID NO: 614066 - RNA, 19 nt, Artificial Sequence
  Description of Artificial Sequence: Synthetic oligonucleotide
agugagugacaugcuugau

SEQ ID NO: 614067 - RNA, 19 nt, Artificial Sequence
  Description of Artificial Sequence: Synthetic oligonucleotide
ugacccgcagucgucccau

SEQ ID NO: 614068 - RNA, 19 nt, Artificial Sequence
  Description of Artificial Sequence: Synthetic oligonucleotide
ggcucucaugaggacagug

SEQ ID NO: 614069 - RNA, 19 nt, Artificial Sequence
  Description of Artificial Sequence: Synthetic oligonucleotide
cacuucccaauguugugcu

SEQ ID NO: 614070 - RNA, 19 nt, Artificial Sequence
  Description of Artificial Sequence: Synthetic oligonucleotide
aaggauccugguagcucau

SEQ ID NO: 614071 - RNA, 19 nt, Artificial Sequence
  Description of Artificial Sequence: Synthetic oligonucleotide
auccaaggagaggccugag

SEQ ID NO: 614072 - RNA, 19 nt, Artificial Sequence
  Description of Artificial Sequence: Synthetic oligonucleotide
ugcgaggaaugaggaggac

SEQ ID NO: 614073 - RNA, 19 nt, Artificial Sequence
  Description of Artificial Sequence: Synthetic oligonucleotide
gaguagggccucccguucu

SEQ ID NO: 614074 - RNA, 19 nt, Artificial Sequence
  Description of Artificial Sequence: Synthetic oligonucleotide
gugacaagcccagauguuu

SEQ ID NO: 614075 - RNA, 19 nt, Artificial Sequence
  Description of Artificial Sequence: Synthetic oligonucleotide
acaagcauccuaggcccua

SEQ ID NO: 614076 - RNA, 19 nt, Artificial Sequence
  Description of Artificial Sequence: Synthetic oligonucleotide
acaguuacacggagucuuu

SEQ ID NO: 614077 - RNA, 19 nt, Artificial Sequence
  Description of Artificial Sequence: Synthetic oligonucleotide
cacaugcucuaaguaggga

SEQ ID NO: 614078 - RNA, 19 nt, Artificial Sequence
  Description of Artificial Sequence: Synthetic oligonucleotide
cuaggcccuauaagugaaa

SEQ ID NO: 614079 - RNA, 19 nt, Artificial Sequence
  Description of Artificial Sequence: Synthetic oligonucleotide
ggucuuagugagcguccac

SEQ ID NO: 614080 - RNA, 19 nt, Artificial Sequence
  Description of Artificial Sequence: Synthetic oligonucleotide
guugugcugaacagugccu

SEQ ID NO: 614081 - RNA, 19 nt, Artificial Sequence
  Description of Artificial Sequence: Synthetic oligonucleotide
agugaccgcaggaacucua

SEQ ID NO: 614082 - RNA, 19 nt, Artificial Sequence
  Description of Artificial Sequence: Synthetic oligonucleotide
guauuccggcugguagccc

SEQ ID NO: 614083 - RNA, 19 nt, Artificial Sequence
  Description of Artificial Sequence: Synthetic oligonucleotide
cccggcauacugaagugca

SEQ ID NO: 614084 - RNA, 19 nt, Artificial Sequence
  Description of Artificial Sequence: Synthetic oligonucleotide
caaacaccuccugguauaa

SEQ ID NO: 614085 - RNA, 19 nt, Artificial Sequence
  Description of Artificial Sequence: Synthetic oligonucleotide
ggugaguagggccucccgu

SEQ ID NO: 614086 - RNA, 19 nt, Artificial Sequence
  Description of Artificial Sequence: Synthetic oligonucleotide
guagcucaugcggcagaac

SEQ ID NO: 614087 - RNA, 19 nt, Artificial Sequence
  Description of Artificial Sequence: Synthetic oligonucleotide
gugaguagggccucccguu

SEQ ID NO: 614088 - RNA, 19 nt, Artificial Sequence
  Description of Artificial Sequence: Synthetic oligonucleotide
ggaggccugcaccggguug

SEQ ID NO: 614089 - RNA, 19 nt, Artificial Sequence
  Description of Artificial Sequence: Synthetic oligonucleotide
auguuagguccaggcccag

SEQ ID NO: 614090 - RNA, 19 nt, Artificial Sequence
  Description of Artificial Sequence: Synthetic oligonucleotide
gaggggcgggaagauucac

SEQ ID NO: 614091 - RNA, 19 nt, Artificial Sequence
  Description of Artificial Sequence: Synthetic oligonucleotide
ucgucccaucugagaagau

SEQ ID NO: 614092 - RNA, 19 nt, Artificial Sequence
  Description of Artificial Sequence: Synthetic oligonucleotide
cagcuagugagggugggua

SEQ ID NO: 614093 - RNA, 19 nt, Artificial Sequence
  Description of Artificial Sequence: Synthetic oligonucleotide
caccccacuccagagagcu

SEQ ID NO: 614094 - RNA, 19 nt, Artificial Sequence
  Description of Artificial Sequence: Synthetic oligonucleotide
ggguagcuagggagggagg

SEQ ID NO: 614095 - RNA, 19 nt, Artificial Sequence
  Description of Artificial Sequence: Synthetic oligonucleotide
ccuaggcccuauaagugaa

SEQ ID NO: 614096 - RNA, 19 nt, Artificial Sequence
  Description of Artificial Sequence: Synthetic oligonucleotide
ccauggugcgaggaaugag

SEQ ID NO: 614097 - RNA, 19 nt, Artificial Sequence
  Description of Artificial Sequence: Synthetic oligonucleotide
cacguucuagguucaggau

SEQ ID NO: 614098 - RNA, 19 nt, Artificial Sequence
  Description of Artificial Sequence: Synthetic oligonucleotide
ccacuccagagagcuauag

SEQ ID NO: 614099 - RNA, 19 nt, Artificial Sequence
  Description of Artificial Sequence: Synthetic oligonucleotide
gccauauuguaugugugau

SEQ ID NO: 614100 - RNA, 19 nt, Artificial Sequence
  Description of Artificial Sequence: Synthetic oligonucleotide
gggugccauauuguaugug

SEQ ID NO: 614101 - RNA, 19 nt, Artificial Sequence
  Description of Artificial Sequence: Synthetic oligonucleotide
ggaccccaauuacuaaaua

SEQ ID NO: 614102 - RNA, 19 nt, Artificial Sequence
  Description of Artificial Sequence: Synthetic oligonucleotide
gcgggaagauucacuuccc

SEQ ID NO: 614103 - RNA, 19 nt, Artificial Sequence
  Description of Artificial Sequence: Synthetic oligonucleotide
gguagcucaugcggcagaa

SEQ ID NO: 614104 - RNA, 19 nt, Artificial Sequence
  Description of Artificial Sequence: Synthetic oligonucleotide
ggaaggcaagagagcugag

SEQ ID NO: 614105 - RNA, 19 nt, Artificial Sequence
  Description of Artificial Sequence: Synthetic oligonucleotide
cugacccgcagucguccca

SEQ ID NO: 614106 - RNA, 19 nt, Artificial Sequence
  Description of Artificial Sequence: Synthetic oligonucleotide
cccgcagucgucccaucug

SEQ ID NO: 614107 - RNA, 19 nt, Artificial Sequence
  Description of Artificial Sequence: Synthetic oligonucleotide
gcuaguggcuggaauccaa

SEQ ID NO: 614108 - RNA, 19 nt, Artificial Sequence
  Description of Artificial Sequence: Synthetic oligonucleotide
gggcgggaagauucacuuc

SEQ ID NO: 614109 - RNA, 19 nt, Artificial Sequence
  Description of Artificial Sequence: Synthetic oligonucleotide
ccgguacugccagaauagc

SEQ ID NO: 614110 - RNA, 19 nt, Artificial Sequence
  Description of Artificial Sequence: Synthetic oligonucleotide
ccgcagugaccgcaggaac

SEQ ID NO: 614111 - RNA, 19 nt, Artificial Sequence
  Description of Artificial Sequence: Synthetic oligonucleotide
ccucgggagaaagaaggga

SEQ ID NO: 614112 - RNA, 19 nt, Artificial Sequence
  Description of Artificial Sequence: Synthetic oligonucleotide
ucggagcaaucgggccuug

SEQ ID NO: 614113 - RNA, 19 nt, Artificial Sequence
  Description of Artificial Sequence: Synthetic oligonucleotide
caccggguugaacgcccuc

SEQ ID NO: 614114 - RNA, 19 nt, Artificial Sequence
  Description of Artificial Sequence: Synthetic oligonucleotide
gccgcccaaacaccuccug

SEQ ID NO: 614115 - RNA, 19 nt, Artificial Sequence
  Description of Artificial Sequence: Synthetic oligonucleotide
guugaacgcccuccucaau

SEQ ID NO: 614116 - RNA, 19 nt, Artificial Sequence
  Description of Artificial Sequence: Synthetic oligonucleotide
ccccggcauacugaagugc

SEQ ID NO: 614117 - RNA, 19 nt, Artificial Sequence
  Description of Artificial Sequence: Synthetic oligonucleotide
gccauggugcgaggaauga

SEQ ID NO: 614118 - RNA, 19 nt, Artificial Sequence
  Description of Artificial Sequence: Synthetic oligonucleotide
caguuacacggagucuuua

SEQ ID NO: 614119 - RNA, 19 nt, Artificial Sequence
  Description of Artificial Sequence: Synthetic oligonucleotide
acgcugccauccccggcau

SEQ ID NO: 614120 - RNA, 19 nt, Artificial Sequence
  Description of Artificial Sequence: Synthetic oligonucleotide
gguauaaacucuggaccuu

SEQ ID NO: 614121 - RNA, 19 nt, Artificial Sequence
  Description of Artificial Sequence: Synthetic oligonucleotide
cacccacucccaguuggga

SEQ ID NO: 614122 - RNA, 19 nt, Artificial Sequence
  Description of Artificial Sequence: Synthetic oligonucleotide
uccgguccuuuggcuuucu

SEQ ID NO: 614123 - RNA, 19 nt, Artificial Sequence
  Description of Artificial Sequence: Synthetic oligonucleotide
ggugguagaucagcagagu

SEQ ID NO: 614124 - RNA, 19 nt, Artificial Sequence
  Description of Artificial Sequence: Synthetic oligonucleotide
cacaagcauccuaggcccu

SEQ ID NO: 614125 - RNA, 19 nt, Artificial Sequence
  Description of Artificial Sequence: Synthetic oligonucleotide
gcgccggaugucccggaug

SEQ ID NO: 614126 - RNA, 19 nt, Artificial Sequence
  Description of Artificial Sequence: Synthetic oligonucleotide
gacccgcagucgucccauc

SEQ ID NO: 614127 - RNA, 19 nt, Artificial Sequence
  Description of Artificial Sequence: Synthetic oligonucleotide
guuccgguacugccagaau

SEQ ID NO: 614128 - RNA, 19 nt, Artificial Sequence
  Description of Artificial Sequence: Synthetic oligonucleotide
cgcagucgucccaucugag

SEQ ID NO: 614129 - RNA, 19 nt, Artificial Sequence
  Description of Artificial Sequence: Synthetic oligonucleotide
ccgcagucgucccaucuga

SEQ ID NO: 614130 - RNA, 19 nt, Artificial Sequence
  Description of Artificial Sequence: Synthetic oligonucleotide
ccucgagcugggaggccug

SEQ ID NO: 614131 - RNA, 19 nt, Artificial Sequence
  Description of Artificial Sequence: Synthetic oligonucleotide
ccucccguucucaucccaa

SEQ ID NO: 614132 - RNA, 19 nt, Artificial Sequence
  Description of Artificial Sequence: Synthetic oligonucleotide
gccucccguucucauccca

SEQ ID NO: 614133 - RNA, 19 nt, Artificial Sequence
  Description of Artificial Sequence: Synthetic oligonucleotide
caagcauccuaggcccuau

SEQ ID NO: 614134 - RNA, 19 nt, Artificial Sequence
  Description of Artificial Sequence: Synthetic oligonucleotide
gcacugacccgcagucguc

SEQ ID NO: 614135 - RNA, 19 nt, Artificial Sequence
  Description of Artificial Sequence: Synthetic oligonucleotide
gcuaagccagacagcgccu

SEQ ID NO: 614136 - RNA, 19 nt, Artificial Sequence
  Description of Artificial Sequence: Synthetic oligonucleotide
cuauacccucugcccuccu

SEQ ID NO: 614137 - RNA, 19 nt, Artificial Sequence
  Description of Artificial Sequence: Synthetic oligonucleotide
gcagcuagugagggugggu

SEQ ID NO: 614138 - RNA, 19 nt, Artificial Sequence
  Description of Artificial Sequence: Synthetic oligonucleotide
cagugaccgcaggaacucu

SEQ ID NO: 614139 - RNA, 19 nt, Artificial Sequence
  Description of Artificial Sequence: Synthetic oligonucleotide
gcuagggagggagguggcu

SEQ ID NO: 614140 - RNA, 19 nt, Artificial Sequence
  Description of Artificial Sequence: Synthetic oligonucleotide
ccccacuccagagagcuau

SEQ ID NO: 614141 - RNA, 19 nt, Artificial Sequence
  Description of Artificial Sequence: Synthetic oligonucleotide
cggguugaacgcccuccuc

SEQ ID NO: 614142 - RNA, 19 nt, Artificial Sequence
  Description of Artificial Sequence: Synthetic oligonucleotide
ccgguccuuuggcuuucuc

SEQ ID NO: 614143 - RNA, 19 nt, Artificial Sequence
  Description of Artificial Sequence: Synthetic oligonucleotide
cccuccauaccuucaccuu

SEQ ID NO: 614144 - RNA, 19 nt, Artificial Sequence
  Description of Artificial Sequence: Synthetic oligonucleotide
cggucuuagugagcgucca

SEQ ID NO: 614145 - RNA, 19 nt, Artificial Sequence
  Description of Artificial Sequence: Synthetic oligonucleotide
ggccugcaccggguugaac

SEQ ID NO: 614146 - RNA, 19 nt, Artificial Sequence
  Description of Artificial Sequence: Synthetic oligonucleotide
ccuccgguccuuuggcuuu

SEQ ID NO: 614147 - RNA, 19 nt, Artificial Sequence
  Description of Artificial Sequence: Synthetic oligonucleotide
ccggguugaacgcccuccu

SEQ ID NO: 614148 - RNA, 19 nt, Artificial Sequence
  Description of Artificial Sequence: Synthetic oligonucleotide
cacucccaguugggaagcu

SEQ ID NO: 614149 - RNA, 19 nt, Artificial Sequence
  Description of Artificial Sequence: Synthetic oligonucleotide
ggcgccggaugucccggau

SEQ ID NO: 614150 - RNA, 19 nt, Artificial Sequence
  Description of Artificial Sequence: Synthetic oligonucleotide
cggcgccggaugucccgga

SEQ ID NO: 614151 - RNA, 19 nt, Artificial Sequence
  Description of Artificial Sequence: Synthetic oligonucleotide
cggagcaaucgggccuugu

SEQ ID NO: 614152 - RNA, 19 nt, Artificial Sequence
  Description of Artificial Sequence: Synthetic oligonucleotide
aauucaaagguauagcugg

SEQ ID NO: 614153 - RNA, 19 nt, Artificial Sequence
  Description of Artificial Sequence: Synthetic oligonucleotide
uuuaacuugaauaggaaag

SEQ ID NO: 614154 - RNA, 19 nt, Artificial Sequence
  Description of Artificial Sequence: Synthetic oligonucleotide
uuaacgaucaaacacuuag

SEQ ID NO: 614155 - RNA, 19 nt, Artificial Sequence
  Description of Artificial Sequence: Synthetic oligonucleotide
aaugucuccaugcaaacac

SEQ ID NO: 614156 - RNA, 19 nt, Artificial Sequence
  Description of Artificial Sequence: Synthetic oligonucleotide
agaguauccaaucugaauc

SEQ ID NO: 614157 - RNA, 19 nt, Artificial Sequence
  Description of Artificial Sequence: Synthetic oligonucleotide
aauaccucaacuaugauga

SEQ ID NO: 614158 - RNA, 19 nt, Artificial Sequence
  Description of Artificial Sequence: Synthetic oligonucleotide
aacgaucaaacacuuaguc

SEQ ID NO: 614159 - RNA, 19 nt, Artificial Sequence
  Description of Artificial Sequence: Synthetic oligonucleotide
aaauaccucaacuaugaug

SEQ ID NO: 614160 - RNA, 19 nt, Artificial Sequence
  Description of Artificial Sequence: Synthetic oligonucleotide
aaaacuaccuucucugaag

SEQ ID NO: 614161 - RNA, 19 nt, Artificial Sequence
  Description of Artificial Sequence: Synthetic oligonucleotide
aacacuuagucaaaacucc

SEQ ID NO: 614162 - RNA, 19 nt, Artificial Sequence
  Description of Artificial Sequence: Synthetic oligonucleotide
aaacuaccuucucugaagc

SEQ ID NO: 614163 - RNA, 19 nt, Artificial Sequence
  Description of Artificial Sequence: Synthetic oligonucleotide
cuucgaaagauccaaacgg

SEQ ID NO: 614164 - RNA, 19 nt, Artificial Sequence
  Description of Artificial Sequence: Synthetic oligonucleotide
uuaucagaggugaucaagg

SEQ ID NO: 614165 - RNA, 19 nt, Artificial Sequence
  Description of Artificial Sequence: Synthetic oligonucleotide
uucaacauaucucaguugu

SEQ ID NO: 614166 - RNA, 19 nt, Artificial Sequence
  Description of Artificial Sequence: Synthetic oligonucleotide
aaacacuuagucaaaacuc

SEQ ID NO: 614167 - RNA, 19 nt, Artificial Sequence
  Description of Artificial Sequence: Synthetic oligonucleotide
aaacaaguaccuuugguga

SEQ ID NO: 614168 - RNA, 19 nt, Artificial Sequence
  Description of Artificial Sequence: Synthetic oligonucleotide
uucuuagucucacagaaga

SEQ ID NO: 614169 - RNA, 19 nt, Artificial Sequence
  Description of Artificial Sequence: Synthetic oligonucleotide
aaauggagaaauuggagaa

SEQ ID NO: 614170 - RNA, 19 nt, Artificial Sequence
  Description of Artificial Sequence: Synthetic oligonucleotide
uuuuguaggauucaugaau

SEQ ID NO: 614171 - RNA, 19 nt, Artificial Sequence
  Description of Artificial Sequence: Synthetic oligonucleotide
aguuauaucuuugaaaucu

SEQ ID NO: 614172 - RNA, 19 nt, Artificial Sequence
  Description of Artificial Sequence: Synthetic oligonucleotide
auggauauaggauucaaca

SEQ ID NO: 614173 - RNA, 19 nt, Artificial Sequence
  Description of Artificial Sequence: Synthetic oligonucleotide
uguaggaacaucaaagcaa

SEQ ID NO: 614174 - RNA, 19 nt, Artificial Sequence
  Description of Artificial Sequence: Synthetic oligonucleotide
caaaacuccguuuauggcc

SEQ ID NO: 614175 - RNA, 19 nt, Artificial Sequence
  Description of Artificial Sequence: Synthetic oligonucleotide
gauauaggauucaacaucc

SEQ ID NO: 614176 - RNA, 19 nt, Artificial Sequence
  Description of Artificial Sequence: Synthetic oligonucleotide
ucacacuggaagauuaacg

SEQ ID NO: 614177 - RNA, 19 nt, Artificial Sequence
  Description of Artificial Sequence: Synthetic oligonucleotide
uuuaggaggcacauucugg

SEQ ID NO: 614178 - RNA, 19 nt, Artificial Sequence
  Description of Artificial Sequence: Synthetic oligonucleotide
ugaugcaccagaaauguga

SEQ ID NO: 614179 - RNA, 19 nt, Artificial Sequence
  Description of Artificial Sequence: Synthetic oligonucleotide
aauccauuguagaaggaac

SEQ ID NO: 614180 - RNA, 19 nt, Artificial Sequence
  Description of Artificial Sequence: Synthetic oligonucleotide
ucauaucuggauuucaugu

SEQ ID NO: 614181 - RNA, 19 nt, Artificial Sequence
  Description of Artificial Sequence: Synthetic oligonucleotide
ucuaguuauaucuuugaaa

SEQ ID NO: 614182 - RNA, 19 nt, Artificial Sequence
  Description of Artificial Sequence: Synthetic oligonucleotide
cacguuuaaaaguaauucc

SEQ ID NO: 614183 - RNA, 19 nt, Artificial Sequence
  Description of Artificial Sequence: Synthetic oligonucleotide
gauauguuaccccucgacc

SEQ ID NO: 614184 - RNA, 19 nt, Artificial Sequence
  Description of Artificial Sequence: Synthetic oligonucleotide
agauauguuaccccucgac

SEQ ID NO: 614185 - RNA, 19 nt, Artificial Sequence
  Description of Artificial Sequence: Synthetic oligonucleotide
gaaauaggcaagcucacac

SEQ ID NO: 614186 - RNA, 19 nt, Artificial Sequence
  Description of Artificial Sequence: Synthetic oligonucleotide
uuagucucacagaagauaa

SEQ ID NO: 614187 - RNA, 19 nt, Artificial Sequence
  Description of Artificial Sequence: Synthetic oligonucleotide
ugcuuuuagauuuaacuaa

SEQ ID NO: 614188 - RNA, 19 nt, Artificial Sequence
  Description of Artificial Sequence: Synthetic oligonucleotide
aaacacgccacacugaguu

SEQ ID NO: 614189 - RNA, 19 nt, Artificial Sequence
  Description of Artificial Sequence: Synthetic oligonucleotide
uuuuggugaauaauauaca

SEQ ID NO: 614190 - RNA, 19 nt, Artificial Sequence
  Description of Artificial Sequence: Synthetic oligonucleotide
uuggugaauaauauacaug

SEQ ID NO: 614191 - RNA, 19 nt, Artificial Sequence
  Description of Artificial Sequence: Synthetic oligonucleotide
uucgaaagauccaaacggc

SEQ ID NO: 614192 - RNA, 19 nt, Artificial Sequence
  Description of Artificial Sequence: Synthetic oligonucleotide
agcauuacuacucagcuuu

SEQ ID NO: 614193 - RNA, 19 nt, Artificial Sequence
  Description of Artificial Sequence: Synthetic oligonucleotide
aacauacacaaauuccagu

SEQ ID NO: 614194 - RNA, 19 nt, Artificial Sequence
  Description of Artificial Sequence: Synthetic oligonucleotide
aacuaugaugaccuaauuu

SEQ ID NO: 614195 - RNA, 19 nt, Artificial Sequence
  Description of Artificial Sequence: Synthetic oligonucleotide
uuuuguucacguguuagag

SEQ ID NO: 614196 - RNA, 19 nt, Artificial Sequence
  Description of Artificial Sequence: Synthetic oligonucleotide
aacuaccuucucugaagcc

SEQ ID NO: 614197 - RNA, 19 nt, Artificial Sequence
  Description of Artificial Sequence: Synthetic oligonucleotide
uuguucacguguuagaguc

SEQ ID NO: 614198 - RNA, 19 nt, Artificial Sequence
  Description of Artificial Sequence: Synthetic oligonucleotide
uuuccgacucacuuguagg

SEQ ID NO: 614199 - RNA, 19 nt, Artificial Sequence
  Description of Artificial Sequence: Synthetic oligonucleotide
gguaauuucucuuugugac

SEQ ID NO: 614200 - RNA, 19 nt, Artificial Sequence
  Description of Artificial Sequence: Synthetic oligonucleotide
uguucaacauaucucaguu

SEQ ID NO: 614201 - RNA, 19 nt, Artificial Sequence
  Description of Artificial Sequence: Synthetic oligonucleotide
ugaucuacuucaucaagca

SEQ ID NO: 614202 - RNA, 19 nt, Artificial Sequence
  Description of Artificial Sequence: Synthetic oligonucleotide
gaaagauccaaacggccgc

SEQ ID NO: 614203 - RNA, 19 nt, Artificial Sequence
  Description of Artificial Sequence: Synthetic oligonucleotide
ucuugaucgauuucgguuc

SEQ ID NO: 614204 - RNA, 19 nt, Artificial Sequence
  Description of Artificial Sequence: Synthetic oligonucleotide
acagaaauaggcaagcuca

SEQ ID NO: 614205 - RNA, 19 nt, Artificial Sequence
  Description of Artificial Sequence: Synthetic oligonucleotide
auauguuaccccucgaccu

SEQ ID NO: 614206 - RNA, 19 nt, Artificial Sequence
  Description of Artificial Sequence: Synthetic oligonucleotide
cuugccgacuuccugaccg

SEQ ID NO: 614207 - RNA, 19 nt, Artificial Sequence
  Description of Artificial Sequence: Synthetic oligonucleotide
uguuggagccaaaacaagu

SEQ ID NO: 614208 - RNA, 19 nt, Artificial Sequence
  Description of Artificial Sequence: Synthetic oligonucleotide
cuggauagccaaauguucc

SEQ ID NO: 614209 - RNA, 19 nt, Artificial Sequence
  Description of Artificial Sequence: Synthetic oligonucleotide
aauuacagacaaauaccuc

SEQ ID NO: 614210 - RNA, 19 nt, Artificial Sequence
  Description of Artificial Sequence: Synthetic oligonucleotide
uuaacuugaauaggaaaga

SEQ ID NO: 614211 - RNA, 19 nt, Artificial Sequence
  Description of Artificial Sequence: Synthetic oligonucleotide
uaauuucucuuugugacug

SEQ ID NO: 614212 - RNA, 19 nt, Artificial Sequence
  Description of Artificial Sequence: Synthetic oligonucleotide
uucucuuugugacugugca

SEQ ID NO: 614213 - RNA, 19 nt, Artificial Sequence
  Description of Artificial Sequence: Synthetic oligonucleotide
cauggcguagcuucgaaag

SEQ ID NO: 614214 - RNA, 19 nt, Artificial Sequence
  Description of Artificial Sequence: Synthetic oligonucleotide
cauucugguuacuugagac

SEQ ID NO: 614215 - RNA, 19 nt, Artificial Sequence
  Description of Artificial Sequence: Synthetic oligonucleotide
gaugacacucgcuuugacc

SEQ ID NO: 614216 - RNA, 19 nt, Artificial Sequence
  Description of Artificial Sequence: Synthetic oligonucleotide
ucaacuaugaugaccuaau

SEQ ID NO: 614217 - RNA, 19 nt, Artificial Sequence
  Description of Artificial Sequence: Synthetic oligonucleotide
cugaucggccaccagaucg

SEQ ID NO: 614218 - RNA, 19 nt, Artificial Sequence
  Description of Artificial Sequence: Synthetic oligonucleotide
uuacuugagacacagcauu

SEQ ID NO: 614219 - RNA, 19 nt, Artificial Sequence
  Description of Artificial Sequence: Synthetic oligonucleotide
uagcccucccuucagaucc

SEQ ID NO: 614220 - RNA, 19 nt, Artificial Sequence
  Description of Artificial Sequence: Synthetic oligonucleotide
aaggguauggcaaaagaga

SEQ ID NO: 614221 - RNA, 19 nt, Artificial Sequence
  Description of Artificial Sequence: Synthetic oligonucleotide
acagcauuacuacucagcu

SEQ ID NO: 614222 - RNA, 19 nt, Artificial Sequence
  Description of Artificial Sequence: Synthetic oligonucleotide
cacaacauggcguagcuuc

SEQ ID NO: 614223 - RNA, 19 nt, Artificial Sequence
  Description of Artificial Sequence: Synthetic oligonucleotide
uaggauucaugaauaauau

SEQ ID NO: 614224 - RNA, 19 nt, Artificial Sequence
  Description of Artificial Sequence: Synthetic oligonucleotide
ucuuugagaccaauggcac

SEQ ID NO: 614225 - RNA, 19 nt, Artificial Sequence
  Description of Artificial Sequence: Synthetic oligonucleotide
ugauuugccaguucccuug

SEQ ID NO: 614226 - RNA, 19 nt, Artificial Sequence
  Description of Artificial Sequence: Synthetic oligonucleotide
cucgcuuugaccuucuuuc

SEQ ID NO: 614227 - RNA, 19 nt, Artificial Sequence
  Description of Artificial Sequence: Synthetic oligonucleotide
ucgaaagauccaaacggcc

SEQ ID NO: 614228 - RNA, 19 nt, Artificial Sequence
  Description of Artificial Sequence: Synthetic oligonucleotide
auacgaccaacuucuuugc

SEQ ID NO: 614229 - RNA, 19 nt, Artificial Sequence
  Description of Artificial Sequence: Synthetic oligonucleotide
gauuuguuuacaaccauuc

SEQ ID NO: 614230 - RNA, 19 nt, Artificial Sequence
  Description of Artificial Sequence: Synthetic oligonucleotide
accauuccgaauuugauua

SEQ ID NO: 614231 - RNA, 19 nt, Artificial Sequence
  Description of Artificial Sequence: Synthetic oligonucleotide
uuuauagucuccucagaaa

SEQ ID NO: 614232 - RNA, 19 nt, Artificial Sequence
  Description of Artificial Sequence: Synthetic oligonucleotide
ugugagcuaaugcugcagc

SEQ ID NO: 614233 - RNA, 19 nt, Artificial Sequence
  Description of Artificial Sequence: Synthetic oligonucleotide
uacacaaauuccaguccgg

SEQ ID NO: 614234 - RNA, 19 nt, Artificial Sequence
  Description of Artificial Sequence: Synthetic oligonucleotide
ugaucaaggaucgugguuc

SEQ ID NO: 614235 - RNA, 19 nt, Artificial Sequence
  Description of Artificial Sequence: Synthetic oligonucleotide
agauuaacgaucaaacacu

SEQ ID NO: 614236 - RNA, 19 nt, Artificial Sequence
  Description of Artificial Sequence: Synthetic oligonucleotide
uaggauucaacauccugug

SEQ ID NO: 614237 - RNA, 19 nt, Artificial Sequence
  Description of Artificial Sequence: Synthetic oligonucleotide
uauagcuggauaaguagau

SEQ ID NO: 614238 - RNA, 19 nt, Artificial Sequence
  Description of Artificial Sequence: Synthetic oligonucleotide
agauaauagcccucccuuc

SEQ ID NO: 614239 - RNA, 19 nt, Artificial Sequence
  Description of Artificial Sequence: Synthetic oligonucleotide
agaagauaauagcccuccc

SEQ ID NO: 614240 - RNA, 19 nt, Artificial Sequence
  Description of Artificial Sequence: Synthetic oligonucleotide
gucggaagaaaucaacagc

SEQ ID NO: 614241 - RNA, 19 nt, Artificial Sequence
  Description of Artificial Sequence: Synthetic oligonucleotide
uuaggaggcacauucuggu

SEQ ID NO: 614242 - RNA, 19 nt, Artificial Sequence
  Description of Artificial Sequence: Synthetic oligonucleotide
aagcacaacauggcguagc

SEQ ID NO: 614243 - RNA, 19 nt, Artificial Sequence
  Description of Artificial Sequence: Synthetic oligonucleotide
aaucaacagcagcauaaga

SEQ ID NO: 614244 - RNA, 19 nt, Artificial Sequence
  Description of Artificial Sequence: Synthetic oligonucleotide
auuacuacucagcuuucug

SEQ ID NO: 614245 - RNA, 19 nt, Artificial Sequence
  Description of Artificial Sequence: Synthetic oligonucleotide
ugcaacuuuguauacccac

SEQ ID NO: 614246 - RNA, 19 nt, Artificial Sequence
  Description of Artificial Sequence: Synthetic oligonucleotide
augauguuccaccauaaaa

SEQ ID NO: 614247 - RNA, 19 nt, Artificial Sequence
  Description of Artificial Sequence: Synthetic oligonucleotide
uuugauacgcccugggguc

SEQ ID NO: 614248 - RNA, 19 nt, Artificial Sequence
  Description of Artificial Sequence: Synthetic oligonucleotide
gauaauagcccucccuuca

SEQ ID NO: 614249 - RNA, 19 nt, Artificial Sequence
  Description of Artificial Sequence: Synthetic oligonucleotide
gguauagcuggauaaguag

SEQ ID NO: 614250 - RNA, 19 nt, Artificial Sequence
  Description of Artificial Sequence: Synthetic oligonucleotide
uuacuacucagcuuucugu

SEQ ID NO: 614251 - RNA, 19 nt, Artificial Sequence
  Description of Artificial Sequence: Synthetic oligonucleotide
uguaggacaucuccaauua

SEQ ID NO: 614252 - RNA, 19 nt, Artificial Sequence
  Description of Artificial Sequence: Synthetic oligonucleotide
uaauuuggcuggcacugag

SEQ ID NO: 614253 - RNA, 19 nt, Artificial Sequence
  Description of Artificial Sequence: Synthetic oligonucleotide
ugagcugauggucggaaga

SEQ ID NO: 614254 - RNA, 19 nt, Artificial Sequence
  Description of Artificial Sequence: Synthetic oligonucleotide
ugauggucggaagaaauca

SEQ ID NO: 614255 - RNA, 19 nt, Artificial Sequence
  Description of Artificial Sequence: Synthetic oligonucleotide
ucaaagcaaacacccauau

SEQ ID NO: 614256 - RNA, 19 nt, Artificial Sequence
  Description of Artificial Sequence: Synthetic oligonucleotide
auaggauucaacauccugu

SEQ ID NO: 614257 - RNA, 19 nt, Artificial Sequence
  Description of Artificial Sequence: Synthetic oligonucleotide
cacagcauuacuacucagc

SEQ ID NO: 614258 - RNA, 19 nt, Artificial Sequence
  Description of Artificial Sequence: Synthetic oligonucleotide
aauguccaagccucgggca

SEQ ID NO: 614259 - RNA, 19 nt, Artificial Sequence
  Description of Artificial Sequence: Synthetic oligonucleotide
cacuggaagauuaacgauc

SEQ ID NO: 614260 - RNA, 19 nt, Artificial Sequence
  Description of Artificial Sequence: Synthetic oligonucleotide
uucugguuacuugagacac

SEQ ID NO: 614261 - RNA, 19 nt, Artificial Sequence
  Description of Artificial Sequence: Synthetic oligonucleotide
uaaguagauuuguuuacaa

SEQ ID NO: 614262 - RNA, 19 nt, Artificial Sequence
  Description of Artificial Sequence: Synthetic oligonucleotide
cuuaucagaggugaucaag

SEQ ID NO: 614263 - RNA, 19 nt, Artificial Sequence
  Description of Artificial Sequence: Synthetic oligonucleotide
accagaucgaccaccagac

SEQ ID NO: 614264 - RNA, 19 nt, Artificial Sequence
  Description of Artificial Sequence: Synthetic oligonucleotide
agguaauuucucuuuguga

SEQ ID NO: 614265 - RNA, 19 nt, Artificial Sequence
  Description of Artificial Sequence: Synthetic oligonucleotide
uacacguuuaaaaguaauu

SEQ ID NO: 614266 - RNA, 19 nt, Artificial Sequence
  Description of Artificial Sequence: Synthetic oligonucleotide
ggauauaggauucaacauc

SEQ ID NO: 614267 - RNA, 19 nt, Artificial Sequence
  Description of Artificial Sequence: Synthetic oligonucleotide
caaggaucgugguucaaag

SEQ ID NO: 614268 - RNA, 19 nt, Artificial Sequence
  Description of Artificial Sequence: Synthetic oligonucleotide
ucuaccugugcgcccagag

SEQ ID NO: 614269 - RNA, 19 nt, Artificial Sequence
  Description of Artificial Sequence: Synthetic oligonucleotide
uaacgaucaaacacuuagu

SEQ ID NO: 614270 - RNA, 19 nt, Artificial Sequence
  Description of Artificial Sequence: Synthetic oligonucleotide
aaccuguucauaucuggau

SEQ ID NO: 614271 - RNA, 19 nt, Artificial Sequence
  Description of Artificial Sequence: Synthetic oligonucleotide
uucuaaggaugacacucgc

SEQ ID NO: 614272 - RNA, 19 nt, Artificial Sequence
  Description of Artificial Sequence: Synthetic oligonucleotide
gaguauccaaucugaauca

SEQ ID NO: 614273 - RNA, 19 nt, Artificial Sequence
  Description of Artificial Sequence: Synthetic oligonucleotide
aaauacgaccaacuucuuu

SEQ ID NO: 614274 - RNA, 19 nt, Artificial Sequence
  Description of Artificial Sequence: Synthetic oligonucleotide
guuuacaaccauucuugug

SEQ ID NO: 614275 - RNA, 19 nt, Artificial Sequence
  Description of Artificial Sequence: Synthetic oligonucleotide
cuuuccgacucacuuguag

SEQ ID NO: 614276 - RNA, 19 nt, Artificial Sequence
  Description of Artificial Sequence: Synthetic oligonucleotide
ucgauuucgguucccauuu

SEQ ID NO: 614277 - RNA, 19 nt, Artificial Sequence
  Description of Artificial Sequence: Synthetic oligonucleotide
uuugauuaauuuggcuuug

SEQ ID NO: 614278 - RNA, 19 nt, Artificial Sequence
  Description of Artificial Sequence: Synthetic oligonucleotide
cagaagauaauagcccucc

SEQ ID NO: 614279 - RNA, 19 nt, Artificial Sequence
  Description of Artificial Sequence: Synthetic oligonucleotide
aagguauagcuggauaagu

SEQ ID NO: 614280 - RNA, 19 nt, Artificial Sequence
  Description of Artificial Sequence: Synthetic oligonucleotide
auaauagcccucccuucag

SEQ ID NO: 614281 - RNA, 19 nt, Artificial Sequence
  Description of Artificial Sequence: Synthetic oligonucleotide
uuccgaauuugauuaauuu

SEQ ID NO: 614282 - RNA, 19 nt, Artificial Sequence
  Description of Artificial Sequence: Synthetic oligonucleotide
aagaaaucaacagcagcau

SEQ ID NO: 614283 - RNA, 19 nt, Artificial Sequence
  Description of Artificial Sequence: Synthetic oligonucleotide
cauuguagaaggaacaccu

SEQ ID NO: 614284 - RNA, 19 nt, Artificial Sequence
  Description of Artificial Sequence: Synthetic oligonucleotide
ucuaaggaugacacucgcu

SEQ ID NO: 614285 - RNA, 19 nt, Artificial Sequence
  Description of Artificial Sequence: Synthetic oligonucleotide
auauacaugauuagacaga

SEQ ID NO: 614286 - RNA, 19 nt, Artificial Sequence
  Description of Artificial Sequence: Synthetic oligonucleotide
uggauagccaaauguucca

SEQ ID NO: 614287 - RNA, 19 nt, Artificial Sequence
  Description of Artificial Sequence: Synthetic oligonucleotide
uggagaaauuggagaaggc

SEQ ID NO: 614288 - RNA, 19 nt, Artificial Sequence
  Description of Artificial Sequence: Synthetic oligonucleotide
uccuguccgggcuugagca

SEQ ID NO: 614289 - RNA, 19 nt, Artificial Sequence
  Description of Artificial Sequence: Synthetic oligonucleotide
cacaaauuccaguccggcc

SEQ ID NO: 614290 - RNA, 19 nt, Artificial Sequence
  Description of Artificial Sequence: Synthetic oligonucleotide
uguuuacaaccauucuugu

SEQ ID NO: 614291 - RNA, 19 nt, Artificial Sequence
  Description of Artificial Sequence: Synthetic oligonucleotide
aagagauauguuaccccuc

SEQ ID NO: 614292 - RNA, 19 nt, Artificial Sequence
  Description of Artificial Sequence: Synthetic oligonucleotide
ggucggaagaaaucaacag

SEQ ID NO: 614293 - RNA, 19 nt, Artificial Sequence
  Description of Artificial Sequence: Synthetic oligonucleotide
aaacuccguuuauggcccc

SEQ ID NO: 614294 - RNA, 19 nt, Artificial Sequence
  Description of Artificial Sequence: Synthetic oligonucleotide
gagccuuucaaucaagggu

SEQ ID NO: 614295 - RNA, 19 nt, Artificial Sequence
  Description of Artificial Sequence: Synthetic oligonucleotide
caacuuuguauacccacug

SEQ ID NO: 614296 - RNA, 19 nt, Artificial Sequence
  Description of Artificial Sequence: Synthetic oligonucleotide
uuccgacucacuuguagga

SEQ ID NO: 614297 - RNA, 19 nt, Artificial Sequence
  Description of Artificial Sequence: Synthetic oligonucleotide
cucugucuaggauuagaag

SEQ ID NO: 614298 - RNA, 19 nt, Artificial Sequence
  Description of Artificial Sequence: Synthetic oligonucleotide
aggucaaccuguucauauc

SEQ ID NO: 614299 - RNA, 19 nt, Artificial Sequence
  Description of Artificial Sequence: Synthetic oligonucleotide
aggauucaacauccugugg

SEQ ID NO: 614300 - RNA, 19 nt, Artificial Sequence
  Description of Artificial Sequence: Synthetic oligonucleotide
uuguucagcaaaaccuaaa

SEQ ID NO: 614301 - RNA, 19 nt, Artificial Sequence
  Description of Artificial Sequence: Synthetic oligonucleotide
ugagaguauccaaucugaa

SEQ ID NO: 614302 - RNA, 19 nt, Artificial Sequence
  Description of Artificial Sequence: Synthetic oligonucleotide
uaccccucgaccuuucaga

SEQ ID NO: 614303 - RNA, 19 nt, Artificial Sequence
  Description of Artificial Sequence: Synthetic oligonucleotide
ugguaauuuggcuggcacu

SEQ ID NO: 614304 - RNA, 19 nt, Artificial Sequence
  Description of Artificial Sequence: Synthetic oligonucleotide
uccauuguagaaggaacac

SEQ ID NO: 614305 - RNA, 19 nt, Artificial Sequence
  Description of Artificial Sequence: Synthetic oligonucleotide
aucuugccgacuuccugac

SEQ ID NO: 614306 - RNA, 19 nt, Artificial Sequence
  Description of Artificial Sequence: Synthetic oligonucleotide
acacuuagucaaaacuccg

SEQ ID NO: 614307 - RNA, 19 nt, Artificial Sequence
  Description of Artificial Sequence: Synthetic oligonucleotide
gaucgugguucaaagcuug

SEQ ID NO: 614308 - RNA, 19 nt, Artificial Sequence
  Description of Artificial Sequence: Synthetic oligonucleotide
ugagcuaaugcugcagcca

SEQ ID NO: 614309 - RNA, 19 nt, Artificial Sequence
  Description of Artificial Sequence: Synthetic oligonucleotide
cuucuuagucucacagaag

SEQ ID NO: 614310 - RNA, 19 nt, Artificial Sequence
  Description of Artificial Sequence: Synthetic oligonucleotide
agcgauggauauaggauuc

SEQ ID NO: 614311 - RNA, 19 nt, Artificial Sequence
  Description of Artificial Sequence: Synthetic oligonucleotide
uuacaaccauucuugugaa

SEQ ID NO: 614312 - RNA, 19 nt, Artificial Sequence
  Description of Artificial Sequence: Synthetic oligonucleotide
auggucggaagaaaucaac

SEQ ID NO: 614313 - RNA, 19 nt, Artificial Sequence
  Description of Artificial Sequence: Synthetic oligonucleotide
caaacggccgcuuugcaga

SEQ ID NO: 614314 - RNA, 19 nt, Artificial Sequence
  Description of Artificial Sequence: Synthetic oligonucleotide
agucaaaacuccguuuaug

SEQ ID NO: 614315 - RNA, 19 nt, Artificial Sequence
  Description of Artificial Sequence: Synthetic oligonucleotide
uaccauuccgaauuugauu

SEQ ID NO: 614316 - RNA, 19 nt, Artificial Sequence
  Description of Artificial Sequence: Synthetic oligonucleotide
ugaucggccaccagaucga

SEQ ID NO: 614317 - RNA, 19 nt, Artificial Sequence
  Description of Artificial Sequence: Synthetic oligonucleotide
agaucgaccaccagaccgg

SEQ ID NO: 614318 - RNA, 19 nt, Artificial Sequence
  Description of Artificial Sequence: Synthetic oligonucleotide
ugauaugauguuccaccau

SEQ ID NO: 614319 - RNA, 19 nt, Artificial Sequence
  Description of Artificial Sequence: Synthetic oligonucleotide
ggauucauggccauuucag

SEQ ID NO: 614320 - RNA, 19 nt, Artificial Sequence
  Description of Artificial Sequence: Synthetic oligonucleotide
gugaauaauauacaugauu

SEQ ID NO: 614321 - RNA, 19 nt, Artificial Sequence
  Description of Artificial Sequence: Synthetic oligonucleotide
ugaccgacuccccugucga

SEQ ID NO: 614322 - RNA, 19 nt, Artificial Sequence
  Description of Artificial Sequence: Synthetic oligonucleotide
uguggauucauggccauuu

SEQ ID NO: 614323 - RNA, 19 nt, Artificial Sequence
  Description of Artificial Sequence: Synthetic oligonucleotide
uaauagcccucccuucaga

SEQ ID NO: 614324 - RNA, 19 nt, Artificial Sequence
  Description of Artificial Sequence: Synthetic oligonucleotide
cuugaucgauuucgguucc

SEQ ID NO: 614325 - RNA, 19 nt, Artificial Sequence
  Description of Artificial Sequence: Synthetic oligonucleotide
accagaccggccugaacgg

SEQ ID NO: 614326 - RNA, 19 nt, Artificial Sequence
  Description of Artificial Sequence: Synthetic oligonucleotide
acgaccaacuucuuugcaa

SEQ ID NO: 614327 - RNA, 19 nt, Artificial Sequence
  Description of Artificial Sequence: Synthetic oligonucleotide
agagcgauggauauaggau

SEQ ID NO: 614328 - RNA, 19 nt, Artificial Sequence
  Description of Artificial Sequence: Synthetic oligonucleotide
ugucaauaccauuccgaau

SEQ ID NO: 614329 - RNA, 19 nt, Artificial Sequence
  Description of Artificial Sequence: Synthetic oligonucleotide
uugaugcaccagaaaugug

SEQ ID NO: 614330 - RNA, 19 nt, Artificial Sequence
  Description of Artificial Sequence: Synthetic oligonucleotide
cuuuuguucacguguuaga

SEQ ID NO: 614331 - RNA, 19 nt, Artificial Sequence
  Description of Artificial Sequence: Synthetic oligonucleotide
ucgaccuuucagaagcuuu

SEQ ID NO: 614332 - RNA, 19 nt, Artificial Sequence
  Description of Artificial Sequence: Synthetic oligonucleotide
uugagcugauggucggaag

SEQ ID NO: 614333 - RNA, 19 nt, Artificial Sequence
  Description of Artificial Sequence: Synthetic oligonucleotide
ugucuaggauuagaagaug

SEQ ID NO: 614334 - RNA, 19 nt, Artificial Sequence
  Description of Artificial Sequence: Synthetic oligonucleotide
guaggaacaucaaagcaaa

SEQ ID NO: 614335 - RNA, 19 nt, Artificial Sequence
  Description of Artificial Sequence: Synthetic oligonucleotide
caaguaccuuuggugagcg

SEQ ID NO: 614336 - RNA, 19 nt, Artificial Sequence
  Description of Artificial Sequence: Synthetic oligonucleotide
guauagcuggauaaguaga

SEQ ID NO: 614337 - RNA, 19 nt, Artificial Sequence
  Description of Artificial Sequence: Synthetic oligonucleotide
auaccucaacuaugaugac

SEQ ID NO: 614338 - RNA, 19 nt, Artificial Sequence
  Description of Artificial Sequence: Synthetic oligonucleotide
uccccugucgacucugucu

SEQ ID NO: 614339 - RNA, 19 nt, Artificial Sequence
  Description of Artificial Sequence: Synthetic oligonucleotide
auaggcaagcucacacugg

SEQ ID NO: 614340 - RNA, 19 nt, Artificial Sequence
  Description of Artificial Sequence: Synthetic oligonucleotide
ugaccugccgccugaccag

SEQ ID NO: 614341 - RNA, 19 nt, Artificial Sequence
  Description of Artificial Sequence: Synthetic oligonucleotide
uguagucuuuccgacucac

SEQ ID NO: 614342 - RNA, 19 nt, Artificial Sequence
  Description of Artificial Sequence: Synthetic oligonucleotide
ugcuuuauguguggauuca

SEQ ID NO: 614343 - RNA, 19 nt, Artificial Sequence
  Description of Artificial Sequence: Synthetic oligonucleotide
cgaaagauccaaacggccg

SEQ ID NO: 614344 - RNA, 19 nt, Artificial Sequence
  Description of Artificial Sequence: Synthetic oligonucleotide
aacauggcguagcuucgaa

SEQ ID NO: 614345 - RNA, 19 nt, Artificial Sequence
  Description of Artificial Sequence: Synthetic oligonucleotide
ugucgacucugucuaccug

SEQ ID NO: 614346 - RNA, 19 nt, Artificial Sequence
  Description of Artificial Sequence: Synthetic oligonucleotide
agauccacuguagaccugu

SEQ ID NO: 614347 - RNA, 19 nt, Artificial Sequence
  Description of Artificial Sequence: Synthetic oligonucleotide
cccucgaccuuucagaagc

SEQ ID NO: 614348 - RNA, 19 nt, Artificial Sequence
  Description of Artificial Sequence: Synthetic oligonucleotide
gcauaagaaacagaggcca

SEQ ID NO: 614349 - RNA, 19 nt, Artificial Sequence
  Description of Artificial Sequence: Synthetic oligonucleotide
agccuuucaaucaagggua

SEQ ID NO: 614350 - RNA, 19 nt, Artificial Sequence
  Description of Artificial Sequence: Synthetic oligonucleotide
gucgacucugucuaccuga

SEQ ID NO: 614351 - RNA, 19 nt, Artificial Sequence
  Description of Artificial Sequence: Synthetic oligonucleotide
guagcuucgaaagauccaa

SEQ ID NO: 614352 - RNA, 19 nt, Artificial Sequence
  Description of Artificial Sequence: Synthetic oligonucleotide
ggcuuugauaugauguucc

SEQ ID NO: 614353 - RNA, 19 nt, Artificial Sequence
  Description of Artificial Sequence: Synthetic oligonucleotide
aauuccaguccggccagcu

SEQ ID NO: 614354 - RNA, 19 nt, Artificial Sequence
  Description of Artificial Sequence: Synthetic oligonucleotide
uacgaccaacuucuuugca

SEQ ID NO: 614355 - RNA, 19 nt, Artificial Sequence
  Description of Artificial Sequence: Synthetic oligonucleotide
uguucacguguuagagucu

SEQ ID NO: 614356 - RNA, 19 nt, Artificial Sequence
  Description of Artificial Sequence: Synthetic oligonucleotide
cuuugauacgcccuggggu

SEQ ID NO: 614357 - RNA, 19 nt, Artificial Sequence
  Description of Artificial Sequence: Synthetic oligonucleotide
accuacacguuuaaaagua

SEQ ID NO: 614358 - RNA, 19 nt, Artificial Sequence
  Description of Artificial Sequence: Synthetic oligonucleotide
cuuagucucacagaagaua

SEQ ID NO: 614359 - RNA, 19 nt, Artificial Sequence
  Description of Artificial Sequence: Synthetic oligonucleotide
ugccuguagucuuuccgac

SEQ ID NO: 614360 - RNA, 19 nt, Artificial Sequence
  Description of Artificial Sequence: Synthetic oligonucleotide
uucacguguuagagucucc

SEQ ID NO: 614361 - RNA, 19 nt, Artificial Sequence
  Description of Artificial Sequence: Synthetic oligonucleotide
ucgcuuugaccuucuuuca

SEQ ID NO: 614362 - RNA, 19 nt, Artificial Sequence
  Description of Artificial Sequence: Synthetic oligonucleotide
uugauuugccaguucccuu

SEQ ID NO: 614363 - RNA, 19 nt, Artificial Sequence
  Description of Artificial Sequence: Synthetic oligonucleotide
gagaguauccaaucugaau

SEQ ID NO: 614364 - RNA, 19 nt, Artificial Sequence
  Description of Artificial Sequence: Synthetic oligonucleotide
cuaccugugcgcccagagc

SEQ ID NO: 614365 - RNA, 19 nt, Artificial Sequence
  Description of Artificial Sequence: Synthetic oligonucleotide
ggauuagaagauguguuuc

SEQ ID NO: 614366 - RNA, 19 nt, Artificial Sequence
  Description of Artificial Sequence: Synthetic oligonucleotide
auggcguagcuucgaaaga

SEQ ID NO: 614367 - RNA, 19 nt, Artificial Sequence
  Description of Artificial Sequence: Synthetic oligonucleotide
uggcuuugauaugauguuc

SEQ ID NO: 614368 - RNA, 19 nt, Artificial Sequence
  Description of Artificial Sequence: Synthetic oligonucleotide
cuuguucagcaaaaccuaa

SEQ ID NO: 614369 - RNA, 19 nt, Artificial Sequence
  Description of Artificial Sequence: Synthetic oligonucleotide
agauuuguuuacaaccauu

SEQ ID NO: 614370 - RNA, 19 nt, Artificial Sequence
  Description of Artificial Sequence: Synthetic oligonucleotide
aaugcauccacggccccuu

SEQ ID NO: 614371 - RNA, 19 nt, Artificial Sequence
  Description of Artificial Sequence: Synthetic oligonucleotide
cccauauuuccuuuuagga

SEQ ID NO: 614372 - RNA, 19 nt, Artificial Sequence
  Description of Artificial Sequence: Synthetic oligonucleotide
uagucucacagaagauaau

SEQ ID NO: 614373 - RNA, 19 nt, Artificial Sequence
  Description of Artificial Sequence: Synthetic oligonucleotide
acucgcuuugaccuucuuu

SEQ ID NO: 614374 - RNA, 19 nt, Artificial Sequence
  Description of Artificial Sequence: Synthetic oligonucleotide
gagcgauggauauaggauu

SEQ ID NO: 614375 - RNA, 19 nt, Artificial Sequence
  Description of Artificial Sequence: Synthetic oligonucleotide
ugccacucugccuguaguc

SEQ ID NO: 614376 - RNA, 19 nt, Artificial Sequence
  Description of Artificial Sequence: Synthetic oligonucleotide
uccaaacggccgcuuugca

SEQ ID NO: 614377 - RNA, 19 nt, Artificial Sequence
  Description of Artificial Sequence: Synthetic oligonucleotide
auguguggauucauggcca

SEQ ID NO: 614378 - RNA, 19 nt, Artificial Sequence
  Description of Artificial Sequence: Synthetic oligonucleotide
uagcuucgaaagauccaaa

SEQ ID NO: 614379 - RNA, 19 nt, Artificial Sequence
  Description of Artificial Sequence: Synthetic oligonucleotide
ucgguucccauuucgucuu

SEQ ID NO: 614380 - RNA, 19 nt, Artificial Sequence
  Description of Artificial Sequence: Synthetic oligonucleotide
gucuuuccgacucacuugu

SEQ ID NO: 614381 - RNA, 19 nt, Artificial Sequence
  Description of Artificial Sequence: Synthetic oligonucleotide
cugucuaggauuagaagau

SEQ ID NO: 614382 - RNA, 19 nt, Artificial Sequence
  Description of Artificial Sequence: Synthetic oligonucleotide
ucuugccgacuuccugacc

SEQ ID NO: 614383 - RNA, 19 nt, Artificial Sequence
  Description of Artificial Sequence: Synthetic oligonucleotide
uugauacgcccuggggucc

SEQ ID NO: 614384 - RNA, 19 nt, Artificial Sequence
  Description of Artificial Sequence: Synthetic oligonucleotide
cccagagcgauggauauag

SEQ ID NO: 614385 - RNA, 19 nt, Artificial Sequence
  Description of Artificial Sequence: Synthetic oligonucleotide
aaacggccgcuuugcagau

SEQ ID NO: 614386 - RNA, 19 nt, Artificial Sequence
  Description of Artificial Sequence: Synthetic oligonucleotide
uccuuuuguucacguguua

SEQ ID NO: 614387 - RNA, 19 nt, Artificial Sequence
  Description of Artificial Sequence: Synthetic oligonucleotide
agagaaugucuuuccuguu

SEQ ID NO: 614388 - RNA, 19 nt, Artificial Sequence
  Description of Artificial Sequence: Synthetic oligonucleotide
gauggucggaagaaaucaa

SEQ ID NO: 614389 - RNA, 19 nt, Artificial Sequence
  Description of Artificial Sequence: Synthetic oligonucleotide
agguauagcuggauaagua

SEQ ID NO: 614390 - RNA, 19 nt, Artificial Sequence
  Description of Artificial Sequence: Synthetic oligonucleotide
aguauccaaucugaaucau

SEQ ID NO: 614391 - RNA, 19 nt, Artificial Sequence
  Description of Artificial Sequence: Synthetic oligonucleotide
auuccgaauuugauuaauu

SEQ ID NO: 614392 - RNA, 19 nt, Artificial Sequence
  Description of Artificial Sequence: Synthetic oligonucleotide
uccgacucacuuguaggaa

SEQ ID NO: 614393 - RNA, 19 nt, Artificial Sequence
  Description of Artificial Sequence: Synthetic oligonucleotide
aacacgccacacugaguuu

SEQ ID NO: 614394 - RNA, 19 nt, Artificial Sequence
  Description of Artificial Sequence: Synthetic oligonucleotide
agauccaaacggccgcuuu

SEQ ID NO: 614395 - RNA, 19 nt, Artificial Sequence
  Description of Artificial Sequence: Synthetic oligonucleotide
cuguucauaucuggauuuc

SEQ ID NO: 614396 - RNA, 19 nt, Artificial Sequence
  Description of Artificial Sequence: Synthetic oligonucleotide
gucuaggauuagaagaugu

SEQ ID NO: 614397 - RNA, 19 nt, Artificial Sequence
  Description of Artificial Sequence: Synthetic oligonucleotide
uccgggcuugagcaauuaa

SEQ ID NO: 614398 - RNA, 19 nt, Artificial Sequence
  Description of Artificial Sequence: Synthetic oligonucleotide
gaucgaccaccagaccggc

SEQ ID NO: 614399 - RNA, 19 nt, Artificial Sequence
  Description of Artificial Sequence: Synthetic oligonucleotide
ccagaaaugugagcuaaug

SEQ ID NO: 614400 - RNA, 19 nt, Artificial Sequence
  Description of Artificial Sequence: Synthetic oligonucleotide
caauuacugcuggucuuug

SEQ ID NO: 614401 - RNA, 19 nt, Artificial Sequence
  Description of Artificial Sequence: Synthetic oligonucleotide
cuuagucaaaacuccguuu

SEQ ID NO: 614402 - RNA, 19 nt, Artificial Sequence
  Description of Artificial Sequence: Synthetic oligonucleotide
cugaacggccugaccugcc

SEQ ID NO: 614403 - RNA, 19 nt, Artificial Sequence
  Description of Artificial Sequence: Synthetic oligonucleotide
uguuaccccucgaccuuuc

SEQ ID NO: 614404 - RNA, 19 nt, Artificial Sequence
  Description of Artificial Sequence: Synthetic oligonucleotide
agcucuaccugugcgccca

SEQ ID NO: 614405 - RNA, 19 nt, Artificial Sequence
  Description of Artificial Sequence: Synthetic oligonucleotide
gcguagcuucgaaagaucc

SEQ ID NO: 614406 - RNA, 19 nt, Artificial Sequence
  Description of Artificial Sequence: Synthetic oligonucleotide
cuugauuugccaguucccu

SEQ ID NO: 614407 - RNA, 19 nt, Artificial Sequence
  Description of Artificial Sequence: Synthetic oligonucleotide
cucuuugugacugugcaau

SEQ ID NO: 614408 - RNA, 19 nt, Artificial Sequence
  Description of Artificial Sequence: Synthetic oligonucleotide
cgugguucaaagcuugaug

SEQ ID NO: 614409 - RNA, 19 nt, Artificial Sequence
  Description of Artificial Sequence: Synthetic oligonucleotide
ggucaaccuguucauaucu

SEQ ID NO: 614410 - RNA, 19 nt, Artificial Sequence
  Description of Artificial Sequence: Synthetic oligonucleotide
uugccgacuuccugaccga

SEQ ID NO: 614411 - RNA, 19 nt, Artificial Sequence
  Description of Artificial Sequence: Synthetic oligonucleotide
gcuuugauaugauguucca

SEQ ID NO: 614412 - RNA, 19 nt, Artificial Sequence
  Description of Artificial Sequence: Synthetic oligonucleotide
ugauacgcccugggguccc

SEQ ID NO: 614413 - RNA, 19 nt, Artificial Sequence
  Description of Artificial Sequence: Synthetic oligonucleotide
auuaacgaucaaacacuua

SEQ ID NO: 614414 - RNA, 19 nt, Artificial Sequence
  Description of Artificial Sequence: Synthetic oligonucleotide
gcacuggauagccaaaugu

SEQ ID NO: 614415 - RNA, 19 nt, Artificial Sequence
  Description of Artificial Sequence: Synthetic oligonucleotide
guuacuugagacacagcau

SEQ ID NO: 614416 - RNA, 19 nt, Artificial Sequence
  Description of Artificial Sequence: Synthetic oligonucleotide
caagcacaacauggcguag

SEQ ID NO: 614417 - RNA, 19 nt, Artificial Sequence
  Description of Artificial Sequence: Synthetic oligonucleotide
ccgacucacuuguaggaac

SEQ ID NO: 614418 - RNA, 19 nt, Artificial Sequence
  Description of Artificial Sequence: Synthetic oligonucleotide
guaauuuggcuggcacuga

SEQ ID NO: 614419 - RNA, 19 nt, Artificial Sequence
  Description of Artificial Sequence: Synthetic oligonucleotide
cuuugagaccaauggcacu

SEQ ID NO: 614420 - RNA, 19 nt, Artificial Sequence
  Description of Artificial Sequence: Synthetic oligonucleotide
aucgaccaccagaccggcc

SEQ ID NO: 614421 - RNA, 19 nt, Artificial Sequence
  Description of Artificial Sequence: Synthetic oligonucleotide
ugcgcccagagcgauggau

SEQ ID NO: 614422 - RNA, 19 nt, Artificial Sequence
  Description of Artificial Sequence: Synthetic oligonucleotide
cacgccacacugaguuuuc

SEQ ID NO: 614423 - RNA, 19 nt, Artificial Sequence
  Description of Artificial Sequence: Synthetic oligonucleotide
gucuaccugaucggccacc

SEQ ID NO: 614424 - RNA, 19 nt, Artificial Sequence
  Description of Artificial Sequence: Synthetic oligonucleotide
guuccuguccgggcuugag

SEQ ID NO: 614425 - RNA, 19 nt, Artificial Sequence
  Description of Artificial Sequence: Synthetic oligonucleotide
cagcucuaccugugcgccc

SEQ ID NO: 614426 - RNA, 19 nt, Artificial Sequence
  Description of Artificial Sequence: Synthetic oligonucleotide
uguccgggcuugagcaauu

SEQ ID NO: 614427 - RNA, 19 nt, Artificial Sequence
  Description of Artificial Sequence: Synthetic oligonucleotide
ccagcucuaccugugcgcc

SEQ ID NO: 614428 - RNA, 19 nt, Artificial Sequence
  Description of Artificial Sequence: Synthetic oligonucleotide
cagauccacuguagaccug

SEQ ID NO: 614429 - RNA, 19 nt, Artificial Sequence
  Description of Artificial Sequence: Synthetic oligonucleotide
gaucggccaccagaucgac

SEQ ID NO: 614430 - RNA, 19 nt, Artificial Sequence
  Description of Artificial Sequence: Synthetic oligonucleotide
uguagaccuguaggacauc

SEQ ID NO: 614431 - RNA, 19 nt, Artificial Sequence
  Description of Artificial Sequence: Synthetic oligonucleotide
guucccauuucgucuucua

SEQ ID NO: 614432 - RNA, 19 nt, Artificial Sequence
  Description of Artificial Sequence: Synthetic oligonucleotide
guuaccccucgaccuuuca

SEQ ID NO: 614433 - RNA, 19 nt, Artificial Sequence
  Description of Artificial Sequence: Synthetic oligonucleotide
ggggaacucugaaucacca

SEQ ID NO: 614434 - RNA, 19 nt, Artificial Sequence
  Description of Artificial Sequence: Synthetic oligonucleotide
cuguagucuuuccgacuca

SEQ ID NO: 614435 - RNA, 19 nt, Artificial Sequence
  Description of Artificial Sequence: Synthetic oligonucleotide
ugccgacuuccugaccgac

SEQ ID NO: 614436 - RNA, 19 nt, Artificial Sequence
  Description of Artificial Sequence: Synthetic oligonucleotide
uguuccuguccgggcuuga

SEQ ID NO: 614437 - RNA, 19 nt, Artificial Sequence
  Description of Artificial Sequence: Synthetic oligonucleotide
aucgugguucaaagcuuga

SEQ ID NO: 614438 - RNA, 19 nt, Artificial Sequence
  Description of Artificial Sequence: Synthetic oligonucleotide
guauacccacugugggcaa

SEQ ID NO: 614439 - RNA, 19 nt, Artificial Sequence
  Description of Artificial Sequence: Synthetic oligonucleotide
auguuaccccucgaccuuu

SEQ ID NO: 614440 - RNA, 19 nt, Artificial Sequence
  Description of Artificial Sequence: Synthetic oligonucleotide
uaccuuuggugagcggcuu

SEQ ID NO: 614441 - RNA, 19 nt, Artificial Sequence
  Description of Artificial Sequence: Synthetic oligonucleotide
ccgggcuugagcaauuaaa

SEQ ID NO: 614442 - RNA, 19 nt, Artificial Sequence
  Description of Artificial Sequence: Synthetic oligonucleotide
cauuacuacucagcuuucu

SEQ ID NO: 614443 - RNA, 19 nt, Artificial Sequence
  Description of Artificial Sequence: Synthetic oligonucleotide
cugucgacucugucuaccu

SEQ ID NO: 614444 - RNA, 19 nt, Artificial Sequence
  Description of Artificial Sequence: Synthetic oligonucleotide
cugugcgcccagagcgaug

SEQ ID NO: 614445 - RNA, 19 nt, Artificial Sequence
  Description of Artificial Sequence: Synthetic oligonucleotide
cuguuccuguccgggcuug

SEQ ID NO: 614446 - RNA, 19 nt, Artificial Sequence
  Description of Artificial Sequence: Synthetic oligonucleotide
cuacuucaucaagcacaac

SEQ ID NO: 614447 - RNA, 19 nt, Artificial Sequence
  Description of Artificial Sequence: Synthetic oligonucleotide
ccagaucgaccaccagacc

SEQ ID NO: 614448 - RNA, 19 nt, Artificial Sequence
  Description of Artificial Sequence: Synthetic oligonucleotide
cauuccgaauuugauuaau

SEQ ID NO: 614449 - RNA, 19 nt, Artificial Sequence
  Description of Artificial Sequence: Synthetic oligonucleotide
ggcguagcuucgaaagauc

SEQ ID NO: 614450 - RNA, 19 nt, Artificial Sequence
  Description of Artificial Sequence: Synthetic oligonucleotide
cuggaagauuaacgaucaa

SEQ ID NO: 614451 - RNA, 19 nt, Artificial Sequence
  Description of Artificial Sequence: Synthetic oligonucleotide
gcccuggggucccaacaag

SEQ ID NO: 614452 - RNA, 19 nt, Artificial Sequence
  Description of Artificial Sequence: Synthetic oligonucleotide
cguagcuucgaaagaucca

SEQ ID NO: 614453 - RNA, 19 nt, Artificial Sequence
  Description of Artificial Sequence: Synthetic oligonucleotide
gaccggccugaacggccug

SEQ ID NO: 614454 - RNA, 19 nt, Artificial Sequence
  Description of Artificial Sequence: Synthetic oligonucleotide
accugugcgcccagagcga

SEQ ID NO: 614455 - RNA, 19 nt, Artificial Sequence
  Description of Artificial Sequence: Synthetic oligonucleotide
gccgcuuugcagauggucu

SEQ ID NO: 614456 - RNA, 19 nt, Artificial Sequence
  Description of Artificial Sequence: Synthetic oligonucleotide
guagucuuuccgacucacu

SEQ ID NO: 614457 - RNA, 19 nt, Artificial Sequence
  Description of Artificial Sequence: Synthetic oligonucleotide
cgacucacuuguaggaaca

SEQ ID NO: 614458 - RNA, 19 nt, Artificial Sequence
  Description of Artificial Sequence: Synthetic oligonucleotide
ccaaugcauccacggcccc

SEQ ID NO: 614459 - RNA, 19 nt, Artificial Sequence
  Description of Artificial Sequence: Synthetic oligonucleotide
gacucacuuguaggaacau

SEQ ID NO: 614460 - RNA, 19 nt, Artificial Sequence
  Description of Artificial Sequence: Synthetic oligonucleotide
ccccucgaccuuucagaag

SEQ ID NO: 614461 - RNA, 19 nt, Artificial Sequence
  Description of Artificial Sequence: Synthetic oligonucleotide
cagcauuacuacucagcuu

SEQ ID NO: 614462 - RNA, 19 nt, Artificial Sequence
  Description of Artificial Sequence: Synthetic oligonucleotide
gauccacuguagaccugua

SEQ ID NO: 614463 - RNA, 19 nt, Artificial Sequence
  Description of Artificial Sequence: Synthetic oligonucleotide
gcauuacuacucagcuuuc

SEQ ID NO: 614464 - RNA, 19 nt, Artificial Sequence
  Description of Artificial Sequence: Synthetic oligonucleotide
gauacgcccugggguccca

SEQ ID NO: 614465 - RNA, 19 nt, Artificial Sequence
  Description of Artificial Sequence: Synthetic oligonucleotide
acuccccugucgacucugu

SEQ ID NO: 614466 - RNA, 19 nt, Artificial Sequence
  Description of Artificial Sequence: Synthetic oligonucleotide
ccuuaucagaggugaucaa

SEQ ID NO: 614467 - RNA, 19 nt, Artificial Sequence
  Description of Artificial Sequence: Synthetic oligonucleotide
accccuuaucagaggugau

SEQ ID NO: 614468 - RNA, 19 nt, Artificial Sequence
  Description of Artificial Sequence: Synthetic oligonucleotide
ccauuccgaauuugauuaa

SEQ ID NO: 614469 - RNA, 19 nt, Artificial Sequence
  Description of Artificial Sequence: Synthetic oligonucleotide
gccuguagucuuuccgacu

SEQ ID NO: 614470 - RNA, 19 nt, Artificial Sequence
  Description of Artificial Sequence: Synthetic oligonucleotide
ccccugucgacucugucua

SEQ ID NO: 614471 - RNA, 19 nt, Artificial Sequence
  Description of Artificial Sequence: Synthetic oligonucleotide
cacucugccuguagucuuu

SEQ ID NO: 614472 - RNA, 19 nt, Artificial Sequence
  Description of Artificial Sequence: Synthetic oligonucleotide
cccucugucuaggauuaga

SEQ ID NO: 614473 - RNA, 19 nt, Artificial Sequence
  Description of Artificial Sequence: Synthetic oligonucleotide
acggccccuuucucuucua

SEQ ID NO: 614474 - RNA, 19 nt, Artificial Sequence
  Description of Artificial Sequence: Synthetic oligonucleotide
gcucuaccugugcgcccag

SEQ ID NO: 614475 - RNA, 19 nt, Artificial Sequence
  Description of Artificial Sequence: Synthetic oligonucleotide
cacggccccuuucucuucu

SEQ ID NO: 614476 - RNA, 19 nt, Artificial Sequence
  Description of Artificial Sequence: Synthetic oligonucleotide
cccugucgacucugucuac

SEQ ID NO: 614477 - RNA, 19 nt, Artificial Sequence
  Description of Artificial Sequence: Synthetic oligonucleotide
cuguccgggcuugagcaau

SEQ ID NO: 614478 - RNA, 19 nt, Artificial Sequence
  Description of Artificial Sequence: Synthetic oligonucleotide
cgauuucgguucccauuuc

SEQ ID NO: 614479 - RNA, 19 nt, Artificial Sequence
  Description of Artificial Sequence: Synthetic oligonucleotide
auacgcccuggggucccaa

SEQ ID NO: 614480 - RNA, 19 nt, Artificial Sequence
  Description of Artificial Sequence: Synthetic oligonucleotide
gcgcccagagcgauggaua

SEQ ID NO: 614481 - RNA, 19 nt, Artificial Sequence
  Description of Artificial Sequence: Synthetic oligonucleotide
guccgggcuugagcaauua

SEQ ID NO: 614482 - RNA, 19 nt, Artificial Sequence
  Description of Artificial Sequence: Synthetic oligonucleotide
ccggccugaacggccugac

SEQ ID NO: 614483 - RNA, 19 nt, Artificial Sequence
  Description of Artificial Sequence: Synthetic oligonucleotide
ccuguccgggcuugagcaa

SEQ ID NO: 614484 - RNA, 19 nt, Artificial Sequence
  Description of Artificial Sequence: Synthetic oligonucleotide
gccgccccucugucuagga

SEQ ID NO: 614485 - RNA, 19 nt, Artificial Sequence
  Description of Artificial Sequence: Synthetic oligonucleotide
ccucaacuaugaugaccua

SEQ ID NO: 614486 - RNA, 19 nt, Artificial Sequence
  Description of Artificial Sequence: Synthetic oligonucleotide
gccuuucaaucaaggguau

SEQ ID NO: 614487 - RNA, 19 nt, Artificial Sequence
  Description of Artificial Sequence: Synthetic oligonucleotide
gccgacuuccugaccgacu

SEQ ID NO: 614488 - RNA, 19 nt, Artificial Sequence
  Description of Artificial Sequence: Synthetic oligonucleotide
ccgcuuugcagauggucuu

SEQ ID NO: 614489 - RNA, 19 nt, Artificial Sequence
  Description of Artificial Sequence: Synthetic oligonucleotide
gcccagagcgauggauaua

SEQ ID NO: 614490 - RNA, 19 nt, Artificial Sequence
  Description of Artificial Sequence: Synthetic oligonucleotide
gggucccaacaaggauguc

SEQ ID NO: 614491 - RNA, 19 nt, Artificial Sequence
  Description of Artificial Sequence: Synthetic oligonucleotide
cgguucccauuucgucuuc

SEQ ID NO: 614492 - RNA, 19 nt, Artificial Sequence
  Description of Artificial Sequence: Synthetic oligonucleotide
gcacaacauggcguagcuu

SEQ ID NO: 614493 - RNA, 19 nt, Artificial Sequence
  Description of Artificial Sequence: Synthetic oligonucleotide
cacucgcuuugaccuucuu

SEQ ID NO: 614494 - RNA, 19 nt, Artificial Sequence
  Description of Artificial Sequence: Synthetic oligonucleotide
cgcccagagcgauggauau

SEQ ID NO: 614495 - RNA, 19 nt, Artificial Sequence
  Description of Artificial Sequence: Synthetic oligonucleotide
ccugugcgcccagagcgau

SEQ ID NO: 614496 - RNA, 19 nt, Artificial Sequence
  Description of Artificial Sequence: Synthetic oligonucleotide
cgacuccccugucgacucu

SEQ ID NO: 614497 - RNA, 19 nt, Artificial Sequence
  Description of Artificial Sequence: Synthetic oligonucleotide
cggccgcuuugcagauggu

SEQ ID NO: 614498 - RNA, 19 nt, Artificial Sequence
  Description of Artificial Sequence: Synthetic oligonucleotide
auaaucgugucuuugaacc

SEQ ID NO: 614499 - RNA, 19 nt, Artificial Sequence
  Description of Artificial Sequence: Synthetic oligonucleotide
aaaucgagaaaacuguaag

SEQ ID NO: 614500 - RNA, 19 nt, Artificial Sequence
  Description of Artificial Sequence: Synthetic oligonucleotide
uguaagaacgauagacugg

SEQ ID NO: 614501 - RNA, 19 nt, Artificial Sequence
  Description of Artificial Sequence: Synthetic oligonucleotide
guuccgauaaaccucauag

SEQ ID NO: 614502 - RNA, 19 nt, Artificial Sequence
  Description of Artificial Sequence: Synthetic oligonucleotide
gaacaggugguuuucaucc

SEQ ID NO: 614503 - RNA, 19 nt, Artificial Sequence
  Description of Artificial Sequence: Synthetic oligonucleotide
aggaguaaacaugauauac

SEQ ID NO: 614504 - RNA, 19 nt, Artificial Sequence
  Description of Artificial Sequence: Synthetic oligonucleotide
gaugaaagggucccuaaag

SEQ ID NO: 614505 - RNA, 19 nt, Artificial Sequence
  Description of Artificial Sequence: Synthetic oligonucleotide
gaacacucggaccugaugc

SEQ ID NO: 614506 - RNA, 19 nt, Artificial Sequence
  Description of Artificial Sequence: Synthetic oligonucleotide
aacaaagucccacucggug

SEQ ID NO: 614507 - RNA, 19 nt, Artificial Sequence
  Description of Artificial Sequence: Synthetic oligonucleotide
aaucgagaaaacuguaaga

SEQ ID NO: 614508 - RNA, 19 nt, Artificial Sequence
  Description of Artificial Sequence: Synthetic oligonucleotide
guaagaacgauagacuggg

SEQ ID NO: 614509 - RNA, 19 nt, Artificial Sequence
  Description of Artificial Sequence: Synthetic oligonucleotide
aacacucggaccugaugcc

SEQ ID NO: 614510 - RNA, 19 nt, Artificial Sequence
  Description of Artificial Sequence: Synthetic oligonucleotide
ugauauaccugcugcaggc

SEQ ID NO: 614511 - RNA, 19 nt, Artificial Sequence
  Description of Artificial Sequence: Synthetic oligonucleotide
cauagaaccugauugggug

SEQ ID NO: 614512 - RNA, 19 nt, Artificial Sequence
  Description of Artificial Sequence: Synthetic oligonucleotide
aagaaggaugccugagacg

SEQ ID NO: 614513 - RNA, 19 nt, Artificial Sequence
  Description of Artificial Sequence: Synthetic oligonucleotide
uaagcggugaaugacauuc

SEQ ID NO: 614514 - RNA, 19 nt, Artificial Sequence
  Description of Artificial Sequence: Synthetic oligonucleotide
aaucgugucuuugaaccgg

SEQ ID NO: 614515 - RNA, 19 nt, Artificial Sequence
  Description of Artificial Sequence: Synthetic oligonucleotide
uccgacggcguucuaagcg

SEQ ID NO: 614516 - RNA, 19 nt, Artificial Sequence
  Description of Artificial Sequence: Synthetic oligonucleotide
uggaagaagcgccucuugg

SEQ ID NO: 614517 - RNA, 19 nt, Artificial Sequence
  Description of Artificial Sequence: Synthetic oligonucleotide
gaagaggcuacacucccgg

SEQ ID NO: 614518 - RNA, 19 nt, Artificial Sequence
  Description of Artificial Sequence: Synthetic oligonucleotide
gcugaagagagacaaaucc

SEQ ID NO: 614519 - RNA, 19 nt, Artificial Sequence
  Description of Artificial Sequence: Synthetic oligonucleotide
cuguaagaacgauagacug

SEQ ID NO: 614520 - RNA, 19 nt, Artificial Sequence
  Description of Artificial Sequence: Synthetic oligonucleotide
auucgucgggguuuaaugg

SEQ ID NO: 614521 - RNA, 19 nt, Artificial Sequence
  Description of Artificial Sequence: Synthetic oligonucleotide
uggauuaggggucacggac

SEQ ID NO: 614522 - RNA, 19 nt, Artificial Sequence
  Description of Artificial Sequence: Synthetic oligonucleotide
gauucgucgggguuuaaug

SEQ ID NO: 614523 - RNA, 19 nt, Artificial Sequence
  Description of Artificial Sequence: Synthetic oligonucleotide
augauauaccugcugcagg

SEQ ID NO: 614524 - RNA, 19 nt, Artificial Sequence
  Description of Artificial Sequence: Synthetic oligonucleotide
ucgucguagcugaagagag

SEQ ID NO: 614525 - RNA, 19 nt, Artificial Sequence
  Description of Artificial Sequence: Synthetic oligonucleotide
cagauauagcccuugguug

SEQ ID NO: 614526 - RNA, 19 nt, Artificial Sequence
  Description of Artificial Sequence: Synthetic oligonucleotide
aauuuacgcaggaaacagg

SEQ ID NO: 614527 - RNA, 19 nt, Artificial Sequence
  Description of Artificial Sequence: Synthetic oligonucleotide
acagauauagcccuugguu

SEQ ID NO: 614528 - RNA, 19 nt, Artificial Sequence
  Description of Artificial Sequence: Synthetic oligonucleotide
agaacgauagacuggguaa

SEQ ID NO: 614529 - RNA, 19 nt, Artificial Sequence
  Description of Artificial Sequence: Synthetic oligonucleotide
aaugcuagguguucccaca

SEQ ID NO: 614530 - RNA, 19 nt, Artificial Sequence
  Description of Artificial Sequence: Synthetic oligonucleotide
ucugguggaacacucggac

SEQ ID NO: 614531 - RNA, 19 nt, Artificial Sequence
  Description of Artificial Sequence: Synthetic oligonucleotide
uaaucgugucuuugaaccg

SEQ ID NO: 614532 - RNA, 19 nt, Artificial Sequence
  Description of Artificial Sequence: Synthetic oligonucleotide
augccaaagaguggcaucc

SEQ ID NO: 614533 - RNA, 19 nt, Artificial Sequence
  Description of Artificial Sequence: Synthetic oligonucleotide
uauaaucgugucuuugaac

SEQ ID NO: 614534 - RNA, 19 nt, Artificial Sequence
  Description of Artificial Sequence: Synthetic oligonucleotide
uuauaaucgugucuuugaa

SEQ ID NO: 614535 - RNA, 19 nt, Artificial Sequence
  Description of Artificial Sequence: Synthetic oligonucleotide
ugguggaacacucggaccu

SEQ ID NO: 614536 - RNA, 19 nt, Artificial Sequence
  Description of Artificial Sequence: Synthetic oligonucleotide
aacgagacggcgcacugug

SEQ ID NO: 614537 - RNA, 19 nt, Artificial Sequence
  Description of Artificial Sequence: Synthetic oligonucleotide
ucgacguugaccacuguga

SEQ ID NO: 614538 - RNA, 19 nt, Artificial Sequence
  Description of Artificial Sequence: Synthetic oligonucleotide
uucuaagcggugaaugaca

SEQ ID NO: 614539 - RNA, 19 nt, Artificial Sequence
  Description of Artificial Sequence: Synthetic oligonucleotide
auaacaucucugucggguc

SEQ ID NO: 614540 - RNA, 19 nt, Artificial Sequence
  Description of Artificial Sequence: Synthetic oligonucleotide
uucucuuauaaagagcccu

SEQ ID NO: 614541 - RNA, 19 nt, Artificial Sequence
  Description of Artificial Sequence: Synthetic oligonucleotide
uucaagugcucaccauugg

SEQ ID NO: 614542 - RNA, 19 nt, Artificial Sequence
  Description of Artificial Sequence: Synthetic oligonucleotide
gcgugugucacacaaacgg

SEQ ID NO: 614543 - RNA, 19 nt, Artificial Sequence
  Description of Artificial Sequence: Synthetic oligonucleotide
caucgggugagaauuuacg

SEQ ID NO: 614544 - RNA, 19 nt, Artificial Sequence
  Description of Artificial Sequence: Synthetic oligonucleotide
aaggcaacgagacggcgca

SEQ ID NO: 614545 - RNA, 19 nt, Artificial Sequence
  Description of Artificial Sequence: Synthetic oligonucleotide
ugucgcauguggaaguuga

SEQ ID NO: 614546 - RNA, 19 nt, Artificial Sequence
  Description of Artificial Sequence: Synthetic oligonucleotide
aaagagcccugccuguuug

SEQ ID NO: 614547 - RNA, 19 nt, Artificial Sequence
  Description of Artificial Sequence: Synthetic oligonucleotide
gaguaaacaugauauaccu

SEQ ID NO: 614548 - RNA, 19 nt, Artificial Sequence
  Description of Artificial Sequence: Synthetic oligonucleotide
aguuggucaaaguacugga

SEQ ID NO: 614549 - RNA, 19 nt, Artificial Sequence
  Description of Artificial Sequence: Synthetic oligonucleotide
ucgggugagaauuuacgca

SEQ ID NO: 614550 - RNA, 19 nt, Artificial Sequence
  Description of Artificial Sequence: Synthetic oligonucleotide
uacgaugacacaccggcaa

SEQ ID NO: 614551 - RNA, 19 nt, Artificial Sequence
  Description of Artificial Sequence: Synthetic oligonucleotide
ucgagaaaacuguaagaac

SEQ ID NO: 614552 - RNA, 19 nt, Artificial Sequence
  Description of Artificial Sequence: Synthetic oligonucleotide
uuggccgccacauugguaa

SEQ ID NO: 614553 - RNA, 19 nt, Artificial Sequence
  Description of Artificial Sequence: Synthetic oligonucleotide
aucgagaaaacuguaagaa

SEQ ID NO: 614554 - RNA, 19 nt, Artificial Sequence
  Description of Artificial Sequence: Synthetic oligonucleotide
aauggacuuaaugcuaggu

SEQ ID NO: 614555 - RNA, 19 nt, Artificial Sequence
  Description of Artificial Sequence: Synthetic oligonucleotide
aaaaucgagaaaacuguaa

SEQ ID NO: 614556 - RNA, 19 nt, Artificial Sequence
  Description of Artificial Sequence: Synthetic oligonucleotide
gagucccgggcauagaacc

SEQ ID NO: 614557 - RNA, 19 nt, Artificial Sequence
  Description of Artificial Sequence: Synthetic oligonucleotide
ugcaaaauuguugcuagaa

SEQ ID NO: 614558 - RNA, 19 nt, Artificial Sequence
  Description of Artificial Sequence: Synthetic oligonucleotide
uugucgucguagcugaaga

SEQ ID NO: 614559 - RNA, 19 nt, Artificial Sequence
  Description of Artificial Sequence: Synthetic oligonucleotide
gauugggugaucuccacaa

SEQ ID NO: 614560 - RNA, 19 nt, Artificial Sequence
  Description of Artificial Sequence: Synthetic oligonucleotide
gauccgacggcguucuaag

SEQ ID NO: 614561 - RNA, 19 nt, Artificial Sequence
  Description of Artificial Sequence: Synthetic oligonucleotide
gaauggacuuaaugcuagg

SEQ ID NO: 614562 - RNA, 19 nt, Artificial Sequence
  Description of Artificial Sequence: Synthetic oligonucleotide
agaauuuacgcaggaaaca

SEQ ID NO: 614563 - RNA, 19 nt, Artificial Sequence
  Description of Artificial Sequence: Synthetic oligonucleotide
ugagacgggucugugaccc

SEQ ID NO: 614564 - RNA, 19 nt, Artificial Sequence
  Description of Artificial Sequence: Synthetic oligonucleotide
ccuacgaugacacaccggc

SEQ ID NO: 614565 - RNA, 19 nt, Artificial Sequence
  Description of Artificial Sequence: Synthetic oligonucleotide
ugacacaccggcaaucauc

SEQ ID NO: 614566 - RNA, 19 nt, Artificial Sequence
  Description of Artificial Sequence: Synthetic oligonucleotide
ucuaagcggugaaugacau

SEQ ID NO: 614567 - RNA, 19 nt, Artificial Sequence
  Description of Artificial Sequence: Synthetic oligonucleotide
uuugaaccggcgcuggauc

SEQ ID NO: 614568 - RNA, 19 nt, Artificial Sequence
  Description of Artificial Sequence: Synthetic oligonucleotide
aaugguccgaacgucaaua

SEQ ID NO: 614569 - RNA, 19 nt, Artificial Sequence
  Description of Artificial Sequence: Synthetic oligonucleotide
guugacgacauacucugca

SEQ ID NO: 614570 - RNA, 19 nt, Artificial Sequence
  Description of Artificial Sequence: Synthetic oligonucleotide
gaguugaugaaaggguccc

SEQ ID NO: 614571 - RNA, 19 nt, Artificial Sequence
  Description of Artificial Sequence: Synthetic oligonucleotide
uuccgauaaaccucauaga

SEQ ID NO: 614572 - RNA, 19 nt, Artificial Sequence
  Description of Artificial Sequence: Synthetic oligonucleotide
ggaguaaacaugauauacc

SEQ ID NO: 614573 - RNA, 19 nt, Artificial Sequence
  Description of Artificial Sequence: Synthetic oligonucleotide
uucguaccccugcaagagg

SEQ ID NO: 614574 - RNA, 19 nt, Artificial Sequence
  Description of Artificial Sequence: Synthetic oligonucleotide
aaccugauugggugaucuc

SEQ ID NO: 614575 - RNA, 19 nt, Artificial Sequence
  Description of Artificial Sequence: Synthetic oligonucleotide
uuuacgcaggaaacaggga

SEQ ID NO: 614576 - RNA, 19 nt, Artificial Sequence
  Description of Artificial Sequence: Synthetic oligonucleotide
aguggguucccgccuugcc

SEQ ID NO: 614577 - RNA, 19 nt, Artificial Sequence
  Description of Artificial Sequence: Synthetic oligonucleotide
gcacagaaauagcaaacgg

SEQ ID NO: 614578 - RNA, 19 nt, Artificial Sequence
  Description of Artificial Sequence: Synthetic oligonucleotide
uaaugcuagguguucccac

SEQ ID NO: 614579 - RNA, 19 nt, Artificial Sequence
  Description of Artificial Sequence: Synthetic oligonucleotide
cacuguuccgauaaaccuc

SEQ ID NO: 614580 - RNA, 19 nt, Artificial Sequence
  Description of Artificial Sequence: Synthetic oligonucleotide
cuugguugugugacaagac

SEQ ID NO: 614581 - RNA, 19 nt, Artificial Sequence
  Description of Artificial Sequence: Synthetic oligonucleotide
gaacgucaauaaaagugcc

SEQ ID NO: 614582 - RNA, 19 nt, Artificial Sequence
  Description of Artificial Sequence: Synthetic oligonucleotide
ucguaccccugcaagaggu

SEQ ID NO: 614583 - RNA, 19 nt, Artificial Sequence
  Description of Artificial Sequence: Synthetic oligonucleotide
uucucgacguugaccacug

SEQ ID NO: 614584 - RNA, 19 nt, Artificial Sequence
  Description of Artificial Sequence: Synthetic oligonucleotide
ugaacugauccgacggcgu

SEQ ID NO: 614585 - RNA, 19 nt, Artificial Sequence
  Description of Artificial Sequence: Synthetic oligonucleotide
gaaugugcgugugucacac

SEQ ID NO: 614586 - RNA, 19 nt, Artificial Sequence
  Description of Artificial Sequence: Synthetic oligonucleotide
uucgucgggguuuaauggu

SEQ ID NO: 614587 - RNA, 19 nt, Artificial Sequence
  Description of Artificial Sequence: Synthetic oligonucleotide
uuaaugcuagguguuccca

SEQ ID NO: 614588 - RNA, 19 nt, Artificial Sequence
  Description of Artificial Sequence: Synthetic oligonucleotide
cugaacugauccgacggcg

SEQ ID NO: 614589 - RNA, 19 nt, Artificial Sequence
  Description of Artificial Sequence: Synthetic oligonucleotide
guccgaacgucaauaaaag

SEQ ID NO: 614590 - RNA, 19 nt, Artificial Sequence
  Description of Artificial Sequence: Synthetic oligonucleotide
uuaggggucacggacucac

SEQ ID NO: 614591 - RNA, 19 nt, Artificial Sequence
  Description of Artificial Sequence: Synthetic oligonucleotide
ugccugaacugauccgacg

SEQ ID NO: 614592 - RNA, 19 nt, Artificial Sequence
  Description of Artificial Sequence: Synthetic oligonucleotide
uccgucucaggugaaggag

SEQ ID NO: 614593 - RNA, 19 nt, Artificial Sequence
  Description of Artificial Sequence: Synthetic oligonucleotide
gagacggcgcacugugugg

SEQ ID NO: 614594 - RNA, 19 nt, Artificial Sequence
  Description of Artificial Sequence: Synthetic oligonucleotide
ucgucgggguuuaauggug

SEQ ID NO: 614595 - RNA, 19 nt, Artificial Sequence
  Description of Artificial Sequence: Synthetic oligonucleotide
gacacaccggcaaucauca

SEQ ID NO: 614596 - RNA, 19 nt, Artificial Sequence
  Description of Artificial Sequence: Synthetic oligonucleotide
gauuaggggucacggacuc

SEQ ID NO: 614597 - RNA, 19 nt, Artificial Sequence
  Description of Artificial Sequence: Synthetic oligonucleotide
ucugccgugcaaaauuguu

SEQ ID NO: 614598 - RNA, 19 nt, Artificial Sequence
  Description of Artificial Sequence: Synthetic oligonucleotide
gacgacauacucugcauua

SEQ ID NO: 614599 - RNA, 19 nt, Artificial Sequence
  Description of Artificial Sequence: Synthetic oligonucleotide
ugguaaugugcaacaggac

SEQ ID NO: 614600 - RNA, 19 nt, Artificial Sequence
  Description of Artificial Sequence: Synthetic oligonucleotide
uccgaacgucaauaaaagu

SEQ ID NO: 614601 - RNA, 19 nt, Artificial Sequence
  Description of Artificial Sequence: Synthetic oligonucleotide
acaccggcaaucaucagug

SEQ ID NO: 614602 - RNA, 19 nt, Artificial Sequence
  Description of Artificial Sequence: Synthetic oligonucleotide
cuuauaaagagcccugccu

SEQ ID NO: 614603 - RNA, 19 nt, Artificial Sequence
  Description of Artificial Sequence: Synthetic oligonucleotide
aacgauagacuggguaaca

SEQ ID NO: 614604 - RNA, 19 nt, Artificial Sequence
  Description of Artificial Sequence: Synthetic oligonucleotide
gccugaacugauccgacgg

SEQ ID NO: 614605 - RNA, 19 nt, Artificial Sequence
  Description of Artificial Sequence: Synthetic oligonucleotide
gaacgauagacuggguaac

SEQ ID NO: 614606 - RNA, 19 nt, Artificial Sequence
  Description of Artificial Sequence: Synthetic oligonucleotide
guauucucaaacacggcga

SEQ ID NO: 614607 - RNA, 19 nt, Artificial Sequence
  Description of Artificial Sequence: Synthetic oligonucleotide
ggcuucucgacguugacca

SEQ ID NO: 614608 - RNA, 19 nt, Artificial Sequence
  Description of Artificial Sequence: Synthetic oligonucleotide
ugaaugugcgugugucaca

SEQ ID NO: 614609 - RNA, 19 nt, Artificial Sequence
  Description of Artificial Sequence: Synthetic oligonucleotide
cucgacguugaccacugug

SEQ ID NO: 614610 - RNA, 19 nt, Artificial Sequence
  Description of Artificial Sequence: Synthetic oligonucleotide
auuuuggauucgucggggu

SEQ ID NO: 614611 - RNA, 19 nt, Artificial Sequence
  Description of Artificial Sequence: Synthetic oligonucleotide
uugacgacauacucugcau

SEQ ID NO: 614612 - RNA, 19 nt, Artificial Sequence
  Description of Artificial Sequence: Synthetic oligonucleotide
agauaaaccagcagccggu

SEQ ID NO: 614613 - RNA, 19 nt, Artificial Sequence
  Description of Artificial Sequence: Synthetic oligonucleotide
gaggggaccguggauuagg

SEQ ID NO: 614614 - RNA, 19 nt, Artificial Sequence
  Description of Artificial Sequence: Synthetic oligonucleotide
aacacggcgaucaccucug

SEQ ID NO: 614615 - RNA, 19 nt, Artificial Sequence
  Description of Artificial Sequence: Synthetic oligonucleotide
gaugacacaccggcaauca

SEQ ID NO: 614616 - RNA, 19 nt, Artificial Sequence
  Description of Artificial Sequence: Synthetic oligonucleotide
ugguugauagggcggccca

SEQ ID NO: 614617 - RNA, 19 nt, Artificial Sequence
  Description of Artificial Sequence: Synthetic oligonucleotide
ucacggacucacuguuccg

SEQ ID NO: 614618 - RNA, 19 nt, Artificial Sequence
  Description of Artificial Sequence: Synthetic oligonucleotide
ccgaagugucacuacaucc

SEQ ID NO: 614619 - RNA, 19 nt, Artificial Sequence
  Description of Artificial Sequence: Synthetic oligonucleotide
cugguggaacacucggacc

SEQ ID NO: 614620 - RNA, 19 nt, Artificial Sequence
  Description of Artificial Sequence: Synthetic oligonucleotide
augcuagguguucccacag

SEQ ID NO: 614621 - RNA, 19 nt, Artificial Sequence
  Description of Artificial Sequence: Synthetic oligonucleotide
gcauuaguccucugcacag

SEQ ID NO: 614622 - RNA, 19 nt, Artificial Sequence
  Description of Artificial Sequence: Synthetic oligonucleotide
uguuccgauaaaccucaua

SEQ ID NO: 614623 - RNA, 19 nt, Artificial Sequence
  Description of Artificial Sequence: Synthetic oligonucleotide
acgauagacuggguaacag

SEQ ID NO: 614624 - RNA, 19 nt, Artificial Sequence
  Description of Artificial Sequence: Synthetic oligonucleotide
ugugcccuccauacuuggc

SEQ ID NO: 614625 - RNA, 19 nt, Artificial Sequence
  Description of Artificial Sequence: Synthetic oligonucleotide
gaaaaucgagaaaacugua

SEQ ID NO: 614626 - RNA, 19 nt, Artificial Sequence
  Description of Artificial Sequence: Synthetic oligonucleotide
agcgcggguguggugaggc

SEQ ID NO: 614627 - RNA, 19 nt, Artificial Sequence
  Description of Artificial Sequence: Synthetic oligonucleotide
aggggucacggacucacug

SEQ ID NO: 614628 - RNA, 19 nt, Artificial Sequence
  Description of Artificial Sequence: Synthetic oligonucleotide
auccgacggcguucuaagc

SEQ ID NO: 614629 - RNA, 19 nt, Artificial Sequence
  Description of Artificial Sequence: Synthetic oligonucleotide
ucuagaggggaccguggau

SEQ ID NO: 614630 - RNA, 19 nt, Artificial Sequence
  Description of Artificial Sequence: Synthetic oligonucleotide
uugaaccggcgcuggaucu

SEQ ID NO: 614631 - RNA, 19 nt, Artificial Sequence
  Description of Artificial Sequence: Synthetic oligonucleotide
agcaaacggcucaaagggg

SEQ ID NO: 614632 - RNA, 19 nt, Artificial Sequence
  Description of Artificial Sequence: Synthetic oligonucleotide
aacaucucugucggguccu

SEQ ID NO: 614633 - RNA, 19 nt, Artificial Sequence
  Description of Artificial Sequence: Synthetic oligonucleotide
aaacaaagucccacucggu

SEQ ID NO: 614634 - RNA, 19 nt, Artificial Sequence
  Description of Artificial Sequence: Synthetic oligonucleotide
cuugucgucguagcugaag

SEQ ID NO: 614635 - RNA, 19 nt, Artificial Sequence
  Description of Artificial Sequence: Synthetic oligonucleotide
uaaugccaaagaguggcau

SEQ ID NO: 614636 - RNA, 19 nt, Artificial Sequence
  Description of Artificial Sequence: Synthetic oligonucleotide
agggguuccaguguggaau

SEQ ID NO: 614637 - RNA, 19 nt, Artificial Sequence
  Description of Artificial Sequence: Synthetic oligonucleotide
ggaaaaucgagaaaacugu

SEQ ID NO: 614638 - RNA, 19 nt, Artificial Sequence
  Description of Artificial Sequence: Synthetic oligonucleotide
ucuuugaaccggcgcugga

SEQ ID NO: 614639 - RNA, 19 nt, Artificial Sequence
  Description of Artificial Sequence: Synthetic oligonucleotide
acgacauacucugcauuag

SEQ ID NO: 614640 - RNA, 19 nt, Artificial Sequence
  Description of Artificial Sequence: Synthetic oligonucleotide
gcggccaaugguccgaacg

SEQ ID NO: 614641 - RNA, 19 nt, Artificial Sequence
  Description of Artificial Sequence: Synthetic oligonucleotide
ucguagcugaagagagaca

SEQ ID NO: 614642 - RNA, 19 nt, Artificial Sequence
  Description of Artificial Sequence: Synthetic oligonucleotide
agcggaaccuacgaugaca

SEQ ID NO: 614643 - RNA, 19 nt, Artificial Sequence
  Description of Artificial Sequence: Synthetic oligonucleotide
aagaggcuacacucccggu

SEQ ID NO: 614644 - RNA, 19 nt, Artificial Sequence
  Description of Artificial Sequence: Synthetic oligonucleotide
ucgccuagccugcucggug

SEQ ID NO: 614645 - RNA, 19 nt, Artificial Sequence
  Description of Artificial Sequence: Synthetic oligonucleotide
agagucccgggcauagaac

SEQ ID NO: 614646 - RNA, 19 nt, Artificial Sequence
  Description of Artificial Sequence: Synthetic oligonucleotide
gacuuaaugcuagguguuc

SEQ ID NO: 614647 - RNA, 19 nt, Artificial Sequence
  Description of Artificial Sequence: Synthetic oligonucleotide
uaaagagcccugccuguuu

SEQ ID NO: 614648 - RNA, 19 nt, Artificial Sequence
  Description of Artificial Sequence: Synthetic oligonucleotide
caagggucgccuagccugc

SEQ ID NO: 614649 - RNA, 19 nt, Artificial Sequence
  Description of Artificial Sequence: Synthetic oligonucleotide
cauaacaucucugucgggu

SEQ ID NO: 614650 - RNA, 19 nt, Artificial Sequence
  Description of Artificial Sequence: Synthetic oligonucleotide
ugauccgacggcguucuaa

SEQ ID NO: 614651 - RNA, 19 nt, Artificial Sequence
  Description of Artificial Sequence: Synthetic oligonucleotide
gacagcgcgggugugguga

SEQ ID NO: 614652 - RNA, 19 nt, Artificial Sequence
  Description of Artificial Sequence: Synthetic oligonucleotide
guugauagggcggcccagc

SEQ ID NO: 614653 - RNA, 19 nt, Artificial Sequence
  Description of Artificial Sequence: Synthetic oligonucleotide
gguccgaacgucaauaaaa

SEQ ID NO: 614654 - RNA, 19 nt, Artificial Sequence
  Description of Artificial Sequence: Synthetic oligonucleotide
gucgucguagcugaagaga

SEQ ID NO: 614655 - RNA, 19 nt, Artificial Sequence
  Description of Artificial Sequence: Synthetic oligonucleotide
uccccuucguaccccugca

SEQ ID NO: 614656 - RNA, 19 nt, Artificial Sequence
  Description of Artificial Sequence: Synthetic oligonucleotide
cucuuggccaucgcgcuac

SEQ ID NO: 614657 - RNA, 19 nt, Artificial Sequence
  Description of Artificial Sequence: Synthetic oligonucleotide
uggccaucgcgcuaccauc

SEQ ID NO: 614658 - RNA, 19 nt, Artificial Sequence
  Description of Artificial Sequence: Synthetic oligonucleotide
ggacucacuguuccgauaa

SEQ ID NO: 614659 - RNA, 19 nt, Artificial Sequence
  Description of Artificial Sequence: Synthetic oligonucleotide
gggucgccuagccugcucg

SEQ ID NO: 614660 - RNA, 19 nt, Artificial Sequence
  Description of Artificial Sequence: Synthetic oligonucleotide
ccgcaguuggucaaaguac

SEQ ID NO: 614661 - RNA, 19 nt, Artificial Sequence
  Description of Artificial Sequence: Synthetic oligonucleotide
gggaccguggauuaggggu

SEQ ID NO: 614662 - RNA, 19 nt, Artificial Sequence
  Description of Artificial Sequence: Synthetic oligonucleotide
uccgugugcccuccauacu

SEQ ID NO: 614663 - RNA, 19 nt, Artificial Sequence
  Description of Artificial Sequence: Synthetic oligonucleotide
gagacgggucugugacccg

SEQ ID NO: 614664 - RNA, 19 nt, Artificial Sequence
  Description of Artificial Sequence: Synthetic oligonucleotide
gcugauccaucauaacauc

SEQ ID NO: 614665 - RNA, 19 nt, Artificial Sequence
  Description of Artificial Sequence: Synthetic oligonucleotide
guggauuaggggucacgga

SEQ ID NO: 614666 - RNA, 19 nt, Artificial Sequence
  Description of Artificial Sequence: Synthetic oligonucleotide
ccgacggcguucuaagcgg

SEQ ID NO: 614667 - RNA, 19 nt, Artificial Sequence
  Description of Artificial Sequence: Synthetic oligonucleotide
cugaccgcuggucguugcc

SEQ ID NO: 614668 - RNA, 19 nt, Artificial Sequence
  Description of Artificial Sequence: Synthetic oligonucleotide
ugaccgcuggucguugcca

SEQ ID NO: 614669 - RNA, 19 nt, Artificial Sequence
  Description of Artificial Sequence: Synthetic oligonucleotide
ggucccuaaagggauuggc

SEQ ID NO: 614670 - RNA, 19 nt, Artificial Sequence
  Description of Artificial Sequence: Synthetic oligonucleotide
gcagugucgcauguggaag

SEQ ID NO: 614671 - RNA, 19 nt, Artificial Sequence
  Description of Artificial Sequence: Synthetic oligonucleotide
uucagaccauaaugccaaa

SEQ ID NO: 614672 - RNA, 19 nt, Artificial Sequence
  Description of Artificial Sequence: Synthetic oligonucleotide
cagccauaaaauguuaagu

SEQ ID NO: 614673 - RNA, 19 nt, Artificial Sequence
  Description of Artificial Sequence: Synthetic oligonucleotide
cgugugucacacaaacggc

SEQ ID NO: 614674 - RNA, 19 nt, Artificial Sequence
  Description of Artificial Sequence: Synthetic oligonucleotide
gcguucuaagcggugaaug

SEQ ID NO: 614675 - RNA, 19 nt, Artificial Sequence
  Description of Artificial Sequence: Synthetic oligonucleotide
gaagcggccaaugguccga

SEQ ID NO: 614676 - RNA, 19 nt, Artificial Sequence
  Description of Artificial Sequence: Synthetic oligonucleotide
gggugagaauuuacgcagg

SEQ ID NO: 614677 - RNA, 19 nt, Artificial Sequence
  Description of Artificial Sequence: Synthetic oligonucleotide
acggacucacuguuccgau

SEQ ID NO: 614678 - RNA, 19 nt, Artificial Sequence
  Description of Artificial Sequence: Synthetic oligonucleotide
agggucgccuagccugcuc

SEQ ID NO: 614679 - RNA, 19 nt, Artificial Sequence
  Description of Artificial Sequence: Synthetic oligonucleotide
cuacgaugacacaccggca

SEQ ID NO: 614680 - RNA, 19 nt, Artificial Sequence
  Description of Artificial Sequence: Synthetic oligonucleotide
ccugaacugauccgacggc

SEQ ID NO: 614681 - RNA, 19 nt, Artificial Sequence
  Description of Artificial Sequence: Synthetic oligonucleotide
acggcguucuaagcgguga

SEQ ID NO: 614682 - RNA, 19 nt, Artificial Sequence
  Description of Artificial Sequence: Synthetic oligonucleotide
acagcgcggguguggugag

SEQ ID NO: 614683 - RNA, 19 nt, Artificial Sequence
  Description of Artificial Sequence: Synthetic oligonucleotide
ucuuggccaucgcgcuacc

SEQ ID NO: 614684 - RNA, 19 nt, Artificial Sequence
  Description of Artificial Sequence: Synthetic oligonucleotide
cuacacucccgguucaagu

SEQ ID NO: 614685 - RNA, 19 nt, Artificial Sequence
  Description of Artificial Sequence: Synthetic oligonucleotide
cuccgucucaggugaagga

SEQ ID NO: 614686 - RNA, 19 nt, Artificial Sequence
  Description of Artificial Sequence: Synthetic oligonucleotide
ugguggaaacaugcugauc

SEQ ID NO: 614687 - RNA, 19 nt, Artificial Sequence
  Description of Artificial Sequence: Synthetic oligonucleotide
gccgcaguuggucaaagua

SEQ ID NO: 614688 - RNA, 19 nt, Artificial Sequence
  Description of Artificial Sequence: Synthetic oligonucleotide
agacggcgcacuguguggu

SEQ ID NO: 614689 - RNA, 19 nt, Artificial Sequence
  Description of Artificial Sequence: Synthetic oligonucleotide
agcggccaaugguccgaac

SEQ ID NO: 614690 - RNA, 19 nt, Artificial Sequence
  Description of Artificial Sequence: Synthetic oligonucleotide
agacgggucugugacccga

SEQ ID NO: 614691 - RNA, 19 nt, Artificial Sequence
  Description of Artificial Sequence: Synthetic oligonucleotide
gauauaccugcugcaggcu

SEQ ID NO: 614692 - RNA, 19 nt, Artificial Sequence
  Description of Artificial Sequence: Synthetic oligonucleotide
ggggaccguggauuagggg

SEQ ID NO: 614693 - RNA, 19 nt, Artificial Sequence
  Description of Artificial Sequence: Synthetic oligonucleotide
cccuucguaccccugcaag

SEQ ID NO: 614694 - RNA, 19 nt, Artificial Sequence
  Description of Artificial Sequence: Synthetic oligonucleotide
gucgggguuuaauggugga

SEQ ID NO: 614695 - RNA, 19 nt, Artificial Sequence
  Description of Artificial Sequence: Synthetic oligonucleotide
cacucgguggcaccccauc

SEQ ID NO: 614696 - RNA, 19 nt, Artificial Sequence
  Description of Artificial Sequence: Synthetic oligonucleotide
gcagcggaaccuacgauga

SEQ ID NO: 614697 - RNA, 19 nt, Artificial Sequence
  Description of Artificial Sequence: Synthetic oligonucleotide
cacggacucacuguuccga

SEQ ID NO: 614698 - RNA, 19 nt, Artificial Sequence
  Description of Artificial Sequence: Synthetic oligonucleotide
gcgaucaccucuguuguca

SEQ ID NO: 614699 - RNA, 19 nt, Artificial Sequence
  Description of Artificial Sequence: Synthetic oligonucleotide
gacggcguucuaagcggug

SEQ ID NO: 614700 - RNA, 19 nt, Artificial Sequence
  Description of Artificial Sequence: Synthetic oligonucleotide
gcaacgagacggcgcacug

SEQ ID NO: 614701 - RNA, 19 nt, Artificial Sequence
  Description of Artificial Sequence: Synthetic oligonucleotide
agugucgcauguggaaguu

SEQ ID NO: 614702 - RNA, 19 nt, Artificial Sequence
  Description of Artificial Sequence: Synthetic oligonucleotide
acggcgcacugugugguug

SEQ ID NO: 614703 - RNA, 19 nt, Artificial Sequence
  Description of Artificial Sequence: Synthetic oligonucleotide
ggucgccuagccugcucgg

SEQ ID NO: 614704 - RNA, 19 nt, Artificial Sequence
  Description of Artificial Sequence: Synthetic oligonucleotide
gacugaccgcuggucguug

SEQ ID NO: 614705 - RNA, 19 nt, Artificial Sequence
  Description of Artificial Sequence: Synthetic oligonucleotide
auuaggggucacggacuca

SEQ ID NO: 614706 - RNA, 19 nt, Artificial Sequence
  Description of Artificial Sequence: Synthetic oligonucleotide
ucgcuccaugacugacacc

SEQ ID NO: 614707 - RNA, 19 nt, Artificial Sequence
  Description of Artificial Sequence: Synthetic oligonucleotide
ugacugaccgcuggucguu

SEQ ID NO: 614708 - RNA, 19 nt, Artificial Sequence
  Description of Artificial Sequence: Synthetic oligonucleotide
cuagccugcucggugcaca

SEQ ID NO: 614709 - RNA, 19 nt, Artificial Sequence
  Description of Artificial Sequence: Synthetic oligonucleotide
gugucgcauguggaaguug

SEQ ID NO: 614710 - RNA, 19 nt, Artificial Sequence
  Description of Artificial Sequence: Synthetic oligonucleotide
ucucgacguugaccacugu

SEQ ID NO: 614711 - RNA, 19 nt, Artificial Sequence
  Description of Artificial Sequence: Synthetic oligonucleotide
gguugauagggcggcccag

SEQ ID NO: 614712 - RNA, 19 nt, Artificial Sequence
  Description of Artificial Sequence: Synthetic oligonucleotide
cucggaccugaugccagug

SEQ ID NO: 614713 - RNA, 19 nt, Artificial Sequence
  Description of Artificial Sequence: Synthetic oligonucleotide
ggccaucgcgcuaccaucc

SEQ ID NO: 614714 - RNA, 19 nt, Artificial Sequence
  Description of Artificial Sequence: Synthetic oligonucleotide
gaacugauccgacggcguu

SEQ ID NO: 614715 - RNA, 19 nt, Artificial Sequence
  Description of Artificial Sequence: Synthetic oligonucleotide
cccgaagugucacuacauc

SEQ ID NO: 614716 - RNA, 19 nt, Artificial Sequence
  Description of Artificial Sequence: Synthetic oligonucleotide
gaccguggauuagggguca

SEQ ID NO: 614717 - RNA, 19 nt, Artificial Sequence
  Description of Artificial Sequence: Synthetic oligonucleotide
cguucuaagcggugaauga

SEQ ID NO: 614718 - RNA, 19 nt, Artificial Sequence
  Description of Artificial Sequence: Synthetic oligonucleotide
cagcggaaccuacgaugac

SEQ ID NO: 614719 - RNA, 19 nt, Artificial Sequence
  Description of Artificial Sequence: Synthetic oligonucleotide
ccuucguaccccugcaaga

SEQ ID NO: 614720 - RNA, 19 nt, Artificial Sequence
  Description of Artificial Sequence: Synthetic oligonucleotide
cuagaggggaccguggauu

SEQ ID NO: 614721 - RNA, 19 nt, Artificial Sequence
  Description of Artificial Sequence: Synthetic oligonucleotide
guggagggaauaguccucu

SEQ ID NO: 614722 - RNA, 19 nt, Artificial Sequence
  Description of Artificial Sequence: Synthetic oligonucleotide
cuucucgacguugaccacu

SEQ ID NO: 614723 - RNA, 19 nt, Artificial Sequence
  Description of Artificial Sequence: Synthetic oligonucleotide
cagugucgcauguggaagu

SEQ ID NO: 614724 - RNA, 19 nt, Artificial Sequence
  Description of Artificial Sequence: Synthetic oligonucleotide
cgagacggcgcacugugug

SEQ ID NO: 614725 - RNA, 19 nt, Artificial Sequence
  Description of Artificial Sequence: Synthetic oligonucleotide
gccaaugguccgaacguca

SEQ ID NO: 614726 - RNA, 19 nt, Artificial Sequence
  Description of Artificial Sequence: Synthetic oligonucleotide
gggcaagggucgccuagcc

SEQ ID NO: 614727 - RNA, 19 nt, Artificial Sequence
  Description of Artificial Sequence: Synthetic oligonucleotide
aggcaacgagacggcgcac

SEQ ID NO: 614728 - RNA, 19 nt, Artificial Sequence
  Description of Artificial Sequence: Synthetic oligonucleotide
aagggucgccuagccugcu

SEQ ID NO: 614729 - RNA, 19 nt, Artificial Sequence
  Description of Artificial Sequence: Synthetic oligonucleotide
aagcggccaaugguccgaa

SEQ ID NO: 614730 - RNA, 19 nt, Artificial Sequence
  Description of Artificial Sequence: Synthetic oligonucleotide
gggucccuaaagggauugg

SEQ ID NO: 614731 - RNA, 19 nt, Artificial Sequence
  Description of Artificial Sequence: Synthetic oligonucleotide
cuuugaaccggcgcuggau

SEQ ID NO: 614732 - RNA, 19 nt, Artificial Sequence
  Description of Artificial Sequence: Synthetic oligonucleotide
cacaaacggccagugugaa

SEQ ID NO: 614733 - RNA, 19 nt, Artificial Sequence
  Description of Artificial Sequence: Synthetic oligonucleotide
gcauagaaccugauugggu

SEQ ID NO: 614734 - RNA, 19 nt, Artificial Sequence
  Description of Artificial Sequence: Synthetic oligonucleotide
ccaaugguccgaacgucaa

SEQ ID NO: 614735 - RNA, 19 nt, Artificial Sequence
  Description of Artificial Sequence: Synthetic oligonucleotide
cacucccgguucaagugcu

SEQ ID NO: 614736 - RNA, 19 nt, Artificial Sequence
  Description of Artificial Sequence: Synthetic oligonucleotide
ggcgaucaccucuguuguc

SEQ ID NO: 614737 - RNA, 19 nt, Artificial Sequence
  Description of Artificial Sequence: Synthetic oligonucleotide
cauagcagaagcggccaau

SEQ ID NO: 614738 - RNA, 19 nt, Artificial Sequence
  Description of Artificial Sequence: Synthetic oligonucleotide
ccgguucaagugcucacca

SEQ ID NO: 614739 - RNA, 19 nt, Artificial Sequence
  Description of Artificial Sequence: Synthetic oligonucleotide
ccaucgcgcuaccauccug

SEQ ID NO: 614740 - RNA, 19 nt, Artificial Sequence
  Description of Artificial Sequence: Synthetic oligonucleotide
cuuggccaucgcgcuacca

SEQ ID NO: 614741 - RNA, 19 nt, Artificial Sequence
  Description of Artificial Sequence: Synthetic oligonucleotide
gacgggucugugacccgaa

SEQ ID NO: 614742 - RNA, 19 nt, Artificial Sequence
  Description of Artificial Sequence: Synthetic oligonucleotide
acgagacggcgcacugugu

SEQ ID NO: 614743 - RNA, 19 nt, Artificial Sequence
  Description of Artificial Sequence: Synthetic oligonucleotide
caaugguccgaacgucaau

SEQ ID NO: 614744 - RNA, 19 nt, Artificial Sequence
  Description of Artificial Sequence: Synthetic oligonucleotide
cuaagcggugaaugacauu

SEQ ID NO: 614745 - RNA, 19 nt, Artificial Sequence
  Description of Artificial Sequence: Synthetic oligonucleotide
cagcgcggguguggugagg

SEQ ID NO: 614746 - RNA, 19 nt, Artificial Sequence
  Description of Artificial Sequence: Synthetic oligonucleotide
ggcaagggucgccuagccu

SEQ ID NO: 614747 - RNA, 19 nt, Artificial Sequence
  Description of Artificial Sequence: Synthetic oligonucleotide
ggcaacgagacggcgcacu

SEQ ID NO: 614748 - RNA, 19 nt, Artificial Sequence
  Description of Artificial Sequence: Synthetic oligonucleotide
agccggccuggaucucaaa

SEQ ID NO: 614749 - RNA, 19 nt, Artificial Sequence
  Description of Artificial Sequence: Synthetic oligonucleotide
cggggcaagggucgccuag

SEQ ID NO: 614750 - RNA, 19 nt, Artificial Sequence
  Description of Artificial Sequence: Synthetic oligonucleotide
ggauucgucgggguuuaau

SEQ ID NO: 614751 - RNA, 19 nt, Artificial Sequence
  Description of Artificial Sequence: Synthetic oligonucleotide
cgucguagcugaagagaga

SEQ ID NO: 614752 - RNA, 19 nt, Artificial Sequence
  Description of Artificial Sequence: Synthetic oligonucleotide
gcgcuaccauccugcucug

SEQ ID NO: 614753 - RNA, 19 nt, Artificial Sequence
  Description of Artificial Sequence: Synthetic oligonucleotide
gucgccuagccugcucggu

SEQ ID NO: 614754 - RNA, 19 nt, Artificial Sequence
  Description of Artificial Sequence: Synthetic oligonucleotide
cccacuugucgucguagcu

SEQ ID NO: 614755 - RNA, 19 nt, Artificial Sequence
  Description of Artificial Sequence: Synthetic oligonucleotide
gccgacacagugagcagau

SEQ ID NO: 614756 - RNA, 19 nt, Artificial Sequence
  Description of Artificial Sequence: Synthetic oligonucleotide
ccgugugcccuccauacuu

SEQ ID NO: 614757 - RNA, 19 nt, Artificial Sequence
  Description of Artificial Sequence: Synthetic oligonucleotide
ggcguucuaagcggugaau

SEQ ID NO: 614758 - RNA, 19 nt, Artificial Sequence
  Description of Artificial Sequence: Synthetic oligonucleotide
cacggcgaucaccucuguu

SEQ ID NO: 614759 - RNA, 19 nt, Artificial Sequence
  Description of Artificial Sequence: Synthetic oligonucleotide
gccaucgcgcuaccauccu

SEQ ID NO: 614760 - RNA, 19 nt, Artificial Sequence
  Description of Artificial Sequence: Synthetic oligonucleotide
caccgaggugcagcagugu

SEQ ID NO: 614761 - RNA, 19 nt, Artificial Sequence
  Description of Artificial Sequence: Synthetic oligonucleotide
gcgcggguguggugaggca

SEQ ID NO: 614762 - RNA, 19 nt, Artificial Sequence
  Description of Artificial Sequence: Synthetic oligonucleotide
cugauccgacggcguucua

SEQ ID NO: 614763 - RNA, 19 nt, Artificial Sequence
  Description of Artificial Sequence: Synthetic oligonucleotide
cggacucacuguuccgaua

SEQ ID NO: 614764 - RNA, 19 nt, Artificial Sequence
  Description of Artificial Sequence: Synthetic oligonucleotide
ccccuucguaccccugcaa

SEQ ID NO: 614765 - RNA, 19 nt, Artificial Sequence
  Description of Artificial Sequence: Synthetic oligonucleotide
cgcccaucgggugagaauu

SEQ ID NO: 614766 - RNA, 19 nt, Artificial Sequence
  Description of Artificial Sequence: Synthetic oligonucleotide
cgacggcguucuaagcggu

SEQ ID NO: 614767 - RNA, 19 nt, Artificial Sequence
  Description of Artificial Sequence: Synthetic oligonucleotide
ccggccucggaugcugacu

SEQ ID NO: 614768 - RNA, 19 nt, Artificial Sequence
  Description of Artificial Sequence: Synthetic oligonucleotide
gcccugcgccacagauaaa

SEQ ID NO: 614769 - RNA, 19 nt, Artificial Sequence
  Description of Artificial Sequence: Synthetic oligonucleotide
uuuaacuaaacccaaaagu

SEQ ID NO: 614770 - RNA, 19 nt, Artificial Sequence
  Description of Artificial Sequence: Synthetic oligonucleotide
aaugagaggugcuuugacc

SEQ ID NO: 614771 - RNA, 19 nt, Artificial Sequence
  Description of Artificial Sequence: Synthetic oligonucleotide
aacucuaugcuguuucucc

SEQ ID NO: 614772 - RNA, 19 nt, Artificial Sequence
  Description of Artificial Sequence: Synthetic oligonucleotide
aacgagaugggcuauaacu

SEQ ID NO: 614773 - RNA, 19 nt, Artificial Sequence
  Description of Artificial Sequence: Synthetic oligonucleotide
uacuacaucacuuugaaau

SEQ ID NO: 614774 - RNA, 19 nt, Artificial Sequence
  Description of Artificial Sequence: Synthetic oligonucleotide
aauuccagaagguagggcu

SEQ ID NO: 614775 - RNA, 19 nt, Artificial Sequence
  Description of Artificial Sequence: Synthetic oligonucleotide
uaaccuggaaucaagguag

SEQ ID NO: 614776 - RNA, 19 nt, Artificial Sequence
  Description of Artificial Sequence: Synthetic oligonucleotide
uuaacuaaacccaaaaguu

SEQ ID NO: 614777 - RNA, 19 nt, Artificial Sequence
  Description of Artificial Sequence: Synthetic oligonucleotide
ucuuuguucgcacacgggg

SEQ ID NO: 614778 - RNA, 19 nt, Artificial Sequence
  Description of Artificial Sequence: Synthetic oligonucleotide
guaggugaguuauagaccg

SEQ ID NO: 614779 - RNA, 19 nt, Artificial Sequence
  Description of Artificial Sequence: Synthetic oligonucleotide
guaggugcaaaacacaugc

SEQ ID NO: 614780 - RNA, 19 nt, Artificial Sequence
  Description of Artificial Sequence: Synthetic oligonucleotide
uguagucugcacaacagcc

SEQ ID NO: 614781 - RNA, 19 nt, Artificial Sequence
  Description of Artificial Sequence: Synthetic oligonucleotide
uacacuacuacacaacaac

SEQ ID NO: 614782 - RNA, 19 nt, Artificial Sequence
  Description of Artificial Sequence: Synthetic oligonucleotide
aucaacuaaauuuaaugca

SEQ ID NO: 614783 - RNA, 19 nt, Artificial Sequence
  Description of Artificial Sequence: Synthetic oligonucleotide
aacgaaauacaguuuguga

SEQ ID NO: 614784 - RNA, 19 nt, Artificial Sequence
  Description of Artificial Sequence: Synthetic oligonucleotide
auaaccacugacuggagag

SEQ ID NO: 614785 - RNA, 19 nt, Artificial Sequence
  Description of Artificial Sequence: Synthetic oligonucleotide
ugaaguguugauucucacg

SEQ ID NO: 614786 - RNA, 19 nt, Artificial Sequence
  Description of Artificial Sequence: Synthetic oligonucleotide
uguuacgucauaagaagcu

SEQ ID NO: 614787 - RNA, 19 nt, Artificial Sequence
  Description of Artificial Sequence: Synthetic oligonucleotide
uucauaucagcuuuaggcu

SEQ ID NO: 614788 - RNA, 19 nt, Artificial Sequence
  Description of Artificial Sequence: Synthetic oligonucleotide
uuugaaaucuccaccucug

SEQ ID NO: 614789 - RNA, 19 nt, Artificial Sequence
  Description of Artificial Sequence: Synthetic oligonucleotide
aauaauggacuacucucca

SEQ ID NO: 614790 - RNA, 19 nt, Artificial Sequence
  Description of Artificial Sequence: Synthetic oligonucleotide
caguaggugaguuauagac

SEQ ID NO: 614791 - RNA, 19 nt, Artificial Sequence
  Description of Artificial Sequence: Synthetic oligonucleotide
uacuacacaacaacgaaau

SEQ ID NO: 614792 - RNA, 19 nt, Artificial Sequence
  Description of Artificial Sequence: Synthetic oligonucleotide
cagauuguagacaugucgc

SEQ ID NO: 614793 - RNA, 19 nt, Artificial Sequence
  Description of Artificial Sequence: Synthetic oligonucleotide
agcaggauuaauuacuaca

SEQ ID NO: 614794 - RNA, 19 nt, Artificial Sequence
  Description of Artificial Sequence: Synthetic oligonucleotide
ucaagaagcugucuauuca

SEQ ID NO: 614795 - RNA, 19 nt, Artificial Sequence
  Description of Artificial Sequence: Synthetic oligonucleotide
aacccugucgugcuaauca

SEQ ID NO: 614796 - RNA, 19 nt, Artificial Sequence
  Description of Artificial Sequence: Synthetic oligonucleotide
ucauaucagcuuuaggcug

SEQ ID NO: 614797 - RNA, 19 nt, Artificial Sequence
  Description of Artificial Sequence: Synthetic oligonucleotide
aucaagaagcugucuauuc

SEQ ID NO: 614798 - RNA, 19 nt, Artificial Sequence
  Description of Artificial Sequence: Synthetic oligonucleotide
gaugauagcagagucggug

SEQ ID NO: 614799 - RNA, 19 nt, Artificial Sequence
  Description of Artificial Sequence: Synthetic oligonucleotide
acgaaauacaguuugugau

SEQ ID NO: 614800 - RNA, 19 nt, Artificial Sequence
  Description of Artificial Sequence: Synthetic oligonucleotide
uacgucauaagaagcuucc

SEQ ID NO: 614801 - RNA, 19 nt, Artificial Sequence
  Description of Artificial Sequence: Synthetic oligonucleotide
ugcuaaucaaaguauuaac

SEQ ID NO: 614802 - RNA, 19 nt, Artificial Sequence
  Description of Artificial Sequence: Synthetic oligonucleotide
aguaggugaguuauagacc

SEQ ID NO: 614803 - RNA, 19 nt, Artificial Sequence
  Description of Artificial Sequence: Synthetic oligonucleotide
ucucacgggguuacaaugg

SEQ ID NO: 614804 - RNA, 19 nt, Artificial Sequence
  Description of Artificial Sequence: Synthetic oligonucleotide
uguuccgugcgguagaaga

SEQ ID NO: 614805 - RNA, 19 nt, Artificial Sequence
  Description of Artificial Sequence: Synthetic oligonucleotide
augauagcagagucggugg

SEQ ID NO: 614806 - RNA, 19 nt, Artificial Sequence
  Description of Artificial Sequence: Synthetic oligonucleotide
uggcguuaggucuaaauac

SEQ ID NO: 614807 - RNA, 19 nt, Artificial Sequence
  Description of Artificial Sequence: Synthetic oligonucleotide
ucuuuaugauguaaaggaa

SEQ ID NO: 614808 - RNA, 19 nt, Artificial Sequence
  Description of Artificial Sequence: Synthetic oligonucleotide
uuguuacgucauaagaagc

SEQ ID NO: 614809 - RNA, 19 nt, Artificial Sequence
  Description of Artificial Sequence: Synthetic oligonucleotide
aauuacuacaucacuuuga

SEQ ID NO: 614810 - RNA, 19 nt, Artificial Sequence
  Description of Artificial Sequence: Synthetic oligonucleotide
aguaaauguuuucccauca

SEQ ID NO: 614811 - RNA, 19 nt, Artificial Sequence
  Description of Artificial Sequence: Synthetic oligonucleotide
auagauuagcucauaaugu

SEQ ID NO: 614812 - RNA, 19 nt, Artificial Sequence
  Description of Artificial Sequence: Synthetic oligonucleotide
uuaggucuaaauacugcac

SEQ ID NO: 614813 - RNA, 19 nt, Artificial Sequence
  Description of Artificial Sequence: Synthetic oligonucleotide
aaagcuugccagcuuauua

SEQ ID NO: 614814 - RNA, 19 nt, Artificial Sequence
  Description of Artificial Sequence: Synthetic oligonucleotide
uugccagcuuauuauaacc

SEQ ID NO: 614815 - RNA, 19 nt, Artificial Sequence
  Description of Artificial Sequence: Synthetic oligonucleotide
gcagauuguagacaugucg

SEQ ID NO: 614816 - RNA, 19 nt, Artificial Sequence
  Description of Artificial Sequence: Synthetic oligonucleotide
gaguuauagaccgugggug

SEQ ID NO: 614817 - RNA, 19 nt, Artificial Sequence
  Description of Artificial Sequence: Synthetic oligonucleotide
cacagaacgacuguaauuc

SEQ ID NO: 614818 - RNA, 19 nt, Artificial Sequence
  Description of Artificial Sequence: Synthetic oligonucleotide
uuuguucgcacacggggcc

SEQ ID NO: 614819 - RNA, 19 nt, Artificial Sequence
  Description of Artificial Sequence: Synthetic oligonucleotide
acagaacgacuguaauucc

SEQ ID NO: 614820 - RNA, 19 nt, Artificial Sequence
  Description of Artificial Sequence: Synthetic oligonucleotide
uucaagcugguaacacucg

SEQ ID NO: 614821 - RNA, 19 nt, Artificial Sequence
  Description of Artificial Sequence: Synthetic oligonucleotide
uauaaccacugacuggaga

SEQ ID NO: 614822 - RNA, 19 nt, Artificial Sequence
  Description of Artificial Sequence: Synthetic oligonucleotide
acuacuacacaacaacgaa

SEQ ID NO: 614823 - RNA, 19 nt, Artificial Sequence
  Description of Artificial Sequence: Synthetic oligonucleotide
aagcuugccagcuuauuau

SEQ ID NO: 614824 - RNA, 19 nt, Artificial Sequence
  Description of Artificial Sequence: Synthetic oligonucleotide
cagcuuauuauaaccacug

SEQ ID NO: 614825 - RNA, 19 nt, Artificial Sequence
  Description of Artificial Sequence: Synthetic oligonucleotide
aaauacugcacaauugcau

SEQ ID NO: 614826 - RNA, 19 nt, Artificial Sequence
  Description of Artificial Sequence: Synthetic oligonucleotide
agacacaggaguuguuacg

SEQ ID NO: 614827 - RNA, 19 nt, Artificial Sequence
  Description of Artificial Sequence: Synthetic oligonucleotide
cauccuauuucagaagagg

SEQ ID NO: 614828 - RNA, 19 nt, Artificial Sequence
  Description of Artificial Sequence: Synthetic oligonucleotide
ggaacuacuguuccgugcg

SEQ ID NO: 614829 - RNA, 19 nt, Artificial Sequence
  Description of Artificial Sequence: Synthetic oligonucleotide
agauuagcucauaaugugg

SEQ ID NO: 614830 - RNA, 19 nt, Artificial Sequence
  Description of Artificial Sequence: Synthetic oligonucleotide
cuugcuuagaacugagauc

SEQ ID NO: 614831 - RNA, 19 nt, Artificial Sequence
  Description of Artificial Sequence: Synthetic oligonucleotide
uuccuaauaguuguucuug

SEQ ID NO: 614832 - RNA, 19 nt, Artificial Sequence
  Description of Artificial Sequence: Synthetic oligonucleotide
caucuuuguucgcacacgg

SEQ ID NO: 614833 - RNA, 19 nt, Artificial Sequence
  Description of Artificial Sequence: Synthetic oligonucleotide
uucucacgggguuacaaug

SEQ ID NO: 614834 - RNA, 19 nt, Artificial Sequence
  Description of Artificial Sequence: Synthetic oligonucleotide
auuagcucauaauguggag

SEQ ID NO: 614835 - RNA, 19 nt, Artificial Sequence
  Description of Artificial Sequence: Synthetic oligonucleotide
acaucagcaauguaugaaa

SEQ ID NO: 614836 - RNA, 19 nt, Artificial Sequence
  Description of Artificial Sequence: Synthetic oligonucleotide
uugcccauaccucuucugc

SEQ ID NO: 614837 - RNA, 19 nt, Artificial Sequence
  Description of Artificial Sequence: Synthetic oligonucleotide
cuuuguucgcacacggggc

SEQ ID NO: 614838 - RNA, 19 nt, Artificial Sequence
  Description of Artificial Sequence: Synthetic oligonucleotide
ugccagcuuauuauaacca

SEQ ID NO: 614839 - RNA, 19 nt, Artificial Sequence
  Description of Artificial Sequence: Synthetic oligonucleotide
aacucucccaagcauuccu

SEQ ID NO: 614840 - RNA, 19 nt, Artificial Sequence
  Description of Artificial Sequence: Synthetic oligonucleotide
aguaaauaauggacuacuc

SEQ ID NO: 614841 - RNA, 19 nt, Artificial Sequence
  Description of Artificial Sequence: Synthetic oligonucleotide
uuacgucauaagaagcuuc

SEQ ID NO: 614842 - RNA, 19 nt, Artificial Sequence
  Description of Artificial Sequence: Synthetic oligonucleotide
ucggugaacgagaugggcu

SEQ ID NO: 614843 - RNA, 19 nt, Artificial Sequence
  Description of Artificial Sequence: Synthetic oligonucleotide
ugaagaacgguagcgagau

SEQ ID NO: 614844 - RNA, 19 nt, Artificial Sequence
  Description of Artificial Sequence: Synthetic oligonucleotide
acacuacuacacaacaacg

SEQ ID NO: 614845 - RNA, 19 nt, Artificial Sequence
  Description of Artificial Sequence: Synthetic oligonucleotide
acacaugcaugaugauagc

SEQ ID NO: 614846 - RNA, 19 nt, Artificial Sequence
  Description of Artificial Sequence: Synthetic oligonucleotide
uagucugcacaacagccgu

SEQ ID NO: 614847 - RNA, 19 nt, Artificial Sequence
  Description of Artificial Sequence: Synthetic oligonucleotide
cuugccagcuuauuauaac

SEQ ID NO: 614848 - RNA, 19 nt, Artificial Sequence
  Description of Artificial Sequence: Synthetic oligonucleotide
ggucuuuaugauguaaagg

SEQ ID NO: 614849 - RNA, 19 nt, Artificial Sequence
  Description of Artificial Sequence: Synthetic oligonucleotide
agaccgugggugaagaacg

SEQ ID NO: 614850 - RNA, 19 nt, Artificial Sequence
  Description of Artificial Sequence: Synthetic oligonucleotide
augucgcugauagauuagc

SEQ ID NO: 614851 - RNA, 19 nt, Artificial Sequence
  Description of Artificial Sequence: Synthetic oligonucleotide
cauugauccaauuucuaaa

SEQ ID NO: 614852 - RNA, 19 nt, Artificial Sequence
  Description of Artificial Sequence: Synthetic oligonucleotide
caauggaacuacuguuccg

SEQ ID NO: 614853 - RNA, 19 nt, Artificial Sequence
  Description of Artificial Sequence: Synthetic oligonucleotide
uggcagauuguagacaugu

SEQ ID NO: 614854 - RNA, 19 nt, Artificial Sequence
  Description of Artificial Sequence: Synthetic oligonucleotide
aggugcuuugaccagggca

SEQ ID NO: 614855 - RNA, 19 nt, Artificial Sequence
  Description of Artificial Sequence: Synthetic oligonucleotide
agucauccaauggaacuac

SEQ ID NO: 614856 - RNA, 19 nt, Artificial Sequence
  Description of Artificial Sequence: Synthetic oligonucleotide
uuuggcguuaggucuaaau

SEQ ID NO: 614857 - RNA, 19 nt, Artificial Sequence
  Description of Artificial Sequence: Synthetic oligonucleotide
guagucugcacaacagccg

SEQ ID NO: 614858 - RNA, 19 nt, Artificial Sequence
  Description of Artificial Sequence: Synthetic oligonucleotide
agaccuacaggcaagcuga

SEQ ID NO: 614859 - RNA, 19 nt, Artificial Sequence
  Description of Artificial Sequence: Synthetic oligonucleotide
ucccaagcauuccugacuc

SEQ ID NO: 614860 - RNA, 19 nt, Artificial Sequence
  Description of Artificial Sequence: Synthetic oligonucleotide
agaacgacuguaauuccag

SEQ ID NO: 614861 - RNA, 19 nt, Artificial Sequence
  Description of Artificial Sequence: Synthetic oligonucleotide
uccuaauaguuguucuugu

SEQ ID NO: 614862 - RNA, 19 nt, Artificial Sequence
  Description of Artificial Sequence: Synthetic oligonucleotide
aacacucgccucuccuauc

SEQ ID NO: 614863 - RNA, 19 nt, Artificial Sequence
  Description of Artificial Sequence: Synthetic oligonucleotide
uuauaaccacugacuggag

SEQ ID NO: 614864 - RNA, 19 nt, Artificial Sequence
  Description of Artificial Sequence: Synthetic oligonucleotide
ugucgcugauagauuagcu

SEQ ID NO: 614865 - RNA, 19 nt, Artificial Sequence
  Description of Artificial Sequence: Synthetic oligonucleotide
aacaguggggaaauauaga

SEQ ID NO: 614866 - RNA, 19 nt, Artificial Sequence
  Description of Artificial Sequence: Synthetic oligonucleotide
acaugucgcugauagauua

SEQ ID NO: 614867 - RNA, 19 nt, Artificial Sequence
  Description of Artificial Sequence: Synthetic oligonucleotide
cacuacuacacaacaacga

SEQ ID NO: 614868 - RNA, 19 nt, Artificial Sequence
  Description of Artificial Sequence: Synthetic oligonucleotide
ucaguaggugaguuauaga

SEQ ID NO: 614869 - RNA, 19 nt, Artificial Sequence
  Description of Artificial Sequence: Synthetic oligonucleotide
ccuauuucagaagaggcgc

SEQ ID NO: 614870 - RNA, 19 nt, Artificial Sequence
  Description of Artificial Sequence: Synthetic oligonucleotide
uccugauuuggcguuaggu

SEQ ID NO: 614871 - RNA, 19 nt, Artificial Sequence
  Description of Artificial Sequence: Synthetic oligonucleotide
ucagcccuaacagugccug

SEQ ID NO: 614872 - RNA, 19 nt, Artificial Sequence
  Description of Artificial Sequence: Synthetic oligonucleotide
gccaauauuaucaaaucuc

SEQ ID NO: 614873 - RNA, 19 nt, Artificial Sequence
  Description of Artificial Sequence: Synthetic oligonucleotide
gaguaaauaauggacuacu

SEQ ID NO: 614874 - RNA, 19 nt, Artificial Sequence
  Description of Artificial Sequence: Synthetic oligonucleotide
caacgaaauacaguuugug

SEQ ID NO: 614875 - RNA, 19 nt, Artificial Sequence
  Description of Artificial Sequence: Synthetic oligonucleotide
uauagaccgugggugaaga

SEQ ID NO: 614876 - RNA, 19 nt, Artificial Sequence
  Description of Artificial Sequence: Synthetic oligonucleotide
agaugggcuauaacuuagc

SEQ ID NO: 614877 - RNA, 19 nt, Artificial Sequence
  Description of Artificial Sequence: Synthetic oligonucleotide
gucgcugauagauuagcuc

SEQ ID NO: 614878 - RNA, 19 nt, Artificial Sequence
  Description of Artificial Sequence: Synthetic oligonucleotide
uaauuccagaagguagggc

SEQ ID NO: 614879 - RNA, 19 nt, Artificial Sequence
  Description of Artificial Sequence: Synthetic oligonucleotide
agcuuauuauaaccacuga

SEQ ID NO: 614880 - RNA, 19 nt, Artificial Sequence
  Description of Artificial Sequence: Synthetic oligonucleotide
gcuauaacuuagcacacuc

SEQ ID NO: 614881 - RNA, 19 nt, Artificial Sequence
  Description of Artificial Sequence: Synthetic oligonucleotide
uuaugauguaaaggaacau

SEQ ID NO: 614882 - RNA, 19 nt, Artificial Sequence
  Description of Artificial Sequence: Synthetic oligonucleotide
acacaggaguuguuacguc

SEQ ID NO: 614883 - RNA, 19 nt, Artificial Sequence
  Description of Artificial Sequence: Synthetic oligonucleotide
ucgugcuaaucaaaguauu

SEQ ID NO: 614884 - RNA, 19 nt, Artificial Sequence
  Description of Artificial Sequence: Synthetic oligonucleotide
gaacuacuguuccgugcgg

SEQ ID NO: 614885 - RNA, 19 nt, Artificial Sequence
  Description of Artificial Sequence: Synthetic oligonucleotide
aaacccugucgugcuaauc

SEQ ID NO: 614886 - RNA, 19 nt, Artificial Sequence
  Description of Artificial Sequence: Synthetic oligonucleotide
uacuguuccgugcgguaga

SEQ ID NO: 614887 - RNA, 19 nt, Artificial Sequence
  Description of Artificial Sequence: Synthetic oligonucleotide
cugauuuggcguuaggucu

SEQ ID NO: 614888 - RNA, 19 nt, Artificial Sequence
  Description of Artificial Sequence: Synthetic oligonucleotide
agguaaccuggaaucaagg

SEQ ID NO: 614889 - RNA, 19 nt, Artificial Sequence
  Description of Artificial Sequence: Synthetic oligonucleotide
aggugaguuauagaccgug

SEQ ID NO: 614890 - RNA, 19 nt, Artificial Sequence
  Description of Artificial Sequence: Synthetic oligonucleotide
cacgggguuacaauggaga

SEQ ID NO: 614891 - RNA, 19 nt, Artificial Sequence
  Description of Artificial Sequence: Synthetic oligonucleotide
ucuugcacaaguggcacua

SEQ ID NO: 614892 - RNA, 19 nt, Artificial Sequence
  Description of Artificial Sequence: Synthetic oligonucleotide
cauaagaagcuuccuaaua

SEQ ID NO: 614893 - RNA, 19 nt, Artificial Sequence
  Description of Artificial Sequence: Synthetic oligonucleotide
cugaacgaagugcugagaa

SEQ ID NO: 614894 - RNA, 19 nt, Artificial Sequence
  Description of Artificial Sequence: Synthetic oligonucleotide
acacucgccucuccuaucu

SEQ ID NO: 614895 - RNA, 19 nt, Artificial Sequence
  Description of Artificial Sequence: Synthetic oligonucleotide
ccugucgugcuaaucaaag

SEQ ID NO: 614896 - RNA, 19 nt, Artificial Sequence
  Description of Artificial Sequence: Synthetic oligonucleotide
cacaggaguuguuacguca

SEQ ID NO: 614897 - RNA, 19 nt, Artificial Sequence
  Description of Artificial Sequence: Synthetic oligonucleotide
agacuaaagcuugccagcu

SEQ ID NO: 614898 - RNA, 19 nt, Artificial Sequence
  Description of Artificial Sequence: Synthetic oligonucleotide
cagacucaaucucuugcac

SEQ ID NO: 614899 - RNA, 19 nt, Artificial Sequence
  Description of Artificial Sequence: Synthetic oligonucleotide
gaggguugacagcacucug

SEQ ID NO: 614900 - RNA, 19 nt, Artificial Sequence
  Description of Artificial Sequence: Synthetic oligonucleotide
cuuaggguguggagguaac

SEQ ID NO: 614901 - RNA, 19 nt, Artificial Sequence
  Description of Artificial Sequence: Synthetic oligonucleotide
uggagguaaccuggaauca

SEQ ID NO: 614902 - RNA, 19 nt, Artificial Sequence
  Description of Artificial Sequence: Synthetic oligonucleotide
agcccaagauuaacucucc

SEQ ID NO: 614903 - RNA, 19 nt, Artificial Sequence
  Description of Artificial Sequence: Synthetic oligonucleotide
cagaacgacuguaauucca

SEQ ID NO: 614904 - RNA, 19 nt, Artificial Sequence
  Description of Artificial Sequence: Synthetic oligonucleotide
uagcgagaucucaauccac

SEQ ID NO: 614905 - RNA, 19 nt, Artificial Sequence
  Description of Artificial Sequence: Synthetic oligonucleotide
cucugaccuugaauggaag

SEQ ID NO: 614906 - RNA, 19 nt, Artificial Sequence
  Description of Artificial Sequence: Synthetic oligonucleotide
ugaugauagcagagucggu

SEQ ID NO: 614907 - RNA, 19 nt, Artificial Sequence
  Description of Artificial Sequence: Synthetic oligonucleotide
aacgguagcgagaucucaa

SEQ ID NO: 614908 - RNA, 19 nt, Artificial Sequence
  Description of Artificial Sequence: Synthetic oligonucleotide
agcgagaucucaauccacu

SEQ ID NO: 614909 - RNA, 19 nt, Artificial Sequence
  Description of Artificial Sequence: Synthetic oligonucleotide
gaacgagaugggcuauaac

SEQ ID NO: 614910 - RNA, 19 nt, Artificial Sequence
  Description of Artificial Sequence: Synthetic oligonucleotide
uggcacuaauauugucuca

SEQ ID NO: 614911 - RNA, 19 nt, Artificial Sequence
  Description of Artificial Sequence: Synthetic oligonucleotide
ucugaacgaagugcugaga

SEQ ID NO: 614912 - RNA, 19 nt, Artificial Sequence
  Description of Artificial Sequence: Synthetic oligonucleotide
ggcgcuuacugggagaugc

SEQ ID NO: 614913 - RNA, 19 nt, Artificial Sequence
  Description of Artificial Sequence: Synthetic oligonucleotide
ggugaguuauagaccgugg

SEQ ID NO: 614914 - RNA, 19 nt, Artificial Sequence
  Description of Artificial Sequence: Synthetic oligonucleotide
uucagcccuaacagugccu

SEQ ID NO: 614915 - RNA, 19 nt, Artificial Sequence
  Description of Artificial Sequence: Synthetic oligonucleotide
agaggcguagagucaucca

SEQ ID NO: 614916 - RNA, 19 nt, Artificial Sequence
  Description of Artificial Sequence: Synthetic oligonucleotide
aucuuuguucgcacacggg

SEQ ID NO: 614917 - RNA, 19 nt, Artificial Sequence
  Description of Artificial Sequence: Synthetic oligonucleotide
cugauagauuagcucauaa

SEQ ID NO: 614918 - RNA, 19 nt, Artificial Sequence
  Description of Artificial Sequence: Synthetic oligonucleotide
ucgccucuccuaucuguag

SEQ ID NO: 614919 - RNA, 19 nt, Artificial Sequence
  Description of Artificial Sequence: Synthetic oligonucleotide
caguggggaaauauagaga

SEQ ID NO: 614920 - RNA, 19 nt, Artificial Sequence
  Description of Artificial Sequence: Synthetic oligonucleotide
guacuuaggguguggaggu

SEQ ID NO: 614921 - RNA, 19 nt, Artificial Sequence
  Description of Artificial Sequence: Synthetic oligonucleotide
guuacaauggagaggcgua

SEQ ID NO: 614922 - RNA, 19 nt, Artificial Sequence
  Description of Artificial Sequence: Synthetic oligonucleotide
gaccuugaauggaagggga

SEQ ID NO: 614923 - RNA, 19 nt, Artificial Sequence
  Description of Artificial Sequence: Synthetic oligonucleotide
ggaguaaauaauggacuac

SEQ ID NO: 614924 - RNA, 19 nt, Artificial Sequence
  Description of Artificial Sequence: Synthetic oligonucleotide
acgagaugggcuauaacuu

SEQ ID NO: 614925 - RNA, 19 nt, Artificial Sequence
  Description of Artificial Sequence: Synthetic oligonucleotide
cagcaggauuaauuacuac

SEQ ID NO: 614926 - RNA, 19 nt, Artificial Sequence
  Description of Artificial Sequence: Synthetic oligonucleotide
cguuaggucuaaauacugc

SEQ ID NO: 614927 - RNA, 19 nt, Artificial Sequence
  Description of Artificial Sequence: Synthetic oligonucleotide
gcuguaugagccacugccg

SEQ ID NO: 614928 - RNA, 19 nt, Artificial Sequence
  Description of Artificial Sequence: Synthetic oligonucleotide
gccagcuuauuauaaccac

SEQ ID NO: 614929 - RNA, 19 nt, Artificial Sequence
  Description of Artificial Sequence: Synthetic oligonucleotide
aacgaagugcugagaagua

SEQ ID NO: 614930 - RNA, 19 nt, Artificial Sequence
  Description of Artificial Sequence: Synthetic oligonucleotide
ucaggguacuuagggugug

SEQ ID NO: 614931 - RNA, 19 nt, Artificial Sequence
  Description of Artificial Sequence: Synthetic oligonucleotide
acgguagcgagaucucaau

SEQ ID NO: 614932 - RNA, 19 nt, Artificial Sequence
  Description of Artificial Sequence: Synthetic oligonucleotide
aggguugacagcacucuga

SEQ ID NO: 614933 - RNA, 19 nt, Artificial Sequence
  Description of Artificial Sequence: Synthetic oligonucleotide
gcuugcuuagaacugagau

SEQ ID NO: 614934 - RNA, 19 nt, Artificial Sequence
  Description of Artificial Sequence: Synthetic oligonucleotide
cacaugcaugaugauagca

SEQ ID NO: 614935 - RNA, 19 nt, Artificial Sequence
  Description of Artificial Sequence: Synthetic oligonucleotide
acuaaacccaaaaguuuua

SEQ ID NO: 614936 - RNA, 19 nt, Artificial Sequence
  Description of Artificial Sequence: Synthetic oligonucleotide
ggguacuuaggguguggag

SEQ ID NO: 614937 - RNA, 19 nt, Artificial Sequence
  Description of Artificial Sequence: Synthetic oligonucleotide
acucugaccuugaauggaa

SEQ ID NO: 614938 - RNA, 19 nt, Artificial Sequence
  Description of Artificial Sequence: Synthetic oligonucleotide
ucgcacacggggccugaga

SEQ ID NO: 614939 - RNA, 19 nt, Artificial Sequence
  Description of Artificial Sequence: Synthetic oligonucleotide
acucggugaacgagauggg

SEQ ID NO: 614940 - RNA, 19 nt, Artificial Sequence
  Description of Artificial Sequence: Synthetic oligonucleotide
cgagaucucaauccacugc

SEQ ID NO: 614941 - RNA, 19 nt, Artificial Sequence
  Description of Artificial Sequence: Synthetic oligonucleotide
acccugucgugcuaaucaa

SEQ ID NO: 614942 - RNA, 19 nt, Artificial Sequence
  Description of Artificial Sequence: Synthetic oligonucleotide
cuccugauuuggcguuagg

SEQ ID NO: 614943 - RNA, 19 nt, Artificial Sequence
  Description of Artificial Sequence: Synthetic oligonucleotide
gcgagaucucaauccacug

SEQ ID NO: 614944 - RNA, 19 nt, Artificial Sequence
  Description of Artificial Sequence: Synthetic oligonucleotide
ugccgccugaggacagacc

SEQ ID NO: 614945 - RNA, 19 nt, Artificial Sequence
  Description of Artificial Sequence: Synthetic oligonucleotide
uguucgcacacggggccug

SEQ ID NO: 614946 - RNA, 19 nt, Artificial Sequence
  Description of Artificial Sequence: Synthetic oligonucleotide
aggguacuuagggugugga

SEQ ID NO: 614947 - RNA, 19 nt, Artificial Sequence
  Description of Artificial Sequence: Synthetic oligonucleotide
cucacgggguuacaaugga

SEQ ID NO: 614948 - RNA, 19 nt, Artificial Sequence
  Description of Artificial Sequence: Synthetic oligonucleotide
caggguacuuagggugugg

SEQ ID NO: 614949 - RNA, 19 nt, Artificial Sequence
  Description of Artificial Sequence: Synthetic oligonucleotide
agucugcacaacagccguc

SEQ ID NO: 614950 - RNA, 19 nt, Artificial Sequence
  Description of Artificial Sequence: Synthetic oligonucleotide
guuauagaccgugggugaa

SEQ ID NO: 614951 - RNA, 19 nt, Artificial Sequence
  Description of Artificial Sequence: Synthetic oligonucleotide
acgucauaagaagcuuccu

SEQ ID NO: 614952 - RNA, 19 nt, Artificial Sequence
  Description of Artificial Sequence: Synthetic oligonucleotide
auagaccgugggugaagaa

SEQ ID NO: 614953 - RNA, 19 nt, Artificial Sequence
  Description of Artificial Sequence: Synthetic oligonucleotide
gguuacaauggagaggcgu

SEQ ID NO: 614954 - RNA, 19 nt, Artificial Sequence
  Description of Artificial Sequence: Synthetic oligonucleotide
ugauguccuuagacauuua

SEQ ID NO: 614955 - RNA, 19 nt, Artificial Sequence
  Description of Artificial Sequence: Synthetic oligonucleotide
uguagacaugucgcugaua

SEQ ID NO: 614956 - RNA, 19 nt, Artificial Sequence
  Description of Artificial Sequence: Synthetic oligonucleotide
cucuccuaucuguagcucu

SEQ ID NO: 614957 - RNA, 19 nt, Artificial Sequence
  Description of Artificial Sequence: Synthetic oligonucleotide
guacccagucauacagcug

SEQ ID NO: 614958 - RNA, 19 nt, Artificial Sequence
  Description of Artificial Sequence: Synthetic oligonucleotide
cuuccuaauaguuguucuu

SEQ ID NO: 614959 - RNA, 19 nt, Artificial Sequence
  Description of Artificial Sequence: Synthetic oligonucleotide
cucuggacagcccauucgu

SEQ ID NO: 614960 - RNA, 19 nt, Artificial Sequence
  Description of Artificial Sequence: Synthetic oligonucleotide
uuguucgcacacggggccu

SEQ ID NO: 614961 - RNA, 19 nt, Artificial Sequence
  Description of Artificial Sequence: Synthetic oligonucleotide
gcauucagaguuggaauga

SEQ ID NO: 614962 - RNA, 19 nt, Artificial Sequence
  Description of Artificial Sequence: Synthetic oligonucleotide
ugauucucacgggguuaca

SEQ ID NO: 614963 - RNA, 19 nt, Artificial Sequence
  Description of Artificial Sequence: Synthetic oligonucleotide
aggcguagagucauccaau

SEQ ID NO: 614964 - RNA, 19 nt, Artificial Sequence
  Description of Artificial Sequence: Synthetic oligonucleotide
accuggaaucaagguaggu

SEQ ID NO: 614965 - RNA, 19 nt, Artificial Sequence
  Description of Artificial Sequence: Synthetic oligonucleotide
accuugaauggaaggggaa

SEQ ID NO: 614966 - RNA, 19 nt, Artificial Sequence
  Description of Artificial Sequence: Synthetic oligonucleotide
cagcccuaacagugccugc

SEQ ID NO: 614967 - RNA, 19 nt, Artificial Sequence
  Description of Artificial Sequence: Synthetic oligonucleotide
cucccaagcauuccugacu

SEQ ID NO: 614968 - RNA, 19 nt, Artificial Sequence
  Description of Artificial Sequence: Synthetic oligonucleotide
guuacgucauaagaagcuu

SEQ ID NO: 614969 - RNA, 19 nt, Artificial Sequence
  Description of Artificial Sequence: Synthetic oligonucleotide
agcuugcuuagaacugaga

SEQ ID NO: 614970 - RNA, 19 nt, Artificial Sequence
  Description of Artificial Sequence: Synthetic oligonucleotide
gauuuggcguuaggucuaa

SEQ ID NO: 614971 - RNA, 19 nt, Artificial Sequence
  Description of Artificial Sequence: Synthetic oligonucleotide
ggcacuaauauugucucau

SEQ ID NO: 614972 - RNA, 19 nt, Artificial Sequence
  Description of Artificial Sequence: Synthetic oligonucleotide
cugucgugcuaaucaaagu

SEQ ID NO: 614973 - RNA, 19 nt, Artificial Sequence
  Description of Artificial Sequence: Synthetic oligonucleotide
ggcguuaggucuaaauacu

SEQ ID NO: 614974 - RNA, 19 nt, Artificial Sequence
  Description of Artificial Sequence: Synthetic oligonucleotide
uacuccugauuuggcguua

SEQ ID NO: 614975 - RNA, 19 nt, Artificial Sequence
  Description of Artificial Sequence: Synthetic oligonucleotide
cucgccucuccuaucugua

SEQ ID NO: 614976 - RNA, 19 nt, Artificial Sequence
  Description of Artificial Sequence: Synthetic oligonucleotide
agaucccggggagguguag

SEQ ID NO: 614977 - RNA, 19 nt, Artificial Sequence
  Description of Artificial Sequence: Synthetic oligonucleotide
gccgccugaggacagaccu

SEQ ID NO: 614978 - RNA, 19 nt, Artificial Sequence
  Description of Artificial Sequence: Synthetic oligonucleotide
cacucgccucuccuaucug

SEQ ID NO: 614979 - RNA, 19 nt, Artificial Sequence
  Description of Artificial Sequence: Synthetic oligonucleotide
gcccuaacagugccugcug

SEQ ID NO: 614980 - RNA, 19 nt, Artificial Sequence
  Description of Artificial Sequence: Synthetic oligonucleotide
guacuccugauuuggcguu

SEQ ID NO: 614981 - RNA, 19 nt, Artificial Sequence
  Description of Artificial Sequence: Synthetic oligonucleotide
ggcgucugaacgaagugcu

SEQ ID NO: 614982 - RNA, 19 nt, Artificial Sequence
  Description of Artificial Sequence: Synthetic oligonucleotide
cuguuccgugcgguagaag

SEQ ID NO: 614983 - RNA, 19 nt, Artificial Sequence
  Description of Artificial Sequence: Synthetic oligonucleotide
cgggguuacaauggagagg

SEQ ID NO: 614984 - RNA, 19 nt, Artificial Sequence
  Description of Artificial Sequence: Synthetic oligonucleotide
cgcacacggggccugagac

SEQ ID NO: 614985 - RNA, 19 nt, Artificial Sequence
  Description of Artificial Sequence: Synthetic oligonucleotide
agcuuguuucaagcuggua

SEQ ID NO: 614986 - RNA, 19 nt, Artificial Sequence
  Description of Artificial Sequence: Synthetic oligonucleotide
ggacucggugaacgagaug

SEQ ID NO: 614987 - RNA, 19 nt, Artificial Sequence
  Description of Artificial Sequence: Synthetic oligonucleotide
guggggaaauauagagaua

SEQ ID NO: 614988 - RNA, 19 nt, Artificial Sequence
  Description of Artificial Sequence: Synthetic oligonucleotide
gaucccggggagguguagu

SEQ ID NO: 614989 - RNA, 19 nt, Artificial Sequence
  Description of Artificial Sequence: Synthetic oligonucleotide
ggaaggagacguggaaucu

SEQ ID NO: 614990 - RNA, 19 nt, Artificial Sequence
  Description of Artificial Sequence: Synthetic oligonucleotide
ccaccugcguccuuugaaa

SEQ ID NO: 614991 - RNA, 19 nt, Artificial Sequence
  Description of Artificial Sequence: Synthetic oligonucleotide
ggucuaaauacugcacaau

SEQ ID NO: 614992 - RNA, 19 nt, Artificial Sequence
  Description of Artificial Sequence: Synthetic oligonucleotide
ggcuauaacuuagcacacu

SEQ ID NO: 614993 - RNA, 19 nt, Artificial Sequence
  Description of Artificial Sequence: Synthetic oligonucleotide
guuccaccggaaggagcuc

SEQ ID NO: 614994 - RNA, 19 nt, Artificial Sequence
  Description of Artificial Sequence: Synthetic oligonucleotide
ccgugggugaagaacggua

SEQ ID NO: 614995 - RNA, 19 nt, Artificial Sequence
  Description of Artificial Sequence: Synthetic oligonucleotide
auuuggcguuaggucuaaa

SEQ ID NO: 614996 - RNA, 19 nt, Artificial Sequence
  Description of Artificial Sequence: Synthetic oligonucleotide
aggcgcuuacugggagaug

SEQ ID NO: 614997 - RNA, 19 nt, Artificial Sequence
  Description of Artificial Sequence: Synthetic oligonucleotide
cagcuuguuucaagcuggu

SEQ ID NO: 614998 - RNA, 19 nt, Artificial Sequence
  Description of Artificial Sequence: Synthetic oligonucleotide
caccucuguuccaccggaa

SEQ ID NO: 614999 - RNA, 19 nt, Artificial Sequence
  Description of Artificial Sequence: Synthetic oligonucleotide
gcgucugaacgaagugcug

SEQ ID NO: 615000 - RNA, 19 nt, Artificial Sequence
  Description of Artificial Sequence: Synthetic oligonucleotide
cgguagcgagaucucaauc

SEQ ID NO: 615001 - RNA, 19 nt, Artificial Sequence
  Description of Artificial Sequence: Synthetic oligonucleotide
cagaucccggggaggugua

SEQ ID NO: 615002 - RNA, 19 nt, Artificial Sequence
  Description of Artificial Sequence: Synthetic oligonucleotide
gacagcccauucgucucau

SEQ ID NO: 615003 - RNA, 19 nt, Artificial Sequence
  Description of Artificial Sequence: Synthetic oligonucleotide
cccugucgugcuaaucaaa

SEQ ID NO: 615004 - RNA, 19 nt, Artificial Sequence
  Description of Artificial Sequence: Synthetic oligonucleotide
gccugaggacagaccuugc

SEQ ID NO: 615005 - RNA, 19 nt, Artificial Sequence
  Description of Artificial Sequence: Synthetic oligonucleotide
ggugaacgagaugggcuau

SEQ ID NO: 615006 - RNA, 19 nt, Artificial Sequence
  Description of Artificial Sequence: Synthetic oligonucleotide
ccaagcauuccugacucuu

SEQ ID NO: 615007 - RNA, 19 nt, Artificial Sequence
  Description of Artificial Sequence: Synthetic oligonucleotide
gggacucggugaacgagau

SEQ ID NO: 615008 - RNA, 19 nt, Artificial Sequence
  Description of Artificial Sequence: Synthetic oligonucleotide
acggggccugagaccuaca

SEQ ID NO: 615009 - RNA, 19 nt, Artificial Sequence
  Description of Artificial Sequence: Synthetic oligonucleotide
gcgcuuacugggagaugcu

SEQ ID NO: 615010 - RNA, 19 nt, Artificial Sequence
  Description of Artificial Sequence: Synthetic oligonucleotide
ccgccugaggacagaccuu

SEQ ID NO: 615011 - RNA, 19 nt, Artificial Sequence
  Description of Artificial Sequence: Synthetic oligonucleotide
aucguaaugggcuggaggc

SEQ ID NO: 615012 - RNA, 19 nt, Artificial Sequence
  Description of Artificial Sequence: Synthetic oligonucleotide
aauauuccgggguacugcg

SEQ ID NO: 615013 - RNA, 19 nt, Artificial Sequence
  Description of Artificial Sequence: Synthetic oligonucleotide
uuaaaucccggccaaagug

SEQ ID NO: 615014 - RNA, 19 nt, Artificial Sequence
  Description of Artificial Sequence: Synthetic oligonucleotide
aagaagagagguuuguucu

SEQ ID NO: 615015 - RNA, 19 nt, Artificial Sequence
  Description of Artificial Sequence: Synthetic oligonucleotide
ucagauacucaucaaacac

SEQ ID NO: 615016 - RNA, 19 nt, Artificial Sequence
  Description of Artificial Sequence: Synthetic oligonucleotide
aaauauuccgggguacugc

SEQ ID NO: 615017 - RNA, 19 nt, Artificial Sequence
  Description of Artificial Sequence: Synthetic oligonucleotide
ugaacgauggccacaaaug

SEQ ID NO: 615018 - RNA, 19 nt, Artificial Sequence
  Description of Artificial Sequence: Synthetic oligonucleotide
acaacaucgucauucuccc

SEQ ID NO: 615019 - RNA, 19 nt, Artificial Sequence
  Description of Artificial Sequence: Synthetic oligonucleotide
aggugaucaauccagaaug

SEQ ID NO: 615020 - RNA, 19 nt, Artificial Sequence
  Description of Artificial Sequence: Synthetic oligonucleotide
uuuggcaucgcaauaggca

SEQ ID NO: 615021 - RNA, 19 nt, Artificial Sequence
  Description of Artificial Sequence: Synthetic oligonucleotide
agaucuaucucacuccggg

SEQ ID NO: 615022 - RNA, 19 nt, Artificial Sequence
  Description of Artificial Sequence: Synthetic oligonucleotide
  modified_base (8)..(8): a, c, u, g, unknown or other
uaggcaancggccucauca

SEQ ID NO: 615023 - RNA, 19 nt, Artificial Sequence
  Description of Artificial Sequence: Synthetic oligonucleotide
ugauauauggcugugguuc

SEQ ID NO: 615024 - RNA, 19 nt, Artificial Sequence
  Description of Artificial Sequence: Synthetic oligonucleotide
aacucauacuucaaguccg

SEQ ID NO: 615025 - RNA, 19 nt, Artificial Sequence
  Description of Artificial Sequence: Synthetic oligonucleotide
uguguacaaagcuucagca

SEQ ID NO: 615026 - RNA, 19 nt, Artificial Sequence
  Description of Artificial Sequence: Synthetic oligonucleotide
cuugucauauuucucaaug

SEQ ID NO: 615027 - RNA, 19 nt, Artificial Sequence
  Description of Artificial Sequence: Synthetic oligonucleotide
ugugauauauggcuguggu

SEQ ID NO: 615028 - RNA, 19 nt, Artificial Sequence
  Description of Artificial Sequence: Synthetic oligonucleotide
aguagcucuaguccucucc

SEQ ID NO: 615029 - RNA, 19 nt, Artificial Sequence
  Description of Artificial Sequence: Synthetic oligonucleotide
aagugucacccucaauggc

SEQ ID NO: 615030 - RNA, 19 nt, Artificial Sequence
  Description of Artificial Sequence: Synthetic oligonucleotide
  modified_base (3)..(3): a, c, u, g, unknown or other
aancggccucaucagauuc

SEQ ID NO: 615031 - RNA, 19 nt, Artificial Sequence
  Description of Artificial Sequence: Synthetic oligonucleotide
gugauaauccuccuuguag

SEQ ID NO: 615032 - RNA, 19 nt, Artificial Sequence
  Description of Artificial Sequence: Synthetic oligonucleotide
gaaaucauuggcugcacac

SEQ ID NO: 615033 - RNA, 19 nt, Artificial Sequence
  Description of Artificial Sequence: Synthetic oligonucleotide
cauagcuuucuucagcugc

SEQ ID NO: 615034 - RNA, 19 nt, Artificial Sequence
  Description of Artificial Sequence: Synthetic oligonucleotide
ugaacugagccucaucugu

SEQ ID NO: 615035 - RNA, 19 nt, Artificial Sequence
  Description of Artificial Sequence: Synthetic oligonucleotide
acagaucuaucucacuccg

SEQ ID NO: 615036 - RNA, 19 nt, Artificial Sequence
  Description of Artificial Sequence: Synthetic oligonucleotide
cagauacucaucaaacacc

SEQ ID NO: 615037 - RNA, 19 nt, Artificial Sequence
  Description of Artificial Sequence: Synthetic oligonucleotide
  modified_base (16)..(16): a, c, u, g, unknown or other
caucgcaauaggcaancgg

SEQ ID NO: 615038 - RNA, 19 nt, Artificial Sequence
  Description of Artificial Sequence: Synthetic oligonucleotide
gaacagaucuaucucacuc

SEQ ID NO: 615039 - RNA, 19 nt, Artificial Sequence
  Description of Artificial Sequence: Synthetic oligonucleotide
uuugucuccacugggagug

SEQ ID NO: 615040 - RNA, 19 nt, Artificial Sequence
  Description of Artificial Sequence: Synthetic oligonucleotide
agcuaguaaagccuucagg

SEQ ID NO: 615041 - RNA, 19 nt, Artificial Sequence
  Description of Artificial Sequence: Synthetic oligonucleotide
uaaaucccggccaaaguga

SEQ ID NO: 615042 - RNA, 19 nt, Artificial Sequence
  Description of Artificial Sequence: Synthetic oligonucleotide
uucagauacucaucaaaca

SEQ ID NO: 615043 - RNA, 19 nt, Artificial Sequence
  Description of Artificial Sequence: Synthetic oligonucleotide
uccacauagcuucagcaga

SEQ ID NO: 615044 - RNA, 19 nt, Artificial Sequence
  Description of Artificial Sequence: Synthetic oligonucleotide
cacgguaccccucagcucg

SEQ ID NO: 615045 - RNA, 19 nt, Artificial Sequence
  Description of Artificial Sequence: Synthetic oligonucleotide
ggacuuguaacucuggcag

SEQ ID NO: 615046 - RNA, 19 nt, Artificial Sequence
  Description of Artificial Sequence: Synthetic oligonucleotide
ucgauggcuagagagagcc

SEQ ID NO: 615047 - RNA, 19 nt, Artificial Sequence
  Description of Artificial Sequence: Synthetic oligonucleotide
agcucuaguccucuccacc

SEQ ID NO: 615048 - RNA, 19 nt, Artificial Sequence
  Description of Artificial Sequence: Synthetic oligonucleotide
ugacagucuaaccccaccc

SEQ ID NO: 615049 - RNA, 19 nt, Artificial Sequence
  Description of Artificial Sequence: Synthetic oligonucleotide
agggacuuguaacucuggc

SEQ ID NO: 615050 - RNA, 19 nt, Artificial Sequence
  Description of Artificial Sequence: Synthetic oligonucleotide
agagccucgauacauggca

SEQ ID NO: 615051 - RNA, 19 nt, Artificial Sequence
  Description of Artificial Sequence: Synthetic oligonucleotide
augacagucuaaccccacc

SEQ ID NO: 615052 - RNA, 19 nt, Artificial Sequence
  Description of Artificial Sequence: Synthetic oligonucleotide
gauggccacaaaugcaucc

SEQ ID NO: 615053 - RNA, 19 nt, Artificial Sequence
  Description of Artificial Sequence: Synthetic oligonucleotide
gauagcuacgggugcacag

SEQ ID NO: 615054 - RNA, 19 nt, Artificial Sequence
  Description of Artificial Sequence: Synthetic oligonucleotide
uugccaaaucuccagagau

SEQ ID NO: 615055 - RNA, 19 nt, Artificial Sequence
  Description of Artificial Sequence: Synthetic oligonucleotide
guugaacagaucuaucuca

SEQ ID NO: 615056 - RNA, 19 nt, Artificial Sequence
  Description of Artificial Sequence: Synthetic oligonucleotide
acugagccucaucuguucc

SEQ ID NO: 615057 - RNA, 19 nt, Artificial Sequence
  Description of Artificial Sequence: Synthetic oligonucleotide
aauggacucuuugucacug

SEQ ID NO: 615058 - RNA, 19 nt, Artificial Sequence
  Description of Artificial Sequence: Synthetic oligonucleotide
cuccuggagaccaugauuc

SEQ ID NO: 615059 - RNA, 19 nt, Artificial Sequence
  Description of Artificial Sequence: Synthetic oligonucleotide
acagagccucgauacaugg

SEQ ID NO: 615060 - RNA, 19 nt, Artificial Sequence
  Description of Artificial Sequence: Synthetic oligonucleotide
uuagcaucguaaugggcug

SEQ ID NO: 615061 - RNA, 19 nt, Artificial Sequence
  Description of Artificial Sequence: Synthetic oligonucleotide
caucguaaugggcuggagg

SEQ ID NO: 615062 - RNA, 19 nt, Artificial Sequence
  Description of Artificial Sequence: Synthetic oligonucleotide
augucaagcauguccagcu

SEQ ID NO: 615063 - RNA, 19 nt, Artificial Sequence
  Description of Artificial Sequence: Synthetic oligonucleotide
ucaaugaauucccuccgaa

SEQ ID NO: 615064 - RNA, 19 nt, Artificial Sequence
  Description of Artificial Sequence: Synthetic oligonucleotide
aagcgagucuccaaggaag

SEQ ID NO: 615065 - RNA, 19 nt, Artificial Sequence
  Description of Artificial Sequence: Synthetic oligonucleotide
auuaaaucccggccaaagu

SEQ ID NO: 615066 - RNA, 19 nt, Artificial Sequence
  Description of Artificial Sequence: Synthetic oligonucleotide
uccgcaaugagguccuugc

SEQ ID NO: 615067 - RNA, 19 nt, Artificial Sequence
  Description of Artificial Sequence: Synthetic oligonucleotide
ugauaggccaccugugcug

SEQ ID NO: 615068 - RNA, 19 nt, Artificial Sequence
  Description of Artificial Sequence: Synthetic oligonucleotide
ggauuugugauaauccucc

SEQ ID NO: 615069 - RNA, 19 nt, Artificial Sequence
  Description of Artificial Sequence: Synthetic oligonucleotide
ucauacuucaaguccgcaa

SEQ ID NO: 615070 - RNA, 19 nt, Artificial Sequence
  Description of Artificial Sequence: Synthetic oligonucleotide
ucggauacuggcuucaauu

SEQ ID NO: 615071 - RNA, 19 nt, Artificial Sequence
  Description of Artificial Sequence: Synthetic oligonucleotide
ucccugucaacucauacuu

SEQ ID NO: 615072 - RNA, 19 nt, Artificial Sequence
  Description of Artificial Sequence: Synthetic oligonucleotide
uuggcaucgcaauaggcaa

SEQ ID NO: 615073 - RNA, 19 nt, Artificial Sequence
  Description of Artificial Sequence: Synthetic oligonucleotide
gcuucaucaguuccgaucc

SEQ ID NO: 615074 - RNA, 19 nt, Artificial Sequence
  Description of Artificial Sequence: Synthetic oligonucleotide
cuuagcaucguaaugggcu

SEQ ID NO: 615075 - RNA, 19 nt, Artificial Sequence
  Description of Artificial Sequence: Synthetic oligonucleotide
agauacucaucaaacacca

SEQ ID NO: 615076 - RNA, 19 nt, Artificial Sequence
  Description of Artificial Sequence: Synthetic oligonucleotide
aauuucuuuggcaucgcaa

SEQ ID NO: 615077 - RNA, 19 nt, Artificial Sequence
  Description of Artificial Sequence: Synthetic oligonucleotide
ugaaaucauuggcugcaca

SEQ ID NO: 615078 - RNA, 19 nt, Artificial Sequence
  Description of Artificial Sequence: Synthetic oligonucleotide
cauuaaaucccggccaaag

SEQ ID NO: 615079 - RNA, 19 nt, Artificial Sequence
  Description of Artificial Sequence: Synthetic oligonucleotide
uucuugacacucugaacga

SEQ ID NO: 615080 - RNA, 19 nt, Artificial Sequence
  Description of Artificial Sequence: Synthetic oligonucleotide
  modified_base (2)..(2): a, c, u, g, unknown or other
uncgggaggugaucaaucc

SEQ ID NO: 615081 - RNA, 19 nt, Artificial Sequence
  Description of Artificial Sequence: Synthetic oligonucleotide
aacaauggcuuggucaggu

SEQ ID NO: 615082 - RNA, 19 nt, Artificial Sequence
  Description of Artificial Sequence: Synthetic oligonucleotide
aaugacagucuaaccccac

SEQ ID NO: 615083 - RNA, 19 nt, Artificial Sequence
  Description of Artificial Sequence: Synthetic oligonucleotide
cuccacauagcuucagcag

SEQ ID NO: 615084 - RNA, 19 nt, Artificial Sequence
  Description of Artificial Sequence: Synthetic oligonucleotide
gacagucuaaccccacccc

SEQ ID NO: 615085 - RNA, 19 nt, Artificial Sequence
  Description of Artificial Sequence: Synthetic oligonucleotide
ugagggucuucucaucugu

SEQ ID NO: 615086 - RNA, 19 nt, Artificial Sequence
  Description of Artificial Sequence: Synthetic oligonucleotide
gagauggggauagcuacgg

SEQ ID NO: 615087 - RNA, 19 nt, Artificial Sequence
  Description of Artificial Sequence: Synthetic oligonucleotide
ccgaaugucaagcaugucc

SEQ ID NO: 615088 - RNA, 19 nt, Artificial Sequence
  Description of Artificial Sequence: Synthetic oligonucleotide
aggaccgucaugaagcgag

SEQ ID NO: 615089 - RNA, 19 nt, Artificial Sequence
  Description of Artificial Sequence: Synthetic oligonucleotide
caucaugagccccaggauc

SEQ ID NO: 615090 - RNA, 19 nt, Artificial Sequence
  Description of Artificial Sequence: Synthetic oligonucleotide
auagcuacgggugcacagg

SEQ ID NO: 615091 - RNA, 19 nt, Artificial Sequence
  Description of Artificial Sequence: Synthetic oligonucleotide
gacagcuccccucggauac

SEQ ID NO: 615092 - RNA, 19 nt, Artificial Sequence
  Description of Artificial Sequence: Synthetic oligonucleotide
auuggcugcacacacggua

SEQ ID NO: 615093 - RNA, 19 nt, Artificial Sequence
  Description of Artificial Sequence: Synthetic oligonucleotide
cuacgggugcacaggaccg

SEQ ID NO: 615094 - RNA, 19 nt, Artificial Sequence
  Description of Artificial Sequence: Synthetic oligonucleotide
gaucaauccagaauggacu

SEQ ID NO: 615095 - RNA, 19 nt, Artificial Sequence
  Description of Artificial Sequence: Synthetic oligonucleotide
ugcgguuucccaaaauaua

SEQ ID NO: 615096 - RNA, 19 nt, Artificial Sequence
  Description of Artificial Sequence: Synthetic oligonucleotide
gaucucccgaaugucaagc

SEQ ID NO: 615097 - RNA, 19 nt, Artificial Sequence
  Description of Artificial Sequence: Synthetic oligonucleotide
guugcuacggugugugaug

SEQ ID NO: 615098 - RNA, 19 nt, Artificial Sequence
  Description of Artificial Sequence: Synthetic oligonucleotide
agggauaacagaagggaug

SEQ ID NO: 615099 - RNA, 19 nt, Artificial Sequence
  Description of Artificial Sequence: Synthetic oligonucleotide
uuggcugcacacacgguac

SEQ ID NO: 615100 - RNA, 19 nt, Artificial Sequence
  Description of Artificial Sequence: Synthetic oligonucleotide
uuugcugcgguuucccaaa

SEQ ID NO: 615101 - RNA, 19 nt, Artificial Sequence
  Description of Artificial Sequence: Synthetic oligonucleotide
guugucgcgaguccccagg

SEQ ID NO: 615102 - RNA, 19 nt, Artificial Sequence
  Description of Artificial Sequence: Synthetic oligonucleotide
cucccgaaugucaagcaug

SEQ ID NO: 615103 - RNA, 19 nt, Artificial Sequence
  Description of Artificial Sequence: Synthetic oligonucleotide
uucuucgcgauuccccgug

SEQ ID NO: 615104 - RNA, 19 nt, Artificial Sequence
  Description of Artificial Sequence: Synthetic oligonucleotide
ucggaucaggguguugucg

SEQ ID NO: 615105 - RNA, 19 nt, Artificial Sequence
  Description of Artificial Sequence: Synthetic oligonucleotide
auucggaucaggguguugu

SEQ ID NO: 615106 - RNA, 19 nt, Artificial Sequence
  Description of Artificial Sequence: Synthetic oligonucleotide
acaggaccgucaugaagcg

SEQ ID NO: 615107 - RNA, 19 nt, Artificial Sequence
  Description of Artificial Sequence: Synthetic oligonucleotide
aaaucccggccaaagugag

SEQ ID NO: 615108 - RNA, 19 nt, Artificial Sequence
  Description of Artificial Sequence: Synthetic oligonucleotide
  modified_base (7)..(7): a, c, u, g, unknown or other
aggcaancggccucaucag

SEQ ID NO: 615109 - RNA, 19 nt, Artificial Sequence
  Description of Artificial Sequence: Synthetic oligonucleotide
uccgacuucaggucagcca

SEQ ID NO: 615110 - RNA, 19 nt, Artificial Sequence
  Description of Artificial Sequence: Synthetic oligonucleotide
acugcacuaaguucccaca

SEQ ID NO: 615111 - RNA, 19 nt, Artificial Sequence
  Description of Artificial Sequence: Synthetic oligonucleotide
acagucuaaccccaccccu

SEQ ID NO: 615112 - RNA, 19 nt, Artificial Sequence
  Description of Artificial Sequence: Synthetic oligonucleotide
ugcacuaaguucccacauc

SEQ ID NO: 615113 - RNA, 19 nt, Artificial Sequence
  Description of Artificial Sequence: Synthetic oligonucleotide
uagagggacuuguaacucu

SEQ ID NO: 615114 - RNA, 19 nt, Artificial Sequence
  Description of Artificial Sequence: Synthetic oligonucleotide
gagcuaguaaagccuucag

SEQ ID NO: 615115 - RNA, 19 nt, Artificial Sequence
  Description of Artificial Sequence: Synthetic oligonucleotide
uucgcgauuccccguggcc

SEQ ID NO: 615116 - RNA, 19 nt, Artificial Sequence
  Description of Artificial Sequence: Synthetic oligonucleotide
acucauacuucaaguccgc

SEQ ID NO: 615117 - RNA, 19 nt, Artificial Sequence
  Description of Artificial Sequence: Synthetic oligonucleotide
cuucguacagguccuggac

SEQ ID NO: 615118 - RNA, 19 nt, Artificial Sequence
  Description of Artificial Sequence: Synthetic oligonucleotide
ucccuccgaauguugaaca

SEQ ID NO: 615119 - RNA, 19 nt, Artificial Sequence
  Description of Artificial Sequence: Synthetic oligonucleotide
gguugaaaucauuggcugc

SEQ ID NO: 615120 - RNA, 19 nt, Artificial Sequence
  Description of Artificial Sequence: Synthetic oligonucleotide
aggucugucggaucugcug

SEQ ID NO: 615121 - RNA, 19 nt, Artificial Sequence
  Description of Artificial Sequence: Synthetic oligonucleotide
accgucaugaagcgagucu

SEQ ID NO: 615122 - RNA, 19 nt, Artificial Sequence
  Description of Artificial Sequence: Synthetic oligonucleotide
acggugugugaugaugucg

SEQ ID NO: 615123 - RNA, 19 nt, Artificial Sequence
  Description of Artificial Sequence: Synthetic oligonucleotide
augugauauauggcugugg

SEQ ID NO: 615124 - RNA, 19 nt, Artificial Sequence
  Description of Artificial Sequence: Synthetic oligonucleotide
cuagagagagccccagcug

SEQ ID NO: 615125 - RNA, 19 nt, Artificial Sequence
  Description of Artificial Sequence: Synthetic oligonucleotide
  modified_base (9)..(9): a, c, u, g, unknown or other
auaggcaancggccucauc

SEQ ID NO: 615126 - RNA, 19 nt, Artificial Sequence
  Description of Artificial Sequence: Synthetic oligonucleotide
aucaugagccccaggauca

SEQ ID NO: 615127 - RNA, 19 nt, Artificial Sequence
  Description of Artificial Sequence: Synthetic oligonucleotide
ucacuccgggagaucauca

SEQ ID NO: 615128 - RNA, 19 nt, Artificial Sequence
  Description of Artificial Sequence: Synthetic oligonucleotide
aucaggguguugucgcgag

SEQ ID NO: 615129 - RNA, 19 nt, Artificial Sequence
  Description of Artificial Sequence: Synthetic oligonucleotide
cuugguccggaagaucucc

SEQ ID NO: 615130 - RNA, 19 nt, Artificial Sequence
  Description of Artificial Sequence: Synthetic oligonucleotide
ucuucgcgauuccccgugg

SEQ ID NO: 615131 - RNA, 19 nt, Artificial Sequence
  Description of Artificial Sequence: Synthetic oligonucleotide
ugucagcuauuuccugagc

SEQ ID NO: 615132 - RNA, 19 nt, Artificial Sequence
  Description of Artificial Sequence: Synthetic oligonucleotide
  modified_base (3)..(3): a, c, u, g, unknown or other
cuncgggaggugaucaauc

SEQ ID NO: 615133 - RNA, 19 nt, Artificial Sequence
  Description of Artificial Sequence: Synthetic oligonucleotide
cugguguagagacuuguca

SEQ ID NO: 615134 - RNA, 19 nt, Artificial Sequence
  Description of Artificial Sequence: Synthetic oligonucleotide
gucgcgaguccccaggccc

SEQ ID NO: 615135 - RNA, 19 nt, Artificial Sequence
  Description of Artificial Sequence: Synthetic oligonucleotide
agucuaaccccaccccuca

SEQ ID NO: 615136 - RNA, 19 nt, Artificial Sequence
  Description of Artificial Sequence: Synthetic oligonucleotide
ucucccgaaugucaagcau

SEQ ID NO: 615137 - RNA, 19 nt, Artificial Sequence
  Description of Artificial Sequence: Synthetic oligonucleotide
gaucuccgacuucagguca

SEQ ID NO: 615138 - RNA, 19 nt, Artificial Sequence
  Description of Artificial Sequence: Synthetic oligonucleotide
cagaucuaucucacuccgg

SEQ ID NO: 615139 - RNA, 19 nt, Artificial Sequence
  Description of Artificial Sequence: Synthetic oligonucleotide
ggugaaugugauauauggc

SEQ ID NO: 615140 - RNA, 19 nt, Artificial Sequence
  Description of Artificial Sequence: Synthetic oligonucleotide
uguauucaccagagguguc

SEQ ID NO: 615141 - RNA, 19 nt, Artificial Sequence
  Description of Artificial Sequence: Synthetic oligonucleotide
gcuacgggugcacaggacc

SEQ ID NO: 615142 - RNA, 19 nt, Artificial Sequence
  Description of Artificial Sequence: Synthetic oligonucleotide
uggacagagccucgauaca

SEQ ID NO: 615143 - RNA, 19 nt, Artificial Sequence
  Description of Artificial Sequence: Synthetic oligonucleotide
uagcuacgggugcacagga

SEQ ID NO: 615144 - RNA, 19 nt, Artificial Sequence
  Description of Artificial Sequence: Synthetic oligonucleotide
gaucuaucucacuccggga

SEQ ID NO: 615145 - RNA, 19 nt, Artificial Sequence
  Description of Artificial Sequence: Synthetic oligonucleotide
aaugcccgagauggcaucu

SEQ ID NO: 615146 - RNA, 19 nt, Artificial Sequence
  Description of Artificial Sequence: Synthetic oligonucleotide
gauuucagcauugguccga

SEQ ID NO: 615147 - RNA, 19 nt, Artificial Sequence
  Description of Artificial Sequence: Synthetic oligonucleotide
guagagacuugucauauuu

SEQ ID NO: 615148 - RNA, 19 nt, Artificial Sequence
  Description of Artificial Sequence: Synthetic oligonucleotide
uucaauuggcuugcccgug

SEQ ID NO: 615149 - RNA, 19 nt, Artificial Sequence
  Description of Artificial Sequence: Synthetic oligonucleotide
agugagauuugaaggucug

SEQ ID NO: 615150 - RNA, 19 nt, Artificial Sequence
  Description of Artificial Sequence: Synthetic oligonucleotide
acacgguaccccucagcuc

SEQ ID NO: 615151 - RNA, 19 nt, Artificial Sequence
  Description of Artificial Sequence: Synthetic oligonucleotide
  modified_base (8)..(8): a, c, u, g, unknown or other
uguugcuncgggaggugau

SEQ ID NO: 615152 - RNA, 19 nt, Artificial Sequence
  Description of Artificial Sequence: Synthetic oligonucleotide
uagcaucguaaugggcugg

SEQ ID NO: 615153 - RNA, 19 nt, Artificial Sequence
  Description of Artificial Sequence: Synthetic oligonucleotide
gaacaauggcuuggucagg

SEQ ID NO: 615154 - RNA, 19 nt, Artificial Sequence
  Description of Artificial Sequence: Synthetic oligonucleotide
aggggugaaugugauauau

SEQ ID NO: 615155 - RNA, 19 nt, Artificial Sequence
  Description of Artificial Sequence: Synthetic oligonucleotide
guauucaccagagguguca

SEQ ID NO: 615156 - RNA, 19 nt, Artificial Sequence
  Description of Artificial Sequence: Synthetic oligonucleotide
cuugccaaaucuccagaga

SEQ ID NO: 615157 - RNA, 19 nt, Artificial Sequence
  Description of Artificial Sequence: Synthetic oligonucleotide
uugucgcgaguccccaggc

SEQ ID NO: 615158 - RNA, 19 nt, Artificial Sequence
  Description of Artificial Sequence: Synthetic oligonucleotide
ccuucuucgcgauuccccg

SEQ ID NO: 615159 - RNA, 19 nt, Artificial Sequence
  Description of Artificial Sequence: Synthetic oligonucleotide
gggucuucucaucugugcc

SEQ ID NO: 615160 - RNA, 19 nt, Artificial Sequence
  Description of Artificial Sequence: Synthetic oligonucleotide
cacuaaguucccacaucug

SEQ ID NO: 615161 - RNA, 19 nt, Artificial Sequence
  Description of Artificial Sequence: Synthetic oligonucleotide
agagggacuuguaacucug

SEQ ID NO: 615162 - RNA, 19 nt, Artificial Sequence
  Description of Artificial Sequence: Synthetic oligonucleotide
auaaaugaacugagccuca

SEQ ID NO: 615163 - RNA, 19 nt, Artificial Sequence
  Description of Artificial Sequence: Synthetic oligonucleotide
acgauggccacaaaugcau

SEQ ID NO: 615164 - RNA, 19 nt, Artificial Sequence
  Description of Artificial Sequence: Synthetic oligonucleotide
  modified_base (6)..(6): a, c, u, g, unknown or other
uugcuncgggaggugauca

SEQ ID NO: 615165 - RNA, 19 nt, Artificial Sequence
  Description of Artificial Sequence: Synthetic oligonucleotide
aucucccgaaugucaagca

SEQ ID NO: 615166 - RNA, 19 nt, Artificial Sequence
  Description of Artificial Sequence: Synthetic oligonucleotide
cuuacaacaucgucauucu

SEQ ID NO: 615167 - RNA, 19 nt, Artificial Sequence
  Description of Artificial Sequence: Synthetic oligonucleotide
ugucgcgaguccccaggcc

SEQ ID NO: 615168 - RNA, 19 nt, Artificial Sequence
  Description of Artificial Sequence: Synthetic oligonucleotide
uaaugggcuggaggcauca

SEQ ID NO: 615169 - RNA, 19 nt, Artificial Sequence
  Description of Artificial Sequence: Synthetic oligonucleotide
aucccggccaaagugagau

SEQ ID NO: 615170 - RNA, 19 nt, Artificial Sequence
  Description of Artificial Sequence: Synthetic oligonucleotide
uaaaugaacugagccucau

SEQ ID NO: 615171 - RNA, 19 nt, Artificial Sequence
  Description of Artificial Sequence: Synthetic oligonucleotide
cauacuucaaguccgcaau

SEQ ID NO: 615172 - RNA, 19 nt, Artificial Sequence
  Description of Artificial Sequence: Synthetic oligonucleotide
aacaccaaccggaggugcu

SEQ ID NO: 615173 - RNA, 19 nt, Artificial Sequence
  Description of Artificial Sequence: Synthetic oligonucleotide
ucccggguucccuggaggc

SEQ ID NO: 615174 - RNA, 19 nt, Artificial Sequence
  Description of Artificial Sequence: Synthetic oligonucleotide
uugcuacggugugugauga

SEQ ID NO: 615175 - RNA, 19 nt, Artificial Sequence
  Description of Artificial Sequence: Synthetic oligonucleotide
cagagccucgauacauggc

SEQ ID NO: 615176 - RNA, 19 nt, Artificial Sequence
  Description of Artificial Sequence: Synthetic oligonucleotide
uguugucgcgaguccccag

SEQ ID NO: 615177 - RNA, 19 nt, Artificial Sequence
  Description of Artificial Sequence: Synthetic oligonucleotide
ggacuuguacaguuuguca

SEQ ID NO: 615178 - RNA, 19 nt, Artificial Sequence
  Description of Artificial Sequence: Synthetic oligonucleotide
  modified_base (9)..(9): a, c, u, g, unknown or other
uuguugcuncgggagguga

SEQ ID NO: 615179 - RNA, 19 nt, Artificial Sequence
  Description of Artificial Sequence: Synthetic oligonucleotide
aguuggucaucuugaugaa

SEQ ID NO: 615180 - RNA, 19 nt, Artificial Sequence
  Description of Artificial Sequence: Synthetic oligonucleotide
ucgcgauuccccguggcca

SEQ ID NO: 615181 - RNA, 19 nt, Artificial Sequence
  Description of Artificial Sequence: Synthetic oligonucleotide
  modified_base (2)..(2): a, c, u, g, unknown or other
ancggccucaucagauuca

SEQ ID NO: 615182 - RNA, 19 nt, Artificial Sequence
  Description of Artificial Sequence: Synthetic oligonucleotide
gaccaguagcucuaguccu

SEQ ID NO: 615183 - RNA, 19 nt, Artificial Sequence
  Description of Artificial Sequence: Synthetic oligonucleotide
  modified_base (19)..(19): a, c, u, g, unknown or other
uggcaucgcaauaggcaan

SEQ ID NO: 615184 - RNA, 19 nt, Artificial Sequence
  Description of Artificial Sequence: Synthetic oligonucleotide
aaguccucgcuuacaacau

SEQ ID NO: 615185 - RNA, 19 nt, Artificial Sequence
  Description of Artificial Sequence: Synthetic oligonucleotide
aaguccgcaaugagguccu

SEQ ID NO: 615186 - RNA, 19 nt, Artificial Sequence
  Description of Artificial Sequence: Synthetic oligonucleotide
uccucgcuuacaacaucgu

SEQ ID NO: 615187 - RNA, 19 nt, Artificial Sequence
  Description of Artificial Sequence: Synthetic oligonucleotide
cagucuaaccccaccccuc

SEQ ID NO: 615188 - RNA, 19 nt, Artificial Sequence
  Description of Artificial Sequence: Synthetic oligonucleotide
gugcucuaugucauaguug

SEQ ID NO: 615189 - RNA, 19 nt, Artificial Sequence
  Description of Artificial Sequence: Synthetic oligonucleotide
uccgaauguugaacagauc

SEQ ID NO: 615190 - RNA, 19 nt, Artificial Sequence
  Description of Artificial Sequence: Synthetic oligonucleotide
caaacaccaaccggaggug

SEQ ID NO: 615191 - RNA, 19 nt, Artificial Sequence
  Description of Artificial Sequence: Synthetic oligonucleotide
auauggcugugguucucca

SEQ ID NO: 615192 - RNA, 19 nt, Artificial Sequence
  Description of Artificial Sequence: Synthetic oligonucleotide
  modified_base (10)..(10): a, c, u, g, unknown or other
aauaggcaancggccucau

SEQ ID NO: 615193 - RNA, 19 nt, Artificial Sequence
  Description of Artificial Sequence: Synthetic oligonucleotide
ucgacucgggccacugcac

SEQ ID NO: 615194 - RNA, 19 nt, Artificial Sequence
  Description of Artificial Sequence: Synthetic oligonucleotide
ucguaaugggcuggaggca

SEQ ID NO: 615195 - RNA, 19 nt, Artificial Sequence
  Description of Artificial Sequence: Synthetic oligonucleotide
ugccgcugggcguugcuac

SEQ ID NO: 615196 - RNA, 19 nt, Artificial Sequence
  Description of Artificial Sequence: Synthetic oligonucleotide
caaucagccguucaaacuu

SEQ ID NO: 615197 - RNA, 19 nt, Artificial Sequence
  Description of Artificial Sequence: Synthetic oligonucleotide
caucacccuagugaggguc

SEQ ID NO: 615198 - RNA, 19 nt, Artificial Sequence
  Description of Artificial Sequence: Synthetic oligonucleotide
ucuugacacucugaacgau

SEQ ID NO: 615199 - RNA, 19 nt, Artificial Sequence
  Description of Artificial Sequence: Synthetic oligonucleotide
gugaucaauccagaaugga

SEQ ID NO: 615200 - RNA, 19 nt, Artificial Sequence
  Description of Artificial Sequence: Synthetic oligonucleotide
ccuugccaaaucuccagag

SEQ ID NO: 615201 - RNA, 19 nt, Artificial Sequence
  Description of Artificial Sequence: Synthetic oligonucleotide
  modified_base (7)..(7): a, c, u, g, unknown or other
guugcuncgggaggugauc

SEQ ID NO: 615202 - RNA, 19 nt, Artificial Sequence
  Description of Artificial Sequence: Synthetic oligonucleotide
cuaaguucccacaucugau

SEQ ID NO: 615203 - RNA, 19 nt, Artificial Sequence
  Description of Artificial Sequence: Synthetic oligonucleotide
agagagcuaguaaagccuu

SEQ ID NO: 615204 - RNA, 19 nt, Artificial Sequence
  Description of Artificial Sequence: Synthetic oligonucleotide
caggguguugucgcgaguc

SEQ ID NO: 615205 - RNA, 19 nt, Artificial Sequence
  Description of Artificial Sequence: Synthetic oligonucleotide
ucacugccgaagcccuuca

SEQ ID NO: 615206 - RNA, 19 nt, Artificial Sequence
  Description of Artificial Sequence: Synthetic oligonucleotide
cucaaugaauucccuccga

SEQ ID NO: 615207 - RNA, 19 nt, Artificial Sequence
  Description of Artificial Sequence: Synthetic oligonucleotide
cuucgcgauuccccguggc

SEQ ID NO: 615208 - RNA, 19 nt, Artificial Sequence
  Description of Artificial Sequence: Synthetic oligonucleotide
cucgacucgggccacugca

SEQ ID NO: 615209 - RNA, 19 nt, Artificial Sequence
  Description of Artificial Sequence: Synthetic oligonucleotide
  modified_base (12)..(12): a, c, u, g, unknown or other
gcaauaggcaancggccuc

SEQ ID NO: 615210 - RNA, 19 nt, Artificial Sequence
  Description of Artificial Sequence: Synthetic oligonucleotide
auauuccgggguacugcgg

SEQ ID NO: 615211 - RNA, 19 nt, Artificial Sequence
  Description of Artificial Sequence: Synthetic oligonucleotide
cacuccgggagaucaucac

SEQ ID NO: 615212 - RNA, 19 nt, Artificial Sequence
  Description of Artificial Sequence: Synthetic oligonucleotide
gcuacggugugugaugaug

SEQ ID NO: 615213 - RNA, 19 nt, Artificial Sequence
  Description of Artificial Sequence: Synthetic oligonucleotide
caaugcccgagauggcauc

SEQ ID NO: 615214 - RNA, 19 nt, Artificial Sequence
  Description of Artificial Sequence: Synthetic oligonucleotide
acgugcucuaugucauagu

SEQ ID NO: 615215 - RNA, 19 nt, Artificial Sequence
  Description of Artificial Sequence: Synthetic oligonucleotide
agucauggacagagccucg

SEQ ID NO: 615216 - RNA, 19 nt, Artificial Sequence
  Description of Artificial Sequence: Synthetic oligonucleotide
acccuagugagggucuucu

SEQ ID NO: 615217 - RNA, 19 nt, Artificial Sequence
  Description of Artificial Sequence: Synthetic oligonucleotide
cuucaauuggcuugcccgu

SEQ ID NO: 615218 - RNA, 19 nt, Artificial Sequence
  Description of Artificial Sequence: Synthetic oligonucleotide
cuacggugugugaugaugu

SEQ ID NO: 615219 - RNA, 19 nt, Artificial Sequence
  Description of Artificial Sequence: Synthetic oligonucleotide
gcaaaauauuccgggguac

SEQ ID NO: 615220 - RNA, 19 nt, Artificial Sequence
  Description of Artificial Sequence: Synthetic oligonucleotide
ucaggguguugucgcgagu

SEQ ID NO: 615221 - RNA, 19 nt, Artificial Sequence
  Description of Artificial Sequence: Synthetic oligonucleotide
guacugcggaugcacuuca

SEQ ID NO: 615222 - RNA, 19 nt, Artificial Sequence
  Description of Artificial Sequence: Synthetic oligonucleotide
ucgcgaguccccaggcccu

SEQ ID NO: 615223 - RNA, 19 nt, Artificial Sequence
  Description of Artificial Sequence: Synthetic oligonucleotide
ugcacaggaccgucaugaa

SEQ ID NO: 615224 - RNA, 19 nt, Artificial Sequence
  Description of Artificial Sequence: Synthetic oligonucleotide
ggcuucaauuggcuugccc

SEQ ID NO: 615225 - RNA, 19 nt, Artificial Sequence
  Description of Artificial Sequence: Synthetic oligonucleotide
gcacuaaguucccacaucu

SEQ ID NO: 615226 - RNA, 19 nt, Artificial Sequence
  Description of Artificial Sequence: Synthetic oligonucleotide
cugaacgauggccacaaau

SEQ ID NO: 615227 - RNA, 19 nt, Artificial Sequence
  Description of Artificial Sequence: Synthetic oligonucleotide
  modified_base (5)..(5): a, c, u, g, unknown or other
ugcuncgggaggugaucaa

SEQ ID NO: 615228 - RNA, 19 nt, Artificial Sequence
  Description of Artificial Sequence: Synthetic oligonucleotide
ucucacuccgggagaucau

SEQ ID NO: 615229 - RNA, 19 nt, Artificial Sequence
  Description of Artificial Sequence: Synthetic oligonucleotide
agcgagucuccaaggaagu

SEQ ID NO: 615230 - RNA, 19 nt, Artificial Sequence
  Description of Artificial Sequence: Synthetic oligonucleotide
gcccguggucuucagauac

SEQ ID NO: 615231 - RNA, 19 nt, Artificial Sequence
  Description of Artificial Sequence: Synthetic oligonucleotide
cuagugagggucuucucau

SEQ ID NO: 615232 - RNA, 19 nt, Artificial Sequence
  Description of Artificial Sequence: Synthetic oligonucleotide
aucuccgacuucaggucag

SEQ ID NO: 615233 - RNA, 19 nt, Artificial Sequence
  Description of Artificial Sequence: Synthetic oligonucleotide
ccucgauggcuagagagag

SEQ ID NO: 615234 - RNA, 19 nt, Artificial Sequence
  Description of Artificial Sequence: Synthetic oligonucleotide
acucugaacgauggccaca

SEQ ID NO: 615235 - RNA, 19 nt, Artificial Sequence
  Description of Artificial Sequence: Synthetic oligonucleotide
acaccaaccggaggugcug

SEQ ID NO: 615236 - RNA, 19 nt, Artificial Sequence
  Description of Artificial Sequence: Synthetic oligonucleotide
gagccucgauacauggcac

SEQ ID NO: 615237 - RNA, 19 nt, Artificial Sequence
  Description of Artificial Sequence: Synthetic oligonucleotide
ugcugcgguuucccaaaau

SEQ ID NO: 615238 - RNA, 19 nt, Artificial Sequence
  Description of Artificial Sequence: Synthetic oligonucleotide
ucgggccacugcacuaagu

SEQ ID NO: 615239 - RNA, 19 nt, Artificial Sequence
  Description of Artificial Sequence: Synthetic oligonucleotide
gcgguuucccaaaauauaa

SEQ ID NO: 615240 - RNA, 19 nt, Artificial Sequence
  Description of Artificial Sequence: Synthetic oligonucleotide
cucacuccgggagaucauc

SEQ ID NO: 615241 - RNA, 19 nt, Artificial Sequence
  Description of Artificial Sequence: Synthetic oligonucleotide
  modified_base (18)..(18): a, c, u, g, unknown or other
ggcaucgcaauaggcaanc

SEQ ID NO: 615242 - RNA, 19 nt, Artificial Sequence
  Description of Artificial Sequence: Synthetic oligonucleotide
gguguugucgcgagucccc

SEQ ID NO: 615243 - RNA, 19 nt, Artificial Sequence
  Description of Artificial Sequence: Synthetic oligonucleotide
gcugcgguuucccaaaaua

SEQ ID NO: 615244 - RNA, 19 nt, Artificial Sequence
  Description of Artificial Sequence: Synthetic oligonucleotide
ggcguugcuacggugugug

SEQ ID NO: 615245 - RNA, 19 nt, Artificial Sequence
  Description of Artificial Sequence: Synthetic oligonucleotide
ggaagaucucccgaauguc

SEQ ID NO: 615246 - RNA, 19 nt, Artificial Sequence
  Description of Artificial Sequence: Synthetic oligonucleotide
agcuacgggugcacaggac

SEQ ID NO: 615247 - RNA, 19 nt, Artificial Sequence
  Description of Artificial Sequence: Synthetic oligonucleotide
caaugaauucccuccgaau

SEQ ID NO: 615248 - RNA, 19 nt, Artificial Sequence
  Description of Artificial Sequence: Synthetic oligonucleotide
aucacccuagugagggucu

SEQ ID NO: 615249 - RNA, 19 nt, Artificial Sequence
  Description of Artificial Sequence: Synthetic oligonucleotide
acgggugcacaggaccguc

SEQ ID NO: 615250 - RNA, 19 nt, Artificial Sequence
  Description of Artificial Sequence: Synthetic oligonucleotide
cuggaacaauggcuugguc

SEQ ID NO: 615251 - RNA, 19 nt, Artificial Sequence
  Description of Artificial Sequence: Synthetic oligonucleotide
gccauagagggacuuguaa

SEQ ID NO: 615252 - RNA, 19 nt, Artificial Sequence
  Description of Artificial Sequence: Synthetic oligonucleotide
gagggauaacagaagggau

SEQ ID NO: 615253 - RNA, 19 nt, Artificial Sequence
  Description of Artificial Sequence: Synthetic oligonucleotide
cucugaacgauggccacaa

SEQ ID NO: 615254 - RNA, 19 nt, Artificial Sequence
  Description of Artificial Sequence: Synthetic oligonucleotide
gcuccccucggauacuggc

SEQ ID NO: 615255 - RNA, 19 nt, Artificial Sequence
  Description of Artificial Sequence: Synthetic oligonucleotide
cugcgguuucccaaaauau

SEQ ID NO: 615256 - RNA, 19 nt, Artificial Sequence
  Description of Artificial Sequence: Synthetic oligonucleotide
gguacugcggaugcacuuc

SEQ ID NO: 615257 - RNA, 19 nt, Artificial Sequence
  Description of Artificial Sequence: Synthetic oligonucleotide
auuccgggguacugcggau

SEQ ID NO: 615258 - RNA, 19 nt, Artificial Sequence
  Description of Artificial Sequence: Synthetic oligonucleotide
uacgggugcacaggaccgu

SEQ ID NO: 615259 - RNA, 19 nt, Artificial Sequence
  Description of Artificial Sequence: Synthetic oligonucleotide
gaccgucaugaagcgaguc

SEQ ID NO: 615260 - RNA, 19 nt, Artificial Sequence
  Description of Artificial Sequence: Synthetic oligonucleotide
cuccgacuucaggucagcc

SEQ ID NO: 615261 - RNA, 19 nt, Artificial Sequence
  Description of Artificial Sequence: Synthetic oligonucleotide
ggggugaaugugauauaug

SEQ ID NO: 615262 - RNA, 19 nt, Artificial Sequence
  Description of Artificial Sequence: Synthetic oligonucleotide
gcuuagcaucguaaugggc

SEQ ID NO: 615263 - RNA, 19 nt, Artificial Sequence
  Description of Artificial Sequence: Synthetic oligonucleotide
  modified_base (6)..(6): a, c, u, g, unknown or other
ggcaancggccucaucaga

SEQ ID NO: 615264 - RNA, 19 nt, Artificial Sequence
  Description of Artificial Sequence: Synthetic oligonucleotide
gguccggaagaucucccga

SEQ ID NO: 615265 - RNA, 19 nt, Artificial Sequence
  Description of Artificial Sequence: Synthetic oligonucleotide
cuaugucauaguuggucau

SEQ ID NO: 615266 - RNA, 19 nt, Artificial Sequence
  Description of Artificial Sequence: Synthetic oligonucleotide
gacucgggccacugcacua

SEQ ID NO: 615267 - RNA, 19 nt, Artificial Sequence
  Description of Artificial Sequence: Synthetic oligonucleotide
ugcccguggucuucagaua

SEQ ID NO: 615268 - RNA, 19 nt, Artificial Sequence
  Description of Artificial Sequence: Synthetic oligonucleotide
cccuccgaauguugaacag

SEQ ID NO: 615269 - RNA, 19 nt, Artificial Sequence
  Description of Artificial Sequence: Synthetic oligonucleotide
ggguguugucgcgaguccc

SEQ ID NO: 615270 - RNA, 19 nt, Artificial Sequence
  Description of Artificial Sequence: Synthetic oligonucleotide
cucauacuucaaguccgca

SEQ ID NO: 615271 - RNA, 19 nt, Artificial Sequence
  Description of Artificial Sequence: Synthetic oligonucleotide
acucgggccacugcacuaa

SEQ ID NO: 615272 - RNA, 19 nt, Artificial Sequence
  Description of Artificial Sequence: Synthetic oligonucleotide
ccgucaugaagcgagucuc

SEQ ID NO: 615273 - RNA, 19 nt, Artificial Sequence
  Description of Artificial Sequence: Synthetic oligonucleotide
gugauauauggcugugguu

SEQ ID NO: 615274 - RNA, 19 nt, Artificial Sequence
  Description of Artificial Sequence: Synthetic oligonucleotide
ugcuacggugugugaugau

SEQ ID NO: 615275 - RNA, 19 nt, Artificial Sequence
  Description of Artificial Sequence: Synthetic oligonucleotide
ggaggcaucaugagcccca

SEQ ID NO: 615276 - RNA, 19 nt, Artificial Sequence
  Description of Artificial Sequence: Synthetic oligonucleotide
ccucgcuuacaacaucguc

SEQ ID NO: 615277 - RNA, 19 nt, Artificial Sequence
  Description of Artificial Sequence: Synthetic oligonucleotide
cagcugaaugacagucuaa

SEQ ID NO: 615278 - RNA, 19 nt, Artificial Sequence
  Description of Artificial Sequence: Synthetic oligonucleotide
guaaugggcuggaggcauc

SEQ ID NO: 615279 - RNA, 19 nt, Artificial Sequence
  Description of Artificial Sequence: Synthetic oligonucleotide
ucagcucgacucgggccac

SEQ ID NO: 615280 - RNA, 19 nt, Artificial Sequence
  Description of Artificial Sequence: Synthetic oligonucleotide
ugccuucguacagguccug

SEQ ID NO: 615281 - RNA, 19 nt, Artificial Sequence
  Description of Artificial Sequence: Synthetic oligonucleotide
gggcccucgauggcuagag

SEQ ID NO: 615282 - RNA, 19 nt, Artificial Sequence
  Description of Artificial Sequence: Synthetic oligonucleotide
  modified_base (4)..(4): a, c, u, g, unknown or other
caancggccucaucagauu

SEQ ID NO: 615283 - RNA, 19 nt, Artificial Sequence
  Description of Artificial Sequence: Synthetic oligonucleotide
guccgaguagccaggauuu

SEQ ID NO: 615284 - RNA, 19 nt, Artificial Sequence
  Description of Artificial Sequence: Synthetic oligonucleotide
cugcacuaaguucccacau

SEQ ID NO: 615285 - RNA, 19 nt, Artificial Sequence
  Description of Artificial Sequence: Synthetic oligonucleotide
ccagcugaaugacagucua

SEQ ID NO: 615286 - RNA, 19 nt, Artificial Sequence
  Description of Artificial Sequence: Synthetic oligonucleotide
guguugucgcgagucccca

SEQ ID NO: 615287 - RNA, 19 nt, Artificial Sequence
  Description of Artificial Sequence: Synthetic oligonucleotide
ccggccaaagugagauuug

SEQ ID NO: 615288 - RNA, 19 nt, Artificial Sequence
  Description of Artificial Sequence: Synthetic oligonucleotide
ccgcaaugagguccuugcc

SEQ ID NO: 615289 - RNA, 19 nt, Artificial Sequence
  Description of Artificial Sequence: Synthetic oligonucleotide
gccgcaucaucaucuccuc

SEQ ID NO: 615290 - RNA, 19 nt, Artificial Sequence
  Description of Artificial Sequence: Synthetic oligonucleotide
ggggauagcuacgggugca

SEQ ID NO: 615291 - RNA, 19 nt, Artificial Sequence
  Description of Artificial Sequence: Synthetic oligonucleotide
cccugucaacucauacuuc

SEQ ID NO: 615292 - RNA, 19 nt, Artificial Sequence
  Description of Artificial Sequence: Synthetic oligonucleotide
ucacccuagugagggucuu

SEQ ID NO: 615293 - RNA, 19 nt, Artificial Sequence
  Description of Artificial Sequence: Synthetic oligonucleotide
  modified_base (5)..(5): a, c, u, g, unknown or other
gcaancggccucaucagau

SEQ ID NO: 615294 - RNA, 19 nt, Artificial Sequence
  Description of Artificial Sequence: Synthetic oligonucleotide
cuucuucgcgauuccccgu

SEQ ID NO: 615295 - RNA, 19 nt, Artificial Sequence
  Description of Artificial Sequence: Synthetic oligonucleotide
cuaucucacuccgggagau

SEQ ID NO: 615296 - RNA, 19 nt, Artificial Sequence
  Description of Artificial Sequence: Synthetic oligonucleotide
ggacagagccucgauacau

SEQ ID NO: 615297 - RNA, 19 nt, Artificial Sequence
  Description of Artificial Sequence: Synthetic oligonucleotide
ggauagcuacgggugcaca

SEQ ID NO: 615298 - RNA, 19 nt, Artificial Sequence
  Description of Artificial Sequence: Synthetic oligonucleotide
cacccuagugagggucuuc

SEQ ID NO: 615299 - RNA, 19 nt, Artificial Sequence
  Description of Artificial Sequence: Synthetic oligonucleotide
ccuccgaauguugaacaga

SEQ ID NO: 615300 - RNA, 19 nt, Artificial Sequence
  Description of Artificial Sequence: Synthetic oligonucleotide
ccguggucuucagauacuc

SEQ ID NO: 615301 - RNA, 19 nt, Artificial Sequence
  Description of Artificial Sequence: Synthetic oligonucleotide
ccgacuucaggucagccau

SEQ ID NO: 615302 - RNA, 19 nt, Artificial Sequence
  Description of Artificial Sequence: Synthetic oligonucleotide
gcucgacucgggccacugc

SEQ ID NO: 615303 - RNA, 19 nt, Artificial Sequence
  Description of Artificial Sequence: Synthetic oligonucleotide
cgcgauuccccguggccag

SEQ ID NO: 615304 - RNA, 19 nt, Artificial Sequence
  Description of Artificial Sequence: Synthetic oligonucleotide
ggcuuggucaggucacggu

SEQ ID NO: 615305 - RNA, 19 nt, Artificial Sequence
  Description of Artificial Sequence: Synthetic oligonucleotide
ccggguucccuggaggcac

SEQ ID NO: 615306 - RNA, 19 nt, Artificial Sequence
  Description of Artificial Sequence: Synthetic oligonucleotide
caagaccaguagcucuagu

SEQ ID NO: 615307 - RNA, 19 nt, Artificial Sequence
  Description of Artificial Sequence: Synthetic oligonucleotide
gcaucaugagccccaggau

SEQ ID NO: 615308 - RNA, 19 nt, Artificial Sequence
  Description of Artificial Sequence: Synthetic oligonucleotide
gggagaucaucacccuagu

SEQ ID NO: 615309 - RNA, 19 nt, Artificial Sequence
  Description of Artificial Sequence: Synthetic oligonucleotide
cauuggcugcacacacggu

SEQ ID NO: 615310 - RNA, 19 nt, Artificial Sequence
  Description of Artificial Sequence: Synthetic oligonucleotide
cucggauacuggcuucaau

SEQ ID NO: 615311 - RNA, 19 nt, Artificial Sequence
  Description of Artificial Sequence: Synthetic oligonucleotide
ccuggacauccuguuggac

SEQ ID NO: 615312 - RNA, 19 nt, Artificial Sequence
  Description of Artificial Sequence: Synthetic oligonucleotide
caucuggguugaaaucauu

SEQ ID NO: 615313 - RNA, 19 nt, Artificial Sequence
  Description of Artificial Sequence: Synthetic oligonucleotide
ggauuucaauaagagccuu

SEQ ID NO: 615314 - RNA, 19 nt, Artificial Sequence
  Description of Artificial Sequence: Synthetic oligonucleotide
cgguuucccaaaauauaaa

SEQ ID NO: 615315 - RNA, 19 nt, Artificial Sequence
  Description of Artificial Sequence: Synthetic oligonucleotide
  modified_base (13)..(13): a, c, u, g, unknown or other
cgcaauaggcaancggccu

SEQ ID NO: 615316 - RNA, 19 nt, Artificial Sequence
  Description of Artificial Sequence: Synthetic oligonucleotide
cugggagugucagcuauuu

SEQ ID NO: 615317 - RNA, 19 nt, Artificial Sequence
  Description of Artificial Sequence: Synthetic oligonucleotide
cgggguacugcggaugcac

SEQ ID NO: 615318 - RNA, 19 nt, Artificial Sequence
  Description of Artificial Sequence: Synthetic oligonucleotide
cccuagugagggucuucuc

SEQ ID NO: 615319 - RNA, 19 nt, Artificial Sequence
  Description of Artificial Sequence: Synthetic oligonucleotide
  modified_base (4)..(4): a, c, u, g, unknown or other
gcuncgggaggugaucaau

SEQ ID NO: 615320 - RNA, 19 nt, Artificial Sequence
  Description of Artificial Sequence: Synthetic oligonucleotide
caucgucauucucccgggu

SEQ ID NO: 615321 - RNA, 19 nt, Artificial Sequence
  Description of Artificial Sequence: Synthetic oligonucleotide
cucugcggagauggggaua

SEQ ID NO: 615322 - RNA, 19 nt, Artificial Sequence
  Description of Artificial Sequence: Synthetic oligonucleotide
gguaccccucagcucgacu

SEQ ID NO: 615323 - RNA, 19 nt, Artificial Sequence
  Description of Artificial Sequence: Synthetic oligonucleotide
acgguaccccucagcucga

SEQ ID NO: 615324 - RNA, 19 nt, Artificial Sequence
  Description of Artificial Sequence: Synthetic oligonucleotide
cccagcugaaugacagucu

SEQ ID NO: 615325 - RNA, 19 nt, Artificial Sequence
  Description of Artificial Sequence: Synthetic oligonucleotide
cgugcucuaugucauaguu

SEQ ID NO: 615326 - RNA, 19 nt, Artificial Sequence
  Description of Artificial Sequence: Synthetic oligonucleotide
cagaagugucacccucaau

SEQ ID NO: 615327 - RNA, 19 nt, Artificial Sequence
  Description of Artificial Sequence: Synthetic oligonucleotide
ccccucggauacuggcuuc

SEQ ID NO: 615328 - RNA, 19 nt, Artificial Sequence
  Description of Artificial Sequence: Synthetic oligonucleotide
ggcccucgauggcuagaga

SEQ ID NO: 615329 - RNA, 19 nt, Artificial Sequence
  Description of Artificial Sequence: Synthetic oligonucleotide
caccaaccggaggugcugu

SEQ ID NO: 615330 - RNA, 19 nt, Artificial Sequence
  Description of Artificial Sequence: Synthetic oligonucleotide
gcguugcuacgguguguga

SEQ ID NO: 615331 - RNA, 19 nt, Artificial Sequence
  Description of Artificial Sequence: Synthetic oligonucleotide
ccauuaaaucccggccaaa

SEQ ID NO: 615332 - RNA, 19 nt, Artificial Sequence
  Description of Artificial Sequence: Synthetic oligonucleotide
cgauuccccguggccagag

SEQ ID NO: 615333 - RNA, 19 nt, Artificial Sequence
  Description of Artificial Sequence: Synthetic oligonucleotide
cccggccaaagugagauuu

SEQ ID NO: 615334 - RNA, 19 nt, Artificial Sequence
  Description of Artificial Sequence: Synthetic oligonucleotide
aguccgcaaugagguccuu

SEQ ID NO: 615335 - RNA, 19 nt, Artificial Sequence
  Description of Artificial Sequence: Synthetic oligonucleotide
ccgggagaucaucacccua

SEQ ID NO: 615336 - RNA, 19 nt, Artificial Sequence
  Description of Artificial Sequence: Synthetic oligonucleotide
ggaccgucaugaagcgagu

SEQ ID NO: 615337 - RNA, 19 nt, Artificial Sequence
  Description of Artificial Sequence: Synthetic oligonucleotide
cguaaugggcuggaggcau

SEQ ID NO: 615338 - RNA, 19 nt, Artificial Sequence
  Description of Artificial Sequence: Synthetic oligonucleotide
ggggcccucgauggcuaga

SEQ ID NO: 615339 - RNA, 19 nt, Artificial Sequence
  Description of Artificial Sequence: Synthetic oligonucleotide
cccguggucuucagauacu

SEQ ID NO: 615340 - RNA, 19 nt, Artificial Sequence
  Description of Artificial Sequence: Synthetic oligonucleotide
cguugcuacggugugugau

SEQ ID NO: 615341 - RNA, 19 nt, Artificial Sequence
  Description of Artificial Sequence: Synthetic oligonucleotide
gcgauuccccguggccaga

SEQ ID NO: 615342 - RNA, 19 nt, Artificial Sequence
  Description of Artificial Sequence: Synthetic oligonucleotide
caguuccgauccccuucau

SEQ ID NO: 615343 - RNA, 19 nt, Artificial Sequence
  Description of Artificial Sequence: Synthetic oligonucleotide
gggcguugcuacggugugu

SEQ ID NO: 615344 - RNA, 19 nt, Artificial Sequence
  Description of Artificial Sequence: Synthetic oligonucleotide
gcgagucuccaaggaaguu

SEQ ID NO: 615345 - RNA, 19 nt, Artificial Sequence
  Description of Artificial Sequence: Synthetic oligonucleotide
cgacucgggccacugcacu

SEQ ID NO: 615346 - RNA, 19 nt, Artificial Sequence
  Description of Artificial Sequence: Synthetic oligonucleotide
ccgggccuggucucgguuu

SEQ ID NO: 615347 - RNA, 19 nt, Artificial Sequence
  Description of Artificial Sequence: Synthetic oligonucleotide
ccgggguacugcggaugca

SEQ ID NO: 615348 - RNA, 19 nt, Artificial Sequence
  Description of Artificial Sequence: Synthetic oligonucleotide
cgguaccccucagcucgac

SEQ ID NO: 615349 - RNA, 19 nt, Artificial Sequence
  Description of Artificial Sequence: Synthetic oligonucleotide
  modified_base (1)..(1): a, c, u, g, unknown or other
ncggccucaucagauucac

SEQ ID NO: 615350 - RNA, 19 nt, Artificial Sequence
  Description of Artificial Sequence: Synthetic oligonucleotide
  modified_base (1)..(1): a, c, u, g, unknown or other
ncgggaggugaucaaucca

SEQ ID NO: 615351 - RNA, 19 nt, Artificial Sequence
  Description of Artificial Sequence: Synthetic oligonucleotide
auuaaauaggcuuauaccc

SEQ ID NO: 615352 - RNA, 19 nt, Artificial Sequence
  Description of Artificial Sequence: Synthetic oligonucleotide
uuuaguuuccuuuagguug

SEQ ID NO: 615353 - RNA, 19 nt, Artificial Sequence
  Description of Artificial Sequence: Synthetic oligonucleotide
aaaccguauaccuauuugg

SEQ ID NO: 615354 - RNA, 19 nt, Artificial Sequence
  Description of Artificial Sequence: Synthetic oligonucleotide
uguuaguuuacucaacacc

SEQ ID NO: 615355 - RNA, 19 nt, Artificial Sequence
  Description of Artificial Sequence: Synthetic oligonucleotide
uuaaauaggcuuauacccc

SEQ ID NO: 615356 - RNA, 19 nt, Artificial Sequence
  Description of Artificial Sequence: Synthetic oligonucleotide
auaguuuucacucagcgau

SEQ ID NO: 615357 - RNA, 19 nt, Artificial Sequence
  Description of Artificial Sequence: Synthetic oligonucleotide
uaucucauaaccauuugcu

SEQ ID NO: 615358 - RNA, 19 nt, Artificial Sequence
  Description of Artificial Sequence: Synthetic oligonucleotide
gacaugauucuacagguag

SEQ ID NO: 615359 - RNA, 19 nt, Artificial Sequence
  Description of Artificial Sequence: Synthetic oligonucleotide
uuucccuaaauuaucuugc

SEQ ID NO: 615360 - RNA, 19 nt, Artificial Sequence
  Description of Artificial Sequence: Synthetic oligonucleotide
uuacucaacaccauacuga

SEQ ID NO: 615361 - RNA, 19 nt, Artificial Sequence
  Description of Artificial Sequence: Synthetic oligonucleotide
uuaucucauaaccauuugc

SEQ ID NO: 615362 - RNA, 19 nt, Artificial Sequence
  Description of Artificial Sequence: Synthetic oligonucleotide
uguacuucuuugucuaccg

SEQ ID NO: 615363 - RNA, 19 nt, Artificial Sequence
  Description of Artificial Sequence: Synthetic oligonucleotide
ucuugcuaccuauagaccu

SEQ ID NO: 615364 - RNA, 19 nt, Artificial Sequence
  Description of Artificial Sequence: Synthetic oligonucleotide
uauccuuaucucauaacca

SEQ ID NO: 615365 - RNA, 19 nt, Artificial Sequence
  Description of Artificial Sequence: Synthetic oligonucleotide
uauacuccaaggaauggcu

SEQ ID NO: 615366 - RNA, 19 nt, Artificial Sequence
  Description of Artificial Sequence: Synthetic oligonucleotide
ggaaguuagagaaaagugg

SEQ ID NO: 615367 - RNA, 19 nt, Artificial Sequence
  Description of Artificial Sequence: Synthetic oligonucleotide
auagaccuugguugaaacc

SEQ ID NO: 615368 - RNA, 19 nt, Artificial Sequence
  Description of Artificial Sequence: Synthetic oligonucleotide
gagcgugaaguaaagaagg

SEQ ID NO: 615369 - RNA, 19 nt, Artificial Sequence
  Description of Artificial Sequence: Synthetic oligonucleotide
uucucgauuaaauaggcuu

SEQ ID NO: 615370 - RNA, 19 nt, Artificial Sequence
  Description of Artificial Sequence: Synthetic oligonucleotide
agugaacgcacauauccuc

SEQ ID NO: 615371 - RNA, 19 nt, Artificial Sequence
  Description of Artificial Sequence: Synthetic oligonucleotide
aacgcacauauccucacug

SEQ ID NO: 615372 - RNA, 19 nt, Artificial Sequence
  Description of Artificial Sequence: Synthetic oligonucleotide
aguuuacucaacaccauac

SEQ ID NO: 615373 - RNA, 19 nt, Artificial Sequence
  Description of Artificial Sequence: Synthetic oligonucleotide
auugaugagcagugaaggg

SEQ ID NO: 615374 - RNA, 19 nt, Artificial Sequence
  Description of Artificial Sequence: Synthetic oligonucleotide
gaaaccguauaccuauuug

SEQ ID NO: 615375 - RNA, 19 nt, Artificial Sequence
  Description of Artificial Sequence: Synthetic oligonucleotide
uaaagagcgugaaguaaag

SEQ ID NO: 615376 - RNA, 19 nt, Artificial Sequence
  Description of Artificial Sequence: Synthetic oligonucleotide
uaaccuaccaaacacccua

SEQ ID NO: 615377 - RNA, 19 nt, Artificial Sequence
  Description of Artificial Sequence: Synthetic oligonucleotide
auucggucaaguguagugc

SEQ ID NO: 615378 - RNA, 19 nt, Artificial Sequence
  Description of Artificial Sequence: Synthetic oligonucleotide
uggauuaggaauguuggca

SEQ ID NO: 615379 - RNA, 19 nt, Artificial Sequence
  Description of Artificial Sequence: Synthetic oligonucleotide
uguugcuauaggcacgagc

SEQ ID NO: 615380 - RNA, 19 nt, Artificial Sequence
  Description of Artificial Sequence: Synthetic oligonucleotide
uuaucuugcuaccuauaga

SEQ ID NO: 615381 - RNA, 19 nt, Artificial Sequence
  Description of Artificial Sequence: Synthetic oligonucleotide
ucggcugacagaacggcgg

SEQ ID NO: 615382 - RNA, 19 nt, Artificial Sequence
  Description of Artificial Sequence: Synthetic oligonucleotide
cuugguugaaaccguauac

SEQ ID NO: 615383 - RNA, 19 nt, Artificial Sequence
  Description of Artificial Sequence: Synthetic oligonucleotide
aacacccuagcuuacccca

SEQ ID NO: 615384 - RNA, 19 nt, Artificial Sequence
  Description of Artificial Sequence: Synthetic oligonucleotide
acaaaauguugacuagcuc

SEQ ID NO: 615385 - RNA, 19 nt, Artificial Sequence
  Description of Artificial Sequence: Synthetic oligonucleotide
uucggucaaguguagugcg

SEQ ID NO: 615386 - RNA, 19 nt, Artificial Sequence
  Description of Artificial Sequence: Synthetic oligonucleotide
ugcucaauggggaagcuuc

SEQ ID NO: 615387 - RNA, 19 nt, Artificial Sequence
  Description of Artificial Sequence: Synthetic oligonucleotide
uccuuuagguuguaaguca

SEQ ID NO: 615388 - RNA, 19 nt, Artificial Sequence
  Description of Artificial Sequence: Synthetic oligonucleotide
cuucggacaaugcuguugc

SEQ ID NO: 615389 - RNA, 19 nt, Artificial Sequence
  Description of Artificial Sequence: Synthetic oligonucleotide
guugcuauaggcacgagca

SEQ ID NO: 615390 - RNA, 19 nt, Artificial Sequence
  Description of Artificial Sequence: Synthetic oligonucleotide
ugcacguuguucuuggcac

SEQ ID NO: 615391 - RNA, 19 nt, Artificial Sequence
  Description of Artificial Sequence: Synthetic oligonucleotide
uugguugaaaccguauacc

SEQ ID NO: 615392 - RNA, 19 nt, Artificial Sequence
  Description of Artificial Sequence: Synthetic oligonucleotide
caugauucuacagguaggc

SEQ ID NO: 615393 - RNA, 19 nt, Artificial Sequence
  Description of Artificial Sequence: Synthetic oligonucleotide
ucucgauuaaauaggcuua

SEQ ID NO: 615394 - RNA, 19 nt, Artificial Sequence
  Description of Artificial Sequence: Synthetic oligonucleotide
agcacugacaugauucuac

SEQ ID NO: 615395 - RNA, 19 nt, Artificial Sequence
  Description of Artificial Sequence: Synthetic oligonucleotide
agauacuucgcacgggaug

SEQ ID NO: 615396 - RNA, 19 nt, Artificial Sequence
  Description of Artificial Sequence: Synthetic oligonucleotide
gaagauacuucgcacggga

SEQ ID NO: 615397 - RNA, 19 nt, Artificial Sequence
  Description of Artificial Sequence: Synthetic oligonucleotide
uauagaccuugguugaaac

SEQ ID NO: 615398 - RNA, 19 nt, Artificial Sequence
  Description of Artificial Sequence: Synthetic oligonucleotide
acgcacauauccucacugc

SEQ ID NO: 615399 - RNA, 19 nt, Artificial Sequence
  Description of Artificial Sequence: Synthetic oligonucleotide
cuggcgaaaggacaugagg

SEQ ID NO: 615400 - RNA, 19 nt, Artificial Sequence
  Description of Artificial Sequence: Synthetic oligonucleotide
cauucggucaaguguagug

SEQ ID NO: 615401 - RNA, 19 nt, Artificial Sequence
  Description of Artificial Sequence: Synthetic oligonucleotide
ucagcgaucguguccccgg

SEQ ID NO: 615402 - RNA, 19 nt, Artificial Sequence
  Description of Artificial Sequence: Synthetic oligonucleotide
cccuaaauuaucuugcuac

SEQ ID NO: 615403 - RNA, 19 nt, Artificial Sequence
  Description of Artificial Sequence: Synthetic oligonucleotide
acuagcucauguuaguuua

SEQ ID NO: 615404 - RNA, 19 nt, Artificial Sequence
  Description of Artificial Sequence: Synthetic oligonucleotide
auccuuaucucauaaccau

SEQ ID NO: 615405 - RNA, 19 nt, Artificial Sequence
  Description of Artificial Sequence: Synthetic oligonucleotide
aucauauugaaaaugcauu

SEQ ID NO: 615406 - RNA, 19 nt, Artificial Sequence
  Description of Artificial Sequence: Synthetic oligonucleotide
uuugucuaccguugcuugc

SEQ ID NO: 615407 - RNA, 19 nt, Artificial Sequence
  Description of Artificial Sequence: Synthetic oligonucleotide
auauacuggguccgaaacu

SEQ ID NO: 615408 - RNA, 19 nt, Artificial Sequence
  Description of Artificial Sequence: Synthetic oligonucleotide
guagcgcugacccaauagc

SEQ ID NO: 615409 - RNA, 19 nt, Artificial Sequence
  Description of Artificial Sequence: Synthetic oligonucleotide
acuacuagucgcuuggcuu

SEQ ID NO: 615410 - RNA, 19 nt, Artificial Sequence
  Description of Artificial Sequence: Synthetic oligonucleotide
uagacuguccacucugcca

SEQ ID NO: 615411 - RNA, 19 nt, Artificial Sequence
  Description of Artificial Sequence: Synthetic oligonucleotide
ugucugguagccuuacagu

SEQ ID NO: 615412 - RNA, 19 nt, Artificial Sequence
  Description of Artificial Sequence: Synthetic oligonucleotide
cuuugucuaccguugcuug

SEQ ID NO: 615413 - RNA, 19 nt, Artificial Sequence
  Description of Artificial Sequence: Synthetic oligonucleotide
aaccguauaccuauuugga

SEQ ID NO: 615414 - RNA, 19 nt, Artificial Sequence
  Description of Artificial Sequence: Synthetic oligonucleotide
caaacacccuagcuuaccc

SEQ ID NO: 615415 - RNA, 19 nt, Artificial Sequence
  Description of Artificial Sequence: Synthetic oligonucleotide
ugucccuaaccuaccaaac

SEQ ID NO: 615416 - RNA, 19 nt, Artificial Sequence
  Description of Artificial Sequence: Synthetic oligonucleotide
aaagugguauuucccuaaa

SEQ ID NO: 615417 - RNA, 19 nt, Artificial Sequence
  Description of Artificial Sequence: Synthetic oligonucleotide
accgauguggguaccacac

SEQ ID NO: 615418 - RNA, 19 nt, Artificial Sequence
  Description of Artificial Sequence: Synthetic oligonucleotide
ucggucaaguguagugcgg

SEQ ID NO: 615419 - RNA, 19 nt, Artificial Sequence
  Description of Artificial Sequence: Synthetic oligonucleotide
accuauagaccuugguuga

SEQ ID NO: 615420 - RNA, 19 nt, Artificial Sequence
  Description of Artificial Sequence: Synthetic oligonucleotide
acugccgacgcagugcugg

SEQ ID NO: 615421 - RNA, 19 nt, Artificial Sequence
  Description of Artificial Sequence: Synthetic oligonucleotide
cucauguuaguuuacucaa

SEQ ID NO: 615422 - RNA, 19 nt, Artificial Sequence
  Description of Artificial Sequence: Synthetic oligonucleotide
cuuaucucauaaccauuug

SEQ ID NO: 615423 - RNA, 19 nt, Artificial Sequence
  Description of Artificial Sequence: Synthetic oligonucleotide
accuaccaaacacccuagc

SEQ ID NO: 615424 - RNA, 19 nt, Artificial Sequence
  Description of Artificial Sequence: Synthetic oligonucleotide
acaugauucuacagguagg

SEQ ID NO: 615425 - RNA, 19 nt, Artificial Sequence
  Description of Artificial Sequence: Synthetic oligonucleotide
ggauuaggaauguuggcac

SEQ ID NO: 615426 - RNA, 19 nt, Artificial Sequence
  Description of Artificial Sequence: Synthetic oligonucleotide
ugcucucgucuccagacga

SEQ ID NO: 615427 - RNA, 19 nt, Artificial Sequence
  Description of Artificial Sequence: Synthetic oligonucleotide
uagcgcugacccaauagcu

SEQ ID NO: 615428 - RNA, 19 nt, Artificial Sequence
  Description of Artificial Sequence: Synthetic oligonucleotide
gacccaauagcuggccucg

SEQ ID NO: 615429 - RNA, 19 nt, Artificial Sequence
  Description of Artificial Sequence: Synthetic oligonucleotide
ccuaaccuaccaaacaccc

SEQ ID NO: 615430 - RNA, 19 nt, Artificial Sequence
  Description of Artificial Sequence: Synthetic oligonucleotide
ucucgucuccagacgauga

SEQ ID NO: 615431 - RNA, 19 nt, Artificial Sequence
  Description of Artificial Sequence: Synthetic oligonucleotide
uugucuaccguugcuugcc

SEQ ID NO: 615432 - RNA, 19 nt, Artificial Sequence
  Description of Artificial Sequence: Synthetic oligonucleotide
ugcuaagacuugcugccac

SEQ ID NO: 615433 - RNA, 19 nt, Artificial Sequence
  Description of Artificial Sequence: Synthetic oligonucleotide
uucccuaaauuaucuugcu

SEQ ID NO: 615434 - RNA, 19 nt, Artificial Sequence
  Description of Artificial Sequence: Synthetic oligonucleotide
aagcccuacuuuugcucuc

SEQ ID NO: 615435 - RNA, 19 nt, Artificial Sequence
  Description of Artificial Sequence: Synthetic oligonucleotide
gguucuguagcacgauagg

SEQ ID NO: 615436 - RNA, 19 nt, Artificial Sequence
  Description of Artificial Sequence: Synthetic oligonucleotide
aaagagcgugaaguaaaga

SEQ ID NO: 615437 - RNA, 19 nt, Artificial Sequence
  Description of Artificial Sequence: Synthetic oligonucleotide
uaggcguuguaccucgcgu

SEQ ID NO: 615438 - RNA, 19 nt, Artificial Sequence
  Description of Artificial Sequence: Synthetic oligonucleotide
auaccuauuuggaacagaa

SEQ ID NO: 615439 - RNA, 19 nt, Artificial Sequence
  Description of Artificial Sequence: Synthetic oligonucleotide
guggaaacguuggugugcg

SEQ ID NO: 615440 - RNA, 19 nt, Artificial Sequence
  Description of Artificial Sequence: Synthetic oligonucleotide
agaagauacuucgcacggg

SEQ ID NO: 615441 - RNA, 19 nt, Artificial Sequence
  Description of Artificial Sequence: Synthetic oligonucleotide
ugaacgcacauauccucac

SEQ ID NO: 615442 - RNA, 19 nt, Artificial Sequence
  Description of Artificial Sequence: Synthetic oligonucleotide
cacucagcgaucguguccc

SEQ ID NO: 615443 - RNA, 19 nt, Artificial Sequence
  Description of Artificial Sequence: Synthetic oligonucleotide
uggcaaagcccuacuuuug

SEQ ID NO: 615444 - RNA, 19 nt, Artificial Sequence
  Description of Artificial Sequence: Synthetic oligonucleotide
gauucuacagguaggcaaa

SEQ ID NO: 615445 - RNA, 19 nt, Artificial Sequence
  Description of Artificial Sequence: Synthetic oligonucleotide
cauaguuuucacucagcga

SEQ ID NO: 615446 - RNA, 19 nt, Artificial Sequence
  Description of Artificial Sequence: Synthetic oligonucleotide
uguagcacgauagggucaa

SEQ ID NO: 615447 - RNA, 19 nt, Artificial Sequence
  Description of Artificial Sequence: Synthetic oligonucleotide
cauccuagaaccagacuca

SEQ ID NO: 615448 - RNA, 19 nt, Artificial Sequence
  Description of Artificial Sequence: Synthetic oligonucleotide
aggcuuauaccccaaccaa

SEQ ID NO: 615449 - RNA, 19 nt, Artificial Sequence
  Description of Artificial Sequence: Synthetic oligonucleotide
ccguauaccuauuuggaac

SEQ ID NO: 615450 - RNA, 19 nt, Artificial Sequence
  Description of Artificial Sequence: Synthetic oligonucleotide
uuguaccucgcguccacug

SEQ ID NO: 615451 - RNA, 19 nt, Artificial Sequence
  Description of Artificial Sequence: Synthetic oligonucleotide
guaggcguuguaccucgcg

SEQ ID NO: 615452 - RNA, 19 nt, Artificial Sequence
  Description of Artificial Sequence: Synthetic oligonucleotide
accguauaccuauuuggaa

SEQ ID NO: 615453 - RNA, 19 nt, Artificial Sequence
  Description of Artificial Sequence: Synthetic oligonucleotide
ucccuaaauuaucuugcua

SEQ ID NO: 615454 - RNA, 19 nt, Artificial Sequence
  Description of Artificial Sequence: Synthetic oligonucleotide
uccuuaucucauaaccauu

SEQ ID NO: 615455 - RNA, 19 nt, Artificial Sequence
  Description of Artificial Sequence: Synthetic oligonucleotide
ugcuaccuauagaccuugg

SEQ ID NO: 615456 - RNA, 19 nt, Artificial Sequence
  Description of Artificial Sequence: Synthetic oligonucleotide
uuggcacuuccccaccaca

SEQ ID NO: 615457 - RNA, 19 nt, Artificial Sequence
  Description of Artificial Sequence: Synthetic oligonucleotide
agggucccgugcuucacgg

SEQ ID NO: 615458 - RNA, 19 nt, Artificial Sequence
  Description of Artificial Sequence: Synthetic oligonucleotide
uucgcacgggaugugagcu

SEQ ID NO: 615459 - RNA, 19 nt, Artificial Sequence
  Description of Artificial Sequence: Synthetic oligonucleotide
uaguuuucacucagcgauc

SEQ ID NO: 615460 - RNA, 19 nt, Artificial Sequence
  Description of Artificial Sequence: Synthetic oligonucleotide
gauacuucgcacgggaugu

SEQ ID NO: 615461 - RNA, 19 nt, Artificial Sequence
  Description of Artificial Sequence: Synthetic oligonucleotide
cuauccuauuauauacaga

SEQ ID NO: 615462 - RNA, 19 nt, Artificial Sequence
  Description of Artificial Sequence: Synthetic oligonucleotide
cuucgcacgggaugugagc

SEQ ID NO: 615463 - RNA, 19 nt, Artificial Sequence
  Description of Artificial Sequence: Synthetic oligonucleotide
cauggcccgaccuugccuc

SEQ ID NO: 615464 - RNA, 19 nt, Artificial Sequence
  Description of Artificial Sequence: Synthetic oligonucleotide
agcgaucguguccccggcc

SEQ ID NO: 615465 - RNA, 19 nt, Artificial Sequence
  Description of Artificial Sequence: Synthetic oligonucleotide
aaccuaccaaacacccuag

SEQ ID NO: 615466 - RNA, 19 nt, Artificial Sequence
  Description of Artificial Sequence: Synthetic oligonucleotide
aauuaucuugcuaccuaua

SEQ ID NO: 615467 - RNA, 19 nt, Artificial Sequence
  Description of Artificial Sequence: Synthetic oligonucleotide
cuagcucauguuaguuuac

SEQ ID NO: 615468 - RNA, 19 nt, Artificial Sequence
  Description of Artificial Sequence: Synthetic oligonucleotide
gacaugcacguuguucuug

SEQ ID NO: 615469 - RNA, 19 nt, Artificial Sequence
  Description of Artificial Sequence: Synthetic oligonucleotide
guccgaaacuguggaaacg

SEQ ID NO: 615470 - RNA, 19 nt, Artificial Sequence
  Description of Artificial Sequence: Synthetic oligonucleotide
guuuacucaacaccauacu

SEQ ID NO: 615471 - RNA, 19 nt, Artificial Sequence
  Description of Artificial Sequence: Synthetic oligonucleotide
ggcgaauauacuggguccg

SEQ ID NO: 615472 - RNA, 19 nt, Artificial Sequence
  Description of Artificial Sequence: Synthetic oligonucleotide
uauugacagcagccuuggc

SEQ ID NO: 615473 - RNA, 19 nt, Artificial Sequence
  Description of Artificial Sequence: Synthetic oligonucleotide
uggguguaugugugguucu

SEQ ID NO: 615474 - RNA, 19 nt, Artificial Sequence
  Description of Artificial Sequence: Synthetic oligonucleotide
ccaauagcuggccucguag

SEQ ID NO: 615475 - RNA, 19 nt, Artificial Sequence
  Description of Artificial Sequence: Synthetic oligonucleotide
uucuacagguaggcaaacu

SEQ ID NO: 615476 - RNA, 19 nt, Artificial Sequence
  Description of Artificial Sequence: Synthetic oligonucleotide
gaccgggcggagaugcugg

SEQ ID NO: 615477 - RNA, 19 nt, Artificial Sequence
  Description of Artificial Sequence: Synthetic oligonucleotide
ugucuaccguugcuugccu

SEQ ID NO: 615478 - RNA, 19 nt, Artificial Sequence
  Description of Artificial Sequence: Synthetic oligonucleotide
agauuagcauuuacugggu

SEQ ID NO: 615479 - RNA, 19 nt, Artificial Sequence
  Description of Artificial Sequence: Synthetic oligonucleotide
cacgguucauuugugccug

SEQ ID NO: 615480 - RNA, 19 nt, Artificial Sequence
  Description of Artificial Sequence: Synthetic oligonucleotide
ucggacaaugcuguugcua

SEQ ID NO: 615481 - RNA, 19 nt, Artificial Sequence
  Description of Artificial Sequence: Synthetic oligonucleotide
aaauaggcuuauaccccaa

SEQ ID NO: 615482 - RNA, 19 nt, Artificial Sequence
  Description of Artificial Sequence: Synthetic oligonucleotide
gguccgaaacuguggaaac

SEQ ID NO: 615483 - RNA, 19 nt, Artificial Sequence
  Description of Artificial Sequence: Synthetic oligonucleotide
augauucuacagguaggca

SEQ ID NO: 615484 - RNA, 19 nt, Artificial Sequence
  Description of Artificial Sequence: Synthetic oligonucleotide
uggguaccacacugccggg

SEQ ID NO: 615485 - RNA, 19 nt, Artificial Sequence
  Description of Artificial Sequence: Synthetic oligonucleotide
uacuucgcacgggauguga

SEQ ID NO: 615486 - RNA, 19 nt, Artificial Sequence
  Description of Artificial Sequence: Synthetic oligonucleotide
cuaccuauagaccuugguu

SEQ ID NO: 615487 - RNA, 19 nt, Artificial Sequence
  Description of Artificial Sequence: Synthetic oligonucleotide
aagauacuucgcacgggau

SEQ ID NO: 615488 - RNA, 19 nt, Artificial Sequence
  Description of Artificial Sequence: Synthetic oligonucleotide
uggaaacguuggugugcgg

SEQ ID NO: 615489 - RNA, 19 nt, Artificial Sequence
  Description of Artificial Sequence: Synthetic oligonucleotide
gugaacgcacauauccuca

SEQ ID NO: 615490 - RNA, 19 nt, Artificial Sequence
  Description of Artificial Sequence: Synthetic oligonucleotide
cuaccaaacacccuagcuu

SEQ ID NO: 615491 - RNA, 19 nt, Artificial Sequence
  Description of Artificial Sequence: Synthetic oligonucleotide
gccucguagccucagguac

SEQ ID NO: 615492 - RNA, 19 nt, Artificial Sequence
  Description of Artificial Sequence: Synthetic oligonucleotide
acuucgcacgggaugugag

SEQ ID NO: 615493 - RNA, 19 nt, Artificial Sequence
  Description of Artificial Sequence: Synthetic oligonucleotide
uacuagucgcuuggcuuug

SEQ ID NO: 615494 - RNA, 19 nt, Artificial Sequence
  Description of Artificial Sequence: Synthetic oligonucleotide
cacccuagcuuaccccacc

SEQ ID NO: 615495 - RNA, 19 nt, Artificial Sequence
  Description of Artificial Sequence: Synthetic oligonucleotide
acucagcgaucgugucccc

SEQ ID NO: 615496 - RNA, 19 nt, Artificial Sequence
  Description of Artificial Sequence: Synthetic oligonucleotide
gacuagcucauguuaguuu

SEQ ID NO: 615497 - RNA, 19 nt, Artificial Sequence
  Description of Artificial Sequence: Synthetic oligonucleotide
ucgauuaaauaggcuuaua

SEQ ID NO: 615498 - RNA, 19 nt, Artificial Sequence
  Description of Artificial Sequence: Synthetic oligonucleotide
ugacaugcacguuguucuu

SEQ ID NO: 615499 - RNA, 19 nt, Artificial Sequence
  Description of Artificial Sequence: Synthetic oligonucleotide
acccuagcuuaccccaccu

SEQ ID NO: 615500 - RNA, 19 nt, Artificial Sequence
  Description of Artificial Sequence: Synthetic oligonucleotide
cucagcgaucguguccccg

SEQ ID NO: 615501 - RNA, 19 nt, Artificial Sequence
  Description of Artificial Sequence: Synthetic oligonucleotide
auaccccaaccaaucuguc

SEQ ID NO: 615502 - RNA, 19 nt, Artificial Sequence
  Description of Artificial Sequence: Synthetic oligonucleotide
cugccaccgauguggguac

SEQ ID NO: 615503 - RNA, 19 nt, Artificial Sequence
  Description of Artificial Sequence: Synthetic oligonucleotide
cucucgucuccagacgaug

SEQ ID NO: 615504 - RNA, 19 nt, Artificial Sequence
  Description of Artificial Sequence: Synthetic oligonucleotide
ccggcgaauauacuggguc

SEQ ID NO: 615505 - RNA, 19 nt, Artificial Sequence
  Description of Artificial Sequence: Synthetic oligonucleotide
gaucguguccccggccaug

SEQ ID NO: 615506 - RNA, 19 nt, Artificial Sequence
  Description of Artificial Sequence: Synthetic oligonucleotide
cacgagcacuuccuggcuc

SEQ ID NO: 615507 - RNA, 19 nt, Artificial Sequence
  Description of Artificial Sequence: Synthetic oligonucleotide
guacuacuagucgcuuggc

SEQ ID NO: 615508 - RNA, 19 nt, Artificial Sequence
  Description of Artificial Sequence: Synthetic oligonucleotide
gcuucggacaaugcuguug

SEQ ID NO: 615509 - RNA, 19 nt, Artificial Sequence
  Description of Artificial Sequence: Synthetic oligonucleotide
uggguccgaaacuguggaa

SEQ ID NO: 615510 - RNA, 19 nt, Artificial Sequence
  Description of Artificial Sequence: Synthetic oligonucleotide
acugcacgguucauuugug

SEQ ID NO: 615511 - RNA, 19 nt, Artificial Sequence
  Description of Artificial Sequence: Synthetic oligonucleotide
gcucucgucgcaguugaag

SEQ ID NO: 615512 - RNA, 19 nt, Artificial Sequence
  Description of Artificial Sequence: Synthetic oligonucleotide
cacuggcgucacuggaggc

SEQ ID NO: 615513 - RNA, 19 nt, Artificial Sequence
  Description of Artificial Sequence: Synthetic oligonucleotide
cacgggaugugagcucugc

SEQ ID NO: 615514 - RNA, 19 nt, Artificial Sequence
  Description of Artificial Sequence: Synthetic oligonucleotide
gcuuaccccaccuaccuua

SEQ ID NO: 615515 - RNA, 19 nt, Artificial Sequence
  Description of Artificial Sequence: Synthetic oligonucleotide
gaacgcacauauccucacu

SEQ ID NO: 615516 - RNA, 19 nt, Artificial Sequence
  Description of Artificial Sequence: Synthetic oligonucleotide
ugcuauccuugggaggguc

SEQ ID NO: 615517 - RNA, 19 nt, Artificial Sequence
  Description of Artificial Sequence: Synthetic oligonucleotide
cgauguggguaccacacug

SEQ ID NO: 615518 - RNA, 19 nt, Artificial Sequence
  Description of Artificial Sequence: Synthetic oligonucleotide
ugccgacgcagugcugggg

SEQ ID NO: 615519 - RNA, 19 nt, Artificial Sequence
  Description of Artificial Sequence: Synthetic oligonucleotide
cugccgacgcagugcuggg

SEQ ID NO: 615520 - RNA, 19 nt, Artificial Sequence
  Description of Artificial Sequence: Synthetic oligonucleotide
gcgccggcgaauauacugg

SEQ ID NO: 615521 - RNA, 19 nt, Artificial Sequence
  Description of Artificial Sequence: Synthetic oligonucleotide
cuacuagucgcuuggcuuu

SEQ ID NO: 615522 - RNA, 19 nt, Artificial Sequence
  Description of Artificial Sequence: Synthetic oligonucleotide
ugcugguuauagggcugcc

SEQ ID NO: 615523 - RNA, 19 nt, Artificial Sequence
  Description of Artificial Sequence: Synthetic oligonucleotide
cacacccgcggcccauucc

SEQ ID NO: 615524 - RNA, 19 nt, Artificial Sequence
  Description of Artificial Sequence: Synthetic oligonucleotide
gcuguugcuauaggcacga

SEQ ID NO: 615525 - RNA, 19 nt, Artificial Sequence
  Description of Artificial Sequence: Synthetic oligonucleotide
gugguucuguagcacgaua

SEQ ID NO: 615526 - RNA, 19 nt, Artificial Sequence
  Description of Artificial Sequence: Synthetic oligonucleotide
uaccguugcuugccuccaa

SEQ ID NO: 615527 - RNA, 19 nt, Artificial Sequence
  Description of Artificial Sequence: Synthetic oligonucleotide
auacuucgcacgggaugug

SEQ ID NO: 615528 - RNA, 19 nt, Artificial Sequence
  Description of Artificial Sequence: Synthetic oligonucleotide
ggguccgaaacuguggaaa

SEQ ID NO: 615529 - RNA, 19 nt, Artificial Sequence
  Description of Artificial Sequence: Synthetic oligonucleotide
gcugcgccggcgaauauac

SEQ ID NO: 615530 - RNA, 19 nt, Artificial Sequence
  Description of Artificial Sequence: Synthetic oligonucleotide
cguugcuugccuccaagac

SEQ ID NO: 615531 - RNA, 19 nt, Artificial Sequence
  Description of Artificial Sequence: Synthetic oligonucleotide
cagcgaucguguccccggc

SEQ ID NO: 615532 - RNA, 19 nt, Artificial Sequence
  Description of Artificial Sequence: Synthetic oligonucleotide
ucgcacgggaugugagcuc

SEQ ID NO: 615533 - RNA, 19 nt, Artificial Sequence
  Description of Artificial Sequence: Synthetic oligonucleotide
accuugguugaaaccguau

SEQ ID NO: 615534 - RNA, 19 nt, Artificial Sequence
  Description of Artificial Sequence: Synthetic oligonucleotide
uacugccgacgcagugcug

SEQ ID NO: 615535 - RNA, 19 nt, Artificial Sequence
  Description of Artificial Sequence: Synthetic oligonucleotide
cucgauuaaauaggcuuau

SEQ ID NO: 615536 - RNA, 19 nt, Artificial Sequence
  Description of Artificial Sequence: Synthetic oligonucleotide
gcuaccuauagaccuuggu

SEQ ID NO: 615537 - RNA, 19 nt, Artificial Sequence
  Description of Artificial Sequence: Synthetic oligonucleotide
gaccuugguugaaaccgua

SEQ ID NO: 615538 - RNA, 19 nt, Artificial Sequence
  Description of Artificial Sequence: Synthetic oligonucleotide
gcgaucguguccccggcca

SEQ ID NO: 615539 - RNA, 19 nt, Artificial Sequence
  Description of Artificial Sequence: Synthetic oligonucleotide
ccuugguugaaaccguaua

SEQ ID NO: 615540 - RNA, 19 nt, Artificial Sequence
  Description of Artificial Sequence: Synthetic oligonucleotide
cgucccuucguuguccacc

SEQ ID NO: 615541 - RNA, 19 nt, Artificial Sequence
  Description of Artificial Sequence: Synthetic oligonucleotide
ggaccgggcggagaugcug

SEQ ID NO: 615542 - RNA, 19 nt, Artificial Sequence
  Description of Artificial Sequence: Synthetic oligonucleotide
cggucaaguguagugcggc

SEQ ID NO: 615543 - RNA, 19 nt, Artificial Sequence
  Description of Artificial Sequence: Synthetic oligonucleotide
cuguugcuauaggcacgag

SEQ ID NO: 615544 - RNA, 19 nt, Artificial Sequence
  Description of Artificial Sequence: Synthetic oligonucleotide
gcugacagaacggcggugu

SEQ ID NO: 615545 - RNA, 19 nt, Artificial Sequence
  Description of Artificial Sequence: Synthetic oligonucleotide
cccuacuuuugcucucguc

SEQ ID NO: 615546 - RNA, 19 nt, Artificial Sequence
  Description of Artificial Sequence: Synthetic oligonucleotide
ccucgcguccacugcuaag

SEQ ID NO: 615547 - RNA, 19 nt, Artificial Sequence
  Description of Artificial Sequence: Synthetic oligonucleotide
cagaugcuucucgauuaaa

SEQ ID NO: 615548 - RNA, 19 nt, Artificial Sequence
  Description of Artificial Sequence: Synthetic oligonucleotide
ggucaaguguagugcggcu

SEQ ID NO: 615549 - RNA, 19 nt, Artificial Sequence
  Description of Artificial Sequence: Synthetic oligonucleotide
ugccaccgauguggguacc

SEQ ID NO: 615550 - RNA, 19 nt, Artificial Sequence
  Description of Artificial Sequence: Synthetic oligonucleotide
cgccggcgaauauacuggg

SEQ ID NO: 615551 - RNA, 19 nt, Artificial Sequence
  Description of Artificial Sequence: Synthetic oligonucleotide
cuagucgcuuggcuuuggu

SEQ ID NO: 615552 - RNA, 19 nt, Artificial Sequence
  Description of Artificial Sequence: Synthetic oligonucleotide
gcgaauauacuggguccga

SEQ ID NO: 615553 - RNA, 19 nt, Artificial Sequence
  Description of Artificial Sequence: Synthetic oligonucleotide
ggccucguagccucaggua

SEQ ID NO: 615554 - RNA, 19 nt, Artificial Sequence
  Description of Artificial Sequence: Synthetic oligonucleotide
gcuauaggcacgagcacuu

SEQ ID NO: 615555 - RNA, 19 nt, Artificial Sequence
  Description of Artificial Sequence: Synthetic oligonucleotide
cuggcugcgccggcgaaua

SEQ ID NO: 615556 - RNA, 19 nt, Artificial Sequence
  Description of Artificial Sequence: Synthetic oligonucleotide
uggcugcgccggcgaauau

SEQ ID NO: 615557 - RNA, 19 nt, Artificial Sequence
  Description of Artificial Sequence: Synthetic oligonucleotide
ccguugcuugccuccaaga

SEQ ID NO: 615558 - RNA, 19 nt, Artificial Sequence
  Description of Artificial Sequence: Synthetic oligonucleotide
gagccucggcugacagaac

SEQ ID NO: 615559 - RNA, 19 nt, Artificial Sequence
  Description of Artificial Sequence: Synthetic oligonucleotide
gcgguaggcguuguaccuc

SEQ ID NO: 615560 - RNA, 19 nt, Artificial Sequence
  Description of Artificial Sequence: Synthetic oligonucleotide
gcccguagcgcugacccaa

SEQ ID NO: 615561 - RNA, 19 nt, Artificial Sequence
  Description of Artificial Sequence: Synthetic oligonucleotide
gugugcgguaggcguugua

SEQ ID NO: 615562 - RNA, 19 nt, Artificial Sequence
  Description of Artificial Sequence: Synthetic oligonucleotide
ccuauagaccuugguugaa

SEQ ID NO: 615563 - RNA, 19 nt, Artificial Sequence
  Description of Artificial Sequence: Synthetic oligonucleotide
cccuggcgaaaggacauga

SEQ ID NO: 615564 - RNA, 19 nt, Artificial Sequence
  Description of Artificial Sequence: Synthetic oligonucleotide
gccaccgauguggguacca

SEQ ID NO: 615565 - RNA, 19 nt, Artificial Sequence
  Description of Artificial Sequence: Synthetic oligonucleotide
ggcugcgccggcgaauaua

SEQ ID NO: 615566 - RNA, 19 nt, Artificial Sequence
  Description of Artificial Sequence: Synthetic oligonucleotide
guagcacgauagggucaaa

SEQ ID NO: 615567 - RNA, 19 nt, Artificial Sequence
  Description of Artificial Sequence: Synthetic oligonucleotide
ggcucagacaguggcccgu

SEQ ID NO: 615568 - RNA, 19 nt, Artificial Sequence
  Description of Artificial Sequence: Synthetic oligonucleotide
ccccaaccaaucugucuua

SEQ ID NO: 615569 - RNA, 19 nt, Artificial Sequence
  Description of Artificial Sequence: Synthetic oligonucleotide
ccacacccgcggcccauuc

SEQ ID NO: 615570 - RNA, 19 nt, Artificial Sequence
  Description of Artificial Sequence: Synthetic oligonucleotide
ccccuggcgaaaggacaug

SEQ ID NO: 615571 - RNA, 19 nt, Artificial Sequence
  Description of Artificial Sequence: Synthetic oligonucleotide
gcucagacaguggcccgua

SEQ ID NO: 615572 - RNA, 19 nt, Artificial Sequence
  Description of Artificial Sequence: Synthetic oligonucleotide
ggcggagaugcugguuaua

SEQ ID NO: 615573 - RNA, 19 nt, Artificial Sequence
  Description of Artificial Sequence: Synthetic oligonucleotide
cugcuauccuugggagggu

SEQ ID NO: 615574 - RNA, 19 nt, Artificial Sequence
  Description of Artificial Sequence: Synthetic oligonucleotide
ccgaaacuguggaaacguu

SEQ ID NO: 615575 - RNA, 19 nt, Artificial Sequence
  Description of Artificial Sequence: Synthetic oligonucleotide
cccuagcuuaccccaccua

SEQ ID NO: 615576 - RNA, 19 nt, Artificial Sequence
  Description of Artificial Sequence: Synthetic oligonucleotide
ccgauguggguaccacacu

SEQ ID NO: 615577 - RNA, 19 nt, Artificial Sequence
  Description of Artificial Sequence: Synthetic oligonucleotide
ccauucggucaaguguagu

SEQ ID NO: 615578 - RNA, 19 nt, Artificial Sequence
  Description of Artificial Sequence: Synthetic oligonucleotide
gccggcgaauauacugggu

SEQ ID NO: 615579 - RNA, 19 nt, Artificial Sequence
  Description of Artificial Sequence: Synthetic oligonucleotide
gcccuacuuuugcucucgu

SEQ ID NO: 615580 - RNA, 19 nt, Artificial Sequence
  Description of Artificial Sequence: Synthetic oligonucleotide
ggugugcgguaggcguugu

SEQ ID NO: 615581 - RNA, 19 nt, Artificial Sequence
  Description of Artificial Sequence: Synthetic oligonucleotide
ccguagcgcugacccaaua

SEQ ID NO: 615582 - RNA, 19 nt, Artificial Sequence
  Description of Artificial Sequence: Synthetic oligonucleotide
cccguagcgcugacccaau

SEQ ID NO: 615583 - RNA, 19 nt, Artificial Sequence
  Description of Artificial Sequence: Synthetic oligonucleotide
cgaucguguccccggccau

SEQ ID NO: 615584 - RNA, 19 nt, Artificial Sequence
  Description of Artificial Sequence: Synthetic oligonucleotide
ugauggaacauccaguggc

SEQ ID NO: 615585 - RNA, 19 nt, Artificial Sequence
  Description of Artificial Sequence: Synthetic oligonucleotide
uguacagcgguucugacca

SEQ ID NO: 615586 - RNA, 19 nt, Artificial Sequence
  Description of Artificial Sequence: Synthetic oligonucleotide
ucaaggagguaauacauag

SEQ ID NO: 615587 - RNA, 19 nt, Artificial Sequence
  Description of Artificial Sequence: Synthetic oligonucleotide
cuguuaaugacguuguagg

SEQ ID NO: 615588 - RNA, 19 nt, Artificial Sequence
  Description of Artificial Sequence: Synthetic oligonucleotide
aaaagaaccgucggguugc

SEQ ID NO: 615589 - RNA, 19 nt, Artificial Sequence
  Description of Artificial Sequence: Synthetic oligonucleotide
ugagaaaagaaccgucggg

SEQ ID NO: 615590 - RNA, 19 nt, Artificial Sequence
  Description of Artificial Sequence: Synthetic oligonucleotide
cagaguuuugguuugacag

SEQ ID NO: 615591 - RNA, 19 nt, Artificial Sequence
  Description of Artificial Sequence: Synthetic oligonucleotide
gaagccaugaucaggagag

SEQ ID NO: 615592 - RNA, 19 nt, Artificial Sequence
  Description of Artificial Sequence: Synthetic oligonucleotide
caugagaaaagaaccgucg

SEQ ID NO: 615593 - RNA, 19 nt, Artificial Sequence
  Description of Artificial Sequence: Synthetic oligonucleotide
gugccaaugaugcacagcg

SEQ ID NO: 615594 - RNA, 19 nt, Artificial Sequence
  Description of Artificial Sequence: Synthetic oligonucleotide
aaauccuccuucaaaucgc

SEQ ID NO: 615595 - RNA, 19 nt, Artificial Sequence
  Description of Artificial Sequence: Synthetic oligonucleotide
aaagccaccaucuggacuu

SEQ ID NO: 615596 - RNA, 19 nt, Artificial Sequence
  Description of Artificial Sequence: Synthetic oligonucleotide
gacaaguagaagcacgugc

SEQ ID NO: 615597 - RNA, 19 nt, Artificial Sequence
  Description of Artificial Sequence: Synthetic oligonucleotide
ugucaguugucgaagaccu

SEQ ID NO: 615598 - RNA, 19 nt, Artificial Sequence
  Description of Artificial Sequence: Synthetic oligonucleotide
ucccucugcaaaaugagcc

SEQ ID NO: 615599 - RNA, 19 nt, Artificial Sequence
  Description of Artificial Sequence: Synthetic oligonucleotide
gguccaauguuguagacgg

SEQ ID NO: 615600 - RNA, 19 nt, Artificial Sequence
  Description of Artificial Sequence: Synthetic oligonucleotide
cuguauaggacucagcuuc

SEQ ID NO: 615601 - RNA, 19 nt, Artificial Sequence
  Description of Artificial Sequence: Synthetic oligonucleotide
uugacagguaugaaaauaa

SEQ ID NO: 615602 - RNA, 19 nt, Artificial Sequence
  Description of Artificial Sequence: Synthetic oligonucleotide
gaugaccauacucagcacc

SEQ ID NO: 615603 - RNA, 19 nt, Artificial Sequence
  Description of Artificial Sequence: Synthetic oligonucleotide
acuuauauuccaaacccac

SEQ ID NO: 615604 - RNA, 19 nt, Artificial Sequence
  Description of Artificial Sequence: Synthetic oligonucleotide
gagauacucacagauaccc

SEQ ID NO: 615605 - RNA, 19 nt, Artificial Sequence
  Description of Artificial Sequence: Synthetic oligonucleotide
accuuuauccauucccagc

SEQ ID NO: 615606 - RNA, 19 nt, Artificial Sequence
  Description of Artificial Sequence: Synthetic oligonucleotide
acugagucguccugcaacc

SEQ ID NO: 615607 - RNA, 19 nt, Artificial Sequence
  Description of Artificial Sequence: Synthetic oligonucleotide
auaggcgggacccaccagc

SEQ ID NO: 615608 - RNA, 19 nt, Artificial Sequence
  Description of Artificial Sequence: Synthetic oligonucleotide
augagaaaagaaccgucgg

SEQ ID NO: 615609 - RNA, 19 nt, Artificial Sequence
  Description of Artificial Sequence: Synthetic oligonucleotide
cuugcuauccauucaggag

SEQ ID NO: 615610 - RNA, 19 nt, Artificial Sequence
  Description of Artificial Sequence: Synthetic oligonucleotide
agaaccgucggguugcuuc

SEQ ID NO: 615611 - RNA, 19 nt, Artificial Sequence
  Description of Artificial Sequence: Synthetic oligonucleotide
uccacgguggccaagacuc

SEQ ID NO: 615612 - RNA, 19 nt, Artificial Sequence
  Description of Artificial Sequence: Synthetic oligonucleotide
uccaauguuguagacgggg

SEQ ID NO: 615613 - RNA, 19 nt, Artificial Sequence
  Description of Artificial Sequence: Synthetic oligonucleotide
ucuaggaguuccaagcugu

SEQ ID NO: 615614 - RNA, 19 nt, Artificial Sequence
  Description of Artificial Sequence: Synthetic oligonucleotide
uauauuccaaacccacagc

SEQ ID NO: 615615 - RNA, 19 nt, Artificial Sequence
  Description of Artificial Sequence: Synthetic oligonucleotide
gacguuguaggcuuccucc

SEQ ID NO: 615616 - RNA, 19 nt, Artificial Sequence
  Description of Artificial Sequence: Synthetic oligonucleotide
gaaaagaaccgucggguug

SEQ ID NO: 615617 - RNA, 19 nt, Artificial Sequence
  Description of Artificial Sequence: Synthetic oligonucleotide
aaugacguuguaggcuucc

SEQ ID NO: 615618 - RNA, 19 nt, Artificial Sequence
  Description of Artificial Sequence: Synthetic oligonucleotide
gaaaccuugucugccaggg

SEQ ID NO: 615619 - RNA, 19 nt, Artificial Sequence
  Description of Artificial Sequence: Synthetic oligonucleotide
uguuaaugacguuguaggc

SEQ ID NO: 615620 - RNA, 19 nt, Artificial Sequence
  Description of Artificial Sequence: Synthetic oligonucleotide
uucgaagaggucuggagug

SEQ ID NO: 615621 - RNA, 19 nt, Artificial Sequence
  Description of Artificial Sequence: Synthetic oligonucleotide
uccaaugugcaugagaaaa

SEQ ID NO: 615622 - RNA, 19 nt, Artificial Sequence
  Description of Artificial Sequence: Synthetic oligonucleotide
ugggcgauggauaagccac

SEQ ID NO: 615623 - RNA, 19 nt, Artificial Sequence
  Description of Artificial Sequence: Synthetic oligonucleotide
acagguaugaaaauaauuu

SEQ ID NO: 615624 - RNA, 19 nt, Artificial Sequence
  Description of Artificial Sequence: Synthetic oligonucleotide
uuuauccauucccagccgc

SEQ ID NO: 615625 - RNA, 19 nt, Artificial Sequence
  Description of Artificial Sequence: Synthetic oligonucleotide
acccuaccgaccuaagacc

SEQ ID NO: 615626 - RNA, 19 nt, Artificial Sequence
  Description of Artificial Sequence: Synthetic oligonucleotide
uucaggagugccuucgaag

SEQ ID NO: 615627 - RNA, 19 nt, Artificial Sequence
  Description of Artificial Sequence: Synthetic oligonucleotide
uuuucagauaauggaagug

SEQ ID NO: 615628 - RNA, 19 nt, Artificial Sequence
  Description of Artificial Sequence: Synthetic oligonucleotide
uuuguacccaaacggagaa

SEQ ID NO: 615629 - RNA, 19 nt, Artificial Sequence
  Description of Artificial Sequence: Synthetic oligonucleotide
caugggguccucuagucgg

SEQ ID NO: 615630 - RNA, 19 nt, Artificial Sequence
  Description of Artificial Sequence: Synthetic oligonucleotide
uuaaugacguuguaggcuu

SEQ ID NO: 615631 - RNA, 19 nt, Artificial Sequence
  Description of Artificial Sequence: Synthetic oligonucleotide
uuagagaggccaccgaggu

SEQ ID NO: 615632 - RNA, 19 nt, Artificial Sequence
  Description of Artificial Sequence: Synthetic oligonucleotide
aaggaguauaaguacugaa

SEQ ID NO: 615633 - RNA, 19 nt, Artificial Sequence
  Description of Artificial Sequence: Synthetic oligonucleotide
cagugguuugggaagagcc

SEQ ID NO: 615634 - RNA, 19 nt, Artificial Sequence
  Description of Artificial Sequence: Synthetic oligonucleotide
uuugacacagcuccaggaa

SEQ ID NO: 615635 - RNA, 19 nt, Artificial Sequence
  Description of Artificial Sequence: Synthetic oligonucleotide
acaucaugcagcauggcuc

SEQ ID NO: 615636 - RNA, 19 nt, Artificial Sequence
  Description of Artificial Sequence: Synthetic oligonucleotide
guacaccaaagcaauaggg

SEQ ID NO: 615637 - RNA, 19 nt, Artificial Sequence
  Description of Artificial Sequence: Synthetic oligonucleotide
ugagauacucacagauacc

SEQ ID NO: 615638 - RNA, 19 nt, Artificial Sequence
  Description of Artificial Sequence: Synthetic oligonucleotide
aggaguauaaguacugaag

SEQ ID NO: 615639 - RNA, 19 nt, Artificial Sequence
  Description of Artificial Sequence: Synthetic oligonucleotide
agcagcgagagcuguauag

SEQ ID NO: 615640 - RNA, 19 nt, Artificial Sequence
  Description of Artificial Sequence: Synthetic oligonucleotide
aaucgcaucugccggcuug

SEQ ID NO: 615641 - RNA, 19 nt, Artificial Sequence
  Description of Artificial Sequence: Synthetic oligonucleotide
ugucgaagaccucuuuuca

SEQ ID NO: 615642 - RNA, 19 nt, Artificial Sequence
  Description of Artificial Sequence: Synthetic oligonucleotide
gauggauaagccacucagg

SEQ ID NO: 615643 - RNA, 19 nt, Artificial Sequence
  Description of Artificial Sequence: Synthetic oligonucleotide
uaggugguuaaacuuguaa

SEQ ID NO: 615644 - RNA, 19 nt, Artificial Sequence
  Description of Artificial Sequence: Synthetic oligonucleotide
cauuguagcaaguucuuca

SEQ ID NO: 615645 - RNA, 19 nt, Artificial Sequence
  Description of Artificial Sequence: Synthetic oligonucleotide
cauuucagcauggugggcc

SEQ ID NO: 615646 - RNA, 19 nt, Artificial Sequence
  Description of Artificial Sequence: Synthetic oligonucleotide
acaccaaagcaauagggaa

SEQ ID NO: 615647 - RNA, 19 nt, Artificial Sequence
  Description of Artificial Sequence: Synthetic oligonucleotide
caucaugcagcauggcucc

SEQ ID NO: 615648 - RNA, 19 nt, Artificial Sequence
  Description of Artificial Sequence: Synthetic oligonucleotide
acccaugaccacaucaugc

SEQ ID NO: 615649 - RNA, 19 nt, Artificial Sequence
  Description of Artificial Sequence: Synthetic oligonucleotide
aagagcguuccuucuugag

SEQ ID NO: 615650 - RNA, 19 nt, Artificial Sequence
  Description of Artificial Sequence: Synthetic oligonucleotide
aggugguuaaacuuguaau

SEQ ID NO: 615651 - RNA, 19 nt, Artificial Sequence
  Description of Artificial Sequence: Synthetic oligonucleotide
ccacuuauauuccaaaccc

SEQ ID NO: 615652 - RNA, 19 nt, Artificial Sequence
  Description of Artificial Sequence: Synthetic oligonucleotide
ggaguauaaguacugaaga

SEQ ID NO: 615653 - RNA, 19 nt, Artificial Sequence
  Description of Artificial Sequence: Synthetic oligonucleotide
cugucuguuaaugacguug

SEQ ID NO: 615654 - RNA, 19 nt, Artificial Sequence
  Description of Artificial Sequence: Synthetic oligonucleotide
uggacggaugaccauacuc

SEQ ID NO: 615655 - RNA, 19 nt, Artificial Sequence
  Description of Artificial Sequence: Synthetic oligonucleotide
agauacccuccauuucagc

SEQ ID NO: 615656 - RNA, 19 nt, Artificial Sequence
  Description of Artificial Sequence: Synthetic oligonucleotide
ucaaaucgcaucugccggc

SEQ ID NO: 615657 - RNA, 19 nt, Artificial Sequence
  Description of Artificial Sequence: Synthetic oligonucleotide
gacggaugaccauacucag

SEQ ID NO: 615658 - RNA, 19 nt, Artificial Sequence
  Description of Artificial Sequence: Synthetic oligonucleotide
cauacucagcacccuaccg

SEQ ID NO: 615659 - RNA, 19 nt, Artificial Sequence
  Description of Artificial Sequence: Synthetic oligonucleotide
auacucagcacccuaccga

SEQ ID NO: 615660 - RNA, 19 nt, Artificial Sequence
  Description of Artificial Sequence: Synthetic oligonucleotide
cuucaaagagcguuccuuc

SEQ ID NO: 615661 - RNA, 19 nt, Artificial Sequence
  Description of Artificial Sequence: Synthetic oligonucleotide
cacccuaccgaccuaagac

SEQ ID NO: 615662 - RNA, 19 nt, Artificial Sequence
  Description of Artificial Sequence: Synthetic oligonucleotide
aaaugagccuugguacuag

SEQ ID NO: 615663 - RNA, 19 nt, Artificial Sequence
  Description of Artificial Sequence: Synthetic oligonucleotide
ugcuauccauucaggagug

SEQ ID NO: 615664 - RNA, 19 nt, Artificial Sequence
  Description of Artificial Sequence: Synthetic oligonucleotide
cuauccauucaggagugcc

SEQ ID NO: 615665 - RNA, 19 nt, Artificial Sequence
  Description of Artificial Sequence: Synthetic oligonucleotide
ugagucguccugcaaccgc

SEQ ID NO: 615666 - RNA, 19 nt, Artificial Sequence
  Description of Artificial Sequence: Synthetic oligonucleotide
guacgcgcuucucacaucc

SEQ ID NO: 615667 - RNA, 19 nt, Artificial Sequence
  Description of Artificial Sequence: Synthetic oligonucleotide
caaggagguaauacauagc

SEQ ID NO: 615668 - RNA, 19 nt, Artificial Sequence
  Description of Artificial Sequence: Synthetic oligonucleotide
uuauccauucccagccgcu

SEQ ID NO: 615669 - RNA, 19 nt, Artificial Sequence
  Description of Artificial Sequence: Synthetic oligonucleotide
aucuaggaguuccaagcug

SEQ ID NO: 615670 - RNA, 19 nt, Artificial Sequence
  Description of Artificial Sequence: Synthetic oligonucleotide
gcuuccgaaaugcugggcg

SEQ ID NO: 615671 - RNA, 19 nt, Artificial Sequence
  Description of Artificial Sequence: Synthetic oligonucleotide
ucgaagaagccaugaucag

SEQ ID NO: 615672 - RNA, 19 nt, Artificial Sequence
  Description of Artificial Sequence: Synthetic oligonucleotide
gaagucacgugacuugcca

SEQ ID NO: 615673 - RNA, 19 nt, Artificial Sequence
  Description of Artificial Sequence: Synthetic oligonucleotide
gucgaagaccucuuuucag

SEQ ID NO: 615674 - RNA, 19 nt, Artificial Sequence
  Description of Artificial Sequence: Synthetic oligonucleotide
gagaaaccuugucugccag

SEQ ID NO: 615675 - RNA, 19 nt, Artificial Sequence
  Description of Artificial Sequence: Synthetic oligonucleotide
acguuguaggcuuccuccg

SEQ ID NO: 615676 - RNA, 19 nt, Artificial Sequence
  Description of Artificial Sequence: Synthetic oligonucleotide
auaaguacugaagaagcuu

SEQ ID NO: 615677 - RNA, 19 nt, Artificial Sequence
  Description of Artificial Sequence: Synthetic oligonucleotide
caaagagcguuccuucuug

SEQ ID NO: 615678 - RNA, 19 nt, Artificial Sequence
  Description of Artificial Sequence: Synthetic oligonucleotide
acagaguuuugguuugaca

SEQ ID NO: 615679 - RNA, 19 nt, Artificial Sequence
  Description of Artificial Sequence: Synthetic oligonucleotide
cauacgugggugcaaggug

SEQ ID NO: 615680 - RNA, 19 nt, Artificial Sequence
  Description of Artificial Sequence: Synthetic oligonucleotide
auaguaggagaaggaacuc

SEQ ID NO: 615681 - RNA, 19 nt, Artificial Sequence
  Description of Artificial Sequence: Synthetic oligonucleotide
cuuuguacccaaacggaga

SEQ ID NO: 615682 - RNA, 19 nt, Artificial Sequence
  Description of Artificial Sequence: Synthetic oligonucleotide
cacaguacgcgcuucucac

SEQ ID NO: 615683 - RNA, 19 nt, Artificial Sequence
  Description of Artificial Sequence: Synthetic oligonucleotide
cuauggacgugacuguuuc

SEQ ID NO: 615684 - RNA, 19 nt, Artificial Sequence
  Description of Artificial Sequence: Synthetic oligonucleotide
guaauacauagcccaguac

SEQ ID NO: 615685 - RNA, 19 nt, Artificial Sequence
  Description of Artificial Sequence: Synthetic oligonucleotide
cugaagccacuauuugggg

SEQ ID NO: 615686 - RNA, 19 nt, Artificial Sequence
  Description of Artificial Sequence: Synthetic oligonucleotide
gaccucuuuucagauaaug

SEQ ID NO: 615687 - RNA, 19 nt, Artificial Sequence
  Description of Artificial Sequence: Synthetic oligonucleotide
cuacucacuugaaggcugg

SEQ ID NO: 615688 - RNA, 19 nt, Artificial Sequence
  Description of Artificial Sequence: Synthetic oligonucleotide
ugucacccauuguagcaag

SEQ ID NO: 615689 - RNA, 19 nt, Artificial Sequence
  Description of Artificial Sequence: Synthetic oligonucleotide
aguagcagccauccaccag

SEQ ID NO: 615690 - RNA, 19 nt, Artificial Sequence
  Description of Artificial Sequence: Synthetic oligonucleotide
cugauggaacauccagugg

SEQ ID NO: 615691 - RNA, 19 nt, Artificial Sequence
  Description of Artificial Sequence: Synthetic oligonucleotide
ugcugggcgauggauaagc

SEQ ID NO: 615692 - RNA, 19 nt, Artificial Sequence
  Description of Artificial Sequence: Synthetic oligonucleotide
aaugugcaugagaaaagaa

SEQ ID NO: 615693 - RNA, 19 nt, Artificial Sequence
  Description of Artificial Sequence: Synthetic oligonucleotide
gagguaauacauagcccag

SEQ ID NO: 615694 - RNA, 19 nt, Artificial Sequence
  Description of Artificial Sequence: Synthetic oligonucleotide
auggucuuuuccagggagc

SEQ ID NO: 615695 - RNA, 19 nt, Artificial Sequence
  Description of Artificial Sequence: Synthetic oligonucleotide
caucuggacuuugacacag

SEQ ID NO: 615696 - RNA, 19 nt, Artificial Sequence
  Description of Artificial Sequence: Synthetic oligonucleotide
aaaaugagccuugguacua

SEQ ID NO: 615697 - RNA, 19 nt, Artificial Sequence
  Description of Artificial Sequence: Synthetic oligonucleotide
agagcuguauaggacucag

SEQ ID NO: 615698 - RNA, 19 nt, Artificial Sequence
  Description of Artificial Sequence: Synthetic oligonucleotide
acgcgcuucucacauccac

SEQ ID NO: 615699 - RNA, 19 nt, Artificial Sequence
  Description of Artificial Sequence: Synthetic oligonucleotide
ugaggauuaccagcgcagc

SEQ ID NO: 615700 - RNA, 19 nt, Artificial Sequence
  Description of Artificial Sequence: Synthetic oligonucleotide
uacuuuggccuguucuaug

SEQ ID NO: 615701 - RNA, 19 nt, Artificial Sequence
  Description of Artificial Sequence: Synthetic oligonucleotide
agcgagagcuguauaggac

SEQ ID NO: 615702 - RNA, 19 nt, Artificial Sequence
  Description of Artificial Sequence: Synthetic oligonucleotide
acccauuguagcaaguucu

SEQ ID NO: 615703 - RNA, 19 nt, Artificial Sequence
  Description of Artificial Sequence: Synthetic oligonucleotide
uccgugccaaugaugcaca

SEQ ID NO: 615704 - RNA, 19 nt, Artificial Sequence
  Description of Artificial Sequence: Synthetic oligonucleotide
ugguacuaggugguuaaac

SEQ ID NO: 615705 - RNA, 19 nt, Artificial Sequence
  Description of Artificial Sequence: Synthetic oligonucleotide
auuucagcauggugggcca

SEQ ID NO: 615706 - RNA, 19 nt, Artificial Sequence
  Description of Artificial Sequence: Synthetic oligonucleotide
aguggacggaugaccauac

SEQ ID NO: 615707 - RNA, 19 nt, Artificial Sequence
  Description of Artificial Sequence: Synthetic oligonucleotide
ucuauggacgugacuguuu

SEQ ID NO: 615708 - RNA, 19 nt, Artificial Sequence
  Description of Artificial Sequence: Synthetic oligonucleotide
aggauuaccagcgcagcca

SEQ ID NO: 615709 - RNA, 19 nt, Artificial Sequence
  Description of Artificial Sequence: Synthetic oligonucleotide
ucgggugacugaacagugc

SEQ ID NO: 615710 - RNA, 19 nt, Artificial Sequence
  Description of Artificial Sequence: Synthetic oligonucleotide
agaagucacgugacuugcc

SEQ ID NO: 615711 - RNA, 19 nt, Artificial Sequence
  Description of Artificial Sequence: Synthetic oligonucleotide
ugcauacgugggugcaagg

SEQ ID NO: 615712 - RNA, 19 nt, Artificial Sequence
  Description of Artificial Sequence: Synthetic oligonucleotide
ucagacuguacagcgguuc

SEQ ID NO: 615713 - RNA, 19 nt, Artificial Sequence
  Description of Artificial Sequence: Synthetic oligonucleotide
acauaggcgggacccacca

SEQ ID NO: 615714 - RNA, 19 nt, Artificial Sequence
  Description of Artificial Sequence: Synthetic oligonucleotide
cagauacccuccauuucag

SEQ ID NO: 615715 - RNA, 19 nt, Artificial Sequence
  Description of Artificial Sequence: Synthetic oligonucleotide
cuugguacuaggugguuaa

SEQ ID NO: 615716 - RNA, 19 nt, Artificial Sequence
  Description of Artificial Sequence: Synthetic oligonucleotide
cacuuauauuccaaaccca

SEQ ID NO: 615717 - RNA, 19 nt, Artificial Sequence
  Description of Artificial Sequence: Synthetic oligonucleotide
gggauacugagauacucac

SEQ ID NO: 615718 - RNA, 19 nt, Artificial Sequence
  Description of Artificial Sequence: Synthetic oligonucleotide
ugacguuguaggcuuccuc

SEQ ID NO: 615719 - RNA, 19 nt, Artificial Sequence
  Description of Artificial Sequence: Synthetic oligonucleotide
acggaugaccauacucagc

SEQ ID NO: 615720 - RNA, 19 nt, Artificial Sequence
  Description of Artificial Sequence: Synthetic oligonucleotide
guugguuagagaggccacc

SEQ ID NO: 615721 - RNA, 19 nt, Artificial Sequence
  Description of Artificial Sequence: Synthetic oligonucleotide
cuuuucagauaauggaagu

SEQ ID NO: 615722 - RNA, 19 nt, Artificial Sequence
  Description of Artificial Sequence: Synthetic oligonucleotide
guccgguccaauguuguag

SEQ ID NO: 615723 - RNA, 19 nt, Artificial Sequence
  Description of Artificial Sequence: Synthetic oligonucleotide
gaggaugcccaucggguga

SEQ ID NO: 615724 - RNA, 19 nt, Artificial Sequence
  Description of Artificial Sequence: Synthetic oligonucleotide
auacgugggugcaaggugu

SEQ ID NO: 615725 - RNA, 19 nt, Artificial Sequence
  Description of Artificial Sequence: Synthetic oligonucleotide
aguacgcgcuucucacauc

SEQ ID NO: 615726 - RNA, 19 nt, Artificial Sequence
  Description of Artificial Sequence: Synthetic oligonucleotide
gguacuaggugguuaaacu

SEQ ID NO: 615727 - RNA, 19 nt, Artificial Sequence
  Description of Artificial Sequence: Synthetic oligonucleotide
guugcagcgucccugaaau

SEQ ID NO: 615728 - RNA, 19 nt, Artificial Sequence
  Description of Artificial Sequence: Synthetic oligonucleotide
cacccauuguagcaaguuc

SEQ ID NO: 615729 - RNA, 19 nt, Artificial Sequence
  Description of Artificial Sequence: Synthetic oligonucleotide
uacgugggugcaaggugug

SEQ ID NO: 615730 - RNA, 19 nt, Artificial Sequence
  Description of Artificial Sequence: Synthetic oligonucleotide
gagcgugcagggcacgaug

SEQ ID NO: 615731 - RNA, 19 nt, Artificial Sequence
  Description of Artificial Sequence: Synthetic oligonucleotide
cuaggaguuccaagcugug

SEQ ID NO: 615732 - RNA, 19 nt, Artificial Sequence
  Description of Artificial Sequence: Synthetic oligonucleotide
gccaaugaugcacagcgca

SEQ ID NO: 615733 - RNA, 19 nt, Artificial Sequence
  Description of Artificial Sequence: Synthetic oligonucleotide
gcuuuguacccaaacggag

SEQ ID NO: 615734 - RNA, 19 nt, Artificial Sequence
  Description of Artificial Sequence: Synthetic oligonucleotide
agugguuugggaagagccu

SEQ ID NO: 615735 - RNA, 19 nt, Artificial Sequence
  Description of Artificial Sequence: Synthetic oligonucleotide
gauguugguuagagaggcc

SEQ ID NO: 615736 - RNA, 19 nt, Artificial Sequence
  Description of Artificial Sequence: Synthetic oligonucleotide
gaacucgaagaagccauga

SEQ ID NO: 615737 - RNA, 19 nt, Artificial Sequence
  Description of Artificial Sequence: Synthetic oligonucleotide
ggaguuccaagcugugcag

SEQ ID NO: 615738 - RNA, 19 nt, Artificial Sequence
  Description of Artificial Sequence: Synthetic oligonucleotide
gugugguagaagucacgug

SEQ ID NO: 615739 - RNA, 19 nt, Artificial Sequence
  Description of Artificial Sequence: Synthetic oligonucleotide
gacggggugagugggcugc

SEQ ID NO: 615740 - RNA, 19 nt, Artificial Sequence
  Description of Artificial Sequence: Synthetic oligonucleotide
guagcagagccaggggcgg

SEQ ID NO: 615741 - RNA, 19 nt, Artificial Sequence
  Description of Artificial Sequence: Synthetic oligonucleotide
ggguucaucuaggaguucc

SEQ ID NO: 615742 - RNA, 19 nt, Artificial Sequence
  Description of Artificial Sequence: Synthetic oligonucleotide
uggacgugacuguuuccac

SEQ ID NO: 615743 - RNA, 19 nt, Artificial Sequence
  Description of Artificial Sequence: Synthetic oligonucleotide
gaaccgucggguugcuuca

SEQ ID NO: 615744 - RNA, 19 nt, Artificial Sequence
  Description of Artificial Sequence: Synthetic oligonucleotide
agacaaguagaagcacgug

SEQ ID NO: 615745 - RNA, 19 nt, Artificial Sequence
  Description of Artificial Sequence: Synthetic oligonucleotide
gcuugucacccauuguagc

SEQ ID NO: 615746 - RNA, 19 nt, Artificial Sequence
  Description of Artificial Sequence: Synthetic oligonucleotide
ggacggaugaccauacuca

SEQ ID NO: 615747 - RNA, 19 nt, Artificial Sequence
  Description of Artificial Sequence: Synthetic oligonucleotide
agcgucccugaaauccucc

SEQ ID NO: 615748 - RNA, 19 nt, Artificial Sequence
  Description of Artificial Sequence: Synthetic oligonucleotide
gagacaaguagaagcacgu

SEQ ID NO: 615749 - RNA, 19 nt, Artificial Sequence
  Description of Artificial Sequence: Synthetic oligonucleotide
cacaucaggauguacuccu

SEQ ID NO: 615750 - RNA, 19 nt, Artificial Sequence
  Description of Artificial Sequence: Synthetic oligonucleotide
agcaaauggccagugguuu

SEQ ID NO: 615751 - RNA, 19 nt, Artificial Sequence
  Description of Artificial Sequence: Synthetic oligonucleotide
ucgaagaggucuggaguga

SEQ ID NO: 615752 - RNA, 19 nt, Artificial Sequence
  Description of Artificial Sequence: Synthetic oligonucleotide
cacauaggcgggacccacc

SEQ ID NO: 615753 - RNA, 19 nt, Artificial Sequence
  Description of Artificial Sequence: Synthetic oligonucleotide
gaggccaccgagguggcac

SEQ ID NO: 615754 - RNA, 19 nt, Artificial Sequence
  Description of Artificial Sequence: Synthetic oligonucleotide
agugaugauguugguuaga

SEQ ID NO: 615755 - RNA, 19 nt, Artificial Sequence
  Description of Artificial Sequence: Synthetic oligonucleotide
ccuacucacuugaaggcug

SEQ ID NO: 615756 - RNA, 19 nt, Artificial Sequence
  Description of Artificial Sequence: Synthetic oligonucleotide
ccuccaaugugcaugagaa

SEQ ID NO: 615757 - RNA, 19 nt, Artificial Sequence
  Description of Artificial Sequence: Synthetic oligonucleotide
gcagcgagagcuguauagg

SEQ ID NO: 615758 - RNA, 19 nt, Artificial Sequence
  Description of Artificial Sequence: Synthetic oligonucleotide
cugcauacgugggugcaag

SEQ ID NO: 615759 - RNA, 19 nt, Artificial Sequence
  Description of Artificial Sequence: Synthetic oligonucleotide
uaaugacguuguaggcuuc

SEQ ID NO: 615760 - RNA, 19 nt, Artificial Sequence
  Description of Artificial Sequence: Synthetic oligonucleotide
cuucgaagaggucuggagu

SEQ ID NO: 615761 - RNA, 19 nt, Artificial Sequence
  Description of Artificial Sequence: Synthetic oligonucleotide
gugugugguggccuggauc

SEQ ID NO: 615762 - RNA, 19 nt, Artificial Sequence
  Description of Artificial Sequence: Synthetic oligonucleotide
ggugguuaaacuuguaauu

SEQ ID NO: 615763 - RNA, 19 nt, Artificial Sequence
  Description of Artificial Sequence: Synthetic oligonucleotide
gcucacauaggcgggaccc

SEQ ID NO: 615764 - RNA, 19 nt, Artificial Sequence
  Description of Artificial Sequence: Synthetic oligonucleotide
uucuggcaccuugcuaucc

SEQ ID NO: 615765 - RNA, 19 nt, Artificial Sequence
  Description of Artificial Sequence: Synthetic oligonucleotide
uccgaaaugcugggcgaug

SEQ ID NO: 615766 - RNA, 19 nt, Artificial Sequence
  Description of Artificial Sequence: Synthetic oligonucleotide
auggcuccgcuuccgaaau

SEQ ID NO: 615767 - RNA, 19 nt, Artificial Sequence
  Description of Artificial Sequence: Synthetic oligonucleotide
ggccgggauacugagauac

SEQ ID NO: 615768 - RNA, 19 nt, Artificial Sequence
  Description of Artificial Sequence: Synthetic oligonucleotide
ugccugccagaaagaguag

SEQ ID NO: 615769 - RNA, 19 nt, Artificial Sequence
  Description of Artificial Sequence: Synthetic oligonucleotide
cacggaccccagaggaugc

SEQ ID NO: 615770 - RNA, 19 nt, Artificial Sequence
  Description of Artificial Sequence: Synthetic oligonucleotide
gcaaauggccagugguuug

SEQ ID NO: 615771 - RNA, 19 nt, Artificial Sequence
  Description of Artificial Sequence: Synthetic oligonucleotide
cucaggucucagacuguac

SEQ ID NO: 615772 - RNA, 19 nt, Artificial Sequence
  Description of Artificial Sequence: Synthetic oligonucleotide
agagcagcgagagcuguau

SEQ ID NO: 615773 - RNA, 19 nt, Artificial Sequence
  Description of Artificial Sequence: Synthetic oligonucleotide
guacuaggugguuaaacuu

SEQ ID NO: 615774 - RNA, 19 nt, Artificial Sequence
  Description of Artificial Sequence: Synthetic oligonucleotide
caguggccgggauacugag

SEQ ID NO: 615775 - RNA, 19 nt, Artificial Sequence
  Description of Artificial Sequence: Synthetic oligonucleotide
cugcaaccgcucucgcgcg

SEQ ID NO: 615776 - RNA, 19 nt, Artificial Sequence
  Description of Artificial Sequence: Synthetic oligonucleotide
cugggcgauggauaagcca

SEQ ID NO: 615777 - RNA, 19 nt, Artificial Sequence
  Description of Artificial Sequence: Synthetic oligonucleotide
cagcgagagcuguauagga

SEQ ID NO: 615778 - RNA, 19 nt, Artificial Sequence
  Description of Artificial Sequence: Synthetic oligonucleotide
cacaucaugcagcauggcu

SEQ ID NO: 615779 - RNA, 19 nt, Artificial Sequence
  Description of Artificial Sequence: Synthetic oligonucleotide
accgaccuaagaccuuuau

SEQ ID NO: 615780 - RNA, 19 nt, Artificial Sequence
  Description of Artificial Sequence: Synthetic oligonucleotide
ugcccaucgggugacugaa

SEQ ID NO: 615781 - RNA, 19 nt, Artificial Sequence
  Description of Artificial Sequence: Synthetic oligonucleotide
agacuguacagcgguucug

SEQ ID NO: 615782 - RNA, 19 nt, Artificial Sequence
  Description of Artificial Sequence: Synthetic oligonucleotide
guggccgggauacugagau

SEQ ID NO: 615783 - RNA, 19 nt, Artificial Sequence
  Description of Artificial Sequence: Synthetic oligonucleotide
uguagcccaauggucuuuu

SEQ ID NO: 615784 - RNA, 19 nt, Artificial Sequence
  Description of Artificial Sequence: Synthetic oligonucleotide
cugagucguccugcaaccg

SEQ ID NO: 615785 - RNA, 19 nt, Artificial Sequence
  Description of Artificial Sequence: Synthetic oligonucleotide
accgucggguugcuucaag

SEQ ID NO: 615786 - RNA, 19 nt, Artificial Sequence
  Description of Artificial Sequence: Synthetic oligonucleotide
guggcucaugcugagggca

SEQ ID NO: 615787 - RNA, 19 nt, Artificial Sequence
  Description of Artificial Sequence: Synthetic oligonucleotide
cagaggaugcccaucgggu

SEQ ID NO: 615788 - RNA, 19 nt, Artificial Sequence
  Description of Artificial Sequence: Synthetic oligonucleotide
gcaugagaaaagaaccguc

SEQ ID NO: 615789 - RNA, 19 nt, Artificial Sequence
  Description of Artificial Sequence: Synthetic oligonucleotide
gagcuguauaggacucagc

SEQ ID NO: 615790 - RNA, 19 nt, Artificial Sequence
  Description of Artificial Sequence: Synthetic oligonucleotide
aaaucgcaucugccggcuu

SEQ ID NO: 615791 - RNA, 19 nt, Artificial Sequence
  Description of Artificial Sequence: Synthetic oligonucleotide
gguugcuucaaggaguaua

SEQ ID NO: 615792 - RNA, 19 nt, Artificial Sequence
  Description of Artificial Sequence: Synthetic oligonucleotide
aaagaaccgucggguugcu

SEQ ID NO: 615793 - RNA, 19 nt, Artificial Sequence
  Description of Artificial Sequence: Synthetic oligonucleotide
uacgcgcuucucacaucca

SEQ ID NO: 615794 - RNA, 19 nt, Artificial Sequence
  Description of Artificial Sequence: Synthetic oligonucleotide
uuccgaaaugcugggcgau

SEQ ID NO: 615795 - RNA, 19 nt, Artificial Sequence
  Description of Artificial Sequence: Synthetic oligonucleotide
ccauacucagcacccuacc

SEQ ID NO: 615796 - RNA, 19 nt, Artificial Sequence
  Description of Artificial Sequence: Synthetic oligonucleotide
ucugucuguuaaugacguu

SEQ ID NO: 615797 - RNA, 19 nt, Artificial Sequence
  Description of Artificial Sequence: Synthetic oligonucleotide
guucuauggacgugacugu

SEQ ID NO: 615798 - RNA, 19 nt, Artificial Sequence
  Description of Artificial Sequence: Synthetic oligonucleotide
uugagcgugcagggcacga

SEQ ID NO: 615799 - RNA, 19 nt, Artificial Sequence
  Description of Artificial Sequence: Synthetic oligonucleotide
caccaugggcuuccauccc

SEQ ID NO: 615800 - RNA, 19 nt, Artificial Sequence
  Description of Artificial Sequence: Synthetic oligonucleotide
cuuccaucccuggcacucc

SEQ ID NO: 615801 - RNA, 19 nt, Artificial Sequence
  Description of Artificial Sequence: Synthetic oligonucleotide
acggaccccagaggaugcc

SEQ ID NO: 615802 - RNA, 19 nt, Artificial Sequence
  Description of Artificial Sequence: Synthetic oligonucleotide
auaagcacagagagugcuu

SEQ ID NO: 615803 - RNA, 19 nt, Artificial Sequence
  Description of Artificial Sequence: Synthetic oligonucleotide
cauaggcgggacccaccag

SEQ ID NO: 615804 - RNA, 19 nt, Artificial Sequence
  Description of Artificial Sequence: Synthetic oligonucleotide
acgugacuguuuccacuga

SEQ ID NO: 615805 - RNA, 19 nt, Artificial Sequence
  Description of Artificial Sequence: Synthetic oligonucleotide
guccaauguuguagacggg

SEQ ID NO: 615806 - RNA, 19 nt, Artificial Sequence
  Description of Artificial Sequence: Synthetic oligonucleotide
cucagcacccuaccgaccu

SEQ ID NO: 615807 - RNA, 19 nt, Artificial Sequence
  Description of Artificial Sequence: Synthetic oligonucleotide
ggugacugaacagugcugu

SEQ ID NO: 615808 - RNA, 19 nt, Artificial Sequence
  Description of Artificial Sequence: Synthetic oligonucleotide
gggugcaagguguggguac

SEQ ID NO: 615809 - RNA, 19 nt, Artificial Sequence
  Description of Artificial Sequence: Synthetic oligonucleotide
gcgguucugaccaggcagg

SEQ ID NO: 615810 - RNA, 19 nt, Artificial Sequence
  Description of Artificial Sequence: Synthetic oligonucleotide
caugcacugcucuccucca

SEQ ID NO: 615811 - RNA, 19 nt, Artificial Sequence
  Description of Artificial Sequence: Synthetic oligonucleotide
cuagucggugcccggaucu

SEQ ID NO: 615812 - RNA, 19 nt, Artificial Sequence
  Description of Artificial Sequence: Synthetic oligonucleotide
agggaauuagaggcagcaa

SEQ ID NO: 615813 - RNA, 19 nt, Artificial Sequence
  Description of Artificial Sequence: Synthetic oligonucleotide
agcuuguugcagcgucccu

SEQ ID NO: 615814 - RNA, 19 nt, Artificial Sequence
  Description of Artificial Sequence: Synthetic oligonucleotide
ugcaaccgcucucgcgcgu

SEQ ID NO: 615815 - RNA, 19 nt, Artificial Sequence
  Description of Artificial Sequence: Synthetic oligonucleotide
acgugggugcaaggugugg

SEQ ID NO: 615816 - RNA, 19 nt, Artificial Sequence
  Description of Artificial Sequence: Synthetic oligonucleotide
ccuccauuucagcauggug

SEQ ID NO: 615817 - RNA, 19 nt, Artificial Sequence
  Description of Artificial Sequence: Synthetic oligonucleotide
agacggggugagugggcug

SEQ ID NO: 615818 - RNA, 19 nt, Artificial Sequence
  Description of Artificial Sequence: Synthetic oligonucleotide
aucaugcagcauggcuccg

SEQ ID NO: 615819 - RNA, 19 nt, Artificial Sequence
  Description of Artificial Sequence: Synthetic oligonucleotide
ccgaaaugcugggcgaugg

SEQ ID NO: 615820 - RNA, 19 nt, Artificial Sequence
  Description of Artificial Sequence: Synthetic oligonucleotide
gucggugcccggaucugag

SEQ ID NO: 615821 - RNA, 19 nt, Artificial Sequence
  Description of Artificial Sequence: Synthetic oligonucleotide
ccgucggguugcuucaagg

SEQ ID NO: 615822 - RNA, 19 nt, Artificial Sequence
  Description of Artificial Sequence: Synthetic oligonucleotide
ucucgcgcgugcucagguc

SEQ ID NO: 615823 - RNA, 19 nt, Artificial Sequence
  Description of Artificial Sequence: Synthetic oligonucleotide
ccaucgggugacugaacag

SEQ ID NO: 615824 - RNA, 19 nt, Artificial Sequence
  Description of Artificial Sequence: Synthetic oligonucleotide
aucgcaucugccggcuugu

SEQ ID NO: 615825 - RNA, 19 nt, Artificial Sequence
  Description of Artificial Sequence: Synthetic oligonucleotide
caccgagguggcacaguac

SEQ ID NO: 615826 - RNA, 19 nt, Artificial Sequence
  Description of Artificial Sequence: Synthetic oligonucleotide
gcgagagcuguauaggacu

SEQ ID NO: 615827 - RNA, 19 nt, Artificial Sequence
  Description of Artificial Sequence: Synthetic oligonucleotide
uugguacuaggugguuaaa

SEQ ID NO: 615828 - RNA, 19 nt, Artificial Sequence
  Description of Artificial Sequence: Synthetic oligonucleotide
gccugcugauggaacaucc

SEQ ID NO: 615829 - RNA, 19 nt, Artificial Sequence
  Description of Artificial Sequence: Synthetic oligonucleotide
ggaauuagaggcagcaaau

SEQ ID NO: 615830 - RNA, 19 nt, Artificial Sequence
  Description of Artificial Sequence: Synthetic oligonucleotide
ugggugcaaggugugggua

SEQ ID NO: 615831 - RNA, 19 nt, Artificial Sequence
  Description of Artificial Sequence: Synthetic oligonucleotide
gcacaguacgcgcuucuca

SEQ ID NO: 615832 - RNA, 19 nt, Artificial Sequence
  Description of Artificial Sequence: Synthetic oligonucleotide
cacgugcuucuguagccca

SEQ ID NO: 615833 - RNA, 19 nt, Artificial Sequence
  Description of Artificial Sequence: Synthetic oligonucleotide
uagucggugcccggaucug

SEQ ID NO: 615834 - RNA, 19 nt, Artificial Sequence
  Description of Artificial Sequence: Synthetic oligonucleotide
acgugacuugccagguuug

SEQ ID NO: 615835 - RNA, 19 nt, Artificial Sequence
  Description of Artificial Sequence: Synthetic oligonucleotide
ccgaccuaagaccuuuauc

SEQ ID NO: 615836 - RNA, 19 nt, Artificial Sequence
  Description of Artificial Sequence: Synthetic oligonucleotide
gcacggaccccagaggaug

SEQ ID NO: 615837 - RNA, 19 nt, Artificial Sequence
  Description of Artificial Sequence: Synthetic oligonucleotide
caucgggugacugaacagu

SEQ ID NO: 615838 - RNA, 19 nt, Artificial Sequence
  Description of Artificial Sequence: Synthetic oligonucleotide
guacagcgguucugaccag

SEQ ID NO: 615839 - RNA, 19 nt, Artificial Sequence
  Description of Artificial Sequence: Synthetic oligonucleotide
uaccgaccuaagaccuuua

SEQ ID NO: 615840 - RNA, 19 nt, Artificial Sequence
  Description of Artificial Sequence: Synthetic oligonucleotide
ugagcgugcagggcacgau

SEQ ID NO: 615841 - RNA, 19 nt, Artificial Sequence
  Description of Artificial Sequence: Synthetic oligonucleotide
cagcgucccugaaauccuc

SEQ ID NO: 615842 - RNA, 19 nt, Artificial Sequence
  Description of Artificial Sequence: Synthetic oligonucleotide
agucggugcccggaucuga

SEQ ID NO: 615843 - RNA, 19 nt, Artificial Sequence
  Description of Artificial Sequence: Synthetic oligonucleotide
guagcccaauggucuuuuc

SEQ ID NO: 615844 - RNA, 19 nt, Artificial Sequence
  Description of Artificial Sequence: Synthetic oligonucleotide
gguagaagucacgugacuu

SEQ ID NO: 615845 - RNA, 19 nt, Artificial Sequence
  Description of Artificial Sequence: Synthetic oligonucleotide
caaccgcucucgcgcgugc

SEQ ID NO: 615846 - RNA, 19 nt, Artificial Sequence
  Description of Artificial Sequence: Synthetic oligonucleotide
aggccaccgagguggcaca

SEQ ID NO: 615847 - RNA, 19 nt, Artificial Sequence
  Description of Artificial Sequence: Synthetic oligonucleotide
cuaggugguuaaacuugua

SEQ ID NO: 615848 - RNA, 19 nt, Artificial Sequence
  Description of Artificial Sequence: Synthetic oligonucleotide
cgguccaauguuguagacg

SEQ ID NO: 615849 - RNA, 19 nt, Artificial Sequence
  Description of Artificial Sequence: Synthetic oligonucleotide
cagacuguacagcgguucu

SEQ ID NO: 615850 - RNA, 19 nt, Artificial Sequence
  Description of Artificial Sequence: Synthetic oligonucleotide
augcugggcgauggauaag

SEQ ID NO: 615851 - RNA, 19 nt, Artificial Sequence
  Description of Artificial Sequence: Synthetic oligonucleotide
cuggcauggcacggacccc

SEQ ID NO: 615852 - RNA, 19 nt, Artificial Sequence
  Description of Artificial Sequence: Synthetic oligonucleotide
gcacgugcuucuguagccc

SEQ ID NO: 615853 - RNA, 19 nt, Artificial Sequence
  Description of Artificial Sequence: Synthetic oligonucleotide
cccaucgggugacugaaca

SEQ ID NO: 615854 - RNA, 19 nt, Artificial Sequence
  Description of Artificial Sequence: Synthetic oligonucleotide
ggacgugacuguuuccacu

SEQ ID NO: 615855 - RNA, 19 nt, Artificial Sequence
  Description of Artificial Sequence: Synthetic oligonucleotide
agcacccuaccgaccuaag

SEQ ID NO: 615856 - RNA, 19 nt, Artificial Sequence
  Description of Artificial Sequence: Synthetic oligonucleotide
caguggacggaugaccaua

SEQ ID NO: 615857 - RNA, 19 nt, Artificial Sequence
  Description of Artificial Sequence: Synthetic oligonucleotide
ccgggauacugagauacuc

SEQ ID NO: 615858 - RNA, 19 nt, Artificial Sequence
  Description of Artificial Sequence: Synthetic oligonucleotide
caguacgcgcuucucacau

SEQ ID NO: 615859 - RNA, 19 nt, Artificial Sequence
  Description of Artificial Sequence: Synthetic oligonucleotide
acgguggccaagacuccca

SEQ ID NO: 615860 - RNA, 19 nt, Artificial Sequence
  Description of Artificial Sequence: Synthetic oligonucleotide
gcgauggauaagccacuca

SEQ ID NO: 615861 - RNA, 19 nt, Artificial Sequence
  Description of Artificial Sequence: Synthetic oligonucleotide
cgggauacugagauacuca

SEQ ID NO: 615862 - RNA, 19 nt, Artificial Sequence
  Description of Artificial Sequence: Synthetic oligonucleotide
ccgcuuccgaaaugcuggg

SEQ ID NO: 615863 - RNA, 19 nt, Artificial Sequence
  Description of Artificial Sequence: Synthetic oligonucleotide
cucgcgcgugcucaggucu

SEQ ID NO: 615864 - RNA, 19 nt, Artificial Sequence
  Description of Artificial Sequence: Synthetic oligonucleotide
gucaguugucgaagaccuc

SEQ ID NO: 615865 - RNA, 19 nt, Artificial Sequence
  Description of Artificial Sequence: Synthetic oligonucleotide
gcacccuaccgaccuaaga

SEQ ID NO: 615866 - RNA, 19 nt, Artificial Sequence
  Description of Artificial Sequence: Synthetic oligonucleotide
cacagcaguggccgggaua

SEQ ID NO: 615867 - RNA, 19 nt, Artificial Sequence
  Description of Artificial Sequence: Synthetic oligonucleotide
gagcagcgagagcuguaua

SEQ ID NO: 615868 - RNA, 19 nt, Artificial Sequence
  Description of Artificial Sequence: Synthetic oligonucleotide
aaccgucggguugcuucaa

SEQ ID NO: 615869 - RNA, 19 nt, Artificial Sequence
  Description of Artificial Sequence: Synthetic oligonucleotide
ggcgauggauaagccacuc

SEQ ID NO: 615870 - RNA, 19 nt, Artificial Sequence
  Description of Artificial Sequence: Synthetic oligonucleotide
gucacgugacuugccaggu

SEQ ID NO: 615871 - RNA, 19 nt, Artificial Sequence
  Description of Artificial Sequence: Synthetic oligonucleotide
ccuaagaccuuuauccauu

SEQ ID NO: 615872 - RNA, 19 nt, Artificial Sequence
  Description of Artificial Sequence: Synthetic oligonucleotide
caaaucgcaucugccggcu

SEQ ID NO: 615873 - RNA, 19 nt, Artificial Sequence
  Description of Artificial Sequence: Synthetic oligonucleotide
gcuauccauucaggagugc

SEQ ID NO: 615874 - RNA, 19 nt, Artificial Sequence
  Description of Artificial Sequence: Synthetic oligonucleotide
agagugcuuuguacccaaa

SEQ ID NO: 615875 - RNA, 19 nt, Artificial Sequence
  Description of Artificial Sequence: Synthetic oligonucleotide
agaccucuuuucagauaau

SEQ ID NO: 615876 - RNA, 19 nt, Artificial Sequence
  Description of Artificial Sequence: Synthetic oligonucleotide
cgugccaaugaugcacagc

SEQ ID NO: 615877 - RNA, 19 nt, Artificial Sequence
  Description of Artificial Sequence: Synthetic oligonucleotide
gcauacgugggugcaaggu

SEQ ID NO: 615878 - RNA, 19 nt, Artificial Sequence
  Description of Artificial Sequence: Synthetic oligonucleotide
ggucuuuuccagggagcuc

SEQ ID NO: 615879 - RNA, 19 nt, Artificial Sequence
  Description of Artificial Sequence: Synthetic oligonucleotide
cggaucugaggucaccuca

SEQ ID NO: 615880 - RNA, 19 nt, Artificial Sequence
  Description of Artificial Sequence: Synthetic oligonucleotide
gucguccugcaaccgcucu

SEQ ID NO: 615881 - RNA, 19 nt, Artificial Sequence
  Description of Artificial Sequence: Synthetic oligonucleotide
ccgguccaauguuguagac

SEQ ID NO: 615882 - RNA, 19 nt, Artificial Sequence
  Description of Artificial Sequence: Synthetic oligonucleotide
ccggaucugaggucaccuc

SEQ ID NO: 615883 - RNA, 19 nt, Artificial Sequence
  Description of Artificial Sequence: Synthetic oligonucleotide
cuaccgaccuaagaccuuu

SEQ ID NO: 615884 - RNA, 19 nt, Artificial Sequence
  Description of Artificial Sequence: Synthetic oligonucleotide
agacucccauaagcacaga

SEQ ID NO: 615885 - RNA, 19 nt, Artificial Sequence
  Description of Artificial Sequence: Synthetic oligonucleotide
cagcacccuaccgaccuaa

SEQ ID NO: 615886 - RNA, 19 nt, Artificial Sequence
  Description of Artificial Sequence: Synthetic oligonucleotide
cccuaccgaccuaagaccu

SEQ ID NO: 615887 - RNA, 19 nt, Artificial Sequence
  Description of Artificial Sequence: Synthetic oligonucleotide
ccacccuggcauggcacgg

SEQ ID NO: 615888 - RNA, 19 nt, Artificial Sequence
  Description of Artificial Sequence: Synthetic oligonucleotide
ccaaacggagaaaccuugu

SEQ ID NO: 615889 - RNA, 19 nt, Artificial Sequence
  Description of Artificial Sequence: Synthetic oligonucleotide
ccgugccaaugaugcacag

SEQ ID NO: 615890 - RNA, 19 nt, Artificial Sequence
  Description of Artificial Sequence: Synthetic oligonucleotide
ggugcaagguguggguacu

SEQ ID NO: 615891 - RNA, 19 nt, Artificial Sequence
  Description of Artificial Sequence: Synthetic oligonucleotide
gccuacucacuugaaggcu

SEQ ID NO: 615892 - RNA, 19 nt, Artificial Sequence
  Description of Artificial Sequence: Synthetic oligonucleotide
guggacggaugaccauacu

SEQ ID NO: 615893 - RNA, 19 nt, Artificial Sequence
  Description of Artificial Sequence: Synthetic oligonucleotide
ucgcaucugccggcuuguc

SEQ ID NO: 615894 - RNA, 19 nt, Artificial Sequence
  Description of Artificial Sequence: Synthetic oligonucleotide
caguugucgaagaccucuu

SEQ ID NO: 615895 - RNA, 19 nt, Artificial Sequence
  Description of Artificial Sequence: Synthetic oligonucleotide
gucacccauuguagcaagu

SEQ ID NO: 615896 - RNA, 19 nt, Artificial Sequence
  Description of Artificial Sequence: Synthetic oligonucleotide
ggccugcugauggaacauc

SEQ ID NO: 615897 - RNA, 19 nt, Artificial Sequence
  Description of Artificial Sequence: Synthetic oligonucleotide
ggaucugaggucaccucau

SEQ ID NO: 615898 - RNA, 19 nt, Artificial Sequence
  Description of Artificial Sequence: Synthetic oligonucleotide
gcgugcagggcacgaugca

SEQ ID NO: 615899 - RNA, 19 nt, Artificial Sequence
  Description of Artificial Sequence: Synthetic oligonucleotide
gguggccaagacucccaua

SEQ ID NO: 615900 - RNA, 19 nt, Artificial Sequence
  Description of Artificial Sequence: Synthetic oligonucleotide
gcgcauugacagcugcaua

SEQ ID NO: 615901 - RNA, 19 nt, Artificial Sequence
  Description of Artificial Sequence: Synthetic oligonucleotide
gucugccuacucacuugaa

SEQ ID NO: 615902 - RNA, 19 nt, Artificial Sequence
  Description of Artificial Sequence: Synthetic oligonucleotide
ccaccgagguggcacagua

SEQ ID NO: 615903 - RNA, 19 nt, Artificial Sequence
  Description of Artificial Sequence: Synthetic oligonucleotide
gcgucccugaaauccuccu

SEQ ID NO: 615904 - RNA, 19 nt, Artificial Sequence
  Description of Artificial Sequence: Synthetic oligonucleotide
cgaaaugcugggcgaugga

SEQ ID NO: 615905 - RNA, 19 nt, Artificial Sequence
  Description of Artificial Sequence: Synthetic oligonucleotide
gcauggcacggaccccaga

SEQ ID NO: 615906 - RNA, 19 nt, Artificial Sequence
  Description of Artificial Sequence: Synthetic oligonucleotide
gcugccggcagaggcagcu

SEQ ID NO: 615907 - RNA, 19 nt, Artificial Sequence
  Description of Artificial Sequence: Synthetic oligonucleotide
cccauuguagcaaguucuu

SEQ ID NO: 615908 - RNA, 19 nt, Artificial Sequence
  Description of Artificial Sequence: Synthetic oligonucleotide
ccucuagucggugcccgga

SEQ ID NO: 615909 - RNA, 19 nt, Artificial Sequence
  Description of Artificial Sequence: Synthetic oligonucleotide
gcgcgugcucaggucucag

SEQ ID NO: 615910 - RNA, 19 nt, Artificial Sequence
  Description of Artificial Sequence: Synthetic oligonucleotide
cugccggcuugucacccau

SEQ ID NO: 615911 - RNA, 19 nt, Artificial Sequence
  Description of Artificial Sequence: Synthetic oligonucleotide
cgugcucaggucucagacu

SEQ ID NO: 615912 - RNA, 19 nt, Artificial Sequence
  Description of Artificial Sequence: Synthetic oligonucleotide
gcccaucgggugacugaac

SEQ ID NO: 615913 - RNA, 19 nt, Artificial Sequence
  Description of Artificial Sequence: Synthetic oligonucleotide
cgcgcuucucacauccacu

SEQ ID NO: 615914 - RNA, 19 nt, Artificial Sequence
  Description of Artificial Sequence: Synthetic oligonucleotide
cguuguaggcuuccuccgu

SEQ ID NO: 615915 - RNA, 19 nt, Artificial Sequence
  Description of Artificial Sequence: Synthetic oligonucleotide
cggugcccggaucugaggu

SEQ ID NO: 615916 - RNA, 19 nt, Artificial Sequence
  Description of Artificial Sequence: Synthetic oligonucleotide
ccuaccgaccuaagaccuu

SEQ ID NO: 615917 - RNA, 19 nt, Artificial Sequence
  Description of Artificial Sequence: Synthetic oligonucleotide
gccaccgagguggcacagu

SEQ ID NO: 615918 - RNA, 19 nt, Artificial Sequence
  Description of Artificial Sequence: Synthetic oligonucleotide
ggguugcuucaaggaguau

SEQ ID NO: 615919 - RNA, 19 nt, Artificial Sequence
  Description of Artificial Sequence: Synthetic oligonucleotide
cgcgcgugcucaggucuca

SEQ ID NO: 615920 - RNA, 19 nt, Artificial Sequence
  Description of Artificial Sequence: Synthetic oligonucleotide
aacagucuuagccaguucc

SEQ ID NO: 615921 - RNA, 19 nt, Artificial Sequence
  Description of Artificial Sequence: Synthetic oligonucleotide
guaauugcggaacaggugg

SEQ ID NO: 615922 - RNA, 19 nt, Artificial Sequence
  Description of Artificial Sequence: Synthetic oligonucleotide
  modified_base (14)..(14): a, c, u, g, unknown or other
uaaucauucagcanacccu

SEQ ID NO: 615923 - RNA, 19 nt, Artificial Sequence
  Description of Artificial Sequence: Synthetic oligonucleotide
aucuacacagguuacgggc

SEQ ID NO: 615924 - RNA, 19 nt, Artificial Sequence
  Description of Artificial Sequence: Synthetic oligonucleotide
uguuugcugaucuuggagg

SEQ ID NO: 615925 - RNA, 19 nt, Artificial Sequence
  Description of Artificial Sequence: Synthetic oligonucleotide
uuaguguuugaucucacug

SEQ ID NO: 615926 - RNA, 19 nt, Artificial Sequence
  Description of Artificial Sequence: Synthetic oligonucleotide
acucauagggccgugagcc

SEQ ID NO: 615927 - RNA, 19 nt, Artificial Sequence
  Description of Artificial Sequence: Synthetic oligonucleotide
guacacaccacgcauauag

SEQ ID NO: 615928 - RNA, 19 nt, Artificial Sequence
  Description of Artificial Sequence: Synthetic oligonucleotide
uggagcaucguaauugcgg

SEQ ID NO: 615929 - RNA, 19 nt, Artificial Sequence
  Description of Artificial Sequence: Synthetic oligonucleotide
uacggaaguacacaccacg

SEQ ID NO: 615930 - RNA, 19 nt, Artificial Sequence
  Description of Artificial Sequence: Synthetic oligonucleotide
auggauuucagucauggca

SEQ ID NO: 615931 - RNA, 19 nt, Artificial Sequence
  Description of Artificial Sequence: Synthetic oligonucleotide
ucgaagagguccuuggugg

SEQ ID NO: 615932 - RNA, 19 nt, Artificial Sequence
  Description of Artificial Sequence: Synthetic oligonucleotide
cacauaaaggggcugaggg

SEQ ID NO: 615933 - RNA, 19 nt, Artificial Sequence
  Description of Artificial Sequence: Synthetic oligonucleotide
ucuagacccauuuauuuca

SEQ ID NO: 615934 - RNA, 19 nt, Artificial Sequence
  Description of Artificial Sequence: Synthetic oligonucleotide
aguagguuggggcugcccc

SEQ ID NO: 615935 - RNA, 19 nt, Artificial Sequence
  Description of Artificial Sequence: Synthetic oligonucleotide
cagucuaccaccaucuugc

SEQ ID NO: 615936 - RNA, 19 nt, Artificial Sequence
  Description of Artificial Sequence: Synthetic oligonucleotide
caggauugaccuuugagag

SEQ ID NO: 615937 - RNA, 19 nt, Artificial Sequence
  Description of Artificial Sequence: Synthetic oligonucleotide
  modified_base (8)..(8): a, c, u, g, unknown or other
caugcugnuaaucauucag

SEQ ID NO: 615938 - RNA, 19 nt, Artificial Sequence
  Description of Artificial Sequence: Synthetic oligonucleotide
agauguagacuucugucuc

SEQ ID NO: 615939 - RNA, 19 nt, Artificial Sequence
  Description of Artificial Sequence: Synthetic oligonucleotide
uuucgagauggccaggugc

SEQ ID NO: 615940 - RNA, 19 nt, Artificial Sequence
  Description of Artificial Sequence: Synthetic oligonucleotide
acaugcacaggauugaccu

SEQ ID NO: 615941 - RNA, 19 nt, Artificial Sequence
  Description of Artificial Sequence: Synthetic oligonucleotide
auguuaucuuucgagaugg

SEQ ID NO: 615942 - RNA, 19 nt, Artificial Sequence
  Description of Artificial Sequence: Synthetic oligonucleotide
  modified_base (4)..(4): a, c, u, g, unknown or other
  modified_base (18)..(18): a, c, u, g, unknown or other
cugnuaaucauucagcana

SEQ ID NO: 615943 - RNA, 19 nt, Artificial Sequence
  Description of Artificial Sequence: Synthetic oligonucleotide
uuuccuaggagcugcagca

SEQ ID NO: 615944 - RNA, 19 nt, Artificial Sequence
  Description of Artificial Sequence: Synthetic oligonucleotide
acuauggagaguuucuuca

SEQ ID NO: 615945 - RNA, 19 nt, Artificial Sequence
  Description of Artificial Sequence: Synthetic oligonucleotide
ugagucuagacccauuuau

SEQ ID NO: 615946 - RNA, 19 nt, Artificial Sequence
  Description of Artificial Sequence: Synthetic oligonucleotide
aaacucccgcuucaggaac

SEQ ID NO: 615947 - RNA, 19 nt, Artificial Sequence
  Description of Artificial Sequence: Synthetic oligonucleotide
  modified_base (3)..(3): a, c, u, g, unknown or other
  modified_base (17)..(17): a, c, u, g, unknown or other
ugnuaaucauucagcanac

SEQ ID NO: 615948 - RNA, 19 nt, Artificial Sequence
  Description of Artificial Sequence: Synthetic oligonucleotide
  modified_base (6)..(6): a, c, u, g, unknown or other
ugcugnuaaucauucagca

SEQ ID NO: 615949 - RNA, 19 nt, Artificial Sequence
  Description of Artificial Sequence: Synthetic oligonucleotide
auaccaguuggucugcagg

SEQ ID NO: 615950 - RNA, 19 nt, Artificial Sequence
  Description of Artificial Sequence: Synthetic oligonucleotide
  modified_base (7)..(7): a, c, u, g, unknown or other
ucagcanacccuucuggag

SEQ ID NO: 615951 - RNA, 19 nt, Artificial Sequence
  Description of Artificial Sequence: Synthetic oligonucleotide
  modified_base (7)..(7): a, c, u, g, unknown or other
augcugnuaaucauucagc

SEQ ID NO: 615952 - RNA, 19 nt, Artificial Sequence
  Description of Artificial Sequence: Synthetic oligonucleotide
uuugguugaagcgagguuc

SEQ ID NO: 615953 - RNA, 19 nt, Artificial Sequence
  Description of Artificial Sequence: Synthetic oligonucleotide
  modified_base (10)..(10): a, c, u, g, unknown or other
uccaugcugnuaaucauuc

SEQ ID NO: 615954 - RNA, 19 nt, Artificial Sequence
  Description of Artificial Sequence: Synthetic oligonucleotide
  modified_base (9)..(9): a, c, u, g, unknown or other
auucagcanacccuucugg

SEQ ID NO: 615955 - RNA, 19 nt, Artificial Sequence
  Description of Artificial Sequence: Synthetic oligonucleotide
uggaguuagcccuuguuug

SEQ ID NO: 615956 - RNA, 19 nt, Artificial Sequence
  Description of Artificial Sequence: Synthetic oligonucleotide
caccucaucuuucauacgg

SEQ ID NO: 615957 - RNA, 19 nt, Artificial Sequence
  Description of Artificial Sequence: Synthetic oligonucleotide
acuggauuucaauagccug

SEQ ID NO: 615958 - RNA, 19 nt, Artificial Sequence
  Description of Artificial Sequence: Synthetic oligonucleotide
gauggcaaugaggaguugg

SEQ ID NO: 615959 - RNA, 19 nt, Artificial Sequence
  Description of Artificial Sequence: Synthetic oligonucleotide
ugggcuuucagccuagagu

SEQ ID NO: 615960 - RNA, 19 nt, Artificial Sequence
  Description of Artificial Sequence: Synthetic oligonucleotide
uuuagggcaguugauggag

SEQ ID NO: 615961 - RNA, 19 nt, Artificial Sequence
  Description of Artificial Sequence: Synthetic oligonucleotide
uucauacggaaguacacac

SEQ ID NO: 615962 - RNA, 19 nt, Artificial Sequence
  Description of Artificial Sequence: Synthetic oligonucleotide
uccauguuaucuuucgaga

SEQ ID NO: 615963 - RNA, 19 nt, Artificial Sequence
  Description of Artificial Sequence: Synthetic oligonucleotide
uccccaaagucauuugggg

SEQ ID NO: 615964 - RNA, 19 nt, Artificial Sequence
  Description of Artificial Sequence: Synthetic oligonucleotide
ugaguuggcggcuucaggu

SEQ ID NO: 615965 - RNA, 19 nt, Artificial Sequence
  Description of Artificial Sequence: Synthetic oligonucleotide
aggauugaccuuugagagc

SEQ ID NO: 615966 - RNA, 19 nt, Artificial Sequence
  Description of Artificial Sequence: Synthetic oligonucleotide
gaucucacugauauuuagg

SEQ ID NO: 615967 - RNA, 19 nt, Artificial Sequence
  Description of Artificial Sequence: Synthetic oligonucleotide
auauaggccauggacuuac

SEQ ID NO: 615968 - RNA, 19 nt, Artificial Sequence
  Description of Artificial Sequence: Synthetic oligonucleotide
aauuguccccuuguacagc

SEQ ID NO: 615969 - RNA, 19 nt, Artificial Sequence
  Description of Artificial Sequence: Synthetic oligonucleotide
agagagacgacuauggaga

SEQ ID NO: 615970 - RNA, 19 nt, Artificial Sequence
  Description of Artificial Sequence: Synthetic oligonucleotide
cuccauguuaucuuucgag

SEQ ID NO: 615971 - RNA, 19 nt, Artificial Sequence
  Description of Artificial Sequence: Synthetic oligonucleotide
cagagagacgacuauggag

SEQ ID NO: 615972 - RNA, 19 nt, Artificial Sequence
  Description of Artificial Sequence: Synthetic oligonucleotide
uucgagauggccaggugca

SEQ ID NO: 615973 - RNA, 19 nt, Artificial Sequence
  Description of Artificial Sequence: Synthetic oligonucleotide
  modified_base (8)..(8): a, c, u, g, unknown or other
uucagcanacccuucugga

SEQ ID NO: 615974 - RNA, 19 nt, Artificial Sequence
  Description of Artificial Sequence: Synthetic oligonucleotide
ucuacacagguuacgggca

SEQ ID NO: 615975 - RNA, 19 nt, Artificial Sequence
  Description of Artificial Sequence: Synthetic oligonucleotide
  modified_base (11)..(11): a, c, u, g, unknown or other
uagucgagganccuuugcu

SEQ ID NO: 615976 - RNA, 19 nt, Artificial Sequence
  Description of Artificial Sequence: Synthetic oligonucleotide
uuucauacggaaguacaca

SEQ ID NO: 615977 - RNA, 19 nt, Artificial Sequence
  Description of Artificial Sequence: Synthetic oligonucleotide
  modified_base (10)..(10): a, c, u, g, unknown or other
agucgagganccuuugcug

SEQ ID NO: 615978 - RNA, 19 nt, Artificial Sequence
  Description of Artificial Sequence: Synthetic oligonucleotide
acuuacugugcagaauggc

SEQ ID NO: 615979 - RNA, 19 nt, Artificial Sequence
  Description of Artificial Sequence: Synthetic oligonucleotide
ucauacggaaguacacacc

SEQ ID NO: 615980 - RNA, 19 nt, Artificial Sequence
  Description of Artificial Sequence: Synthetic oligonucleotide
auauuuagggcaguugaug

SEQ ID NO: 615981 - RNA, 19 nt, Artificial Sequence
  Description of Artificial Sequence: Synthetic oligonucleotide
uacuggaugccaaccaucu

SEQ ID NO: 615982 - RNA, 19 nt, Artificial Sequence
  Description of Artificial Sequence: Synthetic oligonucleotide
gaagcgagguucccgaaug

SEQ ID NO: 615983 - RNA, 19 nt, Artificial Sequence
  Description of Artificial Sequence: Synthetic oligonucleotide
ugucugauccuaguugggg

SEQ ID NO: 615984 - RNA, 19 nt, Artificial Sequence
  Description of Artificial Sequence: Synthetic oligonucleotide
ugaucauggauucgcuucu

SEQ ID NO: 615985 - RNA, 19 nt, Artificial Sequence
  Description of Artificial Sequence: Synthetic oligonucleotide
gcggaagacaucuacacag

SEQ ID NO: 615986 - RNA, 19 nt, Artificial Sequence
  Description of Artificial Sequence: Synthetic oligonucleotide
  modified_base (2)..(2): a, c, u, g, unknown or other
  modified_base (16)..(16): a, c, u, g, unknown or other
gnuaaucauucagcanacc

SEQ ID NO: 615987 - RNA, 19 nt, Artificial Sequence
  Description of Artificial Sequence: Synthetic oligonucleotide
cauguuaucuuucgagaug

SEQ ID NO: 615988 - RNA, 19 nt, Artificial Sequence
  Description of Artificial Sequence: Synthetic oligonucleotide
uacaugcacaggauugacc

SEQ ID NO: 615989 - RNA, 19 nt, Artificial Sequence
  Description of Artificial Sequence: Synthetic oligonucleotide
ucccagagggcauuaacca

SEQ ID NO: 615990 - RNA, 19 nt, Artificial Sequence
  Description of Artificial Sequence: Synthetic oligonucleotide
uugguugaagcgagguucc

SEQ ID NO: 615991 - RNA, 19 nt, Artificial Sequence
  Description of Artificial Sequence: Synthetic oligonucleotide
ggacuuacugugcagaaug

SEQ ID NO: 615992 - RNA, 19 nt, Artificial Sequence
  Description of Artificial Sequence: Synthetic oligonucleotide
cauacggaaguacacacca

SEQ ID NO: 615993 - RNA, 19 nt, Artificial Sequence
  Description of Artificial Sequence: Synthetic oligonucleotide
aaacagucuuagccaguuc

SEQ ID NO: 615994 - RNA, 19 nt, Artificial Sequence
  Description of Artificial Sequence: Synthetic oligonucleotide
aaguacacaccacgcauau

SEQ ID NO: 615995 - RNA, 19 nt, Artificial Sequence
  Description of Artificial Sequence: Synthetic oligonucleotide
gacucuuaagguggggugg

SEQ ID NO: 615996 - RNA, 19 nt, Artificial Sequence
  Description of Artificial Sequence: Synthetic oligonucleotide
gacaccuuaguguuugauc

SEQ ID NO: 615997 - RNA, 19 nt, Artificial Sequence
  Description of Artificial Sequence: Synthetic oligonucleotide
cucccagagggcauuaacc

SEQ ID NO: 615998 - RNA, 19 nt, Artificial Sequence
  Description of Artificial Sequence: Synthetic oligonucleotide
gggcuuucagccuagagug

SEQ ID NO: 615999 - RNA, 19 nt, Artificial Sequence
  Description of Artificial Sequence: Synthetic oligonucleotide
agcccgaccaucuggaucu

SEQ ID NO: 616000 - RNA, 19 nt, Artificial Sequence
  Description of Artificial Sequence: Synthetic oligonucleotide
gacaucuacacagguuacg

SEQ ID NO: 616001 - RNA, 19 nt, Artificial Sequence
  Description of Artificial Sequence: Synthetic oligonucleotide
ugcucgccauaccaguugg

SEQ ID NO: 616002 - RNA, 19 nt, Artificial Sequence
  Description of Artificial Sequence: Synthetic oligonucleotide
gucuuagccaguucccagg

SEQ ID NO: 616003 - RNA, 19 nt, Artificial Sequence
  Description of Artificial Sequence: Synthetic oligonucleotide
ugagccccgaaacaccuca

SEQ ID NO: 616004 - RNA, 19 nt, Artificial Sequence
  Description of Artificial Sequence: Synthetic oligonucleotide
gaugaugggguggaacucc

SEQ ID NO: 616005 - RNA, 19 nt, Artificial Sequence
  Description of Artificial Sequence: Synthetic oligonucleotide
cuuugguggccauggaccc

SEQ ID NO: 616006 - RNA, 19 nt, Artificial Sequence
  Description of Artificial Sequence: Synthetic oligonucleotide
uguccugauuguauucaug

SEQ ID NO: 616007 - RNA, 19 nt, Artificial Sequence
  Description of Artificial Sequence: Synthetic oligonucleotide
aguggaaagaagggguggg

SEQ ID NO: 616008 - RNA, 19 nt, Artificial Sequence
  Description of Artificial Sequence: Synthetic oligonucleotide
uucgagucugaaguacugg

SEQ ID NO: 616009 - RNA, 19 nt, Artificial Sequence
  Description of Artificial Sequence: Synthetic oligonucleotide
agucuagacccauuuauuu

SEQ ID NO: 616010 - RNA, 19 nt, Artificial Sequence
  Description of Artificial Sequence: Synthetic oligonucleotide
auugcggaacagguggagc

SEQ ID NO: 616011 - RNA, 19 nt, Artificial Sequence
  Description of Artificial Sequence: Synthetic oligonucleotide
ggaauuguccccuuguaca

SEQ ID NO: 616012 - RNA, 19 nt, Artificial Sequence
  Description of Artificial Sequence: Synthetic oligonucleotide
agucuuagccaguucccag

SEQ ID NO: 616013 - RNA, 19 nt, Artificial Sequence
  Description of Artificial Sequence: Synthetic oligonucleotide
ucagguuaauguuuugguu

SEQ ID NO: 616014 - RNA, 19 nt, Artificial Sequence
  Description of Artificial Sequence: Synthetic oligonucleotide
caucuacacagguuacggg

SEQ ID NO: 616015 - RNA, 19 nt, Artificial Sequence
  Description of Artificial Sequence: Synthetic oligonucleotide
ucccggugcucauagaugu

SEQ ID NO: 616016 - RNA, 19 nt, Artificial Sequence
  Description of Artificial Sequence: Synthetic oligonucleotide
ucgggagaugggcaugagg

SEQ ID NO: 616017 - RNA, 19 nt, Artificial Sequence
  Description of Artificial Sequence: Synthetic oligonucleotide
agaggugccuugugggaac

SEQ ID NO: 616018 - RNA, 19 nt, Artificial Sequence
  Description of Artificial Sequence: Synthetic oligonucleotide
aguuagcccuuguuuguuc

SEQ ID NO: 616019 - RNA, 19 nt, Artificial Sequence
  Description of Artificial Sequence: Synthetic oligonucleotide
ugauuguauucauggauuu

SEQ ID NO: 616020 - RNA, 19 nt, Artificial Sequence
  Description of Artificial Sequence: Synthetic oligonucleotide
aggugcaguggaguuagcc

SEQ ID NO: 616021 - RNA, 19 nt, Artificial Sequence
  Description of Artificial Sequence: Synthetic oligonucleotide
acagguuacgggcacuuga

SEQ ID NO: 616022 - RNA, 19 nt, Artificial Sequence
  Description of Artificial Sequence: Synthetic oligonucleotide
acggaaguacacaccacgc

SEQ ID NO: 616023 - RNA, 19 nt, Artificial Sequence
  Description of Artificial Sequence: Synthetic oligonucleotide
acucuuaaggugggguggc

SEQ ID NO: 616024 - RNA, 19 nt, Artificial Sequence
  Description of Artificial Sequence: Synthetic oligonucleotide
uugcggaacagguggagcu

SEQ ID NO: 616025 - RNA, 19 nt, Artificial Sequence
  Description of Artificial Sequence: Synthetic oligonucleotide
ugaggcguucuuuccuagg

SEQ ID NO: 616026 - RNA, 19 nt, Artificial Sequence
  Description of Artificial Sequence: Synthetic oligonucleotide
gagggcauuaaccagcacu

SEQ ID NO: 616027 - RNA, 19 nt, Artificial Sequence
  Description of Artificial Sequence: Synthetic oligonucleotide
gguccagacucauagggcc

SEQ ID NO: 616028 - RNA, 19 nt, Artificial Sequence
  Description of Artificial Sequence: Synthetic oligonucleotide
acagcguaauggaaggccg

SEQ ID NO: 616029 - RNA, 19 nt, Artificial Sequence
  Description of Artificial Sequence: Synthetic oligonucleotide
agacucauagggccgugag

SEQ ID NO: 616030 - RNA, 19 nt, Artificial Sequence
  Description of Artificial Sequence: Synthetic oligonucleotide
agucuaccaccaucuugcc

SEQ ID NO: 616031 - RNA, 19 nt, Artificial Sequence
  Description of Artificial Sequence: Synthetic oligonucleotide
uuagggcaguugauggagc

SEQ ID NO: 616032 - RNA, 19 nt, Artificial Sequence
  Description of Artificial Sequence: Synthetic oligonucleotide
ugauggagccaguuguccu

SEQ ID NO: 616033 - RNA, 19 nt, Artificial Sequence
  Description of Artificial Sequence: Synthetic oligonucleotide
caggugaucauggauucgc

SEQ ID NO: 616034 - RNA, 19 nt, Artificial Sequence
  Description of Artificial Sequence: Synthetic oligonucleotide
gacgcguaccaucuccugc

SEQ ID NO: 616035 - RNA, 19 nt, Artificial Sequence
  Description of Artificial Sequence: Synthetic oligonucleotide
cuauggagaguuucuucac

SEQ ID NO: 616036 - RNA, 19 nt, Artificial Sequence
  Description of Artificial Sequence: Synthetic oligonucleotide
gucuagacccauuuauuuc

SEQ ID NO: 616037 - RNA, 19 nt, Artificial Sequence
  Description of Artificial Sequence: Synthetic oligonucleotide
uaauugcggaacaggugga

SEQ ID NO: 616038 - RNA, 19 nt, Artificial Sequence
  Description of Artificial Sequence: Synthetic oligonucleotide
agggcauuaaccagcacug

SEQ ID NO: 616039 - RNA, 19 nt, Artificial Sequence
  Description of Artificial Sequence: Synthetic oligonucleotide
uugauggagccaguugucc

SEQ ID NO: 616040 - RNA, 19 nt, Artificial Sequence
  Description of Artificial Sequence: Synthetic oligonucleotide
  modified_base (12)..(12): a, c, u, g, unknown or other
cuagucgagganccuuugc

SEQ ID NO: 616041 - RNA, 19 nt, Artificial Sequence
  Description of Artificial Sequence: Synthetic oligonucleotide
caccauccaggaaacgucc

SEQ ID NO: 616042 - RNA, 19 nt, Artificial Sequence
  Description of Artificial Sequence: Synthetic oligonucleotide
cauuaaccagcacugcauc

SEQ ID NO: 616043 - RNA, 19 nt, Artificial Sequence
  Description of Artificial Sequence: Synthetic oligonucleotide
guugaagcgagguucccga

SEQ ID NO: 616044 - RNA, 19 nt, Artificial Sequence
  Description of Artificial Sequence: Synthetic oligonucleotide
aaggccgucucuccuuugu

SEQ ID NO: 616045 - RNA, 19 nt, Artificial Sequence
  Description of Artificial Sequence: Synthetic oligonucleotide
  modified_base (3)..(3): a, c, u, g, unknown or other
ganccuuugcuguggaucu

SEQ ID NO: 616046 - RNA, 19 nt, Artificial Sequence
  Description of Artificial Sequence: Synthetic oligonucleotide
cagguuacgggcacuugag

SEQ ID NO: 616047 - RNA, 19 nt, Artificial Sequence
  Description of Artificial Sequence: Synthetic oligonucleotide
agguuacgggcacuugagg

SEQ ID NO: 616048 - RNA, 19 nt, Artificial Sequence
  Description of Artificial Sequence: Synthetic oligonucleotide
ugcaaagcagcaggacgcg

SEQ ID NO: 616049 - RNA, 19 nt, Artificial Sequence
  Description of Artificial Sequence: Synthetic oligonucleotide
cauggauuucagucauggc

SEQ ID NO: 616050 - RNA, 19 nt, Artificial Sequence
  Description of Artificial Sequence: Synthetic oligonucleotide
auguuuugguugaagcgag

SEQ ID NO: 616051 - RNA, 19 nt, Artificial Sequence
  Description of Artificial Sequence: Synthetic oligonucleotide
aguacaugcacaggauuga

SEQ ID NO: 616052 - RNA, 19 nt, Artificial Sequence
  Description of Artificial Sequence: Synthetic oligonucleotide
aucauguccugauuguauu

SEQ ID NO: 616053 - RNA, 19 nt, Artificial Sequence
  Description of Artificial Sequence: Synthetic oligonucleotide
  modified_base (8)..(8): a, c, u, g, unknown or other
ucgagganccuuugcugug

SEQ ID NO: 616054 - RNA, 19 nt, Artificial Sequence
  Description of Artificial Sequence: Synthetic oligonucleotide
ucauagggccgugagcccc

SEQ ID NO: 616055 - RNA, 19 nt, Artificial Sequence
  Description of Artificial Sequence: Synthetic oligonucleotide
cuagacccauuuauuucac

SEQ ID NO: 616056 - RNA, 19 nt, Artificial Sequence
  Description of Artificial Sequence: Synthetic oligonucleotide
ugagguggccuugaacccc

SEQ ID NO: 616057 - RNA, 19 nt, Artificial Sequence
  Description of Artificial Sequence: Synthetic oligonucleotide
  modified_base (5)..(5): a, c, u, g, unknown or other
agcanacccuucuggagaa

SEQ ID NO: 616058 - RNA, 19 nt, Artificial Sequence
  Description of Artificial Sequence: Synthetic oligonucleotide
aagaguacaugcacaggau

SEQ ID NO: 616059 - RNA, 19 nt, Artificial Sequence
  Description of Artificial Sequence: Synthetic oligonucleotide
gacgacuauggagaguuuc

SEQ ID NO: 616060 - RNA, 19 nt, Artificial Sequence
  Description of Artificial Sequence: Synthetic oligonucleotide
caggacgcguaccaucucc

SEQ ID NO: 616061 - RNA, 19 nt, Artificial Sequence
  Description of Artificial Sequence: Synthetic oligonucleotide
cugauauuuagggcaguug

SEQ ID NO: 616062 - RNA, 19 nt, Artificial Sequence
  Description of Artificial Sequence: Synthetic oligonucleotide
caggagucuccccaaaguc

SEQ ID NO: 616063 - RNA, 19 nt, Artificial Sequence
  Description of Artificial Sequence: Synthetic oligonucleotide
acgcguaccaucuccugcu

SEQ ID NO: 616064 - RNA, 19 nt, Artificial Sequence
  Description of Artificial Sequence: Synthetic oligonucleotide
uuacgggcacuugagggga

SEQ ID NO: 616065 - RNA, 19 nt, Artificial Sequence
  Description of Artificial Sequence: Synthetic oligonucleotide
accuuaguguuugaucuca

SEQ ID NO: 616066 - RNA, 19 nt, Artificial Sequence
  Description of Artificial Sequence: Synthetic oligonucleotide
ggcguucuuuccuaggagc

SEQ ID NO: 616067 - RNA, 19 nt, Artificial Sequence
  Description of Artificial Sequence: Synthetic oligonucleotide
uugagucuagacccauuua

SEQ ID NO: 616068 - RNA, 19 nt, Artificial Sequence
  Description of Artificial Sequence: Synthetic oligonucleotide
acguccauugggccggaag

SEQ ID NO: 616069 - RNA, 19 nt, Artificial Sequence
  Description of Artificial Sequence: Synthetic oligonucleotide
agcgagguucccgaaugac

SEQ ID NO: 616070 - RNA, 19 nt, Artificial Sequence
  Description of Artificial Sequence: Synthetic oligonucleotide
cuggacaccuuaguguuug

SEQ ID NO: 616071 - RNA, 19 nt, Artificial Sequence
  Description of Artificial Sequence: Synthetic oligonucleotide
guuguuggccagcagccca

SEQ ID NO: 616072 - RNA, 19 nt, Artificial Sequence
  Description of Artificial Sequence: Synthetic oligonucleotide
guuagcccuuguuuguuca

SEQ ID NO: 616073 - RNA, 19 nt, Artificial Sequence
  Description of Artificial Sequence: Synthetic oligonucleotide
gaucugugcaacagucuac

SEQ ID NO: 616074 - RNA, 19 nt, Artificial Sequence
  Description of Artificial Sequence: Synthetic oligonucleotide
ucugugcaacagucuacca

SEQ ID NO: 616075 - RNA, 19 nt, Artificial Sequence
  Description of Artificial Sequence: Synthetic oligonucleotide
agcguaauggaaggccguc

SEQ ID NO: 616076 - RNA, 19 nt, Artificial Sequence
  Description of Artificial Sequence: Synthetic oligonucleotide
ccuugugggaaccuguuug

SEQ ID NO: 616077 - RNA, 19 nt, Artificial Sequence
  Description of Artificial Sequence: Synthetic oligonucleotide
  modified_base (4)..(4): a, c, u, g, unknown or other
gganccuuugcuguggauc

SEQ ID NO: 616078 - RNA, 19 nt, Artificial Sequence
  Description of Artificial Sequence: Synthetic oligonucleotide
  modified_base (6)..(6): a, c, u, g, unknown or other
cagcanacccuucuggaga

SEQ ID NO: 616079 - RNA, 19 nt, Artificial Sequence
  Description of Artificial Sequence: Synthetic oligonucleotide
agccccgaaacaccucauc

SEQ ID NO: 616080 - RNA, 19 nt, Artificial Sequence
  Description of Artificial Sequence: Synthetic oligonucleotide
uuagcccuuguuuguucac

SEQ ID NO: 616081 - RNA, 19 nt, Artificial Sequence
  Description of Artificial Sequence: Synthetic oligonucleotide
auacggaaguacacaccac

SEQ ID NO: 616082 - RNA, 19 nt, Artificial Sequence
  Description of Artificial Sequence: Synthetic oligonucleotide
ggacucuuaagguggggug

SEQ ID NO: 616083 - RNA, 19 nt, Artificial Sequence
  Description of Artificial Sequence: Synthetic oligonucleotide
aggagucuccccaaaguca

SEQ ID NO: 616084 - RNA, 19 nt, Artificial Sequence
  Description of Artificial Sequence: Synthetic oligonucleotide
ggcauuaaccagcacugca

SEQ ID NO: 616085 - RNA, 19 nt, Artificial Sequence
  Description of Artificial Sequence: Synthetic oligonucleotide
gcaacagucuaccaccauc

SEQ ID NO: 616086 - RNA, 19 nt, Artificial Sequence
  Description of Artificial Sequence: Synthetic oligonucleotide
acgacuauggagaguuucu

SEQ ID NO: 616087 - RNA, 19 nt, Artificial Sequence
  Description of Artificial Sequence: Synthetic oligonucleotide
uuucagccuagaguggcaa

SEQ ID NO: 616088 - RNA, 19 nt, Artificial Sequence
  Description of Artificial Sequence: Synthetic oligonucleotide
uaaccagcacugcaucauu

SEQ ID NO: 616089 - RNA, 19 nt, Artificial Sequence
  Description of Artificial Sequence: Synthetic oligonucleotide
ucuuggugugcuccccaaa

SEQ ID NO: 616090 - RNA, 19 nt, Artificial Sequence
  Description of Artificial Sequence: Synthetic oligonucleotide
ccuggauuucaccugauga

SEQ ID NO: 616091 - RNA, 19 nt, Artificial Sequence
  Description of Artificial Sequence: Synthetic oligonucleotide
  modified_base (12)..(12): a, c, u, g, unknown or other
aucauucagcanacccuuc

SEQ ID NO: 616092 - RNA, 19 nt, Artificial Sequence
  Description of Artificial Sequence: Synthetic oligonucleotide
cauggacuuacugugcaga

SEQ ID NO: 616093 - RNA, 19 nt, Artificial Sequence
  Description of Artificial Sequence: Synthetic oligonucleotide
cugauuguauucauggauu

SEQ ID NO: 616094 - RNA, 19 nt, Artificial Sequence
  Description of Artificial Sequence: Synthetic oligonucleotide
cucauagggccgugagccc

SEQ ID NO: 616095 - RNA, 19 nt, Artificial Sequence
  Description of Artificial Sequence: Synthetic oligonucleotide
auguccugauuguauucau

SEQ ID NO: 616096 - RNA, 19 nt, Artificial Sequence
  Description of Artificial Sequence: Synthetic oligonucleotide
agguagacacagccgccug

SEQ ID NO: 616097 - RNA, 19 nt, Artificial Sequence
  Description of Artificial Sequence: Synthetic oligonucleotide
gaaguacacaccacgcaua

SEQ ID NO: 616098 - RNA, 19 nt, Artificial Sequence
  Description of Artificial Sequence: Synthetic oligonucleotide
agcaggacgcguaccaucu

SEQ ID NO: 616099 - RNA, 19 nt, Artificial Sequence
  Description of Artificial Sequence: Synthetic oligonucleotide
cuuucgagauggccaggug

SEQ ID NO: 616100 - RNA, 19 nt, Artificial Sequence
  Description of Artificial Sequence: Synthetic oligonucleotide
  modified_base (9)..(9): a, c, u, g, unknown or other
gucgagganccuuugcugu

SEQ ID NO: 616101 - RNA, 19 nt, Artificial Sequence
  Description of Artificial Sequence: Synthetic oligonucleotide
aggggcaaagucgaacaga

SEQ ID NO: 616102 - RNA, 19 nt, Artificial Sequence
  Description of Artificial Sequence: Synthetic oligonucleotide
gauauuuagggcaguugau

SEQ ID NO: 616103 - RNA, 19 nt, Artificial Sequence
  Description of Artificial Sequence: Synthetic oligonucleotide
  modified_base (5)..(5): a, c, u, g, unknown or other
  modified_base (19)..(19): a, c, u, g, unknown or other
gcugnuaaucauucagcan

SEQ ID NO: 616104 - RNA, 19 nt, Artificial Sequence
  Description of Artificial Sequence: Synthetic oligonucleotide
ugcaacagucuaccaccau

SEQ ID NO: 616105 - RNA, 19 nt, Artificial Sequence
  Description of Artificial Sequence: Synthetic oligonucleotide
uggagaguuucuucaccuu

SEQ ID NO: 616106 - RNA, 19 nt, Artificial Sequence
  Description of Artificial Sequence: Synthetic oligonucleotide
auuucagucauggcaucua

SEQ ID NO: 616107 - RNA, 19 nt, Artificial Sequence
  Description of Artificial Sequence: Synthetic oligonucleotide
  modified_base (2)..(2): a, c, u, g, unknown or other
anccuuugcuguggaucug

SEQ ID NO: 616108 - RNA, 19 nt, Artificial Sequence
  Description of Artificial Sequence: Synthetic oligonucleotide
uucagccuagaguggcaaa

SEQ ID NO: 616109 - RNA, 19 nt, Artificial Sequence
  Description of Artificial Sequence: Synthetic oligonucleotide
gaugaugaccaggccuuuc

SEQ ID NO: 616110 - RNA, 19 nt, Artificial Sequence
  Description of Artificial Sequence: Synthetic oligonucleotide
uggacuuacugugcagaau

SEQ ID NO: 616111 - RNA, 19 nt, Artificial Sequence
  Description of Artificial Sequence: Synthetic oligonucleotide
cccgaaugaccucuggagc

SEQ ID NO: 616112 - RNA, 19 nt, Artificial Sequence
  Description of Artificial Sequence: Synthetic oligonucleotide
agguucccgaaugaccucu

SEQ ID NO: 616113 - RNA, 19 nt, Artificial Sequence
  Description of Artificial Sequence: Synthetic oligonucleotide
  modified_base (2)..(2): a, c, u, g, unknown or other
anacccuucuggagaacuu

SEQ ID NO: 616114 - RNA, 19 nt, Artificial Sequence
  Description of Artificial Sequence: Synthetic oligonucleotide
cauuugggguauccacuuc

SEQ ID NO: 616115 - RNA, 19 nt, Artificial Sequence
  Description of Artificial Sequence: Synthetic oligonucleotide
gaccucuggagcaucguaa

SEQ ID NO: 616116 - RNA, 19 nt, Artificial Sequence
  Description of Artificial Sequence: Synthetic oligonucleotide
guuuugguugaagcgaggu

SEQ ID NO: 616117 - RNA, 19 nt, Artificial Sequence
  Description of Artificial Sequence: Synthetic oligonucleotide
ggcggcuucagguuaaugu

SEQ ID NO: 616118 - RNA, 19 nt, Artificial Sequence
  Description of Artificial Sequence: Synthetic oligonucleotide
guacuggaugccaaccauc

SEQ ID NO: 616119 - RNA, 19 nt, Artificial Sequence
  Description of Artificial Sequence: Synthetic oligonucleotide
gccuagaguggcaaagugc

SEQ ID NO: 616120 - RNA, 19 nt, Artificial Sequence
  Description of Artificial Sequence: Synthetic oligonucleotide
  modified_base (13)..(13): a, c, u, g, unknown or other
acuagucgagganccuuug

SEQ ID NO: 616121 - RNA, 19 nt, Artificial Sequence
  Description of Artificial Sequence: Synthetic oligonucleotide
ggaaguacacaccacgcau

SEQ ID NO: 616122 - RNA, 19 nt, Artificial Sequence
  Description of Artificial Sequence: Synthetic oligonucleotide
cagcaggacgcguaccauc

SEQ ID NO: 616123 - RNA, 19 nt, Artificial Sequence
  Description of Artificial Sequence: Synthetic oligonucleotide
guagguuggggcugcccca

SEQ ID NO: 616124 - RNA, 19 nt, Artificial Sequence
  Description of Artificial Sequence: Synthetic oligonucleotide
uggaaggccgucucuccuu

SEQ ID NO: 616125 - RNA, 19 nt, Artificial Sequence
  Description of Artificial Sequence: Synthetic oligonucleotide
cguaauugcggaacaggug

SEQ ID NO: 616126 - RNA, 19 nt, Artificial Sequence
  Description of Artificial Sequence: Synthetic oligonucleotide
cuguguggauggaaagcca

SEQ ID NO: 616127 - RNA, 19 nt, Artificial Sequence
  Description of Artificial Sequence: Synthetic oligonucleotide
ucgagauggccaggugcag

SEQ ID NO: 616128 - RNA, 19 nt, Artificial Sequence
  Description of Artificial Sequence: Synthetic oligonucleotide
agggccgugagccccgaaa

SEQ ID NO: 616129 - RNA, 19 nt, Artificial Sequence
  Description of Artificial Sequence: Synthetic oligonucleotide
guacagcguaauggaaggc

SEQ ID NO: 616130 - RNA, 19 nt, Artificial Sequence
  Description of Artificial Sequence: Synthetic oligonucleotide
agggcgacagcagcauuug

SEQ ID NO: 616131 - RNA, 19 nt, Artificial Sequence
  Description of Artificial Sequence: Synthetic oligonucleotide
uacacagguuacgggcacu

SEQ ID NO: 616132 - RNA, 19 nt, Artificial Sequence
  Description of Artificial Sequence: Synthetic oligonucleotide
gagguucccgaaugaccuc

SEQ ID NO: 616133 - RNA, 19 nt, Artificial Sequence
  Description of Artificial Sequence: Synthetic oligonucleotide
gguggaacuccauuucugu

SEQ ID NO: 616134 - RNA, 19 nt, Artificial Sequence
  Description of Artificial Sequence: Synthetic oligonucleotide
agagacgacuauggagagu

SEQ ID NO: 616135 - RNA, 19 nt, Artificial Sequence
  Description of Artificial Sequence: Synthetic oligonucleotide
ccuccguccaggcagagca

SEQ ID NO: 616136 - RNA, 19 nt, Artificial Sequence
  Description of Artificial Sequence: Synthetic oligonucleotide
ugguugaagcgagguuccc

SEQ ID NO: 616137 - RNA, 19 nt, Artificial Sequence
  Description of Artificial Sequence: Synthetic oligonucleotide
gaucauggauucgcuucuc

SEQ ID NO: 616138 - RNA, 19 nt, Artificial Sequence
  Description of Artificial Sequence: Synthetic oligonucleotide
uccccuuguacagcguaau

SEQ ID NO: 616139 - RNA, 19 nt, Artificial Sequence
  Description of Artificial Sequence: Synthetic oligonucleotide
ugcggaacagguggagcuc

SEQ ID NO: 616140 - RNA, 19 nt, Artificial Sequence
  Description of Artificial Sequence: Synthetic oligonucleotide
ccgaaugaccucuggagca

SEQ ID NO: 616141 - RNA, 19 nt, Artificial Sequence
  Description of Artificial Sequence: Synthetic oligonucleotide
ggcgacagcagcauuugga

SEQ ID NO: 616142 - RNA, 19 nt, Artificial Sequence
  Description of Artificial Sequence: Synthetic oligonucleotide
cugggaggacucuuaaggu

SEQ ID NO: 616143 - RNA, 19 nt, Artificial Sequence
  Description of Artificial Sequence: Synthetic oligonucleotide
ugacguugcagcgggcauu

SEQ ID NO: 616144 - RNA, 19 nt, Artificial Sequence
  Description of Artificial Sequence: Synthetic oligonucleotide
gcaucguaauugcggaaca

SEQ ID NO: 616145 - RNA, 19 nt, Artificial Sequence
  Description of Artificial Sequence: Synthetic oligonucleotide
ugccaaccaucucgcucca

SEQ ID NO: 616146 - RNA, 19 nt, Artificial Sequence
  Description of Artificial Sequence: Synthetic oligonucleotide
uggcaucuagugugggguu

SEQ ID NO: 616147 - RNA, 19 nt, Artificial Sequence
  Description of Artificial Sequence: Synthetic oligonucleotide
  modified_base (5)..(5): a, c, u, g, unknown or other
agganccuuugcuguggau

SEQ ID NO: 616148 - RNA, 19 nt, Artificial Sequence
  Description of Artificial Sequence: Synthetic oligonucleotide
gaggugccuugugggaacc

SEQ ID NO: 616149 - RNA, 19 nt, Artificial Sequence
  Description of Artificial Sequence: Synthetic oligonucleotide
ggguggaacuccauuucug

SEQ ID NO: 616150 - RNA, 19 nt, Artificial Sequence
  Description of Artificial Sequence: Synthetic oligonucleotide
aggugaucauggauucgcu

SEQ ID NO: 616151 - RNA, 19 nt, Artificial Sequence
  Description of Artificial Sequence: Synthetic oligonucleotide
ucagggcgacagcagcauu

SEQ ID NO: 616152 - RNA, 19 nt, Artificial Sequence
  Description of Artificial Sequence: Synthetic oligonucleotide
agggcaguugauggagcca

SEQ ID NO: 616153 - RNA, 19 nt, Artificial Sequence
  Description of Artificial Sequence: Synthetic oligonucleotide
cacgcauauaggccaugga

SEQ ID NO: 616154 - RNA, 19 nt, Artificial Sequence
  Description of Artificial Sequence: Synthetic oligonucleotide
ggguucgagucugaaguac

SEQ ID NO: 616155 - RNA, 19 nt, Artificial Sequence
  Description of Artificial Sequence: Synthetic oligonucleotide
cagucuuagccaguuccca

SEQ ID NO: 616156 - RNA, 19 nt, Artificial Sequence
  Description of Artificial Sequence: Synthetic oligonucleotide
  modified_base (3)..(3): a, c, u, g, unknown or other
canacccuucuggagaacu

SEQ ID NO: 616157 - RNA, 19 nt, Artificial Sequence
  Description of Artificial Sequence: Synthetic oligonucleotide
  modified_base (14)..(14): a, c, u, g, unknown or other
cacuagucgagganccuuu

SEQ ID NO: 616158 - RNA, 19 nt, Artificial Sequence
  Description of Artificial Sequence: Synthetic oligonucleotide
ccauggacuuacugugcag

SEQ ID NO: 616159 - RNA, 19 nt, Artificial Sequence
  Description of Artificial Sequence: Synthetic oligonucleotide
ggcuuucagccuagagugg

SEQ ID NO: 616160 - RNA, 19 nt, Artificial Sequence
  Description of Artificial Sequence: Synthetic oligonucleotide
gaaguagguuggggcugcc

SEQ ID NO: 616161 - RNA, 19 nt, Artificial Sequence
  Description of Artificial Sequence: Synthetic oligonucleotide
aggacgcguaccaucuccu

SEQ ID NO: 616162 - RNA, 19 nt, Artificial Sequence
  Description of Artificial Sequence: Synthetic oligonucleotide
gagucuagacccauuuauu

SEQ ID NO: 616163 - RNA, 19 nt, Artificial Sequence
  Description of Artificial Sequence: Synthetic oligonucleotide
ggugccuugugggaaccug

SEQ ID NO: 616164 - RNA, 19 nt, Artificial Sequence
  Description of Artificial Sequence: Synthetic oligonucleotide
cuccguccaggcagagcag

SEQ ID NO: 616165 - RNA, 19 nt, Artificial Sequence
  Description of Artificial Sequence: Synthetic oligonucleotide
ggcaucuagugugggguug

SEQ ID NO: 616166 - RNA, 19 nt, Artificial Sequence
  Description of Artificial Sequence: Synthetic oligonucleotide
ccacgcauauaggccaugg

SEQ ID NO: 616167 - RNA, 19 nt, Artificial Sequence
  Description of Artificial Sequence: Synthetic oligonucleotide
cauggagcggggcugggcu

SEQ ID NO: 616168 - RNA, 19 nt, Artificial Sequence
  Description of Artificial Sequence: Synthetic oligonucleotide
cagugucccugugagcauc

SEQ ID NO: 616169 - RNA, 19 nt, Artificial Sequence
  Description of Artificial Sequence: Synthetic oligonucleotide
ccggugcucauagauguag

SEQ ID NO: 616170 - RNA, 19 nt, Artificial Sequence
  Description of Artificial Sequence: Synthetic oligonucleotide
ggccauggacccuggguac

SEQ ID NO: 616171 - RNA, 19 nt, Artificial Sequence
  Description of Artificial Sequence: Synthetic oligonucleotide
ccuuaguguuugaucucac

SEQ ID NO: 616172 - RNA, 19 nt, Artificial Sequence
  Description of Artificial Sequence: Synthetic oligonucleotide
gcauauaggccauggacuu

SEQ ID NO: 616173 - RNA, 19 nt, Artificial Sequence
  Description of Artificial Sequence: Synthetic oligonucleotide
caucuuucauacggaagua

SEQ ID NO: 616174 - RNA, 19 nt, Artificial Sequence
  Description of Artificial Sequence: Synthetic oligonucleotide
gccuggauuucaccugaug

SEQ ID NO: 616175 - RNA, 19 nt, Artificial Sequence
  Description of Artificial Sequence: Synthetic oligonucleotide
  modified_base (7)..(7): a, c, u, g, unknown or other
cgagganccuuugcugugg

SEQ ID NO: 616176 - RNA, 19 nt, Artificial Sequence
  Description of Artificial Sequence: Synthetic oligonucleotide
acacagguuacgggcacuu

SEQ ID NO: 616177 - RNA, 19 nt, Artificial Sequence
  Description of Artificial Sequence: Synthetic oligonucleotide
augaccucuggagcaucgu

SEQ ID NO: 616178 - RNA, 19 nt, Artificial Sequence
  Description of Artificial Sequence: Synthetic oligonucleotide
ccugccacccagucgaaga

SEQ ID NO: 616179 - RNA, 19 nt, Artificial Sequence
  Description of Artificial Sequence: Synthetic oligonucleotide
gggccgugagccccgaaac

SEQ ID NO: 616180 - RNA, 19 nt, Artificial Sequence
  Description of Artificial Sequence: Synthetic oligonucleotide
ccgaaacaccucaucuuuc

SEQ ID NO: 616181 - RNA, 19 nt, Artificial Sequence
  Description of Artificial Sequence: Synthetic oligonucleotide
acccagucgaagagguccu

SEQ ID NO: 616182 - RNA, 19 nt, Artificial Sequence
  Description of Artificial Sequence: Synthetic oligonucleotide
ggacgcguaccaucuccug

SEQ ID NO: 616183 - RNA, 19 nt, Artificial Sequence
  Description of Artificial Sequence: Synthetic oligonucleotide
cacagguuacgggcacuug

SEQ ID NO: 616184 - RNA, 19 nt, Artificial Sequence
  Description of Artificial Sequence: Synthetic oligonucleotide
ccgugagccccgaaacacc

SEQ ID NO: 616185 - RNA, 19 nt, Artificial Sequence
  Description of Artificial Sequence: Synthetic oligonucleotide
cagcggcguguucccaugc

SEQ ID NO: 616186 - RNA, 19 nt, Artificial Sequence
  Description of Artificial Sequence: Synthetic oligonucleotide
  modified_base (19)..(19): a, c, u, g, unknown or other
ggcuccacuagucgaggan

SEQ ID NO: 616187 - RNA, 19 nt, Artificial Sequence
  Description of Artificial Sequence: Synthetic oligonucleotide
caccugaugauggggugga

SEQ ID NO: 616188 - RNA, 19 nt, Artificial Sequence
  Description of Artificial Sequence: Synthetic oligonucleotide
cggcguguucccaugcucc

SEQ ID NO: 616189 - RNA, 19 nt, Artificial Sequence
  Description of Artificial Sequence: Synthetic oligonucleotide
gaguuggcggcuucagguu

SEQ ID NO: 616190 - RNA, 19 nt, Artificial Sequence
  Description of Artificial Sequence: Synthetic oligonucleotide
ggccauggacuuacugugc

SEQ ID NO: 616191 - RNA, 19 nt, Artificial Sequence
  Description of Artificial Sequence: Synthetic oligonucleotide
caaagucauuugggguauc

SEQ ID NO: 616192 - RNA, 19 nt, Artificial Sequence
  Description of Artificial Sequence: Synthetic oligonucleotide
gcaggagucuccccaaagu

SEQ ID NO: 616193 - RNA, 19 nt, Artificial Sequence
  Description of Artificial Sequence: Synthetic oligonucleotide
aguacacaccacgcauaua

SEQ ID NO: 616194 - RNA, 19 nt, Artificial Sequence
  Description of Artificial Sequence: Synthetic oligonucleotide
gggcauuaaccagcacugc

SEQ ID NO: 616195 - RNA, 19 nt, Artificial Sequence
  Description of Artificial Sequence: Synthetic oligonucleotide
gccugcguuggccccguag

SEQ ID NO: 616196 - RNA, 19 nt, Artificial Sequence
  Description of Artificial Sequence: Synthetic oligonucleotide
aggccgucucuccuuuguu

SEQ ID NO: 616197 - RNA, 19 nt, Artificial Sequence
  Description of Artificial Sequence: Synthetic oligonucleotide
cgggagaugggcaugaggu

SEQ ID NO: 616198 - RNA, 19 nt, Artificial Sequence
  Description of Artificial Sequence: Synthetic oligonucleotide
acguugcagcgggcauugc

SEQ ID NO: 616199 - RNA, 19 nt, Artificial Sequence
  Description of Artificial Sequence: Synthetic oligonucleotide
cauauaggccauggacuua

SEQ ID NO: 616200 - RNA, 19 nt, Artificial Sequence
  Description of Artificial Sequence: Synthetic oligonucleotide
gcauuaaccagcacugcau

SEQ ID NO: 616201 - RNA, 19 nt, Artificial Sequence
  Description of Artificial Sequence: Synthetic oligonucleotide
caucucgcuccaggcccgg

SEQ ID NO: 616202 - RNA, 19 nt, Artificial Sequence
  Description of Artificial Sequence: Synthetic oligonucleotide
gguucgagucugaaguacu

SEQ ID NO: 616203 - RNA, 19 nt, Artificial Sequence
  Description of Artificial Sequence: Synthetic oligonucleotide
gcuggggcggaagacaucu

SEQ ID NO: 616204 - RNA, 19 nt, Artificial Sequence
  Description of Artificial Sequence: Synthetic oligonucleotide
ggggcggaagacaucuaca

SEQ ID NO: 616205 - RNA, 19 nt, Artificial Sequence
  Description of Artificial Sequence: Synthetic oligonucleotide
cgagguucccgaaugaccu

SEQ ID NO: 616206 - RNA, 19 nt, Artificial Sequence
  Description of Artificial Sequence: Synthetic oligonucleotide
  modified_base (9)..(9): a, c, u, g, unknown or other
ccaugcugnuaaucauuca

SEQ ID NO: 616207 - RNA, 19 nt, Artificial Sequence
  Description of Artificial Sequence: Synthetic oligonucleotide
ggcccuugcggaucauguc

SEQ ID NO: 616208 - RNA, 19 nt, Artificial Sequence
  Description of Artificial Sequence: Synthetic oligonucleotide
gaguuagcccuuguuuguu

SEQ ID NO: 616209 - RNA, 19 nt, Artificial Sequence
  Description of Artificial Sequence: Synthetic oligonucleotide
cagacucauagggccguga

SEQ ID NO: 616210 - RNA, 19 nt, Artificial Sequence
  Description of Artificial Sequence: Synthetic oligonucleotide
gggcugcucgccauaccag

SEQ ID NO: 616211 - RNA, 19 nt, Artificial Sequence
  Description of Artificial Sequence: Synthetic oligonucleotide
cagcguaauggaaggccgu

SEQ ID NO: 616212 - RNA, 19 nt, Artificial Sequence
  Description of Artificial Sequence: Synthetic oligonucleotide
ggccgugagccccgaaaca

SEQ ID NO: 616213 - RNA, 19 nt, Artificial Sequence
  Description of Artificial Sequence: Synthetic oligonucleotide
cagcaugaugucugauccu

SEQ ID NO: 616214 - RNA, 19 nt, Artificial Sequence
  Description of Artificial Sequence: Synthetic oligonucleotide
cagguagacacagccgccu

SEQ ID NO: 616215 - RNA, 19 nt, Artificial Sequence
  Description of Artificial Sequence: Synthetic oligonucleotide
ccccagagagacgacuaug

SEQ ID NO: 616216 - RNA, 19 nt, Artificial Sequence
  Description of Artificial Sequence: Synthetic oligonucleotide
gaacuccuccaggggucca

SEQ ID NO: 616217 - RNA, 19 nt, Artificial Sequence
  Description of Artificial Sequence: Synthetic oligonucleotide
ggcugcucgccauaccagu

SEQ ID NO: 616218 - RNA, 19 nt, Artificial Sequence
  Description of Artificial Sequence: Synthetic oligonucleotide
cggaaguacacaccacgca

SEQ ID NO: 616219 - RNA, 19 nt, Artificial Sequence
  Description of Artificial Sequence: Synthetic oligonucleotide
uuggcggcuucagguuaau

SEQ ID NO: 616220 - RNA, 19 nt, Artificial Sequence
  Description of Artificial Sequence: Synthetic oligonucleotide
gcguucuuuccuaggagcu

SEQ ID NO: 616221 - RNA, 19 nt, Artificial Sequence
  Description of Artificial Sequence: Synthetic oligonucleotide
ccccaaagucauuuggggu

SEQ ID NO: 616222 - RNA, 19 nt, Artificial Sequence
  Description of Artificial Sequence: Synthetic oligonucleotide
gcguguucccaugcucccc

SEQ ID NO: 616223 - RNA, 19 nt, Artificial Sequence
  Description of Artificial Sequence: Synthetic oligonucleotide
aacguccauugggccggaa

SEQ ID NO: 616224 - RNA, 19 nt, Artificial Sequence
  Description of Artificial Sequence: Synthetic oligonucleotide
ccggaaguagguuggggcu

SEQ ID NO: 616225 - RNA, 19 nt, Artificial Sequence
  Description of Artificial Sequence: Synthetic oligonucleotide
gcauggagcggggcugggc

SEQ ID NO: 616226 - RNA, 19 nt, Artificial Sequence
  Description of Artificial Sequence: Synthetic oligonucleotide
cucaucccucauggagcuc

SEQ ID NO: 616227 - RNA, 19 nt, Artificial Sequence
  Description of Artificial Sequence: Synthetic oligonucleotide
cguugcagcgggcauugca

SEQ ID NO: 616228 - RNA, 19 nt, Artificial Sequence
  Description of Artificial Sequence: Synthetic oligonucleotide
cugcguuggccccguaggu

SEQ ID NO: 616229 - RNA, 19 nt, Artificial Sequence
  Description of Artificial Sequence: Synthetic oligonucleotide
  modified_base (4)..(4): a, c, u, g, unknown or other
gcanacccuucuggagaac

SEQ ID NO: 616230 - RNA, 19 nt, Artificial Sequence
  Description of Artificial Sequence: Synthetic oligonucleotide
ccaugacguugcagcgggc

SEQ ID NO: 616231 - RNA, 19 nt, Artificial Sequence
  Description of Artificial Sequence: Synthetic oligonucleotide
cccgaaacaccucaucuuu

SEQ ID NO: 616232 - RNA, 19 nt, Artificial Sequence
  Description of Artificial Sequence: Synthetic oligonucleotide
cccaccauccaggaaacgu

SEQ ID NO: 616233 - RNA, 19 nt, Artificial Sequence
  Description of Artificial Sequence: Synthetic oligonucleotide
agacgacuauggagaguuu

SEQ ID NO: 616234 - RNA, 19 nt, Artificial Sequence
  Description of Artificial Sequence: Synthetic oligonucleotide
agccuggauuucaccugau

SEQ ID NO: 616235 - RNA, 19 nt, Artificial Sequence
  Description of Artificial Sequence: Synthetic oligonucleotide
gcaggacgcguaccaucuc

SEQ ID NO: 616236 - RNA, 19 nt, Artificial Sequence
  Description of Artificial Sequence: Synthetic oligonucleotide
cucagggcgacagcagcau

SEQ ID NO: 616237 - RNA, 19 nt, Artificial Sequence
  Description of Artificial Sequence: Synthetic oligonucleotide
cguccauugggccggaagu

SEQ ID NO: 616238 - RNA, 19 nt, Artificial Sequence
  Description of Artificial Sequence: Synthetic oligonucleotide
ccuugaaccccuccccacu

SEQ ID NO: 616239 - RNA, 19 nt, Artificial Sequence
  Description of Artificial Sequence: Synthetic oligonucleotide
gcguaauggaaggccgucu

SEQ ID NO: 616240 - RNA, 19 nt, Artificial Sequence
  Description of Artificial Sequence: Synthetic oligonucleotide
ccagacucauagggccgug

SEQ ID NO: 616241 - RNA, 19 nt, Artificial Sequence
  Description of Artificial Sequence: Synthetic oligonucleotide
ccgggcugcucgccauacc

SEQ ID NO: 616242 - RNA, 19 nt, Artificial Sequence
  Description of Artificial Sequence: Synthetic oligonucleotide
cauggacccuggguacacu

SEQ ID NO: 616243 - RNA, 19 nt, Artificial Sequence
  Description of Artificial Sequence: Synthetic oligonucleotide
cccuccguccaggcagagc

SEQ ID NO: 616244 - RNA, 19 nt, Artificial Sequence
  Description of Artificial Sequence: Synthetic oligonucleotide
gagccccgaaacaccucau

SEQ ID NO: 616245 - RNA, 19 nt, Artificial Sequence
  Description of Artificial Sequence: Synthetic oligonucleotide
cguguucccaugcuccccu

SEQ ID NO: 616246 - RNA, 19 nt, Artificial Sequence
  Description of Artificial Sequence: Synthetic oligonucleotide
gcagaggggcaaagucgaa

SEQ ID NO: 616247 - RNA, 19 nt, Artificial Sequence
  Description of Artificial Sequence: Synthetic oligonucleotide
ccccacgugcugguuccug

SEQ ID NO: 616248 - RNA, 19 nt, Artificial Sequence
  Description of Artificial Sequence: Synthetic oligonucleotide
ccagggguccagacucaua

SEQ ID NO: 616249 - RNA, 19 nt, Artificial Sequence
  Description of Artificial Sequence: Synthetic oligonucleotide
ccgccuggcccagcuuggc

SEQ ID NO: 616250 - RNA, 19 nt, Artificial Sequence
  Description of Artificial Sequence: Synthetic oligonucleotide
caucuagugugggguuguu

SEQ ID NO: 616251 - RNA, 19 nt, Artificial Sequence
  Description of Artificial Sequence: Synthetic oligonucleotide
cccggugcucauagaugua

SEQ ID NO: 616252 - RNA, 19 nt, Artificial Sequence
  Description of Artificial Sequence: Synthetic oligonucleotide
cgauggcaaugaggaguug

SEQ ID NO: 616253 - RNA, 19 nt, Artificial Sequence
  Description of Artificial Sequence: Synthetic oligonucleotide
gcccgaccaucuggaucug

SEQ ID NO: 616254 - RNA, 19 nt, Artificial Sequence
  Description of Artificial Sequence: Synthetic oligonucleotide
ccggucagacagugucccu

SEQ ID NO: 616255 - RNA, 19 nt, Artificial Sequence
  Description of Artificial Sequence: Synthetic oligonucleotide
cccgaccaucuggaucugu

SEQ ID NO: 616256 - RNA, 19 nt, Artificial Sequence
  Description of Artificial Sequence: Synthetic oligonucleotide
cgcguaccaucuccugcuu

SEQ ID NO: 616257 - RNA, 19 nt, Artificial Sequence
  Description of Artificial Sequence: Synthetic oligonucleotide
  modified_base (1)..(1): a, c, u, g, unknown or other
  modified_base (15)..(15): a, c, u, g, unknown or other
nuaaucauucagcanaccc

SEQ ID NO: 616258 - RNA, 19 nt, Artificial Sequence
  Description of Artificial Sequence: Synthetic oligonucleotide
aguauauaagcucagugcc

SEQ ID NO: 616259 - RNA, 19 nt, Artificial Sequence
  Description of Artificial Sequence: Synthetic oligonucleotide
acaaacauuuauuaagcgc

SEQ ID NO: 616260 - RNA, 19 nt, Artificial Sequence
  Description of Artificial Sequence: Synthetic oligonucleotide
aauucugaggccuaacuuc

SEQ ID NO: 616261 - RNA, 19 nt, Artificial Sequence
  Description of Artificial Sequence: Synthetic oligonucleotide
aaaauggccucacuguagc

SEQ ID NO: 616262 - RNA, 19 nt, Artificial Sequence
  Description of Artificial Sequence: Synthetic oligonucleotide
ugaaagaaccacuagucgg

SEQ ID NO: 616263 - RNA, 19 nt, Artificial Sequence
  Description of Artificial Sequence: Synthetic oligonucleotide
agaaaguaugaccaagugc

SEQ ID NO: 616264 - RNA, 19 nt, Artificial Sequence
  Description of Artificial Sequence: Synthetic oligonucleotide
acugugacgaggcacagcc

SEQ ID NO: 616265 - RNA, 19 nt, Artificial Sequence
  Description of Artificial Sequence: Synthetic oligonucleotide
aacaaacauuuauuaagcg

SEQ ID NO: 616266 - RNA, 19 nt, Artificial Sequence
  Description of Artificial Sequence: Synthetic oligonucleotide
ucauacaccaguauauaag

SEQ ID NO: 616267 - RNA, 19 nt, Artificial Sequence
  Description of Artificial Sequence: Synthetic oligonucleotide
uuauuaagcgccuaugugu

SEQ ID NO: 616268 - RNA, 19 nt, Artificial Sequence
  Description of Artificial Sequence: Synthetic oligonucleotide
cugguauacaaacugauag

SEQ ID NO: 616269 - RNA, 19 nt, Artificial Sequence
  Description of Artificial Sequence: Synthetic oligonucleotide
uuuauuaagcgccuaugug

SEQ ID NO: 616270 - RNA, 19 nt, Artificial Sequence
  Description of Artificial Sequence: Synthetic oligonucleotide
ugccacaucaccaaaaccu

SEQ ID NO: 616271 - RNA, 19 nt, Artificial Sequence
  Description of Artificial Sequence: Synthetic oligonucleotide
uccucgucaauucugaggc

SEQ ID NO: 616272 - RNA, 19 nt, Artificial Sequence
  Description of Artificial Sequence: Synthetic oligonucleotide
ucugacgccagucugagac

SEQ ID NO: 616273 - RNA, 19 nt, Artificial Sequence
  Description of Artificial Sequence: Synthetic oligonucleotide
ugauaguugggcaugugcc

SEQ ID NO: 616274 - RNA, 19 nt, Artificial Sequence
  Description of Artificial Sequence: Synthetic oligonucleotide
aaaaccuugaaggguggcc

SEQ ID NO: 616275 - RNA, 19 nt, Artificial Sequence
  Description of Artificial Sequence: Synthetic oligonucleotide
cauacaccaguauauaagc

SEQ ID NO: 616276 - RNA, 19 nt, Artificial Sequence
  Description of Artificial Sequence: Synthetic oligonucleotide
uauuaagcgccuaugugug

SEQ ID NO: 616277 - RNA, 19 nt, Artificial Sequence
  Description of Artificial Sequence: Synthetic oligonucleotide
gaaaguaugaccaagugcu

SEQ ID NO: 616278 - RNA, 19 nt, Artificial Sequence
  Description of Artificial Sequence: Synthetic oligonucleotide
cuaaccuuaggaaagcaug

SEQ ID NO: 616279 - RNA, 19 nt, Artificial Sequence
  Description of Artificial Sequence: Synthetic oligonucleotide
ugucuagucgcacaugcag

SEQ ID NO: 616280 - RNA, 19 nt, Artificial Sequence
  Description of Artificial Sequence: Synthetic oligonucleotide
agcuaaacugaccacagug

SEQ ID NO: 616281 - RNA, 19 nt, Artificial Sequence
  Description of Artificial Sequence: Synthetic oligonucleotide
agggccaacuuccaggagc

SEQ ID NO: 616282 - RNA, 19 nt, Artificial Sequence
  Description of Artificial Sequence: Synthetic oligonucleotide
aauguccuucauuucagcu

SEQ ID NO: 616283 - RNA, 19 nt, Artificial Sequence
  Description of Artificial Sequence: Synthetic oligonucleotide
agaacucacugcuuguaac

SEQ ID NO: 616284 - RNA, 19 nt, Artificial Sequence
  Description of Artificial Sequence: Synthetic oligonucleotide
ugggaugugccauacaugu

SEQ ID NO: 616285 - RNA, 19 nt, Artificial Sequence
  Description of Artificial Sequence: Synthetic oligonucleotide
agaaccacuagucgggauc

SEQ ID NO: 616286 - RNA, 19 nt, Artificial Sequence
  Description of Artificial Sequence: Synthetic oligonucleotide
aaguaugaccaagugcugg

SEQ ID NO: 616287 - RNA, 19 nt, Artificial Sequence
  Description of Artificial Sequence: Synthetic oligonucleotide
aagggugacugaugaacac

SEQ ID NO: 616288 - RNA, 19 nt, Artificial Sequence
  Description of Artificial Sequence: Synthetic oligonucleotide
caacucauuaauuucaaca

SEQ ID NO: 616289 - RNA, 19 nt, Artificial Sequence
  Description of Artificial Sequence: Synthetic oligonucleotide
acagucuaggggcagacag

SEQ ID NO: 616290 - RNA, 19 nt, Artificial Sequence
  Description of Artificial Sequence: Synthetic oligonucleotide
caugaagaauagcuggugg

SEQ ID NO: 616291 - RNA, 19 nt, Artificial Sequence
  Description of Artificial Sequence: Synthetic oligonucleotide
aguguugagaaaguaugac

SEQ ID NO: 616292 - RNA, 19 nt, Artificial Sequence
  Description of Artificial Sequence: Synthetic oligonucleotide
uaaccuuaggaaagcauga

SEQ ID NO: 616293 - RNA, 19 nt, Artificial Sequence
  Description of Artificial Sequence: Synthetic oligonucleotide
ugacuaagggagcuguucc

SEQ ID NO: 616294 - RNA, 19 nt, Artificial Sequence
  Description of Artificial Sequence: Synthetic oligonucleotide
gaaguacugccucucaccc

SEQ ID NO: 616295 - RNA, 19 nt, Artificial Sequence
  Description of Artificial Sequence: Synthetic oligonucleotide
ugcuuaaccccauuagcag

SEQ ID NO: 616296 - RNA, 19 nt, Artificial Sequence
  Description of Artificial Sequence: Synthetic oligonucleotide
uacauguugccucucugcc

SEQ ID NO: 616297 - RNA, 19 nt, Artificial Sequence
  Description of Artificial Sequence: Synthetic oligonucleotide
ucaauauuucugacgccag

SEQ ID NO: 616298 - RNA, 19 nt, Artificial Sequence
  Description of Artificial Sequence: Synthetic oligonucleotide
uuaggaagagagaacucac

SEQ ID NO: 616299 - RNA, 19 nt, Artificial Sequence
  Description of Artificial Sequence: Synthetic oligonucleotide
ucauagaacugccccaucu

SEQ ID NO: 616300 - RNA, 19 nt, Artificial Sequence
  Description of Artificial Sequence: Synthetic oligonucleotide
ucaauucugaggccuaacu

SEQ ID NO: 616301 - RNA, 19 nt, Artificial Sequence
  Description of Artificial Sequence: Synthetic oligonucleotide
gauaguugggcaugugccc

SEQ ID NO: 616302 - RNA, 19 nt, Artificial Sequence
  Description of Artificial Sequence: Synthetic oligonucleotide
uuagguccugcccucaagc

SEQ ID NO: 616303 - RNA, 19 nt, Artificial Sequence
  Description of Artificial Sequence: Synthetic oligonucleotide
aacucacugcuuguaacac

SEQ ID NO: 616304 - RNA, 19 nt, Artificial Sequence
  Description of Artificial Sequence: Synthetic oligonucleotide
uguuacaacaggccacagc

SEQ ID NO: 616305 - RNA, 19 nt, Artificial Sequence
  Description of Artificial Sequence: Synthetic oligonucleotide
gagaaaguaugaccaagug

SEQ ID NO: 616306 - RNA, 19 nt, Artificial Sequence
  Description of Artificial Sequence: Synthetic oligonucleotide
ucuaggggcagacaguaaa

SEQ ID NO: 616307 - RNA, 19 nt, Artificial Sequence
  Description of Artificial Sequence: Synthetic oligonucleotide
cuccaugugaguagcagcc

SEQ ID NO: 616308 - RNA, 19 nt, Artificial Sequence
  Description of Artificial Sequence: Synthetic oligonucleotide
aauggugcuuagguccugc

SEQ ID NO: 616309 - RNA, 19 nt, Artificial Sequence
  Description of Artificial Sequence: Synthetic oligonucleotide
guaagaagggucucuggag

SEQ ID NO: 616310 - RNA, 19 nt, Artificial Sequence
  Description of Artificial Sequence: Synthetic oligonucleotide
uguaacaccccguccuggg

SEQ ID NO: 616311 - RNA, 19 nt, Artificial Sequence
  Description of Artificial Sequence: Synthetic oligonucleotide
ggaacaaccugcaacaucc

SEQ ID NO: 616312 - RNA, 19 nt, Artificial Sequence
  Description of Artificial Sequence: Synthetic oligonucleotide
ugcuggagcacaaaagggu

SEQ ID NO: 616313 - RNA, 19 nt, Artificial Sequence
  Description of Artificial Sequence: Synthetic oligonucleotide
cuguucccuaauuucaggg

SEQ ID NO: 616314 - RNA, 19 nt, Artificial Sequence
  Description of Artificial Sequence: Synthetic oligonucleotide
auaagcucagugccauggc

SEQ ID NO: 616315 - RNA, 19 nt, Artificial Sequence
  Description of Artificial Sequence: Synthetic oligonucleotide
ugguauacaaacugauagu

SEQ ID NO: 616316 - RNA, 19 nt, Artificial Sequence
  Description of Artificial Sequence: Synthetic oligonucleotide
aaccgcaggccaaacaugg

SEQ ID NO: 616317 - RNA, 19 nt, Artificial Sequence
  Description of Artificial Sequence: Synthetic oligonucleotide
ccaaguuucggucucaggg

SEQ ID NO: 616318 - RNA, 19 nt, Artificial Sequence
  Description of Artificial Sequence: Synthetic oligonucleotide
uucagcuaaacugaccaca

SEQ ID NO: 616319 - RNA, 19 nt, Artificial Sequence
  Description of Artificial Sequence: Synthetic oligonucleotide
gauuuggucacagccuagg

SEQ ID NO: 616320 - RNA, 19 nt, Artificial Sequence
  Description of Artificial Sequence: Synthetic oligonucleotide
uaugaccaagugcuggagc

SEQ ID NO: 616321 - RNA, 19 nt, Artificial Sequence
  Description of Artificial Sequence: Synthetic oligonucleotide
aggggcagacaguaaacac

SEQ ID NO: 616322 - RNA, 19 nt, Artificial Sequence
  Description of Artificial Sequence: Synthetic oligonucleotide
acaaacugauaguugggca

SEQ ID NO: 616323 - RNA, 19 nt, Artificial Sequence
  Description of Artificial Sequence: Synthetic oligonucleotide
guucccuaauuucaggggc

SEQ ID NO: 616324 - RNA, 19 nt, Artificial Sequence
  Description of Artificial Sequence: Synthetic oligonucleotide
augaagaauagcuggugga

SEQ ID NO: 616325 - RNA, 19 nt, Artificial Sequence
  Description of Artificial Sequence: Synthetic oligonucleotide
uucauacaccaguauauaa

SEQ ID NO: 616326 - RNA, 19 nt, Artificial Sequence
  Description of Artificial Sequence: Synthetic oligonucleotide
uccgaaacccacuggagcu

SEQ ID NO: 616327 - RNA, 19 nt, Artificial Sequence
  Description of Artificial Sequence: Synthetic oligonucleotide
cugauaguugggcaugugc

SEQ ID NO: 616328 - RNA, 19 nt, Artificial Sequence
  Description of Artificial Sequence: Synthetic oligonucleotide
ucuagucgcacaugcagcu

SEQ ID NO: 616329 - RNA, 19 nt, Artificial Sequence
  Description of Artificial Sequence: Synthetic oligonucleotide
aggccuaacuuccuugccg

SEQ ID NO: 616330 - RNA, 19 nt, Artificial Sequence
  Description of Artificial Sequence: Synthetic oligonucleotide
aacaugguguuaaggagug

SEQ ID NO: 616331 - RNA, 19 nt, Artificial Sequence
  Description of Artificial Sequence: Synthetic oligonucleotide
ugccaugaaguguugagaa

SEQ ID NO: 616332 - RNA, 19 nt, Artificial Sequence
  Description of Artificial Sequence: Synthetic oligonucleotide
ugcuucauacaccaguaua

SEQ ID NO: 616333 - RNA, 19 nt, Artificial Sequence
  Description of Artificial Sequence: Synthetic oligonucleotide
ucuaaccuuaggaaagcau

SEQ ID NO: 616334 - RNA, 19 nt, Artificial Sequence
  Description of Artificial Sequence: Synthetic oligonucleotide
uuaaggaguguggauuucc

SEQ ID NO: 616335 - RNA, 19 nt, Artificial Sequence
  Description of Artificial Sequence: Synthetic oligonucleotide
uguccggaagcuaccaccc

SEQ ID NO: 616336 - RNA, 19 nt, Artificial Sequence
  Description of Artificial Sequence: Synthetic oligonucleotide
uucugguauacaaacugau

SEQ ID NO: 616337 - RNA, 19 nt, Artificial Sequence
  Description of Artificial Sequence: Synthetic oligonucleotide
uauauaagcucagugccau

SEQ ID NO: 616338 - RNA, 19 nt, Artificial Sequence
  Description of Artificial Sequence: Synthetic oligonucleotide
aaacugauaguugggcaug

SEQ ID NO: 616339 - RNA, 19 nt, Artificial Sequence
  Description of Artificial Sequence: Synthetic oligonucleotide
ugcuguuacaacaggccac

SEQ ID NO: 616340 - RNA, 19 nt, Artificial Sequence
  Description of Artificial Sequence: Synthetic oligonucleotide
agcuacagggaggagcugc

SEQ ID NO: 616341 - RNA, 19 nt, Artificial Sequence
  Description of Artificial Sequence: Synthetic oligonucleotide
aacaaccugcaacaucccu

SEQ ID NO: 616342 - RNA, 19 nt, Artificial Sequence
  Description of Artificial Sequence: Synthetic oligonucleotide
aguaugaccaagugcugga

SEQ ID NO: 616343 - RNA, 19 nt, Artificial Sequence
  Description of Artificial Sequence: Synthetic oligonucleotide
uucccuaauuucaggggcc

SEQ ID NO: 616344 - RNA, 19 nt, Artificial Sequence
  Description of Artificial Sequence: Synthetic oligonucleotide
uuaagcgccuaugugugcc

SEQ ID NO: 616345 - RNA, 19 nt, Artificial Sequence
  Description of Artificial Sequence: Synthetic oligonucleotide
uaauuucaggggccaauga

SEQ ID NO: 616346 - RNA, 19 nt, Artificial Sequence
  Description of Artificial Sequence: Synthetic oligonucleotide
ucaucuugggacuggggac

SEQ ID NO: 616347 - RNA, 19 nt, Artificial Sequence
  Description of Artificial Sequence: Synthetic oligonucleotide
cauuucagcuaaacugacc

SEQ ID NO: 616348 - RNA, 19 nt, Artificial Sequence
  Description of Artificial Sequence: Synthetic oligonucleotide
ucugacacuccuccaaguc

SEQ ID NO: 616349 - RNA, 19 nt, Artificial Sequence
  Description of Artificial Sequence: Synthetic oligonucleotide
ugaggccuaacuuccuugc

SEQ ID NO: 616350 - RNA, 19 nt, Artificial Sequence
  Description of Artificial Sequence: Synthetic oligonucleotide
ugacccagcgaacagggau

SEQ ID NO: 616351 - RNA, 19 nt, Artificial Sequence
  Description of Artificial Sequence: Synthetic oligonucleotide
caugguguuaaggagugug

SEQ ID NO: 616352 - RNA, 19 nt, Artificial Sequence
  Description of Artificial Sequence: Synthetic oligonucleotide
accaaaaccuugaagggug

SEQ ID NO: 616353 - RNA, 19 nt, Artificial Sequence
  Description of Artificial Sequence: Synthetic oligonucleotide
uuaggaaagcaugaagaau

SEQ ID NO: 616354 - RNA, 19 nt, Artificial Sequence
  Description of Artificial Sequence: Synthetic oligonucleotide
uguuaaggaguguggauuu

SEQ ID NO: 616355 - RNA, 19 nt, Artificial Sequence
  Description of Artificial Sequence: Synthetic oligonucleotide
ugaagaauagcugguggaa

SEQ ID NO: 616356 - RNA, 19 nt, Artificial Sequence
  Description of Artificial Sequence: Synthetic oligonucleotide
aaagugggcagagcgccuc

SEQ ID NO: 616357 - RNA, 19 nt, Artificial Sequence
  Description of Artificial Sequence: Synthetic oligonucleotide
ucaacuugggcugccuucc

SEQ ID NO: 616358 - RNA, 19 nt, Artificial Sequence
  Description of Artificial Sequence: Synthetic oligonucleotide
guauacaaacugauaguug

SEQ ID NO: 616359 - RNA, 19 nt, Artificial Sequence
  Description of Artificial Sequence: Synthetic oligonucleotide
acaagugacaaugugccau

SEQ ID NO: 616360 - RNA, 19 nt, Artificial Sequence
  Description of Artificial Sequence: Synthetic oligonucleotide
cucggaacaaccugcaaca

SEQ ID NO: 616361 - RNA, 19 nt, Artificial Sequence
  Description of Artificial Sequence: Synthetic oligonucleotide
caccucaggaaguacugcc

SEQ ID NO: 616362 - RNA, 19 nt, Artificial Sequence
  Description of Artificial Sequence: Synthetic oligonucleotide
gacuaagggagcuguuccc

SEQ ID NO: 616363 - RNA, 19 nt, Artificial Sequence
  Description of Artificial Sequence: Synthetic oligonucleotide
cucagcuacagggaggagc

SEQ ID NO: 616364 - RNA, 19 nt, Artificial Sequence
  Description of Artificial Sequence: Synthetic oligonucleotide
ucuuaccacugugacgagg

SEQ ID NO: 616365 - RNA, 19 nt, Artificial Sequence
  Description of Artificial Sequence: Synthetic oligonucleotide
cucaauauuucugacgcca

SEQ ID NO: 616366 - RNA, 19 nt, Artificial Sequence
  Description of Artificial Sequence: Synthetic oligonucleotide
uguuuucuagcaggcaucu

SEQ ID NO: 616367 - RNA, 19 nt, Artificial Sequence
  Description of Artificial Sequence: Synthetic oligonucleotide
ugugugcuuccucggaaca

SEQ ID NO: 616368 - RNA, 19 nt, Artificial Sequence
  Description of Artificial Sequence: Synthetic oligonucleotide
aaguuucggucucagggua

SEQ ID NO: 616369 - RNA, 19 nt, Artificial Sequence
  Description of Artificial Sequence: Synthetic oligonucleotide
uguucgaaccugucuccag

SEQ ID NO: 616370 - RNA, 19 nt, Artificial Sequence
  Description of Artificial Sequence: Synthetic oligonucleotide
guuuugguuggacaagcca

SEQ ID NO: 616371 - RNA, 19 nt, Artificial Sequence
  Description of Artificial Sequence: Synthetic oligonucleotide
caaguccucgucaauucug

SEQ ID NO: 616372 - RNA, 19 nt, Artificial Sequence
  Description of Artificial Sequence: Synthetic oligonucleotide
gaugugccauacauguugc

SEQ ID NO: 616373 - RNA, 19 nt, Artificial Sequence
  Description of Artificial Sequence: Synthetic oligonucleotide
ccaucuaccagcuccagug

SEQ ID NO: 616374 - RNA, 19 nt, Artificial Sequence
  Description of Artificial Sequence: Synthetic oligonucleotide
augugccauacauguugcc

SEQ ID NO: 616375 - RNA, 19 nt, Artificial Sequence
  Description of Artificial Sequence: Synthetic oligonucleotide
cuaauuucaggggccaaug

SEQ ID NO: 616376 - RNA, 19 nt, Artificial Sequence
  Description of Artificial Sequence: Synthetic oligonucleotide
ggaaguacugccucucacc

SEQ ID NO: 616377 - RNA, 19 nt, Artificial Sequence
  Description of Artificial Sequence: Synthetic oligonucleotide
uggauuucccugugccggg

SEQ ID NO: 616378 - RNA, 19 nt, Artificial Sequence
  Description of Artificial Sequence: Synthetic oligonucleotide
uuucugacgccagucugag

SEQ ID NO: 616379 - RNA, 19 nt, Artificial Sequence
  Description of Artificial Sequence: Synthetic oligonucleotide
aguguccggaagcuaccac

SEQ ID NO: 616380 - RNA, 19 nt, Artificial Sequence
  Description of Artificial Sequence: Synthetic oligonucleotide
ugguuggacaagccauucc

SEQ ID NO: 616381 - RNA, 19 nt, Artificial Sequence
  Description of Artificial Sequence: Synthetic oligonucleotide
guccgaaacccacuggagc

SEQ ID NO: 616382 - RNA, 19 nt, Artificial Sequence
  Description of Artificial Sequence: Synthetic oligonucleotide
gagucuaucaccaggauuu

SEQ ID NO: 616383 - RNA, 19 nt, Artificial Sequence
  Description of Artificial Sequence: Synthetic oligonucleotide
cagcagauagccucccugc

SEQ ID NO: 616384 - RNA, 19 nt, Artificial Sequence
  Description of Artificial Sequence: Synthetic oligonucleotide
aaaguaugaccaagugcug

SEQ ID NO: 616385 - RNA, 19 nt, Artificial Sequence
  Description of Artificial Sequence: Synthetic oligonucleotide
gaaagggucagagagugcu

SEQ ID NO: 616386 - RNA, 19 nt, Artificial Sequence
  Description of Artificial Sequence: Synthetic oligonucleotide
caagugacaaugugccaug

SEQ ID NO: 616387 - RNA, 19 nt, Artificial Sequence
  Description of Artificial Sequence: Synthetic oligonucleotide
acaaccugcaacaucccug

SEQ ID NO: 616388 - RNA, 19 nt, Artificial Sequence
  Description of Artificial Sequence: Synthetic oligonucleotide
uucgaaccugucuccagca

SEQ ID NO: 616389 - RNA, 19 nt, Artificial Sequence
  Description of Artificial Sequence: Synthetic oligonucleotide
agcuaguccccacuccauc

SEQ ID NO: 616390 - RNA, 19 nt, Artificial Sequence
  Description of Artificial Sequence: Synthetic oligonucleotide
cuaacuuccuugccgcaug

SEQ ID NO: 616391 - RNA, 19 nt, Artificial Sequence
  Description of Artificial Sequence: Synthetic oligonucleotide
gccuaugugugccaggucc

SEQ ID NO: 616392 - RNA, 19 nt, Artificial Sequence
  Description of Artificial Sequence: Synthetic oligonucleotide
agagggccaacuuccagga

SEQ ID NO: 616393 - RNA, 19 nt, Artificial Sequence
  Description of Artificial Sequence: Synthetic oligonucleotide
gccuagucgagcuaguccc

SEQ ID NO: 616394 - RNA, 19 nt, Artificial Sequence
  Description of Artificial Sequence: Synthetic oligonucleotide
ugcaaggagagcgugccac

SEQ ID NO: 616395 - RNA, 19 nt, Artificial Sequence
  Description of Artificial Sequence: Synthetic oligonucleotide
auggugcuuagguccugcc

SEQ ID NO: 616396 - RNA, 19 nt, Artificial Sequence
  Description of Artificial Sequence: Synthetic oligonucleotide
cuaucaccaggauuugguc

SEQ ID NO: 616397 - RNA, 19 nt, Artificial Sequence
  Description of Artificial Sequence: Synthetic oligonucleotide
agguccuagggacccagag

SEQ ID NO: 616398 - RNA, 19 nt, Artificial Sequence
  Description of Artificial Sequence: Synthetic oligonucleotide
aggauuuggucacagccua

SEQ ID NO: 616399 - RNA, 19 nt, Artificial Sequence
  Description of Artificial Sequence: Synthetic oligonucleotide
agcacaaaagggugacuga

SEQ ID NO: 616400 - RNA, 19 nt, Artificial Sequence
  Description of Artificial Sequence: Synthetic oligonucleotide
uuguaacaccccguccugg

SEQ ID NO: 616401 - RNA, 19 nt, Artificial Sequence
  Description of Artificial Sequence: Synthetic oligonucleotide
aaguacugccucucaccca

SEQ ID NO: 616402 - RNA, 19 nt, Artificial Sequence
  Description of Artificial Sequence: Synthetic oligonucleotide
aggccagaguggcucauuc

SEQ ID NO: 616403 - RNA, 19 nt, Artificial Sequence
  Description of Artificial Sequence: Synthetic oligonucleotide
aaagaaccacuagucggga

SEQ ID NO: 616404 - RNA, 19 nt, Artificial Sequence
  Description of Artificial Sequence: Synthetic oligonucleotide
ucacuguagcccaggcuca

SEQ ID NO: 616405 - RNA, 19 nt, Artificial Sequence
  Description of Artificial Sequence: Synthetic oligonucleotide
aacucucuuucaacuuggg

SEQ ID NO: 616406 - RNA, 19 nt, Artificial Sequence
  Description of Artificial Sequence: Synthetic oligonucleotide
ucgagcuaguccccacucc

SEQ ID NO: 616407 - RNA, 19 nt, Artificial Sequence
  Description of Artificial Sequence: Synthetic oligonucleotide
ugugcuuccucggaacaac

SEQ ID NO: 616408 - RNA, 19 nt, Artificial Sequence
  Description of Artificial Sequence: Synthetic oligonucleotide
ucgaaccugucuccagcag

SEQ ID NO: 616409 - RNA, 19 nt, Artificial Sequence
  Description of Artificial Sequence: Synthetic oligonucleotide
ccaguauauaagcucagug

SEQ ID NO: 616410 - RNA, 19 nt, Artificial Sequence
  Description of Artificial Sequence: Synthetic oligonucleotide
gguagccccaucuaccagc

SEQ ID NO: 616411 - RNA, 19 nt, Artificial Sequence
  Description of Artificial Sequence: Synthetic oligonucleotide
agcucucagccucauagaa

SEQ ID NO: 616412 - RNA, 19 nt, Artificial Sequence
  Description of Artificial Sequence: Synthetic oligonucleotide
aaggagagcgugccacacu

SEQ ID NO: 616413 - RNA, 19 nt, Artificial Sequence
  Description of Artificial Sequence: Synthetic oligonucleotide
cuuguaacaccccguccug

SEQ ID NO: 616414 - RNA, 19 nt, Artificial Sequence
  Description of Artificial Sequence: Synthetic oligonucleotide
gucgggaucuccugucuag

SEQ ID NO: 616415 - RNA, 19 nt, Artificial Sequence
  Description of Artificial Sequence: Synthetic oligonucleotide
aaguccucgucaauucuga

SEQ ID NO: 616416 - RNA, 19 nt, Artificial Sequence
  Description of Artificial Sequence: Synthetic oligonucleotide
ucaugaagguucugguaua

SEQ ID NO: 616417 - RNA, 19 nt, Artificial Sequence
  Description of Artificial Sequence: Synthetic oligonucleotide
ugauguuuucuagcaggca

SEQ ID NO: 616418 - RNA, 19 nt, Artificial Sequence
  Description of Artificial Sequence: Synthetic oligonucleotide
caccuguggugacuaaggg

SEQ ID NO: 616419 - RNA, 19 nt, Artificial Sequence
  Description of Artificial Sequence: Synthetic oligonucleotide
guccuagggacccagagcu

SEQ ID NO: 616420 - RNA, 19 nt, Artificial Sequence
  Description of Artificial Sequence: Synthetic oligonucleotide
ggaaagugggcagagcgcc

SEQ ID NO: 616421 - RNA, 19 nt, Artificial Sequence
  Description of Artificial Sequence: Synthetic oligonucleotide
gcugaaagaaccacuaguc

SEQ ID NO: 616422 - RNA, 19 nt, Artificial Sequence
  Description of Artificial Sequence: Synthetic oligonucleotide
uaggggcagacaguaaaca

SEQ ID NO: 616423 - RNA, 19 nt, Artificial Sequence
  Description of Artificial Sequence: Synthetic oligonucleotide
uggagcacaaaagggugac

SEQ ID NO: 616424 - RNA, 19 nt, Artificial Sequence
  Description of Artificial Sequence: Synthetic oligonucleotide
uucuaaccuuaggaaagca

SEQ ID NO: 616425 - RNA, 19 nt, Artificial Sequence
  Description of Artificial Sequence: Synthetic oligonucleotide
uucugacacuccuccaagu

SEQ ID NO: 616426 - RNA, 19 nt, Artificial Sequence
  Description of Artificial Sequence: Synthetic oligonucleotide
uuccuugccgcaugugcca

SEQ ID NO: 616427 - RNA, 19 nt, Artificial Sequence
  Description of Artificial Sequence: Synthetic oligonucleotide
aaaccgcaggccaaacaug

SEQ ID NO: 616428 - RNA, 19 nt, Artificial Sequence
  Description of Artificial Sequence: Synthetic oligonucleotide
uuccucggaacaaccugca

SEQ ID NO: 616429 - RNA, 19 nt, Artificial Sequence
  Description of Artificial Sequence: Synthetic oligonucleotide
auagccucccugccuccac

SEQ ID NO: 616430 - RNA, 19 nt, Artificial Sequence
  Description of Artificial Sequence: Synthetic oligonucleotide
agcuguaauggugcuuagg

SEQ ID NO: 616431 - RNA, 19 nt, Artificial Sequence
  Description of Artificial Sequence: Synthetic oligonucleotide
ggccccacugaucaaaccc

SEQ ID NO: 616432 - RNA, 19 nt, Artificial Sequence
  Description of Artificial Sequence: Synthetic oligonucleotide
aagaaccacuagucgggau

SEQ ID NO: 616433 - RNA, 19 nt, Artificial Sequence
  Description of Artificial Sequence: Synthetic oligonucleotide
uaagggagcuguucccuaa

SEQ ID NO: 616434 - RNA, 19 nt, Artificial Sequence
  Description of Artificial Sequence: Synthetic oligonucleotide
guauauaagcucagugcca

SEQ ID NO: 616435 - RNA, 19 nt, Artificial Sequence
  Description of Artificial Sequence: Synthetic oligonucleotide
ugacgccagucugagacug

SEQ ID NO: 616436 - RNA, 19 nt, Artificial Sequence
  Description of Artificial Sequence: Synthetic oligonucleotide
gagggccuagucgagcuag

SEQ ID NO: 616437 - RNA, 19 nt, Artificial Sequence
  Description of Artificial Sequence: Synthetic oligonucleotide
ccugucuagucgcacaugc

SEQ ID NO: 616438 - RNA, 19 nt, Artificial Sequence
  Description of Artificial Sequence: Synthetic oligonucleotide
aguagcagcccugcucagg

SEQ ID NO: 616439 - RNA, 19 nt, Artificial Sequence
  Description of Artificial Sequence: Synthetic oligonucleotide
cuuagguccugcccucaag

SEQ ID NO: 616440 - RNA, 19 nt, Artificial Sequence
  Description of Artificial Sequence: Synthetic oligonucleotide
ucgcugggcggauccaggg

SEQ ID NO: 616441 - RNA, 19 nt, Artificial Sequence
  Description of Artificial Sequence: Synthetic oligonucleotide
acuaagggagcuguucccu

SEQ ID NO: 616442 - RNA, 19 nt, Artificial Sequence
  Description of Artificial Sequence: Synthetic oligonucleotide
gcccucaauauuucugacg

SEQ ID NO: 616443 - RNA, 19 nt, Artificial Sequence
  Description of Artificial Sequence: Synthetic oligonucleotide
auauaagcucagugccaug

SEQ ID NO: 616444 - RNA, 19 nt, Artificial Sequence
  Description of Artificial Sequence: Synthetic oligonucleotide
acccagcgaacagggaugc

SEQ ID NO: 616445 - RNA, 19 nt, Artificial Sequence
  Description of Artificial Sequence: Synthetic oligonucleotide
ugugaguagcagcccugcu

SEQ ID NO: 616446 - RNA, 19 nt, Artificial Sequence
  Description of Artificial Sequence: Synthetic oligonucleotide
caugaagguucugguauac

SEQ ID NO: 616447 - RNA, 19 nt, Artificial Sequence
  Description of Artificial Sequence: Synthetic oligonucleotide
cucccuguggcaaaccgca

SEQ ID NO: 616448 - RNA, 19 nt, Artificial Sequence
  Description of Artificial Sequence: Synthetic oligonucleotide
ggcugaagcccucagcuac

SEQ ID NO: 616449 - RNA, 19 nt, Artificial Sequence
  Description of Artificial Sequence: Synthetic oligonucleotide
gugccacaucaccaaaacc

SEQ ID NO: 616450 - RNA, 19 nt, Artificial Sequence
  Description of Artificial Sequence: Synthetic oligonucleotide
aguccucgucaauucugag

SEQ ID NO: 616451 - RNA, 19 nt, Artificial Sequence
  Description of Artificial Sequence: Synthetic oligonucleotide
uggcgcuccaugccacagg

SEQ ID NO: 616452 - RNA, 19 nt, Artificial Sequence
  Description of Artificial Sequence: Synthetic oligonucleotide
uaccacugugacgaggcac

SEQ ID NO: 616453 - RNA, 19 nt, Artificial Sequence
  Description of Artificial Sequence: Synthetic oligonucleotide
aagggagcuguucccuaau

SEQ ID NO: 616454 - RNA, 19 nt, Artificial Sequence
  Description of Artificial Sequence: Synthetic oligonucleotide
cugcuguuacaacaggcca

SEQ ID NO: 616455 - RNA, 19 nt, Artificial Sequence
  Description of Artificial Sequence: Synthetic oligonucleotide
ggccuaacuuccuugccgc

SEQ ID NO: 616456 - RNA, 19 nt, Artificial Sequence
  Description of Artificial Sequence: Synthetic oligonucleotide
gcuaccacccugcuucucc

SEQ ID NO: 616457 - RNA, 19 nt, Artificial Sequence
  Description of Artificial Sequence: Synthetic oligonucleotide
ugcccucaauauuucugac

SEQ ID NO: 616458 - RNA, 19 nt, Artificial Sequence
  Description of Artificial Sequence: Synthetic oligonucleotide
uccaugugaguagcagccc

SEQ ID NO: 616459 - RNA, 19 nt, Artificial Sequence
  Description of Artificial Sequence: Synthetic oligonucleotide
uguagcccaggcucacaga

SEQ ID NO: 616460 - RNA, 19 nt, Artificial Sequence
  Description of Artificial Sequence: Synthetic oligonucleotide
guuucggucucaggguaag

SEQ ID NO: 616461 - RNA, 19 nt, Artificial Sequence
  Description of Artificial Sequence: Synthetic oligonucleotide
agucgagcuaguccccacu

SEQ ID NO: 616462 - RNA, 19 nt, Artificial Sequence
  Description of Artificial Sequence: Synthetic oligonucleotide
guaugaccaagugcuggag

SEQ ID NO: 616463 - RNA, 19 nt, Artificial Sequence
  Description of Artificial Sequence: Synthetic oligonucleotide
caaacugauaguugggcau

SEQ ID NO: 616464 - RNA, 19 nt, Artificial Sequence
  Description of Artificial Sequence: Synthetic oligonucleotide
guaacaccccguccugggc

SEQ ID NO: 616465 - RNA, 19 nt, Artificial Sequence
  Description of Artificial Sequence: Synthetic oligonucleotide
uaagcgccuaugugugcca

SEQ ID NO: 616466 - RNA, 19 nt, Artificial Sequence
  Description of Artificial Sequence: Synthetic oligonucleotide
cagugacccagcgaacagg

SEQ ID NO: 616467 - RNA, 19 nt, Artificial Sequence
  Description of Artificial Sequence: Synthetic oligonucleotide
gugacuaagggagcuguuc

SEQ ID NO: 616468 - RNA, 19 nt, Artificial Sequence
  Description of Artificial Sequence: Synthetic oligonucleotide
uucugaggccuaacuuccu

SEQ ID NO: 616469 - RNA, 19 nt, Artificial Sequence
  Description of Artificial Sequence: Synthetic oligonucleotide
ucccuaauuucaggggcca

SEQ ID NO: 616470 - RNA, 19 nt, Artificial Sequence
  Description of Artificial Sequence: Synthetic oligonucleotide
ccucggaacaaccugcaac

SEQ ID NO: 616471 - RNA, 19 nt, Artificial Sequence
  Description of Artificial Sequence: Synthetic oligonucleotide
agucuaggggcagacagua

SEQ ID NO: 616472 - RNA, 19 nt, Artificial Sequence
  Description of Artificial Sequence: Synthetic oligonucleotide
cacccuccugcaaggagag

SEQ ID NO: 616473 - RNA, 19 nt, Artificial Sequence
  Description of Artificial Sequence: Synthetic oligonucleotide
uugguuggacaagccauuc

SEQ ID NO: 616474 - RNA, 19 nt, Artificial Sequence
  Description of Artificial Sequence: Synthetic oligonucleotide
cacuagucgggaucuccug

SEQ ID NO: 616475 - RNA, 19 nt, Artificial Sequence
  Description of Artificial Sequence: Synthetic oligonucleotide
ggccuagucgagcuagucc

SEQ ID NO: 616476 - RNA, 19 nt, Artificial Sequence
  Description of Artificial Sequence: Synthetic oligonucleotide
gaacugccccaucucccgc

SEQ ID NO: 616477 - RNA, 19 nt, Artificial Sequence
  Description of Artificial Sequence: Synthetic oligonucleotide
cagcgaacagggaugcuca

SEQ ID NO: 616478 - RNA, 19 nt, Artificial Sequence
  Description of Artificial Sequence: Synthetic oligonucleotide
ucgcacaugcagcuccuua

SEQ ID NO: 616479 - RNA, 19 nt, Artificial Sequence
  Description of Artificial Sequence: Synthetic oligonucleotide
ucgucaauucugaggccua

SEQ ID NO: 616480 - RNA, 19 nt, Artificial Sequence
  Description of Artificial Sequence: Synthetic oligonucleotide
uccuagggacccagagcug

SEQ ID NO: 616481 - RNA, 19 nt, Artificial Sequence
  Description of Artificial Sequence: Synthetic oligonucleotide
caggucgcugggcggaucc

SEQ ID NO: 616482 - RNA, 19 nt, Artificial Sequence
  Description of Artificial Sequence: Synthetic oligonucleotide
ggggacuacagcuccuccc

SEQ ID NO: 616483 - RNA, 19 nt, Artificial Sequence
  Description of Artificial Sequence: Synthetic oligonucleotide
aagcgccuaugugugccag

SEQ ID NO: 616484 - RNA, 19 nt, Artificial Sequence
  Description of Artificial Sequence: Synthetic oligonucleotide
uucuuaccacugugacgag

SEQ ID NO: 616485 - RNA, 19 nt, Artificial Sequence
  Description of Artificial Sequence: Synthetic oligonucleotide
uugaaggguggcccacaaa

SEQ ID NO: 616486 - RNA, 19 nt, Artificial Sequence
  Description of Artificial Sequence: Synthetic oligonucleotide
caaaccgcaggccaaacau

SEQ ID NO: 616487 - RNA, 19 nt, Artificial Sequence
  Description of Artificial Sequence: Synthetic oligonucleotide
agcgaacagggaugcucag

SEQ ID NO: 616488 - RNA, 19 nt, Artificial Sequence
  Description of Artificial Sequence: Synthetic oligonucleotide
gggccaaugaaggaacagc

SEQ ID NO: 616489 - RNA, 19 nt, Artificial Sequence
  Description of Artificial Sequence: Synthetic oligonucleotide
gcuaaacugaccacaguga

SEQ ID NO: 616490 - RNA, 19 nt, Artificial Sequence
  Description of Artificial Sequence: Synthetic oligonucleotide
gguccugcccucaagcagc

SEQ ID NO: 616491 - RNA, 19 nt, Artificial Sequence
  Description of Artificial Sequence: Synthetic oligonucleotide
caaguuucggucucagggu

SEQ ID NO: 616492 - RNA, 19 nt, Artificial Sequence
  Description of Artificial Sequence: Synthetic oligonucleotide
ugaccaagugcuggagcac

SEQ ID NO: 616493 - RNA, 19 nt, Artificial Sequence
  Description of Artificial Sequence: Synthetic oligonucleotide
agccuugacauggguuagg

SEQ ID NO: 616494 - RNA, 19 nt, Artificial Sequence
  Description of Artificial Sequence: Synthetic oligonucleotide
ccuguucgaaccugucucc

SEQ ID NO: 616495 - RNA, 19 nt, Artificial Sequence
  Description of Artificial Sequence: Synthetic oligonucleotide
gauuucccugugccgggca

SEQ ID NO: 616496 - RNA, 19 nt, Artificial Sequence
  Description of Artificial Sequence: Synthetic oligonucleotide
agucuaucaccaggauuug

SEQ ID NO: 616497 - RNA, 19 nt, Artificial Sequence
  Description of Artificial Sequence: Synthetic oligonucleotide
gaagaauagcugguggaau

SEQ ID NO: 616498 - RNA, 19 nt, Artificial Sequence
  Description of Artificial Sequence: Synthetic oligonucleotide
caaggagagcgugccacac

SEQ ID NO: 616499 - RNA, 19 nt, Artificial Sequence
  Description of Artificial Sequence: Synthetic oligonucleotide
gguauacaaacugauaguu

SEQ ID NO: 616500 - RNA, 19 nt, Artificial Sequence
  Description of Artificial Sequence: Synthetic oligonucleotide
uagucgagcuaguccccac

SEQ ID NO: 616501 - RNA, 19 nt, Artificial Sequence
  Description of Artificial Sequence: Synthetic oligonucleotide
ggguccgaaacccacugga

SEQ ID NO: 616502 - RNA, 19 nt, Artificial Sequence
  Description of Artificial Sequence: Synthetic oligonucleotide
gucgagcuaguccccacuc

SEQ ID NO: 616503 - RNA, 19 nt, Artificial Sequence
  Description of Artificial Sequence: Synthetic oligonucleotide
gccgcggagggccuagucg

SEQ ID NO: 616504 - RNA, 19 nt, Artificial Sequence
  Description of Artificial Sequence: Synthetic oligonucleotide
uuaaccccauuagcagggu

SEQ ID NO: 616505 - RNA, 19 nt, Artificial Sequence
  Description of Artificial Sequence: Synthetic oligonucleotide
gacuacagcuccucccugu

SEQ ID NO: 616506 - RNA, 19 nt, Artificial Sequence
  Description of Artificial Sequence: Synthetic oligonucleotide
gaaccacuagucgggaucu

SEQ ID NO: 616507 - RNA, 19 nt, Artificial Sequence
  Description of Artificial Sequence: Synthetic oligonucleotide
ucucacccagggaggggcu

SEQ ID NO: 616508 - RNA, 19 nt, Artificial Sequence
  Description of Artificial Sequence: Synthetic oligonucleotide
cuucauacaccaguauaua

SEQ ID NO: 616509 - RNA, 19 nt, Artificial Sequence
  Description of Artificial Sequence: Synthetic oligonucleotide
ccugcaaggagagcgugcc

SEQ ID NO: 616510 - RNA, 19 nt, Artificial Sequence
  Description of Artificial Sequence: Synthetic oligonucleotide
ucgggaucuccugucuagu

SEQ ID NO: 616511 - RNA, 19 nt, Artificial Sequence
  Description of Artificial Sequence: Synthetic oligonucleotide
ggguuaggaagagagaacu

SEQ ID NO: 616512 - RNA, 19 nt, Artificial Sequence
  Description of Artificial Sequence: Synthetic oligonucleotide
uccugucuagucgcacaug

SEQ ID NO: 616513 - RNA, 19 nt, Artificial Sequence
  Description of Artificial Sequence: Synthetic oligonucleotide
cucauagaacugccccauc

SEQ ID NO: 616514 - RNA, 19 nt, Artificial Sequence
  Description of Artificial Sequence: Synthetic oligonucleotide
ccucaauauuucugacgcc

SEQ ID NO: 616515 - RNA, 19 nt, Artificial Sequence
  Description of Artificial Sequence: Synthetic oligonucleotide
guguuaaggaguguggauu

SEQ ID NO: 616516 - RNA, 19 nt, Artificial Sequence
  Description of Artificial Sequence: Synthetic oligonucleotide
cugucuagucgcacaugca

SEQ ID NO: 616517 - RNA, 19 nt, Artificial Sequence
  Description of Artificial Sequence: Synthetic oligonucleotide
uuucggucucaggguaaga

SEQ ID NO: 616518 - RNA, 19 nt, Artificial Sequence
  Description of Artificial Sequence: Synthetic oligonucleotide
gcuguuacaacaggccaca

SEQ ID NO: 616519 - RNA, 19 nt, Artificial Sequence
  Description of Artificial Sequence: Synthetic oligonucleotide
ggaagccuccuguucgaac

SEQ ID NO: 616520 - RNA, 19 nt, Artificial Sequence
  Description of Artificial Sequence: Synthetic oligonucleotide
agucgggaucuccugucua

SEQ ID NO: 616521 - RNA, 19 nt, Artificial Sequence
  Description of Artificial Sequence: Synthetic oligonucleotide
gucgcugggcggauccagg

SEQ ID NO: 616522 - RNA, 19 nt, Artificial Sequence
  Description of Artificial Sequence: Synthetic oligonucleotide
agggacccagagcuguaau

SEQ ID NO: 616523 - RNA, 19 nt, Artificial Sequence
  Description of Artificial Sequence: Synthetic oligonucleotide
caauauuucugacgccagu

SEQ ID NO: 616524 - RNA, 19 nt, Artificial Sequence
  Description of Artificial Sequence: Synthetic oligonucleotide
guaauggugcuuagguccu

SEQ ID NO: 616525 - RNA, 19 nt, Artificial Sequence
  Description of Artificial Sequence: Synthetic oligonucleotide
uucugacgccagucugaga

SEQ ID NO: 616526 - RNA, 19 nt, Artificial Sequence
  Description of Artificial Sequence: Synthetic oligonucleotide
cucgucaauucugaggccu

SEQ ID NO: 616527 - RNA, 19 nt, Artificial Sequence
  Description of Artificial Sequence: Synthetic oligonucleotide
cagcccggugcuucuccgg

SEQ ID NO: 616528 - RNA, 19 nt, Artificial Sequence
  Description of Artificial Sequence: Synthetic oligonucleotide
ugcuuagguccugcccuca

SEQ ID NO: 616529 - RNA, 19 nt, Artificial Sequence
  Description of Artificial Sequence: Synthetic oligonucleotide
ucggaacaaccugcaacau

SEQ ID NO: 616530 - RNA, 19 nt, Artificial Sequence
  Description of Artificial Sequence: Synthetic oligonucleotide
ggccaaacaugguguuaag

SEQ ID NO: 616531 - RNA, 19 nt, Artificial Sequence
  Description of Artificial Sequence: Synthetic oligonucleotide
gguuaggaagagagaacuc

SEQ ID NO: 616532 - RNA, 19 nt, Artificial Sequence
  Description of Artificial Sequence: Synthetic oligonucleotide
acgccagucugagacugcu

SEQ ID NO: 616533 - RNA, 19 nt, Artificial Sequence
  Description of Artificial Sequence: Synthetic oligonucleotide
gggcagagcgccucugggc

SEQ ID NO: 616534 - RNA, 19 nt, Artificial Sequence
  Description of Artificial Sequence: Synthetic oligonucleotide
gcgaacagggaugcucagg

SEQ ID NO: 616535 - RNA, 19 nt, Artificial Sequence
  Description of Artificial Sequence: Synthetic oligonucleotide
gugcuuagguccugcccuc

SEQ ID NO: 616536 - RNA, 19 nt, Artificial Sequence
  Description of Artificial Sequence: Synthetic oligonucleotide
uggcaaaccgcaggccaaa

SEQ ID NO: 616537 - RNA, 19 nt, Artificial Sequence
  Description of Artificial Sequence: Synthetic oligonucleotide
ccuagucgagcuagucccc

SEQ ID NO: 616538 - RNA, 19 nt, Artificial Sequence
  Description of Artificial Sequence: Synthetic oligonucleotide
cacugugacgaggcacagc

SEQ ID NO: 616539 - RNA, 19 nt, Artificial Sequence
  Description of Artificial Sequence: Synthetic oligonucleotide
cuaagggagcuguucccua

SEQ ID NO: 616540 - RNA, 19 nt, Artificial Sequence
  Description of Artificial Sequence: Synthetic oligonucleotide
gggguccgaaacccacugg

SEQ ID NO: 616541 - RNA, 19 nt, Artificial Sequence
  Description of Artificial Sequence: Synthetic oligonucleotide
cuagucgcacaugcagcuc

SEQ ID NO: 616542 - RNA, 19 nt, Artificial Sequence
  Description of Artificial Sequence: Synthetic oligonucleotide
cuguuacaacaggccacag

SEQ ID NO: 616543 - RNA, 19 nt, Artificial Sequence
  Description of Artificial Sequence: Synthetic oligonucleotide
caugugccauguccuccac

SEQ ID NO: 616544 - RNA, 19 nt, Artificial Sequence
  Description of Artificial Sequence: Synthetic oligonucleotide
ccucccuguggcaaaccgc

SEQ ID NO: 616545 - RNA, 19 nt, Artificial Sequence
  Description of Artificial Sequence: Synthetic oligonucleotide
cucagcucgucucucuugu

SEQ ID NO: 616546 - RNA, 19 nt, Artificial Sequence
  Description of Artificial Sequence: Synthetic oligonucleotide
ggccugugugcuuccucgg

SEQ ID NO: 616547 - RNA, 19 nt, Artificial Sequence
  Description of Artificial Sequence: Synthetic oligonucleotide
ggacuggggacagagaggu

SEQ ID NO: 616548 - RNA, 19 nt, Artificial Sequence
  Description of Artificial Sequence: Synthetic oligonucleotide
gugugccagguccuaggga

SEQ ID NO: 616549 - RNA, 19 nt, Artificial Sequence
  Description of Artificial Sequence: Synthetic oligonucleotide
gacgccagucugagacugc

SEQ ID NO: 616550 - RNA, 19 nt, Artificial Sequence
  Description of Artificial Sequence: Synthetic oligonucleotide
ccgcaggccaaacauggug

SEQ ID NO: 616551 - RNA, 19 nt, Artificial Sequence
  Description of Artificial Sequence: Synthetic oligonucleotide
ccagcgaacagggaugcuc

SEQ ID NO: 616552 - RNA, 19 nt, Artificial Sequence
  Description of Artificial Sequence: Synthetic oligonucleotide
aguuucggucucaggguaa

SEQ ID NO: 616553 - RNA, 19 nt, Artificial Sequence
  Description of Artificial Sequence: Synthetic oligonucleotide
gggacuacagcuccucccu

SEQ ID NO: 616554 - RNA, 19 nt, Artificial Sequence
  Description of Artificial Sequence: Synthetic oligonucleotide
agugggcagagcgccucug

SEQ ID NO: 616555 - RNA, 19 nt, Artificial Sequence
  Description of Artificial Sequence: Synthetic oligonucleotide
ggacuacagcuccucccug

SEQ ID NO: 616556 - RNA, 19 nt, Artificial Sequence
  Description of Artificial Sequence: Synthetic oligonucleotide
agcuaccacccugcuucuc

SEQ ID NO: 616557 - RNA, 19 nt, Artificial Sequence
  Description of Artificial Sequence: Synthetic oligonucleotide
cuguucgaaccugucucca

SEQ ID NO: 616558 - RNA, 19 nt, Artificial Sequence
  Description of Artificial Sequence: Synthetic oligonucleotide
acaagccauuccugauguu

SEQ ID NO: 616559 - RNA, 19 nt, Artificial Sequence
  Description of Artificial Sequence: Synthetic oligonucleotide
guuuucuagcaggcaucuc

SEQ ID NO: 616560 - RNA, 19 nt, Artificial Sequence
  Description of Artificial Sequence: Synthetic oligonucleotide
ggcaccacccucaaaacau

SEQ ID NO: 616561 - RNA, 19 nt, Artificial Sequence
  Description of Artificial Sequence: Synthetic oligonucleotide
cacuguagcccaggcucac

SEQ ID NO: 616562 - RNA, 19 nt, Artificial Sequence
  Description of Artificial Sequence: Synthetic oligonucleotide
ccuugcacuucagugccac

SEQ ID NO: 616563 - RNA, 19 nt, Artificial Sequence
  Description of Artificial Sequence: Synthetic oligonucleotide
agucgcacaugcagcuccu

SEQ ID NO: 616564 - RNA, 19 nt, Artificial Sequence
  Description of Artificial Sequence: Synthetic oligonucleotide
ugggcggauccaggggcug

SEQ ID NO: 616565 - RNA, 19 nt, Artificial Sequence
  Description of Artificial Sequence: Synthetic oligonucleotide
gacauugcuuaaccccauu

SEQ ID NO: 616566 - RNA, 19 nt, Artificial Sequence
  Description of Artificial Sequence: Synthetic oligonucleotide
cagucuaggggcagacagu

SEQ ID NO: 616567 - RNA, 19 nt, Artificial Sequence
  Description of Artificial Sequence: Synthetic oligonucleotide
ggucgcugggcggauccag

SEQ ID NO: 616568 - RNA, 19 nt, Artificial Sequence
  Description of Artificial Sequence: Synthetic oligonucleotide
cuugccgcaugugccaugu

SEQ ID NO: 616569 - RNA, 19 nt, Artificial Sequence
  Description of Artificial Sequence: Synthetic oligonucleotide
ggccccaccaaguuucggu

SEQ ID NO: 616570 - RNA, 19 nt, Artificial Sequence
  Description of Artificial Sequence: Synthetic oligonucleotide
cuagggacccagagcugua

SEQ ID NO: 616571 - RNA, 19 nt, Artificial Sequence
  Description of Artificial Sequence: Synthetic oligonucleotide
caguguccggaagcuacca

SEQ ID NO: 616572 - RNA, 19 nt, Artificial Sequence
  Description of Artificial Sequence: Synthetic oligonucleotide
uggcagugccuugcacuuc

SEQ ID NO: 616573 - RNA, 19 nt, Artificial Sequence
  Description of Artificial Sequence: Synthetic oligonucleotide
cuccucccuguggcaaacc

SEQ ID NO: 616574 - RNA, 19 nt, Artificial Sequence
  Description of Artificial Sequence: Synthetic oligonucleotide
aggaggcaccacccucaaa

SEQ ID NO: 616575 - RNA, 19 nt, Artificial Sequence
  Description of Artificial Sequence: Synthetic oligonucleotide
ugccaguguccggaagcua

SEQ ID NO: 616576 - RNA, 19 nt, Artificial Sequence
  Description of Artificial Sequence: Synthetic oligonucleotide
accgcaggccaaacauggu

SEQ ID NO: 616577 - RNA, 19 nt, Artificial Sequence
  Description of Artificial Sequence: Synthetic oligonucleotide
gcuacagggaggagcugca

SEQ ID NO: 616578 - RNA, 19 nt, Artificial Sequence
  Description of Artificial Sequence: Synthetic oligonucleotide
cugcaaggagagcgugcca

SEQ ID NO: 616579 - RNA, 19 nt, Artificial Sequence
  Description of Artificial Sequence: Synthetic oligonucleotide
uugccgcaugugccauguc

SEQ ID NO: 616580 - RNA, 19 nt, Artificial Sequence
  Description of Artificial Sequence: Synthetic oligonucleotide
cuaugugugccagguccua

SEQ ID NO: 616581 - RNA, 19 nt, Artificial Sequence
  Description of Artificial Sequence: Synthetic oligonucleotide
cuccugucuagucgcacau

SEQ ID NO: 616582 - RNA, 19 nt, Artificial Sequence
  Description of Artificial Sequence: Synthetic oligonucleotide
gccugugugcuuccucgga

SEQ ID NO: 616583 - RNA, 19 nt, Artificial Sequence
  Description of Artificial Sequence: Synthetic oligonucleotide
gucugaggccccaccaagu

SEQ ID NO: 616584 - RNA, 19 nt, Artificial Sequence
  Description of Artificial Sequence: Synthetic oligonucleotide
ccgcggagggccuagucga

SEQ ID NO: 616585 - RNA, 19 nt, Artificial Sequence
  Description of Artificial Sequence: Synthetic oligonucleotide
gggcugcuuauccccagaa

SEQ ID NO: 616586 - RNA, 19 nt, Artificial Sequence
  Description of Artificial Sequence: Synthetic oligonucleotide
cugacgccagucugagacu

SEQ ID NO: 616587 - RNA, 19 nt, Artificial Sequence
  Description of Artificial Sequence: Synthetic oligonucleotide
agggccuagucgagcuagu

SEQ ID NO: 616588 - RNA, 19 nt, Artificial Sequence
  Description of Artificial Sequence: Synthetic oligonucleotide
gguggcgcuccaugccaca

SEQ ID NO: 616589 - RNA, 19 nt, Artificial Sequence
  Description of Artificial Sequence: Synthetic oligonucleotide
ggcaaaccgcaggccaaac

SEQ ID NO: 616590 - RNA, 19 nt, Artificial Sequence
  Description of Artificial Sequence: Synthetic oligonucleotide
cagagucuaucaccaggau

SEQ ID NO: 616591 - RNA, 19 nt, Artificial Sequence
  Description of Artificial Sequence: Synthetic oligonucleotide
gucuaggggcagacaguaa

SEQ ID NO: 616592 - RNA, 19 nt, Artificial Sequence
  Description of Artificial Sequence: Synthetic oligonucleotide
gcuuagguccugcccucaa

SEQ ID NO: 616593 - RNA, 19 nt, Artificial Sequence
  Description of Artificial Sequence: Synthetic oligonucleotide
ccauuagcaggguggccaa

SEQ ID NO: 616594 - RNA, 19 nt, Artificial Sequence
  Description of Artificial Sequence: Synthetic oligonucleotide
ccgcaugugccauguccuc

SEQ ID NO: 616595 - RNA, 19 nt, Artificial Sequence
  Description of Artificial Sequence: Synthetic oligonucleotide
ccuugacauggguuaggaa

SEQ ID NO: 616596 - RNA, 19 nt, Artificial Sequence
  Description of Artificial Sequence: Synthetic oligonucleotide
gcggagggccuagucgagc

SEQ ID NO: 616597 - RNA, 19 nt, Artificial Sequence
  Description of Artificial Sequence: Synthetic oligonucleotide
cugccaguguccggaagcu

SEQ ID NO: 616598 - RNA, 19 nt, Artificial Sequence
  Description of Artificial Sequence: Synthetic oligonucleotide
cgcugggcggauccagggg

SEQ ID NO: 616599 - RNA, 19 nt, Artificial Sequence
  Description of Artificial Sequence: Synthetic oligonucleotide
cccucaagcagcucacagu

SEQ ID NO: 616600 - RNA, 19 nt, Artificial Sequence
  Description of Artificial Sequence: Synthetic oligonucleotide
gggccuagucgagcuaguc

SEQ ID NO: 616601 - RNA, 19 nt, Artificial Sequence
  Description of Artificial Sequence: Synthetic oligonucleotide
ccuugccgcaugugccaug

SEQ ID NO: 616602 - RNA, 19 nt, Artificial Sequence
  Description of Artificial Sequence: Synthetic oligonucleotide
cugaggccccaccaaguuu

SEQ ID NO: 616603 - RNA, 19 nt, Artificial Sequence
  Description of Artificial Sequence: Synthetic oligonucleotide
cugugacgaggcacagccu

SEQ ID NO: 616604 - RNA, 19 nt, Artificial Sequence
  Description of Artificial Sequence: Synthetic oligonucleotide
ccacuagucgggaucuccu

SEQ ID NO: 616605 - RNA, 19 nt, Artificial Sequence
  Description of Artificial Sequence: Synthetic oligonucleotide
ccuagggacccagagcugu

SEQ ID NO: 616606 - RNA, 19 nt, Artificial Sequence
  Description of Artificial Sequence: Synthetic oligonucleotide
ccuaauuucaggggccaau

SEQ ID NO: 616607 - RNA, 19 nt, Artificial Sequence
  Description of Artificial Sequence: Synthetic oligonucleotide
gcuacccagagggccaacu

SEQ ID NO: 616608 - RNA, 19 nt, Artificial Sequence
  Description of Artificial Sequence: Synthetic oligonucleotide
gccauacauguugccucuc

SEQ ID NO: 616609 - RNA, 19 nt, Artificial Sequence
  Description of Artificial Sequence: Synthetic oligonucleotide
ggagggccuagucgagcua

SEQ ID NO: 616610 - RNA, 19 nt, Artificial Sequence
  Description of Artificial Sequence: Synthetic oligonucleotide
ccggggacuacagcuccuc

SEQ ID NO: 616611 - RNA, 19 nt, Artificial Sequence
  Description of Artificial Sequence: Synthetic oligonucleotide
cgcggagggccuagucgag

SEQ ID NO: 616612 - RNA, 19 nt, Artificial Sequence
  Description of Artificial Sequence: Synthetic oligonucleotide
ccuaacuuccuugccgcau

SEQ ID NO: 616613 - RNA, 19 nt, Artificial Sequence
  Description of Artificial Sequence: Synthetic oligonucleotide
ccuugaucuuucugaugau

SEQ ID NO: 616614 - RNA, 19 nt, Artificial Sequence
  Description of Artificial Sequence: Synthetic oligonucleotide
ccaagugcuggagcacaaa

SEQ ID NO: 616615 - RNA, 19 nt, Artificial Sequence
  Description of Artificial Sequence: Synthetic oligonucleotide
ggugacuaagggagcuguu

SEQ ID NO: 616616 - RNA, 19 nt, Artificial Sequence
  Description of Artificial Sequence: Synthetic oligonucleotide
cuuggccgcggagggccua

SEQ ID NO: 616617 - RNA, 19 nt, Artificial Sequence
  Description of Artificial Sequence: Synthetic oligonucleotide
gcaccacccucaaaacauu

SEQ ID NO: 616618 - RNA, 19 nt, Artificial Sequence
  Description of Artificial Sequence: Synthetic oligonucleotide
gucgcacaugcagcuccuu

SEQ ID NO: 616619 - RNA, 19 nt, Artificial Sequence
  Description of Artificial Sequence: Synthetic oligonucleotide
gggcggauccaggggcugu

SEQ ID NO: 616620 - RNA, 19 nt, Artificial Sequence
  Description of Artificial Sequence: Synthetic oligonucleotide
gcggauccaggggcugucu

SEQ ID NO: 616621 - RNA, 19 nt, Artificial Sequence
  Description of Artificial Sequence: Synthetic oligonucleotide
caccccguccugggccucu

SEQ ID NO: 616622 - RNA, 19 nt, Artificial Sequence
  Description of Artificial Sequence: Synthetic oligonucleotide
cccggggacuacagcuccu

SEQ ID NO: 616623 - RNA, 19 nt, Artificial Sequence
  Description of Artificial Sequence: Synthetic oligonucleotide
cccagcgaacagggaugcu

SEQ ID NO: 616624 - RNA, 19 nt, Artificial Sequence
  Description of Artificial Sequence: Synthetic oligonucleotide
ucuugaacacauuuaaacg

SEQ ID NO: 616625 - RNA, 19 nt, Artificial Sequence
  Description of Artificial Sequence: Synthetic oligonucleotide
aacacauuuaaacggguag

SEQ ID NO: 616626 - RNA, 19 nt, Artificial Sequence
  Description of Artificial Sequence: Synthetic oligonucleotide
gugguuauggaguagauag

SEQ ID NO: 616627 - RNA, 19 nt, Artificial Sequence
  Description of Artificial Sequence: Synthetic oligonucleotide
cugauaaugguucaggaag

SEQ ID NO: 616628 - RNA, 19 nt, Artificial Sequence
  Description of Artificial Sequence: Synthetic oligonucleotide
aaaccaacagcauaaggga

SEQ ID NO: 616629 - RNA, 19 nt, Artificial Sequence
  Description of Artificial Sequence: Synthetic oligonucleotide
ucuuagauugauccaagcc

SEQ ID NO: 616630 - RNA, 19 nt, Artificial Sequence
  Description of Artificial Sequence: Synthetic oligonucleotide
ugugguacccaccaugggg

SEQ ID NO: 616631 - RNA, 19 nt, Artificial Sequence
  Description of Artificial Sequence: Synthetic oligonucleotide
ugaagguuauucuugggag

SEQ ID NO: 616632 - RNA, 19 nt, Artificial Sequence
  Description of Artificial Sequence: Synthetic oligonucleotide
gaguaauugacaaaagcag

SEQ ID NO: 616633 - RNA, 19 nt, Artificial Sequence
  Description of Artificial Sequence: Synthetic oligonucleotide
guagauaggguucaggaug

SEQ ID NO: 616634 - RNA, 19 nt, Artificial Sequence
  Description of Artificial Sequence: Synthetic oligonucleotide
uuacagauaguguaaagaa

SEQ ID NO: 616635 - RNA, 19 nt, Artificial Sequence
  Description of Artificial Sequence: Synthetic oligonucleotide
guaauugacaaaagcaggg

SEQ ID NO: 616636 - RNA, 19 nt, Artificial Sequence
  Description of Artificial Sequence: Synthetic oligonucleotide
auuacuagggugcuggaug

SEQ ID NO: 616637 - RNA, 19 nt, Artificial Sequence
  Description of Artificial Sequence: Synthetic oligonucleotide
acaaggauuacagauagug

SEQ ID NO: 616638 - RNA, 19 nt, Artificial Sequence
  Description of Artificial Sequence: Synthetic oligonucleotide
uagauaggguucaggaugg

SEQ ID NO: 616639 - RNA, 19 nt, Artificial Sequence
  Description of Artificial Sequence: Synthetic oligonucleotide
agccagaauagauauccgc

SEQ ID NO: 616640 - RNA, 19 nt, Artificial Sequence
  Description of Artificial Sequence: Synthetic oligonucleotide
aguaauugacaaaagcagg

SEQ ID NO: 616641 - RNA, 19 nt, Artificial Sequence
  Description of Artificial Sequence: Synthetic oligonucleotide
augacaauucucuggacag

SEQ ID NO: 616642 - RNA, 19 nt, Artificial Sequence
  Description of Artificial Sequence: Synthetic oligonucleotide
guguaaagaacauccgugg

SEQ ID NO: 616643 - RNA, 19 nt, Artificial Sequence
  Description of Artificial Sequence: Synthetic oligonucleotide
cacaccgucaaucaggccc

SEQ ID NO: 616644 - RNA, 19 nt, Artificial Sequence
  Description of Artificial Sequence: Synthetic oligonucleotide
aacucuaccagcgccugcc

SEQ ID NO: 616645 - RNA, 19 nt, Artificial Sequence
  Description of Artificial Sequence: Synthetic oligonucleotide
ugauaaugguucaggaagc

SEQ ID NO: 616646 - RNA, 19 nt, Artificial Sequence
  Description of Artificial Sequence: Synthetic oligonucleotide
ugugguuaagccucuacug

SEQ ID NO: 616647 - RNA, 19 nt, Artificial Sequence
  Description of Artificial Sequence: Synthetic oligonucleotide
ucuggacagggccacaagg

SEQ ID NO: 616648 - RNA, 19 nt, Artificial Sequence
  Description of Artificial Sequence: Synthetic oligonucleotide
accgauuguuccuugacuc

SEQ ID NO: 616649 - RNA, 19 nt, Artificial Sequence
  Description of Artificial Sequence: Synthetic oligonucleotide
uuagauugauccaagccau

SEQ ID NO: 616650 - RNA, 19 nt, Artificial Sequence
  Description of Artificial Sequence: Synthetic oligonucleotide
agcugauggguccaaauuc

SEQ ID NO: 616651 - RNA, 19 nt, Artificial Sequence
  Description of Artificial Sequence: Synthetic oligonucleotide
uaccacaccgucaaucagg

SEQ ID NO: 616652 - RNA, 19 nt, Artificial Sequence
  Description of Artificial Sequence: Synthetic oligonucleotide
agaacauccgugguuaugg

SEQ ID NO: 616653 - RNA, 19 nt, Artificial Sequence
  Description of Artificial Sequence: Synthetic oligonucleotide
gucaucguaacucuccccg

SEQ ID NO: 616654 - RNA, 19 nt, Artificial Sequence
  Description of Artificial Sequence: Synthetic oligonucleotide
gaaucaaauuccaccauag

SEQ ID NO: 616655 - RNA, 19 nt, Artificial Sequence
  Description of Artificial Sequence: Synthetic oligonucleotide
auuacagauaguguaaaga

SEQ ID NO: 616656 - RNA, 19 nt, Artificial Sequence
  Description of Artificial Sequence: Synthetic oligonucleotide
aucuuagauugauccaagc

SEQ ID NO: 616657 - RNA, 19 nt, Artificial Sequence
  Description of Artificial Sequence: Synthetic oligonucleotide
uacagauaguguaaagaac

SEQ ID NO: 616658 - RNA, 19 nt, Artificial Sequence
  Description of Artificial Sequence: Synthetic oligonucleotide
uuaaggugaguaauggcuc

SEQ ID NO: 616659 - RNA, 19 nt, Artificial Sequence
  Description of Artificial Sequence: Synthetic oligonucleotide
auuuccguugugguuaagc

SEQ ID NO: 616660 - RNA, 19 nt, Artificial Sequence
  Description of Artificial Sequence: Synthetic oligonucleotide
agaagcacaacuucagagu

SEQ ID NO: 616661 - RNA, 19 nt, Artificial Sequence
  Description of Artificial Sequence: Synthetic oligonucleotide
uucaccaucgcucccgccc

SEQ ID NO: 616662 - RNA, 19 nt, Artificial Sequence
  Description of Artificial Sequence: Synthetic oligonucleotide
uuauggaguagauaggguu

SEQ ID NO: 616663 - RNA, 19 nt, Artificial Sequence
  Description of Artificial Sequence: Synthetic oligonucleotide
auauccgccccauuaagug

SEQ ID NO: 616664 - RNA, 19 nt, Artificial Sequence
  Description of Artificial Sequence: Synthetic oligonucleotide
uccguugugguuaagccuc

SEQ ID NO: 616665 - RNA, 19 nt, Artificial Sequence
  Description of Artificial Sequence: Synthetic oligonucleotide
acggguacgggccauuugg

SEQ ID NO: 616666 - RNA, 19 nt, Artificial Sequence
  Description of Artificial Sequence: Synthetic oligonucleotide
aaaugugccaagauacaug

SEQ ID NO: 616667 - RNA, 19 nt, Artificial Sequence
  Description of Artificial Sequence: Synthetic oligonucleotide
acgaccgacuucuaaccgc

SEQ ID NO: 616668 - RNA, 19 nt, Artificial Sequence
  Description of Artificial Sequence: Synthetic oligonucleotide
auaaugguucaggaagccc

SEQ ID NO: 616669 - RNA, 19 nt, Artificial Sequence
  Description of Artificial Sequence: Synthetic oligonucleotide
uaagugaggccuuggcccg

SEQ ID NO: 616670 - RNA, 19 nt, Artificial Sequence
  Description of Artificial Sequence: Synthetic oligonucleotide
cacauuacuagggugcugg

SEQ ID NO: 616671 - RNA, 19 nt, Artificial Sequence
  Description of Artificial Sequence: Synthetic oligonucleotide
uuagagucccacuccaaca

SEQ ID NO: 616672 - RNA, 19 nt, Artificial Sequence
  Description of Artificial Sequence: Synthetic oligonucleotide
gugaguaauggcucggucc

SEQ ID NO: 616673 - RNA, 19 nt, Artificial Sequence
  Description of Artificial Sequence: Synthetic oligonucleotide
gagugcaacagccagaaua

SEQ ID NO: 616674 - RNA, 19 nt, Artificial Sequence
  Description of Artificial Sequence: Synthetic oligonucleotide
auagauauccgccccauua

SEQ ID NO: 616675 - RNA, 19 nt, Artificial Sequence
  Description of Artificial Sequence: Synthetic oligonucleotide
agucccaaguaucuugauc

SEQ ID NO: 616676 - RNA, 19 nt, Artificial Sequence
  Description of Artificial Sequence: Synthetic oligonucleotide
ugcccgaacaugaaguugu

SEQ ID NO: 616677 - RNA, 19 nt, Artificial Sequence
  Description of Artificial Sequence: Synthetic oligonucleotide
cagcacauuacuagggugc

SEQ ID NO: 616678 - RNA, 19 nt, Artificial Sequence
  Description of Artificial Sequence: Synthetic oligonucleotide
uugugguuaagccucuacu

SEQ ID NO: 616679 - RNA, 19 nt, Artificial Sequence
  Description of Artificial Sequence: Synthetic oligonucleotide
acauugaagacgcgaucac

SEQ ID NO: 616680 - RNA, 19 nt, Artificial Sequence
  Description of Artificial Sequence: Synthetic oligonucleotide
cauccgaauccccagggcg

SEQ ID NO: 616681 - RNA, 19 nt, Artificial Sequence
  Description of Artificial Sequence: Synthetic oligonucleotide
uccagcauuuccguugugg

SEQ ID NO: 616682 - RNA, 19 nt, Artificial Sequence
  Description of Artificial Sequence: Synthetic oligonucleotide
gguuauggaguagauaggg

SEQ ID NO: 616683 - RNA, 19 nt, Artificial Sequence
  Description of Artificial Sequence: Synthetic oligonucleotide
ugggauuacugccaggguc

SEQ ID NO: 616684 - RNA, 19 nt, Artificial Sequence
  Description of Artificial Sequence: Synthetic oligonucleotide
caaauuccaccauagccug

SEQ ID NO: 616685 - RNA, 19 nt, Artificial Sequence
  Description of Artificial Sequence: Synthetic oligonucleotide
uuacuagggugcuggaugc

SEQ ID NO: 616686 - RNA, 19 nt, Artificial Sequence
  Description of Artificial Sequence: Synthetic oligonucleotide
aucuaauuaggaggcgugc

SEQ ID NO: 616687 - RNA, 19 nt, Artificial Sequence
  Description of Artificial Sequence: Synthetic oligonucleotide
uacucgaucuucagagugc

SEQ ID NO: 616688 - RNA, 19 nt, Artificial Sequence
  Description of Artificial Sequence: Synthetic oligonucleotide
uuguguagucccaaguauc

SEQ ID NO: 616689 - RNA, 19 nt, Artificial Sequence
  Description of Artificial Sequence: Synthetic oligonucleotide
cuuguagaguaauugacaa

SEQ ID NO: 616690 - RNA, 19 nt, Artificial Sequence
  Description of Artificial Sequence: Synthetic oligonucleotide
uccgucuucagccguuuag

SEQ ID NO: 616691 - RNA, 19 nt, Artificial Sequence
  Description of Artificial Sequence: Synthetic oligonucleotide
uucgcauacucgaucuuca

SEQ ID NO: 616692 - RNA, 19 nt, Artificial Sequence
  Description of Artificial Sequence: Synthetic oligonucleotide
ucucccuucguagugaggu

SEQ ID NO: 616693 - RNA, 19 nt, Artificial Sequence
  Description of Artificial Sequence: Synthetic oligonucleotide
gacauugaagacgcgauca

SEQ ID NO: 616694 - RNA, 19 nt, Artificial Sequence
  Description of Artificial Sequence: Synthetic oligonucleotide
ugcacggaaucaaauucca

SEQ ID NO: 616695 - RNA, 19 nt, Artificial Sequence
  Description of Artificial Sequence: Synthetic oligonucleotide
agggugaccagcaauguag

SEQ ID NO: 616696 - RNA, 19 nt, Artificial Sequence
  Description of Artificial Sequence: Synthetic oligonucleotide
aacuacgcgaccaccgccg

SEQ ID NO: 616697 - RNA, 19 nt, Artificial Sequence
  Description of Artificial Sequence: Synthetic oligonucleotide
cauuaagugaggccuuggc

SEQ ID NO: 616698 - RNA, 19 nt, Artificial Sequence
  Description of Artificial Sequence: Synthetic oligonucleotide
gauaaugguucaggaagcc

SEQ ID NO: 616699 - RNA, 19 nt, Artificial Sequence
  Description of Artificial Sequence: Synthetic oligonucleotide
uggcuuguagaguaauuga

SEQ ID NO: 616700 - RNA, 19 nt, Artificial Sequence
  Description of Artificial Sequence: Synthetic oligonucleotide
agauauccgccccauuaag

SEQ ID NO: 616701 - RNA, 19 nt, Artificial Sequence
  Description of Artificial Sequence: Synthetic oligonucleotide
aagacgcgaucacaguuca

SEQ ID NO: 616702 - RNA, 19 nt, Artificial Sequence
  Description of Artificial Sequence: Synthetic oligonucleotide
cuuagagucccacuccaac

SEQ ID NO: 616703 - RNA, 19 nt, Artificial Sequence
  Description of Artificial Sequence: Synthetic oligonucleotide
ugaagacgcgaucacaguu

SEQ ID NO: 616704 - RNA, 19 nt, Artificial Sequence
  Description of Artificial Sequence: Synthetic oligonucleotide
ugguuaagccucuacugac

SEQ ID NO: 616705 - RNA, 19 nt, Artificial Sequence
  Description of Artificial Sequence: Synthetic oligonucleotide
aagguuauucuugggagau

SEQ ID NO: 616706 - RNA, 19 nt, Artificial Sequence
  Description of Artificial Sequence: Synthetic oligonucleotide
uaaacggguaggcuucgca

SEQ ID NO: 616707 - RNA, 19 nt, Artificial Sequence
  Description of Artificial Sequence: Synthetic oligonucleotide
uuuugccugaaaauacuuu

SEQ ID NO: 616708 - RNA, 19 nt, Artificial Sequence
  Description of Artificial Sequence: Synthetic oligonucleotide
aaacggguaggcuucgcau

SEQ ID NO: 616709 - RNA, 19 nt, Artificial Sequence
  Description of Artificial Sequence: Synthetic oligonucleotide
cuaauuaggaggcgugcug

SEQ ID NO: 616710 - RNA, 19 nt, Artificial Sequence
  Description of Artificial Sequence: Synthetic oligonucleotide
caucuaauuaggaggcgug

SEQ ID NO: 616711 - RNA, 19 nt, Artificial Sequence
  Description of Artificial Sequence: Synthetic oligonucleotide
uagauauccgccccauuaa

SEQ ID NO: 616712 - RNA, 19 nt, Artificial Sequence
  Description of Artificial Sequence: Synthetic oligonucleotide
gaagguuauucuugggaga

SEQ ID NO: 616713 - RNA, 19 nt, Artificial Sequence
  Description of Artificial Sequence: Synthetic oligonucleotide
gacgaccgacuucuaaccg

SEQ ID NO: 616714 - RNA, 19 nt, Artificial Sequence
  Description of Artificial Sequence: Synthetic oligonucleotide
gaagucuuuguaacugcag

SEQ ID NO: 616715 - RNA, 19 nt, Artificial Sequence
  Description of Artificial Sequence: Synthetic oligonucleotide
ucuaauuaggaggcgugcu

SEQ ID NO: 616716 - RNA, 19 nt, Artificial Sequence
  Description of Artificial Sequence: Synthetic oligonucleotide
guuaaggugaguaauggcu

SEQ ID NO: 616717 - RNA, 19 nt, Artificial Sequence
  Description of Artificial Sequence: Synthetic oligonucleotide
agucauccgaauccccagg

SEQ ID NO: 616718 - RNA, 19 nt, Artificial Sequence
  Description of Artificial Sequence: Synthetic oligonucleotide
agaauagauauccgcccca

SEQ ID NO: 616719 - RNA, 19 nt, Artificial Sequence
  Description of Artificial Sequence: Synthetic oligonucleotide
uaauuaggaggcgugcugu

SEQ ID NO: 616720 - RNA, 19 nt, Artificial Sequence
  Description of Artificial Sequence: Synthetic oligonucleotide
guaggcuucgcauacucga

SEQ ID NO: 616721 - RNA, 19 nt, Artificial Sequence
  Description of Artificial Sequence: Synthetic oligonucleotide
uucagaguguacggguacg

SEQ ID NO: 616722 - RNA, 19 nt, Artificial Sequence
  Description of Artificial Sequence: Synthetic oligonucleotide
ucaccaucgcucccgcccg

SEQ ID NO: 616723 - RNA, 19 nt, Artificial Sequence
  Description of Artificial Sequence: Synthetic oligonucleotide
cuugaucauucuugaacac

SEQ ID NO: 616724 - RNA, 19 nt, Artificial Sequence
  Description of Artificial Sequence: Synthetic oligonucleotide
aucguaacucuccccgccg

SEQ ID NO: 616725 - RNA, 19 nt, Artificial Sequence
  Description of Artificial Sequence: Synthetic oligonucleotide
uaacuacgcgaccaccgcc

SEQ ID NO: 616726 - RNA, 19 nt, Artificial Sequence
  Description of Artificial Sequence: Synthetic oligonucleotide
gaguguacggguacgggcc

SEQ ID NO: 616727 - RNA, 19 nt, Artificial Sequence
  Description of Artificial Sequence: Synthetic oligonucleotide
ucgcugaagucuuuguaac

SEQ ID NO: 616728 - RNA, 19 nt, Artificial Sequence
  Description of Artificial Sequence: Synthetic oligonucleotide
ucccuucguagugaggugg

SEQ ID NO: 616729 - RNA, 19 nt, Artificial Sequence
  Description of Artificial Sequence: Synthetic oligonucleotide
uggagaaccgauuguuccu

SEQ ID NO: 616730 - RNA, 19 nt, Artificial Sequence
  Description of Artificial Sequence: Synthetic oligonucleotide
guuguuguuaaggugagua

SEQ ID NO: 616731 - RNA, 19 nt, Artificial Sequence
  Description of Artificial Sequence: Synthetic oligonucleotide
agggccacaaggauuacag

SEQ ID NO: 616732 - RNA, 19 nt, Artificial Sequence
  Description of Artificial Sequence: Synthetic oligonucleotide
auaggguucaggaugguaa

SEQ ID NO: 616733 - RNA, 19 nt, Artificial Sequence
  Description of Artificial Sequence: Synthetic oligonucleotide
guaacuacgcgaccaccgc

SEQ ID NO: 616734 - RNA, 19 nt, Artificial Sequence
  Description of Artificial Sequence: Synthetic oligonucleotide
aagaacauccgugguuaug

SEQ ID NO: 616735 - RNA, 19 nt, Artificial Sequence
  Description of Artificial Sequence: Synthetic oligonucleotide
uggccgggcauaauggcug

SEQ ID NO: 616736 - RNA, 19 nt, Artificial Sequence
  Description of Artificial Sequence: Synthetic oligonucleotide
uuguagaguaauugacaaa

SEQ ID NO: 616737 - RNA, 19 nt, Artificial Sequence
  Description of Artificial Sequence: Synthetic oligonucleotide
cauggggcccuccauauuc

SEQ ID NO: 616738 - RNA, 19 nt, Artificial Sequence
  Description of Artificial Sequence: Synthetic oligonucleotide
gaaccgauuguuccuugac

SEQ ID NO: 616739 - RNA, 19 nt, Artificial Sequence
  Description of Artificial Sequence: Synthetic oligonucleotide
ugggcagcacaaauauaug

SEQ ID NO: 616740 - RNA, 19 nt, Artificial Sequence
  Description of Artificial Sequence: Synthetic oligonucleotide
ucauccgaauccccagggc

SEQ ID NO: 616741 - RNA, 19 nt, Artificial Sequence
  Description of Artificial Sequence: Synthetic oligonucleotide
ggacccgucuucuagcccg

SEQ ID NO: 616742 - RNA, 19 nt, Artificial Sequence
  Description of Artificial Sequence: Synthetic oligonucleotide
uauccgccccauuaaguga

SEQ ID NO: 616743 - RNA, 19 nt, Artificial Sequence
  Description of Artificial Sequence: Synthetic oligonucleotide
acaccgucaaucaggcccc

SEQ ID NO: 616744 - RNA, 19 nt, Artificial Sequence
  Description of Artificial Sequence: Synthetic oligonucleotide
aggaugguaaacagaagca

SEQ ID NO: 616745 - RNA, 19 nt, Artificial Sequence
  Description of Artificial Sequence: Synthetic oligonucleotide
agauaccaguuccccuccc

SEQ ID NO: 616746 - RNA, 19 nt, Artificial Sequence
  Description of Artificial Sequence: Synthetic oligonucleotide
gugguuaagccucuacuga

SEQ ID NO: 616747 - RNA, 19 nt, Artificial Sequence
  Description of Artificial Sequence: Synthetic oligonucleotide
caucguaacucuccccgcc

SEQ ID NO: 616748 - RNA, 19 nt, Artificial Sequence
  Description of Artificial Sequence: Synthetic oligonucleotide
ccagaauagauauccgccc

SEQ ID NO: 616749 - RNA, 19 nt, Artificial Sequence
  Description of Artificial Sequence: Synthetic oligonucleotide
gguuauucuugggagauac

SEQ ID NO: 616750 - RNA, 19 nt, Artificial Sequence
  Description of Artificial Sequence: Synthetic oligonucleotide
agcauuuccguugugguua

SEQ ID NO: 616751 - RNA, 19 nt, Artificial Sequence
  Description of Artificial Sequence: Synthetic oligonucleotide
gaugaucuccuaggagagg

SEQ ID NO: 616752 - RNA, 19 nt, Artificial Sequence
  Description of Artificial Sequence: Synthetic oligonucleotide
ucaucguaacucuccccgc

SEQ ID NO: 616753 - RNA, 19 nt, Artificial Sequence
  Description of Artificial Sequence: Synthetic oligonucleotide
gaagacgcgaucacaguuc

SEQ ID NO: 616754 - RNA, 19 nt, Artificial Sequence
  Description of Artificial Sequence: Synthetic oligonucleotide
auagcugauggguccaaau

SEQ ID NO: 616755 - RNA, 19 nt, Artificial Sequence
  Description of Artificial Sequence: Synthetic oligonucleotide
ugggagauaccaguucccc

SEQ ID NO: 616756 - RNA, 19 nt, Artificial Sequence
  Description of Artificial Sequence: Synthetic oligonucleotide
aacggguaggcuucgcaua

SEQ ID NO: 616757 - RNA, 19 nt, Artificial Sequence
  Description of Artificial Sequence: Synthetic oligonucleotide
uugaagacgcgaucacagu

SEQ ID NO: 616758 - RNA, 19 nt, Artificial Sequence
  Description of Artificial Sequence: Synthetic oligonucleotide
aggcuucgcauacucgauc

SEQ ID NO: 616759 - RNA, 19 nt, Artificial Sequence
  Description of Artificial Sequence: Synthetic oligonucleotide
aaagaacauccgugguuau

SEQ ID NO: 616760 - RNA, 19 nt, Artificial Sequence
  Description of Artificial Sequence: Synthetic oligonucleotide
uccgugguuauggaguaga

SEQ ID NO: 616761 - RNA, 19 nt, Artificial Sequence
  Description of Artificial Sequence: Synthetic oligonucleotide
caacuucagaguguacggg

SEQ ID NO: 616762 - RNA, 19 nt, Artificial Sequence
  Description of Artificial Sequence: Synthetic oligonucleotide
cuucagaguguacggguac

SEQ ID NO: 616763 - RNA, 19 nt, Artificial Sequence
  Description of Artificial Sequence: Synthetic oligonucleotide
gugguacccaccauggggc

SEQ ID NO: 616764 - RNA, 19 nt, Artificial Sequence
  Description of Artificial Sequence: Synthetic oligonucleotide
gacuucuaaccgcccgggg

SEQ ID NO: 616765 - RNA, 19 nt, Artificial Sequence
  Description of Artificial Sequence: Synthetic oligonucleotide
uaucuugaucauucuugaa

SEQ ID NO: 616766 - RNA, 19 nt, Artificial Sequence
  Description of Artificial Sequence: Synthetic oligonucleotide
acuacgcgaccaccgccgc

SEQ ID NO: 616767 - RNA, 19 nt, Artificial Sequence
  Description of Artificial Sequence: Synthetic oligonucleotide
guugugguuaagccucuac

SEQ ID NO: 616768 - RNA, 19 nt, Artificial Sequence
  Description of Artificial Sequence: Synthetic oligonucleotide
gccagaauagauauccgcc

SEQ ID NO: 616769 - RNA, 19 nt, Artificial Sequence
  Description of Artificial Sequence: Synthetic oligonucleotide
uacugaccuagcauuuaaa

SEQ ID NO: 616770 - RNA, 19 nt, Artificial Sequence
  Description of Artificial Sequence: Synthetic oligonucleotide
gcgacuugggccccgacgg

SEQ ID NO: 616771 - RNA, 19 nt, Artificial Sequence
  Description of Artificial Sequence: Synthetic oligonucleotide
uauucagcgggaugaucuc

SEQ ID NO: 616772 - RNA, 19 nt, Artificial Sequence
  Description of Artificial Sequence: Synthetic oligonucleotide
aggacccgucuucuagccc

SEQ ID NO: 616773 - RNA, 19 nt, Artificial Sequence
  Description of Artificial Sequence: Synthetic oligonucleotide
acgcgaucacaguucaucu

SEQ ID NO: 616774 - RNA, 19 nt, Artificial Sequence
  Description of Artificial Sequence: Synthetic oligonucleotide
agaaccgauuguuccuuga

SEQ ID NO: 616775 - RNA, 19 nt, Artificial Sequence
  Description of Artificial Sequence: Synthetic oligonucleotide
cucgguccacagcauagcc

SEQ ID NO: 616776 - RNA, 19 nt, Artificial Sequence
  Description of Artificial Sequence: Synthetic oligonucleotide
agcccguaagacuggccgg

SEQ ID NO: 616777 - RNA, 19 nt, Artificial Sequence
  Description of Artificial Sequence: Synthetic oligonucleotide
ucgcauacucgaucuucag

SEQ ID NO: 616778 - RNA, 19 nt, Artificial Sequence
  Description of Artificial Sequence: Synthetic oligonucleotide
gugaccagcaauguagauc

SEQ ID NO: 616779 - RNA, 19 nt, Artificial Sequence
  Description of Artificial Sequence: Synthetic oligonucleotide
ucguaacucuccccgccgc

SEQ ID NO: 616780 - RNA, 19 nt, Artificial Sequence
  Description of Artificial Sequence: Synthetic oligonucleotide
gccauagcgacuugggccc

SEQ ID NO: 616781 - RNA, 19 nt, Artificial Sequence
  Description of Artificial Sequence: Synthetic oligonucleotide
ugggguuuguguaguccca

SEQ ID NO: 616782 - RNA, 19 nt, Artificial Sequence
  Description of Artificial Sequence: Synthetic oligonucleotide
ugcguaguucacugcauua

SEQ ID NO: 616783 - RNA, 19 nt, Artificial Sequence
  Description of Artificial Sequence: Synthetic oligonucleotide
ugguaauggcugugguacc

SEQ ID NO: 616784 - RNA, 19 nt, Artificial Sequence
  Description of Artificial Sequence: Synthetic oligonucleotide
cagccagaauagauauccg

SEQ ID NO: 616785 - RNA, 19 nt, Artificial Sequence
  Description of Artificial Sequence: Synthetic oligonucleotide
guagcccucaucaugguaa

SEQ ID NO: 616786 - RNA, 19 nt, Artificial Sequence
  Description of Artificial Sequence: Synthetic oligonucleotide
agcacacuguugacgcucc

SEQ ID NO: 616787 - RNA, 19 nt, Artificial Sequence
  Description of Artificial Sequence: Synthetic oligonucleotide
guacgggccauuuggguuc

SEQ ID NO: 616788 - RNA, 19 nt, Artificial Sequence
  Description of Artificial Sequence: Synthetic oligonucleotide
cuucgcauacucgaucuuc

SEQ ID NO: 616789 - RNA, 19 nt, Artificial Sequence
  Description of Artificial Sequence: Synthetic oligonucleotide
auccgaauccccagggcgg

SEQ ID NO: 616790 - RNA, 19 nt, Artificial Sequence
  Description of Artificial Sequence: Synthetic oligonucleotide
auauaugaacaggggaaaa

SEQ ID NO: 616791 - RNA, 19 nt, Artificial Sequence
  Description of Artificial Sequence: Synthetic oligonucleotide
agcaucuaauuaggaggcg

SEQ ID NO: 616792 - RNA, 19 nt, Artificial Sequence
  Description of Artificial Sequence: Synthetic oligonucleotide
ucugguugucugcugcgua

SEQ ID NO: 616793 - RNA, 19 nt, Artificial Sequence
  Description of Artificial Sequence: Synthetic oligonucleotide
ggaugguaaacagaagcac

SEQ ID NO: 616794 - RNA, 19 nt, Artificial Sequence
  Description of Artificial Sequence: Synthetic oligonucleotide
cuucucccuucguagugag

SEQ ID NO: 616795 - RNA, 19 nt, Artificial Sequence
  Description of Artificial Sequence: Synthetic oligonucleotide
cuggacuccauucuuccga

SEQ ID NO: 616796 - RNA, 19 nt, Artificial Sequence
  Description of Artificial Sequence: Synthetic oligonucleotide
guaacucuccccgccgccg

SEQ ID NO: 616797 - RNA, 19 nt, Artificial Sequence
  Description of Artificial Sequence: Synthetic oligonucleotide
cacagggcugucagcgugg

SEQ ID NO: 616798 - RNA, 19 nt, Artificial Sequence
  Description of Artificial Sequence: Synthetic oligonucleotide
aucuucugcccgaacauga

SEQ ID NO: 616799 - RNA, 19 nt, Artificial Sequence
  Description of Artificial Sequence: Synthetic oligonucleotide
cguaacuacgcgaccaccg

SEQ ID NO: 616800 - RNA, 19 nt, Artificial Sequence
  Description of Artificial Sequence: Synthetic oligonucleotide
uccgaauccccagggcggg

SEQ ID NO: 616801 - RNA, 19 nt, Artificial Sequence
  Description of Artificial Sequence: Synthetic oligonucleotide
uaauggcugugguacccac

SEQ ID NO: 616802 - RNA, 19 nt, Artificial Sequence
  Description of Artificial Sequence: Synthetic oligonucleotide
uggucgccggcguuuuccg

SEQ ID NO: 616803 - RNA, 19 nt, Artificial Sequence
  Description of Artificial Sequence: Synthetic oligonucleotide
cacacuguugacgcuccgg

SEQ ID NO: 616804 - RNA, 19 nt, Artificial Sequence
  Description of Artificial Sequence: Synthetic oligonucleotide
cguuuguugggauuacugc

SEQ ID NO: 616805 - RNA, 19 nt, Artificial Sequence
  Description of Artificial Sequence: Synthetic oligonucleotide
caggacccgucuucuagcc

SEQ ID NO: 616806 - RNA, 19 nt, Artificial Sequence
  Description of Artificial Sequence: Synthetic oligonucleotide
uuuuccgucuucagccguu

SEQ ID NO: 616807 - RNA, 19 nt, Artificial Sequence
  Description of Artificial Sequence: Synthetic oligonucleotide
agcacaacuucagagugua

SEQ ID NO: 616808 - RNA, 19 nt, Artificial Sequence
  Description of Artificial Sequence: Synthetic oligonucleotide
acucgaucuucagagugca

SEQ ID NO: 616809 - RNA, 19 nt, Artificial Sequence
  Description of Artificial Sequence: Synthetic oligonucleotide
uacggguacgggccauuug

SEQ ID NO: 616810 - RNA, 19 nt, Artificial Sequence
  Description of Artificial Sequence: Synthetic oligonucleotide
accaacagcauaagggaaa

SEQ ID NO: 616811 - RNA, 19 nt, Artificial Sequence
  Description of Artificial Sequence: Synthetic oligonucleotide
guaaagaacauccgugguu

SEQ ID NO: 616812 - RNA, 19 nt, Artificial Sequence
  Description of Artificial Sequence: Synthetic oligonucleotide
ucuagcccguaagacuggc

SEQ ID NO: 616813 - RNA, 19 nt, Artificial Sequence
  Description of Artificial Sequence: Synthetic oligonucleotide
guuaagccucuacugaccu

SEQ ID NO: 616814 - RNA, 19 nt, Artificial Sequence
  Description of Artificial Sequence: Synthetic oligonucleotide
auccgccccauuaagugag

SEQ ID NO: 616815 - RNA, 19 nt, Artificial Sequence
  Description of Artificial Sequence: Synthetic oligonucleotide
ggcuuguagaguaauugac

SEQ ID NO: 616816 - RNA, 19 nt, Artificial Sequence
  Description of Artificial Sequence: Synthetic oligonucleotide
aagccucuacugaccuagc

SEQ ID NO: 616817 - RNA, 19 nt, Artificial Sequence
  Description of Artificial Sequence: Synthetic oligonucleotide
uagauugauccaagccaua

SEQ ID NO: 616818 - RNA, 19 nt, Artificial Sequence
  Description of Artificial Sequence: Synthetic oligonucleotide
ggaaucaaauuccaccaua

SEQ ID NO: 616819 - RNA, 19 nt, Artificial Sequence
  Description of Artificial Sequence: Synthetic oligonucleotide
gaggcgugcugugcggugg

SEQ ID NO: 616820 - RNA, 19 nt, Artificial Sequence
  Description of Artificial Sequence: Synthetic oligonucleotide
uacuagggugcuggaugcg

SEQ ID NO: 616821 - RNA, 19 nt, Artificial Sequence
  Description of Artificial Sequence: Synthetic oligonucleotide
ucuacugaccuagcauuua

SEQ ID NO: 616822 - RNA, 19 nt, Artificial Sequence
  Description of Artificial Sequence: Synthetic oligonucleotide
gguaauggcugugguaccc

SEQ ID NO: 616823 - RNA, 19 nt, Artificial Sequence
  Description of Artificial Sequence: Synthetic oligonucleotide
cucgagccgccgacgaccg

SEQ ID NO: 616824 - RNA, 19 nt, Artificial Sequence
  Description of Artificial Sequence: Synthetic oligonucleotide
gguuaagccucuacugacc

SEQ ID NO: 616825 - RNA, 19 nt, Artificial Sequence
  Description of Artificial Sequence: Synthetic oligonucleotide
caaggauuacagauagugu

SEQ ID NO: 616826 - RNA, 19 nt, Artificial Sequence
  Description of Artificial Sequence: Synthetic oligonucleotide
cuagcccguaagacuggcc

SEQ ID NO: 616827 - RNA, 19 nt, Artificial Sequence
  Description of Artificial Sequence: Synthetic oligonucleotide
cuucagagugcaacagcca

SEQ ID NO: 616828 - RNA, 19 nt, Artificial Sequence
  Description of Artificial Sequence: Synthetic oligonucleotide
aguguacggguacgggcca

SEQ ID NO: 616829 - RNA, 19 nt, Artificial Sequence
  Description of Artificial Sequence: Synthetic oligonucleotide
guaacugcaggacccgucu

SEQ ID NO: 616830 - RNA, 19 nt, Artificial Sequence
  Description of Artificial Sequence: Synthetic oligonucleotide
ccgggagucauccgaaucc

SEQ ID NO: 616831 - RNA, 19 nt, Artificial Sequence
  Description of Artificial Sequence: Synthetic oligonucleotide
agccucuacugaccuagca

SEQ ID NO: 616832 - RNA, 19 nt, Artificial Sequence
  Description of Artificial Sequence: Synthetic oligonucleotide
uuaaacggguaggcuucgc

SEQ ID NO: 616833 - RNA, 19 nt, Artificial Sequence
  Description of Artificial Sequence: Synthetic oligonucleotide
uccgccccauuaagugagg

SEQ ID NO: 616834 - RNA, 19 nt, Artificial Sequence
  Description of Artificial Sequence: Synthetic oligonucleotide
ugguacccaccauggggcc

SEQ ID NO: 616835 - RNA, 19 nt, Artificial Sequence
  Description of Artificial Sequence: Synthetic oligonucleotide
ccgauuguuccuugacucg

SEQ ID NO: 616836 - RNA, 19 nt, Artificial Sequence
  Description of Artificial Sequence: Synthetic oligonucleotide
acauuacuagggugcugga

SEQ ID NO: 616837 - RNA, 19 nt, Artificial Sequence
  Description of Artificial Sequence: Synthetic oligonucleotide
acugagguugggguuugug

SEQ ID NO: 616838 - RNA, 19 nt, Artificial Sequence
  Description of Artificial Sequence: Synthetic oligonucleotide
uucgccgccgccguaacua

SEQ ID NO: 616839 - RNA, 19 nt, Artificial Sequence
  Description of Artificial Sequence: Synthetic oligonucleotide
cauugaagacgcgaucaca

SEQ ID NO: 616840 - RNA, 19 nt, Artificial Sequence
  Description of Artificial Sequence: Synthetic oligonucleotide
uuaagccucuacugaccua

SEQ ID NO: 616841 - RNA, 19 nt, Artificial Sequence
  Description of Artificial Sequence: Synthetic oligonucleotide
acauugccauacaagcaga

SEQ ID NO: 616842 - RNA, 19 nt, Artificial Sequence
  Description of Artificial Sequence: Synthetic oligonucleotide
gauauccgccccauuaagu

SEQ ID NO: 616843 - RNA, 19 nt, Artificial Sequence
  Description of Artificial Sequence: Synthetic oligonucleotide
agccguuuaggggcucggc

SEQ ID NO: 616844 - RNA, 19 nt, Artificial Sequence
  Description of Artificial Sequence: Synthetic oligonucleotide
cuggucgccggcguuuucc

SEQ ID NO: 616845 - RNA, 19 nt, Artificial Sequence
  Description of Artificial Sequence: Synthetic oligonucleotide
gggauuacugccaggguca

SEQ ID NO: 616846 - RNA, 19 nt, Artificial Sequence
  Description of Artificial Sequence: Synthetic oligonucleotide
gacuugggccccgacggug

SEQ ID NO: 616847 - RNA, 19 nt, Artificial Sequence
  Description of Artificial Sequence: Synthetic oligonucleotide
gguaggcuucgcauacucg

SEQ ID NO: 616848 - RNA, 19 nt, Artificial Sequence
  Description of Artificial Sequence: Synthetic oligonucleotide
ggcagcacaaauauaugaa

SEQ ID NO: 616849 - RNA, 19 nt, Artificial Sequence
  Description of Artificial Sequence: Synthetic oligonucleotide
ccgacgaccgacuucuaac

SEQ ID NO: 616850 - RNA, 19 nt, Artificial Sequence
  Description of Artificial Sequence: Synthetic oligonucleotide
gccauuuggguucuucauc

SEQ ID NO: 616851 - RNA, 19 nt, Artificial Sequence
  Description of Artificial Sequence: Synthetic oligonucleotide
ucucuggacagggccacaa

SEQ ID NO: 616852 - RNA, 19 nt, Artificial Sequence
  Description of Artificial Sequence: Synthetic oligonucleotide
uucuaaccgcccggggcag

SEQ ID NO: 616853 - RNA, 19 nt, Artificial Sequence
  Description of Artificial Sequence: Synthetic oligonucleotide
cuuugcacggaaucaaauu

SEQ ID NO: 616854 - RNA, 19 nt, Artificial Sequence
  Description of Artificial Sequence: Synthetic oligonucleotide
cgcuuuugccugaaaauac

SEQ ID NO: 616855 - RNA, 19 nt, Artificial Sequence
  Description of Artificial Sequence: Synthetic oligonucleotide
uuguaacugcaggacccgu

SEQ ID NO: 616856 - RNA, 19 nt, Artificial Sequence
  Description of Artificial Sequence: Synthetic oligonucleotide
cucgcuuuugccugaaaau

SEQ ID NO: 616857 - RNA, 19 nt, Artificial Sequence
  Description of Artificial Sequence: Synthetic oligonucleotide
gcguuuguugggauuacug

SEQ ID NO: 616858 - RNA, 19 nt, Artificial Sequence
  Description of Artificial Sequence: Synthetic oligonucleotide
gucgccggcguuuuccguc

SEQ ID NO: 616859 - RNA, 19 nt, Artificial Sequence
  Description of Artificial Sequence: Synthetic oligonucleotide
uuuaggggcucggccuccc

SEQ ID NO: 616860 - RNA, 19 nt, Artificial Sequence
  Description of Artificial Sequence: Synthetic oligonucleotide
cauacaagcagaagacauu

SEQ ID NO: 616861 - RNA, 19 nt, Artificial Sequence
  Description of Artificial Sequence: Synthetic oligonucleotide
gccguuuaggggcucggcc

SEQ ID NO: 616862 - RNA, 19 nt, Artificial Sequence
  Description of Artificial Sequence: Synthetic oligonucleotide
gcgaucacaguucaucuua

SEQ ID NO: 616863 - RNA, 19 nt, Artificial Sequence
  Description of Artificial Sequence: Synthetic oligonucleotide
cccugauguggacaacugg

SEQ ID NO: 616864 - RNA, 19 nt, Artificial Sequence
  Description of Artificial Sequence: Synthetic oligonucleotide
uguugacgcuccgggaguc

SEQ ID NO: 616865 - RNA, 19 nt, Artificial Sequence
  Description of Artificial Sequence: Synthetic oligonucleotide
ggugaguaauggcucgguc

SEQ ID NO: 616866 - RNA, 19 nt, Artificial Sequence
  Description of Artificial Sequence: Synthetic oligonucleotide
cagcuucuaccacaccguc

SEQ ID NO: 616867 - RNA, 19 nt, Artificial Sequence
  Description of Artificial Sequence: Synthetic oligonucleotide
gcaggacccgucuucuagc

SEQ ID NO: 616868 - RNA, 19 nt, Artificial Sequence
  Description of Artificial Sequence: Synthetic oligonucleotide
uaacugcaggacccgucuu

SEQ ID NO: 616869 - RNA, 19 nt, Artificial Sequence
  Description of Artificial Sequence: Synthetic oligonucleotide
ugcgcucgcuuuugccuga

SEQ ID NO: 616870 - RNA, 19 nt, Artificial Sequence
  Description of Artificial Sequence: Synthetic oligonucleotide
agcuucuaccacaccguca

SEQ ID NO: 616871 - RNA, 19 nt, Artificial Sequence
  Description of Artificial Sequence: Synthetic oligonucleotide
ggccauagucggguggugg

SEQ ID NO: 616872 - RNA, 19 nt, Artificial Sequence
  Description of Artificial Sequence: Synthetic oligonucleotide
cuucaccaucgcucccgcc

SEQ ID NO: 616873 - RNA, 19 nt, Artificial Sequence
  Description of Artificial Sequence: Synthetic oligonucleotide
guuauggaguagauagggu

SEQ ID NO: 616874 - RNA, 19 nt, Artificial Sequence
  Description of Artificial Sequence: Synthetic oligonucleotide
aucgcucccgcccgccuca

SEQ ID NO: 616875 - RNA, 19 nt, Artificial Sequence
  Description of Artificial Sequence: Synthetic oligonucleotide
ucgccggcguuuuccgucu

SEQ ID NO: 616876 - RNA, 19 nt, Artificial Sequence
  Description of Artificial Sequence: Synthetic oligonucleotide
aggugaguaauggcucggu

SEQ ID NO: 616877 - RNA, 19 nt, Artificial Sequence
  Description of Artificial Sequence: Synthetic oligonucleotide
ugcucgagccgccgacgac

SEQ ID NO: 616878 - RNA, 19 nt, Artificial Sequence
  Description of Artificial Sequence: Synthetic oligonucleotide
uccgccgccgccgccgccg

SEQ ID NO: 616879 - RNA, 19 nt, Artificial Sequence
  Description of Artificial Sequence: Synthetic oligonucleotide
ggauuacagauaguguaaa

SEQ ID NO: 616880 - RNA, 19 nt, Artificial Sequence
  Description of Artificial Sequence: Synthetic oligonucleotide
gccaagauacaugggcagc

SEQ ID NO: 616881 - RNA, 19 nt, Artificial Sequence
  Description of Artificial Sequence: Synthetic oligonucleotide
gaauagauauccgccccau

SEQ ID NO: 616882 - RNA, 19 nt, Artificial Sequence
  Description of Artificial Sequence: Synthetic oligonucleotide
ggcucgguccacagcauag

SEQ ID NO: 616883 - RNA, 19 nt, Artificial Sequence
  Description of Artificial Sequence: Synthetic oligonucleotide
gcguaguucacugcauuac

SEQ ID NO: 616884 - RNA, 19 nt, Artificial Sequence
  Description of Artificial Sequence: Synthetic oligonucleotide
gguuggccgcuucacuccc

SEQ ID NO: 616885 - RNA, 19 nt, Artificial Sequence
  Description of Artificial Sequence: Synthetic oligonucleotide
cuuuggcaucaccaccaca

SEQ ID NO: 616886 - RNA, 19 nt, Artificial Sequence
  Description of Artificial Sequence: Synthetic oligonucleotide
gcccguagcccucaucaug

SEQ ID NO: 616887 - RNA, 19 nt, Artificial Sequence
  Description of Artificial Sequence: Synthetic oligonucleotide
ggaacugcgcucgcuuuug

SEQ ID NO: 616888 - RNA, 19 nt, Artificial Sequence
  Description of Artificial Sequence: Synthetic oligonucleotide
ggguaggcuucgcauacuc

SEQ ID NO: 616889 - RNA, 19 nt, Artificial Sequence
  Description of Artificial Sequence: Synthetic oligonucleotide
guuuaggggcucggccucc

SEQ ID NO: 616890 - RNA, 19 nt, Artificial Sequence
  Description of Artificial Sequence: Synthetic oligonucleotide
cguuuuccgucuucagccg

SEQ ID NO: 616891 - RNA, 19 nt, Artificial Sequence
  Description of Artificial Sequence: Synthetic oligonucleotide
gcaucgcucuuagaguccc

SEQ ID NO: 616892 - RNA, 19 nt, Artificial Sequence
  Description of Artificial Sequence: Synthetic oligonucleotide
ugacgcuccgggagucauc

SEQ ID NO: 616893 - RNA, 19 nt, Artificial Sequence
  Description of Artificial Sequence: Synthetic oligonucleotide
cuacgcgaccaccgccgcc

SEQ ID NO: 616894 - RNA, 19 nt, Artificial Sequence
  Description of Artificial Sequence: Synthetic oligonucleotide
ggcuucgcauacucgaucu

SEQ ID NO: 616895 - RNA, 19 nt, Artificial Sequence
  Description of Artificial Sequence: Synthetic oligonucleotide
gcucgagccgccgacgacc

SEQ ID NO: 616896 - RNA, 19 nt, Artificial Sequence
  Description of Artificial Sequence: Synthetic oligonucleotide
auccgugguuauggaguag

SEQ ID NO: 616897 - RNA, 19 nt, Artificial Sequence
  Description of Artificial Sequence: Synthetic oligonucleotide
gcccguaagacuggccggg

SEQ ID NO: 616898 - RNA, 19 nt, Artificial Sequence
  Description of Artificial Sequence: Synthetic oligonucleotide
aagacuggccgggcauaau

SEQ ID NO: 616899 - RNA, 19 nt, Artificial Sequence
  Description of Artificial Sequence: Synthetic oligonucleotide
ucguucgccgccgccguaa

SEQ ID NO: 616900 - RNA, 19 nt, Artificial Sequence
  Description of Artificial Sequence: Synthetic oligonucleotide
uuuccgucuucagccguuu

SEQ ID NO: 616901 - RNA, 19 nt, Artificial Sequence
  Description of Artificial Sequence: Synthetic oligonucleotide
ccauuaagugaggccuugg

SEQ ID NO: 616902 - RNA, 19 nt, Artificial Sequence
  Description of Artificial Sequence: Synthetic oligonucleotide
gccgccguaacuacgcgac

SEQ ID NO: 616903 - RNA, 19 nt, Artificial Sequence
  Description of Artificial Sequence: Synthetic oligonucleotide
uggcguuuguugggauuac

SEQ ID NO: 616904 - RNA, 19 nt, Artificial Sequence
  Description of Artificial Sequence: Synthetic oligonucleotide
cccggcuugcuuuucauaa

SEQ ID NO: 616905 - RNA, 19 nt, Artificial Sequence
  Description of Artificial Sequence: Synthetic oligonucleotide
ccaagauacaugggcagca

SEQ ID NO: 616906 - RNA, 19 nt, Artificial Sequence
  Description of Artificial Sequence: Synthetic oligonucleotide
cugggcacuuugcacggaa

SEQ ID NO: 616907 - RNA, 19 nt, Artificial Sequence
  Description of Artificial Sequence: Synthetic oligonucleotide
gccccauuaagugaggccu

SEQ ID NO: 616908 - RNA, 19 nt, Artificial Sequence
  Description of Artificial Sequence: Synthetic oligonucleotide
caucgcucccgcccgccuc

SEQ ID NO: 616909 - RNA, 19 nt, Artificial Sequence
  Description of Artificial Sequence: Synthetic oligonucleotide
gccguaacuacgcgaccac

SEQ ID NO: 616910 - RNA, 19 nt, Artificial Sequence
  Description of Artificial Sequence: Synthetic oligonucleotide
gcaucuaauuaggaggcgu

SEQ ID NO: 616911 - RNA, 19 nt, Artificial Sequence
  Description of Artificial Sequence: Synthetic oligonucleotide
ccauagucggguggugggg

SEQ ID NO: 616912 - RNA, 19 nt, Artificial Sequence
  Description of Artificial Sequence: Synthetic oligonucleotide
caccauagccuggacucca

SEQ ID NO: 616913 - RNA, 19 nt, Artificial Sequence
  Description of Artificial Sequence: Synthetic oligonucleotide
cucggccucccucguucgc

SEQ ID NO: 616914 - RNA, 19 nt, Artificial Sequence
  Description of Artificial Sequence: Synthetic oligonucleotide
auggggcccuccauauuca

SEQ ID NO: 616915 - RNA, 19 nt, Artificial Sequence
  Description of Artificial Sequence: Synthetic oligonucleotide
uguacggguacgggccauu

SEQ ID NO: 616916 - RNA, 19 nt, Artificial Sequence
  Description of Artificial Sequence: Synthetic oligonucleotide
cuugggccccgacggugac

SEQ ID NO: 616917 - RNA, 19 nt, Artificial Sequence
  Description of Artificial Sequence: Synthetic oligonucleotide
cagccguuuaggggcucgg

SEQ ID NO: 616918 - RNA, 19 nt, Artificial Sequence
  Description of Artificial Sequence: Synthetic oligonucleotide
augcgguucuuagcugccu

SEQ ID NO: 616919 - RNA, 19 nt, Artificial Sequence
  Description of Artificial Sequence: Synthetic oligonucleotide
uggccgcuucacucccagc

SEQ ID NO: 616920 - RNA, 19 nt, Artificial Sequence
  Description of Artificial Sequence: Synthetic oligonucleotide
cuggccgggcauaauggcu

SEQ ID NO: 616921 - RNA, 19 nt, Artificial Sequence
  Description of Artificial Sequence: Synthetic oligonucleotide
aggcgugcugugcggugga

SEQ ID NO: 616922 - RNA, 19 nt, Artificial Sequence
  Description of Artificial Sequence: Synthetic oligonucleotide
cccgcugggcacuuugcac

SEQ ID NO: 616923 - RNA, 19 nt, Artificial Sequence
  Description of Artificial Sequence: Synthetic oligonucleotide
ccaagccauagaccaugag

SEQ ID NO: 616924 - RNA, 19 nt, Artificial Sequence
  Description of Artificial Sequence: Synthetic oligonucleotide
auagcgacuugggccccga

SEQ ID NO: 616925 - RNA, 19 nt, Artificial Sequence
  Description of Artificial Sequence: Synthetic oligonucleotide
agcccucaucaugguaaug

SEQ ID NO: 616926 - RNA, 19 nt, Artificial Sequence
  Description of Artificial Sequence: Synthetic oligonucleotide
gguacccaccauggggccc

SEQ ID NO: 616927 - RNA, 19 nt, Artificial Sequence
  Description of Artificial Sequence: Synthetic oligonucleotide
uagcgacuugggccccgac

SEQ ID NO: 616928 - RNA, 19 nt, Artificial Sequence
  Description of Artificial Sequence: Synthetic oligonucleotide
cccgcugcggccaucuuca

SEQ ID NO: 616929 - RNA, 19 nt, Artificial Sequence
  Description of Artificial Sequence: Synthetic oligonucleotide
gaggaacugcgcucgcuuu

SEQ ID NO: 616930 - RNA, 19 nt, Artificial Sequence
  Description of Artificial Sequence: Synthetic oligonucleotide
ccccugauguggacaacug

SEQ ID NO: 616931 - RNA, 19 nt, Artificial Sequence
  Description of Artificial Sequence: Synthetic oligonucleotide
gggagucauccgaaucccc

SEQ ID NO: 616932 - RNA, 19 nt, Artificial Sequence
  Description of Artificial Sequence: Synthetic oligonucleotide
cagggugaccagcaaugua

SEQ ID NO: 616933 - RNA, 19 nt, Artificial Sequence
  Description of Artificial Sequence: Synthetic oligonucleotide
uuacugccagggucaccuu

SEQ ID NO: 616934 - RNA, 19 nt, Artificial Sequence
  Description of Artificial Sequence: Synthetic oligonucleotide
uaaccgcccggggcagcag

SEQ ID NO: 616935 - RNA, 19 nt, Artificial Sequence
  Description of Artificial Sequence: Synthetic oligonucleotide
gcucgguccacagcauagc

SEQ ID NO: 616936 - RNA, 19 nt, Artificial Sequence
  Description of Artificial Sequence: Synthetic oligonucleotide
cgccccauuaagugaggcc

SEQ ID NO: 616937 - RNA, 19 nt, Artificial Sequence
  Description of Artificial Sequence: Synthetic oligonucleotide
cgggcauaauggcugguug

SEQ ID NO: 616938 - RNA, 19 nt, Artificial Sequence
  Description of Artificial Sequence: Synthetic oligonucleotide
gcacacuguugacgcuccg

SEQ ID NO: 616939 - RNA, 19 nt, Artificial Sequence
  Description of Artificial Sequence: Synthetic oligonucleotide
gugcaacagccagaauaga

SEQ ID NO: 616940 - RNA, 19 nt, Artificial Sequence
  Description of Artificial Sequence: Synthetic oligonucleotide
cugcucgagccgccgacga

SEQ ID NO: 616941 - RNA, 19 nt, Artificial Sequence
  Description of Artificial Sequence: Synthetic oligonucleotide
cugcucagaugugcucuuc

SEQ ID NO: 616942 - RNA, 19 nt, Artificial Sequence
  Description of Artificial Sequence: Synthetic oligonucleotide
cauuuccguugugguuaag

SEQ ID NO: 616943 - RNA, 19 nt, Artificial Sequence
  Description of Artificial Sequence: Synthetic oligonucleotide
ccgucaaucaggccccuga

SEQ ID NO: 616944 - RNA, 19 nt, Artificial Sequence
  Description of Artificial Sequence: Synthetic oligonucleotide
gccucuacugaccuagcau

SEQ ID NO: 616945 - RNA, 19 nt, Artificial Sequence
  Description of Artificial Sequence: Synthetic oligonucleotide
cuguugacgcuccgggagu

SEQ ID NO: 616946 - RNA, 19 nt, Artificial Sequence
  Description of Artificial Sequence: Synthetic oligonucleotide
cacaaggauuacagauagu

SEQ ID NO: 616947 - RNA, 19 nt, Artificial Sequence
  Description of Artificial Sequence: Synthetic oligonucleotide
auccgccgccgccgccgcc

SEQ ID NO: 616948 - RNA, 19 nt, Artificial Sequence
  Description of Artificial Sequence: Synthetic oligonucleotide
ggggcccuccauauucagc

SEQ ID NO: 616949 - RNA, 19 nt, Artificial Sequence
  Description of Artificial Sequence: Synthetic oligonucleotide
cggguacgggccauuuggg

SEQ ID NO: 616950 - RNA, 19 nt, Artificial Sequence
  Description of Artificial Sequence: Synthetic oligonucleotide
cguaacucuccccgccgcc

SEQ ID NO: 616951 - RNA, 19 nt, Artificial Sequence
  Description of Artificial Sequence: Synthetic oligonucleotide
cauuacuagggugcuggau

SEQ ID NO: 616952 - RNA, 19 nt, Artificial Sequence
  Description of Artificial Sequence: Synthetic oligonucleotide
accgucaaucaggccccug

SEQ ID NO: 616953 - RNA, 19 nt, Artificial Sequence
  Description of Artificial Sequence: Synthetic oligonucleotide
cucgaucuucagagugcaa

SEQ ID NO: 616954 - RNA, 19 nt, Artificial Sequence
  Description of Artificial Sequence: Synthetic oligonucleotide
ccguaacuacgcgaccacc

SEQ ID NO: 616955 - RNA, 19 nt, Artificial Sequence
  Description of Artificial Sequence: Synthetic oligonucleotide
cuucagccguuuaggggcu

SEQ ID NO: 616956 - RNA, 19 nt, Artificial Sequence
  Description of Artificial Sequence: Synthetic oligonucleotide
ccucuacugaccuagcauu

SEQ ID NO: 616957 - RNA, 19 nt, Artificial Sequence
  Description of Artificial Sequence: Synthetic oligonucleotide
caucgcucuuagaguccca

SEQ ID NO: 616958 - RNA, 19 nt, Artificial Sequence
  Description of Artificial Sequence: Synthetic oligonucleotide
cccgaacaugaaguuguug

SEQ ID NO: 616959 - RNA, 19 nt, Artificial Sequence
  Description of Artificial Sequence: Synthetic oligonucleotide
gcauuuccguugugguuaa

SEQ ID NO: 616960 - RNA, 19 nt, Artificial Sequence
  Description of Artificial Sequence: Synthetic oligonucleotide
ugcuggucgccggcguuuu

SEQ ID NO: 616961 - RNA, 19 nt, Artificial Sequence
  Description of Artificial Sequence: Synthetic oligonucleotide
cgggagucauccgaauccc

SEQ ID NO: 616962 - RNA, 19 nt, Artificial Sequence
  Description of Artificial Sequence: Synthetic oligonucleotide
cguuuaggggcucggccuc

SEQ ID NO: 616963 - RNA, 19 nt, Artificial Sequence
  Description of Artificial Sequence: Synthetic oligonucleotide
cugcguaguucacugcauu

SEQ ID NO: 616964 - RNA, 19 nt, Artificial Sequence
  Description of Artificial Sequence: Synthetic oligonucleotide
ccagaggaacugcgcucgc

SEQ ID NO: 616965 - RNA, 19 nt, Artificial Sequence
  Description of Artificial Sequence: Synthetic oligonucleotide
gggguuuguguagucccaa

SEQ ID NO: 616966 - RNA, 19 nt, Artificial Sequence
  Description of Artificial Sequence: Synthetic oligonucleotide
ggggagcauugaagaagug

SEQ ID NO: 616967 - RNA, 19 nt, Artificial Sequence
  Description of Artificial Sequence: Synthetic oligonucleotide
ccguuuaggggcucggccu

SEQ ID NO: 616968 - RNA, 19 nt, Artificial Sequence
  Description of Artificial Sequence: Synthetic oligonucleotide
ccacaccgucaaucaggcc

SEQ ID NO: 616969 - RNA, 19 nt, Artificial Sequence
  Description of Artificial Sequence: Synthetic oligonucleotide
ggguggagaaccgauuguu

SEQ ID NO: 616970 - RNA, 19 nt, Artificial Sequence
  Description of Artificial Sequence: Synthetic oligonucleotide
ccgccccauuaagugaggc

SEQ ID NO: 616971 - RNA, 19 nt, Artificial Sequence
  Description of Artificial Sequence: Synthetic oligonucleotide
cgagccgccgacgaccgac

SEQ ID NO: 616972 - RNA, 19 nt, Artificial Sequence
  Description of Artificial Sequence: Synthetic oligonucleotide
gccgccgacgaccgacuuc

SEQ ID NO: 616973 - RNA, 19 nt, Artificial Sequence
  Description of Artificial Sequence: Synthetic oligonucleotide
cccguaagacuggccgggc

SEQ ID NO: 616974 - RNA, 19 nt, Artificial Sequence
  Description of Artificial Sequence: Synthetic oligonucleotide
ccgccguaacuacgcgacc

SEQ ID NO: 616975 - RNA, 19 nt, Artificial Sequence
  Description of Artificial Sequence: Synthetic oligonucleotide
cagaggaacugcgcucgcu

SEQ ID NO: 616976 - RNA, 19 nt, Artificial Sequence
  Description of Artificial Sequence: Synthetic oligonucleotide
ccguaagacuggccgggca

SEQ ID NO: 616977 - RNA, 19 nt, Artificial Sequence
  Description of Artificial Sequence: Synthetic oligonucleotide
gccgccgccgcccgccgcc

SEQ ID NO: 616978 - RNA, 19 nt, Artificial Sequence
  Description of Artificial Sequence: Synthetic oligonucleotide
gccccugauguggacaacu

SEQ ID NO: 616979 - RNA, 19 nt, Artificial Sequence
  Description of Artificial Sequence: Synthetic oligonucleotide
gccggcguuuuccgucuuc

SEQ ID NO: 616980 - RNA, 19 nt, Artificial Sequence
  Description of Artificial Sequence: Synthetic oligonucleotide
cccagcaaagaguuuuauu

SEQ ID NO: 616981 - RNA, 19 nt, Artificial Sequence
  Description of Artificial Sequence: Synthetic oligonucleotide
guucgccgccgccguaacu

SEQ ID NO: 616982 - RNA, 19 nt, Artificial Sequence
  Description of Artificial Sequence: Synthetic oligonucleotide
ggcgugcugugcgguggag

SEQ ID NO: 616983 - RNA, 19 nt, Artificial Sequence
  Description of Artificial Sequence: Synthetic oligonucleotide
gacccgucuucuagcccgu

SEQ ID NO: 616984 - RNA, 19 nt, Artificial Sequence
  Description of Artificial Sequence: Synthetic oligonucleotide
gcgugcugugcgguggaga

SEQ ID NO: 616985 - RNA, 19 nt, Artificial Sequence
  Description of Artificial Sequence: Synthetic oligonucleotide
ggcguuuguugggauuacu

SEQ ID NO: 616986 - RNA, 19 nt, Artificial Sequence
  Description of Artificial Sequence: Synthetic oligonucleotide
cgccguaacuacgcgacca

SEQ ID NO: 616987 - RNA, 19 nt, Artificial Sequence
  Description of Artificial Sequence: Synthetic oligonucleotide
cuccgggagucauccgaau

SEQ ID NO: 616988 - RNA, 19 nt, Artificial Sequence
  Description of Artificial Sequence: Synthetic oligonucleotide
guacggguacgggccauuu

SEQ ID NO: 616989 - RNA, 19 nt, Artificial Sequence
  Description of Artificial Sequence: Synthetic oligonucleotide
cccgucuucuagcccguaa

SEQ ID NO: 616990 - RNA, 19 nt, Artificial Sequence
  Description of Artificial Sequence: Synthetic oligonucleotide
ccgccgacgaccgacuucu

SEQ ID NO: 616991 - RNA, 19 nt, Artificial Sequence
  Description of Artificial Sequence: Synthetic oligonucleotide
gcuggucgccggcguuuuc

SEQ ID NO: 616992 - RNA, 19 nt, Artificial Sequence
  Description of Artificial Sequence: Synthetic oligonucleotide
gcuucgcauacucgaucuu

SEQ ID NO: 616993 - RNA, 19 nt, Artificial Sequence
  Description of Artificial Sequence: Synthetic oligonucleotide
uuggcccgcugggcacuuu

SEQ ID NO: 616994 - RNA, 19 nt, Artificial Sequence
  Description of Artificial Sequence: Synthetic oligonucleotide
ggucgccggcguuuuccgu

SEQ ID NO: 616995 - RNA, 19 nt, Artificial Sequence
  Description of Artificial Sequence: Synthetic oligonucleotide
guguacggguacgggccau

SEQ ID NO: 616996 - RNA, 19 nt, Artificial Sequence
  Description of Artificial Sequence: Synthetic oligonucleotide
acccgucuucuagcccgua

SEQ ID NO: 616997 - RNA, 19 nt, Artificial Sequence
  Description of Artificial Sequence: Synthetic oligonucleotide
ggccccugauguggacaac

SEQ ID NO: 616998 - RNA, 19 nt, Artificial Sequence
  Description of Artificial Sequence: Synthetic oligonucleotide
gcugggcacuuugcacgga

SEQ ID NO: 616999 - RNA, 19 nt, Artificial Sequence
  Description of Artificial Sequence: Synthetic oligonucleotide
cguucgccgccgccguaac

SEQ ID NO: 617000 - RNA, 19 nt, Artificial Sequence
  Description of Artificial Sequence: Synthetic oligonucleotide
cagcgccugccucuucuuu

SEQ ID NO: 617001 - RNA, 19 nt, Artificial Sequence
  Description of Artificial Sequence: Synthetic oligonucleotide
cggaaucaaauuccaccau

SEQ ID NO: 617002 - RNA, 19 nt, Artificial Sequence
  Description of Artificial Sequence: Synthetic oligonucleotide
cgccgccguaacuacgcga

SEQ ID NO: 617003 - RNA, 19 nt, Artificial Sequence
  Description of Artificial Sequence: Synthetic oligonucleotide
cuaccagcgccugccucuu

SEQ ID NO: 617004 - RNA, 19 nt, Artificial Sequence
  Description of Artificial Sequence: Synthetic oligonucleotide
ccagggcgggagaucuucu

SEQ ID NO: 617005 - RNA, 19 nt, Artificial Sequence
  Description of Artificial Sequence: Synthetic oligonucleotide
ccguugugguuaagccucu

SEQ ID NO: 617006 - RNA, 19 nt, Artificial Sequence
  Description of Artificial Sequence: Synthetic oligonucleotide
cgcgaucacaguucaucuu

SEQ ID NO: 617007 - RNA, 19 nt, Artificial Sequence
  Description of Artificial Sequence: Synthetic oligonucleotide
caccgucaaucaggccccu

SEQ ID NO: 617008 - RNA, 19 nt, Artificial Sequence
  Description of Artificial Sequence: Synthetic oligonucleotide
ccgaauccccagggcggga

SEQ ID NO: 617009 - RNA, 19 nt, Artificial Sequence
  Description of Artificial Sequence: Synthetic oligonucleotide
ccgccgccgccgcccgccg

SEQ ID NO: 617010 - RNA, 19 nt, Artificial Sequence
  Description of Artificial Sequence: Synthetic oligonucleotide
gccgccgccgccgccgccu

SEQ ID NO: 617011 - RNA, 19 nt, Artificial Sequence
  Description of Artificial Sequence: Synthetic oligonucleotide
ccgccgccgccgccgccgc

SEQ ID NO: 617012 - RNA, 19 nt, Artificial Sequence
  Description of Artificial Sequence: Synthetic oligonucleotide
ccauggggcccuccauauu

SEQ ID NO: 617013 - RNA, 19 nt, Artificial Sequence
  Description of Artificial Sequence: Synthetic oligonucleotide
cgacuugggccccgacggu

SEQ ID NO: 617014 - RNA, 19 nt, Artificial Sequence
  Description of Artificial Sequence: Synthetic oligonucleotide
ccgccgccgccgccgccuc

SEQ ID NO: 617015 - RNA, 19 nt, Artificial Sequence
  Description of Artificial Sequence: Synthetic oligonucleotide
cgccgccgccgcccgccgc

SEQ ID NO: 617016 - RNA, 19 nt, Artificial Sequence
  Description of Artificial Sequence: Synthetic oligonucleotide
cgcuggcguuuguugggau

SEQ ID NO: 617017 - RNA, 19 nt, Artificial Sequence
  Description of Artificial Sequence: Synthetic oligonucleotide
cgccgccgccgccgccgcc

SEQ ID NO: 617018 - RNA, 19 nt, Artificial Sequence
  Description of Artificial Sequence: Synthetic oligonucleotide
ccccagggcgggagaucuu

SEQ ID NO: 617019 - RNA, 19 nt, Artificial Sequence
  Description of Artificial Sequence: Synthetic oligonucleotide
cgccgacgaccgacuucua

SEQ ID NO: 617020 - RNA, 19 nt, Artificial Sequence
  Description of Artificial Sequence: Synthetic oligonucleotide
cgccggcguuuuccgucuu

SEQ ID NO: 617021 - RNA, 19 nt, Artificial Sequence
  Description of Artificial Sequence: Synthetic oligonucleotide
aaagcaauaaaccaggugu

SEQ ID NO: 617022 - RNA, 19 nt, Artificial Sequence
  Description of Artificial Sequence: Synthetic oligonucleotide
aggugcuagaguuagaucc

SEQ ID NO: 617023 - RNA, 19 nt, Artificial Sequence
  Description of Artificial Sequence: Synthetic oligonucleotide
auaaaugugacacauccag

SEQ ID NO: 617024 - RNA, 19 nt, Artificial Sequence
  Description of Artificial Sequence: Synthetic oligonucleotide
uggacuauggaccacacug

SEQ ID NO: 617025 - RNA, 19 nt, Artificial Sequence
  Description of Artificial Sequence: Synthetic oligonucleotide
uucauuauagugaaguccu

SEQ ID NO: 617026 - RNA, 19 nt, Artificial Sequence
  Description of Artificial Sequence: Synthetic oligonucleotide
caagauuggagccaaaggg

SEQ ID NO: 617027 - RNA, 19 nt, Artificial Sequence
  Description of Artificial Sequence: Synthetic oligonucleotide
uuuaaugguggguugaagc

SEQ ID NO: 617028 - RNA, 19 nt, Artificial Sequence
  Description of Artificial Sequence: Synthetic oligonucleotide
aauccaaucggucuggagu

SEQ ID NO: 617029 - RNA, 19 nt, Artificial Sequence
  Description of Artificial Sequence: Synthetic oligonucleotide
cauaaagcagccaaagccg

SEQ ID NO: 617030 - RNA, 19 nt, Artificial Sequence
  Description of Artificial Sequence: Synthetic oligonucleotide
aauaauaagcucuggucca

SEQ ID NO: 617031 - RNA, 19 nt, Artificial Sequence
  Description of Artificial Sequence: Synthetic oligonucleotide
gagggaaagaccccgauag

SEQ ID NO: 617032 - RNA, 19 nt, Artificial Sequence
  Description of Artificial Sequence: Synthetic oligonucleotide
acagauuuuaacaugaggu

SEQ ID NO: 617033 - RNA, 19 nt, Artificial Sequence
  Description of Artificial Sequence: Synthetic oligonucleotide
cuaacucugaacuuggcug

SEQ ID NO: 617034 - RNA, 19 nt, Artificial Sequence
  Description of Artificial Sequence: Synthetic oligonucleotide
uaguaggagggaaagaccc

SEQ ID NO: 617035 - RNA, 19 nt, Artificial Sequence
  Description of Artificial Sequence: Synthetic oligonucleotide
uuguuugauuuugagaccg

SEQ ID NO: 617036 - RNA, 19 nt, Artificial Sequence
  Description of Artificial Sequence: Synthetic oligonucleotide
uaagaauccaaucggucug

SEQ ID NO: 617037 - RNA, 19 nt, Artificial Sequence
  Description of Artificial Sequence: Synthetic oligonucleotide
augcaaaccaagaagggcc

SEQ ID NO: 617038 - RNA, 19 nt, Artificial Sequence
  Description of Artificial Sequence: Synthetic oligonucleotide
agauaguucagccuggcca

SEQ ID NO: 617039 - RNA, 19 nt, Artificial Sequence
  Description of Artificial Sequence: Synthetic oligonucleotide
ucuuauucauguccgggag

SEQ ID NO: 617040 - RNA, 19 nt, Artificial Sequence
  Description of Artificial Sequence: Synthetic oligonucleotide
agugucgagacagugaggg

SEQ ID NO: 617041 - RNA, 19 nt, Artificial Sequence
  Description of Artificial Sequence: Synthetic oligonucleotide
aagaacaaaggcagauucc

SEQ ID NO: 617042 - RNA, 19 nt, Artificial Sequence
  Description of Artificial Sequence: Synthetic oligonucleotide
gaaccuccgauccagaaug

SEQ ID NO: 617043 - RNA, 19 nt, Artificial Sequence
  Description of Artificial Sequence: Synthetic oligonucleotide
cuagaguuagaucccaggg

SEQ ID NO: 617044 - RNA, 19 nt, Artificial Sequence
  Description of Artificial Sequence: Synthetic oligonucleotide
auacuccugauucagccac

SEQ ID NO: 617045 - RNA, 19 nt, Artificial Sequence
  Description of Artificial Sequence: Synthetic oligonucleotide
gugacaauacuccugauuc

SEQ ID NO: 617046 - RNA, 19 nt, Artificial Sequence
  Description of Artificial Sequence: Synthetic oligonucleotide
agaguuagaucccagggcu

SEQ ID NO: 617047 - RNA, 19 nt, Artificial Sequence
  Description of Artificial Sequence: Synthetic oligonucleotide
cuucauuauagugaagucc

SEQ ID NO: 617048 - RNA, 19 nt, Artificial Sequence
  Description of Artificial Sequence: Synthetic oligonucleotide
ugucgagacagugagggcg

SEQ ID NO: 617049 - RNA, 19 nt, Artificial Sequence
  Description of Artificial Sequence: Synthetic oligonucleotide
ucuaugaggugcuagaguu

SEQ ID NO: 617050 - RNA, 19 nt, Artificial Sequence
  Description of Artificial Sequence: Synthetic oligonucleotide
uuugauuuugagaccgucu

SEQ ID NO: 617051 - RNA, 19 nt, Artificial Sequence
  Description of Artificial Sequence: Synthetic oligonucleotide
uccuuaacuguauuggcug

SEQ ID NO: 617052 - RNA, 19 nt, Artificial Sequence
  Description of Artificial Sequence: Synthetic oligonucleotide
aaaugauccggaaaggccu

SEQ ID NO: 617053 - RNA, 19 nt, Artificial Sequence
  Description of Artificial Sequence: Synthetic oligonucleotide
uggguaacgauaccccugg

SEQ ID NO: 617054 - RNA, 19 nt, Artificial Sequence
  Description of Artificial Sequence: Synthetic oligonucleotide
uagaguuagaucccagggc

SEQ ID NO: 617055 - RNA, 19 nt, Artificial Sequence
  Description of Artificial Sequence: Synthetic oligonucleotide
gaaagcaauaaaccaggug

SEQ ID NO: 617056 - RNA, 19 nt, Artificial Sequence
  Description of Artificial Sequence: Synthetic oligonucleotide
uugauuuugagaccgucuc

SEQ ID NO: 617057 - RNA, 19 nt, Artificial Sequence
  Description of Artificial Sequence: Synthetic oligonucleotide
uaccucauggggcucauag

SEQ ID NO: 617058 - RNA, 19 nt, Artificial Sequence
  Description of Artificial Sequence: Synthetic oligonucleotide
aaagauucguagagcuucc

SEQ ID NO: 617059 - RNA, 19 nt, Artificial Sequence
  Description of Artificial Sequence: Synthetic oligonucleotide
augaacuaacucccugugc

SEQ ID NO: 617060 - RNA, 19 nt, Artificial Sequence
  Description of Artificial Sequence: Synthetic oligonucleotide
aaguuguugguccgugccg

SEQ ID NO: 617061 - RNA, 19 nt, Artificial Sequence
  Description of Artificial Sequence: Synthetic oligonucleotide
ugaguugcgagcaggaauc

SEQ ID NO: 617062 - RNA, 19 nt, Artificial Sequence
  Description of Artificial Sequence: Synthetic oligonucleotide
cagauuuuaacaugaggug

SEQ ID NO: 617063 - RNA, 19 nt, Artificial Sequence
  Description of Artificial Sequence: Synthetic oligonucleotide
aacgauaccccugggucgc

SEQ ID NO: 617064 - RNA, 19 nt, Artificial Sequence
  Description of Artificial Sequence: Synthetic oligonucleotide
gcauuguuaacuuuguuug

SEQ ID NO: 617065 - RNA, 19 nt, Artificial Sequence
  Description of Artificial Sequence: Synthetic oligonucleotide
uaacgauaccccugggucg

SEQ ID NO: 617066 - RNA, 19 nt, Artificial Sequence
  Description of Artificial Sequence: Synthetic oligonucleotide
uaugaggugcuagaguuag

SEQ ID NO: 617067 - RNA, 19 nt, Artificial Sequence
  Description of Artificial Sequence: Synthetic oligonucleotide
uuauucauguccgggaggc

SEQ ID NO: 617068 - RNA, 19 nt, Artificial Sequence
  Description of Artificial Sequence: Synthetic oligonucleotide
uguaguaccggccuaggua

SEQ ID NO: 617069 - RNA, 19 nt, Artificial Sequence
  Description of Artificial Sequence: Synthetic oligonucleotide
uacauguggggcuucaaga

SEQ ID NO: 617070 - RNA, 19 nt, Artificial Sequence
  Description of Artificial Sequence: Synthetic oligonucleotide
gagaccgucucucaaguug

SEQ ID NO: 617071 - RNA, 19 nt, Artificial Sequence
  Description of Artificial Sequence: Synthetic oligonucleotide
gcaggaaucauccaggcug

SEQ ID NO: 617072 - RNA, 19 nt, Artificial Sequence
  Description of Artificial Sequence: Synthetic oligonucleotide
ucuguuaaucccugaguug

SEQ ID NO: 617073 - RNA, 19 nt, Artificial Sequence
  Description of Artificial Sequence: Synthetic oligonucleotide
uggaggguacacuggaccg

SEQ ID NO: 617074 - RNA, 19 nt, Artificial Sequence
  Description of Artificial Sequence: Synthetic oligonucleotide
agcaauaaaccaggugucc

SEQ ID NO: 617075 - RNA, 19 nt, Artificial Sequence
  Description of Artificial Sequence: Synthetic oligonucleotide
caucauaacguucacuguc

SEQ ID NO: 617076 - RNA, 19 nt, Artificial Sequence
  Description of Artificial Sequence: Synthetic oligonucleotide
uugcgagcaggaaucaucc

SEQ ID NO: 617077 - RNA, 19 nt, Artificial Sequence
  Description of Artificial Sequence: Synthetic oligonucleotide
uccauaaagcagccaaagc

SEQ ID NO: 617078 - RNA, 19 nt, Artificial Sequence
  Description of Artificial Sequence: Synthetic oligonucleotide
cauaggugaaaugauccgg

SEQ ID NO: 617079 - RNA, 19 nt, Artificial Sequence
  Description of Artificial Sequence: Synthetic oligonucleotide
ucucaacggagccauuucc

SEQ ID NO: 617080 - RNA, 19 nt, Artificial Sequence
  Description of Artificial Sequence: Synthetic oligonucleotide
uguccuaacucugaacuug

SEQ ID NO: 617081 - RNA, 19 nt, Artificial Sequence
  Description of Artificial Sequence: Synthetic oligonucleotide
uggguugaaauggaggacc

SEQ ID NO: 617082 - RNA, 19 nt, Artificial Sequence
  Description of Artificial Sequence: Synthetic oligonucleotide
ucgcaucuaccucaugggg

SEQ ID NO: 617083 - RNA, 19 nt, Artificial Sequence
  Description of Artificial Sequence: Synthetic oligonucleotide
aagaauccaaucggucugg

SEQ ID NO: 617084 - RNA, 19 nt, Artificial Sequence
  Description of Artificial Sequence: Synthetic oligonucleotide
guaguaccggccuagguac

SEQ ID NO: 617085 - RNA, 19 nt, Artificial Sequence
  Description of Artificial Sequence: Synthetic oligonucleotide
ggucgcaucuaccucaugg

SEQ ID NO: 617086 - RNA, 19 nt, Artificial Sequence
  Description of Artificial Sequence: Synthetic oligonucleotide
agauucguagagcuuccuc

SEQ ID NO: 617087 - RNA, 19 nt, Artificial Sequence
  Description of Artificial Sequence: Synthetic oligonucleotide
uauuggcugugucccauag

SEQ ID NO: 617088 - RNA, 19 nt, Artificial Sequence
  Description of Artificial Sequence: Synthetic oligonucleotide
auccaaucggucuggagug

SEQ ID NO: 617089 - RNA, 19 nt, Artificial Sequence
  Description of Artificial Sequence: Synthetic oligonucleotide
aucuuauucauguccggga

SEQ ID NO: 617090 - RNA, 19 nt, Artificial Sequence
  Description of Artificial Sequence: Synthetic oligonucleotide
cuuauucauguccgggagg

SEQ ID NO: 617091 - RNA, 19 nt, Artificial Sequence
  Description of Artificial Sequence: Synthetic oligonucleotide
gagcccggugguuuaaugg

SEQ ID NO: 617092 - RNA, 19 nt, Artificial Sequence
  Description of Artificial Sequence: Synthetic oligonucleotide
gauucagccacugggaguc

SEQ ID NO: 617093 - RNA, 19 nt, Artificial Sequence
  Description of Artificial Sequence: Synthetic oligonucleotide
gagggaagcuugcaggcag

SEQ ID NO: 617094 - RNA, 19 nt, Artificial Sequence
  Description of Artificial Sequence: Synthetic oligonucleotide
ucccauagcuguuugcgca

SEQ ID NO: 617095 - RNA, 19 nt, Artificial Sequence
  Description of Artificial Sequence: Synthetic oligonucleotide
gaaacagguuggacuaugg

SEQ ID NO: 617096 - RNA, 19 nt, Artificial Sequence
  Description of Artificial Sequence: Synthetic oligonucleotide
gucgcaucuaccucauggg

SEQ ID NO: 617097 - RNA, 19 nt, Artificial Sequence
  Description of Artificial Sequence: Synthetic oligonucleotide
ggagugucgagacagugag

SEQ ID NO: 617098 - RNA, 19 nt, Artificial Sequence
  Description of Artificial Sequence: Synthetic oligonucleotide
guuguccuaacucugaacu

SEQ ID NO: 617099 - RNA, 19 nt, Artificial Sequence
  Description of Artificial Sequence: Synthetic oligonucleotide
aacacgugagggaagcuug

SEQ ID NO: 617100 - RNA, 19 nt, Artificial Sequence
  Description of Artificial Sequence: Synthetic oligonucleotide
caucuuauucauguccggg

SEQ ID NO: 617101 - RNA, 19 nt, Artificial Sequence
  Description of Artificial Sequence: Synthetic oligonucleotide
guggcgugcagacauguag

SEQ ID NO: 617102 - RNA, 19 nt, Artificial Sequence
  Description of Artificial Sequence: Synthetic oligonucleotide
ccauaguaaagauucguag

SEQ ID NO: 617103 - RNA, 19 nt, Artificial Sequence
  Description of Artificial Sequence: Synthetic oligonucleotide
uugagaccgucucucaagu

SEQ ID NO: 617104 - RNA, 19 nt, Artificial Sequence
  Description of Artificial Sequence: Synthetic oligonucleotide
guaagaauccaaucggucu

SEQ ID NO: 617105 - RNA, 19 nt, Artificial Sequence
  Description of Artificial Sequence: Synthetic oligonucleotide
acuguuugcucacuggcau

SEQ ID NO: 617106 - RNA, 19 nt, Artificial Sequence
  Description of Artificial Sequence: Synthetic oligonucleotide
cgauccagaauguaaaugc

SEQ ID NO: 617107 - RNA, 19 nt, Artificial Sequence
  Description of Artificial Sequence: Synthetic oligonucleotide
ugcaaaccaagaagggccu

SEQ ID NO: 617108 - RNA, 19 nt, Artificial Sequence
  Description of Artificial Sequence: Synthetic oligonucleotide
uguugcggcggucuuuggc

SEQ ID NO: 617109 - RNA, 19 nt, Artificial Sequence
  Description of Artificial Sequence: Synthetic oligonucleotide
caugaacuaacucccugug

SEQ ID NO: 617110 - RNA, 19 nt, Artificial Sequence
  Description of Artificial Sequence: Synthetic oligonucleotide
auuguuaacuuuguuugau

SEQ ID NO: 617111 - RNA, 19 nt, Artificial Sequence
  Description of Artificial Sequence: Synthetic oligonucleotide
gaccgaggggaauaauaag

SEQ ID NO: 617112 - RNA, 19 nt, Artificial Sequence
  Description of Artificial Sequence: Synthetic oligonucleotide
guacauguggggcuucaag

SEQ ID NO: 617113 - RNA, 19 nt, Artificial Sequence
  Description of Artificial Sequence: Synthetic oligonucleotide
ugaaacagguuggacuaug

SEQ ID NO: 617114 - RNA, 19 nt, Artificial Sequence
  Description of Artificial Sequence: Synthetic oligonucleotide
aggcguguagccccagggc

SEQ ID NO: 617115 - RNA, 19 nt, Artificial Sequence
  Description of Artificial Sequence: Synthetic oligonucleotide
acuaacucccugugcagca

SEQ ID NO: 617116 - RNA, 19 nt, Artificial Sequence
  Description of Artificial Sequence: Synthetic oligonucleotide
aggcaaguacucugacagc

SEQ ID NO: 617117 - RNA, 19 nt, Artificial Sequence
  Description of Artificial Sequence: Synthetic oligonucleotide
ugauucagccacugggagu

SEQ ID NO: 617118 - RNA, 19 nt, Artificial Sequence
  Description of Artificial Sequence: Synthetic oligonucleotide
uuccuggaggguacacugg

SEQ ID NO: 617119 - RNA, 19 nt, Artificial Sequence
  Description of Artificial Sequence: Synthetic oligonucleotide
guaaaugccguaagcugag

SEQ ID NO: 617120 - RNA, 19 nt, Artificial Sequence
  Description of Artificial Sequence: Synthetic oligonucleotide
caggaaucauccaggcugc

SEQ ID NO: 617121 - RNA, 19 nt, Artificial Sequence
  Description of Artificial Sequence: Synthetic oligonucleotide
cugauucagccacugggag

SEQ ID NO: 617122 - RNA, 19 nt, Artificial Sequence
  Description of Artificial Sequence: Synthetic oligonucleotide
uuauagugaaguccuccuu

SEQ ID NO: 617123 - RNA, 19 nt, Artificial Sequence
  Description of Artificial Sequence: Synthetic oligonucleotide
uggaccgaggggaauaaua

SEQ ID NO: 617124 - RNA, 19 nt, Artificial Sequence
  Description of Artificial Sequence: Synthetic oligonucleotide
uccuggaggguacacugga

SEQ ID NO: 617125 - RNA, 19 nt, Artificial Sequence
  Description of Artificial Sequence: Synthetic oligonucleotide
uccgcaggcguguagcccc

SEQ ID NO: 617126 - RNA, 19 nt, Artificial Sequence
  Description of Artificial Sequence: Synthetic oligonucleotide
gugaaaugauccggaaagg

SEQ ID NO: 617127 - RNA, 19 nt, Artificial Sequence
  Description of Artificial Sequence: Synthetic oligonucleotide
aauggaggaccaucagcau

SEQ ID NO: 617128 - RNA, 19 nt, Artificial Sequence
  Description of Artificial Sequence: Synthetic oligonucleotide
ucgguuccauaucaggaaa

SEQ ID NO: 617129 - RNA, 19 nt, Artificial Sequence
  Description of Artificial Sequence: Synthetic oligonucleotide
gcucccauaguaaagauuc

SEQ ID NO: 617130 - RNA, 19 nt, Artificial Sequence
  Description of Artificial Sequence: Synthetic oligonucleotide
ucgagguacauguggggcu

SEQ ID NO: 617131 - RNA, 19 nt, Artificial Sequence
  Description of Artificial Sequence: Synthetic oligonucleotide
auagcuguuugcgcacggc

SEQ ID NO: 617132 - RNA, 19 nt, Artificial Sequence
  Description of Artificial Sequence: Synthetic oligonucleotide
cuauggaccacacugggua

SEQ ID NO: 617133 - RNA, 19 nt, Artificial Sequence
  Description of Artificial Sequence: Synthetic oligonucleotide
uggcgugcagacauguagu

SEQ ID NO: 617134 - RNA, 19 nt, Artificial Sequence
  Description of Artificial Sequence: Synthetic oligonucleotide
ggcaacaacuguuugcuca

SEQ ID NO: 617135 - RNA, 19 nt, Artificial Sequence
  Description of Artificial Sequence: Synthetic oligonucleotide
agggaaagaccccgauagg

SEQ ID NO: 617136 - RNA, 19 nt, Artificial Sequence
  Description of Artificial Sequence: Synthetic oligonucleotide
ugcggaaccuccgauccag

SEQ ID NO: 617137 - RNA, 19 nt, Artificial Sequence
  Description of Artificial Sequence: Synthetic oligonucleotide
aacuguuugcucacuggca

SEQ ID NO: 617138 - RNA, 19 nt, Artificial Sequence
  Description of Artificial Sequence: Synthetic oligonucleotide
aggaccaucagcauuguua

SEQ ID NO: 617139 - RNA, 19 nt, Artificial Sequence
  Description of Artificial Sequence: Synthetic oligonucleotide
auaggugaaaugauccgga

SEQ ID NO: 617140 - RNA, 19 nt, Artificial Sequence
  Description of Artificial Sequence: Synthetic oligonucleotide
uguuugauuuugagaccgu

SEQ ID NO: 617141 - RNA, 19 nt, Artificial Sequence
  Description of Artificial Sequence: Synthetic oligonucleotide
uucucaacggagccauuuc

SEQ ID NO: 617142 - RNA, 19 nt, Artificial Sequence
  Description of Artificial Sequence: Synthetic oligonucleotide
uggugcucggauguugcgg

SEQ ID NO: 617143 - RNA, 19 nt, Artificial Sequence
  Description of Artificial Sequence: Synthetic oligonucleotide
aaucggucuggaguggggu

SEQ ID NO: 617144 - RNA, 19 nt, Artificial Sequence
  Description of Artificial Sequence: Synthetic oligonucleotide
ggugacuccaagauuggag

SEQ ID NO: 617145 - RNA, 19 nt, Artificial Sequence
  Description of Artificial Sequence: Synthetic oligonucleotide
ugcgauguguuccuccaua

SEQ ID NO: 617146 - RNA, 19 nt, Artificial Sequence
  Description of Artificial Sequence: Synthetic oligonucleotide
acauguaguaccggccuag

SEQ ID NO: 617147 - RNA, 19 nt, Artificial Sequence
  Description of Artificial Sequence: Synthetic oligonucleotide
acgugagggaagcuugcag

SEQ ID NO: 617148 - RNA, 19 nt, Artificial Sequence
  Description of Artificial Sequence: Synthetic oligonucleotide
aacucugaacuuggcuguc

SEQ ID NO: 617149 - RNA, 19 nt, Artificial Sequence
  Description of Artificial Sequence: Synthetic oligonucleotide
aucauaacguucacugucu

SEQ ID NO: 617150 - RNA, 19 nt, Artificial Sequence
  Description of Artificial Sequence: Synthetic oligonucleotide
uggccguggguaacgauac

SEQ ID NO: 617151 - RNA, 19 nt, Artificial Sequence
  Description of Artificial Sequence: Synthetic oligonucleotide
acucugaacuuggcugucc

SEQ ID NO: 617152 - RNA, 19 nt, Artificial Sequence
  Description of Artificial Sequence: Synthetic oligonucleotide
cucgagguacauguggggc

SEQ ID NO: 617153 - RNA, 19 nt, Artificial Sequence
  Description of Artificial Sequence: Synthetic oligonucleotide
ugguuuaaugguggguuga

SEQ ID NO: 617154 - RNA, 19 nt, Artificial Sequence
  Description of Artificial Sequence: Synthetic oligonucleotide
gcagacauguaguaccggc

SEQ ID NO: 617155 - RNA, 19 nt, Artificial Sequence
  Description of Artificial Sequence: Synthetic oligonucleotide
uggcauucacucugagcag

SEQ ID NO: 617156 - RNA, 19 nt, Artificial Sequence
  Description of Artificial Sequence: Synthetic oligonucleotide
ugaggaguguggugacucc

SEQ ID NO: 617157 - RNA, 19 nt, Artificial Sequence
  Description of Artificial Sequence: Synthetic oligonucleotide
gugguuuaaugguggguug

SEQ ID NO: 617158 - RNA, 19 nt, Artificial Sequence
  Description of Artificial Sequence: Synthetic oligonucleotide
acacuccaaucacacaccu

SEQ ID NO: 617159 - RNA, 19 nt, Artificial Sequence
  Description of Artificial Sequence: Synthetic oligonucleotide
guuuaaugguggguugaag

SEQ ID NO: 617160 - RNA, 19 nt, Artificial Sequence
  Description of Artificial Sequence: Synthetic oligonucleotide
agcccggugguuuaauggu

SEQ ID NO: 617161 - RNA, 19 nt, Artificial Sequence
  Description of Artificial Sequence: Synthetic oligonucleotide
agauuccuggcuucuggga

SEQ ID NO: 617162 - RNA, 19 nt, Artificial Sequence
  Description of Artificial Sequence: Synthetic oligonucleotide
uucguagagcuuccuccca

SEQ ID NO: 617163 - RNA, 19 nt, Artificial Sequence
  Description of Artificial Sequence: Synthetic oligonucleotide
cauuguuaacuuuguuuga

SEQ ID NO: 617164 - RNA, 19 nt, Artificial Sequence
  Description of Artificial Sequence: Synthetic oligonucleotide
uaacuguauuggcuguguc

SEQ ID NO: 617165 - RNA, 19 nt, Artificial Sequence
  Description of Artificial Sequence: Synthetic oligonucleotide
guugcgagcaggaaucauc

SEQ ID NO: 617166 - RNA, 19 nt, Artificial Sequence
  Description of Artificial Sequence: Synthetic oligonucleotide
accccugggucgcaucuac

SEQ ID NO: 617167 - RNA, 19 nt, Artificial Sequence
  Description of Artificial Sequence: Synthetic oligonucleotide
ugucccgguugcagggagg

SEQ ID NO: 617168 - RNA, 19 nt, Artificial Sequence
  Description of Artificial Sequence: Synthetic oligonucleotide
caaucggucuggagugggg

SEQ ID NO: 617169 - RNA, 19 nt, Artificial Sequence
  Description of Artificial Sequence: Synthetic oligonucleotide
gcuggagugccugaaacag

SEQ ID NO: 617170 - RNA, 19 nt, Artificial Sequence
  Description of Artificial Sequence: Synthetic oligonucleotide
agaucccagggcuucggca

SEQ ID NO: 617171 - RNA, 19 nt, Artificial Sequence
  Description of Artificial Sequence: Synthetic oligonucleotide
ucguagagcuuccucccaa

SEQ ID NO: 617172 - RNA, 19 nt, Artificial Sequence
  Description of Artificial Sequence: Synthetic oligonucleotide
gguacacuggaccgagggg

SEQ ID NO: 617173 - RNA, 19 nt, Artificial Sequence
  Description of Artificial Sequence: Synthetic oligonucleotide
aggggaauaauaagcucug

SEQ ID NO: 617174 - RNA, 19 nt, Artificial Sequence
  Description of Artificial Sequence: Synthetic oligonucleotide
uuggacuauggaccacacu

SEQ ID NO: 617175 - RNA, 19 nt, Artificial Sequence
  Description of Artificial Sequence: Synthetic oligonucleotide
ugcaugcucccuugaagaa

SEQ ID NO: 617176 - RNA, 19 nt, Artificial Sequence
  Description of Artificial Sequence: Synthetic oligonucleotide
uccgauccagaauguaaau

SEQ ID NO: 617177 - RNA, 19 nt, Artificial Sequence
  Description of Artificial Sequence: Synthetic oligonucleotide
auaagcucugguccauaaa

SEQ ID NO: 617178 - RNA, 19 nt, Artificial Sequence
  Description of Artificial Sequence: Synthetic oligonucleotide
uguauuggcugugucccau

SEQ ID NO: 617179 - RNA, 19 nt, Artificial Sequence
  Description of Artificial Sequence: Synthetic oligonucleotide
ucgccggcucugcugacag

SEQ ID NO: 617180 - RNA, 19 nt, Artificial Sequence
  Description of Artificial Sequence: Synthetic oligonucleotide
gaaaugcuggggaugccca

SEQ ID NO: 617181 - RNA, 19 nt, Artificial Sequence
  Description of Artificial Sequence: Synthetic oligonucleotide
gcugcggaaccuccgaucc

SEQ ID NO: 617182 - RNA, 19 nt, Artificial Sequence
  Description of Artificial Sequence: Synthetic oligonucleotide
ggacuauggaccacacugg

SEQ ID NO: 617183 - RNA, 19 nt, Artificial Sequence
  Description of Artificial Sequence: Synthetic oligonucleotide
uguugguccgugccggcau

SEQ ID NO: 617184 - RNA, 19 nt, Artificial Sequence
  Description of Artificial Sequence: Synthetic oligonucleotide
ugcucggauguugcggcgg

SEQ ID NO: 617185 - RNA, 19 nt, Artificial Sequence
  Description of Artificial Sequence: Synthetic oligonucleotide
guuugauuuugagaccguc

SEQ ID NO: 617186 - RNA, 19 nt, Artificial Sequence
  Description of Artificial Sequence: Synthetic oligonucleotide
acacgugagggaagcuugc

SEQ ID NO: 617187 - RNA, 19 nt, Artificial Sequence
  Description of Artificial Sequence: Synthetic oligonucleotide
cagauaguucagccuggcc

SEQ ID NO: 617188 - RNA, 19 nt, Artificial Sequence
  Description of Artificial Sequence: Synthetic oligonucleotide
cauggccaugaacuaacuc

SEQ ID NO: 617189 - RNA, 19 nt, Artificial Sequence
  Description of Artificial Sequence: Synthetic oligonucleotide
uccaaucggucuggagugg

SEQ ID NO: 617190 - RNA, 19 nt, Artificial Sequence
  Description of Artificial Sequence: Synthetic oligonucleotide
cgugagggaagcuugcagg

SEQ ID NO: 617191 - RNA, 19 nt, Artificial Sequence
  Description of Artificial Sequence: Synthetic oligonucleotide
auaccccugggucgcaucu

SEQ ID NO: 617192 - RNA, 19 nt, Artificial Sequence
  Description of Artificial Sequence: Synthetic oligonucleotide
uccaucccggggcucuucc

SEQ ID NO: 617193 - RNA, 19 nt, Artificial Sequence
  Description of Artificial Sequence: Synthetic oligonucleotide
gugcgauuccgcuggauga

SEQ ID NO: 617194 - RNA, 19 nt, Artificial Sequence
  Description of Artificial Sequence: Synthetic oligonucleotide
ucccugaguuguccuaacu

SEQ ID NO: 617195 - RNA, 19 nt, Artificial Sequence
  Description of Artificial Sequence: Synthetic oligonucleotide
uuguccuaacucugaacuu

SEQ ID NO: 617196 - RNA, 19 nt, Artificial Sequence
  Description of Artificial Sequence: Synthetic oligonucleotide
guagagcuuccucccaaac

SEQ ID NO: 617197 - RNA, 19 nt, Artificial Sequence
  Description of Artificial Sequence: Synthetic oligonucleotide
accagguguccuaaaaccu

SEQ ID NO: 617198 - RNA, 19 nt, Artificial Sequence
  Description of Artificial Sequence: Synthetic oligonucleotide
ugggagucagagcccggug

SEQ ID NO: 617199 - RNA, 19 nt, Artificial Sequence
  Description of Artificial Sequence: Synthetic oligonucleotide
agagcccggugguuuaaug

SEQ ID NO: 617200 - RNA, 19 nt, Artificial Sequence
  Description of Artificial Sequence: Synthetic oligonucleotide
gguaagaauccaaucgguc

SEQ ID NO: 617201 - RNA, 19 nt, Artificial Sequence
  Description of Artificial Sequence: Synthetic oligonucleotide
caccacacuaggucuauga

SEQ ID NO: 617202 - RNA, 19 nt, Artificial Sequence
  Description of Artificial Sequence: Synthetic oligonucleotide
cucgguuccauaucaggaa

SEQ ID NO: 617203 - RNA, 19 nt, Artificial Sequence
  Description of Artificial Sequence: Synthetic oligonucleotide
ugggcgugcugagugagcu

SEQ ID NO: 617204 - RNA, 19 nt, Artificial Sequence
  Description of Artificial Sequence: Synthetic oligonucleotide
uugcgcacggcuuggcccu

SEQ ID NO: 617205 - RNA, 19 nt, Artificial Sequence
  Description of Artificial Sequence: Synthetic oligonucleotide
uaccggccuagguacuucc

SEQ ID NO: 617206 - RNA, 19 nt, Artificial Sequence
  Description of Artificial Sequence: Synthetic oligonucleotide
ucggauguugcggcggucu

SEQ ID NO: 617207 - RNA, 19 nt, Artificial Sequence
  Description of Artificial Sequence: Synthetic oligonucleotide
cuguuaaucccugaguugu

SEQ ID NO: 617208 - RNA, 19 nt, Artificial Sequence
  Description of Artificial Sequence: Synthetic oligonucleotide
guggguaacgauaccccug

SEQ ID NO: 617209 - RNA, 19 nt, Artificial Sequence
  Description of Artificial Sequence: Synthetic oligonucleotide
aagauucguagagcuuccu

SEQ ID NO: 617210 - RNA, 19 nt, Artificial Sequence
  Description of Artificial Sequence: Synthetic oligonucleotide
uugcggcggucuuuggcag

SEQ ID NO: 617211 - RNA, 19 nt, Artificial Sequence
  Description of Artificial Sequence: Synthetic oligonucleotide
ggugcuagaguuagauccc

SEQ ID NO: 617212 - RNA, 19 nt, Artificial Sequence
  Description of Artificial Sequence: Synthetic oligonucleotide
gggaucugcgauguguucc

SEQ ID NO: 617213 - RNA, 19 nt, Artificial Sequence
  Description of Artificial Sequence: Synthetic oligonucleotide
guucagauacccucucucu

SEQ ID NO: 617214 - RNA, 19 nt, Artificial Sequence
  Description of Artificial Sequence: Synthetic oligonucleotide
gaguuguccuaacucugaa

SEQ ID NO: 617215 - RNA, 19 nt, Artificial Sequence
  Description of Artificial Sequence: Synthetic oligonucleotide
aaugauccggaaaggccuu

SEQ ID NO: 617216 - RNA, 19 nt, Artificial Sequence
  Description of Artificial Sequence: Synthetic oligonucleotide
agaccgucucucaaguugu

SEQ ID NO: 617217 - RNA, 19 nt, Artificial Sequence
  Description of Artificial Sequence: Synthetic oligonucleotide
cuggugcucggauguugcg

SEQ ID NO: 617218 - RNA, 19 nt, Artificial Sequence
  Description of Artificial Sequence: Synthetic oligonucleotide
caguccaacaggucugaca

SEQ ID NO: 617219 - RNA, 19 nt, Artificial Sequence
  Description of Artificial Sequence: Synthetic oligonucleotide
cagguuggacuauggacca

SEQ ID NO: 617220 - RNA, 19 nt, Artificial Sequence
  Description of Artificial Sequence: Synthetic oligonucleotide
gggcucauaggugaaauga

SEQ ID NO: 617221 - RNA, 19 nt, Artificial Sequence
  Description of Artificial Sequence: Synthetic oligonucleotide
agugggcgugcugagugag

SEQ ID NO: 617222 - RNA, 19 nt, Artificial Sequence
  Description of Artificial Sequence: Synthetic oligonucleotide
cuccuuaacuguauuggcu

SEQ ID NO: 617223 - RNA, 19 nt, Artificial Sequence
  Description of Artificial Sequence: Synthetic oligonucleotide
ccagguguccuaaaaccug

SEQ ID NO: 617224 - RNA, 19 nt, Artificial Sequence
  Description of Artificial Sequence: Synthetic oligonucleotide
aguguccacugaguugcuc

SEQ ID NO: 617225 - RNA, 19 nt, Artificial Sequence
  Description of Artificial Sequence: Synthetic oligonucleotide
ggucuaugaggugcuagag

SEQ ID NO: 617226 - RNA, 19 nt, Artificial Sequence
  Description of Artificial Sequence: Synthetic oligonucleotide
ugccguaagcugagggauc

SEQ ID NO: 617227 - RNA, 19 nt, Artificial Sequence
  Description of Artificial Sequence: Synthetic oligonucleotide
gggaaagaccccgauagga

SEQ ID NO: 617228 - RNA, 19 nt, Artificial Sequence
  Description of Artificial Sequence: Synthetic oligonucleotide
gccaugaacuaacucccug

SEQ ID NO: 617229 - RNA, 19 nt, Artificial Sequence
  Description of Artificial Sequence: Synthetic oligonucleotide
acagaacacgugagggaag

SEQ ID NO: 617230 - RNA, 19 nt, Artificial Sequence
  Description of Artificial Sequence: Synthetic oligonucleotide
aguugucgagcauggccau

SEQ ID NO: 617231 - RNA, 19 nt, Artificial Sequence
  Description of Artificial Sequence: Synthetic oligonucleotide
cacuccgcaggcguguagc

SEQ ID NO: 617232 - RNA, 19 nt, Artificial Sequence
  Description of Artificial Sequence: Synthetic oligonucleotide
aggcgcucugugcgauucc

SEQ ID NO: 617233 - RNA, 19 nt, Artificial Sequence
  Description of Artificial Sequence: Synthetic oligonucleotide
gagggcgaugguggcacgg

SEQ ID NO: 617234 - RNA, 19 nt, Artificial Sequence
  Description of Artificial Sequence: Synthetic oligonucleotide
ggacacacuccaaucacac

SEQ ID NO: 617235 - RNA, 19 nt, Artificial Sequence
  Description of Artificial Sequence: Synthetic oligonucleotide
gaugaucaccacacuaggu

SEQ ID NO: 617236 - RNA, 19 nt, Artificial Sequence
  Description of Artificial Sequence: Synthetic oligonucleotide
cuaacucccugugcagcag

SEQ ID NO: 617237 - RNA, 19 nt, Artificial Sequence
  Description of Artificial Sequence: Synthetic oligonucleotide
gucgagcauggccaugaac

SEQ ID NO: 617238 - RNA, 19 nt, Artificial Sequence
  Description of Artificial Sequence: Synthetic oligonucleotide
cccggugguuuaauggugg

SEQ ID NO: 617239 - RNA, 19 nt, Artificial Sequence
  Description of Artificial Sequence: Synthetic oligonucleotide
ugcgagcaggaaucaucca

SEQ ID NO: 617240 - RNA, 19 nt, Artificial Sequence
  Description of Artificial Sequence: Synthetic oligonucleotide
uggugacuccaagauugga

SEQ ID NO: 617241 - RNA, 19 nt, Artificial Sequence
  Description of Artificial Sequence: Synthetic oligonucleotide
cuucggcaugcuaggcaag

SEQ ID NO: 617242 - RNA, 19 nt, Artificial Sequence
  Description of Artificial Sequence: Synthetic oligonucleotide
gugaguugcgagcaggaau

SEQ ID NO: 617243 - RNA, 19 nt, Artificial Sequence
  Description of Artificial Sequence: Synthetic oligonucleotide
cuuccgccuguggaggagg

SEQ ID NO: 617244 - RNA, 19 nt, Artificial Sequence
  Description of Artificial Sequence: Synthetic oligonucleotide
guggguugaaauggaggac

SEQ ID NO: 617245 - RNA, 19 nt, Artificial Sequence
  Description of Artificial Sequence: Synthetic oligonucleotide
ccugaaacagguuggacua

SEQ ID NO: 617246 - RNA, 19 nt, Artificial Sequence
  Description of Artificial Sequence: Synthetic oligonucleotide
cauguggcgugcagacaug

SEQ ID NO: 617247 - RNA, 19 nt, Artificial Sequence
  Description of Artificial Sequence: Synthetic oligonucleotide
cgcaucuaccucauggggc

SEQ ID NO: 617248 - RNA, 19 nt, Artificial Sequence
  Description of Artificial Sequence: Synthetic oligonucleotide
ugagggcgaugguggcacg

SEQ ID NO: 617249 - RNA, 19 nt, Artificial Sequence
  Description of Artificial Sequence: Synthetic oligonucleotide
gucuaugaggugcuagagu

SEQ ID NO: 617250 - RNA, 19 nt, Artificial Sequence
  Description of Artificial Sequence: Synthetic oligonucleotide
ugcgauuccgcuggaugau

SEQ ID NO: 617251 - RNA, 19 nt, Artificial Sequence
  Description of Artificial Sequence: Synthetic oligonucleotide
uaguaccggccuagguacu

SEQ ID NO: 617252 - RNA, 19 nt, Artificial Sequence
  Description of Artificial Sequence: Synthetic oligonucleotide
gacauguaguaccggccua

SEQ ID NO: 617253 - RNA, 19 nt, Artificial Sequence
  Description of Artificial Sequence: Synthetic oligonucleotide
ggggaauaauaagcucugg

SEQ ID NO: 617254 - RNA, 19 nt, Artificial Sequence
  Description of Artificial Sequence: Synthetic oligonucleotide
uuguugguccgugccggca

SEQ ID NO: 617255 - RNA, 19 nt, Artificial Sequence
  Description of Artificial Sequence: Synthetic oligonucleotide
gugucgagacagugagggc

SEQ ID NO: 617256 - RNA, 19 nt, Artificial Sequence
  Description of Artificial Sequence: Synthetic oligonucleotide
gccugaaacagguuggacu

SEQ ID NO: 617257 - RNA, 19 nt, Artificial Sequence
  Description of Artificial Sequence: Synthetic oligonucleotide
ugccugaaacagguuggac

SEQ ID NO: 617258 - RNA, 19 nt, Artificial Sequence
  Description of Artificial Sequence: Synthetic oligonucleotide
gcucauaggugaaaugauc

SEQ ID NO: 617259 - RNA, 19 nt, Artificial Sequence
  Description of Artificial Sequence: Synthetic oligonucleotide
gccguggguaacgauaccc

SEQ ID NO: 617260 - RNA, 19 nt, Artificial Sequence
  Description of Artificial Sequence: Synthetic oligonucleotide
uuccgccuguggaggagga

SEQ ID NO: 617261 - RNA, 19 nt, Artificial Sequence
  Description of Artificial Sequence: Synthetic oligonucleotide
ccguggguaacgauacccc

SEQ ID NO: 617262 - RNA, 19 nt, Artificial Sequence
  Description of Artificial Sequence: Synthetic oligonucleotide
uguuugcgcacggcuuggc

SEQ ID NO: 617263 - RNA, 19 nt, Artificial Sequence
  Description of Artificial Sequence: Synthetic oligonucleotide
cucaacggagccauuuccu

SEQ ID NO: 617264 - RNA, 19 nt, Artificial Sequence
  Description of Artificial Sequence: Synthetic oligonucleotide
guuggacuauggaccacac

SEQ ID NO: 617265 - RNA, 19 nt, Artificial Sequence
  Description of Artificial Sequence: Synthetic oligonucleotide
ugccggcaugaugaagaag

SEQ ID NO: 617266 - RNA, 19 nt, Artificial Sequence
  Description of Artificial Sequence: Synthetic oligonucleotide
cagauacccucucucugca

SEQ ID NO: 617267 - RNA, 19 nt, Artificial Sequence
  Description of Artificial Sequence: Synthetic oligonucleotide
cugucccgguugcagggag

SEQ ID NO: 617268 - RNA, 19 nt, Artificial Sequence
  Description of Artificial Sequence: Synthetic oligonucleotide
cauuuccuggaggguacac

SEQ ID NO: 617269 - RNA, 19 nt, Artificial Sequence
  Description of Artificial Sequence: Synthetic oligonucleotide
auguggcgugcagacaugu

SEQ ID NO: 617270 - RNA, 19 nt, Artificial Sequence
  Description of Artificial Sequence: Synthetic oligonucleotide
aggaaucauccaggcugcg

SEQ ID NO: 617271 - RNA, 19 nt, Artificial Sequence
  Description of Artificial Sequence: Synthetic oligonucleotide
ugggucgcaucuaccucau

SEQ ID NO: 617272 - RNA, 19 nt, Artificial Sequence
  Description of Artificial Sequence: Synthetic oligonucleotide
gccuagguacuuccagucc

SEQ ID NO: 617273 - RNA, 19 nt, Artificial Sequence
  Description of Artificial Sequence: Synthetic oligonucleotide
uccgggaggcucccauagu

SEQ ID NO: 617274 - RNA, 19 nt, Artificial Sequence
  Description of Artificial Sequence: Synthetic oligonucleotide
agguuggacuauggaccac

SEQ ID NO: 617275 - RNA, 19 nt, Artificial Sequence
  Description of Artificial Sequence: Synthetic oligonucleotide
guugguccgugccggcaug

SEQ ID NO: 617276 - RNA, 19 nt, Artificial Sequence
  Description of Artificial Sequence: Synthetic oligonucleotide
cuaugaggugcuagaguua

SEQ ID NO: 617277 - RNA, 19 nt, Artificial Sequence
  Description of Artificial Sequence: Synthetic oligonucleotide
gcuucggcaugcuaggcaa

SEQ ID NO: 617278 - RNA, 19 nt, Artificial Sequence
  Description of Artificial Sequence: Synthetic oligonucleotide
gccugcacauagcauacuc

SEQ ID NO: 617279 - RNA, 19 nt, Artificial Sequence
  Description of Artificial Sequence: Synthetic oligonucleotide
auguccgggaggcucccau

SEQ ID NO: 617280 - RNA, 19 nt, Artificial Sequence
  Description of Artificial Sequence: Synthetic oligonucleotide
ggcaaguacucugacagcu

SEQ ID NO: 617281 - RNA, 19 nt, Artificial Sequence
  Description of Artificial Sequence: Synthetic oligonucleotide
ggaccgaggggaauaauaa

SEQ ID NO: 617282 - RNA, 19 nt, Artificial Sequence
  Description of Artificial Sequence: Synthetic oligonucleotide
aaccuccgauccagaaugu

SEQ ID NO: 617283 - RNA, 19 nt, Artificial Sequence
  Description of Artificial Sequence: Synthetic oligonucleotide
ucaccacacuaggucuaug

SEQ ID NO: 617284 - RNA, 19 nt, Artificial Sequence
  Description of Artificial Sequence: Synthetic oligonucleotide
uucugggacccaggcuaag

SEQ ID NO: 617285 - RNA, 19 nt, Artificial Sequence
  Description of Artificial Sequence: Synthetic oligonucleotide
gucgagacagugagggcga

SEQ ID NO: 617286 - RNA, 19 nt, Artificial Sequence
  Description of Artificial Sequence: Synthetic oligonucleotide
ccgauccagaauguaaaug

SEQ ID NO: 617287 - RNA, 19 nt, Artificial Sequence
  Description of Artificial Sequence: Synthetic oligonucleotide
ggcgcucugugcgauuccg

SEQ ID NO: 617288 - RNA, 19 nt, Artificial Sequence
  Description of Artificial Sequence: Synthetic oligonucleotide
aggcuggccguggguaacg

SEQ ID NO: 617289 - RNA, 19 nt, Artificial Sequence
  Description of Artificial Sequence: Synthetic oligonucleotide
ggcauucacucugagcaga

SEQ ID NO: 617290 - RNA, 19 nt, Artificial Sequence
  Description of Artificial Sequence: Synthetic oligonucleotide
augauccggaaaggccuug

SEQ ID NO: 617291 - RNA, 19 nt, Artificial Sequence
  Description of Artificial Sequence: Synthetic oligonucleotide
cuccgcaggcguguagccc

SEQ ID NO: 617292 - RNA, 19 nt, Artificial Sequence
  Description of Artificial Sequence: Synthetic oligonucleotide
cgugccggcaugaugaaga

SEQ ID NO: 617293 - RNA, 19 nt, Artificial Sequence
  Description of Artificial Sequence: Synthetic oligonucleotide
guugucgagcauggccaug

SEQ ID NO: 617294 - RNA, 19 nt, Artificial Sequence
  Description of Artificial Sequence: Synthetic oligonucleotide
gaacacgugagggaagcuu

SEQ ID NO: 617295 - RNA, 19 nt, Artificial Sequence
  Description of Artificial Sequence: Synthetic oligonucleotide
cacuggguaagaauccaau

SEQ ID NO: 617296 - RNA, 19 nt, Artificial Sequence
  Description of Artificial Sequence: Synthetic oligonucleotide
aguugcgagcaggaaucau

SEQ ID NO: 617297 - RNA, 19 nt, Artificial Sequence
  Description of Artificial Sequence: Synthetic oligonucleotide
uguccgggaggcucccaua

SEQ ID NO: 617298 - RNA, 19 nt, Artificial Sequence
  Description of Artificial Sequence: Synthetic oligonucleotide
gaguugcgagcaggaauca

SEQ ID NO: 617299 - RNA, 19 nt, Artificial Sequence
  Description of Artificial Sequence: Synthetic oligonucleotide
uugguccgugccggcauga

SEQ ID NO: 617300 - RNA, 19 nt, Artificial Sequence
  Description of Artificial Sequence: Synthetic oligonucleotide
gugcuagaguuagauccca

SEQ ID NO: 617301 - RNA, 19 nt, Artificial Sequence
  Description of Artificial Sequence: Synthetic oligonucleotide
gguccgugccggcaugaug

SEQ ID NO: 617302 - RNA, 19 nt, Artificial Sequence
  Description of Artificial Sequence: Synthetic oligonucleotide
ccaaucggucuggaguggg

SEQ ID NO: 617303 - RNA, 19 nt, Artificial Sequence
  Description of Artificial Sequence: Synthetic oligonucleotide
aguaccggccuagguacuu

SEQ ID NO: 617304 - RNA, 19 nt, Artificial Sequence
  Description of Artificial Sequence: Synthetic oligonucleotide
aggaguguggugacuccaa

SEQ ID NO: 617305 - RNA, 19 nt, Artificial Sequence
  Description of Artificial Sequence: Synthetic oligonucleotide
ccuccgauccagaauguaa

SEQ ID NO: 617306 - RNA, 19 nt, Artificial Sequence
  Description of Artificial Sequence: Synthetic oligonucleotide
ugcacucagugggcgugcu

SEQ ID NO: 617307 - RNA, 19 nt, Artificial Sequence
  Description of Artificial Sequence: Synthetic oligonucleotide
uccgugccggcaugaugaa

SEQ ID NO: 617308 - RNA, 19 nt, Artificial Sequence
  Description of Artificial Sequence: Synthetic oligonucleotide
cugcacucagugggcgugc

SEQ ID NO: 617309 - RNA, 19 nt, Artificial Sequence
  Description of Artificial Sequence: Synthetic oligonucleotide
gugccugaaacagguugga

SEQ ID NO: 617310 - RNA, 19 nt, Artificial Sequence
  Description of Artificial Sequence: Synthetic oligonucleotide
cccggcguggccacucugg

SEQ ID NO: 617311 - RNA, 19 nt, Artificial Sequence
  Description of Artificial Sequence: Synthetic oligonucleotide
gguuuaaugguggguugaa

SEQ ID NO: 617312 - RNA, 19 nt, Artificial Sequence
  Description of Artificial Sequence: Synthetic oligonucleotide
ggcguguagccccagggcu

SEQ ID NO: 617313 - RNA, 19 nt, Artificial Sequence
  Description of Artificial Sequence: Synthetic oligonucleotide
ggcugcggaaccuccgauc

SEQ ID NO: 617314 - RNA, 19 nt, Artificial Sequence
  Description of Artificial Sequence: Synthetic oligonucleotide
agggcgaugguggcacgga

SEQ ID NO: 617315 - RNA, 19 nt, Artificial Sequence
  Description of Artificial Sequence: Synthetic oligonucleotide
guauuggcugugucccaua

SEQ ID NO: 617316 - RNA, 19 nt, Artificial Sequence
  Description of Artificial Sequence: Synthetic oligonucleotide
ccggccuagguacuuccag

SEQ ID NO: 617317 - RNA, 19 nt, Artificial Sequence
  Description of Artificial Sequence: Synthetic oligonucleotide
gagugagcuggagggucca

SEQ ID NO: 617318 - RNA, 19 nt, Artificial Sequence
  Description of Artificial Sequence: Synthetic oligonucleotide
guucucaacggagccauuu

SEQ ID NO: 617319 - RNA, 19 nt, Artificial Sequence
  Description of Artificial Sequence: Synthetic oligonucleotide
ccaugaacuaacucccugu

SEQ ID NO: 617320 - RNA, 19 nt, Artificial Sequence
  Description of Artificial Sequence: Synthetic oligonucleotide
ggaaccuccgauccagaau

SEQ ID NO: 617321 - RNA, 19 nt, Artificial Sequence
  Description of Artificial Sequence: Synthetic oligonucleotide
uguagccccagggcucaua

SEQ ID NO: 617322 - RNA, 19 nt, Artificial Sequence
  Description of Artificial Sequence: Synthetic oligonucleotide
gugccggcaugaugaagaa

SEQ ID NO: 617323 - RNA, 19 nt, Artificial Sequence
  Description of Artificial Sequence: Synthetic oligonucleotide
gcucauaguaggagggaaa

SEQ ID NO: 617324 - RNA, 19 nt, Artificial Sequence
  Description of Artificial Sequence: Synthetic oligonucleotide
ggaaagaccccgauaggau

SEQ ID NO: 617325 - RNA, 19 nt, Artificial Sequence
  Description of Artificial Sequence: Synthetic oligonucleotide
ggguaagaauccaaucggu

SEQ ID NO: 617326 - RNA, 19 nt, Artificial Sequence
  Description of Artificial Sequence: Synthetic oligonucleotide
guaccggccuagguacuuc

SEQ ID NO: 617327 - RNA, 19 nt, Artificial Sequence
  Description of Artificial Sequence: Synthetic oligonucleotide
cagugggcgugcugaguga

SEQ ID NO: 617328 - RNA, 19 nt, Artificial Sequence
  Description of Artificial Sequence: Synthetic oligonucleotide
cacgugagggaagcuugca

SEQ ID NO: 617329 - RNA, 19 nt, Artificial Sequence
  Description of Artificial Sequence: Synthetic oligonucleotide
augaggugcuagaguuaga

SEQ ID NO: 617330 - RNA, 19 nt, Artificial Sequence
  Description of Artificial Sequence: Synthetic oligonucleotide
accuccgauccagaaugua

SEQ ID NO: 617331 - RNA, 19 nt, Artificial Sequence
  Description of Artificial Sequence: Synthetic oligonucleotide
ggcuugccgccuguccugg

SEQ ID NO: 617332 - RNA, 19 nt, Artificial Sequence
  Description of Artificial Sequence: Synthetic oligonucleotide
ccgccuguggaggaggaac

SEQ ID NO: 617333 - RNA, 19 nt, Artificial Sequence
  Description of Artificial Sequence: Synthetic oligonucleotide
gcaauccaagaaaggcaca

SEQ ID NO: 617334 - RNA, 19 nt, Artificial Sequence
  Description of Artificial Sequence: Synthetic oligonucleotide
cgauaggaucugaggaguc

SEQ ID NO: 617335 - RNA, 19 nt, Artificial Sequence
  Description of Artificial Sequence: Synthetic oligonucleotide
agaccccgauaggaucuga

SEQ ID NO: 617336 - RNA, 19 nt, Artificial Sequence
  Description of Artificial Sequence: Synthetic oligonucleotide
cacuggaccgaggggaaua

SEQ ID NO: 617337 - RNA, 19 nt, Artificial Sequence
  Description of Artificial Sequence: Synthetic oligonucleotide
ggcggucuuuggcagccuc

SEQ ID NO: 617338 - RNA, 19 nt, Artificial Sequence
  Description of Artificial Sequence: Synthetic oligonucleotide
ucgagacagugagggcgau

SEQ ID NO: 617339 - RNA, 19 nt, Artificial Sequence
  Description of Artificial Sequence: Synthetic oligonucleotide
ccugcacauagcauacucu

SEQ ID NO: 617340 - RNA, 19 nt, Artificial Sequence
  Description of Artificial Sequence: Synthetic oligonucleotide
uccgccuguggaggaggaa

SEQ ID NO: 617341 - RNA, 19 nt, Artificial Sequence
  Description of Artificial Sequence: Synthetic oligonucleotide
gcccggugguuuaauggug

SEQ ID NO: 617342 - RNA, 19 nt, Artificial Sequence
  Description of Artificial Sequence: Synthetic oligonucleotide
acacuggaccgaggggaau

SEQ ID NO: 617343 - RNA, 19 nt, Artificial Sequence
  Description of Artificial Sequence: Synthetic oligonucleotide
gcggcggucuuuggcagcc

SEQ ID NO: 617344 - RNA, 19 nt, Artificial Sequence
  Description of Artificial Sequence: Synthetic oligonucleotide
accggccuagguacuucca

SEQ ID NO: 617345 - RNA, 19 nt, Artificial Sequence
  Description of Artificial Sequence: Synthetic oligonucleotide
cugcggaaccuccgaucca

SEQ ID NO: 617346 - RNA, 19 nt, Artificial Sequence
  Description of Artificial Sequence: Synthetic oligonucleotide
ggccagacacagaacacgu

SEQ ID NO: 617347 - RNA, 19 nt, Artificial Sequence
  Description of Artificial Sequence: Synthetic oligonucleotide
ccccucccaaaugcaaacc

SEQ ID NO: 617348 - RNA, 19 nt, Artificial Sequence
  Description of Artificial Sequence: Synthetic oligonucleotide
ccuuaacuguauuggcugu

SEQ ID NO: 617349 - RNA, 19 nt, Artificial Sequence
  Description of Artificial Sequence: Synthetic oligonucleotide
ggccguggguaacgauacc

SEQ ID NO: 617350 - RNA, 19 nt, Artificial Sequence
  Description of Artificial Sequence: Synthetic oligonucleotide
ugguccgugccggcaugau

SEQ ID NO: 617351 - RNA, 19 nt, Artificial Sequence
  Description of Artificial Sequence: Synthetic oligonucleotide
ggcucauaggugaaaugau

SEQ ID NO: 617352 - RNA, 19 nt, Artificial Sequence
  Description of Artificial Sequence: Synthetic oligonucleotide
ucccgguugcagggagguc

SEQ ID NO: 617353 - RNA, 19 nt, Artificial Sequence
  Description of Artificial Sequence: Synthetic oligonucleotide
ccaaggcuuccaggaacac

SEQ ID NO: 617354 - RNA, 19 nt, Artificial Sequence
  Description of Artificial Sequence: Synthetic oligonucleotide
acgauaccccugggucgca

SEQ ID NO: 617355 - RNA, 19 nt, Artificial Sequence
  Description of Artificial Sequence: Synthetic oligonucleotide
ccgggaggcucccauagua

SEQ ID NO: 617356 - RNA, 19 nt, Artificial Sequence
  Description of Artificial Sequence: Synthetic oligonucleotide
cacuccaaucacacaccuu

SEQ ID NO: 617357 - RNA, 19 nt, Artificial Sequence
  Description of Artificial Sequence: Synthetic oligonucleotide
gccacucuggugcucggau

SEQ ID NO: 617358 - RNA, 19 nt, Artificial Sequence
  Description of Artificial Sequence: Synthetic oligonucleotide
gggucgcaucuaccucaug

SEQ ID NO: 617359 - RNA, 19 nt, Artificial Sequence
  Description of Artificial Sequence: Synthetic oligonucleotide
agacugccgcugaguggca

SEQ ID NO: 617360 - RNA, 19 nt, Artificial Sequence
  Description of Artificial Sequence: Synthetic oligonucleotide
cguagagcuuccucccaaa

SEQ ID NO: 617361 - RNA, 19 nt, Artificial Sequence
  Description of Artificial Sequence: Synthetic oligonucleotide
ccaguccaacaggucugac

SEQ ID NO: 617362 - RNA, 19 nt, Artificial Sequence
  Description of Artificial Sequence: Synthetic oligonucleotide
caaagccggagagguuggu

SEQ ID NO: 617363 - RNA, 19 nt, Artificial Sequence
  Description of Artificial Sequence: Synthetic oligonucleotide
ccgugccggcaugaugaag

SEQ ID NO: 617364 - RNA, 19 nt, Artificial Sequence
  Description of Artificial Sequence: Synthetic oligonucleotide
ggccaugaacuaacucccu

SEQ ID NO: 617365 - RNA, 19 nt, Artificial Sequence
  Description of Artificial Sequence: Synthetic oligonucleotide
ugcgcacggcuuggcccuu

SEQ ID NO: 617366 - RNA, 19 nt, Artificial Sequence
  Description of Artificial Sequence: Synthetic oligonucleotide
ggcuggccguggguaacga

SEQ ID NO: 617367 - RNA, 19 nt, Artificial Sequence
  Description of Artificial Sequence: Synthetic oligonucleotide
cuaccucauggggcucaua

SEQ ID NO: 617368 - RNA, 19 nt, Artificial Sequence
  Description of Artificial Sequence: Synthetic oligonucleotide
gcggaaccuccgauccaga

SEQ ID NO: 617369 - RNA, 19 nt, Artificial Sequence
  Description of Artificial Sequence: Synthetic oligonucleotide
cggccuagguacuuccagu

SEQ ID NO: 617370 - RNA, 19 nt, Artificial Sequence
  Description of Artificial Sequence: Synthetic oligonucleotide
gcgugcugagugagcugga

SEQ ID NO: 617371 - RNA, 19 nt, Artificial Sequence
  Description of Artificial Sequence: Synthetic oligonucleotide
cagagcccggugguuuaau

SEQ ID NO: 617372 - RNA, 19 nt, Artificial Sequence
  Description of Artificial Sequence: Synthetic oligonucleotide
ccgcaggcguguagcccca

SEQ ID NO: 617373 - RNA, 19 nt, Artificial Sequence
  Description of Artificial Sequence: Synthetic oligonucleotide
cggagagguugguggaaau

SEQ ID NO: 617374 - RNA, 19 nt, Artificial Sequence
  Description of Artificial Sequence: Synthetic oligonucleotide
cgcacggcuuggcccuuca

SEQ ID NO: 617375 - RNA, 19 nt, Artificial Sequence
  Description of Artificial Sequence: Synthetic oligonucleotide
cgagguacauguggggcuu

SEQ ID NO: 617376 - RNA, 19 nt, Artificial Sequence
  Description of Artificial Sequence: Synthetic oligonucleotide
ggcccggcguggccacucu

SEQ ID NO: 617377 - RNA, 19 nt, Artificial Sequence
  Description of Artificial Sequence: Synthetic oligonucleotide
gcgcacggcuuggcccuuc

SEQ ID NO: 617378 - RNA, 19 nt, Artificial Sequence
  Description of Artificial Sequence: Synthetic oligonucleotide
ccgcuggaugaugcgcugu

SEQ ID NO: 617379 - RNA, 19 nt, Artificial Sequence
  Description of Artificial Sequence: Synthetic oligonucleotide
cgguugcagggaggucaca

SEQ ID NO: 617380 - RNA, 19 nt, Artificial Sequence
  Description of Artificial Sequence: Synthetic oligonucleotide
cgauaccccugggucgcau

SEQ ID NO: 617381 - RNA, 19 nt, Artificial Sequence
  Description of Artificial Sequence: Synthetic oligonucleotide
cggcggucuuuggcagccu

SEQ ID NO: 617382 - RNA, 19 nt, Artificial Sequence
  Description of Artificial Sequence: Synthetic oligonucleotide
uuaaauucaaauauauuac

SEQ ID NO: 617383 - RNA, 19 nt, Artificial Sequence
  Description of Artificial Sequence: Synthetic oligonucleotide
aaaagaaugccugagauga

SEQ ID NO: 617384 - RNA, 19 nt, Artificial Sequence
  Description of Artificial Sequence: Synthetic oligonucleotide
uuuaucauccacuacagac

SEQ ID NO: 617385 - RNA, 19 nt, Artificial Sequence
  Description of Artificial Sequence: Synthetic oligonucleotide
aaagaagugaaguuugaug

SEQ ID NO: 617386 - RNA, 19 nt, Artificial Sequence
  Description of Artificial Sequence: Synthetic oligonucleotide
aagguuacucuuuucgagc

SEQ ID NO: 617387 - RNA, 19 nt, Artificial Sequence
  Description of Artificial Sequence: Synthetic oligonucleotide
aaacuuacagauuuguaca

SEQ ID NO: 617388 - RNA, 19 nt, Artificial Sequence
  Description of Artificial Sequence: Synthetic oligonucleotide
uuucaagcaauuuucuacg

SEQ ID NO: 617389 - RNA, 19 nt, Artificial Sequence
  Description of Artificial Sequence: Synthetic oligonucleotide
auuucagauaguuugaaga

SEQ ID NO: 617390 - RNA, 19 nt, Artificial Sequence
  Description of Artificial Sequence: Synthetic oligonucleotide
aaccuaagucaucauaaac

SEQ ID NO: 617391 - RNA, 19 nt, Artificial Sequence
  Description of Artificial Sequence: Synthetic oligonucleotide
uucuacaucaucccaagcc

SEQ ID NO: 617392 - RNA, 19 nt, Artificial Sequence
  Description of Artificial Sequence: Synthetic oligonucleotide
uucgauaccacuuuaauuu

SEQ ID NO: 617393 - RNA, 19 nt, Artificial Sequence
  Description of Artificial Sequence: Synthetic oligonucleotide
uccauuuugaaucgugagg

SEQ ID NO: 617394 - RNA, 19 nt, Artificial Sequence
  Description of Artificial Sequence: Synthetic oligonucleotide
ucauaaacgacacuagcga

SEQ ID NO: 617395 - RNA, 19 nt, Artificial Sequence
  Description of Artificial Sequence: Synthetic oligonucleotide
ucauccuuuagcaaggaca

SEQ ID NO: 617396 - RNA, 19 nt, Artificial Sequence
  Description of Artificial Sequence: Synthetic oligonucleotide
augaucuaaugucaggcgc

SEQ ID NO: 617397 - RNA, 19 nt, Artificial Sequence
  Description of Artificial Sequence: Synthetic oligonucleotide
ugcuuuacagcuaagggac

SEQ ID NO: 617398 - RNA, 19 nt, Artificial Sequence
  Description of Artificial Sequence: Synthetic oligonucleotide
auaaaucucagcaaggcuc

SEQ ID NO: 617399 - RNA, 19 nt, Artificial Sequence
  Description of Artificial Sequence: Synthetic oligonucleotide
ucaaguuucuguaaaggac

SEQ ID NO: 617400 - RNA, 19 nt, Artificial Sequence
  Description of Artificial Sequence: Synthetic oligonucleotide
uuaugaacagaaauguccu

SEQ ID NO: 617401 - RNA, 19 nt, Artificial Sequence
  Description of Artificial Sequence: Synthetic oligonucleotide
caaaagaggauuuaacuuc

SEQ ID NO: 617402 - RNA, 19 nt, Artificial Sequence
  Description of Artificial Sequence: Synthetic oligonucleotide
auacgcauccucuuugggc

SEQ ID NO: 617403 - RNA, 19 nt, Artificial Sequence
  Description of Artificial Sequence: Synthetic oligonucleotide
ugcuaguccauuuugaauc

SEQ ID NO: 617404 - RNA, 19 nt, Artificial Sequence
  Description of Artificial Sequence: Synthetic oligonucleotide
agaugcaauuuucucauuc

SEQ ID NO: 617405 - RNA, 19 nt, Artificial Sequence
  Description of Artificial Sequence: Synthetic oligonucleotide
accuaagucaucauaaacg

SEQ ID NO: 617406 - RNA, 19 nt, Artificial Sequence
  Description of Artificial Sequence: Synthetic oligonucleotide
auugacuuccuucagacaa

SEQ ID NO: 617407 - RNA, 19 nt, Artificial Sequence
  Description of Artificial Sequence: Synthetic oligonucleotide
agauucuugcuuuacagcu

SEQ ID NO: 617408 - RNA, 19 nt, Artificial Sequence
  Description of Artificial Sequence: Synthetic oligonucleotide
ucuuuaucuuuccugguug

SEQ ID NO: 617409 - RNA, 19 nt, Artificial Sequence
  Description of Artificial Sequence: Synthetic oligonucleotide
ucuaccuucucuagaaagc

SEQ ID NO: 617410 - RNA, 19 nt, Artificial Sequence
  Description of Artificial Sequence: Synthetic oligonucleotide
uuauugacuuccuucagac

SEQ ID NO: 617411 - RNA, 19 nt, Artificial Sequence
  Description of Artificial Sequence: Synthetic oligonucleotide
uuucguucauccuuuagca

SEQ ID NO: 617412 - RNA, 19 nt, Artificial Sequence
  Description of Artificial Sequence: Synthetic oligonucleotide
acuuaaucuucugacgucc

SEQ ID NO: 617413 - RNA, 19 nt, Artificial Sequence
  Description of Artificial Sequence: Synthetic oligonucleotide
gaagguuacucuuuucgag

SEQ ID NO: 617414 - RNA, 19 nt, Artificial Sequence
  Description of Artificial Sequence: Synthetic oligonucleotide
ucguucauccuuuagcaag

SEQ ID NO: 617415 - RNA, 19 nt, Artificial Sequence
  Description of Artificial Sequence: Synthetic oligonucleotide
uuuuagucaacuguuucag

SEQ ID NO: 617416 - RNA, 19 nt, Artificial Sequence
  Description of Artificial Sequence: Synthetic oligonucleotide
aagaauuuaucauccacua

SEQ ID NO: 617417 - RNA, 19 nt, Artificial Sequence
  Description of Artificial Sequence: Synthetic oligonucleotide
aauuuaucauccacuacag

SEQ ID NO: 617418 - RNA, 19 nt, Artificial Sequence
  Description of Artificial Sequence: Synthetic oligonucleotide
caguuugcuaauaucaaag

SEQ ID NO: 617419 - RNA, 19 nt, Artificial Sequence
  Description of Artificial Sequence: Synthetic oligonucleotide
aucauaaacgacacuagcg

SEQ ID NO: 617420 - RNA, 19 nt, Artificial Sequence
  Description of Artificial Sequence: Synthetic oligonucleotide
agguuacucuuuucgagcc

SEQ ID NO: 617421 - RNA, 19 nt, Artificial Sequence
  Description of Artificial Sequence: Synthetic oligonucleotide
uuagaaaagaaugccugag

SEQ ID NO: 617422 - RNA, 19 nt, Artificial Sequence
  Description of Artificial Sequence: Synthetic oligonucleotide
aucauaaagaacuuugguu

SEQ ID NO: 617423 - RNA, 19 nt, Artificial Sequence
  Description of Artificial Sequence: Synthetic oligonucleotide
uagggcauccaauuguagg

SEQ ID NO: 617424 - RNA, 19 nt, Artificial Sequence
  Description of Artificial Sequence: Synthetic oligonucleotide
aacuggauugaagaaaucu

SEQ ID NO: 617425 - RNA, 19 nt, Artificial Sequence
  Description of Artificial Sequence: Synthetic oligonucleotide
uuaagggcuugucuuuucg

SEQ ID NO: 617426 - RNA, 19 nt, Artificial Sequence
  Description of Artificial Sequence: Synthetic oligonucleotide
ucaugaucuaaugucaggc

SEQ ID NO: 617427 - RNA, 19 nt, Artificial Sequence
  Description of Artificial Sequence: Synthetic oligonucleotide
uauacuccugcucauaaau

SEQ ID NO: 617428 - RNA, 19 nt, Artificial Sequence
  Description of Artificial Sequence: Synthetic oligonucleotide
uugcuuuacagcuaaggga

SEQ ID NO: 617429 - RNA, 19 nt, Artificial Sequence
  Description of Artificial Sequence: Synthetic oligonucleotide
agaauuuaucauccacuac

SEQ ID NO: 617430 - RNA, 19 nt, Artificial Sequence
  Description of Artificial Sequence: Synthetic oligonucleotide
aaauucuuccucuuuguua

SEQ ID NO: 617431 - RNA, 19 nt, Artificial Sequence
  Description of Artificial Sequence: Synthetic oligonucleotide
ugaaucgugaggaaacacu

SEQ ID NO: 617432 - RNA, 19 nt, Artificial Sequence
  Description of Artificial Sequence: Synthetic oligonucleotide
cuucagacaacguuccagg

SEQ ID NO: 617433 - RNA, 19 nt, Artificial Sequence
  Description of Artificial Sequence: Synthetic oligonucleotide
uauuacagcuuuaauuuau

SEQ ID NO: 617434 - RNA, 19 nt, Artificial Sequence
  Description of Artificial Sequence: Synthetic oligonucleotide
agcaaggacacuuugccug

SEQ ID NO: 617435 - RNA, 19 nt, Artificial Sequence
  Description of Artificial Sequence: Synthetic oligonucleotide
uuucagauaguuugaagaa

SEQ ID NO: 617436 - RNA, 19 nt, Artificial Sequence
  Description of Artificial Sequence: Synthetic oligonucleotide
ucuuuguuagaaccuaagu

SEQ ID NO: 617437 - RNA, 19 nt, Artificial Sequence
  Description of Artificial Sequence: Synthetic oligonucleotide
uuuccuuggaucagguuug

SEQ ID NO: 617438 - RNA, 19 nt, Artificial Sequence
  Description of Artificial Sequence: Synthetic oligonucleotide
aauuuucuacgcuucuccu

SEQ ID NO: 617439 - RNA, 19 nt, Artificial Sequence
  Description of Artificial Sequence: Synthetic oligonucleotide
ugaacuucggucucucugc

SEQ ID NO: 617440 - RNA, 19 nt, Artificial Sequence
  Description of Artificial Sequence: Synthetic oligonucleotide
ucuagcuguugccaaaucu

SEQ ID NO: 617441 - RNA, 19 nt, Artificial Sequence
  Description of Artificial Sequence: Synthetic oligonucleotide
uugcuaauaucaaagucaa

SEQ ID NO: 617442 - RNA, 19 nt, Artificial Sequence
  Description of Artificial Sequence: Synthetic oligonucleotide
uguuuuagucaacuguuuc

SEQ ID NO: 617443 - RNA, 19 nt, Artificial Sequence
  Description of Artificial Sequence: Synthetic oligonucleotide
ucuaaugucaggcgcuucu

SEQ ID NO: 617444 - RNA, 19 nt, Artificial Sequence
  Description of Artificial Sequence: Synthetic oligonucleotide
gaaguuugaugcuagucca

SEQ ID NO: 617445 - RNA, 19 nt, Artificial Sequence
  Description of Artificial Sequence: Synthetic oligonucleotide
uguuuaaugauauccucua

SEQ ID NO: 617446 - RNA, 19 nt, Artificial Sequence
  Description of Artificial Sequence: Synthetic oligonucleotide
caugaucuaaugucaggcg

SEQ ID NO: 617447 - RNA, 19 nt, Artificial Sequence
  Description of Artificial Sequence: Synthetic oligonucleotide
auaguuugaagaauuuauc

SEQ ID NO: 617448 - RNA, 19 nt, Artificial Sequence
  Description of Artificial Sequence: Synthetic oligonucleotide
uuugauagggcauccaauu

SEQ ID NO: 617449 - RNA, 19 nt, Artificial Sequence
  Description of Artificial Sequence: Synthetic oligonucleotide
gaauccucaucacugaaga

SEQ ID NO: 617450 - RNA, 19 nt, Artificial Sequence
  Description of Artificial Sequence: Synthetic oligonucleotide
guaggacagaaacuuacag

SEQ ID NO: 617451 - RNA, 19 nt, Artificial Sequence
  Description of Artificial Sequence: Synthetic oligonucleotide
aacgacacuagcgauguca

SEQ ID NO: 617452 - RNA, 19 nt, Artificial Sequence
  Description of Artificial Sequence: Synthetic oligonucleotide
aaaagaggauuuaacuuca

SEQ ID NO: 617453 - RNA, 19 nt, Artificial Sequence
  Description of Artificial Sequence: Synthetic oligonucleotide
ugaucuaaugucaggcgcu

SEQ ID NO: 617454 - RNA, 19 nt, Artificial Sequence
  Description of Artificial Sequence: Synthetic oligonucleotide
uuucguucuacaucauccc

SEQ ID NO: 617455 - RNA, 19 nt, Artificial Sequence
  Description of Artificial Sequence: Synthetic oligonucleotide
uucauacgcauccucuuug

SEQ ID NO: 617456 - RNA, 19 nt, Artificial Sequence
  Description of Artificial Sequence: Synthetic oligonucleotide
cuuuaggagcaucagcagc

SEQ ID NO: 617457 - RNA, 19 nt, Artificial Sequence
  Description of Artificial Sequence: Synthetic oligonucleotide
gaaguggaaguuugauagg

SEQ ID NO: 617458 - RNA, 19 nt, Artificial Sequence
  Description of Artificial Sequence: Synthetic oligonucleotide
gauuacaggugccauucug

SEQ ID NO: 617459 - RNA, 19 nt, Artificial Sequence
  Description of Artificial Sequence: Synthetic oligonucleotide
uccacuacagacuuuucuc

SEQ ID NO: 617460 - RNA, 19 nt, Artificial Sequence
  Description of Artificial Sequence: Synthetic oligonucleotide
gacacuuugccuguuuuag

SEQ ID NO: 617461 - RNA, 19 nt, Artificial Sequence
  Description of Artificial Sequence: Synthetic oligonucleotide
acagcuaagggacucgugu

SEQ ID NO: 617462 - RNA, 19 nt, Artificial Sequence
  Description of Artificial Sequence: Synthetic oligonucleotide
uacgcauccucuuugggcu

SEQ ID NO: 617463 - RNA, 19 nt, Artificial Sequence
  Description of Artificial Sequence: Synthetic oligonucleotide
cacuuuaggagcaucagca

SEQ ID NO: 617464 - RNA, 19 nt, Artificial Sequence
  Description of Artificial Sequence: Synthetic oligonucleotide
uuucgagccuucuuuaagu

SEQ ID NO: 617465 - RNA, 19 nt, Artificial Sequence
  Description of Artificial Sequence: Synthetic oligonucleotide
guuugcuaauaucaaaguc

SEQ ID NO: 617466 - RNA, 19 nt, Artificial Sequence
  Description of Artificial Sequence: Synthetic oligonucleotide
uggagugucucuuccagca

SEQ ID NO: 617467 - RNA, 19 nt, Artificial Sequence
  Description of Artificial Sequence: Synthetic oligonucleotide
ucauacgcauccucuuugg

SEQ ID NO: 617468 - RNA, 19 nt, Artificial Sequence
  Description of Artificial Sequence: Synthetic oligonucleotide
aguuugcuaauaucaaagu

SEQ ID NO: 617469 - RNA, 19 nt, Artificial Sequence
  Description of Artificial Sequence: Synthetic oligonucleotide
uucaaauauauuacagcuu

SEQ ID NO: 617470 - RNA, 19 nt, Artificial Sequence
  Description of Artificial Sequence: Synthetic oligonucleotide
uccucuggcaaagcgaagg

SEQ ID NO: 617471 - RNA, 19 nt, Artificial Sequence
  Description of Artificial Sequence: Synthetic oligonucleotide
aacuuacagauuuguacau

SEQ ID NO: 617472 - RNA, 19 nt, Artificial Sequence
  Description of Artificial Sequence: Synthetic oligonucleotide
ucgguugguggcuuuauug

SEQ ID NO: 617473 - RNA, 19 nt, Artificial Sequence
  Description of Artificial Sequence: Synthetic oligonucleotide
ucacuaacugcauucugga

SEQ ID NO: 617474 - RNA, 19 nt, Artificial Sequence
  Description of Artificial Sequence: Synthetic oligonucleotide
ugacuuuaagggcuugucu

SEQ ID NO: 617475 - RNA, 19 nt, Artificial Sequence
  Description of Artificial Sequence: Synthetic oligonucleotide
uaaacgacacuagcgaugu

SEQ ID NO: 617476 - RNA, 19 nt, Artificial Sequence
  Description of Artificial Sequence: Synthetic oligonucleotide
uuguuagaaccuaagucau

SEQ ID NO: 617477 - RNA, 19 nt, Artificial Sequence
  Description of Artificial Sequence: Synthetic oligonucleotide
ugaugcuaguccauuuuga

SEQ ID NO: 617478 - RNA, 19 nt, Artificial Sequence
  Description of Artificial Sequence: Synthetic oligonucleotide
uuuacagcuaagggacucg

SEQ ID NO: 617479 - RNA, 19 nt, Artificial Sequence
  Description of Artificial Sequence: Synthetic oligonucleotide
auuuaugaacagaaauguc

SEQ ID NO: 617480 - RNA, 19 nt, Artificial Sequence
  Description of Artificial Sequence: Synthetic oligonucleotide
aggauuuaacuucaucaga

SEQ ID NO: 617481 - RNA, 19 nt, Artificial Sequence
  Description of Artificial Sequence: Synthetic oligonucleotide
aguggagugucucuuccag

SEQ ID NO: 617482 - RNA, 19 nt, Artificial Sequence
  Description of Artificial Sequence: Synthetic oligonucleotide
aaucgugaggaaacacucg

SEQ ID NO: 617483 - RNA, 19 nt, Artificial Sequence
  Description of Artificial Sequence: Synthetic oligonucleotide
agagaauccaucaucuucu

SEQ ID NO: 617484 - RNA, 19 nt, Artificial Sequence
  Description of Artificial Sequence: Synthetic oligonucleotide
cucaugaucuaaugucagg

SEQ ID NO: 617485 - RNA, 19 nt, Artificial Sequence
  Description of Artificial Sequence: Synthetic oligonucleotide
gaaacacucgggucgguug

SEQ ID NO: 617486 - RNA, 19 nt, Artificial Sequence
  Description of Artificial Sequence: Synthetic oligonucleotide
aacguuccagggucugucg

SEQ ID NO: 617487 - RNA, 19 nt, Artificial Sequence
  Description of Artificial Sequence: Synthetic oligonucleotide
uauaaaacaguaggacaga

SEQ ID NO: 617488 - RNA, 19 nt, Artificial Sequence
  Description of Artificial Sequence: Synthetic oligonucleotide
uaguccauuuugaaucgug

SEQ ID NO: 617489 - RNA, 19 nt, Artificial Sequence
  Description of Artificial Sequence: Synthetic oligonucleotide
uugccaaaucugcucauca

SEQ ID NO: 617490 - RNA, 19 nt, Artificial Sequence
  Description of Artificial Sequence: Synthetic oligonucleotide
aagacggggcuuuuccuug

SEQ ID NO: 617491 - RNA, 19 nt, Artificial Sequence
  Description of Artificial Sequence: Synthetic oligonucleotide
gcaauuuagaaaagaaugc

SEQ ID NO: 617492 - RNA, 19 nt, Artificial Sequence
  Description of Artificial Sequence: Synthetic oligonucleotide
uucaacuggauugaagaaa

SEQ ID NO: 617493 - RNA, 19 nt, Artificial Sequence
  Description of Artificial Sequence: Synthetic oligonucleotide
ucagguuugguugaacuuc

SEQ ID NO: 617494 - RNA, 19 nt, Artificial Sequence
  Description of Artificial Sequence: Synthetic oligonucleotide
uucguucuacaucauccca

SEQ ID NO: 617495 - RNA, 19 nt, Artificial Sequence
  Description of Artificial Sequence: Synthetic oligonucleotide
ucugacguccaaacagccc

SEQ ID NO: 617496 - RNA, 19 nt, Artificial Sequence
  Description of Artificial Sequence: Synthetic oligonucleotide
uuugcaauucuagcuguug

SEQ ID NO: 617497 - RNA, 19 nt, Artificial Sequence
  Description of Artificial Sequence: Synthetic oligonucleotide
agaagugaaguuugaugcu

SEQ ID NO: 617498 - RNA, 19 nt, Artificial Sequence
  Description of Artificial Sequence: Synthetic oligonucleotide
cuuuaaguugcucgccacc

SEQ ID NO: 617499 - RNA, 19 nt, Artificial Sequence
  Description of Artificial Sequence: Synthetic oligonucleotide
cagacaacguuccaggguc

SEQ ID NO: 617500 - RNA, 19 nt, Artificial Sequence
  Description of Artificial Sequence: Synthetic oligonucleotide
agggacucgugucuucagc

SEQ ID NO: 617501 - RNA, 19 nt, Artificial Sequence
  Description of Artificial Sequence: Synthetic oligonucleotide
cucuuuguuagaaccuaag

SEQ ID NO: 617502 - RNA, 19 nt, Artificial Sequence
  Description of Artificial Sequence: Synthetic oligonucleotide
gcgaagguuacucuuuucg

SEQ ID NO: 617503 - RNA, 19 nt, Artificial Sequence
  Description of Artificial Sequence: Synthetic oligonucleotide
guccauuuugaaucgugag

SEQ ID NO: 617504 - RNA, 19 nt, Artificial Sequence
  Description of Artificial Sequence: Synthetic oligonucleotide
uccugucucuuuucaaaag

SEQ ID NO: 617505 - RNA, 19 nt, Artificial Sequence
  Description of Artificial Sequence: Synthetic oligonucleotide
auucgauaccacuuuaauu

SEQ ID NO: 617506 - RNA, 19 nt, Artificial Sequence
  Description of Artificial Sequence: Synthetic oligonucleotide
acucgggucgguugguggc

SEQ ID NO: 617507 - RNA, 19 nt, Artificial Sequence
  Description of Artificial Sequence: Synthetic oligonucleotide
uuaucucaaguuucuguaa

SEQ ID NO: 617508 - RNA, 19 nt, Artificial Sequence
  Description of Artificial Sequence: Synthetic oligonucleotide
gaaucgugaggaaacacuc

SEQ ID NO: 617509 - RNA, 19 nt, Artificial Sequence
  Description of Artificial Sequence: Synthetic oligonucleotide
aguuugauagggcauccaa

SEQ ID NO: 617510 - RNA, 19 nt, Artificial Sequence
  Description of Artificial Sequence: Synthetic oligonucleotide
ucguucuacaucaucccaa

SEQ ID NO: 617511 - RNA, 19 nt, Artificial Sequence
  Description of Artificial Sequence: Synthetic oligonucleotide
aagugaaguuugaugcuag

SEQ ID NO: 617512 - RNA, 19 nt, Artificial Sequence
  Description of Artificial Sequence: Synthetic oligonucleotide
auccacuacagacuuuucu

SEQ ID NO: 617513 - RNA, 19 nt, Artificial Sequence
  Description of Artificial Sequence: Synthetic oligonucleotide
cugaagacggggcuuuucc

SEQ ID NO: 617514 - RNA, 19 nt, Artificial Sequence
  Description of Artificial Sequence: Synthetic oligonucleotide
auaaacgacacuagcgaug

SEQ ID NO: 617515 - RNA, 19 nt, Artificial Sequence
  Description of Artificial Sequence: Synthetic oligonucleotide
cugguugaguuugauauac

SEQ ID NO: 617516 - RNA, 19 nt, Artificial Sequence
  Description of Artificial Sequence: Synthetic oligonucleotide
gguuauggcugguagauuc

SEQ ID NO: 617517 - RNA, 19 nt, Artificial Sequence
  Description of Artificial Sequence: Synthetic oligonucleotide
auucuugcuuuacagcuaa

SEQ ID NO: 617518 - RNA, 19 nt, Artificial Sequence
  Description of Artificial Sequence: Synthetic oligonucleotide
ucuuuaaguugcucgccac

SEQ ID NO: 617519 - RNA, 19 nt, Artificial Sequence
  Description of Artificial Sequence: Synthetic oligonucleotide
uuugaaucgugaggaaaca

SEQ ID NO: 617520 - RNA, 19 nt, Artificial Sequence
  Description of Artificial Sequence: Synthetic oligonucleotide
gaugcuaguccauuuugaa

SEQ ID NO: 617521 - RNA, 19 nt, Artificial Sequence
  Description of Artificial Sequence: Synthetic oligonucleotide
aaagaaugccugagaugac

SEQ ID NO: 617522 - RNA, 19 nt, Artificial Sequence
  Description of Artificial Sequence: Synthetic oligonucleotide
cuuacucuucucaugaucu

SEQ ID NO: 617523 - RNA, 19 nt, Artificial Sequence
  Description of Artificial Sequence: Synthetic oligonucleotide
uauuguaagacugguucau

SEQ ID NO: 617524 - RNA, 19 nt, Artificial Sequence
  Description of Artificial Sequence: Synthetic oligonucleotide
auauucauacgcauccucu

SEQ ID NO: 617525 - RNA, 19 nt, Artificial Sequence
  Description of Artificial Sequence: Synthetic oligonucleotide
uggaaguuugauagggcau

SEQ ID NO: 617526 - RNA, 19 nt, Artificial Sequence
  Description of Artificial Sequence: Synthetic oligonucleotide
ggaaguauuguaagacugg

SEQ ID NO: 617527 - RNA, 19 nt, Artificial Sequence
  Description of Artificial Sequence: Synthetic oligonucleotide
gguuucacuaacugcauuc

SEQ ID NO: 617528 - RNA, 19 nt, Artificial Sequence
  Description of Artificial Sequence: Synthetic oligonucleotide
gacuuaaucuucugacguc

SEQ ID NO: 617529 - RNA, 19 nt, Artificial Sequence
  Description of Artificial Sequence: Synthetic oligonucleotide
guaaaggacuuccagagau

SEQ ID NO: 617530 - RNA, 19 nt, Artificial Sequence
  Description of Artificial Sequence: Synthetic oligonucleotide
uugacuuccuucagacaac

SEQ ID NO: 617531 - RNA, 19 nt, Artificial Sequence
  Description of Artificial Sequence: Synthetic oligonucleotide
gaaguuugauagggcaucc

SEQ ID NO: 617532 - RNA, 19 nt, Artificial Sequence
  Description of Artificial Sequence: Synthetic oligonucleotide
ucugucgacgggucacgcg

SEQ ID NO: 617533 - RNA, 19 nt, Artificial Sequence
  Description of Artificial Sequence: Synthetic oligonucleotide
uuggaucagguuugguuga

SEQ ID NO: 617534 - RNA, 19 nt, Artificial Sequence
  Description of Artificial Sequence: Synthetic oligonucleotide
cauccaauuguaggaagag

SEQ ID NO: 617535 - RNA, 19 nt, Artificial Sequence
  Description of Artificial Sequence: Synthetic oligonucleotide
caaguuucuguaaaggacu

SEQ ID NO: 617536 - RNA, 19 nt, Artificial Sequence
  Description of Artificial Sequence: Synthetic oligonucleotide
auuuugaaucgugaggaaa

SEQ ID NO: 617537 - RNA, 19 nt, Artificial Sequence
  Description of Artificial Sequence: Synthetic oligonucleotide
uguuagaaccuaagucauc

SEQ ID NO: 617538 - RNA, 19 nt, Artificial Sequence
  Description of Artificial Sequence: Synthetic oligonucleotide
gccugagaugacuuuaagg

SEQ ID NO: 617539 - RNA, 19 nt, Artificial Sequence
  Description of Artificial Sequence: Synthetic oligonucleotide
gcuaguccauuuugaaucg

SEQ ID NO: 617540 - RNA, 19 nt, Artificial Sequence
  Description of Artificial Sequence: Synthetic oligonucleotide
augaaguggaaguuugaua

SEQ ID NO: 617541 - RNA, 19 nt, Artificial Sequence
  Description of Artificial Sequence: Synthetic oligonucleotide
uucagauaguuugaagaau

SEQ ID NO: 617542 - RNA, 19 nt, Artificial Sequence
  Description of Artificial Sequence: Synthetic oligonucleotide
gguugaguuugauauacuc

SEQ ID NO: 617543 - RNA, 19 nt, Artificial Sequence
  Description of Artificial Sequence: Synthetic oligonucleotide
uuuuccuccguucccguuu

SEQ ID NO: 617544 - RNA, 19 nt, Artificial Sequence
  Description of Artificial Sequence: Synthetic oligonucleotide
ucuagauggagggugguuu

SEQ ID NO: 617545 - RNA, 19 nt, Artificial Sequence
  Description of Artificial Sequence: Synthetic oligonucleotide
cucucugccccacuuuagg

SEQ ID NO: 617546 - RNA, 19 nt, Artificial Sequence
  Description of Artificial Sequence: Synthetic oligonucleotide
ugguuugcaucuuggucug

SEQ ID NO: 617547 - RNA, 19 nt, Artificial Sequence
  Description of Artificial Sequence: Synthetic oligonucleotide
cucugccccacuuuaggag

SEQ ID NO: 617548 - RNA, 19 nt, Artificial Sequence
  Description of Artificial Sequence: Synthetic oligonucleotide
cuuuucguucauccuuuag

SEQ ID NO: 617549 - RNA, 19 nt, Artificial Sequence
  Description of Artificial Sequence: Synthetic oligonucleotide
guuauggcugguagauucg

SEQ ID NO: 617550 - RNA, 19 nt, Artificial Sequence
  Description of Artificial Sequence: Synthetic oligonucleotide
gguggcuuuauugacuucc

SEQ ID NO: 617551 - RNA, 19 nt, Artificial Sequence
  Description of Artificial Sequence: Synthetic oligonucleotide
agcuaagggacucgugucu

SEQ ID NO: 617552 - RNA, 19 nt, Artificial Sequence
  Description of Artificial Sequence: Synthetic oligonucleotide
aaguggagugucucuucca

SEQ ID NO: 617553 - RNA, 19 nt, Artificial Sequence
  Description of Artificial Sequence: Synthetic oligonucleotide
caauuguaggaagagagaa

SEQ ID NO: 617554 - RNA, 19 nt, Artificial Sequence
  Description of Artificial Sequence: Synthetic oligonucleotide
ucguauccucuguuuaaug

SEQ ID NO: 617555 - RNA, 19 nt, Artificial Sequence
  Description of Artificial Sequence: Synthetic oligonucleotide
ucucucugccccacuuuag

SEQ ID NO: 617556 - RNA, 19 nt, Artificial Sequence
  Description of Artificial Sequence: Synthetic oligonucleotide
acuuuaagggcuugucuuu

SEQ ID NO: 617557 - RNA, 19 nt, Artificial Sequence
  Description of Artificial Sequence: Synthetic oligonucleotide
aagggacucgugucuucag

SEQ ID NO: 617558 - RNA, 19 nt, Artificial Sequence
  Description of Artificial Sequence: Synthetic oligonucleotide
ucccguuucuugucuguag

SEQ ID NO: 617559 - RNA, 19 nt, Artificial Sequence
  Description of Artificial Sequence: Synthetic oligonucleotide
gaggaaacacucgggucgg

SEQ ID NO: 617560 - RNA, 19 nt, Artificial Sequence
  Description of Artificial Sequence: Synthetic oligonucleotide
auuuucuacgcuucuccuu

SEQ ID NO: 617561 - RNA, 19 nt, Artificial Sequence
  Description of Artificial Sequence: Synthetic oligonucleotide
ucucugccccacuuuagga

SEQ ID NO: 617562 - RNA, 19 nt, Artificial Sequence
  Description of Artificial Sequence: Synthetic oligonucleotide
uuuaagggcuugucuuuuc

SEQ ID NO: 617563 - RNA, 19 nt, Artificial Sequence
  Description of Artificial Sequence: Synthetic oligonucleotide
auacuccugcucauaaauc

SEQ ID NO: 617564 - RNA, 19 nt, Artificial Sequence
  Description of Artificial Sequence: Synthetic oligonucleotide
uagauucgauaccacuuua

SEQ ID NO: 617565 - RNA, 19 nt, Artificial Sequence
  Description of Artificial Sequence: Synthetic oligonucleotide
cuugucuguagcuguuuuc

SEQ ID NO: 617566 - RNA, 19 nt, Artificial Sequence
  Description of Artificial Sequence: Synthetic oligonucleotide
uugaaucgugaggaaacac

SEQ ID NO: 617567 - RNA, 19 nt, Artificial Sequence
  Description of Artificial Sequence: Synthetic oligonucleotide
aguugcucgccacccucac

SEQ ID NO: 617568 - RNA, 19 nt, Artificial Sequence
  Description of Artificial Sequence: Synthetic oligonucleotide
aaagcgaagguuacucuuu

SEQ ID NO: 617569 - RNA, 19 nt, Artificial Sequence
  Description of Artificial Sequence: Synthetic oligonucleotide
agcgaagguuacucuuuuc

SEQ ID NO: 617570 - RNA, 19 nt, Artificial Sequence
  Description of Artificial Sequence: Synthetic oligonucleotide
uacagcuaagggacucgug

SEQ ID NO: 617571 - RNA, 19 nt, Artificial Sequence
  Description of Artificial Sequence: Synthetic oligonucleotide
auucauacgcauccucuuu

SEQ ID NO: 617572 - RNA, 19 nt, Artificial Sequence
  Description of Artificial Sequence: Synthetic oligonucleotide
uacaggugccauucugaca

SEQ ID NO: 617573 - RNA, 19 nt, Artificial Sequence
  Description of Artificial Sequence: Synthetic oligonucleotide
uaaaggacuuccagagauu

SEQ ID NO: 617574 - RNA, 19 nt, Artificial Sequence
  Description of Artificial Sequence: Synthetic oligonucleotide
aacugcauucuggaaguau

SEQ ID NO: 617575 - RNA, 19 nt, Artificial Sequence
  Description of Artificial Sequence: Synthetic oligonucleotide
cuuuacagcuaagggacuc

SEQ ID NO: 617576 - RNA, 19 nt, Artificial Sequence
  Description of Artificial Sequence: Synthetic oligonucleotide
gauucgauaccacuuuaau

SEQ ID NO: 617577 - RNA, 19 nt, Artificial Sequence
  Description of Artificial Sequence: Synthetic oligonucleotide
acguccaaacagcccuccc

SEQ ID NO: 617578 - RNA, 19 nt, Artificial Sequence
  Description of Artificial Sequence: Synthetic oligonucleotide
uaagggacucgugucuuca

SEQ ID NO: 617579 - RNA, 19 nt, Artificial Sequence
  Description of Artificial Sequence: Synthetic oligonucleotide
cuguuuaaugauauccucu

SEQ ID NO: 617580 - RNA, 19 nt, Artificial Sequence
  Description of Artificial Sequence: Synthetic oligonucleotide
uucguucauccuuuagcaa

SEQ ID NO: 617581 - RNA, 19 nt, Artificial Sequence
  Description of Artificial Sequence: Synthetic oligonucleotide
ugaucucguauccucuguu

SEQ ID NO: 617582 - RNA, 19 nt, Artificial Sequence
  Description of Artificial Sequence: Synthetic oligonucleotide
uuauggcugguagauucga

SEQ ID NO: 617583 - RNA, 19 nt, Artificial Sequence
  Description of Artificial Sequence: Synthetic oligonucleotide
aguaggacagaaacuuaca

SEQ ID NO: 617584 - RNA, 19 nt, Artificial Sequence
  Description of Artificial Sequence: Synthetic oligonucleotide
ucggccauucucuaauauu

SEQ ID NO: 617585 - RNA, 19 nt, Artificial Sequence
  Description of Artificial Sequence: Synthetic oligonucleotide
gaagugaaguuugaugcua

SEQ ID NO: 617586 - RNA, 19 nt, Artificial Sequence
  Description of Artificial Sequence: Synthetic oligonucleotide
ugauuacaggugccauucu

SEQ ID NO: 617587 - RNA, 19 nt, Artificial Sequence
  Description of Artificial Sequence: Synthetic oligonucleotide
gacgggucacgcgaggugc

SEQ ID NO: 617588 - RNA, 19 nt, Artificial Sequence
  Description of Artificial Sequence: Synthetic oligonucleotide
cuuuucaagcaauuuucua

SEQ ID NO: 617589 - RNA, 19 nt, Artificial Sequence
  Description of Artificial Sequence: Synthetic oligonucleotide
gaaguauuguaagacuggu

SEQ ID NO: 617590 - RNA, 19 nt, Artificial Sequence
  Description of Artificial Sequence: Synthetic oligonucleotide
aguccauuuugaaucguga

SEQ ID NO: 617591 - RNA, 19 nt, Artificial Sequence
  Description of Artificial Sequence: Synthetic oligonucleotide
aaacgacacuagcgauguc

SEQ ID NO: 617592 - RNA, 19 nt, Artificial Sequence
  Description of Artificial Sequence: Synthetic oligonucleotide
caggcuguuuucuggccgc

SEQ ID NO: 617593 - RNA, 19 nt, Artificial Sequence
  Description of Artificial Sequence: Synthetic oligonucleotide
agacggggcuuuuccuugg

SEQ ID NO: 617594 - RNA, 19 nt, Artificial Sequence
  Description of Artificial Sequence: Synthetic oligonucleotide
cauccucuggcaaagcgaa

SEQ ID NO: 617595 - RNA, 19 nt, Artificial Sequence
  Description of Artificial Sequence: Synthetic oligonucleotide
ugccaaaucugcucaucau

SEQ ID NO: 617596 - RNA, 19 nt, Artificial Sequence
  Description of Artificial Sequence: Synthetic oligonucleotide
ugucgacgggucacgcgag

SEQ ID NO: 617597 - RNA, 19 nt, Artificial Sequence
  Description of Artificial Sequence: Synthetic oligonucleotide
uccucuuuguuagaaccua

SEQ ID NO: 617598 - RNA, 19 nt, Artificial Sequence
  Description of Artificial Sequence: Synthetic oligonucleotide
uuacagcuaagggacucgu

SEQ ID NO: 617599 - RNA, 19 nt, Artificial Sequence
  Description of Artificial Sequence: Synthetic oligonucleotide
ccauuuugaaucgugagga

SEQ ID NO: 617600 - RNA, 19 nt, Artificial Sequence
  Description of Artificial Sequence: Synthetic oligonucleotide
auccaauuguaggaagaga

SEQ ID NO: 617601 - RNA, 19 nt, Artificial Sequence
  Description of Artificial Sequence: Synthetic oligonucleotide
cugacguccaaacagcccu

SEQ ID NO: 617602 - RNA, 19 nt, Artificial Sequence
  Description of Artificial Sequence: Synthetic oligonucleotide
uuacucuuuucgagccuuc

SEQ ID NO: 617603 - RNA, 19 nt, Artificial Sequence
  Description of Artificial Sequence: Synthetic oligonucleotide
cugguagauucgauaccac

SEQ ID NO: 617604 - RNA, 19 nt, Artificial Sequence
  Description of Artificial Sequence: Synthetic oligonucleotide
uuacuugaucuugcaauuu

SEQ ID NO: 617605 - RNA, 19 nt, Artificial Sequence
  Description of Artificial Sequence: Synthetic oligonucleotide
uucuggccgcuucugugcu

SEQ ID NO: 617606 - RNA, 19 nt, Artificial Sequence
  Description of Artificial Sequence: Synthetic oligonucleotide
ggaaguuugauagggcauc

SEQ ID NO: 617607 - RNA, 19 nt, Artificial Sequence
  Description of Artificial Sequence: Synthetic oligonucleotide
cguucauccuuuagcaagg

SEQ ID NO: 617608 - RNA, 19 nt, Artificial Sequence
  Description of Artificial Sequence: Synthetic oligonucleotide
uccucuguuuaaugauauc

SEQ ID NO: 617609 - RNA, 19 nt, Artificial Sequence
  Description of Artificial Sequence: Synthetic oligonucleotide
uuccuuggaucagguuugg

SEQ ID NO: 617610 - RNA, 19 nt, Artificial Sequence
  Description of Artificial Sequence: Synthetic oligonucleotide
guauccucuguuuaaugau

SEQ ID NO: 617611 - RNA, 19 nt, Artificial Sequence
  Description of Artificial Sequence: Synthetic oligonucleotide
uuuaucuuuccugguuguu

SEQ ID NO: 617612 - RNA, 19 nt, Artificial Sequence
  Description of Artificial Sequence: Synthetic oligonucleotide
cugucgacgggucacgcga

SEQ ID NO: 617613 - RNA, 19 nt, Artificial Sequence
  Description of Artificial Sequence: Synthetic oligonucleotide
uguugccaaaucugcucau

SEQ ID NO: 617614 - RNA, 19 nt, Artificial Sequence
  Description of Artificial Sequence: Synthetic oligonucleotide
caaacagcccucccucauc

SEQ ID NO: 617615 - RNA, 19 nt, Artificial Sequence
  Description of Artificial Sequence: Synthetic oligonucleotide
acacuagcgaugucaucau

SEQ ID NO: 617616 - RNA, 19 nt, Artificial Sequence
  Description of Artificial Sequence: Synthetic oligonucleotide
aggacacuuugccuguuuu

SEQ ID NO: 617617 - RNA, 19 nt, Artificial Sequence
  Description of Artificial Sequence: Synthetic oligonucleotide
agauucggccauucucuaa

SEQ ID NO: 617618 - RNA, 19 nt, Artificial Sequence
  Description of Artificial Sequence: Synthetic oligonucleotide
aaagaggauuuaacuucau

SEQ ID NO: 617619 - RNA, 19 nt, Artificial Sequence
  Description of Artificial Sequence: Synthetic oligonucleotide
agauucgauaccacuuuaa

SEQ ID NO: 617620 - RNA, 19 nt, Artificial Sequence
  Description of Artificial Sequence: Synthetic oligonucleotide
uuugcugguugaguuugau

SEQ ID NO: 617621 - RNA, 19 nt, Artificial Sequence
  Description of Artificial Sequence: Synthetic oligonucleotide
cuggaaguauuguaagacu

SEQ ID NO: 617622 - RNA, 19 nt, Artificial Sequence
  Description of Artificial Sequence: Synthetic oligonucleotide
aucuaaugucaggcgcuuc

SEQ ID NO: 617623 - RNA, 19 nt, Artificial Sequence
  Description of Artificial Sequence: Synthetic oligonucleotide
gauucuugcuuuacagcua

SEQ ID NO: 617624 - RNA, 19 nt, Artificial Sequence
  Description of Artificial Sequence: Synthetic oligonucleotide
aagccugaucucguauccu

SEQ ID NO: 617625 - RNA, 19 nt, Artificial Sequence
  Description of Artificial Sequence: Synthetic oligonucleotide
guagauucgauaccacuuu

SEQ ID NO: 617626 - RNA, 19 nt, Artificial Sequence
  Description of Artificial Sequence: Synthetic oligonucleotide
ggauuuaacuucaucagau

SEQ ID NO: 617627 - RNA, 19 nt, Artificial Sequence
  Description of Artificial Sequence: Synthetic oligonucleotide
ccaugguuauggcugguag

SEQ ID NO: 617628 - RNA, 19 nt, Artificial Sequence
  Description of Artificial Sequence: Synthetic oligonucleotide
acuuacagauuuguacauu

SEQ ID NO: 617629 - RNA, 19 nt, Artificial Sequence
  Description of Artificial Sequence: Synthetic oligonucleotide
ugacguccaaacagcccuc

SEQ ID NO: 617630 - RNA, 19 nt, Artificial Sequence
  Description of Artificial Sequence: Synthetic oligonucleotide
aaguugcucgccacccuca

SEQ ID NO: 617631 - RNA, 19 nt, Artificial Sequence
  Description of Artificial Sequence: Synthetic oligonucleotide
uccgaggcauccucuucac

SEQ ID NO: 617632 - RNA, 19 nt, Artificial Sequence
  Description of Artificial Sequence: Synthetic oligonucleotide
ucuacaugcucuggauuuu

SEQ ID NO: 617633 - RNA, 19 nt, Artificial Sequence
  Description of Artificial Sequence: Synthetic oligonucleotide
gacguccaaacagcccucc

SEQ ID NO: 617634 - RNA, 19 nt, Artificial Sequence
  Description of Artificial Sequence: Synthetic oligonucleotide
acguuccagggucugucga

SEQ ID NO: 617635 - RNA, 19 nt, Artificial Sequence
  Description of Artificial Sequence: Synthetic oligonucleotide
ucacgcgaggugccauagc

SEQ ID NO: 617636 - RNA, 19 nt, Artificial Sequence
  Description of Artificial Sequence: Synthetic oligonucleotide
cauaaacgacacuagcgau

SEQ ID NO: 617637 - RNA, 19 nt, Artificial Sequence
  Description of Artificial Sequence: Synthetic oligonucleotide
guuugguuugcaucuuggu

SEQ ID NO: 617638 - RNA, 19 nt, Artificial Sequence
  Description of Artificial Sequence: Synthetic oligonucleotide
cucaaugguuucacuaacu

SEQ ID NO: 617639 - RNA, 19 nt, Artificial Sequence
  Description of Artificial Sequence: Synthetic oligonucleotide
caacguuccagggucuguc

SEQ ID NO: 617640 - RNA, 19 nt, Artificial Sequence
  Description of Artificial Sequence: Synthetic oligonucleotide
acucuucucaugaucuaau

SEQ ID NO: 617641 - RNA, 19 nt, Artificial Sequence
  Description of Artificial Sequence: Synthetic oligonucleotide
ggcugguagauucgauacc

SEQ ID NO: 617642 - RNA, 19 nt, Artificial Sequence
  Description of Artificial Sequence: Synthetic oligonucleotide
caaaucugcucaucaucaa

SEQ ID NO: 617643 - RNA, 19 nt, Artificial Sequence
  Description of Artificial Sequence: Synthetic oligonucleotide
agauggagggugguuuccu

SEQ ID NO: 617644 - RNA, 19 nt, Artificial Sequence
  Description of Artificial Sequence: Synthetic oligonucleotide
gucaaaguggagugucucu

SEQ ID NO: 617645 - RNA, 19 nt, Artificial Sequence
  Description of Artificial Sequence: Synthetic oligonucleotide
guugccaaaucugcucauc

SEQ ID NO: 617646 - RNA, 19 nt, Artificial Sequence
  Description of Artificial Sequence: Synthetic oligonucleotide
ccugcucauaaaucucagc

SEQ ID NO: 617647 - RNA, 19 nt, Artificial Sequence
  Description of Artificial Sequence: Synthetic oligonucleotide
gcaauucuagcuguugcca

SEQ ID NO: 617648 - RNA, 19 nt, Artificial Sequence
  Description of Artificial Sequence: Synthetic oligonucleotide
gucgacgggucacgcgagg

SEQ ID NO: 617649 - RNA, 19 nt, Artificial Sequence
  Description of Artificial Sequence: Synthetic oligonucleotide
cccguuucuugucuguagc

SEQ ID NO: 617650 - RNA, 19 nt, Artificial Sequence
  Description of Artificial Sequence: Synthetic oligonucleotide
gcgguuuggggaugaagug

SEQ ID NO: 617651 - RNA, 19 nt, Artificial Sequence
  Description of Artificial Sequence: Synthetic oligonucleotide
ccucaaugguuucacuaac

SEQ ID NO: 617652 - RNA, 19 nt, Artificial Sequence
  Description of Artificial Sequence: Synthetic oligonucleotide
aacacucgggucgguuggu

SEQ ID NO: 617653 - RNA, 19 nt, Artificial Sequence
  Description of Artificial Sequence: Synthetic oligonucleotide
ggacuucccaggcugaucu

SEQ ID NO: 617654 - RNA, 19 nt, Artificial Sequence
  Description of Artificial Sequence: Synthetic oligonucleotide
gucacgcgaggugccauag

SEQ ID NO: 617655 - RNA, 19 nt, Artificial Sequence
  Description of Artificial Sequence: Synthetic oligonucleotide
cacucacuggggcuacuuc

SEQ ID NO: 617656 - RNA, 19 nt, Artificial Sequence
  Description of Artificial Sequence: Synthetic oligonucleotide
gaucucguauccucuguuu

SEQ ID NO: 617657 - RNA, 19 nt, Artificial Sequence
  Description of Artificial Sequence: Synthetic oligonucleotide
aacaggcgguuuggggaug

SEQ ID NO: 617658 - RNA, 19 nt, Artificial Sequence
  Description of Artificial Sequence: Synthetic oligonucleotide
gaacaggcgguuuggggau

SEQ ID NO: 617659 - RNA, 19 nt, Artificial Sequence
  Description of Artificial Sequence: Synthetic oligonucleotide
agguuugguugaacuucgg

SEQ ID NO: 617660 - RNA, 19 nt, Artificial Sequence
  Description of Artificial Sequence: Synthetic oligonucleotide
aggcgguuuggggaugaag

SEQ ID NO: 617661 - RNA, 19 nt, Artificial Sequence
  Description of Artificial Sequence: Synthetic oligonucleotide
acgggucacgcgaggugcc

SEQ ID NO: 617662 - RNA, 19 nt, Artificial Sequence
  Description of Artificial Sequence: Synthetic oligonucleotide
acgacacuagcgaugucau

SEQ ID NO: 617663 - RNA, 19 nt, Artificial Sequence
  Description of Artificial Sequence: Synthetic oligonucleotide
ucgacgggucacgcgaggu

SEQ ID NO: 617664 - RNA, 19 nt, Artificial Sequence
  Description of Artificial Sequence: Synthetic oligonucleotide
acaacguuccagggucugu

SEQ ID NO: 617665 - RNA, 19 nt, Artificial Sequence
  Description of Artificial Sequence: Synthetic oligonucleotide
agggucugucgacggguca

SEQ ID NO: 617666 - RNA, 19 nt, Artificial Sequence
  Description of Artificial Sequence: Synthetic oligonucleotide
guuugaugcuaguccauuu

SEQ ID NO: 617667 - RNA, 19 nt, Artificial Sequence
  Description of Artificial Sequence: Synthetic oligonucleotide
gccauucucuaauauuuua

SEQ ID NO: 617668 - RNA, 19 nt, Artificial Sequence
  Description of Artificial Sequence: Synthetic oligonucleotide
guuugauagggcauccaau

SEQ ID NO: 617669 - RNA, 19 nt, Artificial Sequence
  Description of Artificial Sequence: Synthetic oligonucleotide
uggaucagguuugguugaa

SEQ ID NO: 617670 - RNA, 19 nt, Artificial Sequence
  Description of Artificial Sequence: Synthetic oligonucleotide
cacgcgaggugccauagcu

SEQ ID NO: 617671 - RNA, 19 nt, Artificial Sequence
  Description of Artificial Sequence: Synthetic oligonucleotide
gcauccaauuguaggaaga

SEQ ID NO: 617672 - RNA, 19 nt, Artificial Sequence
  Description of Artificial Sequence: Synthetic oligonucleotide
cacuagcgaugucaucauc

SEQ ID NO: 617673 - RNA, 19 nt, Artificial Sequence
  Description of Artificial Sequence: Synthetic oligonucleotide
ugacacucacuggggcuac

SEQ ID NO: 617674 - RNA, 19 nt, Artificial Sequence
  Description of Artificial Sequence: Synthetic oligonucleotide
guaggaagagagaauccau

SEQ ID NO: 617675 - RNA, 19 nt, Artificial Sequence
  Description of Artificial Sequence: Synthetic oligonucleotide
gguagauucgauaccacuu

SEQ ID NO: 617676 - RNA, 19 nt, Artificial Sequence
  Description of Artificial Sequence: Synthetic oligonucleotide
aacagcccucccucaucuu

SEQ ID NO: 617677 - RNA, 19 nt, Artificial Sequence
  Description of Artificial Sequence: Synthetic oligonucleotide
cacuaacugcauucuggaa

SEQ ID NO: 617678 - RNA, 19 nt, Artificial Sequence
  Description of Artificial Sequence: Synthetic oligonucleotide
ccaguuugcuaauaucaaa

SEQ ID NO: 617679 - RNA, 19 nt, Artificial Sequence
  Description of Artificial Sequence: Synthetic oligonucleotide
ucuucaucaucgggucuuu

SEQ ID NO: 617680 - RNA, 19 nt, Artificial Sequence
  Description of Artificial Sequence: Synthetic oligonucleotide
guuugcaucuuggucugcu

SEQ ID NO: 617681 - RNA, 19 nt, Artificial Sequence
  Description of Artificial Sequence: Synthetic oligonucleotide
uucccguuucuugucugua

SEQ ID NO: 617682 - RNA, 19 nt, Artificial Sequence
  Description of Artificial Sequence: Synthetic oligonucleotide
gguuugguugaacuucggu

SEQ ID NO: 617683 - RNA, 19 nt, Artificial Sequence
  Description of Artificial Sequence: Synthetic oligonucleotide
uucggucucucugccccac

SEQ ID NO: 617684 - RNA, 19 nt, Artificial Sequence
  Description of Artificial Sequence: Synthetic oligonucleotide
ggcgguuuggggaugaagu

SEQ ID NO: 617685 - RNA, 19 nt, Artificial Sequence
  Description of Artificial Sequence: Synthetic oligonucleotide
augccugagaugacuuuaa

SEQ ID NO: 617686 - RNA, 19 nt, Artificial Sequence
  Description of Artificial Sequence: Synthetic oligonucleotide
uccuuggaucagguuuggu

SEQ ID NO: 617687 - RNA, 19 nt, Artificial Sequence
  Description of Artificial Sequence: Synthetic oligonucleotide
guuacucuuuucgagccuu

SEQ ID NO: 617688 - RNA, 19 nt, Artificial Sequence
  Description of Artificial Sequence: Synthetic oligonucleotide
ccuguuuuagucaacuguu

SEQ ID NO: 617689 - RNA, 19 nt, Artificial Sequence
  Description of Artificial Sequence: Synthetic oligonucleotide
ugguuauggcugguagauu

SEQ ID NO: 617690 - RNA, 19 nt, Artificial Sequence
  Description of Artificial Sequence: Synthetic oligonucleotide
gacggggcuuuuccuugga

SEQ ID NO: 617691 - RNA, 19 nt, Artificial Sequence
  Description of Artificial Sequence: Synthetic oligonucleotide
cuuccagagauucggccau

SEQ ID NO: 617692 - RNA, 19 nt, Artificial Sequence
  Description of Artificial Sequence: Synthetic oligonucleotide
cugccccacuuuaggagca

SEQ ID NO: 617693 - RNA, 19 nt, Artificial Sequence
  Description of Artificial Sequence: Synthetic oligonucleotide
cccacuuuaggagcaucag

SEQ ID NO: 617694 - RNA, 19 nt, Artificial Sequence
  Description of Artificial Sequence: Synthetic oligonucleotide
ggacuuccagagauucggc

SEQ ID NO: 617695 - RNA, 19 nt, Artificial Sequence
  Description of Artificial Sequence: Synthetic oligonucleotide
agacaacguuccagggucu

SEQ ID NO: 617696 - RNA, 19 nt, Artificial Sequence
  Description of Artificial Sequence: Synthetic oligonucleotide
uugccucauugaucugcau

SEQ ID NO: 617697 - RNA, 19 nt, Artificial Sequence
  Description of Artificial Sequence: Synthetic oligonucleotide
gguuuccucugugauuaca

SEQ ID NO: 617698 - RNA, 19 nt, Artificial Sequence
  Description of Artificial Sequence: Synthetic oligonucleotide
acggggcuuuuccuuggau

SEQ ID NO: 617699 - RNA, 19 nt, Artificial Sequence
  Description of Artificial Sequence: Synthetic oligonucleotide
cgaagguuacucuuuucga

SEQ ID NO: 617700 - RNA, 19 nt, Artificial Sequence
  Description of Artificial Sequence: Synthetic oligonucleotide
ccauucugacagcaugguc

SEQ ID NO: 617701 - RNA, 19 nt, Artificial Sequence
  Description of Artificial Sequence: Synthetic oligonucleotide
acaggcgguuuggggauga

SEQ ID NO: 617702 - RNA, 19 nt, Artificial Sequence
  Description of Artificial Sequence: Synthetic oligonucleotide
gucugucgacgggucacgc

SEQ ID NO: 617703 - RNA, 19 nt, Artificial Sequence
  Description of Artificial Sequence: Synthetic oligonucleotide
ccauucucuaauauuuuau

SEQ ID NO: 617704 - RNA, 19 nt, Artificial Sequence
  Description of Artificial Sequence: Synthetic oligonucleotide
cacacuccugaucuucacu

SEQ ID NO: 617705 - RNA, 19 nt, Artificial Sequence
  Description of Artificial Sequence: Synthetic oligonucleotide
gaucuaaugucaggcgcuu

SEQ ID NO: 617706 - RNA, 19 nt, Artificial Sequence
  Description of Artificial Sequence: Synthetic oligonucleotide
ucgccacccucacuuucuu

SEQ ID NO: 617707 - RNA, 19 nt, Artificial Sequence
  Description of Artificial Sequence: Synthetic oligonucleotide
cacuacagacuuuucucuu

SEQ ID NO: 617708 - RNA, 19 nt, Artificial Sequence
  Description of Artificial Sequence: Synthetic oligonucleotide
cugaucucguauccucugu

SEQ ID NO: 617709 - RNA, 19 nt, Artificial Sequence
  Description of Artificial Sequence: Synthetic oligonucleotide
uuccuccguucccguuucu

SEQ ID NO: 617710 - RNA, 19 nt, Artificial Sequence
  Description of Artificial Sequence: Synthetic oligonucleotide
gggucugucgacgggucac

SEQ ID NO: 617711 - RNA, 19 nt, Artificial Sequence
  Description of Artificial Sequence: Synthetic oligonucleotide
ggaucagguuugguugaac

SEQ ID NO: 617712 - RNA, 19 nt, Artificial Sequence
  Description of Artificial Sequence: Synthetic oligonucleotide
ccccacuuuaggagcauca

SEQ ID NO: 617713 - RNA, 19 nt, Artificial Sequence
  Description of Artificial Sequence: Synthetic oligonucleotide
ugcucgccacccucacuuu

SEQ ID NO: 617714 - RNA, 19 nt, Artificial Sequence
  Description of Artificial Sequence: Synthetic oligonucleotide
gcaaggacacuuugccugu

SEQ ID NO: 617715 - RNA, 19 nt, Artificial Sequence
  Description of Artificial Sequence: Synthetic oligonucleotide
ccacuacagacuuuucucu

SEQ ID NO: 617716 - RNA, 19 nt, Artificial Sequence
  Description of Artificial Sequence: Synthetic oligonucleotide
ccuuggaucagguuugguu

SEQ ID NO: 617717 - RNA, 19 nt, Artificial Sequence
  Description of Artificial Sequence: Synthetic oligonucleotide
gguuacucuuuucgagccu

SEQ ID NO: 617718 - RNA, 19 nt, Artificial Sequence
  Description of Artificial Sequence: Synthetic oligonucleotide
cucguauccucuguuuaau

SEQ ID NO: 617719 - RNA, 19 nt, Artificial Sequence
  Description of Artificial Sequence: Synthetic oligonucleotide
guuuggggaugaaguggaa

SEQ ID NO: 617720 - RNA, 19 nt, Artificial Sequence
  Description of Artificial Sequence: Synthetic oligonucleotide
ggcgcuucuuauauucaua

SEQ ID NO: 617721 - RNA, 19 nt, Artificial Sequence
  Description of Artificial Sequence: Synthetic oligonucleotide
aggaaacacucgggucggu

SEQ ID NO: 617722 - RNA, 19 nt, Artificial Sequence
  Description of Artificial Sequence: Synthetic oligonucleotide
gcucgccacccucacuuuc

SEQ ID NO: 617723 - RNA, 19 nt, Artificial Sequence
  Description of Artificial Sequence: Synthetic oligonucleotide
cuaguccauuuugaaucgu

SEQ ID NO: 617724 - RNA, 19 nt, Artificial Sequence
  Description of Artificial Sequence: Synthetic oligonucleotide
cguucccguuucuugucug

SEQ ID NO: 617725 - RNA, 19 nt, Artificial Sequence
  Description of Artificial Sequence: Synthetic oligonucleotide
gguuugcaucuuggucugc

SEQ ID NO: 617726 - RNA, 19 nt, Artificial Sequence
  Description of Artificial Sequence: Synthetic oligonucleotide
ucgggucgguugguggcuu

SEQ ID NO: 617727 - RNA, 19 nt, Artificial Sequence
  Description of Artificial Sequence: Synthetic oligonucleotide
cggccauucucuaauauuu

SEQ ID NO: 617728 - RNA, 19 nt, Artificial Sequence
  Description of Artificial Sequence: Synthetic oligonucleotide
gcugaucuggguucuucuu

SEQ ID NO: 617729 - RNA, 19 nt, Artificial Sequence
  Description of Artificial Sequence: Synthetic oligonucleotide
ggucacgcgaggugccaua

SEQ ID NO: 617730 - RNA, 19 nt, Artificial Sequence
  Description of Artificial Sequence: Synthetic oligonucleotide
gucaggcgcuucuuauauu

SEQ ID NO: 617731 - RNA, 19 nt, Artificial Sequence
  Description of Artificial Sequence: Synthetic oligonucleotide
cucuggcaaagcgaagguu

SEQ ID NO: 617732 - RNA, 19 nt, Artificial Sequence
  Description of Artificial Sequence: Synthetic oligonucleotide
cgacgggucacgcgaggug

SEQ ID NO: 617733 - RNA, 19 nt, Artificial Sequence
  Description of Artificial Sequence: Synthetic oligonucleotide
gacacucacuggggcuacu

SEQ ID NO: 617734 - RNA, 19 nt, Artificial Sequence
  Description of Artificial Sequence: Synthetic oligonucleotide
gcuuuacagcuaagggacu

SEQ ID NO: 617735 - RNA, 19 nt, Artificial Sequence
  Description of Artificial Sequence: Synthetic oligonucleotide
cgacacuagcgaugucauc

SEQ ID NO: 617736 - RNA, 19 nt, Artificial Sequence
  Description of Artificial Sequence: Synthetic oligonucleotide
gccugaucucguauccucu

SEQ ID NO: 617737 - RNA, 19 nt, Artificial Sequence
  Description of Artificial Sequence: Synthetic oligonucleotide
ggaaacacucgggucgguu

SEQ ID NO: 617738 - RNA, 19 nt, Artificial Sequence
  Description of Artificial Sequence: Synthetic oligonucleotide
gcuaagggacucgugucuu

SEQ ID NO: 617739 - RNA, 19 nt, Artificial Sequence
  Description of Artificial Sequence: Synthetic oligonucleotide
cugcaucagucuccaguuu

SEQ ID NO: 617740 - RNA, 19 nt, Artificial Sequence
  Description of Artificial Sequence: Synthetic oligonucleotide
ccucuggcaaagcgaaggu

SEQ ID NO: 617741 - RNA, 19 nt, Artificial Sequence
  Description of Artificial Sequence: Synthetic oligonucleotide
cguccaaacagcccucccu

SEQ ID NO: 617742 - RNA, 19 nt, Artificial Sequence
  Description of Artificial Sequence: Synthetic oligonucleotide
ccgaggcauccucuucaca

SEQ ID NO: 617743 - RNA, 19 nt, Artificial Sequence
  Description of Artificial Sequence: Synthetic oligonucleotide
ccaggagggcugcaucacu

SEQ ID NO: 617744 - RNA, 19 nt, Artificial Sequence
  Description of Artificial Sequence: Synthetic oligonucleotide
caggcgguuuggggaugaa

SEQ ID NO: 617745 - RNA, 19 nt, Artificial Sequence
  Description of Artificial Sequence: Synthetic oligonucleotide
gggucacgcgaggugccau

SEQ ID NO: 617746 - RNA, 19 nt, Artificial Sequence
  Description of Artificial Sequence: Synthetic oligonucleotide
cgggucacgcgaggugcca

SEQ ID NO: 617747 - RNA, 19 nt, Artificial Sequence
  Description of Artificial Sequence: Synthetic oligonucleotide
cgggucgguugguggcuuu

SEQ ID NO: 617748 - RNA, 19 nt, Artificial Sequence
  Description of Artificial Sequence: Synthetic oligonucleotide
uuuauuauauccauugugg

SEQ ID NO: 617749 - RNA, 19 nt, Artificial Sequence
  Description of Artificial Sequence: Synthetic oligonucleotide
uuuaagauccauuugacgc

SEQ ID NO: 617750 - RNA, 19 nt, Artificial Sequence
  Description of Artificial Sequence: Synthetic oligonucleotide
auuuauagaacucuuagca

SEQ ID NO: 617751 - RNA, 19 nt, Artificial Sequence
  Description of Artificial Sequence: Synthetic oligonucleotide
uuugaaucgaaguugaucu

SEQ ID NO: 617752 - RNA, 19 nt, Artificial Sequence
  Description of Artificial Sequence: Synthetic oligonucleotide
uuugcauccauacauaaca

SEQ ID NO: 617753 - RNA, 19 nt, Artificial Sequence
  Description of Artificial Sequence: Synthetic oligonucleotide
acagaaaagagauauacug

SEQ ID NO: 617754 - RNA, 19 nt, Artificial Sequence
  Description of Artificial Sequence: Synthetic oligonucleotide
uuaucauuguccuauaaug

SEQ ID NO: 617755 - RNA, 19 nt, Artificial Sequence
  Description of Artificial Sequence: Synthetic oligonucleotide
aauuuugcccaccauguuc

SEQ ID NO: 617756 - RNA, 19 nt, Artificial Sequence
  Description of Artificial Sequence: Synthetic oligonucleotide
uccuuuugcaauaauauca

SEQ ID NO: 617757 - RNA, 19 nt, Artificial Sequence
  Description of Artificial Sequence: Synthetic oligonucleotide
agauuauaaagcuugacca

SEQ ID NO: 617758 - RNA, 19 nt, Artificial Sequence
  Description of Artificial Sequence: Synthetic oligonucleotide
aaaauguugaccagaauag

SEQ ID NO: 617759 - RNA, 19 nt, Artificial Sequence
  Description of Artificial Sequence: Synthetic oligonucleotide
ugaaauacuuagaagauau

SEQ ID NO: 617760 - RNA, 19 nt, Artificial Sequence
  Description of Artificial Sequence: Synthetic oligonucleotide
auuaauaugucaggcagcc

SEQ ID NO: 617761 - RNA, 19 nt, Artificial Sequence
  Description of Artificial Sequence: Synthetic oligonucleotide
acagaucaaaacuugauug

SEQ ID NO: 617762 - RNA, 19 nt, Artificial Sequence
  Description of Artificial Sequence: Synthetic oligonucleotide
aacucguguaccuuguaac

SEQ ID NO: 617763 - RNA, 19 nt, Artificial Sequence
  Description of Artificial Sequence: Synthetic oligonucleotide
uauaaugauuaaaaugaug

SEQ ID NO: 617764 - RNA, 19 nt, Artificial Sequence
  Description of Artificial Sequence: Synthetic oligonucleotide
uuuaucugaagugauaagc

SEQ ID NO: 617765 - RNA, 19 nt, Artificial Sequence
  Description of Artificial Sequence: Synthetic oligonucleotide
aauguugaccagaauagac

SEQ ID NO: 617766 - RNA, 19 nt, Artificial Sequence
  Description of Artificial Sequence: Synthetic oligonucleotide
uguccuauaaugauuaaaa

SEQ ID NO: 617767 - RNA, 19 nt, Artificial Sequence
  Description of Artificial Sequence: Synthetic oligonucleotide
aguuacuucucugaaauac

SEQ ID NO: 617768 - RNA, 19 nt, Artificial Sequence
  Description of Artificial Sequence: Synthetic oligonucleotide
acauuuaagauccauuuga

SEQ ID NO: 617769 - RNA, 19 nt, Artificial Sequence
  Description of Artificial Sequence: Synthetic oligonucleotide
uaauaugucaggcagccac

SEQ ID NO: 617770 - RNA, 19 nt, Artificial Sequence
  Description of Artificial Sequence: Synthetic oligonucleotide
acuuagaagauauucugag

SEQ ID NO: 617771 - RNA, 19 nt, Artificial Sequence
  Description of Artificial Sequence: Synthetic oligonucleotide
aaagaauuacagcacauua

SEQ ID NO: 617772 - RNA, 19 nt, Artificial Sequence
  Description of Artificial Sequence: Synthetic oligonucleotide
auaggcugaauuugaaucg

SEQ ID NO: 617773 - RNA, 19 nt, Artificial Sequence
  Description of Artificial Sequence: Synthetic oligonucleotide
aaaguaauauucucuccug

SEQ ID NO: 617774 - RNA, 19 nt, Artificial Sequence
  Description of Artificial Sequence: Synthetic oligonucleotide
augauugauacauuuaaga

SEQ ID NO: 617775 - RNA, 19 nt, Artificial Sequence
  Description of Artificial Sequence: Synthetic oligonucleotide
ugagagauuccuuuguugc

SEQ ID NO: 617776 - RNA, 19 nt, Artificial Sequence
  Description of Artificial Sequence: Synthetic oligonucleotide
cauacucaaguauucaugc

SEQ ID NO: 617777 - RNA, 19 nt, Artificial Sequence
  Description of Artificial Sequence: Synthetic oligonucleotide
uauuuauagaacucuuagc

SEQ ID NO: 617778 - RNA, 19 nt, Artificial Sequence
  Description of Artificial Sequence: Synthetic oligonucleotide
cuugugguuaucauugucc

SEQ ID NO: 617779 - RNA, 19 nt, Artificial Sequence
  Description of Artificial Sequence: Synthetic oligonucleotide
uuauuaacuuaaauuuggc

SEQ ID NO: 617780 - RNA, 19 nt, Artificial Sequence
  Description of Artificial Sequence: Synthetic oligonucleotide
uaucacaucucauuauucc

SEQ ID NO: 617781 - RNA, 19 nt, Artificial Sequence
  Description of Artificial Sequence: Synthetic oligonucleotide
uuacagcacauuaauaugu

SEQ ID NO: 617782 - RNA, 19 nt, Artificial Sequence
  Description of Artificial Sequence: Synthetic oligonucleotide
uguuuuaacacaccacugu

SEQ ID NO: 617783 - RNA, 19 nt, Artificial Sequence
  Description of Artificial Sequence: Synthetic oligonucleotide
aaucgaaguugaucuuugc

SEQ ID NO: 617784 - RNA, 19 nt, Artificial Sequence
  Description of Artificial Sequence: Synthetic oligonucleotide
acaagcgagaauuuuaagu

SEQ ID NO: 617785 - RNA, 19 nt, Artificial Sequence
  Description of Artificial Sequence: Synthetic oligonucleotide
ugauugauacauuuaagau

SEQ ID NO: 617786 - RNA, 19 nt, Artificial Sequence
  Description of Artificial Sequence: Synthetic oligonucleotide
uguugaccagaauagacug

SEQ ID NO: 617787 - RNA, 19 nt, Artificial Sequence
  Description of Artificial Sequence: Synthetic oligonucleotide
ugcaauaauuccauacuca

SEQ ID NO: 617788 - RNA, 19 nt, Artificial Sequence
  Description of Artificial Sequence: Synthetic oligonucleotide
ccuauaaugauuaaaauga

SEQ ID NO: 617789 - RNA, 19 nt, Artificial Sequence
  Description of Artificial Sequence: Synthetic oligonucleotide
uauagaacucuuagcaaug

SEQ ID NO: 617790 - RNA, 19 nt, Artificial Sequence
  Description of Artificial Sequence: Synthetic oligonucleotide
auaacuauuccuuuugcaa

SEQ ID NO: 617791 - RNA, 19 nt, Artificial Sequence
  Description of Artificial Sequence: Synthetic oligonucleotide
caagcgagaauuuuaaguc

SEQ ID NO: 617792 - RNA, 19 nt, Artificial Sequence
  Description of Artificial Sequence: Synthetic oligonucleotide
agcacauuaauaugucagg

SEQ ID NO: 617793 - RNA, 19 nt, Artificial Sequence
  Description of Artificial Sequence: Synthetic oligonucleotide
uguaguuaauaucugcauc

SEQ ID NO: 617794 - RNA, 19 nt, Artificial Sequence
  Description of Artificial Sequence: Synthetic oligonucleotide
acucguguaccuuguaacc

SEQ ID NO: 617795 - RNA, 19 nt, Artificial Sequence
  Description of Artificial Sequence: Synthetic oligonucleotide
guaguuaauaucugcauca

SEQ ID NO: 617796 - RNA, 19 nt, Artificial Sequence
  Description of Artificial Sequence: Synthetic oligonucleotide
aagauauucugaggagugc

SEQ ID NO: 617797 - RNA, 19 nt, Artificial Sequence
  Description of Artificial Sequence: Synthetic oligonucleotide
gaauuuuaaguccacuguc

SEQ ID NO: 617798 - RNA, 19 nt, Artificial Sequence
  Description of Artificial Sequence: Synthetic oligonucleotide
aaucuuaauuuugcccacc

SEQ ID NO: 617799 - RNA, 19 nt, Artificial Sequence
  Description of Artificial Sequence: Synthetic oligonucleotide
aacucuguauccaacaaca

SEQ ID NO: 617800 - RNA, 19 nt, Artificial Sequence
  Description of Artificial Sequence: Synthetic oligonucleotide
aauaugucaggcagccacc

SEQ ID NO: 617801 - RNA, 19 nt, Artificial Sequence
  Description of Artificial Sequence: Synthetic oligonucleotide
uuagcugggaaucccauuc

SEQ ID NO: 617802 - RNA, 19 nt, Artificial Sequence
  Description of Artificial Sequence: Synthetic oligonucleotide
agaauuucccaaaaccugg

SEQ ID NO: 617803 - RNA, 19 nt, Artificial Sequence
  Description of Artificial Sequence: Synthetic oligonucleotide
uauuucuaccauaguugcg

SEQ ID NO: 617804 - RNA, 19 nt, Artificial Sequence
  Description of Artificial Sequence: Synthetic oligonucleotide
gaagaaucaaacacagacc

SEQ ID NO: 617805 - RNA, 19 nt, Artificial Sequence
  Description of Artificial Sequence: Synthetic oligonucleotide
uauuagauauauuuucaua

SEQ ID NO: 617806 - RNA, 19 nt, Artificial Sequence
  Description of Artificial Sequence: Synthetic oligonucleotide
aauuuuaaguccacugucu

SEQ ID NO: 617807 - RNA, 19 nt, Artificial Sequence
  Description of Artificial Sequence: Synthetic oligonucleotide
uauacugcaagugacuuuc

SEQ ID NO: 617808 - RNA, 19 nt, Artificial Sequence
  Description of Artificial Sequence: Synthetic oligonucleotide
ucuaccauuggguuuauuu

SEQ ID NO: 617809 - RNA, 19 nt, Artificial Sequence
  Description of Artificial Sequence: Synthetic oligonucleotide
cagaucaaaacuugauugc

SEQ ID NO: 617810 - RNA, 19 nt, Artificial Sequence
  Description of Artificial Sequence: Synthetic oligonucleotide
aacaauccagaauuuccca

SEQ ID NO: 617811 - RNA, 19 nt, Artificial Sequence
  Description of Artificial Sequence: Synthetic oligonucleotide
uguaccuuguaaccguacc

SEQ ID NO: 617812 - RNA, 19 nt, Artificial Sequence
  Description of Artificial Sequence: Synthetic oligonucleotide
aggucacuauuucagagag

SEQ ID NO: 617813 - RNA, 19 nt, Artificial Sequence
  Description of Artificial Sequence: Synthetic oligonucleotide
cuuucaaggguuugugagg

SEQ ID NO: 617814 - RNA, 19 nt, Artificial Sequence
  Description of Artificial Sequence: Synthetic oligonucleotide
guaaccguaccacaacagg

SEQ ID NO: 617815 - RNA, 19 nt, Artificial Sequence
  Description of Artificial Sequence: Synthetic oligonucleotide
aacguuagcugggaauccc

SEQ ID NO: 617816 - RNA, 19 nt, Artificial Sequence
  Description of Artificial Sequence: Synthetic oligonucleotide
agugcuugaaaguucuaug

SEQ ID NO: 617817 - RNA, 19 nt, Artificial Sequence
  Description of Artificial Sequence: Synthetic oligonucleotide
cauucugagcagaagaauc

SEQ ID NO: 617818 - RNA, 19 nt, Artificial Sequence
  Description of Artificial Sequence: Synthetic oligonucleotide
ugcagaauccacaacguua

SEQ ID NO: 617819 - RNA, 19 nt, Artificial Sequence
  Description of Artificial Sequence: Synthetic oligonucleotide
guucuauguauaaauaaug

SEQ ID NO: 617820 - RNA, 19 nt, Artificial Sequence
  Description of Artificial Sequence: Synthetic oligonucleotide
ucgaaguugaucuuugcau

SEQ ID NO: 617821 - RNA, 19 nt, Artificial Sequence
  Description of Artificial Sequence: Synthetic oligonucleotide
auuucuaccauaguugcgu

SEQ ID NO: 617822 - RNA, 19 nt, Artificial Sequence
  Description of Artificial Sequence: Synthetic oligonucleotide
gaccagaauagacuguacc

SEQ ID NO: 617823 - RNA, 19 nt, Artificial Sequence
  Description of Artificial Sequence: Synthetic oligonucleotide
accagaauagacuguaccu

SEQ ID NO: 617824 - RNA, 19 nt, Artificial Sequence
  Description of Artificial Sequence: Synthetic oligonucleotide
ucgcucacagaucaaaacu

SEQ ID NO: 617825 - RNA, 19 nt, Artificial Sequence
  Description of Artificial Sequence: Synthetic oligonucleotide
uuguuaaacaauccagaau

SEQ ID NO: 617826 - RNA, 19 nt, Artificial Sequence
  Description of Artificial Sequence: Synthetic oligonucleotide
caugcuuguuaaacaaucc

SEQ ID NO: 617827 - RNA, 19 nt, Artificial Sequence
  Description of Artificial Sequence: Synthetic oligonucleotide
acaacguuagcugggaauc

SEQ ID NO: 617828 - RNA, 19 nt, Artificial Sequence
  Description of Artificial Sequence: Synthetic oligonucleotide
gaacucuuagcaaugaaga

SEQ ID NO: 617829 - RNA, 19 nt, Artificial Sequence
  Description of Artificial Sequence: Synthetic oligonucleotide
uuacuugcuggacuguggc

SEQ ID NO: 617830 - RNA, 19 nt, Artificial Sequence
  Description of Artificial Sequence: Synthetic oligonucleotide
ugcgucguacuucagaaaa

SEQ ID NO: 617831 - RNA, 19 nt, Artificial Sequence
  Description of Artificial Sequence: Synthetic oligonucleotide
augugcaccauacauacau

SEQ ID NO: 617832 - RNA, 19 nt, Artificial Sequence
  Description of Artificial Sequence: Synthetic oligonucleotide
uguuaacaccaccuugugc

SEQ ID NO: 617833 - RNA, 19 nt, Artificial Sequence
  Description of Artificial Sequence: Synthetic oligonucleotide
caaacaguccauucugagc

SEQ ID NO: 617834 - RNA, 19 nt, Artificial Sequence
  Description of Artificial Sequence: Synthetic oligonucleotide
uaacuauuccuuuugcaau

SEQ ID NO: 617835 - RNA, 19 nt, Artificial Sequence
  Description of Artificial Sequence: Synthetic oligonucleotide
ugauaagcuuaaaugcuuc

SEQ ID NO: 617836 - RNA, 19 nt, Artificial Sequence
  Description of Artificial Sequence: Synthetic oligonucleotide
uugggaaccuuuuauuaac

SEQ ID NO: 617837 - RNA, 19 nt, Artificial Sequence
  Description of Artificial Sequence: Synthetic oligonucleotide
ugggcgauuacauucucca

SEQ ID NO: 617838 - RNA, 19 nt, Artificial Sequence
  Description of Artificial Sequence: Synthetic oligonucleotide
agacuugugguuaucauug

SEQ ID NO: 617839 - RNA, 19 nt, Artificial Sequence
  Description of Artificial Sequence: Synthetic oligonucleotide
uuguaaccguaccacaaca

SEQ ID NO: 617840 - RNA, 19 nt, Artificial Sequence
  Description of Artificial Sequence: Synthetic oligonucleotide
uggcaauugcauaagcuuc

SEQ ID NO: 617841 - RNA, 19 nt, Artificial Sequence
  Description of Artificial Sequence: Synthetic oligonucleotide
ucacaagcgagaauuuuaa

SEQ ID NO: 617842 - RNA, 19 nt, Artificial Sequence
  Description of Artificial Sequence: Synthetic oligonucleotide
aaccuauguucccaucgag

SEQ ID NO: 617843 - RNA, 19 nt, Artificial Sequence
  Description of Artificial Sequence: Synthetic oligonucleotide
ugcauccauacauaacacc

SEQ ID NO: 617844 - RNA, 19 nt, Artificial Sequence
  Description of Artificial Sequence: Synthetic oligonucleotide
aacucuuagcaaugaagaa

SEQ ID NO: 617845 - RNA, 19 nt, Artificial Sequence
  Description of Artificial Sequence: Synthetic oligonucleotide
uuggcaauugcauaagcuu

SEQ ID NO: 617846 - RNA, 19 nt, Artificial Sequence
  Description of Artificial Sequence: Synthetic oligonucleotide
ugcauaagcuucaucuggu

SEQ ID NO: 617847 - RNA, 19 nt, Artificial Sequence
  Description of Artificial Sequence: Synthetic oligonucleotide
agugauaagcuuaaaugcu

SEQ ID NO: 617848 - RNA, 19 nt, Artificial Sequence
  Description of Artificial Sequence: Synthetic oligonucleotide
uacauaacaccacuccauc

SEQ ID NO: 617849 - RNA, 19 nt, Artificial Sequence
  Description of Artificial Sequence: Synthetic oligonucleotide
ucuaagucuuuuacugcca

SEQ ID NO: 617850 - RNA, 19 nt, Artificial Sequence
  Description of Artificial Sequence: Synthetic oligonucleotide
gcaaucuuaauuuugccca

SEQ ID NO: 617851 - RNA, 19 nt, Artificial Sequence
  Description of Artificial Sequence: Synthetic oligonucleotide
aggaccuugaaaugaccuc

SEQ ID NO: 617852 - RNA, 19 nt, Artificial Sequence
  Description of Artificial Sequence: Synthetic oligonucleotide
uuuggcgauaggcugaauu

SEQ ID NO: 617853 - RNA, 19 nt, Artificial Sequence
  Description of Artificial Sequence: Synthetic oligonucleotide
aaaagauuauaaagcuuga

SEQ ID NO: 617854 - RNA, 19 nt, Artificial Sequence
  Description of Artificial Sequence: Synthetic oligonucleotide
uugugguuaucauuguccu

SEQ ID NO: 617855 - RNA, 19 nt, Artificial Sequence
  Description of Artificial Sequence: Synthetic oligonucleotide
gaauuugaaucgaaguuga

SEQ ID NO: 617856 - RNA, 19 nt, Artificial Sequence
  Description of Artificial Sequence: Synthetic oligonucleotide
ugauugcauauucugcccu

SEQ ID NO: 617857 - RNA, 19 nt, Artificial Sequence
  Description of Artificial Sequence: Synthetic oligonucleotide
gaucuuugcauccauacau

SEQ ID NO: 617858 - RNA, 19 nt, Artificial Sequence
  Description of Artificial Sequence: Synthetic oligonucleotide
uucuaccauaguugcgucg

SEQ ID NO: 617859 - RNA, 19 nt, Artificial Sequence
  Description of Artificial Sequence: Synthetic oligonucleotide
ucaauacaggaccuugaaa

SEQ ID NO: 617860 - RNA, 19 nt, Artificial Sequence
  Description of Artificial Sequence: Synthetic oligonucleotide
uccauucugagcagaagaa

SEQ ID NO: 617861 - RNA, 19 nt, Artificial Sequence
  Description of Artificial Sequence: Synthetic oligonucleotide
augucaggcagccaccaag

SEQ ID NO: 617862 - RNA, 19 nt, Artificial Sequence
  Description of Artificial Sequence: Synthetic oligonucleotide
cauuugacgcugaagauaa

SEQ ID NO: 617863 - RNA, 19 nt, Artificial Sequence
  Description of Artificial Sequence: Synthetic oligonucleotide
aguucuauguauaaauaau

SEQ ID NO: 617864 - RNA, 19 nt, Artificial Sequence
  Description of Artificial Sequence: Synthetic oligonucleotide
ucuaccauaguugcgucgu

SEQ ID NO: 617865 - RNA, 19 nt, Artificial Sequence
  Description of Artificial Sequence: Synthetic oligonucleotide
uuuuacugccauaacuauu

SEQ ID NO: 617866 - RNA, 19 nt, Artificial Sequence
  Description of Artificial Sequence: Synthetic oligonucleotide
gugacuuugccacgaagcc

SEQ ID NO: 617867 - RNA, 19 nt, Artificial Sequence
  Description of Artificial Sequence: Synthetic oligonucleotide
ucugaguccgaccgguccc

SEQ ID NO: 617868 - RNA, 19 nt, Artificial Sequence
  Description of Artificial Sequence: Synthetic oligonucleotide
uucgcucacagaucaaaac

SEQ ID NO: 617869 - RNA, 19 nt, Artificial Sequence
  Description of Artificial Sequence: Synthetic oligonucleotide
auaagcuuaaaugcuucug

SEQ ID NO: 617870 - RNA, 19 nt, Artificial Sequence
  Description of Artificial Sequence: Synthetic oligonucleotide
uacagcacauuaauauguc

SEQ ID NO: 617871 - RNA, 19 nt, Artificial Sequence
  Description of Artificial Sequence: Synthetic oligonucleotide
auaucacaucucauuauuc

SEQ ID NO: 617872 - RNA, 19 nt, Artificial Sequence
  Description of Artificial Sequence: Synthetic oligonucleotide
cuagacaaccuauguuccc

SEQ ID NO: 617873 - RNA, 19 nt, Artificial Sequence
  Description of Artificial Sequence: Synthetic oligonucleotide
auguaguuaauaucugcau

SEQ ID NO: 617874 - RNA, 19 nt, Artificial Sequence
  Description of Artificial Sequence: Synthetic oligonucleotide
auaaagcuugaccauguuu

SEQ ID NO: 617875 - RNA, 19 nt, Artificial Sequence
  Description of Artificial Sequence: Synthetic oligonucleotide
aacuuaaauuuggcaaucu

SEQ ID NO: 617876 - RNA, 19 nt, Artificial Sequence
  Description of Artificial Sequence: Synthetic oligonucleotide
gcuaaggucacuauuucag

SEQ ID NO: 617877 - RNA, 19 nt, Artificial Sequence
  Description of Artificial Sequence: Synthetic oligonucleotide
accuugugcacuuccuauc

SEQ ID NO: 617878 - RNA, 19 nt, Artificial Sequence
  Description of Artificial Sequence: Synthetic oligonucleotide
aggccaauguaguuaauau

SEQ ID NO: 617879 - RNA, 19 nt, Artificial Sequence
  Description of Artificial Sequence: Synthetic oligonucleotide
cauuguccuauaaugauua

SEQ ID NO: 617880 - RNA, 19 nt, Artificial Sequence
  Description of Artificial Sequence: Synthetic oligonucleotide
agucccuccauguaguuuu

SEQ ID NO: 617881 - RNA, 19 nt, Artificial Sequence
  Description of Artificial Sequence: Synthetic oligonucleotide
agauauucugaggagugcu

SEQ ID NO: 617882 - RNA, 19 nt, Artificial Sequence
  Description of Artificial Sequence: Synthetic oligonucleotide
uccuaucaauacaggaccu

SEQ ID NO: 617883 - RNA, 19 nt, Artificial Sequence
  Description of Artificial Sequence: Synthetic oligonucleotide
uucccaucgaggccaaugu

SEQ ID NO: 617884 - RNA, 19 nt, Artificial Sequence
  Description of Artificial Sequence: Synthetic oligonucleotide
ugggaaccuuuuauuaacu

SEQ ID NO: 617885 - RNA, 19 nt, Artificial Sequence
  Description of Artificial Sequence: Synthetic oligonucleotide
gucacuauuucagagagcu

SEQ ID NO: 617886 - RNA, 19 nt, Artificial Sequence
  Description of Artificial Sequence: Synthetic oligonucleotide
uugccacgaagccuuuggg

SEQ ID NO: 617887 - RNA, 19 nt, Artificial Sequence
  Description of Artificial Sequence: Synthetic oligonucleotide
cucguguaccuuguaaccg

SEQ ID NO: 617888 - RNA, 19 nt, Artificial Sequence
  Description of Artificial Sequence: Synthetic oligonucleotide
aacugccggccguagaaca

SEQ ID NO: 617889 - RNA, 19 nt, Artificial Sequence
  Description of Artificial Sequence: Synthetic oligonucleotide
uuucgcucacagaucaaaa

SEQ ID NO: 617890 - RNA, 19 nt, Artificial Sequence
  Description of Artificial Sequence: Synthetic oligonucleotide
gcuaugggcgauuacauuc

SEQ ID NO: 617891 - RNA, 19 nt, Artificial Sequence
  Description of Artificial Sequence: Synthetic oligonucleotide
guccauucugagcagaaga

SEQ ID NO: 617892 - RNA, 19 nt, Artificial Sequence
  Description of Artificial Sequence: Synthetic oligonucleotide
auuuugcccaccauguucu

SEQ ID NO: 617893 - RNA, 19 nt, Artificial Sequence
  Description of Artificial Sequence: Synthetic oligonucleotide
ugugaggugcuaugggcga

SEQ ID NO: 617894 - RNA, 19 nt, Artificial Sequence
  Description of Artificial Sequence: Synthetic oligonucleotide
auaacaccacuccaucgga

SEQ ID NO: 617895 - RNA, 19 nt, Artificial Sequence
  Description of Artificial Sequence: Synthetic oligonucleotide
caucaacucguguaccuug

SEQ ID NO: 617896 - RNA, 19 nt, Artificial Sequence
  Description of Artificial Sequence: Synthetic oligonucleotide
gugcaagugccacagcuug

SEQ ID NO: 617897 - RNA, 19 nt, Artificial Sequence
  Description of Artificial Sequence: Synthetic oligonucleotide
guggccauagccaacccag

SEQ ID NO: 617898 - RNA, 19 nt, Artificial Sequence
  Description of Artificial Sequence: Synthetic oligonucleotide
agcuaaggucacuauuuca

SEQ ID NO: 617899 - RNA, 19 nt, Artificial Sequence
  Description of Artificial Sequence: Synthetic oligonucleotide
uaccuuguaaccguaccac

SEQ ID NO: 617900 - RNA, 19 nt, Artificial Sequence
  Description of Artificial Sequence: Synthetic oligonucleotide
ucaagaaaguuggcuggag

SEQ ID NO: 617901 - RNA, 19 nt, Artificial Sequence
  Description of Artificial Sequence: Synthetic oligonucleotide
ucguguaccuuguaaccgu

SEQ ID NO: 617902 - RNA, 19 nt, Artificial Sequence
  Description of Artificial Sequence: Synthetic oligonucleotide
auguugaccagaauagacu

SEQ ID NO: 617903 - RNA, 19 nt, Artificial Sequence
  Description of Artificial Sequence: Synthetic oligonucleotide
ucaugaagacuugugguua

SEQ ID NO: 617904 - RNA, 19 nt, Artificial Sequence
  Description of Artificial Sequence: Synthetic oligonucleotide
uuguccuauaaugauuaaa

SEQ ID NO: 617905 - RNA, 19 nt, Artificial Sequence
  Description of Artificial Sequence: Synthetic oligonucleotide
ggugacuuugccacgaagc

SEQ ID NO: 617906 - RNA, 19 nt, Artificial Sequence
  Description of Artificial Sequence: Synthetic oligonucleotide
ugaaucgaaguugaucuuu

SEQ ID NO: 617907 - RNA, 19 nt, Artificial Sequence
  Description of Artificial Sequence: Synthetic oligonucleotide
agcugggaaucccauucuc

SEQ ID NO: 617908 - RNA, 19 nt, Artificial Sequence
  Description of Artificial Sequence: Synthetic oligonucleotide
acauugggaaccuuuuauu

SEQ ID NO: 617909 - RNA, 19 nt, Artificial Sequence
  Description of Artificial Sequence: Synthetic oligonucleotide
aaguucuugcucagaucgg

SEQ ID NO: 617910 - RNA, 19 nt, Artificial Sequence
  Description of Artificial Sequence: Synthetic oligonucleotide
uggugacuuugccacgaag

SEQ ID NO: 617911 - RNA, 19 nt, Artificial Sequence
  Description of Artificial Sequence: Synthetic oligonucleotide
ucgaggccaauguaguuaa

SEQ ID NO: 617912 - RNA, 19 nt, Artificial Sequence
  Description of Artificial Sequence: Synthetic oligonucleotide
aucccauucucugugcaag

SEQ ID NO: 617913 - RNA, 19 nt, Artificial Sequence
  Description of Artificial Sequence: Synthetic oligonucleotide
agagaccacaguauaauaa

SEQ ID NO: 617914 - RNA, 19 nt, Artificial Sequence
  Description of Artificial Sequence: Synthetic oligonucleotide
cuuauuucuaagucuuuua

SEQ ID NO: 617915 - RNA, 19 nt, Artificial Sequence
  Description of Artificial Sequence: Synthetic oligonucleotide
ggccguagaacauggacgc

SEQ ID NO: 617916 - RNA, 19 nt, Artificial Sequence
  Description of Artificial Sequence: Synthetic oligonucleotide
uugugcacuuccuaucaau

SEQ ID NO: 617917 - RNA, 19 nt, Artificial Sequence
  Description of Artificial Sequence: Synthetic oligonucleotide
guaccuuguaaccguacca

SEQ ID NO: 617918 - RNA, 19 nt, Artificial Sequence
  Description of Artificial Sequence: Synthetic oligonucleotide
aaaccugggcggcggcccg

SEQ ID NO: 617919 - RNA, 19 nt, Artificial Sequence
  Description of Artificial Sequence: Synthetic oligonucleotide
uguuccuuucugaugccuu

SEQ ID NO: 617920 - RNA, 19 nt, Artificial Sequence
  Description of Artificial Sequence: Synthetic oligonucleotide
auaaugauugauacauuua

SEQ ID NO: 617921 - RNA, 19 nt, Artificial Sequence
  Description of Artificial Sequence: Synthetic oligonucleotide
gauaagcuuaaaugcuucu

SEQ ID NO: 617922 - RNA, 19 nt, Artificial Sequence
  Description of Artificial Sequence: Synthetic oligonucleotide
ugggaaucccauucucugu

SEQ ID NO: 617923 - RNA, 19 nt, Artificial Sequence
  Description of Artificial Sequence: Synthetic oligonucleotide
uggcgauaggcugaauuug

SEQ ID NO: 617924 - RNA, 19 nt, Artificial Sequence
  Description of Artificial Sequence: Synthetic oligonucleotide
aaauaaugauugauacauu

SEQ ID NO: 617925 - RNA, 19 nt, Artificial Sequence
  Description of Artificial Sequence: Synthetic oligonucleotide
uauaaagcuugaccauguu

SEQ ID NO: 617926 - RNA, 19 nt, Artificial Sequence
  Description of Artificial Sequence: Synthetic oligonucleotide
uaauuuugcccaccauguu

SEQ ID NO: 617927 - RNA, 19 nt, Artificial Sequence
  Description of Artificial Sequence: Synthetic oligonucleotide
uuucuaccauaguugcguc

SEQ ID NO: 617928 - RNA, 19 nt, Artificial Sequence
  Description of Artificial Sequence: Synthetic oligonucleotide
ccaaaucaucacaagcgag

SEQ ID NO: 617929 - RNA, 19 nt, Artificial Sequence
  Description of Artificial Sequence: Synthetic oligonucleotide
uaacaccacuccaucggaa

SEQ ID NO: 617930 - RNA, 19 nt, Artificial Sequence
  Description of Artificial Sequence: Synthetic oligonucleotide
gcgauuacauucuccacac

SEQ ID NO: 617931 - RNA, 19 nt, Artificial Sequence
  Description of Artificial Sequence: Synthetic oligonucleotide
ugccauaacuauuccuuuu

SEQ ID NO: 617932 - RNA, 19 nt, Artificial Sequence
  Description of Artificial Sequence: Synthetic oligonucleotide
cuccaucggaaucuucuac

SEQ ID NO: 617933 - RNA, 19 nt, Artificial Sequence
  Description of Artificial Sequence: Synthetic oligonucleotide
ggaaagggacaauagcaga

SEQ ID NO: 617934 - RNA, 19 nt, Artificial Sequence
  Description of Artificial Sequence: Synthetic oligonucleotide
agccaccaaguucuugcuc

SEQ ID NO: 617935 - RNA, 19 nt, Artificial Sequence
  Description of Artificial Sequence: Synthetic oligonucleotide
ugggauauuuucgcucaca

SEQ ID NO: 617936 - RNA, 19 nt, Artificial Sequence
  Description of Artificial Sequence: Synthetic oligonucleotide
aaccguaccacaacaggua

SEQ ID NO: 617937 - RNA, 19 nt, Artificial Sequence
  Description of Artificial Sequence: Synthetic oligonucleotide
cugaauuugaaucgaaguu

SEQ ID NO: 617938 - RNA, 19 nt, Artificial Sequence
  Description of Artificial Sequence: Synthetic oligonucleotide
aggcaguuauuagauauau

SEQ ID NO: 617939 - RNA, 19 nt, Artificial Sequence
  Description of Artificial Sequence: Synthetic oligonucleotide
ggugcuaugggcgauuaca

SEQ ID NO: 617940 - RNA, 19 nt, Artificial Sequence
  Description of Artificial Sequence: Synthetic oligonucleotide
uguucuaaugaggcaguua

SEQ ID NO: 617941 - RNA, 19 nt, Artificial Sequence
  Description of Artificial Sequence: Synthetic oligonucleotide
cccaucgaggccaauguag

SEQ ID NO: 617942 - RNA, 19 nt, Artificial Sequence
  Description of Artificial Sequence: Synthetic oligonucleotide
uaccauaguugcgucguac

SEQ ID NO: 617943 - RNA, 19 nt, Artificial Sequence
  Description of Artificial Sequence: Synthetic oligonucleotide
aucacaagcgagaauuuua

SEQ ID NO: 617944 - RNA, 19 nt, Artificial Sequence
  Description of Artificial Sequence: Synthetic oligonucleotide
uuaauaugucaggcagcca

SEQ ID NO: 617945 - RNA, 19 nt, Artificial Sequence
  Description of Artificial Sequence: Synthetic oligonucleotide
accauuuacuagacaaccu

SEQ ID NO: 617946 - RNA, 19 nt, Artificial Sequence
  Description of Artificial Sequence: Synthetic oligonucleotide
gcugaauuugaaucgaagu

SEQ ID NO: 617947 - RNA, 19 nt, Artificial Sequence
  Description of Artificial Sequence: Synthetic oligonucleotide
auccacaacguuagcuggg

SEQ ID NO: 617948 - RNA, 19 nt, Artificial Sequence
  Description of Artificial Sequence: Synthetic oligonucleotide
uccacaacguuagcuggga

SEQ ID NO: 617949 - RNA, 19 nt, Artificial Sequence
  Description of Artificial Sequence: Synthetic oligonucleotide
uucuaaugaggcaguuauu

SEQ ID NO: 617950 - RNA, 19 nt, Artificial Sequence
  Description of Artificial Sequence: Synthetic oligonucleotide
caccagcuaaaaccugugc

SEQ ID NO: 617951 - RNA, 19 nt, Artificial Sequence
  Description of Artificial Sequence: Synthetic oligonucleotide
ugaugccuuuuauuauauc

SEQ ID NO: 617952 - RNA, 19 nt, Artificial Sequence
  Description of Artificial Sequence: Synthetic oligonucleotide
ugugcaccauacauacauu

SEQ ID NO: 617953 - RNA, 19 nt, Artificial Sequence
  Description of Artificial Sequence: Synthetic oligonucleotide
ugugguuaucauuguccua

SEQ ID NO: 617954 - RNA, 19 nt, Artificial Sequence
  Description of Artificial Sequence: Synthetic oligonucleotide
accguaccacaacagguau

SEQ ID NO: 617955 - RNA, 19 nt, Artificial Sequence
  Description of Artificial Sequence: Synthetic oligonucleotide
uaugggcgauuacauucuc

SEQ ID NO: 617956 - RNA, 19 nt, Artificial Sequence
  Description of Artificial Sequence: Synthetic oligonucleotide
gugguuaucauuguccuau

SEQ ID NO: 617957 - RNA, 19 nt, Artificial Sequence
  Description of Artificial Sequence: Synthetic oligonucleotide
augaagacuugugguuauc

SEQ ID NO: 617958 - RNA, 19 nt, Artificial Sequence
  Description of Artificial Sequence: Synthetic oligonucleotide
cauuguggccauagccaac

SEQ ID NO: 617959 - RNA, 19 nt, Artificial Sequence
  Description of Artificial Sequence: Synthetic oligonucleotide
aucgaggccaauguaguua

SEQ ID NO: 617960 - RNA, 19 nt, Artificial Sequence
  Description of Artificial Sequence: Synthetic oligonucleotide
auaugucaggcagccacca

SEQ ID NO: 617961 - RNA, 19 nt, Artificial Sequence
  Description of Artificial Sequence: Synthetic oligonucleotide
gacuuucuauagaggaaga

SEQ ID NO: 617962 - RNA, 19 nt, Artificial Sequence
  Description of Artificial Sequence: Synthetic oligonucleotide
caacguuagcugggaaucc

SEQ ID NO: 617963 - RNA, 19 nt, Artificial Sequence
  Description of Artificial Sequence: Synthetic oligonucleotide
caucucauuauuccuccaa

SEQ ID NO: 617964 - RNA, 19 nt, Artificial Sequence
  Description of Artificial Sequence: Synthetic oligonucleotide
gaggccaauguaguuaaua

SEQ ID NO: 617965 - RNA, 19 nt, Artificial Sequence
  Description of Artificial Sequence: Synthetic oligonucleotide
ugcuaugggcgauuacauu

SEQ ID NO: 617966 - RNA, 19 nt, Artificial Sequence
  Description of Artificial Sequence: Synthetic oligonucleotide
caaccuauguucccaucga

SEQ ID NO: 617967 - RNA, 19 nt, Artificial Sequence
  Description of Artificial Sequence: Synthetic oligonucleotide
ucccaaaaccugggcggcg

SEQ ID NO: 617968 - RNA, 19 nt, Artificial Sequence
  Description of Artificial Sequence: Synthetic oligonucleotide
ggauauuuucgcucacaga

SEQ ID NO: 617969 - RNA, 19 nt, Artificial Sequence
  Description of Artificial Sequence: Synthetic oligonucleotide
uagccaacccagcaccauu

SEQ ID NO: 617970 - RNA, 19 nt, Artificial Sequence
  Description of Artificial Sequence: Synthetic oligonucleotide
ucaacucguguaccuugua

SEQ ID NO: 617971 - RNA, 19 nt, Artificial Sequence
  Description of Artificial Sequence: Synthetic oligonucleotide
guuacuucucugaaauacu

SEQ ID NO: 617972 - RNA, 19 nt, Artificial Sequence
  Description of Artificial Sequence: Synthetic oligonucleotide
accugugccuuuaucacaa

SEQ ID NO: 617973 - RNA, 19 nt, Artificial Sequence
  Description of Artificial Sequence: Synthetic oligonucleotide
uuauaucaacagguucuuu

SEQ ID NO: 617974 - RNA, 19 nt, Artificial Sequence
  Description of Artificial Sequence: Synthetic oligonucleotide
cuuuuacugccauaacuau

SEQ ID NO: 617975 - RNA, 19 nt, Artificial Sequence
  Description of Artificial Sequence: Synthetic oligonucleotide
caccauguucuuaauaaau

SEQ ID NO: 617976 - RNA, 19 nt, Artificial Sequence
  Description of Artificial Sequence: Synthetic oligonucleotide
aucaacucguguaccuugu

SEQ ID NO: 617977 - RNA, 19 nt, Artificial Sequence
  Description of Artificial Sequence: Synthetic oligonucleotide
uugcgucguacuucagaaa

SEQ ID NO: 617978 - RNA, 19 nt, Artificial Sequence
  Description of Artificial Sequence: Synthetic oligonucleotide
caacucguguaccuuguaa

SEQ ID NO: 617979 - RNA, 19 nt, Artificial Sequence
  Description of Artificial Sequence: Synthetic oligonucleotide
auucugaggagugcuugaa

SEQ ID NO: 617980 - RNA, 19 nt, Artificial Sequence
  Description of Artificial Sequence: Synthetic oligonucleotide
cuaugggcgauuacauucu

SEQ ID NO: 617981 - RNA, 19 nt, Artificial Sequence
  Description of Artificial Sequence: Synthetic oligonucleotide
ggcaauugcauaagcuuca

SEQ ID NO: 617982 - RNA, 19 nt, Artificial Sequence
  Description of Artificial Sequence: Synthetic oligonucleotide
ucccaucgaggccaaugua

SEQ ID NO: 617983 - RNA, 19 nt, Artificial Sequence
  Description of Artificial Sequence: Synthetic oligonucleotide
cauagccaacccagcacca

SEQ ID NO: 617984 - RNA, 19 nt, Artificial Sequence
  Description of Artificial Sequence: Synthetic oligonucleotide
ugguuaucauuguccuaua

SEQ ID NO: 617985 - RNA, 19 nt, Artificial Sequence
  Description of Artificial Sequence: Synthetic oligonucleotide
gccauagccaacccagcac

SEQ ID NO: 617986 - RNA, 19 nt, Artificial Sequence
  Description of Artificial Sequence: Synthetic oligonucleotide
cacagaucaaaacuugauu

SEQ ID NO: 617987 - RNA, 19 nt, Artificial Sequence
  Description of Artificial Sequence: Synthetic oligonucleotide
gacgcugaagauaaauauu

SEQ ID NO: 617988 - RNA, 19 nt, Artificial Sequence
  Description of Artificial Sequence: Synthetic oligonucleotide
ucucugaguccgaccgguc

SEQ ID NO: 617989 - RNA, 19 nt, Artificial Sequence
  Description of Artificial Sequence: Synthetic oligonucleotide
caagaaaguuggcuggagu

SEQ ID NO: 617990 - RNA, 19 nt, Artificial Sequence
  Description of Artificial Sequence: Synthetic oligonucleotide
ccugggauauuuucgcuca

SEQ ID NO: 617991 - RNA, 19 nt, Artificial Sequence
  Description of Artificial Sequence: Synthetic oligonucleotide
gcucagaucggcaacugga

SEQ ID NO: 617992 - RNA, 19 nt, Artificial Sequence
  Description of Artificial Sequence: Synthetic oligonucleotide
cugggauauuuucgcucac

SEQ ID NO: 617993 - RNA, 19 nt, Artificial Sequence
  Description of Artificial Sequence: Synthetic oligonucleotide
gguuaucauuguccuauaa

SEQ ID NO: 617994 - RNA, 19 nt, Artificial Sequence
  Description of Artificial Sequence: Synthetic oligonucleotide
uaguugcgucguacuucag

SEQ ID NO: 617995 - RNA, 19 nt, Artificial Sequence
  Description of Artificial Sequence: Synthetic oligonucleotide
gguucuuuuaagauggcuu

SEQ ID NO: 617996 - RNA, 19 nt, Artificial Sequence
  Description of Artificial Sequence: Synthetic oligonucleotide
ugaccucuccauuguuauu

SEQ ID NO: 617997 - RNA, 19 nt, Artificial Sequence
  Description of Artificial Sequence: Synthetic oligonucleotide
cugaguccgaccggucccc

SEQ ID NO: 617998 - RNA, 19 nt, Artificial Sequence
  Description of Artificial Sequence: Synthetic oligonucleotide
auagccaacccagcaccau

SEQ ID NO: 617999 - RNA, 19 nt, Artificial Sequence
  Description of Artificial Sequence: Synthetic oligonucleotide
gcaccauuuacuagacaac

SEQ ID NO: 618000 - RNA, 19 nt, Artificial Sequence
  Description of Artificial Sequence: Synthetic oligonucleotide
ccauuggguuuauuucuac

SEQ ID NO: 618001 - RNA, 19 nt, Artificial Sequence
  Description of Artificial Sequence: Synthetic oligonucleotide
acguuagcugggaauccca

SEQ ID NO: 618002 - RNA, 19 nt, Artificial Sequence
  Description of Artificial Sequence: Synthetic oligonucleotide
ggcgauaggcugaauuuga

SEQ ID NO: 618003 - RNA, 19 nt, Artificial Sequence
  Description of Artificial Sequence: Synthetic oligonucleotide
cuaagucuuuuacugccau

SEQ ID NO: 618004 - RNA, 19 nt, Artificial Sequence
  Description of Artificial Sequence: Synthetic oligonucleotide
agcggccaacugccggccg

SEQ ID NO: 618005 - RNA, 19 nt, Artificial Sequence
  Description of Artificial Sequence: Synthetic oligonucleotide
caguccauucugagcagaa

SEQ ID NO: 618006 - RNA, 19 nt, Artificial Sequence
  Description of Artificial Sequence: Synthetic oligonucleotide
ugucugcuauuagugccuu

SEQ ID NO: 618007 - RNA, 19 nt, Artificial Sequence
  Description of Artificial Sequence: Synthetic oligonucleotide
ccuugugcacuuccuauca

SEQ ID NO: 618008 - RNA, 19 nt, Artificial Sequence
  Description of Artificial Sequence: Synthetic oligonucleotide
ccauuguuauugcaaagua

SEQ ID NO: 618009 - RNA, 19 nt, Artificial Sequence
  Description of Artificial Sequence: Synthetic oligonucleotide
agaucuucuuuuggcgaua

SEQ ID NO: 618010 - RNA, 19 nt, Artificial Sequence
  Description of Artificial Sequence: Synthetic oligonucleotide
cuugugcacuuccuaucaa

SEQ ID NO: 618011 - RNA, 19 nt, Artificial Sequence
  Description of Artificial Sequence: Synthetic oligonucleotide
cuggagagaaaacuaucuu

SEQ ID NO: 618012 - RNA, 19 nt, Artificial Sequence
  Description of Artificial Sequence: Synthetic oligonucleotide
auucaugcagugagagauu

SEQ ID NO: 618013 - RNA, 19 nt, Artificial Sequence
  Description of Artificial Sequence: Synthetic oligonucleotide
ugaggugcuaugggcgauu

SEQ ID NO: 618014 - RNA, 19 nt, Artificial Sequence
  Description of Artificial Sequence: Synthetic oligonucleotide
caacugccggccguagaac

SEQ ID NO: 618015 - RNA, 19 nt, Artificial Sequence
  Description of Artificial Sequence: Synthetic oligonucleotide
ggucacuauuucagagagc

SEQ ID NO: 618016 - RNA, 19 nt, Artificial Sequence
  Description of Artificial Sequence: Synthetic oligonucleotide
gggcgauuacauucuccac

SEQ ID NO: 618017 - RNA, 19 nt, Artificial Sequence
  Description of Artificial Sequence: Synthetic oligonucleotide
guugaccagaauagacugu

SEQ ID NO: 618018 - RNA, 19 nt, Artificial Sequence
  Description of Artificial Sequence: Synthetic oligonucleotide
agccaacccagcaccauuu

SEQ ID NO: 618019 - RNA, 19 nt, Artificial Sequence
  Description of Artificial Sequence: Synthetic oligonucleotide
cccaaaaccugggcggcgg

SEQ ID NO: 618020 - RNA, 19 nt, Artificial Sequence
  Description of Artificial Sequence: Synthetic oligonucleotide
cuggacuguggcaccucca

SEQ ID NO: 618021 - RNA, 19 nt, Artificial Sequence
  Description of Artificial Sequence: Synthetic oligonucleotide
caccuugugcacuuccuau

SEQ ID NO: 618022 - RNA, 19 nt, Artificial Sequence
  Description of Artificial Sequence: Synthetic oligonucleotide
auuuucgcucacagaucaa

SEQ ID NO: 618023 - RNA, 19 nt, Artificial Sequence
  Description of Artificial Sequence: Synthetic oligonucleotide
ccucaggacggcagcggcc

SEQ ID NO: 618024 - RNA, 19 nt, Artificial Sequence
  Description of Artificial Sequence: Synthetic oligonucleotide
ugaguccgaccgguccccu

SEQ ID NO: 618025 - RNA, 19 nt, Artificial Sequence
  Description of Artificial Sequence: Synthetic oligonucleotide
gugcuaugggcgauuacau

SEQ ID NO: 618026 - RNA, 19 nt, Artificial Sequence
  Description of Artificial Sequence: Synthetic oligonucleotide
cugccauaacuauuccuuu

SEQ ID NO: 618027 - RNA, 19 nt, Artificial Sequence
  Description of Artificial Sequence: Synthetic oligonucleotide
caucggaaucuucuaccau

SEQ ID NO: 618028 - RNA, 19 nt, Artificial Sequence
  Description of Artificial Sequence: Synthetic oligonucleotide
ccacuguucuaaugaggca

SEQ ID NO: 618029 - RNA, 19 nt, Artificial Sequence
  Description of Artificial Sequence: Synthetic oligonucleotide
cugaagugauaagcuuaaa

SEQ ID NO: 618030 - RNA, 19 nt, Artificial Sequence
  Description of Artificial Sequence: Synthetic oligonucleotide
gcugggaaucccauucucu

SEQ ID NO: 618031 - RNA, 19 nt, Artificial Sequence
  Description of Artificial Sequence: Synthetic oligonucleotide
cuaccauaguugcgucgua

SEQ ID NO: 618032 - RNA, 19 nt, Artificial Sequence
  Description of Artificial Sequence: Synthetic oligonucleotide
gucugcuauuagugccuua

SEQ ID NO: 618033 - RNA, 19 nt, Artificial Sequence
  Description of Artificial Sequence: Synthetic oligonucleotide
gcccuuugcuccaguuugc

SEQ ID NO: 618034 - RNA, 19 nt, Artificial Sequence
  Description of Artificial Sequence: Synthetic oligonucleotide
gcgauaggcugaauuugaa

SEQ ID NO: 618035 - RNA, 19 nt, Artificial Sequence
  Description of Artificial Sequence: Synthetic oligonucleotide
ggcggcccgcaguguagcc

SEQ ID NO: 618036 - RNA, 19 nt, Artificial Sequence
  Description of Artificial Sequence: Synthetic oligonucleotide
ccagaauagacuguaccuu

SEQ ID NO: 618037 - RNA, 19 nt, Artificial Sequence
  Description of Artificial Sequence: Synthetic oligonucleotide
gcggccgguggcuccucag

SEQ ID NO: 618038 - RNA, 19 nt, Artificial Sequence
  Description of Artificial Sequence: Synthetic oligonucleotide
cugcccuuugcuccaguuu

SEQ ID NO: 618039 - RNA, 19 nt, Artificial Sequence
  Description of Artificial Sequence: Synthetic oligonucleotide
ggccaacugccggccguag

SEQ ID NO: 618040 - RNA, 19 nt, Artificial Sequence
  Description of Artificial Sequence: Synthetic oligonucleotide
gcaauugcauaagcuucau

SEQ ID NO: 618041 - RNA, 19 nt, Artificial Sequence
  Description of Artificial Sequence: Synthetic oligonucleotide
cgauaggcugaauuugaau

SEQ ID NO: 618042 - RNA, 19 nt, Artificial Sequence
  Description of Artificial Sequence: Synthetic oligonucleotide
gugaggugcuaugggcgau

SEQ ID NO: 618043 - RNA, 19 nt, Artificial Sequence
  Description of Artificial Sequence: Synthetic oligonucleotide
ggcggcggcccgcagugua

SEQ ID NO: 618044 - RNA, 19 nt, Artificial Sequence
  Description of Artificial Sequence: Synthetic oligonucleotide
ccacuugaaaauguuccuu

SEQ ID NO: 618045 - RNA, 19 nt, Artificial Sequence
  Description of Artificial Sequence: Synthetic oligonucleotide
cguguaccuuguaaccgua

SEQ ID NO: 618046 - RNA, 19 nt, Artificial Sequence
  Description of Artificial Sequence: Synthetic oligonucleotide
ccacaacguuagcugggaa

SEQ ID NO: 618047 - RNA, 19 nt, Artificial Sequence
  Description of Artificial Sequence: Synthetic oligonucleotide
gcggccaacugccggccgu

SEQ ID NO: 618048 - RNA, 19 nt, Artificial Sequence
  Description of Artificial Sequence: Synthetic oligonucleotide
cguuagcugggaaucccau

SEQ ID NO: 618049 - RNA, 19 nt, Artificial Sequence
  Description of Artificial Sequence: Synthetic oligonucleotide
cuucuaccauuggguuuau

SEQ ID NO: 618050 - RNA, 19 nt, Artificial Sequence
  Description of Artificial Sequence: Synthetic oligonucleotide
ccguaccacaacagguauu

SEQ ID NO: 618051 - RNA, 19 nt, Artificial Sequence
  Description of Artificial Sequence: Synthetic oligonucleotide
gccggccguagaacaugga

SEQ ID NO: 618052 - RNA, 19 nt, Artificial Sequence
  Description of Artificial Sequence: Synthetic oligonucleotide
cgaggccaauguaguuaau

SEQ ID NO: 618053 - RNA, 19 nt, Artificial Sequence
  Description of Artificial Sequence: Synthetic oligonucleotide
cggccaacugccggccgua

SEQ ID NO: 618054 - RNA, 19 nt, Artificial Sequence
  Description of Artificial Sequence: Synthetic oligonucleotide
aaggauauagccuggacac

SEQ ID NO: 618055 - RNA, 19 nt, Artificial Sequence
  Description of Artificial Sequence: Synthetic oligonucleotide
aacucuaccaguguguugc

SEQ ID NO: 618056 - RNA, 19 nt, Artificial Sequence
  Description of Artificial Sequence: Synthetic oligonucleotide
cuuuauaguagguaauucc

SEQ ID NO: 618057 - RNA, 19 nt, Artificial Sequence
  Description of Artificial Sequence: Synthetic oligonucleotide
auaaccuccuggcugaagc

SEQ ID NO: 618058 - RNA, 19 nt, Artificial Sequence
  Description of Artificial Sequence: Synthetic oligonucleotide
aauaguugguuacauaaau

SEQ ID NO: 618059 - RNA, 19 nt, Artificial Sequence
  Description of Artificial Sequence: Synthetic oligonucleotide
aaaggcauaggagauauug

SEQ ID NO: 618060 - RNA, 19 nt, Artificial Sequence
  Description of Artificial Sequence: Synthetic oligonucleotide
cucauucucgaaaagaagc

SEQ ID NO: 618061 - RNA, 19 nt, Artificial Sequence
  Description of Artificial Sequence: Synthetic oligonucleotide
ucgaauuucuuguacaucu

SEQ ID NO: 618062 - RNA, 19 nt, Artificial Sequence
  Description of Artificial Sequence: Synthetic oligonucleotide
aauacucauucucgaaaag

SEQ ID NO: 618063 - RNA, 19 nt, Artificial Sequence
  Description of Artificial Sequence: Synthetic oligonucleotide
agcuacauagcgcuguuuc

SEQ ID NO: 618064 - RNA, 19 nt, Artificial Sequence
  Description of Artificial Sequence: Synthetic oligonucleotide
uucucgaaaagaagccugg

SEQ ID NO: 618065 - RNA, 19 nt, Artificial Sequence
  Description of Artificial Sequence: Synthetic oligonucleotide
ugccauagaaauuccuccg

SEQ ID NO: 618066 - RNA, 19 nt, Artificial Sequence
  Description of Artificial Sequence: Synthetic oligonucleotide
uguuucagaucauacuuga

SEQ ID NO: 618067 - RNA, 19 nt, Artificial Sequence
  Description of Artificial Sequence: Synthetic oligonucleotide
uacucauucucgaaaagaa

SEQ ID NO: 618068 - RNA, 19 nt, Artificial Sequence
  Description of Artificial Sequence: Synthetic oligonucleotide
uguaggaguugcuccagcg

SEQ ID NO: 618069 - RNA, 19 nt, Artificial Sequence
  Description of Artificial Sequence: Synthetic oligonucleotide
uccauauguguucugggug

SEQ ID NO: 618070 - RNA, 19 nt, Artificial Sequence
  Description of Artificial Sequence: Synthetic oligonucleotide
uucauacuguuccucgggg

SEQ ID NO: 618071 - RNA, 19 nt, Artificial Sequence
  Description of Artificial Sequence: Synthetic oligonucleotide
aucugaguggcccugccac

SEQ ID NO: 618072 - RNA, 19 nt, Artificial Sequence
  Description of Artificial Sequence: Synthetic oligonucleotide
gauguuucgggugaaggcc

SEQ ID NO: 618073 - RNA, 19 nt, Artificial Sequence
  Description of Artificial Sequence: Synthetic oligonucleotide
uuuaguggugacugaaugu

SEQ ID NO: 618074 - RNA, 19 nt, Artificial Sequence
  Description of Artificial Sequence: Synthetic oligonucleotide
ugugucaguaggcaaagau

SEQ ID NO: 618075 - RNA, 19 nt, Artificial Sequence
  Description of Artificial Sequence: Synthetic oligonucleotide
gauauuggcguugcgcugg

SEQ ID NO: 618076 - RNA, 19 nt, Artificial Sequence
  Description of Artificial Sequence: Synthetic oligonucleotide
ucguccuuggcuaaggggu

SEQ ID NO: 618077 - RNA, 19 nt, Artificial Sequence
  Description of Artificial Sequence: Synthetic oligonucleotide
ugucaggcaacacugggac

SEQ ID NO: 618078 - RNA, 19 nt, Artificial Sequence
  Description of Artificial Sequence: Synthetic oligonucleotide
auauagccuggacacuugc

SEQ ID NO: 618079 - RNA, 19 nt, Artificial Sequence
  Description of Artificial Sequence: Synthetic oligonucleotide
uguacggaagcuuguagga

SEQ ID NO: 618080 - RNA, 19 nt, Artificial Sequence
  Description of Artificial Sequence: Synthetic oligonucleotide
gaagguagguuacugguca

SEQ ID NO: 618081 - RNA, 19 nt, Artificial Sequence
  Description of Artificial Sequence: Synthetic oligonucleotide
uccauugucaccacugaaa

SEQ ID NO: 618082 - RNA, 19 nt, Artificial Sequence
  Description of Artificial Sequence: Synthetic oligonucleotide
ucuuuguggggucaugugu

SEQ ID NO: 618083 - RNA, 19 nt, Artificial Sequence
  Description of Artificial Sequence: Synthetic oligonucleotide
cuuccuaugacauuccgga

SEQ ID NO: 618084 - RNA, 19 nt, Artificial Sequence
  Description of Artificial Sequence: Synthetic oligonucleotide
uaagggguccuucauccag

SEQ ID NO: 618085 - RNA, 19 nt, Artificial Sequence
  Description of Artificial Sequence: Synthetic oligonucleotide
agcacuugucaauaggucu

SEQ ID NO: 618086 - RNA, 19 nt, Artificial Sequence
  Description of Artificial Sequence: Synthetic oligonucleotide
cacacaaggugcuagcggc

SEQ ID NO: 618087 - RNA, 19 nt, Artificial Sequence
  Description of Artificial Sequence: Synthetic oligonucleotide
guuuaguggugacugaaug

SEQ ID NO: 618088 - RNA, 19 nt, Artificial Sequence
  Description of Artificial Sequence: Synthetic oligonucleotide
uucuucggggcucaggaug

SEQ ID NO: 618089 - RNA, 19 nt, Artificial Sequence
  Description of Artificial Sequence: Synthetic oligonucleotide
gacaugguaggugaccugg

SEQ ID NO: 618090 - RNA, 19 nt, Artificial Sequence
  Description of Artificial Sequence: Synthetic oligonucleotide
gcuuacucaucucaguucg

SEQ ID NO: 618091 - RNA, 19 nt, Artificial Sequence
  Description of Artificial Sequence: Synthetic oligonucleotide
acaaggauauagccuggac

SEQ ID NO: 618092 - RNA, 19 nt, Artificial Sequence
  Description of Artificial Sequence: Synthetic oligonucleotide
cuuuaggagauccaggcca

SEQ ID NO: 618093 - RNA, 19 nt, Artificial Sequence
  Description of Artificial Sequence: Synthetic oligonucleotide
uaauaguugguuacauaaa

SEQ ID NO: 618094 - RNA, 19 nt, Artificial Sequence
  Description of Artificial Sequence: Synthetic oligonucleotide
acgucauggagcauggccc

SEQ ID NO: 618095 - RNA, 19 nt, Artificial Sequence
  Description of Artificial Sequence: Synthetic oligonucleotide
auguagcuuuaggagaucc

SEQ ID NO: 618096 - RNA, 19 nt, Artificial Sequence
  Description of Artificial Sequence: Synthetic oligonucleotide
auaguugguuacauaaauc

SEQ ID NO: 618097 - RNA, 19 nt, Artificial Sequence
  Description of Artificial Sequence: Synthetic oligonucleotide
augguaucagagcaguucu

SEQ ID NO: 618098 - RNA, 19 nt, Artificial Sequence
  Description of Artificial Sequence: Synthetic oligonucleotide
cauguauggauugaucuac

SEQ ID NO: 618099 - RNA, 19 nt, Artificial Sequence
  Description of Artificial Sequence: Synthetic oligonucleotide
acuugcaucaguuguuaca

SEQ ID NO: 618100 - RNA, 19 nt, Artificial Sequence
  Description of Artificial Sequence: Synthetic oligonucleotide
uaguagguaauuccccuga

SEQ ID NO: 618101 - RNA, 19 nt, Artificial Sequence
  Description of Artificial Sequence: Synthetic oligonucleotide
gaauacucauucucgaaaa

SEQ ID NO: 618102 - RNA, 19 nt, Artificial Sequence
  Description of Artificial Sequence: Synthetic oligonucleotide
ggucaugugugucaguagg

SEQ ID NO: 618103 - RNA, 19 nt, Artificial Sequence
  Description of Artificial Sequence: Synthetic oligonucleotide
uugaucuacaauccguaua

SEQ ID NO: 618104 - RNA, 19 nt, Artificial Sequence
  Description of Artificial Sequence: Synthetic oligonucleotide
gaugguaucagagcaguuc

SEQ ID NO: 618105 - RNA, 19 nt, Artificial Sequence
  Description of Artificial Sequence: Synthetic oligonucleotide
ucggggccaacaaugcugg

SEQ ID NO: 618106 - RNA, 19 nt, Artificial Sequence
  Description of Artificial Sequence: Synthetic oligonucleotide
agguaauuccccugaugac

SEQ ID NO: 618107 - RNA, 19 nt, Artificial Sequence
  Description of Artificial Sequence: Synthetic oligonucleotide
agauuucggaacucuacca

SEQ ID NO: 618108 - RNA, 19 nt, Artificial Sequence
  Description of Artificial Sequence: Synthetic oligonucleotide
aaguguggagcuuccacaa

SEQ ID NO: 618109 - RNA, 19 nt, Artificial Sequence
  Description of Artificial Sequence: Synthetic oligonucleotide
ucggaacucuaccagugug

SEQ ID NO: 618110 - RNA, 19 nt, Artificial Sequence
  Description of Artificial Sequence: Synthetic oligonucleotide
uacggaagcuuguaggagu

SEQ ID NO: 618111 - RNA, 19 nt, Artificial Sequence
  Description of Artificial Sequence: Synthetic oligonucleotide
uuaguggugacugaaugua

SEQ ID NO: 618112 - RNA, 19 nt, Artificial Sequence
  Description of Artificial Sequence: Synthetic oligonucleotide
aagcccucgucauccagag

SEQ ID NO: 618113 - RNA, 19 nt, Artificial Sequence
  Description of Artificial Sequence: Synthetic oligonucleotide
acucaucucaguucgaauu

SEQ ID NO: 618114 - RNA, 19 nt, Artificial Sequence
  Description of Artificial Sequence: Synthetic oligonucleotide
cuucaaucaacaaguccac

SEQ ID NO: 618115 - RNA, 19 nt, Artificial Sequence
  Description of Artificial Sequence: Synthetic oligonucleotide
cuguuucagaucauacuug

SEQ ID NO: 618116 - RNA, 19 nt, Artificial Sequence
  Description of Artificial Sequence: Synthetic oligonucleotide
agagcaguucucuuugccu

SEQ ID NO: 618117 - RNA, 19 nt, Artificial Sequence
  Description of Artificial Sequence: Synthetic oligonucleotide
gguagcacuugucaauagg

SEQ ID NO: 618118 - RNA, 19 nt, Artificial Sequence
  Description of Artificial Sequence: Synthetic oligonucleotide
uaguggugacugaauguag

SEQ ID NO: 618119 - RNA, 19 nt, Artificial Sequence
  Description of Artificial Sequence: Synthetic oligonucleotide
aguguguugccguaguaau

SEQ ID NO: 618120 - RNA, 19 nt, Artificial Sequence
  Description of Artificial Sequence: Synthetic oligonucleotide
aauaggucuucgugucuca

SEQ ID NO: 618121 - RNA, 19 nt, Artificial Sequence
  Description of Artificial Sequence: Synthetic oligonucleotide
cucauaggccacgucaugg

SEQ ID NO: 618122 - RNA, 19 nt, Artificial Sequence
  Description of Artificial Sequence: Synthetic oligonucleotide
auaggccacgucauggagc

SEQ ID NO: 618123 - RNA, 19 nt, Artificial Sequence
  Description of Artificial Sequence: Synthetic oligonucleotide
guugccguaguaauaguug

SEQ ID NO: 618124 - RNA, 19 nt, Artificial Sequence
  Description of Artificial Sequence: Synthetic oligonucleotide
caaggauauagccuggaca

SEQ ID NO: 618125 - RNA, 19 nt, Artificial Sequence
  Description of Artificial Sequence: Synthetic oligonucleotide
ugguuauagcuguccacag

SEQ ID NO: 618126 - RNA, 19 nt, Artificial Sequence
  Description of Artificial Sequence: Synthetic oligonucleotide
auacucauucucgaaaaga

SEQ ID NO: 618127 - RNA, 19 nt, Artificial Sequence
  Description of Artificial Sequence: Synthetic oligonucleotide
agcaguucucuuugccucg

SEQ ID NO: 618128 - RNA, 19 nt, Artificial Sequence
  Description of Artificial Sequence: Synthetic oligonucleotide
cauuguacaccacgugacc

SEQ ID NO: 618129 - RNA, 19 nt, Artificial Sequence
  Description of Artificial Sequence: Synthetic oligonucleotide
aggucuucgugucucagga

SEQ ID NO: 618130 - RNA, 19 nt, Artificial Sequence
  Description of Artificial Sequence: Synthetic oligonucleotide
gagauauuggcguugcgcu

SEQ ID NO: 618131 - RNA, 19 nt, Artificial Sequence
  Description of Artificial Sequence: Synthetic oligonucleotide
cuacauagcgcuguuucag

SEQ ID NO: 618132 - RNA, 19 nt, Artificial Sequence
  Description of Artificial Sequence: Synthetic oligonucleotide
caauccagcuguacggaag

SEQ ID NO: 618133 - RNA, 19 nt, Artificial Sequence
  Description of Artificial Sequence: Synthetic oligonucleotide
gggacaaucuguguguugg

SEQ ID NO: 618134 - RNA, 19 nt, Artificial Sequence
  Description of Artificial Sequence: Synthetic oligonucleotide
gcuaagggguccuucaucc

SEQ ID NO: 618135 - RNA, 19 nt, Artificial Sequence
  Description of Artificial Sequence: Synthetic oligonucleotide
aguuguuacagcagcacca

SEQ ID NO: 618136 - RNA, 19 nt, Artificial Sequence
  Description of Artificial Sequence: Synthetic oligonucleotide
uguauggauugaucuacaa

SEQ ID NO: 618137 - RNA, 19 nt, Artificial Sequence
  Description of Artificial Sequence: Synthetic oligonucleotide
aagaagccuggggacaauc

SEQ ID NO: 618138 - RNA, 19 nt, Artificial Sequence
  Description of Artificial Sequence: Synthetic oligonucleotide
uuuaggagauccaggccau

SEQ ID NO: 618139 - RNA, 19 nt, Artificial Sequence
  Description of Artificial Sequence: Synthetic oligonucleotide
uguuucgggugaaggcccg

SEQ ID NO: 618140 - RNA, 19 nt, Artificial Sequence
  Description of Artificial Sequence: Synthetic oligonucleotide
uguugccguaguaauaguu

SEQ ID NO: 618141 - RNA, 19 nt, Artificial Sequence
  Description of Artificial Sequence: Synthetic oligonucleotide
aauguagcuuuaggagauc

SEQ ID NO: 618142 - RNA, 19 nt, Artificial Sequence
  Description of Artificial Sequence: Synthetic oligonucleotide
gaaggcgccauuguacacc

SEQ ID NO: 618143 - RNA, 19 nt, Artificial Sequence
  Description of Artificial Sequence: Synthetic oligonucleotide
cagaucauacuugaugaug

SEQ ID NO: 618144 - RNA, 19 nt, Artificial Sequence
  Description of Artificial Sequence: Synthetic oligonucleotide
aguccacuccauugucacc

SEQ ID NO: 618145 - RNA, 19 nt, Artificial Sequence
  Description of Artificial Sequence: Synthetic oligonucleotide
auucucgaaaagaagccug

SEQ ID NO: 618146 - RNA, 19 nt, Artificial Sequence
  Description of Artificial Sequence: Synthetic oligonucleotide
gaugagaccagcacauaca

SEQ ID NO: 618147 - RNA, 19 nt, Artificial Sequence
  Description of Artificial Sequence: Synthetic oligonucleotide
auguuucgggugaaggccc

SEQ ID NO: 618148 - RNA, 19 nt, Artificial Sequence
  Description of Artificial Sequence: Synthetic oligonucleotide
gagcaguucucuuugccuc

SEQ ID NO: 618149 - RNA, 19 nt, Artificial Sequence
  Description of Artificial Sequence: Synthetic oligonucleotide
guagguaauuccccugaug

SEQ ID NO: 618150 - RNA, 19 nt, Artificial Sequence
  Description of Artificial Sequence: Synthetic oligonucleotide
uacauagcgcuguuucaga

SEQ ID NO: 618151 - RNA, 19 nt, Artificial Sequence
  Description of Artificial Sequence: Synthetic oligonucleotide
uagcacuugucaauagguc

SEQ ID NO: 618152 - RNA, 19 nt, Artificial Sequence
  Description of Artificial Sequence: Synthetic oligonucleotide
ucggcgcuccucuuugugg

SEQ ID NO: 618153 - RNA, 19 nt, Artificial Sequence
  Description of Artificial Sequence: Synthetic oligonucleotide
auugaucuacaauccguau

SEQ ID NO: 618154 - RNA, 19 nt, Artificial Sequence
  Description of Artificial Sequence: Synthetic oligonucleotide
ucgggugaaggcccgguug

SEQ ID NO: 618155 - RNA, 19 nt, Artificial Sequence
  Description of Artificial Sequence: Synthetic oligonucleotide
agauauuggcguugcgcug

SEQ ID NO: 618156 - RNA, 19 nt, Artificial Sequence
  Description of Artificial Sequence: Synthetic oligonucleotide
agagucggggccaacaaug

SEQ ID NO: 618157 - RNA, 19 nt, Artificial Sequence
  Description of Artificial Sequence: Synthetic oligonucleotide
ucagguacacccgucucug

SEQ ID NO: 618158 - RNA, 19 nt, Artificial Sequence
  Description of Artificial Sequence: Synthetic oligonucleotide
guuacuggucaaaaggaga

SEQ ID NO: 618159 - RNA, 19 nt, Artificial Sequence
  Description of Artificial Sequence: Synthetic oligonucleotide
ugaccggugccaauccagc

SEQ ID NO: 618160 - RNA, 19 nt, Artificial Sequence
  Description of Artificial Sequence: Synthetic oligonucleotide
acucauucucgaaaagaag

SEQ ID NO: 618161 - RNA, 19 nt, Artificial Sequence
  Description of Artificial Sequence: Synthetic oligonucleotide
cacccgaccucucagguac

SEQ ID NO: 618162 - RNA, 19 nt, Artificial Sequence
  Description of Artificial Sequence: Synthetic oligonucleotide
ucgcuuacucaucucaguu

SEQ ID NO: 618163 - RNA, 19 nt, Artificial Sequence
  Description of Artificial Sequence: Synthetic oligonucleotide
ugagaccagcacauacaug

SEQ ID NO: 618164 - RNA, 19 nt, Artificial Sequence
  Description of Artificial Sequence: Synthetic oligonucleotide
uaaauccggucguccuugg

SEQ ID NO: 618165 - RNA, 19 nt, Artificial Sequence
  Description of Artificial Sequence: Synthetic oligonucleotide
acgugaccggugccaaucc

SEQ ID NO: 618166 - RNA, 19 nt, Artificial Sequence
  Description of Artificial Sequence: Synthetic oligonucleotide
aauaaccuccuggcugaag

SEQ ID NO: 618167 - RNA, 19 nt, Artificial Sequence
  Description of Artificial Sequence: Synthetic oligonucleotide
gauugaucuacaauccgua

SEQ ID NO: 618168 - RNA, 19 nt, Artificial Sequence
  Description of Artificial Sequence: Synthetic oligonucleotide
uucggaacucuaccagugu

SEQ ID NO: 618169 - RNA, 19 nt, Artificial Sequence
  Description of Artificial Sequence: Synthetic oligonucleotide
uguggagcuuccacaaaua

SEQ ID NO: 618170 - RNA, 19 nt, Artificial Sequence
  Description of Artificial Sequence: Synthetic oligonucleotide
aggguguccuugcaccuuc

SEQ ID NO: 618171 - RNA, 19 nt, Artificial Sequence
  Description of Artificial Sequence: Synthetic oligonucleotide
uggcuuuauaguagguaau

SEQ ID NO: 618172 - RNA, 19 nt, Artificial Sequence
  Description of Artificial Sequence: Synthetic oligonucleotide
auuggcguugcgcugguua

SEQ ID NO: 618173 - RNA, 19 nt, Artificial Sequence
  Description of Artificial Sequence: Synthetic oligonucleotide
ugagagucggggccaacaa

SEQ ID NO: 618174 - RNA, 19 nt, Artificial Sequence
  Description of Artificial Sequence: Synthetic oligonucleotide
uaggagauauuggcguugc

SEQ ID NO: 618175 - RNA, 19 nt, Artificial Sequence
  Description of Artificial Sequence: Synthetic oligonucleotide
caaguguggagcuuccaca

SEQ ID NO: 618176 - RNA, 19 nt, Artificial Sequence
  Description of Artificial Sequence: Synthetic oligonucleotide
uggguagaugagccacagg

SEQ ID NO: 618177 - RNA, 19 nt, Artificial Sequence
  Description of Artificial Sequence: Synthetic oligonucleotide
cguaguaauaguugguuac

SEQ ID NO: 618178 - RNA, 19 nt, Artificial Sequence
  Description of Artificial Sequence: Synthetic oligonucleotide
ugcuccagcgaccuuguuu

SEQ ID NO: 618179 - RNA, 19 nt, Artificial Sequence
  Description of Artificial Sequence: Synthetic oligonucleotide
auauagacccaaacuguca

SEQ ID NO: 618180 - RNA, 19 nt, Artificial Sequence
  Description of Artificial Sequence: Synthetic oligonucleotide
ucauuccguccauaugugu

SEQ ID NO: 618181 - RNA, 19 nt, Artificial Sequence
  Description of Artificial Sequence: Synthetic oligonucleotide
ugacugaauguagcuuuag

SEQ ID NO: 618182 - RNA, 19 nt, Artificial Sequence
  Description of Artificial Sequence: Synthetic oligonucleotide
ggaauacucauucucgaaa

SEQ ID NO: 618183 - RNA, 19 nt, Artificial Sequence
  Description of Artificial Sequence: Synthetic oligonucleotide
ggaugagaccagcacauac

SEQ ID NO: 618184 - RNA, 19 nt, Artificial Sequence
  Description of Artificial Sequence: Synthetic oligonucleotide
gguaauuccccugaugaca

SEQ ID NO: 618185 - RNA, 19 nt, Artificial Sequence
  Description of Artificial Sequence: Synthetic oligonucleotide
uucgaauuucuuguacauc

SEQ ID NO: 618186 - RNA, 19 nt, Artificial Sequence
  Description of Artificial Sequence: Synthetic oligonucleotide
gcccgguuguaguagaagg

SEQ ID NO: 618187 - RNA, 19 nt, Artificial Sequence
  Description of Artificial Sequence: Synthetic oligonucleotide
gaggugagcgcucgaagga

SEQ ID NO: 618188 - RNA, 19 nt, Artificial Sequence
  Description of Artificial Sequence: Synthetic oligonucleotide
ugcgucccucugcagggcg

SEQ ID NO: 618189 - RNA, 19 nt, Artificial Sequence
  Description of Artificial Sequence: Synthetic oligonucleotide
ccagcacauacauguaugg

SEQ ID NO: 618190 - RNA, 19 nt, Artificial Sequence
  Description of Artificial Sequence: Synthetic oligonucleotide
uacacccgucucugcaagg

SEQ ID NO: 618191 - RNA, 19 nt, Artificial Sequence
  Description of Artificial Sequence: Synthetic oligonucleotide
cacacacaaggugcuagcg

SEQ ID NO: 618192 - RNA, 19 nt, Artificial Sequence
  Description of Artificial Sequence: Synthetic oligonucleotide
aggaugguaucagagcagu

SEQ ID NO: 618193 - RNA, 19 nt, Artificial Sequence
  Description of Artificial Sequence: Synthetic oligonucleotide
cucgucauccagagcuggg

SEQ ID NO: 618194 - RNA, 19 nt, Artificial Sequence
  Description of Artificial Sequence: Synthetic oligonucleotide
ugcuagcggccccucggcg

SEQ ID NO: 618195 - RNA, 19 nt, Artificial Sequence
  Description of Artificial Sequence: Synthetic oligonucleotide
acuugucaauaggucuucg

SEQ ID NO: 618196 - RNA, 19 nt, Artificial Sequence
  Description of Artificial Sequence: Synthetic oligonucleotide
uuacauaaauccggucguc

SEQ ID NO: 618197 - RNA, 19 nt, Artificial Sequence
  Description of Artificial Sequence: Synthetic oligonucleotide
caggaguucaauggaguug

SEQ ID NO: 618198 - RNA, 19 nt, Artificial Sequence
  Description of Artificial Sequence: Synthetic oligonucleotide
aagguagguuacuggucaa

SEQ ID NO: 618199 - RNA, 19 nt, Artificial Sequence
  Description of Artificial Sequence: Synthetic oligonucleotide
cuugcaccuuccuaugaca

SEQ ID NO: 618200 - RNA, 19 nt, Artificial Sequence
  Description of Artificial Sequence: Synthetic oligonucleotide
uacucaucucaguucgaau

SEQ ID NO: 618201 - RNA, 19 nt, Artificial Sequence
  Description of Artificial Sequence: Synthetic oligonucleotide
gucggggccaacaaugcug

SEQ ID NO: 618202 - RNA, 19 nt, Artificial Sequence
  Description of Artificial Sequence: Synthetic oligonucleotide
agcauugagcuugcucagg

SEQ ID NO: 618203 - RNA, 19 nt, Artificial Sequence
  Description of Artificial Sequence: Synthetic oligonucleotide
guacacccgucucugcaag

SEQ ID NO: 618204 - RNA, 19 nt, Artificial Sequence
  Description of Artificial Sequence: Synthetic oligonucleotide
guacggaagcuuguaggag

SEQ ID NO: 618205 - RNA, 19 nt, Artificial Sequence
  Description of Artificial Sequence: Synthetic oligonucleotide
ccauuguacaccacgugac

SEQ ID NO: 618206 - RNA, 19 nt, Artificial Sequence
  Description of Artificial Sequence: Synthetic oligonucleotide
cagcauugagcuugcucag

SEQ ID NO: 618207 - RNA, 19 nt, Artificial Sequence
  Description of Artificial Sequence: Synthetic oligonucleotide
gggccaacaaugcuggcug

SEQ ID NO: 618208 - RNA, 19 nt, Artificial Sequence
  Description of Artificial Sequence: Synthetic oligonucleotide
ggugcuagcggccccucgg

SEQ ID NO: 618209 - RNA, 19 nt, Artificial Sequence
  Description of Artificial Sequence: Synthetic oligonucleotide
aguagguaauuccccugau

SEQ ID NO: 618210 - RNA, 19 nt, Artificial Sequence
  Description of Artificial Sequence: Synthetic oligonucleotide
gcggaugucaggcaugcug

SEQ ID NO: 618211 - RNA, 19 nt, Artificial Sequence
  Description of Artificial Sequence: Synthetic oligonucleotide
ccagauuucggaacucuac

SEQ ID NO: 618212 - RNA, 19 nt, Artificial Sequence
  Description of Artificial Sequence: Synthetic oligonucleotide
agaaaccgcucuucauacu

SEQ ID NO: 618213 - RNA, 19 nt, Artificial Sequence
  Description of Artificial Sequence: Synthetic oligonucleotide
guaggaguugcuccagcga

SEQ ID NO: 618214 - RNA, 19 nt, Artificial Sequence
  Description of Artificial Sequence: Synthetic oligonucleotide
caccccgcagaugacaaag

SEQ ID NO: 618215 - RNA, 19 nt, Artificial Sequence
  Description of Artificial Sequence: Synthetic oligonucleotide
caaaaggagaagcucauuu

SEQ ID NO: 618216 - RNA, 19 nt, Artificial Sequence
  Description of Artificial Sequence: Synthetic oligonucleotide
ugguaucagagcaguucuc

SEQ ID NO: 618217 - RNA, 19 nt, Artificial Sequence
  Description of Artificial Sequence: Synthetic oligonucleotide
cccgugauuguggagaggg

SEQ ID NO: 618218 - RNA, 19 nt, Artificial Sequence
  Description of Artificial Sequence: Synthetic oligonucleotide
gaccucucagguacacccg

SEQ ID NO: 618219 - RNA, 19 nt, Artificial Sequence
  Description of Artificial Sequence: Synthetic oligonucleotide
uuggaggccacccgaccuc

SEQ ID NO: 618220 - RNA, 19 nt, Artificial Sequence
  Description of Artificial Sequence: Synthetic oligonucleotide
cuuccacaaauauguccuc

SEQ ID NO: 618221 - RNA, 19 nt, Artificial Sequence
  Description of Artificial Sequence: Synthetic oligonucleotide
gcuguacggaagcuuguag

SEQ ID NO: 618222 - RNA, 19 nt, Artificial Sequence
  Description of Artificial Sequence: Synthetic oligonucleotide
gcugcgucccucugcaggg

SEQ ID NO: 618223 - RNA, 19 nt, Artificial Sequence
  Description of Artificial Sequence: Synthetic oligonucleotide
gugaccggugccaauccag

SEQ ID NO: 618224 - RNA, 19 nt, Artificial Sequence
  Description of Artificial Sequence: Synthetic oligonucleotide
uggagaggguguccuugca

SEQ ID NO: 618225 - RNA, 19 nt, Artificial Sequence
  Description of Artificial Sequence: Synthetic oligonucleotide
accauggcgagugguagcu

SEQ ID NO: 618226 - RNA, 19 nt, Artificial Sequence
  Description of Artificial Sequence: Synthetic oligonucleotide
uuccuaugacauuccggau

SEQ ID NO: 618227 - RNA, 19 nt, Artificial Sequence
  Description of Artificial Sequence: Synthetic oligonucleotide
ugcugucuaggaugguauc

SEQ ID NO: 618228 - RNA, 19 nt, Artificial Sequence
  Description of Artificial Sequence: Synthetic oligonucleotide
cgaccucucagguacaccc

SEQ ID NO: 618229 - RNA, 19 nt, Artificial Sequence
  Description of Artificial Sequence: Synthetic oligonucleotide
gcauaggagauauuggcgu

SEQ ID NO: 618230 - RNA, 19 nt, Artificial Sequence
  Description of Artificial Sequence: Synthetic oligonucleotide
cgaaaagaagccuggggac

SEQ ID NO: 618231 - RNA, 19 nt, Artificial Sequence
  Description of Artificial Sequence: Synthetic oligonucleotide
caguaggcaaagaugacau

SEQ ID NO: 618232 - RNA, 19 nt, Artificial Sequence
  Description of Artificial Sequence: Synthetic oligonucleotide
caccuuccuaugacauucc

SEQ ID NO: 618233 - RNA, 19 nt, Artificial Sequence
  Description of Artificial Sequence: Synthetic oligonucleotide
cgccccaccaguuuagugg

SEQ ID NO: 618234 - RNA, 19 nt, Artificial Sequence
  Description of Artificial Sequence: Synthetic oligonucleotide
guggccauugucccaggca

SEQ ID NO: 618235 - RNA, 19 nt, Artificial Sequence
  Description of Artificial Sequence: Synthetic oligonucleotide
uuccguccauauguguucu

SEQ ID NO: 618236 - RNA, 19 nt, Artificial Sequence
  Description of Artificial Sequence: Synthetic oligonucleotide
caauugcuggagaggccug

SEQ ID NO: 618237 - RNA, 19 nt, Artificial Sequence
  Description of Artificial Sequence: Synthetic oligonucleotide
cccgguuguaguagaaggc

SEQ ID NO: 618238 - RNA, 19 nt, Artificial Sequence
  Description of Artificial Sequence: Synthetic oligonucleotide
gcagaaaccgcucuucaua

SEQ ID NO: 618239 - RNA, 19 nt, Artificial Sequence
  Description of Artificial Sequence: Synthetic oligonucleotide
guccauauguguucugggu

SEQ ID NO: 618240 - RNA, 19 nt, Artificial Sequence
  Description of Artificial Sequence: Synthetic oligonucleotide
ucgccccaccaguuuagug

SEQ ID NO: 618241 - RNA, 19 nt, Artificial Sequence
  Description of Artificial Sequence: Synthetic oligonucleotide
cccgcagaugacaaagcag

SEQ ID NO: 618242 - RNA, 19 nt, Artificial Sequence
  Description of Artificial Sequence: Synthetic oligonucleotide
auguauggauugaucuaca

SEQ ID NO: 618243 - RNA, 19 nt, Artificial Sequence
  Description of Artificial Sequence: Synthetic oligonucleotide
uucaucgcugcagguggga

SEQ ID NO: 618244 - RNA, 19 nt, Artificial Sequence
  Description of Artificial Sequence: Synthetic oligonucleotide
aguguggagcuuccacaaa

SEQ ID NO: 618245 - RNA, 19 nt, Artificial Sequence
  Description of Artificial Sequence: Synthetic oligonucleotide
uaauuccccugaugacagu

SEQ ID NO: 618246 - RNA, 19 nt, Artificial Sequence
  Description of Artificial Sequence: Synthetic oligonucleotide
ugggccccgugauugugga

SEQ ID NO: 618247 - RNA, 19 nt, Artificial Sequence
  Description of Artificial Sequence: Synthetic oligonucleotide
ggugacugaauguagcuuu

SEQ ID NO: 618248 - RNA, 19 nt, Artificial Sequence
  Description of Artificial Sequence: Synthetic oligonucleotide
cucaggaguucaauggagu

SEQ ID NO: 618249 - RNA, 19 nt, Artificial Sequence
  Description of Artificial Sequence: Synthetic oligonucleotide
aggccacccgaccucucag

SEQ ID NO: 618250 - RNA, 19 nt, Artificial Sequence
  Description of Artificial Sequence: Synthetic oligonucleotide
cacgugaccggugccaauc

SEQ ID NO: 618251 - RNA, 19 nt, Artificial Sequence
  Description of Artificial Sequence: Synthetic oligonucleotide
cuugucaauaggucuucgu

SEQ ID NO: 618252 - RNA, 19 nt, Artificial Sequence
  Description of Artificial Sequence: Synthetic oligonucleotide
gcuacauagcgcuguuuca

SEQ ID NO: 618253 - RNA, 19 nt, Artificial Sequence
  Description of Artificial Sequence: Synthetic oligonucleotide
ggcguugcgcugguuauag

SEQ ID NO: 618254 - RNA, 19 nt, Artificial Sequence
  Description of Artificial Sequence: Synthetic oligonucleotide
uuucgggugaaggcccggu

SEQ ID NO: 618255 - RNA, 19 nt, Artificial Sequence
  Description of Artificial Sequence: Synthetic oligonucleotide
gaccccgaggaggaaacuc

SEQ ID NO: 618256 - RNA, 19 nt, Artificial Sequence
  Description of Artificial Sequence: Synthetic oligonucleotide
auauuggcguugcgcuggu

SEQ ID NO: 618257 - RNA, 19 nt, Artificial Sequence
  Description of Artificial Sequence: Synthetic oligonucleotide
cuuacucaucucaguucga

SEQ ID NO: 618258 - RNA, 19 nt, Artificial Sequence
  Description of Artificial Sequence: Synthetic oligonucleotide
aggauauagccuggacacu

SEQ ID NO: 618259 - RNA, 19 nt, Artificial Sequence
  Description of Artificial Sequence: Synthetic oligonucleotide
cacuugucaauaggucuuc

SEQ ID NO: 618260 - RNA, 19 nt, Artificial Sequence
  Description of Artificial Sequence: Synthetic oligonucleotide
ggcggagcggaugucaggc

SEQ ID NO: 618261 - RNA, 19 nt, Artificial Sequence
  Description of Artificial Sequence: Synthetic oligonucleotide
ugcgcugguuauagcuguc

SEQ ID NO: 618262 - RNA, 19 nt, Artificial Sequence
  Description of Artificial Sequence: Synthetic oligonucleotide
cacccgucucugcaagggc

SEQ ID NO: 618263 - RNA, 19 nt, Artificial Sequence
  Description of Artificial Sequence: Synthetic oligonucleotide
guguggagcuuccacaaau

SEQ ID NO: 618264 - RNA, 19 nt, Artificial Sequence
  Description of Artificial Sequence: Synthetic oligonucleotide
cuaagggguccuucaucca

SEQ ID NO: 618265 - RNA, 19 nt, Artificial Sequence
  Description of Artificial Sequence: Synthetic oligonucleotide
ccucgcuuacucaucucag

SEQ ID NO: 618266 - RNA, 19 nt, Artificial Sequence
  Description of Artificial Sequence: Synthetic oligonucleotide
cagguacacccgucucugc

SEQ ID NO: 618267 - RNA, 19 nt, Artificial Sequence
  Description of Artificial Sequence: Synthetic oligonucleotide
uccucuuuguggggucaug

SEQ ID NO: 618268 - RNA, 19 nt, Artificial Sequence
  Description of Artificial Sequence: Synthetic oligonucleotide
ggguagcacuugucaauag

SEQ ID NO: 618269 - RNA, 19 nt, Artificial Sequence
  Description of Artificial Sequence: Synthetic oligonucleotide
cguccauauguguucuggg

SEQ ID NO: 618270 - RNA, 19 nt, Artificial Sequence
  Description of Artificial Sequence: Synthetic oligonucleotide
uucgggugaaggcccgguu

SEQ ID NO: 618271 - RNA, 19 nt, Artificial Sequence
  Description of Artificial Sequence: Synthetic oligonucleotide
ggccacgucauggagcaug

SEQ ID NO: 618272 - RNA, 19 nt, Artificial Sequence
  Description of Artificial Sequence: Synthetic oligonucleotide
gguagguuacuggucaaaa

SEQ ID NO: 618273 - RNA, 19 nt, Artificial Sequence
  Description of Artificial Sequence: Synthetic oligonucleotide
cauucucgaaaagaagccu

SEQ ID NO: 618274 - RNA, 19 nt, Artificial Sequence
  Description of Artificial Sequence: Synthetic oligonucleotide
gugcuagcggccccucggc

SEQ ID NO: 618275 - RNA, 19 nt, Artificial Sequence
  Description of Artificial Sequence: Synthetic oligonucleotide
gugauuguggagagggugu

SEQ ID NO: 618276 - RNA, 19 nt, Artificial Sequence
  Description of Artificial Sequence: Synthetic oligonucleotide
ccaccuacaccacucucac

SEQ ID NO: 618277 - RNA, 19 nt, Artificial Sequence
  Description of Artificial Sequence: Synthetic oligonucleotide
guuucgggugaaggcccgg

SEQ ID NO: 618278 - RNA, 19 nt, Artificial Sequence
  Description of Artificial Sequence: Synthetic oligonucleotide
cagcacauacauguaugga

SEQ ID NO: 618279 - RNA, 19 nt, Artificial Sequence
  Description of Artificial Sequence: Synthetic oligonucleotide
gccucgcuuacucaucuca

SEQ ID NO: 618280 - RNA, 19 nt, Artificial Sequence
  Description of Artificial Sequence: Synthetic oligonucleotide
gcgaccuuguuugaaguuc

SEQ ID NO: 618281 - RNA, 19 nt, Artificial Sequence
  Description of Artificial Sequence: Synthetic oligonucleotide
cugagagucggggccaaca

SEQ ID NO: 618282 - RNA, 19 nt, Artificial Sequence
  Description of Artificial Sequence: Synthetic oligonucleotide
agguagguuacuggucaaa

SEQ ID NO: 618283 - RNA, 19 nt, Artificial Sequence
  Description of Artificial Sequence: Synthetic oligonucleotide
cuccauugucaccacugaa

SEQ ID NO: 618284 - RNA, 19 nt, Artificial Sequence
  Description of Artificial Sequence: Synthetic oligonucleotide
guggagcuuccacaaauau

SEQ ID NO: 618285 - RNA, 19 nt, Artificial Sequence
  Description of Artificial Sequence: Synthetic oligonucleotide
gcaccauggcgagugguag

SEQ ID NO: 618286 - RNA, 19 nt, Artificial Sequence
  Description of Artificial Sequence: Synthetic oligonucleotide
ugcgccauguggucuccuu

SEQ ID NO: 618287 - RNA, 19 nt, Artificial Sequence
  Description of Artificial Sequence: Synthetic oligonucleotide
ggggacaaucuguguguug

SEQ ID NO: 618288 - RNA, 19 nt, Artificial Sequence
  Description of Artificial Sequence: Synthetic oligonucleotide
caucugaguggcccugcca

SEQ ID NO: 618289 - RNA, 19 nt, Artificial Sequence
  Description of Artificial Sequence: Synthetic oligonucleotide
ccaacaaugcuggcuguug

SEQ ID NO: 618290 - RNA, 19 nt, Artificial Sequence
  Description of Artificial Sequence: Synthetic oligonucleotide
aggugagcgcucgaaggaa

SEQ ID NO: 618291 - RNA, 19 nt, Artificial Sequence
  Description of Artificial Sequence: Synthetic oligonucleotide
guuguuacagcagcaccau

SEQ ID NO: 618292 - RNA, 19 nt, Artificial Sequence
  Description of Artificial Sequence: Synthetic oligonucleotide
gcuuggaggccacccgacc

SEQ ID NO: 618293 - RNA, 19 nt, Artificial Sequence
  Description of Artificial Sequence: Synthetic oligonucleotide
gguacacccgucucugcaa

SEQ ID NO: 618294 - RNA, 19 nt, Artificial Sequence
  Description of Artificial Sequence: Synthetic oligonucleotide
ggcuguugagguagaggcc

SEQ ID NO: 618295 - RNA, 19 nt, Artificial Sequence
  Description of Artificial Sequence: Synthetic oligonucleotide
uccggucguccuuggcuaa

SEQ ID NO: 618296 - RNA, 19 nt, Artificial Sequence
  Description of Artificial Sequence: Synthetic oligonucleotide
cauaggagauauuggcguu

SEQ ID NO: 618297 - RNA, 19 nt, Artificial Sequence
  Description of Artificial Sequence: Synthetic oligonucleotide
agcuguacggaagcuugua

SEQ ID NO: 618298 - RNA, 19 nt, Artificial Sequence
  Description of Artificial Sequence: Synthetic oligonucleotide
ccgaggaggaaacucuuca

SEQ ID NO: 618299 - RNA, 19 nt, Artificial Sequence
  Description of Artificial Sequence: Synthetic oligonucleotide
ccgcagaugacaaagcagu

SEQ ID NO: 618300 - RNA, 19 nt, Artificial Sequence
  Description of Artificial Sequence: Synthetic oligonucleotide
cucgcuuacucaucucagu

SEQ ID NO: 618301 - RNA, 19 nt, Artificial Sequence
  Description of Artificial Sequence: Synthetic oligonucleotide
agggcggagcggaugucag

SEQ ID NO: 618302 - RNA, 19 nt, Artificial Sequence
  Description of Artificial Sequence: Synthetic oligonucleotide
guagucuaucuggguggug

SEQ ID NO: 618303 - RNA, 19 nt, Artificial Sequence
  Description of Artificial Sequence: Synthetic oligonucleotide
uggggacaaucuguguguu

SEQ ID NO: 618304 - RNA, 19 nt, Artificial Sequence
  Description of Artificial Sequence: Synthetic oligonucleotide
ggccccgugauuguggaga

SEQ ID NO: 618305 - RNA, 19 nt, Artificial Sequence
  Description of Artificial Sequence: Synthetic oligonucleotide
ggugccaauccagcuguac

SEQ ID NO: 618306 - RNA, 19 nt, Artificial Sequence
  Description of Artificial Sequence: Synthetic oligonucleotide
gagagucggggccaacaau

SEQ ID NO: 618307 - RNA, 19 nt, Artificial Sequence
  Description of Artificial Sequence: Synthetic oligonucleotide
accaaguguggagcuucca

SEQ ID NO: 618308 - RNA, 19 nt, Artificial Sequence
  Description of Artificial Sequence: Synthetic oligonucleotide
cucucagguacacccgucu

SEQ ID NO: 618309 - RNA, 19 nt, Artificial Sequence
  Description of Artificial Sequence: Synthetic oligonucleotide
gaccggugccaauccagcu

SEQ ID NO: 618310 - RNA, 19 nt, Artificial Sequence
  Description of Artificial Sequence: Synthetic oligonucleotide
gugacugaauguagcuuua

SEQ ID NO: 618311 - RNA, 19 nt, Artificial Sequence
  Description of Artificial Sequence: Synthetic oligonucleotide
ggacaauaaccuccuggcu

SEQ ID NO: 618312 - RNA, 19 nt, Artificial Sequence
  Description of Artificial Sequence: Synthetic oligonucleotide
caggcauagaggaggcggu

SEQ ID NO: 618313 - RNA, 19 nt, Artificial Sequence
  Description of Artificial Sequence: Synthetic oligonucleotide
caggccccuucauuccguc

SEQ ID NO: 618314 - RNA, 19 nt, Artificial Sequence
  Description of Artificial Sequence: Synthetic oligonucleotide
gccccgugauuguggagag

SEQ ID NO: 618315 - RNA, 19 nt, Artificial Sequence
  Description of Artificial Sequence: Synthetic oligonucleotide
ccucgucauccagagcugg

SEQ ID NO: 618316 - RNA, 19 nt, Artificial Sequence
  Description of Artificial Sequence: Synthetic oligonucleotide
gggcggagcggaugucagg

SEQ ID NO: 618317 - RNA, 19 nt, Artificial Sequence
  Description of Artificial Sequence: Synthetic oligonucleotide
guguguugccguaguaaua

SEQ ID NO: 618318 - RNA, 19 nt, Artificial Sequence
  Description of Artificial Sequence: Synthetic oligonucleotide
accacgugaccggugccaa

SEQ ID NO: 618319 - RNA, 19 nt, Artificial Sequence
  Description of Artificial Sequence: Synthetic oligonucleotide
agcggccccucggcgcucc

SEQ ID NO: 618320 - RNA, 19 nt, Artificial Sequence
  Description of Artificial Sequence: Synthetic oligonucleotide
uagcgcuguuucagaucau

SEQ ID NO: 618321 - RNA, 19 nt, Artificial Sequence
  Description of Artificial Sequence: Synthetic oligonucleotide
caccacgugaccggugcca

SEQ ID NO: 618322 - RNA, 19 nt, Artificial Sequence
  Description of Artificial Sequence: Synthetic oligonucleotide
cuaugacauuccggauguc

SEQ ID NO: 618323 - RNA, 19 nt, Artificial Sequence
  Description of Artificial Sequence: Synthetic oligonucleotide
cccgucucugcaagggcug

SEQ ID NO: 618324 - RNA, 19 nt, Artificial Sequence
  Description of Artificial Sequence: Synthetic oligonucleotide
gcgcugguuauagcugucc

SEQ ID NO: 618325 - RNA, 19 nt, Artificial Sequence
  Description of Artificial Sequence: Synthetic oligonucleotide
gccaauccagcuguacgga

SEQ ID NO: 618326 - RNA, 19 nt, Artificial Sequence
  Description of Artificial Sequence: Synthetic oligonucleotide
ccguaguaauaguugguua

SEQ ID NO: 618327 - RNA, 19 nt, Artificial Sequence
  Description of Artificial Sequence: Synthetic oligonucleotide
uggcguugcgcugguuaua

SEQ ID NO: 618328 - RNA, 19 nt, Artificial Sequence
  Description of Artificial Sequence: Synthetic oligonucleotide
caccuacaccacucucaca

SEQ ID NO: 618329 - RNA, 19 nt, Artificial Sequence
  Description of Artificial Sequence: Synthetic oligonucleotide
guguugccguaguaauagu

SEQ ID NO: 618330 - RNA, 19 nt, Artificial Sequence
  Description of Artificial Sequence: Synthetic oligonucleotide
cccgaggaggaaacucuuc

SEQ ID NO: 618331 - RNA, 19 nt, Artificial Sequence
  Description of Artificial Sequence: Synthetic oligonucleotide
ccaguuuaguggugacuga

SEQ ID NO: 618332 - RNA, 19 nt, Artificial Sequence
  Description of Artificial Sequence: Synthetic oligonucleotide
gugugucaguaggcaaaga

SEQ ID NO: 618333 - RNA, 19 nt, Artificial Sequence
  Description of Artificial Sequence: Synthetic oligonucleotide
gcgcucgaaggaagguagg

SEQ ID NO: 618334 - RNA, 19 nt, Artificial Sequence
  Description of Artificial Sequence: Synthetic oligonucleotide
cguugcgcugguuauagcu

SEQ ID NO: 618335 - RNA, 19 nt, Artificial Sequence
  Description of Artificial Sequence: Synthetic oligonucleotide
gcgccauguggucuccuuc

SEQ ID NO: 618336 - RNA, 19 nt, Artificial Sequence
  Description of Artificial Sequence: Synthetic oligonucleotide
cuagcggccccucggcgcu

SEQ ID NO: 618337 - RNA, 19 nt, Artificial Sequence
  Description of Artificial Sequence: Synthetic oligonucleotide
gccuggacacuugcaucag

SEQ ID NO: 618338 - RNA, 19 nt, Artificial Sequence
  Description of Artificial Sequence: Synthetic oligonucleotide
cuccagcgaccuuguuuga

SEQ ID NO: 618339 - RNA, 19 nt, Artificial Sequence
  Description of Artificial Sequence: Synthetic oligonucleotide
gccccaccaguuuaguggu

SEQ ID NO: 618340 - RNA, 19 nt, Artificial Sequence
  Description of Artificial Sequence: Synthetic oligonucleotide
ccaauccagcuguacggaa

SEQ ID NO: 618341 - RNA, 19 nt, Artificial Sequence
  Description of Artificial Sequence: Synthetic oligonucleotide
gcacuugucaauaggucuu

SEQ ID NO: 618342 - RNA, 19 nt, Artificial Sequence
  Description of Artificial Sequence: Synthetic oligonucleotide
gccguaguaauaguugguu

SEQ ID NO: 618343 - RNA, 19 nt, Artificial Sequence
  Description of Artificial Sequence: Synthetic oligonucleotide
gcgucccucugcagggcgg

SEQ ID NO: 618344 - RNA, 19 nt, Artificial Sequence
  Description of Artificial Sequence: Synthetic oligonucleotide
uauuggcguugcgcugguu

SEQ ID NO: 618345 - RNA, 19 nt, Artificial Sequence
  Description of Artificial Sequence: Synthetic oligonucleotide
ccgaccucucagguacacc

SEQ ID NO: 618346 - RNA, 19 nt, Artificial Sequence
  Description of Artificial Sequence: Synthetic oligonucleotide
caauaaccuccuggcugaa

SEQ ID NO: 618347 - RNA, 19 nt, Artificial Sequence
  Description of Artificial Sequence: Synthetic oligonucleotide
gggccccgugauuguggag

SEQ ID NO: 618348 - RNA, 19 nt, Artificial Sequence
  Description of Artificial Sequence: Synthetic oligonucleotide
cacccaccuacaccacucu

SEQ ID NO: 618349 - RNA, 19 nt, Artificial Sequence
  Description of Artificial Sequence: Synthetic oligonucleotide
gccacccgaccucucaggu

SEQ ID NO: 618350 - RNA, 19 nt, Artificial Sequence
  Description of Artificial Sequence: Synthetic oligonucleotide
gcgccauuguacaccacgu

SEQ ID NO: 618351 - RNA, 19 nt, Artificial Sequence
  Description of Artificial Sequence: Synthetic oligonucleotide
guuccucggggugggcgua

SEQ ID NO: 618352 - RNA, 19 nt, Artificial Sequence
  Description of Artificial Sequence: Synthetic oligonucleotide
acccgaccucucagguaca

SEQ ID NO: 618353 - RNA, 19 nt, Artificial Sequence
  Description of Artificial Sequence: Synthetic oligonucleotide
cccgaccucucagguacac

SEQ ID NO: 618354 - RNA, 19 nt, Artificial Sequence
  Description of Artificial Sequence: Synthetic oligonucleotide
ccccaccaguuuaguggug

SEQ ID NO: 618355 - RNA, 19 nt, Artificial Sequence
  Description of Artificial Sequence: Synthetic oligonucleotide
ccccgugauuguggagagg

SEQ ID NO: 618356 - RNA, 19 nt, Artificial Sequence
  Description of Artificial Sequence: Synthetic oligonucleotide
gcagcuacauagcgcuguu

SEQ ID NO: 618357 - RNA, 19 nt, Artificial Sequence
  Description of Artificial Sequence: Synthetic oligonucleotide
ccauggcgagugguagcug

SEQ ID NO: 618358 - RNA, 19 nt, Artificial Sequence
  Description of Artificial Sequence: Synthetic oligonucleotide
gcaccccgcagaugacaaa

SEQ ID NO: 618359 - RNA, 19 nt, Artificial Sequence
  Description of Artificial Sequence: Synthetic oligonucleotide
gccuggggacaaucugugu

SEQ ID NO: 618360 - RNA, 19 nt, Artificial Sequence
  Description of Artificial Sequence: Synthetic oligonucleotide
cgugaccggugccaaucca

SEQ ID NO: 618361 - RNA, 19 nt, Artificial Sequence
  Description of Artificial Sequence: Synthetic oligonucleotide
gguggugggccccgugauu

SEQ ID NO: 618362 - RNA, 19 nt, Artificial Sequence
  Description of Artificial Sequence: Synthetic oligonucleotide
cucgccccaccaguuuagu

SEQ ID NO: 618363 - RNA, 19 nt, Artificial Sequence
  Description of Artificial Sequence: Synthetic oligonucleotide
ccuggacacuugcaucagu

SEQ ID NO: 618364 - RNA, 19 nt, Artificial Sequence
  Description of Artificial Sequence: Synthetic oligonucleotide
ccacccgaccucucaggua

SEQ ID NO: 618365 - RNA, 19 nt, Artificial Sequence
  Description of Artificial Sequence: Synthetic oligonucleotide
uagcggccccucggcgcuc

SEQ ID NO: 618366 - RNA, 19 nt, Artificial Sequence
  Description of Artificial Sequence: Synthetic oligonucleotide
aggccacgucauggagcau

SEQ ID NO: 618367 - RNA, 19 nt, Artificial Sequence
  Description of Artificial Sequence: Synthetic oligonucleotide
ccgugauuguggagagggu

SEQ ID NO: 618368 - RNA, 19 nt, Artificial Sequence
  Description of Artificial Sequence: Synthetic oligonucleotide
cagcuacauagcgcuguuu

SEQ ID NO: 618369 - RNA, 19 nt, Artificial Sequence
  Description of Artificial Sequence: Synthetic oligonucleotide
ccaggccccuucauuccgu

SEQ ID NO: 618370 - RNA, 19 nt, Artificial Sequence
  Description of Artificial Sequence: Synthetic oligonucleotide
cgaaggaagguagguuacu

SEQ ID NO: 618371 - RNA, 19 nt, Artificial Sequence
  Description of Artificial Sequence: Synthetic oligonucleotide
ccacuccauugucaccacu

SEQ ID NO: 618372 - RNA, 19 nt, Artificial Sequence
  Description of Artificial Sequence: Synthetic oligonucleotide
cgcagaugacaaagcaguu

SEQ ID NO: 618373 - RNA, 19 nt, Artificial Sequence
  Description of Artificial Sequence: Synthetic oligonucleotide
gugcgccauguggucuccu

SEQ ID NO: 618374 - RNA, 19 nt, Artificial Sequence
  Description of Artificial Sequence: Synthetic oligonucleotide
cggagcccagugcgccaug

SEQ ID NO: 618375 - RNA, 19 nt, Artificial Sequence
  Description of Artificial Sequence: Synthetic oligonucleotide
ccucggcgcuccucuuugu

SEQ ID NO: 618376 - RNA, 19 nt, Artificial Sequence
  Description of Artificial Sequence: Synthetic oligonucleotide
ccccuucauuccguccaua

SEQ ID NO: 618377 - RNA, 19 nt, Artificial Sequence
  Description of Artificial Sequence: Synthetic oligonucleotide
ccacgugaccggugccaau

SEQ ID NO: 618378 - RNA, 19 nt, Artificial Sequence
  Description of Artificial Sequence: Synthetic oligonucleotide
ccggagcccagugcgccau

SEQ ID NO: 618379 - RNA, 19 nt, Artificial Sequence
  Description of Artificial Sequence: Synthetic oligonucleotide
gccccucggcgcuccucuu

SEQ ID NO: 618380 - RNA, 19 nt, Artificial Sequence
  Description of Artificial Sequence: Synthetic oligonucleotide
auugauaucgcgcagaguc

SEQ ID NO: 618381 - RNA, 19 nt, Artificial Sequence
  Description of Artificial Sequence: Synthetic oligonucleotide
aagucguuaauuaacaugc

SEQ ID NO: 618382 - RNA, 19 nt, Artificial Sequence
  Description of Artificial Sequence: Synthetic oligonucleotide
aaucaugugaaaccaacgg

SEQ ID NO: 618383 - RNA, 19 nt, Artificial Sequence
  Description of Artificial Sequence: Synthetic oligonucleotide
aacggguacuuccacaucc

SEQ ID NO: 618384 - RNA, 19 nt, Artificial Sequence
  Description of Artificial Sequence: Synthetic oligonucleotide
aauaucuuaggcaauaaug

SEQ ID NO: 618385 - RNA, 19 nt, Artificial Sequence
  Description of Artificial Sequence: Synthetic oligonucleotide
uaauuaacaugccauauga

SEQ ID NO: 618386 - RNA, 19 nt, Artificial Sequence
  Description of Artificial Sequence: Synthetic oligonucleotide
aaaccaacggcacuacggc

SEQ ID NO: 618387 - RNA, 19 nt, Artificial Sequence
  Description of Artificial Sequence: Synthetic oligonucleotide
uaagagaugucauugaacu

SEQ ID NO: 618388 - RNA, 19 nt, Artificial Sequence
  Description of Artificial Sequence: Synthetic oligonucleotide
uuaaccuuuguacugagac

SEQ ID NO: 618389 - RNA, 19 nt, Artificial Sequence
  Description of Artificial Sequence: Synthetic oligonucleotide
aacauaacuaaauccuauc

SEQ ID NO: 618390 - RNA, 19 nt, Artificial Sequence
  Description of Artificial Sequence: Synthetic oligonucleotide
aacuaaauccuaucagcac

SEQ ID NO: 618391 - RNA, 19 nt, Artificial Sequence
  Description of Artificial Sequence: Synthetic oligonucleotide
aaaaugagcuaagagaugu

SEQ ID NO: 618392 - RNA, 19 nt, Artificial Sequence
  Description of Artificial Sequence: Synthetic oligonucleotide
aucaugugaaaccaacggc

SEQ ID NO: 618393 - RNA, 19 nt, Artificial Sequence
  Description of Artificial Sequence: Synthetic oligonucleotide
aaagcuacaaagcccaagu

SEQ ID NO: 618394 - RNA, 19 nt, Artificial Sequence
  Description of Artificial Sequence: Synthetic oligonucleotide
augcauuucguucaauggc

SEQ ID NO: 618395 - RNA, 19 nt, Artificial Sequence
  Description of Artificial Sequence: Synthetic oligonucleotide
accuauauacaauaaaaca

SEQ ID NO: 618396 - RNA, 19 nt, Artificial Sequence
  Description of Artificial Sequence: Synthetic oligonucleotide
ucaugugaaaccaacggca

SEQ ID NO: 618397 - RNA, 19 nt, Artificial Sequence
  Description of Artificial Sequence: Synthetic oligonucleotide
aaaagcgcauguucgcagc

SEQ ID NO: 618398 - RNA, 19 nt, Artificial Sequence
  Description of Artificial Sequence: Synthetic oligonucleotide
aaggaugcaagggacaaac

SEQ ID NO: 618399 - RNA, 19 nt, Artificial Sequence
  Description of Artificial Sequence: Synthetic oligonucleotide
uaagucguuaauuaacaug

SEQ ID NO: 618400 - RNA, 19 nt, Artificial Sequence
  Description of Artificial Sequence: Synthetic oligonucleotide
ugccauaugagucugaaua

SEQ ID NO: 618401 - RNA, 19 nt, Artificial Sequence
  Description of Artificial Sequence: Synthetic oligonucleotide
agcucucucacauacuggc

SEQ ID NO: 618402 - RNA, 19 nt, Artificial Sequence
  Description of Artificial Sequence: Synthetic oligonucleotide
aaauagccaguauugauau

SEQ ID NO: 618403 - RNA, 19 nt, Artificial Sequence
  Description of Artificial Sequence: Synthetic oligonucleotide
cauaacuaaauccuaucag

SEQ ID NO: 618404 - RNA, 19 nt, Artificial Sequence
  Description of Artificial Sequence: Synthetic oligonucleotide
ugcauuucguucaauggcc

SEQ ID NO: 618405 - RNA, 19 nt, Artificial Sequence
  Description of Artificial Sequence: Synthetic oligonucleotide
cugauauccuagcagaagg

SEQ ID NO: 618406 - RNA, 19 nt, Artificial Sequence
  Description of Artificial Sequence: Synthetic oligonucleotide
aagugcaaucaugugaaac

SEQ ID NO: 618407 - RNA, 19 nt, Artificial Sequence
  Description of Artificial Sequence: Synthetic oligonucleotide
agaugugauaaacggguac

SEQ ID NO: 618408 - RNA, 19 nt, Artificial Sequence
  Description of Artificial Sequence: Synthetic oligonucleotide
cuugugacccacaaaagug

SEQ ID NO: 618409 - RNA, 19 nt, Artificial Sequence
  Description of Artificial Sequence: Synthetic oligonucleotide
uucuuuuaaccacaugaug

SEQ ID NO: 618410 - RNA, 19 nt, Artificial Sequence
  Description of Artificial Sequence: Synthetic oligonucleotide
gaaaccaacggcacuacgg

SEQ ID NO: 618411 - RNA, 19 nt, Artificial Sequence
  Description of Artificial Sequence: Synthetic oligonucleotide
aaccuuuguacugagacca

SEQ ID NO: 618412 - RNA, 19 nt, Artificial Sequence
  Description of Artificial Sequence: Synthetic oligonucleotide
auucaacuagcucaucccg

SEQ ID NO: 618413 - RNA, 19 nt, Artificial Sequence
  Description of Artificial Sequence: Synthetic oligonucleotide
ucgaguaauacacguaugu

SEQ ID NO: 618414 - RNA, 19 nt, Artificial Sequence
  Description of Artificial Sequence: Synthetic oligonucleotide
aaaagugcaaucaugugaa

SEQ ID NO: 618415 - RNA, 19 nt, Artificial Sequence
  Description of Artificial Sequence: Synthetic oligonucleotide
uauaggguuuucgugaugc

SEQ ID NO: 618416 - RNA, 19 nt, Artificial Sequence
  Description of Artificial Sequence: Synthetic oligonucleotide
cuaggagcagauuugcggg

SEQ ID NO: 618417 - RNA, 19 nt, Artificial Sequence
  Description of Artificial Sequence: Synthetic oligonucleotide
ucguuaauuaacaugccau

SEQ ID NO: 618418 - RNA, 19 nt, Artificial Sequence
  Description of Artificial Sequence: Synthetic oligonucleotide
aaagcgcauguucgcagcc

SEQ ID NO: 618419 - RNA, 19 nt, Artificial Sequence
  Description of Artificial Sequence: Synthetic oligonucleotide
cugagaccaacaaagauuc

SEQ ID NO: 618420 - RNA, 19 nt, Artificial Sequence
  Description of Artificial Sequence: Synthetic oligonucleotide
ucaccauccaugaucaaga

SEQ ID NO: 618421 - RNA, 19 nt, Artificial Sequence
  Description of Artificial Sequence: Synthetic oligonucleotide
cagugaucgaguaauacac

SEQ ID NO: 618422 - RNA, 19 nt, Artificial Sequence
  Description of Artificial Sequence: Synthetic oligonucleotide
ucuaaagccccuacuuucc

SEQ ID NO: 618423 - RNA, 19 nt, Artificial Sequence
  Description of Artificial Sequence: Synthetic oligonucleotide
gugauaaacggguacuucc

SEQ ID NO: 618424 - RNA, 19 nt, Artificial Sequence
  Description of Artificial Sequence: Synthetic oligonucleotide
uuuucgugaugcuuggucu

SEQ ID NO: 618425 - RNA, 19 nt, Artificial Sequence
  Description of Artificial Sequence: Synthetic oligonucleotide
gauugaggagaacuucuag

SEQ ID NO: 618426 - RNA, 19 nt, Artificial Sequence
  Description of Artificial Sequence: Synthetic oligonucleotide
aaaauagccaguauugaua

SEQ ID NO: 618427 - RNA, 19 nt, Artificial Sequence
  Description of Artificial Sequence: Synthetic oligonucleotide
ugauaaacggguacuucca

SEQ ID NO: 618428 - RNA, 19 nt, Artificial Sequence
  Description of Artificial Sequence: Synthetic oligonucleotide
aacuagacggaccuucaga

SEQ ID NO: 618429 - RNA, 19 nt, Artificial Sequence
  Description of Artificial Sequence: Synthetic oligonucleotide
uggacugguuccaaaacca

SEQ ID NO: 618430 - RNA, 19 nt, Artificial Sequence
  Description of Artificial Sequence: Synthetic oligonucleotide
uuuugguagggaaguaucu

SEQ ID NO: 618431 - RNA, 19 nt, Artificial Sequence
  Description of Artificial Sequence: Synthetic oligonucleotide
acuugugacccacaaaagu

SEQ ID NO: 618432 - RNA, 19 nt, Artificial Sequence
  Description of Artificial Sequence: Synthetic oligonucleotide
uauccuagcagaaggaguu

SEQ ID NO: 618433 - RNA, 19 nt, Artificial Sequence
  Description of Artificial Sequence: Synthetic oligonucleotide
auuugguauagcuuuuggu

SEQ ID NO: 618434 - RNA, 19 nt, Artificial Sequence
  Description of Artificial Sequence: Synthetic oligonucleotide
aaccugauugaggagaacu

SEQ ID NO: 618435 - RNA, 19 nt, Artificial Sequence
  Description of Artificial Sequence: Synthetic oligonucleotide
gaguuaguggacugguucc

SEQ ID NO: 618436 - RNA, 19 nt, Artificial Sequence
  Description of Artificial Sequence: Synthetic oligonucleotide
uguuugucguucccgaacu

SEQ ID NO: 618437 - RNA, 19 nt, Artificial Sequence
  Description of Artificial Sequence: Synthetic oligonucleotide
gauauccuagcagaaggag

SEQ ID NO: 618438 - RNA, 19 nt, Artificial Sequence
  Description of Artificial Sequence: Synthetic oligonucleotide
uagcuuuuggugaagggaa

SEQ ID NO: 618439 - RNA, 19 nt, Artificial Sequence
  Description of Artificial Sequence: Synthetic oligonucleotide
ugauauccuagcagaagga

SEQ ID NO: 618440 - RNA, 19 nt, Artificial Sequence
  Description of Artificial Sequence: Synthetic oligonucleotide
ccuuuauggaagaaggucc

SEQ ID NO: 618441 - RNA, 19 nt, Artificial Sequence
  Description of Artificial Sequence: Synthetic oligonucleotide
aaccaacggcacuacggcg

SEQ ID NO: 618442 - RNA, 19 nt, Artificial Sequence
  Description of Artificial Sequence: Synthetic oligonucleotide
aucaccccacaguuaacgc

SEQ ID NO: 618443 - RNA, 19 nt, Artificial Sequence
  Description of Artificial Sequence: Synthetic oligonucleotide
auguuuacaaaccuauaua

SEQ ID NO: 618444 - RNA, 19 nt, Artificial Sequence
  Description of Artificial Sequence: Synthetic oligonucleotide
ucaagaaagccgccaacgu

SEQ ID NO: 618445 - RNA, 19 nt, Artificial Sequence
  Description of Artificial Sequence: Synthetic oligonucleotide
ugaaaccaacggcacuacg

SEQ ID NO: 618446 - RNA, 19 nt, Artificial Sequence
  Description of Artificial Sequence: Synthetic oligonucleotide
acuagacggaccuucagaa

SEQ ID NO: 618447 - RNA, 19 nt, Artificial Sequence
  Description of Artificial Sequence: Synthetic oligonucleotide
gcuaggagcagauuugcgg

SEQ ID NO: 618448 - RNA, 19 nt, Artificial Sequence
  Description of Artificial Sequence: Synthetic oligonucleotide
uuuccacauuaaaagauuu

SEQ ID NO: 618449 - RNA, 19 nt, Artificial Sequence
  Description of Artificial Sequence: Synthetic oligonucleotide
gaggcagaugugauaaacg

SEQ ID NO: 618450 - RNA, 19 nt, Artificial Sequence
  Description of Artificial Sequence: Synthetic oligonucleotide
cauuugguauagcuuuugg

SEQ ID NO: 618451 - RNA, 19 nt, Artificial Sequence
  Description of Artificial Sequence: Synthetic oligonucleotide
guauugauaucgcgcagag

SEQ ID NO: 618452 - RNA, 19 nt, Artificial Sequence
  Description of Artificial Sequence: Synthetic oligonucleotide
uacuuuccgcaagagaucc

SEQ ID NO: 618453 - RNA, 19 nt, Artificial Sequence
  Description of Artificial Sequence: Synthetic oligonucleotide
auggaagaaggucccucgc

SEQ ID NO: 618454 - RNA, 19 nt, Artificial Sequence
  Description of Artificial Sequence: Synthetic oligonucleotide
uucaacuagcucaucccga

SEQ ID NO: 618455 - RNA, 19 nt, Artificial Sequence
  Description of Artificial Sequence: Synthetic oligonucleotide
aucauaagucguuaauuaa

SEQ ID NO: 618456 - RNA, 19 nt, Artificial Sequence
  Description of Artificial Sequence: Synthetic oligonucleotide
cuaucagcacagcaaaaug

SEQ ID NO: 618457 - RNA, 19 nt, Artificial Sequence
  Description of Artificial Sequence: Synthetic oligonucleotide
uugauaucgcgcagagucc

SEQ ID NO: 618458 - RNA, 19 nt, Artificial Sequence
  Description of Artificial Sequence: Synthetic oligonucleotide
cauguucgcagccacucgg

SEQ ID NO: 618459 - RNA, 19 nt, Artificial Sequence
  Description of Artificial Sequence: Synthetic oligonucleotide
gacgucuccgcuccgcugg

SEQ ID NO: 618460 - RNA, 19 nt, Artificial Sequence
  Description of Artificial Sequence: Synthetic oligonucleotide
agcaugagaauaaccaaag

SEQ ID NO: 618461 - RNA, 19 nt, Artificial Sequence
  Description of Artificial Sequence: Synthetic oligonucleotide
acguauguaucacuuguga

SEQ ID NO: 618462 - RNA, 19 nt, Artificial Sequence
  Description of Artificial Sequence: Synthetic oligonucleotide
agcaacuagacggaccuuc

SEQ ID NO: 618463 - RNA, 19 nt, Artificial Sequence
  Description of Artificial Sequence: Synthetic oligonucleotide
aguuuagaagggucuuguc

SEQ ID NO: 618464 - RNA, 19 nt, Artificial Sequence
  Description of Artificial Sequence: Synthetic oligonucleotide
augauugugagcacugaag

SEQ ID NO: 618465 - RNA, 19 nt, Artificial Sequence
  Description of Artificial Sequence: Synthetic oligonucleotide
ggauauaggguuuucguga

SEQ ID NO: 618466 - RNA, 19 nt, Artificial Sequence
  Description of Artificial Sequence: Synthetic oligonucleotide
aaacggguacuuccacauc

SEQ ID NO: 618467 - RNA, 19 nt, Artificial Sequence
  Description of Artificial Sequence: Synthetic oligonucleotide
gcaauaauguuuacaaacc

SEQ ID NO: 618468 - RNA, 19 nt, Artificial Sequence
  Description of Artificial Sequence: Synthetic oligonucleotide
uuugucguucccgaacugc

SEQ ID NO: 618469 - RNA, 19 nt, Artificial Sequence
  Description of Artificial Sequence: Synthetic oligonucleotide
gcuagcaccagccagcccc

SEQ ID NO: 618470 - RNA, 19 nt, Artificial Sequence
  Description of Artificial Sequence: Synthetic oligonucleotide
uuuaaccuuuguacugaga

SEQ ID NO: 618471 - RNA, 19 nt, Artificial Sequence
  Description of Artificial Sequence: Synthetic oligonucleotide
gauaaacggguacuuccac

SEQ ID NO: 618472 - RNA, 19 nt, Artificial Sequence
  Description of Artificial Sequence: Synthetic oligonucleotide
gaagaugcaugggugggag

SEQ ID NO: 618473 - RNA, 19 nt, Artificial Sequence
  Description of Artificial Sequence: Synthetic oligonucleotide
uaauacacguauguaucac

SEQ ID NO: 618474 - RNA, 19 nt, Artificial Sequence
  Description of Artificial Sequence: Synthetic oligonucleotide
caaaaugagcuaagagaug

SEQ ID NO: 618475 - RNA, 19 nt, Artificial Sequence
  Description of Artificial Sequence: Synthetic oligonucleotide
caaaagcgcauguucgcag

SEQ ID NO: 618476 - RNA, 19 nt, Artificial Sequence
  Description of Artificial Sequence: Synthetic oligonucleotide
ugcauacugaugcucuagu

SEQ ID NO: 618477 - RNA, 19 nt, Artificial Sequence
  Description of Artificial Sequence: Synthetic oligonucleotide
aaagccgccaacgugucaa

SEQ ID NO: 618478 - RNA, 19 nt, Artificial Sequence
  Description of Artificial Sequence: Synthetic oligonucleotide
guuuucgugaugcuugguc

SEQ ID NO: 618479 - RNA, 19 nt, Artificial Sequence
  Description of Artificial Sequence: Synthetic oligonucleotide
ucacaguccagagucggag

SEQ ID NO: 618480 - RNA, 19 nt, Artificial Sequence
  Description of Artificial Sequence: Synthetic oligonucleotide
gugucaaaagcgcauguuc

SEQ ID NO: 618481 - RNA, 19 nt, Artificial Sequence
  Description of Artificial Sequence: Synthetic oligonucleotide
cuagcagaaggaguuagug

SEQ ID NO: 618482 - RNA, 19 nt, Artificial Sequence
  Description of Artificial Sequence: Synthetic oligonucleotide
caucaccccacaguuaacg

SEQ ID NO: 618483 - RNA, 19 nt, Artificial Sequence
  Description of Artificial Sequence: Synthetic oligonucleotide
aacgugucaaaagcgcaug

SEQ ID NO: 618484 - RNA, 19 nt, Artificial Sequence
  Description of Artificial Sequence: Synthetic oligonucleotide
agugcagcaugagaauaac

SEQ ID NO: 618485 - RNA, 19 nt, Artificial Sequence
  Description of Artificial Sequence: Synthetic oligonucleotide
caucauaagucguuaauua

SEQ ID NO: 618486 - RNA, 19 nt, Artificial Sequence
  Description of Artificial Sequence: Synthetic oligonucleotide
ucaaaagcgcauguucgca

SEQ ID NO: 618487 - RNA, 19 nt, Artificial Sequence
  Description of Artificial Sequence: Synthetic oligonucleotide
auaagucguuaauuaacau

SEQ ID NO: 618488 - RNA, 19 nt, Artificial Sequence
  Description of Artificial Sequence: Synthetic oligonucleotide
ucaaccugauugaggagaa

SEQ ID NO: 618489 - RNA, 19 nt, Artificial Sequence
  Description of Artificial Sequence: Synthetic oligonucleotide
gucguuaauuaacaugcca

SEQ ID NO: 618490 - RNA, 19 nt, Artificial Sequence
  Description of Artificial Sequence: Synthetic oligonucleotide
gaucgaguaauacacguau

SEQ ID NO: 618491 - RNA, 19 nt, Artificial Sequence
  Description of Artificial Sequence: Synthetic oligonucleotide
uugucguucccgaacugcu

SEQ ID NO: 618492 - RNA, 19 nt, Artificial Sequence
  Description of Artificial Sequence: Synthetic oligonucleotide
acugagaccaacaaagauu

SEQ ID NO: 618493 - RNA, 19 nt, Artificial Sequence
  Description of Artificial Sequence: Synthetic oligonucleotide
ggaugcaagggacaaacac

SEQ ID NO: 618494 - RNA, 19 nt, Artificial Sequence
  Description of Artificial Sequence: Synthetic oligonucleotide
uguaucacuugugacccac

SEQ ID NO: 618495 - RNA, 19 nt, Artificial Sequence
  Description of Artificial Sequence: Synthetic oligonucleotide
aacgcucccugggauauag

SEQ ID NO: 618496 - RNA, 19 nt, Artificial Sequence
  Description of Artificial Sequence: Synthetic oligonucleotide
guauagcuuuuggugaagg

SEQ ID NO: 618497 - RNA, 19 nt, Artificial Sequence
  Description of Artificial Sequence: Synthetic oligonucleotide
aaccacaugaugauccuau

SEQ ID NO: 618498 - RNA, 19 nt, Artificial Sequence
  Description of Artificial Sequence: Synthetic oligonucleotide
agcgcauguucgcagccac

SEQ ID NO: 618499 - RNA, 19 nt, Artificial Sequence
  Description of Artificial Sequence: Synthetic oligonucleotide
agucguuaauuaacaugcc

SEQ ID NO: 618500 - RNA, 19 nt, Artificial Sequence
  Description of Artificial Sequence: Synthetic oligonucleotide
gaagggucuugucaaccug

SEQ ID NO: 618501 - RNA, 19 nt, Artificial Sequence
  Description of Artificial Sequence: Synthetic oligonucleotide
aacaugccauaugagucug

SEQ ID NO: 618502 - RNA, 19 nt, Artificial Sequence
  Description of Artificial Sequence: Synthetic oligonucleotide
agugaucgaguaauacacg

SEQ ID NO: 618503 - RNA, 19 nt, Artificial Sequence
  Description of Artificial Sequence: Synthetic oligonucleotide
aaggaguuaguggacuggu

SEQ ID NO: 618504 - RNA, 19 nt, Artificial Sequence
  Description of Artificial Sequence: Synthetic oligonucleotide
uggauucuaaagccccuac

SEQ ID NO: 618505 - RNA, 19 nt, Artificial Sequence
  Description of Artificial Sequence: Synthetic oligonucleotide
ugaucgaguaauacacgua

SEQ ID NO: 618506 - RNA, 19 nt, Artificial Sequence
  Description of Artificial Sequence: Synthetic oligonucleotide
ucaaagccguuuacugccc

SEQ ID NO: 618507 - RNA, 19 nt, Artificial Sequence
  Description of Artificial Sequence: Synthetic oligonucleotide
acaaauaucuuaggcaaua

SEQ ID NO: 618508 - RNA, 19 nt, Artificial Sequence
  Description of Artificial Sequence: Synthetic oligonucleotide
aggguuuucgugaugcuug

SEQ ID NO: 618509 - RNA, 19 nt, Artificial Sequence
  Description of Artificial Sequence: Synthetic oligonucleotide
uuccuguuugucguucccg

SEQ ID NO: 618510 - RNA, 19 nt, Artificial Sequence
  Description of Artificial Sequence: Synthetic oligonucleotide
uagaagggucuugucaacc

SEQ ID NO: 618511 - RNA, 19 nt, Artificial Sequence
  Description of Artificial Sequence: Synthetic oligonucleotide
ugccuuaaaucucuugcuu

SEQ ID NO: 618512 - RNA, 19 nt, Artificial Sequence
  Description of Artificial Sequence: Synthetic oligonucleotide
agagucggagagcuaggag

SEQ ID NO: 618513 - RNA, 19 nt, Artificial Sequence
  Description of Artificial Sequence: Synthetic oligonucleotide
gcgagaagagaaaauagcc

SEQ ID NO: 618514 - RNA, 19 nt, Artificial Sequence
  Description of Artificial Sequence: Synthetic oligonucleotide
guuaucagcuugcaggucu

SEQ ID NO: 618515 - RNA, 19 nt, Artificial Sequence
  Description of Artificial Sequence: Synthetic oligonucleotide
ucaccccacaguuaacgcu

SEQ ID NO: 618516 - RNA, 19 nt, Artificial Sequence
  Description of Artificial Sequence: Synthetic oligonucleotide
ucgcgcagaguccuggggc

SEQ ID NO: 618517 - RNA, 19 nt, Artificial Sequence
  Description of Artificial Sequence: Synthetic oligonucleotide
uuuagccuuuguucaaaau

SEQ ID NO: 618518 - RNA, 19 nt, Artificial Sequence
  Description of Artificial Sequence: Synthetic oligonucleotide
ugauaucgcgcagaguccu

SEQ ID NO: 618519 - RNA, 19 nt, Artificial Sequence
  Description of Artificial Sequence: Synthetic oligonucleotide
auuucguucaauggccuga

SEQ ID NO: 618520 - RNA, 19 nt, Artificial Sequence
  Description of Artificial Sequence: Synthetic oligonucleotide
gggauauaggguuuucgug

SEQ ID NO: 618521 - RNA, 19 nt, Artificial Sequence
  Description of Artificial Sequence: Synthetic oligonucleotide
ugacccacaaaagugcaau

SEQ ID NO: 618522 - RNA, 19 nt, Artificial Sequence
  Description of Artificial Sequence: Synthetic oligonucleotide
uuauggaagaaggucccuc

SEQ ID NO: 618523 - RNA, 19 nt, Artificial Sequence
  Description of Artificial Sequence: Synthetic oligonucleotide
aggucccucgcccugaccu

SEQ ID NO: 618524 - RNA, 19 nt, Artificial Sequence
  Description of Artificial Sequence: Synthetic oligonucleotide
uccuccuggaauucaacua

SEQ ID NO: 618525 - RNA, 19 nt, Artificial Sequence
  Description of Artificial Sequence: Synthetic oligonucleotide
agaauaggacaccaucaua

SEQ ID NO: 618526 - RNA, 19 nt, Artificial Sequence
  Description of Artificial Sequence: Synthetic oligonucleotide
ggggcuaugaggcagaugu

SEQ ID NO: 618527 - RNA, 19 nt, Artificial Sequence
  Description of Artificial Sequence: Synthetic oligonucleotide
ggaguuaguggacugguuc

SEQ ID NO: 618528 - RNA, 19 nt, Artificial Sequence
  Description of Artificial Sequence: Synthetic oligonucleotide
cuagacggaccuucagaag

SEQ ID NO: 618529 - RNA, 19 nt, Artificial Sequence
  Description of Artificial Sequence: Synthetic oligonucleotide
aaacuauuguugcccuuuu

SEQ ID NO: 618530 - RNA, 19 nt, Artificial Sequence
  Description of Artificial Sequence: Synthetic oligonucleotide
ugucaaccugauugaggag

SEQ ID NO: 618531 - RNA, 19 nt, Artificial Sequence
  Description of Artificial Sequence: Synthetic oligonucleotide
cuacuuuccgcaagagauc

SEQ ID NO: 618532 - RNA, 19 nt, Artificial Sequence
  Description of Artificial Sequence: Synthetic oligonucleotide
auauccuagcagaaggagu

SEQ ID NO: 618533 - RNA, 19 nt, Artificial Sequence
  Description of Artificial Sequence: Synthetic oligonucleotide
cacguauguaucacuugug

SEQ ID NO: 618534 - RNA, 19 nt, Artificial Sequence
  Description of Artificial Sequence: Synthetic oligonucleotide
aguuaacgcucccugggau

SEQ ID NO: 618535 - RNA, 19 nt, Artificial Sequence
  Description of Artificial Sequence: Synthetic oligonucleotide
ugagaccaacaaagauucc

SEQ ID NO: 618536 - RNA, 19 nt, Artificial Sequence
  Description of Artificial Sequence: Synthetic oligonucleotide
uaucgcgcagaguccuggg

SEQ ID NO: 618537 - RNA, 19 nt, Artificial Sequence
  Description of Artificial Sequence: Synthetic oligonucleotide
ggcgagaagagaaaauagc

SEQ ID NO: 618538 - RNA, 19 nt, Artificial Sequence
  Description of Artificial Sequence: Synthetic oligonucleotide
uuaucagcuugcaggucuc

SEQ ID NO: 618539 - RNA, 19 nt, Artificial Sequence
  Description of Artificial Sequence: Synthetic oligonucleotide
gagaccaacaaagauuccu

SEQ ID NO: 618540 - RNA, 19 nt, Artificial Sequence
  Description of Artificial Sequence: Synthetic oligonucleotide
aaagugcaaucaugugaaa

SEQ ID NO: 618541 - RNA, 19 nt, Artificial Sequence
  Description of Artificial Sequence: Synthetic oligonucleotide
augugaaaccaacggcacu

SEQ ID NO: 618542 - RNA, 19 nt, Artificial Sequence
  Description of Artificial Sequence: Synthetic oligonucleotide
auaucgcgcagaguccugg

SEQ ID NO: 618543 - RNA, 19 nt, Artificial Sequence
  Description of Artificial Sequence: Synthetic oligonucleotide
ugggccguugcuauucauc

SEQ ID NO: 618544 - RNA, 19 nt, Artificial Sequence
  Description of Artificial Sequence: Synthetic oligonucleotide
uuaacgcucccugggauau

SEQ ID NO: 618545 - RNA, 19 nt, Artificial Sequence
  Description of Artificial Sequence: Synthetic oligonucleotide
uuaguggacugguuccaaa

SEQ ID NO: 618546 - RNA, 19 nt, Artificial Sequence
  Description of Artificial Sequence: Synthetic oligonucleotide
gccaguauugauaucgcgc

SEQ ID NO: 618547 - RNA, 19 nt, Artificial Sequence
  Description of Artificial Sequence: Synthetic oligonucleotide
gagagcuaggagcagauuu

SEQ ID NO: 618548 - RNA, 19 nt, Artificial Sequence
  Description of Artificial Sequence: Synthetic oligonucleotide
cagcaugagaauaaccaaa

SEQ ID NO: 618549 - RNA, 19 nt, Artificial Sequence
  Description of Artificial Sequence: Synthetic oligonucleotide
gccguugcuauucaucacc

SEQ ID NO: 618550 - RNA, 19 nt, Artificial Sequence
  Description of Artificial Sequence: Synthetic oligonucleotide
gagcuaggagcagauuugc

SEQ ID NO: 618551 - RNA, 19 nt, Artificial Sequence
  Description of Artificial Sequence: Synthetic oligonucleotide
gaauaaccaaaggaugcaa

SEQ ID NO: 618552 - RNA, 19 nt, Artificial Sequence
  Description of Artificial Sequence: Synthetic oligonucleotide
cucgcccugaccuugggca

SEQ ID NO: 618553 - RNA, 19 nt, Artificial Sequence
  Description of Artificial Sequence: Synthetic oligonucleotide
ucucacauacuggcccggg

SEQ ID NO: 618554 - RNA, 19 nt, Artificial Sequence
  Description of Artificial Sequence: Synthetic oligonucleotide
ggagagugaggcuuggaca

SEQ ID NO: 618555 - RNA, 19 nt, Artificial Sequence
  Description of Artificial Sequence: Synthetic oligonucleotide
gugaucgaguaauacacgu

SEQ ID NO: 618556 - RNA, 19 nt, Artificial Sequence
  Description of Artificial Sequence: Synthetic oligonucleotide
aggcaauaauguuuacaaa

SEQ ID NO: 618557 - RNA, 19 nt, Artificial Sequence
  Description of Artificial Sequence: Synthetic oligonucleotide
acugcuagcucuugccuua

SEQ ID NO: 618558 - RNA, 19 nt, Artificial Sequence
  Description of Artificial Sequence: Synthetic oligonucleotide
caguauugauaucgcgcag

SEQ ID NO: 618559 - RNA, 19 nt, Artificial Sequence
  Description of Artificial Sequence: Synthetic oligonucleotide
gauauaggguuuucgugau

SEQ ID NO: 618560 - RNA, 19 nt, Artificial Sequence
  Description of Artificial Sequence: Synthetic oligonucleotide
cacuacggcgagaagagaa

SEQ ID NO: 618561 - RNA, 19 nt, Artificial Sequence
  Description of Artificial Sequence: Synthetic oligonucleotide
cuuaggcaauaauguuuac

SEQ ID NO: 618562 - RNA, 19 nt, Artificial Sequence
  Description of Artificial Sequence: Synthetic oligonucleotide
uccuaucagcacagcaaaa

SEQ ID NO: 618563 - RNA, 19 nt, Artificial Sequence
  Description of Artificial Sequence: Synthetic oligonucleotide
guuaauuaacaugccauau

SEQ ID NO: 618564 - RNA, 19 nt, Artificial Sequence
  Description of Artificial Sequence: Synthetic oligonucleotide
uaggagcagauuugcgggu

SEQ ID NO: 618565 - RNA, 19 nt, Artificial Sequence
  Description of Artificial Sequence: Synthetic oligonucleotide
augauccuauacagcugcc

SEQ ID NO: 618566 - RNA, 19 nt, Artificial Sequence
  Description of Artificial Sequence: Synthetic oligonucleotide
acauccagugaucgaguaa

SEQ ID NO: 618567 - RNA, 19 nt, Artificial Sequence
  Description of Artificial Sequence: Synthetic oligonucleotide
caugggugggaguuuagaa

SEQ ID NO: 618568 - RNA, 19 nt, Artificial Sequence
  Description of Artificial Sequence: Synthetic oligonucleotide
guuuagugcugauauccua

SEQ ID NO: 618569 - RNA, 19 nt, Artificial Sequence
  Description of Artificial Sequence: Synthetic oligonucleotide
gauugugagcacugaagau

SEQ ID NO: 618570 - RNA, 19 nt, Artificial Sequence
  Description of Artificial Sequence: Synthetic oligonucleotide
auacacguauguaucacuu

SEQ ID NO: 618571 - RNA, 19 nt, Artificial Sequence
  Description of Artificial Sequence: Synthetic oligonucleotide
caacuagacggaccuucag

SEQ ID NO: 618572 - RNA, 19 nt, Artificial Sequence
  Description of Artificial Sequence: Synthetic oligonucleotide
cuggaucaaagccguuuac

SEQ ID NO: 618573 - RNA, 19 nt, Artificial Sequence
  Description of Artificial Sequence: Synthetic oligonucleotide
aguuaguggacugguucca

SEQ ID NO: 618574 - RNA, 19 nt, Artificial Sequence
  Description of Artificial Sequence: Synthetic oligonucleotide
acggcgagaagagaaaaua

SEQ ID NO: 618575 - RNA, 19 nt, Artificial Sequence
  Description of Artificial Sequence: Synthetic oligonucleotide
uuccacauccagugaucga

SEQ ID NO: 618576 - RNA, 19 nt, Artificial Sequence
  Description of Artificial Sequence: Synthetic oligonucleotide
caaagccguuuacugcccc

SEQ ID NO: 618577 - RNA, 19 nt, Artificial Sequence
  Description of Artificial Sequence: Synthetic oligonucleotide
ccaguauugauaucgcgca

SEQ ID NO: 618578 - RNA, 19 nt, Artificial Sequence
  Description of Artificial Sequence: Synthetic oligonucleotide
aaaggaugcaagggacaaa

SEQ ID NO: 618579 - RNA, 19 nt, Artificial Sequence
  Description of Artificial Sequence: Synthetic oligonucleotide
caugauugugagcacugaa

SEQ ID NO: 618580 - RNA, 19 nt, Artificial Sequence
  Description of Artificial Sequence: Synthetic oligonucleotide
gcugauauccuagcagaag

SEQ ID NO: 618581 - RNA, 19 nt, Artificial Sequence
  Description of Artificial Sequence: Synthetic oligonucleotide
cacacugagaggcagcaua

SEQ ID NO: 618582 - RNA, 19 nt, Artificial Sequence
  Description of Artificial Sequence: Synthetic oligonucleotide
agacggaccuucagaagag

SEQ ID NO: 618583 - RNA, 19 nt, Artificial Sequence
  Description of Artificial Sequence: Synthetic oligonucleotide
uauugauaucgcgcagagu

SEQ ID NO: 618584 - RNA, 19 nt, Artificial Sequence
  Description of Artificial Sequence: Synthetic oligonucleotide
aucgaguaauacacguaug

SEQ ID NO: 618585 - RNA, 19 nt, Artificial Sequence
  Description of Artificial Sequence: Synthetic oligonucleotide
gugcauacugaugcucuag

SEQ ID NO: 618586 - RNA, 19 nt, Artificial Sequence
  Description of Artificial Sequence: Synthetic oligonucleotide
ggguuuucgugaugcuugg

SEQ ID NO: 618587 - RNA, 19 nt, Artificial Sequence
  Description of Artificial Sequence: Synthetic oligonucleotide
ugagcuccacuccgcguac

SEQ ID NO: 618588 - RNA, 19 nt, Artificial Sequence
  Description of Artificial Sequence: Synthetic oligonucleotide
accaacggcacuacggcga

SEQ ID NO: 618589 - RNA, 19 nt, Artificial Sequence
  Description of Artificial Sequence: Synthetic oligonucleotide
agcuaggagcagauuugcg

SEQ ID NO: 618590 - RNA, 19 nt, Artificial Sequence
  Description of Artificial Sequence: Synthetic oligonucleotide
acuggcccgggucugacuu

SEQ ID NO: 618591 - RNA, 19 nt, Artificial Sequence
  Description of Artificial Sequence: Synthetic oligonucleotide
ucugggccguugcuauuca

SEQ ID NO: 618592 - RNA, 19 nt, Artificial Sequence
  Description of Artificial Sequence: Synthetic oligonucleotide
acuuuccgcaagagauccc

SEQ ID NO: 618593 - RNA, 19 nt, Artificial Sequence
  Description of Artificial Sequence: Synthetic oligonucleotide
cuagcucaucccgagcuuc

SEQ ID NO: 618594 - RNA, 19 nt, Artificial Sequence
  Description of Artificial Sequence: Synthetic oligonucleotide
gcuaagagaugucauugaa

SEQ ID NO: 618595 - RNA, 19 nt, Artificial Sequence
  Description of Artificial Sequence: Synthetic oligonucleotide
cagccguucagcucugcuc

SEQ ID NO: 618596 - RNA, 19 nt, Artificial Sequence
  Description of Artificial Sequence: Synthetic oligonucleotide
guuugucguucccgaacug

SEQ ID NO: 618597 - RNA, 19 nt, Artificial Sequence
  Description of Artificial Sequence: Synthetic oligonucleotide
agcuagcaccagccagccc

SEQ ID NO: 618598 - RNA, 19 nt, Artificial Sequence
  Description of Artificial Sequence: Synthetic oligonucleotide
agcauacccggugcugacg

SEQ ID NO: 618599 - RNA, 19 nt, Artificial Sequence
  Description of Artificial Sequence: Synthetic oligonucleotide
auacccggugcugacgaug

SEQ ID NO: 618600 - RNA, 19 nt, Artificial Sequence
  Description of Artificial Sequence: Synthetic oligonucleotide
cagaaucaggccccucaac

SEQ ID NO: 618601 - RNA, 19 nt, Artificial Sequence
  Description of Artificial Sequence: Synthetic oligonucleotide
gccgccaacgugucaaaag

SEQ ID NO: 618602 - RNA, 19 nt, Artificial Sequence
  Description of Artificial Sequence: Synthetic oligonucleotide
augagcuaagagaugucau

SEQ ID NO: 618603 - RNA, 19 nt, Artificial Sequence
  Description of Artificial Sequence: Synthetic oligonucleotide
gcagaugugauaaacgggu

SEQ ID NO: 618604 - RNA, 19 nt, Artificial Sequence
  Description of Artificial Sequence: Synthetic oligonucleotide
ugcuucuaauucucugcuu

SEQ ID NO: 618605 - RNA, 19 nt, Artificial Sequence
  Description of Artificial Sequence: Synthetic oligonucleotide
gccaacgugucaaaagcgc

SEQ ID NO: 618606 - RNA, 19 nt, Artificial Sequence
  Description of Artificial Sequence: Synthetic oligonucleotide
caauaagcaguuucuuccu

SEQ ID NO: 618607 - RNA, 19 nt, Artificial Sequence
  Description of Artificial Sequence: Synthetic oligonucleotide
gagcuagcaccagccagcc

SEQ ID NO: 618608 - RNA, 19 nt, Artificial Sequence
  Description of Artificial Sequence: Synthetic oligonucleotide
acaugauugugagcacuga

SEQ ID NO: 618609 - RNA, 19 nt, Artificial Sequence
  Description of Artificial Sequence: Synthetic oligonucleotide
guuaacgcucccugggaua

SEQ ID NO: 618610 - RNA, 19 nt, Artificial Sequence
  Description of Artificial Sequence: Synthetic oligonucleotide
gugggaguuuagaaggguc

SEQ ID NO: 618611 - RNA, 19 nt, Artificial Sequence
  Description of Artificial Sequence: Synthetic oligonucleotide
gugcagcaugagaauaacc

SEQ ID NO: 618612 - RNA, 19 nt, Artificial Sequence
  Description of Artificial Sequence: Synthetic oligonucleotide
cacucggccgacgucuccg

SEQ ID NO: 618613 - RNA, 19 nt, Artificial Sequence
  Description of Artificial Sequence: Synthetic oligonucleotide
gggccguugcuauucauca

SEQ ID NO: 618614 - RNA, 19 nt, Artificial Sequence
  Description of Artificial Sequence: Synthetic oligonucleotide
gauaucgcgcagaguccug

SEQ ID NO: 618615 - RNA, 19 nt, Artificial Sequence
  Description of Artificial Sequence: Synthetic oligonucleotide
gguaccgaggggcgaggcg

SEQ ID NO: 618616 - RNA, 19 nt, Artificial Sequence
  Description of Artificial Sequence: Synthetic oligonucleotide
gaaaagucugguauaucuu

SEQ ID NO: 618617 - RNA, 19 nt, Artificial Sequence
  Description of Artificial Sequence: Synthetic oligonucleotide
gcauguucgcagccacucg

SEQ ID NO: 618618 - RNA, 19 nt, Artificial Sequence
  Description of Artificial Sequence: Synthetic oligonucleotide
cuaugaggcagaugugaua

SEQ ID NO: 618619 - RNA, 19 nt, Artificial Sequence
  Description of Artificial Sequence: Synthetic oligonucleotide
ccguugcuauucaucaccc

SEQ ID NO: 618620 - RNA, 19 nt, Artificial Sequence
  Description of Artificial Sequence: Synthetic oligonucleotide
augccauaugagucugaau

SEQ ID NO: 618621 - RNA, 19 nt, Artificial Sequence
  Description of Artificial Sequence: Synthetic oligonucleotide
ccgggucugacuuaaguca

SEQ ID NO: 618622 - RNA, 19 nt, Artificial Sequence
  Description of Artificial Sequence: Synthetic oligonucleotide
cacugagaggcagcauacc

SEQ ID NO: 618623 - RNA, 19 nt, Artificial Sequence
  Description of Artificial Sequence: Synthetic oligonucleotide
aagccccuacuuuccgcaa

SEQ ID NO: 618624 - RNA, 19 nt, Artificial Sequence
  Description of Artificial Sequence: Synthetic oligonucleotide
cauccagugaucgaguaau

SEQ ID NO: 618625 - RNA, 19 nt, Artificial Sequence
  Description of Artificial Sequence: Synthetic oligonucleotide
caugccauaugagucugaa

SEQ ID NO: 618626 - RNA, 19 nt, Artificial Sequence
  Description of Artificial Sequence: Synthetic oligonucleotide
auguaucacuugugaccca

SEQ ID NO: 618627 - RNA, 19 nt, Artificial Sequence
  Description of Artificial Sequence: Synthetic oligonucleotide
cucucacauacuggcccgg

SEQ ID NO: 618628 - RNA, 19 nt, Artificial Sequence
  Description of Artificial Sequence: Synthetic oligonucleotide
caguuaacgcucccuggga

SEQ ID NO: 618629 - RNA, 19 nt, Artificial Sequence
  Description of Artificial Sequence: Synthetic oligonucleotide
gacaccaucauaagucguu

SEQ ID NO: 618630 - RNA, 19 nt, Artificial Sequence
  Description of Artificial Sequence: Synthetic oligonucleotide
cugagcuccacuccgcgua

SEQ ID NO: 618631 - RNA, 19 nt, Artificial Sequence
  Description of Artificial Sequence: Synthetic oligonucleotide
ucggccgacgucuccgcuc

SEQ ID NO: 618632 - RNA, 19 nt, Artificial Sequence
  Description of Artificial Sequence: Synthetic oligonucleotide
ccugauugaggagaacuuc

SEQ ID NO: 618633 - RNA, 19 nt, Artificial Sequence
  Description of Artificial Sequence: Synthetic oligonucleotide
cugcccagaauaggacacc

SEQ ID NO: 618634 - RNA, 19 nt, Artificial Sequence
  Description of Artificial Sequence: Synthetic oligonucleotide
uucgugaugcuuggucuuu

SEQ ID NO: 618635 - RNA, 19 nt, Artificial Sequence
  Description of Artificial Sequence: Synthetic oligonucleotide
cagcauacccggugcugac

SEQ ID NO: 618636 - RNA, 19 nt, Artificial Sequence
  Description of Artificial Sequence: Synthetic oligonucleotide
gugaaaccaacggcacuac

SEQ ID NO: 618637 - RNA, 19 nt, Artificial Sequence
  Description of Artificial Sequence: Synthetic oligonucleotide
cggcgagaagagaaaauag

SEQ ID NO: 618638 - RNA, 19 nt, Artificial Sequence
  Description of Artificial Sequence: Synthetic oligonucleotide
uaucagcuugcaggucucu

SEQ ID NO: 618639 - RNA, 19 nt, Artificial Sequence
  Description of Artificial Sequence: Synthetic oligonucleotide
cagaugugauaaacgggua

SEQ ID NO: 618640 - RNA, 19 nt, Artificial Sequence
  Description of Artificial Sequence: Synthetic oligonucleotide
ucccugggauauaggguuu

SEQ ID NO: 618641 - RNA, 19 nt, Artificial Sequence
  Description of Artificial Sequence: Synthetic oligonucleotide
aagccgccaacgugucaaa

SEQ ID NO: 618642 - RNA, 19 nt, Artificial Sequence
  Description of Artificial Sequence: Synthetic oligonucleotide
cccgggucugacuuaaguc

SEQ ID NO: 618643 - RNA, 19 nt, Artificial Sequence
  Description of Artificial Sequence: Synthetic oligonucleotide
cacuuccuguuugucguuc

SEQ ID NO: 618644 - RNA, 19 nt, Artificial Sequence
  Description of Artificial Sequence: Synthetic oligonucleotide
gcauacccggugcugacga

SEQ ID NO: 618645 - RNA, 19 nt, Artificial Sequence
  Description of Artificial Sequence: Synthetic oligonucleotide
ugcuagcucuugccuuaaa

SEQ ID NO: 618646 - RNA, 19 nt, Artificial Sequence
  Description of Artificial Sequence: Synthetic oligonucleotide
caacgugucaaaagcgcau

SEQ ID NO: 618647 - RNA, 19 nt, Artificial Sequence
  Description of Artificial Sequence: Synthetic oligonucleotide
gcuggaucaaagccguuua

SEQ ID NO: 618648 - RNA, 19 nt, Artificial Sequence
  Description of Artificial Sequence: Synthetic oligonucleotide
ggauucuaaagccccuacu

SEQ ID NO: 618649 - RNA, 19 nt, Artificial Sequence
  Description of Artificial Sequence: Synthetic oligonucleotide
cauugaacugaaggacuaa

SEQ ID NO: 618650 - RNA, 19 nt, Artificial Sequence
  Description of Artificial Sequence: Synthetic oligonucleotide
gcugacgaugggcgugagg

SEQ ID NO: 618651 - RNA, 19 nt, Artificial Sequence
  Description of Artificial Sequence: Synthetic oligonucleotide
cccaaagcaacuagacgga

SEQ ID NO: 618652 - RNA, 19 nt, Artificial Sequence
  Description of Artificial Sequence: Synthetic oligonucleotide
guuaguggacugguuccaa

SEQ ID NO: 618653 - RNA, 19 nt, Artificial Sequence
  Description of Artificial Sequence: Synthetic oligonucleotide
gcgggucacuuccuguuug

SEQ ID NO: 618654 - RNA, 19 nt, Artificial Sequence
  Description of Artificial Sequence: Synthetic oligonucleotide
ccgaacugcuagcucuugc

SEQ ID NO: 618655 - RNA, 19 nt, Artificial Sequence
  Description of Artificial Sequence: Synthetic oligonucleotide
acggcacuacggcgagaag

SEQ ID NO: 618656 - RNA, 19 nt, Artificial Sequence
  Description of Artificial Sequence: Synthetic oligonucleotide
cccaaguuauauacaaaua

SEQ ID NO: 618657 - RNA, 19 nt, Artificial Sequence
  Description of Artificial Sequence: Synthetic oligonucleotide
gccugucuaacugugccuc

SEQ ID NO: 618658 - RNA, 19 nt, Artificial Sequence
  Description of Artificial Sequence: Synthetic oligonucleotide
caaccugauugaggagaac

SEQ ID NO: 618659 - RNA, 19 nt, Artificial Sequence
  Description of Artificial Sequence: Synthetic oligonucleotide
cguuaauuaacaugccaua

SEQ ID NO: 618660 - RNA, 19 nt, Artificial Sequence
  Description of Artificial Sequence: Synthetic oligonucleotide
guaccgaggggcgaggcgu

SEQ ID NO: 618661 - RNA, 19 nt, Artificial Sequence
  Description of Artificial Sequence: Synthetic oligonucleotide
guaucacuugugacccaca

SEQ ID NO: 618662 - RNA, 19 nt, Artificial Sequence
  Description of Artificial Sequence: Synthetic oligonucleotide
caccauccaugaucaagaa

SEQ ID NO: 618663 - RNA, 19 nt, Artificial Sequence
  Description of Artificial Sequence: Synthetic oligonucleotide
augcaugggugggaguuua

SEQ ID NO: 618664 - RNA, 19 nt, Artificial Sequence
  Description of Artificial Sequence: Synthetic oligonucleotide
agccguuuacugccccuuu

SEQ ID NO: 618665 - RNA, 19 nt, Artificial Sequence
  Description of Artificial Sequence: Synthetic oligonucleotide
uaccgaggggcgaggcgua

SEQ ID NO: 618666 - RNA, 19 nt, Artificial Sequence
  Description of Artificial Sequence: Synthetic oligonucleotide
cccagaaucaggccccuca

SEQ ID NO: 618667 - RNA, 19 nt, Artificial Sequence
  Description of Artificial Sequence: Synthetic oligonucleotide
aagcaacuagacggaccuu

SEQ ID NO: 618668 - RNA, 19 nt, Artificial Sequence
  Description of Artificial Sequence: Synthetic oligonucleotide
gcuagcucuugccuuaaau

SEQ ID NO: 618669 - RNA, 19 nt, Artificial Sequence
  Description of Artificial Sequence: Synthetic oligonucleotide
ccaacggcacuacggcgag

SEQ ID NO: 618670 - RNA, 19 nt, Artificial Sequence
  Description of Artificial Sequence: Synthetic oligonucleotide
ccaaagcaacuagacggac

SEQ ID NO: 618671 - RNA, 19 nt, Artificial Sequence
  Description of Artificial Sequence: Synthetic oligonucleotide
gucccucgcccugaccuug

SEQ ID NO: 618672 - RNA, 19 nt, Artificial Sequence
  Description of Artificial Sequence: Synthetic oligonucleotide
cguugcuauucaucacccc

SEQ ID NO: 618673 - RNA, 19 nt, Artificial Sequence
  Description of Artificial Sequence: Synthetic oligonucleotide
cguuuacugccccuuuaug

SEQ ID NO: 618674 - RNA, 19 nt, Artificial Sequence
  Description of Artificial Sequence: Synthetic oligonucleotide
ggccguugcuauucaucac

SEQ ID NO: 618675 - RNA, 19 nt, Artificial Sequence
  Description of Artificial Sequence: Synthetic oligonucleotide
acaugccauaugagucuga

SEQ ID NO: 618676 - RNA, 19 nt, Artificial Sequence
  Description of Artificial Sequence: Synthetic oligonucleotide
gugcugacgaugggcguga

SEQ ID NO: 618677 - RNA, 19 nt, Artificial Sequence
  Description of Artificial Sequence: Synthetic oligonucleotide
cauacuggcccgggucuga

SEQ ID NO: 618678 - RNA, 19 nt, Artificial Sequence
  Description of Artificial Sequence: Synthetic oligonucleotide
aucuuccagugaaacuauu

SEQ ID NO: 618679 - RNA, 19 nt, Artificial Sequence
  Description of Artificial Sequence: Synthetic oligonucleotide
ccagguaccgaggggcgag

SEQ ID NO: 618680 - RNA, 19 nt, Artificial Sequence
  Description of Artificial Sequence: Synthetic oligonucleotide
gccccuacuuuccgcaaga

SEQ ID NO: 618681 - RNA, 19 nt, Artificial Sequence
  Description of Artificial Sequence: Synthetic oligonucleotide
cgugaugcuuggucuuuug

SEQ ID NO: 618682 - RNA, 19 nt, Artificial Sequence
  Description of Artificial Sequence: Synthetic oligonucleotide
cucacauacuggcccgggu

SEQ ID NO: 618683 - RNA, 19 nt, Artificial Sequence
  Description of Artificial Sequence: Synthetic oligonucleotide
gggcuggacccagguaccg

SEQ ID NO: 618684 - RNA, 19 nt, Artificial Sequence
  Description of Artificial Sequence: Synthetic oligonucleotide
acgcucccugggauauagg

SEQ ID NO: 618685 - RNA, 19 nt, Artificial Sequence
  Description of Artificial Sequence: Synthetic oligonucleotide
uccuuccaauaagcaguuu

SEQ ID NO: 618686 - RNA, 19 nt, Artificial Sequence
  Description of Artificial Sequence: Synthetic oligonucleotide
gucuccgcuccgcuggccu

SEQ ID NO: 618687 - RNA, 19 nt, Artificial Sequence
  Description of Artificial Sequence: Synthetic oligonucleotide
gaugcaugggugggaguuu

SEQ ID NO: 618688 - RNA, 19 nt, Artificial Sequence
  Description of Artificial Sequence: Synthetic oligonucleotide
gguaaggagguugccacuu

SEQ ID NO: 618689 - RNA, 19 nt, Artificial Sequence
  Description of Artificial Sequence: Synthetic oligonucleotide
gcauacugaugcucuaguu

SEQ ID NO: 618690 - RNA, 19 nt, Artificial Sequence
  Description of Artificial Sequence: Synthetic oligonucleotide
ggugggaguuuagaagggu

SEQ ID NO: 618691 - RNA, 19 nt, Artificial Sequence
  Description of Artificial Sequence: Synthetic oligonucleotide
cagccacucggccgacguc

SEQ ID NO: 618692 - RNA, 19 nt, Artificial Sequence
  Description of Artificial Sequence: Synthetic oligonucleotide
uaacgcucccugggauaua

SEQ ID NO: 618693 - RNA, 19 nt, Artificial Sequence
  Description of Artificial Sequence: Synthetic oligonucleotide
uccgcuccgcuggccuggc

SEQ ID NO: 618694 - RNA, 19 nt, Artificial Sequence
  Description of Artificial Sequence: Synthetic oligonucleotide
gcauuucguucaauggccu

SEQ ID NO: 618695 - RNA, 19 nt, Artificial Sequence
  Description of Artificial Sequence: Synthetic oligonucleotide
caccgggcuccuccccgac

SEQ ID NO: 618696 - RNA, 19 nt, Artificial Sequence
  Description of Artificial Sequence: Synthetic oligonucleotide
ccuagcagaaggaguuagu

SEQ ID NO: 618697 - RNA, 19 nt, Artificial Sequence
  Description of Artificial Sequence: Synthetic oligonucleotide
ccaacagguguugcuggca

SEQ ID NO: 618698 - RNA, 19 nt, Artificial Sequence
  Description of Artificial Sequence: Synthetic oligonucleotide
ggacaccaucauaagucgu

SEQ ID NO: 618699 - RNA, 19 nt, Artificial Sequence
  Description of Artificial Sequence: Synthetic oligonucleotide
gccgacgucuccgcuccgc

SEQ ID NO: 618700 - RNA, 19 nt, Artificial Sequence
  Description of Artificial Sequence: Synthetic oligonucleotide
gcccgggucugacuuaagu

SEQ ID NO: 618701 - RNA, 19 nt, Artificial Sequence
  Description of Artificial Sequence: Synthetic oligonucleotide
gggcgaggcguaggugucc

SEQ ID NO: 618702 - RNA, 19 nt, Artificial Sequence
  Description of Artificial Sequence: Synthetic oligonucleotide
ccccuacuuuccgcaagag

SEQ ID NO: 618703 - RNA, 19 nt, Artificial Sequence
  Description of Artificial Sequence: Synthetic oligonucleotide
gccccucaaccuuucccaa

SEQ ID NO: 618704 - RNA, 19 nt, Artificial Sequence
  Description of Artificial Sequence: Synthetic oligonucleotide
ggacugguuccaaaaccau

SEQ ID NO: 618705 - RNA, 19 nt, Artificial Sequence
  Description of Artificial Sequence: Synthetic oligonucleotide
cugcuagcucuugccuuaa

SEQ ID NO: 618706 - RNA, 19 nt, Artificial Sequence
  Description of Artificial Sequence: Synthetic oligonucleotide
cuggcccgggucugacuua

SEQ ID NO: 618707 - RNA, 19 nt, Artificial Sequence
  Description of Artificial Sequence: Synthetic oligonucleotide
cauacccggugcugacgau

SEQ ID NO: 618708 - RNA, 19 nt, Artificial Sequence
  Description of Artificial Sequence: Synthetic oligonucleotide
cgacgucuccgcuccgcug

SEQ ID NO: 618709 - RNA, 19 nt, Artificial Sequence
  Description of Artificial Sequence: Synthetic oligonucleotide
gcgaggcguagguguccug

SEQ ID NO: 618710 - RNA, 19 nt, Artificial Sequence
  Description of Artificial Sequence: Synthetic oligonucleotide
cccucgcccugaccuuggg

SEQ ID NO: 618711 - RNA, 19 nt, Artificial Sequence
  Description of Artificial Sequence: Synthetic oligonucleotide
ggccgacgucuccgcuccg

SEQ ID NO: 618712 - RNA, 19 nt, Artificial Sequence
  Description of Artificial Sequence: Synthetic oligonucleotide
ccccucaaccuuucccaaa

SEQ ID NO: 618713 - RNA, 19 nt, Artificial Sequence
  Description of Artificial Sequence: Synthetic oligonucleotide
cugggccguugcuauucau

SEQ ID NO: 618714 - RNA, 19 nt, Artificial Sequence
  Description of Artificial Sequence: Synthetic oligonucleotide
caacggcacuacggcgaga

SEQ ID NO: 618715 - RNA, 19 nt, Artificial Sequence
  Description of Artificial Sequence: Synthetic oligonucleotide
ggcgaggcguagguguccu

SEQ ID NO: 618716 - RNA, 19 nt, Artificial Sequence
  Description of Artificial Sequence: Synthetic oligonucleotide
cucggccgacgucuccgcu

SEQ ID NO: 618717 - RNA, 19 nt, Artificial Sequence
  Description of Artificial Sequence: Synthetic oligonucleotide
cgggucugacuuaagucau

SEQ ID NO: 618718 - RNA, 19 nt, Artificial Sequence
  Description of Artificial Sequence: Synthetic oligonucleotide
ccagccguucagcucugcu

SEQ ID NO: 618719 - RNA, 19 nt, Artificial Sequence
  Description of Artificial Sequence: Synthetic oligonucleotide
gccacucggccgacgucuc

SEQ ID NO: 618720 - RNA, 19 nt, Artificial Sequence
  Description of Artificial Sequence: Synthetic oligonucleotide
cgaugggcgugaggagccc

SEQ ID NO: 618721 - RNA, 19 nt, Artificial Sequence
  Description of Artificial Sequence: Synthetic oligonucleotide
ggagagcuaggagcagauu

SEQ ID NO: 618722 - RNA, 19 nt, Artificial Sequence
  Description of Artificial Sequence: Synthetic oligonucleotide
ccgacgucuccgcuccgcu

SEQ ID NO: 618723 - RNA, 19 nt, Artificial Sequence
  Description of Artificial Sequence: Synthetic oligonucleotide
gcgcauguucgcagccacu

SEQ ID NO: 618724 - RNA, 19 nt, Artificial Sequence
  Description of Artificial Sequence: Synthetic oligonucleotide
gccccagaaucaggccccu

SEQ ID NO: 618725 - RNA, 19 nt, Artificial Sequence
  Description of Artificial Sequence: Synthetic oligonucleotide
cgcccugaccuugggcacu

SEQ ID NO: 618726 - RNA, 19 nt, Artificial Sequence
  Description of Artificial Sequence: Synthetic oligonucleotide
aauauauugaaacucaugc

SEQ ID NO: 618727 - RNA, 19 nt, Artificial Sequence
  Description of Artificial Sequence: Synthetic oligonucleotide
aaagauaaugcucaaggcc

SEQ ID NO: 618728 - RNA, 19 nt, Artificial Sequence
  Description of Artificial Sequence: Synthetic oligonucleotide
ucuaaauuaauaaagauua

SEQ ID NO: 618729 - RNA, 19 nt, Artificial Sequence
  Description of Artificial Sequence: Synthetic oligonucleotide
agcauuauaaguuauuccc

SEQ ID NO: 618730 - RNA, 19 nt, Artificial Sequence
  Description of Artificial Sequence: Synthetic oligonucleotide
uauauuauuauauauauau

SEQ ID NO: 618731 - RNA, 19 nt, Artificial Sequence
  Description of Artificial Sequence: Synthetic oligonucleotide
aacaagacugcuuuuagac

SEQ ID NO: 618732 - RNA, 19 nt, Artificial Sequence
  Description of Artificial Sequence: Synthetic oligonucleotide
ucaacuuaaagacaguggg

SEQ ID NO: 618733 - RNA, 19 nt, Artificial Sequence
  Description of Artificial Sequence: Synthetic oligonucleotide
gaaguuaucaauuugcagc

SEQ ID NO: 618734 - RNA, 19 nt, Artificial Sequence
  Description of Artificial Sequence: Synthetic oligonucleotide
uauuauauauauauaauaa

SEQ ID NO: 618735 - RNA, 19 nt, Artificial Sequence
  Description of Artificial Sequence: Synthetic oligonucleotide
ucaacuaagagcaucaaca

SEQ ID NO: 618736 - RNA, 19 nt, Artificial Sequence
  Description of Artificial Sequence: Synthetic oligonucleotide
uauuauuauauauauauaa

SEQ ID NO: 618737 - RNA, 19 nt, Artificial Sequence
  Description of Artificial Sequence: Synthetic oligonucleotide
uuauauauauauaauaaau

SEQ ID NO: 618738 - RNA, 19 nt, Artificial Sequence
  Description of Artificial Sequence: Synthetic oligonucleotide
uauauauauauauauauau

SEQ ID NO: 618739 - RNA, 19 nt, Artificial Sequence
  Description of Artificial Sequence: Synthetic oligonucleotide
uauauauauauuauuauau

SEQ ID NO: 618740 - RNA, 19 nt, Artificial Sequence
  Description of Artificial Sequence: Synthetic oligonucleotide
cuaaagauaaugcucaagg

SEQ ID NO: 618741 - RNA, 19 nt, Artificial Sequence
  Description of Artificial Sequence: Synthetic oligonucleotide
aaaagagagagagagagag

SEQ ID NO: 618742 - RNA, 19 nt, Artificial Sequence
  Description of Artificial Sequence: Synthetic oligonucleotide
aaacagugcauuuacguuc

SEQ ID NO: 618743 - RNA, 19 nt, Artificial Sequence
  Description of Artificial Sequence: Synthetic oligonucleotide
uauauauauauauauauua

SEQ ID NO: 618744 - RNA, 19 nt, Artificial Sequence
  Description of Artificial Sequence: Synthetic oligonucleotide
uguauauauauauauauau

SEQ ID NO: 618745 - RNA, 19 nt, Artificial Sequence
  Description of Artificial Sequence: Synthetic oligonucleotide
aaauuuuccauuugggucu

SEQ ID NO: 618746 - RNA, 19 nt, Artificial Sequence
  Description of Artificial Sequence: Synthetic oligonucleotide
uauauauuauuauauauau

SEQ ID NO: 618747 - RNA, 19 nt, Artificial Sequence
  Description of Artificial Sequence: Synthetic oligonucleotide
aaacaaaacaaaacaaaac

SEQ ID NO: 618748 - RNA, 19 nt, Artificial Sequence
  Description of Artificial Sequence: Synthetic oligonucleotide
uauauauguauauauauau

SEQ ID NO: 618749 - RNA, 19 nt, Artificial Sequence
  Description of Artificial Sequence: Synthetic oligonucleotide
aacacaaccugucaaguuc

SEQ ID NO: 618750 - RNA, 19 nt, Artificial Sequence
  Description of Artificial Sequence: Synthetic oligonucleotide
uauauguauauauauauau

SEQ ID NO: 618751 - RNA, 19 nt, Artificial Sequence
  Description of Artificial Sequence: Synthetic oligonucleotide
uauguauauauauauauau

SEQ ID NO: 618752 - RNA, 19 nt, Artificial Sequence
  Description of Artificial Sequence: Synthetic oligonucleotide
aacuaaacagcauuauaag

SEQ ID NO: 618753 - RNA, 19 nt, Artificial Sequence
  Description of Artificial Sequence: Synthetic oligonucleotide
uauauauauguauauauau

SEQ ID NO: 618754 - RNA, 19 nt, Artificial Sequence
  Description of Artificial Sequence: Synthetic oligonucleotide
uaacuaaagauaaugcuca

SEQ ID NO: 618755 - RNA, 19 nt, Artificial Sequence
  Description of Artificial Sequence: Synthetic oligonucleotide
uaauuuuaaacucacucgu

SEQ ID NO: 618756 - RNA, 19 nt, Artificial Sequence
  Description of Artificial Sequence: Synthetic oligonucleotide
uguauauauauguauauau

SEQ ID NO: 618757 - RNA, 19 nt, Artificial Sequence
  Description of Artificial Sequence: Synthetic oligonucleotide
uauauauauuauuauauau

SEQ ID NO: 618758 - RNA, 19 nt, Artificial Sequence
  Description of Artificial Sequence: Synthetic oligonucleotide
auacacauagucuacuaac

SEQ ID NO: 618759 - RNA, 19 nt, Artificial Sequence
  Description of Artificial Sequence: Synthetic oligonucleotide
uauauauauauaauaaauu

SEQ ID NO: 618760 - RNA, 19 nt, Artificial Sequence
  Description of Artificial Sequence: Synthetic oligonucleotide
uauauagagaucuauguau

SEQ ID NO: 618761 - RNA, 19 nt, Artificial Sequence
  Description of Artificial Sequence: Synthetic oligonucleotide
uuauuauauauauauaaua

SEQ ID NO: 618762 - RNA, 19 nt, Artificial Sequence
  Description of Artificial Sequence: Synthetic oligonucleotide
uucaacuuaaagacagugg

SEQ ID NO: 618763 - RNA, 19 nt, Artificial Sequence
  Description of Artificial Sequence: Synthetic oligonucleotide
agugcauuuacguucuucg

SEQ ID NO: 618764 - RNA, 19 nt, Artificial Sequence
  Description of Artificial Sequence: Synthetic oligonucleotide
uugagacauauaaagaggc

SEQ ID NO: 618765 - RNA, 19 nt, Artificial Sequence
  Description of Artificial Sequence: Synthetic oligonucleotide
aggcuaauaaaacuggagg

SEQ ID NO: 618766 - RNA, 19 nt, Artificial Sequence
  Description of Artificial Sequence: Synthetic oligonucleotide
acugcuuuuagaccguacc

SEQ ID NO: 618767 - RNA, 19 nt, Artificial Sequence
  Description of Artificial Sequence: Synthetic oligonucleotide
aaauugaagccauaggaaa

SEQ ID NO: 618768 - RNA, 19 nt, Artificial Sequence
  Description of Artificial Sequence: Synthetic oligonucleotide
cagucuaagauuuagaaca

SEQ ID NO: 618769 - RNA, 19 nt, Artificial Sequence
  Description of Artificial Sequence: Synthetic oligonucleotide
ugcuaaauuagugagauuc

SEQ ID NO: 618770 - RNA, 19 nt, Artificial Sequence
  Description of Artificial Sequence: Synthetic oligonucleotide
aaguuaucaauuugcagcu

SEQ ID NO: 618771 - RNA, 19 nt, Artificial Sequence
  Description of Artificial Sequence: Synthetic oligonucleotide
acuauauagagaucuaugu

SEQ ID NO: 618772 - RNA, 19 nt, Artificial Sequence
  Description of Artificial Sequence: Synthetic oligonucleotide
uauauauauauauuauuau

SEQ ID NO: 618773 - RNA, 19 nt, Artificial Sequence
  Description of Artificial Sequence: Synthetic oligonucleotide
aaaacuagaaacucuucaa

SEQ ID NO: 618774 - RNA, 19 nt, Artificial Sequence
  Description of Artificial Sequence: Synthetic oligonucleotide
aaaacaaaacaaaacaaaa

SEQ ID NO: 618775 - RNA, 19 nt, Artificial Sequence
  Description of Artificial Sequence: Synthetic oligonucleotide
aagcauucagguuuccaac

SEQ ID NO: 618776 - RNA, 19 nt, Artificial Sequence
  Description of Artificial Sequence: Synthetic oligonucleotide
auuauauauauauaauaaa

SEQ ID NO: 618777 - RNA, 19 nt, Artificial Sequence
  Description of Artificial Sequence: Synthetic oligonucleotide
ucuacuaaccccuuucccc

SEQ ID NO: 618778 - RNA, 19 nt, Artificial Sequence
  Description of Artificial Sequence: Synthetic oligonucleotide
aggcgaucaaauuuuaaac

SEQ ID NO: 618779 - RNA, 19 nt, Artificial Sequence
  Description of Artificial Sequence: Synthetic oligonucleotide
ucauuaaaaccacacggug

SEQ ID NO: 618780 - RNA, 19 nt, Artificial Sequence
  Description of Artificial Sequence: Synthetic oligonucleotide
aguccguucucucacagac

SEQ ID NO: 618781 - RNA, 19 nt, Artificial Sequence
  Description of Artificial Sequence: Synthetic oligonucleotide
aaugcuaaauuagugagau

SEQ ID NO: 618782 - RNA, 19 nt, Artificial Sequence
  Description of Artificial Sequence: Synthetic oligonucleotide
ugcuauuauucuaaagugc

SEQ ID NO: 618783 - RNA, 19 nt, Artificial Sequence
  Description of Artificial Sequence: Synthetic oligonucleotide
cugagaaggauuuauuggc

SEQ ID NO: 618784 - RNA, 19 nt, Artificial Sequence
  Description of Artificial Sequence: Synthetic oligonucleotide
ucaauuugcagcuuaaguu

SEQ ID NO: 618785 - RNA, 19 nt, Artificial Sequence
  Description of Artificial Sequence: Synthetic oligonucleotide
uauauauauauauauuauu

SEQ ID NO: 618786 - RNA, 19 nt, Artificial Sequence
  Description of Artificial Sequence: Synthetic oligonucleotide
uuucuaaggaaauuaaaua

SEQ ID NO: 618787 - RNA, 19 nt, Artificial Sequence
  Description of Artificial Sequence: Synthetic oligonucleotide
uuuaucagaaugcuaaauu

SEQ ID NO: 618788 - RNA, 19 nt, Artificial Sequence
  Description of Artificial Sequence: Synthetic oligonucleotide
auauauauauauuauuaua

SEQ ID NO: 618789 - RNA, 19 nt, Artificial Sequence
  Description of Artificial Sequence: Synthetic oligonucleotide
aagauaaugcucaaggcca

SEQ ID NO: 618790 - RNA, 19 nt, Artificial Sequence
  Description of Artificial Sequence: Synthetic oligonucleotide
auuucuguagcguuaauau

SEQ ID NO: 618791 - RNA, 19 nt, Artificial Sequence
  Description of Artificial Sequence: Synthetic oligonucleotide
agaccuuauuuguaagugc

SEQ ID NO: 618792 - RNA, 19 nt, Artificial Sequence
  Description of Artificial Sequence: Synthetic oligonucleotide
acaagacugcuuuuagacc

SEQ ID NO: 618793 - RNA, 19 nt, Artificial Sequence
  Description of Artificial Sequence: Synthetic oligonucleotide
gaaucuuuucaugaguuag

SEQ ID NO: 618794 - RNA, 19 nt, Artificial Sequence
  Description of Artificial Sequence: Synthetic oligonucleotide
ucuacuuuugacucgcucu

SEQ ID NO: 618795 - RNA, 19 nt, Artificial Sequence
  Description of Artificial Sequence: Synthetic oligonucleotide
uguagcguuaauauuuacu

SEQ ID NO: 618796 - RNA, 19 nt, Artificial Sequence
  Description of Artificial Sequence: Synthetic oligonucleotide
auauuuacuuuucaagacu

SEQ ID NO: 618797 - RNA, 19 nt, Artificial Sequence
  Description of Artificial Sequence: Synthetic oligonucleotide
agcgaaguuaucaauuugc

SEQ ID NO: 618798 - RNA, 19 nt, Artificial Sequence
  Description of Artificial Sequence: Synthetic oligonucleotide
cauggguacaccuaaacuc

SEQ ID NO: 618799 - RNA, 19 nt, Artificial Sequence
  Description of Artificial Sequence: Synthetic oligonucleotide
uaaucaauuacaguauaca

SEQ ID NO: 618800 - RNA, 19 nt, Artificial Sequence
  Description of Artificial Sequence: Synthetic oligonucleotide
acucguuaaaguuauacaa

SEQ ID NO: 618801 - RNA, 19 nt, Artificial Sequence
  Description of Artificial Sequence: Synthetic oligonucleotide
augcuauuauucuaaagug

SEQ ID NO: 618802 - RNA, 19 nt, Artificial Sequence
  Description of Artificial Sequence: Synthetic oligonucleotide
uggggacacaagaaaagcg

SEQ ID NO: 618803 - RNA, 19 nt, Artificial Sequence
  Description of Artificial Sequence: Synthetic oligonucleotide
uuaucagaaugcuaaauua

SEQ ID NO: 618804 - RNA, 19 nt, Artificial Sequence
  Description of Artificial Sequence: Synthetic oligonucleotide
uuauaaaugcacacugcac

SEQ ID NO: 618805 - RNA, 19 nt, Artificial Sequence
  Description of Artificial Sequence: Synthetic oligonucleotide
accuauugucaauuugugc

SEQ ID NO: 618806 - RNA, 19 nt, Artificial Sequence
  Description of Artificial Sequence: Synthetic oligonucleotide
aaacauacuaugauuguca

SEQ ID NO: 618807 - RNA, 19 nt, Artificial Sequence
  Description of Artificial Sequence: Synthetic oligonucleotide
acuaaacagcauuauaagu

SEQ ID NO: 618808 - RNA, 19 nt, Artificial Sequence
  Description of Artificial Sequence: Synthetic oligonucleotide
auauauauauauauuauua

SEQ ID NO: 618809 - RNA, 19 nt, Artificial Sequence
  Description of Artificial Sequence: Synthetic oligonucleotide
ggcuaauaaaacuggaggg

SEQ ID NO: 618810 - RNA, 19 nt, Artificial Sequence
  Description of Artificial Sequence: Synthetic oligonucleotide
aauguagcgaaguuaucaa

SEQ ID NO: 618811 - RNA, 19 nt, Artificial Sequence
  Description of Artificial Sequence: Synthetic oligonucleotide
aagagagagagagagagaa

SEQ ID NO: 618812 - RNA, 19 nt, Artificial Sequence
  Description of Artificial Sequence: Synthetic oligonucleotide
gagagagagagagagaaug

SEQ ID NO: 618813 - RNA, 19 nt, Artificial Sequence
  Description of Artificial Sequence: Synthetic oligonucleotide
cucucacagacauugauug

SEQ ID NO: 618814 - RNA, 19 nt, Artificial Sequence
  Description of Artificial Sequence: Synthetic oligonucleotide
auacuaugauugucaaagc

SEQ ID NO: 618815 - RNA, 19 nt, Artificial Sequence
  Description of Artificial Sequence: Synthetic oligonucleotide
agucuacuaaccccuuucc

SEQ ID NO: 618816 - RNA, 19 nt, Artificial Sequence
  Description of Artificial Sequence: Synthetic oligonucleotide
auauauauauuauuauaua

SEQ ID NO: 618817 - RNA, 19 nt, Artificial Sequence
  Description of Artificial Sequence: Synthetic oligonucleotide
uuucaacuuaaagacagug

SEQ ID NO: 618818 - RNA, 19 nt, Artificial Sequence
  Description of Artificial Sequence: Synthetic oligonucleotide
guaacuaaagauaaugcuc

SEQ ID NO: 618819 - RNA, 19 nt, Artificial Sequence
  Description of Artificial Sequence: Synthetic oligonucleotide
guuauaaaugcacacugca

SEQ ID NO: 618820 - RNA, 19 nt, Artificial Sequence
  Description of Artificial Sequence: Synthetic oligonucleotide
uuuugugacagaaccauuu

SEQ ID NO: 618821 - RNA, 19 nt, Artificial Sequence
  Description of Artificial Sequence: Synthetic oligonucleotide
uuuacguucuucguaacac

SEQ ID NO: 618822 - RNA, 19 nt, Artificial Sequence
  Description of Artificial Sequence: Synthetic oligonucleotide
uuuauauguuccuuguaau

SEQ ID NO: 618823 - RNA, 19 nt, Artificial Sequence
  Description of Artificial Sequence: Synthetic oligonucleotide
aauucaccaacacaccaau

SEQ ID NO: 618824 - RNA, 19 nt, Artificial Sequence
  Description of Artificial Sequence: Synthetic oligonucleotide
uaagaucccaauuuucagu

SEQ ID NO: 618825 - RNA, 19 nt, Artificial Sequence
  Description of Artificial Sequence: Synthetic oligonucleotide
aacaaguuaagaucccaau

SEQ ID NO: 618826 - RNA, 19 nt, Artificial Sequence
  Description of Artificial Sequence: Synthetic oligonucleotide
uaaaacauacuaugauugu

SEQ ID NO: 618827 - RNA, 19 nt, Artificial Sequence
  Description of Artificial Sequence: Synthetic oligonucleotide
ucagucuaagauuuagaac

SEQ ID NO: 618828 - RNA, 19 nt, Artificial Sequence
  Description of Artificial Sequence: Synthetic oligonucleotide
aguuaaggcgaucaaauuu

SEQ ID NO: 618829 - RNA, 19 nt, Artificial Sequence
  Description of Artificial Sequence: Synthetic oligonucleotide
aaagcgacucaagacaaug

SEQ ID NO: 618830 - RNA, 19 nt, Artificial Sequence
  Description of Artificial Sequence: Synthetic oligonucleotide
agagagagagagaaugacc

SEQ ID NO: 618831 - RNA, 19 nt, Artificial Sequence
  Description of Artificial Sequence: Synthetic oligonucleotide
cuuuaagccguuuguaaac

SEQ ID NO: 618832 - RNA, 19 nt, Artificial Sequence
  Description of Artificial Sequence: Synthetic oligonucleotide
agcguuaauauuuacuuuu

SEQ ID NO: 618833 - RNA, 19 nt, Artificial Sequence
  Description of Artificial Sequence: Synthetic oligonucleotide
uuccuuguaauguagcgaa

SEQ ID NO: 618834 - RNA, 19 nt, Artificial Sequence
  Description of Artificial Sequence: Synthetic oligonucleotide
uuugacucgcucuaaaguu

SEQ ID NO: 618835 - RNA, 19 nt, Artificial Sequence
  Description of Artificial Sequence: Synthetic oligonucleotide
aaugccauuacagccaaau

SEQ ID NO: 618836 - RNA, 19 nt, Artificial Sequence
  Description of Artificial Sequence: Synthetic oligonucleotide
uaaacucacucguuaaagu

SEQ ID NO: 618837 - RNA, 19 nt, Artificial Sequence
  Description of Artificial Sequence: Synthetic oligonucleotide
auuauuauauauauauaau

SEQ ID NO: 618838 - RNA, 19 nt, Artificial Sequence
  Description of Artificial Sequence: Synthetic oligonucleotide
uguagcgaaguuaucaauu

SEQ ID NO: 618839 - RNA, 19 nt, Artificial Sequence
  Description of Artificial Sequence: Synthetic oligonucleotide
aauaggcuauguuuacagu

SEQ ID NO: 618840 - RNA, 19 nt, Artificial Sequence
  Description of Artificial Sequence: Synthetic oligonucleotide
cacaccaauaguacaaaac

SEQ ID NO: 618841 - RNA, 19 nt, Artificial Sequence
  Description of Artificial Sequence: Synthetic oligonucleotide
ucaugcuauuauucuaaag

SEQ ID NO: 618842 - RNA, 19 nt, Artificial Sequence
  Description of Artificial Sequence: Synthetic oligonucleotide
uuugggucuaaaagcauuc

SEQ ID NO: 618843 - RNA, 19 nt, Artificial Sequence
  Description of Artificial Sequence: Synthetic oligonucleotide
uguaaucaauuacaguaua

SEQ ID NO: 618844 - RNA, 19 nt, Artificial Sequence
  Description of Artificial Sequence: Synthetic oligonucleotide
auauauauauauauauuau

SEQ ID NO: 618845 - RNA, 19 nt, Artificial Sequence
  Description of Artificial Sequence: Synthetic oligonucleotide
auauauauuauuauauaua

SEQ ID NO: 618846 - RNA, 19 nt, Artificial Sequence
  Description of Artificial Sequence: Synthetic oligonucleotide
aaguuaagaucccaauuuu

SEQ ID NO: 618847 - RNA, 19 nt, Artificial Sequence
  Description of Artificial Sequence: Synthetic oligonucleotide
caugcuauuauucuaaagu

SEQ ID NO: 618848 - RNA, 19 nt, Artificial Sequence
  Description of Artificial Sequence: Synthetic oligonucleotide
aaacucugagcuggcaugg

SEQ ID NO: 618849 - RNA, 19 nt, Artificial Sequence
  Description of Artificial Sequence: Synthetic oligonucleotide
uucaacacugcugaagcug

SEQ ID NO: 618850 - RNA, 19 nt, Artificial Sequence
  Description of Artificial Sequence: Synthetic oligonucleotide
uacguucuucguaacacca

SEQ ID NO: 618851 - RNA, 19 nt, Artificial Sequence
  Description of Artificial Sequence: Synthetic oligonucleotide
cagcauuauaaguuauucc

SEQ ID NO: 618852 - RNA, 19 nt, Artificial Sequence
  Description of Artificial Sequence: Synthetic oligonucleotide
uuuuagaccguaccacaac

SEQ ID NO: 618853 - RNA, 19 nt, Artificial Sequence
  Description of Artificial Sequence: Synthetic oligonucleotide
ugagacauauaaagaggcu

SEQ ID NO: 618854 - RNA, 19 nt, Artificial Sequence
  Description of Artificial Sequence: Synthetic oligonucleotide
auaggcuauguuuacagua

SEQ ID NO: 618855 - RNA, 19 nt, Artificial Sequence
  Description of Artificial Sequence: Synthetic oligonucleotide
aagcgacucaagacaaugc

SEQ ID NO: 618856 - RNA, 19 nt, Artificial Sequence
  Description of Artificial Sequence: Synthetic oligonucleotide
cuuuugacucgcucuaaag

SEQ ID NO: 618857 - RNA, 19 nt, Artificial Sequence
  Description of Artificial Sequence: Synthetic oligonucleotide
aguauacaagaacaguaau

SEQ ID NO: 618858 - RNA, 19 nt, Artificial Sequence
  Description of Artificial Sequence: Synthetic oligonucleotide
uaccacaacuauauagaga

SEQ ID NO: 618859 - RNA, 19 nt, Artificial Sequence
  Description of Artificial Sequence: Synthetic oligonucleotide
gaggcuaauaaaacuggag

SEQ ID NO: 618860 - RNA, 19 nt, Artificial Sequence
  Description of Artificial Sequence: Synthetic oligonucleotide
agcccguguaaucaauuac

SEQ ID NO: 618861 - RNA, 19 nt, Artificial Sequence
  Description of Artificial Sequence: Synthetic oligonucleotide
ugcauuuacguucuucgua

SEQ ID NO: 618862 - RNA, 19 nt, Artificial Sequence
  Description of Artificial Sequence: Synthetic oligonucleotide
aguuaagaucccaauuuuc

SEQ ID NO: 618863 - RNA, 19 nt, Artificial Sequence
  Description of Artificial Sequence: Synthetic oligonucleotide
gauucucaugcuauuauuc

SEQ ID NO: 618864 - RNA, 19 nt, Artificial Sequence
  Description of Artificial Sequence: Synthetic oligonucleotide
uugcaguuagcacacaguu

SEQ ID NO: 618865 - RNA, 19 nt, Artificial Sequence
  Description of Artificial Sequence: Synthetic oligonucleotide
guaccacaacuauauagag

SEQ ID NO: 618866 - RNA, 19 nt, Artificial Sequence
  Description of Artificial Sequence: Synthetic oligonucleotide
ucacaaguucucucacugg

SEQ ID NO: 618867 - RNA, 19 nt, Artificial Sequence
  Description of Artificial Sequence: Synthetic oligonucleotide
uuacguucuucguaacacc

SEQ ID NO: 618868 - RNA, 19 nt, Artificial Sequence
  Description of Artificial Sequence: Synthetic oligonucleotide
cagaaugcuaaauuaguga

SEQ ID NO: 618869 - RNA, 19 nt, Artificial Sequence
  Description of Artificial Sequence: Synthetic oligonucleotide
uuaucaauuugcagcuuaa

SEQ ID NO: 618870 - RNA, 19 nt, Artificial Sequence
  Description of Artificial Sequence: Synthetic oligonucleotide
ugucagucuaagauuuaga

SEQ ID NO: 618871 - RNA, 19 nt, Artificial Sequence
  Description of Artificial Sequence: Synthetic oligonucleotide
ucuucguaacaccaguuuu

SEQ ID NO: 618872 - RNA, 19 nt, Artificial Sequence
  Description of Artificial Sequence: Synthetic oligonucleotide
aauagauaauccagcauuu

SEQ ID NO: 618873 - RNA, 19 nt, Artificial Sequence
  Description of Artificial Sequence: Synthetic oligonucleotide
aagucaacugcuuguuuaa

SEQ ID NO: 618874 - RNA, 19 nt, Artificial Sequence
  Description of Artificial Sequence: Synthetic oligonucleotide
ccuauugucaauuugugca

SEQ ID NO: 618875 - RNA, 19 nt, Artificial Sequence
  Description of Artificial Sequence: Synthetic oligonucleotide
uacccuucaaaggaaagac

SEQ ID NO: 618876 - RNA, 19 nt, Artificial Sequence
  Description of Artificial Sequence: Synthetic oligonucleotide
uagucuacuaaccccuuuc

SEQ ID NO: 618877 - RNA, 19 nt, Artificial Sequence
  Description of Artificial Sequence: Synthetic oligonucleotide
acauggguacaccuaaacu

SEQ ID NO: 618878 - RNA, 19 nt, Artificial Sequence
  Description of Artificial Sequence: Synthetic oligonucleotide
cuuggccuacccuucaaag

SEQ ID NO: 618879 - RNA, 19 nt, Artificial Sequence
  Description of Artificial Sequence: Synthetic oligonucleotide
ugcaauuacaaguguguua

SEQ ID NO: 618880 - RNA, 19 nt, Artificial Sequence
  Description of Artificial Sequence: Synthetic oligonucleotide
caccuaaacucugagcugg

SEQ ID NO: 618881 - RNA, 19 nt, Artificial Sequence
  Description of Artificial Sequence: Synthetic oligonucleotide
acuaaagauaaugcucaag

SEQ ID NO: 618882 - RNA, 19 nt, Artificial Sequence
  Description of Artificial Sequence: Synthetic oligonucleotide
auacauuugaccaaauauu

SEQ ID NO: 618883 - RNA, 19 nt, Artificial Sequence
  Description of Artificial Sequence: Synthetic oligonucleotide
auauauauauauauauaua

SEQ ID NO: 618884 - RNA, 19 nt, Artificial Sequence
  Description of Artificial Sequence: Synthetic oligonucleotide
auuuacguucuucguaaca

SEQ ID NO: 618885 - RNA, 19 nt, Artificial Sequence
  Description of Artificial Sequence: Synthetic oligonucleotide
auauauauauauauauauu

SEQ ID NO: 618886 - RNA, 19 nt, Artificial Sequence
  Description of Artificial Sequence: Synthetic oligonucleotide
agcgacucaagacaaugca

SEQ ID NO: 618887 - RNA, 19 nt, Artificial Sequence
  Description of Artificial Sequence: Synthetic oligonucleotide
ucaaucaaggcaguucagu

SEQ ID NO: 618888 - RNA, 19 nt, Artificial Sequence
  Description of Artificial Sequence: Synthetic oligonucleotide
ugcaguaguuauucuaaaa

SEQ ID NO: 618889 - RNA, 19 nt, Artificial Sequence
  Description of Artificial Sequence: Synthetic oligonucleotide
ugccgauacacauagucua

SEQ ID NO: 618890 - RNA, 19 nt, Artificial Sequence
  Description of Artificial Sequence: Synthetic oligonucleotide
uaaaacuggagggaauuuc

SEQ ID NO: 618891 - RNA, 19 nt, Artificial Sequence
  Description of Artificial Sequence: Synthetic oligonucleotide
uagcgaaguuaucaauuug

SEQ ID NO: 618892 - RNA, 19 nt, Artificial Sequence
  Description of Artificial Sequence: Synthetic oligonucleotide
ucaaagcuagaugucaguc

SEQ ID NO: 618893 - RNA, 19 nt, Artificial Sequence
  Description of Artificial Sequence: Synthetic oligonucleotide
auauauauguauauauaua

SEQ ID NO: 618894 - RNA, 19 nt, Artificial Sequence
  Description of Artificial Sequence: Synthetic oligonucleotide
guguguuauaaaugcacac

SEQ ID NO: 618895 - RNA, 19 nt, Artificial Sequence
  Description of Artificial Sequence: Synthetic oligonucleotide
acaguaguuaaggcgauca

SEQ ID NO: 618896 - RNA, 19 nt, Artificial Sequence
  Description of Artificial Sequence: Synthetic oligonucleotide
agaaggauuuauuggcuaa

SEQ ID NO: 618897 - RNA, 19 nt, Artificial Sequence
  Description of Artificial Sequence: Synthetic oligonucleotide
gaccuuauuuguaagugca

SEQ ID NO: 618898 - RNA, 19 nt, Artificial Sequence
  Description of Artificial Sequence: Synthetic oligonucleotide
ugcuuuuagaccguaccac

SEQ ID NO: 618899 - RNA, 19 nt, Artificial Sequence
  Description of Artificial Sequence: Synthetic oligonucleotide
augauugucaaagcuagau

SEQ ID NO: 618900 - RNA, 19 nt, Artificial Sequence
  Description of Artificial Sequence: Synthetic oligonucleotide
ucuguagcguuaauauuua

SEQ ID NO: 618901 - RNA, 19 nt, Artificial Sequence
  Description of Artificial Sequence: Synthetic oligonucleotide
uagaccguaccacaacuau

SEQ ID NO: 618902 - RNA, 19 nt, Artificial Sequence
  Description of Artificial Sequence: Synthetic oligonucleotide
ucucucacagacauugauu

SEQ ID NO: 618903 - RNA, 19 nt, Artificial Sequence
  Description of Artificial Sequence: Synthetic oligonucleotide
gaaaacaaacacugugcaa

SEQ ID NO: 618904 - RNA, 19 nt, Artificial Sequence
  Description of Artificial Sequence: Synthetic oligonucleotide
cucaacuaagagcaucaac

SEQ ID NO: 618905 - RNA, 19 nt, Artificial Sequence
  Description of Artificial Sequence: Synthetic oligonucleotide
aacagugcauuuacguucu

SEQ ID NO: 618906 - RNA, 19 nt, Artificial Sequence
  Description of Artificial Sequence: Synthetic oligonucleotide
uaugauugucaaagcuaga

SEQ ID NO: 618907 - RNA, 19 nt, Artificial Sequence
  Description of Artificial Sequence: Synthetic oligonucleotide
gagagagagagaaugaccu

SEQ ID NO: 618908 - RNA, 19 nt, Artificial Sequence
  Description of Artificial Sequence: Synthetic oligonucleotide
augucagucuaagauuuag

SEQ ID NO: 618909 - RNA, 19 nt, Artificial Sequence
  Description of Artificial Sequence: Synthetic oligonucleotide
guauauauauauauauaua

SEQ ID NO: 618910 - RNA, 19 nt, Artificial Sequence
  Description of Artificial Sequence: Synthetic oligonucleotide
cuuaaagacagugggaaaa

SEQ ID NO: 618911 - RNA, 19 nt, Artificial Sequence
  Description of Artificial Sequence: Synthetic oligonucleotide
ugacccaguguacugucac

SEQ ID NO: 618912 - RNA, 19 nt, Artificial Sequence
  Description of Artificial Sequence: Synthetic oligonucleotide
gagagagagagagaaugac

SEQ ID NO: 618913 - RNA, 19 nt, Artificial Sequence
  Description of Artificial Sequence: Synthetic oligonucleotide
acgucaaucaaggcaguuc

SEQ ID NO: 618914 - RNA, 19 nt, Artificial Sequence
  Description of Artificial Sequence: Synthetic oligonucleotide
aguguguuauaaaugcaca

SEQ ID NO: 618915 - RNA, 19 nt, Artificial Sequence
  Description of Artificial Sequence: Synthetic oligonucleotide
cauucagguuuccaacagc

SEQ ID NO: 618916 - RNA, 19 nt, Artificial Sequence
  Description of Artificial Sequence: Synthetic oligonucleotide
guagcguuaauauuuacuu

SEQ ID NO: 618917 - RNA, 19 nt, Artificial Sequence
  Description of Artificial Sequence: Synthetic oligonucleotide
gagacauauaaagaggcua

SEQ ID NO: 618918 - RNA, 19 nt, Artificial Sequence
  Description of Artificial Sequence: Synthetic oligonucleotide
acuaugauugucaaagcua

SEQ ID NO: 618919 - RNA, 19 nt, Artificial Sequence
  Description of Artificial Sequence: Synthetic oligonucleotide
aauuuuaaacucacucguu

SEQ ID NO: 618920 - RNA, 19 nt, Artificial Sequence
  Description of Artificial Sequence: Synthetic oligonucleotide
auauguauauauauauaua

SEQ ID NO: 618921 - RNA, 19 nt, Artificial Sequence
  Description of Artificial Sequence: Synthetic oligonucleotide
ggcgaucaaauuuuaaaca

SEQ ID NO: 618922 - RNA, 19 nt, Artificial Sequence
  Description of Artificial Sequence: Synthetic oligonucleotide
cucuaaauuaauaaagauu

SEQ ID NO: 618923 - RNA, 19 nt, Artificial Sequence
  Description of Artificial Sequence: Synthetic oligonucleotide
agcaacacacaauggaguu

SEQ ID NO: 618924 - RNA, 19 nt, Artificial Sequence
  Description of Artificial Sequence: Synthetic oligonucleotide
cccuucaaaggaaagacac

SEQ ID NO: 618925 - RNA, 19 nt, Artificial Sequence
  Description of Artificial Sequence: Synthetic oligonucleotide
aguaguuaaggcgaucaaa

SEQ ID NO: 618926 - RNA, 19 nt, Artificial Sequence
  Description of Artificial Sequence: Synthetic oligonucleotide
cuaacuuggccuacccuuc

SEQ ID NO: 618927 - RNA, 19 nt, Artificial Sequence
  Description of Artificial Sequence: Synthetic oligonucleotide
ggaacaagacugcuuuuag

SEQ ID NO: 618928 - RNA, 19 nt, Artificial Sequence
  Description of Artificial Sequence: Synthetic oligonucleotide
guauauauauguauauaua

SEQ ID NO: 618929 - RNA, 19 nt, Artificial Sequence
  Description of Artificial Sequence: Synthetic oligonucleotide
ugacucgcucuaaaguuuc

SEQ ID NO: 618930 - RNA, 19 nt, Artificial Sequence
  Description of Artificial Sequence: Synthetic oligonucleotide
uugacucgcucuaaaguuu

SEQ ID NO: 618931 - RNA, 19 nt, Artificial Sequence
  Description of Artificial Sequence: Synthetic oligonucleotide
uccuuguaauguagcgaag

SEQ ID NO: 618932 - RNA, 19 nt, Artificial Sequence
  Description of Artificial Sequence: Synthetic oligonucleotide
acaccuaaacucugagcug

SEQ ID NO: 618933 - RNA, 19 nt, Artificial Sequence
  Description of Artificial Sequence: Synthetic oligonucleotide
gaaggauuuauuggcuaac

SEQ ID NO: 618934 - RNA, 19 nt, Artificial Sequence
  Description of Artificial Sequence: Synthetic oligonucleotide
gagagagaaugaccuauga

SEQ ID NO: 618935 - RNA, 19 nt, Artificial Sequence
  Description of Artificial Sequence: Synthetic oligonucleotide
ugucacaaguucucucacu

SEQ ID NO: 618936 - RNA, 19 nt, Artificial Sequence
  Description of Artificial Sequence: Synthetic oligonucleotide
agacauauaaagaggcuaa

SEQ ID NO: 618937 - RNA, 19 nt, Artificial Sequence
  Description of Artificial Sequence: Synthetic oligonucleotide
caguauacaagaacaguaa

SEQ ID NO: 618938 - RNA, 19 nt, Artificial Sequence
  Description of Artificial Sequence: Synthetic oligonucleotide
uucaugcaauuugagacau

SEQ ID NO: 618939 - RNA, 19 nt, Artificial Sequence
  Description of Artificial Sequence: Synthetic oligonucleotide
ugcuggucauuaaaaccac

SEQ ID NO: 618940 - RNA, 19 nt, Artificial Sequence
  Description of Artificial Sequence: Synthetic oligonucleotide
gucuacuaaccccuuuccc

SEQ ID NO: 618941 - RNA, 19 nt, Artificial Sequence
  Description of Artificial Sequence: Synthetic oligonucleotide
uuucuguagcguuaauauu

SEQ ID NO: 618942 - RNA, 19 nt, Artificial Sequence
  Description of Artificial Sequence: Synthetic oligonucleotide
acauacauuugaccaaaua

SEQ ID NO: 618943 - RNA, 19 nt, Artificial Sequence
  Description of Artificial Sequence: Synthetic oligonucleotide
auauuauuauauauauaua

SEQ ID NO: 618944 - RNA, 19 nt, Artificial Sequence
  Description of Artificial Sequence: Synthetic oligonucleotide
uuagaccguaccacaacua

SEQ ID NO: 618945 - RNA, 19 nt, Artificial Sequence
  Description of Artificial Sequence: Synthetic oligonucleotide
auauauguauauauauaua

SEQ ID NO: 618946 - RNA, 19 nt, Artificial Sequence
  Description of Artificial Sequence: Synthetic oligonucleotide
cuaauaaaacuggagggaa

SEQ ID NO: 618947 - RNA, 19 nt, Artificial Sequence
  Description of Artificial Sequence: Synthetic oligonucleotide
agauucucaugcuauuauu

SEQ ID NO: 618948 - RNA, 19 nt, Artificial Sequence
  Description of Artificial Sequence: Synthetic oligonucleotide
uauuggcuaacuuggccua

SEQ ID NO: 618949 - RNA, 19 nt, Artificial Sequence
  Description of Artificial Sequence: Synthetic oligonucleotide
acaaaacuaaacagcauua

SEQ ID NO: 618950 - RNA, 19 nt, Artificial Sequence
  Description of Artificial Sequence: Synthetic oligonucleotide
agcuagaugucagucuaag

SEQ ID NO: 618951 - RNA, 19 nt, Artificial Sequence
  Description of Artificial Sequence: Synthetic oligonucleotide
gguacaccuaaacucugag

SEQ ID NO: 618952 - RNA, 19 nt, Artificial Sequence
  Description of Artificial Sequence: Synthetic oligonucleotide
auucaguaucuuaagcaca

SEQ ID NO: 618953 - RNA, 19 nt, Artificial Sequence
  Description of Artificial Sequence: Synthetic oligonucleotide
acuaaccccuuuccccacg

SEQ ID NO: 618954 - RNA, 19 nt, Artificial Sequence
  Description of Artificial Sequence: Synthetic oligonucleotide
uauugucaauuugugcagu

SEQ ID NO: 618955 - RNA, 19 nt, Artificial Sequence
  Description of Artificial Sequence: Synthetic oligonucleotide
cuacuaaccccuuucccca

SEQ ID NO: 618956 - RNA, 19 nt, Artificial Sequence
  Description of Artificial Sequence: Synthetic oligonucleotide
auguauauauauauauaua

SEQ ID NO: 618957 - RNA, 19 nt, Artificial Sequence
  Description of Artificial Sequence: Synthetic oligonucleotide
ccguaccacaacuauauag

SEQ ID NO: 618958 - RNA, 19 nt, Artificial Sequence
  Description of Artificial Sequence: Synthetic oligonucleotide
agacaaugcaguguuuaca

SEQ ID NO: 618959 - RNA, 19 nt, Artificial Sequence
  Description of Artificial Sequence: Synthetic oligonucleotide
uagugagauucucaugcua

SEQ ID NO: 618960 - RNA, 19 nt, Artificial Sequence
  Description of Artificial Sequence: Synthetic oligonucleotide
aaagagagagagagagaga

SEQ ID NO: 618961 - RNA, 19 nt, Artificial Sequence
  Description of Artificial Sequence: Synthetic oligonucleotide
ugagauucucaugcuauua

SEQ ID NO: 618962 - RNA, 19 nt, Artificial Sequence
  Description of Artificial Sequence: Synthetic oligonucleotide
auauagagaucuauguaua

SEQ ID NO: 618963 - RNA, 19 nt, Artificial Sequence
  Description of Artificial Sequence: Synthetic oligonucleotide
aggauuuauuggcuaacuu

SEQ ID NO: 618964 - RNA, 19 nt, Artificial Sequence
  Description of Artificial Sequence: Synthetic oligonucleotide
ucgcucuaaaguuucuuuu

SEQ ID NO: 618965 - RNA, 19 nt, Artificial Sequence
  Description of Artificial Sequence: Synthetic oligonucleotide
uaguuaaggcgaucaaauu

SEQ ID NO: 618966 - RNA, 19 nt, Artificial Sequence
  Description of Artificial Sequence: Synthetic oligonucleotide
auauauuauuauauauaua

SEQ ID NO: 618967 - RNA, 19 nt, Artificial Sequence
  Description of Artificial Sequence: Synthetic oligonucleotide
uuuucaguuccaggaacaa

SEQ ID NO: 618968 - RNA, 19 nt, Artificial Sequence
  Description of Artificial Sequence: Synthetic oligonucleotide
acuuuugacucgcucuaaa

SEQ ID NO: 618969 - RNA, 19 nt, Artificial Sequence
  Description of Artificial Sequence: Synthetic oligonucleotide
gcugccgauacacauaguc

SEQ ID NO: 618970 - RNA, 19 nt, Artificial Sequence
  Description of Artificial Sequence: Synthetic oligonucleotide
uuacaguaguuaaggcgau

SEQ ID NO: 618971 - RNA, 19 nt, Artificial Sequence
  Description of Artificial Sequence: Synthetic oligonucleotide
uagcguuaauauuuacuuu

SEQ ID NO: 618972 - RNA, 19 nt, Artificial Sequence
  Description of Artificial Sequence: Synthetic oligonucleotide
uaugaccuauugucaauuu

SEQ ID NO: 618973 - RNA, 19 nt, Artificial Sequence
  Description of Artificial Sequence: Synthetic oligonucleotide
ugcaguuagcacacaguuu

SEQ ID NO: 618974 - RNA, 19 nt, Artificial Sequence
  Description of Artificial Sequence: Synthetic oligonucleotide
ucccaauuuucaguuccag

SEQ ID NO: 618975 - RNA, 19 nt, Artificial Sequence
  Description of Artificial Sequence: Synthetic oligonucleotide
gcgaucaaauuuuaaacaa

SEQ ID NO: 618976 - RNA, 19 nt, Artificial Sequence
  Description of Artificial Sequence: Synthetic oligonucleotide
uggcuaacuuggccuaccc

SEQ ID NO: 618977 - RNA, 19 nt, Artificial Sequence
  Description of Artificial Sequence: Synthetic oligonucleotide
auguagcgaaguuaucaau

SEQ ID NO: 618978 - RNA, 19 nt, Artificial Sequence
  Description of Artificial Sequence: Synthetic oligonucleotide
gcuaauaaaacuggaggga

SEQ ID NO: 618979 - RNA, 19 nt, Artificial Sequence
  Description of Artificial Sequence: Synthetic oligonucleotide
caguaucuuaagcacaaaa

SEQ ID NO: 618980 - RNA, 19 nt, Artificial Sequence
  Description of Artificial Sequence: Synthetic oligonucleotide
gcaaucacucacaaugacc

SEQ ID NO: 618981 - RNA, 19 nt, Artificial Sequence
  Description of Artificial Sequence: Synthetic oligonucleotide
cuuuuagaccguaccacaa

SEQ ID NO: 618982 - RNA, 19 nt, Artificial Sequence
  Description of Artificial Sequence: Synthetic oligonucleotide
acauacuaugauugucaaa

SEQ ID NO: 618983 - RNA, 19 nt, Artificial Sequence
  Description of Artificial Sequence: Synthetic oligonucleotide
agaaguugccacagaaagu

SEQ ID NO: 618984 - RNA, 19 nt, Artificial Sequence
  Description of Artificial Sequence: Synthetic oligonucleotide
guaguuaaggcgaucaaau

SEQ ID NO: 618985 - RNA, 19 nt, Artificial Sequence
  Description of Artificial Sequence: Synthetic oligonucleotide
agagagagagagagaauga

SEQ ID NO: 618986 - RNA, 19 nt, Artificial Sequence
  Description of Artificial Sequence: Synthetic oligonucleotide
cauuuacguucuucguaac

SEQ ID NO: 618987 - RNA, 19 nt, Artificial Sequence
  Description of Artificial Sequence: Synthetic oligonucleotide
gcauuuacguucuucguaa

SEQ ID NO: 618988 - RNA, 19 nt, Artificial Sequence
  Description of Artificial Sequence: Synthetic oligonucleotide
gaagccauaggaaagcauu

SEQ ID NO: 618989 - RNA, 19 nt, Artificial Sequence
  Description of Artificial Sequence: Synthetic oligonucleotide
guuccuuguaauguagcga

SEQ ID NO: 618990 - RNA, 19 nt, Artificial Sequence
  Description of Artificial Sequence: Synthetic oligonucleotide
gguacauggguacaccuaa

SEQ ID NO: 618991 - RNA, 19 nt, Artificial Sequence
  Description of Artificial Sequence: Synthetic oligonucleotide
cucuacuuuugacucgcuc

SEQ ID NO: 618992 - RNA, 19 nt, Artificial Sequence
  Description of Artificial Sequence: Synthetic oligonucleotide
cugcuuuuagaccguacca

SEQ ID NO: 618993 - RNA, 19 nt, Artificial Sequence
  Description of Artificial Sequence: Synthetic oligonucleotide
cacaagaaaagcgacucaa

SEQ ID NO: 618994 - RNA, 19 nt, Artificial Sequence
  Description of Artificial Sequence: Synthetic oligonucleotide
acucacucguuaaaguuau

SEQ ID NO: 618995 - RNA, 19 nt, Artificial Sequence
  Description of Artificial Sequence: Synthetic oligonucleotide
uaaugcucaaggccaucuu

SEQ ID NO: 618996 - RNA, 19 nt, Artificial Sequence
  Description of Artificial Sequence: Synthetic oligonucleotide
guuaaggcgaucaaauuuu

SEQ ID NO: 618997 - RNA, 19 nt, Artificial Sequence
  Description of Artificial Sequence: Synthetic oligonucleotide
cccguguaaucaauuacag

SEQ ID NO: 618998 - RNA, 19 nt, Artificial Sequence
  Description of Artificial Sequence: Synthetic oligonucleotide
auagucuacuaaccccuuu

SEQ ID NO: 618999 - RNA, 19 nt, Artificial Sequence
  Description of Artificial Sequence: Synthetic oligonucleotide
aaacaacguggggacacaa

SEQ ID NO: 619000 - RNA, 19 nt, Artificial Sequence
  Description of Artificial Sequence: Synthetic oligonucleotide
accuaaacucugagcuggc

SEQ ID NO: 619001 - RNA, 19 nt, Artificial Sequence
  Description of Artificial Sequence: Synthetic oligonucleotide
aguuagcacacaguuuaaa

SEQ ID NO: 619002 - RNA, 19 nt, Artificial Sequence
  Description of Artificial Sequence: Synthetic oligonucleotide
gaccguaccacaacuauau

SEQ ID NO: 619003 - RNA, 19 nt, Artificial Sequence
  Description of Artificial Sequence: Synthetic oligonucleotide
cguaccacaacuauauaga

SEQ ID NO: 619004 - RNA, 19 nt, Artificial Sequence
  Description of Artificial Sequence: Synthetic oligonucleotide
caugcaauuugagacauau

SEQ ID NO: 619005 - RNA, 19 nt, Artificial Sequence
  Description of Artificial Sequence: Synthetic oligonucleotide
caaagcuagaugucagucu

SEQ ID NO: 619006 - RNA, 19 nt, Artificial Sequence
  Description of Artificial Sequence: Synthetic oligonucleotide
agucuaagauuuagaacaa

SEQ ID NO: 619007 - RNA, 19 nt, Artificial Sequence
  Description of Artificial Sequence: Synthetic oligonucleotide
aaaagcgacucaagacaau

SEQ ID NO: 619008 - RNA, 19 nt, Artificial Sequence
  Description of Artificial Sequence: Synthetic oligonucleotide
gccauuacagccaaauuaa

SEQ ID NO: 619009 - RNA, 19 nt, Artificial Sequence
  Description of Artificial Sequence: Synthetic oligonucleotide
accauuugcugagaaggau

SEQ ID NO: 619010 - RNA, 19 nt, Artificial Sequence
  Description of Artificial Sequence: Synthetic oligonucleotide
gauaaugcucaaggccauc

SEQ ID NO: 619011 - RNA, 19 nt, Artificial Sequence
  Description of Artificial Sequence: Synthetic oligonucleotide
uacuaaccccuuuccccac

SEQ ID NO: 619012 - RNA, 19 nt, Artificial Sequence
  Description of Artificial Sequence: Synthetic oligonucleotide
guagcgaaguuaucaauuu

SEQ ID NO: 619013 - RNA, 19 nt, Artificial Sequence
  Description of Artificial Sequence: Synthetic oligonucleotide
acguucuucguaacaccag

SEQ ID NO: 619014 - RNA, 19 nt, Artificial Sequence
  Description of Artificial Sequence: Synthetic oligonucleotide
gacccaguguacugucaca

SEQ ID NO: 619015 - RNA, 19 nt, Artificial Sequence
  Description of Artificial Sequence: Synthetic oligonucleotide
ucaugcaauuugagacaua

SEQ ID NO: 619016 - RNA, 19 nt, Artificial Sequence
  Description of Artificial Sequence: Synthetic oligonucleotide
gcgacucaagacaaugcag

SEQ ID NO: 619017 - RNA, 19 nt, Artificial Sequence
  Description of Artificial Sequence: Synthetic oligonucleotide
uacuuuugacucgcucuaa

SEQ ID NO: 619018 - RNA, 19 nt, Artificial Sequence
  Description of Artificial Sequence: Synthetic oligonucleotide
cagugcauuuacguucuuc

SEQ ID NO: 619019 - RNA, 19 nt, Artificial Sequence
  Description of Artificial Sequence: Synthetic oligonucleotide
ucaguaucuuaagcacaaa

SEQ ID NO: 619020 - RNA, 19 nt, Artificial Sequence
  Description of Artificial Sequence: Synthetic oligonucleotide
agauaaugcucaaggccau

SEQ ID NO: 619021 - RNA, 19 nt, Artificial Sequence
  Description of Artificial Sequence: Synthetic oligonucleotide
gacugcuuuuagaccguac

SEQ ID NO: 619022 - RNA, 19 nt, Artificial Sequence
  Description of Artificial Sequence: Synthetic oligonucleotide
caugcauuucuguagcguu

SEQ ID NO: 619023 - RNA, 19 nt, Artificial Sequence
  Description of Artificial Sequence: Synthetic oligonucleotide
cugccgauacacauagucu

SEQ ID NO: 619024 - RNA, 19 nt, Artificial Sequence
  Description of Artificial Sequence: Synthetic oligonucleotide
guaauguagcgaaguuauc

SEQ ID NO: 619025 - RNA, 19 nt, Artificial Sequence
  Description of Artificial Sequence: Synthetic oligonucleotide
cagcaacacacaauggagu

SEQ ID NO: 619026 - RNA, 19 nt, Artificial Sequence
  Description of Artificial Sequence: Synthetic oligonucleotide
uccccaaauggugcuaauu

SEQ ID NO: 619027 - RNA, 19 nt, Artificial Sequence
  Description of Artificial Sequence: Synthetic oligonucleotide
acugcacaugcaaaucuuu

SEQ ID NO: 619028 - RNA, 19 nt, Artificial Sequence
  Description of Artificial Sequence: Synthetic oligonucleotide
gcuaacuuggccuacccuu

SEQ ID NO: 619029 - RNA, 19 nt, Artificial Sequence
  Description of Artificial Sequence: Synthetic oligonucleotide
aagcuagaugucagucuaa

SEQ ID NO: 619030 - RNA, 19 nt, Artificial Sequence
  Description of Artificial Sequence: Synthetic oligonucleotide
cuuguaauguagcgaaguu

SEQ ID NO: 619031 - RNA, 19 nt, Artificial Sequence
  Description of Artificial Sequence: Synthetic oligonucleotide
guugccacagaaaguuuua

SEQ ID NO: 619032 - RNA, 19 nt, Artificial Sequence
  Description of Artificial Sequence: Synthetic oligonucleotide
gcccguguaaucaauuaca

SEQ ID NO: 619033 - RNA, 19 nt, Artificial Sequence
  Description of Artificial Sequence: Synthetic oligonucleotide
augcuaaauuagugagauu

SEQ ID NO: 619034 - RNA, 19 nt, Artificial Sequence
  Description of Artificial Sequence: Synthetic oligonucleotide
cgucaaucaaggcaguuca

SEQ ID NO: 619035 - RNA, 19 nt, Artificial Sequence
  Description of Artificial Sequence: Synthetic oligonucleotide
gucuaagauuuagaacaaa

SEQ ID NO: 619036 - RNA, 19 nt, Artificial Sequence
  Description of Artificial Sequence: Synthetic oligonucleotide
agagagagagagagagaau

SEQ ID NO: 619037 - RNA, 19 nt, Artificial Sequence
  Description of Artificial Sequence: Synthetic oligonucleotide
gcguuaauauuuacuuuuc

SEQ ID NO: 619038 - RNA, 19 nt, Artificial Sequence
  Description of Artificial Sequence: Synthetic oligonucleotide
uacucccauagaccuuauu

SEQ ID NO: 619039 - RNA, 19 nt, Artificial Sequence
  Description of Artificial Sequence: Synthetic oligonucleotide
augcauuucuguagcguua

SEQ ID NO: 619040 - RNA, 19 nt, Artificial Sequence
  Description of Artificial Sequence: Synthetic oligonucleotide
caacacacaauggaguuuu

SEQ ID NO: 619041 - RNA, 19 nt, Artificial Sequence
  Description of Artificial Sequence: Synthetic oligonucleotide
agaccguaccacaacuaua

SEQ ID NO: 619042 - RNA, 19 nt, Artificial Sequence
  Description of Artificial Sequence: Synthetic oligonucleotide
gugcauuuacguucuucgu

SEQ ID NO: 619043 - RNA, 19 nt, Artificial Sequence
  Description of Artificial Sequence: Synthetic oligonucleotide
caguguacugucacaaguu

SEQ ID NO: 619044 - RNA, 19 nt, Artificial Sequence
  Description of Artificial Sequence: Synthetic oligonucleotide
caguaguuaaggcgaucaa

SEQ ID NO: 619045 - RNA, 19 nt, Artificial Sequence
  Description of Artificial Sequence: Synthetic oligonucleotide
cucgcucuaaaguuucuuu

SEQ ID NO: 619046 - RNA, 19 nt, Artificial Sequence
  Description of Artificial Sequence: Synthetic oligonucleotide
accguaccacaacuauaua

SEQ ID NO: 619047 - RNA, 19 nt, Artificial Sequence
  Description of Artificial Sequence: Synthetic oligonucleotide
caguuagcacacaguuuaa

SEQ ID NO: 619048 - RNA, 19 nt, Artificial Sequence
  Description of Artificial Sequence: Synthetic oligonucleotide
cugcgugcuggucauuaaa

SEQ ID NO: 619049 - RNA, 19 nt, Artificial Sequence
  Description of Artificial Sequence: Synthetic oligonucleotide
cccaguguacugucacaag

SEQ ID NO: 619050 - RNA, 19 nt, Artificial Sequence
  Description of Artificial Sequence: Synthetic oligonucleotide
ugcugccgauacacauagu

SEQ ID NO: 619051 - RNA, 19 nt, Artificial Sequence
  Description of Artificial Sequence: Synthetic oligonucleotide
gccguuuguaaacauuuau

SEQ ID NO: 619052 - RNA, 19 nt, Artificial Sequence
  Description of Artificial Sequence: Synthetic oligonucleotide
gugagauucucaugcuauu

SEQ ID NO: 619053 - RNA, 19 nt, Artificial Sequence
  Description of Artificial Sequence: Synthetic oligonucleotide
caacacaaccugucaaguu

SEQ ID NO: 619054 - RNA, 19 nt, Artificial Sequence
  Description of Artificial Sequence: Synthetic oligonucleotide
guacauggguacaccuaaa

SEQ ID NO: 619055 - RNA, 19 nt, Artificial Sequence
  Description of Artificial Sequence: Synthetic oligonucleotide
agccguuuguaaacauuua

SEQ ID NO: 619056 - RNA, 19 nt, Artificial Sequence
  Description of Artificial Sequence: Synthetic oligonucleotide
ggacacaagaaaagcgacu

SEQ ID NO: 619057 - RNA, 19 nt, Artificial Sequence
  Description of Artificial Sequence: Synthetic oligonucleotide
gugcaauuacaaguguguu

SEQ ID NO: 619058 - RNA, 19 nt, Artificial Sequence
  Description of Artificial Sequence: Synthetic oligonucleotide
cccauagaccuuauuugua

SEQ ID NO: 619059 - RNA, 19 nt, Artificial Sequence
  Description of Artificial Sequence: Synthetic oligonucleotide
acagugcauuuacguucuu

SEQ ID NO: 619060 - RNA, 19 nt, Artificial Sequence
  Description of Artificial Sequence: Synthetic oligonucleotide
ggcuaacuuggccuacccu

SEQ ID NO: 619061 - RNA, 19 nt, Artificial Sequence
  Description of Artificial Sequence: Synthetic oligonucleotide
gacucgcucuaaaguuucu

SEQ ID NO: 619062 - RNA, 19 nt, Artificial Sequence
  Description of Artificial Sequence: Synthetic oligonucleotide
cucacucguuaaaguuaua

SEQ ID NO: 619063 - RNA, 19 nt, Artificial Sequence
  Description of Artificial Sequence: Synthetic oligonucleotide
cagugacccaguguacugu

SEQ ID NO: 619064 - RNA, 19 nt, Artificial Sequence
  Description of Artificial Sequence: Synthetic oligonucleotide
ccguguaaucaauuacagu

SEQ ID NO: 619065 - RNA, 19 nt, Artificial Sequence
  Description of Artificial Sequence: Synthetic oligonucleotide
ccuaugaccuauugucaau

SEQ ID NO: 619066 - RNA, 19 nt, Artificial Sequence
  Description of Artificial Sequence: Synthetic oligonucleotide
gccuacccuucaaaggaaa

SEQ ID NO: 619067 - RNA, 19 nt, Artificial Sequence
  Description of Artificial Sequence: Synthetic oligonucleotide
gcaacacacaauggaguuu

SEQ ID NO: 619068 - RNA, 19 nt, Artificial Sequence
  Description of Artificial Sequence: Synthetic oligonucleotide
cacgucaaucaaggcaguu

SEQ ID NO: 619069 - RNA, 19 nt, Artificial Sequence
  Description of Artificial Sequence: Synthetic oligonucleotide
ccagcccguguaaucaauu

SEQ ID NO: 619070 - RNA, 19 nt, Artificial Sequence
  Description of Artificial Sequence: Synthetic oligonucleotide
cccugcgugcuggucauua

SEQ ID NO: 619071 - RNA, 19 nt, Artificial Sequence
  Description of Artificial Sequence: Synthetic oligonucleotide
ccccagcccguguaaucaa

SEQ ID NO: 619072 - RNA, 19 nt, Artificial Sequence
  Description of Artificial Sequence: Synthetic oligonucleotide
cccagcccguguaaucaau

SEQ ID NO: 619073 - RNA, 19 nt, Artificial Sequence
  Description of Artificial Sequence: Synthetic oligonucleotide
ccguucucucacagacauu

SEQ ID NO: 619074 - RNA, 19 nt, Artificial Sequence
  Description of Artificial Sequence: Synthetic oligonucleotide
uguacaucaaguuacacag

SEQ ID NO: 619075 - RNA, 19 nt, Artificial Sequence
  Description of Artificial Sequence: Synthetic oligonucleotide
aauaucagaggucauuggg

SEQ ID NO: 619076 - RNA, 19 nt, Artificial Sequence
  Description of Artificial Sequence: Synthetic oligonucleotide
ugugguacaauaaauaacu

SEQ ID NO: 619077 - RNA, 19 nt, Artificial Sequence
  Description of Artificial Sequence: Synthetic oligonucleotide
aaagacuggauauuaaaug

SEQ ID NO: 619078 - RNA, 19 nt, Artificial Sequence
  Description of Artificial Sequence: Synthetic oligonucleotide
aauaugucaaaauaucaga

SEQ ID NO: 619079 - RNA, 19 nt, Artificial Sequence
  Description of Artificial Sequence: Synthetic oligonucleotide
agauuauugaaacucacag

SEQ ID NO: 619080 - RNA, 19 nt, Artificial Sequence
  Description of Artificial Sequence: Synthetic oligonucleotide
aaauaugucaaaauaucag

SEQ ID NO: 619081 - RNA, 19 nt, Artificial Sequence
  Description of Artificial Sequence: Synthetic oligonucleotide
aacuacuuaggccaaucac

SEQ ID NO: 619082 - RNA, 19 nt, Artificial Sequence
  Description of Artificial Sequence: Synthetic oligonucleotide
auaaucaagaaagagaacu

SEQ ID NO: 619083 - RNA, 19 nt, Artificial Sequence
  Description of Artificial Sequence: Synthetic oligonucleotide
ugguacaauaaauaacugg

SEQ ID NO: 619084 - RNA, 19 nt, Artificial Sequence
  Description of Artificial Sequence: Synthetic oligonucleotide
uguuuguugggccagcagg

SEQ ID NO: 619085 - RNA, 19 nt, Artificial Sequence
  Description of Artificial Sequence: Synthetic oligonucleotide
guuagauaaacaaugagac

SEQ ID NO: 619086 - RNA, 19 nt, Artificial Sequence
  Description of Artificial Sequence: Synthetic oligonucleotide
acagacgagacacaguugg

SEQ ID NO: 619087 - RNA, 19 nt, Artificial Sequence
  Description of Artificial Sequence: Synthetic oligonucleotide
uucaaugugaugccaauca

SEQ ID NO: 619088 - RNA, 19 nt, Artificial Sequence
  Description of Artificial Sequence: Synthetic oligonucleotide
uuaacuccauugcugaucc

SEQ ID NO: 619089 - RNA, 19 nt, Artificial Sequence
  Description of Artificial Sequence: Synthetic oligonucleotide
aacuccauugcugaucccc

SEQ ID NO: 619090 - RNA, 19 nt, Artificial Sequence
  Description of Artificial Sequence: Synthetic oligonucleotide
cauuuaaugauguaggaga

SEQ ID NO: 619091 - RNA, 19 nt, Artificial Sequence
  Description of Artificial Sequence: Synthetic oligonucleotide
auguacacgaguugugucc

SEQ ID NO: 619092 - RNA, 19 nt, Artificial Sequence
  Description of Artificial Sequence: Synthetic oligonucleotide
acuuaggccaaucacaaca

SEQ ID NO: 619093 - RNA, 19 nt, Artificial Sequence
  Description of Artificial Sequence: Synthetic oligonucleotide
uauugaaacucacagcuau

SEQ ID NO: 619094 - RNA, 19 nt, Artificial Sequence
  Description of Artificial Sequence: Synthetic oligonucleotide
acuggugcuaacuacuuag

SEQ ID NO: 619095 - RNA, 19 nt, Artificial Sequence
  Description of Artificial Sequence: Synthetic oligonucleotide
aagagaacuuauaaaaugu

SEQ ID NO: 619096 - RNA, 19 nt, Artificial Sequence
  Description of Artificial Sequence: Synthetic oligonucleotide
ugcacaucagcaaaucuug

SEQ ID NO: 619097 - RNA, 19 nt, Artificial Sequence
  Description of Artificial Sequence: Synthetic oligonucleotide
uaugaggacaagaggguag

SEQ ID NO: 619098 - RNA, 19 nt, Artificial Sequence
  Description of Artificial Sequence: Synthetic oligonucleotide
gagcauuuaaugauguagg

SEQ ID NO: 619099 - RNA, 19 nt, Artificial Sequence
  Description of Artificial Sequence: Synthetic oligonucleotide
gaggcauaaacccaacacc

SEQ ID NO: 619100 - RNA, 19 nt, Artificial Sequence
  Description of Artificial Sequence: Synthetic oligonucleotide
aagaggacaaacagggaac

SEQ ID NO: 619101 - RNA, 19 nt, Artificial Sequence
  Description of Artificial Sequence: Synthetic oligonucleotide
ugguuagauaaacaaugag

SEQ ID NO: 619102 - RNA, 19 nt, Artificial Sequence
  Description of Artificial Sequence: Synthetic oligonucleotide
aaaguugugaguuguuaau

SEQ ID NO: 619103 - RNA, 19 nt, Artificial Sequence
  Description of Artificial Sequence: Synthetic oligonucleotide
gauaguuugcacaucagca

SEQ ID NO: 619104 - RNA, 19 nt, Artificial Sequence
  Description of Artificial Sequence: Synthetic oligonucleotide
aguggguccaacauagugc

SEQ ID NO: 619105 - RNA, 19 nt, Artificial Sequence
  Description of Artificial Sequence: Synthetic oligonucleotide
uuagauaaacaaugagaca

SEQ ID NO: 619106 - RNA, 19 nt, Artificial Sequence
  Description of Artificial Sequence: Synthetic oligonucleotide
cagagauugcuuuaacucc

SEQ ID NO: 619107 - RNA, 19 nt, Artificial Sequence
  Description of Artificial Sequence: Synthetic oligonucleotide
uagauuauugaaacucaca

SEQ ID NO: 619108 - RNA, 19 nt, Artificial Sequence
  Description of Artificial Sequence: Synthetic oligonucleotide
cuuggaaaucucuuagacc

SEQ ID NO: 619109 - RNA, 19 nt, Artificial Sequence
  Description of Artificial Sequence: Synthetic oligonucleotide
agaacuuauaaaauguugu

SEQ ID NO: 619110 - RNA, 19 nt, Artificial Sequence
  Description of Artificial Sequence: Synthetic oligonucleotide
ugcuagauuauugaaacuc

SEQ ID NO: 619111 - RNA, 19 nt, Artificial Sequence
  Description of Artificial Sequence: Synthetic oligonucleotide
auuuucgccaucuccagcu

SEQ ID NO: 619112 - RNA, 19 nt, Artificial Sequence
  Description of Artificial Sequence: Synthetic oligonucleotide
cauaaacccaacaccacac

SEQ ID NO: 619113 - RNA, 19 nt, Artificial Sequence
  Description of Artificial Sequence: Synthetic oligonucleotide
ucuagagguuuuaacuuga

SEQ ID NO: 619114 - RNA, 19 nt, Artificial Sequence
  Description of Artificial Sequence: Synthetic oligonucleotide
ucacaugguagguugugag

SEQ ID NO: 619115 - RNA, 19 nt, Artificial Sequence
  Description of Artificial Sequence: Synthetic oligonucleotide
cuagauuauugaaacucac

SEQ ID NO: 619116 - RNA, 19 nt, Artificial Sequence
  Description of Artificial Sequence: Synthetic oligonucleotide
augugguacaauaaauaac

SEQ ID NO: 619117 - RNA, 19 nt, Artificial Sequence
  Description of Artificial Sequence: Synthetic oligonucleotide
ggugguuagauaaacaaug

SEQ ID NO: 619118 - RNA, 19 nt, Artificial Sequence
  Description of Artificial Sequence: Synthetic oligonucleotide
gugcuaacuacuuaggcca

SEQ ID NO: 619119 - RNA, 19 nt, Artificial Sequence
  Description of Artificial Sequence: Synthetic oligonucleotide
aaucuugacuggugcuaac

SEQ ID NO: 619120 - RNA, 19 nt, Artificial Sequence
  Description of Artificial Sequence: Synthetic oligonucleotide
ugucaaaauaucagagguc

SEQ ID NO: 619121 - RNA, 19 nt, Artificial Sequence
  Description of Artificial Sequence: Synthetic oligonucleotide
auuuccuauguacacgagu

SEQ ID NO: 619122 - RNA, 19 nt, Artificial Sequence
  Description of Artificial Sequence: Synthetic oligonucleotide
uuuaaugauguaggagaag

SEQ ID NO: 619123 - RNA, 19 nt, Artificial Sequence
  Description of Artificial Sequence: Synthetic oligonucleotide
uagugcuagauuauugaaa

SEQ ID NO: 619124 - RNA, 19 nt, Artificial Sequence
  Description of Artificial Sequence: Synthetic oligonucleotide
ucuucaaccgccugcuccc

SEQ ID NO: 619125 - RNA, 19 nt, Artificial Sequence
  Description of Artificial Sequence: Synthetic oligonucleotide
ugauggauaguuugcacau

SEQ ID NO: 619126 - RNA, 19 nt, Artificial Sequence
  Description of Artificial Sequence: Synthetic oligonucleotide
caaacacgccaccagacag

SEQ ID NO: 619127 - RNA, 19 nt, Artificial Sequence
  Description of Artificial Sequence: Synthetic oligonucleotide
aaagagcauuuaaugaugu

SEQ ID NO: 619128 - RNA, 19 nt, Artificial Sequence
  Description of Artificial Sequence: Synthetic oligonucleotide
ugaaacucacagcuauaca

SEQ ID NO: 619129 - RNA, 19 nt, Artificial Sequence
  Description of Artificial Sequence: Synthetic oligonucleotide
auaauggagccuaagagau

SEQ ID NO: 619130 - RNA, 19 nt, Artificial Sequence
  Description of Artificial Sequence: Synthetic oligonucleotide
uugcacaucagcaaaucuu

SEQ ID NO: 619131 - RNA, 19 nt, Artificial Sequence
  Description of Artificial Sequence: Synthetic oligonucleotide
acuacuuaggccaaucaca

SEQ ID NO: 619132 - RNA, 19 nt, Artificial Sequence
  Description of Artificial Sequence: Synthetic oligonucleotide
ugugccgagcugaccaugg

SEQ ID NO: 619133 - RNA, 19 nt, Artificial Sequence
  Description of Artificial Sequence: Synthetic oligonucleotide
gaguggguccaacauagug

SEQ ID NO: 619134 - RNA, 19 nt, Artificial Sequence
  Description of Artificial Sequence: Synthetic oligonucleotide
cauagugcuagauuauuga

SEQ ID NO: 619135 - RNA, 19 nt, Artificial Sequence
  Description of Artificial Sequence: Synthetic oligonucleotide
auugcugauccccgcgggc

SEQ ID NO: 619136 - RNA, 19 nt, Artificial Sequence
  Description of Artificial Sequence: Synthetic oligonucleotide
gauuauaauggagccuaag

SEQ ID NO: 619137 - RNA, 19 nt, Artificial Sequence
  Description of Artificial Sequence: Synthetic oligonucleotide
auagcagucaugggcuugc

SEQ ID NO: 619138 - RNA, 19 nt, Artificial Sequence
  Description of Artificial Sequence: Synthetic oligonucleotide
uuuaacuccauugcugauc

SEQ ID NO: 619139 - RNA, 19 nt, Artificial Sequence
  Description of Artificial Sequence: Synthetic oligonucleotide
gguuagauaaacaaugaga

SEQ ID NO: 619140 - RNA, 19 nt, Artificial Sequence
  Description of Artificial Sequence: Synthetic oligonucleotide
uaacuacuuaggccaauca

SEQ ID NO: 619141 - RNA, 19 nt, Artificial Sequence
  Description of Artificial Sequence: Synthetic oligonucleotide
agaccuaugugguacaaua

SEQ ID NO: 619142 - RNA, 19 nt, Artificial Sequence
  Description of Artificial Sequence: Synthetic oligonucleotide
ggggcauacuguuuuaagg

SEQ ID NO: 619143 - RNA, 19 nt, Artificial Sequence
  Description of Artificial Sequence: Synthetic oligonucleotide
cuuaggccaaucacaacac

SEQ ID NO: 619144 - RNA, 19 nt, Artificial Sequence
  Description of Artificial Sequence: Synthetic oligonucleotide
cuggauauuaaauguuuca

SEQ ID NO: 619145 - RNA, 19 nt, Artificial Sequence
  Description of Artificial Sequence: Synthetic oligonucleotide
guuuguugggccagcaggg

SEQ ID NO: 619146 - RNA, 19 nt, Artificial Sequence
  Description of Artificial Sequence: Synthetic oligonucleotide
uccuauguacacgaguugu

SEQ ID NO: 619147 - RNA, 19 nt, Artificial Sequence
  Description of Artificial Sequence: Synthetic oligonucleotide
auugggaaaguugugaguu

SEQ ID NO: 619148 - RNA, 19 nt, Artificial Sequence
  Description of Artificial Sequence: Synthetic oligonucleotide
uccaacauagugcuagauu

SEQ ID NO: 619149 - RNA, 19 nt, Artificial Sequence
  Description of Artificial Sequence: Synthetic oligonucleotide
gagacgcuggauuuucgcc

SEQ ID NO: 619150 - RNA, 19 nt, Artificial Sequence
  Description of Artificial Sequence: Synthetic oligonucleotide
auagugcuagauuauugaa

SEQ ID NO: 619151 - RNA, 19 nt, Artificial Sequence
  Description of Artificial Sequence: Synthetic oligonucleotide
cauaaucaagaaagagaac

SEQ ID NO: 619152 - RNA, 19 nt, Artificial Sequence
  Description of Artificial Sequence: Synthetic oligonucleotide
cacgccaccagacagacga

SEQ ID NO: 619153 - RNA, 19 nt, Artificial Sequence
  Description of Artificial Sequence: Synthetic oligonucleotide
uugaugagugccaggccug

SEQ ID NO: 619154 - RNA, 19 nt, Artificial Sequence
  Description of Artificial Sequence: Synthetic oligonucleotide
aggggcucucuauugcuac

SEQ ID NO: 619155 - RNA, 19 nt, Artificial Sequence
  Description of Artificial Sequence: Synthetic oligonucleotide
acagcuauacacaccuggg

SEQ ID NO: 619156 - RNA, 19 nt, Artificial Sequence
  Description of Artificial Sequence: Synthetic oligonucleotide
uucacggagacgcuggauu

SEQ ID NO: 619157 - RNA, 19 nt, Artificial Sequence
  Description of Artificial Sequence: Synthetic oligonucleotide
ugacucucgacggaccagg

SEQ ID NO: 619158 - RNA, 19 nt, Artificial Sequence
  Description of Artificial Sequence: Synthetic oligonucleotide
ucaaugugaugccaaucau

SEQ ID NO: 619159 - RNA, 19 nt, Artificial Sequence
  Description of Artificial Sequence: Synthetic oligonucleotide
ggauaguuugcacaucagc

SEQ ID NO: 619160 - RNA, 19 nt, Artificial Sequence
  Description of Artificial Sequence: Synthetic oligonucleotide
agugaggggcucucuauug

SEQ ID NO: 619161 - RNA, 19 nt, Artificial Sequence
  Description of Artificial Sequence: Synthetic oligonucleotide
ggaggcauaaacccaacac

SEQ ID NO: 619162 - RNA, 19 nt, Artificial Sequence
  Description of Artificial Sequence: Synthetic oligonucleotide
agccuaagagauguguggg

SEQ ID NO: 619163 - RNA, 19 nt, Artificial Sequence
  Description of Artificial Sequence: Synthetic oligonucleotide
cuaugugguacaauaaaua

SEQ ID NO: 619164 - RNA, 19 nt, Artificial Sequence
  Description of Artificial Sequence: Synthetic oligonucleotide
agacgcuggauuuucgcca

SEQ ID NO: 619165 - RNA, 19 nt, Artificial Sequence
  Description of Artificial Sequence: Synthetic oligonucleotide
cuguguggaagccuccagg

SEQ ID NO: 619166 - RNA, 19 nt, Artificial Sequence
  Description of Artificial Sequence: Synthetic oligonucleotide
agucccuccgcuuuccaug

SEQ ID NO: 619167 - RNA, 19 nt, Artificial Sequence
  Description of Artificial Sequence: Synthetic oligonucleotide
gacgagacacaguuggguc

SEQ ID NO: 619168 - RNA, 19 nt, Artificial Sequence
  Description of Artificial Sequence: Synthetic oligonucleotide
cagcuauacacaccugggg

SEQ ID NO: 619169 - RNA, 19 nt, Artificial Sequence
  Description of Artificial Sequence: Synthetic oligonucleotide
ucccuuaaccguuccaccu

SEQ ID NO: 619170 - RNA, 19 nt, Artificial Sequence
  Description of Artificial Sequence: Synthetic oligonucleotide
uguggggcugguucaaaca

SEQ ID NO: 619171 - RNA, 19 nt, Artificial Sequence
  Description of Artificial Sequence: Synthetic oligonucleotide
ucuuggugguuagauaaac

SEQ ID NO: 619172 - RNA, 19 nt, Artificial Sequence
  Description of Artificial Sequence: Synthetic oligonucleotide
gacuucacggagacgcugg

SEQ ID NO: 619173 - RNA, 19 nt, Artificial Sequence
  Description of Artificial Sequence: Synthetic oligonucleotide
caccagacagacgagacac

SEQ ID NO: 619174 - RNA, 19 nt, Artificial Sequence
  Description of Artificial Sequence: Synthetic oligonucleotide
uuaggccaaucacaacaca

SEQ ID NO: 619175 - RNA, 19 nt, Artificial Sequence
  Description of Artificial Sequence: Synthetic oligonucleotide
aaucucuuagaccccugua

SEQ ID NO: 619176 - RNA, 19 nt, Artificial Sequence
  Description of Artificial Sequence: Synthetic oligonucleotide
caugguagguugugagggg

SEQ ID NO: 619177 - RNA, 19 nt, Artificial Sequence
  Description of Artificial Sequence: Synthetic oligonucleotide
cgugauagcagucaugggc

SEQ ID NO: 619178 - RNA, 19 nt, Artificial Sequence
  Description of Artificial Sequence: Synthetic oligonucleotide
gugauuauaauggagccua

SEQ ID NO: 619179 - RNA, 19 nt, Artificial Sequence
  Description of Artificial Sequence: Synthetic oligonucleotide
ucaugaaccugaguucuga

SEQ ID NO: 619180 - RNA, 19 nt, Artificial Sequence
  Description of Artificial Sequence: Synthetic oligonucleotide
acauaggggcuacaugaug

SEQ ID NO: 619181 - RNA, 19 nt, Artificial Sequence
  Description of Artificial Sequence: Synthetic oligonucleotide
aggggcauacuguuuuaag

SEQ ID NO: 619182 - RNA, 19 nt, Artificial Sequence
  Description of Artificial Sequence: Synthetic oligonucleotide
ggccaugcgacagugaggg

SEQ ID NO: 619183 - RNA, 19 nt, Artificial Sequence
  Description of Artificial Sequence: Synthetic oligonucleotide
uaagagaugugugggcugu

SEQ ID NO: 619184 - RNA, 19 nt, Artificial Sequence
  Description of Artificial Sequence: Synthetic oligonucleotide
cuaagagaugugugggcug

SEQ ID NO: 619185 - RNA, 19 nt, Artificial Sequence
  Description of Artificial Sequence: Synthetic oligonucleotide
agagcugaaugucauccau

SEQ ID NO: 619186 - RNA, 19 nt, Artificial Sequence
  Description of Artificial Sequence: Synthetic oligonucleotide
aacauagugcuagauuauu

SEQ ID NO: 619187 - RNA, 19 nt, Artificial Sequence
  Description of Artificial Sequence: Synthetic oligonucleotide
uuguugggccagcagggug

SEQ ID NO: 619188 - RNA, 19 nt, Artificial Sequence
  Description of Artificial Sequence: Synthetic oligonucleotide
acauagugcuagauuauug

SEQ ID NO: 619189 - RNA, 19 nt, Artificial Sequence
  Description of Artificial Sequence: Synthetic oligonucleotide
gguugugaggggcauacug

SEQ ID NO: 619190 - RNA, 19 nt, Artificial Sequence
  Description of Artificial Sequence: Synthetic oligonucleotide
ugggaaaguugugaguugu

SEQ ID NO: 619191 - RNA, 19 nt, Artificial Sequence
  Description of Artificial Sequence: Synthetic oligonucleotide
aaguugugaguuguuaauu

SEQ ID NO: 619192 - RNA, 19 nt, Artificial Sequence
  Description of Artificial Sequence: Synthetic oligonucleotide
auuuaaugauguaggagaa

SEQ ID NO: 619193 - RNA, 19 nt, Artificial Sequence
  Description of Artificial Sequence: Synthetic oligonucleotide
cuacuuaggccaaucacaa

SEQ ID NO: 619194 - RNA, 19 nt, Artificial Sequence
  Description of Artificial Sequence: Synthetic oligonucleotide
aaggggaguggguccaaca

SEQ ID NO: 619195 - RNA, 19 nt, Artificial Sequence
  Description of Artificial Sequence: Synthetic oligonucleotide
aagagcauuuaaugaugua

SEQ ID NO: 619196 - RNA, 19 nt, Artificial Sequence
  Description of Artificial Sequence: Synthetic oligonucleotide
ugauguuaacaaagagcau

SEQ ID NO: 619197 - RNA, 19 nt, Artificial Sequence
  Description of Artificial Sequence: Synthetic oligonucleotide
aaccgccugcucccgaaag

SEQ ID NO: 619198 - RNA, 19 nt, Artificial Sequence
  Description of Artificial Sequence: Synthetic oligonucleotide
ugauuauaauggagccuaa

SEQ ID NO: 619199 - RNA, 19 nt, Artificial Sequence
  Description of Artificial Sequence: Synthetic oligonucleotide
uucuaaggggucgggagcu

SEQ ID NO: 619200 - RNA, 19 nt, Artificial Sequence
  Description of Artificial Sequence: Synthetic oligonucleotide
uucacaugguagguuguga

SEQ ID NO: 619201 - RNA, 19 nt, Artificial Sequence
  Description of Artificial Sequence: Synthetic oligonucleotide
uccuguucccuuaaccguu

SEQ ID NO: 619202 - RNA, 19 nt, Artificial Sequence
  Description of Artificial Sequence: Synthetic oligonucleotide
uggagccuaagagaugugu

SEQ ID NO: 619203 - RNA, 19 nt, Artificial Sequence
  Description of Artificial Sequence: Synthetic oligonucleotide
cuaacuacuuaggccaauc

SEQ ID NO: 619204 - RNA, 19 nt, Artificial Sequence
  Description of Artificial Sequence: Synthetic oligonucleotide
aguuacacaggaggaguug

SEQ ID NO: 619205 - RNA, 19 nt, Artificial Sequence
  Description of Artificial Sequence: Synthetic oligonucleotide
aguucugacucucgacgga

SEQ ID NO: 619206 - RNA, 19 nt, Artificial Sequence
  Description of Artificial Sequence: Synthetic oligonucleotide
cauaggggcuacaugaugu

SEQ ID NO: 619207 - RNA, 19 nt, Artificial Sequence
  Description of Artificial Sequence: Synthetic oligonucleotide
gggaguggguccaacauag

SEQ ID NO: 619208 - RNA, 19 nt, Artificial Sequence
  Description of Artificial Sequence: Synthetic oligonucleotide
gauagcagucaugggcuug

SEQ ID NO: 619209 - RNA, 19 nt, Artificial Sequence
  Description of Artificial Sequence: Synthetic oligonucleotide
agaggacaaacagggaaca

SEQ ID NO: 619210 - RNA, 19 nt, Artificial Sequence
  Description of Artificial Sequence: Synthetic oligonucleotide
ugguagguugugaggggca

SEQ ID NO: 619211 - RNA, 19 nt, Artificial Sequence
  Description of Artificial Sequence: Synthetic oligonucleotide
caugaaccugaguucugac

SEQ ID NO: 619212 - RNA, 19 nt, Artificial Sequence
  Description of Artificial Sequence: Synthetic oligonucleotide
ccaacauagugcuagauua

SEQ ID NO: 619213 - RNA, 19 nt, Artificial Sequence
  Description of Artificial Sequence: Synthetic oligonucleotide
agacgagacacaguugggu

SEQ ID NO: 619214 - RNA, 19 nt, Artificial Sequence
  Description of Artificial Sequence: Synthetic oligonucleotide
cccgugauagcagucaugg

SEQ ID NO: 619215 - RNA, 19 nt, Artificial Sequence
  Description of Artificial Sequence: Synthetic oligonucleotide
gcuacaugauguugcacug

SEQ ID NO: 619216 - RNA, 19 nt, Artificial Sequence
  Description of Artificial Sequence: Synthetic oligonucleotide
gauuuccuauguacacgag

SEQ ID NO: 619217 - RNA, 19 nt, Artificial Sequence
  Description of Artificial Sequence: Synthetic oligonucleotide
ggauuuucgccaucuccag

SEQ ID NO: 619218 - RNA, 19 nt, Artificial Sequence
  Description of Artificial Sequence: Synthetic oligonucleotide
ucgggagcuccagaggaag

SEQ ID NO: 619219 - RNA, 19 nt, Artificial Sequence
  Description of Artificial Sequence: Synthetic oligonucleotide
agcguuucuaaggggucgg

SEQ ID NO: 619220 - RNA, 19 nt, Artificial Sequence
  Description of Artificial Sequence: Synthetic oligonucleotide
cuuugacauuggcaccugc

SEQ ID NO: 619221 - RNA, 19 nt, Artificial Sequence
  Description of Artificial Sequence: Synthetic oligonucleotide
cagcaaaucuugacuggug

SEQ ID NO: 619222 - RNA, 19 nt, Artificial Sequence
  Description of Artificial Sequence: Synthetic oligonucleotide
aggcuacagucccuggaag

SEQ ID NO: 619223 - RNA, 19 nt, Artificial Sequence
  Description of Artificial Sequence: Synthetic oligonucleotide
uuaagggaggggcucucuu

SEQ ID NO: 619224 - RNA, 19 nt, Artificial Sequence
  Description of Artificial Sequence: Synthetic oligonucleotide
ugcugauccccgcgggcag

SEQ ID NO: 619225 - RNA, 19 nt, Artificial Sequence
  Description of Artificial Sequence: Synthetic oligonucleotide
gguaggagggaugaucccc

SEQ ID NO: 619226 - RNA, 19 nt, Artificial Sequence
  Description of Artificial Sequence: Synthetic oligonucleotide
uccgcuuuccaugcugucu

SEQ ID NO: 619227 - RNA, 19 nt, Artificial Sequence
  Description of Artificial Sequence: Synthetic oligonucleotide
ggcugguucaaacacgcca

SEQ ID NO: 619228 - RNA, 19 nt, Artificial Sequence
  Description of Artificial Sequence: Synthetic oligonucleotide
aguugggucaggcuuccuu

SEQ ID NO: 619229 - RNA, 19 nt, Artificial Sequence
  Description of Artificial Sequence: Synthetic oligonucleotide
uacuuaggccaaucacaac

SEQ ID NO: 619230 - RNA, 19 nt, Artificial Sequence
  Description of Artificial Sequence: Synthetic oligonucleotide
ugcuaacuacuuaggccaa

SEQ ID NO: 619231 - RNA, 19 nt, Artificial Sequence
  Description of Artificial Sequence: Synthetic oligonucleotide
aagagagcguggguuggca

SEQ ID NO: 619232 - RNA, 19 nt, Artificial Sequence
  Description of Artificial Sequence: Synthetic oligonucleotide
acggagacgcuggauuuuc

SEQ ID NO: 619233 - RNA, 19 nt, Artificial Sequence
  Description of Artificial Sequence: Synthetic oligonucleotide
aggggaguggguccaacau

SEQ ID NO: 619234 - RNA, 19 nt, Artificial Sequence
  Description of Artificial Sequence: Synthetic oligonucleotide
gguauucucugcagcagcc

SEQ ID NO: 619235 - RNA, 19 nt, Artificial Sequence
  Description of Artificial Sequence: Synthetic oligonucleotide
agcgucucuaggaaaguga

SEQ ID NO: 619236 - RNA, 19 nt, Artificial Sequence
  Description of Artificial Sequence: Synthetic oligonucleotide
uaggggcuacaugauguug

SEQ ID NO: 619237 - RNA, 19 nt, Artificial Sequence
  Description of Artificial Sequence: Synthetic oligonucleotide
aaguuacacaggaggaguu

SEQ ID NO: 619238 - RNA, 19 nt, Artificial Sequence
  Description of Artificial Sequence: Synthetic oligonucleotide
guggguccaacauagugcu

SEQ ID NO: 619239 - RNA, 19 nt, Artificial Sequence
  Description of Artificial Sequence: Synthetic oligonucleotide
ucgagguguccccuuucac

SEQ ID NO: 619240 - RNA, 19 nt, Artificial Sequence
  Description of Artificial Sequence: Synthetic oligonucleotide
aagaccuaugugguacaau

SEQ ID NO: 619241 - RNA, 19 nt, Artificial Sequence
  Description of Artificial Sequence: Synthetic oligonucleotide
uuuaagggaggggcucucu

SEQ ID NO: 619242 - RNA, 19 nt, Artificial Sequence
  Description of Artificial Sequence: Synthetic oligonucleotide
ggacauggcaaauccagaa

SEQ ID NO: 619243 - RNA, 19 nt, Artificial Sequence
  Description of Artificial Sequence: Synthetic oligonucleotide
uuuguugggccagcagggu

SEQ ID NO: 619244 - RNA, 19 nt, Artificial Sequence
  Description of Artificial Sequence: Synthetic oligonucleotide
cuaaggggucgggagcucc

SEQ ID NO: 619245 - RNA, 19 nt, Artificial Sequence
  Description of Artificial Sequence: Synthetic oligonucleotide
gauggauaguuugcacauc

SEQ ID NO: 619246 - RNA, 19 nt, Artificial Sequence
  Description of Artificial Sequence: Synthetic oligonucleotide
ccaucaugaaccugaguuc

SEQ ID NO: 619247 - RNA, 19 nt, Artificial Sequence
  Description of Artificial Sequence: Synthetic oligonucleotide
guucugacucucgacggac

SEQ ID NO: 619248 - RNA, 19 nt, Artificial Sequence
  Description of Artificial Sequence: Synthetic oligonucleotide
ggagccuaagagaugugug

SEQ ID NO: 619249 - RNA, 19 nt, Artificial Sequence
  Description of Artificial Sequence: Synthetic oligonucleotide
cacuccaucccugcugaag

SEQ ID NO: 619250 - RNA, 19 nt, Artificial Sequence
  Description of Artificial Sequence: Synthetic oligonucleotide
auaggggcuacaugauguu

SEQ ID NO: 619251 - RNA, 19 nt, Artificial Sequence
  Description of Artificial Sequence: Synthetic oligonucleotide
cagucaugggcuugccuuc

SEQ ID NO: 619252 - RNA, 19 nt, Artificial Sequence
  Description of Artificial Sequence: Synthetic oligonucleotide
cuuguccacccaucccuac

SEQ ID NO: 619253 - RNA, 19 nt, Artificial Sequence
  Description of Artificial Sequence: Synthetic oligonucleotide
gguugggcaugcucugggg

SEQ ID NO: 619254 - RNA, 19 nt, Artificial Sequence
  Description of Artificial Sequence: Synthetic oligonucleotide
auuuucucugauggauagu

SEQ ID NO: 619255 - RNA, 19 nt, Artificial Sequence
  Description of Artificial Sequence: Synthetic oligonucleotide
ggaucuguucuuguccacc

SEQ ID NO: 619256 - RNA, 19 nt, Artificial Sequence
  Description of Artificial Sequence: Synthetic oligonucleotide
uuuuaagggaggggcucuc

SEQ ID NO: 619257 - RNA, 19 nt, Artificial Sequence
  Description of Artificial Sequence: Synthetic oligonucleotide
ggcggauacagggugggag

SEQ ID NO: 619258 - RNA, 19 nt, Artificial Sequence
  Description of Artificial Sequence: Synthetic oligonucleotide
agagaugugugggcugugu

SEQ ID NO: 619259 - RNA, 19 nt, Artificial Sequence
  Description of Artificial Sequence: Synthetic oligonucleotide
cuggcggauacaggguggg

SEQ ID NO: 619260 - RNA, 19 nt, Artificial Sequence
  Description of Artificial Sequence: Synthetic oligonucleotide
uggcccgugauagcaguca

SEQ ID NO: 619261 - RNA, 19 nt, Artificial Sequence
  Description of Artificial Sequence: Synthetic oligonucleotide
caucaugaaccugaguucu

SEQ ID NO: 619262 - RNA, 19 nt, Artificial Sequence
  Description of Artificial Sequence: Synthetic oligonucleotide
uucaaccgccugcucccga

SEQ ID NO: 619263 - RNA, 19 nt, Artificial Sequence
  Description of Artificial Sequence: Synthetic oligonucleotide
gccuaagagaugugugggc

SEQ ID NO: 619264 - RNA, 19 nt, Artificial Sequence
  Description of Artificial Sequence: Synthetic oligonucleotide
ucuggucagcagcguuucu

SEQ ID NO: 619265 - RNA, 19 nt, Artificial Sequence
  Description of Artificial Sequence: Synthetic oligonucleotide
agagagcguggguuggcau

SEQ ID NO: 619266 - RNA, 19 nt, Artificial Sequence
  Description of Artificial Sequence: Synthetic oligonucleotide
uaacuccauugcugauccc

SEQ ID NO: 619267 - RNA, 19 nt, Artificial Sequence
  Description of Artificial Sequence: Synthetic oligonucleotide
ccuccaccgccccauagcg

SEQ ID NO: 619268 - RNA, 19 nt, Artificial Sequence
  Description of Artificial Sequence: Synthetic oligonucleotide
gucgagguguccccuuuca

SEQ ID NO: 619269 - RNA, 19 nt, Artificial Sequence
  Description of Artificial Sequence: Synthetic oligonucleotide
guuacacaggaggaguugu

SEQ ID NO: 619270 - RNA, 19 nt, Artificial Sequence
  Description of Artificial Sequence: Synthetic oligonucleotide
guugugaggggcauacugu

SEQ ID NO: 619271 - RNA, 19 nt, Artificial Sequence
  Description of Artificial Sequence: Synthetic oligonucleotide
cauugggaaaguugugagu

SEQ ID NO: 619272 - RNA, 19 nt, Artificial Sequence
  Description of Artificial Sequence: Synthetic oligonucleotide
ggcuacagucccuggaaga

SEQ ID NO: 619273 - RNA, 19 nt, Artificial Sequence
  Description of Artificial Sequence: Synthetic oligonucleotide
gacuggugcuaacuacuua

SEQ ID NO: 619274 - RNA, 19 nt, Artificial Sequence
  Description of Artificial Sequence: Synthetic oligonucleotide
agcguggguuggcauuugu

SEQ ID NO: 619275 - RNA, 19 nt, Artificial Sequence
  Description of Artificial Sequence: Synthetic oligonucleotide
gauguugcacugggugguc

SEQ ID NO: 619276 - RNA, 19 nt, Artificial Sequence
  Description of Artificial Sequence: Synthetic oligonucleotide
gaagaccuaugugguacaa

SEQ ID NO: 619277 - RNA, 19 nt, Artificial Sequence
  Description of Artificial Sequence: Synthetic oligonucleotide
cuccaccgccccauagcgc

SEQ ID NO: 619278 - RNA, 19 nt, Artificial Sequence
  Description of Artificial Sequence: Synthetic oligonucleotide
uaggcuggacauggcaaau

SEQ ID NO: 619279 - RNA, 19 nt, Artificial Sequence
  Description of Artificial Sequence: Synthetic oligonucleotide
ucucggcuuccagauggac

SEQ ID NO: 619280 - RNA, 19 nt, Artificial Sequence
  Description of Artificial Sequence: Synthetic oligonucleotide
agucaugggcuugccuuca

SEQ ID NO: 619281 - RNA, 19 nt, Artificial Sequence
  Description of Artificial Sequence: Synthetic oligonucleotide
caugcgacagugaggggcu

SEQ ID NO: 619282 - RNA, 19 nt, Artificial Sequence
  Description of Artificial Sequence: Synthetic oligonucleotide
cuucaaccgccugcucccg

SEQ ID NO: 619283 - RNA, 19 nt, Artificial Sequence
  Description of Artificial Sequence: Synthetic oligonucleotide
agagcguggguuggcauuu

SEQ ID NO: 619284 - RNA, 19 nt, Artificial Sequence
  Description of Artificial Sequence: Synthetic oligonucleotide
gugaggggcauacuguuuu

SEQ ID NO: 619285 - RNA, 19 nt, Artificial Sequence
  Description of Artificial Sequence: Synthetic oligonucleotide
ugcuggucucagccauaga

SEQ ID NO: 619286 - RNA, 19 nt, Artificial Sequence
  Description of Artificial Sequence: Synthetic oligonucleotide
caacauagugcuagauuau

SEQ ID NO: 619287 - RNA, 19 nt, Artificial Sequence
  Description of Artificial Sequence: Synthetic oligonucleotide
acgcuggauuuucgccauc

SEQ ID NO: 619288 - RNA, 19 nt, Artificial Sequence
  Description of Artificial Sequence: Synthetic oligonucleotide
ggcaggucgaggugucccc

SEQ ID NO: 619289 - RNA, 19 nt, Artificial Sequence
  Description of Artificial Sequence: Synthetic oligonucleotide
gugcuagauuauugaaacu

SEQ ID NO: 619290 - RNA, 19 nt, Artificial Sequence
  Description of Artificial Sequence: Synthetic oligonucleotide
gggucaugccccuuuccca

SEQ ID NO: 619291 - RNA, 19 nt, Artificial Sequence
  Description of Artificial Sequence: Synthetic oligonucleotide
gacgcuggauuuucgccau

SEQ ID NO: 619292 - RNA, 19 nt, Artificial Sequence
  Description of Artificial Sequence: Synthetic oligonucleotide
auggcccgugauagcaguc

SEQ ID NO: 619293 - RNA, 19 nt, Artificial Sequence
  Description of Artificial Sequence: Synthetic oligonucleotide
gaggggcauacuguuuuaa

SEQ ID NO: 619294 - RNA, 19 nt, Artificial Sequence
  Description of Artificial Sequence: Synthetic oligonucleotide
ggggcuacaugauguugca

SEQ ID NO: 619295 - RNA, 19 nt, Artificial Sequence
  Description of Artificial Sequence: Synthetic oligonucleotide
cauucacaugguagguugu

SEQ ID NO: 619296 - RNA, 19 nt, Artificial Sequence
  Description of Artificial Sequence: Synthetic oligonucleotide
ggacuucacggagacgcug

SEQ ID NO: 619297 - RNA, 19 nt, Artificial Sequence
  Description of Artificial Sequence: Synthetic oligonucleotide
ucuaaggggucgggagcuc

SEQ ID NO: 619298 - RNA, 19 nt, Artificial Sequence
  Description of Artificial Sequence: Synthetic oligonucleotide
ccgcuuuccaugcugucuc

SEQ ID NO: 619299 - RNA, 19 nt, Artificial Sequence
  Description of Artificial Sequence: Synthetic oligonucleotide
gagagcguggguuggcauu

SEQ ID NO: 619300 - RNA, 19 nt, Artificial Sequence
  Description of Artificial Sequence: Synthetic oligonucleotide
cuccgcuuuccaugcuguc

SEQ ID NO: 619301 - RNA, 19 nt, Artificial Sequence
  Description of Artificial Sequence: Synthetic oligonucleotide
aggucgagguguccccuuu

SEQ ID NO: 619302 - RNA, 19 nt, Artificial Sequence
  Description of Artificial Sequence: Synthetic oligonucleotide
auagcgccucagaggcuuc

SEQ ID NO: 619303 - RNA, 19 nt, Artificial Sequence
  Description of Artificial Sequence: Synthetic oligonucleotide
uggguccaacauagugcua

SEQ ID NO: 619304 - RNA, 19 nt, Artificial Sequence
  Description of Artificial Sequence: Synthetic oligonucleotide
aggacuucacggagacgcu

SEQ ID NO: 619305 - RNA, 19 nt, Artificial Sequence
  Description of Artificial Sequence: Synthetic oligonucleotide
cuagagguuuuaacuugau

SEQ ID NO: 619306 - RNA, 19 nt, Artificial Sequence
  Description of Artificial Sequence: Synthetic oligonucleotide
ccgugauagcagucauggg

SEQ ID NO: 619307 - RNA, 19 nt, Artificial Sequence
  Description of Artificial Sequence: Synthetic oligonucleotide
cccuuaaccguuccaccuc

SEQ ID NO: 619308 - RNA, 19 nt, Artificial Sequence
  Description of Artificial Sequence: Synthetic oligonucleotide
ccuuaaccguuccaccuca

SEQ ID NO: 619309 - RNA, 19 nt, Artificial Sequence
  Description of Artificial Sequence: Synthetic oligonucleotide
gcgucauccaccaggaagu

SEQ ID NO: 619310 - RNA, 19 nt, Artificial Sequence
  Description of Artificial Sequence: Synthetic oligonucleotide
gacucucgacggaccagga

SEQ ID NO: 619311 - RNA, 19 nt, Artificial Sequence
  Description of Artificial Sequence: Synthetic oligonucleotide
gcgaccaaguucugcagcu

SEQ ID NO: 619312 - RNA, 19 nt, Artificial Sequence
  Description of Artificial Sequence: Synthetic oligonucleotide
gacuuguaucugacagcaa

SEQ ID NO: 619313 - RNA, 19 nt, Artificial Sequence
  Description of Artificial Sequence: Synthetic oligonucleotide
uggcggauacaggguggga

SEQ ID NO: 619314 - RNA, 19 nt, Artificial Sequence
  Description of Artificial Sequence: Synthetic oligonucleotide
gccgagcugaccauggcaa

SEQ ID NO: 619315 - RNA, 19 nt, Artificial Sequence
  Description of Artificial Sequence: Synthetic oligonucleotide
gucccacagcaauccuuga

SEQ ID NO: 619316 - RNA, 19 nt, Artificial Sequence
  Description of Artificial Sequence: Synthetic oligonucleotide
ggggaguggguccaacaua

SEQ ID NO: 619317 - RNA, 19 nt, Artificial Sequence
  Description of Artificial Sequence: Synthetic oligonucleotide
cauagcgccucagaggcuu

SEQ ID NO: 619318 - RNA, 19 nt, Artificial Sequence
  Description of Artificial Sequence: Synthetic oligonucleotide
acacgccaccagacagacg

SEQ ID NO: 619319 - RNA, 19 nt, Artificial Sequence
  Description of Artificial Sequence: Synthetic oligonucleotide
gagcguggguuggcauuug

SEQ ID NO: 619320 - RNA, 19 nt, Artificial Sequence
  Description of Artificial Sequence: Synthetic oligonucleotide
ggggcucucuauugcuaca

SEQ ID NO: 619321 - RNA, 19 nt, Artificial Sequence
  Description of Artificial Sequence: Synthetic oligonucleotide
ccuaagagaugugugggcu

SEQ ID NO: 619322 - RNA, 19 nt, Artificial Sequence
  Description of Artificial Sequence: Synthetic oligonucleotide
ccuuguuuguugggccagc

SEQ ID NO: 619323 - RNA, 19 nt, Artificial Sequence
  Description of Artificial Sequence: Synthetic oligonucleotide
ggucgagguguccccuuuc

SEQ ID NO: 619324 - RNA, 19 nt, Artificial Sequence
  Description of Artificial Sequence: Synthetic oligonucleotide
cccuccgcuuuccaugcug

SEQ ID NO: 619325 - RNA, 19 nt, Artificial Sequence
  Description of Artificial Sequence: Synthetic oligonucleotide
guuguggggcugguucaaa

SEQ ID NO: 619326 - RNA, 19 nt, Artificial Sequence
  Description of Artificial Sequence: Synthetic oligonucleotide
cuucaaccccuucugccuu

SEQ ID NO: 619327 - RNA, 19 nt, Artificial Sequence
  Description of Artificial Sequence: Synthetic oligonucleotide
cggagacgcuggauuuucg

SEQ ID NO: 619328 - RNA, 19 nt, Artificial Sequence
  Description of Artificial Sequence: Synthetic oligonucleotide
cacgaguuguguccauaau

SEQ ID NO: 619329 - RNA, 19 nt, Artificial Sequence
  Description of Artificial Sequence: Synthetic oligonucleotide
cgacggaccaggacuucac

SEQ ID NO: 619330 - RNA, 19 nt, Artificial Sequence
  Description of Artificial Sequence: Synthetic oligonucleotide
gggcuacaugauguugcac

SEQ ID NO: 619331 - RNA, 19 nt, Artificial Sequence
  Description of Artificial Sequence: Synthetic oligonucleotide
gcuacacucugcacagcaa

SEQ ID NO: 619332 - RNA, 19 nt, Artificial Sequence
  Description of Artificial Sequence: Synthetic oligonucleotide
ggcucucuauugcuacacu

SEQ ID NO: 619333 - RNA, 19 nt, Artificial Sequence
  Description of Artificial Sequence: Synthetic oligonucleotide
gcccgugauagcagucaug

SEQ ID NO: 619334 - RNA, 19 nt, Artificial Sequence
  Description of Artificial Sequence: Synthetic oligonucleotide
guggucccacagcaauccu

SEQ ID NO: 619335 - RNA, 19 nt, Artificial Sequence
  Description of Artificial Sequence: Synthetic oligonucleotide
gcugaccauggcaaaugua

SEQ ID NO: 619336 - RNA, 19 nt, Artificial Sequence
  Description of Artificial Sequence: Synthetic oligonucleotide
guccacccaucccuacccu

SEQ ID NO: 619337 - RNA, 19 nt, Artificial Sequence
  Description of Artificial Sequence: Synthetic oligonucleotide
gcgucucuaggaaagugau

SEQ ID NO: 619338 - RNA, 19 nt, Artificial Sequence
  Description of Artificial Sequence: Synthetic oligonucleotide
ugauccccgcgggcagguc

SEQ ID NO: 619339 - RNA, 19 nt, Artificial Sequence
  Description of Artificial Sequence: Synthetic oligonucleotide
ccacuguaggcuggacaug

SEQ ID NO: 619340 - RNA, 19 nt, Artificial Sequence
  Description of Artificial Sequence: Synthetic oligonucleotide
cuucccagucccuccgcuu

SEQ ID NO: 619341 - RNA, 19 nt, Artificial Sequence
  Description of Artificial Sequence: Synthetic oligonucleotide
caccgccccauagcgccuc

SEQ ID NO: 619342 - RNA, 19 nt, Artificial Sequence
  Description of Artificial Sequence: Synthetic oligonucleotide
gcgacagugaggggcucuc

SEQ ID NO: 619343 - RNA, 19 nt, Artificial Sequence
  Description of Artificial Sequence: Synthetic oligonucleotide
ccucagaggcuucucggcu

SEQ ID NO: 619344 - RNA, 19 nt, Artificial Sequence
  Description of Artificial Sequence: Synthetic oligonucleotide
gcuaacuacuuaggccaau

SEQ ID NO: 619345 - RNA, 19 nt, Artificial Sequence
  Description of Artificial Sequence: Synthetic oligonucleotide
cugauccccgcgggcaggu

SEQ ID NO: 619346 - RNA, 19 nt, Artificial Sequence
  Description of Artificial Sequence: Synthetic oligonucleotide
cacggagacgcuggauuuu

SEQ ID NO: 619347 - RNA, 19 nt, Artificial Sequence
  Description of Artificial Sequence: Synthetic oligonucleotide
caggucgagguguccccuu

SEQ ID NO: 619348 - RNA, 19 nt, Artificial Sequence
  Description of Artificial Sequence: Synthetic oligonucleotide
ggaguggguccaacauagu

SEQ ID NO: 619349 - RNA, 19 nt, Artificial Sequence
  Description of Artificial Sequence: Synthetic oligonucleotide
ccgcgggcaggucgaggug

SEQ ID NO: 619350 - RNA, 19 nt, Artificial Sequence
  Description of Artificial Sequence: Synthetic oligonucleotide
ccgccccauagcgccucag

SEQ ID NO: 619351 - RNA, 19 nt, Artificial Sequence
  Description of Artificial Sequence: Synthetic oligonucleotide
cuccuggguugggcaugcu

SEQ ID NO: 619352 - RNA, 19 nt, Artificial Sequence
  Description of Artificial Sequence: Synthetic oligonucleotide
ccaccgccccauagcgccu

SEQ ID NO: 619353 - RNA, 19 nt, Artificial Sequence
  Description of Artificial Sequence: Synthetic oligonucleotide
aagauuauaauuuggggac

SEQ ID NO: 619354 - RNA, 19 nt, Artificial Sequence
  Description of Artificial Sequence: Synthetic oligonucleotide
aaauguguacuccaaaacc

SEQ ID NO: 619355 - RNA, 19 nt, Artificial Sequence
  Description of Artificial Sequence: Synthetic oligonucleotide
uuauuuaauaggauuaaag

SEQ ID NO: 619356 - RNA, 19 nt, Artificial Sequence
  Description of Artificial Sequence: Synthetic oligonucleotide
uuuaauaggauuaaaggaa

SEQ ID NO: 619357 - RNA, 19 nt, Artificial Sequence
  Description of Artificial Sequence: Synthetic oligonucleotide
aauuauguaauauugugau

SEQ ID NO: 619358 - RNA, 19 nt, Artificial Sequence
  Description of Artificial Sequence: Synthetic oligonucleotide
ucuuguauuauuuuguacc

SEQ ID NO: 619359 - RNA, 19 nt, Artificial Sequence
  Description of Artificial Sequence: Synthetic oligonucleotide
ugugauguaaaauuagugc

SEQ ID NO: 619360 - RNA, 19 nt, Artificial Sequence
  Description of Artificial Sequence: Synthetic oligonucleotide
uuuuguaccagcaagguaa

SEQ ID NO: 619361 - RNA, 19 nt, Artificial Sequence
  Description of Artificial Sequence: Synthetic oligonucleotide
aaaacugugucccuacaac

SEQ ID NO: 619362 - RNA, 19 nt, Artificial Sequence
  Description of Artificial Sequence: Synthetic oligonucleotide
cuauaauuaacacaaacug

SEQ ID NO: 619363 - RNA, 19 nt, Artificial Sequence
  Description of Artificial Sequence: Synthetic oligonucleotide
acuacauccauuuagaaau

SEQ ID NO: 619364 - RNA, 19 nt, Artificial Sequence
  Description of Artificial Sequence: Synthetic oligonucleotide
uuaaggacgaucaguaagg

SEQ ID NO: 619365 - RNA, 19 nt, Artificial Sequence
  Description of Artificial Sequence: Synthetic oligonucleotide
aauaggauuaaaggaaugg

SEQ ID NO: 619366 - RNA, 19 nt, Artificial Sequence
  Description of Artificial Sequence: Synthetic oligonucleotide
ugaaguagcuucaucauag

SEQ ID NO: 619367 - RNA, 19 nt, Artificial Sequence
  Description of Artificial Sequence: Synthetic oligonucleotide
auaauuauguaauauugug

SEQ ID NO: 619368 - RNA, 19 nt, Artificial Sequence
  Description of Artificial Sequence: Synthetic oligonucleotide
aauagauacugcuagaguu

SEQ ID NO: 619369 - RNA, 19 nt, Artificial Sequence
  Description of Artificial Sequence: Synthetic oligonucleotide
aauuauuccuccuaauaca

SEQ ID NO: 619370 - RNA, 19 nt, Artificial Sequence
  Description of Artificial Sequence: Synthetic oligonucleotide
aaugcacugagcauaaucg

SEQ ID NO: 619371 - RNA, 19 nt, Artificial Sequence
  Description of Artificial Sequence: Synthetic oligonucleotide
uuuaauccuuaaaauaaag

SEQ ID NO: 619372 - RNA, 19 nt, Artificial Sequence
  Description of Artificial Sequence: Synthetic oligonucleotide
ucuauguuaaggacgauca

SEQ ID NO: 619373 - RNA, 19 nt, Artificial Sequence
  Description of Artificial Sequence: Synthetic oligonucleotide
aaagauacuccacuaagga

SEQ ID NO: 619374 - RNA, 19 nt, Artificial Sequence
  Description of Artificial Sequence: Synthetic oligonucleotide
acuaguuuugccucagugc

SEQ ID NO: 619375 - RNA, 19 nt, Artificial Sequence
  Description of Artificial Sequence: Synthetic oligonucleotide
ugugguguuauuugaaggg

SEQ ID NO: 619376 - RNA, 19 nt, Artificial Sequence
  Description of Artificial Sequence: Synthetic oligonucleotide
ucaaauucaaaagauguug

SEQ ID NO: 619377 - RNA, 19 nt, Artificial Sequence
  Description of Artificial Sequence: Synthetic oligonucleotide
aagauacuccacuaaggac

SEQ ID NO: 619378 - RNA, 19 nt, Artificial Sequence
  Description of Artificial Sequence: Synthetic oligonucleotide
agaguuagcaagcagacca

SEQ ID NO: 619379 - RNA, 19 nt, Artificial Sequence
  Description of Artificial Sequence: Synthetic oligonucleotide
uagcaaaugaguaucagac

SEQ ID NO: 619380 - RNA, 19 nt, Artificial Sequence
  Description of Artificial Sequence: Synthetic oligonucleotide
uaauuauguaauauuguga

SEQ ID NO: 619381 - RNA, 19 nt, Artificial Sequence
  Description of Artificial Sequence: Synthetic oligonucleotide
auguauuacgagcagcgcc

SEQ ID NO: 619382 - RNA, 19 nt, Artificial Sequence
  Description of Artificial Sequence: Synthetic oligonucleotide
uugaaucuaaugaugaagu

SEQ ID NO: 619383 - RNA, 19 nt, Artificial Sequence
  Description of Artificial Sequence: Synthetic oligonucleotide
aauuuggggacaauuauag

SEQ ID NO: 619384 - RNA, 19 nt, Artificial Sequence
  Description of Artificial Sequence: Synthetic oligonucleotide
  modified_base (3)..(3): a, c, u, g, unknown or other
ucncuuuucuaucaguggc

SEQ ID NO: 619385 - RNA, 19 nt, Artificial Sequence
  Description of Artificial Sequence: Synthetic oligonucleotide
aaacccugcaugcccaugc

SEQ ID NO: 619386 - RNA, 19 nt, Artificial Sequence
  Description of Artificial Sequence: Synthetic oligonucleotide
guauaauuauguaauauug

SEQ ID NO: 619387 - RNA, 19 nt, Artificial Sequence
  Description of Artificial Sequence: Synthetic oligonucleotide
gauaguguuauggaagagg

SEQ ID NO: 619388 - RNA, 19 nt, Artificial Sequence
  Description of Artificial Sequence: Synthetic oligonucleotide
uguugaggcucauagaagc

SEQ ID NO: 619389 - RNA, 19 nt, Artificial Sequence
  Description of Artificial Sequence: Synthetic oligonucleotide
aauagaaccaccucucuuu

SEQ ID NO: 619390 - RNA, 19 nt, Artificial Sequence
  Description of Artificial Sequence: Synthetic oligonucleotide
agaauugcaucaugaagac

SEQ ID NO: 619391 - RNA, 19 nt, Artificial Sequence
  Description of Artificial Sequence: Synthetic oligonucleotide
guuaaggacgaucaguaag

SEQ ID NO: 619392 - RNA, 19 nt, Artificial Sequence
  Description of Artificial Sequence: Synthetic oligonucleotide
uguauaauuauguaauauu

SEQ ID NO: 619393 - RNA, 19 nt, Artificial Sequence
  Description of Artificial Sequence: Synthetic oligonucleotide
auuaucaaaggccacugug

SEQ ID NO: 619394 - RNA, 19 nt, Artificial Sequence
  Description of Artificial Sequence: Synthetic oligonucleotide
caguugacaaucuaugugc

SEQ ID NO: 619395 - RNA, 19 nt, Artificial Sequence
  Description of Artificial Sequence: Synthetic oligonucleotide
gauuaaaggaaugggaaug

SEQ ID NO: 619396 - RNA, 19 nt, Artificial Sequence
  Description of Artificial Sequence: Synthetic oligonucleotide
uacugcuagaguuagcaag

SEQ ID NO: 619397 - RNA, 19 nt, Artificial Sequence
  Description of Artificial Sequence: Synthetic oligonucleotide
  modified_base (4)..(4): a, c, u, g, unknown or other
uucncuuuucuaucagugg

SEQ ID NO: 619398 - RNA, 19 nt, Artificial Sequence
  Description of Artificial Sequence: Synthetic oligonucleotide
auauaaaagguuguaguag

SEQ ID NO: 619399 - RNA, 19 nt, Artificial Sequence
  Description of Artificial Sequence: Synthetic oligonucleotide
uaggauuaaaggaauggga

SEQ ID NO: 619400 - RNA, 19 nt, Artificial Sequence
  Description of Artificial Sequence: Synthetic oligonucleotide
guaguagauaguguuaugg

SEQ ID NO: 619401 - RNA, 19 nt, Artificial Sequence
  Description of Artificial Sequence: Synthetic oligonucleotide
aguuauugaaucuaaugau

SEQ ID NO: 619402 - RNA, 19 nt, Artificial Sequence
  Description of Artificial Sequence: Synthetic oligonucleotide
uccgagguuaucaugauuc

SEQ ID NO: 619403 - RNA, 19 nt, Artificial Sequence
  Description of Artificial Sequence: Synthetic oligonucleotide
ugucccuacaacuugucag

SEQ ID NO: 619404 - RNA, 19 nt, Artificial Sequence
  Description of Artificial Sequence: Synthetic oligonucleotide
auagcuugaguccucguuc

SEQ ID NO: 619405 - RNA, 19 nt, Artificial Sequence
  Description of Artificial Sequence: Synthetic oligonucleotide
acaguucuauguuaaggac

SEQ ID NO: 619406 - RNA, 19 nt, Artificial Sequence
  Description of Artificial Sequence: Synthetic oligonucleotide
ugaauagauacugcuagag

SEQ ID NO: 619407 - RNA, 19 nt, Artificial Sequence
  Description of Artificial Sequence: Synthetic oligonucleotide
aacuacauccauuuagaaa

SEQ ID NO: 619408 - RNA, 19 nt, Artificial Sequence
  Description of Artificial Sequence: Synthetic oligonucleotide
ugcuacugcauauacuucc

SEQ ID NO: 619409 - RNA, 19 nt, Artificial Sequence
  Description of Artificial Sequence: Synthetic oligonucleotide
aagaauguauuacgagcag

SEQ ID NO: 619410 - RNA, 19 nt, Artificial Sequence
  Description of Artificial Sequence: Synthetic oligonucleotide
uaucuuauuuaauaggauu

SEQ ID NO: 619411 - RNA, 19 nt, Artificial Sequence
  Description of Artificial Sequence: Synthetic oligonucleotide
acaauuauagaugucaaau

SEQ ID NO: 619412 - RNA, 19 nt, Artificial Sequence
  Description of Artificial Sequence: Synthetic oligonucleotide
ucagagcucaaauuauucc

SEQ ID NO: 619413 - RNA, 19 nt, Artificial Sequence
  Description of Artificial Sequence: Synthetic oligonucleotide
aguguuauggaagaggaca

SEQ ID NO: 619414 - RNA, 19 nt, Artificial Sequence
  Description of Artificial Sequence: Synthetic oligonucleotide
guaccagcaagguaaaugc

SEQ ID NO: 619415 - RNA, 19 nt, Artificial Sequence
  Description of Artificial Sequence: Synthetic oligonucleotide
caguucuauguuaaggacg

SEQ ID NO: 619416 - RNA, 19 nt, Artificial Sequence
  Description of Artificial Sequence: Synthetic oligonucleotide
acaguugacaaucuaugug

SEQ ID NO: 619417 - RNA, 19 nt, Artificial Sequence
  Description of Artificial Sequence: Synthetic oligonucleotide
gugauguaaaauuagugca

SEQ ID NO: 619418 - RNA, 19 nt, Artificial Sequence
  Description of Artificial Sequence: Synthetic oligonucleotide
ugaagaccagcuaauuuug

SEQ ID NO: 619419 - RNA, 19 nt, Artificial Sequence
  Description of Artificial Sequence: Synthetic oligonucleotide
augggaauguaugauuugc

SEQ ID NO: 619420 - RNA, 19 nt, Artificial Sequence
  Description of Artificial Sequence: Synthetic oligonucleotide
agaauguauuacgagcagc

SEQ ID NO: 619421 - RNA, 19 nt, Artificial Sequence
  Description of Artificial Sequence: Synthetic oligonucleotide
gacaguucuauguuaagga

SEQ ID NO: 619422 - RNA, 19 nt, Artificial Sequence
  Description of Artificial Sequence: Synthetic oligonucleotide
uguaccagcaagguaaaug

SEQ ID NO: 619423 - RNA, 19 nt, Artificial Sequence
  Description of Artificial Sequence: Synthetic oligonucleotide
ucuaguaacugucuugaau

SEQ ID NO: 619424 - RNA, 19 nt, Artificial Sequence
  Description of Artificial Sequence: Synthetic oligonucleotide
aaucaucccaggaagcuuc

SEQ ID NO: 619425 - RNA, 19 nt, Artificial Sequence
  Description of Artificial Sequence: Synthetic oligonucleotide
uauggaagaggacagcauc

SEQ ID NO: 619426 - RNA, 19 nt, Artificial Sequence
  Description of Artificial Sequence: Synthetic oligonucleotide
  modified_base (9)..(9): a, c, u, g, unknown or other
acauguucncuuuucuauc

SEQ ID NO: 619427 - RNA, 19 nt, Artificial Sequence
  Description of Artificial Sequence: Synthetic oligonucleotide
ucuucgaaguacuuuccag

SEQ ID NO: 619428 - RNA, 19 nt, Artificial Sequence
  Description of Artificial Sequence: Synthetic oligonucleotide
aaugggaauguaugauuug

SEQ ID NO: 619429 - RNA, 19 nt, Artificial Sequence
  Description of Artificial Sequence: Synthetic oligonucleotide
acugcuagaguuagcaagc

SEQ ID NO: 619430 - RNA, 19 nt, Artificial Sequence
  Description of Artificial Sequence: Synthetic oligonucleotide
aauccgugugucuaccuug

SEQ ID NO: 619431 - RNA, 19 nt, Artificial Sequence
  Description of Artificial Sequence: Synthetic oligonucleotide
uucgaaguacuuuccaggc

SEQ ID NO: 619432 - RNA, 19 nt, Artificial Sequence
  Description of Artificial Sequence: Synthetic oligonucleotide
aaaugcuacccuguugagg

SEQ ID NO: 619433 - RNA, 19 nt, Artificial Sequence
  Description of Artificial Sequence: Synthetic oligonucleotide
caguuauugaaucuaauga

SEQ ID NO: 619434 - RNA, 19 nt, Artificial Sequence
  Description of Artificial Sequence: Synthetic oligonucleotide
ugauguaaaauuagugcau

SEQ ID NO: 619435 - RNA, 19 nt, Artificial Sequence
  Description of Artificial Sequence: Synthetic oligonucleotide
aucacucuauuucuucugg

SEQ ID NO: 619436 - RNA, 19 nt, Artificial Sequence
  Description of Artificial Sequence: Synthetic oligonucleotide
gauuucgucugcaucaacc

SEQ ID NO: 619437 - RNA, 19 nt, Artificial Sequence
  Description of Artificial Sequence: Synthetic oligonucleotide
uaauaggauuaaaggaaug

SEQ ID NO: 619438 - RNA, 19 nt, Artificial Sequence
  Description of Artificial Sequence: Synthetic oligonucleotide
uauguuaaggacgaucagu

SEQ ID NO: 619439 - RNA, 19 nt, Artificial Sequence
  Description of Artificial Sequence: Synthetic oligonucleotide
uaugaacuaguuuugccuc

SEQ ID NO: 619440 - RNA, 19 nt, Artificial Sequence
  Description of Artificial Sequence: Synthetic oligonucleotide
uucgaaagcagccgccgcg

SEQ ID NO: 619441 - RNA, 19 nt, Artificial Sequence
  Description of Artificial Sequence: Synthetic oligonucleotide
augaguaucagacuucaaa

SEQ ID NO: 619442 - RNA, 19 nt, Artificial Sequence
  Description of Artificial Sequence: Synthetic oligonucleotide
aagaccagcuaauuuugcu

SEQ ID NO: 619443 - RNA, 19 nt, Artificial Sequence
  Description of Artificial Sequence: Synthetic oligonucleotide
gauacugcuagaguuagca

SEQ ID NO: 619444 - RNA, 19 nt, Artificial Sequence
  Description of Artificial Sequence: Synthetic oligonucleotide
ugggguacuacucccacug

SEQ ID NO: 619445 - RNA, 19 nt, Artificial Sequence
  Description of Artificial Sequence: Synthetic oligonucleotide
cauucgaagaauugcauca

SEQ ID NO: 619446 - RNA, 19 nt, Artificial Sequence
  Description of Artificial Sequence: Synthetic oligonucleotide
cuagaguuagcaagcagac

SEQ ID NO: 619447 - RNA, 19 nt, Artificial Sequence
  Description of Artificial Sequence: Synthetic oligonucleotide
auaaagagaugcaagaaau

SEQ ID NO: 619448 - RNA, 19 nt, Artificial Sequence
  Description of Artificial Sequence: Synthetic oligonucleotide
auuauguaauauugugaug

SEQ ID NO: 619449 - RNA, 19 nt, Artificial Sequence
  Description of Artificial Sequence: Synthetic oligonucleotide
uggcccaguuuuaugaucc

SEQ ID NO: 619450 - RNA, 19 nt, Artificial Sequence
  Description of Artificial Sequence: Synthetic oligonucleotide
uguaaaauuagugcauuau

SEQ ID NO: 619451 - RNA, 19 nt, Artificial Sequence
  Description of Artificial Sequence: Synthetic oligonucleotide
agacaguucuauguuaagg

SEQ ID NO: 619452 - RNA, 19 nt, Artificial Sequence
  Description of Artificial Sequence: Synthetic oligonucleotide
ugacucuguauucuggaac

SEQ ID NO: 619453 - RNA, 19 nt, Artificial Sequence
  Description of Artificial Sequence: Synthetic oligonucleotide
uguuauuugaagggguuga

SEQ ID NO: 619454 - RNA, 19 nt, Artificial Sequence
  Description of Artificial Sequence: Synthetic oligonucleotide
uuuucgaaagcagccgccg

SEQ ID NO: 619455 - RNA, 19 nt, Artificial Sequence
  Description of Artificial Sequence: Synthetic oligonucleotide
uggcauucgaagaauugca

SEQ ID NO: 619456 - RNA, 19 nt, Artificial Sequence
  Description of Artificial Sequence: Synthetic oligonucleotide
gaccauaguggguaccacg

SEQ ID NO: 619457 - RNA, 19 nt, Artificial Sequence
  Description of Artificial Sequence: Synthetic oligonucleotide
uaauuuggggacaauuaua

SEQ ID NO: 619458 - RNA, 19 nt, Artificial Sequence
  Description of Artificial Sequence: Synthetic oligonucleotide
gaguaaacccugcaugccc

SEQ ID NO: 619459 - RNA, 19 nt, Artificial Sequence
  Description of Artificial Sequence: Synthetic oligonucleotide
agcgccaagaauguauuac

SEQ ID NO: 619460 - RNA, 19 nt, Artificial Sequence
  Description of Artificial Sequence: Synthetic oligonucleotide
uuuguauaauuauguaaua

SEQ ID NO: 619461 - RNA, 19 nt, Artificial Sequence
  Description of Artificial Sequence: Synthetic oligonucleotide
ucuuauuuaauaggauuaa

SEQ ID NO: 619462 - RNA, 19 nt, Artificial Sequence
  Description of Artificial Sequence: Synthetic oligonucleotide
  modified_base (2)..(2): a, c, u, g, unknown or other
cncuuuucuaucaguggcc

SEQ ID NO: 619463 - RNA, 19 nt, Artificial Sequence
  Description of Artificial Sequence: Synthetic oligonucleotide
auaguguuauggaagagga

SEQ ID NO: 619464 - RNA, 19 nt, Artificial Sequence
  Description of Artificial Sequence: Synthetic oligonucleotide
ugcuuuucgaaagcagccg

SEQ ID NO: 619465 - RNA, 19 nt, Artificial Sequence
  Description of Artificial Sequence: Synthetic oligonucleotide
aacccugcaugcccaugcc

SEQ ID NO: 619466 - RNA, 19 nt, Artificial Sequence
  Description of Artificial Sequence: Synthetic oligonucleotide
aguucuauguuaaggacga

SEQ ID NO: 619467 - RNA, 19 nt, Artificial Sequence
  Description of Artificial Sequence: Synthetic oligonucleotide
  modified_base (5)..(5): a, c, u, g, unknown or other
guucncuuuucuaucagug

SEQ ID NO: 619468 - RNA, 19 nt, Artificial Sequence
  Description of Artificial Sequence: Synthetic oligonucleotide
cuguaauuacaaacagccc

SEQ ID NO: 619469 - RNA, 19 nt, Artificial Sequence
  Description of Artificial Sequence: Synthetic oligonucleotide
aaauagaaguucugugcuu

SEQ ID NO: 619470 - RNA, 19 nt, Artificial Sequence
  Description of Artificial Sequence: Synthetic oligonucleotide
ugucauauccauguggcau

SEQ ID NO: 619471 - RNA, 19 nt, Artificial Sequence
  Description of Artificial Sequence: Synthetic oligonucleotide
aguauaaaggaaguuuuaa

SEQ ID NO: 619472 - RNA, 19 nt, Artificial Sequence
  Description of Artificial Sequence: Synthetic oligonucleotide
caaucuaugugcaaugaaa

SEQ ID NO: 619473 - RNA, 19 nt, Artificial Sequence
  Description of Artificial Sequence: Synthetic oligonucleotide
aggacgaucaguaaggcau

SEQ ID NO: 619474 - RNA, 19 nt, Artificial Sequence
  Description of Artificial Sequence: Synthetic oligonucleotide
ucccacgacugaaucaucc

SEQ ID NO: 619475 - RNA, 19 nt, Artificial Sequence
  Description of Artificial Sequence: Synthetic oligonucleotide
ugccacaacacugauauuu

SEQ ID NO: 619476 - RNA, 19 nt, Artificial Sequence
  Description of Artificial Sequence: Synthetic oligonucleotide
gcaagcagaccauaguggg

SEQ ID NO: 619477 - RNA, 19 nt, Artificial Sequence
  Description of Artificial Sequence: Synthetic oligonucleotide
ggaaaugugucuugugugc

SEQ ID NO: 619478 - RNA, 19 nt, Artificial Sequence
  Description of Artificial Sequence: Synthetic oligonucleotide
uuauuugaagggguugaug

SEQ ID NO: 619479 - RNA, 19 nt, Artificial Sequence
  Description of Artificial Sequence: Synthetic oligonucleotide
  modified_base (7)..(7): a, c, u, g, unknown or other
auguucncuuuucuaucag

SEQ ID NO: 619480 - RNA, 19 nt, Artificial Sequence
  Description of Artificial Sequence: Synthetic oligonucleotide
  modified_base (6)..(6): a, c, u, g, unknown or other
uguucncuuuucuaucagu

SEQ ID NO: 619481 - RNA, 19 nt, Artificial Sequence
  Description of Artificial Sequence: Synthetic oligonucleotide
ugcuagaguuagcaagcag

SEQ ID NO: 619482 - RNA, 19 nt, Artificial Sequence
  Description of Artificial Sequence: Synthetic oligonucleotide
aaggacgaucaguaaggca

SEQ ID NO: 619483 - RNA, 19 nt, Artificial Sequence
  Description of Artificial Sequence: Synthetic oligonucleotide
uucuauguuaaggacgauc

SEQ ID NO: 619484 - RNA, 19 nt, Artificial Sequence
  Description of Artificial Sequence: Synthetic oligonucleotide
uuuaauccgugugucuacc

SEQ ID NO: 619485 - RNA, 19 nt, Artificial Sequence
  Description of Artificial Sequence: Synthetic oligonucleotide
cacgacugaaucaucccag

SEQ ID NO: 619486 - RNA, 19 nt, Artificial Sequence
  Description of Artificial Sequence: Synthetic oligonucleotide
uucgacuucaucugucuau

SEQ ID NO: 619487 - RNA, 19 nt, Artificial Sequence
  Description of Artificial Sequence: Synthetic oligonucleotide
agcaaaugaguaucagacu

SEQ ID NO: 619488 - RNA, 19 nt, Artificial Sequence
  Description of Artificial Sequence: Synthetic oligonucleotide
cauaguggguaccacguuc

SEQ ID NO: 619489 - RNA, 19 nt, Artificial Sequence
  Description of Artificial Sequence: Synthetic oligonucleotide
aagagaugcaagaaaugaa

SEQ ID NO: 619490 - RNA, 19 nt, Artificial Sequence
  Description of Artificial Sequence: Synthetic oligonucleotide
uaaaugcuacccuguugag

SEQ ID NO: 619491 - RNA, 19 nt, Artificial Sequence
  Description of Artificial Sequence: Synthetic oligonucleotide
gaucaguaaggcaucuggc

SEQ ID NO: 619492 - RNA, 19 nt, Artificial Sequence
  Description of Artificial Sequence: Synthetic oligonucleotide
ugauucugugcacggcugc

SEQ ID NO: 619493 - RNA, 19 nt, Artificial Sequence
  Description of Artificial Sequence: Synthetic oligonucleotide
ucccucaauagaaccaccu

SEQ ID NO: 619494 - RNA, 19 nt, Artificial Sequence
  Description of Artificial Sequence: Synthetic oligonucleotide
cacacuguuaauaauuucu

SEQ ID NO: 619495 - RNA, 19 nt, Artificial Sequence
  Description of Artificial Sequence: Synthetic oligonucleotide
guuagcaagcagaccauag

SEQ ID NO: 619496 - RNA, 19 nt, Artificial Sequence
  Description of Artificial Sequence: Synthetic oligonucleotide
uuaucaugauucugugcac

SEQ ID NO: 619497 - RNA, 19 nt, Artificial Sequence
  Description of Artificial Sequence: Synthetic oligonucleotide
uuucccacgacugaaucau

SEQ ID NO: 619498 - RNA, 19 nt, Artificial Sequence
  Description of Artificial Sequence: Synthetic oligonucleotide
aaacagcccaucugcacaa

SEQ ID NO: 619499 - RNA, 19 nt, Artificial Sequence
  Description of Artificial Sequence: Synthetic oligonucleotide
uacuugugugucauaucca

SEQ ID NO: 619500 - RNA, 19 nt, Artificial Sequence
  Description of Artificial Sequence: Synthetic oligonucleotide
ugcaauugcuacucucugu

SEQ ID NO: 619501 - RNA, 19 nt, Artificial Sequence
  Description of Artificial Sequence: Synthetic oligonucleotide
ucuuucgacuucaucuguc

SEQ ID NO: 619502 - RNA, 19 nt, Artificial Sequence
  Description of Artificial Sequence: Synthetic oligonucleotide
uuucgucugcaucaaccac

SEQ ID NO: 619503 - RNA, 19 nt, Artificial Sequence
  Description of Artificial Sequence: Synthetic oligonucleotide
gacaauuauagaugucaaa

SEQ ID NO: 619504 - RNA, 19 nt, Artificial Sequence
  Description of Artificial Sequence: Synthetic oligonucleotide
agguuaucaugauucugug

SEQ ID NO: 619505 - RNA, 19 nt, Artificial Sequence
  Description of Artificial Sequence: Synthetic oligonucleotide
cccacuaccuccuacaaug

SEQ ID NO: 619506 - RNA, 19 nt, Artificial Sequence
  Description of Artificial Sequence: Synthetic oligonucleotide
auauacuuccucuggugaa

SEQ ID NO: 619507 - RNA, 19 nt, Artificial Sequence
  Description of Artificial Sequence: Synthetic oligonucleotide
uuucgaaagcagccgccgc

SEQ ID NO: 619508 - RNA, 19 nt, Artificial Sequence
  Description of Artificial Sequence: Synthetic oligonucleotide
guggcauucgaagaauugc

SEQ ID NO: 619509 - RNA, 19 nt, Artificial Sequence
  Description of Artificial Sequence: Synthetic oligonucleotide
ugacgcgccgcccugcugc

SEQ ID NO: 619510 - RNA, 19 nt, Artificial Sequence
  Description of Artificial Sequence: Synthetic oligonucleotide
cugagcauaaucggggcag

SEQ ID NO: 619511 - RNA, 19 nt, Artificial Sequence
  Description of Artificial Sequence: Synthetic oligonucleotide
ugaacuaguuuugccucag

SEQ ID NO: 619512 - RNA, 19 nt, Artificial Sequence
  Description of Artificial Sequence: Synthetic oligonucleotide
uggucagaacugccgaaug

SEQ ID NO: 619513 - RNA, 19 nt, Artificial Sequence
  Description of Artificial Sequence: Synthetic oligonucleotide
aaagguuguaguagauagu

SEQ ID NO: 619514 - RNA, 19 nt, Artificial Sequence
  Description of Artificial Sequence: Synthetic oligonucleotide
ucgaaguacuuuccaggcu

SEQ ID NO: 619515 - RNA, 19 nt, Artificial Sequence
  Description of Artificial Sequence: Synthetic oligonucleotide
  modified_base (8)..(8): a, c, u, g, unknown or other
cauguucncuuuucuauca

SEQ ID NO: 619516 - RNA, 19 nt, Artificial Sequence
  Description of Artificial Sequence: Synthetic oligonucleotide
cuauguuaaggacgaucag

SEQ ID NO: 619517 - RNA, 19 nt, Artificial Sequence
  Description of Artificial Sequence: Synthetic oligonucleotide
guugaggcucauagaagcg

SEQ ID NO: 619518 - RNA, 19 nt, Artificial Sequence
  Description of Artificial Sequence: Synthetic oligonucleotide
gggacaauuauagauguca

SEQ ID NO: 619519 - RNA, 19 nt, Artificial Sequence
  Description of Artificial Sequence: Synthetic oligonucleotide
augaacuaguuuugccuca

SEQ ID NO: 619520 - RNA, 19 nt, Artificial Sequence
  Description of Artificial Sequence: Synthetic oligonucleotide
ugcucuauuuucagagcuc

SEQ ID NO: 619521 - RNA, 19 nt, Artificial Sequence
  Description of Artificial Sequence: Synthetic oligonucleotide
aguucugugcuugaccaca

SEQ ID NO: 619522 - RNA, 19 nt, Artificial Sequence
  Description of Artificial Sequence: Synthetic oligonucleotide
acacaaacuguaauuacaa

SEQ ID NO: 619523 - RNA, 19 nt, Artificial Sequence
  Description of Artificial Sequence: Synthetic oligonucleotide
caguuacagggcaaaauca

SEQ ID NO: 619524 - RNA, 19 nt, Artificial Sequence
  Description of Artificial Sequence: Synthetic oligonucleotide
uaaggacgaucaguaaggc

SEQ ID NO: 619525 - RNA, 19 nt, Artificial Sequence
  Description of Artificial Sequence: Synthetic oligonucleotide
cauaaucggggcaggaaca

SEQ ID NO: 619526 - RNA, 19 nt, Artificial Sequence
  Description of Artificial Sequence: Synthetic oligonucleotide
auuuuguaccagcaaggua

SEQ ID NO: 619527 - RNA, 19 nt, Artificial Sequence
  Description of Artificial Sequence: Synthetic oligonucleotide
cacccuuucacacuguuaa

SEQ ID NO: 619528 - RNA, 19 nt, Artificial Sequence
  Description of Artificial Sequence: Synthetic oligonucleotide
ugagcauaaucggggcagg

SEQ ID NO: 619529 - RNA, 19 nt, Artificial Sequence
  Description of Artificial Sequence: Synthetic oligonucleotide
gcucaggacaaugauuucg

SEQ ID NO: 619530 - RNA, 19 nt, Artificial Sequence
  Description of Artificial Sequence: Synthetic oligonucleotide
guguacuccaaaaccaaac

SEQ ID NO: 619531 - RNA, 19 nt, Artificial Sequence
  Description of Artificial Sequence: Synthetic oligonucleotide
augaaguagcuucaucaua

SEQ ID NO: 619532 - RNA, 19 nt, Artificial Sequence
  Description of Artificial Sequence: Synthetic oligonucleotide
ucuguguaugccacaucuc

SEQ ID NO: 619533 - RNA, 19 nt, Artificial Sequence
  Description of Artificial Sequence: Synthetic oligonucleotide
caucuaguaacugucuuga

SEQ ID NO: 619534 - RNA, 19 nt, Artificial Sequence
  Description of Artificial Sequence: Synthetic oligonucleotide
gguaaaugcuacccuguug

SEQ ID NO: 619535 - RNA, 19 nt, Artificial Sequence
  Description of Artificial Sequence: Synthetic oligonucleotide
gcgccaagaauguauuacg

SEQ ID NO: 619536 - RNA, 19 nt, Artificial Sequence
  Description of Artificial Sequence: Synthetic oligonucleotide
cacugagcauaaucggggc

SEQ ID NO: 619537 - RNA, 19 nt, Artificial Sequence
  Description of Artificial Sequence: Synthetic oligonucleotide
agauuauaauuuggggaca

SEQ ID NO: 619538 - RNA, 19 nt, Artificial Sequence
  Description of Artificial Sequence: Synthetic oligonucleotide
gauccaaauuaccuuggcu

SEQ ID NO: 619539 - RNA, 19 nt, Artificial Sequence
  Description of Artificial Sequence: Synthetic oligonucleotide
acugagcauaaucggggca

SEQ ID NO: 619540 - RNA, 19 nt, Artificial Sequence
  Description of Artificial Sequence: Synthetic oligonucleotide
gguugaugccaucacuuug

SEQ ID NO: 619541 - RNA, 19 nt, Artificial Sequence
  Description of Artificial Sequence: Synthetic oligonucleotide
cuaccuccuacaauggcca

SEQ ID NO: 619542 - RNA, 19 nt, Artificial Sequence
  Description of Artificial Sequence: Synthetic oligonucleotide
uagaguuagcaagcagacc

SEQ ID NO: 619543 - RNA, 19 nt, Artificial Sequence
  Description of Artificial Sequence: Synthetic oligonucleotide
ucaugauucugugcacggc

SEQ ID NO: 619544 - RNA, 19 nt, Artificial Sequence
  Description of Artificial Sequence: Synthetic oligonucleotide
aacccuccuguaaauauau

SEQ ID NO: 619545 - RNA, 19 nt, Artificial Sequence
  Description of Artificial Sequence: Synthetic oligonucleotide
aagcgaaacagcagccuca

SEQ ID NO: 619546 - RNA, 19 nt, Artificial Sequence
  Description of Artificial Sequence: Synthetic oligonucleotide
agauggagacuagaggccu

SEQ ID NO: 619547 - RNA, 19 nt, Artificial Sequence
  Description of Artificial Sequence: Synthetic oligonucleotide
cugcacaacaagacaguuc

SEQ ID NO: 619548 - RNA, 19 nt, Artificial Sequence
  Description of Artificial Sequence: Synthetic oligonucleotide
aauguaugauuugcauuuu

SEQ ID NO: 619549 - RNA, 19 nt, Artificial Sequence
  Description of Artificial Sequence: Synthetic oligonucleotide
ugcugcgaccuccaucgca

SEQ ID NO: 619550 - RNA, 19 nt, Artificial Sequence
  Description of Artificial Sequence: Synthetic oligonucleotide
cugauagcuugaguccucg

SEQ ID NO: 619551 - RNA, 19 nt, Artificial Sequence
  Description of Artificial Sequence: Synthetic oligonucleotide
auagauacugcuagaguua

SEQ ID NO: 619552 - RNA, 19 nt, Artificial Sequence
  Description of Artificial Sequence: Synthetic oligonucleotide
gcuagaguuagcaagcaga

SEQ ID NO: 619553 - RNA, 19 nt, Artificial Sequence
  Description of Artificial Sequence: Synthetic oligonucleotide
gcauaaucggggcaggaac

SEQ ID NO: 619554 - RNA, 19 nt, Artificial Sequence
  Description of Artificial Sequence: Synthetic oligonucleotide
gcauauacuuccucuggug

SEQ ID NO: 619555 - RNA, 19 nt, Artificial Sequence
  Description of Artificial Sequence: Synthetic oligonucleotide
agcaucuaguaacugucuu

SEQ ID NO: 619556 - RNA, 19 nt, Artificial Sequence
  Description of Artificial Sequence: Synthetic oligonucleotide
uuucgacuucaucugucua

SEQ ID NO: 619557 - RNA, 19 nt, Artificial Sequence
  Description of Artificial Sequence: Synthetic oligonucleotide
cuacauccauuuagaaauc

SEQ ID NO: 619558 - RNA, 19 nt, Artificial Sequence
  Description of Artificial Sequence: Synthetic oligonucleotide
  modified_base (16)..(16): a, c, u, g, unknown or other
caugccaacauguucncuu

SEQ ID NO: 619559 - RNA, 19 nt, Artificial Sequence
  Description of Artificial Sequence: Synthetic oligonucleotide
auaguggguaccacguuca

SEQ ID NO: 619560 - RNA, 19 nt, Artificial Sequence
  Description of Artificial Sequence: Synthetic oligonucleotide
gugucuaccuugagcagag

SEQ ID NO: 619561 - RNA, 19 nt, Artificial Sequence
  Description of Artificial Sequence: Synthetic oligonucleotide
gcuuuucgaaagcagccgc

SEQ ID NO: 619562 - RNA, 19 nt, Artificial Sequence
  Description of Artificial Sequence: Synthetic oligonucleotide
uguauucaaaaugcacauu

SEQ ID NO: 619563 - RNA, 19 nt, Artificial Sequence
  Description of Artificial Sequence: Synthetic oligonucleotide
ugauuucgucugcaucaac

SEQ ID NO: 619564 - RNA, 19 nt, Artificial Sequence
  Description of Artificial Sequence: Synthetic oligonucleotide
cuccuguaaauauaucuua

SEQ ID NO: 619565 - RNA, 19 nt, Artificial Sequence
  Description of Artificial Sequence: Synthetic oligonucleotide
uaguuuugccucagugcaa

SEQ ID NO: 619566 - RNA, 19 nt, Artificial Sequence
  Description of Artificial Sequence: Synthetic oligonucleotide
uaguggguaccacguucag

SEQ ID NO: 619567 - RNA, 19 nt, Artificial Sequence
  Description of Artificial Sequence: Synthetic oligonucleotide
uaaucggggcaggaacaag

SEQ ID NO: 619568 - RNA, 19 nt, Artificial Sequence
  Description of Artificial Sequence: Synthetic oligonucleotide
uggcaccaagaauagucuc

SEQ ID NO: 619569 - RNA, 19 nt, Artificial Sequence
  Description of Artificial Sequence: Synthetic oligonucleotide
auugcaucaugaagaccag

SEQ ID NO: 619570 - RNA, 19 nt, Artificial Sequence
  Description of Artificial Sequence: Synthetic oligonucleotide
ucugcacaacaagacaguu

SEQ ID NO: 619571 - RNA, 19 nt, Artificial Sequence
  Description of Artificial Sequence: Synthetic oligonucleotide
aucuaaugaugaaguagcu

SEQ ID NO: 619572 - RNA, 19 nt, Artificial Sequence
  Description of Artificial Sequence: Synthetic oligonucleotide
gcaaaugaguaucagacuu

SEQ ID NO: 619573 - RNA, 19 nt, Artificial Sequence
  Description of Artificial Sequence: Synthetic oligonucleotide
agaccauaguggguaccac

SEQ ID NO: 619574 - RNA, 19 nt, Artificial Sequence
  Description of Artificial Sequence: Synthetic oligonucleotide
ugcaugcccaugccaacau

SEQ ID NO: 619575 - RNA, 19 nt, Artificial Sequence
  Description of Artificial Sequence: Synthetic oligonucleotide
accagcuaauuuugcuacu

SEQ ID NO: 619576 - RNA, 19 nt, Artificial Sequence
  Description of Artificial Sequence: Synthetic oligonucleotide
ccuucaaaauggcucuugc

SEQ ID NO: 619577 - RNA, 19 nt, Artificial Sequence
  Description of Artificial Sequence: Synthetic oligonucleotide
cagggcaaaaucaaauggu

SEQ ID NO: 619578 - RNA, 19 nt, Artificial Sequence
  Description of Artificial Sequence: Synthetic oligonucleotide
caauuauagaugucaaauu

SEQ ID NO: 619579 - RNA, 19 nt, Artificial Sequence
  Description of Artificial Sequence: Synthetic oligonucleotide
aggcucacaucuuguauua

SEQ ID NO: 619580 - RNA, 19 nt, Artificial Sequence
  Description of Artificial Sequence: Synthetic oligonucleotide
cuguguaugccacaucucu

SEQ ID NO: 619581 - RNA, 19 nt, Artificial Sequence
  Description of Artificial Sequence: Synthetic oligonucleotide
ugccacacccuuucacacu

SEQ ID NO: 619582 - RNA, 19 nt, Artificial Sequence
  Description of Artificial Sequence: Synthetic oligonucleotide
agccuuugaagcaucuagu

SEQ ID NO: 619583 - RNA, 19 nt, Artificial Sequence
  Description of Artificial Sequence: Synthetic oligonucleotide
cuugagcagaguaaacccu

SEQ ID NO: 619584 - RNA, 19 nt, Artificial Sequence
  Description of Artificial Sequence: Synthetic oligonucleotide
ucgacuucaucugucuauu

SEQ ID NO: 619585 - RNA, 19 nt, Artificial Sequence
  Description of Artificial Sequence: Synthetic oligonucleotide
caucgcagggccgagccac

SEQ ID NO: 619586 - RNA, 19 nt, Artificial Sequence
  Description of Artificial Sequence: Synthetic oligonucleotide
gaaguacuuuccaggcuca

SEQ ID NO: 619587 - RNA, 19 nt, Artificial Sequence
  Description of Artificial Sequence: Synthetic oligonucleotide
caugauucugugcacggcu

SEQ ID NO: 619588 - RNA, 19 nt, Artificial Sequence
  Description of Artificial Sequence: Synthetic oligonucleotide
caucuggcccaguuuuaug

SEQ ID NO: 619589 - RNA, 19 nt, Artificial Sequence
  Description of Artificial Sequence: Synthetic oligonucleotide
accccauccgagguuauca

SEQ ID NO: 619590 - RNA, 19 nt, Artificial Sequence
  Description of Artificial Sequence: Synthetic oligonucleotide
augauucugugcacggcug

SEQ ID NO: 619591 - RNA, 19 nt, Artificial Sequence
  Description of Artificial Sequence: Synthetic oligonucleotide
gucuaccuugagcagagua

SEQ ID NO: 619592 - RNA, 19 nt, Artificial Sequence
  Description of Artificial Sequence: Synthetic oligonucleotide
cuggcccaguuuuaugauc

SEQ ID NO: 619593 - RNA, 19 nt, Artificial Sequence
  Description of Artificial Sequence: Synthetic oligonucleotide
uuccccuacuuguguguca

SEQ ID NO: 619594 - RNA, 19 nt, Artificial Sequence
  Description of Artificial Sequence: Synthetic oligonucleotide
uauuacgagcagcgccauc

SEQ ID NO: 619595 - RNA, 19 nt, Artificial Sequence
  Description of Artificial Sequence: Synthetic oligonucleotide
cgaaguacuuuccaggcuc

SEQ ID NO: 619596 - RNA, 19 nt, Artificial Sequence
  Description of Artificial Sequence: Synthetic oligonucleotide
cuaccuugagcagaguaaa

SEQ ID NO: 619597 - RNA, 19 nt, Artificial Sequence
  Description of Artificial Sequence: Synthetic oligonucleotide
aucugcacaacaagacagu

SEQ ID NO: 619598 - RNA, 19 nt, Artificial Sequence
  Description of Artificial Sequence: Synthetic oligonucleotide
auaaucggggcaggaacaa

SEQ ID NO: 619599 - RNA, 19 nt, Artificial Sequence
  Description of Artificial Sequence: Synthetic oligonucleotide
ccauccgagguuaucauga

SEQ ID NO: 619600 - RNA, 19 nt, Artificial Sequence
  Description of Artificial Sequence: Synthetic oligonucleotide
gccacacccuuucacacug

SEQ ID NO: 619601 - RNA, 19 nt, Artificial Sequence
  Description of Artificial Sequence: Synthetic oligonucleotide
uaaacccugcaugcccaug

SEQ ID NO: 619602 - RNA, 19 nt, Artificial Sequence
  Description of Artificial Sequence: Synthetic oligonucleotide
agccucacuauugugcuuu

SEQ ID NO: 619603 - RNA, 19 nt, Artificial Sequence
  Description of Artificial Sequence: Synthetic oligonucleotide
acuagaggccuggucagaa

SEQ ID NO: 619604 - RNA, 19 nt, Artificial Sequence
  Description of Artificial Sequence: Synthetic oligonucleotide
cugcaucaaccacaguuga

SEQ ID NO: 619605 - RNA, 19 nt, Artificial Sequence
  Description of Artificial Sequence: Synthetic oligonucleotide
cugcagggacuucaaaaga

SEQ ID NO: 619606 - RNA, 19 nt, Artificial Sequence
  Description of Artificial Sequence: Synthetic oligonucleotide
cuuucgacuucaucugucu

SEQ ID NO: 619607 - RNA, 19 nt, Artificial Sequence
  Description of Artificial Sequence: Synthetic oligonucleotide
gcugcgaccuccaucgcag

SEQ ID NO: 619608 - RNA, 19 nt, Artificial Sequence
  Description of Artificial Sequence: Synthetic oligonucleotide
gugucuugugugccuuagc

SEQ ID NO: 619609 - RNA, 19 nt, Artificial Sequence
  Description of Artificial Sequence: Synthetic oligonucleotide
ugcuacccuguugaggcuc

SEQ ID NO: 619610 - RNA, 19 nt, Artificial Sequence
  Description of Artificial Sequence: Synthetic oligonucleotide
uccccuacuugugugucau

SEQ ID NO: 619611 - RNA, 19 nt, Artificial Sequence
  Description of Artificial Sequence: Synthetic oligonucleotide
aaaaugcacugagcauaau

SEQ ID NO: 619612 - RNA, 19 nt, Artificial Sequence
  Description of Artificial Sequence: Synthetic oligonucleotide
gugucccuacaacuuguca

SEQ ID NO: 619613 - RNA, 19 nt, Artificial Sequence
  Description of Artificial Sequence: Synthetic oligonucleotide
guacuacucccacugcucu

SEQ ID NO: 619614 - RNA, 19 nt, Artificial Sequence
  Description of Artificial Sequence: Synthetic oligonucleotide
gguacuacucccacugcuc

SEQ ID NO: 619615 - RNA, 19 nt, Artificial Sequence
  Description of Artificial Sequence: Synthetic oligonucleotide
cacaacaagacaguucuau

SEQ ID NO: 619616 - RNA, 19 nt, Artificial Sequence
  Description of Artificial Sequence: Synthetic oligonucleotide
uuccugacgcgccgcccug

SEQ ID NO: 619617 - RNA, 19 nt, Artificial Sequence
  Description of Artificial Sequence: Synthetic oligonucleotide
acgaucaguaaggcaucug

SEQ ID NO: 619618 - RNA, 19 nt, Artificial Sequence
  Description of Artificial Sequence: Synthetic oligonucleotide
auccgagguuaucaugauu

SEQ ID NO: 619619 - RNA, 19 nt, Artificial Sequence
  Description of Artificial Sequence: Synthetic oligonucleotide
ccacuaccuccuacaaugg

SEQ ID NO: 619620 - RNA, 19 nt, Artificial Sequence
  Description of Artificial Sequence: Synthetic oligonucleotide
ccagcuaauuuugcuacug

SEQ ID NO: 619621 - RNA, 19 nt, Artificial Sequence
  Description of Artificial Sequence: Synthetic oligonucleotide
cccacgacugaaucauccc

SEQ ID NO: 619622 - RNA, 19 nt, Artificial Sequence
  Description of Artificial Sequence: Synthetic oligonucleotide
gacgcgccgcccugcugcg

SEQ ID NO: 619623 - RNA, 19 nt, Artificial Sequence
  Description of Artificial Sequence: Synthetic oligonucleotide
ccuacaacuugucaguaua

SEQ ID NO: 619624 - RNA, 19 nt, Artificial Sequence
  Description of Artificial Sequence: Synthetic oligonucleotide
uucccacgacugaaucauc

SEQ ID NO: 619625 - RNA, 19 nt, Artificial Sequence
  Description of Artificial Sequence: Synthetic oligonucleotide
ggacaauuauagaugucaa

SEQ ID NO: 619626 - RNA, 19 nt, Artificial Sequence
  Description of Artificial Sequence: Synthetic oligonucleotide
ucccuacaacuugucagua

SEQ ID NO: 619627 - RNA, 19 nt, Artificial Sequence
  Description of Artificial Sequence: Synthetic oligonucleotide
cugcgaccuccaucgcagg

SEQ ID NO: 619628 - RNA, 19 nt, Artificial Sequence
  Description of Artificial Sequence: Synthetic oligonucleotide
ccucaauagaaccaccucu

SEQ ID NO: 619629 - RNA, 19 nt, Artificial Sequence
  Description of Artificial Sequence: Synthetic oligonucleotide
gcuacuuccccuggcucag

SEQ ID NO: 619630 - RNA, 19 nt, Artificial Sequence
  Description of Artificial Sequence: Synthetic oligonucleotide
augcuacccuguugaggcu

SEQ ID NO: 619631 - RNA, 19 nt, Artificial Sequence
  Description of Artificial Sequence: Synthetic oligonucleotide
guuccccuacuuguguguc

SEQ ID NO: 619632 - RNA, 19 nt, Artificial Sequence
  Description of Artificial Sequence: Synthetic oligonucleotide
caguuuuaugauccaaauu

SEQ ID NO: 619633 - RNA, 19 nt, Artificial Sequence
  Description of Artificial Sequence: Synthetic oligonucleotide
caauagaaccaccucucuu

SEQ ID NO: 619634 - RNA, 19 nt, Artificial Sequence
  Description of Artificial Sequence: Synthetic oligonucleotide
caggcucacaucuuguauu

SEQ ID NO: 619635 - RNA, 19 nt, Artificial Sequence
  Description of Artificial Sequence: Synthetic oligonucleotide
aucggggcaggaacaagau

SEQ ID NO: 619636 - RNA, 19 nt, Artificial Sequence
  Description of Artificial Sequence: Synthetic oligonucleotide
caagcagaccauagugggu

SEQ ID NO: 619637 - RNA, 19 nt, Artificial Sequence
  Description of Artificial Sequence: Synthetic oligonucleotide
uggguaccacguucagcua

SEQ ID NO: 619638 - RNA, 19 nt, Artificial Sequence
  Description of Artificial Sequence: Synthetic oligonucleotide
cuuccucuggugaagcauu

SEQ ID NO: 619639 - RNA, 19 nt, Artificial Sequence
  Description of Artificial Sequence: Synthetic oligonucleotide
auguggcauucgaagaauu

SEQ ID NO: 619640 - RNA, 19 nt, Artificial Sequence
  Description of Artificial Sequence: Synthetic oligonucleotide
uuguaccagcaagguaaau

SEQ ID NO: 619641 - RNA, 19 nt, Artificial Sequence
  Description of Artificial Sequence: Synthetic oligonucleotide
gacgaucaguaaggcaucu

SEQ ID NO: 619642 - RNA, 19 nt, Artificial Sequence
  Description of Artificial Sequence: Synthetic oligonucleotide
ccucguuccccuacuugug

SEQ ID NO: 619643 - RNA, 19 nt, Artificial Sequence
  Description of Artificial Sequence: Synthetic oligonucleotide
gaggcucauagaagcgaaa

SEQ ID NO: 619644 - RNA, 19 nt, Artificial Sequence
  Description of Artificial Sequence: Synthetic oligonucleotide
ccugauagcuugaguccuc

SEQ ID NO: 619645 - RNA, 19 nt, Artificial Sequence
  Description of Artificial Sequence: Synthetic oligonucleotide
ggguacuacucccacugcu

SEQ ID NO: 619646 - RNA, 19 nt, Artificial Sequence
  Description of Artificial Sequence: Synthetic oligonucleotide
ccacgacugaaucauccca

SEQ ID NO: 619647 - RNA, 19 nt, Artificial Sequence
  Description of Artificial Sequence: Synthetic oligonucleotide
cuacuuccccuggcucagg

SEQ ID NO: 619648 - RNA, 19 nt, Artificial Sequence
  Description of Artificial Sequence: Synthetic oligonucleotide
uccugacgcgccgcccugc

SEQ ID NO: 619649 - RNA, 19 nt, Artificial Sequence
  Description of Artificial Sequence: Synthetic oligonucleotide
gaacauccgagagcuuccu

SEQ ID NO: 619650 - RNA, 19 nt, Artificial Sequence
  Description of Artificial Sequence: Synthetic oligonucleotide
ggacgaucaguaaggcauc

SEQ ID NO: 619651 - RNA, 19 nt, Artificial Sequence
  Description of Artificial Sequence: Synthetic oligonucleotide
cucguuccccuacuugugu

SEQ ID NO: 619652 - RNA, 19 nt, Artificial Sequence
  Description of Artificial Sequence: Synthetic oligonucleotide
cuuccugacgcgccgcccu

SEQ ID NO: 619653 - RNA, 19 nt, Artificial Sequence
  Description of Artificial Sequence: Synthetic oligonucleotide
cuuuucuaucaguggccau

SEQ ID NO: 619654 - RNA, 19 nt, Artificial Sequence
  Description of Artificial Sequence: Synthetic oligonucleotide
cgaccuccaucgcagggcc

SEQ ID NO: 619655 - RNA, 19 nt, Artificial Sequence
  Description of Artificial Sequence: Synthetic oligonucleotide
gcuacugcauauacuuccu

SEQ ID NO: 619656 - RNA, 19 nt, Artificial Sequence
  Description of Artificial Sequence: Synthetic oligonucleotide
cugacgcgccgcccugcug

SEQ ID NO: 619657 - RNA, 19 nt, Artificial Sequence
  Description of Artificial Sequence: Synthetic oligonucleotide
cugggguacuacucccacu

SEQ ID NO: 619658 - RNA, 19 nt, Artificial Sequence
  Description of Artificial Sequence: Synthetic oligonucleotide
caccccauccgagguuauc

SEQ ID NO: 619659 - RNA, 19 nt, Artificial Sequence
  Description of Artificial Sequence: Synthetic oligonucleotide
cauccgagguuaucaugau

SEQ ID NO: 619660 - RNA, 19 nt, Artificial Sequence
  Description of Artificial Sequence: Synthetic oligonucleotide
cagcgccaagaauguauua

SEQ ID NO: 619661 - RNA, 19 nt, Artificial Sequence
  Description of Artificial Sequence: Synthetic oligonucleotide
gcuuccugacgcgccgccc

SEQ ID NO: 619662 - RNA, 19 nt, Artificial Sequence
  Description of Artificial Sequence: Synthetic oligonucleotide
cccagcgccaagaauguau

SEQ ID NO: 619663 - RNA, 19 nt, Artificial Sequence
  Description of Artificial Sequence: Synthetic oligonucleotide
guauuacgagcagcgccau

SEQ ID NO: 619664 - RNA, 19 nt, Artificial Sequence
  Description of Artificial Sequence: Synthetic oligonucleotide
cgaaagcagccgccgcggc

SEQ ID NO: 619665 - RNA, 19 nt, Artificial Sequence
  Description of Artificial Sequence: Synthetic oligonucleotide
gccacaacacugauauuuu

SEQ ID NO: 619666 - RNA, 19 nt, Artificial Sequence
  Description of Artificial Sequence: Synthetic oligonucleotide
guucuauguuaaggacgau

SEQ ID NO: 619667 - RNA, 19 nt, Artificial Sequence
  Description of Artificial Sequence: Synthetic oligonucleotide
cccuacaacuugucaguau

SEQ ID NO: 619668 - RNA, 19 nt, Artificial Sequence
  Description of Artificial Sequence: Synthetic oligonucleotide
ccaucgcagggccgagcca

SEQ ID NO: 619669 - RNA, 19 nt, Artificial Sequence
  Description of Artificial Sequence: Synthetic oligonucleotide
ggcucacaucuuguauuau

SEQ ID NO: 619670 - RNA, 19 nt, Artificial Sequence
  Description of Artificial Sequence: Synthetic oligonucleotide
gcgaaacagcagccucacu

SEQ ID NO: 619671 - RNA, 19 nt, Artificial Sequence
  Description of Artificial Sequence: Synthetic oligonucleotide
gccgaauguuugugcuuuu

SEQ ID NO: 619672 - RNA, 19 nt, Artificial Sequence
  Description of Artificial Sequence: Synthetic oligonucleotide
gccucacuauugugcuuuu

SEQ ID NO: 619673 - RNA, 19 nt, Artificial Sequence
  Description of Artificial Sequence: Synthetic oligonucleotide
  modified_base (17)..(17): a, c, u, g, unknown or other
ccaugccaacauguucncu

SEQ ID NO: 619674 - RNA, 19 nt, Artificial Sequence
  Description of Artificial Sequence: Synthetic oligonucleotide
ccuuggcuucaaguuaauu

SEQ ID NO: 619675 - RNA, 19 nt, Artificial Sequence
  Description of Artificial Sequence: Synthetic oligonucleotide
ccugacgcgccgcccugcu

SEQ ID NO: 619676 - RNA, 19 nt, Artificial Sequence
  Description of Artificial Sequence: Synthetic oligonucleotide
ccccuacuugugugucaua

SEQ ID NO: 619677 - RNA, 19 nt, Artificial Sequence
  Description of Artificial Sequence: Synthetic oligonucleotide
gcccagcgccaagaaugua

SEQ ID NO: 619678 - RNA, 19 nt, Artificial Sequence
  Description of Artificial Sequence: Synthetic oligonucleotide
  modified_base (1)..(1): a, c, u, g, unknown or other
ncuuuucuaucaguggcca

SEQ ID NO: 619679 - RNA, 19 nt, Artificial Sequence
  Description of Artificial Sequence: Synthetic oligonucleotide
acuaccaagaauuagggac

SEQ ID NO: 619680 - RNA, 19 nt, Artificial Sequence
  Description of Artificial Sequence: Synthetic oligonucleotide
aauauugguuccaagaagc

SEQ ID NO: 619681 - RNA, 19 nt, Artificial Sequence
  Description of Artificial Sequence: Synthetic oligonucleotide
aagaauuagggacacagag

SEQ ID NO: 619682 - RNA, 19 nt, Artificial Sequence
  Description of Artificial Sequence: Synthetic oligonucleotide
aaaccucucagucaguccc

SEQ ID NO: 619683 - RNA, 19 nt, Artificial Sequence
  Description of Artificial Sequence: Synthetic oligonucleotide
uuuagaucagaucaggccc

SEQ ID NO: 619684 - RNA, 19 nt, Artificial Sequence
  Description of Artificial Sequence: Synthetic oligonucleotide
ugugaugcaaguauuuugg

SEQ ID NO: 619685 - RNA, 19 nt, Artificial Sequence
  Description of Artificial Sequence: Synthetic oligonucleotide
aaaacgguuggccagagug

SEQ ID NO: 619686 - RNA, 19 nt, Artificial Sequence
  Description of Artificial Sequence: Synthetic oligonucleotide
aaguguaucaaguccgccc

SEQ ID NO: 619687 - RNA, 19 nt, Artificial Sequence
  Description of Artificial Sequence: Synthetic oligonucleotide
aaaucaaagauaauaaagu

SEQ ID NO: 619688 - RNA, 19 nt, Artificial Sequence
  Description of Artificial Sequence: Synthetic oligonucleotide
uauuuaguauacuucaggc

SEQ ID NO: 619689 - RNA, 19 nt, Artificial Sequence
  Description of Artificial Sequence: Synthetic oligonucleotide
acuugauccauuuaauagg

SEQ ID NO: 619690 - RNA, 19 nt, Artificial Sequence
  Description of Artificial Sequence: Synthetic oligonucleotide
uuuaguauacuucaggcuu

SEQ ID NO: 619691 - RNA, 19 nt, Artificial Sequence
  Description of Artificial Sequence: Synthetic oligonucleotide
aauauaucgaaugccuuuc

SEQ ID NO: 619692 - RNA, 19 nt, Artificial Sequence
  Description of Artificial Sequence: Synthetic oligonucleotide
ucucuaagagcuacuaggg

SEQ ID NO: 619693 - RNA, 19 nt, Artificial Sequence
  Description of Artificial Sequence: Synthetic oligonucleotide
uaauauugguuccaagaag

SEQ ID NO: 619694 - RNA, 19 nt, Artificial Sequence
  Description of Artificial Sequence: Synthetic oligonucleotide
aaauuaaguacaaauacaa

SEQ ID NO: 619695 - RNA, 19 nt, Artificial Sequence
  Description of Artificial Sequence: Synthetic oligonucleotide
uuauauaugcccacuauau

SEQ ID NO: 619696 - RNA, 19 nt, Artificial Sequence
  Description of Artificial Sequence: Synthetic oligonucleotide
uuauacagucagaaaaugc

SEQ ID NO: 619697 - RNA, 19 nt, Artificial Sequence
  Description of Artificial Sequence: Synthetic oligonucleotide
gaaaagauagcacaggaaa

SEQ ID NO: 619698 - RNA, 19 nt, Artificial Sequence
  Description of Artificial Sequence: Synthetic oligonucleotide
uuuugguacaauuuuagau

SEQ ID NO: 619699 - RNA, 19 nt, Artificial Sequence
  Description of Artificial Sequence: Synthetic oligonucleotide
uuaacccauauuuagaaaa

SEQ ID NO: 619700 - RNA, 19 nt, Artificial Sequence
  Description of Artificial Sequence: Synthetic oligonucleotide
uggacaaaccaaauaauca

SEQ ID NO: 619701 - RNA, 19 nt, Artificial Sequence
  Description of Artificial Sequence: Synthetic oligonucleotide
acacaagcgacugaaaacc

SEQ ID NO: 619702 - RNA, 19 nt, Artificial Sequence
  Description of Artificial Sequence: Synthetic oligonucleotide
uaucgaaugccuuucauac

SEQ ID NO: 619703 - RNA, 19 nt, Artificial Sequence
  Description of Artificial Sequence: Synthetic oligonucleotide
cuugauccauuuaauaggg

SEQ ID NO: 619704 - RNA, 19 nt, Artificial Sequence
  Description of Artificial Sequence: Synthetic oligonucleotide
auuaaguguaucaaguccg

SEQ ID NO: 619705 - RNA, 19 nt, Artificial Sequence
  Description of Artificial Sequence: Synthetic oligonucleotide
uguugugucagaacuauac

SEQ ID NO: 619706 - RNA, 19 nt, Artificial Sequence
  Description of Artificial Sequence: Synthetic oligonucleotide
ucgaaugccuuucauaccc

SEQ ID NO: 619707 - RNA, 19 nt, Artificial Sequence
  Description of Artificial Sequence: Synthetic oligonucleotide
agaguguucauuuugcugu

SEQ ID NO: 619708 - RNA, 19 nt, Artificial Sequence
  Description of Artificial Sequence: Synthetic oligonucleotide
caguuuagaauucaucugg

SEQ ID NO: 619709 - RNA, 19 nt, Artificial Sequence
  Description of Artificial Sequence: Synthetic oligonucleotide
uuucaugaggaauauaguc

SEQ ID NO: 619710 - RNA, 19 nt, Artificial Sequence
  Description of Artificial Sequence: Synthetic oligonucleotide
uaauaaaguggucagggaa

SEQ ID NO: 619711 - RNA, 19 nt, Artificial Sequence
  Description of Artificial Sequence: Synthetic oligonucleotide
gucagaacuauaccuaucg

SEQ ID NO: 619712 - RNA, 19 nt, Artificial Sequence
  Description of Artificial Sequence: Synthetic oligonucleotide
ucuucuaucagacgaucag

SEQ ID NO: 619713 - RNA, 19 nt, Artificial Sequence
  Description of Artificial Sequence: Synthetic oligonucleotide
ucaggcuuuauauaugccc

SEQ ID NO: 619714 - RNA, 19 nt, Artificial Sequence
  Description of Artificial Sequence: Synthetic oligonucleotide
uaguggacaaaccaaauaa

SEQ ID NO: 619715 - RNA, 19 nt, Artificial Sequence
  Description of Artificial Sequence: Synthetic oligonucleotide
agaacuauaccuaucgccg

SEQ ID NO: 619716 - RNA, 19 nt, Artificial Sequence
  Description of Artificial Sequence: Synthetic oligonucleotide
guuuacagcaggaaaacgg

SEQ ID NO: 619717 - RNA, 19 nt, Artificial Sequence
  Description of Artificial Sequence: Synthetic oligonucleotide
aaauuggaauuuucuugac

SEQ ID NO: 619718 - RNA, 19 nt, Artificial Sequence
  Description of Artificial Sequence: Synthetic oligonucleotide
uucuaucagacgaucagag

SEQ ID NO: 619719 - RNA, 19 nt, Artificial Sequence
  Description of Artificial Sequence: Synthetic oligonucleotide
aaccccauaauuaagaaaa

SEQ ID NO: 619720 - RNA, 19 nt, Artificial Sequence
  Description of Artificial Sequence: Synthetic oligonucleotide
aucuagaucaccgaguauc

SEQ ID NO: 619721 - RNA, 19 nt, Artificial Sequence
  Description of Artificial Sequence: Synthetic oligonucleotide
uugcuuaccuccuagggag

SEQ ID NO: 619722 - RNA, 19 nt, Artificial Sequence
  Description of Artificial Sequence: Synthetic oligonucleotide
aaauauaucgaaugccuuu

SEQ ID NO: 619723 - RNA, 19 nt, Artificial Sequence
  Description of Artificial Sequence: Synthetic oligonucleotide
uguaucaggcuguuuacag

SEQ ID NO: 619724 - RNA, 19 nt, Artificial Sequence
  Description of Artificial Sequence: Synthetic oligonucleotide
auaccuaucgccguccucc

SEQ ID NO: 619725 - RNA, 19 nt, Artificial Sequence
  Description of Artificial Sequence: Synthetic oligonucleotide
ugauccauuuaauaggggu

SEQ ID NO: 619726 - RNA, 19 nt, Artificial Sequence
  Description of Artificial Sequence: Synthetic oligonucleotide
uugguacaauuuuagauca

SEQ ID NO: 619727 - RNA, 19 nt, Artificial Sequence
  Description of Artificial Sequence: Synthetic oligonucleotide
uggucuaucagcaucugac

SEQ ID NO: 619728 - RNA, 19 nt, Artificial Sequence
  Description of Artificial Sequence: Synthetic oligonucleotide
uuuaauagggguguugugu

SEQ ID NO: 619729 - RNA, 19 nt, Artificial Sequence
  Description of Artificial Sequence: Synthetic oligonucleotide
auuggaauuuucuugacua

SEQ ID NO: 619730 - RNA, 19 nt, Artificial Sequence
  Description of Artificial Sequence: Synthetic oligonucleotide
cagaacuauaccuaucgcc

SEQ ID NO: 619731 - RNA, 19 nt, Artificial Sequence
  Description of Artificial Sequence: Synthetic oligonucleotide
uuuauauaugcccacuaua

SEQ ID NO: 619732 - RNA, 19 nt, Artificial Sequence
  Description of Artificial Sequence: Synthetic oligonucleotide
agugggaaauuuaaauucc

SEQ ID NO: 619733 - RNA, 19 nt, Artificial Sequence
  Description of Artificial Sequence: Synthetic oligonucleotide
agcugauuaacccauauuu

SEQ ID NO: 619734 - RNA, 19 nt, Artificial Sequence
  Description of Artificial Sequence: Synthetic oligonucleotide
aacuauaccuaucgccguc

SEQ ID NO: 619735 - RNA, 19 nt, Artificial Sequence
  Description of Artificial Sequence: Synthetic oligonucleotide
uccaugagcauuaagugua

SEQ ID NO: 619736 - RNA, 19 nt, Artificial Sequence
  Description of Artificial Sequence: Synthetic oligonucleotide
uugugucagaacuauaccu

SEQ ID NO: 619737 - RNA, 19 nt, Artificial Sequence
  Description of Artificial Sequence: Synthetic oligonucleotide
aucagaucaggcccugucc

SEQ ID NO: 619738 - RNA, 19 nt, Artificial Sequence
  Description of Artificial Sequence: Synthetic oligonucleotide
aaucucguggcugaaagca

SEQ ID NO: 619739 - RNA, 19 nt, Artificial Sequence
  Description of Artificial Sequence: Synthetic oligonucleotide
cucccuaccagcuuuagug

SEQ ID NO: 619740 - RNA, 19 nt, Artificial Sequence
  Description of Artificial Sequence: Synthetic oligonucleotide
auuuaguauacuucaggcu

SEQ ID NO: 619741 - RNA, 19 nt, Artificial Sequence
  Description of Artificial Sequence: Synthetic oligonucleotide
aguguuaaauaaaaggaca

SEQ ID NO: 619742 - RNA, 19 nt, Artificial Sequence
  Description of Artificial Sequence: Synthetic oligonucleotide
auugucgcaaaauuggaau

SEQ ID NO: 619743 - RNA, 19 nt, Artificial Sequence
  Description of Artificial Sequence: Synthetic oligonucleotide
uuucagacaaccucacaug

SEQ ID NO: 619744 - RNA, 19 nt, Artificial Sequence
  Description of Artificial Sequence: Synthetic oligonucleotide
aauaaucaaaccaguagaa

SEQ ID NO: 619745 - RNA, 19 nt, Artificial Sequence
  Description of Artificial Sequence: Synthetic oligonucleotide
ucgaagguggucauguucu

SEQ ID NO: 619746 - RNA, 19 nt, Artificial Sequence
  Description of Artificial Sequence: Synthetic oligonucleotide
ugugaauugacuugagcau

SEQ ID NO: 619747 - RNA, 19 nt, Artificial Sequence
  Description of Artificial Sequence: Synthetic oligonucleotide
uuuucaugaggaauauagu

SEQ ID NO: 619748 - RNA, 19 nt, Artificial Sequence
  Description of Artificial Sequence: Synthetic oligonucleotide
uagaucaccgaguaucagc

SEQ ID NO: 619749 - RNA, 19 nt, Artificial Sequence
  Description of Artificial Sequence: Synthetic oligonucleotide
agucagaaaaugcacauuu

SEQ ID NO: 619750 - RNA, 19 nt, Artificial Sequence
  Description of Artificial Sequence: Synthetic oligonucleotide
uuaaguguaucaaguccgc

SEQ ID NO: 619751 - RNA, 19 nt, Artificial Sequence
  Description of Artificial Sequence: Synthetic oligonucleotide
uacuaacacuucaacacca

SEQ ID NO: 619752 - RNA, 19 nt, Artificial Sequence
  Description of Artificial Sequence: Synthetic oligonucleotide
agucccauaaagucuagcu

SEQ ID NO: 619753 - RNA, 19 nt, Artificial Sequence
  Description of Artificial Sequence: Synthetic oligonucleotide
aacugauucugcucccauc

SEQ ID NO: 619754 - RNA, 19 nt, Artificial Sequence
  Description of Artificial Sequence: Synthetic oligonucleotide
ugugucagaacuauaccua

SEQ ID NO: 619755 - RNA, 19 nt, Artificial Sequence
  Description of Artificial Sequence: Synthetic oligonucleotide
gagcauuaaguguaucaag

SEQ ID NO: 619756 - RNA, 19 nt, Artificial Sequence
  Description of Artificial Sequence: Synthetic oligonucleotide
ucuagaucaccgaguauca

SEQ ID NO: 619757 - RNA, 19 nt, Artificial Sequence
  Description of Artificial Sequence: Synthetic oligonucleotide
aguuuagaauucaucuggc

SEQ ID NO: 619758 - RNA, 19 nt, Artificial Sequence
  Description of Artificial Sequence: Synthetic oligonucleotide
aucgaaugccuuucauacc

SEQ ID NO: 619759 - RNA, 19 nt, Artificial Sequence
  Description of Artificial Sequence: Synthetic oligonucleotide
acuaguuucaggucaaguu

SEQ ID NO: 619760 - RNA, 19 nt, Artificial Sequence
  Description of Artificial Sequence: Synthetic oligonucleotide
uccuagggagacacaagcg

SEQ ID NO: 619761 - RNA, 19 nt, Artificial Sequence
  Description of Artificial Sequence: Synthetic oligonucleotide
uuaauagggguguuguguc

SEQ ID NO: 619762 - RNA, 19 nt, Artificial Sequence
  Description of Artificial Sequence: Synthetic oligonucleotide
uuaagguccacagugggaa

SEQ ID NO: 619763 - RNA, 19 nt, Artificial Sequence
  Description of Artificial Sequence: Synthetic oligonucleotide
uucuugacguuuccagccg

SEQ ID NO: 619764 - RNA, 19 nt, Artificial Sequence
  Description of Artificial Sequence: Synthetic oligonucleotide
aguaucagcaaaggacagc

SEQ ID NO: 619765 - RNA, 19 nt, Artificial Sequence
  Description of Artificial Sequence: Synthetic oligonucleotide
agaauuagggacacagagg

SEQ ID NO: 619766 - RNA, 19 nt, Artificial Sequence
  Description of Artificial Sequence: Synthetic oligonucleotide
uuaguggacaaaccaaaua

SEQ ID NO: 619767 - RNA, 19 nt, Artificial Sequence
  Description of Artificial Sequence: Synthetic oligonucleotide
cucacuuuacccugugugc

SEQ ID NO: 619768 - RNA, 19 nt, Artificial Sequence
  Description of Artificial Sequence: Synthetic oligonucleotide
aauagggguguugugucag

SEQ ID NO: 619769 - RNA, 19 nt, Artificial Sequence
  Description of Artificial Sequence: Synthetic oligonucleotide
uguccuuucaguggaacgc

SEQ ID NO: 619770 - RNA, 19 nt, Artificial Sequence
  Description of Artificial Sequence: Synthetic oligonucleotide
aguguaucaaguccgccca

SEQ ID NO: 619771 - RNA, 19 nt, Artificial Sequence
  Description of Artificial Sequence: Synthetic oligonucleotide
uuagaucagaucaggcccu

SEQ ID NO: 619772 - RNA, 19 nt, Artificial Sequence
  Description of Artificial Sequence: Synthetic oligonucleotide
uaucaaguccgcccagcgg

SEQ ID NO: 619773 - RNA, 19 nt, Artificial Sequence
  Description of Artificial Sequence: Synthetic oligonucleotide
ugaucagaacugauucugc

SEQ ID NO: 619774 - RNA, 19 nt, Artificial Sequence
  Description of Artificial Sequence: Synthetic oligonucleotide
cuuucaguggaacgcauac

SEQ ID NO: 619775 - RNA, 19 nt, Artificial Sequence
  Description of Artificial Sequence: Synthetic oligonucleotide
auuuugguacaauuuuaga

SEQ ID NO: 619776 - RNA, 19 nt, Artificial Sequence
  Description of Artificial Sequence: Synthetic oligonucleotide
uacugaaggaaacuaguuu

SEQ ID NO: 619777 - RNA, 19 nt, Artificial Sequence
  Description of Artificial Sequence: Synthetic oligonucleotide
guuuacugaaggaaacuag

SEQ ID NO: 619778 - RNA, 19 nt, Artificial Sequence
  Description of Artificial Sequence: Synthetic oligonucleotide
ugagcauuccucucuguga

SEQ ID NO: 619779 - RNA, 19 nt, Artificial Sequence
  Description of Artificial Sequence: Synthetic oligonucleotide
accgaugucagucuaucca

SEQ ID NO: 619780 - RNA, 19 nt, Artificial Sequence
  Description of Artificial Sequence: Synthetic oligonucleotide
acacccuuucuacagagcu

SEQ ID NO: 619781 - RNA, 19 nt, Artificial Sequence
  Description of Artificial Sequence: Synthetic oligonucleotide
uugauccauuuaauagggg

SEQ ID NO: 619782 - RNA, 19 nt, Artificial Sequence
  Description of Artificial Sequence: Synthetic oligonucleotide
uuuaguggacaaaccaaau

SEQ ID NO: 619783 - RNA, 19 nt, Artificial Sequence
  Description of Artificial Sequence: Synthetic oligonucleotide
auaauaaaguggucaggga

SEQ ID NO: 619784 - RNA, 19 nt, Artificial Sequence
  Description of Artificial Sequence: Synthetic oligonucleotide
uacuccgcugcauucaaug

SEQ ID NO: 619785 - RNA, 19 nt, Artificial Sequence
  Description of Artificial Sequence: Synthetic oligonucleotide
cuguuguuuacuccgcugc

SEQ ID NO: 619786 - RNA, 19 nt, Artificial Sequence
  Description of Artificial Sequence: Synthetic oligonucleotide
ucagaucaggcccuguccu

SEQ ID NO: 619787 - RNA, 19 nt, Artificial Sequence
  Description of Artificial Sequence: Synthetic oligonucleotide
aucgaggcccuuuagaaaa

SEQ ID NO: 619788 - RNA, 19 nt, Artificial Sequence
  Description of Artificial Sequence: Synthetic oligonucleotide
ucaauugccauugucucaa

SEQ ID NO: 619789 - RNA, 19 nt, Artificial Sequence
  Description of Artificial Sequence: Synthetic oligonucleotide
gugacuguaacuugugcac

SEQ ID NO: 619790 - RNA, 19 nt, Artificial Sequence
  Description of Artificial Sequence: Synthetic oligonucleotide
agcauuaaguguaucaagu

SEQ ID NO: 619791 - RNA, 19 nt, Artificial Sequence
  Description of Artificial Sequence: Synthetic oligonucleotide
ucuauccaugagcauuaag

SEQ ID NO: 619792 - RNA, 19 nt, Artificial Sequence
  Description of Artificial Sequence: Synthetic oligonucleotide
ucucccaaagagaauuuaa

SEQ ID NO: 619793 - RNA, 19 nt, Artificial Sequence
  Description of Artificial Sequence: Synthetic oligonucleotide
auaaaccccauaauuaaga

SEQ ID NO: 619794 - RNA, 19 nt, Artificial Sequence
  Description of Artificial Sequence: Synthetic oligonucleotide
ugagcauuaaguguaucaa

SEQ ID NO: 619795 - RNA, 19 nt, Artificial Sequence
  Description of Artificial Sequence: Synthetic oligonucleotide
uaaaccccauaauuaagaa

SEQ ID NO: 619796 - RNA, 19 nt, Artificial Sequence
  Description of Artificial Sequence: Synthetic oligonucleotide
uguucucccaaagagaauu

SEQ ID NO: 619797 - RNA, 19 nt, Artificial Sequence
  Description of Artificial Sequence: Synthetic oligonucleotide
cuccuagggagacacaagc

SEQ ID NO: 619798 - RNA, 19 nt, Artificial Sequence
  Description of Artificial Sequence: Synthetic oligonucleotide
acuauaccuaucgccgucc

SEQ ID NO: 619799 - RNA, 19 nt, Artificial Sequence
  Description of Artificial Sequence: Synthetic oligonucleotide
gaagcuauuuuaaaagcaa

SEQ ID NO: 619800 - RNA, 19 nt, Artificial Sequence
  Description of Artificial Sequence: Synthetic oligonucleotide
aagucccauaaagucuagc

SEQ ID NO: 619801 - RNA, 19 nt, Artificial Sequence
  Description of Artificial Sequence: Synthetic oligonucleotide
uuuacucacuuuacccugu

SEQ ID NO: 619802 - RNA, 19 nt, Artificial Sequence
  Description of Artificial Sequence: Synthetic oligonucleotide
ggaaacuaguuucagguca

SEQ ID NO: 619803 - RNA, 19 nt, Artificial Sequence
  Description of Artificial Sequence: Synthetic oligonucleotide
uugacuugauccauuuaau

SEQ ID NO: 619804 - RNA, 19 nt, Artificial Sequence
  Description of Artificial Sequence: Synthetic oligonucleotide
ugcacaguuuacugaagga

SEQ ID NO: 619805 - RNA, 19 nt, Artificial Sequence
  Description of Artificial Sequence: Synthetic oligonucleotide
cuauagcaauuacuuauug

SEQ ID NO: 619806 - RNA, 19 nt, Artificial Sequence
  Description of Artificial Sequence: Synthetic oligonucleotide
auuuaauagggguguugug

SEQ ID NO: 619807 - RNA, 19 nt, Artificial Sequence
  Description of Artificial Sequence: Synthetic oligonucleotide
ugaugcaaguauuuuggua

SEQ ID NO: 619808 - RNA, 19 nt, Artificial Sequence
  Description of Artificial Sequence: Synthetic oligonucleotide
uguuguuuacuccgcugca

SEQ ID NO: 619809 - RNA, 19 nt, Artificial Sequence
  Description of Artificial Sequence: Synthetic oligonucleotide
guaucaaguccgcccagcg

SEQ ID NO: 619810 - RNA, 19 nt, Artificial Sequence
  Description of Artificial Sequence: Synthetic oligonucleotide
uauaucgaaugccuuucau

SEQ ID NO: 619811 - RNA, 19 nt, Artificial Sequence
  Description of Artificial Sequence: Synthetic oligonucleotide
aaucgaggcccuuuagaaa

SEQ ID NO: 619812 - RNA, 19 nt, Artificial Sequence
  Description of Artificial Sequence: Synthetic oligonucleotide
aguucuguucucccaaaga

SEQ ID NO: 619813 - RNA, 19 nt, Artificial Sequence
  Description of Artificial Sequence: Synthetic oligonucleotide
aucaggcuucaccagucac

SEQ ID NO: 619814 - RNA, 19 nt, Artificial Sequence
  Description of Artificial Sequence: Synthetic oligonucleotide
ccgaguaucagcaaaggac

SEQ ID NO: 619815 - RNA, 19 nt, Artificial Sequence
  Description of Artificial Sequence: Synthetic oligonucleotide
guauuagaaaagauagcac

SEQ ID NO: 619816 - RNA, 19 nt, Artificial Sequence
  Description of Artificial Sequence: Synthetic oligonucleotide
uaucagacgaucagaguuu

SEQ ID NO: 619817 - RNA, 19 nt, Artificial Sequence
  Description of Artificial Sequence: Synthetic oligonucleotide
guaacuugugcacaguuua

SEQ ID NO: 619818 - RNA, 19 nt, Artificial Sequence
  Description of Artificial Sequence: Synthetic oligonucleotide
caguggaacgcauacagca

SEQ ID NO: 619819 - RNA, 19 nt, Artificial Sequence
  Description of Artificial Sequence: Synthetic oligonucleotide
gugaucagaacugauucug

SEQ ID NO: 619820 - RNA, 19 nt, Artificial Sequence
  Description of Artificial Sequence: Synthetic oligonucleotide
uuaguauacuucaggcuuu

SEQ ID NO: 619821 - RNA, 19 nt, Artificial Sequence
  Description of Artificial Sequence: Synthetic oligonucleotide
cuugacuaccaagaauuag

SEQ ID NO: 619822 - RNA, 19 nt, Artificial Sequence
  Description of Artificial Sequence: Synthetic oligonucleotide
aggcuuuauauaugcccac

SEQ ID NO: 619823 - RNA, 19 nt, Artificial Sequence
  Description of Artificial Sequence: Synthetic oligonucleotide
uuuggauguggagagccug

SEQ ID NO: 619824 - RNA, 19 nt, Artificial Sequence
  Description of Artificial Sequence: Synthetic oligonucleotide
uacuagggugugaugcaag

SEQ ID NO: 619825 - RNA, 19 nt, Artificial Sequence
  Description of Artificial Sequence: Synthetic oligonucleotide
cagaguguucauuuugcug

SEQ ID NO: 619826 - RNA, 19 nt, Artificial Sequence
  Description of Artificial Sequence: Synthetic oligonucleotide
gucccauaaagucuagcug

SEQ ID NO: 619827 - RNA, 19 nt, Artificial Sequence
  Description of Artificial Sequence: Synthetic oligonucleotide
cuguccuuucaguggaacg

SEQ ID NO: 619828 - RNA, 19 nt, Artificial Sequence
  Description of Artificial Sequence: Synthetic oligonucleotide
agucaacaagcugauuaac

SEQ ID NO: 619829 - RNA, 19 nt, Artificial Sequence
  Description of Artificial Sequence: Synthetic oligonucleotide
ucuaucagacgaucagagu

SEQ ID NO: 619830 - RNA, 19 nt, Artificial Sequence
  Description of Artificial Sequence: Synthetic oligonucleotide
uuaagggcaugcccaguca

SEQ ID NO: 619831 - RNA, 19 nt, Artificial Sequence
  Description of Artificial Sequence: Synthetic oligonucleotide
cuagcuuauucucccuacc

SEQ ID NO: 619832 - RNA, 19 nt, Artificial Sequence
  Description of Artificial Sequence: Synthetic oligonucleotide
uauucacacccaaucucgu

SEQ ID NO: 619833 - RNA, 19 nt, Artificial Sequence
  Description of Artificial Sequence: Synthetic oligonucleotide
guggaacgcauacagcagc

SEQ ID NO: 619834 - RNA, 19 nt, Artificial Sequence
  Description of Artificial Sequence: Synthetic oligonucleotide
ucagacgaucagaguuucg

SEQ ID NO: 619835 - RNA, 19 nt, Artificial Sequence
  Description of Artificial Sequence: Synthetic oligonucleotide
aaguccgcccagcggcacc

SEQ ID NO: 619836 - RNA, 19 nt, Artificial Sequence
  Description of Artificial Sequence: Synthetic oligonucleotide
ucuugacguuuccagccgc

SEQ ID NO: 619837 - RNA, 19 nt, Artificial Sequence
  Description of Artificial Sequence: Synthetic oligonucleotide
caggcuuuauauaugccca

SEQ ID NO: 619838 - RNA, 19 nt, Artificial Sequence
  Description of Artificial Sequence: Synthetic oligonucleotide
cagacaaccucacauguga

SEQ ID NO: 619839 - RNA, 19 nt, Artificial Sequence
  Description of Artificial Sequence: Synthetic oligonucleotide
uuucuacagagcuuuccau

SEQ ID NO: 619840 - RNA, 19 nt, Artificial Sequence
  Description of Artificial Sequence: Synthetic oligonucleotide
cacaaccaccaaucgaggc

SEQ ID NO: 619841 - RNA, 19 nt, Artificial Sequence
  Description of Artificial Sequence: Synthetic oligonucleotide
uuaccuccuagggagacac

SEQ ID NO: 619842 - RNA, 19 nt, Artificial Sequence
  Description of Artificial Sequence: Synthetic oligonucleotide
agaucaccgaguaucagca

SEQ ID NO: 619843 - RNA, 19 nt, Artificial Sequence
  Description of Artificial Sequence: Synthetic oligonucleotide
uuuacuccgcugcauucaa

SEQ ID NO: 619844 - RNA, 19 nt, Artificial Sequence
  Description of Artificial Sequence: Synthetic oligonucleotide
auaaucaaaccaguagaaa

SEQ ID NO: 619845 - RNA, 19 nt, Artificial Sequence
  Description of Artificial Sequence: Synthetic oligonucleotide
acuagggugugaugcaagu

SEQ ID NO: 619846 - RNA, 19 nt, Artificial Sequence
  Description of Artificial Sequence: Synthetic oligonucleotide
aucaccgaguaucagcaaa

SEQ ID NO: 619847 - RNA, 19 nt, Artificial Sequence
  Description of Artificial Sequence: Synthetic oligonucleotide
auauaucgaaugccuuuca

SEQ ID NO: 619848 - RNA, 19 nt, Artificial Sequence
  Description of Artificial Sequence: Synthetic oligonucleotide
uuguauacucuguccauuu

SEQ ID NO: 619849 - RNA, 19 nt, Artificial Sequence
  Description of Artificial Sequence: Synthetic oligonucleotide
uguugccuauagcaauuac

SEQ ID NO: 619850 - RNA, 19 nt, Artificial Sequence
  Description of Artificial Sequence: Synthetic oligonucleotide
agucccgucgcuuccuaag

SEQ ID NO: 619851 - RNA, 19 nt, Artificial Sequence
  Description of Artificial Sequence: Synthetic oligonucleotide
gcaguuuagaauucaucug

SEQ ID NO: 619852 - RNA, 19 nt, Artificial Sequence
  Description of Artificial Sequence: Synthetic oligonucleotide
aagcugauuaacccauauu

SEQ ID NO: 619853 - RNA, 19 nt, Artificial Sequence
  Description of Artificial Sequence: Synthetic oligonucleotide
cugcauucaaugaggggac

SEQ ID NO: 619854 - RNA, 19 nt, Artificial Sequence
  Description of Artificial Sequence: Synthetic oligonucleotide
ggaugagcgagucccgucg

SEQ ID NO: 619855 - RNA, 19 nt, Artificial Sequence
  Description of Artificial Sequence: Synthetic oligonucleotide
uguaucaaguccgcccagc

SEQ ID NO: 619856 - RNA, 19 nt, Artificial Sequence
  Description of Artificial Sequence: Synthetic oligonucleotide
agcgacugaaaaccuuuug

SEQ ID NO: 619857 - RNA, 19 nt, Artificial Sequence
  Description of Artificial Sequence: Synthetic oligonucleotide
aauuagggacacagaggag

SEQ ID NO: 619858 - RNA, 19 nt, Artificial Sequence
  Description of Artificial Sequence: Synthetic oligonucleotide
gucagucuauccaugagca

SEQ ID NO: 619859 - RNA, 19 nt, Artificial Sequence
  Description of Artificial Sequence: Synthetic oligonucleotide
caaagucccauaaagucua

SEQ ID NO: 619860 - RNA, 19 nt, Artificial Sequence
  Description of Artificial Sequence: Synthetic oligonucleotide
cuguuguauacucugucca

SEQ ID NO: 619861 - RNA, 19 nt, Artificial Sequence
  Description of Artificial Sequence: Synthetic oligonucleotide
cauucaaugaggggacccc

SEQ ID NO: 619862 - RNA, 19 nt, Artificial Sequence
  Description of Artificial Sequence: Synthetic oligonucleotide
agaaaagacuggcaauaua

SEQ ID NO: 619863 - RNA, 19 nt, Artificial Sequence
  Description of Artificial Sequence: Synthetic oligonucleotide
gcuugcuuaccuccuaggg

SEQ ID NO: 619864 - RNA, 19 nt, Artificial Sequence
  Description of Artificial Sequence: Synthetic oligonucleotide
ucuugacuaccaagaauua

SEQ ID NO: 619865 - RNA, 19 nt, Artificial Sequence
  Description of Artificial Sequence: Synthetic oligonucleotide
ucgagcuuguuuccugaga

SEQ ID NO: 619866 - RNA, 19 nt, Artificial Sequence
  Description of Artificial Sequence: Synthetic oligonucleotide
cagcugucgagcuuguuuc

SEQ ID NO: 619867 - RNA, 19 nt, Artificial Sequence
  Description of Artificial Sequence: Synthetic oligonucleotide
uaaguguaucaaguccgcc

SEQ ID NO: 619868 - RNA, 19 nt, Artificial Sequence
  Description of Artificial Sequence: Synthetic oligonucleotide
gaauguacuaacacuucaa

SEQ ID NO: 619869 - RNA, 19 nt, Artificial Sequence
  Description of Artificial Sequence: Synthetic oligonucleotide
cuugcuuaccuccuaggga

SEQ ID NO: 619870 - RNA, 19 nt, Artificial Sequence
  Description of Artificial Sequence: Synthetic oligonucleotide
ugugaggaguccagcuaug

SEQ ID NO: 619871 - RNA, 19 nt, Artificial Sequence
  Description of Artificial Sequence: Synthetic oligonucleotide
uaagggcaugcccagucaa

SEQ ID NO: 619872 - RNA, 19 nt, Artificial Sequence
  Description of Artificial Sequence: Synthetic oligonucleotide
gaggagaaucuagaucacc

SEQ ID NO: 619873 - RNA, 19 nt, Artificial Sequence
  Description of Artificial Sequence: Synthetic oligonucleotide
ugucgagcuuguuuccuga

SEQ ID NO: 619874 - RNA, 19 nt, Artificial Sequence
  Description of Artificial Sequence: Synthetic oligonucleotide
uugucgcaaaauuggaauu

SEQ ID NO: 619875 - RNA, 19 nt, Artificial Sequence
  Description of Artificial Sequence: Synthetic oligonucleotide
gaguaucagcaaaggacag

SEQ ID NO: 619876 - RNA, 19 nt, Artificial Sequence
  Description of Artificial Sequence: Synthetic oligonucleotide
accgaguaucagcaaagga

SEQ ID NO: 619877 - RNA, 19 nt, Artificial Sequence
  Description of Artificial Sequence: Synthetic oligonucleotide
aucagacgaucagaguuuc

SEQ ID NO: 619878 - RNA, 19 nt, Artificial Sequence
  Description of Artificial Sequence: Synthetic oligonucleotide
agaccgaugucagucuauc

SEQ ID NO: 619879 - RNA, 19 nt, Artificial Sequence
  Description of Artificial Sequence: Synthetic oligonucleotide
caaucucguggcugaaagc

SEQ ID NO: 619880 - RNA, 19 nt, Artificial Sequence
  Description of Artificial Sequence: Synthetic oligonucleotide
aggaugagcgagucccguc

SEQ ID NO: 619881 - RNA, 19 nt, Artificial Sequence
  Description of Artificial Sequence: Synthetic oligonucleotide
cuaucagacgaucagaguu

SEQ ID NO: 619882 - RNA, 19 nt, Artificial Sequence
  Description of Artificial Sequence: Synthetic oligonucleotide
gacuaccaagaauuaggga

SEQ ID NO: 619883 - RNA, 19 nt, Artificial Sequence
  Description of Artificial Sequence: Synthetic oligonucleotide
ugacuguaacuugugcaca

SEQ ID NO: 619884 - RNA, 19 nt, Artificial Sequence
  Description of Artificial Sequence: Synthetic oligonucleotide
agucugaccagguccgagu

SEQ ID NO: 619885 - RNA, 19 nt, Artificial Sequence
  Description of Artificial Sequence: Synthetic oligonucleotide
aguucauuuuccagcuguc

SEQ ID NO: 619886 - RNA, 19 nt, Artificial Sequence
  Description of Artificial Sequence: Synthetic oligonucleotide
agagcuacuagggugugau

SEQ ID NO: 619887 - RNA, 19 nt, Artificial Sequence
  Description of Artificial Sequence: Synthetic oligonucleotide
accuagugcucacaacuga

SEQ ID NO: 619888 - RNA, 19 nt, Artificial Sequence
  Description of Artificial Sequence: Synthetic oligonucleotide
uguauacucuguccauuuu

SEQ ID NO: 619889 - RNA, 19 nt, Artificial Sequence
  Description of Artificial Sequence: Synthetic oligonucleotide
caaggaugagcgagucccg

SEQ ID NO: 619890 - RNA, 19 nt, Artificial Sequence
  Description of Artificial Sequence: Synthetic oligonucleotide
uuacagcaggaaaacgguu

SEQ ID NO: 619891 - RNA, 19 nt, Artificial Sequence
  Description of Artificial Sequence: Synthetic oligonucleotide
agaaaagauagcacaggaa

SEQ ID NO: 619892 - RNA, 19 nt, Artificial Sequence
  Description of Artificial Sequence: Synthetic oligonucleotide
uuucaguggaacgcauaca

SEQ ID NO: 619893 - RNA, 19 nt, Artificial Sequence
  Description of Artificial Sequence: Synthetic oligonucleotide
ccauuuuacucacuuuacc

SEQ ID NO: 619894 - RNA, 19 nt, Artificial Sequence
  Description of Artificial Sequence: Synthetic oligonucleotide
cacuguuguauacucuguc

SEQ ID NO: 619895 - RNA, 19 nt, Artificial Sequence
  Description of Artificial Sequence: Synthetic oligonucleotide
aguggaacgcauacagcag

SEQ ID NO: 619896 - RNA, 19 nt, Artificial Sequence
  Description of Artificial Sequence: Synthetic oligonucleotide
auagugugaucagaacuga

SEQ ID NO: 619897 - RNA, 19 nt, Artificial Sequence
  Description of Artificial Sequence: Synthetic oligonucleotide
cuaagagcuacuagggugu

SEQ ID NO: 619898 - RNA, 19 nt, Artificial Sequence
  Description of Artificial Sequence: Synthetic oligonucleotide
uagaaaagacuggcaauau

SEQ ID NO: 619899 - RNA, 19 nt, Artificial Sequence
  Description of Artificial Sequence: Synthetic oligonucleotide
gaugagcgagucccgucgc

SEQ ID NO: 619900 - RNA, 19 nt, Artificial Sequence
  Description of Artificial Sequence: Synthetic oligonucleotide
ugccgaugaccccuccaag

SEQ ID NO: 619901 - RNA, 19 nt, Artificial Sequence
  Description of Artificial Sequence: Synthetic oligonucleotide
aggcacaaccaccaaucga

SEQ ID NO: 619902 - RNA, 19 nt, Artificial Sequence
  Description of Artificial Sequence: Synthetic oligonucleotide
caaugaggggaccccuugc

SEQ ID NO: 619903 - RNA, 19 nt, Artificial Sequence
  Description of Artificial Sequence: Synthetic oligonucleotide
agaaugguacagaugccga

SEQ ID NO: 619904 - RNA, 19 nt, Artificial Sequence
  Description of Artificial Sequence: Synthetic oligonucleotide
caagaauuagggacacaga

SEQ ID NO: 619905 - RNA, 19 nt, Artificial Sequence
  Description of Artificial Sequence: Synthetic oligonucleotide
accaaucgaggcccuuuag

SEQ ID NO: 619906 - RNA, 19 nt, Artificial Sequence
  Description of Artificial Sequence: Synthetic oligonucleotide
agacgaucagaguuucgaa

SEQ ID NO: 619907 - RNA, 19 nt, Artificial Sequence
  Description of Artificial Sequence: Synthetic oligonucleotide
aguggacaaaccaaauaau

SEQ ID NO: 619908 - RNA, 19 nt, Artificial Sequence
  Description of Artificial Sequence: Synthetic oligonucleotide
uccuagcuuauucucccua

SEQ ID NO: 619909 - RNA, 19 nt, Artificial Sequence
  Description of Artificial Sequence: Synthetic oligonucleotide
gaccuagugcucacaacug

SEQ ID NO: 619910 - RNA, 19 nt, Artificial Sequence
  Description of Artificial Sequence: Synthetic oligonucleotide
ugccuauagcaauuacuua

SEQ ID NO: 619911 - RNA, 19 nt, Artificial Sequence
  Description of Artificial Sequence: Synthetic oligonucleotide
ucgggcgcugcugugacug

SEQ ID NO: 619912 - RNA, 19 nt, Artificial Sequence
  Description of Artificial Sequence: Synthetic oligonucleotide
ccuuuuaagggcaugccca

SEQ ID NO: 619913 - RNA, 19 nt, Artificial Sequence
  Description of Artificial Sequence: Synthetic oligonucleotide
uuacccugugugccuuugc

SEQ ID NO: 619914 - RNA, 19 nt, Artificial Sequence
  Description of Artificial Sequence: Synthetic oligonucleotide
gccgaugaccccuccaagg

SEQ ID NO: 619915 - RNA, 19 nt, Artificial Sequence
  Description of Artificial Sequence: Synthetic oligonucleotide
ucaaguccgcccagcggca

SEQ ID NO: 619916 - RNA, 19 nt, Artificial Sequence
  Description of Artificial Sequence: Synthetic oligonucleotide
uauaccuaucgccguccuc

SEQ ID NO: 619917 - RNA, 19 nt, Artificial Sequence
  Description of Artificial Sequence: Synthetic oligonucleotide
gucccgucgcuuccuaagg

SEQ ID NO: 619918 - RNA, 19 nt, Artificial Sequence
  Description of Artificial Sequence: Synthetic oligonucleotide
ugucuugacuugauccauu

SEQ ID NO: 619919 - RNA, 19 nt, Artificial Sequence
  Description of Artificial Sequence: Synthetic oligonucleotide
uacucacuuuacccugugu

SEQ ID NO: 619920 - RNA, 19 nt, Artificial Sequence
  Description of Artificial Sequence: Synthetic oligonucleotide
aaagucuagcugaggcaca

SEQ ID NO: 619921 - RNA, 19 nt, Artificial Sequence
  Description of Artificial Sequence: Synthetic oligonucleotide
uaugaggccugcuggucau

SEQ ID NO: 619922 - RNA, 19 nt, Artificial Sequence
  Description of Artificial Sequence: Synthetic oligonucleotide
aacgguuggccagaguguu

SEQ ID NO: 619923 - RNA, 19 nt, Artificial Sequence
  Description of Artificial Sequence: Synthetic oligonucleotide
aaagucccauaaagucuag

SEQ ID NO: 619924 - RNA, 19 nt, Artificial Sequence
  Description of Artificial Sequence: Synthetic oligonucleotide
agccgcacagcugaccuag

SEQ ID NO: 619925 - RNA, 19 nt, Artificial Sequence
  Description of Artificial Sequence: Synthetic oligonucleotide
cagacgaucagaguuucga

SEQ ID NO: 619926 - RNA, 19 nt, Artificial Sequence
  Description of Artificial Sequence: Synthetic oligonucleotide
gacacacccuuucuacaga

SEQ ID NO: 619927 - RNA, 19 nt, Artificial Sequence
  Description of Artificial Sequence: Synthetic oligonucleotide
cuucuaucagacgaucaga

SEQ ID NO: 619928 - RNA, 19 nt, Artificial Sequence
  Description of Artificial Sequence: Synthetic oligonucleotide
guugccuauagcaauuacu

SEQ ID NO: 619929 - RNA, 19 nt, Artificial Sequence
  Description of Artificial Sequence: Synthetic oligonucleotide
cugaccuagugcucacaac

SEQ ID NO: 619930 - RNA, 19 nt, Artificial Sequence
  Description of Artificial Sequence: Synthetic oligonucleotide
gcucgcaagaucugcauuc

SEQ ID NO: 619931 - RNA, 19 nt, Artificial Sequence
  Description of Artificial Sequence: Synthetic oligonucleotide
guuuacuccgcugcauuca

SEQ ID NO: 619932 - RNA, 19 nt, Artificial Sequence
  Description of Artificial Sequence: Synthetic oligonucleotide
cuagaucaccgaguaucag

SEQ ID NO: 619933 - RNA, 19 nt, Artificial Sequence
  Description of Artificial Sequence: Synthetic oligonucleotide
guuucgaagguggucaugu

SEQ ID NO: 619934 - RNA, 19 nt, Artificial Sequence
  Description of Artificial Sequence: Synthetic oligonucleotide
gaucaggcccuguccuagc

SEQ ID NO: 619935 - RNA, 19 nt, Artificial Sequence
  Description of Artificial Sequence: Synthetic oligonucleotide
gccuauagcaauuacuuau

SEQ ID NO: 619936 - RNA, 19 nt, Artificial Sequence
  Description of Artificial Sequence: Synthetic oligonucleotide
agucccagaccgaugucag

SEQ ID NO: 619937 - RNA, 19 nt, Artificial Sequence
  Description of Artificial Sequence: Synthetic oligonucleotide
gaacuauaccuaucgccgu

SEQ ID NO: 619938 - RNA, 19 nt, Artificial Sequence
  Description of Artificial Sequence: Synthetic oligonucleotide
ugcuuaccuccuagggaga

SEQ ID NO: 619939 - RNA, 19 nt, Artificial Sequence
  Description of Artificial Sequence: Synthetic oligonucleotide
ugcauucaaugaggggacc

SEQ ID NO: 619940 - RNA, 19 nt, Artificial Sequence
  Description of Artificial Sequence: Synthetic oligonucleotide
gucgagcuuguuuccugag

SEQ ID NO: 619941 - RNA, 19 nt, Artificial Sequence
  Description of Artificial Sequence: Synthetic oligonucleotide
agucuauccaugagcauua

SEQ ID NO: 619942 - RNA, 19 nt, Artificial Sequence
  Description of Artificial Sequence: Synthetic oligonucleotide
cuagugcucacaacugaaa

SEQ ID NO: 619943 - RNA, 19 nt, Artificial Sequence
  Description of Artificial Sequence: Synthetic oligonucleotide
cagguccgagucaugggug

SEQ ID NO: 619944 - RNA, 19 nt, Artificial Sequence
  Description of Artificial Sequence: Synthetic oligonucleotide
gaugccgaugaccccucca

SEQ ID NO: 619945 - RNA, 19 nt, Artificial Sequence
  Description of Artificial Sequence: Synthetic oligonucleotide
ucccgucgcuuccuaaggu

SEQ ID NO: 619946 - RNA, 19 nt, Artificial Sequence
  Description of Artificial Sequence: Synthetic oligonucleotide
accccuugcacuguuguau

SEQ ID NO: 619947 - RNA, 19 nt, Artificial Sequence
  Description of Artificial Sequence: Synthetic oligonucleotide
uaacaaccaaagucccaua

SEQ ID NO: 619948 - RNA, 19 nt, Artificial Sequence
  Description of Artificial Sequence: Synthetic oligonucleotide
gcaggaaaacgguuggcca

SEQ ID NO: 619949 - RNA, 19 nt, Artificial Sequence
  Description of Artificial Sequence: Synthetic oligonucleotide
guguaucaaguccgcccag

SEQ ID NO: 619950 - RNA, 19 nt, Artificial Sequence
  Description of Artificial Sequence: Synthetic oligonucleotide
ccuagcuuauucucccuac

SEQ ID NO: 619951 - RNA, 19 nt, Artificial Sequence
  Description of Artificial Sequence: Synthetic oligonucleotide
uagaucagaucaggcccug

SEQ ID NO: 619952 - RNA, 19 nt, Artificial Sequence
  Description of Artificial Sequence: Synthetic oligonucleotide
gggguguugugucagaacu

SEQ ID NO: 619953 - RNA, 19 nt, Artificial Sequence
  Description of Artificial Sequence: Synthetic oligonucleotide
cagcaacagaaugguacag

SEQ ID NO: 619954 - RNA, 19 nt, Artificial Sequence
  Description of Artificial Sequence: Synthetic oligonucleotide
ccagcuaugaggccugcug

SEQ ID NO: 619955 - RNA, 19 nt, Artificial Sequence
  Description of Artificial Sequence: Synthetic oligonucleotide
agagcucgcaagaucugca

SEQ ID NO: 619956 - RNA, 19 nt, Artificial Sequence
  Description of Artificial Sequence: Synthetic oligonucleotide
uugacguuuccagccgcac

SEQ ID NO: 619957 - RNA, 19 nt, Artificial Sequence
  Description of Artificial Sequence: Synthetic oligonucleotide
cuugacguuuccagccgca

SEQ ID NO: 619958 - RNA, 19 nt, Artificial Sequence
  Description of Artificial Sequence: Synthetic oligonucleotide
ggagacacaagcgacugaa

SEQ ID NO: 619959 - RNA, 19 nt, Artificial Sequence
  Description of Artificial Sequence: Synthetic oligonucleotide
caugggugcaguuuagaau

SEQ ID NO: 619960 - RNA, 19 nt, Artificial Sequence
  Description of Artificial Sequence: Synthetic oligonucleotide
uaccuaucgccguccucca

SEQ ID NO: 619961 - RNA, 19 nt, Artificial Sequence
  Description of Artificial Sequence: Synthetic oligonucleotide
aguuucgaagguggucaug

SEQ ID NO: 619962 - RNA, 19 nt, Artificial Sequence
  Description of Artificial Sequence: Synthetic oligonucleotide
cgcaagaucugcauucuug

SEQ ID NO: 619963 - RNA, 19 nt, Artificial Sequence
  Description of Artificial Sequence: Synthetic oligonucleotide
cauagccagggcaguuuuc

SEQ ID NO: 619964 - RNA, 19 nt, Artificial Sequence
  Description of Artificial Sequence: Synthetic oligonucleotide
ccaaauaaucaaaccagua

SEQ ID NO: 619965 - RNA, 19 nt, Artificial Sequence
  Description of Artificial Sequence: Synthetic oligonucleotide
cacccaaucucguggcuga

SEQ ID NO: 619966 - RNA, 19 nt, Artificial Sequence
  Description of Artificial Sequence: Synthetic oligonucleotide
uuacuccgcugcauucaau

SEQ ID NO: 619967 - RNA, 19 nt, Artificial Sequence
  Description of Artificial Sequence: Synthetic oligonucleotide
aguggucagggaagagaag

SEQ ID NO: 619968 - RNA, 19 nt, Artificial Sequence
  Description of Artificial Sequence: Synthetic oligonucleotide
agcucgcaagaucugcauu

SEQ ID NO: 619969 - RNA, 19 nt, Artificial Sequence
  Description of Artificial Sequence: Synthetic oligonucleotide
gcuacuagggugugaugca

SEQ ID NO: 619970 - RNA, 19 nt, Artificial Sequence
  Description of Artificial Sequence: Synthetic oligonucleotide
gcgacugaaaaccuuuugu

SEQ ID NO: 619971 - RNA, 19 nt, Artificial Sequence
  Description of Artificial Sequence: Synthetic oligonucleotide
augagcgagucccgucgcu

SEQ ID NO: 619972 - RNA, 19 nt, Artificial Sequence
  Description of Artificial Sequence: Synthetic oligonucleotide
gcuuuauauaugcccacua

SEQ ID NO: 619973 - RNA, 19 nt, Artificial Sequence
  Description of Artificial Sequence: Synthetic oligonucleotide
caagcgacugaaaaccuuu

SEQ ID NO: 619974 - RNA, 19 nt, Artificial Sequence
  Description of Artificial Sequence: Synthetic oligonucleotide
guccuuucaguggaacgca

SEQ ID NO: 619975 - RNA, 19 nt, Artificial Sequence
  Description of Artificial Sequence: Synthetic oligonucleotide
ugaccagguccgagucaug

SEQ ID NO: 619976 - RNA, 19 nt, Artificial Sequence
  Description of Artificial Sequence: Synthetic oligonucleotide
cccacuauauaacaaccaa

SEQ ID NO: 619977 - RNA, 19 nt, Artificial Sequence
  Description of Artificial Sequence: Synthetic oligonucleotide
ucgcaagaucugcauucuu

SEQ ID NO: 619978 - RNA, 19 nt, Artificial Sequence
  Description of Artificial Sequence: Synthetic oligonucleotide
ccaaagucccauaaagucu

SEQ ID NO: 619979 - RNA, 19 nt, Artificial Sequence
  Description of Artificial Sequence: Synthetic oligonucleotide
acaagcgacugaaaaccuu

SEQ ID NO: 619980 - RNA, 19 nt, Artificial Sequence
  Description of Artificial Sequence: Synthetic oligonucleotide
gaucaccgaguaucagcaa

SEQ ID NO: 619981 - RNA, 19 nt, Artificial Sequence
  Description of Artificial Sequence: Synthetic oligonucleotide
aagcgacugaaaaccuuuu

SEQ ID NO: 619982 - RNA, 19 nt, Artificial Sequence
  Description of Artificial Sequence: Synthetic oligonucleotide
ucagucugaccagguccga

SEQ ID NO: 619983 - RNA, 19 nt, Artificial Sequence
  Description of Artificial Sequence: Synthetic oligonucleotide
gcacaaccaccaaucgagg

SEQ ID NO: 619984 - RNA, 19 nt, Artificial Sequence
  Description of Artificial Sequence: Synthetic oligonucleotide
ccuaucgccguccuccauc

SEQ ID NO: 619985 - RNA, 19 nt, Artificial Sequence
  Description of Artificial Sequence: Synthetic oligonucleotide
uaccuccuagggagacaca

SEQ ID NO: 619986 - RNA, 19 nt, Artificial Sequence
  Description of Artificial Sequence: Synthetic oligonucleotide
gucaugggugcaguuuaga

SEQ ID NO: 619987 - RNA, 19 nt, Artificial Sequence
  Description of Artificial Sequence: Synthetic oligonucleotide
agggugugaugcaaguauu

SEQ ID NO: 619988 - RNA, 19 nt, Artificial Sequence
  Description of Artificial Sequence: Synthetic oligonucleotide
ugguuccaagaagcuauuu

SEQ ID NO: 619989 - RNA, 19 nt, Artificial Sequence
  Description of Artificial Sequence: Synthetic oligonucleotide
ccuccuagggagacacaag

SEQ ID NO: 619990 - RNA, 19 nt, Artificial Sequence
  Description of Artificial Sequence: Synthetic oligonucleotide
agacaaccucacaugugau

SEQ ID NO: 619991 - RNA, 19 nt, Artificial Sequence
  Description of Artificial Sequence: Synthetic oligonucleotide
cuuccuaagguugauccuu

SEQ ID NO: 619992 - RNA, 19 nt, Artificial Sequence
  Description of Artificial Sequence: Synthetic oligonucleotide
cagucuauccaugagcauu

SEQ ID NO: 619993 - RNA, 19 nt, Artificial Sequence
  Description of Artificial Sequence: Synthetic oligonucleotide
cagaugccgaugaccccuc

SEQ ID NO: 619994 - RNA, 19 nt, Artificial Sequence
  Description of Artificial Sequence: Synthetic oligonucleotide
ggaaaacgguuggccagag

SEQ ID NO: 619995 - RNA, 19 nt, Artificial Sequence
  Description of Artificial Sequence: Synthetic oligonucleotide
acgguuggccagaguguuc

SEQ ID NO: 619996 - RNA, 19 nt, Artificial Sequence
  Description of Artificial Sequence: Synthetic oligonucleotide
ucgcuuccuaagguugauc

SEQ ID NO: 619997 - RNA, 19 nt, Artificial Sequence
  Description of Artificial Sequence: Synthetic oligonucleotide
ccaaucgaggcccuuuaga

SEQ ID NO: 619998 - RNA, 19 nt, Artificial Sequence
  Description of Artificial Sequence: Synthetic oligonucleotide
cuaucgccguccuccaucu

SEQ ID NO: 619999 - RNA, 19 nt, Artificial Sequence
  Description of Artificial Sequence: Synthetic oligonucleotide
guuguauacucuguccauu

SEQ ID NO: 620000 - RNA, 19 nt, Artificial Sequence
  Description of Artificial Sequence: Synthetic oligonucleotide
cacaagcgacugaaaaccu

SEQ ID NO: 620001 - RNA, 19 nt, Artificial Sequence
  Description of Artificial Sequence: Synthetic oligonucleotide
gaaaacgguuggccagagu

SEQ ID NO: 620002 - RNA, 19 nt, Artificial Sequence
  Description of Artificial Sequence: Synthetic oligonucleotide
gacuggcaauauauuuaaa

SEQ ID NO: 620003 - RNA, 19 nt, Artificial Sequence
  Description of Artificial Sequence: Synthetic oligonucleotide
aucucguggcugaaagcaa

SEQ ID NO: 620004 - RNA, 19 nt, Artificial Sequence
  Description of Artificial Sequence: Synthetic oligonucleotide
agaucagaucaggcccugu

SEQ ID NO: 620005 - RNA, 19 nt, Artificial Sequence
  Description of Artificial Sequence: Synthetic oligonucleotide
ccuagugcucacaacugaa

SEQ ID NO: 620006 - RNA, 19 nt, Artificial Sequence
  Description of Artificial Sequence: Synthetic oligonucleotide
gguguugugucagaacuau

SEQ ID NO: 620007 - RNA, 19 nt, Artificial Sequence
  Description of Artificial Sequence: Synthetic oligonucleotide
gaccccuugcacuguugua

SEQ ID NO: 620008 - RNA, 19 nt, Artificial Sequence
  Description of Artificial Sequence: Synthetic oligonucleotide
aguccgcccagcggcacca

SEQ ID NO: 620009 - RNA, 19 nt, Artificial Sequence
  Description of Artificial Sequence: Synthetic oligonucleotide
cacuuuacccugugugccu

SEQ ID NO: 620010 - RNA, 19 nt, Artificial Sequence
  Description of Artificial Sequence: Synthetic oligonucleotide
gcccuguccuagcuuauuc

SEQ ID NO: 620011 - RNA, 19 nt, Artificial Sequence
  Description of Artificial Sequence: Synthetic oligonucleotide
cuagggugugaugcaagua

SEQ ID NO: 620012 - RNA, 19 nt, Artificial Sequence
  Description of Artificial Sequence: Synthetic oligonucleotide
gcuguccuuucaguggaac

SEQ ID NO: 620013 - RNA, 19 nt, Artificial Sequence
  Description of Artificial Sequence: Synthetic oligonucleotide
aaccaccaaucgaggcccu

SEQ ID NO: 620014 - RNA, 19 nt, Artificial Sequence
  Description of Artificial Sequence: Synthetic oligonucleotide
cugaggcacaaccaccaau

SEQ ID NO: 620015 - RNA, 19 nt, Artificial Sequence
  Description of Artificial Sequence: Synthetic oligonucleotide
uaucgccguccuccaucuc

SEQ ID NO: 620016 - RNA, 19 nt, Artificial Sequence
  Description of Artificial Sequence: Synthetic oligonucleotide
gucgcaaaauuggaauuuu

SEQ ID NO: 620017 - RNA, 19 nt, Artificial Sequence
  Description of Artificial Sequence: Synthetic oligonucleotide
ucuggcuaccaggcucaua

SEQ ID NO: 620018 - RNA, 19 nt, Artificial Sequence
  Description of Artificial Sequence: Synthetic oligonucleotide
cuugagcauuccucucugu

SEQ ID NO: 620019 - RNA, 19 nt, Artificial Sequence
  Description of Artificial Sequence: Synthetic oligonucleotide
cagaucaggcccuguccua

SEQ ID NO: 620020 - RNA, 19 nt, Artificial Sequence
  Description of Artificial Sequence: Synthetic oligonucleotide
caccaaucgaggcccuuua

SEQ ID NO: 620021 - RNA, 19 nt, Artificial Sequence
  Description of Artificial Sequence: Synthetic oligonucleotide
accuaucgccguccuccau

SEQ ID NO: 620022 - RNA, 19 nt, Artificial Sequence
  Description of Artificial Sequence: Synthetic oligonucleotide
cuauaccuaucgccguccu

SEQ ID NO: 620023 - RNA, 19 nt, Artificial Sequence
  Description of Artificial Sequence: Synthetic oligonucleotide
caaguccgcccagcggcac

SEQ ID NO: 620024 - RNA, 19 nt, Artificial Sequence
  Description of Artificial Sequence: Synthetic oligonucleotide
ggcuuuauauaugcccacu

SEQ ID NO: 620025 - RNA, 19 nt, Artificial Sequence
  Description of Artificial Sequence: Synthetic oligonucleotide
ccucacaugugaugaagcu

SEQ ID NO: 620026 - RNA, 19 nt, Artificial Sequence
  Description of Artificial Sequence: Synthetic oligonucleotide
ggugugaugcaaguauuuu

SEQ ID NO: 620027 - RNA, 19 nt, Artificial Sequence
  Description of Artificial Sequence: Synthetic oligonucleotide
ggaccccuugcacuguugu

SEQ ID NO: 620028 - RNA, 19 nt, Artificial Sequence
  Description of Artificial Sequence: Synthetic oligonucleotide
ccuaagguugauccuuugu

SEQ ID NO: 620029 - RNA, 19 nt, Artificial Sequence
  Description of Artificial Sequence: Synthetic oligonucleotide
cagaccgaugucagucuau

SEQ ID NO: 620030 - RNA, 19 nt, Artificial Sequence
  Description of Artificial Sequence: Synthetic oligonucleotide
ggaacgcauacagcagcaa

SEQ ID NO: 620031 - RNA, 19 nt, Artificial Sequence
  Description of Artificial Sequence: Synthetic oligonucleotide
ccgaugucagucuauccau

SEQ ID NO: 620032 - RNA, 19 nt, Artificial Sequence
  Description of Artificial Sequence: Synthetic oligonucleotide
uccagcugucgagcuuguu

SEQ ID NO: 620033 - RNA, 19 nt, Artificial Sequence
  Description of Artificial Sequence: Synthetic oligonucleotide
cgacugaaaaccuuuuguu

SEQ ID NO: 620034 - RNA, 19 nt, Artificial Sequence
  Description of Artificial Sequence: Synthetic oligonucleotide
gguccgagucaugggugca

SEQ ID NO: 620035 - RNA, 19 nt, Artificial Sequence
  Description of Artificial Sequence: Synthetic oligonucleotide
cgucgcuuccuaagguuga

SEQ ID NO: 620036 - RNA, 19 nt, Artificial Sequence
  Description of Artificial Sequence: Synthetic oligonucleotide
cgaaugccuuucauaccca

SEQ ID NO: 620037 - RNA, 19 nt, Artificial Sequence
  Description of Artificial Sequence: Synthetic oligonucleotide
gcugucgagcuuguuuccu

SEQ ID NO: 620038 - RNA, 19 nt, Artificial Sequence
  Description of Artificial Sequence: Synthetic oligonucleotide
gucgcuuccuaagguugau

SEQ ID NO: 620039 - RNA, 19 nt, Artificial Sequence
  Description of Artificial Sequence: Synthetic oligonucleotide
aggcccuguccuagcuuau

SEQ ID NO: 620040 - RNA, 19 nt, Artificial Sequence
  Description of Artificial Sequence: Synthetic oligonucleotide
ccagaccgaugucagucua

SEQ ID NO: 620041 - RNA, 19 nt, Artificial Sequence
  Description of Artificial Sequence: Synthetic oligonucleotide
ccccuugcacuguuguaua

SEQ ID NO: 620042 - RNA, 19 nt, Artificial Sequence
  Description of Artificial Sequence: Synthetic oligonucleotide
cgaucagaguuucgaaggu

SEQ ID NO: 620043 - RNA, 19 nt, Artificial Sequence
  Description of Artificial Sequence: Synthetic oligonucleotide
cagccgcacagcugaccua

SEQ ID NO: 620044 - RNA, 19 nt, Artificial Sequence
  Description of Artificial Sequence: Synthetic oligonucleotide
cccagaccgaugucagucu

SEQ ID NO: 620045 - RNA, 19 nt, Artificial Sequence
  Description of Artificial Sequence: Synthetic oligonucleotide
cccgucgcuuccuaagguu

SEQ ID NO: 620046 - RNA, 19 nt, Artificial Sequence
  Description of Artificial Sequence: Synthetic oligonucleotide
cgaugaccccuccaaggau

SEQ ID NO: 620047 - RNA, 19 nt, Artificial Sequence
  Description of Artificial Sequence: Synthetic oligonucleotide
ccaccaaucgaggcccuuu

SEQ ID NO: 620048 - RNA, 19 nt, Artificial Sequence
  Description of Artificial Sequence: Synthetic oligonucleotide
ggcccuguccuagcuuauu

SEQ ID NO: 620049 - RNA, 19 nt, Artificial Sequence
  Description of Artificial Sequence: Synthetic oligonucleotide
cgagucccgucgcuuccua

SEQ ID NO: 620050 - RNA, 19 nt, Artificial Sequence
  Description of Artificial Sequence: Synthetic oligonucleotide
aguguuucaaguuacguuc

SEQ ID NO: 620051 - RNA, 19 nt, Artificial Sequence
  Description of Artificial Sequence: Synthetic oligonucleotide
aaugguacugccugguugg

SEQ ID NO: 620052 - RNA, 19 nt, Artificial Sequence
  Description of Artificial Sequence: Synthetic oligonucleotide
cauuaguugaucagaaugg

SEQ ID NO: 620053 - RNA, 19 nt, Artificial Sequence
  Description of Artificial Sequence: Synthetic oligonucleotide
acucuauaggauuauuggc

SEQ ID NO: 620054 - RNA, 19 nt, Artificial Sequence
  Description of Artificial Sequence: Synthetic oligonucleotide
aaaacacuauuggagaguc

SEQ ID NO: 620055 - RNA, 19 nt, Artificial Sequence
  Description of Artificial Sequence: Synthetic oligonucleotide
uugugaauguauauaaaac

SEQ ID NO: 620056 - RNA, 19 nt, Artificial Sequence
  Description of Artificial Sequence: Synthetic oligonucleotide
uuaucuagaaggcagcaaa

SEQ ID NO: 620057 - RNA, 19 nt, Artificial Sequence
  Description of Artificial Sequence: Synthetic oligonucleotide
ugcggauacacucuauagg

SEQ ID NO: 620058 - RNA, 19 nt, Artificial Sequence
  Description of Artificial Sequence: Synthetic oligonucleotide
aaugucauaauagccccgg

SEQ ID NO: 620059 - RNA, 19 nt, Artificial Sequence
  Description of Artificial Sequence: Synthetic oligonucleotide
ugauguuacaguacauaag

SEQ ID NO: 620060 - RNA, 19 nt, Artificial Sequence
  Description of Artificial Sequence: Synthetic oligonucleotide
ucugaagguacucaaagua

SEQ ID NO: 620061 - RNA, 19 nt, Artificial Sequence
  Description of Artificial Sequence: Synthetic oligonucleotide
aaguuacguucucagaaag

SEQ ID NO: 620062 - RNA, 19 nt, Artificial Sequence
  Description of Artificial Sequence: Synthetic oligonucleotide
uguuacaguacauaaguua

SEQ ID NO: 620063 - RNA, 19 nt, Artificial Sequence
  Description of Artificial Sequence: Synthetic oligonucleotide
ucaaaguauggguuggacc

SEQ ID NO: 620064 - RNA, 19 nt, Artificial Sequence
  Description of Artificial Sequence: Synthetic oligonucleotide
cauaaguuauuuacaacug

SEQ ID NO: 620065 - RNA, 19 nt, Artificial Sequence
  Description of Artificial Sequence: Synthetic oligonucleotide
ugaucagaauggaacgagg

SEQ ID NO: 620066 - RNA, 19 nt, Artificial Sequence
  Description of Artificial Sequence: Synthetic oligonucleotide
ucgucauugacaucaacca

SEQ ID NO: 620067 - RNA, 19 nt, Artificial Sequence
  Description of Artificial Sequence: Synthetic oligonucleotide
uguaguguuucaaguuacg

SEQ ID NO: 620068 - RNA, 19 nt, Artificial Sequence
  Description of Artificial Sequence: Synthetic oligonucleotide
aggauuauuggcucuguag

SEQ ID NO: 620069 - RNA, 19 nt, Artificial Sequence
  Description of Artificial Sequence: Synthetic oligonucleotide
uacgaagucgucauugaca

SEQ ID NO: 620070 - RNA, 19 nt, Artificial Sequence
  Description of Artificial Sequence: Synthetic oligonucleotide
gaagcgaucucgcacagac

SEQ ID NO: 620071 - RNA, 19 nt, Artificial Sequence
  Description of Artificial Sequence: Synthetic oligonucleotide
uucuaugcugugcugcagg

SEQ ID NO: 620072 - RNA, 19 nt, Artificial Sequence
  Description of Artificial Sequence: Synthetic oligonucleotide
uguucugcgacuccucaag

SEQ ID NO: 620073 - RNA, 19 nt, Artificial Sequence
  Description of Artificial Sequence: Synthetic oligonucleotide
uuuacacauaacugaaagu

SEQ ID NO: 620074 - RNA, 19 nt, Artificial Sequence
  Description of Artificial Sequence: Synthetic oligonucleotide
uaacugaaagugauguuac

SEQ ID NO: 620075 - RNA, 19 nt, Artificial Sequence
  Description of Artificial Sequence: Synthetic oligonucleotide
ucaaccaugggcacguaga

SEQ ID NO: 620076 - RNA, 19 nt, Artificial Sequence
  Description of Artificial Sequence: Synthetic oligonucleotide
aagaguacgaagucgucau

SEQ ID NO: 620077 - RNA, 19 nt, Artificial Sequence
  Description of Artificial Sequence: Synthetic oligonucleotide
acuauuggagaguccuggc

SEQ ID NO: 620078 - RNA, 19 nt, Artificial Sequence
  Description of Artificial Sequence: Synthetic oligonucleotide
gaagguacucaaaguaugg

SEQ ID NO: 620079 - RNA, 19 nt, Artificial Sequence
  Description of Artificial Sequence: Synthetic oligonucleotide
auacaaaccacguggauuu

SEQ ID NO: 620080 - RNA, 19 nt, Artificial Sequence
  Description of Artificial Sequence: Synthetic oligonucleotide
uggcaaugucauaauagcc

SEQ ID NO: 620081 - RNA, 19 nt, Artificial Sequence
  Description of Artificial Sequence: Synthetic oligonucleotide
ucuauaggauuauuggcuc

SEQ ID NO: 620082 - RNA, 19 nt, Artificial Sequence
  Description of Artificial Sequence: Synthetic oligonucleotide
aauauacaaaccacgugga

SEQ ID NO: 620083 - RNA, 19 nt, Artificial Sequence
  Description of Artificial Sequence: Synthetic oligonucleotide
uuauagaccuccgagucca

SEQ ID NO: 620084 - RNA, 19 nt, Artificial Sequence
  Description of Artificial Sequence: Synthetic oligonucleotide
cuuucugaucugaagguac

SEQ ID NO: 620085 - RNA, 19 nt, Artificial Sequence
  Description of Artificial Sequence: Synthetic oligonucleotide
auaauagccccgguuacac

SEQ ID NO: 620086 - RNA, 19 nt, Artificial Sequence
  Description of Artificial Sequence: Synthetic oligonucleotide
gaaugguacugccugguug

SEQ ID NO: 620087 - RNA, 19 nt, Artificial Sequence
  Description of Artificial Sequence: Synthetic oligonucleotide
aaugucaugcuggcaagag

SEQ ID NO: 620088 - RNA, 19 nt, Artificial Sequence
  Description of Artificial Sequence: Synthetic oligonucleotide
agaacguuggaagcggcgc

SEQ ID NO: 620089 - RNA, 19 nt, Artificial Sequence
  Description of Artificial Sequence: Synthetic oligonucleotide
ugccgcaucagcaaacaug

SEQ ID NO: 620090 - RNA, 19 nt, Artificial Sequence
  Description of Artificial Sequence: Synthetic oligonucleotide
gacuagaacguuggaagcg

SEQ ID NO: 620091 - RNA, 19 nt, Artificial Sequence
  Description of Artificial Sequence: Synthetic oligonucleotide
uuagucuauuuuccauuag

SEQ ID NO: 620092 - RNA, 19 nt, Artificial Sequence
  Description of Artificial Sequence: Synthetic oligonucleotide
aauggaacgaggaauuaaa

SEQ ID NO: 620093 - RNA, 19 nt, Artificial Sequence
  Description of Artificial Sequence: Synthetic oligonucleotide
uugaucagaauggaacgag

SEQ ID NO: 620094 - RNA, 19 nt, Artificial Sequence
  Description of Artificial Sequence: Synthetic oligonucleotide
uugcggauacacucuauag

SEQ ID NO: 620095 - RNA, 19 nt, Artificial Sequence
  Description of Artificial Sequence: Synthetic oligonucleotide
ucaagugcccuguuggcug

SEQ ID NO: 620096 - RNA, 19 nt, Artificial Sequence
  Description of Artificial Sequence: Synthetic oligonucleotide
aauuaucuagaaggcagca

SEQ ID NO: 620097 - RNA, 19 nt, Artificial Sequence
  Description of Artificial Sequence: Synthetic oligonucleotide
ugcggagugaugcagcaga

SEQ ID NO: 620098 - RNA, 19 nt, Artificial Sequence
  Description of Artificial Sequence: Synthetic oligonucleotide
uagaacguuggaagcggcg

SEQ ID NO: 620099 - RNA, 19 nt, Artificial Sequence
  Description of Artificial Sequence: Synthetic oligonucleotide
gacgccuuagucuauuuuc

SEQ ID NO: 620100 - RNA, 19 nt, Artificial Sequence
  Description of Artificial Sequence: Synthetic oligonucleotide
cauacggucauacuuguca

SEQ ID NO: 620101 - RNA, 19 nt, Artificial Sequence
  Description of Artificial Sequence: Synthetic oligonucleotide
accguuaggggccuugggg

SEQ ID NO: 620102 - RNA, 19 nt, Artificial Sequence
  Description of Artificial Sequence: Synthetic oligonucleotide
ugacuagaacguuggaagc

SEQ ID NO: 620103 - RNA, 19 nt, Artificial Sequence
  Description of Artificial Sequence: Synthetic oligonucleotide
uggcaccucauuuacacac

SEQ ID NO: 620104 - RNA, 19 nt, Artificial Sequence
  Description of Artificial Sequence: Synthetic oligonucleotide
ucauaauagccccgguuac

SEQ ID NO: 620105 - RNA, 19 nt, Artificial Sequence
  Description of Artificial Sequence: Synthetic oligonucleotide
acuagaacguuggaagcgg

SEQ ID NO: 620106 - RNA, 19 nt, Artificial Sequence
  Description of Artificial Sequence: Synthetic oligonucleotide
ugcacugaaugguacugcc

SEQ ID NO: 620107 - RNA, 19 nt, Artificial Sequence
  Description of Artificial Sequence: Synthetic oligonucleotide
acgaagucgucauugacau

SEQ ID NO: 620108 - RNA, 19 nt, Artificial Sequence
  Description of Artificial Sequence: Synthetic oligonucleotide
ccauuaguugaucagaaug

SEQ ID NO: 620109 - RNA, 19 nt, Artificial Sequence
  Description of Artificial Sequence: Synthetic oligonucleotide
uguacagguuugcggauac

SEQ ID NO: 620110 - RNA, 19 nt, Artificial Sequence
  Description of Artificial Sequence: Synthetic oligonucleotide
aacugaaagugauguuaca

SEQ ID NO: 620111 - RNA, 19 nt, Artificial Sequence
  Description of Artificial Sequence: Synthetic oligonucleotide
uuugcggauacacucuaua

SEQ ID NO: 620112 - RNA, 19 nt, Artificial Sequence
  Description of Artificial Sequence: Synthetic oligonucleotide
uuacaacugugcaguaaug

SEQ ID NO: 620113 - RNA, 19 nt, Artificial Sequence
  Description of Artificial Sequence: Synthetic oligonucleotide
gaguacgaagucgucauug

SEQ ID NO: 620114 - RNA, 19 nt, Artificial Sequence
  Description of Artificial Sequence: Synthetic oligonucleotide
cugcugacuagaacguugg

SEQ ID NO: 620115 - RNA, 19 nt, Artificial Sequence
  Description of Artificial Sequence: Synthetic oligonucleotide
auuggcucuguaguguuuc

SEQ ID NO: 620116 - RNA, 19 nt, Artificial Sequence
  Description of Artificial Sequence: Synthetic oligonucleotide
ucugaucugaagguacuca

SEQ ID NO: 620117 - RNA, 19 nt, Artificial Sequence
  Description of Artificial Sequence: Synthetic oligonucleotide
gguuacacgccucaugcag

SEQ ID NO: 620118 - RNA, 19 nt, Artificial Sequence
  Description of Artificial Sequence: Synthetic oligonucleotide
agcgaucucgcacagacuu

SEQ ID NO: 620119 - RNA, 19 nt, Artificial Sequence
  Description of Artificial Sequence: Synthetic oligonucleotide
acgguuccuggucaugcgc

SEQ ID NO: 620120 - RNA, 19 nt, Artificial Sequence
  Description of Artificial Sequence: Synthetic oligonucleotide
cacuauuggagaguccugg

SEQ ID NO: 620121 - RNA, 19 nt, Artificial Sequence
  Description of Artificial Sequence: Synthetic oligonucleotide
guuauguucugcuugcucu

SEQ ID NO: 620122 - RNA, 19 nt, Artificial Sequence
  Description of Artificial Sequence: Synthetic oligonucleotide
aaacacuauuggagagucc

SEQ ID NO: 620123 - RNA, 19 nt, Artificial Sequence
  Description of Artificial Sequence: Synthetic oligonucleotide
ugcagccaagagaugaacu

SEQ ID NO: 620124 - RNA, 19 nt, Artificial Sequence
  Description of Artificial Sequence: Synthetic oligonucleotide
cuugccggcaccagugucc

SEQ ID NO: 620125 - RNA, 19 nt, Artificial Sequence
  Description of Artificial Sequence: Synthetic oligonucleotide
ugucauaauagccccgguu

SEQ ID NO: 620126 - RNA, 19 nt, Artificial Sequence
  Description of Artificial Sequence: Synthetic oligonucleotide
ucuaugcugugcugcaggc

SEQ ID NO: 620127 - RNA, 19 nt, Artificial Sequence
  Description of Artificial Sequence: Synthetic oligonucleotide
uggcaagaguacgaagucg

SEQ ID NO: 620128 - RNA, 19 nt, Artificial Sequence
  Description of Artificial Sequence: Synthetic oligonucleotide
gacaucugcgcccucgcug

SEQ ID NO: 620129 - RNA, 19 nt, Artificial Sequence
  Description of Artificial Sequence: Synthetic oligonucleotide
aaugguccuggcugcccgg

SEQ ID NO: 620130 - RNA, 19 nt, Artificial Sequence
  Description of Artificial Sequence: Synthetic oligonucleotide
cagcuuaccccgcacagcc

SEQ ID NO: 620131 - RNA, 19 nt, Artificial Sequence
  Description of Artificial Sequence: Synthetic oligonucleotide
acgccuuagucuauuuucc

SEQ ID NO: 620132 - RNA, 19 nt, Artificial Sequence
  Description of Artificial Sequence: Synthetic oligonucleotide
ucucgcacagacuuguuuu

SEQ ID NO: 620133 - RNA, 19 nt, Artificial Sequence
  Description of Artificial Sequence: Synthetic oligonucleotide
agaggcacggcccuuggcu

SEQ ID NO: 620134 - RNA, 19 nt, Artificial Sequence
  Description of Artificial Sequence: Synthetic oligonucleotide
gucauaauagccccgguua

SEQ ID NO: 620135 - RNA, 19 nt, Artificial Sequence
  Description of Artificial Sequence: Synthetic oligonucleotide
uucauacggucauacuugu

SEQ ID NO: 620136 - RNA, 19 nt, Artificial Sequence
  Description of Artificial Sequence: Synthetic oligonucleotide
uuacacgccucaugcagug

SEQ ID NO: 620137 - RNA, 19 nt, Artificial Sequence
  Description of Artificial Sequence: Synthetic oligonucleotide
agacagagcuaccuugucu

SEQ ID NO: 620138 - RNA, 19 nt, Artificial Sequence
  Description of Artificial Sequence: Synthetic oligonucleotide
cacugcuuaugcgaggugg

SEQ ID NO: 620139 - RNA, 19 nt, Artificial Sequence
  Description of Artificial Sequence: Synthetic oligonucleotide
guauggguuggaccugucg

SEQ ID NO: 620140 - RNA, 19 nt, Artificial Sequence
  Description of Artificial Sequence: Synthetic oligonucleotide
uaguguccguuguuggcgg

SEQ ID NO: 620141 - RNA, 19 nt, Artificial Sequence
  Description of Artificial Sequence: Synthetic oligonucleotide
ucugcgcccucgcugauga

SEQ ID NO: 620142 - RNA, 19 nt, Artificial Sequence
  Description of Artificial Sequence: Synthetic oligonucleotide
cucuauaggauuauuggcu

SEQ ID NO: 620143 - RNA, 19 nt, Artificial Sequence
  Description of Artificial Sequence: Synthetic oligonucleotide
uaauagccccgguuacacg

SEQ ID NO: 620144 - RNA, 19 nt, Artificial Sequence
  Description of Artificial Sequence: Synthetic oligonucleotide
caaaccacguggauuugac

SEQ ID NO: 620145 - RNA, 19 nt, Artificial Sequence
  Description of Artificial Sequence: Synthetic oligonucleotide
gaugcagcagaggaucuug

SEQ ID NO: 620146 - RNA, 19 nt, Artificial Sequence
  Description of Artificial Sequence: Synthetic oligonucleotide
auagcgggacagcacuuuc

SEQ ID NO: 620147 - RNA, 19 nt, Artificial Sequence
  Description of Artificial Sequence: Synthetic oligonucleotide
ugcaugcacugaaugguac

SEQ ID NO: 620148 - RNA, 19 nt, Artificial Sequence
  Description of Artificial Sequence: Synthetic oligonucleotide
acacucuauaggauuauug

SEQ ID NO: 620149 - RNA, 19 nt, Artificial Sequence
  Description of Artificial Sequence: Synthetic oligonucleotide
caagggcgugucaucaucc

SEQ ID NO: 620150 - RNA, 19 nt, Artificial Sequence
  Description of Artificial Sequence: Synthetic oligonucleotide
ugucuucauacggucauac

SEQ ID NO: 620151 - RNA, 19 nt, Artificial Sequence
  Description of Artificial Sequence: Synthetic oligonucleotide
augcacugaaugguacugc

SEQ ID NO: 620152 - RNA, 19 nt, Artificial Sequence
  Description of Artificial Sequence: Synthetic oligonucleotide
gcuuaugcgagguggacgc

SEQ ID NO: 620153 - RNA, 19 nt, Artificial Sequence
  Description of Artificial Sequence: Synthetic oligonucleotide
acggucauacuugucaucu

SEQ ID NO: 620154 - RNA, 19 nt, Artificial Sequence
  Description of Artificial Sequence: Synthetic oligonucleotide
guggauuugacuccauuaa

SEQ ID NO: 620155 - RNA, 19 nt, Artificial Sequence
  Description of Artificial Sequence: Synthetic oligonucleotide
aucaaccaugggcacguag

SEQ ID NO: 620156 - RNA, 19 nt, Artificial Sequence
  Description of Artificial Sequence: Synthetic oligonucleotide
agcagccggacccuugccg

SEQ ID NO: 620157 - RNA, 19 nt, Artificial Sequence
  Description of Artificial Sequence: Synthetic oligonucleotide
uggaugaccucccgagucu

SEQ ID NO: 620158 - RNA, 19 nt, Artificial Sequence
  Description of Artificial Sequence: Synthetic oligonucleotide
auauacaaaccacguggau

SEQ ID NO: 620159 - RNA, 19 nt, Artificial Sequence
  Description of Artificial Sequence: Synthetic oligonucleotide
gcggauacacucuauagga

SEQ ID NO: 620160 - RNA, 19 nt, Artificial Sequence
  Description of Artificial Sequence: Synthetic oligonucleotide
cuagaacguuggaagcggc

SEQ ID NO: 620161 - RNA, 19 nt, Artificial Sequence
  Description of Artificial Sequence: Synthetic oligonucleotide
gacucaucggcagcacugg

SEQ ID NO: 620162 - RNA, 19 nt, Artificial Sequence
  Description of Artificial Sequence: Synthetic oligonucleotide
aguguccaagccugucccg

SEQ ID NO: 620163 - RNA, 19 nt, Artificial Sequence
  Description of Artificial Sequence: Synthetic oligonucleotide
cuuagucuauuuuccauua

SEQ ID NO: 620164 - RNA, 19 nt, Artificial Sequence
  Description of Artificial Sequence: Synthetic oligonucleotide
ggaucucuugcucacagga

SEQ ID NO: 620165 - RNA, 19 nt, Artificial Sequence
  Description of Artificial Sequence: Synthetic oligonucleotide
aacugugcaguaauguguu

SEQ ID NO: 620166 - RNA, 19 nt, Artificial Sequence
  Description of Artificial Sequence: Synthetic oligonucleotide
auagaccuccgaguccagc

SEQ ID NO: 620167 - RNA, 19 nt, Artificial Sequence
  Description of Artificial Sequence: Synthetic oligonucleotide
auacggucauacuugucau

SEQ ID NO: 620168 - RNA, 19 nt, Artificial Sequence
  Description of Artificial Sequence: Synthetic oligonucleotide
uagcgggacagcacuuucc

SEQ ID NO: 620169 - RNA, 19 nt, Artificial Sequence
  Description of Artificial Sequence: Synthetic oligonucleotide
aagggcgugucaucaucca

SEQ ID NO: 620170 - RNA, 19 nt, Artificial Sequence
  Description of Artificial Sequence: Synthetic oligonucleotide
caugcacugaaugguacug

SEQ ID NO: 620171 - RNA, 19 nt, Artificial Sequence
  Description of Artificial Sequence: Synthetic oligonucleotide
ugaacucgaaggaucucuu

SEQ ID NO: 620172 - RNA, 19 nt, Artificial Sequence
  Description of Artificial Sequence: Synthetic oligonucleotide
ucccacuuguuggaugcgg

SEQ ID NO: 620173 - RNA, 19 nt, Artificial Sequence
  Description of Artificial Sequence: Synthetic oligonucleotide
agucuauuuuccauuaguu

SEQ ID NO: 620174 - RNA, 19 nt, Artificial Sequence
  Description of Artificial Sequence: Synthetic oligonucleotide
ucaagcuuuauggcaucca

SEQ ID NO: 620175 - RNA, 19 nt, Artificial Sequence
  Description of Artificial Sequence: Synthetic oligonucleotide
ccaagagaugaacugucgg

SEQ ID NO: 620176 - RNA, 19 nt, Artificial Sequence
  Description of Artificial Sequence: Synthetic oligonucleotide
aagaaaacccagagggcau

SEQ ID NO: 620177 - RNA, 19 nt, Artificial Sequence
  Description of Artificial Sequence: Synthetic oligonucleotide
cugaagcaggagacgagug

SEQ ID NO: 620178 - RNA, 19 nt, Artificial Sequence
  Description of Artificial Sequence: Synthetic oligonucleotide
uuguuggaugcggugcucc

SEQ ID NO: 620179 - RNA, 19 nt, Artificial Sequence
  Description of Artificial Sequence: Synthetic oligonucleotide
uuucuaugcugugcugcag

SEQ ID NO: 620180 - RNA, 19 nt, Artificial Sequence
  Description of Artificial Sequence: Synthetic oligonucleotide
ugcaggcgcagcuuacccc

SEQ ID NO: 620181 - RNA, 19 nt, Artificial Sequence
  Description of Artificial Sequence: Synthetic oligonucleotide
acacgccucaugcagugca

SEQ ID NO: 620182 - RNA, 19 nt, Artificial Sequence
  Description of Artificial Sequence: Synthetic oligonucleotide
cuuucuaugcugugcugca

SEQ ID NO: 620183 - RNA, 19 nt, Artificial Sequence
  Description of Artificial Sequence: Synthetic oligonucleotide
guuggaagcggcgcuugcg

SEQ ID NO: 620184 - RNA, 19 nt, Artificial Sequence
  Description of Artificial Sequence: Synthetic oligonucleotide
uuguuggcggcaucaugca

SEQ ID NO: 620185 - RNA, 19 nt, Artificial Sequence
  Description of Artificial Sequence: Synthetic oligonucleotide
acaguacauaaguuauuua

SEQ ID NO: 620186 - RNA, 19 nt, Artificial Sequence
  Description of Artificial Sequence: Synthetic oligonucleotide
cuggcaagaguacgaaguc

SEQ ID NO: 620187 - RNA, 19 nt, Artificial Sequence
  Description of Artificial Sequence: Synthetic oligonucleotide
uccguuguuggcggcauca

SEQ ID NO: 620188 - RNA, 19 nt, Artificial Sequence
  Description of Artificial Sequence: Synthetic oligonucleotide
ggauuauuggcucuguagu

SEQ ID NO: 620189 - RNA, 19 nt, Artificial Sequence
  Description of Artificial Sequence: Synthetic oligonucleotide
agcggcuugccauccaaga

SEQ ID NO: 620190 - RNA, 19 nt, Artificial Sequence
  Description of Artificial Sequence: Synthetic oligonucleotide
caaguuacguucucagaaa

SEQ ID NO: 620191 - RNA, 19 nt, Artificial Sequence
  Description of Artificial Sequence: Synthetic oligonucleotide
agguaggaccccguguagg

SEQ ID NO: 620192 - RNA, 19 nt, Artificial Sequence
  Description of Artificial Sequence: Synthetic oligonucleotide
guugaucagaauggaacga

SEQ ID NO: 620193 - RNA, 19 nt, Artificial Sequence
  Description of Artificial Sequence: Synthetic oligonucleotide
agguggacgccuuagucua

SEQ ID NO: 620194 - RNA, 19 nt, Artificial Sequence
  Description of Artificial Sequence: Synthetic oligonucleotide
uuaugcgagguggacgccu

SEQ ID NO: 620195 - RNA, 19 nt, Artificial Sequence
  Description of Artificial Sequence: Synthetic oligonucleotide
auuaucuagaaggcagcaa

SEQ ID NO: 620196 - RNA, 19 nt, Artificial Sequence
  Description of Artificial Sequence: Synthetic oligonucleotide
ggugccugcggagugaugc

SEQ ID NO: 620197 - RNA, 19 nt, Artificial Sequence
  Description of Artificial Sequence: Synthetic oligonucleotide
caagugcccuguuggcugg

SEQ ID NO: 620198 - RNA, 19 nt, Artificial Sequence
  Description of Artificial Sequence: Synthetic oligonucleotide
cuugucuccuuggcaaagc

SEQ ID NO: 620199 - RNA, 19 nt, Artificial Sequence
  Description of Artificial Sequence: Synthetic oligonucleotide
ccuauguggcccuuguuug

SEQ ID NO: 620200 - RNA, 19 nt, Artificial Sequence
  Description of Artificial Sequence: Synthetic oligonucleotide
caagaguacgaagucguca

SEQ ID NO: 620201 - RNA, 19 nt, Artificial Sequence
  Description of Artificial Sequence: Synthetic oligonucleotide
uauagaccuccgaguccag

SEQ ID NO: 620202 - RNA, 19 nt, Artificial Sequence
  Description of Artificial Sequence: Synthetic oligonucleotide
ccgguuacacgccucaugc

SEQ ID NO: 620203 - RNA, 19 nt, Artificial Sequence
  Description of Artificial Sequence: Synthetic oligonucleotide
agggcgugucaucauccag

SEQ ID NO: 620204 - RNA, 19 nt, Artificial Sequence
  Description of Artificial Sequence: Synthetic oligonucleotide
uuccucugaaugucaugcu

SEQ ID NO: 620205 - RNA, 19 nt, Artificial Sequence
  Description of Artificial Sequence: Synthetic oligonucleotide
ggcauuggauccuucucug

SEQ ID NO: 620206 - RNA, 19 nt, Artificial Sequence
  Description of Artificial Sequence: Synthetic oligonucleotide
caugcaagggcgugucauc

SEQ ID NO: 620207 - RNA, 19 nt, Artificial Sequence
  Description of Artificial Sequence: Synthetic oligonucleotide
guguccaagccugucccgg

SEQ ID NO: 620208 - RNA, 19 nt, Artificial Sequence
  Description of Artificial Sequence: Synthetic oligonucleotide
auagccccgguuacacgcc

SEQ ID NO: 620209 - RNA, 19 nt, Artificial Sequence
  Description of Artificial Sequence: Synthetic oligonucleotide
aggcccuuaguguucacuu

SEQ ID NO: 620210 - RNA, 19 nt, Artificial Sequence
  Description of Artificial Sequence: Synthetic oligonucleotide
cugcccggcagugaacucg

SEQ ID NO: 620211 - RNA, 19 nt, Artificial Sequence
  Description of Artificial Sequence: Synthetic oligonucleotide
ggauuugacuccauuaaaa

SEQ ID NO: 620212 - RNA, 19 nt, Artificial Sequence
  Description of Artificial Sequence: Synthetic oligonucleotide
uguuggcggcaucaugcaa

SEQ ID NO: 620213 - RNA, 19 nt, Artificial Sequence
  Description of Artificial Sequence: Synthetic oligonucleotide
ugcugccgcaucagcaaac

SEQ ID NO: 620214 - RNA, 19 nt, Artificial Sequence
  Description of Artificial Sequence: Synthetic oligonucleotide
gucccggggaccauagcgg

SEQ ID NO: 620215 - RNA, 19 nt, Artificial Sequence
  Description of Artificial Sequence: Synthetic oligonucleotide
uacggucauacuugucauc

SEQ ID NO: 620216 - RNA, 19 nt, Artificial Sequence
  Description of Artificial Sequence: Synthetic oligonucleotide
caucaagcuuuauggcauc

SEQ ID NO: 620217 - RNA, 19 nt, Artificial Sequence
  Description of Artificial Sequence: Synthetic oligonucleotide
ucacugcuuaugcgaggug

SEQ ID NO: 620218 - RNA, 19 nt, Artificial Sequence
  Description of Artificial Sequence: Synthetic oligonucleotide
cauugagggcugcagccuc

SEQ ID NO: 620219 - RNA, 19 nt, Artificial Sequence
  Description of Artificial Sequence: Synthetic oligonucleotide
aucucgcacagacuuguuu

SEQ ID NO: 620220 - RNA, 19 nt, Artificial Sequence
  Description of Artificial Sequence: Synthetic oligonucleotide
ugcugacuagaacguugga

SEQ ID NO: 620221 - RNA, 19 nt, Artificial Sequence
  Description of Artificial Sequence: Synthetic oligonucleotide
uggguuggaccugucgcug

SEQ ID NO: 620222 - RNA, 19 nt, Artificial Sequence
  Description of Artificial Sequence: Synthetic oligonucleotide
cugcaggcgcagcuuaccc

SEQ ID NO: 620223 - RNA, 19 nt, Artificial Sequence
  Description of Artificial Sequence: Synthetic oligonucleotide
gguuauguucugcuugcuc

SEQ ID NO: 620224 - RNA, 19 nt, Artificial Sequence
  Description of Artificial Sequence: Synthetic oligonucleotide
ucgcacagacuuguuuuca

SEQ ID NO: 620225 - RNA, 19 nt, Artificial Sequence
  Description of Artificial Sequence: Synthetic oligonucleotide
ccucccacuuguuggaugc

SEQ ID NO: 620226 - RNA, 19 nt, Artificial Sequence
  Description of Artificial Sequence: Synthetic oligonucleotide
auaggauuauuggcucugu

SEQ ID NO: 620227 - RNA, 19 nt, Artificial Sequence
  Description of Artificial Sequence: Synthetic oligonucleotide
ucugcaccagcggcuaaca

SEQ ID NO: 620228 - RNA, 19 nt, Artificial Sequence
  Description of Artificial Sequence: Synthetic oligonucleotide
auggcaccucauuuacaca

SEQ ID NO: 620229 - RNA, 19 nt, Artificial Sequence
  Description of Artificial Sequence: Synthetic oligonucleotide
ggcgugucaucauccaggc

SEQ ID NO: 620230 - RNA, 19 nt, Artificial Sequence
  Description of Artificial Sequence: Synthetic oligonucleotide
gguacugccugguuggcaa

SEQ ID NO: 620231 - RNA, 19 nt, Artificial Sequence
  Description of Artificial Sequence: Synthetic oligonucleotide
cugccacuccauucuuugc

SEQ ID NO: 620232 - RNA, 19 nt, Artificial Sequence
  Description of Artificial Sequence: Synthetic oligonucleotide
augucauaauagccccggu

SEQ ID NO: 620233 - RNA, 19 nt, Artificial Sequence
  Description of Artificial Sequence: Synthetic oligonucleotide
gaaugucaugcuggcaaga

SEQ ID NO: 620234 - RNA, 19 nt, Artificial Sequence
  Description of Artificial Sequence: Synthetic oligonucleotide
cauaauagccccgguuaca

SEQ ID NO: 620235 - RNA, 19 nt, Artificial Sequence
  Description of Artificial Sequence: Synthetic oligonucleotide
uuggggacuucagcugaag

SEQ ID NO: 620236 - RNA, 19 nt, Artificial Sequence
  Description of Artificial Sequence: Synthetic oligonucleotide
ucuagagguuggggcaggc

SEQ ID NO: 620237 - RNA, 19 nt, Artificial Sequence
  Description of Artificial Sequence: Synthetic oligonucleotide
uaugcgagguggacgccuu

SEQ ID NO: 620238 - RNA, 19 nt, Artificial Sequence
  Description of Artificial Sequence: Synthetic oligonucleotide
gaggcacggcccuuggcuc

SEQ ID NO: 620239 - RNA, 19 nt, Artificial Sequence
  Description of Artificial Sequence: Synthetic oligonucleotide
cacucuguucugcgacucc

SEQ ID NO: 620240 - RNA, 19 nt, Artificial Sequence
  Description of Artificial Sequence: Synthetic oligonucleotide
agguuugcggauacacucu

SEQ ID NO: 620241 - RNA, 19 nt, Artificial Sequence
  Description of Artificial Sequence: Synthetic oligonucleotide
ugccugcggagugaugcag

SEQ ID NO: 620242 - RNA, 19 nt, Artificial Sequence
  Description of Artificial Sequence: Synthetic oligonucleotide
auggaacgaggaauuaaaa

SEQ ID NO: 620243 - RNA, 19 nt, Artificial Sequence
  Description of Artificial Sequence: Synthetic oligonucleotide
gcacguagaaggauggcac

SEQ ID NO: 620244 - RNA, 19 nt, Artificial Sequence
  Description of Artificial Sequence: Synthetic oligonucleotide
uacacucuauaggauuauu

SEQ ID NO: 620245 - RNA, 19 nt, Artificial Sequence
  Description of Artificial Sequence: Synthetic oligonucleotide
ucaugcgcugaggaacuuc

SEQ ID NO: 620246 - RNA, 19 nt, Artificial Sequence
  Description of Artificial Sequence: Synthetic oligonucleotide
cugggcgaccuauguggcc

SEQ ID NO: 620247 - RNA, 19 nt, Artificial Sequence
  Description of Artificial Sequence: Synthetic oligonucleotide
cacgccucaugcagugcag

SEQ ID NO: 620248 - RNA, 19 nt, Artificial Sequence
  Description of Artificial Sequence: Synthetic oligonucleotide
cugccuccaccuuguagug

SEQ ID NO: 620249 - RNA, 19 nt, Artificial Sequence
  Description of Artificial Sequence: Synthetic oligonucleotide
agacgaguggccaggugca

SEQ ID NO: 620250 - RNA, 19 nt, Artificial Sequence
  Description of Artificial Sequence: Synthetic oligonucleotide
cuauaggauuauuggcucu

SEQ ID NO: 620251 - RNA, 19 nt, Artificial Sequence
  Description of Artificial Sequence: Synthetic oligonucleotide
caccguuaggggccuuggg

SEQ ID NO: 620252 - RNA, 19 nt, Artificial Sequence
  Description of Artificial Sequence: Synthetic oligonucleotide
uccaccguuaggggccuug

SEQ ID NO: 620253 - RNA, 19 nt, Artificial Sequence
  Description of Artificial Sequence: Synthetic oligonucleotide
gcggcuugccauccaagag

SEQ ID NO: 620254 - RNA, 19 nt, Artificial Sequence
  Description of Artificial Sequence: Synthetic oligonucleotide
cuauuggagaguccuggcu

SEQ ID NO: 620255 - RNA, 19 nt, Artificial Sequence
  Description of Artificial Sequence: Synthetic oligonucleotide
gugguagggcucaauggca

SEQ ID NO: 620256 - RNA, 19 nt, Artificial Sequence
  Description of Artificial Sequence: Synthetic oligonucleotide
agaguacgaagucgucauu

SEQ ID NO: 620257 - RNA, 19 nt, Artificial Sequence
  Description of Artificial Sequence: Synthetic oligonucleotide
cugucgggcauugaagcga

SEQ ID NO: 620258 - RNA, 19 nt, Artificial Sequence
  Description of Artificial Sequence: Synthetic oligonucleotide
ggcacguagaaggauggca

SEQ ID NO: 620259 - RNA, 19 nt, Artificial Sequence
  Description of Artificial Sequence: Synthetic oligonucleotide
ugaagcgaucucgcacaga

SEQ ID NO: 620260 - RNA, 19 nt, Artificial Sequence
  Description of Artificial Sequence: Synthetic oligonucleotide
gucaugcuggcaagaguac

SEQ ID NO: 620261 - RNA, 19 nt, Artificial Sequence
  Description of Artificial Sequence: Synthetic oligonucleotide
uugccggcaccagugucca

SEQ ID NO: 620262 - RNA, 19 nt, Artificial Sequence
  Description of Artificial Sequence: Synthetic oligonucleotide
caaccaugggcacguagaa

SEQ ID NO: 620263 - RNA, 19 nt, Artificial Sequence
  Description of Artificial Sequence: Synthetic oligonucleotide
cuuaugcgagguggacgcc

SEQ ID NO: 620264 - RNA, 19 nt, Artificial Sequence
  Description of Artificial Sequence: Synthetic oligonucleotide
gcaggagacgaguggccag

SEQ ID NO: 620265 - RNA, 19 nt, Artificial Sequence
  Description of Artificial Sequence: Synthetic oligonucleotide
gucgcugugguagggcuca

SEQ ID NO: 620266 - RNA, 19 nt, Artificial Sequence
  Description of Artificial Sequence: Synthetic oligonucleotide
cugcuuaugcgagguggac

SEQ ID NO: 620267 - RNA, 19 nt, Artificial Sequence
  Description of Artificial Sequence: Synthetic oligonucleotide
gcuggcaagaguacgaagu

SEQ ID NO: 620268 - RNA, 19 nt, Artificial Sequence
  Description of Artificial Sequence: Synthetic oligonucleotide
ugaugcagcagaggaucuu

SEQ ID NO: 620269 - RNA, 19 nt, Artificial Sequence
  Description of Artificial Sequence: Synthetic oligonucleotide
guaggaccccguguaggug

SEQ ID NO: 620270 - RNA, 19 nt, Artificial Sequence
  Description of Artificial Sequence: Synthetic oligonucleotide
uagccccgguuacacgccu

SEQ ID NO: 620271 - RNA, 19 nt, Artificial Sequence
  Description of Artificial Sequence: Synthetic oligonucleotide
ccccguguaggugacauac

SEQ ID NO: 620272 - RNA, 19 nt, Artificial Sequence
  Description of Artificial Sequence: Synthetic oligonucleotide
gacgaguggccaggugcag

SEQ ID NO: 620273 - RNA, 19 nt, Artificial Sequence
  Description of Artificial Sequence: Synthetic oligonucleotide
uacacgccucaugcagugc

SEQ ID NO: 620274 - RNA, 19 nt, Artificial Sequence
  Description of Artificial Sequence: Synthetic oligonucleotide
accugucgcugugguaggg

SEQ ID NO: 620275 - RNA, 19 nt, Artificial Sequence
  Description of Artificial Sequence: Synthetic oligonucleotide
ggcaagaguacgaagucgu

SEQ ID NO: 620276 - RNA, 19 nt, Artificial Sequence
  Description of Artificial Sequence: Synthetic oligonucleotide
gcaagggcgugucaucauc

SEQ ID NO: 620277 - RNA, 19 nt, Artificial Sequence
  Description of Artificial Sequence: Synthetic oligonucleotide
uguccguuguuggcggcau

SEQ ID NO: 620278 - RNA, 19 nt, Artificial Sequence
  Description of Artificial Sequence: Synthetic oligonucleotide
gccgcaucagcaaacaugu

SEQ ID NO: 620279 - RNA, 19 nt, Artificial Sequence
  Description of Artificial Sequence: Synthetic oligonucleotide
uggacgccuuagucuauuu

SEQ ID NO: 620280 - RNA, 19 nt, Artificial Sequence
  Description of Artificial Sequence: Synthetic oligonucleotide
uuaggggccuuggggacuu

SEQ ID NO: 620281 - RNA, 19 nt, Artificial Sequence
  Description of Artificial Sequence: Synthetic oligonucleotide
acguuggaagcggcgcuug

SEQ ID NO: 620282 - RNA, 19 nt, Artificial Sequence
  Description of Artificial Sequence: Synthetic oligonucleotide
acgaguggccaggugcagu

SEQ ID NO: 620283 - RNA, 19 nt, Artificial Sequence
  Description of Artificial Sequence: Synthetic oligonucleotide
cagaggcacggcccuuggc

SEQ ID NO: 620284 - RNA, 19 nt, Artificial Sequence
  Description of Artificial Sequence: Synthetic oligonucleotide
cucccacuuguuggaugcg

SEQ ID NO: 620285 - RNA, 19 nt, Artificial Sequence
  Description of Artificial Sequence: Synthetic oligonucleotide
gcgaucacagggaugugca

SEQ ID NO: 620286 - RNA, 19 nt, Artificial Sequence
  Description of Artificial Sequence: Synthetic oligonucleotide
ggaccauagcgggacagca

SEQ ID NO: 620287 - RNA, 19 nt, Artificial Sequence
  Description of Artificial Sequence: Synthetic oligonucleotide
gcacugggcgaccuaugug

SEQ ID NO: 620288 - RNA, 19 nt, Artificial Sequence
  Description of Artificial Sequence: Synthetic oligonucleotide
gguaggaccccguguaggu

SEQ ID NO: 620289 - RNA, 19 nt, Artificial Sequence
  Description of Artificial Sequence: Synthetic oligonucleotide
cagcacugggcgaccuaug

SEQ ID NO: 620290 - RNA, 19 nt, Artificial Sequence
  Description of Artificial Sequence: Synthetic oligonucleotide
cagccggacccuugccggc

SEQ ID NO: 620291 - RNA, 19 nt, Artificial Sequence
  Description of Artificial Sequence: Synthetic oligonucleotide
gguuugcggauacacucua

SEQ ID NO: 620292 - RNA, 19 nt, Artificial Sequence
  Description of Artificial Sequence: Synthetic oligonucleotide
ggaugaccucccgagucug

SEQ ID NO: 620293 - RNA, 19 nt, Artificial Sequence
  Description of Artificial Sequence: Synthetic oligonucleotide
ccguuaggggccuugggga

SEQ ID NO: 620294 - RNA, 19 nt, Artificial Sequence
  Description of Artificial Sequence: Synthetic oligonucleotide
ggcccuuaguguucacuuc

SEQ ID NO: 620295 - RNA, 19 nt, Artificial Sequence
  Description of Artificial Sequence: Synthetic oligonucleotide
ggcagcaaaaguacauugu

SEQ ID NO: 620296 - RNA, 19 nt, Artificial Sequence
  Description of Artificial Sequence: Synthetic oligonucleotide
cccggcagugaacucgaag

SEQ ID NO: 620297 - RNA, 19 nt, Artificial Sequence
  Description of Artificial Sequence: Synthetic oligonucleotide
ccugucccggggaccauag

SEQ ID NO: 620298 - RNA, 19 nt, Artificial Sequence
  Description of Artificial Sequence: Synthetic oligonucleotide
acgccucaugcagugcagu

SEQ ID NO: 620299 - RNA, 19 nt, Artificial Sequence
  Description of Artificial Sequence: Synthetic oligonucleotide
aucugcgcccucgcugaug

SEQ ID NO: 620300 - RNA, 19 nt, Artificial Sequence
  Description of Artificial Sequence: Synthetic oligonucleotide
gcccucgcugaugagcucc

SEQ ID NO: 620301 - RNA, 19 nt, Artificial Sequence
  Description of Artificial Sequence: Synthetic oligonucleotide
gugccugcggagugaugca

SEQ ID NO: 620302 - RNA, 19 nt, Artificial Sequence
  Description of Artificial Sequence: Synthetic oligonucleotide
ucggcagcacugggcgacc

SEQ ID NO: 620303 - RNA, 19 nt, Artificial Sequence
  Description of Artificial Sequence: Synthetic oligonucleotide
cguguaggugacauacuca

SEQ ID NO: 620304 - RNA, 19 nt, Artificial Sequence
  Description of Artificial Sequence: Synthetic oligonucleotide
cugucccggggaccauagc

SEQ ID NO: 620305 - RNA, 19 nt, Artificial Sequence
  Description of Artificial Sequence: Synthetic oligonucleotide
cccgguuacacgccucaug

SEQ ID NO: 620306 - RNA, 19 nt, Artificial Sequence
  Description of Artificial Sequence: Synthetic oligonucleotide
cgagguggacgccuuaguc

SEQ ID NO: 620307 - RNA, 19 nt, Artificial Sequence
  Description of Artificial Sequence: Synthetic oligonucleotide
gcaugcacugaaugguacu

SEQ ID NO: 620308 - RNA, 19 nt, Artificial Sequence
  Description of Artificial Sequence: Synthetic oligonucleotide
guguccguuguuggcggca

SEQ ID NO: 620309 - RNA, 19 nt, Artificial Sequence
  Description of Artificial Sequence: Synthetic oligonucleotide
cguuaggggccuuggggac

SEQ ID NO: 620310 - RNA, 19 nt, Artificial Sequence
  Description of Artificial Sequence: Synthetic oligonucleotide
gcaagaguacgaagucguc

SEQ ID NO: 620311 - RNA, 19 nt, Artificial Sequence
  Description of Artificial Sequence: Synthetic oligonucleotide
ccuuagucuauuuuccauu

SEQ ID NO: 620312 - RNA, 19 nt, Artificial Sequence
  Description of Artificial Sequence: Synthetic oligonucleotide
guacagguuugcggauaca

SEQ ID NO: 620313 - RNA, 19 nt, Artificial Sequence
  Description of Artificial Sequence: Synthetic oligonucleotide
agccccgguuacacgccuc

SEQ ID NO: 620314 - RNA, 19 nt, Artificial Sequence
  Description of Artificial Sequence: Synthetic oligonucleotide
aucuugcguuucucuucua

SEQ ID NO: 620315 - RNA, 19 nt, Artificial Sequence
  Description of Artificial Sequence: Synthetic oligonucleotide
agccggacccuugccggca

SEQ ID NO: 620316 - RNA, 19 nt, Artificial Sequence
  Description of Artificial Sequence: Synthetic oligonucleotide
ccggggaccauagcgggac

SEQ ID NO: 620317 - RNA, 19 nt, Artificial Sequence
  Description of Artificial Sequence: Synthetic oligonucleotide
guuaggggccuuggggacu

SEQ ID NO: 620318 - RNA, 19 nt, Artificial Sequence
  Description of Artificial Sequence: Synthetic oligonucleotide
cuuaccccgcacagccucu

SEQ ID NO: 620319 - RNA, 19 nt, Artificial Sequence
  Description of Artificial Sequence: Synthetic oligonucleotide
gcgaucucgcacagacuug

SEQ ID NO: 620320 - RNA, 19 nt, Artificial Sequence
  Description of Artificial Sequence: Synthetic oligonucleotide
ggucaugcgcugaggaacu

SEQ ID NO: 620321 - RNA, 19 nt, Artificial Sequence
  Description of Artificial Sequence: Synthetic oligonucleotide
cuucucuguugggguuaug

SEQ ID NO: 620322 - RNA, 19 nt, Artificial Sequence
  Description of Artificial Sequence: Synthetic oligonucleotide
ccaccguuaggggccuugg

SEQ ID NO: 620323 - RNA, 19 nt, Artificial Sequence
  Description of Artificial Sequence: Synthetic oligonucleotide
accccguguaggugacaua

SEQ ID NO: 620324 - RNA, 19 nt, Artificial Sequence
  Description of Artificial Sequence: Synthetic oligonucleotide
augcgagguggacgccuua

SEQ ID NO: 620325 - RNA, 19 nt, Artificial Sequence
  Description of Artificial Sequence: Synthetic oligonucleotide
guccguuguuggcggcauc

SEQ ID NO: 620326 - RNA, 19 nt, Artificial Sequence
  Description of Artificial Sequence: Synthetic oligonucleotide
gggcacguagaaggauggc

SEQ ID NO: 620327 - RNA, 19 nt, Artificial Sequence
  Description of Artificial Sequence: Synthetic oligonucleotide
ccuugccggcaccaguguc

SEQ ID NO: 620328 - RNA, 19 nt, Artificial Sequence
  Description of Artificial Sequence: Synthetic oligonucleotide
ggcagugaacucgaaggau

SEQ ID NO: 620329 - RNA, 19 nt, Artificial Sequence
  Description of Artificial Sequence: Synthetic oligonucleotide
ggcacgguuccuggucaug

SEQ ID NO: 620330 - RNA, 19 nt, Artificial Sequence
  Description of Artificial Sequence: Synthetic oligonucleotide
cugagcggcuugccaucca

SEQ ID NO: 620331 - RNA, 19 nt, Artificial Sequence
  Description of Artificial Sequence: Synthetic oligonucleotide
gaccuauguggcccuuguu

SEQ ID NO: 620332 - RNA, 19 nt, Artificial Sequence
  Description of Artificial Sequence: Synthetic oligonucleotide
gccccgguuacacgccuca

SEQ ID NO: 620333 - RNA, 19 nt, Artificial Sequence
  Description of Artificial Sequence: Synthetic oligonucleotide
gcgcagcuuaccccgcaca

SEQ ID NO: 620334 - RNA, 19 nt, Artificial Sequence
  Description of Artificial Sequence: Synthetic oligonucleotide
caugggcacguagaaggau

SEQ ID NO: 620335 - RNA, 19 nt, Artificial Sequence
  Description of Artificial Sequence: Synthetic oligonucleotide
cauagcgggacagcacuuu

SEQ ID NO: 620336 - RNA, 19 nt, Artificial Sequence
  Description of Artificial Sequence: Synthetic oligonucleotide
cccgagucuguugugugga

SEQ ID NO: 620337 - RNA, 19 nt, Artificial Sequence
  Description of Artificial Sequence: Synthetic oligonucleotide
cugcgcccucgcugaugag

SEQ ID NO: 620338 - RNA, 19 nt, Artificial Sequence
  Description of Artificial Sequence: Synthetic oligonucleotide
cuaccuugucuguggccau

SEQ ID NO: 620339 - RNA, 19 nt, Artificial Sequence
  Description of Artificial Sequence: Synthetic oligonucleotide
cgccucaugcagugcaguc

SEQ ID NO: 620340 - RNA, 19 nt, Artificial Sequence
  Description of Artificial Sequence: Synthetic oligonucleotide
ggacgccuuagucuauuuu

SEQ ID NO: 620341 - RNA, 19 nt, Artificial Sequence
  Description of Artificial Sequence: Synthetic oligonucleotide
guacugccugguuggcaau

SEQ ID NO: 620342 - RNA, 19 nt, Artificial Sequence
  Description of Artificial Sequence: Synthetic oligonucleotide
gcggugcucccuccuccgc

SEQ ID NO: 620343 - RNA, 19 nt, Artificial Sequence
  Description of Artificial Sequence: Synthetic oligonucleotide
cuuugaccugaaggucacu

SEQ ID NO: 620344 - RNA, 19 nt, Artificial Sequence
  Description of Artificial Sequence: Synthetic oligonucleotide
ggggugcgaucacagggau

SEQ ID NO: 620345 - RNA, 19 nt, Artificial Sequence
  Description of Artificial Sequence: Synthetic oligonucleotide
guggacgccuuagucuauu

SEQ ID NO: 620346 - RNA, 19 nt, Artificial Sequence
  Description of Artificial Sequence: Synthetic oligonucleotide
cacggcccuuggcucuaga

SEQ ID NO: 620347 - RNA, 19 nt, Artificial Sequence
  Description of Artificial Sequence: Synthetic oligonucleotide
ggcaggcauuggauccuuc

SEQ ID NO: 620348 - RNA, 19 nt, Artificial Sequence
  Description of Artificial Sequence: Synthetic oligonucleotide
ccagcggcuaacagcugcu

SEQ ID NO: 620349 - RNA, 19 nt, Artificial Sequence
  Description of Artificial Sequence: Synthetic oligonucleotide
cugccgcaucagcaaacau

SEQ ID NO: 620350 - RNA, 19 nt, Artificial Sequence
  Description of Artificial Sequence: Synthetic oligonucleotide
cgguuacacgccucaugca

SEQ ID NO: 620351 - RNA, 19 nt, Artificial Sequence
  Description of Artificial Sequence: Synthetic oligonucleotide
gcgcccucgcugaugagcu

SEQ ID NO: 620352 - RNA, 19 nt, Artificial Sequence
  Description of Artificial Sequence: Synthetic oligonucleotide
cacguggauuugacuccau

SEQ ID NO: 620353 - RNA, 19 nt, Artificial Sequence
  Description of Artificial Sequence: Synthetic oligonucleotide
cgaucucgcacagacuugu

SEQ ID NO: 620354 - RNA, 19 nt, Artificial Sequence
  Description of Artificial Sequence: Synthetic oligonucleotide
cccuguuggcuggaagaaa

SEQ ID NO: 620355 - RNA, 19 nt, Artificial Sequence
  Description of Artificial Sequence: Synthetic oligonucleotide
uuccaccguuaggggccuu

SEQ ID NO: 620356 - RNA, 19 nt, Artificial Sequence
  Description of Artificial Sequence: Synthetic oligonucleotide
cgaccuauguggcccuugu

SEQ ID NO: 620357 - RNA, 19 nt, Artificial Sequence
  Description of Artificial Sequence: Synthetic oligonucleotide
gcacggcccuuggcucuag

SEQ ID NO: 620358 - RNA, 19 nt, Artificial Sequence
  Description of Artificial Sequence: Synthetic oligonucleotide
gguggacgccuuagucuau

SEQ ID NO: 620359 - RNA, 19 nt, Artificial Sequence
  Description of Artificial Sequence: Synthetic oligonucleotide
gggcacgguuccuggucau

SEQ ID NO: 620360 - RNA, 19 nt, Artificial Sequence
  Description of Artificial Sequence: Synthetic oligonucleotide
cagcggcuaacagcugcuu

SEQ ID NO: 620361 - RNA, 19 nt, Artificial Sequence
  Description of Artificial Sequence: Synthetic oligonucleotide
cggacccuugccggcacca

SEQ ID NO: 620362 - RNA, 19 nt, Artificial Sequence
  Description of Artificial Sequence: Synthetic oligonucleotide
ccgagucuguuguguggau

SEQ ID NO: 620363 - RNA, 19 nt, Artificial Sequence
  Description of Artificial Sequence: Synthetic oligonucleotide
cgcccucgcugaugagcuc

SEQ ID NO: 620364 - RNA, 19 nt, Artificial Sequence
  Description of Artificial Sequence: Synthetic oligonucleotide
cccuugccggcaccagugu

SEQ ID NO: 620365 - RNA, 19 nt, Artificial Sequence
  Description of Artificial Sequence: Synthetic oligonucleotide
ccguuguuggcggcaucau

SEQ ID NO: 620366 - RNA, 19 nt, Artificial Sequence
  Description of Artificial Sequence: Synthetic oligonucleotide
gcccggcagugaacucgaa

SEQ ID NO: 620367 - RNA, 19 nt, Artificial Sequence
  Description of Artificial Sequence: Synthetic oligonucleotide
ccccgguuacacgccucau

SEQ ID NO: 620368 - RNA, 19 nt, Artificial Sequence
  Description of Artificial Sequence: Synthetic oligonucleotide
uucuagaugagcaaggcgg

SEQ ID NO: 620369 - RNA, 19 nt, Artificial Sequence
  Description of Artificial Sequence: Synthetic oligonucleotide
auaaaaguccuguauuucc

SEQ ID NO: 620370 - RNA, 19 nt, Artificial Sequence
  Description of Artificial Sequence: Synthetic oligonucleotide
aauagcacggaucuucaac

SEQ ID NO: 620371 - RNA, 19 nt, Artificial Sequence
  Description of Artificial Sequence: Synthetic oligonucleotide
aaguccuguauuuccaccc

SEQ ID NO: 620372 - RNA, 19 nt, Artificial Sequence
  Description of Artificial Sequence: Synthetic oligonucleotide
ugagucuuagcuuuucucg

SEQ ID NO: 620373 - RNA, 19 nt, Artificial Sequence
  Description of Artificial Sequence: Synthetic oligonucleotide
uuaucaauggucuccauca

SEQ ID NO: 620374 - RNA, 19 nt, Artificial Sequence
  Description of Artificial Sequence: Synthetic oligonucleotide
ucaacucucacccugguca

SEQ ID NO: 620375 - RNA, 19 nt, Artificial Sequence
  Description of Artificial Sequence: Synthetic oligonucleotide
ugagauauggcauuucuac

SEQ ID NO: 620376 - RNA, 19 nt, Artificial Sequence
  Description of Artificial Sequence: Synthetic oligonucleotide
aaaguccuguauuuccacc

SEQ ID NO: 620377 - RNA, 19 nt, Artificial Sequence
  Description of Artificial Sequence: Synthetic oligonucleotide
uuugcugcaggcaaguacc

SEQ ID NO: 620378 - RNA, 19 nt, Artificial Sequence
  Description of Artificial Sequence: Synthetic oligonucleotide
ucaccaaguauaaaagucc

SEQ ID NO: 620379 - RNA, 19 nt, Artificial Sequence
  Description of Artificial Sequence: Synthetic oligonucleotide
auuuaggcggacucaaggc

SEQ ID NO: 620380 - RNA, 19 nt, Artificial Sequence
  Description of Artificial Sequence: Synthetic oligonucleotide
aaugagauauggcauuucu

SEQ ID NO: 620381 - RNA, 19 nt, Artificial Sequence
  Description of Artificial Sequence: Synthetic oligonucleotide
uuugaaaaugagauauggc

SEQ ID NO: 620382 - RNA, 19 nt, Artificial Sequence
  Description of Artificial Sequence: Synthetic oligonucleotide
ugaacguaagccaggacag

SEQ ID NO: 620383 - RNA, 19 nt, Artificial Sequence
  Description of Artificial Sequence: Synthetic oligonucleotide
ucucccaaaacgcagugag

SEQ ID NO: 620384 - RNA, 19 nt, Artificial Sequence
  Description of Artificial Sequence: Synthetic oligonucleotide
uucccgaucacuuucagcu

SEQ ID NO: 620385 - RNA, 19 nt, Artificial Sequence
  Description of Artificial Sequence: Synthetic oligonucleotide
aauguuauuccagcgcagg

SEQ ID NO: 620386 - RNA, 19 nt, Artificial Sequence
  Description of Artificial Sequence: Synthetic oligonucleotide
acgcuuuugaaccccaggc

SEQ ID NO: 620387 - RNA, 19 nt, Artificial Sequence
  Description of Artificial Sequence: Synthetic oligonucleotide
ucuucaacucggcagaugu

SEQ ID NO: 620388 - RNA, 19 nt, Artificial Sequence
  Description of Artificial Sequence: Synthetic oligonucleotide
uuaguggugaccuucgggu

SEQ ID NO: 620389 - RNA, 19 nt, Artificial Sequence
  Description of Artificial Sequence: Synthetic oligonucleotide
agacuuuaccuuccguucc

SEQ ID NO: 620390 - RNA, 19 nt, Artificial Sequence
  Description of Artificial Sequence: Synthetic oligonucleotide
gugaacuacccuuggaugg

SEQ ID NO: 620391 - RNA, 19 nt, Artificial Sequence
  Description of Artificial Sequence: Synthetic oligonucleotide
ucucauuggcggcagacag

SEQ ID NO: 620392 - RNA, 19 nt, Artificial Sequence
  Description of Artificial Sequence: Synthetic oligonucleotide
aaacgcagugagccggucc

SEQ ID NO: 620393 - RNA, 19 nt, Artificial Sequence
  Description of Artificial Sequence: Synthetic oligonucleotide
cuucaugcggcucagcucc

SEQ ID NO: 620394 - RNA, 19 nt, Artificial Sequence
  Description of Artificial Sequence: Synthetic oligonucleotide
aguauaaaaguccuguauu

SEQ ID NO: 620395 - RNA, 19 nt, Artificial Sequence
  Description of Artificial Sequence: Synthetic oligonucleotide
cuugccugugccaacagcc

SEQ ID NO: 620396 - RNA, 19 nt, Artificial Sequence
  Description of Artificial Sequence: Synthetic oligonucleotide
auuaguggugaccuucggg

SEQ ID NO: 620397 - RNA, 19 nt, Artificial Sequence
  Description of Artificial Sequence: Synthetic oligonucleotide
guuucggagguccagcugg

SEQ ID NO: 620398 - RNA, 19 nt, Artificial Sequence
  Description of Artificial Sequence: Synthetic oligonucleotide
gagucuuagcuuuucucgg

SEQ ID NO: 620399 - RNA, 19 nt, Artificial Sequence
  Description of Artificial Sequence: Synthetic oligonucleotide
gagacaguucaccagggcc

SEQ ID NO: 620400 - RNA, 19 nt, Artificial Sequence
  Description of Artificial Sequence: Synthetic oligonucleotide
cauuuaggcggacucaagg

SEQ ID NO: 620401 - RNA, 19 nt, Artificial Sequence
  Description of Artificial Sequence: Synthetic oligonucleotide
cucugaggagcuuagauuc

SEQ ID NO: 620402 - RNA, 19 nt, Artificial Sequence
  Description of Artificial Sequence: Synthetic oligonucleotide
aggccaauguuauuccagc

SEQ ID NO: 620403 - RNA, 19 nt, Artificial Sequence
  Description of Artificial Sequence: Synthetic oligonucleotide
uccuugcuaaggauguugg

SEQ ID NO: 620404 - RNA, 19 nt, Artificial Sequence
  Description of Artificial Sequence: Synthetic oligonucleotide
ucccaaaacgcagugagcc

SEQ ID NO: 620405 - RNA, 19 nt, Artificial Sequence
  Description of Artificial Sequence: Synthetic oligonucleotide
ugagcaccaauguuggcag

SEQ ID NO: 620406 - RNA, 19 nt, Artificial Sequence
  Description of Artificial Sequence: Synthetic oligonucleotide
uuuaggcggacucaaggcu

SEQ ID NO: 620407 - RNA, 19 nt, Artificial Sequence
  Description of Artificial Sequence: Synthetic oligonucleotide
aauguuggcagaaccccac

SEQ ID NO: 620408 - RNA, 19 nt, Artificial Sequence
  Description of Artificial Sequence: Synthetic oligonucleotide
auagcacggaucuucaacu

SEQ ID NO: 620409 - RNA, 19 nt, Artificial Sequence
  Description of Artificial Sequence: Synthetic oligonucleotide
cagaggagaccccugaacg

SEQ ID NO: 620410 - RNA, 19 nt, Artificial Sequence
  Description of Artificial Sequence: Synthetic oligonucleotide
uauauuaguggugaccuuc

SEQ ID NO: 620411 - RNA, 19 nt, Artificial Sequence
  Description of Artificial Sequence: Synthetic oligonucleotide
uagauucccgaucugcagc

SEQ ID NO: 620412 - RNA, 19 nt, Artificial Sequence
  Description of Artificial Sequence: Synthetic oligonucleotide
gagagaagcguucucacuc

SEQ ID NO: 620413 - RNA, 19 nt, Artificial Sequence
  Description of Artificial Sequence: Synthetic oligonucleotide
uaucaccaaguauaaaagu

SEQ ID NO: 620414 - RNA, 19 nt, Artificial Sequence
  Description of Artificial Sequence: Synthetic oligonucleotide
uucgucucgccuauauuag

SEQ ID NO: 620415 - RNA, 19 nt, Artificial Sequence
  Description of Artificial Sequence: Synthetic oligonucleotide
cuuuucucggagagaagcg

SEQ ID NO: 620416 - RNA, 19 nt, Artificial Sequence
  Description of Artificial Sequence: Synthetic oligonucleotide
uuucuacacucgcagggag

SEQ ID NO: 620417 - RNA, 19 nt, Artificial Sequence
  Description of Artificial Sequence: Synthetic oligonucleotide
agcguuucugugcacuucg

SEQ ID NO: 620418 - RNA, 19 nt, Artificial Sequence
  Description of Artificial Sequence: Synthetic oligonucleotide
uucuucucguugcuuauca

SEQ ID NO: 620419 - RNA, 19 nt, Artificial Sequence
  Description of Artificial Sequence: Synthetic oligonucleotide
cagcugacgcuuuugaacc

SEQ ID NO: 620420 - RNA, 19 nt, Artificial Sequence
  Description of Artificial Sequence: Synthetic oligonucleotide
ugaauagcacggaucuuca

SEQ ID NO: 620421 - RNA, 19 nt, Artificial Sequence
  Description of Artificial Sequence: Synthetic oligonucleotide
aacucggcagauguguuag

SEQ ID NO: 620422 - RNA, 19 nt, Artificial Sequence
  Description of Artificial Sequence: Synthetic oligonucleotide
ucucuucuagaugagcaag

SEQ ID NO: 620423 - RNA, 19 nt, Artificial Sequence
  Description of Artificial Sequence: Synthetic oligonucleotide
cugaacguaagccaggaca

SEQ ID NO: 620424 - RNA, 19 nt, Artificial Sequence
  Description of Artificial Sequence: Synthetic oligonucleotide
uguuguuccgggauugggu

SEQ ID NO: 620425 - RNA, 19 nt, Artificial Sequence
  Description of Artificial Sequence: Synthetic oligonucleotide
aacgcagugagccgguccu

SEQ ID NO: 620426 - RNA, 19 nt, Artificial Sequence
  Description of Artificial Sequence: Synthetic oligonucleotide
cguccauucauuuaggcgg

SEQ ID NO: 620427 - RNA, 19 nt, Artificial Sequence
  Description of Artificial Sequence: Synthetic oligonucleotide
gagacuuuaccuuccguuc

SEQ ID NO: 620428 - RNA, 19 nt, Artificial Sequence
  Description of Artificial Sequence: Synthetic oligonucleotide
aacucgugcugcugacgcc

SEQ ID NO: 620429 - RNA, 19 nt, Artificial Sequence
  Description of Artificial Sequence: Synthetic oligonucleotide
ugaacuacccuuggauggg

SEQ ID NO: 620430 - RNA, 19 nt, Artificial Sequence
  Description of Artificial Sequence: Synthetic oligonucleotide
agcacggaucuucaacucg

SEQ ID NO: 620431 - RNA, 19 nt, Artificial Sequence
  Description of Artificial Sequence: Synthetic oligonucleotide
uauuaguggugaccuucgg

SEQ ID NO: 620432 - RNA, 19 nt, Artificial Sequence
  Description of Artificial Sequence: Synthetic oligonucleotide
uccuccuacagcaguacug

SEQ ID NO: 620433 - RNA, 19 nt, Artificial Sequence
  Description of Artificial Sequence: Synthetic oligonucleotide
uuuuccuaagucuuccaua

SEQ ID NO: 620434 - RNA, 19 nt, Artificial Sequence
  Description of Artificial Sequence: Synthetic oligonucleotide
gacgcuuuugaaccccagg

SEQ ID NO: 620435 - RNA, 19 nt, Artificial Sequence
  Description of Artificial Sequence: Synthetic oligonucleotide
cauucauuuaggcggacuc

SEQ ID NO: 620436 - RNA, 19 nt, Artificial Sequence
  Description of Artificial Sequence: Synthetic oligonucleotide
ugcugaaccuccuugcuaa

SEQ ID NO: 620437 - RNA, 19 nt, Artificial Sequence
  Description of Artificial Sequence: Synthetic oligonucleotide
uccuguauuuccacccugc

SEQ ID NO: 620438 - RNA, 19 nt, Artificial Sequence
  Description of Artificial Sequence: Synthetic oligonucleotide
aacguaagccaggacagca

SEQ ID NO: 620439 - RNA, 19 nt, Artificial Sequence
  Description of Artificial Sequence: Synthetic oligonucleotide
uucaacucggcagaugugu

SEQ ID NO: 620440 - RNA, 19 nt, Artificial Sequence
  Description of Artificial Sequence: Synthetic oligonucleotide
cuaaggauguuggugcggg

SEQ ID NO: 620441 - RNA, 19 nt, Artificial Sequence
  Description of Artificial Sequence: Synthetic oligonucleotide
uggcuauuucuucucguug

SEQ ID NO: 620442 - RNA, 19 nt, Artificial Sequence
  Description of Artificial Sequence: Synthetic oligonucleotide
ugcuaaggauguuggugcg

SEQ ID NO: 620443 - RNA, 19 nt, Artificial Sequence
  Description of Artificial Sequence: Synthetic oligonucleotide
ucuagggugaggcucugaa

SEQ ID NO: 620444 - RNA, 19 nt, Artificial Sequence
  Description of Artificial Sequence: Synthetic oligonucleotide
aggugugccggugagcacc

SEQ ID NO: 620445 - RNA, 19 nt, Artificial Sequence
  Description of Artificial Sequence: Synthetic oligonucleotide
gaaggagcuuuccuagagc

SEQ ID NO: 620446 - RNA, 19 nt, Artificial Sequence
  Description of Artificial Sequence: Synthetic oligonucleotide
uucgggugaacuacccuug

SEQ ID NO: 620447 - RNA, 19 nt, Artificial Sequence
  Description of Artificial Sequence: Synthetic oligonucleotide
gagauauggcauuucuaca

SEQ ID NO: 620448 - RNA, 19 nt, Artificial Sequence
  Description of Artificial Sequence: Synthetic oligonucleotide
ucauuuaggcggacucaag

SEQ ID NO: 620449 - RNA, 19 nt, Artificial Sequence
  Description of Artificial Sequence: Synthetic oligonucleotide
acucgugcugcugacgccc

SEQ ID NO: 620450 - RNA, 19 nt, Artificial Sequence
  Description of Artificial Sequence: Synthetic oligonucleotide
ucgccuauauuagugguga

SEQ ID NO: 620451 - RNA, 19 nt, Artificial Sequence
  Description of Artificial Sequence: Synthetic oligonucleotide
uuaggcggacucaaggcuc

SEQ ID NO: 620452 - RNA, 19 nt, Artificial Sequence
  Description of Artificial Sequence: Synthetic oligonucleotide
ucauuggcggcagacaggu

SEQ ID NO: 620453 - RNA, 19 nt, Artificial Sequence
  Description of Artificial Sequence: Synthetic oligonucleotide
uucuacacucgcagggagc

SEQ ID NO: 620454 - RNA, 19 nt, Artificial Sequence
  Description of Artificial Sequence: Synthetic oligonucleotide
ucuacacucgcagggagcu

SEQ ID NO: 620455 - RNA, 19 nt, Artificial Sequence
  Description of Artificial Sequence: Synthetic oligonucleotide
uguuauuccagcgcagguc

SEQ ID NO: 620456 - RNA, 19 nt, Artificial Sequence
  Description of Artificial Sequence: Synthetic oligonucleotide
ucguugcuuaucaaugguc

SEQ ID NO: 620457 - RNA, 19 nt, Artificial Sequence
  Description of Artificial Sequence: Synthetic oligonucleotide
ugucgaaggagcuuuccua

SEQ ID NO: 620458 - RNA, 19 nt, Artificial Sequence
  Description of Artificial Sequence: Synthetic oligonucleotide
ucauucccgaucacuuuca

SEQ ID NO: 620459 - RNA, 19 nt, Artificial Sequence
  Description of Artificial Sequence: Synthetic oligonucleotide
caccaauguuggcagaacc

SEQ ID NO: 620460 - RNA, 19 nt, Artificial Sequence
  Description of Artificial Sequence: Synthetic oligonucleotide
guacuguucugguuuguug

SEQ ID NO: 620461 - RNA, 19 nt, Artificial Sequence
  Description of Artificial Sequence: Synthetic oligonucleotide
ggcuauuucuucucguugc

SEQ ID NO: 620462 - RNA, 19 nt, Artificial Sequence
  Description of Artificial Sequence: Synthetic oligonucleotide
ucccggaugcgugagaucu

SEQ ID NO: 620463 - RNA, 19 nt, Artificial Sequence
  Description of Artificial Sequence: Synthetic oligonucleotide
uacacucgcagggagcucc

SEQ ID NO: 620464 - RNA, 19 nt, Artificial Sequence
  Description of Artificial Sequence: Synthetic oligonucleotide
uuuucucggagagaagcgu

SEQ ID NO: 620465 - RNA, 19 nt, Artificial Sequence
  Description of Artificial Sequence: Synthetic oligonucleotide
agcugacgcuuuugaaccc

SEQ ID NO: 620466 - RNA, 19 nt, Artificial Sequence
  Description of Artificial Sequence: Synthetic oligonucleotide
gauugggucuucugacagc

SEQ ID NO: 620467 - RNA, 19 nt, Artificial Sequence
  Description of Artificial Sequence: Synthetic oligonucleotide
ugguuuguuguuccgggau

SEQ ID NO: 620468 - RNA, 19 nt, Artificial Sequence
  Description of Artificial Sequence: Synthetic oligonucleotide
uuguuguuccgggauuggg

SEQ ID NO: 620469 - RNA, 19 nt, Artificial Sequence
  Description of Artificial Sequence: Synthetic oligonucleotide
ucucgccuauauuaguggu

SEQ ID NO: 620470 - RNA, 19 nt, Artificial Sequence
  Description of Artificial Sequence: Synthetic oligonucleotide
uucauuuaggcggacucaa

SEQ ID NO: 620471 - RNA, 19 nt, Artificial Sequence
  Description of Artificial Sequence: Synthetic oligonucleotide
ggugaacuacccuuggaug

SEQ ID NO: 620472 - RNA, 19 nt, Artificial Sequence
  Description of Artificial Sequence: Synthetic oligonucleotide
agauucccgaucugcagcu

SEQ ID NO: 620473 - RNA, 19 nt, Artificial Sequence
  Description of Artificial Sequence: Synthetic oligonucleotide
caauguuauuccagcgcag
